United States Patent Application Publication US 2013/0267429 A1 - sequence listing, part 23

SEQ ID NO: 528610 - DNA, 55 bp, Artificial
  Synthetic oligonucleotide
ccacccgcctacgcggcgaccccaatggccaatgttgcactcggggtattacaga

SEQ ID NO: 528611 - DNA, 55 bp, Artificial
  Synthetic oligonucleotide
taagacagttatgtacaggagtgaagactgttgattatgattccggcatacctga

SEQ ID NO: 528612 - DNA, 55 bp, Artificial
  Synthetic oligonucleotide
taagaatgaacgtgagatggcaccgcgcccgcagatccagagtgcggcgccaagg

SEQ ID NO: 528613 - DNA, 55 bp, Artificial
  Synthetic oligonucleotide
gattgtaggcgatttagaggctacgggatcgcgggtaatggacgcagcggattgt

SEQ ID NO: 528614 - DNA, 55 bp, Artificial
  Synthetic oligonucleotide
ctgagtttagtgcgcgtggatgataccatttctcaaccgccaaggtatgctccga

SEQ ID NO: 528615 - DNA, 55 bp, Artificial
  Synthetic oligonucleotide
ccacaatctgagactagactgcccattttggatatcagagtttcatctcaaattt

SEQ ID NO: 528616 - DNA, 55 bp, Artificial
  Synthetic oligonucleotide
taacggaaatcactatatcttgggtactctgacgcagatggttagtgcacctccg

SEQ ID NO: 528617 - DNA, 55 bp, Artificial
  Synthetic oligonucleotide
ctgatcgcggcactgaatgtatttcgtaccatggcaaacgagcgtctgcgtccgt

SEQ ID NO: 528618 - DNA, 55 bp, Artificial
  Synthetic oligonucleotide
ctgatggcatacggagatgaacgtgtaagagagacctataatagcactacgttgc

SEQ ID NO: 528619 - DNA, 55 bp, Artificial
  Synthetic oligonucleotide
gcgcggacatcttagaggccgcgtcggaagaggtgcccttctttggggctggtat

SEQ ID NO: 528620 - DNA, 55 bp, Artificial
  Synthetic oligonucleotide
atttcaccggatgcagaagcattcaataagtacatgttgtcgaagtctccagagg

SEQ ID NO: 528621 - DNA, 55 bp, Artificial
  Synthetic oligonucleotide
ctgattatatacaaaatttggcaacgataggagtactggcgacgccagagatacc

SEQ ID NO: 528622 - DNA, 55 bp, Artificial
  Synthetic oligonucleotide
ccaatcactggctccatggatacggcatatgcaaacttatcacagcaagagacat

SEQ ID NO: 528623 - DNA, 55 bp, Artificial
  Synthetic oligonucleotide
ccaatagcaaactcagttacggtaagacaagacttggaaagacaacttggtgaac

SEQ ID NO: 528624 - DNA, 55 bp, Artificial
  Synthetic oligonucleotide
ctgcattatccaacgtttgggttagctttgagacgcaggcaggcttaggagattc

SEQ ID NO: 528625 - DNA, 55 bp, Artificial
  Synthetic oligonucleotide
taaaggaagctgcttcgagcgtgggcagattggagaggttgcgtgaggcgagaac

SEQ ID NO: 528626 - DNA, 55 bp, Artificial
  Synthetic oligonucleotide
taaagcgtgacctcgtaaagaagcagatgtatgtatctttcgtccggaggatggg

SEQ ID NO: 528627 - DNA, 55 bp, Artificial
  Synthetic oligonucleotide
gcgctacagtgatgtctctcagtattgatgtaacgagtcttccttcaatctcatc

SEQ ID NO: 528628 - DNA, 55 bp, Artificial
  Synthetic oligonucleotide
taaacttcgtcactgggttgctacctccattactcactggcgatactgagcccgc

SEQ ID NO: 528629 - DNA, 55 bp, Artificial
  Synthetic oligonucleotide
ctgccctgagcgtcgttacacgcgacttcgcctcgttcaggtcacgcgtgcgaat

SEQ ID NO: 528630 - DNA, 55 bp, Artificial
  Synthetic oligonucleotide
gttttgatgaatctactaaaaggtatgaactgcaatgtgtaggtacgtgtgagcg

SEQ ID NO: 528631 - DNA, 55 bp, Artificial
  Synthetic oligonucleotide
tacaacaagaccggtggccgggcatgcgattcgaggcggttgacatgtacccgcg

SEQ ID NO: 528632 - DNA, 55 bp, Artificial
  Synthetic oligonucleotide
ctgaagtacattccatatatgattattctgtgactcaaattggtgacgctccaga

SEQ ID NO: 528633 - DNA, 55 bp, Artificial
  Synthetic oligonucleotide
agatgtcacatctacaacatgtacaatacggaattgtaacaaactaggaccgaga

SEQ ID NO: 528634 - DNA, 55 bp, Artificial
  Synthetic oligonucleotide
taatgcttttcagtggttgatgctcaagatggagtctactcagcagatggcatct

SEQ ID NO: 528635 - DNA, 55 bp, Artificial
  Synthetic oligonucleotide
taatgctgagtatgcacccgtggacccgcgaggcgtcttttccggcagtgccacc

SEQ ID NO: 528636 - DNA, 55 bp, Artificial
  Synthetic oligonucleotide
agatgttgttagatccttacggaagatgtcctctgccattacagtgcattcgcat

SEQ ID NO: 528637 - DNA, 55 bp, Artificial
  Synthetic oligonucleotide
agattcaagttgcgttctatgtgtcaatggataaaacgctgaatcaatacccctc

SEQ ID NO: 528638 - DNA, 55 bp, Artificial
  Synthetic oligonucleotide
agattgcggcacaatgcgaagataatagagctatttgataaagaccttgaagacg

SEQ ID NO: 528639 - DNA, 55 bp, Artificial
  Synthetic oligonucleotide
ctgaagtgaacagagacaagttaactgaattgtgcggtttaggacacgtcttcgc

SEQ ID NO: 528640 - DNA, 55 bp, Artificial
  Synthetic oligonucleotide
taatgagatgttgcggatgctagttgctgcgggtaaggattcagaggcggcgtat

SEQ ID NO: 528641 - DNA, 55 bp, Artificial
  Synthetic oligonucleotide
agatttatcggattacgtgttgaatcttctgtgttaagggttcggaatcccacgc

SEQ ID NO: 528642 - DNA, 55 bp, Artificial
  Synthetic oligonucleotide
ccacgaactaaggcggtggcgaaaggagatcggaaacatggaaagaatagccgag

SEQ ID NO: 528643 - DNA, 55 bp, Artificial
  Synthetic oligonucleotide
ccaccgtacacacggaatgattttgccagacgggagatccgggaattacctggcg

SEQ ID NO: 528644 - DNA, 55 bp, Artificial
  Synthetic oligonucleotide
taatacaacaacggaggcgatacaaacgtatattaaacccttttgtgcggctttc

SEQ ID NO: 528645 - DNA, 55 bp, Artificial
  Synthetic oligonucleotide
gcgcgaagcaaaattttgagagagcaatgattgcagcaacggatgcggaagagcc

SEQ ID NO: 528646 - DNA, 55 bp, Artificial
  Synthetic oligonucleotide
agcacctacgggagatccgaaatggaaggaggttgcgcgcgaagcgtcaaggaag

SEQ ID NO: 528647 - DNA, 55 bp, Artificial
  Synthetic oligonucleotide
ccaccgggtgattatactctgactcctctgtaactcactgtccctcgtgagtgtg

SEQ ID NO: 528648 - DNA, 55 bp, Artificial
  Synthetic oligonucleotide
agcacgctaagggccctgccctatacgtaccagcgcgaaagctcggatggaccga

SEQ ID NO: 528649 - DNA, 55 bp, Artificial
  Synthetic oligonucleotide
ctgacgttgaataatgaaatagagatcacatttgccaccataagactccctgcac

SEQ ID NO: 528650 - DNA, 55 bp, Artificial
  Synthetic oligonucleotide
ctgacttaacttactgtcgaggttgtaccatgtatcacgtatgtcaatggtgtag

SEQ ID NO: 528651 - DNA, 55 bp, Artificial
  Synthetic oligonucleotide
ctagatatgtccgaattagctgatctaatactaaatgagtggctgtgcaatccaa

SEQ ID NO: 528652 - DNA, 55 bp, Artificial
  Synthetic oligonucleotide
caaacatggcgaaattgcacaacgacggaatgatgacccaatggtgaaacgtaca

SEQ ID NO: 528653 - DNA, 55 bp, Artificial
  Synthetic oligonucleotide
ccatcgttggattagagggcgtggcatccggaatgatgagggatggcaggagggc

SEQ ID NO: 528654 - DNA, 55 bp, Artificial
  Synthetic oligonucleotide
tatgcagcctacataccatgtagcatgaatcacgactgggtttagtccatgcttg

SEQ ID NO: 528655 - DNA, 55 bp, Artificial
  Synthetic oligonucleotide
actgctggatggcgtggcgcccaaccgatggcggtcagtatgcgactcagactga

SEQ ID NO: 528656 - DNA, 55 bp, Artificial
  Synthetic oligonucleotide
ccatccaggaaaatcacaaggagttaatgcatataaaggatgagattttacctcg

SEQ ID NO: 528657 - DNA, 55 bp, Artificial
  Synthetic oligonucleotide
tatgatgttcgtgagctgcgtcagaagataaggagtgagcgtgagcaggcgccgc

SEQ ID NO: 528658 - DNA, 55 bp, Artificial
  Synthetic oligonucleotide
ctaggaccgagagaaaatgtggctataatacaggttggcggttctaatatattag

SEQ ID NO: 528659 - DNA, 55 bp, Artificial
  Synthetic oligonucleotide
gcgagcaatatataaggacaacgagctattgcgagagcctttatactcgaaggtg

SEQ ID NO: 528660 - DNA, 55 bp, Artificial
  Synthetic oligonucleotide
actgtccaatctatccgcccaaggagtctcccattacaaccatgtcgccccggcg

SEQ ID NO: 528661 - DNA, 55 bp, Artificial
  Synthetic oligonucleotide
gcgagcacactaacgagcgatttggggatcattctaaagaatactaccgcaacag

SEQ ID NO: 528662 - DNA, 55 bp, Artificial
  Synthetic oligonucleotide
ctataccatccgccgtctctcttactgattatgataccaattcaccatacctcgc

SEQ ID NO: 528663 - DNA, 55 bp, Artificial
  Synthetic oligonucleotide
tatctaagagggacaagcaaaagggaatgcgcgatggtgaggagacacaaccgtc

SEQ ID NO: 528664 - DNA, 55 bp, Artificial
  Synthetic oligonucleotide
tatcgtgtagagtggttgatctcacgatgcagactcctactgctgtctaacgggg

SEQ ID NO: 528665 - DNA, 55 bp, Artificial
  Synthetic oligonucleotide
gcgagtgctctctcagggatacgcatcattaatgtgctattatcacccttcacgg

SEQ ID NO: 528666 - DNA, 55 bp, Artificial
  Synthetic oligonucleotide
ctatccgtttgaaagtgggtatggcggagtaagaattgaaagcgcttatgtgacc

SEQ ID NO: 528667 - DNA, 55 bp, Artificial
  Synthetic oligonucleotide
tatcaccgtatcatctattcccctaggcagtacttcatggttaactccgatccct

SEQ ID NO: 528668 - DNA, 55 bp, Artificial
  Synthetic oligonucleotide
gcgataatacacgccacgatgttggttgcggccgcaattgcgttattgacgtcgg

SEQ ID NO: 528669 - DNA, 55 bp, Artificial
  Synthetic oligonucleotide
cactacagctattgtatcctcaactttagcgcaggtttcaatgaatgccggggcg

SEQ ID NO: 528670 - DNA, 55 bp, Artificial
  Synthetic oligonucleotide
ctacattaacagactcactgtccgacgcagcttcttcaatttcaagaggagcatc

SEQ ID NO: 528671 - DNA, 55 bp, Artificial
  Synthetic oligonucleotide
ctaccagcagcgaacccaaacggcggaaaagagtactatgaagtggctggaaggt

SEQ ID NO: 528672 - DNA, 55 bp, Artificial
  Synthetic oligonucleotide
tattgaaggcggatcgcgatcgtttaattaagaaagctaccactgcaaattcacc

SEQ ID NO: 528673 - DNA, 55 bp, Artificial
  Synthetic oligonucleotide
gcgacgcggatattgatgacagcgggataggcgaggtcatgcgtacacgtgtgcg

SEQ ID NO: 528674 - DNA, 55 bp, Artificial
  Synthetic oligonucleotide
tattctgaccttctaacgtacgttgattgctacgttggtgtgtcggctcgtcagg

SEQ ID NO: 528675 - DNA, 55 bp, Artificial
  Synthetic oligonucleotide
cactaacatcctggatgccagacccgccaatggaaggagagtcgtgctcgaccgc

SEQ ID NO: 528676 - DNA, 55 bp, Artificial
  Synthetic oligonucleotide
actatgctatctgaaacactcgagacagatacagacatgtggtgtgatcgatgtg

SEQ ID NO: 528677 - DNA, 55 bp, Artificial; identical to SEQ ID NO: 379074
  Synthetic oligonucleotide

SEQ ID NO: 528678 - DNA, 55 bp, Artificial
  Synthetic oligonucleotide
gatgtcagcgtttgtgcctatcgatcgtgagttgatggagctcgctctccttatc

SEQ ID NO: 528679 - DNA, 55 bp, Artificial
  Synthetic oligonucleotide
ctacgttggaatctctaaagattgatactatcttgcctcctttgacggtgtctga

SEQ ID NO: 528680 - DNA, 55 bp, Artificial
  Synthetic oligonucleotide
actccaatcatgaattcagttacagtacgtcaggatctcgaacgccaattaagtg

SEQ ID NO: 528681 - DNA, 55 bp, Artificial
  Synthetic oligonucleotide
ccatgggtaaattcacttcattcttgaagcgcgcgggaagtgcgactaagaaggc

SEQ ID NO: 528682 - DNA, 55 bp, Artificial
  Synthetic oligonucleotide
ccatgggatcttcatgtacaatcaaagtatgtccacttaatacacaaactctagg

SEQ ID NO: 528683 - DNA, 55 bp, Artificial
  Synthetic oligonucleotide
gcgacgtaaagagaaaggtgaaccgcggactaaggcggtgatgaaaggggatcgg

SEQ ID NO: 528684 - DNA, 55 bp, Artificial
  Synthetic oligonucleotide
caattcgagagtgagcacgattgagcgaagctatgttgcgtctgcggtggcgcct

SEQ ID NO: 528685 - DNA, 55 bp, Artificial
  Synthetic oligonucleotide
ccatgctatccaggttagttcccggtgtagagactagaatagaaatgaaggcgag

SEQ ID NO: 528686 - DNA, 55 bp, Artificial
  Synthetic oligonucleotide
gcgacgttacaaggttcttatctagtaattcaatggtgttatatacggatgtgtc

SEQ ID NO: 528687 - DNA, 55 bp, Artificial
  Synthetic oligonucleotide
ctactggttattacaccgtaactaactacgacacagtaaacatgacatcacactg

SEQ ID NO: 528688 - DNA, 55 bp, Artificial
  Synthetic oligonucleotide
ctacttgaggcgggcctttcctcaatggcgtgccaattcggcagtgctcctctcc

SEQ ID NO: 528689 - DNA, 55 bp, Artificial
  Synthetic oligonucleotide
gagatgaggcgtcagttggaaatgattgataggttaaccacacgtgagattgagc

SEQ ID NO: 528690 - DNA, 55 bp, Artificial
  Synthetic oligonucleotide
tatggtcacaactacgccagcacaagaccgtctgcactagagtagcgcctaggca

SEQ ID NO: 528691 - DNA, 55 bp, Artificial
  Synthetic oligonucleotide
cagaacaacgctgccaaacaatataccgcccatttatccgccacatgatcgtgag

SEQ ID NO: 528692 - DNA, 55 bp, Artificial
  Synthetic oligonucleotide
ctcaggaggatatattcgatgggattagcgaaattgcatttggaggcttactact

SEQ ID NO: 528693 - DNA, 55 bp, Artificial
  Synthetic oligonucleotide
taggagttaatgatgcatggaggccatcacctccaacaaaatataaaggatggtg

SEQ ID NO: 528694 - DNA, 55 bp, Artificial
  Synthetic oligonucleotide
taggagatcgtttagacgtaccactcttcttacgaaatgcttgaacgcagcgacg

SEQ ID NO: 528695 - DNA, 55 bp, Artificial
  Synthetic oligonucleotide
taggaccgagggaaaatgtagcaattatacaagtaggtagttctgacatcataga

SEQ ID NO: 528696 - DNA, 55 bp, Artificial
  Synthetic oligonucleotide
caatgggaacggattgcacggtaaaagtttgcccacttaatacacaaacgttagg

SEQ ID NO: 528697 - DNA, 55 bp, Artificial
  Synthetic oligonucleotide
tagctgtgaagaaatacattatgtggggagcggcgatgggcgtaccgtgatgtgc

SEQ ID NO: 528698 - DNA, 55 bp, Artificial
  Synthetic oligonucleotide
gagagttcttaatgcatgctttagtgttaagagagtacctggaaaatcgtcatct

SEQ ID NO: 528699 - DNA, 55 bp, Artificial
  Synthetic oligonucleotide
agaataaatatgtccagccacgtcatcactgggttattaacagccgcggcgatag

SEQ ID NO: 528700 - DNA, 55 bp, Artificial
  Synthetic oligonucleotide
tagcatggtccctttcgccactgatgtcttcagctatccctccccttatggctga

SEQ ID NO: 528701 - DNA, 55 bp, Artificial
  Synthetic oligonucleotide
ccagctacgctatgcggggtaatgcagaaaacatcattacgcgccctttcacgac

SEQ ID NO: 528702 - DNA, 55 bp, Artificial
  Synthetic oligonucleotide
ctcatctacgtacaccaaagatagaacctacgatggttgcgactacgctggaaca

SEQ ID NO: 528703 - DNA, 55 bp, Artificial
  Synthetic oligonucleotide
caatggattaacactccggtcagtaacaatgcggccaacttcgcaggatcagaga

SEQ ID NO: 528704 - DNA, 55 bp, Artificial
  Synthetic oligonucleotide
agacagatcaggagtgccgcccgtgcaattcgtaccgcgtctcttgcgctcgctg

SEQ ID NO: 528705 - DNA, 55 bp, Artificial
  Synthetic oligonucleotide
gcgatttaaagtaccattaagccagcagccacaaattcatatttacgctgcaccc

SEQ ID NO: 528706 - DNA, 55 bp, Artificial
  Synthetic oligonucleotide
ccagcagaagctgagacagagattgctgatagttcatggaaagacacattgtcac

SEQ ID NO: 528707 - DNA, 55 bp, Artificial
  Synthetic oligonucleotide
gagagtgctgaatgcttgctttagtgttaagagaatacctggaaaatcatcatca

SEQ ID NO: 528708 - DNA, 55 bp, Artificial
  Synthetic oligonucleotide
tagagatcacatttgccaccataagactccctgcactagagtagcgcctaggcag

SEQ ID NO: 528709 - DNA, 55 bp, Artificial
  Synthetic oligonucleotide
gagtctagctacgatcgccgaaaattatatgatgcataatggaaatcagagagca

SEQ ID NO: 528710 - DNA, 55 bp, Artificial
  Synthetic oligonucleotide
agaccatgcgcttgtggacgcgcgctggctcggacgacgccatctctacatcttc

SEQ ID NO: 528711 - DNA, 55 bp, Artificial
  Synthetic oligonucleotide
ccagattaaaactggcggcttcttctcctgtatcgcaatgctgcgtcctttgcaa

SEQ ID NO: 528712 - DNA, 55 bp, Artificial
  Synthetic oligonucleotide
acttctatctaactaccaccatatcgcaaggaggtattcaggccagcatcgtgtc

SEQ ID NO: 528713 - DNA, 55 bp, Artificial
  Synthetic oligonucleotide
actttggactgtcgcattactctcgcgctacaacgccgattcttggcaagatgcc

SEQ ID NO: 528714 - DNA, 55 bp, Artificial
  Synthetic oligonucleotide
ctattgaatgtattgagcgcaggtgaagaactaccagaccccttgagtccgggtg

SEQ ID NO: 528715 - DNA, 55 bp, Artificial
  Synthetic oligonucleotide
gcgatgagattagtttatgattccgagttacaaatgcattgtctccgtgggcctc

SEQ ID NO: 528716 - DNA, 55 bp, Artificial
  Synthetic oligonucleotide
agaaaagcgtcgtgcgcaaatatcagcactattaactatgttgcagaaaccagtg

SEQ ID NO: 528717 - DNA, 55 bp, Artificial
  Synthetic oligonucleotide
gcgatgataccacaagtaacggctcggtttgacgctaccaaaggagagtggtcgt

SEQ ID NO: 528718 - DNA, 55 bp, Artificial
  Synthetic oligonucleotide
ccatacgaagaaggagataatgaagaaagatgcgtacaacgaagcagtgaggatg

SEQ ID NO: 528719 - DNA, 55 bp, Artificial
  Synthetic oligonucleotide
gcgatgctacattaggcgagtggctgatggtgaacccgcactgccctcaatatgg

SEQ ID NO: 528720 - DNA, 55 bp, Artificial
  Synthetic oligonucleotide
gcgatgttgaaagatgcggtgacggatagcgatttagcgatggcggttaagtcga

SEQ ID NO: 528721 - DNA, 55 bp, Artificial
  Synthetic oligonucleotide
tagttggttcggggatggcgtccgcgattgcaacaggaagagcgatcgagggcgc

SEQ ID NO: 528722 - DNA, 55 bp, Artificial
  Synthetic oligonucleotide
ccatacaccgcggatcagattgtcgcgaggttcactcctctacagctacctgagg

SEQ ID NO: 528723 - DNA, 55 bp, Artificial
  Synthetic oligonucleotide
cagagctacgctatgttcgttgagtagatgatgccaaccagagggccttggggcg

SEQ ID NO: 528724 - DNA, 55 bp, Artificial
  Synthetic oligonucleotide
ctcaatcatgaccggggagtcatatggcgaatcggtgaaacaagctgtgctgctg

SEQ ID NO: 528725 - DNA, 55 bp, Artificial
  Synthetic oligonucleotide
ctcaatgtcctaggtgcaggtgacgaaattcctgatccattgagcccgggtgagc

SEQ ID NO: 528726 - DNA, 55 bp, Artificial
  Synthetic oligonucleotide
agaactttacttttcggaagcacgctaggagttatacttcatgtttgagggtgtg

SEQ ID NO: 528727 - DNA, 55 bp, Artificial
  Synthetic oligonucleotide
tagtgaagcatggcgtcggtacgcatgtcgttggtagcaacacacccatccacgg

SEQ ID NO: 528728 - DNA, 55 bp, Artificial
  Synthetic oligonucleotide
ctcacggaggcagaaggttctacggatatccaccccgagcgccgctggcttatcc

SEQ ID NO: 528729 - DNA, 55 bp, Artificial
  Synthetic oligonucleotide
ccagtggacataaatggaacggagtatgtattattagactatgaagtgaactggg

SEQ ID NO: 528730 - DNA, 55 bp, Artificial
  Synthetic oligonucleotide
caatgggagattcatgtacgattaaggtatgtccgctgaatacacagacattagg

SEQ ID NO: 528731 - DNA, 55 bp, Artificial
  Synthetic oligonucleotide
ctcagcagatggcaagttctattattaacacttcttttgaagctgcggttgttgc

SEQ ID NO: 528732 - DNA, 55 bp, Artificial
  Synthetic oligonucleotide
ccagtctttaaaactaagctaattcgtgatcagcaaatcggcagaattggggatc

SEQ ID NO: 528733 - DNA, 55 bp, Artificial
  Synthetic oligonucleotide
cgcaaagctgaacgccaccagactgcaggccttcgtgaatgccaacccggagagc

SEQ ID NO: 528734 - DNA, 55 bp, Artificial
  Synthetic oligonucleotide
cgcaacaattacggaactagctttgaactttccctgtgtcaattgggacatcaag

SEQ ID NO: 528735 - DNA, 55 bp, Artificial; identical to SEQ ID NO: 364121
  Synthetic oligonucleotide

SEQ ID NO: 528736 - DNA, 55 bp, Artificial
  Synthetic oligonucleotide
aaccagtgactggcgacactggccttgataggcgggcacctagcgatggtgtcgc

SEQ ID NO: 528737 - DNA, 55 bp, Artificial
  Synthetic oligonucleotide
caccagagcgtttccacagaatcatatggcacctatacgatccaatcgcaaacga

SEQ ID NO: 528738 - DNA, 55 bp, Artificial
  Synthetic oligonucleotide
cgcaagttcaattgttaaatccggtgggctaggttataaatggtcagagatttca

SEQ ID NO: 528739 - DNA, 55 bp, Artificial
  Synthetic oligonucleotide
cgcaatcgagtttcatggatcagaggcggaaacattaaatgatgcgaatccccgg

SEQ ID NO: 528740 - DNA, 55 bp, Artificial; identical to SEQ ID NO: 402680
  Synthetic oligonucleotide

SEQ ID NO: 528741 - DNA, 55 bp, Artificial
  Synthetic oligonucleotide
ttaggaattggatgcacaacaaccgacgtcacaacatttgaagaggtagcaaacg

SEQ ID NO: 528742 - DNA, 55 bp, Artificial
  Synthetic oligonucleotide
aaccgatgggaggagtggagttttgaagcgttaacaccagtaccgatggctgtgg

SEQ ID NO: 528743 - DNA, 55 bp, Artificial
  Synthetic oligonucleotide
caagaaccccctatggcatggtctccgggcagcaattctaaacaggacaaccctg

SEQ ID NO: 528744 - DNA, 55 bp, Artificial
  Synthetic oligonucleotide
gatcgaatcaaagggagaaggcgcaacttgcagcggagatagagacgggagtggc

SEQ ID NO: 528745 - DNA, 55 bp, Artificial
  Synthetic oligonucleotide
cgcacaaagaattgtatacgatgacgaattgcagatgcacatattgagaggccca

SEQ ID NO: 528746 - DNA, 55 bp, Artificial
  Synthetic oligonucleotide
aacctctttgacttagaaggagagcccgcaacgaaggtatttcactgggagtacg

SEQ ID NO: 528747 - DNA, 55 bp, Artificial
  Synthetic oligonucleotide
gatcgacgcatataggtcctgacacattaccagatataataaccgaatcgtctga

SEQ ID NO: 528748 - DNA, 55 bp, Artificial
  Synthetic oligonucleotide
cctaagatcagtaggtagagtggcgccccgaggtttgcaccgcgtggagtggttg

SEQ ID NO: 528749 - DNA, 55 bp, Artificial
  Synthetic oligonucleotide
ttactgactcgacttcatgatagattacaaactgtcgaaaccagtactctaccga

SEQ ID NO: 528750 - DNA, 55 bp, Artificial
  Synthetic oligonucleotide
ttacgctaatcatgatttaaccgggacagttcggtacgctcggtttgcattgggt

SEQ ID NO: 528751 - DNA, 55 bp, Artificial
  Synthetic oligonucleotide
gagcgaaagttggttaattatgctaaaggtaaaccactagaggctgatttaacag

SEQ ID NO: 528752 - DNA, 55 bp, Artificial
  Synthetic oligonucleotide
cgcagattagcgcgttcgcgaggtgcacacccgatttatttaggagcaacgcact

SEQ ID NO: 528753 - DNA, 55 bp, Artificial
  Synthetic oligonucleotide
ttacccgaacgaagcggcaactcagatcgcagatgacaagtggaaagatactctc

SEQ ID NO: 528754 - DNA, 55 bp, Artificial
  Synthetic oligonucleotide
cgcagcgcgacacgtgaaggagcggactttatgacgaaagttctccggttccgcg

SEQ ID NO: 528755 - DNA, 55 bp, Artificial
  Synthetic oligonucleotide
ccgttgtcgaagaagaacctgacaatactgaacatcgtaacgacggtttctcgct

SEQ ID NO: 528756 - DNA, 55 bp, Artificial
  Synthetic oligonucleotide
ttaagtttggttcgtgtggatgatacaatttcacaaccaccgagatatgctccga

SEQ ID NO: 528757 - DNA, 55 bp, Artificial
  Synthetic oligonucleotide
gatcaaacttagccagctcagtttctacattaactgatgcaatgtctgatgcagc

SEQ ID NO: 528758 - DNA, 55 bp, Artificial
  Synthetic oligonucleotide
cgatgctagattatgcgatctatagctgtgaagaggtacactatgtggggagcgg

SEQ ID NO: 528759 - DNA, 55 bp, Artificial
  Synthetic oligonucleotide
cctcccatacaaaatacgaggaatgttgtgccagtatccttgtcagctagagaga

SEQ ID NO: 528760 - DNA, 55 bp, Artificial
  Synthetic oligonucleotide
aaatttagcgacaattggagtactagcaacaccggaaattccttatacaatggag

SEQ ID NO: 528761 - DNA, 55 bp, Artificial; identical to SEQ ID NO: 402326
  Synthetic oligonucleotide

SEQ ID NO: 528762 - DNA, 55 bp, Artificial
  Synthetic oligonucleotide
cagaatcgcttgacatgtcagaattggctgatctgatattgaacgaatggttatg

SEQ ID NO: 528763 - DNA, 55 bp, Artificial
  Synthetic oligonucleotide
gatcagaaggttgaagagttgagtctggttcgtgcaggtgataggatttcgctac

SEQ ID NO: 528764 - DNA, 55 bp, Artificial
  Synthetic oligonucleotide
aacaaccttaccaaatatgcttccaccgattttcccaccaaatgatagagacagc

SEQ ID NO: 528765 - DNA, 55 bp, Artificial
  Synthetic oligonucleotide
cgattaatgatattctgcgcgacataaagccattctttgtgactacagaagctag

SEQ ID NO: 528766 - DNA, 55 bp, Artificial
  Synthetic oligonucleotide
aacacggaacattgttttctacaccaaagttatatgctgtaatgaagttcagcgg

SEQ ID NO: 528767 - DNA, 55 bp, Artificial
  Synthetic oligonucleotide
aacagagctattgctcaaaacgcctatgtgtgagggcagttatggcacggcataa

SEQ ID NO: 528768 - DNA, 55 bp, Artificial
  Synthetic oligonucleotide
caccatctacatatgaccctctatgagcgcaatagttaaaagctaacactgtcaa

SEQ ID NO: 528769 - DNA, 55 bp, Artificial
  Synthetic oligonucleotide
caccatagggaaggcggcggaaaggttcgcggaaagtgagattgggtccgcggca

SEQ ID NO: 528770 - DNA, 55 bp, Artificial
  Synthetic oligonucleotide
gagcgagatagggtcagccgcgatagatggattgatccaggggagcgtgcagtcg

SEQ ID NO: 528771 - DNA, 55 bp, Artificial
  Synthetic oligonucleotide
caccatacctcgcaaaaccaacatatctcatgggaacagtatttagccaagcttc

SEQ ID NO: 528772 - DNA, 55 bp, Artificial
  Synthetic oligonucleotide
cctatgagtaaccatagcatattaccatcttcacgtaaccctctatgagcacaat

SEQ ID NO: 528773 - DNA, 55 bp, Artificial
  Synthetic oligonucleotide
aaccaaattacgtttcttctaaccattggcaaccagcttcaaagatatcagtgtg

SEQ ID NO: 528774 - DNA, 55 bp, Artificial
  Synthetic oligonucleotide
gatcctatcaattcgagagtgagcacgattgagcgaagctatgttgcgtctgcgg

SEQ ID NO: 528775 - DNA, 55 bp, Artificial
  Synthetic oligonucleotide
ttatctcgcgtgggccccgaatgcaccgagacatggcgacgaggagccagtgatg

SEQ ID NO: 528776 - DNA, 55 bp, Artificial
  Synthetic oligonucleotide
ttatcggtttgaaggtgggtatggcagagcaagaatagaaagcgcttatgtgacc

SEQ ID NO: 528777 - DNA, 55 bp, Artificial
  Synthetic oligonucleotide
cgcaaacgccataatcaaatctggcggcctagggtataagtggtccgagatttca

SEQ ID NO: 528778 - DNA, 55 bp, Artificial
  Synthetic oligonucleotide
gatcggtaccatgctatccagattagtatcgggcacggagacaagaataaacatg

SEQ ID NO: 528779 - DNA, 55 bp, Artificial
  Synthetic oligonucleotide
cgcctggtcgcttggatgaggaagaatataacgtgatacgttcgcgcttcttaac

SEQ ID NO: 528780 - DNA, 55 bp, Artificial
  Synthetic oligonucleotide
cgccttaatcaaacataggataccagccaagagggatgaatatcactgtatatcg

SEQ ID NO: 528781 - DNA, 55 bp, Artificial
  Synthetic oligonucleotide
cgcgaaatttgtacgacaagcgcatatactcttcaccgcacccacaggcgaccca

SEQ ID NO: 528782 - DNA, 55 bp, Artificial
  Synthetic oligonucleotide
cgcgaggctctgcgccgccgaggacatacagatattaaagtgtatgggactgatg

SEQ ID NO: 528783 - DNA, 55 bp, Artificial
  Synthetic oligonucleotide
gatcggtggtgttgagaggaaggcggcaccaataggagcgcgggagagtgctgtt

SEQ ID NO: 528784 - DNA, 55 bp, Artificial
  Synthetic oligonucleotide
aagaaattaggaccaagagaaaatgtagcgattgtacaagttggtggttcagaag

SEQ ID NO: 528785 - DNA, 55 bp, Artificial
  Synthetic oligonucleotide
aagaatcacaagtggtggtgttgagacgcctgactacgattacgtcgacggtggc

SEQ ID NO: 528786 - DNA, 55 bp, Artificial
  Synthetic oligonucleotide
cgcgcaacggattgtttacgatgatgaattacagatgcatattttacgtggacca

SEQ ID NO: 528787 - DNA, 55 bp, Artificial
  Synthetic oligonucleotide
cgcgcacgaacttaaggttattccattagaggtgggttcctacaatgaccgatgc

SEQ ID NO: 528788 - DNA, 55 bp, Artificial
  Synthetic oligonucleotide
tgtccggtccgagccatcctctctctcctcccaagtctcgtcgcagacgtccact

SEQ ID NO: 528789 - DNA, 55 bp, Artificial
  Synthetic oligonucleotide
cgcgcctcagagttgatcggttgctcacctttcaggaccgtgacgatcgaagaac

SEQ ID NO: 528790 - DNA, 55 bp, Artificial
  Synthetic oligonucleotide
tgtcagctgcgatactacttgcacccggtgacgtgattatgcgttcatccgagga

SEQ ID NO: 528791 - DNA, 55 bp, Artificial
  Synthetic oligonucleotide
gataaccacatacagattaaaacgatcggagaagtcagttcttacgctcgcgatc

SEQ ID NO: 528792 - DNA, 55 bp, Artificial
  Synthetic oligonucleotide
cgcgcgcaaggagagtttaaggtgccaaaaggcgtattaccagtgtcaaccgttg

SEQ ID NO: 528793 - DNA, 55 bp, Artificial
  Synthetic oligonucleotide
ccgtctggctaacggttagctccttttaatgtatggtattgaatataccacaatt

SEQ ID NO: 528794 - DNA, 55 bp, Artificial
  Synthetic oligonucleotide
aagagccatcattctcgatcaccagaactagagttagtagattgtatgggttacc

SEQ ID NO: 528795 - DNA, 55 bp, Artificial
  Synthetic oligonucleotide
cgcggaaagcgacattggttcagcggcaatcgatgggctcatccagggtagcgtt

SEQ ID NO: 528796 - DNA, 55 bp, Artificial
  Synthetic oligonucleotide
gatctccatatactaatgccaacttctttcaagattagagtgcttggatgtgacc

SEQ ID NO: 528797 - DNA, 55 bp, Artificial
  Synthetic oligonucleotide
cgcatgagaattggagtattcaaaggtatggtaatgacgcggaatggccaggtaa

SEQ ID NO: 528798 - DNA, 55 bp, Artificial
  Synthetic oligonucleotide
gcccgcttgcgtcaggaagccaacgctgaatgggagccccgcattgctgcactaa

SEQ ID NO: 528799 - DNA, 55 bp, Artificial
  Synthetic oligonucleotide
aacggagtggtgactaccgtcattgatgacagctcgtatcctaaagacggcggaa

SEQ ID NO: 528800 - DNA, 55 bp, Artificial
  Synthetic oligonucleotide
gcccggagcggatgcggacatgtatgaactgaggaacttcatgcggttacagggc

SEQ ID NO: 528801 - DNA, 55 bp, Artificial
  Synthetic oligonucleotide
cgcatgtcagctgcggttttgctcgcacccggtgacgtgatccaacgttcgaccg

SEQ ID NO: 528802 - DNA, 55 bp, Artificial
  Synthetic oligonucleotide
aacgtcagaggaaccaaaagaaatgcagagatcggaagaaggagccacagctaga

SEQ ID NO: 528803 - DNA, 55 bp, Artificial; identical to SEQ ID NO: 363651
  Synthetic oligonucleotide

SEQ ID NO: 528804 - DNA, 55 bp, Artificial
  Synthetic oligonucleotide
caacacaatcacgaccatctagcgacattggatacgatcaaatggatttctcttt

SEQ ID NO: 528805 - DNA, 55 bp, Artificial
  Synthetic oligonucleotide
cgccacgaacacagacttgcctgttaccgtgttcggcccagaccgcaccatccct

SEQ ID NO: 528806 - DNA, 55 bp, Artificial
  Synthetic oligonucleotide
ccgttatatctcatggatgagatgcaaaagaaatatgagctgcagagcgtaggga

SEQ ID NO: 528807 - DNA, 55 bp, Artificial
  Synthetic oligonucleotide
ccgttagagagacgaggatgcgacgcgcgatgtgagattgctagagcgggttgga

SEQ ID NO: 528808 - DNA, 55 bp, Artificial
  Synthetic oligonucleotide
cgccagattatacccaacatatggctaccatcggtgttttagcgactccagagat

SEQ ID NO: 528809 - DNA, 55 bp, Artificial
  Synthetic oligonucleotide
tgtttacacgttatgagatttcactatgggtttaaggcgagacgacatgaattgg

SEQ ID NO: 528810 - DNA, 55 bp, Artificial
  Synthetic oligonucleotide
tgttgggcgcaggagattaaaattaaggaaggcgtttggcgacattctacgcagt

SEQ ID NO: 528811 - DNA, 55 bp, Artificial
  Synthetic oligonucleotide
cgccgaaatgagttcgcgcaaagtggctagacgtcgtcataaggatgctaccgac

SEQ ID NO: 528812 - DNA, 55 bp, Artificial
  Synthetic oligonucleotide
aactccaaatgccacgaccaaaggatactttataacgaattacgcatcggctgag

SEQ ID NO: 528813 - DNA, 55 bp, Artificial
  Synthetic oligonucleotide
cgccggagaatccagtatcttggctacgtgcctgaagatgtgatcgacgaacgtt

SEQ ID NO: 528814 - DNA, 55 bp, Artificial
  Synthetic oligonucleotide
aactcttcttttgaagctgcagttgtcgctgcaacttctacattggaattaatgg

SEQ ID NO: 528815 - DNA, 55 bp, Artificial
  Synthetic oligonucleotide
gcccggggctccaataacgatgtatgagctacgaaatctcatgcgtttggacgga

SEQ ID NO: 528816 - DNA, 55 bp, Artificial
  Synthetic oligonucleotide
cacgctggacgacgcttggggagcaatcatcgataggacaaaggatcgtattctc

SEQ ID NO: 528817 - DNA, 55 bp, Artificial
  Synthetic oligonucleotide
aaaaggtcgcgtatgcatcatatgcagaagcatttagagatgatctacgactgcg

SEQ ID NO: 528818 - DNA, 55 bp, Artificial
  Synthetic oligonucleotide
aaaaggtgaaccacgggctaaggtagtgatgaaaggagatcggaaacatggaaag

SEQ ID NO: 528819 - DNA, 55 bp, Artificial
  Synthetic oligonucleotide
tttccagaggcgggcaattttgggagcgttaaagtttggttgcaaggtgttagga

SEQ ID NO: 528820 - DNA, 55 bp, Artificial
  Synthetic oligonucleotide
gatagcaattaacagatataatggattgacactacggggagtaacaatgagaccc

SEQ ID NO: 528821 - DNA, 55 bp, Artificial
  Synthetic oligonucleotide
cctttcaagtgatatgagtgtggccttcaagataaatgggaccaagacggaagtg

SEQ ID NO: 528822 - DNA, 55 bp, Artificial
  Synthetic oligonucleotide
tttagggctaacgtattgcatatgctactagagtttgtcttggacaatctataca

SEQ ID NO: 528823 - DNA, 55 bp, Artificial
  Synthetic oligonucleotide
aaaatcctctgtggcatggtttgcgggcagcaatacttaacaggaccaccttacc

SEQ ID NO: 528824 - DNA, 55 bp, Artificial
  Synthetic oligonucleotide
aaaatcgggtgattcttcttctttgtatcatttgttaggtgacatgttcactttt

SEQ ID NO: 528825 - DNA, 55 bp, Artificial
  Synthetic oligonucleotide
cacgacgaccatctatgatatcgctgtcacaggtaaagctgttaaatttagcccg

SEQ ID NO: 528826 - DNA, 55 bp, Artificial
  Synthetic oligonucleotide
gccaccctggaatgagacagacgtagacagccgtcttctgtccacgcagacgccc

SEQ ID NO: 528827 - DNA, 55 bp, Artificial
  Synthetic oligonucleotide
ccttgagaaggatgttaagttgggtagcggatcacaaattgtattcccatcgtac

SEQ ID NO: 528828 - DNA, 55 bp, Artificial
  Synthetic oligonucleotide
cgacaggaaaggcgaaagtatgctgtgttaagttaacagctatggatttagaact

SEQ ID NO: 528829 - DNA, 55 bp, Artificial
  Synthetic oligonucleotide
tttacaatgacagagcgcacatcattttcaatggtatctatcactcagttactcc

SEQ ID NO: 528830 - DNA, 55 bp, Artificial
  Synthetic oligonucleotide
gccactagacatgttttcgatgttctcgggaattgagggtactgtgaatgcagca

SEQ ID NO: 528831 - DNA, 55 bp, Artificial
  Synthetic oligonucleotide
aaacataatacaacaacggaggcgatacaaacgtatattaaacccttttgtgcgg

SEQ ID NO: 528832 - DNA, 55 bp, Artificial
  Synthetic oligonucleotide
aaacatgacatcacactgtgacttttacatcataccacggtctgaagaaaacgcg

SEQ ID NO: 528833 - DNA, 55 bp, Artificial
  Synthetic oligonucleotide
cgacccgtcacagagtttagacagaacttggcgattgccatcctctctcgcttgt

SEQ ID NO: 528834 - DNA, 55 bp, Artificial
  Synthetic oligonucleotide
caacgctatgcttatattatcctaccgaagcatcaactcaaattggagacactga

SEQ ID NO: 528835 - DNA, 55 bp, Artificial
  Synthetic oligonucleotide
cgacgaatcgccacagcggcgggtactgcgataagcaaagcggcgtcgtcggaaa

SEQ ID NO: 528836 - DNA, 55 bp, Artificial
  Synthetic oligonucleotide
cgacgatatgactggagacacgccaagaactcaaaggatccggcaaaaggtgaag

SEQ ID NO: 528837 - DNA, 55 bp, Artificial
  Synthetic oligonucleotide
gagctacgaaatctcatgcgtttggacggatattcacatgtcgaaaggaaacaca

SEQ ID NO: 528838 - DNA, 55 bp, Artificial
  Synthetic oligonucleotide
gccagctgcgatgctacttgcacccagtgacgtgattaaacgctcatccgaggaa

SEQ ID NO: 528839 - DNA, 55 bp, Artificial
  Synthetic oligonucleotide
ttgttattcccggtgttcgagaagttctagtcttaggagatgctcaacgtatggt

SEQ ID NO: 528840 - DNA, 55 bp, Artificial
  Synthetic oligonucleotide
cagaactttgtagagacatacctctcgtacccataccaacttacgaagaccgagg

SEQ ID NO: 528841 - DNA, 55 bp, Artificial
  Synthetic oligonucleotide
cgaacgcacaagggaactcaatgcagacacaggctggtgtagtagtgagcattgg

SEQ ID NO: 528842 - DNA, 55 bp, Artificial
  Synthetic oligonucleotide
ttttgtcggttccattgtcccactccactcctattccacctcaacgtaagactgt

SEQ ID NO: 528843 - DNA, 55 bp, Artificial
  Synthetic oligonucleotide
cgaacgcggcttatacagacgctgcacattgaacccgcgaatgcactcgaacacg

SEQ ID NO: 528844 - DNA, 55 bp, Artificial
  Synthetic oligonucleotide
cgaacgtaaggctgaatgctgagaaccaccgaatgagtcgagcaaccagagtggg

SEQ ID NO: 528845 - DNA, 55 bp, Artificial
  Synthetic oligonucleotide
cgaacgtgaatataagtcatggcgatttgacgccgatctatgaacggctgaccaa

SEQ ID NO: 528846 - DNA, 55 bp, Artificial
  Synthetic oligonucleotide
aaaacactcgaaacagatgcagacatgtagcgtaatagatgttcgcgcctcagag

SEQ ID NO: 528847 - DNA, 55 bp, Artificial
  Synthetic oligonucleotide
cgaagaacatagacgtcaaggcattcgaatcgattgttgggcgtaggagattaaa

SEQ ID NO: 528848 - DNA, 55 bp, Artificial
  Synthetic oligonucleotide
cgaacacgcgtaagaggcgtcgaagactcatgcatcgggaggtgcgtcgtccgac

SEQ ID NO: 528849 - DNA, 55 bp, Artificial
  Synthetic oligonucleotide
tttgggcaaagcggcgactattgatcaggcactaaatggaaaatttggttcagct

SEQ ID NO: 528850 - DNA, 55 bp, Artificial
  Synthetic oligonucleotide
cgaaattgagcaacagatggatagaattgttaaagagatgagacgtcagttggag

SEQ ID NO: 528851 - DNA, 55 bp, Artificial
  Synthetic oligonucleotide
aaaagaaagatcacgtttgccactacaagactccctgcactagagtagcgcctag

SEQ ID NO: 528852 - DNA, 55 bp, Artificial
  Synthetic oligonucleotide
gccaccaccggatctagtgtttgatcgagatacgccaggcgttcacgtgttcggc

SEQ ID NO: 528853 - DNA, 55 bp, Artificial
  Synthetic oligonucleotide
gatagaaggacgcattgccaatacttgatcaatccctcaagcgtgcctcccgatg

SEQ ID NO: 528854 - DNA, 55 bp, Artificial
  Synthetic oligonucleotide
tttgcattgtgccgagttgatgtgtctcgctcttacgatcgggatctcagtcgtc

SEQ ID NO: 528855 - DNA, 55 bp, Artificial
  Synthetic oligonucleotide
cgaatactgggagggaatacttgcgtgcgggacagtccgttgcatatttcggggc

SEQ ID NO: 528856 - DNA, 55 bp, Artificial
  Synthetic oligonucleotide
tttgatgatatcggcggatggagtagagggtacgcaagaacggtgggaagagtgg

SEQ ID NO: 528857 - DNA, 55 bp, Artificial
  Synthetic oligonucleotide
tttgaggatcttaccagtcattggcatgcattaggaaatgcgcaagaggcaacag

SEQ ID NO: 528858 - DNA, 55 bp, Artificial
  Synthetic oligonucleotide
aaaaggaaggtgttggaggggaggtgcaggaggaaaccactaaagttggcataat

SEQ ID NO: 528859 - DNA, 55 bp, Artificial
  Synthetic oligonucleotide
gatagacagctctacacttgagatcaactccaatgggcaactgactgtgaaatcg

SEQ ID NO: 528860 - DNA, 55 bp, Artificial
  Synthetic oligonucleotide
tttctcgcccagaagcagtgtgtcggtcaccgcacgacagtccgcccctcgagga

SEQ ID NO: 528861 - DNA, 55 bp, Artificial
  Synthetic oligonucleotide
tttcgatagctcgaacctcactcacgatcttaagcttcagggactatgggctcgg

SEQ ID NO: 528862 - DNA, 55 bp, Artificial
  Synthetic oligonucleotide
gatacaatccttaggatcactcaaggactcgatgatgcaaacaaacgaatcagcg

SEQ ID NO: 528863 - DNA, 55 bp, Artificial
  Synthetic oligonucleotide
cgaggaccaaaacactttcaacgaagggcgatattgagcgcgctgaaagatggag

SEQ ID NO: 528864 - DNA, 55 bp, Artificial
  Synthetic oligonucleotide
cgaggatgtgcagcaccttagaatgcgagtatgtcgtagtgaagcatggcgtcgg

SEQ ID NO: 528865 - DNA, 55 bp, Artificial
  Synthetic oligonucleotide
cgaggcccaaagcatttccaaagacgtgcaataatgggtgcgattaaagtgggcg

SEQ ID NO: 528866 - DNA, 55 bp, Artificial
  Synthetic oligonucleotide
cgaggttcttaagaacaacgctcagcgtatcgtttatgatgatgagctacagatg

SEQ ID NO: 528867 - DNA, 55 bp, Artificial
  Synthetic oligonucleotide
aaataccttgagacgcatattcccggaacaactgtttagcgatacgaagacacac

SEQ ID NO: 528868 - DNA, 55 bp, Artificial
  Synthetic oligonucleotide
cgagtccggttccggatctttcattatgcagatttattggattaaggttgatgtc

SEQ ID NO: 528869 - DNA, 55 bp, Artificial
  Synthetic oligonucleotide
cagaacacaaaactatggaattaacttaccaatcactggttccatggatacagca

SEQ ID NO: 528870 - DNA, 55 bp, Artificial
  Synthetic oligonucleotide
ttgaggatctggcggcccattggcacgctttaggtgcggcgcaggaggctaaagg

SEQ ID NO: 528871 - DNA, 55 bp, Artificial
  Synthetic oligonucleotide
gatattacagctgatccgacgacagcaccacaaactgagaaaatgatgagagtta

SEQ ID NO: 528872 - DNA, 55 bp, Artificial
  Synthetic oligonucleotide
gatatttggaagagatcagatatgtgcaacaactattcgggaaggttccaaccgg

SEQ ID NO: 528873 - DNA, 55 bp, Artificial
  Synthetic oligonucleotide
aaatgcagttatgttttggctggagcgacattcaaatgatgtcgctgacgcgaat

SEQ ID NO: 528874 - DNA, 55 bp, Artificial
  Synthetic oligonucleotide
cctgacgttatcagggtcggcaacgcttactgttgcactcagtgttgtggtgttc

SEQ ID NO: 528875 - DNA, 55 bp, Artificial
  Synthetic oligonucleotide
cctgaccgggcaacattcgttcgtcaccggtagagacatcggcatgtggctcgct

SEQ ID NO: 528876 - DNA, 55 bp, Artificial
  Synthetic oligonucleotide
cctgaagcggagagtgccgtttgcggcgaccttcaagtgtctgacgtctgtgtta

SEQ ID NO: 528877 - DNA, 55 bp, Artificial
  Synthetic oligonucleotide
ttgaaccatcgcaatcccgagaacggttctttagggtggacacgcacttcgaacg

SEQ ID NO: 528878 - DNA, 55 bp, Artificial
  Synthetic oligonucleotide
ttcttgcgcggccgagggatcggacatgctttcttgcgtgcgctgtcttcggacg

SEQ ID NO: 528879 - DNA, 55 bp, Artificial
  Synthetic oligonucleotide
gatcaaaagatgagagtgctgaatgcttgctttagtgttaagagaatacctggaa

SEQ ID NO: 528880 - DNA, 55 bp, Artificial
  Synthetic oligonucleotide
gcccacacatgccagctatgttacgccgctgcacacaccgcccatcggagggttt

SEQ ID NO: 528881 - DNA, 55 bp, Artificial
  Synthetic oligonucleotide
ttctatatggtgtgaaaatagcttgaaagcctcacggcgcggagaaaacacatac

SEQ ID NO: 528882 - DNA, 55 bp, Artificial
  Synthetic oligonucleotide
cctcggatctaatcaactacgcacaccatgtcaattcatcatcccttactacctc

SEQ ID NO: 528883 - DNA, 55 bp, Artificial
  Synthetic oligonucleotide
cgacgccttactgtcaagtgaaaataggacgaaattttgcattgaaggcggtttc

SEQ ID NO: 528884 - DNA, 55 bp, Artificial
  Synthetic oligonucleotide
cacgagaattcaaccagaagcattttaaaacgctaaacgaatgggaagaaggtgg

SEQ ID NO: 528885 - DNA, 55 bp, Artificial
  Synthetic oligonucleotide
aaactgtgcctaaagatttagaagtactgaagactcatgctctctgttccgttcg

SEQ ID NO: 528886 - DNA, 55 bp, Artificial
  Synthetic oligonucleotide
ttgtcctgctagtacaacagacgtgacacactatggcggttacgaccaatattcg

SEQ ID NO: 528887 - DNA, 55 bp, Artificial
  Synthetic oligonucleotide
ttgtcaaatcaaaatagggaggaacttcgctttgagggcggttgcgactccagaa

SEQ ID NO: 528888 - DNA, 55 bp, Artificial
  Synthetic oligonucleotide
cacgatataattttcgagctggtatgctgcaagggatcagggaagcgatgactcc

SEQ ID NO: 528889 - DNA, 55 bp, Artificial
  Synthetic oligonucleotide
ttggtggtgtcgagagaaaggcggcaccgataggggcgcgggagagtgccgttat

SEQ ID NO: 528890 - DNA, 55 bp, Artificial
  Synthetic oligonucleotide
ttggtggtgtaaatataagagcgggaaggatcacggcgtgggatggacaggcagc

SEQ ID NO: 528891 - DNA, 55 bp, Artificial
  Synthetic oligonucleotide
cctgtaactcagcagcctcttttacatgtctatacagcgccttgggattcggacg

SEQ ID NO: 528892 - DNA, 55 bp, Artificial
  Synthetic oligonucleotide
gatatcaatgggatcatcatgtactgtgaaagtgtgtccactgaatacacaaacg

SEQ ID NO: 528893 - DNA, 55 bp, Artificial
  Synthetic oligonucleotide
cgagaagcgaggcgaaacaacttctacgcagccgtggatgtcgcattcgcgacct

SEQ ID NO: 528894 - DNA, 55 bp, Artificial
  Synthetic oligonucleotide
caaccgtatatgaggaatgattttgaccgaaatgagatgccggatctaccaggtg

SEQ ID NO: 528895 - DNA, 55 bp, Artificial
  Synthetic oligonucleotide
cctggcaagggatgagattccgtatacaccgtcgacgtttaggcgggttcagcga

SEQ ID NO: 528896 - DNA, 55 bp, Artificial
  Synthetic oligonucleotide
cctggagcatggttgtaaatcaagcttgccgatatcacatgatggttgtgtctgc

SEQ ID NO: 528897 - DNA, 55 bp, Artificial
  Synthetic oligonucleotide
gagcgggtgtaattatcgcttatgatgggcaggcacccgttaatgtaaacaaccc

SEQ ID NO: 528898 - DNA, 55 bp, Artificial
  Synthetic oligonucleotide
ttgggagagttccaactggtgaattcccattgcatcagatgatgttgatgagacg

SEQ ID NO: 528899 - DNA, 55 bp, Artificial
  Synthetic oligonucleotide
ttggctgtagaggatgtgatgagccaaaagaaattactatcaatgataggtgggg

SEQ ID NO: 528900 - DNA, 55 bp, Artificial; identical to SEQ ID NO: 401656
  Synthetic oligonucleotide

SEQ ID NO: 528901 - DNA, 55 bp, Artificial
  Synthetic oligonucleotide
cgagactcaactggcatgtttgagatgtggtccatggtactcacccttacgtgcg

SEQ ID NO: 528902 - DNA, 55 bp, Artificial
  Synthetic oligonucleotide
ttggaccgatatcgcctgattatactcaacatatggcaaccatcggtgttttagc

SEQ ID NO: 528903 - DNA, 55 bp, Artificial
  Synthetic oligonucleotide
gatatgagcgtggcgtttaagcttaatggtacatcgacggaaataccgcagtggt

SEQ ID NO: 528904 - DNA, 55 bp, Artificial; identical to SEQ ID NO: 368813
  Synthetic oligonucleotide

SEQ ID NO: 528905 - DNA, 55 bp, Artificial
  Synthetic oligonucleotide
cgagatggagaggaggtgacagctcacacgacgtgctccgtaaacggaacgaacg

SEQ ID NO: 528906 - DNA, 55 bp, Artificial
  Synthetic oligonucleotide
cctgcatgaacatgccagttgagccggatggtaattatgaccagcagatgcgagc

SEQ ID NO: 528907 - DNA, 55 bp, Artificial
  Synthetic oligonucleotide
cggtatgcacactttcaagtgatatgagtgtggcatttaagcttaatggtacatc

SEQ ID NO: 528908 - DNA, 55 bp, Artificial
  Synthetic oligonucleotide
tgagtttagttcgtgtggatgacgcgatttctcaaccaccaagatatgctccgag

SEQ ID NO: 528909 - DNA, 55 bp, Artificial
  Synthetic oligonucleotide
cggtcgccttacactagtgcaaacttctttcaagattagagtgcttggatgtgac

SEQ ID NO: 528910 - DNA, 55 bp, Artificial
  Synthetic oligonucleotide
cggtcgctcggtaaactaaagaggaaatgcgtattactgcattgtgtggaggtcc

SEQ ID NO: 528911 - DNA, 55 bp, Artificial
  Synthetic oligonucleotide
gccgcgatgaaccatattctgacatggagtctttggagcgtatatgtcgtactgc

SEQ ID NO: 528912 - DNA, 55 bp, Artificial
  Synthetic oligonucleotide
cggttgaacagcctcataaaccagcgttcaaaactgaacgtggcatgaacagacc

SEQ ID NO: 528913 - DNA, 55 bp, Artificial
  Synthetic oligonucleotide
tgaggatttaacccaacattggcacgcactgggcgcagcgcagcaagctgttgga

SEQ ID NO: 528914 - DNA, 55 bp, Artificial
  Synthetic oligonucleotide
ccgacaggaacatagaagcgcgctacgccgcatgcgaatcaagatgcgaacccct

SEQ ID NO: 528915 - DNA, 55 bp, Artificial
  Synthetic oligonucleotide
gatgctcgagtgttcacacgcagatgtgagggtactagatgggaatggagcggtc

SEQ ID NO: 528916 - DNA, 55 bp, Artificial
  Synthetic oligonucleotide
gccaaagtgcttgaccttcaaattagcgcccgggacgcgcctacgcctttgttcc

SEQ ID NO: 528917 - DNA, 55 bp, Artificial
  Synthetic oligonucleotide
cgtaactgcatcagtatacacataaatgattgtgaatggaataaagcgtgtacgc

SEQ ID NO: 528918 - DNA, 55 bp, Artificial
  Synthetic oligonucleotide
acaatgctagcagccctggagatgaagcagtcaccaaccgcgccacccgcctacg

SEQ ID NO: 528919 - DNA, 55 bp, Artificial; identical to SEQ ID NO: 308726
  Synthetic oligonucleotide

SEQ ID NO: 528920 - DNA, 55 bp, Artificial
  Synthetic oligonucleotide
ccgaatttagtgagatcccgctggatggatttgacataccaccggaactcaccag

SEQ ID NO: 528921 - DNA, 55 bp, Artificial
  Synthetic oligonucleotide
cgtaatgcttgtcgtttcattctgtggaattagagcacaatcaacgaaaatccta

SEQ ID NO: 528922 - DNA, 55 bp, Artificial
  Synthetic oligonucleotide
gccaaaattacgtgttgaactgactgtgatgaagagaaagcgtgcgatggcgcac

SEQ ID NO: 528923 - DNA, 55 bp, Artificial
  Synthetic oligonucleotide
tgacctcatttcggcgctgaaattaactgtcaagccctggcgaccgttgcgatct

SEQ ID NO: 528924 - DNA, 55 bp, Artificial
  Synthetic oligonucleotide
tgaattgggacatcagtgtaaaccaaattacgtttcttctaaccattggcaacca

SEQ ID NO: 528925 - DNA, 55 bp, Artificial
  Synthetic oligonucleotide
cgtagcagatatcacgataatgattcttattcaagcgccattcaggcgacctgtc

SEQ ID NO: 528926 - DNA, 55 bp, Artificial
  Synthetic oligonucleotide
cgtagcgcaacgcgcgagggcgcagacttcatgacgaaagttctccggttccgtg

SEQ ID NO: 528927 - DNA, 55 bp, Artificial
  Synthetic oligonucleotide
acacggagcccgtaaagctttcagatctcacgatctctaatattggcgcaccgcc

SEQ ID NO: 528928 - DNA, 55 bp, Artificial
  Synthetic oligonucleotide
aatgtgttaggtagtggtgaagagattccagatccgctaagtcctggggagcgag

SEQ ID NO: 528929 - DNA, 55 bp, Artificial
  Synthetic oligonucleotide
cggctaggcaaaacaatccatgcgctcacgggtctacatacccaccatatggagg

SEQ ID NO: 528930 - DNA, 55 bp, Artificial
  Synthetic oligonucleotide
ccgaggtttacgtcgtgcagggtggttgacctcgcggcgtagattcccactgctg

SEQ ID NO: 528931 - DNA, 55 bp, Artificial
  Synthetic oligonucleotide
cgggaagtagagaggcaaattaatacatgtccttattcaggctataaaggtaggg

SEQ ID NO: 528932 - DNA, 55 bp, Artificial
  Synthetic oligonucleotide
cacagatgtttcacaatgggattcatcacagcataacacacagccatttagaaag

SEQ ID NO: 528933 - DNA, 55 bp, Artificial
  Synthetic oligonucleotide
ccgaggaaccatcagacgcggccccgagacgtactagactactactaccagtcgc

SEQ ID NO: 528934 - DNA, 55 bp, Artificial
  Synthetic oligonucleotide
tgatttatctcatttgcgtacaccgaagatagaacctacgatggttgcgactacg

SEQ ID NO: 528935 - DNA, 55 bp, Artificial
  Synthetic oligonucleotide
tgattcggatctacaggcgcacgttctaaggggtccgaaacatttccaacggaga

SEQ ID NO: 528936 - DNA, 55 bp, Artificial
  Synthetic oligonucleotide
gccgatgaggaagaacaaggtgaagacgctagcgatgacgaacttcctaagactc

SEQ ID NO: 528937 - DNA, 55 bp, Artificial
  Synthetic oligonucleotide
tgatgttgatgagacgcgatttccccacgcgcgatcgcagtatcgtagaatcgcg

SEQ ID NO: 528938 - DNA, 55 bp, Artificial
  Synthetic oligonucleotide
cgggatcactggatgctgtatatacgaattcaactagtggagaaacatttctaac

SEQ ID NO: 528939 - DNA, 55 bp, Artificial
  Synthetic oligonucleotide
gatgcggtgaggatgagttttacggaattttcatcagttccgctagatggtttcg

SEQ ID NO: 528940 - DNA, 55 bp, Artificial
  Synthetic oligonucleotide
aattcaatcgatgatgtggcacacgcaacagcgtacttcaccgcaccaacaggtg

SEQ ID NO: 528941 - DNA, 55 bp, Artificial
  Synthetic oligonucleotide
ccgacgatgaaaattgcgctgaagacatcaaaatgctcgtataaggtggtgaagt

SEQ ID NO: 528942 - DNA, 55 bp, Artificial
  Synthetic oligonucleotide
tgatgctgatgagacgcgatttcccaacgcgcgatcgcagtatcgtggaggcacg

SEQ ID NO: 528943 - DNA, 55 bp, Artificial
  Synthetic oligonucleotide
gccgatgaggatgaacagggtgaagacgctagcgatgacgaacatcctaagactc

SEQ ID NO: 528944 - DNA, 55 bp, Artificial
  Synthetic oligonucleotide
cgggtggaattatctgcaatgaagagacgacgcgcaatagcacatatgaccttgg

SEQ ID NO: 528945 - DNA, 55 bp, Artificial
  Synthetic oligonucleotide
cgggtgttctagtgcactatgataagcccactaacgggaatcattacgtcttggg

SEQ ID NO: 528946 - DNA, 55 bp, Artificial
  Synthetic oligonucleotide
tgatcgcgaccaatcgacgtttctggtggtgtcacgagatggaattgaggtacaa

SEQ ID NO: 528947 - DNA, 55 bp, Artificial
  Synthetic oligonucleotide
aattgcagcctattcatgcaagatctaagatgagatctggtcacgcactgggatc

SEQ ID NO: 528948 - DNA, 55 bp, Artificial
  Synthetic oligonucleotide
cggtaggcgtctaatccacgctgatgtagccgcagacaggtgatgggatttacac

SEQ ID NO: 528949 - DNA, 55 bp, Artificial
  Synthetic oligonucleotide
cggtatcgtcatcagaacgtattccagacttagctgtggaggatgtgatgagcca

SEQ ID NO: 528950 - DNA, 55 bp, Artificial
  Synthetic oligonucleotide
cgtcgagacgcggtttactttacgaatatgctggacgctcgacccaataacggcc

SEQ ID NO: 528951 - DNA, 55 bp, Artificial
  Synthetic oligonucleotide
cgtcgcgcagattacttgccatagatactgggtcacctcgccaccgcgcgtcgtc

SEQ ID NO: 528952 - DNA, 55 bp, Artificial
  Synthetic oligonucleotide
cgtcgtgataacgtcaagaccattttgactcgtgatctgcccttcccatccgatc

SEQ ID NO: 528953 - DNA, 55 bp, Artificial; identical to SEQ ID NO: 339444
  Synthetic oligonucleotide

SEQ ID NO: 528954 - DNA, 55 bp, Artificial
  Synthetic oligonucleotide
gccgtcgtctgtccacggaagcgacggagttcttaacagtaagccccatcggacc

SEQ ID NO: 528955 - DNA, 55 bp, Artificial
  Synthetic oligonucleotide
gccgtcgtctgtctgcggaagcggcggagttcttaacagcaagtaccatcggacc

SEQ ID NO: 528956 - DNA, 55 bp, Artificial
  Synthetic oligonucleotide
acatccttcagacgcgcgatttacactcattgtgcatgccaactcctgacgcgcc

SEQ ID NO: 528957 - DNA, 55 bp, Artificial
  Synthetic oligonucleotide
tctcttcatgagttcaacgtaatcctgcgtgcgcgtgaggcaggcgtctcaatcg

SEQ ID NO: 528958 - DNA, 55 bp, Artificial
  Synthetic oligonucleotide
cgtcttcgatgaaacaaggtaacactcttgatgtatgtaagagactgctctttca

SEQ ID NO: 528959 - DNA, 55 bp, Artificial; identical to SEQ ID NO: 463746
  Synthetic oligonucleotide

SEQ ID NO: 528960 - DNA, 55 bp, Artificial
  Synthetic oligonucleotide
tctcggtactaatcgtttagaaagaagaggctcctatttgactgcttacagtcca

SEQ ID NO: 528961 - DNA, 55 bp, Artificial
  Synthetic oligonucleotide
ccctatacataccaacgtgaaagctcggacgggccgacgacgcgcgtcactctgc

SEQ ID NO: 528962 - DNA, 55 bp, Artificial
  Synthetic oligonucleotide
gccgtcgttgcccagagagctaagaatcgtgacaggtttgaggcccgcttgcgtc

SEQ ID NO: 528963 - DNA, 55 bp, Artificial
  Synthetic oligonucleotide
cgtgaacccaaacgcatcggccaaggaagttgagactcagattggaagagaaagg

SEQ ID NO: 528964 - DNA, 55 bp, Artificial
  Synthetic oligonucleotide
caaaggataaaccaattcaaacgtcgacactatgtttatattacccaacggaagc

SEQ ID NO: 528965 - DNA, 55 bp, Artificial
  Synthetic oligonucleotide
tctacgtatctaataccacaaccaggagcgcctacagatatgtatgagctgcgga

SEQ ID NO: 528966 - DNA, 55 bp, Artificial
  Synthetic oligonucleotide
tctacgcagctacgcatataggaaagcgattatattacacggaagtgaagcggag

SEQ ID NO: 528967 - DNA, 55 bp, Artificial
  Synthetic oligonucleotide
tctaacccctggttccactgcctcttcttcaattaattacgttcggctcgtgtct

SEQ ID NO: 528968 - DNA, 55 bp, Artificial
  Synthetic oligonucleotide
tcgttgcatatgacggtcaggctccagttaatgtgaataatcctggcgcgggacc

SEQ ID NO: 528969 - DNA, 55 bp, Artificial
  Synthetic oligonucleotide
ccctacgattacggaagatgggtaaaatcatcaaatcactaagccgattcggcaa

SEQ ID NO: 528970 - DNA, 55 bp, Artificial
  Synthetic oligonucleotide
cgtgagactttcgtaaacgccctagggttgaaggaaagtgatgatcccgcagcaa

SEQ ID NO: 528971 - DNA, 55 bp, Artificial
  Synthetic oligonucleotide
tgaagctgaatcaacaatggttaaagagtacaggcagaaaattgatgcactaaag

SEQ ID NO: 528972 - DNA, 55 bp, Artificial
  Synthetic oligonucleotide
cgtataacccgattatatcgtgcacttcaaaccgaggaagaattgcgtaccgctg

SEQ ID NO: 528973 - DNA, 55 bp, Artificial
  Synthetic oligonucleotide
tgaagcgactacggagagatgggaagagtggaagtttgagagtgtgagtgtaacc

SEQ ID NO: 528974 - DNA, 55 bp, Artificial
  Synthetic oligonucleotide
cgtatatggaggtccaacccatatccctgtctgcggggcacgttgattgcagcgg

SEQ ID NO: 528975 - DNA, 55 bp, Artificial
  Synthetic oligonucleotide
acacgtgagtatatccatgatgtgatagtgattcaagtaggcagacctggagagc

SEQ ID NO: 528976 - DNA, 55 bp, Artificial; identical to SEQ ID NO: 375596
  Synthetic oligonucleotide

SEQ ID NO: 528977 - DNA, 55 bp, Artificial
  Synthetic oligonucleotide
ccgaaatttacggtgaatgtcaaaggtgaattagacgtacctccaatcacagcag

SEQ ID NO: 528978 - DNA, 55 bp, Artificial
  Synthetic oligonucleotide
cgtattgtcaaatcaagatagggagaaacttcgctttgagagcggttgcaacacc

SEQ ID NO: 528979 - DNA, 55 bp, Artificial
  Synthetic oligonucleotide
cgtcacactacagaaatctgttcatggaatcatggcgtgggtggtcaaagtcagc

SEQ ID NO: 528980 - DNA, 55 bp, Artificial
  Synthetic oligonucleotide
cacactgtcacaacttttcctgactaaaggatggtcgacaaattccgtctacttc

SEQ ID NO: 528981 - DNA, 55 bp, Artificial
  Synthetic oligonucleotide
tgaaatgccggacttaccaggtgtaatgaggtccaattatgacatacgtgagctc

SEQ ID NO: 528982 - DNA, 55 bp, Artificial
  Synthetic oligonucleotide
acagacgctgcacattgaacccgcgaatgcactcgaacacgagtcgtgcccgcgt

SEQ ID NO: 528983 - DNA, 55 bp, Artificial
  Synthetic oligonucleotide
ccctttggtgttcttctctccctcagccattcgttgggcgattgatcattcatgc

SEQ ID NO: 528984 - DNA, 55 bp, Artificial
  Synthetic oligonucleotide
cgtcaggataccgcgtgaagtcacaaagaacatagacgtcaaagcattcgagtcg

SEQ ID NO: 528985 - DNA, 55 bp, Artificial
  Synthetic oligonucleotide
acagatgcatattctgagaggaccattgcattttcaacgtcgagctatattgggg

SEQ ID NO: 528986 - DNA, 55 bp, Artificial
  Synthetic oligonucleotide
cgtccatcggccaccaaaggattaaaccagagtatggaactcagaacgcacgcat

SEQ ID NO: 528987 - DNA, 55 bp, Artificial
  Synthetic oligonucleotide
tcttgtggaagacagacatagtccaacatcattaatacaggtggtacgtaactgt

SEQ ID NO: 528988 - DNA, 55 bp, Artificial
  Synthetic oligonucleotide
gatggacaagcgccagtgaatgttaacaacccaggagtagcaccagggatgattg

SEQ ID NO: 528989 - DNA, 55 bp, Artificial
  Synthetic oligonucleotide
cccttccagtgcagaagatcaaattaactggaaccgaacatctcggccgagcgag

SEQ ID NO: 528990 - DNA, 55 bp, Artificial
  Synthetic oligonucleotide
tcttcggcattactcctcgcacctggcgatctgatcgttaaagcaaagcgtgagc

SEQ ID NO: 528991 - DNA, 55 bp, Artificial
  Synthetic oligonucleotide
acagctgatccaaccacagcaccacaaactgagcgaatgatgcgtattaattgga

SEQ ID NO: 528992 - DNA, 55 bp, Artificial
  Synthetic oligonucleotide
acagctgatcccacaacttctccacaaacagaacgaatgatgcgcgtaaactgga

SEQ ID NO: 528993 - DNA, 55 bp, Artificial
  Synthetic oligonucleotide
tcttatggggagtccgttaaacaggcggtgttactcaatgttctgggtgccggtg

SEQ ID NO: 528994 - DNA, 55 bp, Artificial
  Synthetic oligonucleotide
cgctcctagcgtaaataggctgatgccataccgaatctctaacgccgagcggcag

SEQ ID NO: 528995 - DNA, 55 bp, Artificial
  Synthetic oligonucleotide
ccggaggagaagaaattcgcagcggttctgttaatgacaggttgcgatatcgtcg

SEQ ID NO: 528996 - DNA, 55 bp, Artificial
  Synthetic oligonucleotide
cgctcgacccaataacggccaacgagtgatcttggaccggatcatcatgcagcaa

SEQ ID NO: 528997 - DNA, 55 bp, Artificial
  Synthetic oligonucleotide
aagtagagaaggttgcttatgcttcgtatgcggaggcgttcagagacgatttaag

SEQ ID NO: 528998 - DNA, 55 bp, Artificial
  Synthetic oligonucleotide
tgggaaggcggctgaacggtttgctgagagtgagattggatcagcggcaattgat

SEQ ID NO: 528999 - DNA, 55 bp, Artificial
  Synthetic oligonucleotide
ccggagctggaaacgcatacggaacccttatgaaagcatcatacaagcgaccgct

SEQ ID NO: 529000 - DNA, 55 bp, Artificial; identical to SEQ ID NO: 362595
  Synthetic oligonucleotide

SEQ ID NO: 529001 - DNA, 55 bp, Artificial
  Synthetic oligonucleotide
tggctacaagtggatcctggctcaatgtttcgatcaattcattccagctggactg

SEQ ID NO: 529002 - DNA, 55 bp, Artificial
  Synthetic oligonucleotide
ccggacagggaagatgtgatcatggccgaatttacgtggcagagactggcaaatg

SEQ ID NO: 529003 - DNA, 55 bp, Artificial
  Synthetic oligonucleotide
gagttggctacgctgaagagatgcgatatgtgcaacaactgtttgggagagttcc

SEQ ID NO: 529004 - DNA, 55 bp, Artificial
  Synthetic oligonucleotide
cgctgattcagagttagatatgtcggaattggcggacctgatacttaatgaatgg

SEQ ID NO: 529005 - DNA, 55 bp, Artificial
  Synthetic oligonucleotide
tggcctgctggcactgcacagagacaaccaactgtttcacttatgattactatac

SEQ ID NO: 529006 - DNA, 55 bp, Artificial
  Synthetic oligonucleotide
tggccgtaatgcaacgaaggcggtacaatcccactttccattcctttcacgtgct

SEQ ID NO: 529007 - DNA, 55 bp, Artificial
  Synthetic oligonucleotide
cgctgcacgagcgctcaccgttatgagatcttgcgtcacgctacaggatgcgaga

SEQ ID NO: 529008 - DNA, 55 bp, Artificial
  Synthetic oligonucleotide
cgctgtcaacactcgtgttaacgctatcggagctgctgttcatttggttactaag

SEQ ID NO: 529009 - DNA, 55 bp, Artificial
  Synthetic oligonucleotide
cgctgtcaagtgacatgagtgtggcattcaaacttaacggtacatcagcggagat

SEQ ID NO: 529010 - DNA, 55 bp, Artificial
  Synthetic oligonucleotide
cgcttatgtaaagcgaagggcagatggagcggatatactgaaccgagtaactcgg

SEQ ID NO: 529011 - DNA, 55 bp, Artificial
  Synthetic oligonucleotide
tggatggatgaagatgaagcgaaggtcaacgatgaggttgatgaagctacagcgg

SEQ ID NO: 529012 - DNA, 55 bp, Artificial
  Synthetic oligonucleotide
cacataatgcgagagaacggcttgtatgctgaagacgaagagccgcgagcagact

SEQ ID NO: 529013 - DNA, 55 bp, Artificial
  Synthetic oligonucleotide
gcccttgacattttagataaagcaatgtcaaatcaaacgggcgcaacaatggcgc

SEQ ID NO: 529014 - DNA, 55 bp, Artificial
  Synthetic oligonucleotide
gagctgccgtcgtctgtctgcggaagcggcggagttcttaacagtaagccccatc

SEQ ID NO: 529015 - DNA, 55 bp, Artificial
  Synthetic oligonucleotide
tggatgactcgctgtcggcggtgccatacatctatgtaccaatcagagaaggcca

SEQ ID NO: 529016 - DNA, 55 bp, Artificial
  Synthetic oligonucleotide
aataaacagatacaatgggttgaccctgcgaggcgtaacaatgcggccgacttcg

SEQ ID NO: 529017 - DNA, 55 bp, Artificial
  Synthetic oligonucleotide
cgcggcaattgatggactagtccaaggtagcgttcactcgatcatgaccggggag

SEQ ID NO: 529018 - DNA, 55 bp, Artificial
  Synthetic oligonucleotide
cgcgtactcgcttggtatatacccgagtcacaatggacggaaaatggatggtgca

SEQ ID NO: 529019 - DNA, 55 bp, Artificial
  Synthetic oligonucleotide
gccctcgacattctggataaggcgatgtcaaatcaaactggtgccacgatggctc

SEQ ID NO: 529020 - DNA, 55 bp, Artificial
  Synthetic oligonucleotide
ccggtcttcgaacgtgctaaacatcagacgcagaattgaagaatctagaagacgt

SEQ ID NO: 529021 - DNA, 55 bp, Artificial
  Synthetic oligonucleotide
gatctggaaacgtggtaaggcattagctgctccctgcatcgattacatcaaactt

SEQ ID NO: 529022 - DNA, 55 bp, Artificial
  Synthetic oligonucleotide
cgcgtgcagcgcatacgtgtgtgcacgtctgattattcgaacgtcagggaagagt

SEQ ID NO: 529023 - DNA, 55 bp, Artificial
  Synthetic oligonucleotide
gccctcttgacttagacgcccatgtcgcgtcacatggcttgcatggtaatatgac

SEQ ID NO: 529024 - DNA, 55 bp, Artificial
  Synthetic oligonucleotide
ccggtagcgtctaaaccacgctgatgtagccgcggataggggaagggatttacac

SEQ ID NO: 529025 - DNA, 55 bp, Artificial
  Synthetic oligonucleotide
cgcgtgtggttcaagccttaatcccgtttaactaatccggtcagcaccggacgtt

SEQ ID NO: 529026 - DNA, 55 bp, Artificial
  Synthetic oligonucleotide
aagcggaaaacattatgtggacaaatagcagcgagacaatcattaccgtattgtc

SEQ ID NO: 529027 - DNA, 55 bp, Artificial
  Synthetic oligonucleotide
tggtcagcacaggggcgtgagcaaaagctgtacgatctaaccagatcaaatgcag

SEQ ID NO: 529028 - DNA, 55 bp, Artificial
  Synthetic oligonucleotide
cgctaaacgaatgggcagaaggtgaaaatccatacaagccaaaagaagtgactgc

SEQ ID NO: 529029 - DNA, 55 bp, Artificial
  Synthetic oligonucleotide
cgctaatacaacagttggccgacgactatggacatgctcctctgggacttgcgtg

SEQ ID NO: 529030 - DNA, 55 bp, Artificial
  Synthetic oligonucleotide
tggtagagtatggtggtcaaatccttatccatgtctacgtggcgcgctgatcgcg

SEQ ID NO: 529031 - DNA, 55 bp, Artificial
  Synthetic oligonucleotide
aaggatgggacaaaacaatctcagcacagccggacatgatggtgtgtggtggcgc

SEQ ID NO: 529032 - DNA, 55 bp, Artificial
  Synthetic oligonucleotide
ccggatgataaggagttaaggaaagttgtgaatactttaggattgagcgaaccta

SEQ ID NO: 529033 - DNA, 55 bp, Artificial
  Synthetic oligonucleotide
tgggtatcgagattgcagactactgtattcgccaggaggatggaatgttcacaga

SEQ ID NO: 529034 - DNA, 55 bp, Artificial
  Synthetic oligonucleotide
aaggggagcgcattaaagtatatctcccttggcggactctggaacgattggggcg

SEQ ID NO: 529035 - DNA, 55 bp, Artificial
  Synthetic oligonucleotide
cacatgcgctcttccctagccttttaacataccgtgttgtggcggattaaacctg

SEQ ID NO: 529036 - DNA, 55 bp, Artificial
  Synthetic oligonucleotide
gatgaatagtacattgcatacaatactagaagacccaggaatggcgtattttcct

SEQ ID NO: 529037 - DNA, 55 bp, Artificial
  Synthetic oligonucleotide
cggagttcctacatctaatcgatcacctctaaagggtccagggtaccttcacggc

SEQ ID NO: 529038 - DNA, 55 bp, Artificial
  Synthetic oligonucleotide
aatctaccactcagactctcagcccagcgtcatcgattttgggtaagctgcgacc

SEQ ID NO: 529039 - DNA, 55 bp, Artificial
  Synthetic oligonucleotide
aatctaccgattactggatccatggatatgaactatcagaatgcatcaacttcag

SEQ ID NO: 529040 - DNA, 55 bp, Artificial
  Synthetic oligonucleotide
ccgatctcccaggtgtccaaccctttctggacatgtactatgccacagtcccacg

SEQ ID NO: 529041 - DNA, 55 bp, Artificial
  Synthetic oligonucleotide
aatctcgcgatcgcaatcctttcacgcctctttgacgtctactgcgcgatgtcac

SEQ ID NO: 529042 - DNA, 55 bp, Artificial
  Synthetic oligonucleotide
ccgatatgtgtcattagaagatgaatcgaaaggttgcaaccacacgagggtgcat

SEQ ID NO: 529043 - DNA, 55 bp, Artificial
  Synthetic oligonucleotide
tgcggagttttattcgcagtcaaatcagttattatcgtatggcgacgttacaagg

SEQ ID NO: 529044 - DNA, 55 bp, Artificial
  Synthetic oligonucleotide
ccgatacggggaaaaggagaacgactcggagattcgattcggacgcgcctcggga

SEQ ID NO: 529045 - DNA, 55 bp, Artificial
  Synthetic oligonucleotide
tgcggaagatgggtaaaatcatcaaatcactaagccgtttcggcaagacggttgg

SEQ ID NO: 529046 - DNA, 55 bp, Artificial
  Synthetic oligonucleotide
cggcactggccttagttggcgggcaccttgcgatggtgtcgccggggaattaaga

SEQ ID NO: 529047 - DNA, 55 bp, Artificial
  Synthetic oligonucleotide
tgcgcgtcgaatcttcagtgttgagggtaaggaatcctacgttacatgagacggc

SEQ ID NO: 529048 - DNA, 55 bp, Artificial
  Synthetic oligonucleotide
cggcagaattggggatcattactacacgacaagctgctacaccggagccgaagcg

SEQ ID NO: 529049 - DNA, 55 bp, Artificial
  Synthetic oligonucleotide
ccgagtacattaataacgggttacctccgattcagaatacacgaaacattgttcc

SEQ ID NO: 529050 - DNA, 55 bp, Artificial
  Synthetic oligonucleotide
tgcctccgggtgattatactctgacacctctgtaactcattacccctcgtgagcg

SEQ ID NO: 529051 - DNA, 55 bp, Artificial
  Synthetic oligonucleotide
cggcgataggcctacagcgcgccagacagagccaccagcgcagaaagaagagtct

SEQ ID NO: 529052 - DNA, 55 bp, Artificial
  Synthetic oligonucleotide
cggcgattgacggaatagttcaaggtagcgttcactcaatcatgaccggggagtc

SEQ ID NO: 529053 - DNA, 55 bp, Artificial
  Synthetic oligonucleotide
cggcgcaaaagatatataaaacaatcggtaaagccgcagagcgtttcgcagagag

SEQ ID NO: 529054 - DNA, 55 bp, Artificial
  Synthetic oligonucleotide
aatggctgacataagacttgacatagcgcccgatcttatccataatggtgtgcct

SEQ ID NO: 529055 - DNA, 55 bp, Artificial
  Synthetic oligonucleotide
cggcgtaaagagaaaggcgaaccacgggctaaggcagtgatgaaaggagatcgga

SEQ ID NO: 529056 - DNA, 55 bp, Artificial
  Synthetic oligonucleotide
tgcagctattgtggaggcaacgaggtagtcgctagctttatattgccgatcaccc

SEQ ID NO: 529057 - DNA, 55 bp, Artificial
  Synthetic oligonucleotide
aatgggtgagtgagctgatgtggtcgccaggacacgtgccggtgtcttggtggtg

SEQ ID NO: 529058 - DNA, 55 bp, Artificial
  Synthetic oligonucleotide
cggcgtgggaagctaccgctgacccctcggagatcggcttcacacgtgacgtata

SEQ ID NO: 529059 - DNA, 55 bp, Artificial
  Synthetic oligonucleotide
gagttcgataaacagttaaagcctaacccgaataatttagtgcaggatgtctcgg

SEQ ID NO: 529060 - DNA, 55 bp, Artificial
  Synthetic oligonucleotide
gccgaatttaccaggtgtaatgaggtccaattatgatatacgtgagcttcgacaa

SEQ ID NO: 529061 - DNA, 55 bp, Artificial
  Synthetic oligonucleotide
ccgcggactaaggcggtgatgaaaggggatcggaaacatggaaggaatagccgag

SEQ ID NO: 529062 - DNA, 55 bp, Artificial
  Synthetic oligonucleotide
tggagcaaaagcaaaggagattcactaagaacgtattcgttctggaccaaaagcg

SEQ ID NO: 529063 - DNA, 55 bp, Artificial
  Synthetic oligonucleotide
ccgcgcagaatatgcttcaggtcctcggcccatgggaacgtgacgttcgtgagct

SEQ ID NO: 529064 - DNA, 55 bp, Artificial
  Synthetic oligonucleotide
aatagcaatgtcgcaactcattgatctagctttattgccattagacatgttctcc

SEQ ID NO: 529065 - DNA, 55 bp, Artificial
  Synthetic oligonucleotide
ccgcagtggtttaagagtctaaatcctatgcttggagtagtaaatctaggagcga

SEQ ID NO: 529066 - DNA, 55 bp, Artificial
  Synthetic oligonucleotide
cggaagcggcggagttctttacagtaagccccatcggacctgatggctgactgag

SEQ ID NO: 529067 - DNA, 55 bp, Artificial
  Synthetic oligonucleotide
cggaattcttccacgaaatggtcaaagcgtattaagtcctactcgcgccattgcg

SEQ ID NO: 529068 - DNA, 55 bp, Artificial
  Synthetic oligonucleotide
cggacgacggcggctcatgagcttaaggttcccctgcagcagaggcccatgatac

SEQ ID NO: 529069 - DNA, 55 bp, Artificial
  Synthetic oligonucleotide
gatgatttgtatagcactttcaaacgtaaagtcatagaacgaggatgggagcagc

SEQ ID NO: 529070 - DNA, 55 bp, Artificial
  Synthetic oligonucleotide
gatgcaacacgcaatgctggttccggtgaggtaccatccggtggagtcacttcag

SEQ ID NO: 529071 - DNA, 55 bp, Artificial
  Synthetic oligonucleotide
cacaggcgctgaggcattggtcacgaccgccattcatatacatcgatggattaga

SEQ ID NO: 529072 - DNA, 55 bp, Artificial
  Synthetic oligonucleotide
ccgatttcaatttacattgggtgggagaattgttgctacagtagatcgtactgga

SEQ ID NO: 529073 - DNA, 55 bp, Artificial
  Synthetic oligonucleotide
tgctccgacgcttggtggtcaggcgggtgaaatggagtccatgtcgcttgggata

SEQ ID NO: 529074 - DNA, 55 bp, Artificial
  Synthetic oligonucleotide
cacaggaagagactttccttacatcaactctgtgtctgtattatccaaacgaagc

SEQ ID NO: 529075 - DNA, 55 bp, Artificial
  Synthetic oligonucleotide
aatccatatgaaccgtcagaagtgactgcgtctatgtgagaggttgagttgccgt

SEQ ID NO: 529076 - DNA, 55 bp, Artificial
  Synthetic oligonucleotide
aatcccgagataatctcaaaactaatgaactagacctctgaccgggtctactggg

SEQ ID NO: 529077 - DNA, 55 bp, Artificial
  Synthetic oligonucleotide
cggagttaagatattaggcgataagatagatgttcccctcttcttacgaaatgct

SEQ ID NO: 529078 - DNA, 55 bp, Artificial
  Synthetic oligonucleotide
aatcgccacaccggcgaaagattttggtaacttcggcctgtcacattattcccgc

SEQ ID NO: 529079 - DNA, 55 bp, Artificial
  Synthetic oligonucleotide
gcgtgagacggtgagactttggactcgatcggcattagacgattcagtggctaca

SEQ ID NO: 529080 - DNA, 55 bp, Artificial
  Synthetic oligonucleotide
gaagcgaataaatggatatcgatgggacaatcttgtaccataaaagtgtgcccat

SEQ ID NO: 529081 - DNA, 55 bp, Artificial
  Synthetic oligonucleotide
ggggatagtaccaccgtatacaaggaatgattttgataggagagaacttcctgag

SEQ ID NO: 529082 - DNA, 55 bp, Artificial
  Synthetic oligonucleotide
ggggagtgggcgctgaacaaatcacggtattaacgtcaggagctggagatgatcg

SEQ ID NO: 529083 - DNA, 55 bp, Artificial
  Synthetic oligonucleotide
cagtgtttacggtggcttgatctttagtgctttgaacttgatgagcggcggacat

SEQ ID NO: 529084 - DNA, 55 bp, Artificial; identical to SEQ ID NO: 427937
  Synthetic oligonucleotide

SEQ ID NO: 529085 - DNA, 55 bp, Artificial
  Synthetic oligonucleotide
ggggaataattcagttttcgagacgaaattagtccgtgatgagcaaatcgggagg

SEQ ID NO: 529086 - DNA, 55 bp, Artificial
  Synthetic oligonucleotide
ggggaacctacgcctcctacttagtcggcttgaagcaggacccgctttctttacc

SEQ ID NO: 529087 - DNA, 55 bp, Artificial
  Synthetic oligonucleotide
gggctgcgtataatgcgagactagctttccgatctaactcggcgtgatccgtgac

SEQ ID NO: 529088 - DNA, 55 bp, Artificial
  Synthetic oligonucleotide
gggctatgaaatttgcagttacgttaaaggaaccagttcccgatccgccggttcc

SEQ ID NO: 529089 - DNA, 55 bp, Artificial
  Synthetic oligonucleotide
gggcgttccttgaatcccatcctcccaacgggtgctagagcaacgcgctcgatgc

SEQ ID NO: 529090 - DNA, 55 bp, Artificial
  Synthetic oligonucleotide
gaggcgcgaatgcacggacatgacatcatccctcctgaggatatgtacagctcac

SEQ ID NO: 529091 - DNA, 55 bp, Artificial
  Synthetic oligonucleotide
gggcgtaagcttaattggagagattgacttgcccgagtttatgcgttacgcgtga

SEQ ID NO: 529092 - DNA, 55 bp, Artificial
  Synthetic oligonucleotide
gggcgctcctctgtcgtcgtggtcgagctcaggcatgagaggggagaagtcgatg

SEQ ID NO: 529093 - DNA, 55 bp, Artificial
  Synthetic oligonucleotide
gaagcgtttcgtgatgatgtgagattgagacagatcaaacgccatgtgaacgagc

SEQ ID NO: 529094 - DNA, 55 bp, Artificial
  Synthetic oligonucleotide
gggcactctactcatattcatctagtgttaagtgactgcgtcgctacggtgagcg

SEQ ID NO: 529095 - DNA, 55 bp, Artificial
  Synthetic oligonucleotide
gcagcatttacaatgtggaagttaacgtatctggaacataagctaatgccaattc

SEQ ID NO: 529096 - DNA, 55 bp, Artificial
  Synthetic oligonucleotide
gggattgcccaccggctacaggctgctctgcgtgccttcagactcggtcgataga

SEQ ID NO: 529097 - DNA, 55 bp, Artificial
  Synthetic oligonucleotide
gaagctgcggttgttgctgccacttcgacactagaattaatgggtattcaatatg

SEQ ID NO: 529098 - DNA, 55 bp, Artificial
  Synthetic oligonucleotide
gggatgcaggattatgcacgtcattcaagatcgtccccattgtaccagcgcaggt

SEQ ID NO: 529099 - DNA, 55 bp, Artificial
  Synthetic oligonucleotide
gggatatcaaaagcagtaaccagcaataccgcacgacagatcgtctcagcggcgg

SEQ ID NO: 529100 - DNA, 55 bp, Artificial
  Synthetic oligonucleotide
gggatataatggaagtgatactagaggacattacaacttctcattcacatgtcag

SEQ ID NO: 529101 - DNA, 55 bp, Artificial
  Synthetic oligonucleotide
gcagcgaacccaaacggcggaaaagagtactatgaagtggctggaaggttttcgg

SEQ ID NO: 529102 - DNA, 55 bp, Artificial
  Synthetic oligonucleotide
gaactgggaagtgaggggactagtcatgcaaaatatggatgggaaagtaccaaga

SEQ ID NO: 529103 - DNA, 55 bp, Artificial
  Synthetic oligonucleotide
gggtttggcccgatttcatacgttcgagtggacgaagatatgtggagtggagatg

SEQ ID NO: 529104 - DNA, 55 bp, Artificial
  Synthetic oligonucleotide
gggtttgatttgggaatcgacgtcgtacatttcgaagatttagcggctcattggc

SEQ ID NO: 529105 - DNA, 55 bp, Artificial
  Synthetic oligonucleotide
cagttggagatgattgataaactgaccactcgtgaaattgaacaagttgagttgc

SEQ ID NO: 529106 - DNA, 55 bp, Artificial
  Synthetic oligonucleotide
ggattgactttgcgtggagtcacgatgaggcccacctctctagctcaaaggaatg

SEQ ID NO: 529107 - DNA, 55 bp, Artificial
  Synthetic oligonucleotide
gggttcaaagctcgacgaaacgatctcgaagcggatttattaagtgtgattaaga

SEQ ID NO: 529108 - DNA, 55 bp, Artificial
  Synthetic oligonucleotide
gcagatgacccgagtatatatcgtaccttagcgccaattagttcggaccctatcg

SEQ ID NO: 529109 - DNA, 55 bp, Artificial
  Synthetic oligonucleotide
gggttaccgaaacagccaccattgtattacgagagattgaatgcggatggaccat

SEQ ID NO: 529110 - DNA, 55 bp, Artificial
  Synthetic oligonucleotide
gggtgtgttatccctggctgcaagcgggaggcgcgtgaacaggtgttccacgtct

SEQ ID NO: 529111 - DNA, 55 bp, Artificial
  Synthetic oligonucleotide
gaacttgtgccgcaatggtacaatcacttactgatgccaataacactacaagctt

SEQ ID NO: 529112 - DNA, 55 bp, Artificial
  Synthetic oligonucleotide
gaagaacctcacttgttaagaatgcgaacattcaaggatgtaataacgaaagagg

SEQ ID NO: 529113 - DNA, 55 bp, Artificial
  Synthetic oligonucleotide
gggtgtccgggtacggacgtcgggagaccttcgtacggttgtcgagcaatacgca

SEQ ID NO: 529114 - DNA, 55 bp, Artificial
  Synthetic oligonucleotide
gggtggcggaatgatcacacattcgaatagtaaatggcctgccatgaccatctca

SEQ ID NO: 529115 - DNA, 55 bp, Artificial
  Synthetic oligonucleotide
gcagatgcacgtgctacgtgggccgatacactttcagcgcagggcaatcttaggt

SEQ ID NO: 529116 - DNA, 55 bp, Artificial
  Synthetic oligonucleotide
caaggtttggaacaattgtagcgaggaattttgatacaattagactgtcatttca

SEQ ID NO: 529117 - DNA, 55 bp, Artificial
  Synthetic oligonucleotide
atcgaaagaattcatgacttctctttacaacgcgtcttcaaatgtgatcatcacc

SEQ ID NO: 529118 - DNA, 55 bp, Artificial
  Synthetic oligonucleotide
gggtacaatcggagtgttagcaacgcctgaagttccatttaccaccgagtgtgcg

SEQ ID NO: 529119 - DNA, 55 bp, Artificial
  Synthetic oligonucleotide
gagacaggacttgcaggattacgcaatgactacagcagtctcgctacgcgaatgg

SEQ ID NO: 529120 - DNA, 55 bp, Artificial
  Synthetic oligonucleotide
ggggtgagaaacgtgatgaaacaatacgtgcaagggaaacatcagtaatgttagt

SEQ ID NO: 529121 - DNA, 55 bp, Artificial; identical to SEQ ID NO: 407066
  Synthetic oligonucleotide

SEQ ID NO: 529122 - DNA, 55 bp, Artificial
  Synthetic oligonucleotide
ggggcgcgagtcagattgtataacgttcttaaacagaacttggttaagaccactg

SEQ ID NO: 529123 - DNA, 55 bp, Artificial
  Synthetic oligonucleotide
ggggcgacagcaggtaccgttaataattgggtggtagaggtgcagaaacaggagg

SEQ ID NO: 529124 - DNA, 55 bp, Artificial
  Synthetic oligonucleotide
gaagcaagaatcgtattagaagcgaatgtgatggaaattttggggatagctatca

SEQ ID NO: 529125 - DNA, 55 bp, Artificial
  Synthetic oligonucleotide
gcagggtatatacgtcccacaggatcggatgatgataatatcgtctgagcggcgt

SEQ ID NO: 529126 - DNA, 55 bp, Artificial
  Synthetic oligonucleotide
ggctgagctagcttgcttttgttatccccatttggagaacgatagctataaattt

SEQ ID NO: 529127 - DNA, 55 bp, Artificial
  Synthetic oligonucleotide
ggctgagagtcagtgcccaaaatttacacacgagtatgatcagctcgcggagagg

SEQ ID NO: 529128 - DNA, 55 bp, Artificial
  Synthetic oligonucleotide
caggttgaattactgaagcgtatctacgacaaattgatggtgcgatcgactggtg

SEQ ID NO: 529129 - DNA, 55 bp, Artificial
  Synthetic oligonucleotide
caggtgttgccaaaattgcgtgttgaattaactgctatgaagaggaaacgtgcgg

SEQ ID NO: 529130 - DNA, 55 bp, Artificial
  Synthetic oligonucleotide
gcgtgcaagccgcaatggaggtgcgtgtgccaaactttcactcctttatcgaggg

SEQ ID NO: 529131 - DNA, 55 bp, Artificial
  Synthetic oligonucleotide
caggtggaattgctaaaacgcattcacgataaattgatgatacgaacagtagacg

SEQ ID NO: 529132 - DNA, 55 bp, Artificial
  Synthetic oligonucleotide
caaggaggtgaagtcatcaacttagctgcacgcatgtcacagatgtgggcggaac

SEQ ID NO: 529133 - DNA, 55 bp, Artificial
  Synthetic oligonucleotide
gcgtggcgtccgacggatggcggtcagtacgcgacacaaactgatctagggatgg

SEQ ID NO: 529134 - DNA, 55 bp, Artificial
  Synthetic oligonucleotide
ggctagctacaattttagttgagccaaacgtaacatcagaaaccagaagttatac

SEQ ID NO: 529135 - DNA, 55 bp, Artificial
  Synthetic oligonucleotide
ggctacagctatgttgaccgaacacgacatactgatgcacaggtacacacagtgg

SEQ ID NO: 529136 - DNA, 55 bp, Artificial
  Synthetic oligonucleotide
ggctaacgctcatgttacatccttcggctcgcgtctattcaatcagatgtcagcg

SEQ ID NO: 529137 - DNA, 55 bp, Artificial
  Synthetic oligonucleotide
gaatcacatggtacgtaatcacttgtttaacgccgtccaagaggcgtgctacgtg

SEQ ID NO: 529138 - DNA, 55 bp, Artificial
  Synthetic oligonucleotide
gaatcagaggggatgcaggaagaagcgatacaggaaatagctggcatgagcgcgg

SEQ ID NO: 529139 - DNA, 55 bp, Artificial
  Synthetic oligonucleotide
atgatacgagattggcaggtctcgatgtggtgattcctactgttgtatagcgggg

SEQ ID NO: 529140 - DNA, 55 bp, Artificial
  Synthetic oligonucleotide
ggcgtacgaacataggcagtggtcggttccgattatattatatgctgatacctta

SEQ ID NO: 529141 - DNA, 55 bp, Artificial
  Synthetic oligonucleotide
ggcggtgaggatgagcatatcggaatttagcgaggtgccgttagacggattcgac

SEQ ID NO: 529142 - DNA, 55 bp, Artificial
  Synthetic oligonucleotide
atgatagagagttgcagctccatatactgagaggaccactacatttccagcgtag

SEQ ID NO: 529143 - DNA, 55 bp, Artificial
  Synthetic oligonucleotide
ggcgggagacgagattcctgatccgttaagcccaggggaacgcggcatccagatg

SEQ ID NO: 529144 - DNA, 55 bp, Artificial
  Synthetic oligonucleotide
attgctcaacatgcggttgtcgaaaagatgttagtttatgcaaagcatactaggg

SEQ ID NO: 529145 - DNA, 55 bp, Artificial
  Synthetic oligonucleotide
gcgtggttcctaccataattttggacatcccatggttgggagaggtaagaaagct

SEQ ID NO: 529146 - DNA, 55 bp, Artificial
  Synthetic oligonucleotide
ggcggacaacgacagagaatcgaagcattcaaattggatagtgagaggaagaggg

SEQ ID NO: 529147 - DNA, 55 bp, Artificial
  Synthetic oligonucleotide
ggcgcgtacgatactaccatccaacccagtgctgtttgacaatgttactggggcg

SEQ ID NO: 529148 - DNA, 55 bp, Artificial
  Synthetic oligonucleotide
gcgtgttgcctttgtctctaaaggcacgaacctaatcattttaccggtaggcgtc

SEQ ID NO: 529149 - DNA, 55 bp, Artificial
  Synthetic oligonucleotide
atgatgctggtcagcaagtttgtcccaattatgtcacgcttagatcatcagtcac

SEQ ID NO: 529150 - DNA, 55 bp, Artificial
  Synthetic oligonucleotide
gaaggatgagaaagcggacgagccttggcacataaagaatgatttgctggcggcg

SEQ ID NO: 529151 - DNA, 55 bp, Artificial
  Synthetic oligonucleotide
gggaggcagaaagggagaagatggaacgagccctaagtggtgggctcgatatggg

SEQ ID NO: 529152 - DNA, 55 bp, Artificial
  Synthetic oligonucleotide
gggaggaatgatggttacgccttgccccgtattttagatgtgtctatagcagcat

SEQ ID NO: 529153 - DNA, 55 bp, Artificial
  Synthetic oligonucleotide
gaaggccacgaaattgtccttcctggagtgtaggtggtaagcacctctgggtcaa

SEQ ID NO: 529154 - DNA, 55 bp, Artificial
  Synthetic oligonucleotide
cagtcgatcctgacgctgtcattaatcaagcaggaattacaaactcatcacgacc

SEQ ID NO: 529155 - DNA, 55 bp, Artificial
  Synthetic oligonucleotide
gaaggtcaaattgtgaacccaacgttcatctccaggtatcgccagatcgcgtact

SEQ ID NO: 529156 - DNA, 55 bp, Artificial
  Synthetic oligonucleotide
gaaggtgtgtaacatgcttagggcgagttactcgtggttcgtgaagaattggggc

SEQ ID NO: 529157 - DNA, 55 bp, Artificial; identical to SEQ ID NO: 349471
  Synthetic oligonucleotide

SEQ ID NO: 529158 - DNA, 55 bp, Artificial
  Synthetic oligonucleotide
cagtcacaacaaaggtggtacgaaacgttgctgagtatcaaattcgtacaggcgg

SEQ ID NO: 529159 - DNA, 55 bp, Artificial
  Synthetic oligonucleotide
gcagcgccagaagtcactcaacacggacggttcagacaacgagttggccagaaca

SEQ ID NO: 529160 - DNA, 55 bp, Artificial
  Synthetic oligonucleotide
gggacatcgaccaagcgataatcgatctggagaacgccagaagggatctagcgac

SEQ ID NO: 529161 - DNA, 55 bp, Artificial
  Synthetic oligonucleotide
gaagtggaatatgtgctgtttgatcatgaaattaactgggaagttagaggcttga

SEQ ID NO: 529162 - DNA, 55 bp, Artificial; identical to SEQ ID NO: 425970
  Synthetic oligonucleotide

SEQ ID NO: 529163 - DNA, 55 bp, Artificial
  Synthetic oligonucleotide
gggaaggatgacttcgtcgcgaagatgtgcgctgtcctgggatgcgaatatgttg

SEQ ID NO: 529164 - DNA, 55 bp, Artificial
  Synthetic oligonucleotide
gggaagatcttgcgagaggaagacaagaaaatgttggaattagcgagagcgttac

SEQ ID NO: 529165 - DNA, 55 bp, Artificial
  Synthetic oligonucleotide
gcagcggttgtcgctctgctgacatcggtttgtacgttgtcgagcgatatgagcg

SEQ ID NO: 529166 - DNA, 55 bp, Artificial
  Synthetic oligonucleotide
gcgtgaggcgagaactaatatgtttaaagaagtagaagctggtgttagctggaac

SEQ ID NO: 529167 - DNA, 55 bp, Artificial
  Synthetic oligonucleotide
gcagcgttcgattccaccctagctgaaaatgcaccaaacaatacgcaacgattcg

SEQ ID NO: 529168 - DNA, 55 bp, Artificial
  Synthetic oligonucleotide
cagtacggcagagtctacggtacacgcgaaggtaagcactgcatgacatccagac

SEQ ID NO: 529169 - DNA, 55 bp, Artificial
  Synthetic oligonucleotide
gcaggcttttattggtgatccaagcacaattatcacacaggcggcaccagtgctg

SEQ ID NO: 529170 - DNA, 55 bp, Artificial
  Synthetic oligonucleotide
atgagagacccatcccacgcgttcaatggtgtgaagctggagggcgacgctcgtc

SEQ ID NO: 529171 - DNA, 55 bp, Artificial
  Synthetic oligonucleotide
ggcttgctgatacttctagagcagctaaattggatgaggatgtaaacaaactaag

SEQ ID NO: 529172 - DNA, 55 bp, Artificial
  Synthetic oligonucleotide
ggctgttctatatatcatgtttgtcagtggtgcaatcaatatggtagatgctttc

SEQ ID NO: 529173 - DNA, 55 bp, Artificial
  Synthetic oligonucleotide
ggctgtgattaagggtaatcacttaccgataaagttagtcttacggttcgcgtgc

SEQ ID NO: 529174 - DNA, 55 bp, Artificial
  Synthetic oligonucleotide
catatccgcgcagcttcacgtgaggatcagaccaccccgcggcactggggcattt

SEQ ID NO: 529175 - DNA, 55 bp, Artificial
  Synthetic oligonucleotide
gaaatgccattaacctaaggtcagtaggtagagtggcgccccaaggtttgcgtcg

SEQ ID NO: 529176 - DNA, 55 bp, Artificial
  Synthetic oligonucleotide
gaaatgccggatttaccaggtgtaatgaggtccaattatgatatacgcgaacttc

SEQ ID NO: 529177 - DNA, 55 bp, Artificial
  Synthetic oligonucleotide
gcacatattgaggggtccgttgcatttccaacgacgcgcaatactaggcgcgtta

SEQ ID NO: 529178 - DNA, 55 bp, Artificial
  Synthetic oligonucleotide
gtaattatcaaataatggcgttacgcttcaccgtcgccacgggctaggctgtggc

SEQ ID NO: 529179 - DNA, 55 bp, Artificial
  Synthetic oligonucleotide
gcacattgcacacaataatggaagatccgggaatggcgtactttccttacattgc

SEQ ID NO: 529180 - DNA, 55 bp, Artificial
  Synthetic oligonucleotide
gcaccagaatgtgatgaaggtgcagttatgaatatcgctcaggcaatggctaaca

SEQ ID NO: 529181 - DNA, 55 bp, Artificial
  Synthetic oligonucleotide
atatctcatagacgaaacgcaaaagaaatatgaattacagagcgttgggtgttgc

SEQ ID NO: 529182 - DNA, 55 bp, Artificial
  Synthetic oligonucleotide
gtaacgaatcatgcactatcacaattcgaggaactccagatggcctgcgaactgg

SEQ ID NO: 529183 - DNA, 55 bp, Artificial
  Synthetic oligonucleotide
gcaccagtgaactggggacctggagaaacgaatgactcaacaacaatcgaaccag

SEQ ID NO: 529184 - DNA, 55 bp, Artificial
  Synthetic oligonucleotide
caagttgctggatttgactactcctgtgccattaatgcaccagctaatacgcaac

SEQ ID NO: 529185 - DNA, 55 bp, Artificial
  Synthetic oligonucleotide
gtaaacgaaaacatgaactctctccagaatgtaatttctcagcaacaagcgcata

SEQ ID NO: 529186 - DNA, 55 bp, Artificial; identical to SEQ ID NO: 391542
  Synthetic oligonucleotide

SEQ ID NO: 529187 - DNA, 55 bp, Artificial
  Synthetic oligonucleotide
gaacagcacactgcacacaatactggaagatccgggaatggcgtattttccttac

SEQ ID NO: 529188 - DNA, 55 bp, Artificial
  Synthetic oligonucleotide
gaacagcgatactgaatagaacaactctaccaaatatgcttccgccgatcttccc

SEQ ID NO: 529189 - DNA, 55 bp, Artificial
  Synthetic oligonucleotide
atatggtagattcaaatgtcccctacactatggtgaaagtggacccgtcaaccct

SEQ ID NO: 529190 - DNA, 55 bp, Artificial
  Synthetic oligonucleotide
gaacatccgacgagtgacgcaagtctggctcggatcgctggctccagatcaaaac

SEQ ID NO: 529191 - DNA, 55 bp, Artificial
  Synthetic oligonucleotide
atcaaagacctggacgctgtactggagacgacgcgaaccctcgtccgggaggaga

SEQ ID NO: 529192 - DNA, 55 bp, Artificial
  Synthetic oligonucleotide
gaacatcggacgagggatatcccggataatacgttggcggtaagcgttctatcga

SEQ ID NO: 529193 - DNA, 55 bp, Artificial
  Synthetic oligonucleotide
ggtttatttgtcttaatgacgacttgcctgtcccagcaagttatccaccagaagt

SEQ ID NO: 529194 - DNA, 55 bp, Artificial
  Synthetic oligonucleotide
gaggggacatgctcgcactatgcttggacgctctctgccgaacgtctgtgacgac

SEQ ID NO: 529195 - DNA, 55 bp, Artificial; identical to SEQ ID NO: 433371
  Synthetic oligonucleotide

SEQ ID NO: 529196 - DNA, 55 bp, Artificial
  Synthetic oligonucleotide
ggtttaagaacggcaatactgaataggacaaccttaccgaatatgcttccgccga

SEQ ID NO: 529197 - DNA, 55 bp, Artificial
  Synthetic oligonucleotide
ggttggtgtcatgctatccaggttagtatcgggtgcagagacaagaattaacatg

SEQ ID NO: 529198 - DNA, 55 bp, Artificial
  Synthetic oligonucleotide
gtatcaaattcaatcgatgatgtggcacacgcaacagcgtacttcaccgcaccaa

SEQ ID NO: 529199 - DNA, 55 bp, Artificial
  Synthetic oligonucleotide
atactgtgcgatgtcgccagagatcaacgcgcccgtggccgcccaaggaccgtta

SEQ ID NO: 529200 - DNA, 55 bp, Artificial
  Synthetic oligonucleotide
atacttcacttcgcccacgggagacccaaattggaagaaggtggcgcgcgaggcc

SEQ ID NO: 529201 - DNA, 55 bp, Artificial
  Synthetic oligonucleotide
gaaactgtaagaagttaggtccaagagagaacgtagctgtaatacaagttggtgg

SEQ ID NO: 529202 - DNA, 55 bp, Artificial
  Synthetic oligonucleotide
atagaacaacttattttgcaatgtagactgtaagcaacggctagaggttgtgacc

SEQ ID NO: 529203 - DNA, 55 bp, Artificial
  Synthetic oligonucleotide
gcacagcacgccgtagtagaaaagatgttatcacacgcgaaacatactcgagaat

SEQ ID NO: 529204 - DNA, 55 bp, Artificial
  Synthetic oligonucleotide
gtaggatgcggcgatttacgcaccttgatgctgtttaagaaacgttcgcctgggc

SEQ ID NO: 529205 - DNA, 55 bp, Artificial
  Synthetic oligonucleotide
gaaagaagccgctcctagcgcaaatcggctggagaggttgcgtgaggcaagagtg

SEQ ID NO: 529206 - DNA, 55 bp, Artificial
  Synthetic oligonucleotide
gaaagaagccgcttccagcgtaagtcggctggaggggttgcgtgaagcaagagcg

SEQ ID NO: 529207 - DNA, 55 bp, Artificial
  Synthetic oligonucleotide
gtagataaatcattgcttgagcggggtgggttagggagggaagacattctacatc

SEQ ID NO: 529208 - DNA, 55 bp, Artificial
  Synthetic oligonucleotide
cactgattcgctcatttctcctcggaatatcagagtgtgcgttggcatcgacccg

SEQ ID NO: 529209 - DNA, 55 bp, Artificial
  Synthetic oligonucleotide
gtagagggtgcgctctgtatcatgtgtgtcaatggtgcagtcagtataatcggtg

SEQ ID NO: 529210 - DNA, 55 bp, Artificial
  Synthetic oligonucleotide
catattagcgcgaactaacctattcgatttggatgaaggaccgggagggaaggtg

SEQ ID NO: 529211 - DNA, 55 bp, Artificial
  Synthetic oligonucleotide
gaaagagaaaatagaacgtggagaagtcgaagtggatgatgcattcattgaagaa

SEQ ID NO: 529212 - DNA, 55 bp, Artificial
  Synthetic oligonucleotide
gtactgtaaggggatgggaatcgtccaaccgtatatgaggaatgattttgaccga

SEQ ID NO: 529213 - DNA, 55 bp, Artificial
  Synthetic oligonucleotide
gcgtaagtgtagaaatgaatacttactggaatggtacaaccatctattgcttcca

SEQ ID NO: 529214 - DNA, 55 bp, Artificial
  Synthetic oligonucleotide
gaaagcgatgagatgagtttagtaccataccaggagatgactagaccgccaagtt

SEQ ID NO: 529215 - DNA, 55 bp, Artificial
  Synthetic oligonucleotide
gtacgtaaattagtggatgcggtaaaccatgcatggggtgtcgagaagatcaggt

SEQ ID NO: 529216 - DNA, 55 bp, Artificial
  Synthetic oligonucleotide
gcgtacaatcgtgtactacatggggatctccatataatggcgggaacgtgctacg

SEQ ID NO: 529217 - DNA, 55 bp, Artificial
  Synthetic oligonucleotide
gtaccatgctcaggagtaatgacagccatatacttgcctgcaccgggtgaattac

SEQ ID NO: 529218 - DNA, 55 bp, Artificial
  Synthetic oligonucleotide
gaaagtaaatgtgcaggccctcatttatcctttcagcggacaaatcacagacatt

SEQ ID NO: 529219 - DNA, 55 bp, Artificial
  Synthetic oligonucleotide
gaaagtgatgagatgagtctagtaccgtatcaggagataaccaggccaccgagtt

SEQ ID NO: 529220 - DNA, 55 bp, Artificial
  Synthetic oligonucleotide
gcacatactgaggggcccattacattttcagcggcgagctatattaggtgcgctc

SEQ ID NO: 529221 - DNA, 55 bp, Artificial
  Synthetic oligonucleotide
ggtgactgtcattcactcgttattcgattcgctaaacgcaaaccttattttcgct

SEQ ID NO: 529222 - DNA, 55 bp, Artificial
  Synthetic oligonucleotide
ggtgacaatatgatctataaacacagacagtggtccatcccattactattgtacg

SEQ ID NO: 529223 - DNA, 55 bp, Artificial
  Synthetic oligonucleotide
attggcggacctgatacttaatgaatggttatgcaatccaatggacataacgctg

SEQ ID NO: 529224 - DNA, 55 bp, Artificial
  Synthetic oligonucleotide
caagtcgcgatgcaattaattgaagacttgtaactccaacctgagagaccactag

SEQ ID NO: 529225 - DNA, 55 bp, Artificial
  Synthetic oligonucleotide
ggtgaatctgggcgcgacatttctgatgatggtttgcgctagaagcgagagaggg

SEQ ID NO: 529226 - DNA, 55 bp, Artificial; identical to SEQ ID NO: 406905
  Synthetic oligonucleotide

SEQ ID NO: 529227 - DNA, 55 bp, Artificial
  Synthetic oligonucleotide
gcagagcgtagggagttgtgagcgtgtcgcttttgtctctaagggcacgaacctg

SEQ ID NO: 529228 - DNA, 55 bp, Artificial
  Synthetic oligonucleotide
gcagaggaggcgggacgccacaaggaaaccagtgactggcgacactggccttgat

SEQ ID NO: 529229 - DNA, 55 bp, Artificial
  Synthetic oligonucleotide
ggtcgcgaagcaggttaaactaaaggatgaacggtttatgagcttatcgagcgct

SEQ ID NO: 529230 - DNA, 55 bp, Artificial
  Synthetic oligonucleotide
ggtccgactcatataacggtgtttcagtccaatatcttgatggcagactaggtcg

SEQ ID NO: 529231 - DNA, 55 bp, Artificial
  Synthetic oligonucleotide
ggtcccatcgctatgcagagacggacgatcttgaacgcgattatgcatggtgcgg

SEQ ID NO: 529232 - DNA, 55 bp, Artificial
  Synthetic oligonucleotide
gaactaaagaagcgtaagatggccagaccccacgcgatgaagaatgacgtaacgc

SEQ ID NO: 529233 - DNA, 55 bp, Artificial
  Synthetic oligonucleotide
ggtcacgcctgtggtttgcggcccagatatgatccaggtttcactgaacgcggga

SEQ ID NO: 529234 - DNA, 55 bp, Artificial
  Synthetic oligonucleotide
gcgtcagattaagaagcatgtgaacgaacaagtattgcccaaaatgcgcgtggaa

SEQ ID NO: 529235 - DNA, 55 bp, Artificial
  Synthetic oligonucleotide
gcgtcatctcagactacagttaatttatacattcgtaagcatttgctgactcgac

SEQ ID NO: 529236 - DNA, 55 bp, Artificial
  Synthetic oligonucleotide
ggtattgagacccgagtttgcaatacatggtgtgaatccaatgcctggcccgctc

SEQ ID NO: 529237 - DNA, 55 bp, Artificial
  Synthetic oligonucleotide
gaactaccgataacagcgaaattactacaccatccaaccactgagattagatctg

SEQ ID NO: 529238 - DNA, 55 bp, Artificial
  Synthetic oligonucleotide
ggtagttctaaccgatgtgattgttgactataacattgtcactttagccaattgg

SEQ ID NO: 529239 - DNA, 55 bp, Artificial
  Synthetic oligonucleotide
ggtaggtttgaccgtgctcagatgatgaatggagcgatgtctgaatgggtggacg

SEQ ID NO: 529240 - DNA, 55 bp, Artificial
  Synthetic oligonucleotide
gaactacgaaacggaggattgcgaccacacacggtggagaataaattacgacatg

SEQ ID NO: 529241 - DNA, 55 bp, Artificial
  Synthetic oligonucleotide
caagtaggaggttcaaatatactcgatattacagcagatccaactacagctccac

SEQ ID NO: 529242 - DNA, 55 bp, Artificial; identical to SEQ ID NO: 350003
  Synthetic oligonucleotide

SEQ ID NO: 529243 - DNA, 55 bp, Artificial
  Synthetic oligonucleotide
ggtaattcctactgttgtatagcgggggagggtttgccgatctcaacacactcac

SEQ ID NO: 529244 - DNA, 55 bp, Artificial
  Synthetic oligonucleotide
ggtaatagagacttgtcaaacctggaggactttcgagttgcatatactacgcctc

SEQ ID NO: 529245 - DNA, 55 bp, Artificial
  Synthetic oligonucleotide
ggtaaagactacaagaagggcactgttgatccagataaccagaagctggtgctcc

SEQ ID NO: 529246 - DNA, 55 bp, Artificial
  Synthetic oligonucleotide
ggttggtaatgtattgagctctaacacggcaaagaagatttactcaacaatcgga

SEQ ID NO: 529247 - DNA, 55 bp, Artificial
  Synthetic oligonucleotide
ggttgatgtttacagggatgaaacgtcagcacagataattgagattgagcggagc

SEQ ID NO: 529248 - DNA, 55 bp, Artificial
  Synthetic oligonucleotide
gagggattgcaagatgaagcaatacaggaaatagcagggatgagtgcagaggtgc

SEQ ID NO: 529249 - DNA, 55 bp, Artificial
  Synthetic oligonucleotide
ggttcgccacctccgatgatgctacgctggcgcatatatacgaatgggctagtga

SEQ ID NO: 529250 - DNA, 55 bp, Artificial
  Synthetic oligonucleotide
ggttcaatgcattatgacatatctttctcagatctgcgtggaaacgcgcaacgga

SEQ ID NO: 529251 - DNA, 55 bp, Artificial
  Synthetic oligonucleotide
cataccatctgagctaaccagatagagtggcgctccaaggtcatcatgatgtgag

SEQ ID NO: 529252 - DNA, 55 bp, Artificial
  Synthetic oligonucleotide
gagaccgttactacagctaacaccgaggtgaacacctacctcttttgcacgtggc

SEQ ID NO: 529253 - DNA, 55 bp, Artificial
  Synthetic oligonucleotide
ggtgtttcttagatgaagaaccccatttgctgagaatgcgaacattcaaagatgt

SEQ ID NO: 529254 - DNA, 55 bp, Artificial
  Synthetic oligonucleotide
gaacctggctaactacgttcgacaaccgaacatcagcattaaatctcctgacttc

SEQ ID NO: 529255 - DNA, 55 bp, Artificial
  Synthetic oligonucleotide
ggtgtggatatgagggcaggacggataatcgcatgggatggacaagcggttctgc

SEQ ID NO: 529256 - DNA, 55 bp, Artificial
  Synthetic oligonucleotide
caagtgatatgagtgtggccttcaaaataaatgggaccaaaacagaagtgccttc

SEQ ID NO: 529257 - DNA, 55 bp, Artificial
  Synthetic oligonucleotide
ggtgtccttaaatgcaggagcccgaggagacatacaacagatctttcaaggtcgt

SEQ ID NO: 529258 - DNA, 55 bp, Artificial
  Synthetic oligonucleotide
ggtggctcagatgtgttagatattacagcggatccaactactacaccacaaactg

SEQ ID NO: 529259 - DNA, 55 bp, Artificial
  Synthetic oligonucleotide
cactggcggaggataccacgcacttgtaggaagagccactggaaagatggctgtc

SEQ ID NO: 529260 - DNA, 55 bp, Artificial
  Synthetic oligonucleotide
ggtgctggagatgacattccagatccattaagtccaggtgaaaggggtttacaac

SEQ ID NO: 529261 - DNA, 55 bp, Artificial
  Synthetic oligonucleotide
ggtgcgccgagaggcgatgtcacacggacgctgaggtacggagatttcgtgactg

SEQ ID NO: 529262 - DNA, 55 bp, Artificial
  Synthetic oligonucleotide
gcacttagcgcctggcttgggaaacatcgaccctgagatctacaacgaggggcgc

SEQ ID NO: 529263 - DNA, 55 bp, Artificial
  Synthetic oligonucleotide
ggtgcagcagattatgcttttaaagctcttccagtacgttgtggcgcccacatcc

SEQ ID NO: 529264 - DNA, 55 bp, Artificial
  Synthetic oligonucleotide
ggtgatgacacgttattctatgctaagctacataccacggatacgaaagcgttcg

SEQ ID NO: 529265 - DNA, 55 bp, Artificial
  Synthetic oligonucleotide
ggtgatgacaactacgccgtgttgcaatttaatacggaggtgactaaacagatgg

SEQ ID NO: 529266 - DNA, 55 bp, Artificial
  Synthetic oligonucleotide
gcacttggtggtgcgcaggaggcgacaggtaggacatttcgagaggcttatcgag

SEQ ID NO: 529267 - DNA, 55 bp, Artificial
  Synthetic oligonucleotide
gacggttcggacctcgcgatggtttctacgcacctgtccggcgagaactcaacgc

SEQ ID NO: 529268 - DNA, 55 bp, Artificial
  Synthetic oligonucleotide
gcttttcagtggttgacgctcaagatggagtctactcagcagatggcttcttcca

SEQ ID NO: 529269 - DNA, 55 bp, Artificial
  Synthetic oligonucleotide
gctttcagccatgcgcgctggaccagtactgtacgttgagacctggcccaatatg

SEQ ID NO: 529270 - DNA, 55 bp, Artificial
  Synthetic oligonucleotide
gctttcagatgatcaaacatttaccgcacttcacaattttgcaacgtccgcttca

SEQ ID NO: 529271 - DNA, 55 bp, Artificial
  Synthetic oligonucleotide
gctttagttaattcagaaagagtgaggttggatgactcctattccgctctaccct

SEQ ID NO: 529272 - DNA, 55 bp, Artificial
  Synthetic oligonucleotide
gacgttaatggaacgttcacacagcatggaccattactatcagacacaaagctct

SEQ ID NO: 529273 - DNA, 55 bp, Artificial
  Synthetic oligonucleotide
gcttcttcagagtcgatacccacttcgaacgattgactcggacggcggtggacgg

SEQ ID NO: 529274 - DNA, 55 bp, Artificial
  Synthetic oligonucleotide
gcttctgatgctaatggaaacatcgaccaagttcaacccgctacttgtgctgttc

SEQ ID NO: 529275 - DNA, 55 bp, Artificial
  Synthetic oligonucleotide
gcttctctaagctacttaacacgtaccttcgagtaacttgggacctgaccgagcc

SEQ ID NO: 529276 - DNA, 55 bp, Artificial
  Synthetic oligonucleotide
gcttcggctaataggccttgggaacatgatggtacatatgctaggatgactcaga

SEQ ID NO: 529277 - DNA, 55 bp, Artificial
  Synthetic oligonucleotide
gaggacattggaccatctgattctgcttcaaacgatccactcaccagcttctcga

SEQ ID NO: 529278 - DNA, 55 bp, Artificial
  Synthetic oligonucleotide
gcttcccatatctgcaaaattattgcatcatccaacgactgagatccgatcagag

SEQ ID NO: 529279 - DNA, 55 bp, Artificial
  Synthetic oligonucleotide
gcttagatatgacgttggcagcagcaaacttgaatatagggaatatatcacctga

SEQ ID NO: 529280 - DNA, 55 bp, Artificial
  Synthetic oligonucleotide
gcttacagtccattttatgaattattcattgacgcgatagctcaagaattcggtg

SEQ ID NO: 529281 - DNA, 55 bp, Artificial
  Synthetic oligonucleotide
gactataggaaaagcggcggagagatttgcggaaagcgagataggatccgctgcg

SEQ ID NO: 529282 - DNA, 55 bp, Artificial
  Synthetic oligonucleotide
gagaagtttcttctcaagaagggccatcagctaccggagattatgaacagactgc

SEQ ID NO: 529283 - DNA, 55 bp, Artificial
  Synthetic oligonucleotide
gcttaagttatcgtaacattgccgctttaaaagacttcgtagtaatgggaggtat

SEQ ID NO: 529284 - DNA, 55 bp, Artificial
  Synthetic oligonucleotide
gcttaaggttcccctgcagcagaggcccatgatacacacctacacgtccccttgg

SEQ ID NO: 529285 - DNA, 55 bp, Artificial
  Synthetic oligonucleotide
gcatggatgaaatggttcgagaatcgcagagaaatggaatcgcaccacagtcaga

SEQ ID NO: 529286 - DNA, 55 bp, Artificial
  Synthetic oligonucleotide
gactccttgagattaggccgtgccacgtctgagctgaacgggtggatatctcagc

SEQ ID NO: 529287 - DNA, 55 bp, Artificial
  Synthetic oligonucleotide
gactcggacggcggtggacggatcgctagaagacccggcgcatttaatgtccatc

SEQ ID NO: 529288 - DNA, 55 bp, Artificial
  Synthetic oligonucleotide
attaccaacttgggcttccaatttgatcactcgtatgaacgttgtaaacacttct

SEQ ID NO: 529289 - DNA, 55 bp, Artificial
  Synthetic oligonucleotide
gacgcatacatactgcagtgggatctggaccaggcgcgcagagatctggaggaag

SEQ ID NO: 529290 - DNA, 55 bp, Artificial
  Synthetic oligonucleotide
cagcatacattgaacgcattagcaaaatacggaagaccaaggatgatcggctatc

SEQ ID NO: 529291 - DNA, 55 bp, Artificial
  Synthetic oligonucleotide
gaggagcatctattcgctcagttggatcatcagcatcagcatggacggatgtctc

SEQ ID NO: 529292 - DNA, 55 bp, Artificial
  Synthetic oligonucleotide
ggaataggatgttcgactactgatccaacaacatttgaggaaatagcttctgcag

SEQ ID NO: 529293 - DNA, 55 bp, Artificial
  Synthetic oligonucleotide
ggaatacatctgtggcaggtatattcaactgcttagaaccagtagagttggataa

SEQ ID NO: 529294 - DNA, 55 bp, Artificial
  Synthetic oligonucleotide
cagcactactttgttaatacacctcttgaacgcatcgcaattcatttcgtaatgc

SEQ ID NO: 529295 - DNA, 55 bp, Artificial
  Synthetic oligonucleotide
ggaagctggtgctcctggttatgcagtccaaaataccgttcgagtcatggacttc

SEQ ID NO: 529296 - DNA, 55 bp, Artificial
  Synthetic oligonucleotide
atgtcgatcatacatgccttccgactgcgtttcctgccaatctcacgcccagagc

SEQ ID NO: 529297 - DNA, 55 bp, Artificial
  Synthetic oligonucleotide
ggaagcagggatttctgactaagatacagacgttgttcaaaccatcgtgaggtgc

SEQ ID NO: 529298 - DNA, 55 bp, Artificial
  Synthetic oligonucleotide
ggaagatagacacagcccaacatcactgatgcaagtaattcgtaattgtgttgca

SEQ ID NO: 529299 - DNA, 55 bp, Artificial
  Synthetic oligonucleotide
ggaagagtaatcgcttttaaaccagtcaagaatccggaacccaagggttatgttt

SEQ ID NO: 529300 - DNA, 55 bp, Artificial
  Synthetic oligonucleotide
gacgcgtacaacgaggcagtgaggatgagtatatcagagtttagcgagatacctc

SEQ ID NO: 529301 - DNA, 55 bp, Artificial
  Synthetic oligonucleotide
ggaactcagaacgcacgcataacttttctattctcaggtggcaatctccggatcc

SEQ ID NO: 529302 - DNA, 55 bp, Artificial
  Synthetic oligonucleotide
atgtctaaccaaacaggcgctacaatggctcaaaaggtagaaaaggtcgcttacg

SEQ ID NO: 529303 - DNA, 55 bp, Artificial
  Synthetic oligonucleotide
ggaacctggggaccggatcgtcaacctttcggctacttcctagctgctcccgagg

SEQ ID NO: 529304 - DNA, 55 bp, Artificial
  Synthetic oligonucleotide
ggaacaactgacgatgaggtatacatacagagagcatttatgtcattatctagtc

SEQ ID NO: 529305 - DNA, 55 bp, Artificial
  Synthetic oligonucleotide
ggaaattggatgttgctagcgccaacaagaccgggtgtagtagtggaagggacgg

SEQ ID NO: 529306 - DNA, 55 bp, Artificial
  Synthetic oligonucleotide
gacgggattaaactacagttggacgcatctagacagtgtcatgagtgtcccgtgt

SEQ ID NO: 529307 - DNA, 55 bp, Artificial
  Synthetic oligonucleotide
atgtgctacagactctcgggatgcccgcccatcactacccgctccatccggtgac

SEQ ID NO: 529308 - DNA, 55 bp, Artificial
  Synthetic oligonucleotide
gcatctgcttggacggaagtatcaacttcgatcgcagatatttctacaacagttg

SEQ ID NO: 529309 - DNA, 55 bp, Artificial
  Synthetic oligonucleotide
ggaaaccaagacattgttcatcagtcaccccattctacgagatgcttttgagcgt

SEQ ID NO: 529310 - DNA, 55 bp, Artificial
  Synthetic oligonucleotide
ggaaaagctgagagatctgcgacgtaaagagaaaggtgaaccgcggactaaggcg

SEQ ID NO: 529311 - DNA, 55 bp, Artificial
  Synthetic oligonucleotide
ggaaaacaagacaatttaaacgatggtgaggggacacaacagaaggatggcgaga

SEQ ID NO: 529312 - DNA, 55 bp, Artificial
  Synthetic oligonucleotide
gctctgaagcctacatatgatatcgttgtgcacgctgaaaggagagatcggagtc

SEQ ID NO: 529313 - DNA, 55 bp, Artificial
  Synthetic oligonucleotide
gacttgcaggattacgcaatgactacggcagtctcgctgcgcgaatggataacgc

SEQ ID NO: 529314 - DNA, 55 bp, Artificial
  Synthetic oligonucleotide
gctctaacggtcatcaaagcatgcaacacattaaaagaagtcagaattgtggtgg

SEQ ID NO: 529315 - DNA, 55 bp, Artificial
  Synthetic oligonucleotide
attataggtttaggcaaagtatgtggataggacttgtttcatactcgggtagtgg

SEQ ID NO: 529316 - DNA, 55 bp, Artificial
  Synthetic oligonucleotide
cagattgccagttggcgcatggccggtaatgactggtggcgctgtatcactacga

SEQ ID NO: 529317 - DNA, 55 bp, Artificial
  Synthetic oligonucleotide
cagattacacgtaattgtagcgaactgtcttttgactggaatgaagcatgtaagc

SEQ ID NO: 529318 - DNA, 55 bp, Artificial
  Synthetic oligonucleotide
gctccgatagaattgatttatgcctgcagatcggcgaaagagttcgctctattgc

SEQ ID NO: 529319 - DNA, 55 bp, Artificial
  Synthetic oligonucleotide
gctccaatgggatatagaccaggcgatcatcgatctggagaacgcaaggagggat

SEQ ID NO: 529320 - DNA, 55 bp, Artificial
  Synthetic oligonucleotide
gctcagttgctagtatgggaagctcaagcgctgtacggattccaacagccgatct

SEQ ID NO: 529321 - DNA, 55 bp, Artificial
  Synthetic oligonucleotide
attatgatattcgtcctgggctgatgggtcgttcactgatgagagcacaaaccca

SEQ ID NO: 529322 - DNA, 55 bp, Artificial
  Synthetic oligonucleotide
gctcaagcgaatgaagatatcgttgtgtcaaagacatcactttggaaagagatgc

SEQ ID NO: 529323 - DNA, 55 bp, Artificial
  Synthetic oligonucleotide
gagaagtggctattggagaaagttgaaaggggagtacagagaggagtagccgatg

SEQ ID NO: 529324 - DNA, 55 bp, Artificial
  Synthetic oligonucleotide
gctcaaacgaacgtagcgctgatcgaacacccacaccgcccaagcctattgcccc

SEQ ID NO: 529325 - DNA, 55 bp, Artificial
  Synthetic oligonucleotide
attattaaagggcttgaagcggagacgaagataaagggtacgctaaggagcgtcg

SEQ ID NO: 529326 - DNA, 55 bp, Artificial
  Synthetic oligonucleotide
gctacgctatatcaacccatacacttcagatccatttggacccaatgcaggcggc

SEQ ID NO: 529327 - DNA, 55 bp, Artificial
  Synthetic oligonucleotide
gcatgtgaatgtaccgaaagttgatcgtaaagttgtcagtttggtagtgcgacct

SEQ ID NO: 529328 - DNA, 55 bp, Artificial
  Synthetic oligonucleotide
cagatggagttgagtagggctcaatctctgaatgcccagttggaggcggatgtca

SEQ ID NO: 529329 - DNA, 55 bp, Artificial
  Synthetic oligonucleotide
gctattaggcacaacgcaattatgctaaaacgagagggtgatgtactcaagaacg

SEQ ID NO: 529330 - DNA, 55 bp, Artificial
  Synthetic oligonucleotide
attcaggatggaaatgatgtcattagtttgatgatttcggcggatggggtagagg

SEQ ID NO: 529331 - DNA, 55 bp, Artificial
  Synthetic oligonucleotide
gctatcttgaagaaagacgttatgtcacgcaactatttggggagtgcccagcggg

SEQ ID NO: 529332 - DNA, 55 bp, Artificial
  Synthetic oligonucleotide
gagaagagctgtacaacaatcatccctgtgcgcttcgacttagaaatctcggaca

SEQ ID NO: 529333 - DNA, 55 bp, Artificial
  Synthetic oligonucleotide
gctagaccgattccaaagcagttgacgaatcgctggttgtcaagctttgtgagtc

SEQ ID NO: 529334 - DNA, 55 bp, Artificial
  Synthetic oligonucleotide
cagatctaccgcctcgggaagacgatccacgcgctgacagggctgcatacgcatc

SEQ ID NO: 529335 - DNA, 55 bp, Artificial
  Synthetic oligonucleotide
gactcggtcgatagacggtaagctccactccgtctgtgtctgagctgtcgtgcgt

SEQ ID NO: 529336 - DNA, 55 bp, Artificial
  Synthetic oligonucleotide
gactcgtggcttgagttactgcgtcacttatgatgcgtgactgctaggtgagggg

SEQ ID NO: 529337 - DNA, 55 bp, Artificial
  Synthetic oligonucleotide
gactcttctgtttcgtctgttatggatatgctcctcgtgcagatgggacggtgcc

SEQ ID NO: 529338 - DNA, 55 bp, Artificial
  Synthetic oligonucleotide
gctgtagagcgaaagttggttaattatgctaaaggtaaaccactagaggctgatt

SEQ ID NO: 529339 - DNA, 55 bp, Artificial
  Synthetic oligonucleotide
attacgatatgattctagaaggcggtttgatgataggttccggcacatgctatga

SEQ ID NO: 529340 - DNA, 55 bp, Artificial
  Synthetic oligonucleotide
gctggaatggcgacggcggtagctactggaagagcaatagagggagcttacaagc

SEQ ID NO: 529341 - DNA, 55 bp, Artificial
  Synthetic oligonucleotide
gactgacgatagatcatcttttgcggatatcttggagaggatgcgtaagaacggg

SEQ ID NO: 529342 - DNA, 55 bp, Artificial
  Synthetic oligonucleotide
cagcaaagtagcgaatcaaataaatggatctcaatgggaacggattgcacggtaa

SEQ ID NO: 529343 - DNA, 55 bp, Artificial
  Synthetic oligonucleotide
gctgccgtcgactgtcttcggaagcggcggagttctttacagtaagctccatcag

SEQ ID NO: 529344 - DNA, 55 bp, Artificial
  Synthetic oligonucleotide
gctgcccgagacgtgctgcaaaccagggatctacactcactatgcatgcccacgc

SEQ ID NO: 529345 - DNA, 55 bp, Artificial
  Synthetic oligonucleotide
gctgcagttgtcgctgcaacttctacattggaattaatgggtatccaatatgatt

SEQ ID NO: 529346 - DNA, 55 bp, Artificial
  Synthetic oligonucleotide
gactgcgcaggcactagctctactagccacttttaccgtctaggtgtagggtcgt

SEQ ID NO: 529347 - DNA, 55 bp, Artificial
  Synthetic oligonucleotide
gaggacattaacttgactattttcaacgatgatgcattaccacatgcgctggtag

SEQ ID NO: 529348 - DNA, 55 bp, Artificial
  Synthetic oligonucleotide
gctgcaccctgggattcagacgacgtattcatattgcattgcgttgcaccacatc

SEQ ID NO: 529349 - DNA, 55 bp, Artificial
  Synthetic oligonucleotide
gctgatttgagttattacaccatctttaacggacagagatctcatgttgaactgg

SEQ ID NO: 529350 - DNA, 55 bp, Artificial
  Synthetic oligonucleotide
cagatttcgagtctagagtatcggcattagagcgtactgcagttactagtgcctc

SEQ ID NO: 529351 - DNA, 55 bp, Artificial
  Synthetic oligonucleotide
gctgatccaacgacaatgccacaaacagaaagaatgatgcgagtgaattggaaga

SEQ ID NO: 529352 - DNA, 55 bp, Artificial
  Synthetic oligonucleotide
gctgacaccgcatacccacgactcacgcgggccgtacaagcatgaagagaggatg

SEQ ID NO: 529353 - DNA, 55 bp, Artificial
  Synthetic oligonucleotide
gctgaattgcgatggcagtacaacaaattcgcagtaatcactcatggtaaaggtc

SEQ ID NO: 529354 - DNA, 55 bp, Artificial
  Synthetic oligonucleotide
gcatgtaagcttgttaaaaacgtcagtacgtactttgacatgctgaaaacatcac

SEQ ID NO: 529355 - DNA, 55 bp, Artificial
  Synthetic oligonucleotide
gctaccctctcacactgttgaggaaatgttgactaacactggcctactgaatgct

SEQ ID NO: 529356 - DNA, 55 bp, Artificial
  Synthetic oligonucleotide
ggcaacttgacgatgctcagagtaatggcgacaatgcttggcaggatgcgtggga

SEQ ID NO: 529357 - DNA, 55 bp, Artificial
  Synthetic oligonucleotide
ggcaaatttagttcattagtgtcatcagttgagtggtatctaaggtctatggaac

SEQ ID NO: 529358 - DNA, 55 bp, Artificial
  Synthetic oligonucleotide
ggatttctatgggatcttcctgtacaataaaagtgtgtccacttaatgtgcagac

SEQ ID NO: 529359 - DNA, 55 bp, Artificial
  Synthetic oligonucleotide
ggatttcgctttggtttgcttttaaccggtcatttgaaccgacacaccgaaacga

SEQ ID NO: 529360 - DNA, 55 bp, Artificial
  Synthetic oligonucleotide
ggattcactgccccggcatgtgaaagtggggaagtaatcaatctcgctgctcgca

SEQ ID NO: 529361 - DNA, 55 bp, Artificial; identical to SEQ ID NO: 407535
  Synthetic oligonucleotide

SEQ ID NO: 529362 - DNA, 55 bp, Artificial
  Synthetic oligonucleotide
ggatggatgattttgcaagacatttcaataggtatgcttcgatggccatacagca

SEQ ID NO: 529363 - DNA, 55 bp, Artificial
  Synthetic oligonucleotide
ggatgcgtactcacgtcgcatatggagatcaaatccatacccttgtctgcggggc

SEQ ID NO: 529364 - DNA, 55 bp, Artificial
  Synthetic oligonucleotide
ggatgaagatgtgaataagttaaggatgatgctttcttccaaagggattgaccag

SEQ ID NO: 529365 - DNA, 55 bp, Artificial
  Synthetic oligonucleotide
gaatttccgactggctatcggatagctccttttaatgtatggtattgaatatacc

SEQ ID NO: 529366 - DNA, 55 bp, Artificial
  Synthetic oligonucleotide
ggatcgcacacgatactgctattacaccagtcactccggaaactcaagccagacg

SEQ ID NO: 529367 - DNA, 55 bp, Artificial
  Synthetic oligonucleotide
gaatttgcaagacgatactctgatgaaacaggcgaagctcgcaaattgacagtcg

SEQ ID NO: 529368 - DNA, 55 bp, Artificial
  Synthetic oligonucleotide
ggatccaacgctgcgctgactagcttttcgatctctaccgccgttgaggagttca

SEQ ID NO: 529369 - DNA, 55 bp, Artificial
  Synthetic oligonucleotide
gcagtacgaaagtgctggacatgttgatagacagctctacacttgagatcaactc

SEQ ID NO: 529370 - DNA, 55 bp, Artificial
  Synthetic oligonucleotide
gacaattgtacgcaagacgaaagattgctgattacgactcaggtgtatctgatgt

SEQ ID NO: 529371 - DNA, 55 bp, Artificial
  Synthetic oligonucleotide
ggatcacccgagaaggagcggcggagcaaacggaaaagctgagagatctgcggcg

SEQ ID NO: 529372 - DNA, 55 bp, Artificial
  Synthetic oligonucleotide
gacactgacgaggctccctcccttgcaactaacgatatcgctgcttccacgatgg

SEQ ID NO: 529373 - DNA, 55 bp, Artificial
  Synthetic oligonucleotide
atgctcagaagatgggaagggaatggcagaccacagacacttgtgcaaatgcggc

SEQ ID NO: 529374 - DNA, 55 bp, Artificial
  Synthetic oligonucleotide
atgctccatactaggcatgtcttcagccaaatgttgaccacgacaaccatctatg

SEQ ID NO: 529375 - DNA, 55 bp, Artificial
  Synthetic oligonucleotide
attgcaacaggagggcgcttcgctaatacatcagagacggctgttgcgatcgagg

SEQ ID NO: 529376 - DNA, 55 bp, Artificial
  Synthetic oligonucleotide
gacagacgtgtcgcacgacgactcgcagaattcgtaacaggagatcggctacgct

SEQ ID NO: 529377 - DNA, 55 bp, Artificial
  Synthetic oligonucleotide
caggatcaatggatactgtatactccaactctactcaagaagaagtgtttctaac

SEQ ID NO: 529378 - DNA, 55 bp, Artificial
  Synthetic oligonucleotide
caggagtttgacaatgagatggttaaagagttgacggtgccaggagagctagccc

SEQ ID NO: 529379 - DNA, 55 bp, Artificial
  Synthetic oligonucleotide
caggtcacgcgtgcgaataatggacttagccgctgctctcgatgcgggtagccag

SEQ ID NO: 529380 - DNA, 55 bp, Artificial
  Synthetic oligonucleotide
ggcgaccagttattcgactacgatgattattcagttccgagagcgcttttgatgc

SEQ ID NO: 529381 - DNA, 55 bp, Artificial
  Synthetic oligonucleotide
ggccttcttccaacgtcaggcatgtataccgtggctaataaagagacgttgagtg

SEQ ID NO: 529382 - DNA, 55 bp, Artificial
  Synthetic oligonucleotide
cagggtgcacgtaaggtaacttcagatgatgcgaatcaatctccagacaacacgg

SEQ ID NO: 529383 - DNA, 55 bp, Artificial
  Synthetic oligonucleotide
gaatgcgcaatggggacgaggtaatactggagcgactagtgccgcaattgcagcc

SEQ ID NO: 529384 - DNA, 55 bp, Artificial
  Synthetic oligonucleotide
ggcccacctttgactatccatcagccgatacgcaaagaccctatgacagggctgg

SEQ ID NO: 529385 - DNA, 55 bp, Artificial
  Synthetic oligonucleotide
atgcagatgctggcgtgtctatggattcatcaacacaatcacgaccatctagcga

SEQ ID NO: 529386 - DNA, 55 bp, Artificial
  Synthetic oligonucleotide
cagggagctggactggacagctgcaatatcaacatccgcaactgaattggcaggc

SEQ ID NO: 529387 - DNA, 55 bp, Artificial
  Synthetic oligonucleotide
gaatggagcggtcttatttctaatatggcgttatccagatatgtataagcgtggg

SEQ ID NO: 529388 - DNA, 55 bp, Artificial
  Synthetic oligonucleotide
ggcattatgttatatgctactgagaagtttgggagcgtgtattatggattgcgga

SEQ ID NO: 529389 - DNA, 55 bp, Artificial
  Synthetic oligonucleotide
gaatggctgtgcaatcctatggatatatcactttactattatcagcaaagtagcg

SEQ ID NO: 529390 - DNA, 55 bp, Artificial
  Synthetic oligonucleotide
gcaggtgaggccgcccagttatgttccgtcagccccaatacccacagctatgccg

SEQ ID NO: 529391 - DNA, 55 bp, Artificial
  Synthetic oligonucleotide
cacttacgaggtatcgtgatactgtccgtttccaagagtagggcgattagcgcgt

SEQ ID NO: 529392 - DNA, 55 bp, Artificial
  Synthetic oligonucleotide
gagaattttgcaatgccccaaggtaactcacagcagaccatggcgggtgttacag

SEQ ID NO: 529393 - DNA, 55 bp, Artificial
  Synthetic oligonucleotide
ggcagtacaacagatttgctgtaataacacatggtaaaggtcactatagagttgt

SEQ ID NO: 529394 - DNA, 55 bp, Artificial
  Synthetic oligonucleotide
gcagtaaatggagtgtattataccattaaaattgggagaactgtacaatgtgggg

SEQ ID NO: 529395 - DNA, 55 bp, Artificial
  Synthetic oligonucleotide
ggcacttgtaaagtcaaacggaaatgttgggcattgttcgtcacaagaatcagtg

SEQ ID NO: 529396 - DNA, 55 bp, Artificial
  Synthetic oligonucleotide
caggcgcacattctcttcactgcccctaccggggaccctacgtggaaggaaacgg

SEQ ID NO: 529397 - DNA, 55 bp, Artificial
  Synthetic oligonucleotide
ggcaccaggcgtcggtaatatcgatcctgagatctacaatgagggacggttcatg

SEQ ID NO: 529398 - DNA, 55 bp, Artificial
  Synthetic oligonucleotide
ggcacagaaccgacctggcttttcgatgaacggtggaacgcctgtgcacgagctg

SEQ ID NO: 529399 - DNA, 55 bp, Artificial
  Synthetic oligonucleotide
ggcaatcggtagcacctatacctctccaatgcacgcccgacgcatgatccgatcg

SEQ ID NO: 529400 - DNA, 55 bp, Artificial
  Synthetic oligonucleotide
ggcaagcgacgaagtgagtttagtgccttatcaggaacaggcgagaccgcccagc

SEQ ID NO: 529401 - DNA, 55 bp, Artificial
  Synthetic oligonucleotide
ggactacccatggagaagcaaggtaactttgtagtgggccagaattgctctttga

SEQ ID NO: 529402 - DNA, 55 bp, Artificial
  Synthetic oligonucleotide
cagctacgccaacaggactacgttgatgtgcagttcgctgatcgggttactgctc

SEQ ID NO: 529403 - DNA, 55 bp, Artificial
  Synthetic oligonucleotide
ggacggacaattctggtagatggttatctgtaattctaattgagccaggtgtcgc

SEQ ID NO: 529404 - DNA, 55 bp, Artificial
  Synthetic oligonucleotide
ggacgagcagcatcaggcaagcgagatgtcttctgagaagcaaactccacctatg

SEQ ID NO: 529405 - DNA, 55 bp, Artificial
  Synthetic oligonucleotide
ggaccaaaagcgaaagacactatgtggtcaaatagctggaaagaattcgacgcct

SEQ ID NO: 529406 - DNA, 55 bp, Artificial
  Synthetic oligonucleotide
gctaactaaagcgcctatgcgggaacgctagcgcggaggggggattctaagatac

SEQ ID NO: 529407 - DNA, 55 bp, Artificial
  Synthetic oligonucleotide
ggacatgagcttaatcatattgccgatcggcgtttaggcgcttgtgatcgcgtgg

SEQ ID NO: 529408 - DNA, 55 bp, Artificial
  Synthetic oligonucleotide
cagcggagataccaccgtggtttaaaagtctaaatcccatgcttggagtggtgaa

SEQ ID NO: 529409 - DNA, 55 bp, Artificial
  Synthetic oligonucleotide
ggacagggccgctgaacttaactactcttgccgaccagatgtctcgagcgatcgc

SEQ ID NO: 529410 - DNA, 55 bp, Artificial
  Synthetic oligonucleotide
ggacagctatgggtttataatggagaaactccaaatgccactactacgggctacg

SEQ ID NO: 529411 - DNA, 55 bp, Artificial
  Synthetic oligonucleotide
ggacagagtcgtaaaagaaatgagacgtcagttggaaatgattgacaagttgact

SEQ ID NO: 529412 - DNA, 55 bp, Artificial
  Synthetic oligonucleotide
ggacacgcgccccttgggctagcgtgtatggagcgcttcatcgatgaccatggag

SEQ ID NO: 529413 - DNA, 55 bp, Artificial
  Synthetic oligonucleotide
ggacaaaatccatatgaatcatcagaagtgactgcgcctatgtgagaggttgagt

SEQ ID NO: 529414 - DNA, 55 bp, Artificial
  Synthetic oligonucleotide
cagcgcacaccacatgttcagtcaatggagttaacaatttcagttataacggcgg

SEQ ID NO: 529415 - DNA, 55 bp, Artificial
  Synthetic oligonucleotide
attgagcgcatcagcaggatacgcaagatcaaagatgagcggctatcgatgttag

SEQ ID NO: 529416 - DNA, 55 bp, Artificial
  Synthetic oligonucleotide
gacgaaatagatatgacgaaggaaattaaccaaaagaacgtgagaacgctagaag

SEQ ID NO: 529417 - DNA, 55 bp, Artificial
  Synthetic oligonucleotide
atggtgactggaaagactcattgtcgcaaatgtttcttacaaagggttggccaac

SEQ ID NO: 529418 - DNA, 55 bp, Artificial
  Synthetic oligonucleotide
gacgaacatccactttggagacagatgttggaggaatccgtgctgaattgtccgc

SEQ ID NO: 529419 - DNA, 55 bp, Artificial
  Synthetic oligonucleotide
cagatagtgtatcaacacctgttattgaaagtgtggacgtatcgacgcaagtatc

SEQ ID NO: 529420 - DNA, 55 bp, Artificial
  Synthetic oligonucleotide
gacgaacgtttctgcggggatgatctgcgctacctcctacacgagcgaatgtgcg

SEQ ID NO: 529421 - DNA, 55 bp, Artificial
  Synthetic oligonucleotide
cagcctataccacaacatttggcattacagattgcgctgacttccaactcatacc

SEQ ID NO: 529422 - DNA, 55 bp, Artificial; identical to SEQ ID NO: 407954
  Synthetic oligonucleotide

SEQ ID NO: 529423 - DNA, 55 bp, Artificial
  Synthetic oligonucleotide
ggaatcaccgtacccttgactcctcttcattgtttcagtaaattgtacacttacg

SEQ ID NO: 529424 - DNA, 55 bp, Artificial; identical to SEQ ID NO: 421011
  Synthetic oligonucleotide

SEQ ID NO: 529425 - DNA, 55 bp, Artificial
  Synthetic oligonucleotide
ggagtccatcagaccgttccggaccctctgaacgcggttgaaatcgagacgcagg

SEQ ID NO: 529426 - DNA, 55 bp, Artificial
  Synthetic oligonucleotide
cagatagatggttagccacaatactaattgagcctaatgtaacatcacaaagcag

SEQ ID NO: 529427 - DNA, 55 bp, Artificial
  Synthetic oligonucleotide
caggagaagtaaagccaagcgctagttcagttgaagttgtggtgcgagcgctcct

SEQ ID NO: 529428 - DNA, 55 bp, Artificial
  Synthetic oligonucleotide
attgatgagtcgtcgaagaagtacgagctccagtgtgttggtgcttgtgagcgcg

SEQ ID NO: 529429 - DNA, 55 bp, Artificial
  Synthetic oligonucleotide
ggaggcatacaggctagcatagtttcaactaaggcgttactttatgaggcgtatc

SEQ ID NO: 529430 - DNA, 55 bp, Artificial
  Synthetic oligonucleotide
ggaggaggaagttgaacgccggaagacacaggaagcgcgactagaacaggaacgg

SEQ ID NO: 529431 - DNA, 55 bp, Artificial
  Synthetic oligonucleotide
ggagctatctaaagcgcagcgtagcgcagtactccggcttttctgtttcgtgtgc

SEQ ID NO: 529432 - DNA, 55 bp, Artificial
  Synthetic oligonucleotide
ggagccgtagcatcaggggagaaacaaacgaaagcagccaattctatagcaaact

SEQ ID NO: 529433 - DNA, 55 bp, Artificial
  Synthetic oligonucleotide
ggagccggagatgacatcccagatccattaagtccgggtgaaagaggattgcaac

SEQ ID NO: 529434 - DNA, 55 bp, Artificial
  Synthetic oligonucleotide
cagctgcggtcttgctcgcacccggtgacgtgatccaacgttcgaccgaggaact

SEQ ID NO: 529435 - DNA, 55 bp, Artificial
  Synthetic oligonucleotide
ggagagaactctacgctagtcgcgaactcattacacaacatggccatgggacggg

SEQ ID NO: 529436 - DNA, 55 bp, Artificial
  Synthetic oligonucleotide
ggagactgcagcgaagtttaggctcacatccaatatatatggggtcaatggatta

SEQ ID NO: 529437 - DNA, 55 bp, Artificial
  Synthetic oligonucleotide
ggagaccacccgacgccttaccctcacatccgccggagaatccagtaccttggct

SEQ ID NO: 529438 - DNA, 55 bp, Artificial
  Synthetic oligonucleotide
cagctgcaatcgacgggttgattcaaggaagcgtacagtctttagtcacgggaga

SEQ ID NO: 529439 - DNA, 55 bp, Artificial
  Synthetic oligonucleotide
ggagaaactccaaatgtcacgaccaaaggatacatcgtaacgaattatgcatcag

SEQ ID NO: 529440 - DNA, 55 bp, Artificial
  Synthetic oligonucleotide
gaccagcaccaataacgaaattcaaaggttggtgtttggattgctgtcaatatac

SEQ ID NO: 529441 - DNA, 55 bp, Artificial
  Synthetic oligonucleotide
atggattcatcgacacaatcacgaccttcaagcaacgttggatgcgatcaattgg

SEQ ID NO: 529442 - DNA, 55 bp, Artificial
  Synthetic oligonucleotide
ggactgtcaactgatagaaagatggatgaagtttctcaagtaggaatttattcgc

SEQ ID NO: 529443 - DNA, 55 bp, Artificial
  Synthetic oligonucleotide
gaccataaagtagttctgtcgagattgtgcgggttagtgtacggtaactacgaat

SEQ ID NO: 529444 - DNA, 55 bp, Artificial
  Synthetic oligonucleotide
atggcgatacagcaatatttgagagttggttatgctgaagaggttagatacgtac

SEQ ID NO: 529445 - DNA, 55 bp, Artificial
  Synthetic oligonucleotide
aggagctcttggctactaccacagcccggggctccaataacgatgtatgagctgc

SEQ ID NO: 529446 - DNA, 55 bp, Artificial
  Synthetic oligonucleotide
gttcgatttagataaatttgcggaactggtaacggactcaccggtgatatctgca

SEQ ID NO: 529447 - DNA, 55 bp, Artificial
  Synthetic oligonucleotide
aggtgtacacaggcttctgagatgaacgttgcgaaacagtctccgatcgcaggaa

SEQ ID NO: 529448 - DNA, 55 bp, Artificial
  Synthetic oligonucleotide
gtctgatagctttctgccggatcgagatcgcttcgtgtcgtttgctgccgcgccg

SEQ ID NO: 529449 - DNA, 55 bp, Artificial
  Synthetic oligonucleotide
cttcagactctgggaatgccgatgcaccactatcccctgcgacccgtcacagagt

SEQ ID NO: 529450 - DNA, 55 bp, Artificial
  Synthetic oligonucleotide
gttcccctcttcttacgaaatgcatgaacgcagcgagggagaaccttacacttac

SEQ ID NO: 529451 - DNA, 55 bp, Artificial
  Synthetic oligonucleotide
gcaaatggattatgcttcagcgaaattaacgtaggatgcacttccacttcaccca

SEQ ID NO: 529452 - DNA, 55 bp, Artificial
  Synthetic oligonucleotide
agttgcaatgcaattgatcgaagatttgtaggtctaacctgagaggtcactagga

SEQ ID NO: 529453 - DNA, 55 bp, Artificial
  Synthetic oligonucleotide
gtctgtagccggcatccttggaaagctcatgttttcttacggcccactgctcttc

SEQ ID NO: 529454 - DNA, 55 bp, Artificial
  Synthetic oligonucleotide
ctttacgtgctaagctgactttgccaacgtatcgttatcccttagagttagacgc

SEQ ID NO: 529455 - DNA, 55 bp, Artificial
  Synthetic oligonucleotide
catgaagcgatagggagtgaagagcagacgcgaatcttgcccgtaactgcgatgc

SEQ ID NO: 529456 - DNA, 55 bp, Artificial
  Synthetic oligonucleotide
gtctttctaacccctggttccactgcctcttcttcaattaattacgttcagctcg

SEQ ID NO: 529457 - DNA, 55 bp, Artificial
  Synthetic oligonucleotide
gtctttgcagctagatgtgaatcgcataacgacccctgccattgacgttgctatg

SEQ ID NO: 529458 - DNA, 55 bp, Artificial
  Synthetic oligonucleotide
cattcctcgcacgtgacccaagattcaaacatcgggtatatcagcaattgagtgc

SEQ ID NO: 529459 - DNA, 55 bp, Artificial; identical to SEQ ID NO: 444143
  Synthetic oligonucleotide

SEQ ID NO: 529460 - DNA, 55 bp, Artificial
  Synthetic oligonucleotide
gatttgggcgtaattctgaaacacaacacaacaacggaagcgatacaaacgtaca

SEQ ID NO: 529461 - DNA, 55 bp, Artificial
  Synthetic oligonucleotide
gtgaagaaacagatgtacgtttcgttcgcgcagcgtatggggacgcagattccgg

SEQ ID NO: 529462 - DNA, 55 bp, Artificial
  Synthetic oligonucleotide
gaggtatttgaatctctagacgctcctcctcctttggcttcgttaatctattctg

SEQ ID NO: 529463 - DNA, 55 bp, Artificial
  Synthetic oligonucleotide
catgaatctagctacaatcgccaagaattatagcatgcataatggagagtcgggg

SEQ ID NO: 529464 - DNA, 55 bp, Artificial
  Synthetic oligonucleotide
catgagagaaacgccaatgacgacgtcaacaacgaatcagcttagaacactgaat

SEQ ID NO: 529465 - DNA, 55 bp, Artificial
  Synthetic oligonucleotide
gcaaggtacgcaagaccaaagatgaacggctctcgatgttagcgagcatgatgcc

SEQ ID NO: 529466 - DNA, 55 bp, Artificial
  Synthetic oligonucleotide
gaggtgcaaaagaagtatgaactacagagcgttggtagttgcgagcgtgttgcct

SEQ ID NO: 529467 - DNA, 55 bp, Artificial
  Synthetic oligonucleotide
catggaggccgtcatttccaactaaatataaaggatggtgtttagattgctgtca

SEQ ID NO: 529468 - DNA, 55 bp, Artificial
  Synthetic oligonucleotide
gcgggtacgtaatcctcgcgtgcatcaggtcaatgatgagcttaaacgtatgggt

SEQ ID NO: 529469 - DNA, 55 bp, Artificial
  Synthetic oligonucleotide
gtgggaggagcgctgacatcaaacaccgcaaagaagatctataaaacaattgggg

SEQ ID NO: 529470 - DNA, 55 bp, Artificial
  Synthetic oligonucleotide
gtgggagactgcagactcattaccctctcggttcgtgaaatgtggatgtctcggg

SEQ ID NO: 529471 - DNA, 55 bp, Artificial
  Synthetic oligonucleotide
gcggctgaacgaagaattccccgcgaaagcgatatccacacggaaagcggtgccc

SEQ ID NO: 529472 - DNA, 55 bp, Artificial
  Synthetic oligonucleotide
gttgagctgtcgtcgtctgtccacggaagcggcggagttcttaacagtaagcccc

SEQ ID NO: 529473 - DNA, 55 bp, Artificial
  Synthetic oligonucleotide
cagagttgtgaaatactcgtcagttgcgaatcacgcagaccgagtttacgctact

SEQ ID NO: 529474 - DNA, 55 bp, Artificial
  Synthetic oligonucleotide
gtcgctgatgtttattcgtgctatattaattaccattttaatcaaagattacagc

SEQ ID NO: 529475 - DNA, 55 bp, Artificial
  Synthetic oligonucleotide
agtttcagagaccacacatggcatggattaagaacggcaatactgaatagaacaa

SEQ ID NO: 529476 - DNA, 55 bp, Artificial
  Synthetic oligonucleotide
agtctggttcgtgtggatgatacaaattcacaaccaccaagatatgctccgagtg

SEQ ID NO: 529477 - DNA, 55 bp, Artificial
  Synthetic oligonucleotide
cattaccggttggtcaatggccagtaatgactggcggagcagtgtcattgcattc

SEQ ID NO: 529478 - DNA, 55 bp, Artificial
  Synthetic oligonucleotide
ctgtttcgtctgttatgggtatgctccgcgtgcagatgggacagtgcctgattgg

SEQ ID NO: 529479 - DNA, 55 bp, Artificial
  Synthetic oligonucleotide
gttgaaaacagtacgtaaattagtggatgcggtaaaccatgcatggggtgtcgag

SEQ ID NO: 529480 - DNA, 55 bp, Artificial
  Synthetic oligonucleotide
ctggatcaatactggacggccctgaatctgatgattgattcatccgacttggtgc

SEQ ID NO: 529481 - DNA, 55 bp, Artificial
  Synthetic oligonucleotide
gtggtttaagagtctaaaccccatgcttggagtagtgaatctaggcgcgactttc

SEQ ID NO: 529482 - DNA, 55 bp, Artificial
  Synthetic oligonucleotide
gtcggtgtgtacactgtcaagcgacatgagtttggcgttcaaagtcagtgaaacg

SEQ ID NO: 529483 - DNA, 55 bp, Artificial
  Synthetic oligonucleotide
ccaaccactttcaacccaccaacaagctattggatactacttgcaccaactgtag

SEQ ID NO: 529484 - DNA, 55 bp, Artificial
  Synthetic oligonucleotide
catcgccctgggatagcgacacagtcgtgatactacacatcgtcgggccctacca

SEQ ID NO: 529485 - DNA, 55 bp, Artificial
  Synthetic oligonucleotide
ctttaggaataggttgtattaccacaaatacagcaacatttgaagaggtggctac

SEQ ID NO: 529486 - DNA, 55 bp, Artificial
  Synthetic oligonucleotide
ctggcacgctttgggcgctgcacaagaagtgaaaggacgtaccctgaacgaggcg

SEQ ID NO: 529487 - DNA, 55 bp, Artificial
  Synthetic oligonucleotide
agtcttggcaccgttattaagtccattcagagcgattgtgaaatcagggtgcagc

SEQ ID NO: 529488 - DNA, 55 bp, Artificial
  Synthetic oligonucleotide
catcgctctgatatcaccatttgtgaggacgcaaaattatggtatgtatttacca

SEQ ID NO: 529489 - DNA, 55 bp, Artificial
  Synthetic oligonucleotide
ctgtttcctcaattatataggtggtgggtgtctccagagctcacatatggtcacg

SEQ ID NO: 529490 - DNA, 55 bp, Artificial
  Synthetic oligonucleotide
gtcgttcagatgatgtggcacgaagacatgctgagttggtggagatggagcgatt

SEQ ID NO: 529491 - DNA, 55 bp, Artificial
  Synthetic oligonucleotide
aggaattggatgtttgaccaccgatgtagcgacatttgaagagattgcgacagct

SEQ ID NO: 529492 - DNA, 55 bp, Artificial
  Synthetic oligonucleotide
gtcgttgaaacagcgagttaacgaaaagtacaataattgggttattaaggcaagg

SEQ ID NO: 529493 - DNA, 55 bp, Artificial
  Synthetic oligonucleotide
ctggcagattctcactaatatcattggtaccatctaatgacgattaccagacacc

SEQ ID NO: 529494 - DNA, 55 bp, Artificial
  Synthetic oligonucleotide
agttgtgacctccgcagaatacaagacgtctggattgtgtaatttagcgtcaccc

SEQ ID NO: 529495 - DNA, 55 bp, Artificial
  Synthetic oligonucleotide
gcggaaacactaaatgacgcaaatccccgactacataaggtgtatggaatgccgg

SEQ ID NO: 529496 - DNA, 55 bp, Artificial
  Synthetic oligonucleotide
gttctaacattcttgatataacggctgatccgactacggctccacagattggacg

SEQ ID NO: 529497 - DNA, 55 bp, Artificial
  Synthetic oligonucleotide
ccaaatggtcatccatcagaaggtccaacgcagtacgttccctgacaggtgcacg

SEQ ID NO: 529498 - DNA, 55 bp, Artificial
  Synthetic oligonucleotide
ctggctactaccaatgatcatagtacgggagggattggaccgatcagagagatgg

SEQ ID NO: 529499 - DNA, 55 bp, Artificial
  Synthetic oligonucleotide
gcaaaagtttgcagatctagtaactgactctccggtcatctcagccataatagac

SEQ ID NO: 529500 - DNA, 55 bp, Artificial
  Synthetic oligonucleotide
cattttgaagatctgacgaatcattggcacgccctaggagttgcgcaagaagcta

SEQ ID NO: 529501 - DNA, 55 bp, Artificial
  Synthetic oligonucleotide
gtgatttcaattacctccgctgctctgaagtgggtggttaaacatggcgtgtctg

SEQ ID NO: 529502 - DNA, 55 bp, Artificial
  Synthetic oligonucleotide
gagactcaggcagattaagcgtcatgtcaacgaacagatcttgcccaagttgaag

SEQ ID NO: 529503 - DNA, 55 bp, Artificial
  Synthetic oligonucleotide
gtgatttcccaacgcgcgaccgtaacatcgtagaagcgcgtgtgaaaaggtcggg

SEQ ID NO: 529504 - DNA, 55 bp, Artificial
  Synthetic oligonucleotide
ctggtgatactgaacctgcatttcatacagatgtggtcacgtatggggcacggac

SEQ ID NO: 529505 - DNA, 55 bp, Artificial
  Synthetic oligonucleotide
gttagtgcagccaattgacggcgtagacatgacaaaggaaattaaccagaagaac

SEQ ID NO: 529506 - DNA, 55 bp, Artificial
  Synthetic oligonucleotide
gtgcaattgcacgcgccgcttacgcatagtccactttgcacgggtgtgggttatg

SEQ ID NO: 529507 - DNA, 55 bp, Artificial
  Synthetic oligonucleotide
gttagtatcatcgcctatgtctatactagttgcactagtagacattaatggcaca

SEQ ID NO: 529508 - DNA, 55 bp, Artificial
  Synthetic oligonucleotide
gttaggcaggagttgatgctgaagcgtaaggcgacgcgtcaagaatggtgggagc

SEQ ID NO: 529509 - DNA, 55 bp, Artificial
  Synthetic oligonucleotide
gcggatgtggctgcagataaattcacttttggaagatatcatgccgtcgctactg

SEQ ID NO: 529510 - DNA, 55 bp, Artificial
  Synthetic oligonucleotide
aggccataaacacgtctagtcatgtcatcaccggactactcaccgctaccgcaat

SEQ ID NO: 529511 - DNA, 55 bp, Artificial
  Synthetic oligonucleotide
gcaaaccatgcagacagagtttatgctactttcaagagtaacaacaagaacggaa

SEQ ID NO: 529512 - DNA, 55 bp, Artificial
  Synthetic oligonucleotide
cttggcaattggtagtacgtatacatctccgatgcacactagacgtatgataaga

SEQ ID NO: 529513 - DNA, 55 bp, Artificial
  Synthetic oligonucleotide
gtgcctcaaagactttcagatacgataattctaaacaaccgaccaacaatcacac

SEQ ID NO: 529514 - DNA, 55 bp, Artificial
  Synthetic oligonucleotide
gcggaggaggcgggacgctacaaggatttcagtgactggcggcactggccttagt

SEQ ID NO: 529515 - DNA, 55 bp, Artificial
  Synthetic oligonucleotide
agggaaggcggcggaaaggttcgcggagagtgaaattggatctgcggcgattgac

SEQ ID NO: 529516 - DNA, 55 bp, Artificial
  Synthetic oligonucleotide
gcgggcgcatgccgtggaagatcatgcttgctatgatggccgctcaactgaagct

SEQ ID NO: 529517 - DNA, 55 bp, Artificial
  Synthetic oligonucleotide
gtgctctcaagagtagtttctgtaagacatctggaaaatttggtgctgaggagag

SEQ ID NO: 529518 - DNA, 55 bp, Artificial
  Synthetic oligonucleotide
gtgctctaatagatgcgagaataaaatatcaaaggggatgggcatggtaccaccg

SEQ ID NO: 529519 - DNA, 55 bp, Artificial
  Synthetic oligonucleotide
catgcggttgtcgaaaagatgttagtttatgcaaagcatactagggaatatgctg

SEQ ID NO: 529520 - DNA, 55 bp, Artificial
  Synthetic oligonucleotide
gttacatgctgcaggtgttacattatcaacgcaattcactgactttgtttcgtta

SEQ ID NO: 529521 - DNA, 55 bp, Artificial
  Synthetic oligonucleotide
agggaattaagtatggcgagagctagtatgacctccacgagcggaaaatccatcg

SEQ ID NO: 529522 - DNA, 55 bp, Artificial
  Synthetic oligonucleotide
ctgtaacaaattaggaccacgagaaaatgttgctataattcaagttggcggaccg

SEQ ID NO: 529523 - DNA, 55 bp, Artificial
  Synthetic oligonucleotide
gagagatattctccgtcatcgcttgccagattgttcactatgggtatggccggac

SEQ ID NO: 529524 - DNA, 55 bp, Artificial
  Synthetic oligonucleotide
gcggatgagcccgtctacgctgagttggccacccctgctgaagtaatgaacgagc

SEQ ID NO: 529525 - DNA, 55 bp, Artificial
  Synthetic oligonucleotide
agggagaaggtgcgtcgtccaatagagatcgatcggatccatagtgtacagcggc

SEQ ID NO: 529526 - DNA, 55 bp, Artificial
  Synthetic oligonucleotide
gagagcccttcgttaatgggaagcccgctcctagagtaggtgttcggccggatca

SEQ ID NO: 529527 - DNA, 55 bp, Artificial; identical to SEQ ID NO: 444065
  Synthetic oligonucleotide

SEQ ID NO: 529528 - DNA, 55 bp, Artificial
  Synthetic oligonucleotide
cattcttcgttacctctgaggctaacttgccaattcaatataggaaattcatgcc

SEQ ID NO: 529529 - DNA, 55 bp, Artificial
  Synthetic oligonucleotide
gtgacggtctccccgcgttgaaccattagagcggcgaggctagacgcgagctgat

SEQ ID NO: 529530 - DNA, 55 bp, Artificial
  Synthetic oligonucleotide
ctgtccatgctcaatgtgttgacgtatcaactgtcatgactgaaggagacatccg

SEQ ID NO: 529531 - DNA, 55 bp, Artificial
  Synthetic oligonucleotide
gcggggtggaggcaacgactgagagatgggaagagtggaaatttgagggtgtgag

SEQ ID NO: 529532 - DNA, 55 bp, Artificial
  Synthetic oligonucleotide
gttcactcgtggcgtcttccgtcccaatccccgttccacgttcagttctgcgacg

SEQ ID NO: 529533 - DNA, 55 bp, Artificial
  Synthetic oligonucleotide
cagataatcttatggaagataggcacagtccaacatcattaatgcaagtggtacg

SEQ ID NO: 529534 - DNA, 55 bp, Artificial
  Synthetic oligonucleotide
gtgactgacttaacgaacagatcctctgcgcacgcggcgatactatcttcacttc

SEQ ID NO: 529535 - DNA, 55 bp, Artificial
  Synthetic oligonucleotide
gttcactcgctgttcataccgagctgtacgctccttcatacaggttcgccacctc

SEQ ID NO: 529536 - DNA, 55 bp, Artificial
  Synthetic oligonucleotide
gcgggattggcagatcctggcatgatgattcccatcgctgtctaacgagggaggg

SEQ ID NO: 529537 - DNA, 55 bp, Artificial
  Synthetic oligonucleotide
ctgtcactaacagattagcgcgttatttcactcctgcaagcttaactcggatcac

SEQ ID NO: 529538 - DNA, 55 bp, Artificial
  Synthetic oligonucleotide
gtggctagatttactgcagcgcttatagaatgtggaagttctgagccaggcctgc

SEQ ID NO: 529539 - DNA, 55 bp, Artificial
  Synthetic oligonucleotide
gtggcgtttaagcttaatggtacatcagcggaaataccacagtggtttaagagtc

SEQ ID NO: 529540 - DNA, 55 bp, Artificial
  Synthetic oligonucleotide
cttcctgagttacccggggtccagagatcaaaatacgatatcagagagctacgac

SEQ ID NO: 529541 - DNA, 55 bp, Artificial
  Synthetic oligonucleotide
gtgagagaaacgtatgcacggatgaatgctaaagtcaaagctctagtatctacgg

SEQ ID NO: 529542 - DNA, 55 bp, Artificial
  Synthetic oligonucleotide
gtggccgggcatgcgattcgaggcggttgacatgtacccgcgcgcgtgtaagatt

SEQ ID NO: 529543 - DNA, 55 bp, Artificial
  Synthetic oligonucleotide
gcggagaaggctgcattcgcatcgtacgcggaagcgtttcgtgatgatgtaagat

SEQ ID NO: 529544 - DNA, 55 bp, Artificial
  Synthetic oligonucleotide
aggatggacaagatgtcataagcgtaatgttaacatcatgcggggtggaggcgac

SEQ ID NO: 529545 - DNA, 55 bp, Artificial
  Synthetic oligonucleotide
gtgatagtgatgaccaatctgacgaggatcacgaggttgggagtacagagccaga

SEQ ID NO: 529546 - DNA, 55 bp, Artificial
  Synthetic oligonucleotide
gttcaagtctcggctgacgttgaaaacaagaaaactgctcaactgctccatgctg

SEQ ID NO: 529547 - DNA, 55 bp, Artificial
  Synthetic oligonucleotide
catggaacactaccgatgtgacgcagctaatcgatacggttcgcccacggtgcca

SEQ ID NO: 529548 - DNA, 55 bp, Artificial
  Synthetic oligonucleotide
cagagttcagtgggatcccgctagatggatttgacataccgccggaactcaccag

SEQ ID NO: 529549 - DNA, 55 bp, Artificial
  Synthetic oligonucleotide
ctgggtcaacgcaacctagaacgtatcgctgcccgagacgtgctgcaaaccaggg

SEQ ID NO: 529550 - DNA, 55 bp, Artificial
  Synthetic oligonucleotide
agggattggatgcaaaactacggacgtaaacacatttgagattgttgcgtcgtct

SEQ ID NO: 529551 - DNA, 55 bp, Artificial
  Synthetic oligonucleotide
cttcgccgtgacaacgtgaaacagattcttactcgtgaactgccattttcctcgg

SEQ ID NO: 529552 - DNA, 55 bp, Artificial
  Synthetic oligonucleotide
gcaagatgtcttccgataagcagaacgttccaatgattaagaagccattcacacg

SEQ ID NO: 529553 - DNA, 55 bp, Artificial
  Synthetic oligonucleotide
catgccggagccacacgcggttatctatgtcacggaggaattgacgcacctgatt

SEQ ID NO: 529554 - DNA, 55 bp, Artificial; identical to SEQ ID NO: 324149
  Synthetic oligonucleotide

SEQ ID NO: 529555 - DNA, 55 bp, Artificial
  Synthetic oligonucleotide
cagaggtgcgtaggttccgcgactgtatgatgctgcagattttcgccatagactc

SEQ ID NO: 529556 - DNA, 55 bp, Artificial
  Synthetic oligonucleotide
ctgcgtgatagtgaaaccccgtagcgcaacgcgcgagggcgcagacttcatgacg

SEQ ID NO: 529557 - DNA, 55 bp, Artificial
  Synthetic oligonucleotide
caagttggtggtgctgacatacttgatataacatctgatccaactactactccac

SEQ ID NO: 529558 - DNA, 55 bp, Artificial
  Synthetic oligonucleotide
cttacggtgaaagcgtcaagcaggctgtcttactcaatattctaggagccggaga

SEQ ID NO: 529559 - DNA, 55 bp, Artificial
  Synthetic oligonucleotide
cttacgaataggtgtaattatgatatgtggcgcgaacagaagcgtgtattacgag

SEQ ID NO: 529560 - DNA, 55 bp, Artificial
  Synthetic oligonucleotide
cttacatcgcatctgtcctaacagttctgtttacactacataaggcgtcaatccc

SEQ ID NO: 529561 - DNA, 55 bp, Artificial
  Synthetic oligonucleotide
gaaaacgtggcagttatccaggttggtggctcaaatatacttgacataacggctg

SEQ ID NO: 529562 - DNA, 55 bp, Artificial
  Synthetic oligonucleotide
gcaattacgtacgatcggtatacgaagcgaggtacatcatatacaaagtgaggtc

SEQ ID NO: 529563 - DNA, 55 bp, Artificial
  Synthetic oligonucleotide
gtatttaatatcactaggagtacctaaaattgacgcggacacttatgtaggatcc

SEQ ID NO: 529564 - DNA, 55 bp, Artificial
  Synthetic oligonucleotide
gtgtctggactgttgccaacatactgacttaacttactgtcgaggttgtaccatg

SEQ ID NO: 529565 - DNA, 55 bp, Artificial
  Synthetic oligonucleotide
ccaagggctatgtcttaaacgttccaggaccaggtgcctatagaatacaggacgg

SEQ ID NO: 529566 - DNA, 55 bp, Artificial
  Synthetic oligonucleotide
gcggtagaagttgatgattcatttgctgaagagaaaatggaagttgacacagttg

SEQ ID NO: 529567 - DNA, 55 bp, Artificial
  Synthetic oligonucleotide
agtacctttagatggatttgacataccgcctgaactgatcagatagagtggtgcc

SEQ ID NO: 529568 - DNA, 55 bp, Artificial
  Synthetic oligonucleotide
gtcaaataacattaaggatgtggcgcgtgcaacagcatacttcacctcgcctacg

SEQ ID NO: 529569 - DNA, 55 bp, Artificial
  Synthetic oligonucleotide
cttacacttaattgatcatctctaaagggtcagggctgctgcttcatggcacacg

SEQ ID NO: 529570 - DNA, 55 bp, Artificial
  Synthetic oligonucleotide
gatttcaatgggatcgtcttgtactataaaagtatgtccactgaatgcgcagacg

SEQ ID NO: 529571 - DNA, 55 bp, Artificial
  Synthetic oligonucleotide
gcggcggacataactacattcctattcttggcctacttttacacgctattgttca

SEQ ID NO: 529572 - DNA, 55 bp, Artificial
  Synthetic oligonucleotide
gcaatgtccaagagatcacgatcactagattcagcagcgttttactacagaatct

SEQ ID NO: 529573 - DNA, 55 bp, Artificial
  Synthetic oligonucleotide
gtcaagcgcctgtgaatgtaaataatccgggagcgggaccgggtatgatagaaat

SEQ ID NO: 529574 - DNA, 55 bp, Artificial
  Synthetic oligonucleotide
gtcacaaatgtttctcacaaaaggttggccaacaggatcggtctattttaaagag

SEQ ID NO: 529575 - DNA, 55 bp, Artificial
  Synthetic oligonucleotide
gcggcggagttcttaacagtaagccccatcggacctgatggttggttgagaagcc

SEQ ID NO: 529576 - DNA, 55 bp, Artificial
  Synthetic oligonucleotide
catcatgctgactagctacgagcccgtcgatacgtgcaccgctcacatcacctgc

SEQ ID NO: 529577 - DNA, 55 bp, Artificial
  Synthetic oligonucleotide
agtaataagccagcggattgaccatacaagaaaggagataatgaagaaagatgca

SEQ ID NO: 529578 - DNA, 55 bp, Artificial
  Synthetic oligonucleotide
catgttgaggtcttctgtgaataccaaagtggtgagaaatgtggttgactaccag

SEQ ID NO: 529579 - DNA, 55 bp, Artificial
  Synthetic oligonucleotide
gtcacgatggagcacgcgacagatatgcctgtaattaatgaagtcgaatttaacg

SEQ ID NO: 529580 - DNA, 55 bp, Artificial
  Synthetic oligonucleotide
catgtaatggatgatatggctaacggaaaatatacgcctggagtgattccaccag

SEQ ID NO: 529581 - DNA, 55 bp, Artificial
  Synthetic oligonucleotide
cttatattgttagcaccaggcgacgtgattgaaagcgtcgccgacaagctacggg

SEQ ID NO: 529582 - DNA, 55 bp, Artificial
  Synthetic oligonucleotide
gtttgtgttcttgatttaggacaaaagacttattgcggtaaagtggtcagagcag

SEQ ID NO: 529583 - DNA, 55 bp, Artificial
  Synthetic oligonucleotide
gtgtgtggtggcgccgtcgtatgcatgcattgtctaggtgtggttgggtcactgc

SEQ ID NO: 529584 - DNA, 55 bp, Artificial
  Synthetic oligonucleotide
gcaactgttttatctacagatgaccacgagtctatggtcgcagggattgagtctc

SEQ ID NO: 529585 - DNA, 55 bp, Artificial
  Synthetic oligonucleotide
gcaatttccttaacatttccatttccgacgaaacttattatgagtacgtttccgc

SEQ ID NO: 529586 - DNA, 55 bp, Artificial
  Synthetic oligonucleotide
cttatgcgtcgccaatgcatgctcgacgtatgattcgatctaaaacggtgcaccc

SEQ ID NO: 529587 - DNA, 55 bp, Artificial
  Synthetic oligonucleotide
gtatggactcatccagatgcattaatgagctgtataccgctgaaacagctgaggc

SEQ ID NO: 529588 - DNA, 55 bp, Artificial
  Synthetic oligonucleotide
gtatggtattgaatataccacaattctaacctttttgatatctcttattttactg

SEQ ID NO: 529589 - DNA, 55 bp, Artificial
  Synthetic oligonucleotide
gtttggactgatcagtttcaactattacgcgagcactaagatcgcgcagggaggg

SEQ ID NO: 529590 - DNA, 55 bp, Artificial
  Synthetic oligonucleotide
gtgttttagcaccagatttcaatttgttcggtgtagtaccaatccaaggtccgat

SEQ ID NO: 529591 - DNA, 55 bp, Artificial
  Synthetic oligonucleotide
gaaacggcgacgagcgatggctcatatggtcttgatcattgcagctgtggtagcg

SEQ ID NO: 529592 - DNA, 55 bp, Artificial
  Synthetic oligonucleotide
gtgtgggaggtgccgcgtagcggggtgtcaaatctggtcatcaacgctgctctcg

SEQ ID NO: 529593 - DNA, 55 bp, Artificial
  Synthetic oligonucleotide
catcacgcgttgcgctacggtgaatgggatgtgggacagctcatcgaagctgggt

SEQ ID NO: 529594 - DNA, 55 bp, Artificial
  Synthetic oligonucleotide
gcggtcgcacagatgaggagaggttttatgctttactgttgatatgtgcaacgga

SEQ ID NO: 529595 - DNA, 55 bp, Artificial
  Synthetic oligonucleotide
gaaaccaaacactgacgtactcaatctgtctaaaactcaaactatccttccatct

SEQ ID NO: 529596 - DNA, 55 bp, Artificial
  Synthetic oligonucleotide
gtatgtggtggtgccgtcgtttgcatgcattgtctaggtgttgttggatctctgc

SEQ ID NO: 529597 - DNA, 55 bp, Artificial
  Synthetic oligonucleotide
gaggtcttctttgtaagtgcgcggagaattaatctttgctaggatgaggtccaat

SEQ ID NO: 529598 - DNA, 55 bp, Artificial
  Synthetic oligonucleotide
catgtcagagttagctgacttaatacttaatgagtggctttgtaatccaatggac

SEQ ID NO: 529599 - DNA, 55 bp, Artificial
  Synthetic oligonucleotide
agtatggcgctatactgtgtcggatttatgaaaggaacgggaatgtcttcaggga

SEQ ID NO: 529600 - DNA, 55 bp, Artificial
  Synthetic oligonucleotide
ctgcctcttaacgaatacttcgcgcgtgcgggtggatcgacgcatccggcgagct

SEQ ID NO: 529601 - DNA, 55 bp, Artificial
  Synthetic oligonucleotide
ccaatacatttccagaggcgggcaattttgggagcgttaaagtttggttgcaagg

SEQ ID NO: 529602 - DNA, 55 bp, Artificial
  Synthetic oligonucleotide
agtatgattggtggtgttgagaggagggcggcgccgataggggcgcgagagagtg

SEQ ID NO: 529603 - DNA, 55 bp, Artificial
  Synthetic oligonucleotide
atttatatacatctatgttgagattggctaggaatacaagctcgggtttcgcggc

SEQ ID NO: 529604 - DNA, 55 bp, Artificial
  Synthetic oligonucleotide
gtattacagaatgcgatcacgtcgaccaccggagcgaacgagaatgcgaagaatg

SEQ ID NO: 529605 - DNA, 55 bp, Artificial
  Synthetic oligonucleotide
caatacggcgacacttatctagaatccatgttgaaagtgatttctcatgtgactt

SEQ ID NO: 529606 - DNA, 55 bp, Artificial
  Synthetic oligonucleotide
catcagcgactgaggtgcataactgcaaatggtgctcaattaataacggttatac

SEQ ID NO: 529607 - DNA, 55 bp, Artificial
  Synthetic oligonucleotide
gtccaagagatttggatcgagagcgtgataaatacatattggcgcgaaccaacct

SEQ ID NO: 529608 - DNA, 55 bp, Artificial
  Synthetic oligonucleotide
gttggttgagttggctaaagaggctatgcgtgatagagaaacagtgtggctgcaa

SEQ ID NO: 529609 - DNA, 55 bp, Artificial
  Synthetic oligonucleotide
gtccattgaatacacagactctaggaataggatgtacaactacaaatacggcgac

SEQ ID NO: 529610 - DNA, 55 bp, Artificial
  Synthetic oligonucleotide
gttggctagggcgcttagagcggaagaggaagaacgcactgatgaagagacgcgt

SEQ ID NO: 529611 - DNA, 55 bp, Artificial; identical to SEQ ID NO: 437539
  Synthetic oligonucleotide

SEQ ID NO: 529612 - DNA, 55 bp, Artificial
  Synthetic oligonucleotide
gttggcgctcatgctattggaatcgtttcgtagttacaagaagaatcggagattg

SEQ ID NO: 529613 - DNA, 55 bp, Artificial
  Synthetic oligonucleotide
gttggagaatttccaatattaaagggcggggcgattacattagtacccgctggag

SEQ ID NO: 529614 - DNA, 55 bp, Artificial
  Synthetic oligonucleotide
gtcccactcttcctacgaaacgcgtgacagcggtgatcccgggacttccacttac

SEQ ID NO: 529615 - DNA, 55 bp, Artificial
  Synthetic oligonucleotide
ctttctggaaaatctattagtaggagtgaacaatacatttcaccagataccgagg

SEQ ID NO: 529616 - DNA, 55 bp, Artificial
  Synthetic oligonucleotide
catccgtcctgctataatggggcaggcgctttcacgacaacagggacaatccaca

SEQ ID NO: 529617 - DNA, 55 bp, Artificial
  Synthetic oligonucleotide
ctgctggttaacgatccgccaagcacgagcgcacgggatactattcgtggggccc

SEQ ID NO: 529618 - DNA, 55 bp, Artificial
  Synthetic oligonucleotide
catcctgatgcagcggtgatgaaaatagtgtcccgtgatgtacgtagaatggtcg

SEQ ID NO: 529619 - DNA, 55 bp, Artificial
  Synthetic oligonucleotide
gtccttggaaaagacctagaatgattgcttacagcggttacaacgtattggcaga

SEQ ID NO: 529620 - DNA, 55 bp, Artificial
  Synthetic oligonucleotide
agtttggtccgtgtggatgacacgatttcccaaccgccaagatatgctccgagcg

SEQ ID NO: 529621 - DNA, 55 bp, Artificial
  Synthetic oligonucleotide
gtcgaaagaatttaatcagaagaatgttagaacgctagatgaatgggaaagcgga

SEQ ID NO: 529622 - DNA, 55 bp, Artificial
  Synthetic oligonucleotide
catcgacgattcgcggagcctctttcctcacttgtacgttccgatgcgcggagat

SEQ ID NO: 529623 - DNA, 55 bp, Artificial
  Synthetic oligonucleotide
gtcgaccgaacacgacatactgatgcacagatacacacagtggtacaaagggacg

SEQ ID NO: 529624 - DNA, 55 bp, Artificial
  Synthetic oligonucleotide
ctgctttgtctgttatggatatgctccccgcgcggatggaacggtacccgattgg

SEQ ID NO: 529625 - DNA, 55 bp, Artificial
  Synthetic oligonucleotide
gtcgacgaacaagcaaatcagtatcttacatatcttacttcaaacgttccagcct

SEQ ID NO: 529626 - DNA, 55 bp, Artificial
  Synthetic oligonucleotide
gtcgactggatcaataacgcatttgaaggacgagtgtcaatttacagtgctcagc

SEQ ID NO: 529627 - DNA, 55 bp, Artificial
  Synthetic oligonucleotide
gtcgagcggagcctacaaaaggagctggggatcacccgagaaggagtggcggaac

SEQ ID NO: 529628 - DNA, 55 bp, Artificial
  Synthetic oligonucleotide
gttgcaattgaggtgtgtgatgataaggtgccggctcggctacgctgcgaacggg

SEQ ID NO: 529629 - DNA, 55 bp, Artificial
  Synthetic oligonucleotide
ccaacgacggtatgggattggtcttcctcactaccatttcccaaaggttgtcaac

SEQ ID NO: 529630 - DNA, 55 bp, Artificial
  Synthetic oligonucleotide
gttgagttaccgtcgtctgtcttcggaagcggcggaactcttcaccgcaagcccc

SEQ ID NO: 529631 - DNA, 55 bp, Artificial
  Synthetic oligonucleotide
ccaactgaagcaagtactcaaattaatgatggtgaatggaaagactcattatcgc

SEQ ID NO: 529632 - DNA, 55 bp, Artificial
  Synthetic oligonucleotide
gagagacgagtcgcgctccgcctgtccgaatttgtcactagcgacagactacgat

SEQ ID NO: 529633 - DNA, 55 bp, Artificial
  Synthetic oligonucleotide
gtcacgcagtctgatgttgcaagtgttctttcaagagtagtttccgttagacatc

SEQ ID NO: 529634 - DNA, 55 bp, Artificial
  Synthetic oligonucleotide
gtcactctcatgaatgatactttacataccataatggaggatcctggaatggcgt

SEQ ID NO: 529635 - DNA, 55 bp, Artificial
  Synthetic oligonucleotide
ctttggatgttggagttagagatttgcgtttaaagatgaaggagaacagggaggc

SEQ ID NO: 529636 - DNA, 55 bp, Artificial
  Synthetic oligonucleotide
ataacatcctgccacagataaaagaggcgatgaaggaagaccatgagatagtggg

SEQ ID NO: 529637 - DNA, 55 bp, Artificial
  Synthetic oligonucleotide
ataacacgctctcaagcgttagatttaattagatctgatcccagagttttacgtg

SEQ ID NO: 529638 - DNA, 55 bp, Artificial
  Synthetic oligonucleotide
ctgctatccatatacatcgatggatcagagggtgtggtatctggaatgatgaagg

SEQ ID NO: 529639 - DNA, 55 bp, Artificial
  Synthetic oligonucleotide
ccaacgttcaaaactgagcgttggcatgaacagccggattcagacgaagaccaga

SEQ ID NO: 529640 - DNA, 55 bp, Artificial
  Synthetic oligonucleotide
ctgctgaacccagcagtcttgtacgctcccgtcgagtgcaatggatacggcgtgc

SEQ ID NO: 529641 - DNA, 55 bp, Artificial
  Synthetic oligonucleotide
cttaagaggagttgttatccatgccgctaaatgcttattctacatgttctccatg

SEQ ID NO: 529642 - DNA, 55 bp, Artificial
  Synthetic oligonucleotide
catccgaggagttaaaacagaggcaaattcagatgaacttagttgattggactga

SEQ ID NO: 529643 - DNA, 55 bp, Artificial
  Synthetic oligonucleotide
gtgtcaatctacagcgcgcaggagggatgggacaaaacaatctcagcacagccag

SEQ ID NO: 529644 - DNA, 55 bp, Artificial
  Synthetic oligonucleotide
gtcatggctgtagtggagcagcggattacttcagcaaacaacgcaatacgacgca

SEQ ID NO: 529645 - DNA, 55 bp, Artificial
  Synthetic oligonucleotide
gtcataatcatgaaatctatcatatatgagtggtttgatatcagatatatgagga

SEQ ID NO: 529646 - DNA, 55 bp, Artificial
  Synthetic oligonucleotide
ctttgaggagactacccatgttggccagtcgtccgctccactaaagaaggccacg

SEQ ID NO: 529647 - DNA, 55 bp, Artificial
  Synthetic oligonucleotide
gttgtggtgcgtcatggcttgggcacccaaatcgcagggagtgacacgccagctc

SEQ ID NO: 529648 - DNA, 54 bp, Artificial
  Synthetic oligonucleotide
gttaaaaagatccctatgatcgcggaagatgggcaaaatcatcaagtcactaag

SEQ ID NO: 529649 - DNA, 54 bp, Artificial
  Synthetic oligonucleotide
gttaaaaagctgtttggtgacttgcgggatggggaagttcatcaagtcactctc

SEQ ID NO: 529650 - DNA, 54 bp, Artificial
  Synthetic oligonucleotide
cgcgtcgctcataccctgtggaacggcaaaaggagagtgtgccggatgggccga

SEQ ID NO: 529651 - DNA, 54 bp, Artificial
  Synthetic oligonucleotide
agtgccacggtcgcaacaaccacaaatacacatatatagcgcgccatgggattc

SEQ ID NO: 529652 - DNA, 54 bp, Artificial
  Synthetic oligonucleotide
gggagggagtagctgaacagactgagcgactacgagagattaggcgtcgagaga

SEQ ID NO: 529653 - DNA, 54 bp, Artificial
  Synthetic oligonucleotide
caggtggcaggacttagttcccgtgtggcttcagtgactgatgaggtagtccgt

SEQ ID NO: 529654 - DNA, 54 bp, Artificial
  Synthetic oligonucleotide
agaattatgggggcacgtatacaggccacacgcaggtgtattgggctccgtgga

SEQ ID NO: 529655 - DNA, 54 bp, Artificial
  Synthetic oligonucleotide
tatcacggctttcattaactttgtgtcagctatgcttaagatgacagtaactag

SEQ ID NO: 529656 - DNA, 54 bp, Artificial
  Synthetic oligonucleotide
tagcggtagatttaaagtataataacgttaatgtacatcgtatgtttgtagatg

SEQ ID NO: 529657 - DNA, 54 bp, Artificial
  Synthetic oligonucleotide
gttaacaaagactgaggttgacgctgtttcgttatactgcacccagatgattat

SEQ ID NO: 529658 - DNA, 54 bp, Artificial
  Synthetic oligonucleotide
agaaaagctgagagatctgcgacgcaaagaaagaggtgagctacggactaaaac

SEQ ID NO: 529659 - DNA, 54 bp, Artificial
  Synthetic oligonucleotide
gagatctgcgacgcaaagaaagaggtgagccacggactaaagcagaggtaaaag

SEQ ID NO: 529660 - DNA, 54 bp, Artificial
  Synthetic oligonucleotide
gttaaaaaggacctcgccagaatggatgaattcgcaattccaatcgtgcatggc

SEQ ID NO: 529661 - DNA, 54 bp, Artificial
  Synthetic oligonucleotide
ccctcccgagattgaacagatcttctcagctctaagcgacctaaggtcggagcg

SEQ ID NO: 529662 - DNA, 54 bp, Artificial
  Synthetic oligonucleotide
ccaccgaatgagtcgagcaaccagagtgggtgattcttttgtcagcgatgtcct

SEQ ID NO: 529663 - DNA, 54 bp, Artificial
  Synthetic oligonucleotide
tctggcggcgctagcgttaacgtcggaagatcacgcgctcgcagaacgcatcat

SEQ ID NO: 529664 - DNA, 54 bp, Artificial
  Synthetic oligonucleotide
gcgctggagattagattggcggacaacgacagagaatcgaagcattcaaattgg

SEQ ID NO: 529665 - DNA, 54 bp, Artificial
  Synthetic oligonucleotide
aaagcacggtaaggagattacaagaaagtttgggcgggagctagaagaaatata

SEQ ID NO: 529666 - DNA, 54 bp, Artificial
  Synthetic oligonucleotide
atcaggattgggagccactcaagcagtatagacatcctagtattctgtccgatt

SEQ ID NO: 529667 - DNA, 54 bp, Artificial
  Synthetic oligonucleotide
ttggcgatggcaattaagtcaaaagtggatgtaattgacgagatgaacgtagaa

SEQ ID NO: 529668 - DNA, 54 bp, Artificial
  Synthetic oligonucleotide
ttgcgtttggaggcttactactttgtttaggtaaaaggaaacctaaatttgcat

SEQ ID NO: 529669 - DNA, 54 bp, Artificial
  Synthetic oligonucleotide
taatgtagtattaatgaaatatgacgcgaacctgcaattggatatgtctgaact

SEQ ID NO: 529670 - DNA, 54 bp, Artificial
  Synthetic oligonucleotide
caccccctacgagcagtttcttagagtgttaaacgtgaccgaaggccttctcgc

SEQ ID NO: 529671 - DNA, 54 bp, Artificial
  Synthetic oligonucleotide
cgtagattcccactgctgtataacgggggagggtgcgcgacactacacacttac

SEQ ID NO: 529672 - DNA, 54 bp, Artificial
  Synthetic oligonucleotide
gacgtacgccccttcgtcctgccaaccggatgttggtccacatttaccgatatg

SEQ ID NO: 529673 - DNA, 54 bp, Artificial
  Synthetic oligonucleotide
ccactcacaactgacccatgtgcacccgtgaaagcatttatgactttggccaat

SEQ ID NO: 529674 - DNA, 54 bp, Artificial
  Synthetic oligonucleotide
gtatcaatttttaataccctattgaaactggctggatacaaagagcagattacc

SEQ ID NO: 529675 - DNA, 54 bp, Artificial
  Synthetic oligonucleotide
gtatctacttggaacactcagcgatgagttctctatttgacaaagttgcttcag

SEQ ID NO: 529676 - DNA, 54 bp, Artificial
  Synthetic oligonucleotide
tcgaaactgagtcaatcgcaccaattgatatcgtgaccaggactgaatctattc

SEQ ID NO: 529677 - DNA, 54 bp, Artificial
  Synthetic oligonucleotide
accggatcgacagccattcggttattttttagctgctccggaagtgatacagca

SEQ ID NO: 529678 - DNA, 54 bp, Artificial
  Synthetic oligonucleotide
gctatcaacgcaagcacgctctatcatgtttagattgttttgcttcgtctgctt

SEQ ID NO: 529679 - DNA, 54 bp, Artificial
  Synthetic oligonucleotide
tcccgctcttcctaaaaaacgcgtgactgcggtaatctcgggacttacacttac

SEQ ID NO: 529680 - DNA, 54 bp, Artificial
  Synthetic oligonucleotide
tttgcagttacgttaaaggaaccagttcccgatccgccggttcctgatatatca

SEQ ID NO: 529681 - DNA, 54 bp, Artificial
  Synthetic oligonucleotide
aaaagcagcgtttggtgcgatggcggaagcattacgtgatccagaaccgatacg

SEQ ID NO: 529682 - DNA, 54 bp, Artificial
  Synthetic oligonucleotide
agcgtacggcaagtcctttggatggaattatgacatcgagtttacggggaacgc

SEQ ID NO: 529683 - DNA, 54 bp, Artificial
  Synthetic oligonucleotide
acgagccctaagtggtgggctcgatatgggaagctgtagaatgtatgggggagg

SEQ ID NO: 529684 - DNA, 54 bp, Artificial
  Synthetic oligonucleotide
caagaattatgtatctaaattatcaagtcaactgcttgttactaagaatgctat

SEQ ID NO: 529685 - DNA, 54 bp, Artificial
  Synthetic oligonucleotide
atacagcgccttgggattcggacgaagttgtcatgtttcactgcgtgtcgccac

SEQ ID NO: 529686 - DNA, 54 bp, Artificial
  Synthetic oligonucleotide
gcgtactagaataatttttatactaccatatgaatatttcatagctcagcatgc

SEQ ID NO: 529687 - DNA, 54 bp, Artificial
  Synthetic oligonucleotide
cgttgtcgagttaatggaggcggaaagcgaagattggacaggccatgacgttac

SEQ ID NO: 529688 - DNA, 54 bp, Artificial
  Synthetic oligonucleotide
caataaaatgatatctgttatgcattctgtgatgggtgacgacgtcttagaggt

SEQ ID NO: 529689 - DNA, 54 bp, Artificial
  Synthetic oligonucleotide
taacgcgttaacttcaaacaccgcaaagaaaatctacagtacgattgggaaggc

SEQ ID NO: 529690 - DNA, 54 bp, Artificial
  Synthetic oligonucleotide
aaaatctcgtcgataaccagcgttatcagccaggatggactcaaagcctggtct

SEQ ID NO: 529691 - DNA, 54 bp, Artificial; identical to SEQ ID NO: 324315
  Synthetic oligonucleotide

SEQ ID NO: 529692 - DNA, 54 bp, Artificial
  Synthetic oligonucleotide
cggcgatgggcgtaccgtgatgtgcttcgcaaaacgatcacctgagcgatttca

SEQ ID NO: 529693 - DNA, 54 bp, Artificial
  Synthetic oligonucleotide
ggaatggaaggatactctgtcccaattattattgactaaaggatggccaactgg

SEQ ID NO: 529694 - DNA, 54 bp, Artificial
  Synthetic oligonucleotide
actatatacatacaatggtgagacaccgaatgcaactactggttattataccac

SEQ ID NO: 529695 - DNA, 54 bp, Artificial
  Synthetic oligonucleotide
ggggaagagatagcgatgtccatgtcaggattgttctcgatggccataatcaaa

SEQ ID NO: 529696 - DNA, 54 bp, Artificial
  Synthetic oligonucleotide
ttattgaatgtattaggggcgggagatgaaatcccagatccgttaagccctggg

SEQ ID NO: 529697 - DNA, 54 bp, Artificial
  Synthetic oligonucleotide
ttccgttgctgacacacgtgcctatcggtttcatgcccccagactaccaattcc

SEQ ID NO: 529698 - DNA, 54 bp, Artificial
  Synthetic oligonucleotide
gtgatgaggaagtcaacaatagccacagtatgggtgggtcgcacaccgttgtat

SEQ ID NO: 529699 - DNA, 54 bp, Artificial
  Synthetic oligonucleotide
tgcaccgacgggtcgagggaccagcggattacattcccgcctgagttcacgctc

SEQ ID NO: 529700 - DNA, 54 bp, Artificial
  Synthetic oligonucleotide
ggggtttatctaaagatgatctgctacatcaatctgatatcgtaaaagaggcga

SEQ ID NO: 529701 - DNA, 54 bp, Artificial
  Synthetic oligonucleotide
tgcggggatgactgcggatgttttggaggcaacggcagaggaagtcccacttat

SEQ ID NO: 529702 - DNA, 54 bp, Artificial
  Synthetic oligonucleotide
gtgatgagcaaatcgggaggattggagatcattattatacaacaaactgttaca

SEQ ID NO: 529703 - DNA, 54 bp, Artificial
  Synthetic oligonucleotide
ccgaccagatgtctcgagcgatcgctgaggctgcccgctcagtgggaatggtac

SEQ ID NO: 529704 - DNA, 54 bp, Artificial
  Synthetic oligonucleotide
ttcggccttagcggatgcatttagtgtactggcgccagatttcaatctattcgg

SEQ ID NO: 529705 - DNA, 54 bp, Artificial
  Synthetic oligonucleotide
tgatcaacgctgtcaacactcgtgttaacgctatcggagctgctgttcatttgg

SEQ ID NO: 529706 - DNA, 54 bp, Artificial
  Synthetic oligonucleotide
gtcttttccggcagtgccacccgcagtagcttgggcacagagagtgacggtagt

SEQ ID NO: 529707 - DNA, 54 bp, Artificial
  Synthetic oligonucleotide
cacgcgtagtgaatctggaccagattgctccgatgaggttcgttttggatctag

SEQ ID NO: 529708 - DNA, 54 bp, Artificial
  Synthetic oligonucleotide
cgatgaactttgccgtatcattgaaagagcccataccggacccgccagtaccgg

SEQ ID NO: 529709 - DNA, 54 bp, Artificial
  Synthetic oligonucleotide
ctaatgacgattaccagacaccaataactaattcagttacagtcagacaagatt

SEQ ID NO: 529710 - DNA, 53 bp, Artificial
  Synthetic oligonucleotide
tttcattgagtataagattacagtgaatgaagataaaccaatttcagaatcac

SEQ ID NO: 529711 - DNA, 53 bp, Artificial
  Synthetic oligonucleotide
tgtcgctttcggtgtacatcaacaatcgtcacttacctggacttctggagtat

SEQ ID NO: 529712 - DNA, 53 bp, Artificial
  Synthetic oligonucleotide
tagtgaagataccagaatcagatatgatagacatcccaagggtgagcatcgtg

SEQ ID NO: 529713 - DNA, 53 bp, Artificial
  Synthetic oligonucleotide
cagctaaatttcgtgactgaagatcaagatggaagggtgattaagggtctaag

SEQ ID NO: 529714 - DNA, 53 bp, Artificial
  Synthetic oligonucleotide
aaaagaggacaaagtacacaatgggaccaggcagcagttttatactcgaatta

SEQ ID NO: 529715 - DNA, 53 bp, Artificial
  Synthetic oligonucleotide
gtttgcatactagaggccagctatgtaatcatttagtaaggatggacttgtta

SEQ ID NO: 529716 - DNA, 53 bp, Artificial
  Synthetic oligonucleotide
attcactacgttttacttaattatgaggtgaactgggatgttgctaacgtatt

SEQ ID NO: 529717 - DNA, 53 bp, Artificial
  Synthetic oligonucleotide
agcgggcggtgattctgtggcacgcgacggcgaaacgcatgggcctgggcgag

SEQ ID NO: 529718 - DNA, 53 bp, Artificial
  Synthetic oligonucleotide
tttgtcaacgaccagctctctgacacaagtttgtgccgtctctatcctgaatg

SEQ ID NO: 529719 - DNA, 53 bp, Artificial
  Synthetic oligonucleotide
cgaacagaagcgtgtattacgagtaagtcaaatagcgacaatgtgggttgggg

SEQ ID NO: 529720 - DNA, 53 bp, Artificial
  Synthetic oligonucleotide
tacgttggggtgctcaatacgttggtgaggattcactgacatatcgtttaggt

SEQ ID NO: 529721 - DNA, 53 bp, Artificial
  Synthetic oligonucleotide
atggattcatctcgatgcatcaatgaactatattgcgaggagacggcagaagc

SEQ ID NO: 529722 - DNA, 53 bp, Artificial
  Synthetic oligonucleotide
gtttgttgaaatgtctttgcttcctctgttaaaccgcgaatctgaagaatctt

SEQ ID NO: 529723 - DNA, 53 bp, Artificial
  Synthetic oligonucleotide
gattgcaatcagttagcacacaacgccgcccgagggaacggcttcgtgaactg

SEQ ID NO: 529724 - DNA, 53 bp, Artificial
  Synthetic oligonucleotide
gacgcggaggtgccagcgttagaggcgcggtgcctgcgatggggttaggatac

SEQ ID NO: 529725 - DNA, 53 bp, Artificial
  Synthetic oligonucleotide
cagagttgatcggttgctcacccttcagaactgtaaagatcgaggagcacgta

SEQ ID NO: 529726 - DNA, 53 bp, Artificial
  Synthetic oligonucleotide
aaatttggtgctgaggagagaaaatcatcaggacgtgctttttcactcaaaag

SEQ ID NO: 529727 - DNA, 53 bp, Artificial
  Synthetic oligonucleotide
cgccgcgtggtgaaagtgtacaggatgtatcgttggtcgaaggtgtaatagcg

SEQ ID NO: 529728 - DNA, 53 bp, Artificial
  Synthetic oligonucleotide
caatggactacataatctatagatttttactaatcattgttctgatatcgcca

SEQ ID NO: 529729 - DNA, 53 bp, Artificial
  Synthetic oligonucleotide
gattcgattcggacgcgcctcgggaaccgttccgccatatacgcccgatggtg

SEQ ID NO: 529730 - DNA, 53 bp, Artificial
  Synthetic oligonucleotide
gcgttagggatggcacaagaggccagtggacggactttaacggaggcttatag

SEQ ID NO: 529731 - DNA, 53 bp, Artificial
  Synthetic oligonucleotide
ggaattacgaaacaacaagcactaaacatactaaagtcagatccgaaaacttt

SEQ ID NO: 529732 - DNA, 53 bp, Artificial
  Synthetic oligonucleotide
ctgatcgtggaaacaaggattggaaagaatggaggaaagtagttgagtcgcaa

SEQ ID NO: 529733 - DNA, 53 bp, Artificial
  Synthetic oligonucleotide
ccaattctgaattagagaagaaatgtatcgatttccatgctaagtgtgtggat

SEQ ID NO: 529734 - DNA, 53 bp, Artificial
  Synthetic oligonucleotide
aacactggcctactgaatgctattgatgcctcatttggcattgagtctaaaag

SEQ ID NO: 529735 - DNA, 53 bp, Artificial
  Synthetic oligonucleotide
ccaatcctgaactagaaaagagatgtatcgattttcatgctaagtgtgttgat

SEQ ID NO: 529736 - DNA, 53 bp, Artificial
  Synthetic oligonucleotide
ggatggcatacttaccaccaattctacagcaagaatatgcgttgaggtatttt

SEQ ID NO: 529737 - DNA, 53 bp, Artificial
  Synthetic oligonucleotide
agagccaatactacgagacgtaaagaccactaggatggatggatacccatatg

SEQ ID NO: 529738 - DNA, 53 bp, Artificial
  Synthetic oligonucleotide
aaaagtggagaaagtcgcgtacgcttcatatgcggaggcgtttagggatgatt

SEQ ID NO: 529739 - DNA, 53 bp, Artificial
  Synthetic oligonucleotide
catctcagtctctttcgatttctgatctccagcaacgagttacggccttagaa

SEQ ID NO: 529740 - DNA, 53 bp, Artificial
  Synthetic oligonucleotide
gaagagcgtaccgttggaacgagtcggtattcagctattactgcaaacgatca

SEQ ID NO: 529741 - DNA, 53 bp, Artificial
  Synthetic oligonucleotide
gtgaggttgagagacaagttaacacatgtccttatactggatacaaaggtaga

SEQ ID NO: 529742 - DNA, 53 bp, Artificial
  Synthetic oligonucleotide
actattttgacttacaacgtgaggaaaacgatagcgtttataaatggattata

SEQ ID NO: 529743 - DNA, 53 bp, Artificial
  Synthetic oligonucleotide
ggggaaaacctctactctctgcatgcaatcatacggaacgtctacgaatacac

SEQ ID NO: 529744 - DNA, 53 bp, Artificial
  Synthetic oligonucleotide
aatgcctcggatccctcgtcattacggctgatgacatccgccgacctgtcaac

SEQ ID NO: 529745 - DNA, 53 bp, Artificial
  Synthetic oligonucleotide
cttgggactaatcattctgttagtgatctcgttaccgtgtttacacttatgaa

SEQ ID NO: 529746 - DNA, 53 bp, Artificial
  Synthetic oligonucleotide
ccgatccggcgtgatgggcaggacgttaacaacgacgcagaagcagagcgata

SEQ ID NO: 529747 - DNA, 53 bp, Artificial
  Synthetic oligonucleotide
gagactagagtatcggtattagagcgtactgcagttactagtgcctccgcccc

SEQ ID NO: 529748 - DNA, 53 bp, Artificial
  Synthetic oligonucleotide
cggacgccaatcgtagccgatgagatctgtagaataacatcacagataggacg

SEQ ID NO: 529749 - DNA, 53 bp, Artificial
  Synthetic oligonucleotide
cggaagctaatagaggggatgcgccacaactaccaagcgcttgcgaagagcgt

SEQ ID NO: 529750 - DNA, 53 bp, Artificial
  Synthetic oligonucleotide
tatgatgcgtgatccatcgcatgcttttaatggggtgaagttggaaggtgagg

SEQ ID NO: 529751 - DNA, 53 bp, Artificial
  Synthetic oligonucleotide
tatgatcaacttcttgaaacaagatgagtttgctcgacatttcaatagatatg

SEQ ID NO: 529752 - DNA, 53 bp, Artificial
  Synthetic oligonucleotide
ctagtcatctgtgcactgtttgcatggctcaattcgcttcagccgacgcgtta

SEQ ID NO: 529753 - DNA, 53 bp, Artificial
  Synthetic oligonucleotide
cagtacgtacccatctgtaatctactgcttggtgtaccaaagaggtagtgtga

SEQ ID NO: 529754 - DNA, 53 bp, Artificial
  Synthetic oligonucleotide
actgtcgtaggtaacaagtcacctattcgtacgtcttcccaaattcaacttac

SEQ ID NO: 529755 - DNA, 53 bp, Artificial
  Synthetic oligonucleotide
caggttttgtgtgatgatgaaggataagaacttgaagatagacatgcgtgaga

SEQ ID NO: 529756 - DNA, 53 bp, Artificial
  Synthetic oligonucleotide
gtatccgcatcagctgactaagacggagctagacgcaatagtactgtattgct

SEQ ID NO: 529757 - DNA, 53 bp, Artificial
  Synthetic oligonucleotide
gatggcctacggggtccgtgtatctaaaagaatatacagacatcgcttctttt

SEQ ID NO: 529758 - DNA, 53 bp, Artificial
  Synthetic oligonucleotide
gtattaatgttagtgctaatcttgattcatgtatatcaattacaactgatcat

SEQ ID NO: 529759 - DNA, 53 bp, Artificial
  Synthetic oligonucleotide
gcctggcatacagaggaacgaaaggataagcgacatgaagcagcccgtatata

SEQ ID NO: 529760 - DNA, 53 bp, Artificial
  Synthetic oligonucleotide
cgtgcacatcaagtaactgatatcttgaagaaattgggtttggacgtatcggg

SEQ ID NO: 529761 - DNA, 53 bp, Artificial
  Synthetic oligonucleotide
tctaccgatagttaaacaagaatatgagaaacatgataacaaatatcatgtta

SEQ ID NO: 529762 - DNA, 53 bp, Artificial
  Synthetic oligonucleotide
tctcatggattcgtatgtccaaataccagacggtaacataattaaaaagattc

SEQ ID NO: 529763 - DNA, 53 bp, Artificial
  Synthetic oligonucleotide
tcatccttgctcagagtacaggagccaattgctcacgccacctctgacctcat

SEQ ID NO: 529764 - DNA, 53 bp, Artificial
  Synthetic oligonucleotide
cgtttgggttagctttgagacgcaggcaggcttaggagattctattgaggggt

SEQ ID NO: 529765 - DNA, 53 bp, Artificial
  Synthetic oligonucleotide
tcaggttcttgcgtctggtgtggtcgtcacctactctcgacggattagttgtg

SEQ ID NO: 529766 - DNA, 53 bp, Artificial
  Synthetic oligonucleotide
gtccagatctctgtacggccagatcgcaccttcggcgtgacgacgtgtggtat

SEQ ID NO: 529767 - DNA, 53 bp, Artificial
  Synthetic oligonucleotide
gagcatactgctaataatagcacgatgatggatggctttctaagatcttggat

SEQ ID NO: 529768 - DNA, 53 bp, Artificial
  Synthetic oligonucleotide
gatggtgttgaggcgacacaagagcgttgggaggagtggaaatttgaaactat

SEQ ID NO: 529769 - DNA, 53 bp, Artificial
  Synthetic oligonucleotide
gtcgattagacctacatataccgatagatgcgcgggagtttgtgataggaaaa

SEQ ID NO: 529770 - DNA, 53 bp, Artificial
  Synthetic oligonucleotide
gaacgtgtttgttctagaccagaaacgtaagacgttatgtggtcaaatagcgg

SEQ ID NO: 529771 - DNA, 53 bp, Artificial
  Synthetic oligonucleotide
cccagatccattaagtccgggtgaaagaggattgcaacataaaatccgtgaaa

SEQ ID NO: 529772 - DNA, 53 bp, Artificial
  Synthetic oligonucleotide
tgacatatggaactgcggacacagaagatacgattgtatgtaccgaggtcagt

SEQ ID NO: 529773 - DNA, 53 bp, Artificial
  Synthetic oligonucleotide
ccgaatttctgcgctacgcgtgaaggcgggtggtatatggatcttcaacttac

SEQ ID NO: 529774 - DNA, 53 bp, Artificial
  Synthetic oligonucleotide
acaagaacatcaggtctcttcttatgaacaaatcgctatctttgatgacctcg

SEQ ID NO: 529775 - DNA, 53 bp, Artificial
  Synthetic oligonucleotide
ggcggaagggaatactatgaagtggcaggaagattttcgttgatctcattggt

SEQ ID NO: 529776 - DNA, 53 bp, Artificial
  Synthetic oligonucleotide
agaaacgggattgtctcctttggatgatgttgtcactatcagaatgaaggatt

SEQ ID NO: 529777 - DNA, 53 bp, Artificial
  Synthetic oligonucleotide
agtcgaagaatcgtatcgaggaaataactgattgggatacctttgttgtgttt

SEQ ID NO: 529778 - DNA, 53 bp, Artificial
  Synthetic oligonucleotide
tggcttctacttcgcttccaagacacgggggcaggctatggataactggacgt

SEQ ID NO: 529779 - DNA, 52 bp, Artificial
  Synthetic oligonucleotide
atgcgagtcgaacggatatggcgtacatccattcgcgctgaatgtggtgcag

SEQ ID NO: 529780 - DNA, 52 bp, Artificial
  Synthetic oligonucleotide
acaatcatcaatacccttctaaagttggctggttataaagaacatgttacta

SEQ ID NO: 529781 - DNA, 52 bp, Artificial
  Synthetic oligonucleotide
gtctacttcaagagttatgctgatatatcgtccttctctgtagatccgcagt

SEQ ID NO: 529782 - DNA, 52 bp, Artificial
  Synthetic oligonucleotide
cgataccgccttaagcgtcgtcacccgagactttacctcctttcggtctcgt

SEQ ID NO: 529783 - DNA, 52 bp, Artificial
  Synthetic oligonucleotide
ggaaactgcaaaatgtaccccttcataaaagggactgccaaattaagaacgg

SEQ ID NO: 529784 - DNA, 52 bp, Artificial
  Synthetic oligonucleotide
aaatatgcttccgccgatcttcccaccaaatgatagagatagtgttttaaca

SEQ ID NO: 529785 - DNA, 52 bp, Artificial; identical to SEQ ID NO: 466165
  Synthetic oligonucleotide

SEQ ID NO: 529786 - DNA, 52 bp, Artificial
  Synthetic oligonucleotide
atgttacagattacggtaagtggtgagataccgaatgacatacgcgttgaga

SEQ ID NO: 529787 - DNA, 52 bp, Artificial
  Synthetic oligonucleotide
tgaattttatagcgtttctaccagatgtagaatattcacacaatgtaaactc

SEQ ID NO: 529788 - DNA, 52 bp, Artificial
  Synthetic oligonucleotide
caacccgcgtgaagccgtatacatcaccgcaacgcttgtccatcgattcatg

SEQ ID NO: 529789 - DNA, 52 bp, Artificial
  Synthetic oligonucleotide
gttgacagaccaattccactaggacgtagagatgtccctgggcgaagaacac

SEQ ID NO: 529790 - DNA, 52 bp, Artificial
  Synthetic oligonucleotide
gatgcttacatacgcttagacgagactgaacgtgctcagggtgtgtttaaag

SEQ ID NO: 529791 - DNA, 52 bp, Artificial
  Synthetic oligonucleotide
ggacaaatagcagcgagacaatcattgccatattgtcaaatcaaaataggga

SEQ ID NO: 529792 - DNA, 52 bp, Artificial
  Synthetic oligonucleotide
ggggaggggtggcgacgagcatagcaactgcgcgtgcgatagaaggagggta

SEQ ID NO: 529793 - DNA, 52 bp, Artificial
  Synthetic oligonucleotide
ctcgagtaccgctctgtgctggtatctctccctcaaatagtgagcccttcct

SEQ ID NO: 529794 - DNA, 52 bp, Artificial
  Synthetic oligonucleotide
taggaccatttccaccccctacgagcagtttcttagagtgttaaacgtgacc

SEQ ID NO: 529795 - DNA, 52 bp, Artificial
  Synthetic oligonucleotide
aggatggccaactggttccgtttatcttaagagctacacagatattgcaact

SEQ ID NO: 529796 - DNA, 52 bp, Artificial
  Synthetic oligonucleotide
cgattactgaattagcattaaaagttgtaggacacagcaaacgtatcaatac

SEQ ID NO: 529797 - DNA, 52 bp, Artificial
  Synthetic oligonucleotide
ggggattagagacagtcatgtcgggaggcgttcgaacaaatatctttgaggc

SEQ ID NO: 529798 - DNA, 52 bp, Artificial
  Synthetic oligonucleotide
gtgagacttgcagattcactatcgtcacccactattgaaacacgaacacgtc

SEQ ID NO: 529799 - DNA, 52 bp, Artificial
  Synthetic oligonucleotide
aacacctgagaaagcagtgcgaagtgatcagaaccaccgcctcccatgagct

SEQ ID NO: 529800 - DNA, 52 bp, Artificial
  Synthetic oligonucleotide
ggggcgtataaattaaagaaggtcatcaatgcactcagcggaattgacttat

SEQ ID NO: 529801 - DNA, 52 bp, Artificial
  Synthetic oligonucleotide
atgcgcagactgtaacagctaaagttgaggaatcaatcattgcattgcgcaa

SEQ ID NO: 529802 - DNA, 52 bp, Artificial
  Synthetic oligonucleotide
aattatgtgggatacgatagagcttctgtgctggatgttaaacgtggaatta

SEQ ID NO: 529803 - DNA, 52 bp, Artificial
  Synthetic oligonucleotide
aattcatccacgtaaaggtttggtcgtattttgcatcgcggatgatttaacg

SEQ ID NO: 529804 - DNA, 52 bp, Artificial
  Synthetic oligonucleotide
gaagacattatgttcaaatattttcacactagtgattctcttgggtttaacg

SEQ ID NO: 529805 - DNA, 52 bp, Artificial
  Synthetic oligonucleotide
gacgccgtcgtgctcttgcatgtgatcgggccgtatcactctgggcaggcgt

SEQ ID NO: 529806 - DNA, 52 bp, Artificial
  Synthetic oligonucleotide
agttggtctccttcgcttccaacttacgtggtacctccgggtgatcatacgt

SEQ ID NO: 529807 - DNA, 52 bp, Artificial
  Synthetic oligonucleotide
ttgaaacaaaatcaatttgagttgcttactaaattattaggggatagtttat

SEQ ID NO: 529808 - DNA, 52 bp, Artificial
  Synthetic oligonucleotide
tctagtgcaggatgtctcggatttgactcgagagttttttaagctagcgtat

SEQ ID NO: 529809 - DNA, 52 bp, Artificial
  Synthetic oligonucleotide
agctaatcgcattactgcgcgcacacagtcccttcggaacggtattccctga

SEQ ID NO: 529810 - DNA, 52 bp, Artificial
  Synthetic oligonucleotide
gaaaaaggctggactagttgatataccaaagatgatacaggattggctagtg

SEQ ID NO: 529811 - DNA, 52 bp, Artificial
  Synthetic oligonucleotide
agcctgtacgagcggattgcgtcgatcaacttaggcttcacatgtcgcatta

SEQ ID NO: 529812 - DNA, 52 bp, Artificial
  Synthetic oligonucleotide
tcggaagcggaaacgttgaatgatgcgaacccccggttgcataagatatatg

SEQ ID NO: 529813 - DNA, 52 bp, Artificial; identical to SEQ ID NO: 415241
  Synthetic oligonucleotide

SEQ ID NO: 529814 - DNA, 52 bp, Artificial
  Synthetic oligonucleotide
gtacgcgtggactcgagcggtacatttccacgggagcgaggttgagagcgtg

SEQ ID NO: 529815 - DNA, 52 bp, Artificial
  Synthetic oligonucleotide
gtactatatctgattcagatgggtttcgaaaagcagatctcaacattaagcg

SEQ ID NO: 529816 - DNA, 52 bp, Artificial
  Synthetic oligonucleotide
agtcgattggaaatcaagatatgatcagttggaaagacgattcgaatcgtta

SEQ ID NO: 529817 - DNA, 52 bp, Artificial
  Synthetic oligonucleotide
cgaaactcgtgaactagcttcgtgactgaagctactggcgacatcaacttac

SEQ ID NO: 529818 - DNA, 52 bp, Artificial
  Synthetic oligonucleotide
gtagccgatgcgaaaggtaatgaatcgttagtacggttagaaaaactgatgc

SEQ ID NO: 529819 - DNA, 52 bp, Artificial
  Synthetic oligonucleotide
gtagcgcagtactccggcttttctgtttcgtgtgctatggatacgcgccacg

SEQ ID NO: 529820 - DNA, 52 bp, Artificial
  Synthetic oligonucleotide
cagatagaggtgacatgagtgatagagaatgggaaaggcatagatttgcgga

SEQ ID NO: 529821 - DNA, 52 bp, Artificial
  Synthetic oligonucleotide
cacacggaaatatcgattcttacacttcttggacttcttatttacctcctat

SEQ ID NO: 529822 - DNA, 52 bp, Artificial
  Synthetic oligonucleotide
attctcaccattccagtaacatatcgcgctttctttgaagaagtggaaggta

SEQ ID NO: 529823 - DNA, 52 bp, Artificial
  Synthetic oligonucleotide
gtttgtttaaaattattacatcaagcgctttgcgaggtgccccacgtcaaac

SEQ ID NO: 529824 - DNA, 52 bp, Artificial
  Synthetic oligonucleotide
gttgcaaccacacgagggtgcatatggttaatcacctaataaataacggatt

SEQ ID NO: 529825 - DNA, 52 bp, Artificial
  Synthetic oligonucleotide
gtcgaggtgaccctgaggtctacgagttcggacagcgtagtttcgccaactt

SEQ ID NO: 529826 - DNA, 52 bp, Artificial
  Synthetic oligonucleotide
agatttgaagcatttaggttagataacgagaggaaaaaggaggagtttgaga

SEQ ID NO: 529827 - DNA, 52 bp, Artificial
  Synthetic oligonucleotide
catgtccgaactagcagatttgttacttaatgagtggttatgtaatcctatg

SEQ ID NO: 529828 - DNA, 52 bp, Artificial
  Synthetic oligonucleotide
tgaacacgatggtaggatggttgatcagaagcagtctggactcatattgtgt

SEQ ID NO: 529829 - DNA, 52 bp, Artificial
  Synthetic oligonucleotide
gcgaagaagatttacagtacgattgggaaagcagctgagaggttcgcagaga

SEQ ID NO: 529830 - DNA, 52 bp, Artificial; identical to SEQ ID NO: 328428
  Synthetic oligonucleotide

SEQ ID NO: 529831 - DNA, 52 bp, Artificial
  Synthetic oligonucleotide
ttggttcctccaacaatagacaaggactagtatcctacttagagtacatgtg

SEQ ID NO: 529832 - DNA, 52 bp, Artificial
  Synthetic oligonucleotide
tgtatcaacttcagagccttttttgacatcgacgctgtgtctatattatcca

SEQ ID NO: 529833 - DNA, 52 bp, Artificial
  Synthetic oligonucleotide
aaactttatgatttaacggttgccttacgaaaggaggtggatgacagaacgc

SEQ ID NO: 529834 - DNA, 52 bp, Artificial
  Synthetic oligonucleotide
acatcctaaaaaatgcatagtgttgataatcgtaggggatgataagctggaa

SEQ ID NO: 529835 - DNA, 52 bp, Artificial
  Synthetic oligonucleotide
tctcattgttcttcttgtgctcgtggttttgatcgtgtattgttgtaaacat

SEQ ID NO: 529836 - DNA, 52 bp, Artificial
  Synthetic oligonucleotide
ctgagatccgatcagagttctatcttcttctagacatttgggacattagcaa

SEQ ID NO: 529837 - DNA, 52 bp, Artificial
  Synthetic oligonucleotide
cgacaatatggcgtacgaacatagacagtgggcggtacctctgctcttctac

SEQ ID NO: 529838 - DNA, 52 bp, Artificial
  Synthetic oligonucleotide
taactccaacctgagagaccactagggagctccccactcccgtgttgtgacc

SEQ ID NO: 529839 - DNA, 52 bp, Artificial
  Synthetic oligonucleotide
agctacccaatacggctacgttaggagaaatcaattgcggctgggcatgagg

SEQ ID NO: 529840 - DNA, 52 bp, Artificial
  Synthetic oligonucleotide
attgggagaactgtacaatgtggggttacgccaaccccgattccaaaaagtt

SEQ ID NO: 529841 - DNA, 52 bp, Artificial
  Synthetic oligonucleotide
gggcggtgtgttttctagcgcactaatcaagcataggattccaagaacgcgt

SEQ ID NO: 529842 - DNA, 52 bp, Artificial
  Synthetic oligonucleotide
gggccggattattgcgtgggatgggcaagcggcattacaggtacataaccca

SEQ ID NO: 529843 - DNA, 52 bp, Artificial
  Synthetic oligonucleotide
gaagctcgtgagcatgctggactacgccgtccacggcttcgacagggtcatc

SEQ ID NO: 529844 - DNA, 52 bp, Artificial
  Synthetic oligonucleotide
tgctaactcaacacaagacaataactttttatcttcaactctatgtttatat

SEQ ID NO: 529845 - DNA, 52 bp, Artificial
  Synthetic oligonucleotide
aacgaaggcgcaacgtagcgcgttgcttagactcttctgcttcgtatgttac

SEQ ID NO: 529846 - DNA, 52 bp, Artificial
  Synthetic oligonucleotide
aatccgtggatatctacaattacatagtctatgtggactgctttgttggtgt

SEQ ID NO: 529847 - DNA, 52 bp, Artificial
  Synthetic oligonucleotide
cttgctgaaggacagttcctctaggggagccgtccgctcgacataaggatac

SEQ ID NO: 529848 - DNA, 52 bp, Artificial
  Synthetic oligonucleotide
tgctatggcggaagcattgcgtgatccagaacccatacgtcaaattaaaaag

SEQ ID NO: 529849 - DNA, 52 bp, Artificial
  Synthetic oligonucleotide
aacgatatcgctgcttccacgatgggtgcgcttgctaacaccacccccctgg

SEQ ID NO: 529850 - DNA, 52 bp, Artificial
  Synthetic oligonucleotide
gacattggttcagcggcaatcgatgggctcatccagggtagcgttcaatcgg

SEQ ID NO: 529851 - DNA, 52 bp, Artificial
  Synthetic oligonucleotide
caacacgtgactgttctacacggaagtgaggcggaaacgttgagttatgcgg

SEQ ID NO: 529852 - DNA, 52 bp, Artificial
  Synthetic oligonucleotide
tactttatattctaatgtgagtgatctaattcagcaatttaatcaaatggta

SEQ ID NO: 529853 - DNA, 52 bp, Artificial
  Synthetic oligonucleotide
atgcgggcatgtgccacgttacaagaagcaagaatcgtattagaagcgaatg

SEQ ID NO: 529854 - DNA, 52 bp, Artificial
  Synthetic oligonucleotide
gcgatcaatacacgcctagaggcagacgtgaagtcagcacaatcttgcagcc

SEQ ID NO: 529855 - DNA, 52 bp, Artificial
  Synthetic oligonucleotide
gagacacgtaccgcagaaaaagtcgaggatatactaccactcgtattttttc

SEQ ID NO: 529856 - DNA, 52 bp, Artificial
  Synthetic oligonucleotide
acttaatgacgttaggaagatctatttagccctaatgtttccgggacagatt

SEQ ID NO: 529857 - DNA, 52 bp, Artificial
  Synthetic oligonucleotide
acttatgaatattgaaacgcgtgttgccgaggagttagccgaatacatgact

SEQ ID NO: 529858 - DNA, 52 bp, Artificial
  Synthetic oligonucleotide
tggctggctaagaagccatagtcagccatatcgcgtgtggctcgagccttaa

SEQ ID NO: 529859 - DNA, 52 bp, Artificial; identical to SEQ ID NO: 338592
  Synthetic oligonucleotide

SEQ ID NO: 529860 - DNA, 52 bp, Artificial
  Synthetic oligonucleotide
aagaaagcttctcactaccgcaatttgttcatggaatgctggcgtggatggt

SEQ ID NO: 529861 - DNA, 52 bp, Artificial
  Synthetic oligonucleotide
ctggtgagagtttaaacgatcgcgggcctccagtagaagggtgttactcatc

SEQ ID NO: 529862 - DNA, 51 bp, Artificial
  Synthetic oligonucleotide
caatgggcaactgactgtgaaatcgacctcgccgagtctaagatatccaat

SEQ ID NO: 529863 - DNA, 51 bp, Artificial
  Synthetic oligonucleotide
tagcgttaaaaacgtcaaagtgttcgttcaaagtaatcaaatattgtatgg

SEQ ID NO: 529864 - DNA, 51 bp, Artificial
  Synthetic oligonucleotide
caaaatacttggggatcgtttggacgtaccactcttcttacgaaatgcttg

SEQ ID NO: 529865 - DNA, 51 bp, Artificial
  Synthetic oligonucleotide
cacaaggcttcaattccaaccatgaaaattgcacttaaaacatctaaatgt

SEQ ID NO: 529866 - DNA, 51 bp, Artificial
  Synthetic oligonucleotide
gctgttcacgttacataaggcttcaattccaactatgaaaatcgctcttaa

SEQ ID NO: 529867 - DNA, 51 bp, Artificial
  Synthetic oligonucleotide
ccccagctgatctgggaagttccacggagcggcgtgtcgaatcttgtcctc

SEQ ID NO: 529868 - DNA, 51 bp, Artificial
  Synthetic oligonucleotide
tccatcattagttaataagtataagcatatagttaatgtcggaccaagaaa

SEQ ID NO: 529869 - DNA, 51 bp, Artificial
  Synthetic oligonucleotide
gatgttgcggcgtcgggaaaggccgctaaattttctccgatggtggctaca

SEQ ID NO: 529870 - DNA, 51 bp, Artificial; identical to SEQ ID NO: 373044
  Synthetic oligonucleotide

SEQ ID NO: 529871 - DNA, 51 bp, Artificial
  Synthetic oligonucleotide
caaattgtacaagtgatgtccaaacgatcacgttctttaaattccgctgct

SEQ ID NO: 529872 - DNA, 51 bp, Artificial
  Synthetic oligonucleotide
tactgattgtagctgtcttttccataattactaatgcacagaactacggca

SEQ ID NO: 529873 - DNA, 51 bp, Artificial
  Synthetic oligonucleotide
taatgcaccagctaatacgcaacaatttgagcatatagtgcagcttcgaag

SEQ ID NO: 529874 - DNA, 51 bp, Artificial
  Synthetic oligonucleotide
gattcgatccagcccacattaactcgcaggacttgtgtcggatactatcac

SEQ ID NO: 529875 - DNA, 51 bp, Artificial
  Synthetic oligonucleotide
atcgtaacgacggtttctcgctttttggtgaatgtctcgataaagtgcgtc

SEQ ID NO: 529876 - DNA, 51 bp, Artificial
  Synthetic oligonucleotide
gcaagtatcaagattgtcgaataggctaaggttcaaagaaatggttacgca

SEQ ID NO: 529877 - DNA, 51 bp, Artificial
  Synthetic oligonucleotide
tgtattctcgcatgaagattacctaattgcgagggaactaatcatcctttc

SEQ ID NO: 529878 - DNA, 51 bp, Artificial
  Synthetic oligonucleotide
cttatgtatagtccgcatgtgcacgggtgcggggtatacagacgcgagtgt

SEQ ID NO: 529879 - DNA, 51 bp, Artificial
  Synthetic oligonucleotide
aacagctatccacatacaccgatggattagaggatgtggtatctggaatga

SEQ ID NO: 529880 - DNA, 51 bp, Artificial
  Synthetic oligonucleotide
tctattatagagtatagatatatcttagattagaattgtatgatgtgacca

SEQ ID NO: 529881 - DNA, 51 bp, Artificial; identical to SEQ ID NO: 443148
  Synthetic oligonucleotide

SEQ ID NO: 529882 - DNA, 51 bp, Artificial
  Synthetic oligonucleotide
ttaaaaattctggagacatgaagggcatggatgcccatactattcctaacc

SEQ ID NO: 529883 - DNA, 51 bp, Artificial
  Synthetic oligonucleotide
cgctttagacgcgataagagatacttggataggagggaacttcgagcgaac

SEQ ID NO: 529884 - DNA, 51 bp, Artificial
  Synthetic oligonucleotide
ataatcggagatctcgaagctacgggatcacgcgtcatggatgcggctgat

SEQ ID NO: 529885 - DNA, 51 bp, Artificial
  Synthetic oligonucleotide
gcatttggaattatcaacttagccgctaccatgataatgatgtttatggcg

SEQ ID NO: 529886 - DNA, 51 bp, Artificial
  Synthetic oligonucleotide
cgaatttttccagttagcggcacaaatcgacggggcaggagcaatacatca

SEQ ID NO: 529887 - DNA, 51 bp, Artificial
  Synthetic oligonucleotide
tttacaccttctcaattattttccactttcacgcgtctagaaacgatcttt

SEQ ID NO: 529888 - DNA, 51 bp, Artificial
  Synthetic oligonucleotide
tgggactcagtcggtacgctctctgaaggttccccctatcgaggctagagc

SEQ ID NO: 529889 - DNA, 51 bp, Artificial
  Synthetic oligonucleotide
tttagtacttatgaaatatgaccaaagtcttgaattagatatgtcggagtt

SEQ ID NO: 529890 - DNA, 51 bp, Artificial
  Synthetic oligonucleotide
aaaatccatatgaaccgatagaagtgactgcatccatgtgagaggttgagt

SEQ ID NO: 529891 - DNA, 51 bp, Artificial
  Synthetic oligonucleotide
cgcttcgcaccattaaaagtgaactaaagaagcgtaaaatggccaaacccc

SEQ ID NO: 529892 - DNA, 51 bp, Artificial
  Synthetic oligonucleotide
cccttaaggctactgtttttgatcccatcagttcgagagtaagcacggttg

SEQ ID NO: 529893 - DNA, 51 bp, Artificial
  Synthetic oligonucleotide
aaactcaaactatccttccatctttagtagtgaatgcaacctgtcaactga

SEQ ID NO: 529894 - DNA, 51 bp, Artificial
  Synthetic oligonucleotide
gcgtttgagacggaaggtacgctctgcgacgtatcgcagattgtggttcac

SEQ ID NO: 529895 - DNA, 51 bp, Artificial
  Synthetic oligonucleotide
tatacatgataacctgatagctaaaccagttgacgttatagatatgtcgaa

SEQ ID NO: 529896 - DNA, 51 bp, Artificial
  Synthetic oligonucleotide
gctggcgtctaacgcgtctggtcgtattgactccgtaggcttgtgtatgcc

SEQ ID NO: 529897 - DNA, 51 bp, Artificial
  Synthetic oligonucleotide
ctgatgtcactaagcaaatggttcaggaagtgtcaaatgatgtaagatacg

SEQ ID NO: 529898 - DNA, 51 bp, Artificial
  Synthetic oligonucleotide
tctgtgggccagacatgatccaagtttcgatgaatgcgggtgcgagggcgg

SEQ ID NO: 529899 - DNA, 51 bp, Artificial
  Synthetic oligonucleotide
gggccaggtgaagtgaatgactcaactgtggtgcaacctgtgctggatgga

SEQ ID NO: 529900 - DNA, 51 bp, Artificial
  Synthetic oligonucleotide
tatatcgctccgaacccaagaatctcatccattacactgactcaaagaatt

SEQ ID NO: 529901 - DNA, 51 bp, Artificial
  Synthetic oligonucleotide
gtctagaaccagtagagcttgatgatggcaagtatgttttagttaaccatg

SEQ ID NO: 529902 - DNA, 51 bp, Artificial
  Synthetic oligonucleotide
agtagattcaaatgtacgtatcgacaagatcaaacggagatttcctttatc

SEQ ID NO: 529903 - DNA, 51 bp, Artificial
  Synthetic oligonucleotide
atttaccgatcactggttccatggatacaacatatgcaaattcatcacagc

SEQ ID NO: 529904 - DNA, 51 bp, Artificial
  Synthetic oligonucleotide
ttttacagtcagtgaagcacatttgccaatgcagtatcaaaagttcatgcc

SEQ ID NO: 529905 - DNA, 51 bp, Artificial
  Synthetic oligonucleotide
gtttggttcagctattagaaacagaaattggatgactgattctaaaacggt

SEQ ID NO: 529906 - DNA, 51 bp, Artificial
  Synthetic oligonucleotide
cttaccgaatatgcttccgccgatcttcccaccaaatgatagagatagcgt

SEQ ID NO: 529907 - DNA, 51 bp, Artificial
  Synthetic oligonucleotide
ggattttcgacctcacgggccaacactcgttcatcacaggccgggacatcg

SEQ ID NO: 529908 - DNA, 51 bp, Artificial
  Synthetic oligonucleotide
cggtggaacgcctgtgcacgagctgaatctgttaactaccgctcaagcttg

SEQ ID NO: 529909 - DNA, 51 bp, Artificial
  Synthetic oligonucleotide
attggtttgacataaggtttatgagaaacactccaatgactacgttcacag

SEQ ID NO: 529910 - DNA, 51 bp, Artificial
  Synthetic oligonucleotide
agatcagaacccaactagtagtgtggtaactgattgggcaaacgaagctca

SEQ ID NO: 529911 - DNA, 51 bp, Artificial
  Synthetic oligonucleotide
ttctaaagaatactaccgcaacagaaataatacagaaacagatcaaaccat

SEQ ID NO: 529912 - DNA, 51 bp, Artificial
  Synthetic oligonucleotide
tgagtcaaatgttctagaaatcctaggaatagcaattaatcggtataacgg

SEQ ID NO: 529913 - DNA, 51 bp, Artificial
  Synthetic oligonucleotide
aaattcccactgttgtctagcgggggagggtatgcggcactacacacttac

SEQ ID NO: 529914 - DNA, 51 bp, Artificial
  Synthetic oligonucleotide
gtgtgaaagtggggaagtaatcaacttagctgcgcgcatgtctcagatgtg

SEQ ID NO: 529915 - DNA, 51 bp, Artificial
  Synthetic oligonucleotide
aggatcggaactttttcgaatgcggcaggaaacgcacaagatacaccacaa

SEQ ID NO: 529916 - DNA, 51 bp, Artificial
  Synthetic oligonucleotide
tgcagtggaaagaaagctagtacattatgcaaaaggtaaacctttagaagc

SEQ ID NO: 529917 - DNA, 51 bp, Artificial
  Synthetic oligonucleotide
tgcgcgtggatgataccatttctcaaccgccaaggtatgctccgagtgcac

SEQ ID NO: 529918 - DNA, 51 bp, Artificial
  Synthetic oligonucleotide
catcaatcgcccacattactttatattccacgtatgctcccaaaagccctt

SEQ ID NO: 529919 - DNA, 51 bp, Artificial
  Synthetic oligonucleotide
ggaccaagagaaaatgtagcaattatacaagtgggagggtcaagtacaatt

SEQ ID NO: 529920 - DNA, 51 bp, Artificial
  Synthetic oligonucleotide
gtgacatcaaaaacaccgtgtcgttcgaccccggatgggccgcgaattatg

SEQ ID NO: 529921 - DNA, 51 bp, Artificial
  Synthetic oligonucleotide
tttgcttatattcacgaacttaatgggcgcagagtgtatctcgattacagt

SEQ ID NO: 529922 - DNA, 51 bp, Artificial
  Synthetic oligonucleotide
gttcactgatgagagcacaaacccagtcgacattcgatgcgaaggcgtcgg

SEQ ID NO: 529923 - DNA, 51 bp, Artificial
  Synthetic oligonucleotide
cgtactagagtatcacgtctctacggtttaccagctgcaaatccaaataac

SEQ ID NO: 529924 - DNA, 51 bp, Artificial
  Synthetic oligonucleotide
tgcattcaataattcaggatccaggcatggcgtactttccctatatcgcat

SEQ ID NO: 529925 - DNA, 51 bp, Artificial
  Synthetic oligonucleotide
aactatttggggagtgcccagcgggtgaatttccgatgcaccatatgatgc

SEQ ID NO: 529926 - DNA, 51 bp, Artificial
  Synthetic oligonucleotide
agcgctaagcgacttacgcagcgaaagaccgtacaggctcgaggagtggct

SEQ ID NO: 529927 - DNA, 51 bp, Artificial
  Synthetic oligonucleotide
agatgcgaagctaaataatacctcagaagtggtattacctgactattacgg

SEQ ID NO: 529928 - DNA, 51 bp, Artificial
  Synthetic oligonucleotide
acacccaatctacctaggatcgcttcactatgatatttcgttcacagattt

SEQ ID NO: 529929 - DNA, 51 bp, Artificial
  Synthetic oligonucleotide
atgataactaaaccagttgataaaatcgatatgtcacaagagtttaatcag

SEQ ID NO: 529930 - DNA, 51 bp, Artificial
  Synthetic oligonucleotide
tgacaaaaggatggccaactggttcagtttaccttaaaagttacgcagata

SEQ ID NO: 529931 - DNA, 51 bp, Artificial
  Synthetic oligonucleotide
aacattttgtggactgcagttggtcttttaactaaaatttctctcttacag

SEQ ID NO: 529932 - DNA, 51 bp, Artificial
  Synthetic oligonucleotide
ttcaatttttaacactctactgaaactagctggatataaagaacagattac

SEQ ID NO: 529933 - DNA, 51 bp, Artificial; identical to SEQ ID NO: 308819
  Synthetic oligonucleotide

SEQ ID NO: 529934 - DNA, 50 bp, Artificial
  Synthetic oligonucleotide
gctaggtccgcgaacgcagatacaatttattacgactactttcctctcga

SEQ ID NO: 529935 - DNA, 50 bp, Artificial
  Synthetic oligonucleotide
aaaagcgaagctgaattcgtatgcaccaatatcacttgaaaagagacgtg

SEQ ID NO: 529936 - DNA, 50 bp, Artificial
  Synthetic oligonucleotide
gatgttaaatgtgtgttcacctcatttatatgcaacggtcaacgctcgac

SEQ ID NO: 529937 - DNA, 50 bp, Artificial
  Synthetic oligonucleotide
tcgcactatcaaaagtgaactaaagaagcgtaagatggccagaccccacg

SEQ ID NO: 529938 - DNA, 50 bp, Artificial
  Synthetic oligonucleotide
ggcccattacattttcagcggcgagctatattaggtgcgctcaaattcgg

SEQ ID NO: 529939 - DNA, 50 bp, Artificial
  Synthetic oligonucleotide
aagttatggaagaaaatgtggaacataacagcactgagatcaccatatac

SEQ ID NO: 529940 - DNA, 50 bp, Artificial
  Synthetic oligonucleotide
ctattttgatcagtgttggccatcctcatgttccaccacggaattatcaa

SEQ ID NO: 529941 - DNA, 50 bp, Artificial
  Synthetic oligonucleotide
gatctgtagaacgcaaggagggatttggtgacggaggaggagataaggtt

SEQ ID NO: 529942 - DNA, 50 bp, Artificial
  Synthetic oligonucleotide
ggcgaaccgctacaaaggtctgtttcggtcatccttttatagtgagtcga

SEQ ID NO: 529943 - DNA, 50 bp, Artificial
  Synthetic oligonucleotide
atacatgacaatctgataactagaccagctgacgttatagatatgtcgaa

SEQ ID NO: 529944 - DNA, 50 bp, Artificial
  Synthetic oligonucleotide
gagcttcagtgaattggaaacattgttaactgcgaaagcattgacaggtc

SEQ ID NO: 529945 - DNA, 50 bp, Artificial
  Synthetic oligonucleotide
gatggcggaacggccatggcatgttcgaaacgatctgatagcagcattac

SEQ ID NO: 529946 - DNA, 50 bp, Artificial
  Synthetic oligonucleotide
gacacttcctcaggagatcatgtcgatcggagcggaactactgactcaga

SEQ ID NO: 529947 - DNA, 50 bp, Artificial
  Synthetic oligonucleotide
ctatacgtgcggattgtatcgatctgttaaggtatcatatgtcgcattac

SEQ ID NO: 529948 - DNA, 50 bp, Artificial
  Synthetic oligonucleotide
atagagaaaggttcatcgttgcgtaagaccgaaattgaagacaaaaatac

SEQ ID NO: 529949 - DNA, 50 bp, Artificial
  Synthetic oligonucleotide
ggtctaacctgagaggtcactaggaagctccccacttccgttttgtgacc

SEQ ID NO: 529950 - DNA, 50 bp, Artificial
  Synthetic oligonucleotide
gtgctcaattgcatgcaattcaaacttgaaatggacgatttggcacataa

SEQ ID NO: 529951 - DNA, 50 bp, Artificial
  Synthetic oligonucleotide
gcgattgaatcatcaggggaaggagggtgtaatcacattcactccggtct

SEQ ID NO: 529952 - DNA, 50 bp, Artificial
  Synthetic oligonucleotide
gtgcaagatgtttcaaatgatgttagagatacttatgcgcggatgaatgc

SEQ ID NO: 529953 - DNA, 50 bp, Artificial
  Synthetic oligonucleotide
gaagctgtactcgatcggtcctatgatgcagtcgactcggaaatatttta

SEQ ID NO: 529954 - DNA, 50 bp, Artificial
  Synthetic oligonucleotide
gctttttcagtgctagcctttctcacaagatgggtaacgcgacgtctgtg

SEQ ID NO: 529955 - DNA, 50 bp, Artificial
  Synthetic oligonucleotide
cgagtcacaatggacggaaaatggatggtgcatgtgtgataagcatcgtc

SEQ ID NO: 529956 - DNA, 50 bp, Artificial
  Synthetic oligonucleotide
tatgtaaaaagggggcataccacgccagaaggggctttaagcgtctagat

SEQ ID NO: 529957 - DNA, 50 bp, Artificial
  Synthetic oligonucleotide
ggtatctctgggggttttgtagactctgatcatgctaacgtcacacccag

SEQ ID NO: 529958 - DNA, 50 bp, Artificial
  Synthetic oligonucleotide
gcgtcggttattcaggacaacatttgatgcctacttacgattagatgaga

SEQ ID NO: 529959 - DNA, 50 bp, Artificial
  Synthetic oligonucleotide
actctggtgtaaaaaacaatcttttaggtaaagctataactattgatcag

SEQ ID NO: 529960 - DNA, 50 bp, Artificial
  Synthetic oligonucleotide
aggatgattcaagaatggttagttgattgctcacttgaaaaatttacgtt

SEQ ID NO: 529961 - DNA, 50 bp, Artificial
  Synthetic oligonucleotide
cagttatgttccgtcggccccaatacccacagctatgccgaaggttgcat

SEQ ID NO: 529962 - DNA, 50 bp, Artificial
  Synthetic oligonucleotide
tgcggacctggtttcggatgatcctcgagtggagctcgaaaaatcgcgat

SEQ ID NO: 529963 - DNA, 50 bp, Artificial
  Synthetic oligonucleotide
aggagttcatccgatctacctaggagcggtgcattatgaggtctcatata

SEQ ID NO: 529964 - DNA, 50 bp, Artificial
  Synthetic oligonucleotide
tcaagttaattgtcacgggtgcctctggagccttagtgattagggatggg

SEQ ID NO: 529965 - DNA, 50 bp, Artificial
  Synthetic oligonucleotide
ctcttacgctggacgacccactaaccgtgtcggtcttaaatttcgtagat

SEQ ID NO: 529966 - DNA, 50 bp, Artificial
  Synthetic oligonucleotide
gaagaacttccagatccactaagtccaggagagcggggtatgcaggttaa

SEQ ID NO: 529967 - DNA, 50 bp, Artificial
  Synthetic oligonucleotide
tcaaaactcgcgtcatcagtgtcgatgttaacggactctttatccgatgc

SEQ ID NO: 529968 - DNA, 50 bp, Artificial
  Synthetic oligonucleotide
cgatgttagcgagcatgatgcctcaacaatcaggagagtatactaccact

SEQ ID NO: 529969 - DNA, 50 bp, Artificial
  Synthetic oligonucleotide
ctctatctacgcataatggagtgtctttgtgcgccctgctgatggatgaa

SEQ ID NO: 529970 - DNA, 50 bp, Artificial
  Synthetic oligonucleotide
agcatgaacgctataacgaaaagggtgtgatgctattagaacacgttaaa

SEQ ID NO: 529971 - DNA, 50 bp, Artificial
  Synthetic oligonucleotide
gtttaggacacgtcttcgcttttaattcttattacatgggtttttctact

SEQ ID NO: 529972 - DNA, 50 bp, Artificial
  Synthetic oligonucleotide
tgggagcaacttttttaatgatggtttgcgctaagagtgaaagagctttg

SEQ ID NO: 529973 - DNA, 50 bp, Artificial
  Synthetic oligonucleotide
tggaagcgcgtgtgaaaaggtcgggtgacgaaaattggcaaagctggtta

SEQ ID NO: 529974 - DNA, 50 bp, Artificial
  Synthetic oligonucleotide
aagggaggagtttaatatgttgtcacagaatatcgcagtgtctcaattaa

SEQ ID NO: 529975 - DNA, 50 bp, Artificial
  Synthetic oligonucleotide
agcatattatggagggtttaattgaaccgaatactttgggaaatggtgac

SEQ ID NO: 529976 - DNA, 50 bp, Artificial
  Synthetic oligonucleotide
gttgtgtaacccaatggacataacattatactattatcaacaaactgatg

SEQ ID NO: 529977 - DNA, 50 bp, Artificial
  Synthetic oligonucleotide
tctgctgtcaggtcagtaccctactgagccacctttgcagacaaatgttt

SEQ ID NO: 529978 - DNA, 50 bp, Artificial
  Synthetic oligonucleotide
gttaagagtggttatttacccatatggcatctgacaggagacgaaagctt

SEQ ID NO: 529979 - DNA, 50 bp, Artificial
  Synthetic oligonucleotide
ctgtagctatcactggatcattaagactatttccgtcagagcgggtactg

SEQ ID NO: 529980 - DNA, 50 bp, Artificial
  Synthetic oligonucleotide
acggagctgttgcctcaggtgaaaaacagactaaagcggcaaattccata

SEQ ID NO: 529981 - DNA, 50 bp, Artificial
  Synthetic oligonucleotide
ctgctgaatgtataatccctttgacaggggattggcggccttaaacttac

SEQ ID NO: 529982 - DNA, 50 bp, Artificial
  Synthetic oligonucleotide
gccggactgtgcacttcattcaagattgttccgattgtaccagcccaggt

SEQ ID NO: 529983 - DNA, 50 bp, Artificial
  Synthetic oligonucleotide
cacactctggatcgggggtccactggcctcttatgacgattatagcatgg

SEQ ID NO: 529984 - DNA, 50 bp, Artificial
  Synthetic oligonucleotide
tactttaccttgcgatcttggtatgactggagtgttagatctagctatat

SEQ ID NO: 529985 - DNA, 50 bp, Artificial
  Synthetic oligonucleotide
agtatatcagcaactgagtgctgtaactctgcttaacttgacagggtttg

SEQ ID NO: 529986 - DNA, 50 bp, Artificial
  Synthetic oligonucleotide
gatggttgccatgcgcgaagaaccaggagtaatatcgacttcatatggca

SEQ ID NO: 529987 - DNA, 50 bp, Artificial
  Synthetic oligonucleotide
cttcaagctatcacctttgaacgtaacgatcagacaatatctggtaattt

SEQ ID NO: 529988 - DNA, 60 bp, Artificial
  Synthetic oligonucleotide
ccagggccatacggacacccagatcaagtcccttacattaccacatggagatccttagcc

SEQ ID NO: 529989 - DNA, 60 bp, Artificial
  Synthetic oligonucleotide
ccatccttcaggaggggtcagacatatacccctccctgatagacctagatctggaagaga

SEQ ID NO: 529990 - DNA, 60 bp, Artificial; identical to SEQ ID NO: 357335
  Synthetic oligonucleotide

SEQ ID NO: 529991 - DNA, 60 bp, Artificial
  Synthetic oligonucleotide
cccaacaggaatggtcattttatgtagcctaataatagttcgggcagggtttgacgaccc

SEQ ID NO: 529992 - DNA, 60 bp, Artificial
  Synthetic oligonucleotide
cccttggctttaagtgtttggggtccttgttaaaacccgctgcgtcgggcagagactcag

SEQ ID NO: 529993 - DNA, 60 bp, Artificial; identical to SEQ ID NO: 127944
  Synthetic oligonucleotide

SEQ ID NO: 529994 - DNA, 60 bp, Artificial
  Synthetic oligonucleotide
cgcggaaggaggtttggccacctccaataggggaggactgaaacaggtcctcgaccggag

SEQ ID NO: 529995 - DNA, 60 bp, Artificial
  Synthetic oligonucleotide
cggcccagaccgctactattgtggtagttggagttgtgtcacctccaatgacgggccccg

SEQ ID NO: 529996 - DNA, 60 bp, Artificial
  Synthetic oligonucleotide
ctaacaatgggagctgtactaggaaccagattcccagggatagacaacatgttgaacaga

SEQ ID NO: 529997 - DNA, 60 bp, Artificial
  Synthetic oligonucleotide
ctggggattgttaatcataatgggacgcttgctaggctatggactaaaaggacttgctat

SEQ ID NO: 529998 - DNA, 60 bp, Artificial
  Synthetic oligonucleotide
gaacctatgcctattatgtatgatccagaaacagaactttgggttaagccaggaaggatt

SEQ ID NO: 529999 - DNA, 60 bp, Artificial
  Synthetic oligonucleotide
gaactttctcccttgataacatttctcaggtcgaaaagaagatcttcgccccagggccat

SEQ ID NO: 530000 - DNA, 60 bp, Artificial
  Synthetic oligonucleotide
gacagattcccaatatgtgctaggaatcttacaaggaactcctgaccaaagtgactcccc

SEQ ID NO: 530001 - DNA, 60 bp, Artificial
  Synthetic oligonucleotide
gacataccatcgcagacgtgtatggcaagaagggcactgggaccaggaccagtacaacat

SEQ ID NO: 530002 - DNA, 60 bp, Artificial
  Synthetic oligonucleotide
gaccagattgaaagagccaaagcacagcttctccggctggacatccacgaaggagacttt

SEQ ID NO: 530003 - DNA, 60 bp, Artificial
  Synthetic oligonucleotide
gatctaggaattaatagagatcctagacatagagaggtaattgccctccgaatgaccgga

SEQ ID NO: 530004 - DNA, 60 bp, Artificial
  Synthetic oligonucleotide
gcgaatcaggcagagacaggtggaggggatatccagtaggattcttgcaacttatctggg

SEQ ID NO: 530005 - DNA, 60 bp, Artificial
  Synthetic oligonucleotide
gcgaatgcagcggagggcaggtatccgaggccccaccgaactccatccaacaggtaactt

SEQ ID NO: 530006 - DNA, 60 bp, Artificial
  Synthetic oligonucleotide
ggagttgtatattagccttgcttagggaaccatctagtgggataagtgggtactacactt

SEQ ID NO: 530007 - DNA, 60 bp, Artificial
  Synthetic oligonucleotide
gggtcagtcttcctctgtggaaataacatggcatacacctatttaccccaaaactggaca

SEQ ID NO: 530008 - DNA, 60 bp, Artificial
  Synthetic oligonucleotide
ggtcagggttaacagcccctagcctgaaacaacctaattgtaaattgtaagagaccgtta

SEQ ID NO: 530009 - DNA, 60 bp, Artificial
  Synthetic oligonucleotide
gtagtcagggcatgagaccactgcttaacgctcaataaagcttgcctgagagtgttatca

SEQ ID NO: 530010 - DNA, 60 bp, Artificial
  Synthetic oligonucleotide
gttctcagccttagcagagggagccatcccacatgatcttaatacaatgctaaatgcaat

SEQ ID NO: 530011 - DNA, 60 bp, Artificial
  Synthetic oligonucleotide
taatatggggaagagtacctgtattccaacttccagttacaaaggaagtgtggcaacaat

SEQ ID NO: 530012 - DNA, 60 bp, Artificial
  Synthetic oligonucleotide
tactcatgcaccctgcttgctcctatggaagagatgaccctaatggagaactgttggtat

SEQ ID NO: 530013 - DNA, 60 bp, Artificial
  Synthetic oligonucleotide
tagtgggacagccattggggctagattgtttgggatctcatccgtattaggtgaatacag

SEQ ID NO: 530014 - DNA, 60 bp, Artificial
  Synthetic oligonucleotide
tccatgctagggaccttaaccgatgcctaccctaccttacatgttgatttatgtgaccta

SEQ ID NO: 530015 - DNA, 60 bp, Artificial
  Synthetic oligonucleotide
tctacataaccttgtataacccatataactaggcaggcgttgctaagcaactgaactaat

SEQ ID NO: 530016 - DNA, 60 bp, Artificial
  Synthetic oligonucleotide
tgacctgggtaataaccaatgtacaaaccaactcccaggctaatgccacctccatgctag

SEQ ID NO: 530017 - DNA, 60 bp, Artificial
  Synthetic oligonucleotide
tgattggatgtgcagaaaggtcacatatattttgtcatactggtcacccctggaatgaga

SEQ ID NO: 530018 - DNA, 60 bp, Artificial
  Synthetic oligonucleotide
tgggccccttaataatcctactcctaattctcctcttcggtccatgcatccttaaccgat

SEQ ID NO: 530019 - DNA, 60 bp, Artificial
  Synthetic oligonucleotide
tgttgacaaccttaagttaacagcacatcagaataatggcacctccaatgactttggaac

SEQ ID NO: 530020 - DNA, 60 bp, Artificial
  Synthetic oligonucleotide
agcagccctctacttccagtggtgaccccatggcccttatctcaggaccatgtggccccc

SEQ ID NO: 530021 - DNA, 60 bp, Artificial
  Synthetic oligonucleotide
caacgcacccaaaaccctctaaagataagactttctcgtgggacctaatgattctggtgg

SEQ ID NO: 530022 - DNA, 60 bp, Artificial
  Synthetic oligonucleotide
atttcgcttgggtaccaggtcataaggggatttatggtaatcaattagcagatgaggcta

SEQ ID NO: 530023 - DNA, 60 bp, Artificial
  Synthetic oligonucleotide
atttagttttgcctgatcaaaaacccccatcccgacaatctcaaatagagtccaaagtgg

SEQ ID NO: 530024 - DNA, 60 bp, Artificial
  Synthetic oligonucleotide
actcttaggcttgaacgccaggggacaaagccttaggataccagcttctgggggacaaac

SEQ ID NO: 530025 - DNA, 60 bp, Artificial
  Synthetic oligonucleotide
attgaaacggcgcctgtggatgtggtgtggttgaccggccggtgggtgttaaagagtccc

SEQ ID NO: 530026 - DNA, 60 bp, Artificial
  Synthetic oligonucleotide
attcttgctattgtaaagtatgctgttatcactgccaactttgctttaccaagaaggctc

SEQ ID NO: 530027 - DNA, 60 bp, Artificial
  Synthetic oligonucleotide
acatactacacggccaccttgcttaaaatacggtctgggagcctcaacgaggtacagata

SEQ ID NO: 530028 - DNA, 60 bp, Artificial
  Synthetic oligonucleotide
agtatgactactcagtcaggtccaagcgggctgtaattgacacctctcaaggacatagtg

SEQ ID NO: 530029 - DNA, 60 bp, Artificial
  Synthetic oligonucleotide
aggttactccagatgtccaattttagccttgcccaagattgttggctctgtttaaaacta

SEQ ID NO: 530030 - DNA, 60 bp, Artificial
  Synthetic oligonucleotide
catttcgcttctgtaaaaccgcttatgcgccccaccctaaccgctttcatttcgcttctg

SEQ ID NO: 530031 - DNA, 60 bp, Artificial
  Synthetic oligonucleotide
aaaagctaagtatggaaaaggtgctactggtaaaaagcagacaaacccccaagaggcata

SEQ ID NO: 530032 - DNA, 60 bp, Artificial
  Synthetic oligonucleotide
aaacggcggggaaatgtaagagacctttagcatgagaactgctatcttaaggtcagggtt

SEQ ID NO: 530033 - DNA, 60 bp, Artificial
  Synthetic oligonucleotide
cagggcattcccctccgatgagaccaaaggggacacattgtggaggggcacaagatgggt

SEQ ID NO: 530034 - DNA, 59 bp, Artificial
  Synthetic oligonucleotide
aactattcgactatcggtcgaaacgatcagcactcaggtgggtccaaataaggtactgg

SEQ ID NO: 530035 - DNA, 59 bp, Artificial
  Synthetic oligonucleotide
cacagaaagtattactaggattggaatatgtccaacatttaaggttccattcactaagg

SEQ ID NO: 530036 - DNA, 59 bp, Artificial
  Synthetic oligonucleotide
gaacccagccaaagacctctgtaactccttcgacacctgctacgcagacaaccgaagac

SEQ ID NO: 530037 - DNA, 58 bp, Artificial
  Synthetic oligonucleotide
attctgtgtcctagtaactgtgctgccccgcatcctctatcaccctgaggagagtatg

SEQ ID NO: 530038 - DNA, 57 bp, Artificial
  Synthetic oligonucleotide
cctacaggacattctaaggtagggagcctacagtttctagcctttaaaaaagtgcta

SEQ ID NO: 530039 - DNA, 57 bp, Artificial
  Synthetic oligonucleotide
gcggtaagcctcctatcctacgccaagcccatcttggtaggaataggagttattctg

SEQ ID NO: 530040 - DNA, 57 bp, Artificial
  Synthetic oligonucleotide
ggtacaagccagaggattgctctctggtatagtacagcagcaagcaaatttgctgca

SEQ ID NO: 530041 - DNA, 56 bp, Artificial
  Synthetic oligonucleotide
cctagacgctttgtcctcgccgcctcacaaccccctcctacagcctccaccctata

SEQ ID NO: 530042 - DNA, 56 bp, Artificial
  Synthetic oligonucleotide
caacattgtattacttgggcttcggctgtagcaactctttatgtaaggactcatgg

SEQ ID NO: 530043 - DNA, 55 bp, Artificial
  Synthetic oligonucleotide
aggactcacagactcgtacaagcagaagctaatggatctacagcctccaactacc

SEQ ID NO: 530044 - DNA, 55 bp, Artificial
  Synthetic oligonucleotide
gcttgttcctggaacctcacccaaaacccataatctccaaggagagggtattggg

SEQ ID NO: 530045 - DNA, 55 bp, Artificial
  Synthetic oligonucleotide
ggctactgggactctggggctgaaatcacttgtgtcccagctatctatgttatag

SEQ ID NO: 530046 - DNA, 55 bp, Artificial; identical to SEQ ID NO: 427108
  Synthetic oligonucleotide

SEQ ID NO: 530047 - DNA, 55 bp, Artificial
  Synthetic oligonucleotide
ggcaataggacttaatgccacttacaacgcctctaacggtaagaacccttctcag

SEQ ID NO: 530048 - DNA, 55 bp, Artificial
  Synthetic oligonucleotide
ggtctgactattggcaggtcagctggattccagaatgggagtttgttaacacccc

SEQ ID NO: 530049 - DNA, 55 bp, Artificial
  Synthetic oligonucleotide
ggtggcctaatctaaggaaggatgtggttaaagtgatcagacagtgtaaacagtg

SEQ ID NO: 530050 - DNA, 55 bp, Artificial
  Synthetic oligonucleotide
gtacaaaccaactcccaggctaatgccacctccatgctagggaccttaaccgatg

SEQ ID NO: 530051 - DNA, 55 bp, Artificial
  Synthetic oligonucleotide
agacctaaacgagctgtacagttcatccctttactagctggactgggaatcaccg

SEQ ID NO: 530052 - DNA, 55 bp, Artificial
  Synthetic oligonucleotide
gtgaatacagggtgttgatcggagacgagggagccggaccctcaaggtctccttc

SEQ ID NO: 530053 - DNA, 55 bp, Artificial
  Synthetic oligonucleotide
gttagtgtacagccctaggggaagagcgaagtccctaggtaaggggagatgggtg

SEQ ID NO: 530054 - DNA, 55 bp, Artificial
  Synthetic oligonucleotide
gttggccccatgaaggcaggagtattaaaaggagggcctttaaaagccaagcaaa

SEQ ID NO: 530055 - DNA, 55 bp, Artificial
  Synthetic oligonucleotide
accttcctgaacccacaaactggctgccttaaccctgaggcacttccaggaacct

SEQ ID NO: 530056 - DNA, 55 bp, Artificial
  Synthetic oligonucleotide
tatggttggcacgggcggtacctgccttacagggtgtttacccggtccaggacgc

SEQ ID NO: 530057 - DNA, 55 bp, Artificial
  Synthetic oligonucleotide
acacccaactcatgcagggccgctagtcccagggactctaagagagcccacaggg

SEQ ID NO: 530058 - DNA, 55 bp, Artificial
  Synthetic oligonucleotide
tggatcagctataaggtcacccaagcccaacaagacgcattcggcaggtatgggt

SEQ ID NO: 530059 - DNA, 55 bp, Artificial
  Synthetic oligonucleotide
tgtggcagacagggaccaaacttattggtcctcatgaaagtgactattggtgtga

SEQ ID NO: 530060 - DNA, 55 bp, Artificial
  Synthetic oligonucleotide
tgtggtactaacatctatgcctaagttcctcaggcacctcttgacaacgatcagt

SEQ ID NO: 530061 - DNA, 55 bp, Artificial
  Synthetic oligonucleotide
ttaagaggggagtgagaaggctcttgcttactatccctagggaactgaggcaccg

SEQ ID NO: 530062 - DNA, 55 bp, Artificial
  Synthetic oligonucleotide
ttgcgactatatcgtacagggtatgaccctatagctttattcacggtgacccggc

SEQ ID NO: 530063 - DNA, 55 bp, Artificial
  Synthetic oligonucleotide
ttttagccttgcccaagattgttggctctgtttaaaactaggtacccctacccct

SEQ ID NO: 530064 - DNA, 55 bp, Artificial
  Synthetic oligonucleotide
caggatttcccggactatcattgtcacctgtgtttcctgcggtctctgggaattg

SEQ ID NO: 530065 - DNA, 55 bp, Artificial
  Synthetic oligonucleotide
cctaattgtaaattccaggatgtgggcagttgcagcacggagaccagaagtcctg

SEQ ID NO: 530066 - DNA, 55 bp, Artificial
  Synthetic oligonucleotide
ccgggattgggagcttctcttactaaatacgtgatattgttcttacttgtctatg

SEQ ID NO: 530067 - DNA, 55 bp, Artificial
  Synthetic oligonucleotide
ccggattcagcagaaatttgcccaagtgcgacaccgtgtccgcccaacacttctc

SEQ ID NO: 530068 - DNA, 55 bp, Artificial
  Synthetic oligonucleotide
ccgcaacataggatgtgagtcatagctattttagtaagttagcgcttgggaactg

SEQ ID NO: 530069 - DNA, 55 bp, Artificial; identical to SEQ ID NO: 365360
  Synthetic oligonucleotide

SEQ ID NO: 530070 - DNA, 55 bp, Artificial
  Synthetic oligonucleotide
cgatgcctaccctaccttacatgttgatttatgtgacctagtaggagacgcctgg

SEQ ID NO: 530071 - DNA, 55 bp, Artificial
  Synthetic oligonucleotide
cgcgttggaagggctatattggtctccaaagagagcagcaatactagatacctgg

SEQ ID NO: 530072 - DNA, 55 bp, Artificial
  Synthetic oligonucleotide
cggcacaccagaaacttgcacaaacaccggattcagcagaaatttgcccaagtgc

SEQ ID NO: 530073 - DNA, 55 bp, Artificial
  Synthetic oligonucleotide
cactatgacaaaactctccctgagttgcaacaaattccttccgtcacagaagata

SEQ ID NO: 530074 - DNA, 55 bp, Artificial
  Synthetic oligonucleotide
ccctcctgtctgacttctcgcttccggacagttatcagaacaagacgcaggacgg

SEQ ID NO: 530075 - DNA, 55 bp, Artificial
  Synthetic oligonucleotide
ctgagattagatctgatctaggttatttagcctatttaggagcctttcccagccc

SEQ ID NO: 530076 - DNA, 55 bp, Artificial
  Synthetic oligonucleotide
cccctgggcagacctatgcaacaacctcttcccagacgcaacaaccagccaccta

SEQ ID NO: 530077 - DNA, 55 bp, Artificial
  Synthetic oligonucleotide
caggtatatgtggacgacgtctatgtgagctcagcgactgaacaagaacatctgg

SEQ ID NO: 530078 - DNA, 55 bp, Artificial
  Synthetic oligonucleotide
ctgcaagaagcatcacttacgatgtccaaaatgtgaagaataccagtgactcgac

SEQ ID NO: 530079 - DNA, 55 bp, Artificial
  Synthetic oligonucleotide
catcggcgtatagagccacataagatagccactggaaccttgaaacctcgacctc

SEQ ID NO: 530080 - DNA, 55 bp, Artificial
  Synthetic oligonucleotide
ccaacagcgttcccagtctcagcaaccgcgatcagaggctcgtggcgagcagtca

SEQ ID NO: 530081 - DNA, 55 bp, Artificial
  Synthetic oligonucleotide
ccagggcaataactgtgagggccgatgcaaccccttagtcttgcagttcacccag

SEQ ID NO: 530082 - DNA, 55 bp, Artificial
  Synthetic oligonucleotide
gcatacactcggtggagaccaggacatgcgggtcaatacttccggtattaagccc

SEQ ID NO: 530083 - DNA, 55 bp, Artificial
  Synthetic oligonucleotide
gcattgcaacttgctctcatcacttgtaacaaagggagggaaagtatgggaggac

SEQ ID NO: 530084 - DNA, 55 bp, Artificial
  Synthetic oligonucleotide
gccaatcctgcaaagacagcaaccccgactcagagtttatacccggatctgagtc

SEQ ID NO: 530085 - DNA, 55 bp, Artificial
  Synthetic oligonucleotide
gccctagaggacgtctggcctgtagctgcgtctgctgtgagtacaatcgggaccc

SEQ ID NO: 530086 - DNA, 55 bp, Artificial
  Synthetic oligonucleotide
ccacattattcccgactgagaagagcaatacacttagcacaaaagcctgttcagg

SEQ ID NO: 530087 - DNA, 54 bp, Artificial
  Synthetic oligonucleotide
cactgaattggagcaaagcgctcaagaagctagagaaggtgacggtccaggggt

SEQ ID NO: 530088 - DNA, 54 bp, Artificial
  Synthetic oligonucleotide
ggaaaacaaaatgggcgaggagtagcagcatacgtaactagtacaggaaagact

SEQ ID NO: 530089 - DNA, 54 bp, Artificial
  Synthetic oligonucleotide
gctaacatggaccctaacagatggacagacccaaacaacccttaatagcaccac

SEQ ID NO: 530090 - DNA, 54 bp, Artificial
  Synthetic oligonucleotide
gcgactcaaaggtgtacgacaaactgcagaagcattggaggaggctaacaaagc

SEQ ID NO: 530091 - DNA, 53 bp, Artificial
  Synthetic oligonucleotide
tggctcactgcataaattgactagtctttgctcaagaacccagggagcagtgt

SEQ ID NO: 530092 - DNA, 53 bp, Artificial
  Synthetic oligonucleotide
agagaaccaatatcattaaccgttgcccttatgctgggaggactcactgtagg

SEQ ID NO: 530093 - DNA, 53 bp, Artificial
  Synthetic oligonucleotide
ctggagtgccacagcccccatccatatctccgatggtggaggacccctcgata

SEQ ID NO: 530094 - DNA, 53 bp, Artificial
  Synthetic oligonucleotide
gaattatggcccagagtgacttaccatcaacccgaatatgtctatacacattt

SEQ ID NO: 530095 - DNA, 53 bp, Artificial
  Synthetic oligonucleotide
gccttagtagagagtcctccctcctggcttaagccctttatccccgacaagcc

SEQ ID NO: 530096 - DNA, 52 bp, Artificial
  Synthetic oligonucleotide
accacgttggatttaacaaatggattctgggctcatcctataaccccggaat

SEQ ID NO: 530097 - DNA, 52 bp, Artificial
  Synthetic oligonucleotide
tagcagactccctagcgaatgcctcctgtcagattatacctcccctcttggt

SEQ ID NO: 530098 - DNA, 52 bp, Artificial
  Synthetic oligonucleotide
accagggccaggagttagatatcctctgtgtagaggttggttatttaagtta

SEQ ID NO: 530099 - DNA, 52 bp, Artificial
  Synthetic oligonucleotide
taaggaaggggatatctctcttgaatcggctgcgcccgtgagagatctgact

SEQ ID NO: 530100 - DNA, 52 bp, Artificial
  Synthetic oligonucleotide
ggtacagatattacaaaaccccaatcagctcctacagtccccttgtaggggc

SEQ ID NO: 530101 - DNA, 51 bp, Artificial
  Synthetic oligonucleotide
cctcagggttaaggaatgcaacctacactcatgtcttattctgttctgatc

SEQ ID NO: 530102 - DNA, 51 bp, Artificial
  Synthetic oligonucleotide
taaattgtgccaactcgctcatgatgggccaggatctgcccatctgggacg

SEQ ID NO: 530103 - DNA, 51 bp, Artificial
  Synthetic oligonucleotide
ttctggacaccttacccatgtgactatacatcatccatatgagattgtgaa

SEQ ID NO: 530104 - DNA, 51 bp, Artificial
  Synthetic oligonucleotide
gcaagttaattgcaagtatcgcttatgcttgagatcaggaagtagcttgcg

SEQ ID NO: 530105 - DNA, 51 bp, Artificial
  Synthetic oligonucleotide
ttgcttccccatatgactatatactgttgagtccatcagatgttccctggc

SEQ ID NO: 530106 - DNA, 50 bp, Artificial
  Synthetic oligonucleotide
aagcggctcttaacgaaactgttggcaggacggcccacaaagtggtatcc

SEQ ID NO: 530107 - DNA, 50 bp, Artificial
  Synthetic oligonucleotide
ctctgttcagtccctgtgttcaacttgttttgcttacagcaacccaacag

SEQ ID NO: 530108 - DNA, 60 bp, Artificial
  Synthetic oligonucleotide
cattcactttgttggatgttatatgggtcaggtgagatctctgaatgcaacagtgattgc

SEQ ID NO: 530109 - DNA, 60 bp, Artificial
  Synthetic oligonucleotide
ccaatcactcctgtagatctcagctacctcggaccaaagaatcccggagtaggcccggtt

SEQ ID NO: 530110 - DNA, 60 bp, Artificial
  Synthetic oligonucleotide
ccacatcatgtgggaattgacgactatcgaggaaagtggattgacccgatatttccgggg

SEQ ID NO: 530111 - DNA, 60 bp, Artificial
  Synthetic oligonucleotide
ccacctgactctcccttgtctgcctgtatactaaacaacattcgagctctcaccggggaa

SEQ ID NO: 530112 - DNA, 60 bp, Artificial
  Synthetic oligonucleotide
ccatcgtgatagtcttctccaatagggtgttcaatgtttcgaaaccgctgactgaccctt

SEQ ID NO: 530113 - DNA, 60 bp, Artificial
  Synthetic oligonucleotide
ccattacaagctcaaacctattctggatgatctcaatgtattcccatctctatgtcttgt

SEQ ID NO: 530114 - DNA, 60 bp, Artificial
  Synthetic oligonucleotide
gtatgcttacggagatgaaattctaactttacatggaaataaaggttacaaagggattaa

SEQ ID NO: 530115 - DNA, 60 bp, Artificial
  Synthetic oligonucleotide
gtatagttgatgccccgtacccagattgggatgccctagagtattcttggtcagaattat

SEQ ID NO: 530116 - DNA, 60 bp, Artificial
  Synthetic oligonucleotide
gtacttccagtcagtccaagaacaagtaaatatgtcctatgacctcatcatttgtgatgc

SEQ ID NO: 530117 - DNA, 60 bp, Artificial
  Synthetic oligonucleotide
gtaaacccggattacagggcggttcaacacctgtccagagcatttcctatagttaccggg

SEQ ID NO: 530118 - DNA, 60 bp, Artificial
  Synthetic oligonucleotide
cccgctgcttacccgaccacgatgaaagaaggtaacagatctattttgtgctatctccaa

SEQ ID NO: 530119 - DNA, 60 bp, Artificial
  Synthetic oligonucleotide
ggtgatcataactgctctgtctcagaaccctgtgaatccaagagagttcttaaagagaat

SEQ ID NO: 530120 - DNA, 60 bp, Artificial
  Synthetic oligonucleotide
ccctccagagggggtcctaagttgtcttgagagggtcgattacgataaaacatttgggcg

SEQ ID NO: 530121 - DNA, 60 bp, Artificial
  Synthetic oligonucleotide
ccggagggggtcctaagttgtcttgaaagggtcgattacgataaaacatttgggcggtat

SEQ ID NO: 530122 - DNA, 60 bp, Artificial
  Synthetic oligonucleotide
ccgtcaattctgatgacgaggactacttctctagtgagaccaggagtccggaggcagtct

SEQ ID NO: 530123 - DNA, 60 bp, Artificial
  Synthetic oligonucleotide
cctattcttgatgatctcaatgtgttcccatccttatgtcttgtggtcggagacggatca

SEQ ID NO: 530124 - DNA, 60 bp, Artificial
  Synthetic oligonucleotide
tggtgcccttctgatcaattggtgaatctacatgactttcactcagacgagatagaacat

SEQ ID NO: 530125 - DNA, 60 bp, Artificial
  Synthetic oligonucleotide
cctccccgcatacaaaatccgctaatgtcaggacttagattaggtcaattacctactggg

SEQ ID NO: 530126 - DNA, 60 bp, Artificial
  Synthetic oligonucleotide
cctgagggaatctctcttttcaacagtccttcctggactccgtgcaacaggatggactca

SEQ ID NO: 530127 - DNA, 60 bp, Artificial
  Synthetic oligonucleotide
ttatatattcgcagagctctcactgtctcttcgatcggaactatacactcatgttaaagg

SEQ ID NO: 530128 - DNA, 60 bp, Artificial
  Synthetic oligonucleotide
gggaactgggctctaacaggaggtatggagttaacgagggaccccactgtttcggagcat

SEQ ID NO: 530129 - DNA, 60 bp, Artificial
  Synthetic oligonucleotide
cgagctatgccagatgatgtatccgggtcaagaaattgacaaagcagattcatatatgcc

SEQ ID NO: 530130 - DNA, 60 bp, Artificial
  Synthetic oligonucleotide
tggtttgtacaaagggactcttgactttaccttcacagtttctgatgatgagtctaatga

SEQ ID NO: 530131 - DNA, 60 bp, Artificial
  Synthetic oligonucleotide
cggaggtcactgacattgcatcaatcaaccgaataaccttgctaatgtctgattttgcac

SEQ ID NO: 530132 - DNA, 60 bp, Artificial
  Synthetic oligonucleotide
caaaagatgggctagagtctcttgtatctccaacgaccaaatagtcaatcttgccaatat

SEQ ID NO: 530133 - DNA, 60 bp, Artificial
  Synthetic oligonucleotide
tagagggtctccgacagaaaggctggagcctagtcagcttattgatgatagatcgggagt

SEQ ID NO: 530134 - DNA, 60 bp, Artificial
  Synthetic oligonucleotide
tacctgttgtttagtcctatcctgaagggcagagtttacaagatcctgagtgcagagggt

SEQ ID NO: 530135 - DNA, 60 bp, Artificial
  Synthetic oligonucleotide
caacgcgttaaccgtggcacactttagtgaaagacctttagacgcaattgttggacaaat

SEQ ID NO: 530136 - DNA, 60 bp, Artificial
  Synthetic oligonucleotide
tggggaggggaaatcaatgaggcatctgaagttctaaaggcttttctgaggggttggttt

SEQ ID NO: 530137 - DNA, 60 bp, Artificial
  Synthetic oligonucleotide
taatggccgtcctgatctcatgactgttcgaaatggcactctatgcaactccactaaaaa

SEQ ID NO: 530138 - DNA, 60 bp, Artificial
  Synthetic oligonucleotide
taaggactgataccaaaggttgtggacaagccaactgatatcccagataactctatgctt

SEQ ID NO: 530139 - DNA, 60 bp, Artificial
  Synthetic oligonucleotide
caaggggggcaagacctgcggattcgtggacgaaaggggcttgtacaagtctctaaaagg

SEQ ID NO: 530140 - DNA, 60 bp, Artificial
  Synthetic oligonucleotide
taaagaaggaagagaccatgtgtagttacgatttcctcatctatggaaagacccccttgt

SEQ ID NO: 530141 - DNA, 60 bp, Artificial
  Synthetic oligonucleotide
caagtcattcgggggaatacttatctgtcctggagttggtccgatgacgccgcagtgttt

SEQ ID NO: 530142 - DNA, 60 bp, Artificial
  Synthetic oligonucleotide
caagtgcataaggcccatcgatgatattacccttgagacttctcaggtcttcgagtttcc

SEQ ID NO: 530143 - DNA, 60 bp, Artificial
  Synthetic oligonucleotide
gttttttcagaagtcttggatctactattcagacaggtcagacctcatcgggctgtggga

SEQ ID NO: 530144 - DNA, 60 bp, Artificial
  Synthetic oligonucleotide
gttcccactggagtagcacatgggatcactcatcacataatgcagtctaaagacaaatta

SEQ ID NO: 530145 - DNA, 60 bp, Artificial
  Synthetic oligonucleotide
caccagacttgtaggcagcacagaagacctatctggggagataaagaagcaccttcgagg

SEQ ID NO: 530146 - DNA, 60 bp, Artificial
  Synthetic oligonucleotide
cagatccgacctcatcgggttgtgggaggatcaaatatactgtttggacatgtcaaatgg

SEQ ID NO: 530147 - DNA, 60 bp, Artificial
  Synthetic oligonucleotide
gtggagtcctttttggttcacaagatggtagatgacttagaactgactcgaggaagtcta

SEQ ID NO: 530148 - DNA, 60 bp, Artificial
  Synthetic oligonucleotide
cagcgagacagtcaatcatccaagactagaatggcggctcaaactgcctctggtcctcct

SEQ ID NO: 530149 - DNA, 60 bp, Artificial
  Synthetic oligonucleotide
gtgaatctcagaccaggaacacaagaactaagatactagcccagggggacaaccaggtcc

SEQ ID NO: 530150 - DNA, 60 bp, Artificial
  Synthetic oligonucleotide
gtctggcaatccatctatactccacataaatgcttacctttacgcagcattaaagggagt

SEQ ID NO: 530151 - DNA, 60 bp, Artificial
  Synthetic oligonucleotide
gtctctggggcagtgcctcattttcggaaacttcctgatattcgtttaagaccaggtgat

SEQ ID NO: 530152 - DNA, 60 bp, Artificial
  Synthetic oligonucleotide
catctattatggcgacacaggggtatcaaaaaacccagttgagttagtcgagggctggtt

SEQ ID NO: 530153 - DNA, 60 bp, Artificial
  Synthetic oligonucleotide
catctatttagacccctcattggggggagtatctggaatgtctcttggaaggttccacat

SEQ ID NO: 530154 - DNA, 60 bp, Artificial
  Synthetic oligonucleotide
catctcttacttcagagggttgagaaaaatctctctaaaagtatgagggccaacttacga

SEQ ID NO: 530155 - DNA, 60 bp, Artificial
  Synthetic oligonucleotide
catgggattaaccggatgacccagactccccaaagggtcggaagggtatggccttgctcc

SEQ ID NO: 530156 - DNA, 60 bp, Artificial
  Synthetic oligonucleotide
cttcatgtttcaggcttcattactatacggacaaatgacaaccagcatctcaagatatgg

SEQ ID NO: 530157 - DNA, 60 bp, Artificial
  Synthetic oligonucleotide
gctcctacagttaagagaatcattgacgactccattattcagcctaagttaccggccaac

SEQ ID NO: 530158 - DNA, 60 bp, Artificial
  Synthetic oligonucleotide
ctttagatggtacggaccaaaatacataactcactccatccataatgaggaacctaatga

SEQ ID NO: 530159 - DNA, 60 bp, Artificial
  Synthetic oligonucleotide
gcctcttggatgtgaaaaaaactattaacatccctcgaaagacctaaggaaagatggttc

SEQ ID NO: 530160 - DNA, 60 bp, Artificial
  Synthetic oligonucleotide
gaaaccggcaaaagcctactttgagagtaccacaaggcaaattagatttgcccacagtta

SEQ ID NO: 530161 - DNA, 60 bp, Artificial
  Synthetic oligonucleotide
gaacccatagaggtggacagtctccccgaagacataagacggcttcaattggatgataca

SEQ ID NO: 530162 - DNA, 60 bp, Artificial
  Synthetic oligonucleotide
gaagaaattaggcatgcagttagggggatgtcttataaaaaacaatcgagcataactcta

SEQ ID NO: 530163 - DNA, 60 bp, Artificial
  Synthetic oligonucleotide
gaagataccctagagtcagatgaagacattcagaggctgctaaaagactctttgcgtagg

SEQ ID NO: 530164 - DNA, 60 bp, Artificial
  Synthetic oligonucleotide
gacaatcacccatctttgtacataatgctcagagagccatctcttagaggagagatattc

SEQ ID NO: 530165 - DNA, 60 bp, Artificial
  Synthetic oligonucleotide
ttaacttggacataacaacaaacaggccagtagagaggacatctgacatgttacacatct

SEQ ID NO: 530166 - DNA, 60 bp, Artificial
  Synthetic oligonucleotide
tgttatgggcctgaagcataagaaactctttaatcaggcaaggatgaaatatcgacttta

SEQ ID NO: 530167 - DNA, 60 bp, Artificial
  Synthetic oligonucleotide
gaccagctacggaatcctaatagcacggaggggagacaagatcaccccaaattctcttgt

SEQ ID NO: 530168 - DNA, 60 bp, Artificial
  Synthetic oligonucleotide
gcatttaattagcagtagatctttcaaagaaggggtatttagcaacagggatctatgaaa

SEQ ID NO: 530169 - DNA, 60 bp, Artificial
  Synthetic oligonucleotide
ttaaaacccagacatggcctccaaaacatatagtagatttggtgggcgacacctggcata

SEQ ID NO: 530170 - DNA, 60 bp, Artificial
  Synthetic oligonucleotide
gacccaggagtaaatcttgaaacactgtttcaaattgctggggttcccactggagtagca

SEQ ID NO: 530171 - DNA, 60 bp, Artificial
  Synthetic oligonucleotide
gacctcttgaactgatctcaggggtgatttcttacatcctcttgaggctggacaatcacc

SEQ ID NO: 530172 - DNA, 60 bp, Artificial
  Synthetic oligonucleotide
gactgttagatctaacaagcccttcagatcgtatgatgatgtcactgcagctgtatcaca

SEQ ID NO: 530173 - DNA, 60 bp, Artificial
  Synthetic oligonucleotide
gcaattcaacatttgtccagagcttttcccgcggtcacaggattcataactcagatgaca

SEQ ID NO: 530174 - DNA, 60 bp, Artificial
  Synthetic oligonucleotide
ttaacgaagattgaagtggccttggcagatgacggaacagtcaattctgatgacgaggac

SEQ ID NO: 530175 - DNA, 60 bp, Artificial
  Synthetic oligonucleotide
gagacccttcacgggtaaatccttctccttgcagttctcgccaagtacctccaaagtcag

SEQ ID NO: 530176 - DNA, 60 bp, Artificial
  Synthetic oligonucleotide
gagggaatcaaacggtccggtgttcagagtaatgggccagtttttaggtctacctcactt

SEQ ID NO: 530177 - DNA, 60 bp, Artificial
  Synthetic oligonucleotide
gaggtcttggatctattattcagacaggtctgacctcatcgggttgtgggaggatcaaat

SEQ ID NO: 530178 - DNA, 60 bp, Artificial
  Synthetic oligonucleotide
gattaaaccgatgagggactttttgctcatgtcagtacaagccgttttccattacttgct

SEQ ID NO: 530179 - DNA, 60 bp, Artificial
  Synthetic oligonucleotide
gatctctatgataaggattctttaagatatgagaagttccgattcatgttaaagatgacc

SEQ ID NO: 530180 - DNA, 60 bp, Artificial
  Synthetic oligonucleotide
cggatgcaaactatgctctcgatgatcaatagatcagatcacaagttcacagagagtcat

SEQ ID NO: 530181 - DNA, 60 bp, Artificial
  Synthetic oligonucleotide
ggatccatgcattatagattaggagataatcatatatggtcctgttcagcatctagagct

SEQ ID NO: 530182 - DNA, 60 bp, Artificial
  Synthetic oligonucleotide
ggatcacccttgatgacatcagatctagatcatctctcttggattatagttgcctgtaaa

SEQ ID NO: 530183 - DNA, 60 bp, Artificial
  Synthetic oligonucleotide
cgtaggactagatgggtagaccaggaagtacgccatgcagcgaggaccatggcaggatgt

SEQ ID NO: 530184 - DNA, 60 bp, Artificial
  Synthetic oligonucleotide
cgtcctaaaattcctaaattccctcatttcgaagaacatgtcaagagttcagtgcgggag

SEQ ID NO: 530185 - DNA, 60 bp, Artificial
  Synthetic oligonucleotide
ctaagttgtcttgaaagggtcgattacgataaaacatttgggcggtatctggctaacata

SEQ ID NO: 530186 - DNA, 60 bp, Artificial
  Synthetic oligonucleotide
ctaccagacttgtaggaaatacggaagacttgtccagggaagtaaaaaagcacctccgag

SEQ ID NO: 530187 - DNA, 60 bp, Artificial
  Synthetic oligonucleotide
ggagccttatgttgtgaacagcttagttcagagggccgaaaagttcaggcctctcattca

SEQ ID NO: 530188 - DNA, 60 bp, Artificial
  Synthetic oligonucleotide
ggagcaggttaaaaccaaggtcatttctagaagggatgattgatggattcaaattgtgtg

SEQ ID NO: 530189 - DNA, 60 bp, Artificial
  Synthetic oligonucleotide
ggacttaataatcggtcttaagcctaaggaaagggagctaaaaattgaaggtcggttctt

SEQ ID NO: 530190 - DNA, 60 bp, Artificial
  Synthetic oligonucleotide
ttaggacaataagccctttgtttcccaggtttctgagccaatttgcagagtcaacctatt

SEQ ID NO: 530191 - DNA, 60 bp, Artificial
  Synthetic oligonucleotide
ctagtaacacatctgaattgtatctagtctgtagaagactgaaagattacatcgatactc

SEQ ID NO: 530192 - DNA, 60 bp, Artificial
  Synthetic oligonucleotide
ctcaatataccgtgccatcgaggagggggcatccaaactggggctcattataaagaagga

SEQ ID NO: 530193 - DNA, 60 bp, Artificial
  Synthetic oligonucleotide
ggaatggaggatatggacttatatgataaggactccttgagatatgagaagttccgcttt

SEQ ID NO: 530194 - DNA, 60 bp, Artificial
  Synthetic oligonucleotide
ctcatctccaaggagaacccatagaggtggacagtctccctgaggacatgagacggcttc

SEQ ID NO: 530195 - DNA, 60 bp, Artificial
  Synthetic oligonucleotide
ctccaatgaccaaatagtcaaccttgccaatataatgtcaactgtgtccaccaatgcatt

SEQ ID NO: 530196 - DNA, 60 bp, Artificial
  Synthetic oligonucleotide
ggaatcacagatgtattcaataggagaggaccattaccggcttacttggggtctaacaca

SEQ ID NO: 530197 - DNA, 60 bp, Artificial
  Synthetic oligonucleotide
ctcttcattaagtcatcttggatctatgcattttcgactaggggacaaccagatatggtc

SEQ ID NO: 530198 - DNA, 60 bp, Artificial
  Synthetic oligonucleotide
ctctttacatgaatgctctggattgggatgaggagaaaaccatcctcgcactgtggaggg

SEQ ID NO: 530199 - DNA, 60 bp, Artificial
  Synthetic oligonucleotide
ctgaagacagcacttcctgatgggaaatcagaccctgaccgttctgctgaggatgataaa

SEQ ID NO: 530200 - DNA, 60 bp, Artificial
  Synthetic oligonucleotide
ctgggatgatgatacagaatttgtcggattggaaatgcgagtgagtgcaaggcaatgcca

SEQ ID NO: 530201 - DNA, 60 bp, Artificial
  Synthetic oligonucleotide
ctgtccgagcttgcacattcctaccgacccctgatccctctattccctaggtttcatcag

SEQ ID NO: 530202 - DNA, 60 bp, Artificial
  Synthetic oligonucleotide
ttacaactcagagatccatgggattaaccggatgacccagactccccaaagggtcggaag

SEQ ID NO: 530203 - DNA, 60 bp, Artificial
  Synthetic oligonucleotide
cttatgacctcatcatttgtgatgcagaggtcactgatattgcatcaatcaaccgaataa

SEQ ID NO: 530204 - DNA, 60 bp, Artificial
  Synthetic oligonucleotide
acagagtgggtagatcgaaagttactgattaccgaaagaaattgctagatggtctagaga

SEQ ID NO: 530205 - DNA, 60 bp, Artificial
  Synthetic oligonucleotide
acagtgatgtagaatctttcctggttcacaagatggtagatgatctagagttgcagcgag

SEQ ID NO: 530206 - DNA, 60 bp, Artificial
  Synthetic oligonucleotide
tgaaagagggtaacagatctattctgtgctatctccaacacgtgttgcgctacgaacggg

SEQ ID NO: 530207 - DNA, 60 bp, Artificial
  Synthetic oligonucleotide
acatctccagatcctccaagtgccttagagactgtcaccaagggattgactagatgcgtg

SEQ ID NO: 530208 - DNA, 60 bp, Artificial
  Synthetic oligonucleotide
acccccttgtttcgaggtaacatcttggtacctgagtccaaaagatgggctagagtctct

SEQ ID NO: 530209 - DNA, 60 bp, Artificial
  Synthetic oligonucleotide
acccctaaaggagtgcctaacaaatgtgagtatcgaggaccatattacccttacttaggg

SEQ ID NO: 530210 - DNA, 60 bp, Artificial
  Synthetic oligonucleotide
accgcgggatagaatcagaacacccatttcatcccccccctcgctgcacaccaggtatac

SEQ ID NO: 530211 - DNA, 60 bp, Artificial
  Synthetic oligonucleotide
acggaaccgtcaattctgatgacgaggactacttctctagtgagaccaggagtccggagg

SEQ ID NO: 530212 - DNA, 60 bp, Artificial
  Synthetic oligonucleotide
tctcattgaggattctactcactggggggaagatgagtctgactttttactacgagatat

SEQ ID NO: 530213 - DNA, 60 bp, Artificial
  Synthetic oligonucleotide
tttatagtgacaaaagtcattcatatgatagatcagaagtaatcaggtttatacaagatc

SEQ ID NO: 530214 - DNA, 60 bp, Artificial
  Synthetic oligonucleotide
agaaccaagatactagcccagggggacaaccaggtcctgtgtccgacatacatgttgtcg

SEQ ID NO: 530215 - DNA, 60 bp, Artificial
  Synthetic oligonucleotide
agacccagctatcaaggcagaaggagaacctcccaaaaaagtgaccctaatctaagcttt

SEQ ID NO: 530216 - DNA, 60 bp, Artificial
  Synthetic oligonucleotide
tttactcgcctactcgaggaccctaccacccttaatatcaaggggggagccagtcctacc

SEQ ID NO: 530217 - DNA, 60 bp, Artificial
  Synthetic oligonucleotide
tcggggaagtatttatctgtcctggagttggtctgatgacgcctcagtgttcaagagggt

SEQ ID NO: 530218 - DNA, 60 bp, Artificial
  Synthetic oligonucleotide
agatcaccccagattctcttgtggacataaaacgtactaatgtggaaggaaattgggccc

SEQ ID NO: 530219 - DNA, 60 bp, Artificial
  Synthetic oligonucleotide
agattaagagatgctatatcttggttcataccacctgactctcccttgtccacatgcata

SEQ ID NO: 530220 - DNA, 60 bp, Artificial
  Synthetic oligonucleotide
tcgggagccccagtccccgagggtatgaactgggtttataaattgagaagaactcttatc

SEQ ID NO: 530221 - DNA, 60 bp, Artificial
  Synthetic oligonucleotide
agcaagatttttgtcaacccgagtgcaatcagggcgggccttgcagatctagagatggca

SEQ ID NO: 530222 - DNA, 60 bp, Artificial
  Synthetic oligonucleotide
agcttctcggatgtgaaaaaaactattaacatccctccaaagactcaaggaaagatgatc

SEQ ID NO: 530223 - DNA, 60 bp, Artificial
  Synthetic oligonucleotide
aggagaactcttatcttccagtgggctgattctaggggccctctagaaggagaggagttg

SEQ ID NO: 530224 - DNA, 60 bp, Artificial
  Synthetic oligonucleotide
tggagtagcacatgggatcactcaccacgtaatgcagtctaaagacagattaatatccaa

SEQ ID NO: 530225 - DNA, 60 bp, Artificial
  Synthetic oligonucleotide
tcgagggaatatttatctgtcctggagttggtctgaagacacctcagtgtttaagagggt

SEQ ID NO: 530226 - DNA, 60 bp, Artificial
  Synthetic oligonucleotide
agggctggtttagtggatggaggagctctatcatgggagtggtggctgtgattatcggat

SEQ ID NO: 530227 - DNA, 60 bp, Artificial
  Synthetic oligonucleotide
agggttcctcatgaatacaattactgtcccactagtgcagataagaactcacatgggact

SEQ ID NO: 530228 - DNA, 60 bp, Artificial
  Synthetic oligonucleotide
tcgaagctatatgatcaagtccacattaagaaggtgatagataaatcctatcaggagtgt

SEQ ID NO: 530229 - DNA, 60 bp, Artificial
  Synthetic oligonucleotide
tcctcaaatgcagttggtcacgtgttcaacctcattcactttgttggatgttatatgggt

SEQ ID NO: 530230 - DNA, 60 bp, Artificial
  Synthetic oligonucleotide
tccccctttacacaattcccgagaagatcgactcctggacccctatagatatgatccatc

SEQ ID NO: 530231 - DNA, 60 bp, Artificial
  Synthetic oligonucleotide
agtccccttgggtttccaaatggaatctatcgaagaggtccctatgatccttatttaggg

SEQ ID NO: 530232 - DNA, 60 bp, Artificial
  Synthetic oligonucleotide
tttgttggttatgtcaccactacattcaagagaaaacactttcgccctatgccagatgca

SEQ ID NO: 530233 - DNA, 60 bp, Artificial
  Synthetic oligonucleotide
aaaagatgggctagagtctcctgcatctctaacgaccaaattgtcaaccttgccaatata

SEQ ID NO: 530234 - DNA, 60 bp, Artificial
  Synthetic oligonucleotide
aaaaggaggtgatacagcatgttcggtcaaagccaaatgttcccattccaagcaggaaag

SEQ ID NO: 530235 - DNA, 60 bp, Artificial
  Synthetic oligonucleotide
aaacagtccacaactctacaaaatggtttacgtcttcagatggagaaagtgtctgtagtc

SEQ ID NO: 530236 - DNA, 60 bp, Artificial
  Synthetic oligonucleotide
aaagatgacaagcacttgacagatttcctctggtcgattgaccccttattcccgcgtttt

SEQ ID NO: 530237 - DNA, 60 bp, Artificial
  Synthetic oligonucleotide
aaaggtgaacgggttcacttgtacgggtgttgtgacagaagctgagacctataccaactt

SEQ ID NO: 530238 - DNA, 60 bp, Artificial
  Synthetic oligonucleotide
aaatattaaaggaggggctagtcctaccattcttctcaaagatgcaatcagaaaagccct

SEQ ID NO: 530239 - DNA, 60 bp, Artificial
  Synthetic oligonucleotide
tttgtgatgcagaggtcactgacattgcatcaatcaaccgaataaccctgctaatgtctg

SEQ ID NO: 530240 - DNA, 60 bp, Artificial
  Synthetic oligonucleotide
tgagttggtagagggatggtttagcggttggagaagctccatcatgggagtgctggctgt

SEQ ID NO: 530241 - DNA, 60 bp, Artificial
  Synthetic oligonucleotide
aaccaggtcctatgtccgacatatatgttgtcaccggggctttctcgagaggggcttctc

SEQ ID NO: 530242 - DNA, 60 bp, Artificial
  Synthetic oligonucleotide
aaccccagagaattcctaaaatctatagaccttggaggattgccggatgaggacttaata

SEQ ID NO: 530243 - DNA, 60 bp, Artificial
  Synthetic oligonucleotide
aaccgaataaccctcctaatgtctgatttcgcattgtccatagatggtccactttacctg

SEQ ID NO: 530244 - DNA, 60 bp, Artificial
  Synthetic oligonucleotide
aaccgatttggctcagttctactccaagtcttcccccatagagagactgttaaattgcac

SEQ ID NO: 530245 - DNA, 60 bp, Artificial
  Synthetic oligonucleotide
tgagttcgaaaattgtgctcgcggctatttgcctgtgtagtgtacaatatgtcgcttgta

SEQ ID NO: 530246 - DNA, 60 bp, Artificial
  Synthetic oligonucleotide
tttcagatgggtgaagcggaggaccccgcactcttgttccagtcttacctggacaacgtt

SEQ ID NO: 530247 - DNA, 60 bp, Artificial
  Synthetic oligonucleotide
tgagtgggggagatgatatcatctcccgggttattgactttgattccatctgggagaaac

SEQ ID NO: 530248 - DNA, 60 bp, Artificial
  Synthetic oligonucleotide
aagatgggctagagtctcttgtatctctaatgaccaaatagtcaacctcgccaacataat

SEQ ID NO: 530249 - DNA, 60 bp, Artificial
  Synthetic oligonucleotide
tggacaggggagtctagatccccagaggcggtgtttaatcgcatcatggtaaacaaagga

SEQ ID NO: 530250 - DNA, 60 bp, Artificial
  Synthetic oligonucleotide
aagtcatcaaaatattagagccatacgttgtgaacagcttggttcagagggcagagaaat

SEQ ID NO: 530251 - DNA, 60 bp, Artificial
  Synthetic oligonucleotide
tgagtacaagtacccagctatcaaagacctaaaaaagcctagtataaccttagggaaggc

SEQ ID NO: 530252 - DNA, 60 bp, Artificial
  Synthetic oligonucleotide
tgagatgtatgctggggtgggttgctctagccaactccaaaaaattccagctgttagtgg

SEQ ID NO: 530253 - DNA, 60 bp, Artificial
  Synthetic oligonucleotide
aatctcgatgacatagtcaaagagtcgaaaaatgtgccaagtgtaacccgcttggcccat

SEQ ID NO: 530254 - DNA, 60 bp, Artificial
  Synthetic oligonucleotide
tgagacacttcaacatatgctgcagtaccatgatgtacttgtccactgccttgggagatg

SEQ ID NO: 530255 - DNA, 60 bp, Artificial
  Synthetic oligonucleotide
tgaatgcagctaagctcgaccctgacgatgtatgctcttatctagcggctgcaatgcagt

SEQ ID NO: 530256 - DNA, 60 bp, Artificial
  Synthetic oligonucleotide
aattgtctagatgcactggagtccatcatgaccaccaaatcagtgaccttcagacgtctc

SEQ ID NO: 530257 - DNA, 60 bp, Artificial
  Synthetic oligonucleotide
acaagatcaccccaaattctcttgtggacataagacgcaccgatgtggaagggaattggg

SEQ ID NO: 530258 - DNA, 60 bp, Artificial
  Synthetic oligonucleotide
acaagatcaccccagagtctcttgtagacatcagacgtaccaatgtggaagggaattggg

SEQ ID NO: 530259 - DNA, 60 bp, Artificial
  Synthetic oligonucleotide
tgaactgggtatacaaattgaggagaactcttatcttccagtgggctgattctaggggcc

SEQ ID NO: 530260 - DNA, 60 bp, Artificial
  Synthetic oligonucleotide
acacattaaggactgtgatctttcctcatccattattacaccgggggaacatgcaacaga

SEQ ID NO: 530261 - DNA, 60 bp, Artificial
  Synthetic oligonucleotide
atgaactgctgcaactatctaactcatgttgtaacatgaaaacactacattaaatatggg

SEQ ID NO: 530262 - DNA, 60 bp, Artificial
  Synthetic oligonucleotide
atctaaggggggcaagatttgcggattcgtggacgaaaggggcttgtacaagtctctgaa

SEQ ID NO: 530263 - DNA, 60 bp, Artificial
  Synthetic oligonucleotide
tggcacaaacttcccctcactcaatgtttcgaaataccggatttgatagacccttcagtg

SEQ ID NO: 530264 - DNA, 60 bp, Artificial
  Synthetic oligonucleotide
tatgacatcgtgtctgttgagattgtcacattgttctagaggactgtttaatagtctatt

SEQ ID NO: 530265 - DNA, 60 bp, Artificial
  Synthetic oligonucleotide
atggagttacaatgtcttgtttatgtcaaccggaaaatatggatttcttctcgatgaggg

SEQ ID NO: 530266 - DNA, 60 bp, Artificial
  Synthetic oligonucleotide
attcaagagaaaacactttcgccctatgccagatgcatgcagagctgcatacaattggaa

SEQ ID NO: 530267 - DNA, 60 bp, Artificial
  Synthetic oligonucleotide
ttctgatggcggggagttattccagttcatcattaaaactatggatcagggcattcgggt

SEQ ID NO: 530268 - DNA, 60 bp, Artificial
  Synthetic oligonucleotide
atactcccaggagattacctgggatgatgacacagagtttgtcggattggaaatacgagt

SEQ ID NO: 530269 - DNA, 60 bp, Artificial
  Synthetic oligonucleotide
agtcttctccaatagagtgttcaacgtatcaaagccgctgactgaccctttattctatcc

SEQ ID NO: 530270 - DNA, 60 bp, Artificial
  Synthetic oligonucleotide
atccgatttgatgggggcaattgttatgggcctgaagcataagaaactctttaatcaggc

SEQ ID NO: 530271 - DNA, 60 bp, Artificial
  Synthetic oligonucleotide
tcaatttcattggtcaccctaatttttaccaagagatgtcaaagctacctcacaaagttc

SEQ ID NO: 530272 - DNA, 60 bp, Artificial
  Synthetic oligonucleotide
tatagaccttggaggattgccggatgaggacttaataatcggtcttaagcctaaggaaag

SEQ ID NO: 530273 - DNA, 60 bp, Artificial
  Synthetic oligonucleotide
atctctcaaacccattaatctctggactgagattgaatcaattagccacaggagcacatt

SEQ ID NO: 530274 - DNA, 60 bp, Artificial
  Synthetic oligonucleotide
tattctatcctccatctgatcccaaaatcctgagacacttcaacatatgctgcagtacca

SEQ ID NO: 530275 - DNA, 60 bp, Artificial
  Synthetic oligonucleotide
atcctatgttatggtcaacttccccagtctgccggggaagtcttcagaagataaagctac

SEQ ID NO: 530276 - DNA, 60 bp, Artificial
  Synthetic oligonucleotide
agtcctaccattcttctcaaagatgcaatcagaaaagctctatatgatgaggtagacaaa

SEQ ID NO: 530277 - DNA, 59 bp, Artificial
  Synthetic oligonucleotide
tcctcttgacatgcttaaaggttgtcaagctcaacccatatcccatcaagatatgcaca

SEQ ID NO: 530278 - DNA, 59 bp, Artificial
  Synthetic oligonucleotide
atagatacaggaaaggacttggtcaagtttaaggatcaaatatggggattgctgattgt

SEQ ID NO: 530279 - DNA, 59 bp, Artificial
  Synthetic oligonucleotide
gttattagaggaccctacctctttaaacatctcaatggggatgagccctgccaatctac

SEQ ID NO: 530280 - DNA, 59 bp, Artificial
  Synthetic oligonucleotide
cccttcagtgatttattcggacaaaagtcactccatgaacaaaaaagaagtgatacaac

SEQ ID NO: 530281 - DNA, 58 bp, Artificial
  Synthetic oligonucleotide
actccttgcaggcactccgtgagaaaacgattggcaagtatgccaaggcagagttcga

SEQ ID NO: 530282 - DNA, 58 bp, Artificial
  Synthetic oligonucleotide
ttgggagatgtgcccagctttgcaagacttcatgacctatacaacagacccataacct

SEQ ID NO: 530283 - DNA, 58 bp, Artificial
  Synthetic oligonucleotide
ggatctagtgtcggtaaatgcatcggatttataatatcagagtacctattctctaaag

SEQ ID NO: 530284 - DNA, 58 bp, Artificial
  Synthetic oligonucleotide
ggctgtgggatgatcaaatatactgtttggacatgtcaaacggaccgacatgctggaa

SEQ ID NO: 530285 - DNA, 58 bp, Artificial
  Synthetic oligonucleotide
catgcagtaaaaggtatgcattataattcaatgagtataaaggaggagcaagtcactc

SEQ ID NO: 530286 - DNA, 58 bp, Artificial
  Synthetic oligonucleotide
tgatccaggggaggtttatgatgaccccattgatccgattgagtcagaggctgagccg

SEQ ID NO: 530287 - DNA, 57 bp, Artificial
  Synthetic oligonucleotide
ctgaattctccactcatatcagatgacatggtttatttagtcaagcggatgaaccat

SEQ ID NO: 530288 - DNA, 57 bp, Artificial
  Synthetic oligonucleotide
ggtagattcaaaagtcgagaaactttcattaatcatctccactgatcagacatagtc

SEQ ID NO: 530289 - DNA, 57 bp, Artificial
  Synthetic oligonucleotide
ggggaatttaatagtgtggaattaggcttgataattaaagtaattgtatctgaatca

SEQ ID NO: 530290 - DNA, 57 bp, Artificial
  Synthetic oligonucleotide
taacaatgcccaagggactaacaacacatcaggttgatgggtttatgtgtcactctg

SEQ ID NO: 530291 - DNA, 57 bp, Artificial
  Synthetic oligonucleotide
tctcctcttgacatgcttcgaggttgtcaggctcagcccatatcccatcaggaaatg

SEQ ID NO: 530292 - DNA, 57 bp, Artificial
  Synthetic oligonucleotide
ctcaagacaaatgccacaaaattgagatatggatggctgccgaagagttgctaactg

SEQ ID NO: 530293 - DNA, 57 bp, Artificial
  Synthetic oligonucleotide
cgaattggaactgagcaatggttctaaaccaccggattttaagtatagcctagagcc

SEQ ID NO: 530294 - DNA, 57 bp, Artificial
  Synthetic oligonucleotide
ttacactgtctggatgcccgaggaaccaagactcgggacattttgcgacatttttac

SEQ ID NO: 530295 - DNA, 57 bp, Artificial
  Synthetic oligonucleotide
gagcaattcaacacctatccagagcgtttcctgcggtcactggatttataactcaga

SEQ ID NO: 530296 - DNA, 57 bp, Artificial
  Synthetic oligonucleotide
tattaacatgaactctcgggcatgtcaattgtggtctgacatgtcccttcgaacaca

SEQ ID NO: 530297 - DNA, 56 bp, Artificial
  Synthetic oligonucleotide
ggttataaaggggtaatattagaagatggagagtggtggagttatactaatttggc

SEQ ID NO: 530298 - DNA, 56 bp, Artificial
  Synthetic oligonucleotide
tatgaacgagaggtaatcacaacttcccctgagaatgactggttgtggatcttctc

SEQ ID NO: 530299 - DNA, 56 bp, Artificial
  Synthetic oligonucleotide
ttgactatgaaaagtggaataaccatcagagaaaagagtctaatggcccaatattt

SEQ ID NO: 530300 - DNA, 56 bp, Artificial
  Synthetic oligonucleotide
ccccactgtttcggagcatgcatctttggttggtcttctcttgagtctgtataggt

SEQ ID NO: 530301 - DNA, 56 bp, Artificial
  Synthetic oligonucleotide
gtggtcctagtacaattaacaaaacatcaagtacaggtcaatctgacaacaagttg

SEQ ID NO: 530302 - DNA, 56 bp, Artificial
  Synthetic oligonucleotide
gagggaccccactgtttcggagcatgcatctttggttggtcttctcttgagtctgt

SEQ ID NO: 530303 - DNA, 56 bp, Artificial
  Synthetic oligonucleotide
ccagaacggattaaggattaccaaattaagtgtccaattaggcaaaatgagttgtc

SEQ ID NO: 530304 - DNA, 56 bp, Artificial
  Synthetic oligonucleotide
gtgaggtgcttaaaagtactccccttatagaccgacatgagaagtatgagggcaat

SEQ ID NO: 530305 - DNA, 55 bp, Artificial
  Synthetic oligonucleotide
gctcaacagattgccgtatctacctcttcaaatcctgctccgacatcagagatcg

SEQ ID NO: 530306 - DNA, 55 bp, Artificial
  Synthetic oligonucleotide
gctaactggagtactataccgaacttcagatttctggccggaacctacgatatgt

SEQ ID NO: 530307 - DNA, 55 bp, Artificial
  Synthetic oligonucleotide
gccttggaaagttccctatctatacgataccagacaagctcggcccttggagccc

SEQ ID NO: 530308 - DNA, 55 bp, Artificial
  Synthetic oligonucleotide
taaggggtacaaaagaactgggtcttcactacatagatttggatgcagtagggtt

SEQ ID NO: 530309 - DNA, 55 bp, Artificial
  Synthetic oligonucleotide
tgtgctcgggtgggttgctctagccagttccaggaagttccagattctggttgag

SEQ ID NO: 530310 - DNA, 55 bp, Artificial
  Synthetic oligonucleotide
gccttgactgttgcgcagcattcccagtctttaattaagccgatgagggacttct

SEQ ID NO: 530311 - DNA, 55 bp, Artificial
  Synthetic oligonucleotide
gctgacatattggctttccgaaaataggggcgggccagttccaagtgagaaagtc

SEQ ID NO: 530312 - DNA, 55 bp, Artificial
  Synthetic oligonucleotide
gctgatctcaggagtaatttcatacatcctcttgagactggacaatcacccctct

SEQ ID NO: 530313 - DNA, 55 bp, Artificial
  Synthetic oligonucleotide
tgagaccaaatggtgcccttctgatcaactggtaaatctacatgactttcactca

SEQ ID NO: 530314 - DNA, 55 bp, Artificial
  Synthetic oligonucleotide
gctgcttatgaactaggctttctcgagggaatgtaatgaccaagactcagggatg

SEQ ID NO: 530315 - DNA, 55 bp, Artificial
  Synthetic oligonucleotide
gctgtcatctgtctcaactaatgcattgactgtgtcccatttcagtgtgaatcca

SEQ ID NO: 530316 - DNA, 55 bp, Artificial
  Synthetic oligonucleotide
gcttatatcaggagtgatttcgtacatcctcttgagattggacaatcacccgtct

SEQ ID NO: 530317 - DNA, 55 bp, Artificial
  Synthetic oligonucleotide
gcttgggctaaggcagaacccatcgcaagttccctcacaatagactaaacagggg

SEQ ID NO: 530318 - DNA, 55 bp, Artificial
  Synthetic oligonucleotide
gcttgtaatctaggctctctcgaaggaatgtatggaccaagactcttggacagtg

SEQ ID NO: 530319 - DNA, 55 bp, Artificial
  Synthetic oligonucleotide
ggaagatggccggagatcctagatacgaagagtctcttcacaatccttaccctga

SEQ ID NO: 530320 - DNA, 55 bp, Artificial
  Synthetic oligonucleotide
tggtccgccgcaaacgaagaggatgacccatctgtggaggctgaaatcgctcacc

SEQ ID NO: 530321 - DNA, 55 bp, Artificial
  Synthetic oligonucleotide
ggaataactatcaaagaaaagagtccaatggccctgtgttccgagtcatgggtca

SEQ ID NO: 530322 - DNA, 55 bp, Artificial
  Synthetic oligonucleotide
gttctatcggttgagagtctttgtactattagccatggaggactatttgtctagc

SEQ ID NO: 530323 - DNA, 55 bp, Artificial
  Synthetic oligonucleotide
ggaatctacgtcattacatcagatgtttggcaagttgctaaatcggatcatggtg

SEQ ID NO: 530324 - DNA, 55 bp, Artificial
  Synthetic oligonucleotide
ggaatctaggggagacattgagtaggctaattgaggggatacgagaggtgggagc

SEQ ID NO: 530325 - DNA, 55 bp, Artificial
  Synthetic oligonucleotide
gttagagctctctccaagagacttcagaatccgttaatctctggcctgagggtgg

SEQ ID NO: 530326 - DNA, 55 bp, Artificial
  Synthetic oligonucleotide
gcagatagaatagagcagattttcgagacggctccctttgcaaagatcgtggaac

SEQ ID NO: 530327 - DNA, 55 bp, Artificial
  Synthetic oligonucleotide
gcagaggctacagcaagttcccttacattagaccaaatagaagttagttgagaga

SEQ ID NO: 530328 - DNA, 55 bp, Artificial
  Synthetic oligonucleotide
gcagacaggatagagcagattttcgaaacagccccttttgcaaagatcgtagaac

SEQ ID NO: 530329 - DNA, 55 bp, Artificial
  Synthetic oligonucleotide
gcagacagaatagagcaaattttcgagacagccccttttgtcaagattgtcgagc

SEQ ID NO: 530330 - DNA, 55 bp, Artificial
  Synthetic oligonucleotide
gcactgattgggacctgtctttggctgagttggatcgaatcagatcttaatctat

SEQ ID NO: 530331 - DNA, 55 bp, Artificial
  Synthetic oligonucleotide
tgctcattacaagtcaattcggacctggaacgagatcatcccctcaaaagggtgc

SEQ ID NO: 530332 - DNA, 55 bp, Artificial
  Synthetic oligonucleotide
tagcacgaaggggagacaagatcaccccagaatctctcgtagacatcaggcgtac

SEQ ID NO: 530333 - DNA, 55 bp, Artificial
  Synthetic oligonucleotide
tgcttatctctacgcagcgttaaagggagtggaaggaactttagacagagactgg

SEQ ID NO: 530334 - DNA, 55 bp, Artificial
  Synthetic oligonucleotide
tagcacggaggggagacaagatcaccccaaattctcttgtggacataagacgcac

SEQ ID NO: 530335 - DNA, 55 bp, Artificial
  Synthetic oligonucleotide
gcaataggtcacaatcatcttacatcctgataaggtgtgcaaaactacaaagggc

SEQ ID NO: 530336 - DNA, 55 bp, Artificial
  Synthetic oligonucleotide
gcaaggtctcccctcgagactatttgaggggactcgccagaggagtcttgatagg

SEQ ID NO: 530337 - DNA, 55 bp, Artificial
  Synthetic oligonucleotide
gattggaaataagagtaagtgcaagacaatgccatattcaaggcaggatttggtg

SEQ ID NO: 530338 - DNA, 55 bp, Artificial
  Synthetic oligonucleotide
tagcatgggagactcagagaatgttggattatgcactgtgtcagtcgacatggga

SEQ ID NO: 530339 - DNA, 55 bp, Artificial
  Synthetic oligonucleotide
taggaagggtttggccgtgctcctctgagagagcagacctcctgagagagatctc

SEQ ID NO: 530340 - DNA, 55 bp, Artificial
  Synthetic oligonucleotide
gattcgttaagatatgagaagttccgattcatgttgaagatgactgtcaggtcca

SEQ ID NO: 530341 - DNA, 55 bp, Artificial
  Synthetic oligonucleotide
gatgttagagccaatctgcaatttgcgaataactgaattggcccgagaacataga

SEQ ID NO: 530342 - DNA, 55 bp, Artificial
  Synthetic oligonucleotide
gatggagtatgtcctgatgactggaccagctatggaatcctgattgcacggaagg

SEQ ID NO: 530343 - DNA, 55 bp, Artificial
  Synthetic oligonucleotide
gatgagtcccatgggctttccttcgaaaatattccgaaggggaccttacgatcct

SEQ ID NO: 530344 - DNA, 55 bp, Artificial
  Synthetic oligonucleotide
gatctctcagctgtgtcaactatatatcgcaggagatcacgtcttgtccatgtgc

SEQ ID NO: 530345 - DNA, 55 bp, Artificial; identical to SEQ ID NO: 470369
  Synthetic oligonucleotide

SEQ ID NO: 530346 - DNA, 55 bp, Artificial
  Synthetic oligonucleotide
gcctggggaagttcccgatctacacaatcccagacaagctaggtccttggagtcc

SEQ ID NO: 530347 - DNA, 55 bp, Artificial
  Synthetic oligonucleotide
taatctatacaagacatgtttgagatcgatagtgaaatcaatgcccgtgagatgg

SEQ ID NO: 530348 - DNA, 55 bp, Artificial
  Synthetic oligonucleotide
gcctctgcttctgtcatgctgtatggaaccagtgttcccaatacaatacatttcc

SEQ ID NO: 530349 - DNA, 55 bp, Artificial
  Synthetic oligonucleotide
gccggagtccaaaagatgggctagagtctcctgtatctccaacgaccaaatagtc

SEQ ID NO: 530350 - DNA, 55 bp, Artificial
  Synthetic oligonucleotide
gccggaagtgtataaccgacttggctcagttctattccaagtcctcccctataga

SEQ ID NO: 530351 - DNA, 55 bp, Artificial
  Synthetic oligonucleotide
tatccagctatcaaggactcgaagaagcccagtataaccttaggaaaagcccctg

SEQ ID NO: 530352 - DNA, 55 bp, Artificial
  Synthetic oligonucleotide
tacacaatccgggaaaagttaaggtgttcatcccgactaggatcccactagacag

SEQ ID NO: 530353 - DNA, 55 bp, Artificial
  Synthetic oligonucleotide
gccgaaagaattgtctttaaagtccgtaatcagctagtctctgtgaaaccggagg

SEQ ID NO: 530354 - DNA, 55 bp, Artificial
  Synthetic oligonucleotide
gccctatcctgaagggcagagtttacaagatcctgggtgcagaaggggacaactt

SEQ ID NO: 530355 - DNA, 55 bp, Artificial
  Synthetic oligonucleotide
gccccttatttcccaggtttctgagtcaatttgcagaatcaacctattatggagt

SEQ ID NO: 530356 - DNA, 55 bp, Artificial
  Synthetic oligonucleotide
tacatgggatgatgatacagagttcgttgggctgcaaatgcgggtaagtgcaagg

SEQ ID NO: 530357 - DNA, 55 bp, Artificial
  Synthetic oligonucleotide
tatcatcttgagatgcgggattgcttacagagatttcatatgtggaggggatggg

SEQ ID NO: 530358 - DNA, 55 bp, Artificial
  Synthetic oligonucleotide
gccatgtgttcaacctcattcactttgttggatgttatatgggtcaggtgagatc

SEQ ID NO: 530359 - DNA, 55 bp, Artificial
  Synthetic oligonucleotide
tgggcggagctgcagctcaatctatgatctccctttggctgtacggtgcctactc

SEQ ID NO: 530360 - DNA, 55 bp, Artificial
  Synthetic oligonucleotide
gcatcataccttgatgacaacccacaaaatgtgtgctaactggagtactataccg

SEQ ID NO: 530361 - DNA, 55 bp, Artificial
  Synthetic oligonucleotide
tagattgagcaaaatatctgggcagaacaccggcaattacaagacaaacatcgca

SEQ ID NO: 530362 - DNA, 55 bp, Artificial
  Synthetic oligonucleotide
gcagtccaaatggatactcttttaggatcttgcgccatattttgagatcattcga

SEQ ID NO: 530363 - DNA, 55 bp, Artificial
  Synthetic oligonucleotide
gcagggtttgcggatttgtggatgagaggggcttatacaaatctctcaaaggagc

SEQ ID NO: 530364 - DNA, 55 bp, Artificial
  Synthetic oligonucleotide
tgatcggatgtgatgagtgtgtaatagacccggtgagggttgtcattgagctgac

SEQ ID NO: 530365 - DNA, 55 bp, Artificial
  Synthetic oligonucleotide
gcagcgtactgaatctaattggatatatctcgaagtgtacagtctgtataactag

SEQ ID NO: 530366 - DNA, 55 bp, Artificial
  Synthetic oligonucleotide
gcagccccaagagcgaaatgcagagggcccgatctctgaattaccaagatcttgt

SEQ ID NO: 530367 - DNA, 55 bp, Artificial
  Synthetic oligonucleotide
ggtagccttggcagatgatggaacagtcaattctgatgacgaggactacttctcc

SEQ ID NO: 530368 - DNA, 55 bp, Artificial
  Synthetic oligonucleotide
gtctcgggaagttccccatttacactataccagacaagctaggcccttggagtcc

SEQ ID NO: 530369 - DNA, 55 bp, Artificial
  Synthetic oligonucleotide
gggtttataaaattagacgcactttaatatttcaatgggcagactcatcaggccc

SEQ ID NO: 530370 - DNA, 55 bp, Artificial
  Synthetic oligonucleotide
gggttaactctatctgggagtccgatccctgaagggatgaattgggcatacagat

SEQ ID NO: 530371 - DNA, 55 bp, Artificial
  Synthetic oligonucleotide
gggtcgattgcaaatgggaataccaacctagatcagtccactcaatattagagaa

SEQ ID NO: 530372 - DNA, 55 bp, Artificial
  Synthetic oligonucleotide
gggtccaagctccctctgagatgtgtgctaggatgggttgctctagccaattcca

SEQ ID NO: 530373 - DNA, 55 bp, Artificial
  Synthetic oligonucleotide
tcaaggtgtgtagtccaaacggctattcatttaggatcctgcggcatattttgaa

SEQ ID NO: 530374 - DNA, 55 bp, Artificial
  Synthetic oligonucleotide
gggtcaggtgggatatcaagagcagtactcaacatgtttccggatgccaggcttg

SEQ ID NO: 530375 - DNA, 55 bp, Artificial
  Synthetic oligonucleotide
gggtcaggtgaggtccttgaatgcaacggtaatagccacctgtgctccgcatgag

SEQ ID NO: 530376 - DNA, 55 bp, Artificial
  Synthetic oligonucleotide
gggtattaatggatcgaaactttctcctcatgtgcaaggatgtaataattggccg

SEQ ID NO: 530377 - DNA, 55 bp, Artificial
  Synthetic oligonucleotide
gggtacaacagatggatcaccctcgatgacattagatcccgatcatctctgttag

SEQ ID NO: 530378 - DNA, 55 bp, Artificial
  Synthetic oligonucleotide
gtctttctggagagaaatctggctaagctctaatgagtcttggattcatgcactg

SEQ ID NO: 530379 - DNA, 55 bp, Artificial
  Synthetic oligonucleotide
ggggttctggcgggcctgagtagagtcagttatgaccattcttttgggaggtact

SEQ ID NO: 530380 - DNA, 55 bp, Artificial
  Synthetic oligonucleotide
ggggtcttaagttgtcttgagagggttgattacgacaaagcatttgggcggtatc

SEQ ID NO: 530381 - DNA, 55 bp, Artificial
  Synthetic oligonucleotide
tggtttctctgaagcctgagattattgtagatcagtatgagtacaagtatccagc

SEQ ID NO: 530382 - DNA, 55 bp, Artificial
  Synthetic oligonucleotide
ggggcatctcttgccttgacaatcttccgtgaactctgtatagcaaggcggactc

SEQ ID NO: 530383 - DNA, 55 bp, Artificial
  Synthetic oligonucleotide
ggggaatatcgagagcggtactcaacatgtttccagatgctaagcttgtattcaa

SEQ ID NO: 530384 - DNA, 55 bp, Artificial
  Synthetic oligonucleotide
ggggaaagcagatccatggagtctcagtcggccaccccttagaactgttcggtcg

SEQ ID NO: 530385 - DNA, 55 bp, Artificial
  Synthetic oligonucleotide
gggattctcctcccagttatactgatgtgagaagagggatatacccatctgcacc

SEQ ID NO: 530386 - DNA, 55 bp, Artificial
  Synthetic oligonucleotide
gggatggatcaggagggatatcaagagtggtactcaacatgtttccggatgccag

SEQ ID NO: 530387 - DNA, 55 bp, Artificial
  Synthetic oligonucleotide
gtcgccggggctctccagagaaggacttctttacgagttggagagcatatctcga

SEQ ID NO: 530388 - DNA, 55 bp, Artificial
  Synthetic oligonucleotide
gtcgagttctcatcacaaacttccacaaagaaactaacaatgccccaacggattc

SEQ ID NO: 530389 - DNA, 55 bp, Artificial
  Synthetic oligonucleotide
gtcgcggggaattccccatctacacgataccagacaagctcggcccttggagccc

SEQ ID NO: 530390 - DNA, 55 bp, Artificial
  Synthetic oligonucleotide
gtccggactccgactaggacagttacccaccggagctcactacaagatgagaacc

SEQ ID NO: 530391 - DNA, 55 bp, Artificial
  Synthetic oligonucleotide
gtcccaataggtgtgacaccctctaaatcagacggttacctctgccatggtgcaa

SEQ ID NO: 530392 - DNA, 55 bp, Artificial
  Synthetic oligonucleotide
gtccagatcgtctctcttagattatagctgcctgtaacctaaatgctctcgaagg

SEQ ID NO: 530393 - DNA, 55 bp, Artificial
  Synthetic oligonucleotide
gtcatatcttcatgggagttgtacaagagtggaggcgagaccgggctgtgagggc

SEQ ID NO: 530394 - DNA, 55 bp, Artificial
  Synthetic oligonucleotide
gtcagaagctgagccgaggggaaatcccaccattcccaacatcttgagaaactct

SEQ ID NO: 530395 - DNA, 55 bp, Artificial
  Synthetic oligonucleotide
gtcaattccgacgatgaggactacttctctagtgagactcggagtccagaagctg

SEQ ID NO: 530396 - DNA, 55 bp, Artificial
  Synthetic oligonucleotide
gtctacatgcatattaaacaacattcaagctctaacgggagaagattggagctca

SEQ ID NO: 530397 - DNA, 55 bp, Artificial
  Synthetic oligonucleotide
gtatctgctgggtctttatagagtaggcagggcaaccgtcccatcttatcagaat

SEQ ID NO: 530398 - DNA, 55 bp, Artificial
  Synthetic oligonucleotide
gtagagtcttttctggtccacaagatggtagatgatctagaattacagcggggaa

SEQ ID NO: 530399 - DNA, 55 bp, Artificial
  Synthetic oligonucleotide
tcagaaggccataaggcctgccaagcctagtgattctactacaccgcaatatccc

SEQ ID NO: 530400 - DNA, 55 bp, Artificial
  Synthetic oligonucleotide
ggtttgcgaagacaaattttctcagactgatccaataatgtcgttttgtgaaggc

SEQ ID NO: 530401 - DNA, 55 bp, Artificial
  Synthetic oligonucleotide
tcggattacagataagagtgagtgctaaacaatgtcatatcacagggagatcttg

SEQ ID NO: 530402 - DNA, 55 bp, Artificial
  Synthetic oligonucleotide
ggtgttgacccgattgtctgatctaatgattcccagtgctatacacaatggggag

SEQ ID NO: 530403 - DNA, 55 bp, Artificial
  Synthetic oligonucleotide
ggtggcttgcaactctagcttgagtctttcatctcactggatcaggctaatctac

SEQ ID NO: 530404 - DNA, 55 bp, Artificial
  Synthetic oligonucleotide
ggtccctagtgagaaggtcattattacggctctttccaaacctcctgtcaacccc

SEQ ID NO: 530405 - DNA, 55 bp, Artificial
  Synthetic oligonucleotide
ggtcattggaactacaatacctcatcctctggagatgcatgggcctccctcaaag

SEQ ID NO: 530406 - DNA, 55 bp, Artificial
  Synthetic oligonucleotide
ggtcacaatcatcttacatcccaataaggcgtacaaaactacaaagggctgggcc

SEQ ID NO: 530407 - DNA, 55 bp, Artificial
  Synthetic oligonucleotide
ggtcaaggactcaccgactactctagagtgacctatgcttttcatttggactacg

SEQ ID NO: 530408 - DNA, 55 bp, Artificial
  Synthetic oligonucleotide
ggatgaggcataactgaatcctccctgaaggctcacatgtcccacgcgacgcaag

SEQ ID NO: 530409 - DNA, 55 bp, Artificial
  Synthetic oligonucleotide
ggatgacaaacatcaacattaacagacctcttgaactgatctcaggagtgatttc

SEQ ID NO: 530410 - DNA, 55 bp, Artificial
  Synthetic oligonucleotide
ggatccagccaaattaatgttagaatggttgagaacaggaaataggcctctccgg

SEQ ID NO: 530411 - DNA, 55 bp, Artificial
  Synthetic oligonucleotide
tggactcgaagttcaataaaccttgtgatcccgttcacgggaaagtcactacatg

SEQ ID NO: 530412 - DNA, 55 bp, Artificial
  Synthetic oligonucleotide
ggagttgtacaaaagtgaaagcgagaccggactgtgaaggtgagtcatccccttc

SEQ ID NO: 530413 - DNA, 55 bp, Artificial
  Synthetic oligonucleotide
gtggcctccaaaacatgtggtagatttggtgggtgacacttggcataagctcccg

SEQ ID NO: 530414 - DNA, 55 bp, Artificial
  Synthetic oligonucleotide
tctgatcgtatagaacagatttttgagacggccccctttgttaagatagtggaac

SEQ ID NO: 530415 - DNA, 55 bp, Artificial
  Synthetic oligonucleotide
ggagtgtgcggaactgctctgactcgcttcttgataaggagctttcctgatcctg

SEQ ID NO: 530416 - DNA, 55 bp, Artificial
  Synthetic oligonucleotide
ggaggggtacttttactatcgcaattcagggatccaacccaacaaagacggcacg

SEQ ID NO: 530417 - DNA, 55 bp, Artificial
  Synthetic oligonucleotide
ggaggggccagtcctaccattcttctcaaagatgcaattaggagagctttatatg

SEQ ID NO: 530418 - DNA, 55 bp, Artificial
  Synthetic oligonucleotide
tctgttcttgtccacaacaatgggagatctacccaactttactagactacatgag

SEQ ID NO: 530419 - DNA, 55 bp, Artificial
  Synthetic oligonucleotide
gtggtcagctgccaacgaagaggatgacttatccgtggaggctgaaatcgctcac

SEQ ID NO: 530420 - DNA, 55 bp, Artificial
  Synthetic oligonucleotide
ggaggatgggttaacttccctgagtcttgtgaacaaataatgccagacaatgctt

SEQ ID NO: 530421 - DNA, 55 bp, Artificial
  Synthetic oligonucleotide
ggagctgttagagtcttctgttatccctctgatgcatcccttggcggacccatca

SEQ ID NO: 530422 - DNA, 55 bp, Artificial
  Synthetic oligonucleotide
ggagccatacgttgtgaatagcctagtccaaaaggcagagaaatttaggcctctc

SEQ ID NO: 530423 - DNA, 55 bp, Artificial
  Synthetic oligonucleotide
gtggtgatcggattggccttgtcaggggcacctgttcctgatgggatgaactggg

SEQ ID NO: 530424 - DNA, 55 bp, Artificial
  Synthetic oligonucleotide
gtgtgctcttatctagcagccgcaatgcagttctttgagggagcatgtcctgatg

SEQ ID NO: 530425 - DNA, 55 bp, Artificial
  Synthetic oligonucleotide
gtgtgttttatcaggattgaaaagtcctgggaaactgaatgtgatagagtgggga

SEQ ID NO: 530426 - DNA, 55 bp, Artificial
  Synthetic oligonucleotide
gttactgattaccggaagaaattgctagatggtctagagaaccagtgcaaagtag

SEQ ID NO: 530427 - DNA, 55 bp, Artificial
  Synthetic oligonucleotide
ggacttaaagaggcccagtataaccttaggaaaagcccctgacttgaacaaagca

SEQ ID NO: 530428 - DNA, 55 bp, Artificial
  Synthetic oligonucleotide
ggacctggaacgagatcatcccctcaaaagggtgcctaaaagtcggagggagatg

SEQ ID NO: 530429 - DNA, 55 bp, Artificial
  Synthetic oligonucleotide
gggatatctaggctcatctacatctatgtcaacccagttgttccacgcttgggag

SEQ ID NO: 530430 - DNA, 55 bp, Artificial
  Synthetic oligonucleotide
gggaggccttccgaagacaaatctactcaaactgctaatcggggactcaagaggg

SEQ ID NO: 530431 - DNA, 55 bp, Artificial
  Synthetic oligonucleotide
gggaggatggtggtcactaaagaatacgttctgatgctagatatcagctgcttgt

SEQ ID NO: 530432 - DNA, 55 bp, Artificial
  Synthetic oligonucleotide
gtgcaatccattaatatcagggttaaggttaaatcaaattgcaacgggagcacat

SEQ ID NO: 530433 - DNA, 55 bp, Artificial
  Synthetic oligonucleotide
gggagaaaccttctgacctgaggaacttgactacatggaggtactttcagtcagt

SEQ ID NO: 530434 - DNA, 55 bp, Artificial
  Synthetic oligonucleotide
gggacagctcaaggattgttatactctattcttgtggctattcatgacccaggat

SEQ ID NO: 530435 - DNA, 55 bp, Artificial
  Synthetic oligonucleotide
gtgctttagcttgggcaaagcctagaacaagtccctctaaaccaaacaggggtca

SEQ ID NO: 530436 - DNA, 55 bp, Artificial
  Synthetic oligonucleotide
gggaaatatccctcaaaatgttctgcacaataaatcagaaggccataaggcctgc

SEQ ID NO: 530437 - DNA, 55 bp, Artificial
  Synthetic oligonucleotide
tcaaggctctagatcaattcgacaacatacacgacttagtctttgtgtacggatg

SEQ ID NO: 530438 - DNA, 55 bp, Artificial
  Synthetic oligonucleotide
gggaaacattaaatggggcagagcagagtcatgagatagggaaaacaattggatt

SEQ ID NO: 530439 - DNA, 55 bp, Artificial
  Synthetic oligonucleotide
ggcttaggagacactaactatgattttatgtttcaatccacaatcatctggtgtc

SEQ ID NO: 530440 - DNA, 55 bp, Artificial
  Synthetic oligonucleotide
ggctgatgacggaaccgtcaattctgatgatgaggactacttctctagtgagacc

SEQ ID NO: 530441 - DNA, 55 bp, Artificial
  Synthetic oligonucleotide
ggctgatacaaaattccagaaccataagaagacagtttaggaggagtctctcgag

SEQ ID NO: 530442 - DNA, 55 bp, Artificial
  Synthetic oligonucleotide
tcaaagacttaaagaagcccagtataactttaggaaaagcccctgacttgaacaa

SEQ ID NO: 530443 - DNA, 55 bp, Artificial
  Synthetic oligonucleotide
ggccttctcttgagtttatataggttgagcaaaatttctggacagaataccggca

SEQ ID NO: 530444 - DNA, 55 bp, Artificial; identical to SEQ ID NO: 424078
  Synthetic oligonucleotide

SEQ ID NO: 530445 - DNA, 55 bp, Artificial
  Synthetic oligonucleotide
ggcctgagtgggaaatctccgtattcgtcaaatgcagttggtcacgtgttcaacc

SEQ ID NO: 530446 - DNA, 55 bp, Artificial
  Synthetic oligonucleotide
ggccgactcaaaagatcgcacataagaagatatgtctcagtcagttccaatcacc

SEQ ID NO: 530447 - DNA, 55 bp, Artificial
  Synthetic oligonucleotide
ggcagcctactagggtctgaaagatccagaaatgctagaatggtaagcgagaaca

SEQ ID NO: 530448 - DNA, 55 bp, Artificial
  Synthetic oligonucleotide
ggcactaaatgatttaagggcttatgtctaccaagggatcaaatctggcaatccg

SEQ ID NO: 530449 - DNA, 55 bp, Artificial
  Synthetic oligonucleotide
ggatgatctagagttgcagcgaggaaccttgtctaaagtttcaattattgtagct

SEQ ID NO: 530450 - DNA, 55 bp, Artificial
  Synthetic oligonucleotide
ccatgattacactatctggatgcctgaagaagcaagactcgggacatcttgtgat

SEQ ID NO: 530451 - DNA, 55 bp, Artificial
  Synthetic oligonucleotide
ccatgaaagacgtcgatctcgttttagtggtttatggatcattccgtcattgggg

SEQ ID NO: 530452 - DNA, 55 bp, Artificial
  Synthetic oligonucleotide
ccaggaggcgaaatactatctggctgaagatggaactaatctgtcgttcgacagg

SEQ ID NO: 530453 - DNA, 55 bp, Artificial
  Synthetic oligonucleotide
ccactacattcaagagaaaacactttcgccctatgccagacgcatgcagagctgc

SEQ ID NO: 530454 - DNA, 55 bp, Artificial
  Synthetic oligonucleotide
ccacattaagaaggtgatagataaatcctatcaggagtgtttggctagcgacttg

SEQ ID NO: 530455 - DNA, 55 bp, Artificial
  Synthetic oligonucleotide
ccaacttatgtggtgtcacaagggttgaatgaggacggtctaaaatatgagttgg

SEQ ID NO: 530456 - DNA, 55 bp, Artificial
  Synthetic oligonucleotide
catgggtataccgtcccaatttataccggatcctggagtaaatctcgaaacactg

SEQ ID NO: 530457 - DNA, 55 bp, Artificial
  Synthetic oligonucleotide
catgggagttgcctcaagtgtagttagtctattccagaactcacgaactatcaga

SEQ ID NO: 530458 - DNA, 55 bp, Artificial
  Synthetic oligonucleotide
catacgttatggtgccacacaatagctgcataacttcaaacttgtgatccagagc

SEQ ID NO: 530459 - DNA, 55 bp, Artificial
  Synthetic oligonucleotide
cataccatgttggtagagcgttaggctttctgtacggagacctgattggccaatc

SEQ ID NO: 530460 - DNA, 55 bp, Artificial
  Synthetic oligonucleotide
ttatctgtcctggagttggtccgatgacgccgcagtgtttaaaagggtggcttgc

SEQ ID NO: 530461 - DNA, 55 bp, Artificial
  Synthetic oligonucleotide
cagtctacagcgatcgacctcggggctatcatggccgaactgtttgtgcggagtt

SEQ ID NO: 530462 - DNA, 55 bp, Artificial
  Synthetic oligonucleotide
cagtcccgtatctatcaaacccgttaatatcaggattgagattaaatcaactggc

SEQ ID NO: 530463 - DNA, 55 bp, Artificial
  Synthetic oligonucleotide
caggagccccagtccctgagggcatgaactgggtatacaaattgaggagaactct

SEQ ID NO: 530464 - DNA, 55 bp, Artificial
  Synthetic oligonucleotide
caggaagcagggaacccggatctgggagagaggacactggaaagttttactcgcc

SEQ ID NO: 530465 - DNA, 55 bp, Artificial
  Synthetic oligonucleotide
caggaacttgggttccagatataagggtaaaggaagtgagtgaacactgcaacca

SEQ ID NO: 530466 - DNA, 55 bp, Artificial
  Synthetic oligonucleotide
cagattccaagactaacaggcttttatctcagaacgagagtccctgccatgacac

SEQ ID NO: 530467 - DNA, 55 bp, Artificial
  Synthetic oligonucleotide
cagactgtcactgaaaagtctcaacaggtctctgcctcgtcggctcccagtcgac

SEQ ID NO: 530468 - DNA, 55 bp, Artificial
  Synthetic oligonucleotide
cagactatgggaatcacctgaactggggataatgaaattaaataaggcctgcaag

SEQ ID NO: 530469 - DNA, 55 bp, Artificial
  Synthetic oligonucleotide
cagaagtcttggatctattactcagacagatccgacctcattggtttatgggagg

SEQ ID NO: 530470 - DNA, 55 bp, Artificial
  Synthetic oligonucleotide
cagaagagctaatcgaacagaatcaatacaacgagatcccggggagtcagggagg

SEQ ID NO: 530471 - DNA, 55 bp, Artificial
  Synthetic oligonucleotide
cactgcccgaaaggactcaataatgtcttagatagtagaggggatctagctgcat

SEQ ID NO: 530472 - DNA, 55 bp, Artificial
  Synthetic oligonucleotide
ttcccgcggtcacgggattcataactcagatgacatcatctttctcatctgagct

SEQ ID NO: 530473 - DNA, 55 bp, Artificial
  Synthetic oligonucleotide
cacctttgattggtagaaatgaagagcatgagggaaacatgagctggaatgggat

SEQ ID NO: 530474 - DNA, 55 bp, Artificial
  Synthetic oligonucleotide
caccggggaagatatgttggactataacaacaactgacaccatgaatgacttagg

SEQ ID NO: 530475 - DNA, 55 bp, Artificial
  Synthetic oligonucleotide
cacagccttggcagatgacggaacagtcaattccgacgatgaggactacttctcc

SEQ ID NO: 530476 - DNA, 55 bp, Artificial
  Synthetic oligonucleotide
caatgatcagatagtcaacctcgccaatataatgtcaacagtatctaccaatgcc

SEQ ID NO: 530477 - DNA, 55 bp, Artificial
  Synthetic oligonucleotide
cctcatctactcccctgttctggagggccctctgctggttaaggcctacgagcgt

SEQ ID NO: 530478 - DNA, 55 bp, Artificial
  Synthetic oligonucleotide
cctaggggacttccctgtattcataagggataaagtggggcaactcgaaggaacg

SEQ ID NO: 530479 - DNA, 55 bp, Artificial
  Synthetic oligonucleotide
cctactttgagagtaccgcaaggtaaattagatttgccaacagttagagaactgg

SEQ ID NO: 530480 - DNA, 55 bp, Artificial
  Synthetic oligonucleotide
cctactaaaagggtactacagacattacttgaaaagccagctacgaattggcctg

SEQ ID NO: 530481 - DNA, 55 bp, Artificial
  Synthetic oligonucleotide
cctaacccaatctgccttatggtggacggcaagtgtcatccaggttatgatggtg

SEQ ID NO: 530482 - DNA, 55 bp, Artificial
  Synthetic oligonucleotide
ccgggatcctattttgggtttcgattgtctattcggacgtccttttgaacagcag

SEQ ID NO: 530483 - DNA, 55 bp, Artificial
  Synthetic oligonucleotide
ccgggaatcaaagaatgattgggctggtcaaggttgtcattggattggcgttgtc

SEQ ID NO: 530484 - DNA, 55 bp, Artificial
  Synthetic oligonucleotide
ccggccaaaacaccggcaattacaagacgaacattgcagatagaatagagcagat

SEQ ID NO: 530485 - DNA, 55 bp, Artificial
  Synthetic oligonucleotide
ccggatcatggggactgtccattaatcaactcaaaccgatggtgggaaaatggga

SEQ ID NO: 530486 - DNA, 55 bp, Artificial
  Synthetic oligonucleotide
ccggaagaaattgctagatggtctagagaatcagtgcaaggtagcatcaaccaga

SEQ ID NO: 530487 - DNA, 55 bp, Artificial
  Synthetic oligonucleotide
ccgctaatgtcaggacttagattaggtcaattacctactggggctcattacaaga

SEQ ID NO: 530488 - DNA, 55 bp, Artificial
  Synthetic oligonucleotide
ccgccttctgaccccaaaatcttgagacacttcaacatatgctgcagtaccatga

SEQ ID NO: 530489 - DNA, 55 bp, Artificial
  Synthetic oligonucleotide
ccgagtgcaatcagggcgggccttgcagatctagagatggcagaggaaacagtag

SEQ ID NO: 530490 - DNA, 55 bp, Artificial
  Synthetic oligonucleotide
cccttgatccattctttgggagagtttccagcgtttataaaggataagaccaccc

SEQ ID NO: 530491 - DNA, 55 bp, Artificial
  Synthetic oligonucleotide
ttatctctcactttgtcatgaacacaatacggacgacagacagtatgcctggacc

SEQ ID NO: 530492 - DNA, 55 bp, Artificial
  Synthetic oligonucleotide
ccctactgtttcagagcatgcatctctggttggccttctcttgagtttatatagg

SEQ ID NO: 530493 - DNA, 55 bp, Artificial
  Synthetic oligonucleotide
cccgtctgagatcctagatgacaaatcacactcttttactagaacaagattggcg

SEQ ID NO: 530494 - DNA, 55 bp, Artificial
  Synthetic oligonucleotide
cccggaataccagaaccaagatactagcccaaggggacaaccaggtcctgtgtcc

SEQ ID NO: 530495 - DNA, 55 bp, Artificial
  Synthetic oligonucleotide
cccgactgcaccagtgctatccatccacgatccgaggttactgtgcccgtcaagc

SEQ ID NO: 530496 - DNA, 55 bp, Artificial
  Synthetic oligonucleotide
cccctgaggacgacaaatggatggcacttgcagtcatatcgatgtatagattagg

SEQ ID NO: 530497 - DNA, 55 bp, Artificial
  Synthetic oligonucleotide
cccctcctgtaaacctttgtgtctatcattttggaaagccaccctgtcattatcc

SEQ ID NO: 530498 - DNA, 55 bp, Artificial
  Synthetic oligonucleotide
ccccgttgatccgattgagtcagaggccgagccgagagggaacccaaccattccc

SEQ ID NO: 530499 - DNA, 55 bp, Artificial
  Synthetic oligonucleotide
cccagtataaccttaggaaaagcccctgacttgaacaaagcatacaaatcagttt

SEQ ID NO: 530500 - DNA, 55 bp, Artificial
  Synthetic oligonucleotide
cccagctgttccacgcctgggagaaagtcaccaatgttcatgttgtgaaaagagc

SEQ ID NO: 530501 - DNA, 55 bp, Artificial
  Synthetic oligonucleotide
cccagaccgcctctggtcctcctgctctagagtggtcagctgccaacgaagagga

SEQ ID NO: 530502 - DNA, 55 bp, Artificial
  Synthetic oligonucleotide
cccagaacgggaaggtcatatcttcatgggaatcctataagagtggaagcgaaac

SEQ ID NO: 530503 - DNA, 55 bp, Artificial
  Synthetic oligonucleotide
ccatgctcatgttgtcaggagttgataattccagaattgcaactttatgctcaag

SEQ ID NO: 530504 - DNA, 55 bp, Artificial
  Synthetic oligonucleotide
agttacctgtaaactgggcactctagagggaaggtataaactggtaatcttgaac

SEQ ID NO: 530505 - DNA, 55 bp, Artificial
  Synthetic oligonucleotide
agtacccggcaatcaaggactcgaggaagcccagtataaccttaggaaaagcccc

SEQ ID NO: 530506 - DNA, 55 bp, Artificial
  Synthetic oligonucleotide
aggttgtcaggctcagcccatatcccatcaggaaatgcacaactggttcggaacg

SEQ ID NO: 530507 - DNA, 55 bp, Artificial
  Synthetic oligonucleotide
aggtggagaactcagagtttagggaagcgatcctcttgtccaagactcataggga

SEQ ID NO: 530508 - DNA, 55 bp, Artificial
  Synthetic oligonucleotide
ttgggacattgcttacgtcagagaggtctaaacatgcacgcatggtcagtgagca

SEQ ID NO: 530509 - DNA, 55 bp, Artificial
  Synthetic oligonucleotide
aggcctctccgaatgactctgacagacaattgttctagatcttacaaagtattga

SEQ ID NO: 530510 - DNA, 55 bp, Artificial
  Synthetic oligonucleotide
aggcatggagttaatgaatttgtctggagacgactttgatggaagagagttcgac

SEQ ID NO: 530511 - DNA, 55 bp, Artificial
  Synthetic oligonucleotide
ttggggttgattcccaaatcctctatttcctgtacttgtggagtaacaggagggg

SEQ ID NO: 530512 - DNA, 55 bp, Artificial
  Synthetic oligonucleotide
agactaccaaattaagtgtccaattagacaaaatgaggtgtctctagaggcacat

SEQ ID NO: 530513 - DNA, 55 bp, Artificial
  Synthetic oligonucleotide
actgagaatctgtccagggaggtagaaaagcaccttcgagggtacaacaggtgga

SEQ ID NO: 530514 - DNA, 55 bp, Artificial
  Synthetic oligonucleotide
acgttgagtcattccttgtccacaaaatgatcgatgacctagagcttcaacgagg

SEQ ID NO: 530515 - DNA, 55 bp, Artificial
  Synthetic oligonucleotide
acctcctatcaaccccagagaattcttgaaatctatagaccttggaggattgccg

SEQ ID NO: 530516 - DNA, 55 bp, Artificial
  Synthetic oligonucleotide
acctccaacatgtgctgcgctatgaacaggaggtcataactgcatctccggagaa

SEQ ID NO: 530517 - DNA, 55 bp, Artificial
  Synthetic oligonucleotide
acaagtttgactccgaaagtggctctatttcctacaacaagattgttccgatagt

SEQ ID NO: 530518 - DNA, 55 bp, Artificial
  Synthetic oligonucleotide
aattcgacaacatacacgacttagtctttgtttacggctgttacaggcactgggg

SEQ ID NO: 530519 - DNA, 55 bp, Artificial
  Synthetic oligonucleotide
aatggcttcccatctacatcctaggtctttacagagtgggcagatctaaagtcac

SEQ ID NO: 530520 - DNA, 55 bp, Artificial
  Synthetic oligonucleotide
aatcgaacagaagccgaaagtgtataacagacttggcccagttctactccaagtc

SEQ ID NO: 530521 - DNA, 55 bp, Artificial
  Synthetic oligonucleotide
aatcccgaatacagagcaattcaacacctatccagagcatttcctgcggtcactg

SEQ ID NO: 530522 - DNA, 55 bp, Artificial
  Synthetic oligonucleotide
aataagttattagaggaccccacctctttaaacatctcaatggggatgagccctg

SEQ ID NO: 530523 - DNA, 55 bp, Artificial
  Synthetic oligonucleotide
aaggctggatttcccataatccccttcttcccaccagctgtctgttattggaatg

SEQ ID NO: 530524 - DNA, 55 bp, Artificial
  Synthetic oligonucleotide
aagaggacagggtctgccttgcacagattcaagtcagccaggtacagtgaagggg

SEQ ID NO: 530525 - DNA, 55 bp, Artificial
  Synthetic oligonucleotide
aacctctgtagatatcgggaaggacttggtcaagttcaaagatcagatatgggga

SEQ ID NO: 530526 - DNA, 55 bp, Artificial
  Synthetic oligonucleotide
aaccagacgacattgaatacacatcactgacgtgtgcaagcctactattgtcatt

SEQ ID NO: 530527 - DNA, 55 bp, Artificial
  Synthetic oligonucleotide
aacactgtttcaaattgctggggttcccactggagtagcacatgggatcactcac

SEQ ID NO: 530528 - DNA, 55 bp, Artificial
  Synthetic oligonucleotide
aaaggccctatatgatgaggtagacaaagtggagaactcagagtttagggaagcg

SEQ ID NO: 530529 - DNA, 55 bp, Artificial
  Synthetic oligonucleotide
aaagccagagataactcttgtggggatccctccccaattcataccagacccgggg

SEQ ID NO: 530530 - DNA, 55 bp, Artificial
  Synthetic oligonucleotide
aaacatggaatcctttgaggaactatcatattacagtgcggagctagatcaacta

SEQ ID NO: 530531 - DNA, 55 bp, Artificial
  Synthetic oligonucleotide
caatcggaggtgtgtgtggtatggcgttgtctcgattcttaatcagagcattccc

SEQ ID NO: 530532 - DNA, 55 bp, Artificial
  Synthetic oligonucleotide
caatcatgtctttaaggagcatgtcagggacaacacttggccgacccctgcattg

SEQ ID NO: 530533 - DNA, 55 bp, Artificial
  Synthetic oligonucleotide
caatcaagatgtcctccatagtcaaacgaatttcaacgggaactaatgtgttggc

SEQ ID NO: 530534 - DNA, 55 bp, Artificial
  Synthetic oligonucleotide
caagtcaattcggacctggaacgagatcatcccctcaaaagggtgcctaaaagtc

SEQ ID NO: 530535 - DNA, 55 bp, Artificial
  Synthetic oligonucleotide
caaggaaagcacatctatattacaaccatgggagaaagagactaaggtcccagtg

SEQ ID NO: 530536 - DNA, 55 bp, Artificial
  Synthetic oligonucleotide
caagctctcaagctgatcatttgaggttgttgtcatggggacagaaggttttagg

SEQ ID NO: 530537 - DNA, 55 bp, Artificial
  Synthetic oligonucleotide
caagaggtaagagtgttccgggaatgtgggccaagaagaattggagtcaaaccat

SEQ ID NO: 530538 - DNA, 55 bp, Artificial
  Synthetic oligonucleotide
caagacaatgccatattcagggcaggatttggtgtattaacatgaactctcgggc

SEQ ID NO: 530539 - DNA, 55 bp, Artificial
  Synthetic oligonucleotide
caacttccccagtctgccgaggaaggtttcagaagacaaagctactcagactgcc

SEQ ID NO: 530540 - DNA, 55 bp, Artificial
  Synthetic oligonucleotide
caaccccagctgtgctggcagatttgaatcaaccggagtactatgctacattgac

SEQ ID NO: 530541 - DNA, 55 bp, Artificial
  Synthetic oligonucleotide
caacagtccctcacccctctgagatgttggggttacttccaaagtcctcgatctc

SEQ ID NO: 530542 - DNA, 55 bp, Artificial
  Synthetic oligonucleotide
ttcgagctctaacaggggaagactggagctccaaacaacacggcttcaagaggac

SEQ ID NO: 530543 - DNA, 55 bp, Artificial
  Synthetic oligonucleotide
caaagaagtgcctatgtgcaagagccaagaactcatcactaatggagtggctgat

SEQ ID NO: 530544 - DNA, 55 bp, Artificial
  Synthetic oligonucleotide
caaacctattttggatgatctcaatgtgttcccatccctatgtcttgttgtcggg

SEQ ID NO: 530545 - DNA, 55 bp, Artificial
  Synthetic oligonucleotide
attttccaatgggcagactctaggggtcctctggaaggggaagagttggagtact

SEQ ID NO: 530546 - DNA, 55 bp, Artificial
  Synthetic oligonucleotide
atttagcagccgcaatgcaattctttgaaggaacatgcccggaggactggaccag

SEQ ID NO: 530547 - DNA, 55 bp, Artificial
  Synthetic oligonucleotide
attgaggagaactcttatcttccagtgggctgattctaggggccctctagagggg

SEQ ID NO: 530548 - DNA, 55 bp, Artificial
  Synthetic oligonucleotide
ttcggaggagtctatcaagaacattagaagagtccttttataactccgagatcca

SEQ ID NO: 530549 - DNA, 55 bp, Artificial
  Synthetic oligonucleotide
attcaaggactgtgcagcacttgcgacatttggacatctcagcaaagtcagtggg

SEQ ID NO: 530550 - DNA, 55 bp, Artificial
  Synthetic oligonucleotide
atgccactaccgaggtccttattacccatacttagggtctaataccaaggaaagc

SEQ ID NO: 530551 - DNA, 55 bp, Artificial
  Synthetic oligonucleotide
atctgtacaagacatgcttaagatcgataatgaagtcaatgcctgtgagatggtt

SEQ ID NO: 530552 - DNA, 55 bp, Artificial
  Synthetic oligonucleotide
atctcagttcattgctcgaaaggattaaaggatgtattggactctcgaggcccgc

SEQ ID NO: 530553 - DNA, 55 bp, Artificial
  Synthetic oligonucleotide
ttgaactaggttacttggcgccatcatcttatggaaagggctatgcatatcgctt

SEQ ID NO: 530554 - DNA, 55 bp, Artificial
  Synthetic oligonucleotide
atccctcaggctcttctttatgtgcctctcctaatcccctcgttgtgtttcgggg

SEQ ID NO: 530555 - DNA, 55 bp, Artificial
  Synthetic oligonucleotide
ataggagccggaagtgtataactgacttggttcagttctatgccaagtcttcccc

SEQ ID NO: 530556 - DNA, 55 bp, Artificial
  Synthetic oligonucleotide
atacacgacttagtctttgtgtacggctgttacaggcattggggacatccttaca

SEQ ID NO: 530557 - DNA, 55 bp, Artificial
  Synthetic oligonucleotide
agttcctcaattgtccacctctggaggagagaacacatgggctcaactccaacct

SEQ ID NO: 530558 - DNA, 55 bp, Artificial
  Synthetic oligonucleotide
gaatctttcctggttcacaagatggtagatgatctagagttgcagcgaggaactt

SEQ ID NO: 530559 - DNA, 55 bp, Artificial
  Synthetic oligonucleotide
gaagggctggagcctggtcagcttactgatgatagatcgggaatctcagaccagg

SEQ ID NO: 530560 - DNA, 55 bp, Artificial
  Synthetic oligonucleotide
gaaggccgtgccactaagcctgacggacggaggtcgcccggaatataacggagag

SEQ ID NO: 530561 - DNA, 55 bp, Artificial
  Synthetic oligonucleotide
gaaagctaagcggtttatctcggatcctcagatcgcaagagaattggactgaggc

SEQ ID NO: 530562 - DNA, 55 bp, Artificial
  Synthetic oligonucleotide
cttttctcactgagtaggggtagtagactgagaggagcaacccctccccaaggag

SEQ ID NO: 530563 - DNA, 55 bp, Artificial
  Synthetic oligonucleotide
ctttgagggagcgtgtcccgatgactgggttagctacggaatcctgatagcgcgg

SEQ ID NO: 530564 - DNA, 55 bp, Artificial
  Synthetic oligonucleotide
ctttgagggagcatgccctgatgactggaccagctatggaatcctgattgcacgg

SEQ ID NO: 530565 - DNA, 55 bp, Artificial
  Synthetic oligonucleotide
ctttcctggtccacaagatggtggatgatctagagttgcagcgaggaaccttgtc

SEQ ID NO: 530566 - DNA, 55 bp, Artificial
  Synthetic oligonucleotide
cttggttcataccacctgactctcccttgtccacatgcatactaaacaacattcg

SEQ ID NO: 530567 - DNA, 55 bp, Artificial
  Synthetic oligonucleotide
cttggggaaggaaagtggtagggactacagttccgcatccttcagagctgttaag

SEQ ID NO: 530568 - DNA, 55 bp, Artificial
  Synthetic oligonucleotide
cttggaagagtccttttataactcagagatccatgggatcaaccggatgacccag

SEQ ID NO: 530569 - DNA, 55 bp, Artificial
  Synthetic oligonucleotide
cttcgttgtgtcttgggaaattccccatctacacgataccagacaagctcggtcc

SEQ ID NO: 530570 - DNA, 55 bp, Artificial
  Synthetic oligonucleotide
cttcgaatctctaagtggtaaggagaagtcacgccatataggatcggcccaaggg

SEQ ID NO: 530571 - DNA, 55 bp, Artificial
  Synthetic oligonucleotide
cttccctgtattcataagggataaagtggggcaactcgaaggaacgtttggcccc

SEQ ID NO: 530572 - DNA, 55 bp, Artificial
  Synthetic oligonucleotide
cttaagaaactctgactacaacctcaactcccctttaatagaggatccagccaga

SEQ ID NO: 530573 - DNA, 55 bp, Artificial
  Synthetic oligonucleotide
ctgtcaggggaagtcgagaggcaccttagagggtacaacagatggatcactctcg

SEQ ID NO: 530574 - DNA, 55 bp, Artificial
  Synthetic oligonucleotide
ctggcagctgcaatgcagttctttgaagggacatgtcctgatgactggaccagct

SEQ ID NO: 530575 - DNA, 55 bp, Artificial
  Synthetic oligonucleotide
ctgactacaatctgaactctcccctcttagaagacccctcaagactgatgcttga

SEQ ID NO: 530576 - DNA, 55 bp, Artificial
  Synthetic oligonucleotide
ctgaatgcaacagtgattgcgacatgtgcccctcatgagatgtctgttcttgggg

SEQ ID NO: 530577 - DNA, 55 bp, Artificial
  Synthetic oligonucleotide
ctctttcattctgttcaacttgtccaaacagacttaagttctagtaacacatccg

SEQ ID NO: 530578 - DNA, 55 bp, Artificial
  Synthetic oligonucleotide
ctcttcagatgactaagaggaaaggacccaatgtatttgacgtttatagatatcc

SEQ ID NO: 530579 - DNA, 55 bp, Artificial
  Synthetic oligonucleotide
ctccacataaatgcttacctttacgcagcattaaagggagtagaagggaccttgg

SEQ ID NO: 530580 - DNA, 55 bp, Artificial
  Synthetic oligonucleotide
ctccaaaagtatgagagtcaacctgcgacagatgagctctttgatgaggcaggtg

SEQ ID NO: 530581 - DNA, 55 bp, Artificial
  Synthetic oligonucleotide
ctcatgatgggagaaactatgactttatgtttcaacctttgatgctttacgcgca

SEQ ID NO: 530582 - DNA, 55 bp, Artificial
  Synthetic oligonucleotide
ctcagacagatccgacctcatcgggttatgggaggatcagatatactgtttggac

SEQ ID NO: 530583 - DNA, 55 bp, Artificial
  Synthetic oligonucleotide
ctattctgtgctatctccaacacgtgttgcgctacgaacgggaggcaatcacagc

SEQ ID NO: 530584 - DNA, 55 bp, Artificial
  Synthetic oligonucleotide
gatccctgagatgcaatcgtccctacttcaacaacatgtggagctgttggagtct

SEQ ID NO: 530585 - DNA, 55 bp, Artificial
  Synthetic oligonucleotide
gatccctcaggctattctgtcagtgcctcttctgatttcctcgctgtgttttggg

SEQ ID NO: 530586 - DNA, 55 bp, Artificial
  Synthetic oligonucleotide
gatccatgggatcaaccggatgacccaaactccccaaagggtcggaagtgtttgg

SEQ ID NO: 530587 - DNA, 55 bp, Artificial
  Synthetic oligonucleotide
gatcactctaggacccttgtcactaaagagaccattgattctagagactggagag

SEQ ID NO: 530588 - DNA, 55 bp, Artificial
  Synthetic oligonucleotide
gatatgaagagtcccttcacaatccttatcctgattaccattggctaaggactgt

SEQ ID NO: 530589 - DNA, 55 bp, Artificial
  Synthetic oligonucleotide
gagttgcttgcaactctaatttgagtttgtcagctcactggattcggctaatcta

SEQ ID NO: 530590 - DNA, 55 bp, Artificial
  Synthetic oligonucleotide
gagtggaggcgaggctaggctgtgagggcaggtcatcccctccataccttgcgtt

SEQ ID NO: 530591 - DNA, 55 bp, Artificial
  Synthetic oligonucleotide
gagtgcaggcgctctggctatcctactgctgacaatcttcttaatgacatgttgc

SEQ ID NO: 530592 - DNA, 55 bp, Artificial
  Synthetic oligonucleotide
gaggactacttctctagtgagaccaggagtccggaggcagtctacactcgaatca

SEQ ID NO: 530593 - DNA, 55 bp, Artificial
  Synthetic oligonucleotide
gagatatgtctcagtaagttccaatcatcaagctcgccctaattcattcgctgag

SEQ ID NO: 530594 - DNA, 55 bp, Artificial
  Synthetic oligonucleotide
gagacacaaggctgaaagactccacttttcattggcatctccgatgcggaaagtg

SEQ ID NO: 530595 - DNA, 55 bp, Artificial
  Synthetic oligonucleotide
gagaagcttttggccaattacatcttgccactgtttgatgcactaactatgacag

SEQ ID NO: 530596 - DNA, 55 bp, Artificial
  Synthetic oligonucleotide
gactggaccagctatggaatcctgatagctcggaagggagataagatcaccccgg

SEQ ID NO: 530597 - DNA, 55 bp, Artificial
  Synthetic oligonucleotide
gactgagagagtacttcgttatcactgagtatttaatcaaaacctactatgtccc

SEQ ID NO: 530598 - DNA, 55 bp, Artificial
  Synthetic oligonucleotide
gactccagattcttgaaaccttgtaccatagaagacagcaagaaattgggatgtc

SEQ ID NO: 530599 - DNA, 55 bp, Artificial
  Synthetic oligonucleotide
gactatccaaagtgcagactatataaactatggcaaggttccaatttacagagga

SEQ ID NO: 530600 - DNA, 55 bp, Artificial
  Synthetic oligonucleotide
gactagcgtcatggctatcagagaacagaggaggaccggtccctagtgagaaggt

SEQ ID NO: 530601 - DNA, 55 bp, Artificial
  Synthetic oligonucleotide
gactaaacaggggttgactgagagaaatgattcgcctcctatgaagggcacaagc

SEQ ID NO: 530602 - DNA, 55 bp, Artificial
  Synthetic oligonucleotide
gacggaacctgggtatcaatccaaacatcggatgagaccaaatggtgtcctcctg

SEQ ID NO: 530603 - DNA, 55 bp, Artificial
  Synthetic oligonucleotide
gacctcttctacccttcgagaaatgagccttgtactgttcaactgtagtagccct

SEQ ID NO: 530604 - DNA, 55 bp, Artificial
  Synthetic oligonucleotide
gaccccattgatccgattgagtcagaggctgagccgagagggaaccccactatcc

SEQ ID NO: 530605 - DNA, 55 bp, Artificial
  Synthetic oligonucleotide
gacccaaatacatcactcattcgatacacaatgaggaacccacggactaccagtg

SEQ ID NO: 530606 - DNA, 55 bp, Artificial
  Synthetic oligonucleotide
gaccatgtgtagctatgattttctcatctatggaaagacccctctgtttcgaggt

SEQ ID NO: 530607 - DNA, 55 bp, Artificial
  Synthetic oligonucleotide
gaccaggcacagtagggaagtatctttcgaccattgcatgagtgatggctcagtt

SEQ ID NO: 530608 - DNA, 55 bp, Artificial
  Synthetic oligonucleotide
gacatgtcaaatggcccgacatgctggaacggccaagatggagggttagagggtt

SEQ ID NO: 530609 - DNA, 55 bp, Artificial
  Synthetic oligonucleotide
gacagatgagatcaggagagagattcctcaagatatggtctcgtactgtagagga

SEQ ID NO: 530610 - DNA, 55 bp, Artificial
  Synthetic oligonucleotide
cggtgcatattctgaatcgaacagaagccgaaagtgtataacagacttggcccag

SEQ ID NO: 530611 - DNA, 55 bp, Artificial
  Synthetic oligonucleotide
cggtcttctcttgagtctgtataggttgagcaaaatatccggccaaaacaccggc

SEQ ID NO: 530612 - DNA, 55 bp, Artificial
  Synthetic oligonucleotide
cgggttgtgggaggatcaaatatactgtttggacatgtcaaatggcccgacatgc

SEQ ID NO: 530613 - DNA, 55 bp, Artificial
  Synthetic oligonucleotide
cgggcactctcgagggaatgtataaactagtaatcttgaacggtacaccgtgaaa

SEQ ID NO: 530614 - DNA, 55 bp, Artificial
  Synthetic oligonucleotide
cctgatgggaaatcagaccctgaccgttctgctgaggatgataaatggcttccca

SEQ ID NO: 530615 - DNA, 55 bp, Artificial
  Synthetic oligonucleotide
cgggaaagtcatatcttcatgggagtcttataagagtggaggtgaaaccaggctg

SEQ ID NO: 530616 - DNA, 55 bp, Artificial
  Synthetic oligonucleotide
cctggagactactttggaaggagcaaagggacaaagccgaccataagaatccctc

SEQ ID NO: 530617 - DNA, 55 bp, Artificial
  Synthetic oligonucleotide
cgggaaagtcaatcatccaaagtcagaatggcagctcaaacagcctctggccctc

SEQ ID NO: 530618 - DNA, 55 bp, Artificial
  Synthetic oligonucleotide
cctggagttggtctgatgacgcctcagtgtttaagagggtggcatgcaactctag

SEQ ID NO: 530619 - DNA, 55 bp, Artificial
  Synthetic oligonucleotide
cggctgattatcttaattacggtaaagttccaatcttccgaggggtcatacgagg

SEQ ID NO: 530620 - DNA, 55 bp, Artificial
  Synthetic oligonucleotide
ccttgttccccagaggacgacagtgaaatgctattcccgacgagtagcgtgcatc

SEQ ID NO: 530621 - DNA, 55 bp, Artificial
  Synthetic oligonucleotide
cggcataattctgggtccagacgggaatgtcttgatacctgaaatgcaatcgtcc

SEQ ID NO: 530622 - DNA, 55 bp, Artificial
  Synthetic oligonucleotide
cggcaattacaagacaaacatcgcggatagaatagagcagattttcgagacagcc

SEQ ID NO: 530623 - DNA, 55 bp, Artificial
  Synthetic oligonucleotide
cgaacattctatacctgttgaagccatagactgccctgtgaggagaaatgagctt

SEQ ID NO: 530624 - DNA, 55 bp, Artificial
  Synthetic oligonucleotide
cggatgccaggcttgtattcaatagcctattagaggtgaacgacctgatggcatc

SEQ ID NO: 530625 - DNA, 55 bp, Artificial
  Synthetic oligonucleotide
cggacatagatctagggttccatcactggggtctgttcattctgataggagtgac

SEQ ID NO: 530626 - DNA, 55 bp, Artificial
  Synthetic oligonucleotide
cgcctgctcgaggatccaactaccctaaatattaaaggaggggctagtcccacca

SEQ ID NO: 530627 - DNA, 55 bp, Artificial
  Synthetic oligonucleotide
cgacgttaacccctcctgtaaacctttgtgtctatcattttggaaagccaccctg

SEQ ID NO: 530628 - DNA, 55 bp, Artificial
  Synthetic oligonucleotide
cgagacagccccttttgtgaagattgtggagcatcatactttgatgacaacccac

SEQ ID NO: 530629 - DNA, 55 bp, Artificial
  Synthetic oligonucleotide
cgataccggacaagcttggtccttggagccctattgacatacatcaccttagctg

SEQ ID NO: 530630 - DNA, 55 bp, Artificial
  Synthetic oligonucleotide
cgatgcgtgaatgctctggattgttgggagtatccatccgacctcagtctaaaag

SEQ ID NO: 530631 - DNA, 55 bp, Artificial
  Synthetic oligonucleotide
cgattagagtaggcacagttgtcactgcttatgaagactgctcagggttggtgtc

SEQ ID NO: 530632 - DNA, 55 bp, Artificial
  Synthetic oligonucleotide
cgccatcatcagtcttcaggagatctagtcaatctgaatgggtttgttcttctca

SEQ ID NO: 530633 - DNA, 55 bp, Artificial
  Synthetic oligonucleotide
ctatgggaaagttccgatatatagagggaatattctgggtttaaatcagaagcgg

SEQ ID NO: 530634 - DNA, 55 bp, Artificial
  Synthetic oligonucleotide
cctccggtcaaccccagagaattcctaaaatctatagacattggaggattgccgg

SEQ ID NO: 530635 - DNA, 55 bp, Artificial
  Synthetic oligonucleotide
cctccgtttgtccgaatctcctctctcatatctctgttagcacagacacgatgtc

SEQ ID NO: 530636 - DNA, 55 bp, Artificial
  Synthetic oligonucleotide
ctagctcagggagacaaccaagtcctatgtcccacatacatgttatcgcccgggc

SEQ ID NO: 530637 - DNA, 55 bp, Artificial
  Synthetic oligonucleotide
cctcctatgagggacacaagcaatatgtcacaaccatctcacatcccgacaaggt

SEQ ID NO: 530638 - DNA, 55 bp, Artificial
  Synthetic oligonucleotide
ctagcgtcatggctatcagagaacagaggagggccggttcccagcgagaaggtca

SEQ ID NO: 530639 - DNA, 55 bp, Artificial
  Synthetic oligonucleotide
ctagatgataaatcacactctttcactagaacaagactcgcatcatggctatcag

SEQ ID NO: 530640 - DNA, 55 bp, Artificial
  Synthetic oligonucleotide
ctagatacgctgatgaaacggataccgaggctcatgcgcaaggcgagacgtcccc

SEQ ID NO: 530641 - DNA, 55 bp, Artificial
  Synthetic oligonucleotide
ctactgactgcagctcatcaatcaaatctcagaactccatacagagttccgaatc

SEQ ID NO: 530642 - DNA, 55 bp, Artificial
  Synthetic oligonucleotide
ctaccctccgagaaatgagccttgtattattcaattgtagcagccccaagagcga

SEQ ID NO: 530643 - DNA, 55 bp, Artificial
  Synthetic oligonucleotide
cctctctcacatctcggtcagcacagacacgatgtcagacttgactcatgatggg

SEQ ID NO: 530644 - DNA, 55 bp, Artificial
  Synthetic oligonucleotide
cctctgagatgtgtgttgggatgggttgccctggccagatccaagaagttccagc

SEQ ID NO: 530645 - DNA, 55 bp, Artificial
  Synthetic oligonucleotide
cgttccttgggcttaagcgggaaatctccgtactcatcaaatgcagttggtcacg

SEQ ID NO: 530646 - DNA, 55 bp, Artificial
  Synthetic oligonucleotide
cgttaggtccagatcatctctgttggattatagctgcttgtgagctaatcacccc

SEQ ID NO: 530647 - DNA, 55 bp, Artificial
  Synthetic oligonucleotide
cgtggaccaatatgagtacaaatacccggcaatcaaggactcgaggaagcccagt

SEQ ID NO: 530648 - DNA, 55 bp, Artificial
  Synthetic oligonucleotide
cctctgagatgttggggttgatcccaaagtcttctatttcctgcacttgcggggc

SEQ ID NO: 530649 - DNA, 55 bp, Artificial
  Synthetic oligonucleotide
cgtagaacatcatactttaatgacaactcacaaaatgtgtgctaactggagcacc

SEQ ID NO: 530650 - DNA, 55 bp, Artificial
  Synthetic oligonucleotide
cctgacaaaacgcttacaggcataccttctcaatttatacctgacccaggagtaa

SEQ ID NO: 530651 - DNA, 55 bp, Artificial
  Synthetic oligonucleotide
cgtaataaccaagttgaatgctcagatgcaaggcatatctaaggatgcaattccg

SEQ ID NO: 530652 - DNA, 55 bp, Artificial
  Synthetic oligonucleotide
cctgacttgaacaaggcatacaagtcgattttatccggcatgaatgcagctaagc

SEQ ID NO: 530653 - DNA, 54 bp, Artificial
  Synthetic oligonucleotide
actggtctaattaagggagccgagtctaattggaccagccgaaggtcagtcaac

SEQ ID NO: 530654 - DNA, 54 bp, Artificial
  Synthetic oligonucleotide
ggggcatccaaactggggcttatcataaagaaggaagagaccatgtgtagctat

SEQ ID NO: 530655 - DNA, 54 bp, Artificial
  Synthetic oligonucleotide
tctaatctgtagaagattgaaagagtacatcgatactccttttgtagattggat

SEQ ID NO: 530656 - DNA, 54 bp, Artificial
  Synthetic oligonucleotide
cctcgatttctaagtgagtttaaggctgggactttcttaggggtgtcagagggc

SEQ ID NO: 530657 - DNA, 54 bp, Artificial
  Synthetic oligonucleotide
gagcaattcaacatctgtctagagcatttcccgcggtcacgggattcataactc

SEQ ID NO: 530658 - DNA, 54 bp, Artificial
  Synthetic oligonucleotide
tacagtcaagagaatcgttaacgactctattattcatcccaagctgccagccca

SEQ ID NO: 530659 - DNA, 54 bp, Artificial
  Synthetic oligonucleotide
gtcggagattaaagagctacatagacactcctttcgtggattggatagaattgt

SEQ ID NO: 530660 - DNA, 54 bp, Artificial
  Synthetic oligonucleotide
ggaggcgagaccgggctgtgagggcaggtcatccccttcataccttgcgttcag

SEQ ID NO: 530661 - DNA, 54 bp, Artificial
  Synthetic oligonucleotide
attcactggatggttcagcagtctgggtaaaatggtaagatggactatatgggg

SEQ ID NO: 530662 - DNA, 54 bp, Artificial
  Synthetic oligonucleotide
gttgagagcaatgataactgaagaccttctcacggggatgcgcacagccgtgcc

SEQ ID NO: 530663 - DNA, 54 bp, Artificial
  Synthetic oligonucleotide
cttttataactcggagatccatgggatcaaccggatgactcagactcctcagag

SEQ ID NO: 530664 - DNA, 54 bp, Artificial
  Synthetic oligonucleotide
ttgcacaaaatggcctgctgtattgtgggagtaagcctctggacttctataaag

SEQ ID NO: 530665 - DNA, 54 bp, Artificial
  Synthetic oligonucleotide
tcaagaacaggtaaacatgtcttatgatcttatcatttgtgacgctgaggtcac

SEQ ID NO: 530666 - DNA, 54 bp, Artificial
  Synthetic oligonucleotide
ggctctctcgaaggagtgtacagaccgaaacccttggacgatataccctgaaaa

SEQ ID NO: 530667 - DNA, 54 bp, Artificial
  Synthetic oligonucleotide
agtcatcttacatttcgataggacgtgcacaactgcaaagggcttggtcatcta

SEQ ID NO: 530668 - DNA, 53 bp, Artificial
  Synthetic oligonucleotide
ggacaactttatactcttcttgaaatctgtcgagcctttgtttccccgatttc

SEQ ID NO: 530669 - DNA, 53 bp, Artificial
  Synthetic oligonucleotide
ggggcatcctttcattgactactttcagggactaaagaagctccacactcaag

SEQ ID NO: 530670 - DNA, 53 bp, Artificial
  Synthetic oligonucleotide
caagcttcctctgagatgtgtgttggggtgggttgccctagccaaatccaaaa

SEQ ID NO: 530671 - DNA, 53 bp, Artificial
  Synthetic oligonucleotide
gttatatgggtcaaattagatctctaaatgccacagttattcagacgtgtgcg

SEQ ID NO: 530672 - DNA, 53 bp, Artificial
  Synthetic oligonucleotide
ggggttaatcccaaaatcctcgatttcttgcacttgtggagcatcaggagggg

SEQ ID NO: 530673 - DNA, 53 bp, Artificial
  Synthetic oligonucleotide
ctgaaaggatacctgggctcatctacatccatgtcaacccaactgttccatgc

SEQ ID NO: 530674 - DNA, 53 bp, Artificial
  Synthetic oligonucleotide
tacagagttccgaatctctctattcttcccattcaccgggccccgcacccaga

SEQ ID NO: 530675 - DNA, 53 bp, Artificial
  Synthetic oligonucleotide
tacccgctgcgtatccaacaaccatgaaagaaggcaacaggtctgttctatgc

SEQ ID NO: 530676 - DNA, 53 bp, Artificial
  Synthetic oligonucleotide
tactcttaacttcttcgtatgggtgggagagacagatactcaagatgaactac

SEQ ID NO: 530677 - DNA, 53 bp, Artificial
  Synthetic oligonucleotide
acagtgattgccacatgtgccccgcacgagatgtctgttctggggggttattt

SEQ ID NO: 530678 - DNA, 53 bp, Artificial
  Synthetic oligonucleotide
ccctctgacttgagaaacccgctaacgtggaaatatttcagctctgtacaatc

SEQ ID NO: 530679 - DNA, 53 bp, Artificial
  Synthetic oligonucleotide
atgtgttgcgctatgaacgagaggtaatcacagcatccccggagaatgactgg

SEQ ID NO: 530680 - DNA, 53 bp, Artificial
  Synthetic oligonucleotide
cggctctagatctggccttcgtgaaacctcccaatggaactgtaacaatagat

SEQ ID NO: 530681 - DNA, 53 bp, Artificial
  Synthetic oligonucleotide
tcactcgtaagaacaggacctattagacaagagttggaacaggtaccacacaa

SEQ ID NO: 530682 - DNA, 53 bp, Artificial
  Synthetic oligonucleotide
agtcttctctaacagggtgttcaatgtctcaaaacctctgacagaccctttat

SEQ ID NO: 530683 - DNA, 53 bp, Artificial
  Synthetic oligonucleotide
tcctatcaggagtgtctggctagcgacttggccagaatgatcctcaggtgggg

SEQ ID NO: 530684 - DNA, 52 bp, Artificial
  Synthetic oligonucleotide
ttaggggatgtgcccagcttttcgagacttcatgacttgtacaacagaccta

SEQ ID NO: 530685 - DNA, 52 bp, Artificial
  Synthetic oligonucleotide
ttttaccaagagatgtcaaagctacctcacaaagttcctgccagctacccaa

SEQ ID NO: 530686 - DNA, 52 bp, Artificial
  Synthetic oligonucleotide
cataactctagatacacctagaatatggggggaggaatatatctgtgggatc

SEQ ID NO: 530687 - DNA, 52 bp, Artificial
  Synthetic oligonucleotide
cactcctgtgaaaatatacagaccgatattcttgaagggtgtaccctgaaaa

SEQ ID NO: 530688 - DNA, 52 bp, Artificial
  Synthetic oligonucleotide
caaatgctttgacataccagatatgatagacccgagcgtgatttatagtgac

SEQ ID NO: 530689 - DNA, 52 bp, Artificial
  Synthetic oligonucleotide
attccctagatgaattcaaaagagccagatccctgttgtttaaagagcacct

SEQ ID NO: 530690 - DNA, 52 bp, Artificial
  Synthetic oligonucleotide
attatcctggtcgacaaaggttcagatcaagagtggataatatgggaaaatg

SEQ ID NO: 530691 - DNA, 52 bp, Artificial
  Synthetic oligonucleotide
gacaatccttgtacacagtccaagaaaagatacccggtttacacaccagaac

SEQ ID NO: 530692 - DNA, 52 bp, Artificial
  Synthetic oligonucleotide
gcattacactgggaagggctccagacttgaacacagcatacaagtcaatatt

SEQ ID NO: 530693 - DNA, 52 bp, Artificial
  Synthetic oligonucleotide
gctatcagagtaggaaccgttgtaacagcttacgaagattgcaccggattgg

SEQ ID NO: 530694 - DNA, 52 bp, Artificial
  Synthetic oligonucleotide
ggggtttcgccagtcaaagccctgcagctttgacaagaatggtagccaccac

SEQ ID NO: 530695 - DNA, 52 bp, Artificial
  Synthetic oligonucleotide
taatggttcaagtgcaatcaacaacacatcgagtacaagtcaatctgacaac

SEQ ID NO: 530696 - DNA, 52 bp, Artificial
  Synthetic oligonucleotide
tcgatgacctagagcttcaacgaggagcgttctccaaactgtcaatcatact

SEQ ID NO: 530697 - DNA, 52 bp, Artificial
  Synthetic oligonucleotide
tctgacttggtgcatatcaactacggatacaatgtgtggcttaggagacacc

SEQ ID NO: 530698 - DNA, 51 bp, Artificial
  Synthetic oligonucleotide
agaaacacagcagttaaagttctagcgcaaggagataatcaagtcatctgc

SEQ ID NO: 530699 - DNA, 51 bp, Artificial
  Synthetic oligonucleotide
agggaagaatgtctagatgcactggagtccatcatgaccaccaaatccgta

SEQ ID NO: 530700 - DNA, 51 bp, Artificial
  Synthetic oligonucleotide
atatcctcttaaggctggataatcacccttctctgtacataatgctcagag

SEQ ID NO: 530701 - DNA, 51 bp, Artificial
  Synthetic oligonucleotide
aacttggacttactttcggcaagagaaaatcaagaattcattgcgattgga

SEQ ID NO: 530702 - DNA, 51 bp, Artificial
  Synthetic oligonucleotide
atcaaagactcgaggaagcccagtatcaccttaggaaaagcccctgacttg

SEQ ID NO: 530703 - DNA, 51 bp, Artificial
  Synthetic oligonucleotide
tttggcagctgccatgcaattctttgaagggacatgtccggaagactggac

SEQ ID NO: 530704 - DNA, 51 bp, Artificial
  Synthetic oligonucleotide
aaaacccaatcgagtctgtggagggatggttctcgaattggatatccggtc

SEQ ID NO: 530705 - DNA, 51 bp, Artificial
  Synthetic oligonucleotide
aaaacaattaacatccctcaaaagacctaaggaaagatgatccctcaggct

SEQ ID NO: 530706 - DNA, 51 bp, Artificial
  Synthetic oligonucleotide
tgagtatcaatctcattactatggacatggaagtgaaggaccctaccatgt

SEQ ID NO: 530707 - DNA, 51 bp, Artificial
  Synthetic oligonucleotide
tcagatgacctgatatctcaattgtgtcaactgtatatcgctggagatcaa

SEQ ID NO: 530708 - DNA, 51 bp, Artificial
  Synthetic oligonucleotide
gtttttatgcagagtctaagctagatattatgccgaatcatgtacttggag

SEQ ID NO: 530709 - DNA, 51 bp, Artificial
  Synthetic oligonucleotide
ggctcccaatgctgattttgggactgtaccgagtggggagggccacgcaag

SEQ ID NO: 530710 - DNA, 51 bp, Artificial
  Synthetic oligonucleotide
gccatcatgaacagaattcgtaaattttggggaagcaataagaattcacag

SEQ ID NO: 530711 - DNA, 51 bp, Artificial
  Synthetic oligonucleotide
gcaattacttcccctatgtgtctacagaaggaatttgcaaaatgccattct

SEQ ID NO: 530712 - DNA, 51 bp, Artificial
  Synthetic oligonucleotide
ctcccgttgatatcagctatctaggaccaaagaaccctggtgtagggccag

SEQ ID NO: 530713 - DNA, 51 bp, Artificial
  Synthetic oligonucleotide
cgatatgtcaggacctggatagatggacctgtcttgaaggacctgaaagga

SEQ ID NO: 530714 - DNA, 51 bp, Artificial
  Synthetic oligonucleotide
ccttaaagcctgaaatcatcgtagatcaatatgaatacaagtacccggcta

SEQ ID NO: 530715 - DNA, 50 bp, Artificial
  Synthetic oligonucleotide
ctgtttcctctaagcattcaattcaaggtcagagggagaggttttctgcg

SEQ ID NO: 530716 - DNA, 50 bp, Artificial
  Synthetic oligonucleotide
atccggaaggtttaacagatgctcagtttactcaatgggttcaaggaatt

SEQ ID NO: 530717 - DNA, 50 bp, Artificial
  Synthetic oligonucleotide
ctagggttcttgaatggtatactagatggattaattgtatccggttcttt

SEQ ID NO: 530718 - DNA, 50 bp, Artificial
  Synthetic oligonucleotide
aggaaatcatatcttatgtcactgtcaacttccccagtctgtcggggaag

SEQ ID NO: 530719 - DNA, 50 bp, Artificial
  Synthetic oligonucleotide
agcaagatctttgtcaacccaagtgcaatcagggcaggtttggctgatct

SEQ ID NO: 530720 - DNA, 50 bp, Artificial
  Synthetic oligonucleotide
agacggcttcaattggacgatacaaaaccatctggactcagtgagattgc

SEQ ID NO: 530721 - DNA, 50 bp, Artificial
  Synthetic oligonucleotide
ggggcatgtaaactgaaactgtgcggagttcctggacttagacttatgga

SEQ ID NO: 530722 - DNA, 50 bp, Artificial
  Synthetic oligonucleotide
ttccaatagagtgttcaatgtctcgaaaccgatgactgaacctttgttct

SEQ ID NO: 530723 - DNA, 50 bp, Artificial
  Synthetic oligonucleotide
tagaacgtggtaccactaagttaggacttgtgatcaaccaagatgagacc

SEQ ID NO: 530724 - DNA, 50 bp, Artificial
  Synthetic oligonucleotide
aaatcacagaaggattccaaccaagagagttctccaaagcttactagatc

SEQ ID NO: 530725 - DNA, 50 bp, Artificial
  Synthetic oligonucleotide
ccctagactgggatgaggagaagactatcttggcgctgtggagggaattg

SEQ ID NO: 530726 - DNA, 55 bp, Artificial
  Synthetic oligonucleotide
ggaaccataggcggagaacgacgcacttgcgctaactaattgtgttaacgatgag

SEQ ID NO: 530727 - DNA, 55 bp, Artificial
  Synthetic oligonucleotide
gcattatacatggcgttctctatcgcgggctcattagttttgccgacgccgagag

SEQ ID NO: 530728 - DNA, 55 bp, Artificial
  Synthetic oligonucleotide
gcacgattagacgtgctatcgaaacgtttccgctgattgtgagcgtcgacgcgac

SEQ ID NO: 530729 - DNA, 55 bp, Artificial
  Synthetic oligonucleotide
ctttcggccgacacccagccgaaactttcgggcttataaataggccacggttgac

SEQ ID NO: 530730 - DNA, 55 bp, Artificial
  Synthetic oligonucleotide
ctgtagccatttgcccgggccatacttataaatgaacagcaagtcgtttacgaaa

SEQ ID NO: 530731 - DNA, 55 bp, Artificial
  Synthetic oligonucleotide
cgtgcactgtcgaattacggtagaccttatataaatcccgaggtagttaggcaga

SEQ ID NO: 530732 - DNA, 55 bp, Artificial
  Synthetic oligonucleotide
cccgcgacccacgtgaatacgattacccggtagcacaacggggcgatctcttgac

SEQ ID NO: 530733 - DNA, 55 bp, Artificial
  Synthetic oligonucleotide
ccactgatcgaacttcgcgagctgagtaacgtctaacgcgtcttcgcacccttcg

SEQ ID NO: 530734 - DNA, 55 bp, Artificial
  Synthetic oligonucleotide
ccaacgttgtaagtagttatacaccatgactacgtgttcctcaaggtactgttgg

SEQ ID NO: 530735 - DNA, 55 bp, Artificial
  Synthetic oligonucleotide
caatttcatgatatccccagttggcgttgaggaatactacgacaaaacgcatatg

SEQ ID NO: 530736 - DNA, 55 bp, Artificial
  Synthetic oligonucleotide
caactcgacgcgggaattaacttcgatctcagcgagtatgaaggaatattcgacg

SEQ ID NO: 530737 - DNA, 55 bp, Artificial
  Synthetic oligonucleotide
caacatagaaaattcgtagtcacgttgaacggcagagtgcttacttctacgtata

SEQ ID NO: 530738 - DNA, 55 bp, Artificial
  Synthetic oligonucleotide
atttggataataccggtctctgagatttccacgttgctgaacaactcttcgcccc

SEQ ID NO: 530739 - DNA, 53 bp, Artificial
  Synthetic oligonucleotide
cttattttcgacgagattcaaaactggcgtaacacggtgaacgaggacattaa

SEQ ID NO: 530740 - DNA, 53 bp, Artificial
  Synthetic oligonucleotide
aatccgtggctcttgcgcgaggttactttcataccgaatagtaacttctccgc

SEQ ID NO: 530741 - DNA, 52 bp, Artificial
  Synthetic oligonucleotide
aaaactagtcggctaacttgacgacacgcattgtcccgccataccgcctaag

SEQ ID NO: 530742 - DNA, 50 bp, Artificial
  Synthetic oligonucleotide
gacgcttatcatgtgcccgcagacctacaacagaagtacttgacgtacgc

SEQ ID NO: 530743 - DNA, 60 bp, Artificial
  Synthetic oligonucleotide
gggctagacaacgctatatctgccctgacgagagttgggcaaagtatgattagcttcaaa

SEQ ID NO: 530744 - DNA, 60 bp, Artificial
  Synthetic oligonucleotide
cgctcccggtctatgagagtagatcggaatgctgatgttggagttgcccttcctcggatg

SEQ ID NO: 530745 - DNA, 60 bp, Artificial
  Synthetic oligonucleotide
cgattggaccagttagaaactgggttccaggtggtgcttccggcaccaaagatgagctgc

SEQ ID NO: 530746 - DNA, 60 bp, Artificial; identical to SEQ ID NO: 369227
  Synthetic oligonucleotide

SEQ ID NO: 530747 - DNA, 60 bp, Artificial
  Synthetic oligonucleotide
tactggactggtcctgctcttaggtgagtggggaagctgtataaactcagcttttcgggg

SEQ ID NO: 530748 - DNA, 60 bp, Artificial
  Synthetic oligonucleotide
tagactcgctgcctcacgtaaccttcacattctgtaaaggaggatctagtacgaggagtt

SEQ ID NO: 530749 - DNA, 60 bp, Artificial
  Synthetic oligonucleotide
tatccattggacatggcctacctgcatgaaaagggcatgtccatggactcaccacttgtc

SEQ ID NO: 530750 - DNA, 60 bp, Artificial
  Synthetic oligonucleotide
cgacatgttggtttaagggaaggtcccttctaatgacacgacatcaagccctggcagttc

SEQ ID NO: 530751 - DNA, 60 bp, Artificial
  Synthetic oligonucleotide
gctacgtttgttgcccaggtgagggcaagacgggctgctgcccgcttagagcgtgaaaac

SEQ ID NO: 530752 - DNA, 60 bp, Artificial
  Synthetic oligonucleotide
tccacaatagaacagtggctagctcagtacacgctgcacaagtacaaggcaccactttga

SEQ ID NO: 530753 - DNA, 60 bp, Artificial
  Synthetic oligonucleotide
tcccttgtgatggacacatctgaaggatatcccgatgttttggaccggaaaccaggagaa

SEQ ID NO: 530754 - DNA, 60 bp, Artificial
  Synthetic oligonucleotide
cccttgaagaattaaagggagttgctgtgcagttagactcagagtaccaggaacttggac

SEQ ID NO: 530755 - DNA, 60 bp, Artificial
  Synthetic oligonucleotide
cccgggtgttatgtcgatgaagacgggaactttgaaatcgaaattcgttctccctatcat

SEQ ID NO: 530756 - DNA, 60 bp, Artificial
  Synthetic oligonucleotide
ccccacgtggatgttgatgttggggtaactgcgagcctcaagatacaatctcccttttat

SEQ ID NO: 530757 - DNA, 60 bp, Artificial
  Synthetic oligonucleotide
tcctataacatacggggctgttataagaattgtcagtgagtgggctggcaacactgcgac

SEQ ID NO: 530758 - DNA, 60 bp, Artificial
  Synthetic oligonucleotide
ccaagatgtggcacccattctgtctaagactaaaagcatgagggtcaagacatttggaag

SEQ ID NO: 530759 - DNA, 60 bp, Artificial
  Synthetic oligonucleotide
tcgtccaacaggatggaactgagttggagcgccatgacatttgtcctgggttggctatat

SEQ ID NO: 530760 - DNA, 60 bp, Artificial
  Synthetic oligonucleotide
ggccaatgtcatttcgattcctgccagtttgtacacattgtgtgcaattggtaaataatt

SEQ ID NO: 530761 - DNA, 60 bp, Artificial
  Synthetic oligonucleotide
ccaaaatcctagtggatgagcccatccctaggtgtcccaatgggcggaacttgtgccgcc

SEQ ID NO: 530762 - DNA, 60 bp, Artificial
  Synthetic oligonucleotide
catttggaagctttagagcgggtaatatccccgtgaatttcttaggcgccccatctaatg

SEQ ID NO: 530763 - DNA, 60 bp, Artificial
  Synthetic oligonucleotide
catcttggagataatccttttgcccacatgatagcttgtcatggactccaccatggtatt

SEQ ID NO: 530764 - DNA, 60 bp, Artificial
  Synthetic oligonucleotide
cagtcccgttcacatcaagcgagtccatgctaaaacaaataccaaggagggtagcgaagc

SEQ ID NO: 530765 - DNA, 60 bp, Artificial
  Synthetic oligonucleotide
cagtcaatagtgcttccataccttgctccgagccacgaatggaagaaagatatcccccgc

SEQ ID NO: 530766 - DNA, 60 bp, Artificial
  Synthetic oligonucleotide
gtcatgcgatgtggtttagtgccaccacttttgaaagccccaaacttcatttcacatgcc

SEQ ID NO: 530767 - DNA, 60 bp, Artificial
  Synthetic oligonucleotide
gtactgtccatgaaggatataccccgattcgggatggtatgaaaaaatttgctgaaccaa

SEQ ID NO: 530768 - DNA, 60 bp, Artificial
  Synthetic oligonucleotide
gtacagttcgaccgagctgtaccttctgtcagcaggatatttgagtatcctgttggccgg

SEQ ID NO: 530769 - DNA, 60 bp, Artificial
  Synthetic oligonucleotide
gcacagtgtatgctaaagcgaaaggtcctgataaggtcacggaaacaagaaacttgctag

SEQ ID NO: 530770 - DNA, 60 bp, Artificial
  Synthetic oligonucleotide
gtaaataattggtacattgccaaatttaagccccaccttgaagaggaaactgattggtgg

SEQ ID NO: 530771 - DNA, 60 bp, Artificial
  Synthetic oligonucleotide
gaagggcgaccgaggccttaactcggtttgcagctaccagtggcttttcactgggtgccc

SEQ ID NO: 530772 - DNA, 60 bp, Artificial
  Synthetic oligonucleotide
gaaagctgaacccctgtgagaccactccaccacatcccaatgtgattccttggctggagg

SEQ ID NO: 530773 - DNA, 60 bp, Artificial
  Synthetic oligonucleotide
cttttcgggggtgagagcccgagaatgtctgtctgtcagctgcttgtgtaaatgagcttt

SEQ ID NO: 530774 - DNA, 60 bp, Artificial
  Synthetic oligonucleotide
ctttcctcgtggatttttatccagaggacgcccttattgctgagttggggcggatcacca

SEQ ID NO: 530775 - DNA, 60 bp, Artificial
  Synthetic oligonucleotide
ctggaatccagtatgagaagtggataacttcggggttgtgtatgccaaaatttgaagttg

SEQ ID NO: 530776 - DNA, 60 bp, Artificial
  Synthetic oligonucleotide
gtgctgcgcactttgatggagagctcgagttttccctcgatgcttcggagagaccatccc

SEQ ID NO: 530777 - DNA, 60 bp, Artificial
  Synthetic oligonucleotide
gtgtacaccctttcggttccacattggctgttacatcataagaatggaaccacttcgtgc

SEQ ID NO: 530778 - DNA, 60 bp, Artificial
  Synthetic oligonucleotide
gtgtaccaacctgttggtgcaccatttcccaggagtcgttctcaatcggctcttgctttc

SEQ ID NO: 530779 - DNA, 60 bp, Artificial
  Synthetic oligonucleotide
gtgtggacatgaccaatcaacaagagattgtccggtacccctccaaggagatgtgctcgg

SEQ ID NO: 530780 - DNA, 60 bp, Artificial
  Synthetic oligonucleotide
gcagagctctgcctgagatctttggtgtacaatgatgcacctaccttatctgcctctatt

SEQ ID NO: 530781 - DNA, 60 bp, Artificial
  Synthetic oligonucleotide
ctatccagccaacgcttttacgggtattacgtgggttatgagttttgatgcttataatcg

SEQ ID NO: 530782 - DNA, 60 bp, Artificial
  Synthetic oligonucleotide
ggtgctaatcctaacacagcattatctctatatagccgatggctcgctatcaaattggat

SEQ ID NO: 530783 - DNA, 60 bp, Artificial
  Synthetic oligonucleotide
gttgcctttggagtaccctcagggtgctcctttagtagtcccccgtggttttgccgccat

SEQ ID NO: 530784 - DNA, 60 bp, Artificial
  Synthetic oligonucleotide
gcccgccggctaacctagagttggtataccctgccttagtgcaggaagaggtggcaaccc

SEQ ID NO: 530785 - DNA, 60 bp, Artificial
  Synthetic oligonucleotide
cgtgtgctgctaccatggaactacatggtctagaatggtactgggataaccatcaataaa

SEQ ID NO: 530786 - DNA, 60 bp, Artificial
  Synthetic oligonucleotide
cgtggaaagagagcaataggcgaacttactagctggctcattgatcttgttggaagtgtt

SEQ ID NO: 530787 - DNA, 60 bp, Artificial
  Synthetic oligonucleotide
gcgcatgaaagtagtttgagctcctatgaatttttcagtggagttctctctgaatcaagt

SEQ ID NO: 530788 - DNA, 60 bp, Artificial
  Synthetic oligonucleotide
taagagttcggtttactctaggcccaaaactggtgggttttggagtggttatgccaggca

SEQ ID NO: 530789 - DNA, 60 bp, Artificial
  Synthetic oligonucleotide
agtggctattcgacccaagagtcttaaattctggggtagaactgctactttgttttagaa

SEQ ID NO: 530790 - DNA, 60 bp, Artificial
  Synthetic oligonucleotide
ttaggcaagccggtagacttcgtgtgctgctaccatggaactacatggtctcgtatggta

SEQ ID NO: 530791 - DNA, 60 bp, Artificial
  Synthetic oligonucleotide
aggcttgggtgggttacgtggacatccccagcatttctgtatgctgtgcggatggtagaa

SEQ ID NO: 530792 - DNA, 60 bp, Artificial
  Synthetic oligonucleotide
aggagcatatgcttctcgacttggaggggctcctagtcacgtgatcttttatcctacaca

SEQ ID NO: 530793 - DNA, 60 bp, Artificial
  Synthetic oligonucleotide
aggaactcttgaatggaaggtagttattctggctaattctgagatgatgagttataggcg

SEQ ID NO: 530794 - DNA, 60 bp, Artificial
  Synthetic oligonucleotide
agcccagggatttgaccaacttgcaagaggtaagcgggcgataggcgaacttactagttg

SEQ ID NO: 530795 - DNA, 60 bp, Artificial
  Synthetic oligonucleotide
agccagtttttgggatcaccgctgtggaattcacagagtatatgcctacctcttatggtg

SEQ ID NO: 530796 - DNA, 60 bp, Artificial
  Synthetic oligonucleotide
ttatgggggtagttctggcagtgtcatcttcactaagttatgtggagataaagccaccgg

SEQ ID NO: 530797 - DNA, 60 bp, Artificial
  Synthetic oligonucleotide
acttatgcgagcattgatcccgaaaactcttcaaaagaacccatacagcatttcgaagag

SEQ ID NO: 530798 - DNA, 60 bp, Artificial
  Synthetic oligonucleotide
ttcagatgccccatctggaattggagcccgtgccacgtcatagaccggtggtgcgtactt

SEQ ID NO: 530799 - DNA, 60 bp, Artificial
  Synthetic oligonucleotide
actattgccaaattgctagaagacggtcataagattttagtaacggcggctggcgtacca

SEQ ID NO: 530800 - DNA, 60 bp, Artificial
  Synthetic oligonucleotide
ttccctgtgatgttcccattaaggaaccatccattatctctccacaggacccaaggtgcc

SEQ ID NO: 530801 - DNA, 60 bp, Artificial
  Synthetic oligonucleotide
ggagggcggcagtgctagaggttcggaggaaggatgggagtttctttactccacgggcat

SEQ ID NO: 530802 - DNA, 60 bp, Artificial
  Synthetic oligonucleotide
accgccaccacgggggccataaaacttaaaatttggcctgtgtctaaccacttggagtcc

SEQ ID NO: 530803 - DNA, 60 bp, Artificial
  Synthetic oligonucleotide
accccgtgcatacgataattgcattgaagtgagatttttgcacaacaagtgtgcgtatat

SEQ ID NO: 530804 - DNA, 60 bp, Artificial
  Synthetic oligonucleotide
aatgagctttctccgaggatagctctcctcggcacaagtgaaaacgactaccgtggcacg

SEQ ID NO: 530805 - DNA, 60 bp, Artificial
  Synthetic oligonucleotide
tttatggacgcactggtagccctagacttagcgtcgctggtactactgtgccgccaattg

SEQ ID NO: 530806 - DNA, 60 bp, Artificial
  Synthetic oligonucleotide
aagctggcactgagttagaaaaacatgacatctgccctggtttgtctattgcaggagcta

SEQ ID NO: 530807 - DNA, 60 bp, Artificial
  Synthetic oligonucleotide
tttctatagaggttttggagggattccgattctatggtcgtagtgcaggtcctatgacta

SEQ ID NO: 530808 - DNA, 60 bp, Artificial
  Synthetic oligonucleotide
aactcgataaggctaggagtatgaaaatactcagagtactttgccgtcctattggagatt

SEQ ID NO: 530809 - DNA, 60 bp, Artificial
  Synthetic oligonucleotide
aactacgctttgccaagagcaagaaatgtcgtgcaaacatacgggcagtacagcgattct

SEQ ID NO: 530810 - DNA, 60 bp, Artificial
  Synthetic oligonucleotide
aaacttcgttgggccttaacgtggcctgggtaggaatggctaccatccctagcacttcta

SEQ ID NO: 530811 - DNA, 60 bp, Artificial
  Synthetic oligonucleotide
caggacctgtctgtcaacaatgtgggggtactggaattgagcaagtgggggttgagttac

SEQ ID NO: 530812 - DNA, 60 bp, Artificial
  Synthetic oligonucleotide
ggcatgtcagctgtagtgatagatgcgctagaaatagcaattaatccctttggcatgcct

SEQ ID NO: 530813 - DNA, 60 bp, Artificial
  Synthetic oligonucleotide
gctggggctctatatgataagaggcacaaaacactcaagaattccttcaaaggagcatat

SEQ ID NO: 530814 - DNA, 60 bp, Artificial
  Synthetic oligonucleotide
cactagctctttctgcaagagttgagttttatcttgaagcacagagtgtgggagaggaat

SEQ ID NO: 530815 - DNA, 60 bp, Artificial
  Synthetic oligonucleotide
tctagctataagtggacgcctctctatttgtgggaatcaggtgtatgccactgaagcagg

SEQ ID NO: 530816 - DNA, 60 bp, Artificial
  Synthetic oligonucleotide
cacgacaaaaggagttttacaggggctagataatgctatatctgccctgactagagttgg

SEQ ID NO: 530817 - DNA, 60 bp, Artificial
  Synthetic oligonucleotide
ggcaggctgcacactctgtgcaggggagggcgactgaagcccttacaagatttgccgctt

SEQ ID NO: 530818 - DNA, 60 bp, Artificial
  Synthetic oligonucleotide
gcttttaggtgcctaacctaccatcctagtgcttaggcttttgtggctaggatgatatta

SEQ ID NO: 530819 - DNA, 60 bp, Artificial
  Synthetic oligonucleotide
tggcatgcctggaaatcccacagacttgaccgtcgtggcaacatatggacatgagcgtga

SEQ ID NO: 530820 - DNA, 60 bp, Artificial
  Synthetic oligonucleotide
tgggttatttgcataggtctgatgctccacatgtgccctctaggacggcgtttatgagag

SEQ ID NO: 530821 - DNA, 60 bp, Artificial
  Synthetic oligonucleotide
tggttacccaacaatggctactcggagtctcaagggcaaaactggcgtcagagactttgg

SEQ ID NO: 530822 - DNA, 60 bp, Artificial
  Synthetic oligonucleotide
tgttggccggggccctgtagagggccctgctggaatcgcctggcactatatagtgcacgg

SEQ ID NO: 530823 - DNA, 60 bp, Artificial
  Synthetic oligonucleotide
atgtgatagggtctaggttttttgacattacctcgactactagtactgtccatcttggag

SEQ ID NO: 530824 - DNA, 60 bp, Artificial
  Synthetic oligonucleotide
atctggagaggctggccacttgttagcaggagagttcgcagagctctgtctgagatccct

SEQ ID NO: 530825 - DNA, 60 bp, Artificial
  Synthetic oligonucleotide
tgttaacagcgcctctataccctgttcagaacctcgcatggaggaaagatactcccctag

SEQ ID NO: 530826 - DNA, 60 bp, Artificial
  Synthetic oligonucleotide
ggaggcgtagtcaagggcagagtgcacatatgtagcccttgtacttatggcatagtccta

SEQ ID NO: 530827 - DNA, 60 bp, Artificial
  Synthetic oligonucleotide
atgagcgtgatatgacgcgcgcttttattggttcagcttcaacgtttctaggaaatgggt

SEQ ID NO: 530828 - DNA, 60 bp, Artificial
  Synthetic oligonucleotide
atggattcaccgcttgtcgtgacaactgctaatacggtaaagcctcctaccaatgctggt

SEQ ID NO: 530829 - DNA, 59 bp, Artificial
  Synthetic oligonucleotide
aaccgaggccttaactcggtttgcggctaccagtggcttttcactggatgcccaccaaa

SEQ ID NO: 530830 - DNA, 58 bp, Artificial
  Synthetic oligonucleotide
gtccaaattggaagaagtgcatgctagaacggcgtgtgctggtattaatgagggcatg

SEQ ID NO: 530831 - DNA, 58 bp, Artificial
  Synthetic oligonucleotide
gttttattattccaacaggcgtcttgcctgttgggctgctggaaagagtcccgatgtt

SEQ ID NO: 530832 - DNA, 58 bp, Artificial
  Synthetic oligonucleotide
accactgcttcctcccttacgtagtgcatatgcccctaggggtttatggagagggcct

SEQ ID NO: 530833 - DNA, 58 bp, Artificial
  Synthetic oligonucleotide
gtgcataccccattgtacgttttttgcgtaattatgtgggggcatagttccgatgctg

SEQ ID NO: 530834 - DNA, 58 bp, Artificial
  Synthetic oligonucleotide
caagcgcgtgagactgcaagttgaaactatggccattggagatagaataacgcttgat

SEQ ID NO: 530835 - DNA, 58 bp, Artificial
  Synthetic oligonucleotide
gctcaagcataccacttggaggaagtggtatgacactagtgatgaacgcctcctagag

SEQ ID NO: 530836 - DNA, 58 bp, Artificial
  Synthetic oligonucleotide
ttctccattcctagtcgttctcggtctgttaggatcgataggaatgccgacgttggag

SEQ ID NO: 530837 - DNA, 58 bp, Artificial
  Synthetic oligonucleotide
tcccggagggtgattttaatcacttcctggagtgttgcaatggtcttcagtcctcaat

SEQ ID NO: 530838 - DNA, 58 bp, Artificial
  Synthetic oligonucleotide
attactgagcaaattttggccgttgttgcgacaatgataaatgcggggtatcaaaacc

SEQ ID NO: 530839 - DNA, 57 bp, Artificial
  Synthetic oligonucleotide
ggagggctgcggtgctggaagttagaaggaaggatgggggaattttcgatcctgaag

SEQ ID NO: 530840 - DNA, 57 bp, Artificial
  Synthetic oligonucleotide
gttttttaaacgattgagcctatctgagaggatttacctcaggttgtgccaaattcg

SEQ ID NO: 530841 - DNA, 56 bp, Artificial
  Synthetic oligonucleotide
acgctttgtcaaaaagtgttcaatgccactatggccccctacatgagtcatctcac

SEQ ID NO: 530842 - DNA, 56 bp, Artificial
  Synthetic oligonucleotide
tctactaccaggggtcttgctggaagagggtcggtccaggtacctaaggattgtag

SEQ ID NO: 530843 - DNA, 56 bp, Artificial
  Synthetic oligonucleotide
ctactgatgacgagacaccaggcgttggccattcctatcggaaatgaagtgcaggt

SEQ ID NO: 530844 - DNA, 56 bp, Artificial
  Synthetic oligonucleotide
cagcgattctggcataacatttcgcagacctaagttcacaaacactggaattgtgc

SEQ ID NO: 530845 - DNA, 56 bp, Artificial
  Synthetic oligonucleotide
ccaagggaaactcttgcatgcaaaagatttcacgctctctaagcatgatgttttcc

SEQ ID NO: 530846 - DNA, 56 bp, Artificial
  Synthetic oligonucleotide
gcggccatttttgccagtattggcttgaaatgtgctgggggttgggacaatcttca

SEQ ID NO: 530847 - DNA, 56 bp, Artificial
  Synthetic oligonucleotide
tacctagtaggctcacagttagttgctagcaagctgcgcatctctatgtggagtaa

SEQ ID NO: 530848 - DNA, 55 bp, Artificial
  Synthetic oligonucleotide
tttggaatatccgatatcaccgaaacatcttcgtgatttggacttgacccttacc

SEQ ID NO: 530849 - DNA, 55 bp, Artificial
  Synthetic oligonucleotide
tgtggtgtgctagcaaccagccaggtaataccctttgaaatagggtcatttgctg

SEQ ID NO: 530850 - DNA, 55 bp, Artificial
  Synthetic oligonucleotide
tgctgttatggcacgttatataggatttagcggttctatcaaaggaagtattaag

SEQ ID NO: 530851 - DNA, 55 bp, Artificial
  Synthetic oligonucleotide
tgcactgaaggaaggcgcaaggaaccatgctggatctacctatggggtcagcgcc

SEQ ID NO: 530852 - DNA, 55 bp, Artificial
  Synthetic oligonucleotide
tctaccagagctaacttcactctggattttaggctcaatggtattcctactgggc

SEQ ID NO: 530853 - DNA, 55 bp, Artificial
  Synthetic oligonucleotide
tcagtgaggccatattaaagtgttgtctgaggtgtcctggtgttagtaccaagac

SEQ ID NO: 530854 - DNA, 55 bp, Artificial
  Synthetic oligonucleotide
gggacagaccttcctccatgtggatgacttatctgccattaggactgatccacct

SEQ ID NO: 530855 - DNA, 55 bp, Artificial
  Synthetic oligonucleotide
ggggccataaaacttaaaatttggcctgtgtctaaccacttggagtccgatgaca

SEQ ID NO: 530856 - DNA, 55 bp, Artificial
  Synthetic oligonucleotide
gggtaatatccccgtgaatttcttaggcgccccatctaatggtcagattgtgtcc

SEQ ID NO: 530857 - DNA, 55 bp, Artificial
  Synthetic oligonucleotide
gggtcatgtaaggggtacattgaattccccgaaaatgaacttgtcgtatttgagc

SEQ ID NO: 530858 - DNA, 55 bp, Artificial
  Synthetic oligonucleotide
gttggttctatgcattatcggacagtggcaagtgccgagcaccaagcccaggtgc

SEQ ID NO: 530859 - DNA, 55 bp, Artificial
  Synthetic oligonucleotide
gggtttactcatggaccgaattgcttcaaagaatagtgtagcttacaactgtgac

SEQ ID NO: 530860 - DNA, 55 bp, Artificial
  Synthetic oligonucleotide
gttgagttttatcttgaagcacagagtgtgggagaggaattgccacgaaccttgg

SEQ ID NO: 530861 - DNA, 55 bp, Artificial
  Synthetic oligonucleotide
gtctcttagctcccttttgccaggtgatgttaacgcgactaagcttgaactcaag

SEQ ID NO: 530862 - DNA, 55 bp, Artificial
  Synthetic oligonucleotide
gtctcgcgaatctccaaaattaggggcgaggggccttccaaaggacaaggtgagc

SEQ ID NO: 530863 - DNA, 55 bp, Artificial
  Synthetic oligonucleotide
gtcggtgatgggtgtgcgcgtagattggagatatattctacaaagcccagagccg

SEQ ID NO: 530864 - DNA, 55 bp, Artificial
  Synthetic oligonucleotide
gtcccaccacctggtcctattagggtggtgaagaccgctgctgccccggttaagg

SEQ ID NO: 530865 - DNA, 55 bp, Artificial
  Synthetic oligonucleotide
gtatcgaaaccccaaaggatgaaaggcttaagagatctaaaattgagactccagg

SEQ ID NO: 530866 - DNA, 55 bp, Artificial
  Synthetic oligonucleotide
gaccttggtcgagaaaagtctaaggtgttgtctcttccacttgtcacaatcccgc

SEQ ID NO: 530867 - DNA, 55 bp, Artificial
  Synthetic oligonucleotide
ctgcaagttgaaacaatggccataggtgatagaataaccttggatactattgcca

SEQ ID NO: 530868 - DNA, 55 bp, Artificial
  Synthetic oligonucleotide
ctgatctttgttgattggaaaccttgttgtacttggtggttagttagacgcgtca

SEQ ID NO: 530869 - DNA, 55 bp, Artificial
  Synthetic oligonucleotide
ctgatctccactctggtgggtctagccgggtgtacaagctttgctggaggtttgg

SEQ ID NO: 530870 - DNA, 55 bp, Artificial
  Synthetic oligonucleotide
ctcgaggtaaaagagctataggtgaacttactagttggctcatcgatcttgtagg

SEQ ID NO: 530871 - DNA, 55 bp, Artificial
  Synthetic oligonucleotide
ctcagaaccccggttagaagaccgatatgcagctagaaaccgttttgtgtcgcgg

SEQ ID NO: 530872 - DNA, 55 bp, Artificial
  Synthetic oligonucleotide
ctatggctcacatccgaagatgttggcgggcccaacggaaaacttatgcccgtcc

SEQ ID NO: 530873 - DNA, 55 bp, Artificial
  Synthetic oligonucleotide
cagcatgtactctgttaaggagcctgtgtgtgaaggagaaggggactccacgaca

SEQ ID NO: 530874 - DNA, 55 bp, Artificial
  Synthetic oligonucleotide
ccaaaccacgccatagcgtgagtgggcacggtttcatggcccctacagtagttcc

SEQ ID NO: 530875 - DNA, 55 bp, Artificial
  Synthetic oligonucleotide
ccaacaatgaagatggatagggaagctattgaggaccaacaggaccaccttgagg

SEQ ID NO: 530876 - DNA, 55 bp, Artificial
  Synthetic oligonucleotide
cgtggcacgttagtagccagacggtcggggtaaaatccctagttaacaaaatgtg

SEQ ID NO: 530877 - DNA, 55 bp, Artificial
  Synthetic oligonucleotide
cgtgctcgaacaatgcgaacgtcttattgctgatggccataaactgttgcggggc

SEQ ID NO: 530878 - DNA, 55 bp, Artificial
  Synthetic oligonucleotide
cgtgcgtctgacgctccacatgtaccttcaaagacttctttcttgaaggtgccag

SEQ ID NO: 530879 - DNA, 55 bp, Artificial
  Synthetic oligonucleotide
cggatgttggttacaattgtgactacaaggggtttgatggtctaattactgagca

SEQ ID NO: 530880 - DNA, 55 bp, Artificial
  Synthetic oligonucleotide
cgagcgggattcttggcaggccatgctcagaaaccaccagggcaaggataaggga

SEQ ID NO: 530881 - DNA, 55 bp, Artificial
  Synthetic oligonucleotide
cgacttggaggggctcctagtcacgtgatcttttatcctacacatcgagtaccag

SEQ ID NO: 530882 - DNA, 55 bp, Artificial
  Synthetic oligonucleotide
cgaccctattaaccatagagttgcttctaatacagctcccggtagggctacatgg

SEQ ID NO: 530883 - DNA, 55 bp, Artificial
  Synthetic oligonucleotide
ccttttgcccacatgatagcttgtcatggactccaccatggtattcttgacctca

SEQ ID NO: 530884 - DNA, 55 bp, Artificial
  Synthetic oligonucleotide
cctcaaatgttgtgaaagatgcattggtgtcactactaaggtggtaactagcacc

SEQ ID NO: 530885 - DNA, 55 bp, Artificial
  Synthetic oligonucleotide
cctaggaatctttcccctaggtggtcccatagctccagaggcgcacactggtgcg

SEQ ID NO: 530886 - DNA, 55 bp, Artificial
  Synthetic oligonucleotide
ccgggatcttaattgattccgtcttagtttcctggtcctactggactggtcctgc

SEQ ID NO: 530887 - DNA, 55 bp, Artificial
  Synthetic oligonucleotide
ccccacggttacttggccgctgagtgttggggattcactcagtgttgatagatat

SEQ ID NO: 530888 - DNA, 55 bp, Artificial
  Synthetic oligonucleotide
gctgtggaattcacagagtatatgcctacctcttatggtggcataacacacgagc

SEQ ID NO: 530889 - DNA, 55 bp, Artificial
  Synthetic oligonucleotide
gctgcttagcccaatctggaaagaagaccttagtcatacgtgatgagaggcctta

SEQ ID NO: 530890 - DNA, 55 bp, Artificial
  Synthetic oligonucleotide
gctctagcccactaccgaaactctatccccgagtcggttgatgggctggaacgtt

SEQ ID NO: 530891 - DNA, 55 bp, Artificial
  Synthetic oligonucleotide
gctaaagcgaaaggtcctgataaggtcacggaaacaagaaacttgctagctgcga

SEQ ID NO: 530892 - DNA, 55 bp, Artificial
  Synthetic oligonucleotide
gcgtgctgtaagagtgctatttattccatgtattctgtgaatgagtcaaccatgg

SEQ ID NO: 530893 - DNA, 55 bp, Artificial
  Synthetic oligonucleotide
aatactgctcatgtcccgaccaatgccaatgttaaccacatggaggcatacaaaa

SEQ ID NO: 530894 - DNA, 55 bp, Artificial
  Synthetic oligonucleotide
actacagtgatggagttaagaagctgatttcgacatgttggtttaagggaaggtc

SEQ ID NO: 530895 - DNA, 55 bp, Artificial
  Synthetic oligonucleotide
gcggggcagaagctctctgaaggaatctgtagtgttatgatcaagcactttagag

SEQ ID NO: 530896 - DNA, 55 bp, Artificial
  Synthetic oligonucleotide
gcgcgagtggggacacttgctctcgcgtttaatgcgccccaagactaccgaagcc

SEQ ID NO: 530897 - DNA, 55 bp, Artificial; identical to SEQ ID NO: 408811
  Synthetic oligonucleotide

SEQ ID NO: 530898 - DNA, 55 bp, Artificial
  Synthetic oligonucleotide
gccaaatttaagccccaccttgaagaggaaactgattggtggaaggatcttgtga

SEQ ID NO: 530899 - DNA, 55 bp, Artificial
  Synthetic oligonucleotide
gcacctgggctttctgcgaatcctttcattctgcacagcagacgggcatgcttcg

SEQ ID NO: 530900 - DNA, 55 bp, Artificial
  Synthetic oligonucleotide
actgcatttcactatgtactctcgacacatatggtgcagtaaacaagtacgcccc

SEQ ID NO: 530901 - DNA, 55 bp, Artificial
  Synthetic oligonucleotide
caaagggctgcacgtagatctgctgcgtgcaagaaaattcgcaaggccagggctc

SEQ ID NO: 530902 - DNA, 55 bp, Artificial
  Synthetic oligonucleotide
caatgggcttctgctgctaagcagatggctaaaggggttggtaccatggttggcg

SEQ ID NO: 530903 - DNA, 55 bp, Artificial
  Synthetic oligonucleotide
gaggccattttgaagtgttgtctaagatgtcctggtgttactaccaagaccgttc

SEQ ID NO: 530904 - DNA, 55 bp, Artificial
  Synthetic oligonucleotide
gaggcacaaaacactcaagaattccttcaaaggagcatatgcttctcgacttgga

SEQ ID NO: 530905 - DNA, 55 bp, Artificial
  Synthetic oligonucleotide
cacgggtgttggtcttcttcctagtgcgctacacatgacgacatgctcactgagt

SEQ ID NO: 530906 - DNA, 55 bp, Artificial
  Synthetic oligonucleotide
gaggagtattttgaccccatggccatggatacgtctgagggatatcctgaagtcc

SEQ ID NO: 530907 - DNA, 55 bp, Artificial
  Synthetic oligonucleotide
gagcccgagaatgtctgtctgtcagctgcttgtgtaaatgagctttctccgagga

SEQ ID NO: 530908 - DNA, 54 bp, Artificial
  Synthetic oligonucleotide
atatgccctggtgggagcggacctctacaaagtaaattgtggtctcccttcagg

SEQ ID NO: 530909 - DNA, 54 bp, Artificial
  Synthetic oligonucleotide
aagcatcactactactgccagccccgtttatacattgtctgtgccccattggtt

SEQ ID NO: 530910 - DNA, 54 bp, Artificial
  Synthetic oligonucleotide
aaaacgttggaaagggaaagcatccctacttcgaggaagcggaagatggatccc

SEQ ID NO: 530911 - DNA, 54 bp, Artificial
  Synthetic oligonucleotide
gagttttcaggtattgcagatgggaaggctatatttggtataacttctattgag

SEQ ID NO: 530912 - DNA, 54 bp, Artificial
  Synthetic oligonucleotide
gtccccggaacgcgctagttgcatgttttctacaaggtttagtccaaggacaaa

SEQ ID NO: 530913 - DNA, 53 bp, Artificial
  Synthetic oligonucleotide
agggactgtacaagtcccattcccaaaggttgttggggtaaagcccaacgacc

SEQ ID NO: 530914 - DNA, 53 bp, Artificial
  Synthetic oligonucleotide
atctggtaagttattgacaccaaaggaggtgtccagcgcccttgcgctcaaac

SEQ ID NO: 530915 - DNA, 53 bp, Artificial
  Synthetic oligonucleotide
gttgtagatagtgagaagaccttggtccctgtgaccgaggccactatgattgc

SEQ ID NO: 530916 - DNA, 53 bp, Artificial
  Synthetic oligonucleotide
ctaccagaacaagataagacgtttcattgtctatgcccatgaggcaaagaagt

SEQ ID NO: 530917 - DNA, 52 bp, Artificial
  Synthetic oligonucleotide
agagtcggctctggagtattacatccagattttaggtatcgaggctgatacc

SEQ ID NO: 530918 - DNA, 52 bp, Artificial
  Synthetic oligonucleotide
gatccacaccagatgaagccttccagtatgaagagctgatggttgtgctgta

SEQ ID NO: 530919 - DNA, 52 bp, Artificial
  Synthetic oligonucleotide
caacaaaccatcgtttggccacagataggtggcaggggcaggcgcgtatttt

SEQ ID NO: 530920 - DNA, 52 bp, Artificial
  Synthetic oligonucleotide
ctacctgctatcaaggctggaggggttttggatacgcgttcaatggtggtca

SEQ ID NO: 530921 - DNA, 51 bp, Artificial
  Synthetic oligonucleotide
attccaagaccaaggtaccttccttgataagtatagaaaccccaaaagacg

SEQ ID NO: 530922 - DNA, 51 bp, Artificial
  Synthetic oligonucleotide
gatggtagaactaccggggggcaaactattgctcaagaggctgacccttta

SEQ ID NO: 530923 - DNA, 51 bp, Artificial
  Synthetic oligonucleotide
ttcatagtcaatccgttaagagcggaaacaaagccaaaccgttaagagcgg

SEQ ID NO: 530924 - DNA, 51 bp, Artificial
  Synthetic oligonucleotide
ggggttttctgctcttgtggggcttttaggtgcctaacctacccatcctag

SEQ ID NO: 530925 - DNA, 51 bp, Artificial
  Synthetic oligonucleotide
acgtgctggtttaagggaaggtctctcttaatgacgagacatcaagccctg

SEQ ID NO: 530926 - DNA, 50 bp, Artificial
  Synthetic oligonucleotide
attagggataccttggcattatatgccaatctgttgggacctaataggaa

SEQ ID NO: 530927 - DNA, 50 bp, Artificial
  Synthetic oligonucleotide
atgaaaaattctgtggagttttcatataaacgcaatccacagttctttca

SEQ ID NO: 530928 - DNA, 50 bp, Artificial
  Synthetic oligonucleotide
gatttgtaccaccgtttaggtgaactttctgacgtggggtacaattgtga

SEQ ID NO: 530929 - DNA, 50 bp, Artificial
  Synthetic oligonucleotide
gcgtaccaaaatgcgcttaaagtggatgtccctgatgaggtgcttctata

SEQ ID NO: 530930 - DNA, 50 bp, Artificial
  Synthetic oligonucleotide
ggcacaacatgccatttttgccctaggcgctatggtcataggaggagtgg

SEQ ID NO: 530931 - DNA, 50 bp, Artificial
  Synthetic oligonucleotide
ggataatgtgatcacaagcccgcgattattattctacgtggttaccacta

SEQ ID NO: 530932 - DNA, 60 bp, Artificial
  Synthetic oligonucleotide
cacggtgctggtgacgtagcccgcgattccgtcccatttcaccgatacgtcaatcggctt

SEQ ID NO: 530933 - DNA, 60 bp, Artificial
  Synthetic oligonucleotide
cgcctgctttaatctgacggacacgacatgaacaaacagctacagatggcggttaatcac

SEQ ID NO: 530934 - DNA, 60 bp, Artificial
  Synthetic oligonucleotide
tctaggtatggcgcggagcctcgacgagatagggaggcagatgcacaccgccaatcagct

SEQ ID NO: 530935 - DNA, 60 bp, Artificial
  Synthetic oligonucleotide
acggcaacagggcttgaaccctgccgctgtgtcgctcgatgagtacgcgttcagcaagca

SEQ ID NO: 530936 - DNA, 60 bp, Artificial
  Synthetic oligonucleotide
tctgacagtgggatcacccaagacgtcgttacgcgggcaccgttcccgctgacagtcgga

SEQ ID NO: 530937 - DNA, 60 bp, Artificial
  Synthetic oligonucleotide
atcaagctcatatggaacgtattcatggcagatttttaaggcagtattgggtggacagct

SEQ ID NO: 530938 - DNA, 60 bp, Artificial
  Synthetic oligonucleotide
tctgtaacgctggtgcttgaaagtcgcaccggttcatctgggtgggtaatcgaaaagacc

SEQ ID NO: 530939 - DNA, 60 bp, Artificial
  Synthetic oligonucleotide
gctgatctagcccacctgaggggcgggtcgggattcttcggagtcctggcccgccccttt

SEQ ID NO: 530940 - DNA, 60 bp, Artificial
  Synthetic oligonucleotide
gctggcatatcagtgtagttggcgaagccttagttaaaggaactgattaaattcattagc

SEQ ID NO: 530941 - DNA, 60 bp, Artificial
  Synthetic oligonucleotide
gacaaccgaggcaccgcagaggcgtaccccatctgggagatcaccggaccgggaaccaac

SEQ ID NO: 530942 - DNA, 60 bp, Artificial
  Synthetic oligonucleotide
tgcctttcattctatcagaactccccattatttcggctgatcgccgcaattcctttcgct

SEQ ID NO: 530943 - DNA, 60 bp, Artificial
  Synthetic oligonucleotide
atctagcggtagtcattttttgagcggtttcatcaattctttagaaaacgctttaagcaa

SEQ ID NO: 530944 - DNA, 60 bp, Artificial
  Synthetic oligonucleotide
ccgagctcgcagtcgctgggggatacggccgcctgatctctctccgtcgtggccatgcga

SEQ ID NO: 530945 - DNA, 60 bp, Artificial
  Synthetic oligonucleotide
tggatgtgcgccaatcgaccagtcttccgctgctctttggcccagtacatcagacccccg

SEQ ID NO: 530946 - DNA, 60 bp, Artificial
  Synthetic oligonucleotide
gtggacagctttcctaccgatatggggcaggaaataatgtctggactacatggggacaca

SEQ ID NO: 530947 - DNA, 60 bp, Artificial
  Synthetic oligonucleotide
cgttcgagttggtccaggtgtactgggcctcagagatgggggtgttcgactgagtggctg

SEQ ID NO: 530948 - DNA, 60 bp, Artificial
  Synthetic oligonucleotide
acacagaggtgacctacgatacgccgctggtgcgtaccattacggataatgacgtgaccc

SEQ ID NO: 530949 - DNA, 60 bp, Artificial
  Synthetic oligonucleotide
gaactgccataatttctcggtgtacggtggttatgcagcggcaaccaggcatgctgtcgc

SEQ ID NO: 530950 - DNA, 60 bp, Artificial
  Synthetic oligonucleotide
aatttgccaagttgtcttgggttccgtagaatacggcccaagaacatcttggcgcgagga

SEQ ID NO: 530951 - DNA, 60 bp, Artificial
  Synthetic oligonucleotide
agggcttatgattcagaggctggtgactagatcagaaatcgctcgctggtaacgctcgat

SEQ ID NO: 530952 - DNA, 60 bp, Artificial
  Synthetic oligonucleotide
agggcgcgactgggaccccgcagctaccgccccccgcctcgtacggacgatggtcctgaa

SEQ ID NO: 530953 - DNA, 60 bp, Artificial
  Synthetic oligonucleotide
agggggccggtcctgggggtcgctgtatggcgccgacgtgtgaccctccgtggatttgcc

SEQ ID NO: 530954 - DNA, 60 bp, Artificial
  Synthetic oligonucleotide
agggaaataccctgcacatcagctcacgctgcacaactggctcaccgtcctggacagatt

SEQ ID NO: 530955 - DNA, 60 bp, Artificial
  Synthetic oligonucleotide
tacgtttgtaggattagagcaagctagtattttccgtagcttatcagaggcaaaagcaca

SEQ ID NO: 530956 - DNA, 60 bp, Artificial
  Synthetic oligonucleotide
aggttagcctgaacactatccgtgaccagcaacgccctaacgggttactacggaggtaat

SEQ ID NO: 530957 - DNA, 60 bp, Artificial
  Synthetic oligonucleotide
gaggaacatttgaaaccgaagacttcactattcaagcattcttagtccctcacgacattg

SEQ ID NO: 530958 - DNA, 60 bp, Artificial
  Synthetic oligonucleotide
cagatggccggtttctcggcggcgcaactcccggacgaactggtctacgaagcggtcaac

SEQ ID NO: 530959 - DNA, 60 bp, Artificial
  Synthetic oligonucleotide
gagaccttctgcggtccttggactacactgactcgggccccgaccagggctcttagcggt

SEQ ID NO: 530960 - DNA, 60 bp, Artificial
  Synthetic oligonucleotide
tatggcaagggtgattttcattctggaagacacgccgaacggcgtttcattggatgtgcg

SEQ ID NO: 530961 - DNA, 60 bp, Artificial
  Synthetic oligonucleotide
tcaaacaagtaagtacatgaaccctaatactatatggaacagtacaacccaacgttatca

SEQ ID NO: 530962 - DNA, 60 bp, Artificial
  Synthetic oligonucleotide
agcagatacgacgaagccccggctacccccttctgagggtgccggggctttcgtgtgtca

SEQ ID NO: 530963 - DNA, 60 bp, Artificial
  Synthetic oligonucleotide
ggtgctgtgctcggcttgcacatttgcaggtgagccgctgttcgccactcggtaaccgtt

SEQ ID NO: 530964 - DNA, 60 bp, Artificial
  Synthetic oligonucleotide
gttatcactgcactggctggcacaaatgaggatgttcaccctgaaagcgacaacatgctc

SEQ ID NO: 530965 - DNA, 60 bp, Artificial
  Synthetic oligonucleotide
tccggttaacttcaccggtggtgataactggcaaccatacaccaggctgatacctgcgag

SEQ ID NO: 530966 - DNA, 60 bp, Artificial
  Synthetic oligonucleotide
cggtaattatccggcgaaagaagttgtaaacaccggagtgttgtatgttgtgaagatttg

SEQ ID NO: 530967 - DNA, 60 bp, Artificial
  Synthetic oligonucleotide
gctaggaaacaaagcgacaactgagcagatagctaaggcaaaacagcaggctaaagctat

SEQ ID NO: 530968 - DNA, 60 bp, Artificial
  Synthetic oligonucleotide
tcctgacctgtgtaaacgctactcgcacaagcactctcggaggtgaacgatgagcggagt

SEQ ID NO: 530969 - DNA, 60 bp, Artificial
  Synthetic oligonucleotide
gctaggaacgcaagcaacaccaataacgcaaaacaacaataagaaaaccatcactaaaga

SEQ ID NO: 530970 - DNA, 60 bp, Artificial
  Synthetic oligonucleotide
atacgggaacttgaggcggaaatagccaagtacattcgatgggaagaggagagtgcccga

SEQ ID NO: 530971 - DNA, 60 bp, Artificial
  Synthetic oligonucleotide
gcctacgactaggtctcggtttgaggggggcggatggccttatctgaagtttagttccac

SEQ ID NO: 530972 - DNA, 60 bp, Artificial
  Synthetic oligonucleotide
ctataggtaataaaacttacaagaaacacactaaagcgcaaattttgcaattagcgaaag

SEQ ID NO: 530973 - DNA, 60 bp, Artificial
  Synthetic oligonucleotide
ctacgcgagacatcatagatcgctctcagcgctcacaggctataaacgccatacaaggct

SEQ ID NO: 530974 - DNA, 60 bp, Artificial
  Synthetic oligonucleotide
ttagttccacaacggggacagtttacgtaaatggagttatgccgttgcaaaacactttta

SEQ ID NO: 530975 - DNA, 60 bp, Artificial
  Synthetic oligonucleotide
ccccggcccagcgatagccgaggtcgtggagtgaccccgttcaacccagactccataggc

SEQ ID NO: 530976 - DNA, 60 bp, Artificial
  Synthetic oligonucleotide
aaacaccggagttaattaatggctgaacctgacgagcgtagaccataccctccggttaac

SEQ ID NO: 530977 - DNA, 60 bp, Artificial
  Synthetic oligonucleotide
ctcaagttcccgtatgcgggccgtaaggcctgtatgttctgcatgggctgcgttcaactg

SEQ ID NO: 530978 - DNA, 60 bp, Artificial
  Synthetic oligonucleotide
ccccagctcccctttctcgctgacccgcgaaatccactgcaccacacacgaaaaggaacc

SEQ ID NO: 530979 - DNA, 60 bp, Artificial
  Synthetic oligonucleotide
ttctaaaatcgtgaattggttccatttgcttaatagcggaggcagcgcactgagtgttat

SEQ ID NO: 530980 - DNA, 60 bp, Artificial
  Synthetic oligonucleotide
tgttactagcgtttacctttaatgctggcgcagcgtctacatatacgaaagaacagttga

SEQ ID NO: 530981 - DNA, 60 bp, Artificial
  Synthetic oligonucleotide
ttctcggcgctcaggaggaagttgagccatcaggaaaccaacaacacatttaagttgccc

SEQ ID NO: 530982 - DNA, 60 bp, Artificial
  Synthetic oligonucleotide
aacccacttaatatgcctagccgatatggttctttaatgtcgtatttgggatcaagctca

SEQ ID NO: 530983 - DNA, 60 bp, Artificial
  Synthetic oligonucleotide
tgtgttaaatgtttcaatgagggagttaaaagtgttttgcaacggcataactccatttac

SEQ ID NO: 530984 - DNA, 60 bp, Artificial
  Synthetic oligonucleotide
cttcacgacctgtcggagtacgtggaccgtggggagcagctcccctcgcacgtctctgag

SEQ ID NO: 530985 - DNA, 60 bp, Artificial
  Synthetic oligonucleotide
aagtgttgcaggagcgatcacaggcgctaaggctggtaagagtgcgggagctttagggct

SEQ ID NO: 530986 - DNA, 60 bp, Artificial
  Synthetic oligonucleotide
ctccatttacgtaaactgtccccgttgtggaactaaacttcagataaggccatccgcccc

SEQ ID NO: 530987 - DNA, 60 bp, Artificial
  Synthetic oligonucleotide
ctcttcgcacagatccttcgagatactgcgcccgtcgctggctgtgattgtgtaagtctt

SEQ ID NO: 530988 - DNA, 60 bp, Artificial
  Synthetic oligonucleotide
caatcggcttgatcggatggatagcgaccacagcgtgacagcattcccaggggcgaccgt

SEQ ID NO: 530989 - DNA, 60 bp, Artificial
  Synthetic oligonucleotide
aaatttaaaggaggaggcaaggaaatgcctatatttagtatatcacttgtaactagccgt

SEQ ID NO: 530990 - DNA, 60 bp, Artificial
  Synthetic oligonucleotide
ctggattggcttttatcttggctggatgtgcgcaagaacgccccttaacgtcatatgacg

SEQ ID NO: 530991 - DNA, 60 bp, Artificial
  Synthetic oligonucleotide
ctcttgaaaaggccattggaaatattgttacgcaacagtgtactgctgatgggataagcg

SEQ ID NO: 530992 - DNA, 60 bp, Artificial
  Synthetic oligonucleotide
atgtcgatcatgggagtgtggtgaacaggtggccacggcaccgaagaacttctggcgggg

SEQ ID NO: 530993 - DNA, 60 bp, Artificial
  Synthetic oligonucleotide
ccccaatatccaagcccaacagcaaaacgccttaaaccgatcaagcgctaaaaacgcgct

SEQ ID NO: 530994 - DNA, 60 bp, Artificial
  Synthetic oligonucleotide
gtcgcgggaagactatttgtgcctttgagatcgccaagcataagggtgccaagaaggtct

SEQ ID NO: 530995 - DNA, 59 bp, Artificial
  Synthetic oligonucleotide
aaccgctactgatcaacccatctctcctggccgcgtgtgcaagtggcgcacgtcgagcc

SEQ ID NO: 530996 - DNA, 59 bp, Artificial
  Synthetic oligonucleotide
cttacaagaaacacactaaagcgcaaattttgcaattagcgaaagaggctctaaaattc

SEQ ID NO: 530997 - DNA, 59 bp, Artificial
  Synthetic oligonucleotide
ggcagtggtcgacgtcaagaacccgaaacagccaacagtcggtcaggacaaggcgaaat

SEQ ID NO: 530998 - DNA, 59 bp, Artificial
  Synthetic oligonucleotide
cgtaaaatgatagaattggttcgttaggatagtgttgttgtgtatacctaaacgattgg

SEQ ID NO: 530999 - DNA, 58 bp, Artificial
  Synthetic oligonucleotide
tgtgacttccacgatacatgtgcacagttgaccgtgctgggctactgtggaagtgtta

SEQ ID NO: 531000 - DNA, 58 bp, Artificial
  Synthetic oligonucleotide
cgcgggtgacagcgggtacagccggtgagacggcaggggctattcgaccgggggccca

SEQ ID NO: 531001 - DNA, 57 bp, Artificial
  Synthetic oligonucleotide
ctgtataaagacaattgaggagtttgacacttatatctacaaacaagacaaggacgg

SEQ ID NO: 531002 - DNA, 57 bp, Artificial
  Synthetic oligonucleotide
ttggtcaagtaatcccgcaagcattttctggactatcgggggttattagtagcttag

SEQ ID NO: 531003 - DNA, 57 bp, Artificial
  Synthetic oligonucleotide
taagttgcccaacctctttattgagttcatcgatagttttggcattacattccatct

SEQ ID NO: 531004 - DNA, 57 bp, Artificial
  Synthetic oligonucleotide
accatgactctaaaatgtcagacttagaagaatattttaggtggtggcaagaatgag

SEQ ID NO: 531005 - DNA, 57 bp, Artificial
  Synthetic oligonucleotide
tccgacttgacatcgtacacaatgaaaggagggcccaaatgacggccctacaaggca

SEQ ID NO: 531006 - DNA, 56 bp, Artificial
  Synthetic oligonucleotide
caactccaacttaagagctaagccaagcggtgaagctttaaaaccaggcttaacaa

SEQ ID NO: 531007 - DNA, 56 bp, Artificial
  Synthetic oligonucleotide
cgcaacggaattaaatatacaacaagcaagtttgaatagggctattagaggtttgc

SEQ ID NO: 531008 - DNA, 56 bp, Artificial
  Synthetic oligonucleotide
agcactttggtaccggcccaaacgtcggtctggaacggccagctccgggtaaccac

SEQ ID NO: 531009 - DNA, 56 bp, Artificial
  Synthetic oligonucleotide
ggagatatagccccatatctatctattgagatgaacgaagttgaagtatttagacg

SEQ ID NO: 531010 - DNA, 56 bp, Artificial
  Synthetic oligonucleotide
cgtactagactcgatacttcccaatcaaataagttttctctatacactataggctc

SEQ ID NO: 531011 - DNA, 56 bp, Artificial
  Synthetic oligonucleotide
cacggtgacgggatcggctcccggcgtggagtgtaggcgttgtggcttcccatggc

SEQ ID NO: 531012 - DNA, 55 bp, Artificial
  Synthetic oligonucleotide
gcgcctccggtgttggcgtgccataggtcaactatatctaagactaagtcgaggt

SEQ ID NO: 531013 - DNA, 55 bp, Artificial
  Synthetic oligonucleotide
gccgtatgtacttgcgttttagtttacgtctcatgttgtctcctaatttggctga

SEQ ID NO: 531014 - DNA, 55 bp, Artificial
  Synthetic oligonucleotide
gcgcttacaccgcaccattgaccaactaacggcgcattcggttaacgccgcgttg

SEQ ID NO: 531015 - DNA, 55 bp, Artificial
  Synthetic oligonucleotide
gcgcgcgttctgccatgtgggcaggggcaacgtagaagatccagttttgtcccat

SEQ ID NO: 531016 - DNA, 55 bp, Artificial
  Synthetic oligonucleotide
gccgtccgtgcaataggcaagtgttgcatcttcctacgttttctatcaccatcag

SEQ ID NO: 531017 - DNA, 55 bp, Artificial
  Synthetic oligonucleotide
gcgccgtacttctaggattgatgggcgttcggagattacccggtctattcgtgcc

SEQ ID NO: 531018 - DNA, 55 bp, Artificial
  Synthetic oligonucleotide
gcgcagatcttcaacagcgattccagcgcggatgcaccagtcatcgcaatctggt

SEQ ID NO: 531019 - DNA, 55 bp, Artificial
  Synthetic oligonucleotide
gcgcacttgttccctgtgattcgtccgatcgcagttgttccaactgtagacttct

SEQ ID NO: 531020 - DNA, 55 bp, Artificial
  Synthetic oligonucleotide
gcgcaaggcagggtatgttgaagatttcgattgctatcgactacggtgacggtac

SEQ ID NO: 531021 - DNA, 55 bp, Artificial
  Synthetic oligonucleotide
gcgcaacgtttatttgtttctcggtagcgcggacaagcgttagttccacatcgac

SEQ ID NO: 531022 - DNA, 55 bp, Artificial
  Synthetic oligonucleotide
gcctaaaacatgccccgacgtttcatagcatccggcaggagtagcgcaaacattc

SEQ ID NO: 531023 - DNA, 55 bp, Artificial
  Synthetic oligonucleotide
gcgcaacaggcgccgaagcgagttggcattgggacgcgaagaattcaagcggcga

SEQ ID NO: 531024 - DNA, 55 bp, Artificial
  Synthetic oligonucleotide
gcctagccgatatggttctttaatgtcgtatttgggatcaagctcatatggaacg

SEQ ID NO: 531025 - DNA, 55 bp, Artificial
  Synthetic oligonucleotide
gcgatgttcgaaatactgtcaatacccaacgtatcgaaattcgcagcttcgcgcg

SEQ ID NO: 531026 - DNA, 55 bp, Artificial
  Synthetic oligonucleotide
gcgaggtctacactatcccggataactggaagtcttgggattacgctcgctacac

SEQ ID NO: 531027 - DNA, 55 bp, Artificial
  Synthetic oligonucleotide
gcgactcttctgacctgggcatacgcggttgcaacgcatccccgatctggctact

SEQ ID NO: 531028 - DNA, 55 bp, Artificial
  Synthetic oligonucleotide
gcctctcgtgtgtgcgatgtcaagtcagcgaacgcggacgatgtggttgccgcgt

SEQ ID NO: 531029 - DNA, 55 bp, Artificial
  Synthetic oligonucleotide
gcgaatcctggatcgagattaccgccacacctaaaactattgaggtgcatgatga

SEQ ID NO: 531030 - DNA, 55 bp, Artificial
  Synthetic oligonucleotide
gcctgcatttccgtatgtcgtgcatgcctgctattcggaccttgccgctattcgg

SEQ ID NO: 531031 - DNA, 55 bp, Artificial
  Synthetic oligonucleotide
gctgcggtagctgctgaagcataacgcggtgcaccggcatacccatctcaagcgt

SEQ ID NO: 531032 - DNA, 55 bp, Artificial
  Synthetic oligonucleotide
gctggttcgtagtgttcctgtgcgctgtgctgtctcaaacccgctggcatgtggg

SEQ ID NO: 531033 - DNA, 55 bp, Artificial
  Synthetic oligonucleotide
gctgtacgaagtgttttcgtacttgccaacagtagccatgcccgactaaatcggg

SEQ ID NO: 531034 - DNA, 55 bp, Artificial
  Synthetic oligonucleotide
gctgtagagggcatggaatgcttggatcggcaccagattgcgccggttatcagcg

SEQ ID NO: 531035 - DNA, 55 bp, Artificial
  Synthetic oligonucleotide
gctgttcctgtaggttagcagactgtcctacactatctaggctagtttgtcctct

SEQ ID NO: 531036 - DNA, 55 bp, Artificial
  Synthetic oligonucleotide
gcttcacgttttcccaggtcagaagcggttttcgggagtagtgccccaactgggg

SEQ ID NO: 531037 - DNA, 55 bp, Artificial
  Synthetic oligonucleotide
gcttgaacctccggttcgattgcgttgtcgcggacctgcgatggggtgtaggtgg

SEQ ID NO: 531038 - DNA, 55 bp, Artificial
  Synthetic oligonucleotide
gctttagcctgctctgcgtatccttctatagccttctggttactagccgctattc

SEQ ID NO: 531039 - DNA, 55 bp, Artificial
  Synthetic oligonucleotide
ggaagagctgacggaacctttgtcagtgttgaccaaaactggattaacccaagcc

SEQ ID NO: 531040 - DNA, 55 bp, Artificial
  Synthetic oligonucleotide
ggaagcgcctggtaagcgatgaagtttgcccaggtaacgccatccataaaccagg

SEQ ID NO: 531041 - DNA, 55 bp, Artificial
  Synthetic oligonucleotide
ggaaggactactagaaggtgttcctgacgctattctttgcatggtgtccccagcc

SEQ ID NO: 531042 - DNA, 55 bp, Artificial
  Synthetic oligonucleotide
ggaccacaaataccgcccagcccacgccagtaatatcttaccggaatggaggaaa

SEQ ID NO: 531043 - DNA, 55 bp, Artificial
  Synthetic oligonucleotide
ggacgccgtggtgtagagcatcattgcgtaacgtgactctcgcaccatctcgcag

SEQ ID NO: 531044 - DNA, 55 bp, Artificial
  Synthetic oligonucleotide
ggacggtttgagcaccgggattcccgacctagaccaatacacgcaaggcctgaag

SEQ ID NO: 531045 - DNA, 55 bp, Artificial
  Synthetic oligonucleotide
ggagacgtatctgataccacatggaccgcgttaatctggctgtttgcattgcgca

SEQ ID NO: 531046 - DNA, 55 bp, Artificial
  Synthetic oligonucleotide
ggagcccaatgctgcggacacccagtatcagcgggtttatgagaaggcccgggag

SEQ ID NO: 531047 - DNA, 55 bp, Artificial
  Synthetic oligonucleotide
ggagccgttcgagtggaatggccgcgtgtacgggaaggtgcggggcgatctgtac

SEQ ID NO: 531048 - DNA, 55 bp, Artificial
  Synthetic oligonucleotide
ggagcctgatacacgatcaaccatctcggtatagaccatcagcccctatcctgct

SEQ ID NO: 531049 - DNA, 55 bp, Artificial
  Synthetic oligonucleotide
ggaggcaaagtgcgcaagttgatatgcaaactacgcgagacatcatagatcgctc

SEQ ID NO: 531050 - DNA, 55 bp, Artificial
  Synthetic oligonucleotide
gcggatagtccagtatataaccgtgtgctaactgacttgcttctaaacgttacgc

SEQ ID NO: 531051 - DNA, 55 bp, Artificial
  Synthetic oligonucleotide
gcggatctaccgccctgtcccatcactaccgagttcacgtcctcgccttctggca

SEQ ID NO: 531052 - DNA, 55 bp, Artificial
  Synthetic oligonucleotide
gcggcggcggttagccgaaagactatcttgagtcaagcgcgatctgtcgtgaatc

SEQ ID NO: 531053 - DNA, 55 bp, Artificial
  Synthetic oligonucleotide
gcgggaactgatttagataaacaacgttcggaaattgtaaagcgtcacagtaatg

SEQ ID NO: 531054 - DNA, 55 bp, Artificial
  Synthetic oligonucleotide
gcgggcgctacgtcttacgcaaacttcagtcgtgccgtttcagaagttaacaccc

SEQ ID NO: 531055 - DNA, 55 bp, Artificial
  Synthetic oligonucleotide
gcggggtattattctgagcttggccgtttgtggcgttctgggaagatgaatgaca

SEQ ID NO: 531056 - DNA, 55 bp, Artificial
  Synthetic oligonucleotide
gcgggttcgcgtgcgactccctcccgggcgagaagcacatgcccttcctgaacca

SEQ ID NO: 531057 - DNA, 55 bp, Artificial
  Synthetic oligonucleotide
gcgtaggttcggttgtaaacgagttcaccggttggtccccaagggatttcgtcag

SEQ ID NO: 531058 - DNA, 55 bp, Artificial
  Synthetic oligonucleotide
gcgtatcgacgcaatcagcggtggcatcatcacggtagcacgcggtgttatggat

SEQ ID NO: 531059 - DNA, 55 bp, Artificial
  Synthetic oligonucleotide
gcgtctagcgtgttcggaaaggacacaggagtacagtgtgacagctgcccgggag

SEQ ID NO: 531060 - DNA, 55 bp, Artificial
  Synthetic oligonucleotide
gcgtttattgtccagcccctcttttagcttgttaaagcgggtacgttcttcatag

SEQ ID NO: 531061 - DNA, 55 bp, Artificial
  Synthetic oligonucleotide
gcgtttcggggctgtatcctctgagcgggattcggagcaagcgagagcccagtct

SEQ ID NO: 531062 - DNA, 55 bp, Artificial
  Synthetic oligonucleotide
gctaatcgaagcacacgacccgcgatcaaacgaatggccctattactggcacatg

SEQ ID NO: 531063 - DNA, 55 bp, Artificial
  Synthetic oligonucleotide
gctatgattgcagcttacggctctagtattttggctagtctttcggcattagggg

SEQ ID NO: 531064 - DNA, 55 bp, Artificial
  Synthetic oligonucleotide
gctatgctgattccgttgcccagggcctttctgttaaagacgcttcacgcgctgc

SEQ ID NO: 531065 - DNA, 55 bp, Artificial
  Synthetic oligonucleotide
gctccccttggctcgttaccggcttctcgacctcggtggatgtcaagtagtcgag

SEQ ID NO: 531066 - DNA, 55 bp, Artificial
  Synthetic oligonucleotide
gctccgtgtggatacgcttaaccgtggcgattgcgtgagtgtttacgatattagg

SEQ ID NO: 531067 - DNA, 55 bp, Artificial
  Synthetic oligonucleotide
gctcctctctgagcgatgtaaagtgtgtgactaaggctgtagccgtcgcacgtcc

SEQ ID NO: 531068 - DNA, 55 bp, Artificial
  Synthetic oligonucleotide
gctgaaactacccgccataggtttaaacccgccacctgtaaactccattcgatag

SEQ ID NO: 531069 - DNA, 55 bp, Artificial
  Synthetic oligonucleotide
gctgagttccgtggtggacaacggtatcggggatgggacccgtctcgctacatgc

SEQ ID NO: 531070 - DNA, 55 bp, Artificial
  Synthetic oligonucleotide
gaagacctcggactgaaggcgtgggccggcgaccctgctacctgccgaagcggat

SEQ ID NO: 531071 - DNA, 55 bp, Artificial
  Synthetic oligonucleotide
gaagctattacagctatcctcaggggctatctacgatgaggaacgaggtatacat

SEQ ID NO: 531072 - DNA, 55 bp, Artificial
  Synthetic oligonucleotide
gaagcttcaccgatcagcttacaagtttcgttaacaacatcctttagttcgttga

SEQ ID NO: 531073 - DNA, 55 bp, Artificial
  Synthetic oligonucleotide
gaatacacgtggaatattcgccatattgttcatcgctataacgcgaatctaccgg

SEQ ID NO: 531074 - DNA, 55 bp, Artificial
  Synthetic oligonucleotide
gaatgcgatgctcatgatagggtcggctgttcgtcttgcatgaactggttgaagg

SEQ ID NO: 531075 - DNA, 55 bp, Artificial
  Synthetic oligonucleotide
gaattggtggaggcaatgcacaatactctccaatggctaccgcagtaggtgtcgg

SEQ ID NO: 531076 - DNA, 55 bp, Artificial
  Synthetic oligonucleotide
gacaggtacgacagagcttagtggcggacttatcaaagttgatggaagaagtcct

SEQ ID NO: 531077 - DNA, 55 bp, Artificial
  Synthetic oligonucleotide
gaccgcaagatgggcgcagttgacaggtaaggatgcgaaggagattactggttac

SEQ ID NO: 531078 - DNA, 55 bp, Artificial
  Synthetic oligonucleotide
gaccgcttatcatgttgctttaaatcttatcccgttgttccggcaagaaagacat

SEQ ID NO: 531079 - DNA, 55 bp, Artificial
  Synthetic oligonucleotide
gaccggcccagccagtaatcgagtcggtcgttcggtgagttcatcccctgcaccc

SEQ ID NO: 531080 - DNA, 55 bp, Artificial
  Synthetic oligonucleotide
gaccggcgactgccaccactgtaactgcctcaaccggacggaggccgtgccctac

SEQ ID NO: 531081 - DNA, 55 bp, Artificial
  Synthetic oligonucleotide
gaccttcggcttccctcggatattgcataatcctccgcgaaagtatgccatgccc

SEQ ID NO: 531082 - DNA, 55 bp, Artificial
  Synthetic oligonucleotide
gacgacgacctaggggttttgcatggcactcgacgcaagcattggcatcgggcgg

SEQ ID NO: 531083 - DNA, 55 bp, Artificial
  Synthetic oligonucleotide
gacgcctgcatctacgggcggtcgtacgtcacgatctcgatgccagacccgaagg

SEQ ID NO: 531084 - DNA, 55 bp, Artificial
  Synthetic oligonucleotide
gacggcgtatatgggcctagtggtacgtacctgctgtatccaacctcgaagaatg

SEQ ID NO: 531085 - DNA, 55 bp, Artificial
  Synthetic oligonucleotide
gacgtctatattggtaaagctcatgccggtgacactattgatggtgtgaagacgg

SEQ ID NO: 531086 - DNA, 55 bp, Artificial
  Synthetic oligonucleotide
gacgtgagtattacagaaatccaacgcacattcgggcatagaatagcacaatgcg

SEQ ID NO: 531087 - DNA, 55 bp, Artificial
  Synthetic oligonucleotide
gactccaatcaaagggatttaatgttgatttcaaggcgtaacgacgtaggcatga

SEQ ID NO: 531088 - DNA, 55 bp, Artificial
  Synthetic oligonucleotide
gactcctcgttgtaactccagcccaccctgtgacgcatccactcacgggccacga

SEQ ID NO: 531089 - DNA, 55 bp, Artificial
  Synthetic oligonucleotide
ctgaattagctgtgctagcgactgtggcgttatcggtggctgcattacttgcatc

SEQ ID NO: 531090 - DNA, 55 bp, Artificial
  Synthetic oligonucleotide
ctgaccacggataaattagtagcagcgttaagagtaaaggataaggtaacaggag

SEQ ID NO: 531091 - DNA, 55 bp, Artificial
  Synthetic oligonucleotide
ctgccatgtgggcaggggcaacgtagaagatccagttttgtcccatagtcgcccc

SEQ ID NO: 531092 - DNA, 55 bp, Artificial
  Synthetic oligonucleotide
ctgcctagcggggatattatttcctgcgagttcagcgagattaatcaggtagacc

SEQ ID NO: 531093 - DNA, 55 bp, Artificial
  Synthetic oligonucleotide
ctgcctttcctcttgtgtgattccagctatctcgttgggagacagcaggtctagc

SEQ ID NO: 531094 - DNA, 55 bp, Artificial
  Synthetic oligonucleotide
ctgcgcctcgtgtggtcatgtcttctccttcggtagatgtcaagctgtcgtcacc

SEQ ID NO: 531095 - DNA, 55 bp, Artificial
  Synthetic oligonucleotide
ctgcttatattttgatatgagcgcttaccgaattcgggcttgctctcttcaggga

SEQ ID NO: 531096 - DNA, 55 bp, Artificial
  Synthetic oligonucleotide
ctggcgtatatcaggttgccgtagtgtttcccgcgggcacgggtacacagtatgc

SEQ ID NO: 531097 - DNA, 55 bp, Artificial
  Synthetic oligonucleotide
ctgggccaagccttgtagtgctagattgaggatagtccctatagcagtaccaacg

SEQ ID NO: 531098 - DNA, 55 bp, Artificial
  Synthetic oligonucleotide
ctgtcatgaatcttgacacctgtcgggattggaggctagatggctcccgcctttc

SEQ ID NO: 531099 - DNA, 55 bp, Artificial
  Synthetic oligonucleotide
cttaggtcagactggcaatccggtgtaacatccactctcgccgacttgacagaga

SEQ ID NO: 531100 - DNA, 55 bp, Artificial
  Synthetic oligonucleotide
cttcacatcatggatacccgtttccgcacacacgttgtgacgcacggactctggg

SEQ ID NO: 531101 - DNA, 55 bp, Artificial
  Synthetic oligonucleotide
cttcccatcgaatgtacttggctatttccgcctcaagttcccgtatgcgggccgt

SEQ ID NO: 531102 - DNA, 55 bp, Artificial
  Synthetic oligonucleotide
cttggcaattgcttcggggaatggtagtcctaacgatatccaattctctgctaaa

SEQ ID NO: 531103 - DNA, 55 bp, Artificial
  Synthetic oligonucleotide
gaaaaccagatttcgattgagatattagccacacaaccgctatatacctgcttgc

SEQ ID NO: 531104 - DNA, 55 bp, Artificial
  Synthetic oligonucleotide
gaaagtcgtgggtagctgcgcgtaaggtcatccagcttctgacacttaaccctgg

SEQ ID NO: 531105 - DNA, 55 bp, Artificial
  Synthetic oligonucleotide
gaaccgtgcgtgaggcacaacactggcgggtgatccgccgacaatgaggacacaa

SEQ ID NO: 531106 - DNA, 55 bp, Artificial
  Synthetic oligonucleotide
gaacggggtcgagtacatctgggcgtccaacgtcccgctgacgtggaacttggac

SEQ ID NO: 531107 - DNA, 55 bp, Artificial
  Synthetic oligonucleotide
gaactgtgacgaaacgtgtttggtgcgcatcgtggacagcgggatggctcgttgg

SEQ ID NO: 531108 - DNA, 55 bp, Artificial
  Synthetic oligonucleotide
gcacgaactcacgccgcatgaagtaacctatcattcttgcggcaataaattttgg

SEQ ID NO: 531109 - DNA, 55 bp, Artificial
  Synthetic oligonucleotide
gcacttcggttcaggttacggcaggttgcgaccattcttacaacggggccaacgg

SEQ ID NO: 531110 - DNA, 55 bp, Artificial
  Synthetic oligonucleotide
gcagatcagttcgttacccagaagcgtatagagattctgcaattagttgggtggg

SEQ ID NO: 531111 - DNA, 55 bp, Artificial
  Synthetic oligonucleotide
gcaggaatctatgacgttagggttcgcagcgtatcagatactgaaaacgtgtctg

SEQ ID NO: 531112 - DNA, 55 bp, Artificial
  Synthetic oligonucleotide
gcagggatgtagtagcctagaagagagaacagttatggcggttatcactaaagta

SEQ ID NO: 531113 - DNA, 55 bp, Artificial
  Synthetic oligonucleotide
gcaggttccaactaattacctggtggatttagggtttgttgtcccaaccgtttac

SEQ ID NO: 531114 - DNA, 55 bp, Artificial
  Synthetic oligonucleotide
gccaaatatcaatcgattaaccttaaacgaagcgtggcgtttgagataggctggg

SEQ ID NO: 531115 - DNA, 55 bp, Artificial
  Synthetic oligonucleotide
gccaagtctagcgtttcttctagcgcgtgttgcaaccaatcgcgaagcgacaacg

SEQ ID NO: 531116 - DNA, 55 bp, Artificial
  Synthetic oligonucleotide
gccataattagctcctaatagtttgaacgaccacactgagagcagtatgggcacg

SEQ ID NO: 531117 - DNA, 55 bp, Artificial
  Synthetic oligonucleotide
gccatcggccgaatcgtgatgagcgccaggcgattcatcggaggtaaggactccg

SEQ ID NO: 531118 - DNA, 55 bp, Artificial
  Synthetic oligonucleotide
gcccgccgtcctgtaaattcaaaccatggcccgccgatgcagggtgcacgcacaa

SEQ ID NO: 531119 - DNA, 55 bp, Artificial
  Synthetic oligonucleotide
gcccgctgacaatgcgggctctgatcggcccgctgacaatgcgggcctcttttat

SEQ ID NO: 531120 - DNA, 55 bp, Artificial
  Synthetic oligonucleotide
gccctgggccagcctctcaagttgctcgggtgagacttcatacattcttgtttcc

SEQ ID NO: 531121 - DNA, 55 bp, Artificial
  Synthetic oligonucleotide
gccgaagtttcgttgcattacggcgcacgcgaaggcggcaagtcgattgcccgta

SEQ ID NO: 531122 - DNA, 55 bp, Artificial
  Synthetic oligonucleotide
gccgcaaccaatgcttggaacggcatagtttcagcttgtcaagcggcaatggctt

SEQ ID NO: 531123 - DNA, 55 bp, Artificial
  Synthetic oligonucleotide
gccgcctaatcaacaaggcagcgatcccgcagggtacaggcgcaccgcattactc

SEQ ID NO: 531124 - DNA, 55 bp, Artificial
  Synthetic oligonucleotide
gccgccttgaggcagtgagagacccaactacccctggaggattcacccgtgatcg

SEQ ID NO: 531125 - DNA, 55 bp, Artificial
  Synthetic oligonucleotide
gccggtgaggatgtcagtgagtacatgcgggagtggcacacaggctgcgactgca

SEQ ID NO: 531126 - DNA, 55 bp, Artificial
  Synthetic oligonucleotide
gccgtatcgaccaataacgaatgtagtcagcgaacctactcaactaatcaaaggt

SEQ ID NO: 531127 - DNA, 55 bp, Artificial
  Synthetic oligonucleotide
gactctcctttcttagacagcctcaagatcgttacaccggcttgcgaagatgtac

SEQ ID NO: 531128 - DNA, 55 bp, Artificial
  Synthetic oligonucleotide
gactgactcgttcagagacgaaagcaggctcagacgctctctgcgcgtccgggac

SEQ ID NO: 531129 - DNA, 55 bp, Artificial
  Synthetic oligonucleotide
gactggaggtactgttagtggtaatctagtcatccaaacgcccaataaccctaca

SEQ ID NO: 531130 - DNA, 55 bp, Artificial
  Synthetic oligonucleotide
gacttctactggaaccggacgtactcagtcgagttcaccggagaccttgcgctgc

SEQ ID NO: 531131 - DNA, 55 bp, Artificial
  Synthetic oligonucleotide
gacttctttagctacgcgatcgatattgccccgagcgcagagaaggctgttctgt

SEQ ID NO: 531132 - DNA, 55 bp, Artificial
  Synthetic oligonucleotide
gagatgggtacacggtactggttttcgacaccgtcaacaatgttttgcagctggt

SEQ ID NO: 531133 - DNA, 55 bp, Artificial
  Synthetic oligonucleotide
gagccccttcgttcgtacgcatgtccgattctcatacgtgcgactaccgggcgtc

SEQ ID NO: 531134 - DNA, 55 bp, Artificial
  Synthetic oligonucleotide
gaggggtctttgcgaccagcatcggagagagacatggtcgtgagggatgtcatgg

SEQ ID NO: 531135 - DNA, 55 bp, Artificial
  Synthetic oligonucleotide
gagggttaccgggtcgcgaagtggatcgaagagttctgttacctgaccgggtcgt

SEQ ID NO: 531136 - DNA, 55 bp, Artificial
  Synthetic oligonucleotide
gaggttaaaacagggaagccctagagcctcccgtagtgatttagattgcgtcggc

SEQ ID NO: 531137 - DNA, 55 bp, Artificial
  Synthetic oligonucleotide
gagtccgttaaagttctgcagcacgattcacgcagtcaggcgttgccactatcgc

SEQ ID NO: 531138 - DNA, 55 bp, Artificial
  Synthetic oligonucleotide
gatagttaggtctgggcgcttttctggcccgggcctattttaaatgtcctgatag

SEQ ID NO: 531139 - DNA, 55 bp, Artificial
  Synthetic oligonucleotide
gatgtgaggtagtaacacctattttgtacatatcggtaccaactaagttccatag

SEQ ID NO: 531140 - DNA, 55 bp, Artificial
  Synthetic oligonucleotide
gcaaattcgaggacgaagtgttcaagccaaccgtgttcgcgtcaattacgcgtcc

SEQ ID NO: 531141 - DNA, 55 bp, Artificial
  Synthetic oligonucleotide
gcaacagcgattaagtatcagcgctaagagcctagaaacggcggtaaaggctacc

SEQ ID NO: 531142 - DNA, 55 bp, Artificial
  Synthetic oligonucleotide
gcaagaccacagctaactccaatgccctcacccaagttcaggtgagtgtggatgg

SEQ ID NO: 531143 - DNA, 55 bp, Artificial
  Synthetic oligonucleotide
gcaagtcgattcgtcttttcgtcggaactgttatcaagaacgaaaagaccccggc

SEQ ID NO: 531144 - DNA, 55 bp, Artificial
  Synthetic oligonucleotide
gcaccccggagaaggtccggaaggtgcaccccgattgggacgacacccgcgtgaa

SEQ ID NO: 531145 - DNA, 55 bp, Artificial
  Synthetic oligonucleotide
gcaccgaccggtagcgaagctcttcaagcccgaagtcggtttcccattcccaatc

SEQ ID NO: 531146 - DNA, 55 bp, Artificial
  Synthetic oligonucleotide
gcacctttgccctcgtataagcgaagcgagggccaaatcatgactcttagtcgcg

SEQ ID NO: 531147 - DNA, 55 bp, Artificial
  Synthetic oligonucleotide
tatatagggttgaccctggtagtcgattctagagcccatacagggcgtctcaggg

SEQ ID NO: 531148 - DNA, 55 bp, Artificial
  Synthetic oligonucleotide
tatcaaacttacgataagtcgagctatgagcaacgccatcgggtatgagtagctt

SEQ ID NO: 531149 - DNA, 55 bp, Artificial
  Synthetic oligonucleotide
tatgcccgcaccccgccacgtccgttctgcggaccgcgtggattcgcggctacgt

SEQ ID NO: 531150 - DNA, 55 bp, Artificial
  Synthetic oligonucleotide
tcaacccttcgtcggtctcgatcacagcgtcgataaagccacgaacaagcacacc

SEQ ID NO: 531151 - DNA, 55 bp, Artificial
  Synthetic oligonucleotide
tcactcgcggcgtcacttcgttcttcagtggagcggtgtccaaggtgacttcggg

SEQ ID NO: 531152 - DNA, 55 bp, Artificial
  Synthetic oligonucleotide
tcatcgctcagaggatcgacccacaggtcagcctggtcctcacgcgggaaccatc

SEQ ID NO: 531153 - DNA, 55 bp, Artificial
  Synthetic oligonucleotide
tcccatcataggtggtgccccaggtgtgcatgatgtggagtgggtccacgccgtc

SEQ ID NO: 531154 - DNA, 55 bp, Artificial
  Synthetic oligonucleotide
tcccctgaccgcaaggacgccctacgggcggctagccctttggcccgcttggtcc

SEQ ID NO: 531155 - DNA, 55 bp, Artificial; identical to SEQ ID NO: 460242
  Synthetic oligonucleotide

SEQ ID NO: 531156 - DNA, 55 bp, Artificial
  Synthetic oligonucleotide
tcctaacccgcgatattaatccggcagatggggcgctcatcgttcgcagatgcgg

SEQ ID NO: 531157 - DNA, 55 bp, Artificial
  Synthetic oligonucleotide
tcgaaccctgtaccgtctatgttaatttccatagcggcgacacaaggcgctaggc

SEQ ID NO: 531158 - DNA, 55 bp, Artificial
  Synthetic oligonucleotide
tcggatggatagcgaccacagcgtgacagcattcccaggggcgaccgttacgctc

SEQ ID NO: 531159 - DNA, 55 bp, Artificial
  Synthetic oligonucleotide
tcgtatgccctattaccgcaatatcgctttgctcggtaaggcgcgctccggaaag

SEQ ID NO: 531160 - DNA, 55 bp, Artificial
  Synthetic oligonucleotide
tcgtggggcgctgacggcccgaagggctgggagctcgacatcggttaccgcgacc

SEQ ID NO: 531161 - DNA, 55 bp, Artificial
  Synthetic oligonucleotide
tcgttcgcctgaccaacgtcgtcactccctgaccgggacttgacatcgtacatcg

SEQ ID NO: 531162 - DNA, 55 bp, Artificial
  Synthetic oligonucleotide
tctagcgagtcgagataggcccacatcgcaaaggtcgaggtgtcagatctgggca

SEQ ID NO: 531163 - DNA, 55 bp, Artificial
  Synthetic oligonucleotide
tctcgggtacggacagggctcttacgccccaccgacgggccatgacgtaggttcg

SEQ ID NO: 531164 - DNA, 55 bp, Artificial
  Synthetic oligonucleotide
tctggatgattttcgtgtgggcacgacgattcagggtaacacggtgttgtgtacg

SEQ ID NO: 531165 - DNA, 55 bp, Artificial
  Synthetic oligonucleotide
tgaacgcttcaagcgagacgaggcccaccctggcctcatgtaaccccggcagctc

SEQ ID NO: 531166 - DNA, 55 bp, Artificial
  Synthetic oligonucleotide
tgacatatgagcgggcgcgacttctggcacataaccaataataaacgtccagccg

SEQ ID NO: 531167 - DNA, 55 bp, Artificial
  Synthetic oligonucleotide
gtgggacgatctgccagagcctttcatggtcggctcaatcaagctatggcccgcc

SEQ ID NO: 531168 - DNA, 55 bp, Artificial
  Synthetic oligonucleotide
gtgtacggtggttgaagttgtggggcgttgggagccctcctctgcggacaccgca

SEQ ID NO: 531169 - DNA, 55 bp, Artificial
  Synthetic oligonucleotide
gtgtcgacgtacggcgagagtgacgccatgaacgctcacgcgcttgtggcatgga

SEQ ID NO: 531170 - DNA, 55 bp, Artificial
  Synthetic oligonucleotide
gtgtcgctggataagacgaatcatgttgttgatgcaaccgatagcgctacgactg

SEQ ID NO: 531171 - DNA, 55 bp, Artificial
  Synthetic oligonucleotide
gtgttgcgtgccgagcctggcgtgtatcatcagcaactgttggctaccctggtga

SEQ ID NO: 531172 - DNA, 55 bp, Artificial
  Synthetic oligonucleotide
gttagcagctacagagtttgcatcggtcaagagactcgctgtaagcttcgtaggt

SEQ ID NO: 531173 - DNA, 55 bp, Artificial
  Synthetic oligonucleotide
gttagctgtacattgtgccggctattcgcatacacactggtcagagcgttatcgc

SEQ ID NO: 531174 - DNA, 55 bp, Artificial
  Synthetic oligonucleotide
gttatgtagacgatccaatcctgaagtctcgtatggagtttgtagagtctctggt

SEQ ID NO: 531175 - DNA, 55 bp, Artificial
  Synthetic oligonucleotide
gttctagtagccagtcaagttgcgcgttagcagcgtctctttgctgccgtagccg

SEQ ID NO: 531176 - DNA, 55 bp, Artificial
  Synthetic oligonucleotide
gttctccaagatcgccttcccgatggcggatcaggagccgatacaagtgcctccc

SEQ ID NO: 531177 - DNA, 55 bp, Artificial
  Synthetic oligonucleotide
gttgatcgctgcgtggcaacggttctggctgtccctctgcttgaggaacccgtcg

SEQ ID NO: 531178 - DNA, 55 bp, Artificial
  Synthetic oligonucleotide
gtttgagcaaatcgtaaacctgatcactcgcggcgtagtagcactggaaaccatc

SEQ ID NO: 531179 - DNA, 55 bp, Artificial
  Synthetic oligonucleotide
gtttgtgcagggtcaggaccatctccgggatacgggtgatctgtcccttgacgcc

SEQ ID NO: 531180 - DNA, 55 bp, Artificial
  Synthetic oligonucleotide
taaacgattttaagtacgggctgcggtttaccattaatcctgaactggccgaggg

SEQ ID NO: 531181 - DNA, 55 bp, Artificial
  Synthetic oligonucleotide
taatgtgctggagcacactatcgggcatgtctcgtacttggttttcggtaagcca

SEQ ID NO: 531182 - DNA, 55 bp, Artificial
  Synthetic oligonucleotide
tacccgtgcagccccgcctgtagcaacaggaaccacgctcaccgcaggcactact

SEQ ID NO: 531183 - DNA, 55 bp, Artificial
  Synthetic oligonucleotide
tacctactggctccgtttctgcggctacctagcgtgccctcccacgtctcaggtg

SEQ ID NO: 531184 - DNA, 55 bp, Artificial
  Synthetic oligonucleotide
tacggcggaggtcgcacagtggcttcacgcaaggggaatcggcagggaggaagca

SEQ ID NO: 531185 - DNA, 55 bp, Artificial
  Synthetic oligonucleotide
taggcgtttcactcatatgtcttggtagtaagttgcaataagcactagcgccata

SEQ ID NO: 531186 - DNA, 55 bp, Artificial
  Synthetic oligonucleotide
tagggctggtatgattggtggtctggtacaagtgcgagacctaactaagcagtac

SEQ ID NO: 531187 - DNA, 55 bp, Artificial
  Synthetic oligonucleotide
tagttgggacatttgcatacgttcacctattcaagtcaagcgccccggtagcttg

SEQ ID NO: 531188 - DNA, 55 bp, Artificial
  Synthetic oligonucleotide
ttaatggctgaacctgacgagcgtagaccataccctccggttaacttcaccggtg

SEQ ID NO: 531189 - DNA, 55 bp, Artificial
  Synthetic oligonucleotide
ttatggacggcgttacctgggcaaacttcatcgcttaccaggcgcttccatctgc

SEQ ID NO: 531190 - DNA, 55 bp, Artificial
  Synthetic oligonucleotide
ttcaaaagcaatggctcgaaaagttggataacgctggcgtaattacacaagacgt

SEQ ID NO: 531191 - DNA, 55 bp, Artificial
  Synthetic oligonucleotide
ttcgagaagggtacgtccctgccgtaagtcatttctgacggcgagctttatcccc

SEQ ID NO: 531192 - DNA, 55 bp, Artificial
  Synthetic oligonucleotide
ttcgccttgtagagggcagtcgatgccgctgtgctacccgacaccgccaggaaca

SEQ ID NO: 531193 - DNA, 55 bp, Artificial
  Synthetic oligonucleotide
ttcgggtcgatggcttctcgggttcgtggtgctgcctcgtccgggtttaacgctg

SEQ ID NO: 531194 - DNA, 55 bp, Artificial
  Synthetic oligonucleotide
ttcgtccggtcgttgacttcgttagaagcttcgatattgtcacggttgaacagcc

SEQ ID NO: 531195 - DNA, 55 bp, Artificial
  Synthetic oligonucleotide
ttcgtggtaaggctctgtctctgctacgtgaagaacgtatcgctgctatcccagc

SEQ ID NO: 531196 - DNA, 55 bp, Artificial
  Synthetic oligonucleotide
ttctggaagacacgccgaacggcgtttcattggatgtgcgccaatcgaccagtct

SEQ ID NO: 531197 - DNA, 55 bp, Artificial
  Synthetic oligonucleotide
ttctgtgtctgtttacttgttgttaaggaatagcctgctagtgtccccttgtcgg

SEQ ID NO: 531198 - DNA, 55 bp, Artificial
  Synthetic oligonucleotide
ttgacctgttaccacactgaaggtctagtcgagtgcgaagagatgtacgaggcgt

SEQ ID NO: 531199 - DNA, 55 bp, Artificial
  Synthetic oligonucleotide
ttgatggtgtgaagacggttcctgatgggttgactgctttagggtatctgtctga

SEQ ID NO: 531200 - DNA, 55 bp, Artificial
  Synthetic oligonucleotide
ttggtaatcccggctcgacgccacttcatcactacgtcaccgggttgcccactgc

SEQ ID NO: 531201 - DNA, 55 bp, Artificial
  Synthetic oligonucleotide
ttgtctcgtgccttgggttcgcgggactgttccgcgtaggggtcgcaggtcggta

SEQ ID NO: 531202 - DNA, 55 bp, Artificial
  Synthetic oligonucleotide
tttagtgtacgttccattcgttccgtagtacttcccgttaaagaactgataaggc

SEQ ID NO: 531203 - DNA, 55 bp, Artificial
  Synthetic oligonucleotide
tttctagcaacaccgcgcgggcaaaccagaaatagtcaatcaacccgctgccaac

SEQ ID NO: 531204 - DNA, 55 bp, Artificial
  Synthetic oligonucleotide
tttgggttgatcgcgttggtccggatgattgcgggtcctgccatgtttggctggg

SEQ ID NO: 531205 - DNA, 55 bp, Artificial
  Synthetic oligonucleotide
ttttcgatcggaacggtgttttccgtggcaacagacccaagaccaagattagagc

SEQ ID NO: 531206 - DNA, 55 bp, Artificial
  Synthetic oligonucleotide
ttttgtttcacgctccggtaaattgcatttgacgtgattacaaaggtctaaaccc

SEQ ID NO: 531207 - DNA, 55 bp, Artificial
  Synthetic oligonucleotide
tgagatgccccaggacgttccggttgcacgcggtgcatagaagaccccggacgat

SEQ ID NO: 531208 - DNA, 55 bp, Artificial
  Synthetic oligonucleotide
tgagcggtttcatcaattctttagaaaacgctttaagcaacgctagcggtggctt

SEQ ID NO: 531209 - DNA, 55 bp, Artificial
  Synthetic oligonucleotide
tgatgacctgaccgcgcactaccttgcggcgggcggagtcctttcatgatctcgg

SEQ ID NO: 531210 - DNA, 55 bp, Artificial
  Synthetic oligonucleotide
tgatgggccttcggatccaggttggtgaggcacagggcttctccgaggagcggtt

SEQ ID NO: 531211 - DNA, 55 bp, Artificial
  Synthetic oligonucleotide
tgcagcgtgagcaccagctcagggacgcgagtgatctggcccttgacaccgccga

SEQ ID NO: 531212 - DNA, 55 bp, Artificial
  Synthetic oligonucleotide
tgccagttgtgaccgtaccatctagcgaccaacgccaagtgacaccagaaaccac

SEQ ID NO: 531213 - DNA, 55 bp, Artificial
  Synthetic oligonucleotide
tgcgctactccgtagtggtcgaacttgtctccgcagatgacgcagggcccgtcct

SEQ ID NO: 531214 - DNA, 55 bp, Artificial
  Synthetic oligonucleotide
tgcgctcgcagtagagaagcctgtgctcggtgtattcaggtagaacagcacgctc

SEQ ID NO: 531215 - DNA, 55 bp, Artificial
  Synthetic oligonucleotide
tggaccgggatgatggatcactaccgggtcatcaagaccgattccggtgatgcgt

SEQ ID NO: 531216 - DNA, 55 bp, Artificial
  Synthetic oligonucleotide
tggattgggagatcagcccggagtttgaccataagggtcatgcaccgcaggacac

SEQ ID NO: 531217 - DNA, 55 bp, Artificial
  Synthetic oligonucleotide
tggcaatagagtatactcggcagcaaacaaacctactccagaggatattggagca

SEQ ID NO: 531218 - DNA, 55 bp, Artificial
  Synthetic oligonucleotide
tggctcctttggaaggttctagctgcggcgtcttagggtgaatctcctagcggcc

SEQ ID NO: 531219 - DNA, 55 bp, Artificial
  Synthetic oligonucleotide
tgggatcgtccctgagatggcccacaacgtccctgttgcacgggccgcacagaag

SEQ ID NO: 531220 - DNA, 55 bp, Artificial
  Synthetic oligonucleotide
tgtaatacagccctacggtatcgggagagaacattataggtgtatcaatgttcgc

SEQ ID NO: 531221 - DNA, 55 bp, Artificial
  Synthetic oligonucleotide
tgtacgagaacgtcttcctggccttccaggaatggccgactctgcgggcgatggg

SEQ ID NO: 531222 - DNA, 55 bp, Artificial
  Synthetic oligonucleotide
tgtcgcctgaggtggtactcgtgaatgtttcgtggcagattgtgcagtgttctgg

SEQ ID NO: 531223 - DNA, 55 bp, Artificial
  Synthetic oligonucleotide
tgtgaataactcaacccggcctccgacaatctacaccattaatgcttattcggcg

SEQ ID NO: 531224 - DNA, 55 bp, Artificial
  Synthetic oligonucleotide
tgtgcctggtatctgcaagcactgtgacgaacacttcgaacgactggttggcggg

SEQ ID NO: 531225 - DNA, 55 bp, Artificial
  Synthetic oligonucleotide
tgtggatcacctgatccggctgatagtccccgatgaaccgcagcaccgcacggac

SEQ ID NO: 531226 - DNA, 55 bp, Artificial
  Synthetic oligonucleotide
tgtgtactgttctgatggtcgcctggttgtgaaatatagtgacggtgtggcttct

SEQ ID NO: 531227 - DNA, 55 bp, Artificial
  Synthetic oligonucleotide
tgtttaagggacttggtgactatgttccggcagttatcgctatagacgagtgcca

SEQ ID NO: 531228 - DNA, 55 bp, Artificial
  Synthetic oligonucleotide
ggcttacacctacactcgtggcctctctttgtaccgctatcgctactgtccttgg

SEQ ID NO: 531229 - DNA, 55 bp, Artificial
  Synthetic oligonucleotide
ggcttcgacatgaatgggtcagtgcgtatggctggctcatcagtgacgggtaacc

SEQ ID NO: 531230 - DNA, 55 bp, Artificial
  Synthetic oligonucleotide
ggctttgtaaaggccgtcatgacggttactgatcgtgaaaccattgataaggtga

SEQ ID NO: 531231 - DNA, 55 bp, Artificial
  Synthetic oligonucleotide
gggagttttcgggacgactgcggcaatcaataagcatcgggaatatattgcgggg

SEQ ID NO: 531232 - DNA, 55 bp, Artificial
  Synthetic oligonucleotide
gggatcgtcctgccctggaacacccacacgtcagagctcaggtcacgcttcgaga

SEQ ID NO: 531233 - DNA, 55 bp, Artificial
  Synthetic oligonucleotide
gggattacgtcagaatggtacgagaaactactggcggatgcccgtaagctttccg

SEQ ID NO: 531234 - DNA, 55 bp, Artificial
  Synthetic oligonucleotide
gggccaagaccaaccaaccgaacacaaccccgaccaacgaggtcaccaacgacgg

SEQ ID NO: 531235 - DNA, 55 bp, Artificial
  Synthetic oligonucleotide
gggcgaaccaagaacatgagatcaaggctgaatgctttgactgctcacggtgtgg

SEQ ID NO: 531236 - DNA, 55 bp, Artificial
  Synthetic oligonucleotide
gggcgcagtggctacccagccaggtattgggaataagaaacttaaccgcatacta

SEQ ID NO: 531237 - DNA, 55 bp, Artificial
  Synthetic oligonucleotide
gggcgtcgaggtccttttgtgcttcggtggactgagaggttaggcgcgggattgc

SEQ ID NO: 531238 - DNA, 55 bp, Artificial
  Synthetic oligonucleotide
gggcgtttgcctcggcgtgtaccgcaacacatcgggtttcacccgagttgtagtc

SEQ ID NO: 531239 - DNA, 55 bp, Artificial
  Synthetic oligonucleotide
gggcttccttatctgtaaacaggtatttagcgaagtccgagcgtaaccccgttag

SEQ ID NO: 531240 - DNA, 55 bp, Artificial
  Synthetic oligonucleotide
ggggacagtttacgtaaatggagttatgccgttgcaaaacacttttaactccctc

SEQ ID NO: 531241 - DNA, 55 bp, Artificial
  Synthetic oligonucleotide
ggggataaagggaagtctgcattccgcttagagcatctaccagagtataaaggga

SEQ ID NO: 531242 - DNA, 55 bp, Artificial
  Synthetic oligonucleotide
ggggcactggtctatcgtgcataacggcaccatcgcaaacgacaaggccctgcgc

SEQ ID NO: 531243 - DNA, 55 bp, Artificial
  Synthetic oligonucleotide
ggggctccgatggctccagcggcgagagtcttccatttcgcatcgtacccgaggt

SEQ ID NO: 531244 - DNA, 55 bp, Artificial
  Synthetic oligonucleotide
ggggtctcgccgtaccgagcacatcggctacacgatgaagaggtactgacatggc

SEQ ID NO: 531245 - DNA, 55 bp, Artificial
  Synthetic oligonucleotide
ggggtgttgctgtccgttgacggagccggggtggactagacccggaacccgcccc

SEQ ID NO: 531246 - DNA, 55 bp, Artificial
  Synthetic oligonucleotide
gggtcgccgactcccttcgtataggtaggaggtatatccgtgcctaatttcgaag

SEQ ID NO: 531247 - DNA, 55 bp, Artificial
  Synthetic oligonucleotide
ggaggcgatgtgtgggagtttgggaggtagtcttgagggtgcagaattctcttcg

SEQ ID NO: 531248 - DNA, 55 bp, Artificial
  Synthetic oligonucleotide
ggagtcgaaccctccgaggttgctaagcctcgcaccactgacgatcccttgacgg

SEQ ID NO: 531249 - DNA, 55 bp, Artificial
  Synthetic oligonucleotide
ggatatctgctaaatcagccatacgacctccctattcttggattaaacccttttc

SEQ ID NO: 531250 - DNA, 55 bp, Artificial
  Synthetic oligonucleotide
ggattgaccgtaacaagaaacatcgctttaaagctgtgtcaccaatgaactgtct

SEQ ID NO: 531251 - DNA, 55 bp, Artificial
  Synthetic oligonucleotide
ggcacaggaaccactcacatcagggctgtgcgcctccagggcgcgtgaactcccc

SEQ ID NO: 531252 - DNA, 55 bp, Artificial
  Synthetic oligonucleotide
ggcacccttgcccagttaggtgcatcgcaggagtttggaggaagtctccgtgtac

SEQ ID NO: 531253 - DNA, 55 bp, Artificial
  Synthetic oligonucleotide
ggcagaagagtgttgctcaccgatgtctccttaacacagaacggaggcacccctt

SEQ ID NO: 531254 - DNA, 55 bp, Artificial
  Synthetic oligonucleotide
ggcatacttaccaccagttttggctacaagagtgccatcgtctagtatcatctcc

SEQ ID NO: 531255 - DNA, 55 bp, Artificial
  Synthetic oligonucleotide
ggcccgccatagccgcctggttatacgtggttcatcgctcacgaaggtaagcctt

SEQ ID NO: 531256 - DNA, 55 bp, Artificial
  Synthetic oligonucleotide
ggccggtgtatgtcaaggtgatctacgccactctgacctctggtgcatgtaaagg

SEQ ID NO: 531257 - DNA, 55 bp, Artificial
  Synthetic oligonucleotide
ggcctcaagatggttgccggtaaggaagggatccgtaagtgggcggacgagagcg

SEQ ID NO: 531258 - DNA, 55 bp, Artificial
  Synthetic oligonucleotide
ggcgaactcgcatggcgatcctagttccggatgtggtgatgccgtcgtgacgctc

SEQ ID NO: 531259 - DNA, 55 bp, Artificial
  Synthetic oligonucleotide
ggcgcaacgacctagttctggtggatcagttcttcgatgcccggtggccacgtcc

SEQ ID NO: 531260 - DNA, 55 bp, Artificial
  Synthetic oligonucleotide
ggcgcaactcccggacgaactggtctacgaagcggtcaacggtgccttcaccaag

SEQ ID NO: 531261 - DNA, 55 bp, Artificial
  Synthetic oligonucleotide
ggcgcaggacgtctcgtattgatgggcgctccgagattacacggtcgatcagggc

SEQ ID NO: 531262 - DNA, 55 bp, Artificial
  Synthetic oligonucleotide
ggcggcagacctcttagcctggaaacaggaaattaggcaagccttagttgagcag

SEQ ID NO: 531263 - DNA, 55 bp, Artificial
  Synthetic oligonucleotide
ggcgggtatctacgtaatgcgcgccgatctggccttcaaagcagaagagctgact

SEQ ID NO: 531264 - DNA, 55 bp, Artificial
  Synthetic oligonucleotide
ggcgtaccacgtggcctgcgtgaagcagcgcatgggcccgtgtgacccgaccgca

SEQ ID NO: 531265 - DNA, 55 bp, Artificial
  Synthetic oligonucleotide
ggcgtttcgccttgcactactgcgacacttgcacttcacgactgcggtatcgggc

SEQ ID NO: 531266 - DNA, 55 bp, Artificial
  Synthetic oligonucleotide
ggctaacgcttcgcctacgcaccgggacaggtatgtaagtttgggcttctcgcca

SEQ ID NO: 531267 - DNA, 55 bp, Artificial
  Synthetic oligonucleotide
ggctcgttgcacctcttcagcaatattggatagacaaattaagaaagcagggcgc

SEQ ID NO: 531268 - DNA, 55 bp, Artificial
  Synthetic oligonucleotide
gtagtactctacgttagagttacgaccaattttacgatcttcgcctagttctgac

SEQ ID NO: 531269 - DNA, 55 bp, Artificial
  Synthetic oligonucleotide
gtatggctgcgccgaactattgcggctaacccgtccctaagcggtcagcaggacg

SEQ ID NO: 531270 - DNA, 55 bp, Artificial
  Synthetic oligonucleotide
gtatgtttgcgaaggctgattgcgtgactctcctacgctgcacaagtatccggct

SEQ ID NO: 531271 - DNA, 55 bp, Artificial
  Synthetic oligonucleotide
gtcaaacatgccacacggtcaaaacgtcacaaggtgcctttccgcgctttgatgg

SEQ ID NO: 531272 - DNA, 55 bp, Artificial
  Synthetic oligonucleotide
gtcagcgcaggattcgttgatgtaccggtcgtagcttttccggaacacggcggtc

SEQ ID NO: 531273 - DNA, 55 bp, Artificial
  Synthetic oligonucleotide
gtcagttctgtactgcgtcaggttttctcacgggctaatgaaggttgggcgaacc

SEQ ID NO: 531274 - DNA, 55 bp, Artificial
  Synthetic oligonucleotide
gtcccatccccttttctttgcacccaaaaggcggaaaccgcataagagattaggt

SEQ ID NO: 531275 - DNA, 55 bp, Artificial
  Synthetic oligonucleotide
gtcgcacaccttgaaactgatcgttataccgtggacgttaacggctatcgagggg

SEQ ID NO: 531276 - DNA, 55 bp, Artificial
  Synthetic oligonucleotide
gtcgctactcggataactgagccaagctctataaccctacctgatactctatccg

SEQ ID NO: 531277 - DNA, 55 bp, Artificial
  Synthetic oligonucleotide
gtcgtgaacgacgctacacgatgcgatgtgcgatgtcaagcgatccgctgtggag

SEQ ID NO: 531278 - DNA, 55 bp, Artificial
  Synthetic oligonucleotide
gtgaaaccatcaccggtggttaccgtatcatcccacaagtaaaagaggaagggtg

SEQ ID NO: 531279 - DNA, 55 bp, Artificial
  Synthetic oligonucleotide
gtgaactgcaccacactctcgagcccctggagttacttttcccgccagtaacccg

SEQ ID NO: 531280 - DNA, 55 bp, Artificial
  Synthetic oligonucleotide
gtgaagaagtcttgctgcgcattcttaacctgtttagtgagacgcgcacgaagct

SEQ ID NO: 531281 - DNA, 55 bp, Artificial
  Synthetic oligonucleotide
gtgaagctggtcacaaatagaggggtgcaccgtacggattccgtcggattacacc

SEQ ID NO: 531282 - DNA, 55 bp, Artificial
  Synthetic oligonucleotide
gtgcaggactggattggcttcctgcaggctttgtacccggaggtctaccggcacc

SEQ ID NO: 531283 - DNA, 55 bp, Artificial
  Synthetic oligonucleotide
gtgctacgtcgagaacgaaggcaaggggccagtaaaggcacaccctaaagccccg

SEQ ID NO: 531284 - DNA, 55 bp, Artificial
  Synthetic oligonucleotide
gtgctttgcgtttcggggctgtgtcttctgagcgggattcagagcaggcgagggc

SEQ ID NO: 531285 - DNA, 55 bp, Artificial
  Synthetic oligonucleotide
gtggacttcgcagtacccgtcgtaacccatgtctcgggcgaacgcttcgtagtcg

SEQ ID NO: 531286 - DNA, 55 bp, Artificial
  Synthetic oligonucleotide
gtggctggactgagggcagttgaacacgcaagcactcaagatcggaacctgagat

SEQ ID NO: 531287 - DNA, 55 bp, Artificial
  Synthetic oligonucleotide
gtgggaaggcttgactcaacttatacaagtcagggctggcgaagtgtatacattc

SEQ ID NO: 531288 - DNA, 55 bp, Artificial
  Synthetic oligonucleotide
gtgggacctcaagccctcacacggggccaaggtcaccggaccccacttctgacca

SEQ ID NO: 531289 - DNA, 55 bp, Artificial
  Synthetic oligonucleotide
gggtcgttcggtaagctgggcagcaagtattcaatcctctactcacccgacctgc

SEQ ID NO: 531290 - DNA, 55 bp, Artificial
  Synthetic oligonucleotide
gggtgcagttgtctccgcgtatcgagacgggttcgaagtcgattatgtttggcgg

SEQ ID NO: 531291 - DNA, 55 bp, Artificial
  Synthetic oligonucleotide
gggtgctggaaaatgttggccgctcgccatgtcgtatcgggcgggagccaaagaa

SEQ ID NO: 531292 - DNA, 55 bp, Artificial
  Synthetic oligonucleotide
gggtggatgttcagtcgggagcgctcgatggtctggctgcacgggtatctggagg

SEQ ID NO: 531293 - DNA, 55 bp, Artificial
  Synthetic oligonucleotide
gggtgtccgatagctttcaccacaggttaacactaaagaccacactcacaggcac

SEQ ID NO: 531294 - DNA, 55 bp, Artificial
  Synthetic oligonucleotide
ggtaggattatgcaggatccaccctgctgatcgattctaggccccttctagggcg

SEQ ID NO: 531295 - DNA, 55 bp, Artificial
  Synthetic oligonucleotide
ggtcactagagcgcagaccaaccagtggcggcgtaggaacgttgattttgtggag

SEQ ID NO: 531296 - DNA, 55 bp, Artificial
  Synthetic oligonucleotide
ggtgaccggtgggtaacgatcccacttcctcgatgtcacagatcgaacatcatcc

SEQ ID NO: 531297 - DNA, 55 bp, Artificial
  Synthetic oligonucleotide
ggtgcctcgaaaggtcgtgatataaatctgcctgtagtagttcgccctgtacgtt

SEQ ID NO: 531298 - DNA, 55 bp, Artificial
  Synthetic oligonucleotide
ggtgcgggatctatgcgcgtttacctgcgggaacgtaagttacgggtgcgtaggg

SEQ ID NO: 531299 - DNA, 55 bp, Artificial
  Synthetic oligonucleotide
ggtggccttaacatagtgccaggttacgcgttctcccgttcgggtagtggacctg

SEQ ID NO: 531300 - DNA, 55 bp, Artificial
  Synthetic oligonucleotide
ggtgggcctacccctacgtctacagactctgctatagattgaactgaggtaatgg

SEQ ID NO: 531301 - DNA, 55 bp, Artificial
  Synthetic oligonucleotide
ggtgtcgggtctgcatttcgctggagtcctccgtacgtgtggttcagtcggcgag

SEQ ID NO: 531302 - DNA, 55 bp, Artificial
  Synthetic oligonucleotide
ggtgtggtcacaatgttctttgatggcctagtctgcgcgatgagtccatatccga

SEQ ID NO: 531303 - DNA, 55 bp, Artificial
  Synthetic oligonucleotide
ggtttacggcaagggtctcgatgccacgttgtatgggcaagaatttaaacgtctt

SEQ ID NO: 531304 - DNA, 55 bp, Artificial
  Synthetic oligonucleotide
gtacactgagagccatgagagcgattataaggaactttctcattgttgtagcctc

SEQ ID NO: 531305 - DNA, 55 bp, Artificial
  Synthetic oligonucleotide
gtacatgtcccgcagttcaaaaccgaagaacggggtagagctagtgttaccacca

SEQ ID NO: 531306 - DNA, 55 bp, Artificial
  Synthetic oligonucleotide
gtaccaggacgatgtcgtgtactcggctgtgacgcagacggatacgacgttcgac

SEQ ID NO: 531307 - DNA, 55 bp, Artificial
  Synthetic oligonucleotide
gtagcactctcaatgtattgaatcaggtttccggtaattatccggcgaaagaagt

SEQ ID NO: 531308 - DNA, 55 bp, Artificial
  Synthetic oligonucleotide
gtagggaagcgttgataggaactctcccatacttctgttgattaaggtgtgccac

SEQ ID NO: 531309 - DNA, 55 bp, Artificial
  Synthetic oligonucleotide
gtagggcagttcgccttgaactagctaaagccagtggtggttttcagcgcgtaag

SEQ ID NO: 531310 - DNA, 55 bp, Artificial
  Synthetic oligonucleotide
cactgtcgttaagtgaagcacttacttttgaaacctcgttcactgctagctctat

SEQ ID NO: 531311 - DNA, 55 bp, Artificial
  Synthetic oligonucleotide
cagacgattctaggccgttacaggagcaatgagaggcttacaggggccataggag

SEQ ID NO: 531312 - DNA, 55 bp, Artificial
  Synthetic oligonucleotide
cagagaaggttggtgtttgatgaaaatacttgcgattgacccatcaagcaaccga

SEQ ID NO: 531313 - DNA, 55 bp, Artificial
  Synthetic oligonucleotide
cagagactattgaagagcatacatggacagttggatttaacgtagaggacgcttc

SEQ ID NO: 531314 - DNA, 55 bp, Artificial
  Synthetic oligonucleotide
cagattgccgctgtctcccaggatcagacccgcaacacgttcacactcttccccg

SEQ ID NO: 531315 - DNA, 55 bp, Artificial
  Synthetic oligonucleotide
cagccgcacacatggcagctttcggttcattgaatggctcgcctactgtctccca

SEQ ID NO: 531316 - DNA, 55 bp, Artificial
  Synthetic oligonucleotide
cagcggctcgaccgcgcgacctagggagtaacccacatggccggattcaaccttt

SEQ ID NO: 531317 - DNA, 55 bp, Artificial
  Synthetic oligonucleotide
cagcgtcgattcatggcgaacgaacacaccagacgtcgggacgtacgggatgtcg

SEQ ID NO: 531318 - DNA, 55 bp, Artificial
  Synthetic oligonucleotide
cagcgtgaatcacgttgctttcggctgggcccgcatcactctcggcggcgttaag

SEQ ID NO: 531319 - DNA, 55 bp, Artificial
  Synthetic oligonucleotide
caggaagcccgcctagaacgtgaacccgaaacaatggcgcagtatcatgatcccg

SEQ ID NO: 531320 - DNA, 55 bp, Artificial
  Synthetic oligonucleotide
caggagccttgaaggtgcccatcgcttggttcagatccacgccggtctggttgcc

SEQ ID NO: 531321 - DNA, 55 bp, Artificial
  Synthetic oligonucleotide
cagggttaggcttggcttaggcgtcgttaatgtaccgctactagtcgctactcgg

SEQ ID NO: 531322 - DNA, 55 bp, Artificial
  Synthetic oligonucleotide
cagtcccctacacctgttgcgcctgatttggcgctattctgcgcgtgctgtatca

SEQ ID NO: 531323 - DNA, 55 bp, Artificial
  Synthetic oligonucleotide
catatcaccatctcctaaccatgcacctaaagtatatggatcaatcggaactttt

SEQ ID NO: 531324 - DNA, 55 bp, Artificial
  Synthetic oligonucleotide
catcaattaactccatgaattaatgtaaattgagctagcctcaagcgtagcgcgc

SEQ ID NO: 531325 - DNA, 55 bp, Artificial
  Synthetic oligonucleotide
catcacgggttagattcaggtgagacatcggcttacgggttgatcgtgacatctc

SEQ ID NO: 531326 - DNA, 55 bp, Artificial
  Synthetic oligonucleotide
catcccgtggttcgtgaaggaggagcaccgctgggcatacccgctcgcgatgctt

SEQ ID NO: 531327 - DNA, 55 bp, Artificial
  Synthetic oligonucleotide
catcgtaacgttcgccacttggattaacacgaaatttagaaacgtttgggtaatc

SEQ ID NO: 531328 - DNA, 55 bp, Artificial
  Synthetic oligonucleotide
catgcaggacatggaagaagttgatccgttagacatcttgtatgaccaaattcgt

SEQ ID NO: 531329 - DNA, 55 bp, Artificial
  Synthetic oligonucleotide
catgcatagaacctgatacgccagacaatgcacaatcttggaattgcgaggtagt

SEQ ID NO: 531330 - DNA, 55 bp, Artificial
  Synthetic oligonucleotide
attcgcacggaggcgcaagtcccatgccacctgagctgatcgcacaccttcccca

SEQ ID NO: 531331 - DNA, 55 bp, Artificial
  Synthetic oligonucleotide
attgggtgtcctgtgcttcccctctgccagctcaaccgaggttgcgagtctcgcc

SEQ ID NO: 531332 - DNA, 55 bp, Artificial
  Synthetic oligonucleotide
caaagcatgtcaacccgatactacgggcgcgacgtttaaaccgcatagcctgccg

SEQ ID NO: 531333 - DNA, 55 bp, Artificial
  Synthetic oligonucleotide
caaatgggataagggctttgcgcataacgcatcccgccttgtaaccctcgggtcg

SEQ ID NO: 531334 - DNA, 55 bp, Artificial
  Synthetic oligonucleotide
caaattgcgcccctaaagcaccacacggggcgctaacccttccgaagaattgcgc

SEQ ID NO: 531335 - DNA, 55 bp, Artificial
  Synthetic oligonucleotide
caacgcctgagattgctcctcctattgctcgccatgtggaccgcgatagcggcac

SEQ ID NO: 531336 - DNA, 55 bp, Artificial
  Synthetic oligonucleotide
caagccgtacagatttacgcgcttcgctattggtcgcaaccgggcttcgataagg

SEQ ID NO: 531337 - DNA, 55 bp, Artificial
  Synthetic oligonucleotide
caagcgcaaatcgaagttatcgaacgcttgccaaaggcgggcgaacttgataagc

SEQ ID NO: 531338 - DNA, 55 bp, Artificial
  Synthetic oligonucleotide
caaggcacttgccgttaccgtcaaacttcaggtcgaatcgcaaccatgcggccct

SEQ ID NO: 531339 - DNA, 55 bp, Artificial
  Synthetic oligonucleotide
caagtgatttcaaagcttcgctaacagattcgttgataccgcttcgaatttctgg

SEQ ID NO: 531340 - DNA, 55 bp, Artificial
  Synthetic oligonucleotide
caatccgacaaatccgccgacctttcgaagatgaatcccgcagaacttgcggcgc

SEQ ID NO: 531341 - DNA, 55 bp, Artificial
  Synthetic oligonucleotide
caatgagtgcgagattccgtatgttatcgtaagtatcccagagggagatatgcgg

SEQ ID NO: 531342 - DNA, 55 bp, Artificial
  Synthetic oligonucleotide
cacacaccatgcgcaccgcttctgacgacgccgtgaaggcgccactgtggcagta

SEQ ID NO: 531343 - DNA, 55 bp, Artificial
  Synthetic oligonucleotide
cacacatcaatagatactgctctttagtcatcttggaaccagacccttgtgcgct

SEQ ID NO: 531344 - DNA, 55 bp, Artificial
  Synthetic oligonucleotide
cacatcagctcacgctgcacaactggctcaccgtcctggacagattggctcaggc

SEQ ID NO: 531345 - DNA, 55 bp, Artificial
  Synthetic oligonucleotide
cacatggctgaaaacgacgacgcagtgttgactgcggcggtcggctacgtgtacg

SEQ ID NO: 531346 - DNA, 55 bp, Artificial
  Synthetic oligonucleotide
caccctcatactatgtgagataggccatactctcctggcttagtgtgcaccctcg

SEQ ID NO: 531347 - DNA, 55 bp, Artificial
  Synthetic oligonucleotide
cacgttcgtagtgctcaacgaaacccatcactgggtgacgggtaacaacggcgac

SEQ ID NO: 531348 - DNA, 55 bp, Artificial
  Synthetic oligonucleotide
cactagcaggctattccttaacaacaagtaaacagacacagaaaagcgcaccgcc

SEQ ID NO: 531349 - DNA, 55 bp, Artificial
  Synthetic oligonucleotide
cactgaccagcagccggtgaccaagggcgagatgcggccggtcaagatccccaac

SEQ ID NO: 531350 - DNA, 55 bp, Artificial
  Synthetic oligonucleotide
ccatcgctcgcatttgaaggccggatgcgtctgttgccttggcactgagtagtcc

SEQ ID NO: 531351 - DNA, 55 bp, Artificial
  Synthetic oligonucleotide
ccatcggcaacctgtaagtattcgttacaacttcaccgttttcgtcgcaaccaag

SEQ ID NO: 531352 - DNA, 55 bp, Artificial
  Synthetic oligonucleotide
ccatctggatgtctggcagatatgtgaccgcatgggctttagtaaggctacatac

SEQ ID NO: 531353 - DNA, 55 bp, Artificial
  Synthetic oligonucleotide
cccaccgtgccggagcacaagcgggcgttttggatatcttgcaagcgctaagccc

SEQ ID NO: 531354 - DNA, 55 bp, Artificial
  Synthetic oligonucleotide
cccagacgattccaggccgttacaggggcaaataagacccatacagggctaggtg

SEQ ID NO: 531355 - DNA, 55 bp, Artificial
  Synthetic oligonucleotide
cccataatgaacgctcctgtttagatatacggtttaatgatacagcacgcgcata

SEQ ID NO: 531356 - DNA, 55 bp, Artificial
  Synthetic oligonucleotide
ccccaccagccttccgtgtcaacgtcaggcgtgggcatgtgtcagtcctctcttc

SEQ ID NO: 531357 - DNA, 55 bp, Artificial
  Synthetic oligonucleotide
ccccagaaacctctccgaatgttccagatacaaccatgtttgcacccacttctga

SEQ ID NO: 531358 - DNA, 55 bp, Artificial
  Synthetic oligonucleotide
ccccggtgcctgccggtctccctgctgacttacatcagcctaacacactctggtc

SEQ ID NO: 531359 - DNA, 55 bp, Artificial
  Synthetic oligonucleotide
ccccgtaccgttgttttggggaactattcgtttgaaatccccgaatacgatttgg

SEQ ID NO: 531360 - DNA, 55 bp, Artificial
  Synthetic oligonucleotide
cccctccgtgatctacaggagaccataaactcccgttactagaacctacaagttc

SEQ ID NO: 531361 - DNA, 55 bp, Artificial
  Synthetic oligonucleotide
ccccttctagggcgtctcaggggtatgtctgggtggcagcaggttcggtagatgg

SEQ ID NO: 531362 - DNA, 55 bp, Artificial
  Synthetic oligonucleotide
ccccttctcatcgaatgcacctctaacgcgttttcggatataagtacgacccgta

SEQ ID NO: 531363 - DNA, 55 bp, Artificial
  Synthetic oligonucleotide
cccgccgagcctttgacgcggagactctgcatcggtgtgtacatgcgtctcctac

SEQ ID NO: 531364 - DNA, 55 bp, Artificial
  Synthetic oligonucleotide
cccggcatatctgaatcagttggtggaaagccgcatccaaacgatgatagatgac

SEQ ID NO: 531365 - DNA, 55 bp, Artificial
  Synthetic oligonucleotide
cccgtaaagctggtacgacaaagggtgcgaatcaacaaagcctcggcgtcagggc

SEQ ID NO: 531366 - DNA, 55 bp, Artificial
  Synthetic oligonucleotide
ccctcctgcaccccattcttatctggaacacgaaaggttgttgtcccatccccag

SEQ ID NO: 531367 - DNA, 55 bp, Artificial
  Synthetic oligonucleotide
cccttcatggggagtgacggaaggggttcaaccttgatcacttatcgccatgcga

SEQ ID NO: 531368 - DNA, 55 bp, Artificial
  Synthetic oligonucleotide
ccgaaaggcacgccctgagcacctttaagtagtaacttttcacggtggcgcacgc

SEQ ID NO: 531369 - DNA, 55 bp, Artificial
  Synthetic oligonucleotide
ccgaagcggctgcgtcacagcaggatgagattgcttctcgccaagaccactcgcg

SEQ ID NO: 531370 - DNA, 55 bp, Artificial
  Synthetic oligonucleotide
catggagagagctacgattacgccggagcacactacatgcgaaatgacattcccg

SEQ ID NO: 531371 - DNA, 55 bp, Artificial
  Synthetic oligonucleotide
catgtcgcagcgactttggccgatgccacgcaacgcatacaccctcacgtcaggg

SEQ ID NO: 531372 - DNA, 55 bp, Artificial
  Synthetic oligonucleotide
cattcccgtattcatgtcaacaaagaagtccgcatggagccttccttcagtcgcc

SEQ ID NO: 531373 - DNA, 55 bp, Artificial
  Synthetic oligonucleotide
ccaacggcagcgaaggtaaactcacgcgggtcggcgttatccgtatacacaacga

SEQ ID NO: 531374 - DNA, 55 bp, Artificial
  Synthetic oligonucleotide
ccaagacgctcagcgatcgataggcttctgcgggccttgcatccgtactggttga

SEQ ID NO: 531375 - DNA, 55 bp, Artificial
  Synthetic oligonucleotide
ccaagatccatcagggttaactttacgggcttgctttactaccttgcgacctgcg

SEQ ID NO: 531376 - DNA, 55 bp, Artificial
  Synthetic oligonucleotide
ccaagctagctctagggttatcacggtatgttccatgaatagatacccagtttcg

SEQ ID NO: 531377 - DNA, 55 bp, Artificial
  Synthetic oligonucleotide
ccaatcccacgattggtatgtggatcgggccggactcgggaacaatcttggaaac

SEQ ID NO: 531378 - DNA, 55 bp, Artificial
  Synthetic oligonucleotide
ccacacccaaagccggggatgtatcacggagttttaaccgtagttaaaccggaca

SEQ ID NO: 531379 - DNA, 55 bp, Artificial
  Synthetic oligonucleotide
ccaccatttgatgttgtgacttggtttctattgacaatttctgccctataccctg

SEQ ID NO: 531380 - DNA, 55 bp, Artificial
  Synthetic oligonucleotide
ccaccgggactgatgatgattggcggtggcgcatggtttactcaggcatcggcac

SEQ ID NO: 531381 - DNA, 55 bp, Artificial
  Synthetic oligonucleotide
ccacgttcccgaaagcgaaattaagccatttaagcgattttgttaggcttacctg

SEQ ID NO: 531382 - DNA, 55 bp, Artificial
  Synthetic oligonucleotide
ccactacccgaaagggagaacgcgtaacctggctctatgttaaggccaccgacga

SEQ ID NO: 531383 - DNA, 55 bp, Artificial
  Synthetic oligonucleotide
ccactacttaatacatagtaccttatcgcacacacctgataatgtacggctgcgt

SEQ ID NO: 531384 - DNA, 55 bp, Artificial
  Synthetic oligonucleotide
ccactccgacatacgtgcccaatcgcacgtgttcgtctcgcgtggactcacctgg

SEQ ID NO: 531385 - DNA, 55 bp, Artificial
  Synthetic oligonucleotide
ccacttgctataccactgtcgcctaaatcctgtgaggtgtaatgtgtctgtacga

SEQ ID NO: 531386 - DNA, 55 bp, Artificial
  Synthetic oligonucleotide
ccagcagcgcaccattcggccggctctaatcatccggtgaatagggttgtgattc

SEQ ID NO: 531387 - DNA, 55 bp, Artificial
  Synthetic oligonucleotide
ccagcagtattccaccatgtgtgatagtaccttgtcgggcatgtctcgtacttgg

SEQ ID NO: 531388 - DNA, 55 bp, Artificial
  Synthetic oligonucleotide
ccaggctacggccacttctggctcggatcacgagtcggtacaagcgttctcgggt

SEQ ID NO: 531389 - DNA, 55 bp, Artificial
  Synthetic oligonucleotide
ccagtgtgccaggagatggtaacggcccggtgcaatgtgggtatcgctgctgaaa

SEQ ID NO: 531390 - DNA, 55 bp, Artificial
  Synthetic oligonucleotide
acaagacagacaacccggtcaccaagctcccagcgcgtggaccggtgaagcaacc

SEQ ID NO: 531391 - DNA, 55 bp, Artificial
  Synthetic oligonucleotide
acacacgattggcgtacttaagtggataaggaactcctgtatggccatggaacag

SEQ ID NO: 531392 - DNA, 55 bp, Artificial
  Synthetic oligonucleotide
acacggacccaagggaagagcaagtcacttcggagaacggctcgcagttgtgggc

SEQ ID NO: 531393 - DNA, 55 bp, Artificial
  Synthetic oligonucleotide
acactgtctcgctagtgggagcactgccgggcacgtcagtccaaacggcagggaa

SEQ ID NO: 531394 - DNA, 55 bp, Artificial
  Synthetic oligonucleotide
acaggtaaattgacggatactggagcagattctacggatgcagaagctctgaacg

SEQ ID NO: 531395 - DNA, 55 bp, Artificial
  Synthetic oligonucleotide
acatcaagggaattccggttttccttatcgttacgacttggcagaagctggtaaa

SEQ ID NO: 531396 - DNA, 55 bp, Artificial
  Synthetic oligonucleotide
acccctacgccgagcgttgccgttaatgcagcgatgccaatccctaacgggccga

SEQ ID NO: 531397 - DNA, 55 bp, Artificial
  Synthetic oligonucleotide
acccgcctcacgataagtctggtctagccatttatctaattgagtactagtggtc

SEQ ID NO: 531398 - DNA, 55 bp, Artificial
  Synthetic oligonucleotide
accctgccgttaaagaccgtgtagcatcggtgaataaagcgctggagtctggtag

SEQ ID NO: 531399 - DNA, 55 bp, Artificial; identical to SEQ ID NO: 312647
  Synthetic oligonucleotide

SEQ ID NO: 531400 - DNA, 55 bp, Artificial
  Synthetic oligonucleotide
accgtgccctgacggtcagcccttgtccctgacgcgaggcggggtctgcgactga

SEQ ID NO: 531401 - DNA, 55 bp, Artificial
  Synthetic oligonucleotide
accttcctggtcgcaaagattgtgctcactgtcgttgttggccctcatcgaagtg

SEQ ID NO: 531402 - DNA, 55 bp, Artificial
  Synthetic oligonucleotide
acgaaaacgatattcgttgccatacgtcgaagtttgggcgaaatgttgcggcttg

SEQ ID NO: 531403 - DNA, 55 bp, Artificial
  Synthetic oligonucleotide
acgaccggcgcagcaatgggtagacgtgccagttcatgtactccgcgaggaccag

SEQ ID NO: 531404 - DNA, 55 bp, Artificial
  Synthetic oligonucleotide
acgcgagctgactgtacgcgcgcccaggtgggcgctgtgatcctgagtcgcaagc

SEQ ID NO: 531405 - DNA, 55 bp, Artificial
  Synthetic oligonucleotide
acggcctccgcttgggcaaacctgcgtgcagcctctggggtcgggaacggaaact

SEQ ID NO: 531406 - DNA, 55 bp, Artificial
  Synthetic oligonucleotide
acggtggcgatgaacatggaagctcctgtctgtgcgatgtctagtctagcagatc

SEQ ID NO: 531407 - DNA, 55 bp, Artificial
  Synthetic oligonucleotide
acgtccggacagctacaggcactggcgcgctcactggcaggtaatggcatcacac

SEQ ID NO: 531408 - DNA, 55 bp, Artificial
  Synthetic oligonucleotide
actacaagggacgcccgcatatgtgtagcggctacccgttttacggtcagacccc

SEQ ID NO: 531409 - DNA, 55 bp, Artificial
  Synthetic oligonucleotide
actacggagtgtgattcgtgcaactgcccagctaagggccttgacaggtgtcagc

SEQ ID NO: 531410 - DNA, 55 bp, Artificial
  Synthetic oligonucleotide
aaaacacacttacgcttgaggtctacgatagtctttaaagtctgcaagcatcctg

SEQ ID NO: 531411 - DNA, 55 bp, Artificial
  Synthetic oligonucleotide
aaaccccgcgcgcattcgagtgagatcacggcgggcggaacgttagacctttcgg

SEQ ID NO: 531412 - DNA, 55 bp, Artificial
  Synthetic oligonucleotide
aaaccttagcgacgtagcgaacaaagatacggcgcgggacaatctgtcactaggc

SEQ ID NO: 531413 - DNA, 55 bp, Artificial
  Synthetic oligonucleotide
aaacgccaatactgtgactgtttctgtagcaagtggtacaggcacatctataccg

SEQ ID NO: 531414 - DNA, 55 bp, Artificial
  Synthetic oligonucleotide
aacacgtcctgaacgcccgccgacatccgactacctacgacgcgatttccatccg

SEQ ID NO: 531415 - DNA, 55 bp, Artificial
  Synthetic oligonucleotide
aacatgtccgacgccatccgcctgtccgtccgacaggtcgccgacatgtaccgca

SEQ ID NO: 531416 - DNA, 55 bp, Artificial
  Synthetic oligonucleotide
aacgctctcgcgaagctcagcccacacctggcgggcccatcgcacgtccgtcgat

SEQ ID NO: 531417 - DNA, 55 bp, Artificial
  Synthetic oligonucleotide
aacgttccataatagcgtcggatatttgatgccagccgcctcagctaagtcactc

SEQ ID NO: 531418 - DNA, 55 bp, Artificial
  Synthetic oligonucleotide
aagcgcgatgtggccaccgaatatggcctctcggctgatgctgtagctttcttgt

SEQ ID NO: 531419 - DNA, 55 bp, Artificial
  Synthetic oligonucleotide
aaggaaggttcggacgccgaagccgtgcacacgaccgagcgcgacgcccagtagg

SEQ ID NO: 531420 - DNA, 55 bp, Artificial
  Synthetic oligonucleotide
aagggcgacatgttgaccgtctcccttccgctcgactatgacccgaacgcccagg

SEQ ID NO: 531421 - DNA, 55 bp, Artificial
  Synthetic oligonucleotide
aagggtacggcttttccggttgtgttgatgcctggtgttggttcgggttgggatc

SEQ ID NO: 531422 - DNA, 55 bp, Artificial
  Synthetic oligonucleotide
aagtcgcaccggttcatctgggtgggtaatcgaaaagaccgtcaccatcacaggg

SEQ ID NO: 531423 - DNA, 55 bp, Artificial
  Synthetic oligonucleotide
aagtctattccgaccgttccgctaccggtataacttccgccattcatgaaatagg

SEQ ID NO: 531424 - DNA, 55 bp, Artificial
  Synthetic oligonucleotide
aatcggtctataacgaggaaatggaaataggtgctgtactgttctgcaatgtaca

SEQ ID NO: 531425 - DNA, 55 bp, Artificial
  Synthetic oligonucleotide
aatgtagggagtgggccacccatgcgggcaggtgtgcacagcaccacgccacgta

SEQ ID NO: 531426 - DNA, 55 bp, Artificial
  Synthetic oligonucleotide
aattcatctttcagattggttgcttaacgaccggtgtcaatgtcccaccgtggga

SEQ ID NO: 531427 - DNA, 55 bp, Artificial
  Synthetic oligonucleotide
aatttcctgccacggaatacctgactgatggaaacgaatgttagtctgaatcacg

SEQ ID NO: 531428 - DNA, 55 bp, Artificial
  Synthetic oligonucleotide
agtctctggcttcctcagcgcagtcgcggtactacgagccgtccgactggcagta

SEQ ID NO: 531429 - DNA, 55 bp, Artificial
  Synthetic oligonucleotide
agtgaagcttttcgtttaataaccgaaggtgaacaactaaaccgtctagaggaag

SEQ ID NO: 531430 - DNA, 55 bp, Artificial
  Synthetic oligonucleotide
agtgacaccagaaaccactggcttaccacctcgatacaaggacggtgtaaccagg

SEQ ID NO: 531431 - DNA, 55 bp, Artificial
  Synthetic oligonucleotide
agtggacgttcgtcgacccgagcgccaagtcgttcagcacccagctttggcagga

SEQ ID NO: 531432 - DNA, 55 bp, Artificial
  Synthetic oligonucleotide
agtggcacacgggctgcgactgcaaggtggtgccggtttacgaccgcaagaactg

SEQ ID NO: 531433 - DNA, 55 bp, Artificial
  Synthetic oligonucleotide
agtgggccattcagcagggcatcacggcaaccgccgtcgttaccggatggatcac

SEQ ID NO: 531434 - DNA, 55 bp, Artificial
  Synthetic oligonucleotide
agtgtccacagtcgagactttggcagatggtaccaggtcaacagtcgcagaactg

SEQ ID NO: 531435 - DNA, 55 bp, Artificial
  Synthetic oligonucleotide
ataacggctttgaccttggttttaccaactcacctactctgcatttgaaagcaga

SEQ ID NO: 531436 - DNA, 55 bp, Artificial
  Synthetic oligonucleotide
atagacgcaggagtcgtacttgtccttatgttcggtgggtgtagttggatattag

SEQ ID NO: 531437 - DNA, 55 bp, Artificial
  Synthetic oligonucleotide
atagtaattgagatcaacgaaacaggcgacttgtgtgctagtaactatgggtcgg

SEQ ID NO: 531438 - DNA, 55 bp, Artificial
  Synthetic oligonucleotide
atcaaagaatgacggcttaacgcgcccgaagacataggatgacccatatccagcg

SEQ ID NO: 531439 - DNA, 55 bp, Artificial
  Synthetic oligonucleotide
atcgactcggacatcccggcaattccaaaggctccgcccgctcccatggagttcc

SEQ ID NO: 531440 - DNA, 55 bp, Artificial
  Synthetic oligonucleotide
atcgtcgcagtgagtgtcccctcaccgctccccgagggcaaatatcctcgcaggt

SEQ ID NO: 531441 - DNA, 55 bp, Artificial
  Synthetic oligonucleotide
atgacgctgccatcgggcctaactcgtggctgtctcgggaatcggagtggcgcaa

SEQ ID NO: 531442 - DNA, 55 bp, Artificial
  Synthetic oligonucleotide
atgcagaagcgctcggcatggtagccaacgtgtactgcccgtgcttaagcggccc

SEQ ID NO: 531443 - DNA, 55 bp, Artificial
  Synthetic oligonucleotide
atggcttacgcaactgtcgaggaacttcggctactcgacgggcttgacgacgctg

SEQ ID NO: 531444 - DNA, 55 bp, Artificial
  Synthetic oligonucleotide
atggggccgtggagccgggcgggtggcctcgccttgacggaacgagcgattacac

SEQ ID NO: 531445 - DNA, 55 bp, Artificial
  Synthetic oligonucleotide
atgtagtcggacggtgccagctcccctgcctcgttgagctccctggcgacagact

SEQ ID NO: 531446 - DNA, 55 bp, Artificial
  Synthetic oligonucleotide
attccagacgtcatgctgcccttcccggggcacaaccacgaagccgacgctgaga

SEQ ID NO: 531447 - DNA, 55 bp, Artificial
  Synthetic oligonucleotide
attccggccggcctcgacaccccgtgcctgctctggcccgagaccagcctcgacc

SEQ ID NO: 531448 - DNA, 55 bp, Artificial
  Synthetic oligonucleotide
actcctgggactctcaggggctgaaccggacgacctattggaggtggaagagggg

SEQ ID NO: 531449 - DNA, 55 bp, Artificial
  Synthetic oligonucleotide
actcgcacaagcactctcggaggtgaacgatgagcggagtaccgacacctgcgcc

SEQ ID NO: 531450 - DNA, 55 bp, Artificial
  Synthetic oligonucleotide
actgcgttcgtggactactcgcaaggcagcgtgatcggtggtcgtgtccggaacc

SEQ ID NO: 531451 - DNA, 55 bp, Artificial
  Synthetic oligonucleotide
acttccctaaactattggtagacacttccactgcttacttagcaggtgagcctat

SEQ ID NO: 531452 - DNA, 55 bp, Artificial
  Synthetic oligonucleotide
agaaaactggcgtcgctggtatgcgcggaacccgaaagcagccctcgcgcatgtg

SEQ ID NO: 531453 - DNA, 55 bp, Artificial
  Synthetic oligonucleotide
agaacacgatggagaacctgtgggcgatgctcacgaagaccgtccgcgacgttca

SEQ ID NO: 531454 - DNA, 55 bp, Artificial
  Synthetic oligonucleotide
agactcagctagtaccgtcgttgccaattcggaaacggcatataaacgtgctggt

SEQ ID NO: 531455 - DNA, 55 bp, Artificial
  Synthetic oligonucleotide
agaggacggtcgacggggaatggcatctgcccgatcccaagatgaccctcggatg

SEQ ID NO: 531456 - DNA, 55 bp, Artificial
  Synthetic oligonucleotide
agcatccgaagatggattcaagtgccctatctgtggtaatcatgaccccgaaact

SEQ ID NO: 531457 - DNA, 55 bp, Artificial
  Synthetic oligonucleotide
agccacgcgatgttatccacgctgatcgtgtagaagtgacagtccttactcgcgg

SEQ ID NO: 531458 - DNA, 55 bp, Artificial
  Synthetic oligonucleotide
agccctcggcggcattccggtcatgctccgcgatgttctgttgtggtgaccactc

SEQ ID NO: 531459 - DNA, 55 bp, Artificial
  Synthetic oligonucleotide
agcgacgcgaccaattcgacgtcctggggctccggcctagctgaacagaacatcg

SEQ ID NO: 531460 - DNA, 55 bp, Artificial
  Synthetic oligonucleotide
agcgcgtgtggggcatggcgagtgagcacagcaactcgacgcaccccagcccttt

SEQ ID NO: 531461 - DNA, 55 bp, Artificial
  Synthetic oligonucleotide
agctacctacattcggtgccataagcatgtgcgtctcaacagtcggacgatatcc

SEQ ID NO: 531462 - DNA, 55 bp, Artificial
  Synthetic oligonucleotide
agctctgctacccaaccgaccacccactgtcccgaaggatgggaataatcgcccg

SEQ ID NO: 531463 - DNA, 55 bp, Artificial
  Synthetic oligonucleotide
agcttcggtggtgaatccactaagagctatggcgacattttccgaggctctcgca

SEQ ID NO: 531464 - DNA, 55 bp, Artificial
  Synthetic oligonucleotide
aggcatggaagattggcccagtggtaagcgtccggcactgaaggctgacgcgggt

SEQ ID NO: 531465 - DNA, 55 bp, Artificial
  Synthetic oligonucleotide
agggcagttgaacgcagcccatgcagaacatacaggccttacggcccgcatacgg

SEQ ID NO: 531466 - DNA, 55 bp, Artificial
  Synthetic oligonucleotide
aggtctgttacctaggcgacgcatccgcgctaagttcgttatctcgctatgtcgc

SEQ ID NO: 531467 - DNA, 55 bp, Artificial
  Synthetic oligonucleotide
agtacgcgccagttcggctgcgcattgaggcggtagaacgcgcctacgatgctgt

SEQ ID NO: 531468 - DNA, 55 bp, Artificial
  Synthetic oligonucleotide
agtcgaagaaggaggttatcgagctgttttggcaatcgaaggttactgccggagt

SEQ ID NO: 531469 - DNA, 55 bp, Artificial
  Synthetic oligonucleotide
cgcccacaccttccgttacgatccgcgcaccttgaacaccaatagtagggtcaac

SEQ ID NO: 531470 - DNA, 55 bp, Artificial
  Synthetic oligonucleotide
ctaagttttctgttcaacgaattttggacgtgcaagacgataagggaacagttac

SEQ ID NO: 531471 - DNA, 55 bp, Artificial
  Synthetic oligonucleotide
ctaaaacgactgatttatcagagctgcccaaatatactttatcggtcggtgatgc

SEQ ID NO: 531472 - DNA, 55 bp, Artificial
  Synthetic oligonucleotide
cgccgaagtggggatccgaattgatggaaccaggccgacgttgtttgtgaacaca

SEQ ID NO: 531473 - DNA, 55 bp, Artificial
  Synthetic oligonucleotide
cgcgaccgagggtgtagttcatattttccatgattgattcctcacgaggttgttg

SEQ ID NO: 531474 - DNA, 55 bp, Artificial
  Synthetic oligonucleotide
cgcgcaaaatcgtgggcttgacgctaaagtagtgcatgatacacaggcaatgtgc

SEQ ID NO: 531475 - DNA, 55 bp, Artificial
  Synthetic oligonucleotide
cgcgcgcgttcggcgtgttccacacttcgtactatctcgaactgatgggattgcg

SEQ ID NO: 531476 - DNA, 55 bp, Artificial
  Synthetic oligonucleotide
cgcgctttgcgtagcgtctatagtgtgtagaacggatagcataattttagaggcg

SEQ ID NO: 531477 - DNA, 55 bp, Artificial
  Synthetic oligonucleotide
cgcgtagagccagttcggttcgcatgcgatcgtctcgggcggtgtgcttactacc

SEQ ID NO: 531478 - DNA, 55 bp, Artificial
  Synthetic oligonucleotide
cgctatgcatgctatgggctcggctgtgtctagcggtgttcatagtgtgctgggg

SEQ ID NO: 531479 - DNA, 55 bp, Artificial
  Synthetic oligonucleotide
cgctcgcgaataccttacccgtcgcgttgccggtgttatcctggtgggcgtatcg

SEQ ID NO: 531480 - DNA, 55 bp, Artificial
  Synthetic oligonucleotide
cgctgatcagggtatcctactcggtaagtgaagaggtgattgactgatgcacgag

SEQ ID NO: 531481 - DNA, 55 bp, Artificial
  Synthetic oligonucleotide
cgctggtacgtgctgaacgcacaccggcaccccacgacctacgacgcaatctcaa

SEQ ID NO: 531482 - DNA, 55 bp, Artificial
  Synthetic oligonucleotide
cgcttgacgaattccgacgcaaggttaaacaaattctttcccggcgatacggtgt

SEQ ID NO: 531483 - DNA, 55 bp, Artificial
  Synthetic oligonucleotide
cgcttttcacccaggaggtgtcaagtgggcgaaagaggccctatcggcaagcgat

SEQ ID NO: 531484 - DNA, 55 bp, Artificial
  Synthetic oligonucleotide
cgtttgcgtctgcccactccttaatggcgagccagctgatagggccttcggtgtt

SEQ ID NO: 531485 - DNA, 55 bp, Artificial
  Synthetic oligonucleotide
cggacttccactctaacatcgcacacatggtatttaagctccaatgcgaaccccg

SEQ ID NO: 531486 - DNA, 55 bp, Artificial
  Synthetic oligonucleotide
cgacatggccaaaggtaaaacattagttgataacttgccagcgtctaatgagtta

SEQ ID NO: 531487 - DNA, 55 bp, Artificial
  Synthetic oligonucleotide
ctatattttgtgcgcctggctcaatatacacatttaagtacaaagacccactcgc

SEQ ID NO: 531488 - DNA, 55 bp, Artificial
  Synthetic oligonucleotide
cgacggaggcactaagcctcggcacacagtcccgcttgagggttagctgtggtct

SEQ ID NO: 531489 - DNA, 55 bp, Artificial
  Synthetic oligonucleotide
cgacggtaacggttcagctgaaacggacgtaacaggatacaagttatcttatgcg

SEQ ID NO: 531490 - DNA, 55 bp, Artificial
  Synthetic oligonucleotide
cgacggtcgttttgacccgccgcaagattcttacttggtttcgaagattggcccg

SEQ ID NO: 531491 - DNA, 55 bp, Artificial
  Synthetic oligonucleotide
cgacttttgaccatgctcctcggacggtgtcaacacttcttcaacggcggtgatc

SEQ ID NO: 531492 - DNA, 55 bp, Artificial
  Synthetic oligonucleotide
cgagcatgcttatctaatctagggcgtgaaggaaataacaaccgtgtgccttcgc

SEQ ID NO: 531493 - DNA, 55 bp, Artificial
  Synthetic oligonucleotide
cgagcattggccttcaatcattcagaaagacgtagaagaacttaaatccgacacg

SEQ ID NO: 531494 - DNA, 55 bp, Artificial
  Synthetic oligonucleotide
cgatcacaggcgctaaggctggtaagagtgcgggagctttagggctagtgggtgg

SEQ ID NO: 531495 - DNA, 55 bp, Artificial
  Synthetic oligonucleotide
ctagggccgcctgacaggccggcttgttgttgtccgggtgttctgcaaggttgca

SEQ ID NO: 531496 - DNA, 55 bp, Artificial
  Synthetic oligonucleotide
cgatgacggaccgactcacgttgtagaccttgctcagggtgaggaactacctaac

SEQ ID NO: 531497 - DNA, 55 bp, Artificial
  Synthetic oligonucleotide
cgatgccatccaaaggccctattcctgcagctcgctatctgtatggtgccgtgag

SEQ ID NO: 531498 - DNA, 55 bp, Artificial
  Synthetic oligonucleotide
ctaccaacgtagaagtgcatgtactcctaaataacgaagaattgtggttagctag

SEQ ID NO: 531499 - DNA, 55 bp, Artificial
  Synthetic oligonucleotide
cgcaacttcatgttggcctacacaccgaaggccgactggcagccctacacgggct

SEQ ID NO: 531500 - DNA, 55 bp, Artificial
  Synthetic oligonucleotide
cgcaagcgtctaggacataccgtggtacgactgaggaattcatgggaactgttcg

SEQ ID NO: 531501 - DNA, 55 bp, Artificial
  Synthetic oligonucleotide
cgccactctgcatagcggactcaagcgaaatatatcgttcaaactccgcacctgt

SEQ ID NO: 531502 - DNA, 55 bp, Artificial
  Synthetic oligonucleotide
ctacaccacggcgttgtgcgatgtcaaaccccaatctgtttgccctggtcacagg

SEQ ID NO: 531503 - DNA, 55 bp, Artificial
  Synthetic oligonucleotide
cggggccgttcttcgcgctccgatgtggtcctttagatccactgacgtgggtcag

SEQ ID NO: 531504 - DNA, 55 bp, Artificial
  Synthetic oligonucleotide
cgtcaattcttcggccaagataatttcggcgatgttcgaaatgctgtcaatcccc

SEQ ID NO: 531505 - DNA, 55 bp, Artificial
  Synthetic oligonucleotide
cgtattgcgtagagcgattgaagacgaaggagtgaataacagggaccggagcgcc

SEQ ID NO: 531506 - DNA, 55 bp, Artificial
  Synthetic oligonucleotide
cgggtcgatctggtttactaacaacgtgccatacgcgcagcgacttgagtatggc

SEQ ID NO: 531507 - DNA, 55 bp, Artificial
  Synthetic oligonucleotide
cgggtgctatggtgattgccttggcgaattccttaaaacctacggagtgtatcag

SEQ ID NO: 531508 - DNA, 55 bp, Artificial
  Synthetic oligonucleotide
cgtatcacattccagtagagttgcgtggcttcaccgtcggtgagtggtttccact

SEQ ID NO: 531509 - DNA, 55 bp, Artificial
  Synthetic oligonucleotide
cggttcggatgtatgttccaaaagcgaacgagatgcgcatgtggctggtatcttg

SEQ ID NO: 531510 - DNA, 55 bp, Artificial
  Synthetic oligonucleotide
cggttcaccttaacgatgacgtattccagaagatacaagctaaccaggaagagca

SEQ ID NO: 531511 - DNA, 55 bp, Artificial
  Synthetic oligonucleotide
cggttcacccacccacttctttccgtcccagtacctcggctggtttgtacctgcg

SEQ ID NO: 531512 - DNA, 55 bp, Artificial
  Synthetic oligonucleotide
cggtatctcatgcccctcctctctgtacgatgtcaagtttctggcacatggtcgg

SEQ ID NO: 531513 - DNA, 55 bp, Artificial
  Synthetic oligonucleotide
cggtcgcctttatcgtagatttcctcaatgactttcaggatgtgaccttcagccc

SEQ ID NO: 531514 - DNA, 55 bp, Artificial
  Synthetic oligonucleotide
cggtctgatcagggatgcgtcggaagttcttggcaggcatagctactcctcacag

SEQ ID NO: 531515 - DNA, 55 bp, Artificial
  Synthetic oligonucleotide
cggtgagacgcatccgctcatcacggagatgtacgactccatcaagacatccgca

SEQ ID NO: 531516 - DNA, 55 bp, Artificial
  Synthetic oligonucleotide
cggtgtatgtcaagcgcgactcagtagtcagcgccgtagagcgatccccatgacc

SEQ ID NO: 531517 - DNA, 55 bp, Artificial
  Synthetic oligonucleotide
cggtgagttgtcactgtgggaagacgtggttgtcggcgctgcagcacgtatcagt

SEQ ID NO: 531518 - DNA, 55 bp, Artificial
  Synthetic oligonucleotide
cggtgctaggaggtgcgaaatgaagacatatagagttatccctcatagcggcatt

SEQ ID NO: 531519 - DNA, 55 bp, Artificial
  Synthetic oligonucleotide
cggagcatgaccatctccgataccgtgggaatcaacgggcgatccgcacatgcaa

SEQ ID NO: 531520 - DNA, 55 bp, Artificial
  Synthetic oligonucleotide
cggagtggtaaaagcctacgcaggattagaacaggcccttggtggcgttgagacc

SEQ ID NO: 531521 - DNA, 55 bp, Artificial
  Synthetic oligonucleotide
cggatcctgcaaattactgcctttcctcttgtgtgattccagctatctcgttggg

SEQ ID NO: 531522 - DNA, 55 bp, Artificial
  Synthetic oligonucleotide
cggccgcttctcgagaggagtaccaacagctagccgctgctgcggctgaaatggt

SEQ ID NO: 531523 - DNA, 55 bp, Artificial
  Synthetic oligonucleotide
cgtttctagatagcatagcgggaatgctgtcactagtcgtagtacctgatccgct

SEQ ID NO: 531524 - DNA, 55 bp, Artificial
  Synthetic oligonucleotide
cggcggttaatgcacctaacgctaaggctacgcgtaataacgtcgctaacaaacc

SEQ ID NO: 531525 - DNA, 55 bp, Artificial
  Synthetic oligonucleotide
cggcgttctgatcaagacctgggaggtccactgccgggcctgccaggaaccctat

SEQ ID NO: 531526 - DNA, 55 bp, Artificial
  Synthetic oligonucleotide
cggcgtttgatctagatcgcagaggatataaacgccaacttcattggtgagcgtg

SEQ ID NO: 531527 - DNA, 55 bp, Artificial
  Synthetic oligonucleotide
cgttgctgaaaacccaaaagtcgacccaggaacgtatcgaccagctattagcgcg

SEQ ID NO: 531528 - DNA, 55 bp, Artificial
  Synthetic oligonucleotide
cgttgcgtgcggtttcagtgttacggtattcgcgggacgaactaacgtcaccacg

SEQ ID NO: 531529 - DNA, 55 bp, Artificial
  Synthetic oligonucleotide
cgttgatacgggaagggccacatgaggattcgcaacaagagcaacggtggcgtct

SEQ ID NO: 531530 - DNA, 55 bp, Artificial
  Synthetic oligonucleotide
cggctatggcagccaaattcgtgcaagattttcgccggttgaacggtgtcgatcc

SEQ ID NO: 531531 - DNA, 55 bp, Artificial
  Synthetic oligonucleotide
cgggcattcactgagccaactaccgtggtccgcctaagtggggcatggccgattg

SEQ ID NO: 531532 - DNA, 55 bp, Artificial
  Synthetic oligonucleotide
cgttcgcaattttccgatagcatcccgtcgtattcatgggacattcgcggcgcgg

SEQ ID NO: 531533 - DNA, 55 bp, Artificial
  Synthetic oligonucleotide
cgttagcgtgcaggtttccagtcagtcgggcggtggtcagagcgcaatcgggtca

SEQ ID NO: 531534 - DNA, 55 bp, Artificial
  Synthetic oligonucleotide
cgtggcgacagcctccgcgatgatcaggaagtactcgtcccagtccggtcgatga

SEQ ID NO: 531535 - DNA, 55 bp, Artificial
  Synthetic oligonucleotide
cgtgaatctcggtaccaacttctggcgctcgtacgctggtcggcatgagtagccg

SEQ ID NO: 531536 - DNA, 55 bp, Artificial
  Synthetic oligonucleotide
cgtcccatttcaccgatacgtcaatcggcttgatcggatggatagcgaccacagc

SEQ ID NO: 531537 - DNA, 55 bp, Artificial
  Synthetic oligonucleotide
ctcgagcccctggagttacttttcccgccagtaacccgtactacagggtgaaggg

SEQ ID NO: 531538 - DNA, 55 bp, Artificial
  Synthetic oligonucleotide
ccgctgtggagttgtgaagctgcgatgttccggtcgtgctgtggaacgtctacga

SEQ ID NO: 531539 - DNA, 55 bp, Artificial
  Synthetic oligonucleotide
ccgcttgacacgaagaacggtcggcgtaaaatcaacccgtcgcaacaacgcgaca

SEQ ID NO: 531540 - DNA, 55 bp, Artificial
  Synthetic oligonucleotide
ccggagcaatgtcgtagaactccgggagcgtggtgatcccgtggccggcaaagtc

SEQ ID NO: 531541 - DNA, 55 bp, Artificial
  Synthetic oligonucleotide
ccggcataggcctgaaagaggacgtgcatcccgtgccgggaaacgaccttgccat

SEQ ID NO: 531542 - DNA, 55 bp, Artificial
  Synthetic oligonucleotide
ccggcccgtttacgcaaactatacggtcgaatacgtcttctaatctgttgtggcc

SEQ ID NO: 531543 - DNA, 55 bp, Artificial
  Synthetic oligonucleotide
ctcctttcctcagtgcgtgttttgccaaaatcctaggagcttaatgccatggcac

SEQ ID NO: 531544 - DNA, 55 bp, Artificial
  Synthetic oligonucleotide
ccggcctccggataacatagacctgcttgtcctgtgggtctgtcttagaggtgtc

SEQ ID NO: 531545 - DNA, 55 bp, Artificial
  Synthetic oligonucleotide
ccggctccctaccaaattccgacacagctcttgctacctatgccgggtatggccg

SEQ ID NO: 531546 - DNA, 55 bp, Artificial
  Synthetic oligonucleotide
ccggctctcgatctgggaaccaacttaccggaccgactgtctagcgtcaagtccc

SEQ ID NO: 531547 - DNA, 55 bp, Artificial
  Synthetic oligonucleotide
ccgggcaacgttcagtgggaattggcatccaatccgggtcagaagttctactggt

SEQ ID NO: 531548 - DNA, 55 bp, Artificial
  Synthetic oligonucleotide
ccggtaacagacacatcaatttatgctctgacctgcgggtatgccactggggaca

SEQ ID NO: 531549 - DNA, 55 bp, Artificial
  Synthetic oligonucleotide
ctccgggttgctcctccacatcagggacagccagccctgggacaggcccgccagg

SEQ ID NO: 531550 - DNA, 55 bp, Artificial
  Synthetic oligonucleotide
ccggtctagcggatcgggtattatcttttcatcgacacgatacagaggaaacgaa

SEQ ID NO: 531551 - DNA, 55 bp, Artificial
  Synthetic oligonucleotide
ccggtggtgataactggcaaccatacaccaggctgatacctgcgagcgaagtcag

SEQ ID NO: 531552 - DNA, 55 bp, Artificial
  Synthetic oligonucleotide
ccgtcccactgaagcccagcaccttgaacaatgcattgaccttctcgcgtggcgc

SEQ ID NO: 531553 - DNA, 55 bp, Artificial
  Synthetic oligonucleotide
ccgtgggccagtcaatgagattactgaaattcgtgtaggcgaccgaaccgcatgg

SEQ ID NO: 531554 - DNA, 55 bp, Artificial
  Synthetic oligonucleotide
ccgttcctgtacctgttaacgctggactggtaaacggaactactatacaggcggg

SEQ ID NO: 531555 - DNA, 55 bp, Artificial
  Synthetic oligonucleotide
ctgaaaggggtatacgccatcagggaaggctatcagcacatcagcgtctagcgtg

SEQ ID NO: 531556 - DNA, 55 bp, Artificial
  Synthetic oligonucleotide
ccgaatagtgtccaatgtacctctgaccattatcagacgtggtcagacctgtgcc

SEQ ID NO: 531557 - DNA, 55 bp, Artificial
  Synthetic oligonucleotide
ccgaatatttccgcagacgttgataattacgaacctgcgaattatgcgccgcttc

SEQ ID NO: 531558 - DNA, 55 bp, Artificial
  Synthetic oligonucleotide
ccgacaaacccgccgacctttcgaagatgaatcccgcagaacttgcggcccatct

SEQ ID NO: 531559 - DNA, 55 bp, Artificial
  Synthetic oligonucleotide
ccgacatagcgaagctcacgaccgccgtgctgtccggacgcatgacatcgtcttc

SEQ ID NO: 531560 - DNA, 55 bp, Artificial
  Synthetic oligonucleotide
ctctagcaccgtctctaagtcttcgtaggctaggtcagggtctccggttagagtc

SEQ ID NO: 531561 - DNA, 55 bp, Artificial
  Synthetic oligonucleotide
ccgatagctcaccttgccgcgcttctctgcatcgttcgctgtacaggtcggccag

SEQ ID NO: 531562 - DNA, 55 bp, Artificial
  Synthetic oligonucleotide
ccgatcggctgatatctgccccagagcttggtacggaataacttatcggtcggga

SEQ ID NO: 531563 - DNA, 55 bp, Artificial
  Synthetic oligonucleotide
ccgatttatattttctcgaaaatctcctataaggcgtcccgacagctgttccgac

SEQ ID NO: 531564 - DNA, 55 bp, Artificial
  Synthetic oligonucleotide
ccgcaacacttccaatcaagtctcacgtccgatgcgtggcggtccggtttactgc

SEQ ID NO: 531565 - DNA, 55 bp, Artificial
  Synthetic oligonucleotide
ccgcattcaatccctgcaactttgaatgactcatcggttttcaggaaaattgcgc

SEQ ID NO: 531566 - DNA, 55 bp, Artificial
  Synthetic oligonucleotide
ccgccccaataaagcatggccctcccttatatcttgcaatgcccctccccatgcc

SEQ ID NO: 531567 - DNA, 55 bp, Artificial
  Synthetic oligonucleotide
ctctactaccaaaacggcttaaaaggtgttcaagttgctagtgacaagacccaac

SEQ ID NO: 531568 - DNA, 55 bp, Artificial
  Synthetic oligonucleotide
ccgccccagaatccgcaatacttgacatactagatgcagaggatgcctgagcaag

SEQ ID NO: 531569 - DNA, 55 bp, Artificial
  Synthetic oligonucleotide
ctcgcgagtgtagcggcggattttgtaggtcttaggggtaggcttacagaatcgg

SEQ ID NO: 531570 - DNA, 55 bp, Artificial
  Synthetic oligonucleotide
ccgccgcgatttcttggttgccgcacgtcccgatgatggttatttgacgttcgtt

SEQ ID NO: 531571 - DNA, 55 bp, Artificial
  Synthetic oligonucleotide
ccgcgtgcttgcgggctagcttgattcggtctttgagtgcgctcatccggggcaa

SEQ ID NO: 531572 - DNA, 55 bp, Artificial
  Synthetic oligonucleotide
ctcgcactttaacggcatcgagcttccgccgaccctcagtcctctggcagcgaac

SEQ ID NO: 531573 - DNA, 55 bp, Artificial
  Synthetic oligonucleotide
cctgtgcatctcttagggagatataaaagccatgtaaagatctaatataaccgag

SEQ ID NO: 531574 - DNA, 55 bp, Artificial
  Synthetic oligonucleotide
cctgagcaagattcagatgccgtcgttcggctcaggcatcaacccgatgggctgg

SEQ ID NO: 531575 - DNA, 55 bp, Artificial
  Synthetic oligonucleotide
ccttaatcttcgtcattacaccggcctgagattcgaatggcttaacctttcttgc

SEQ ID NO: 531576 - DNA, 55 bp, Artificial
  Synthetic oligonucleotide
cctgacgcattcgttttcacttcctgaagcgataaccaccgtaacactagaggcg

SEQ ID NO: 531577 - DNA, 55 bp, Artificial
  Synthetic oligonucleotide
ccttatcgacgccggctttaagctagaaggtgcaacgcaagggaaagcgtgacgc

SEQ ID NO: 531578 - DNA, 55 bp, Artificial
  Synthetic oligonucleotide
cctgaccggattgattggaagtaaaccagatgtcactgcgcaggttggagcggct

SEQ ID NO: 531579 - DNA, 55 bp, Artificial
  Synthetic oligonucleotide
cctctgctcaggcgatgggagatacgcagaaagcatcagagcttgccatgcgcgc

SEQ ID NO: 531580 - DNA, 55 bp, Artificial
  Synthetic oligonucleotide
cctcctgaagaacgcgacttcccagctactcgcatcgcggtatccacgacgatcg

SEQ ID NO: 531581 - DNA, 55 bp, Artificial
  Synthetic oligonucleotide
cctccatagccgctcaactcgctaaaaccgttcatacgcaccgcgaactgacgcg

SEQ ID NO: 531582 - DNA, 55 bp, Artificial
  Synthetic oligonucleotide
ccttcatggaagcatgacaacagcagcacattgcatagcggtgatgatcgttaca

SEQ ID NO: 531583 - DNA, 55 bp, Artificial
  Synthetic oligonucleotide
ctccaaccgggtccttgaatgtacggtccgcatgatggagattcaaccatgacgt

SEQ ID NO: 531584 - DNA, 55 bp, Artificial
  Synthetic oligonucleotide
cgacagcgcctcgaccaagtccttacggtaaataaccatatcggactgcatagtg

SEQ ID NO: 531585 - DNA, 55 bp, Artificial
  Synthetic oligonucleotide
ccgttggctcgctggcagatgtagcaccgaccaccttggaactcgtagatctgcc

SEQ ID NO: 531586 - DNA, 55 bp, Artificial
  Synthetic oligonucleotide
cctcaccagttactatcacccgtttcttaatctcaaacaatcccatgttcatgta

SEQ ID NO: 531587 - DNA, 55 bp, Artificial
  Synthetic oligonucleotide
cgacactgagcgaatgctcacaactcaaaggattctaatatgtctttaacagtgt

SEQ ID NO: 531588 - DNA, 55 bp, Artificial
  Synthetic oligonucleotide
cgaagtgtcagacctagatttgccgttctaaagctatggtagggatggtagatta

SEQ ID NO: 531589 - DNA, 55 bp, Artificial
  Synthetic oligonucleotide
ctattgctgatctgcggtctggcaatcagcggctgcgcctccaagtctcctcttg

SEQ ID NO: 531590 - DNA, 55 bp, Artificial
  Synthetic oligonucleotide
cgaaggcacagattgaagcactcttcgagcgtggccgcgcgatgctgtaaagccc

SEQ ID NO: 531591 - DNA, 55 bp, Artificial
  Synthetic oligonucleotide
cgaaagcgcctgagtttgcaagaaacgaaatcaacgggttaactaatggcgagcc

SEQ ID NO: 531592 - DNA, 55 bp, Artificial
  Synthetic oligonucleotide
ccttgcgtactgcttcactcttggttactcctaatacttcactgattgtttcaag

SEQ ID NO: 531593 - DNA, 54 bp, Artificial
  Synthetic oligonucleotide
ttccagcggcgagagtcttccatttcgcatcgtacccgaggtcggccaagtctc

SEQ ID NO: 531594 - DNA, 54 bp, Artificial
  Synthetic oligonucleotide
tgagtctcgcgaccgatatcctgaaacacgccggaattaacctcgcaccgcctt

SEQ ID NO: 531595 - DNA, 54 bp, Artificial
  Synthetic oligonucleotide
tacagaacgccccggagttgacccttggttcggagctgtactacatcggatttt

SEQ ID NO: 531596 - DNA, 54 bp, Artificial
  Synthetic oligonucleotide
tccgtgtcgaccgttcggttgacgcgaagttcagcactgaccagatcgtttacc

SEQ ID NO: 531597 - DNA, 54 bp, Artificial
  Synthetic oligonucleotide
cccagattggccgcagagcgaataaacggctccgtcaggggtacggtccacccc

SEQ ID NO: 531598 - DNA, 54 bp, Artificial
  Synthetic oligonucleotide
aagtgatgttcccaagtaccctcgacatcaaaccaacgccacatataatgctcg

SEQ ID NO: 531599 - DNA, 54 bp, Artificial
  Synthetic oligonucleotide
ggaaacactgatatcatccctagaattcaggctgaattttctcgccgtggcgac

SEQ ID NO: 531600 - DNA, 54 bp, Artificial
  Synthetic oligonucleotide
ttcactcacctgccgtgctgccttgctgagctcgactctacacgagttgggccc

SEQ ID NO: 531601 - DNA, 54 bp, Artificial
  Synthetic oligonucleotide
tacgggtctgtcgggcccgcacacacgcacccttcaggcttcgtccactcgaac

SEQ ID NO: 531602 - DNA, 54 bp, Artificial
  Synthetic oligonucleotide
tcgtatgctgtgagattggtaaccgtatactttgtgtaaaagataccgttcagc

SEQ ID NO: 531603 - DNA, 54 bp, Artificial
  Synthetic oligonucleotide
aaagaggtcgttgtgggcgcggtatctgggtcagctatgcgtgaggactctaat

SEQ ID NO: 531604 - DNA, 54 bp, Artificial
  Synthetic oligonucleotide
ctgatcagatcagctttggcaacacttgaacgccaactatttcggctcgatgaa

SEQ ID NO: 531605 - DNA, 54 bp, Artificial
  Synthetic oligonucleotide
gactcccgtaaggagcacaccccatgcccgtgaccctcgccgaggcgtccaaca

SEQ ID NO: 531606 - DNA, 54 bp, Artificial
  Synthetic oligonucleotide
acaccatcgtgtccttgggcgaacagatcaccggagaaccgctatgagccgcaa

SEQ ID NO: 531607 - DNA, 54 bp, Artificial
  Synthetic oligonucleotide
cttcgtactcgcagccaagcgtcagaccatagtcctcacatgaacgtccactgc

SEQ ID NO: 531608 - DNA, 54 bp, Artificial
  Synthetic oligonucleotide
cgctccgcatcctgctctgttaaggttcgggaacccaccacacaagccctgtga

SEQ ID NO: 531609 - DNA, 54 bp, Artificial
  Synthetic oligonucleotide
gtgcattacgtcctcacgtcctgtcggaactgcgccgtcgtgtatgcgggttgt

SEQ ID NO: 531610 - DNA, 54 bp, Artificial
  Synthetic oligonucleotide
ttcggtgtaccgctgttttgagtgcagtgtagaggatattggttgtggtatcga

SEQ ID NO: 531611 - DNA, 54 bp, Artificial
  Synthetic oligonucleotide
caaccatgcctagtggacagccagcatcgaagctggggaccagtgatgtcggtc

SEQ ID NO: 531612 - DNA, 54 bp, Artificial
  Synthetic oligonucleotide
gtcatgtactacagggtgagagggtaaaactcctagaccctcccctgagagagg

SEQ ID NO: 531613 - DNA, 54 bp, Artificial
  Synthetic oligonucleotide
cttctagacctcctggggcagttagacgaggtaacactgtaactattaggggag

SEQ ID NO: 531614 - DNA, 54 bp, Artificial
  Synthetic oligonucleotide
gatcgcatcccatcataggtggtgccccaggtgtgcatgatgtaggtggggtct

SEQ ID NO: 531615 - DNA, 54 bp, Artificial
  Synthetic oligonucleotide
gatccggtattcgaagacgttattttcccggaagcactgattatcaccgacttc

SEQ ID NO: 531616 - DNA, 54 bp, Artificial
  Synthetic oligonucleotide
gtcacagcaaaacttcacaaatctacagggacaggcttcaccagtcgctgcggt

SEQ ID NO: 531617 - DNA, 54 bp, Artificial
  Synthetic oligonucleotide
tgtctatctgagaggtgtcaaggttggggataccattcgagtggttcgacatga

SEQ ID NO: 531618 - DNA, 54 bp, Artificial
  Synthetic oligonucleotide
aggtgaataataatttcgccgatgcacagtcacagattaatgcactgggcacaa

SEQ ID NO: 531619 - DNA, 54 bp, Artificial
  Synthetic oligonucleotide
gtataccttttccatcgtgacacctcataaagttggtttatcgccgggactttt

SEQ ID NO: 531620 - DNA, 54 bp, Artificial
  Synthetic oligonucleotide
ccggagtcactggaggtgatgtgcgaatgagccgcgcccggatccagtggaacg

SEQ ID NO: 531621 - DNA, 54 bp, Artificial
  Synthetic oligonucleotide
gagcctacggggcaaacgcggtccacttcagctacctccatgagtacgtcgccc

SEQ ID NO: 531622 - DNA, 54 bp, Artificial
  Synthetic oligonucleotide
gtcaaggctccgactcctggttcctcgagaccatgcggaagggccacgagccgc

SEQ ID NO: 531623 - DNA, 53 bp, Artificial
  Synthetic oligonucleotide
tgcgttgagtgcaggcgggtgatggacaccgagatacgtcgggtcgacgtacc

SEQ ID NO: 531624 - DNA, 53 bp, Artificial
  Synthetic oligonucleotide
cttctcgccaagaccactcgcgtagtactcccgaagctgcatctcaagcgagc

SEQ ID NO: 531625 - DNA, 53 bp, Artificial
  Synthetic oligonucleotide
aacggatagttgtgccattgcggcctattgtacgtatagctgttgtgatttgg

SEQ ID NO: 531626 - DNA, 53 bp, Artificial
  Synthetic oligonucleotide
accatcggttccccgattcccttggggcctagtgcgaatactcgcttgtccat

SEQ ID NO: 531627 - DNA, 53 bp, Artificial
  Synthetic oligonucleotide
aagcctggcgaacaggataacggggcctttcgcaggccccttgacatttaccg

SEQ ID NO: 531628 - DNA, 53 bp, Artificial
  Synthetic oligonucleotide
aaacaattgtccggggttatgccggctgagggtcagcgttctggtagtctttt

SEQ ID NO: 531629 - DNA, 53 bp, Artificial
  Synthetic oligonucleotide
tgcacgtcacgtcgagcttctgcgaagcggtgtctgctgtgatcgcacaccga

SEQ ID NO: 531630 - DNA, 53 bp, Artificial
  Synthetic oligonucleotide
tgttctcggaggatcacccgctctccccacgttgggtgctgctgcacatcaag

SEQ ID NO: 531631 - DNA, 53 bp, Artificial
  Synthetic oligonucleotide
tgcaccctcgatcttggccaactcggcttccgtgcgggtgcgctcctcgacca

SEQ ID NO: 531632 - DNA, 53 bp, Artificial
  Synthetic oligonucleotide
tgtcacagtgacgaaactaccgggtagctctgagtagctcgaggacatcctct

SEQ ID NO: 531633 - DNA, 53 bp, Artificial; identical to SEQ ID NO: 486019
  Synthetic oligonucleotide

SEQ ID NO: 531634 - DNA, 53 bp, Artificial
  Synthetic oligonucleotide
ttttgtgccagtccatgacgaggccgtaacaatccgtaattccgagaacaaat

SEQ ID NO: 531635 - DNA, 53 bp, Artificial
  Synthetic oligonucleotide
aattacttatcaaagcgttcgtccgctcgtagcttcatccgaaaccacgctac

SEQ ID NO: 531636 - DNA, 53 bp, Artificial
  Synthetic oligonucleotide
acttgtagaccgagtggttgtacggctcagccatattggcggtggctcgtttc

SEQ ID NO: 531637 - DNA, 53 bp, Artificial
  Synthetic oligonucleotide
gtctttcggtccctcgaaacctcgaggggttcgaacggccactcgttcgatga

SEQ ID NO: 531638 - DNA, 53 bp, Artificial
  Synthetic oligonucleotide
gatgaataacgaacttccttggatagccgaagcccgaaagtatatcggccttc

SEQ ID NO: 531639 - DNA, 53 bp, Artificial
  Synthetic oligonucleotide
gcgtacacctcgcagacgtggcccggcggcgcgaactcttgccggacccgact

SEQ ID NO: 531640 - DNA, 53 bp, Artificial
  Synthetic oligonucleotide
gagtttcgcgtagccgtcggacaccttgaagagcgcgcgtctgcggacgggcg

SEQ ID NO: 531641 - DNA, 53 bp, Artificial
  Synthetic oligonucleotide
ggcgcgtgcatgggcgcgccatattggcaaaccggaaggggaaattcgatgct

SEQ ID NO: 531642 - DNA, 53 bp, Artificial
  Synthetic oligonucleotide
gttggagagagagcatcggaaccttatctatctgttacggtttgggcggagag

SEQ ID NO: 531643 - DNA, 53 bp, Artificial
  Synthetic oligonucleotide
ccgctacaagatccccggagccgtcggctacgtccgccagtaccgcggtaccg

SEQ ID NO: 531644 - DNA, 53 bp, Artificial
  Synthetic oligonucleotide
gagaccagggtcctcgagccgatcgccggtacctgcgacctctacgacaaaga

SEQ ID NO: 531645 - DNA, 53 bp, Artificial
  Synthetic oligonucleotide
aggttaaggttagacttgaccatctggactacaaagagaatgtaccaggtcgt

SEQ ID NO: 531646 - DNA, 53 bp, Artificial
  Synthetic oligonucleotide
ggcatgacctactacgagtacgcaatcaagcaccttcgagacaccgccgaggc

SEQ ID NO: 531647 - DNA, 53 bp, Artificial
  Synthetic oligonucleotide
tacaagcacctgggttgtgtggccactgagtggagtcttacggctgaggttga

SEQ ID NO: 531648 - DNA, 53 bp, Artificial
  Synthetic oligonucleotide
ccgcatcagtccccgaaccagggtgtgctgcagaagtggcttggcactggcgc

SEQ ID NO: 531649 - DNA, 53 bp, Artificial
  Synthetic oligonucleotide
ccgcagatcataggttgggaggaaccgcgcctacgtcgcgcgtgaggtacccc

SEQ ID NO: 531650 - DNA, 53 bp, Artificial
  Synthetic oligonucleotide
tccagaaactgtgataagagcgacaaggacagcactatctttcaaccaaggtg

SEQ ID NO: 531651 - DNA, 53 bp, Artificial
  Synthetic oligonucleotide
tccatcaatagcacctcatggagagcaggcaagactacctctgcctcccgtgg

SEQ ID NO: 531652 - DNA, 53 bp, Artificial
  Synthetic oligonucleotide
tactgcgtgtcgtggccgtccattcaccccgaggggcggatgtacgagtggcg

SEQ ID NO: 531653 - DNA, 52 bp, Artificial; identical to SEQ ID NO: 458545
  Synthetic oligonucleotide

SEQ ID NO: 531654 - DNA, 52 bp, Artificial
  Synthetic oligonucleotide
atccctacgaacgcgagccatcccatcgtcagggccatgcttgcggctcctg

SEQ ID NO: 531655 - DNA, 52 bp, Artificial
  Synthetic oligonucleotide
ggctgcaggcggggaaggtaccgccattctactgttagacctgtggtactac

SEQ ID NO: 531656 - DNA, 52 bp, Artificial
  Synthetic oligonucleotide
ggaagcgcccgctgacgacgctcattggcgcgtccccatggcggacgtccgc

SEQ ID NO: 531657 - DNA, 52 bp, Artificial
  Synthetic oligonucleotide
gatgcagcacgtggaaaccttcctggaccccggaagcggtctggaaatggag

SEQ ID NO: 531658 - DNA, 52 bp, Artificial
  Synthetic oligonucleotide
agaatcaaaacgaacatagataccacctgccgcactataccgtagtcccata

SEQ ID NO: 531659 - DNA, 52 bp, Artificial
  Synthetic oligonucleotide
tggctctcttgagacatcatttgcaaaacttgtctcctcaataaatgacgca

SEQ ID NO: 531660 - DNA, 52 bp, Artificial
  Synthetic oligonucleotide
gggcatctgtaagtaacataccaactacggctaaacgttggcctacttgggg

SEQ ID NO: 531661 - DNA, 52 bp, Artificial
  Synthetic oligonucleotide
acaacacgttctgaacgcacgtcgacatccgactacatacgacgcgatttcc

SEQ ID NO: 531662 - DNA, 52 bp, Artificial
  Synthetic oligonucleotide
gcagggcggagacagctacacgatgatcatgttgaaggaggagaccgatttc

SEQ ID NO: 531663 - DNA, 52 bp, Artificial
  Synthetic oligonucleotide
gggcttattaaccattacttagggataatgactagtggagagtttgcgctag

SEQ ID NO: 531664 - DNA, 52 bp, Artificial
  Synthetic oligonucleotide
gccagtattcggccagattattggtatggttgccggtttggctgcccagttg

SEQ ID NO: 531665 - DNA, 52 bp, Artificial
  Synthetic oligonucleotide
cgattcgagatatttacgaataatggcagtggttttcactggattcgtgcgg

SEQ ID NO: 531666 - DNA, 52 bp, Artificial
  Synthetic oligonucleotide
cttacggtataatgctgttgagccatgcctcatcctttctagcttttgccaa

SEQ ID NO: 531667 - DNA, 52 bp, Artificial
  Synthetic oligonucleotide
ttcgcaaggagagctacgcgtttgtgcggttatggctaacgaacccgcaatg

SEQ ID NO: 531668 - DNA, 52 bp, Artificial
  Synthetic oligonucleotide
gtaacacacgcggctctggaatcaggaggtggtgcggtacccgtcgaagcaa

SEQ ID NO: 531669 - DNA, 52 bp, Artificial
  Synthetic oligonucleotide
aagcgatctaaccaagccaccccggtgtgtaagtgcgactgcggacccgcct

SEQ ID NO: 531670 - DNA, 52 bp, Artificial
  Synthetic oligonucleotide
ctgtgacgtaggtttggtcgtagccgtatacttccctgaatgctgcgagccg

SEQ ID NO: 531671 - DNA, 52 bp, Artificial
  Synthetic oligonucleotide
ggggtcagttgtgctgagccccaacgcttcccggtaggcaatgtctgacttg

SEQ ID NO: 531672 - DNA, 52 bp, Artificial
  Synthetic oligonucleotide
ggggtgccctatctaggcatggaatctacaagtctgcatcgcaaaggtgggg

SEQ ID NO: 531673 - DNA, 52 bp, Artificial
  Synthetic oligonucleotide
ggtagtcttgattctccccgtggatcaggcgctatctatcggaagctaccca

SEQ ID NO: 531674 - DNA, 52 bp, Artificial
  Synthetic oligonucleotide
acgactatcagtaccatcacctgcacctattggaattgctgaccaataggta

SEQ ID NO: 531675 - DNA, 52 bp, Artificial
  Synthetic oligonucleotide
aggcggtaggcgctgtactgcttgatctgtccgagcacgttcatcgttgtca

SEQ ID NO: 531676 - DNA, 52 bp, Artificial
  Synthetic oligonucleotide
tcttctgtgtcgatgtgcgcaaccgccgctgattctttagcgcctacatctg

SEQ ID NO: 531677 - DNA, 52 bp, Artificial
  Synthetic oligonucleotide
taggtagaggggtttacgcgccacgcatcaagcaccgctaaggaacggcgtc

SEQ ID NO: 531678 - DNA, 52 bp, Artificial
  Synthetic oligonucleotide
ccccaactgagggaagtcccctagcgtgttccctatgcgtcggtatcgagtc

SEQ ID NO: 531679 - DNA, 52 bp, Artificial
  Synthetic oligonucleotide
gaaggcctggacgcaatgcgccagcacatcaaggctatcgagtccgcggtat

SEQ ID NO: 531680 - DNA, 52 bp, Artificial
  Synthetic oligonucleotide
aaagcgccgtggaaggcctcctaaggcctctcagagcgattctgaggcatcc

SEQ ID NO: 531681 - DNA, 52 bp, Artificial
  Synthetic oligonucleotide
cccggagaacttaacgaagctattgccgcgccttgctgaactgtacgaccca

SEQ ID NO: 531682 - DNA, 52 bp, Artificial
  Synthetic oligonucleotide
cccggcctcaagacagacggcaacgtgaacatcctcggagacgccaacgcgt

SEQ ID NO: 531683 - DNA, 52 bp, Artificial
  Synthetic oligonucleotide
tacggcctgttttcggctatcctacggggcaacgggccgacaattcgcccat

SEQ ID NO: 531684 - DNA, 52 bp, Artificial
  Synthetic oligonucleotide
ctcttgatctcgtgcgccctcggggtcagcctcacgggcggtcaccctcggg

SEQ ID NO: 531685 - DNA, 52 bp, Artificial
  Synthetic oligonucleotide
acgtgtccgataagacggcacttcccgacacgctgaatcaggcagcgtccga

SEQ ID NO: 531686 - DNA, 52 bp, Artificial
  Synthetic oligonucleotide
aggatgaattcgtgcatattctgacgcgatagcaaacgtcaggtaagtctta

SEQ ID NO: 531687 - DNA, 52 bp, Artificial
  Synthetic oligonucleotide
aaaacctactggatgaaattaacgcgaaacgtcaagccggggttatctcaga

SEQ ID NO: 531688 - DNA, 52 bp, Artificial
  Synthetic oligonucleotide
cggtaccgccacgtcacgcagaccgtgtgggcgatatgggacgccacgatga

SEQ ID NO: 531689 - DNA, 52 bp, Artificial
  Synthetic oligonucleotide
agagaaggacacccaaagcgacaagatagatcacccgccgggcttcagcaaa

SEQ ID NO: 531690 - DNA, 52 bp, Artificial
  Synthetic oligonucleotide
aaaacccgcttagagttaattcaccaactaggtaagacgtgcccgacactat

SEQ ID NO: 531691 - DNA, 52 bp, Artificial
  Synthetic oligonucleotide
gttgccggcgttgcggtgcacgaagtaggtgtcatcgtcgatcgggtcgtct

SEQ ID NO: 531692 - DNA, 52 bp, Artificial
  Synthetic oligonucleotide
gttcctggaagtacagggactcgttctgggctcgtcagtgggcctacgacga

SEQ ID NO: 531693 - DNA, 51 bp, Artificial
  Synthetic oligonucleotide
ttaccgccctcgtgccctgaatactggatctcaaagtcggcgataagatta

SEQ ID NO: 531694 - DNA, 51 bp, Artificial
  Synthetic oligonucleotide
ttgtgtaatacagcaagtttccgaatacctgtgttttgtttgcctccaaag

SEQ ID NO: 531695 - DNA, 51 bp, Artificial
  Synthetic oligonucleotide
ttcgggcacgtagtacgagctcaacaacttgatcagccatgcgttaaccct

SEQ ID NO: 531696 - DNA, 51 bp, Artificial
  Synthetic oligonucleotide
aagaccctcacagtgcatcgatcccttccgcgatgatgtcccggaccacac

SEQ ID NO: 531697 - DNA, 51 bp, Artificial
  Synthetic oligonucleotide
ggcagtgagagacccaactaccccaggaggattcacccgtgatcgacgttc

SEQ ID NO: 531698 - DNA, 51 bp, Artificial
  Synthetic oligonucleotide
ttgacatcgtccatcgcgtacaacgcgagtgcgaacacggtcgagacccga

SEQ ID NO: 531699 - DNA, 51 bp, Artificial
  Synthetic oligonucleotide
aagaacgacatagcgacaggtgccttgtcgcgctgacgcggagccacggct

SEQ ID NO: 531700 - DNA, 51 bp, Artificial
  Synthetic oligonucleotide
tttggcgcgtatgggttcggtgggtcaggctggctggaatcatattagggc

SEQ ID NO: 531701 - DNA, 51 bp, Artificial
  Synthetic oligonucleotide
ggaacgtaacattcgaggtgaagaaagatgagcaagattcacaaacttaag

SEQ ID NO: 531702 - DNA, 51 bp, Artificial
  Synthetic oligonucleotide
taccaagctagcaccggtcgctgtgcgatgtcaagccatccgacggaattg

SEQ ID NO: 531703 - DNA, 51 bp, Artificial
  Synthetic oligonucleotide
acctctccctgccgattccgcaggacgaaaacaccgcctcatggccaggca

SEQ ID NO: 531704 - DNA, 51 bp, Artificial
  Synthetic oligonucleotide
tctgaccgctggctcgctaatggtgcagctggagctatgccattgtacttt

SEQ ID NO: 531705 - DNA, 51 bp, Artificial
  Synthetic oligonucleotide
tgataagcattccatcaatagacgtccgaaagctttcctcctacctttccc

SEQ ID NO: 531706 - DNA, 51 bp, Artificial
  Synthetic oligonucleotide
cgttcggtcggtgtgttgtgctgacttacggggaccaagctagcccaaggg

SEQ ID NO: 531707 - DNA, 51 bp, Artificial
  Synthetic oligonucleotide
taaggctgtttgttgagggacggtaacgaactagactaaccaccccgtttt

SEQ ID NO: 531708 - DNA, 51 bp, Artificial
  Synthetic oligonucleotide
gtttctccacatacggcatgaggtccgcgacgaagcggaggaacgtcaggt

SEQ ID NO: 531709 - DNA, 51 bp, Artificial
  Synthetic oligonucleotide
tgcgacgtagatacgagccatagcaatgcctttcgtacgatgtctagtttt

SEQ ID NO: 531710 - DNA, 51 bp, Artificial
  Synthetic oligonucleotide
aggcgggtcgtcgtgtaacactgcaattagagacgcgctgttacgcgttaa

SEQ ID NO: 531711 - DNA, 51 bp, Artificial
  Synthetic oligonucleotide
acagaacccaaccaacttggctactatcctcgacaaaacgatattataatg

SEQ ID NO: 531712 - DNA, 51 bp, Artificial
  Synthetic oligonucleotide
tacgtcggctcagtgctgatgggcatttgtgaccaaatgtgaacactgaaa

SEQ ID NO: 531713 - DNA, 51 bp, Artificial
  Synthetic oligonucleotide
tcggttctttgtttgcagcttactttgtaggctctaaagtcgctatgggta

SEQ ID NO: 531714 - DNA, 51 bp, Artificial
  Synthetic oligonucleotide
tgtaccggtttgggtaggtctaggtggtggactgttttgtttgctagtcgt

SEQ ID NO: 531715 - DNA, 51 bp, Artificial
  Synthetic oligonucleotide
caagcgccttacccgcaagtaccgggttttcgttcataacgaatatgcgtg

SEQ ID NO: 531716 - DNA, 51 bp, Artificial
  Synthetic oligonucleotide
tagttagtgcacaccacattagcgtccgactccagcgccgctatgcggcgc

SEQ ID NO: 531717 - DNA, 51 bp, Artificial
  Synthetic oligonucleotide
tagttggggagatataaacggcgtacctgaggctgctaagcgttggccagc

SEQ ID NO: 531718 - DNA, 51 bp, Artificial
  Synthetic oligonucleotide
gcccggggcgtagatgtttcctagatcaggatgtttgacgggctttgcgat

SEQ ID NO: 531719 - DNA, 51 bp, Artificial
  Synthetic oligonucleotide
cgacgagatcaagagaacccacgaggcctacgggatcatcggctatagcca

SEQ ID NO: 531720 - DNA, 51 bp, Artificial
  Synthetic oligonucleotide
acttccgagacgatcacggaagggctcatgggcatggtcgacgccatgaac

SEQ ID NO: 531721 - DNA, 51 bp, Artificial
  Synthetic oligonucleotide
gacgaaacatacgggccgtccatcggtggcgttggcgggttaggatcactg

SEQ ID NO: 531722 - DNA, 50 bp, Artificial
  Synthetic oligonucleotide
tcatgtacattttgtccttgtggtcagtggagtagccttgtagatcaatt

SEQ ID NO: 531723 - DNA, 50 bp, Artificial
  Synthetic oligonucleotide
ttttggagggtgttcgttcgggtgttgtgtctcatcctcgtgctgattct

SEQ ID NO: 531724 - DNA, 50 bp, Artificial
  Synthetic oligonucleotide
ccgaataaagagtctcgccgaacggaaacgggaaaaaatcacgaaacgcg

SEQ ID NO: 531725 - DNA, 50 bp, Artificial
  Synthetic oligonucleotide
cgttacaggagcaatgagaggcttacagaggccataggtgaacaggggac

SEQ ID NO: 531726 - DNA, 50 bp, Artificial
  Synthetic oligonucleotide
tacattgtcaagcctccctaaccttcactcggtgcccggttgtctcgtgt

SEQ ID NO: 531727 - DNA, 50 bp, Artificial
  Synthetic oligonucleotide
tggacaagatgctttccaactagggctatgatgcgggcagtttcacgcct

SEQ ID NO: 531728 - DNA, 50 bp, Artificial
  Synthetic oligonucleotide
caaacgtttcattcagcgagacgtcaataactatgttgcagtagatgaac

SEQ ID NO: 531729 - DNA, 50 bp, Artificial
  Synthetic oligonucleotide
cgcccggcttccgggataatgcagcttcggacggtagacgctgttagctt

SEQ ID NO: 531730 - DNA, 50 bp, Artificial
  Synthetic oligonucleotide
gtatctgacgtgcaacatgtcggtcgagctttacgcgacgtcgccttaca

SEQ ID NO: 531731 - DNA, 50 bp, Artificial
  Synthetic oligonucleotide
aatacgatttgcccaacattaaggattttgtagaacgcgctaaacaccga

SEQ ID NO: 531732 - DNA, 50 bp, Artificial
  Synthetic oligonucleotide
cctgtctcattgatcttgcacggcgaaaacgaaggtactcacgtgaggac

SEQ ID NO: 531733 - DNA, 50 bp, Artificial
  Synthetic oligonucleotide
aagtacaacgcaaggcgctagacttagttcaacacttcgtacaaaccggg

SEQ ID NO: 531734 - DNA, 50 bp, Artificial
  Synthetic oligonucleotide
cagtacgcttgaccgtgaagcaccaaatggtgtttggggcgaggataaat

SEQ ID NO: 531735 - DNA, 50 bp, Artificial
  Synthetic oligonucleotide
ttaaaacatctgccgcatcatcgtgcttgttcgctgaaaattcacgaagg

SEQ ID NO: 531736 - DNA, 50 bp, Artificial
  Synthetic oligonucleotide
ctatacaatctacgttggctatctcatcttgacctttaagagcttggtcg

SEQ ID NO: 531737 - DNA, 60 bp, Artificial
  Synthetic oligonucleotide
tacaccaaccctatccgtgctgaaaactgcgccgtgggatcaattccactagcttttgac

SEQ ID NO: 531738 - DNA, 60 bp, Artificial
  Synthetic oligonucleotide
attggtggaggcgttcgacacgacagaatgcgacgtcaccatctattgcttggccaacaa

SEQ ID NO: 531739 - DNA, 60 bp, Artificial
  Synthetic oligonucleotide
atttgccggaaacaaggataggttaatgcaatccttaaaccatctgttaacggcattgga

SEQ ID NO: 531740 - DNA, 60 bp, Artificial
  Synthetic oligonucleotide
caacaaaaatcagtaaggcagacagtgttgtctgaagtggtgctagagaggaccgagtta

SEQ ID NO: 531741 - DNA, 60 bp, Artificial
  Synthetic oligonucleotide
cacggggatatacagcggcgaggcactccataccgcaggatgtgcaccctcgtacagggt

SEQ ID NO: 531742 - DNA, 60 bp, Artificial
  Synthetic oligonucleotide
gtccacactgttttatgacaaaagaatgagaactactaacccacgggattctaaaatcga

SEQ ID NO: 531743 - DNA, 60 bp, Artificial
  Synthetic oligonucleotide
gtccaagacttccaagcactcagtgagagcgccacaattgtgtataacgaacgtgagttc

SEQ ID NO: 531744 - DNA, 60 bp, Artificial
  Synthetic oligonucleotide
gtacgcacccacctcagagcatgtaaacgtgctgttgacccggacggaagacaagattgt

SEQ ID NO: 531745 - DNA, 60 bp, Artificial
  Synthetic oligonucleotide
gtaaggagcgaagggcatgacggctatgtacgactccagacctcatctcagtatggatta

SEQ ID NO: 531746 - DNA, 60 bp, Artificial
  Synthetic oligonucleotide
ccttatggacgaaaccaaagcatggttccgggtaggaattaggaacactctcgcagttgc

SEQ ID NO: 531747 - DNA, 60 bp, Artificial
  Synthetic oligonucleotide
ggtataattgttcatgcaaagacggtaacaggcaatcagagaccagccgtgaagtcgtgt

SEQ ID NO: 531748 - DNA, 60 bp, Artificial
  Synthetic oligonucleotide
cgcctacatcttttcatcggatacgggacccggacacttacagcaacaatccatctgtca

SEQ ID NO: 531749 - DNA, 60 bp, Artificial
  Synthetic oligonucleotide
cgctcgccagcagtgtcgagtcgttcaggtgcctaagagggaccccaataactctctacg

SEQ ID NO: 531750 - DNA, 60 bp, Artificial
  Synthetic oligonucleotide
gggctgacgagaccgtgttaacggctcgtaatattggcctatgcagttccgacgttatgg

SEQ ID NO: 531751 - DNA, 60 bp, Artificial
  Synthetic oligonucleotide
cgtcccgttccggccccgaggaccattttcagaaccagtaggcccgttgtccgagcagcc

SEQ ID NO: 531752 - DNA, 60 bp, Artificial
  Synthetic oligonucleotide
ctaatccaccgggtgttaaccgagtgatcactagggaagaattcgaggccttcgttgccc

SEQ ID NO: 531753 - DNA, 60 bp, Artificial
  Synthetic oligonucleotide
ctctccgccacctacctcaacctgcctctgaagcaactgctgcttaacacgctcaaacgc

SEQ ID NO: 531754 - DNA, 60 bp, Artificial
  Synthetic oligonucleotide
ctctgaacacagacgaggagtattacagggtggtgaaacctagtgaacatgaaggtgagt

SEQ ID NO: 531755 - DNA, 60 bp, Artificial
  Synthetic oligonucleotide
ctgatgtacaccacttcagcgcaagtgctcagtcctcgtcctggtccattccatgtgcat

SEQ ID NO: 531756 - DNA, 60 bp, Artificial
  Synthetic oligonucleotide
gctgtctgtcgtgacgtggaacgaaaaaggggttacagttaaatacacccccgagaatag

SEQ ID NO: 531757 - DNA, 60 bp, Artificial
  Synthetic oligonucleotide
ctggagcatatccctcctattcgaccaattgggctgacgagaccgtgttaacggctcgta

SEQ ID NO: 531758 - DNA, 60 bp, Artificial
  Synthetic oligonucleotide
ctgtagcaatgggctctcatcactgctccattgagtccgagcacctcagaccctcagtgg

SEQ ID NO: 531759 - DNA, 60 bp, Artificial
  Synthetic oligonucleotide
gacacacctaaggctagacagaccggcatctggtaacatacatgtaccatatacccagat

SEQ ID NO: 531760 - DNA, 60 bp, Artificial
  Synthetic oligonucleotide
gcatatccctcctattcgaccaactgggccgacgagaccgtgttaacggctcgtaatata

SEQ ID NO: 531761 - DNA, 60 bp, Artificial
  Synthetic oligonucleotide
gatgaagaaccggaaaaaactctaacgatgctgagtatgaacgtggataacccagactat

SEQ ID NO: 531762 - DNA, 60 bp, Artificial
  Synthetic oligonucleotide
gcaagctaaccggagtagatatcagtcccggagggttgaaaacatgaaggccataacaac

SEQ ID NO: 531763 - DNA, 60 bp, Artificial
  Synthetic oligonucleotide
tttttgccctgccaagctgcgtagctttccgaagaaacacgcatacctcgagcccaccat

SEQ ID NO: 531764 - DNA, 60 bp, Artificial
  Synthetic oligonucleotide
ttttctctttaagagcccgtggacagagggcctttcaattggattgtgcacgaaaatcaa

SEQ ID NO: 531765 - DNA, 60 bp, Artificial
  Synthetic oligonucleotide
tttctagatgtagacccggagggtccattcatgaagcacgtggagcgatgcttcccgtcc

SEQ ID NO: 531766 - DNA, 60 bp, Artificial
  Synthetic oligonucleotide
ttataggccggacgagcaatgcaaagtcttctctggagtatacccattcatgtggggagg

SEQ ID NO: 531767 - DNA, 60 bp, Artificial
  Synthetic oligonucleotide
aatcccgctagcagcactgatagttgctacccgcttgctgaagtgtttgtgctgcgtggt

SEQ ID NO: 531768 - DNA, 60 bp, Artificial
  Synthetic oligonucleotide
tgactactgggagagtatacgacatgaacaccggtaccttgcgcaattatgatccgcgca

SEQ ID NO: 531769 - DNA, 60 bp, Artificial
  Synthetic oligonucleotide
tgaagtggtcaggcaactatcccgcaggtaccctcaactaccgcgtgcggtgactactgg

SEQ ID NO: 531770 - DNA, 60 bp, Artificial
  Synthetic oligonucleotide
tctgtatcggaagtaccccgaaagcttcgacctacaaccaatagaagtggggaaagctag

SEQ ID NO: 531771 - DNA, 60 bp, Artificial
  Synthetic oligonucleotide
tcgaaactttgtacattgatgaagcctttgcatgccacgctggcactctcagggccttaa

SEQ ID NO: 531772 - DNA, 60 bp, Artificial
  Synthetic oligonucleotide
tccaggaaccaagcacactgaagaaaggcctaaggtccaagtaatccaggctgcagatcc

SEQ ID NO: 531773 - DNA, 60 bp, Artificial
  Synthetic oligonucleotide
acctcatcctcacatgcttccgcggatgggttaaacagctccaactcgagtatccccgta

SEQ ID NO: 531774 - DNA, 60 bp, Artificial
  Synthetic oligonucleotide
agagccctgagaacacggaacaactggtggaggaggaagacggtataagcgtgctgtctg

SEQ ID NO: 531775 - DNA, 60 bp, Artificial
  Synthetic oligonucleotide
tataagcgtgctgtctgaggatacaccaaaccaagtgcacctagtggaggctgatgtaca

SEQ ID NO: 531776 - DNA, 60 bp, Artificial
  Synthetic oligonucleotide
agcacaatggtatcttggcggccctcagagaagcgtgtgtcccacggatgaacttcgcgc

SEQ ID NO: 531777 - DNA, 60 bp, Artificial
  Synthetic oligonucleotide
atgtgtctctgaacagtgggattctaagccgagaggtgctgtggtcgttacagccgatat

SEQ ID NO: 531778 - DNA, 60 bp, Artificial
  Synthetic oligonucleotide
atgcatagcgacgctggactcgccgggataagtacatctgctgtaacttggttagggtcc

SEQ ID NO: 531779 - DNA, 60 bp, Artificial
  Synthetic oligonucleotide
tacccaacgtctattatcaggactgaaactttatacatatgagcctaaccaaccggagtg

SEQ ID NO: 531780 - DNA, 60 bp, Artificial
  Synthetic oligonucleotide
atcaaaaaccgcttggacgtggttaacatcattactgggagggtcagctataattataat

SEQ ID NO: 531781 - DNA, 60 bp, Artificial
  Synthetic oligonucleotide
agtggaagatgcaaacgagcaaatatgcatgtacgttatgggggagacgatggaccagat

SEQ ID NO: 531782 - DNA, 60 bp, Artificial
  Synthetic oligonucleotide
agtgaagctgaccgcgggtcctctgtccacagcctggtcgccgttcgacaaaaagatcgt

SEQ ID NO: 531783 - DNA, 57 bp, Artificial
  Synthetic oligonucleotide
tgccagagcgttttcgcatctggcttcgaaactgatcgaaacggaggtagacccatc

SEQ ID NO: 531784 - DNA, 57 bp, Artificial
  Synthetic oligonucleotide
gaccgagttagagatctcgtatgccccgcgcctcgacctgaataaagaagagatact

SEQ ID NO: 531785 - DNA, 57 bp, Artificial
  Synthetic oligonucleotide
acgtcttgttctctgtaggatctacaatctaccatgagaagagggacctacttagaa

SEQ ID NO: 531786 - DNA, 57 bp, Artificial
  Synthetic oligonucleotide
gtaacatgcaacgacaatcagtgcacagtgagggtgtcacccggtaccacagtgaaa

SEQ ID NO: 531787 - DNA, 55 bp, Artificial
  Synthetic oligonucleotide
gttgcaactgttagtgcccgtagcgggcatgattgtgctgtgctcggtctgcaaa

SEQ ID NO: 531788 - DNA, 55 bp, Artificial
  Synthetic oligonucleotide
gcccggacagtggactcagtgctgttaaatggatgcaagcacccggtcgagactt

SEQ ID NO: 531789 - DNA, 55 bp, Artificial
  Synthetic oligonucleotide
gtttccgcaatttgaagatgacaaaccacattcggccatatacgctctagacgtc

SEQ ID NO: 531790 - DNA, 55 bp, Artificial
  Synthetic oligonucleotide
gccgacaccgtggtgggtttgggcacccgctgcgttggtactcctatgtggattg

SEQ ID NO: 531791 - DNA, 55 bp, Artificial
  Synthetic oligonucleotide
gcacccaagaggtagacgttctacacgtagacgaggcattcgcgtgtcacgccgg

SEQ ID NO: 531792 - DNA, 55 bp, Artificial
  Synthetic oligonucleotide
gcctcagtccaagccttcttaaatatcacagttggaggacactcaacgacagcag

SEQ ID NO: 531793 - DNA, 55 bp, Artificial
  Synthetic oligonucleotide
gcgcaccaccaacccatgtaacaagaacatcgtaatcgacattaccggacaaacc

SEQ ID NO: 531794 - DNA, 55 bp, Artificial
  Synthetic oligonucleotide
gcggagttgagagacgaagcaccaaacaactacgcggctcaccatggctaaacca

SEQ ID NO: 531795 - DNA, 55 bp, Artificial
  Synthetic oligonucleotide
ttgtctgaagtggtgctagagaggaccgagttagagatctcgtatgccccgcgcc

SEQ ID NO: 531796 - DNA, 55 bp, Artificial
  Synthetic oligonucleotide
gcggcgcatgacagaagccctaactacatactacccaacatggagaaagttcacg

SEQ ID NO: 531797 - DNA, 55 bp, Artificial
  Synthetic oligonucleotide
gcgtgcgcagagctgatatcgcaaactgtacagaagaagtggtggtgaatgccgc

SEQ ID NO: 531798 - DNA, 55 bp, Artificial
  Synthetic oligonucleotide
gcgttatcagcagaacccgacagaagcaaataagtcgaggtatcagtctcgaaaa

SEQ ID NO: 531799 - DNA, 55 bp, Artificial
  Synthetic oligonucleotide
ttctgtggtgggtttatcttgtgtgactctgtgaccggaactgcatgtcgtgtgg

SEQ ID NO: 531800 - DNA, 55 bp, Artificial
  Synthetic oligonucleotide
taggactccacctgtaccaaaaccgcgtgtgcggaggccattgcatcctttgtct

SEQ ID NO: 531801 - DNA, 55 bp, Artificial
  Synthetic oligonucleotide
gtacattgatgaagccttcgcatgccacgctggcactctcagggccttaatagcc

SEQ ID NO: 531802 - DNA, 55 bp, Artificial
  Synthetic oligonucleotide
gtaagacggtagactggttatctgaaacacccgattctactttcagggcgcgcct

SEQ ID NO: 531803 - DNA, 55 bp, Artificial
  Synthetic oligonucleotide
ggttcgaggctccatgaagctggctgcgcaccttcgtatcatgtagtgcgcgggg

SEQ ID NO: 531804 - DNA, 55 bp, Artificial
  Synthetic oligonucleotide
gtccgaggactcgaggccaccatcatacacgcagccggagctgacttcagagaag

SEQ ID NO: 531805 - DNA, 55 bp, Artificial
  Synthetic oligonucleotide
ggtatcagccccttagagctgcataatcacatagtccacgggacagatcaacccc

SEQ ID NO: 531806 - DNA, 55 bp, Artificial
  Synthetic oligonucleotide
gtccgatgaagtgtgcagaagacccggacaggctgtataagtatgcagccaagct

SEQ ID NO: 531807 - DNA, 55 bp, Artificial
  Synthetic oligonucleotide
gtcggcacttacccttttgtgtatcttgggtaacgttactttcccgtgtgattcg

SEQ ID NO: 531808 - DNA, 55 bp, Artificial
  Synthetic oligonucleotide
gggtcaagtcgcagtgtatcaggatgtgtacgcggttgacggaccgacgagcctc

SEQ ID NO: 531809 - DNA, 55 bp, Artificial
  Synthetic oligonucleotide
gtctgcgaagctttgccctgccgcaatgactaggccgagccggggcctacatctt

SEQ ID NO: 531810 - DNA, 55 bp, Artificial
  Synthetic oligonucleotide
tactcagggttatcggaggattccattaactggagattccgtttccgtgataagc

SEQ ID NO: 531811 - DNA, 55 bp, Artificial
  Synthetic oligonucleotide
gggcatgatggctatgtacgactccagacctcatctcagtatggattagacccat

SEQ ID NO: 531812 - DNA, 55 bp, Artificial
  Synthetic oligonucleotide
ggcctgaatcaacgcatagtggttaacggcagaacccagcgtaacaccaacagcg

SEQ ID NO: 531813 - DNA, 55 bp, Artificial
  Synthetic oligonucleotide
gtgcttccgtgggtgggttaaacagctggagatagattaccgcgggcatgaggtt

SEQ ID NO: 531814 - DNA, 55 bp, Artificial
  Synthetic oligonucleotide
ggacgggaatattgactaaccggagcgggagggtacatattttcttcagacaccg

SEQ ID NO: 531815 - DNA, 55 bp, Artificial
  Synthetic oligonucleotide
ggaagatcttggagttgaccaacctttgctagagttgattgaggcggccttcgga

SEQ ID NO: 531816 - DNA, 55 bp, Artificial
  Synthetic oligonucleotide
gcttaaaagtgcacttcaaccatgaaatatgcactcaagtcttccacaaaagcat

SEQ ID NO: 531817 - DNA, 55 bp, Artificial
  Synthetic oligonucleotide
gtggggatcccgtataataccattgtcaacagagcgggttatgcacctctaccca

SEQ ID NO: 531818 - DNA, 55 bp, Artificial
  Synthetic oligonucleotide
gtacaagaagcccgacacccagtctatcatcaaggtaccaggagagtattcagca

SEQ ID NO: 531819 - DNA, 55 bp, Artificial
  Synthetic oligonucleotide
ccgaggggcaggctatacctgtccaagacttccaagcactcagtgagagcgccac

SEQ ID NO: 531820 - DNA, 55 bp, Artificial
  Synthetic oligonucleotide
ccctgacagctgtttgaaaggacgtaaaggctttagcaccaccaaaggcaaactg

SEQ ID NO: 531821 - DNA, 55 bp, Artificial
  Synthetic oligonucleotide
ccctagaaagtatcttgcagacgcagctcccgcgagcaatgaggcagccgaatca

SEQ ID NO: 531822 - DNA, 55 bp, Artificial
  Synthetic oligonucleotide
cccggccataacagaattgacatgtacagtggcttcgtgcacacattcatccgac

SEQ ID NO: 531823 - DNA, 55 bp, Artificial
  Synthetic oligonucleotide
cattcggctttccgcctcagtcgaggtacgacctagtgatcataaatatcggtac

SEQ ID NO: 531824 - DNA, 55 bp, Artificial
  Synthetic oligonucleotide
cattagaaatcgtaacgtagccttccactttcatcgaacatggagaaaccaactg

SEQ ID NO: 531825 - DNA, 55 bp, Artificial
  Synthetic oligonucleotide
cataagagtatatcacgacggtgtactcaagctgttacagccatcgtttccacgt

SEQ ID NO: 531826 - DNA, 55 bp, Artificial
  Synthetic oligonucleotide
cactgaccacccgacattgctgtccactagacagctgggaagtgaccctcacccc

SEQ ID NO: 531827 - DNA, 55 bp, Artificial
  Synthetic oligonucleotide
cactatggagaagcccgttgtcaacgtagacgtagaccctcaaagtccgttcgtt

SEQ ID NO: 531828 - DNA, 55 bp, Artificial
  Synthetic oligonucleotide
cacgggctgcaaccagcaggaactgccccgaactatcgtgttgtcagagccgaca

SEQ ID NO: 531829 - DNA, 55 bp, Artificial
  Synthetic oligonucleotide
cacccaaacgatcatcaaggtaaacagcgatttccactctttcgtgctgcccaga

SEQ ID NO: 531830 - DNA, 55 bp, Artificial
  Synthetic oligonucleotide
attggataggcttcgacacaacaccattcatgttcaaaaacttagctggtgccta

SEQ ID NO: 531831 - DNA, 55 bp, Artificial
  Synthetic oligonucleotide
atgtttctgacgttatttgttaacacgctgcttaacgtcgttatagctagtcgcg

SEQ ID NO: 531832 - DNA, 55 bp, Artificial
  Synthetic oligonucleotide
atccaggcgctgcatcctgcctgtcaccgccatcgtatcttccatacattacgac

SEQ ID NO: 531833 - DNA, 55 bp, Artificial
  Synthetic oligonucleotide
agtgaatcttgagtacattacatgccattacaagaccggaatggattcacccgcc

SEQ ID NO: 531834 - DNA, 55 bp, Artificial
  Synthetic oligonucleotide
agccttgtttactagcggaccttgcgtgatccacgggacaatggggcacttcatc

SEQ ID NO: 531835 - DNA, 55 bp, Artificial
  Synthetic oligonucleotide
agatatcagtcccggagggttgaaaacatgaaggccataacaactaagagaatct

SEQ ID NO: 531836 - DNA, 55 bp, Artificial
  Synthetic oligonucleotide
accggagtcgagtaccactggggtaacaacgacccagtcaggctctgggcccaga

SEQ ID NO: 531837 - DNA, 55 bp, Artificial
  Synthetic oligonucleotide
accatagaccaccccgtactgtcaaagctgaagttcaccaaatcgtcagcatacg

SEQ ID NO: 531838 - DNA, 55 bp, Artificial
  Synthetic oligonucleotide
acagaaacaaccactgggataacagcgccggagggaaaatgtggggttttaacga

SEQ ID NO: 531839 - DNA, 55 bp, Artificial
  Synthetic oligonucleotide
aattactacagatgtcaagcgtactcgcggattggacatcaccgcgaaaactgtc

SEQ ID NO: 531840 - DNA, 55 bp, Artificial
  Synthetic oligonucleotide
aatgcctggtcccgctagcccgctccccagctatccggtactcccgaaatgaggt

SEQ ID NO: 531841 - DNA, 55 bp, Artificial
  Synthetic oligonucleotide
aagtcaccagctatgcaggagaagacaaaatcggctcatacgcggtgctctcccc

SEQ ID NO: 531842 - DNA, 55 bp, Artificial
  Synthetic oligonucleotide
aagattctatggttacgatctggatagcgggttattctctgctgacaccgtgtcg

SEQ ID NO: 531843 - DNA, 55 bp, Artificial
  Synthetic oligonucleotide
aaatggatgcaagcacccggtcgagactttgtacattgatgaagccttcgcatgc

SEQ ID NO: 531844 - DNA, 55 bp, Artificial
  Synthetic oligonucleotide
aaaggcatctaagtatgatctggagtacgcagatgtgccgcagagcatgcgcgca

SEQ ID NO: 531845 - DNA, 55 bp, Artificial
  Synthetic oligonucleotide
aaaccgtccatacatgtgctgttcgatatgagttctgaggacttcgacgctatcg

SEQ ID NO: 531846 - DNA, 55 bp, Artificial
  Synthetic oligonucleotide
gcaatgcaaagtcttctctggagtatacccatttatgtggggaggggcgtattgc

SEQ ID NO: 531847 - DNA, 55 bp, Artificial
  Synthetic oligonucleotide
gatgttttggagtcagctgctgatcccgctagcagcactgatagttgctacccgc

SEQ ID NO: 531848 - DNA, 55 bp, Artificial
  Synthetic oligonucleotide
gagtcctttcctcaaatcgttgcagcgtgccttcccttcacttgagattgaagcg

SEQ ID NO: 531849 - DNA, 55 bp, Artificial
  Synthetic oligonucleotide
gagcccgtggacagagggcctttcaattggattgtgcacgaaaatcaagctgatg

SEQ ID NO: 531850 - DNA, 55 bp, Artificial
  Synthetic oligonucleotide
gagaatcttacagggattaggtcactatctgaaatctgaaggtaaggtggagtgc

SEQ ID NO: 531851 - DNA, 55 bp, Artificial
  Synthetic oligonucleotide
gaccccgacggagtgggcgccgccccatcatactcggtgatcagaggcgacataa

SEQ ID NO: 531852 - DNA, 55 bp, Artificial
  Synthetic oligonucleotide
gacagtgttgtctgaagtggtgctagagaggaccgagttagagatctcgtatgcc

SEQ ID NO: 531853 - DNA, 55 bp, Artificial
  Synthetic oligonucleotide
gaagtggtgctagagaggaccgagttagagatctcgtatgccccgcgcctcgacc

SEQ ID NO: 531854 - DNA, 55 bp, Artificial
  Synthetic oligonucleotide
gaaagttcacgttgacatcgaggaagacagccccttcctcagagctttgcaacgg

SEQ ID NO: 531855 - DNA, 55 bp, Artificial
  Synthetic oligonucleotide
ctgtcattataccatcagtccaacaggagtacattacgtgtaagtacaccactgt

SEQ ID NO: 531856 - DNA, 55 bp, Artificial
  Synthetic oligonucleotide
ctgcggcactcaggagtgttcacctacttataggccggacgagcaatgcaaagtc

SEQ ID NO: 531857 - DNA, 55 bp, Artificial
  Synthetic oligonucleotide
ctagagtgtgcacagataccggtgaagatgcgttccgatgcatccaagtacactc

SEQ ID NO: 531858 - DNA, 55 bp, Artificial
  Synthetic oligonucleotide
ctacgcgcaacttctctgccttacggggaacacttaagaccctctacaactaacc

SEQ ID NO: 531859 - DNA, 55 bp, Artificial
  Synthetic oligonucleotide
ctaagctggctttatcgagacctgtcccagccatgttgccggtacgaccacccaa

SEQ ID NO: 531860 - DNA, 55 bp, Artificial
  Synthetic oligonucleotide
ccggctacgctgtgctgattggttctcgcgtgtttaagccagcgcacgtgaaggg

SEQ ID NO: 531861 - DNA, 55 bp, Artificial
  Synthetic oligonucleotide
cgacctccgggttactgcgttggctgcaggacgctccgaagccacttagtgtcac

SEQ ID NO: 531862 - DNA, 55 bp, Artificial
  Synthetic oligonucleotide
cgagtattgggacatttgtcttcttgttcctggggatactactggtggtcaccat

SEQ ID NO: 531863 - DNA, 55 bp, Artificial
  Synthetic oligonucleotide
cggagatataaccagcacgcacctacccaccggagcacgtttccggtttggcgcc

SEQ ID NO: 531864 - DNA, 55 bp, Artificial
  Synthetic oligonucleotide
cgtgctgttggttagcgaatacaacctggttcttccctcgaaacgcgtgacttgg

SEQ ID NO: 531865 - DNA, 54 bp, Artificial
  Synthetic oligonucleotide
attcggttacaaccagaatggagccgcagacaacactaagttcaggtatatgtc

SEQ ID NO: 531866 - DNA, 54 bp, Artificial
  Synthetic oligonucleotide
ccatttttaggactccacctgtcccgaaaccgcgtgtgcggaggccattgcacc

SEQ ID NO: 531867 - DNA, 54 bp, Artificial
  Synthetic oligonucleotide
tcgtaaacggccgcacacaaaggaataccaacaccatgaagaactacttactac

SEQ ID NO: 531868 - DNA, 54 bp, Artificial
  Synthetic oligonucleotide
ggggagcgaacgagggctcgagaacagctctgtcggtagtaacctggaacaagg

SEQ ID NO: 531869 - DNA, 53 bp, Artificial
  Synthetic oligonucleotide
tgtacctacaactccaacacctttgattgctccaaaccgtcctgccaggactg

SEQ ID NO: 531870 - DNA, 53 bp, Artificial
  Synthetic oligonucleotide
gcgcaatatcggactgtgtgcaaacggtctgacagagggcggtagaaagggac

SEQ ID NO: 531871 - DNA, 53 bp, Artificial
  Synthetic oligonucleotide
caggtgccagaagcgtgcgcagtgtccagtccggttcagccgggcatagaact

SEQ ID NO: 531872 - DNA, 52 bp, Artificial
  Synthetic oligonucleotide
tatcaggatgtgtacgcggttgatggaccgacgagcctttaccaccaggcta

SEQ ID NO: 531873 - DNA, 52 bp, Artificial
  Synthetic oligonucleotide
ggggaaagatgcgtacgaccaacacgcgcaatagccctataatcatagacac

SEQ ID NO: 531874 - DNA, 52 bp, Artificial
  Synthetic oligonucleotide
gtgcatggtgtcagaccagacaagttgatggccgatcggtgtgcgtcttgga

SEQ ID NO: 531875 - DNA, 52 bp, Artificial
  Synthetic oligonucleotide
ctcctttagcgcgtttcctctgtcatccgtatggacaacgtcgctacctatg

SEQ ID NO: 531876 - DNA, 51 bp, Artificial
  Synthetic oligonucleotide
acagttccgctctccattaggaacaaccattgggacaactcaccgtcaccc

SEQ ID NO: 531877 - DNA, 51 bp, Artificial
  Synthetic oligonucleotide
gggcgcatacattttctcctcggatactggtcaaggacatttgcaacaaaa

SEQ ID NO: 531878 - DNA, 51 bp, Artificial
  Synthetic oligonucleotide
gaccgacatctacgctcgcacgaggaaggcgtacaaaatgctggcgagggg

SEQ ID NO: 531879 - DNA, 51 bp, Artificial
  Synthetic oligonucleotide
ttccacttacgtggcaagcaaaattacacatgtcggtgtgagactatagtt

SEQ ID NO: 531880 - DNA, 51 bp, Artificial
  Synthetic oligonucleotide
cgtataaactcgatgtactcccgaggacgcacaacgcctatagttgtgcga

SEQ ID NO: 531881 - DNA, 51 bp, Artificial
  Synthetic oligonucleotide
ggtggtcagctctgctggtcatccttgcgtatgtacagagctgcaagagct

SEQ ID NO: 531882 - DNA, 50 bp, Artificial
  Synthetic oligonucleotide
cattaccggacaaaccaaaccaaaaccaggagatattatcctgacgtgtt

SEQ ID NO: 531883 - DNA, 50 bp, Artificial
  Synthetic oligonucleotide
tgcaaaatctcacagctaacccctccgccggcactacagtcactgtagat

SEQ ID NO: 531884 - DNA, 50 bp, Artificial
  Synthetic oligonucleotide
aaagatcgtgcagtacgccggggaaatctacaactacgactttccggaat

SEQ ID NO: 531885 - DNA, 60 bp, Artificial
  Synthetic oligonucleotide
tggcttctcggtaaagtttgaggaaccagtctatgaactagagaaggttgaattctgcca

SEQ ID NO: 531886 - DNA, 60 bp, Artificial
  Synthetic oligonucleotide
tcttggcatgccccaagctcctgtcgctcaaactgggctccgagttaatcgcgtctccca

SEQ ID NO: 531887 - DNA, 60 bp, Artificial
  Synthetic oligonucleotide
gtatagtagccagttgtgacctcgtgtgaatacgccccaacttagttggattctcacgtg

SEQ ID NO: 531888 - DNA, 60 bp, Artificial
  Synthetic oligonucleotide
ggggggtataaacagcgaattatggacgtctcttctcaaaccactacatacgatctagat

SEQ ID NO: 531889 - DNA, 60 bp, Artificial
  Synthetic oligonucleotide
ggcatcactagtggcacagctagtgttggtacacctttaggcacaggactagggggagaa

SEQ ID NO: 531890 - DNA, 60 bp, Artificial
  Synthetic oligonucleotide
gcacattttcatgaatctgagatactttcgacggcgattgtgtcatatcgttggaccgta

SEQ ID NO: 531891 - DNA, 60 bp, Artificial
  Synthetic oligonucleotide
cacgaaccatttccatttctgagcccctctgggataacgatatactcatcatactggtat

SEQ ID NO: 531892 - DNA, 60 bp, Artificial
  Synthetic oligonucleotide
atttggattacccatgtattggttcgaggagttagctctgtgggtgctggactcgcgctt

SEQ ID NO: 531893 - DNA, 60 bp, Artificial
  Synthetic oligonucleotide
atcttgggtcataaatcccagtgacgtttctacttttcctcaactctctgtttctgcggc

SEQ ID NO: 531894 - DNA, 60 bp, Artificial
  Synthetic oligonucleotide
aggggcgctcaggcgactaagagggctgtcgctagggatactgcgttgtctgcgactcgt

SEQ ID NO: 531895 - DNA, 60 bp, Artificial
  Synthetic oligonucleotide
accagcctcaaaagtgcggaagatttaccaagttaccgggctcgacagtggtttaaactt

SEQ ID NO: 531896 - DNA, 60 bp, Artificial
  Synthetic oligonucleotide
aacttatgcacccctagcatggagttggtgcagaacccattttgtgggtctgcttggaga

SEQ ID NO: 531897 - DNA, 56 bp, Artificial
  Synthetic oligonucleotide
tcgtcgcactaaaacacacattttggaggaaacaagagtttctttttggagggcat

SEQ ID NO: 531898 - DNA, 55 bp, Artificial
  Synthetic oligonucleotide
gcgatgatctaccaaccgaccctaccatgctatatgagtattcaggggctatgcg

SEQ ID NO: 531899 - DNA, 55 bp, Artificial
  Synthetic oligonucleotide
ggggcattgagcgtgggtataaatcccttagatgaatgcaaaagcttgcttaaag

SEQ ID NO: 531900 - DNA, 55 bp, Artificial
  Synthetic oligonucleotide
atcacgcaattgacacaatttggggaggaccgactgttttgaaaggttatacggt

SEQ ID NO: 531901 - DNA, 54 bp, Artificial
  Synthetic oligonucleotide
gttgtccccttgcctacacgagccaacttaacggtggccactaggttcgtggcc

SEQ ID NO: 531902 - DNA, 60 bp, Artificial
  Synthetic oligonucleotide
gcaaactgtgcccgacgagcgcaagtcatacgctatctttgttccgccggctatattgca

SEQ ID NO: 531903 - DNA, 60 bp, Artificial
  Synthetic oligonucleotide
gcgccagagttcgtaagctttgaaacgtatgttaaggatgggtattggctgacttcgggt

SEQ ID NO: 531904 - DNA, 60 bp, Artificial
  Synthetic oligonucleotide
cttatctgaccacggcccaatctgttatcccggttcaagcatgcaatcgagctgctaacc

SEQ ID NO: 531905 - DNA, 60 bp, Artificial
  Synthetic oligonucleotide
ggtgtgaattgcaaggctggcatcgaacagactcaatcaacatagcgtgtggcaaaatac

SEQ ID NO: 531906 - DNA, 60 bp, Artificial
  Synthetic oligonucleotide
gtaattatgccaggttacagtgcaaattaccgggaagggcccgtaatcgtccctagtggt

SEQ ID NO: 531907 - DNA, 60 bp, Artificial
  Synthetic oligonucleotide
caatacgaaaccattgtttactgttattttaacgacataccagatgacgaactcacgatt

SEQ ID NO: 531908 - DNA, 60 bp, Artificial
  Synthetic oligonucleotide
tgtacacagtactatgtgctttcagagacgctttcacacgtaatatgtccattgaacaac

SEQ ID NO: 531909 - DNA, 60 bp, Artificial
  Synthetic oligonucleotide
accttcttctaaggtaatgatgtcggcattgcgtaagtatgttaatcataatcgacttta

SEQ ID NO: 531910 - DNA, 60 bp, Artificial
  Synthetic oligonucleotide
acatgcgtgtgtatgacactgacccagctacgtggaacaaggtagccctcggtctggcta

SEQ ID NO: 531911 - DNA, 60 bp, Artificial
  Synthetic oligonucleotide
aacacgcaaagagccgctgacttatcgactaggaacaagacgagacacggttcgaacaac

SEQ ID NO: 531912 - DNA, 58 bp, Artificial
  Synthetic oligonucleotide
atctcatcctcaggcgttcgcggctggaccaatcgcgctattccttctgtaacacaac

SEQ ID NO: 531913 - DNA, 57 bp, Artificial
  Synthetic oligonucleotide
ctaagcacgtcatgcgttcttacattgtggctcttagagcttgcaaacctgagtgga

SEQ ID NO: 531914 - DNA, 56 bp, Artificial
  Synthetic oligonucleotide
tacggcgtgtcacaaaagttcaccctagtcggcaacccgaaagtctgtttcaatga

SEQ ID NO: 531915 - DNA, 55 bp, Artificial
  Synthetic oligonucleotide
tacgtcttggagatggtacgataatcacgtggcattactcatgaatatgttacgt

SEQ ID NO: 531916 - DNA, 55 bp, Artificial
  Synthetic oligonucleotide
tatacggccgctcaactattagctcagattatgatgaaaccagtacctaactgcg

SEQ ID NO: 531917 - DNA, 55 bp, Artificial
  Synthetic oligonucleotide
gttattaagcctgcgctgaaatacctacgcaaaggtgctctgtatgccaaactag

SEQ ID NO: 531918 - DNA, 55 bp, Artificial
  Synthetic oligonucleotide
ggtaatgatgtcggcattgcgtaagtatgttaatcataatcgactttacaaccag

SEQ ID NO: 531919 - DNA, 55 bp, Artificial
  Synthetic oligonucleotide
ggcccaagcgtcacgctgtcgtggaccgggtgtacaaaactctcactctgaagaa

SEQ ID NO: 531920 - DNA, 55 bp, Artificial
  Synthetic oligonucleotide
gaggctatggattgggtatgtgagtcagtcaagcacatgtgggttttagatccgg

SEQ ID NO: 531921 - DNA, 55 bp, Artificial
  Synthetic oligonucleotide
gactatgagccactgacggaactgtttgaattggctgtgctcatgaacagaggcg

SEQ ID NO: 531922 - DNA, 55 bp, Artificial
  Synthetic oligonucleotide
ctgacaatgagcggttccttgactccgggcaaatatcagaccacgttgacagtac

SEQ ID NO: 531923 - DNA, 55 bp, Artificial
  Synthetic oligonucleotide
cggctacttttgcatacaggtcgcacacgtatgcatgcacggtaacggcactacg

SEQ ID NO: 531924 - DNA, 55 bp, Artificial
  Synthetic oligonucleotide
cggcgaaaggctggagtttaacaagattaaagacgctgtttcaaagggcagcaga

SEQ ID NO: 531925 - DNA, 55 bp, Artificial
  Synthetic oligonucleotide
cagtcgagtaaacataatagaaccatcccatgggcctcgtccgatgagatacata

SEQ ID NO: 531926 - DNA, 55 bp, Artificial
  Synthetic oligonucleotide
caagctagatttgcgatgcaggcggccttagatagttccgatcctttaagagcac

SEQ ID NO: 531927 - DNA, 55 bp, Artificial
  Synthetic oligonucleotide
caacaactagctcctcaagagagctgcaacaagaccgccagtgttgaggagtatc

SEQ ID NO: 531928 - DNA, 54 bp, Artificial
  Synthetic oligonucleotide
cttagtcttatcaacttcttataagccagctggctaccccactaagacatggtc

SEQ ID NO: 531929 - DNA, 54 bp, Artificial
  Synthetic oligonucleotide
ttaacattgaagcagcagtagctacaataatgacgtacgtactcactttggacg

SEQ ID NO: 531930 - DNA, 53 bp, Artificial
  Synthetic oligonucleotide
gcaatattagaccaaagcactttaaaggtctgcgtacttatgagaggtctaag

SEQ ID NO: 531931 - DNA, 53 bp, Artificial
  Synthetic oligonucleotide
tgactcatttaagtggccgagtgaccggacaacagacacttacccagactggg

SEQ ID NO: 531932 - DNA, 51 bp, Artificial
  Synthetic oligonucleotide
ggtcaggcctcaagccggaccagatgccacagctggagctattcccttggc

SEQ ID NO: 531933 - DNA, 51 bp, Artificial
  Synthetic oligonucleotide
atgcaccgcttaacggtatgtctgatgtgtacgtgacatacccagatctcc

SEQ ID NO: 531934 - DNA, 50 bp, Artificial
  Synthetic oligonucleotide
atctggactcaattgtggggccttcgccatttggtcacgttacactctct

SEQ ID NO: 531935 - DNA, 60 bp, Artificial
  Synthetic oligonucleotide
tgaatgtcacagccagcgaccccgccacttccttccccagtcgccaacgtagtgacccag

SEQ ID NO: 531936 - DNA, 60 bp, Artificial
  Synthetic oligonucleotide
acgtccaatcccaattcggccccctcacctgcatgagactcacaggcgaaccaggcactt

SEQ ID NO: 531937 - DNA, 60 bp, Artificial
  Synthetic oligonucleotide
attggccccgcttcttcacccgttcaatgtgccatctaccactcacctggtcattggtcc

SEQ ID NO: 531938 - DNA, 60 bp, Artificial
  Synthetic oligonucleotide
gtctcgcccaacatcacattagtggccctcacccgccattctcgttccattaccttcctg

SEQ ID NO: 531939 - DNA, 60 bp, Artificial
  Synthetic oligonucleotide
ccccttctacgttgaggtcctcacctcaatagcatcctgccatcttctcctcatcactcg

SEQ ID NO: 531940 - DNA, 60 bp, Artificial
  Synthetic oligonucleotide
cttccaacatgaaaaatcattttgacggcgtgcttcgcgaactcctctcagcctcaccca

SEQ ID NO: 531941 - DNA, 60 bp, Artificial
  Synthetic oligonucleotide
ccgaaatctaccatcttcgtccctacattgacctctactgtgcctggacccaccgttcac

SEQ ID NO: 531942 - DNA, 60 bp, Artificial
  Synthetic oligonucleotide
cgaggcctcaaagccgcttccctctggctttccctccaaaccgccctcacttacttctca

SEQ ID NO: 531943 - DNA, 59 bp, Artificial
  Synthetic oligonucleotide
tcattggtccgcttccccacccctcgtaggtgcactccctcaccccgccactgaacgtc

SEQ ID NO: 531944 - DNA, 58 bp, Artificial
  Synthetic oligonucleotide
caccgctgatcaatctttcgaccccctttacgcctacaccctcacttggtggcaacgc

SEQ ID NO: 531945 - DNA, 55 bp, Artificial
  Synthetic oligonucleotide
gccgcttccctctggctttccctccaaaccgccctcacttacttctcaggtggct

SEQ ID NO: 531946 - DNA, 55 bp, Artificial
  Synthetic oligonucleotide
cgacacttttcccgtttcctgcaaaggtcaagggttgacggttgaccaaacaccg

SEQ ID NO: 531947 - DNA, 55 bp, Artificial
  Synthetic oligonucleotide
ccctacattgacctctactgtgcctggacccaccgttcaccccgaaacgttgccc

SEQ ID NO: 531948 - DNA, 55 bp, Artificial
  Synthetic oligonucleotide
cacgctttcgactccatcgttgacttcgccccttcgcattccgtccgcctttgtc

SEQ ID NO: 531949 - DNA, 53 bp, Artificial
  Synthetic oligonucleotide
agacgcccgaacctccttcctctcaagacagacccaaggacttcgccactccc

SEQ ID NO: 531950 - DNA, 51 bp, Artificial
  Synthetic oligonucleotide
aaacgctttctacaccgttcgagactcagcccgttatgaaaagcaagacct

SEQ ID NO: 531951 - DNA, 50 bp, Artificial
  Synthetic oligonucleotide
cccctcccgacctccaacatttgtctcttcagagccctgtccattcttct

SEQ ID NO: 531952 - DNA, 60 bp, Artificial
  Synthetic oligonucleotide
gccggcaagtgctgggtccatcatgacacgatggataagagaggtgcaattcctcccctt

SEQ ID NO: 531953 - DNA, 60 bp, Artificial
  Synthetic oligonucleotide
gattgaggtagacgaggtcgagacacgcagaactacgttgcgttgtcccgccgatgtcac

SEQ ID NO: 531954 - DNA, 60 bp, Artificial
  Synthetic oligonucleotide
gcgaggaacagacgcttattgctacacgggcatacccagaattccagataactttctaca

SEQ ID NO: 531955 - DNA, 60 bp, Artificial
  Synthetic oligonucleotide
gagatatggtcatagtaccactttttgatatatctcttgagaccagtaagaggacacgca

SEQ ID NO: 531956 - DNA, 60 bp, Artificial
  Synthetic oligonucleotide
gctatgatattggcggtaacttccctgtgcatatgcttaaaggcagatcatacgtgcact

SEQ ID NO: 531957 - DNA, 60 bp, Artificial
  Synthetic oligonucleotide
ctccgtgcgataatgttcatgctggagcgagcttaatgtggaatttttcagccaagctat

SEQ ID NO: 531958 - DNA, 60 bp, Artificial
  Synthetic oligonucleotide
cgtttgaccgcgaagtcgcgggttcgtgaatacaccacgaatagtggggagcattacccc

SEQ ID NO: 531959 - DNA, 60 bp, Artificial; identical to SEQ ID NO: 416200
  Synthetic oligonucleotide

SEQ ID NO: 531960 - DNA, 60 bp, Artificial
  Synthetic oligonucleotide
cgtacaatcttacaaggtcggcaaggatattcggcctcttccctctgaaaaagtcggaag

SEQ ID NO: 531961 - DNA, 60 bp, Artificial
  Synthetic oligonucleotide
cctggtagcatcactatctgctgcggtgtcgaatcttgtcaagatcataaaggatactgc

SEQ ID NO: 531962 - DNA, 60 bp, Artificial
  Synthetic oligonucleotide
gtgtctatgtctttgtgcgatatcgcgtatgtatatggagacgcacagcagattccgtac

SEQ ID NO: 531963 - DNA, 60 bp, Artificial
  Synthetic oligonucleotide
ccgactgccaagagtcatgcgtggggcgttgttgagactcacgcgaggaaataccacgtt

SEQ ID NO: 531964 - DNA, 60 bp, Artificial
  Synthetic oligonucleotide
ccattcagtatgagtatccagcctcgcagactattgtgtatcacagtaagcatgttaatg

SEQ ID NO: 531965 - DNA, 60 bp, Artificial
  Synthetic oligonucleotide
tacgcacccaggatcaagttaaacctacagcacgcatcacattagttgatggcgttactg

SEQ ID NO: 531966 - DNA, 60 bp, Artificial
  Synthetic oligonucleotide
aacagtcttaaagttgatttagacgtagtgtcgaaagtactggctggtcttacgactgga

SEQ ID NO: 531967 - DNA, 60 bp, Artificial
  Synthetic oligonucleotide
aatcaaggaacgttcgagggaatacttagaacccatactaaggacctctgtagaacgacc

SEQ ID NO: 531968 - DNA, 60 bp, Artificial
  Synthetic oligonucleotide
aattaaagtggcgggtgatgcattagagatcagggtgcctgatctatatgtaactttcca

SEQ ID NO: 531969 - DNA, 60 bp, Artificial
  Synthetic oligonucleotide
aattgcagcttgtttgtgtagtattctccctctcgaaaagtgctataaggctgcgttctg

SEQ ID NO: 531970 - DNA, 60 bp, Artificial
  Synthetic oligonucleotide
actggatatgtacacagctgatcgtcttaccaaatagcaattacagatccgaccgttcat

SEQ ID NO: 531971 - DNA, 60 bp, Artificial
  Synthetic oligonucleotide
actggcttccaaaaatgagagatatggtcatagtaccactttttgatatatctcttgaga

SEQ ID NO: 531972 - DNA, 60 bp, Artificial
  Synthetic oligonucleotide
agcaaatgcaacacactggcagggtgtacgccatcgcgttacacagcatctatgatattc

SEQ ID NO: 531973 - DNA, 60 bp, Artificial
  Synthetic oligonucleotide
agtcgctagaccgtagaccgaagatccatttttctcgagcactcagtcaggaccaagttg

SEQ ID NO: 531974 - DNA, 60 bp, Artificial
  Synthetic oligonucleotide
tgcgtacgaaaacgcatagtgcttaccgatccacttaaatagaatcggggacaacttccg

SEQ ID NO: 531975 - DNA, 60 bp, Artificial
  Synthetic oligonucleotide
atcctgacaatagaaccgatttccgcaccgtcatgtcctttattgagagtgtaaggtcca

SEQ ID NO: 531976 - DNA, 60 bp, Artificial
  Synthetic oligonucleotide
atgtcgcattagctctgcaagatcaagagaaagcttcggaaggtgcgctcgtagttacct

SEQ ID NO: 531977 - DNA, 60 bp, Artificial
  Synthetic oligonucleotide
tgacgatgcgactgtggccgtaagatcacaattgcagttgttattcgatgcactttctgg

SEQ ID NO: 531978 - DNA, 60 bp, Artificial
  Synthetic oligonucleotide
tcctgcataccaagcttgcggttctaaaagacgatctgatgatcagcaagtttagttttg

SEQ ID NO: 531979 - DNA, 60 bp, Artificial
  Synthetic oligonucleotide
cactagtcagactagaccccactcaactttcaattgccgaaaaagggtcgcctcatttgc

SEQ ID NO: 531980 - DNA, 58 bp, Artificial
  Synthetic oligonucleotide
tcgagggtaattattaacggagtaactgcgaggtctgagtgggatgtggataagtctt

SEQ ID NO: 531981 - DNA, 57 bp, Artificial
  Synthetic oligonucleotide
cgtgccgatcgaagatggttactatccattagccatcgagatagccacacttgttga

SEQ ID NO: 531982 - DNA, 56 bp, Artificial
  Synthetic oligonucleotide
ggaactttgaagcaaaactgttcaaaaaacagtatggttacttctgcggaaggtat

SEQ ID NO: 531983 - DNA, 55 bp, Artificial
  Synthetic oligonucleotide
gctgttctaaaagacgatctaatgatcagcaagtttagttttggtccaaagacag

SEQ ID NO: 531984 - DNA, 55 bp, Artificial
  Synthetic oligonucleotide
ggatgggtgaaatcagtggatcaagtcctagaagtgagtatcccagaatttgtga

SEQ ID NO: 531985 - DNA, 55 bp, Artificial
  Synthetic oligonucleotide
ggttacaatgctgtcaatacagtgcatgaggttcaaggtgaaacatatagagacg

SEQ ID NO: 531986 - DNA, 55 bp, Artificial
  Synthetic oligonucleotide
gctctgcaagatcaagagaaagcttcggaaggtgcgctcgtagttacctcaagag

SEQ ID NO: 531987 - DNA, 55 bp, Artificial
  Synthetic oligonucleotide
gcatcacatctgttcaaaggacgggcgtacgtacactgttgtatgcccaacttgg

SEQ ID NO: 531988 - DNA, 55 bp, Artificial
  Synthetic oligonucleotide
gcaacaatattgaaaaggtgtgatgacatttctgatcttgaacttccttctgtgg

SEQ ID NO: 531989 - DNA, 55 bp, Artificial
  Synthetic oligonucleotide
gatatgtacaaggtcgatgcaggtacccaatagcaattacaggttgactcggtgt

SEQ ID NO: 531990 - DNA, 55 bp, Artificial
  Synthetic oligonucleotide
agtgaggtgtggaaaccgtcaccccaagtcactgtcaggtttcctgcaaatgact

SEQ ID NO: 531991 - DNA, 55 bp, Artificial
  Synthetic oligonucleotide
ctttgcaaacaattgtttatcatagcaaggatattaatgcaatcttcgggcccgc

SEQ ID NO: 531992 - DNA, 55 bp, Artificial
  Synthetic oligonucleotide
cgtgatgtgaccaaaagatgcccagtggatgttacccattttctcaatggtgtgt

SEQ ID NO: 531993 - DNA, 55 bp, Artificial
  Synthetic oligonucleotide
cggcgatgttctcaccttttcgtttctagaggagtcatctttggtgtacacacat

SEQ ID NO: 531994 - DNA, 55 bp, Artificial
  Synthetic oligonucleotide
cgaaggggacgatggtatgaatgaactcatctgtctatctgaccgcgcccctgtc

SEQ ID NO: 531995 - DNA, 55 bp, Artificial
  Synthetic oligonucleotide
caaggtcgatgctggtacccaatagcaattacaggtcgactcggtgtttaggggt

SEQ ID NO: 531996 - DNA, 55 bp, Artificial
  Synthetic oligonucleotide
cctcaattggtctaccacttgcaggtgtttcaggtgagaagaacatgtccttcac

SEQ ID NO: 531997 - DNA, 55 bp, Artificial
  Synthetic oligonucleotide
caatggtacgacaactgcttcccaatgggatgtcgacaagtcacaccttaaagac

SEQ ID NO: 531998 - DNA, 55 bp, Artificial
  Synthetic oligonucleotide
ccaccgatcgcaagaggataggttcttgcgccccgtactccgaaccgctgtggag

SEQ ID NO: 531999 - DNA, 54 bp, Artificial
  Synthetic oligonucleotide
ttttggttgcactgtcaaggcatacatgttcgctcaagtactacacagttgtaa

SEQ ID NO: 532000 - DNA, 54 bp, Artificial
  Synthetic oligonucleotide
cacacacagttggacgacgcagtctgggaggtccataagaccgccccggctggt

SEQ ID NO: 532001 - DNA, 53 bp, Artificial
  Synthetic oligonucleotide
gttgaagaatagtcgagactcatacattgggaagccgaatccgttagtttgcg

SEQ ID NO: 532002 - DNA, 53 bp, Artificial
  Synthetic oligonucleotide
tttagtggacaagaggatggaaagggctaatgaagcaacacttggatcctact

SEQ ID NO: 532003 - DNA, 52 bp, Artificial
  Synthetic oligonucleotide
tacctttaagtgtcgagattgcgtgtttagtacaattttctaattgtgtgtt

SEQ ID NO: 532004 - DNA, 52 bp, Artificial
  Synthetic oligonucleotide
cctaactatgcaattaccactcaggacgctttgaagaatgtctggcaggtct

SEQ ID NO: 532005 - DNA, 52 bp, Artificial
  Synthetic oligonucleotide
gtatgagcacaaaaaccttcacaaagaaacccggaagatgaatgttgcttct

SEQ ID NO: 532006 - DNA, 52 bp, Artificial
  Synthetic oligonucleotide
cgaaccgttgattcatttacgatgaattacggtaaaggcacacgctgtcaat

SEQ ID NO: 532007 - DNA, 52 bp, Artificial
  Synthetic oligonucleotide
gaagggatgcgagttcccggatgtacaacattccgcaaatctcatgtggaac

SEQ ID NO: 532008 - DNA, 50 bp, Artificial
  Synthetic oligonucleotide
tcaagaatttgatcggtgctgcagaatttgaaccttcgaggtaccctgag

SEQ ID NO: 532009 - DNA, 50 bp, Artificial
  Synthetic oligonucleotide
gcaaaagttatagtcgcggttctgagcaatgaaagcggtctcacgctcac

SEQ ID NO: 532010 - DNA, 60 bp, Artificial
  Synthetic oligonucleotide
acgtgatatggaattcactattcattggaaccaagatagacaattcttggaaattcgcaa

SEQ ID NO: 532011 - DNA, 60 bp, Artificial
  Synthetic oligonucleotide
cagatcaactttctgtaccatatatcgcacaaaagtggtcatatctaacacgtacacctt

SEQ ID NO: 532012 - DNA, 60 bp, Artificial
  Synthetic oligonucleotide
ttgatccaagtgtgggtcagaatggtaataattgtctggatcggccacttacatttgttc

SEQ ID NO: 532013 - DNA, 60 bp, Artificial
  Synthetic oligonucleotide
ctactccaagtgacagcgctcccagtggttctggtgagattgacactattgatatagctg

SEQ ID NO: 532014 - DNA, 60 bp, Artificial
  Synthetic oligonucleotide
tagagctgaaattgaaccacgttctccaatgaatttccaagaagatgtccaggtgtctca

SEQ ID NO: 532015 - DNA, 60 bp, Artificial
  Synthetic oligonucleotide
tacaagttgtataaacacttaagctcagctactatggatgagcaaggaaatggtatgtca

SEQ ID NO: 532016 - DNA, 59 bp, Artificial
  Synthetic oligonucleotide
ttgacggtatgaaattcgttgatgccatgaaacctactacatctatgggatggccagtt

SEQ ID NO: 532017 - DNA, 57 bp, Artificial
  Synthetic oligonucleotide
agaacatctggaggtttacgagaagccccattcgctttttgcgtattcggtaaatcc

SEQ ID NO: 532018 - DNA, 57 bp, Artificial
  Synthetic oligonucleotide
gagataccgcatctaggtttactgcgtaaccaaagcgattttcaaagagtagtactt

SEQ ID NO: 532019 - DNA, 56 bp, Artificial
  Synthetic oligonucleotide
ttgctgggatagctttcccatgtgtattaatctacccgtcggaaagctatttttcc

SEQ ID NO: 532020 - DNA, 55 bp, Artificial
  Synthetic oligonucleotide
gtggcagtacctacaatgtattaccacgatcccactcctacttaaatcctagttc

SEQ ID NO: 532021 - DNA, 55 bp, Artificial
  Synthetic oligonucleotide
gtccgacacttgaaattgaatctccttactatcgtagtgtgagatatgagcctac

SEQ ID NO: 532022 - DNA, 55 bp, Artificial
  Synthetic oligonucleotide
gggatgctgtagctttgatgacttacggagatgatgttaaaatgtccgtatcacc

SEQ ID NO: 532023 - DNA, 55 bp, Artificial
  Synthetic oligonucleotide
ctagttcatgtcgaattaggcgaacgattcagtaatggattattcgttggggcta

SEQ ID NO: 532024 - DNA, 55 bp, Artificial
  Synthetic oligonucleotide
cgccatgtggacgaatgtccgtgtgtcggtggttcggtggtgtcccgacagacac

SEQ ID NO: 532025 - DNA, 54 bp, Artificial
  Synthetic oligonucleotide
ttgtatgaaaaccaccgagcgtggtttcgaacaagtactcaactatggcgagaa

SEQ ID NO: 532026 - DNA, 51 bp, Artificial
  Synthetic oligonucleotide
caatgttggggattgaaataaatagggcgacttttacaccgcatagtctca

SEQ ID NO: 532027 - DNA, 60 bp, Artificial
  Synthetic oligonucleotide
cttcgagtttgtgtaacgtatcgtcatctctctgtgcacatgagtcttcattgagtccat

SEQ ID NO: 532028 - DNA, 60 bp, Artificial
  Synthetic oligonucleotide
tctcccataggtaaattgtactccaatatatcggagatcaattggtgcctcataattagt

SEQ ID NO: 532029 - DNA, 60 bp, Artificial
  Synthetic oligonucleotide
ctgttgaagtcgaatggtgggataatcccatggtgtctgtatgggatcatgaatttcttc

SEQ ID NO: 532030 - DNA, 60 bp, Artificial
  Synthetic oligonucleotide
ctgtgtctgaggggcgcgtggtattgcgctgaaaaagttaagtttctctctccaaaaact

SEQ ID NO: 532031 - DNA, 60 bp, Artificial
  Synthetic oligonucleotide
tctccaacatgagaatccctgtacatgaccctcaacatattatgtatcccttcctccata

SEQ ID NO: 532032 - DNA, 60 bp, Artificial
  Synthetic oligonucleotide
ctgtaaaaacgtccaaacggttttactgcgcggtaataaaaaactactttcacctcagag

SEQ ID NO: 532033 - DNA, 60 bp, Artificial
  Synthetic oligonucleotide
atgacgataatacccctcatttaaaactaacaggcgcgtcgcagtgcgctgataaagctg

SEQ ID NO: 532034 - DNA, 60 bp, Artificial
  Synthetic oligonucleotide
ctcgtcggaactccgattaaggcacttccggtcaccaatttgcgacacgcgcggcgggtg

SEQ ID NO: 532035 - DNA, 60 bp, Artificial
  Synthetic oligonucleotide
tgaactcttcgtacgtggcatccttgtacatcacctctagcgtggtctgtatgccctctt

SEQ ID NO: 532036 - DNA, 60 bp, Artificial
  Synthetic oligonucleotide
tgaagtcgaatggcacaatgatcccgtcgtggccgtatggtatggagaaccttcgcctta

SEQ ID NO: 532037 - DNA, 60 bp, Artificial
  Synthetic oligonucleotide
ctccaataggtaaatttgtctccgatatatcggagatcaattggtgcctcataattggtc

SEQ ID NO: 532038 - DNA, 60 bp, Artificial
  Synthetic oligonucleotide
tgaatcagcacccctcaacttgacattaataataaacaccaaactcttctgattagtata

SEQ ID NO: 532039 - DNA, 60 bp, Artificial
  Synthetic oligonucleotide
tgaattataacattgaatgagttgttactcttcaacttcacatcgataatgaatttcaaa

SEQ ID NO: 532040 - DNA, 60 bp, Artificial
  Synthetic oligonucleotide
ctataatgaattccagccccttcgtgttgttgtatttgatggtcatatttatttggtgtg

SEQ ID NO: 532041 - DNA, 60 bp, Artificial
  Synthetic oligonucleotide
cgttattagacactcagttataaatatggtctttattcattaatagtcgtattacattca

SEQ ID NO: 532042 - DNA, 60 bp, Artificial
  Synthetic oligonucleotide
cgtgtttcattgttgttcatatgcctactagtggagatatttatgtttgatagtgacatg

SEQ ID NO: 532043 - DNA, 60 bp, Artificial
  Synthetic oligonucleotide
cggtgactcgatgaacagcatagggggtggcccggaggggttacgaagcgtgttcattga

SEQ ID NO: 532044 - DNA, 60 bp, Artificial
  Synthetic oligonucleotide
cggtaccactacgctacgcagcagccttagctacgccggagcttagctcgccaccgttat

SEQ ID NO: 532045 - DNA, 60 bp, Artificial
  Synthetic oligonucleotide
tccgaaaacgttgtcgtttgaaggagactgtgtggttttaccatttactgtgtggtaaat

SEQ ID NO: 532046 - DNA, 60 bp, Artificial
  Synthetic oligonucleotide
gacgggaagctcattgacatccgctgtgtcgtgggtgacctgggctgcactgtattaata

SEQ ID NO: 532047 - DNA, 60 bp, Artificial
  Synthetic oligonucleotide
gacctgggcaatgcaattgggcctgaattttatgggcctctattattgggctctgttatt

SEQ ID NO: 532048 - DNA, 60 bp, Artificial
  Synthetic oligonucleotide
tccgacctgtgcgggccccacactcggtcaatgagtcaaatgggttctctttttaaatgg

SEQ ID NO: 532049 - DNA, 60 bp, Artificial
  Synthetic oligonucleotide
gaccgtgtggcgaatagccgaatgtggacaataattgaatcagcacccctcaacttgaca

SEQ ID NO: 532050 - DNA, 60 bp, Artificial
  Synthetic oligonucleotide
tcctcatgtcggaacgcatcaaacgtggtgtccctatacatgatatgtaacatactccgg

SEQ ID NO: 532051 - DNA, 60 bp, Artificial
  Synthetic oligonucleotide
gaccaagcgcatgtcttgactggatttgacttctaatgggccaatttaatgggttgaaaa

SEQ ID NO: 532052 - DNA, 60 bp, Artificial
  Synthetic oligonucleotide
tcgaatgatgccatcctatacatgatggctaatatgtttttgattccctcttccaaatta

SEQ ID NO: 532053 - DNA, 60 bp, Artificial
  Synthetic oligonucleotide
gacaccaatggtaattgggacaccgatacatcggttcctctattagtgccccaatgtgca

SEQ ID NO: 532054 - DNA, 60 bp, Artificial
  Synthetic oligonucleotide
gaatttcttcttggctaatgccggtgactttgttgatgctagttcaatccttacaaggat

SEQ ID NO: 532055 - DNA, 60 bp, Artificial
  Synthetic oligonucleotide
gaatttcaaacccgtttcactctgatatatgatcgtcattttagatgtgcaacacctaac

SEQ ID NO: 532056 - DNA, 60 bp, Artificial
  Synthetic oligonucleotide
gaattgtgatatatggactgtaatgatttacgtgtttcattgttgttcatatgcctacta

SEQ ID NO: 532057 - DNA, 60 bp, Artificial
  Synthetic oligonucleotide
tcggttcctctattagtgccccaatgtgcaatttccaaaaatacccttatccctgtgtct

SEQ ID NO: 532058 - DNA, 60 bp, Artificial
  Synthetic oligonucleotide
gaacgatcccctcatacttgattagcgatggtgacttcgtggatagtatccccatgtgaa

SEQ ID NO: 532059 - DNA, 60 bp, Artificial
  Synthetic oligonucleotide
gaaatacccccgcttttatcagtaataggcgcgtcggagtgcggtgttaaagttaacatt

SEQ ID NO: 532060 - DNA, 60 bp, Artificial
  Synthetic oligonucleotide
tcgttgtgggacccacttgttagatctgcagaataaatgggcctttttatgctattgggc

SEQ ID NO: 532061 - DNA, 60 bp, Artificial
  Synthetic oligonucleotide
tctatctttgccccgttgtatgcgaatacgaaattcgctatgatgctcccttcaaagccg

SEQ ID NO: 532062 - DNA, 60 bp, Artificial
  Synthetic oligonucleotide
tctcagaggtaaataaacgggacaccaatggtaattgggacaccgatacatcggttcctc

SEQ ID NO: 532063 - DNA, 60 bp, Artificial
  Synthetic oligonucleotide
tggtgtggattatacatgagtctggtcctgttaaataatgctgggaattgtgctatatgg

SEQ ID NO: 532064 - DNA, 60 bp, Artificial
  Synthetic oligonucleotide
ccgacctccgattctggcacttccggtcaccaatttgcgacacgcgcggcgttgtgtacc

SEQ ID NO: 532065 - DNA, 60 bp, Artificial
  Synthetic oligonucleotide
ccgaattgatcaccgatatatcggtgatcaataattgtgaactgaccaaaatacccctgt

SEQ ID NO: 532066 - DNA, 60 bp, Artificial
  Synthetic oligonucleotide
ccgaaaactaattaatcagtaattactgctccgtaaatctgaaacaaattaacccattgg

SEQ ID NO: 532067 - DNA, 60 bp, Artificial
  Synthetic oligonucleotide
cccttatctctgtgtctaaagggcgcgtgctattgcgctgaaaaagttaagtttctctct

SEQ ID NO: 532068 - DNA, 60 bp, Artificial
  Synthetic oligonucleotide
cccctatttctgtgtctggaaggcgcgtggtaatgctctgaaaaagtaggttttctctct

SEQ ID NO: 532069 - DNA, 60 bp, Artificial
  Synthetic oligonucleotide
cccccgggtaaatatcggaggcaccaataggtaaatgagcccccaattgaggcaccgata

SEQ ID NO: 532070 - DNA, 60 bp, Artificial
  Synthetic oligonucleotide
cccaaggttatttgtaccccaatagcctgggtaatttgtactccattacaccgattgtgt

SEQ ID NO: 532071 - DNA, 60 bp, Artificial
  Synthetic oligonucleotide
ccatgtcttcttgcctgaattcccatatggtagactctttgtacattattttgaggcagt

SEQ ID NO: 532072 - DNA, 60 bp, Artificial
  Synthetic oligonucleotide
tgtcgaaattctctaacatgagaatccttgtacatgatcctcaacatattatgtatccct

SEQ ID NO: 532073 - DNA, 60 bp, Artificial
  Synthetic oligonucleotide
tgtgaggtgaaacatgagtgcttcccattatataggcgtcatatatctggatatatgaac

SEQ ID NO: 532074 - DNA, 60 bp, Artificial
  Synthetic oligonucleotide
tgtggtaaatggtaaattactgaagaatgggtaaatatagaagtctccaataggtaaatt

SEQ ID NO: 532075 - DNA, 60 bp, Artificial
  Synthetic oligonucleotide
ccacgcggtaaagtagtaattaataattactgaggtgaatgggttaaaaaatgagacccc

SEQ ID NO: 532076 - DNA, 60 bp, Artificial
  Synthetic oligonucleotide
ccacatatatggacatcagtcatttacgtggttcaataatcatcatattaagtggagttg

SEQ ID NO: 532077 - DNA, 60 bp, Artificial
  Synthetic oligonucleotide
tgttgttggtgatatgtgtgttaaatatgcattgctggtttgtggttggaatttaaacgg

SEQ ID NO: 532078 - DNA, 60 bp, Artificial
  Synthetic oligonucleotide
ccaaagataatagggaatttattcataaaacattaatcttattacatggaaaatacgtat

SEQ ID NO: 532079 - DNA, 60 bp, Artificial
  Synthetic oligonucleotide
catttgggggctttagatataagagcccccaatatatcgggggctcagtgagagaattaa

SEQ ID NO: 532080 - DNA, 60 bp, Artificial
  Synthetic oligonucleotide
tgtttctctctccaaaaactccccggagctccgattaagggccttccggtcatcaaattg

SEQ ID NO: 532081 - DNA, 60 bp, Artificial
  Synthetic oligonucleotide
tgcaacccatgcagtcccgtgttttctgctatcaccatgtcgactatctctactatgtct

SEQ ID NO: 532082 - DNA, 60 bp, Artificial
  Synthetic oligonucleotide
cggagtcaatgagtcaaatgggctcttaattgagttggaccagtagattcgtaactgggc

SEQ ID NO: 532083 - DNA, 60 bp, Artificial
  Synthetic oligonucleotide
tgcaagtaatttgatacatgggattgatttacgtgtttcattgttgttcatataggttat

SEQ ID NO: 532084 - DNA, 60 bp, Artificial
  Synthetic oligonucleotide
tgcggcggtgtgtacccctgggagggtaggtaccactacgctacgcagcagccttagcta

SEQ ID NO: 532085 - DNA, 60 bp, Artificial
  Synthetic oligonucleotide
cgattccgatctccgatcacgacacgcgcgggcggtgggacatgttaaatgcccaaaccg

SEQ ID NO: 532086 - DNA, 60 bp, Artificial
  Synthetic oligonucleotide
cgatatatcggtgcctcggagagagaaataaatcccggattccgtaaatgcccctaattc

SEQ ID NO: 532087 - DNA, 60 bp, Artificial
  Synthetic oligonucleotide
cgagaggaaaaacaacacatgatgcataataacacacgtaaagcactaataaccacaata

SEQ ID NO: 532088 - DNA, 60 bp, Artificial
  Synthetic oligonucleotide
cgaatggtggtattatcccattgtgcctgtatgggattatgaatttcttcttggccaatg

SEQ ID NO: 532089 - DNA, 60 bp, Artificial
  Synthetic oligonucleotide
cgaatggaggtacaattccatcatggccgtatggaatcgagaattgccgcttcacaagaa

SEQ ID NO: 532090 - DNA, 60 bp, Artificial
  Synthetic oligonucleotide
ccttgaaagttaaattcccaaaatacccttatccctgtgtctgagaagcgcgtggtattg

SEQ ID NO: 532091 - DNA, 60 bp, Artificial
  Synthetic oligonucleotide
ccttatacttgagttacttactgttttaccgaacggtaaaatagtaattgatatttacac

SEQ ID NO: 532092 - DNA, 60 bp, Artificial
  Synthetic oligonucleotide
tgggagggtaggtaccactacgctacgcagcagccttagctacgccggagcttagctcgc

SEQ ID NO: 532093 - DNA, 60 bp, Artificial
  Synthetic oligonucleotide
cctgggagggtagaaaccactacgctacgcagcagccttagctacgccggaacttaactc

SEQ ID NO: 532094 - DNA, 60 bp, Artificial
  Synthetic oligonucleotide
cctgggagggtagtacgctacgcagcagccttagctacgccggagcttagctcgcccacg

SEQ ID NO: 532095 - DNA, 60 bp, Artificial
  Synthetic oligonucleotide
cctgggagggtaggtaccggtaccactacgctacgcagcagccttagctacgccggagct

SEQ ID NO: 532096 - DNA, 60 bp, Artificial
  Synthetic oligonucleotide
cctcacaatgtaaaaatcttggacccaataggtaaattgtccccaatatatcggtgccta

SEQ ID NO: 532097 - DNA, 60 bp, Artificial
  Synthetic oligonucleotide
ccgattgtgtctccaatgtattggagacacaattggagtcatatgacctcaattccgatt

SEQ ID NO: 532098 - DNA, 60 bp, Artificial
  Synthetic oligonucleotide
ggttacgaagcgtgttcattgaccccagtgcagcccatgactcgatgaacagcgtagggg

SEQ ID NO: 532099 - DNA, 60 bp, Artificial
  Synthetic oligonucleotide
ggttacgaagcgtgttcattcaacgaccagtgcagcctatgactcgatgaacagcatagg

SEQ ID NO: 532100 - DNA, 60 bp, Artificial
  Synthetic oligonucleotide
ggtgttatttccctctaattacccaaggttatttgtaccccaatagcctgggtaatttgt

SEQ ID NO: 532101 - DNA, 60 bp, Artificial
  Synthetic oligonucleotide
ggtgtacctattggtgtctcaagagtgaatttccaaaaatacccttatctctgtgtctta

SEQ ID NO: 532102 - DNA, 60 bp, Artificial
  Synthetic oligonucleotide
ggtgactttgttgatgctagttcaatccttacaaggattgaagtgtcttcctgtaacttg

SEQ ID NO: 532103 - DNA, 60 bp, Artificial
  Synthetic oligonucleotide
ggtgaacaaaaaacccggaatagaggaaaacaaggactgagaagaagcgaacttgagtgc

SEQ ID NO: 532104 - DNA, 60 bp, Artificial
  Synthetic oligonucleotide
ggtcttgcctaaaatacccccatttctgtgtctggaaggcgcgtggaagtgcgctgaaaa

SEQ ID NO: 532105 - DNA, 60 bp, Artificial
  Synthetic oligonucleotide
ggtaggtaccgtcgattacgggtacactacgctacgcagcagccttagctacgccggagc

SEQ ID NO: 532106 - DNA, 60 bp, Artificial
  Synthetic oligonucleotide
ggtaatttgtactccattacaccgattgtgtctccaatgtattggagacacaattggagt

SEQ ID NO: 532107 - DNA, 60 bp, Artificial
  Synthetic oligonucleotide
taaagggcgcgtgctattgcgctgaaaaagttaagtttctctctccagaaactaaccgga

SEQ ID NO: 532108 - DNA, 60 bp, Artificial
  Synthetic oligonucleotide
taaccaaaaaaccgtcccaaaaaacagtccgtacattaaagcaggcagtcctcatcctcc

SEQ ID NO: 532109 - DNA, 60 bp, Artificial
  Synthetic oligonucleotide
taactacaggggcttcattcatgatcaatatatcaacaagttcggtcatgtcctcatgtc

SEQ ID NO: 532110 - DNA, 60 bp, Artificial
  Synthetic oligonucleotide
taagtctgtgtctggaaggcgcgtggtaatgcgctgaaaaaggtgaccgtctctctccta

SEQ ID NO: 532111 - DNA, 60 bp, Artificial
  Synthetic oligonucleotide
taatcagtaattactgcgcagtaaatgtgaataaaattaacccgaggggttaattttgga

SEQ ID NO: 532112 - DNA, 60 bp, Artificial
  Synthetic oligonucleotide
tacatatagttgaatacgtatagctacgtattcatacatctgaatttatgaatacatcat

SEQ ID NO: 532113 - DNA, 60 bp, Artificial
  Synthetic oligonucleotide
ggggctcttaacttactttcctaaaatacccctgtccctgtgtctggtaggcgcgtgaga

SEQ ID NO: 532114 - DNA, 60 bp, Artificial
  Synthetic oligonucleotide
tacccctgggagggtaggtaccactacgctacgcagcagccttagctacgccggagctta

SEQ ID NO: 532115 - DNA, 60 bp, Artificial
  Synthetic oligonucleotide
gttacgaagcgtgttcattgaccgtgttcagtgcatccggtgactcgatgaacagcatag

SEQ ID NO: 532116 - DNA, 60 bp, Artificial
  Synthetic oligonucleotide
gttacgaagcgtgttcattgaccgtgttgttgtctcataaccagtgcagccggtgactcg

SEQ ID NO: 532117 - DNA, 60 bp, Artificial
  Synthetic oligonucleotide
gttaaaaaatgaagtctcccataggtaaattgtactccaatatatcggagatcaattggt

SEQ ID NO: 532118 - DNA, 60 bp, Artificial
  Synthetic oligonucleotide
gttgaagtcgaaagggggtattatcccgtcgtggccgtatggtattgtgaacttcctctt

SEQ ID NO: 532119 - DNA, 60 bp, Artificial
  Synthetic oligonucleotide
gtggttcattgttgttcatgtaactactagtggagatatttatgattgatagtgacataa

SEQ ID NO: 532120 - DNA, 60 bp, Artificial
  Synthetic oligonucleotide
gtctggaaggcgcgtggaagtgcgctgaaaaaagtgttcttctctcacctaaaacccacc

SEQ ID NO: 532121 - DNA, 60 bp, Artificial
  Synthetic oligonucleotide
gtctcatatttcgcactttacgaaactacccccgcttttatcagtataaggcgcgtcgga

SEQ ID NO: 532122 - DNA, 60 bp, Artificial
  Synthetic oligonucleotide
gtcatatatcatgatttatggacataattcatatacgtggtctaatatgtagcatatgaa

SEQ ID NO: 532123 - DNA, 60 bp, Artificial
  Synthetic oligonucleotide
gttgaccgtaaatgggccttctgtagcagttggacctagaaatgaaatgggccgggaaca

SEQ ID NO: 532124 - DNA, 60 bp, Artificial
  Synthetic oligonucleotide
gtagctattgggcttactaattaattgggccttggaccgattattttgcgttttggcctg

SEQ ID NO: 532125 - DNA, 60 bp, Artificial
  Synthetic oligonucleotide
gttgtgtacccctgggagggtaggtaccactacgctacgcagcatccttagctacgccgg

SEQ ID NO: 532126 - DNA, 60 bp, Artificial
  Synthetic oligonucleotide
gtacattattttgagacagtgtttgatgccttcttctaagctgttaaagtcgaatggtgg

SEQ ID NO: 532127 - DNA, 60 bp, Artificial
  Synthetic oligonucleotide
gtacacattttattcaaatgaaactctcaatagagtcacgcacatacattagtacataca

SEQ ID NO: 532128 - DNA, 60 bp, Artificial
  Synthetic oligonucleotide
gtaaaatcgtcatgacgattttactgcgcggtaataaaaaactactttcatctcagaggt

SEQ ID NO: 532129 - DNA, 60 bp, Artificial
  Synthetic oligonucleotide
gtttctctctccaaaaactcaccggaagtccggttgaggctcttccgatcatcaatttgc

SEQ ID NO: 532130 - DNA, 60 bp, Artificial
  Synthetic oligonucleotide
ggttatgcaattgggcctttaatgaatgggctgtatcttaatgtaaatttctattgggct

SEQ ID NO: 532131 - DNA, 60 bp, Artificial
  Synthetic oligonucleotide
gcgcgtcggagtgcgccgataaagttaacattctctctcctaaaatcgtcggagatggcc

SEQ ID NO: 532132 - DNA, 60 bp, Artificial
  Synthetic oligonucleotide
tatacaattaaaccccaaaattttgcctaaattgatatagctcaattatctgcaacccat

SEQ ID NO: 532133 - DNA, 60 bp, Artificial
  Synthetic oligonucleotide
gccttagcttcgcacgtagctgaatgccgacgggaagctcattgacatccactgtgtcgg

SEQ ID NO: 532134 - DNA, 60 bp, Artificial
  Synthetic oligonucleotide
gccctctatctcttgctctatcccgttgaagtcgaaagggggtattatcccgtcgtggcc

SEQ ID NO: 532135 - DNA, 60 bp, Artificial
  Synthetic oligonucleotide
gcccaaaccgctacgctaagcagccttagcttcgcacgtagctgaatgccgacgggaagc

SEQ ID NO: 532136 - DNA, 60 bp, Artificial
  Synthetic oligonucleotide
gccataacttccgattccgatctccgatcacgacacgcgcgggcggtgggacatgttaaa

SEQ ID NO: 532137 - DNA, 60 bp, Artificial
  Synthetic oligonucleotide
gcagtgccaacccctgggagggtaggtaccggtaccactacgctacgcagcagccttagc

SEQ ID NO: 532138 - DNA, 60 bp, Artificial
  Synthetic oligonucleotide
gcaaaaaacggaaaaacaaacctaaactacgagggtcctacacgaaatttgagaaagtcc

SEQ ID NO: 532139 - DNA, 60 bp, Artificial
  Synthetic oligonucleotide
tcaacgttcgcctcttgcatcatcagaagatctatcatctcaaccatctcctcctgtttg

SEQ ID NO: 532140 - DNA, 60 bp, Artificial
  Synthetic oligonucleotide
gatcacgttgtgtctcatatttcgcactttacgaaactacccccgcttttatcagtataa

SEQ ID NO: 532141 - DNA, 60 bp, Artificial
  Synthetic oligonucleotide
gataaagctgtcggagttactttcccaaatcacaaatccgccataacttccgattccgat

SEQ ID NO: 532142 - DNA, 60 bp, Artificial
  Synthetic oligonucleotide
gataaagctgtcggaactactttcccaaatcttaaaatcgccataacttccgattccgat

SEQ ID NO: 532143 - DNA, 60 bp, Artificial
  Synthetic oligonucleotide
gagtctgttcttcttaaataatggtaggaattgtgatacatggactgtaatgatttacgt

SEQ ID NO: 532144 - DNA, 60 bp, Artificial
  Synthetic oligonucleotide
tcatatgtgcttgagctttgatcctccataccctataaatagataagaatctgtgtttat

SEQ ID NO: 532145 - DNA, 60 bp, Artificial
  Synthetic oligonucleotide
gagggtaggtacggtaccactacgctacgcagcagccttagcttcgccggagcttagctc

SEQ ID NO: 532146 - DNA, 60 bp, Artificial
  Synthetic oligonucleotide
gaggccatcttatagatggactcaatggtggtcacatgaaccgttctcccatgtccttaa

SEQ ID NO: 532147 - DNA, 60 bp, Artificial
  Synthetic oligonucleotide
tcatatgtttggtagtggagatatttgtatcagatgtgacgttgtttctaatggtgtggt

SEQ ID NO: 532148 - DNA, 60 bp, Artificial
  Synthetic oligonucleotide
gactctacaatcatgaatagtcaagtccgtacacatgagttatttactgttttaccgcac

SEQ ID NO: 532149 - DNA, 60 bp, Artificial
  Synthetic oligonucleotide
tactatgtcttcttccctgatggcactgtatccggtgtctctgtatcggttgatgagtgc

SEQ ID NO: 532150 - DNA, 60 bp, Artificial
  Synthetic oligonucleotide
gggcctttggtgatgcaattgggcctttaagttatgggttttcaattaatggactctgtg

SEQ ID NO: 532151 - DNA, 60 bp, Artificial
  Synthetic oligonucleotide
gggccttgaactgtattttaattgggctgttaacataagacgaagttgggccaaagataa

SEQ ID NO: 532152 - DNA, 60 bp, Artificial
  Synthetic oligonucleotide
tactggggcttcttccatcatgattatgtctataacttgtaccatatcttcttgcctaaa

SEQ ID NO: 532153 - DNA, 60 bp, Artificial
  Synthetic oligonucleotide
gggacaccaatggtaaatgagaccccgatacatcggtgcctctattgggtccttgaaagt

SEQ ID NO: 532154 - DNA, 60 bp, Artificial
  Synthetic oligonucleotide
ggcgcgtggtaatgcgctgaaaaaggtgaccttctctctcctaaaaactcaccggaacca

SEQ ID NO: 532155 - DNA, 60 bp, Artificial
  Synthetic oligonucleotide
ggccttgggtatgcaatttgggcctataattatgggctttatgtaacggactttgtatat

SEQ ID NO: 532156 - DNA, 60 bp, Artificial
  Synthetic oligonucleotide
ggccgtaatcatggaggcccataacttgatctataattgcctgcaccaaattaaaatgct

SEQ ID NO: 532157 - DNA, 60 bp, Artificial
  Synthetic oligonucleotide
ggcatcaatttacaacacgcgcggcggtgtgtacccctgggagggtaggtaccactacgc

SEQ ID NO: 532158 - DNA, 60 bp, Artificial
  Synthetic oligonucleotide
ggcagttcccggcatcaatttgcgacacgcgcggcggtgtgtacccctgggagggtaggt

SEQ ID NO: 532159 - DNA, 60 bp, Artificial
  Synthetic oligonucleotide
ggataatgaacttgttcttgacaagaactggagatcttgtagagaatagctgaattataa

SEQ ID NO: 532160 - DNA, 60 bp, Artificial
  Synthetic oligonucleotide
taggtaaattgatctccgatatatcggagaccagttggtgcctcataattggtcttgcct

SEQ ID NO: 532161 - DNA, 60 bp, Artificial
  Synthetic oligonucleotide
taggtaccactacgctacgcgcagccttagctacgccggaacttaactcgcccacgctct

SEQ ID NO: 532162 - DNA, 60 bp, Artificial
  Synthetic oligonucleotide
ggaagcgcagcgaaaaaaccaggaaaaagacaatcaaaggagacacatgagcaaaaaacg

SEQ ID NO: 532163 - DNA, 60 bp, Artificial
  Synthetic oligonucleotide
gcttggaccagtagattcgagactgggccatataattaaataacaaatgggctcacaatc

SEQ ID NO: 532164 - DNA, 60 bp, Artificial
  Synthetic oligonucleotide
gcttagttcgacctgaacaaggaaggaagtatctgctcccaatttgacatctattttgaa

SEQ ID NO: 532165 - DNA, 60 bp, Artificial
  Synthetic oligonucleotide
tagtggagatatttatgattgatagtgacataactatcaagcatgagtactttaattaat

SEQ ID NO: 532166 - DNA, 60 bp, Artificial
  Synthetic oligonucleotide
tataattatgggctttatgtaacggactttgtatattgggcctaattaaaataatgaagt

SEQ ID NO: 532167 - DNA, 60 bp, Artificial
  Synthetic oligonucleotide
acttccggtcatcaatttacgacacgcgcggcggtgtatacccctgggagggtaggtacc

SEQ ID NO: 532168 - DNA, 60 bp, Artificial
  Synthetic oligonucleotide
actgcttgtcttgactggatttgacttctaatgggccaatttaatgggcttggaagtgat

SEQ ID NO: 532169 - DNA, 60 bp, Artificial
  Synthetic oligonucleotide
ttgatagtgacataactatcaagcatgagtactttaattaattacatgataatctagatt

SEQ ID NO: 532170 - DNA, 60 bp, Artificial
  Synthetic oligonucleotide
ttggaagagggccttttatggattatgggtctggatattgttggtgatatttgtcttaaa

SEQ ID NO: 532171 - DNA, 60 bp, Artificial
  Synthetic oligonucleotide
actaaccggacgtccggttgaggctcttccggtcatcaatttgcgacacgcgcggcggtg

SEQ ID NO: 532172 - DNA, 60 bp, Artificial
  Synthetic oligonucleotide
acgaccagtgcagcccatgactcgatgaacagcatagggggtggcccggaggggttacga

SEQ ID NO: 532173 - DNA, 60 bp, Artificial
  Synthetic oligonucleotide
accgtgggcgagcggtgtttttggggttccaagtgggtcccaccatatccaaaagaagaa

SEQ ID NO: 532174 - DNA, 60 bp, Artificial
  Synthetic oligonucleotide
accgtgggcgagcggggtctttggcgttccatgtgggtcccacaatatccaaaggaagaa

SEQ ID NO: 532175 - DNA, 60 bp, Artificial
  Synthetic oligonucleotide
accgtgggcgagcggggtctttggcgttcaacgtgggtcccacgttgactgttgaccgta

SEQ ID NO: 532176 - DNA, 60 bp, Artificial
  Synthetic oligonucleotide
accgtgggcgagcggggattttccgatcttggtgggtcccacacggagtcaatgagtcaa

SEQ ID NO: 532177 - DNA, 60 bp, Artificial
  Synthetic oligonucleotide
accgtgggcgagcggagcttctggtgtttgaaggtgggtcccactagtatataaattggg

SEQ ID NO: 532178 - DNA, 60 bp, Artificial
  Synthetic oligonucleotide
ttgtcttaaatatgcatggctggtttgtgtttggaatttaaacggtgaactttttattga

SEQ ID NO: 532179 - DNA, 60 bp, Artificial
  Synthetic oligonucleotide
accggtggcgagctggagtcttgggttccaggggtgggacccacacctggaacactcttg

SEQ ID NO: 532180 - DNA, 60 bp, Artificial
  Synthetic oligonucleotide
ttgttgaagtcgaacggtggtatgatcccatcatggccgtatgggatcatgaacatcttc

SEQ ID NO: 532181 - DNA, 60 bp, Artificial
  Synthetic oligonucleotide
accggtggcgagcggattttttggtgtccttgtgggtcccacttgggaaatgtgcagaat

SEQ ID NO: 532182 - DNA, 60 bp, Artificial
  Synthetic oligonucleotide
accggtggcgagcgatttttttggggttgcaggtgggtcccactttacaggaaaaggaat

SEQ ID NO: 532183 - DNA, 60 bp, Artificial
  Synthetic oligonucleotide
atagttcaatctgaacaataattgaagtgtcttccttgagcttcacatcgatggtaaact

SEQ ID NO: 532184 - DNA, 60 bp, Artificial
  Synthetic oligonucleotide
ataggtaaataattgggacaccaaaggtaaatgagaccccgatacaattggtgtacctat

SEQ ID NO: 532185 - DNA, 60 bp, Artificial
  Synthetic oligonucleotide
atagggggtggcccggaggggttacgaagcgtgttcattgaccgtgttgttgtctcctaa

SEQ ID NO: 532186 - DNA, 60 bp, Artificial
  Synthetic oligonucleotide
ttccaaattattgaaatcaaacggagggattatcccttcgtggctataagggataatgaa

SEQ ID NO: 532187 - DNA, 60 bp, Artificial
  Synthetic oligonucleotide
atacccctgtccctgtgtctggaaggcgcgtgatagtggactgaaaaagtatgttttctc

SEQ ID NO: 532188 - DNA, 60 bp, Artificial
  Synthetic oligonucleotide
atacatgatatgtaacatattctggatcccctcctccaaagtattgaaatcgaatggagg

SEQ ID NO: 532189 - DNA, 60 bp, Artificial
  Synthetic oligonucleotide
agtttcgaccatgtcctcctgtcggaaatcaccaatatgagaatccttgtacatgaactt

SEQ ID NO: 532190 - DNA, 60 bp, Artificial
  Synthetic oligonucleotide
ttccatcatggccgtatggaatcgtgaattgccgcttcacaagaacaggagaccgtgtgg

SEQ ID NO: 532191 - DNA, 60 bp, Artificial
  Synthetic oligonucleotide
aggaggttaaaaattgggacaccaatggtaaatgagaccccgatacatcggtgcctctat

SEQ ID NO: 532192 - DNA, 60 bp, Artificial
  Synthetic oligonucleotide
aggaaggcgcgtgctattgcgcctacaaagttacttcctctctcctccgatggtttccaa

SEQ ID NO: 532193 - DNA, 60 bp, Artificial
  Synthetic oligonucleotide
agctgttgaagtcgattggtgggatgatcccctggtgtctgtatgggatcatgaattttt

SEQ ID NO: 532194 - DNA, 60 bp, Artificial
  Synthetic oligonucleotide
agctgttgaagtcgagtggtggaatgatcccattgtgtctgtatgggatcatgaacttct

SEQ ID NO: 532195 - DNA, 60 bp, Artificial
  Synthetic oligonucleotide
agctgaatgccgacgggaagctcattgacatccactgtgtcggaggtgacctgggctgca

SEQ ID NO: 532196 - DNA, 60 bp, Artificial
  Synthetic oligonucleotide
agcccccaattgagaccccaatatattggggtctcggagagagaaataatatccggttcc

SEQ ID NO: 532197 - DNA, 60 bp, Artificial
  Synthetic oligonucleotide
agagtttctctctcctaaaacccctccgacctccgattctggcacttccggtcaccaatt

SEQ ID NO: 532198 - DNA, 60 bp, Artificial
  Synthetic oligonucleotide
agagaaataaatcccgcatcccgaaaatacccccaagtctgtgtctggaaggcgcgtggt

SEQ ID NO: 532199 - DNA, 60 bp, Artificial
  Synthetic oligonucleotide
ttcgcggaaattacgaaaatgcaattggggcctgatatataagaggccccaatatatcgg

SEQ ID NO: 532200 - DNA, 60 bp, Artificial
  Synthetic oligonucleotide
acttggacccaataggtaaattgtccccaatatatcggtgtctattgggtacattggagt

SEQ ID NO: 532201 - DNA, 60 bp, Artificial
  Synthetic oligonucleotide
aatttggagaccccaataggtaaatgagccccaatatcaccgatatatccccgaattgat

SEQ ID NO: 532202 - DNA, 60 bp, Artificial
  Synthetic oligonucleotide
aattccgattatacccctgaaaagctgaaaggaaggcgcgtgctattgcgcctacaaagt

SEQ ID NO: 532203 - DNA, 60 bp, Artificial
  Synthetic oligonucleotide
aatggcgctataatctggtcgtatgaatatggtatgatgaatcttcgattcatcatgttt

SEQ ID NO: 532204 - DNA, 60 bp, Artificial
  Synthetic oligonucleotide
aatcatcatattaagtggagttgatggagatatggttgatagttacacgactatcaatca

SEQ ID NO: 532205 - DNA, 60 bp, Artificial
  Synthetic oligonucleotide
aatagatgcaaacaagttcgcggaaattacgaaaatgcaattggggcctgatatataaga

SEQ ID NO: 532206 - DNA, 60 bp, Artificial
  Synthetic oligonucleotide
tttgtcgagcacaagtcaatccggacaataacggaattgtcctcgctgatcttcacgttg

SEQ ID NO: 532207 - DNA, 60 bp, Artificial
  Synthetic oligonucleotide
aacagcatagggggtggcccggaggggttacgaagcgtgttcattgaccgtgttgttgtc

SEQ ID NO: 532208 - DNA, 60 bp, Artificial
  Synthetic oligonucleotide
tttgtgtttggaatttaaacggtgaactttttattgaatacgtccggttcgattacatcc

SEQ ID NO: 532209 - DNA, 60 bp, Artificial
  Synthetic oligonucleotide
aacacctaactcgaatgaatcaatttataacgaagaacgtacattatatatggacataaa

SEQ ID NO: 532210 - DNA, 60 bp, Artificial
  Synthetic oligonucleotide
tttgttatggatgtgggcagtgatattttttggtttcgttagagtgaggtttaattaatt

SEQ ID NO: 532211 - DNA, 60 bp, Artificial
  Synthetic oligonucleotide
aaatgcccctaattctgtgtctgtatggcgcgtgggagtgcgcctaaaaaggtgaccttc

SEQ ID NO: 532212 - DNA, 60 bp, Artificial
  Synthetic oligonucleotide
aaatacgtatttatacagctgagttcgtatacacatcgtattcatccattacatcgatat

SEQ ID NO: 532213 - DNA, 60 bp, Artificial
  Synthetic oligonucleotide
aaataaattaatgctcttatggtaaatgtgtccctgataggtaaatgagaccccaatata

SEQ ID NO: 532214 - DNA, 60 bp, Artificial
  Synthetic oligonucleotide
aaacgtggttcaataattatcatatgaagtggagttgatttagatatggttgatagttac

SEQ ID NO: 532215 - DNA, 60 bp, Artificial
  Synthetic oligonucleotide
aaaagaagaatagtgggccgggcaatgcaattgggccggaattgaaatgggcttggacca

SEQ ID NO: 532216 - DNA, 60 bp, Artificial
  Synthetic oligonucleotide
aaaaaggtgaccttctctctcctaaaacctctccgatctccgattcaggcacttccggtc

SEQ ID NO: 532217 - DNA, 60 bp, Artificial
  Synthetic oligonucleotide
tttacgacacgcgcggcggtgtatacccctgggagggtaggtaccgtcgattacgggtac

SEQ ID NO: 532218 - DNA, 60 bp, Artificial
  Synthetic oligonucleotide
tttcgacacgcgcggcggtgtgtacccctgggagggtatggtaccactacgctacgcagc

SEQ ID NO: 532219 - DNA, 60 bp, Artificial
  Synthetic oligonucleotide
accagtgcagaccggtgactcgatgaacagcgtagggggtggcccggaggggttacgaag

SEQ ID NO: 532220 - DNA, 60 bp, Artificial
  Synthetic oligonucleotide
tttctgtaattagatgcacttctatcttgaactccactcccttgctgttccgatagttga

SEQ ID NO: 532221 - DNA, 60 bp, Artificial
  Synthetic oligonucleotide
acattggagactcttattttatactttcccattttgcccttctttatgtgtctggtaggc

SEQ ID NO: 532222 - DNA, 60 bp, Artificial
  Synthetic oligonucleotide
acattgcaagtacgattaataatagtcatttattcattaataggcgaattacaatcaggc

SEQ ID NO: 532223 - DNA, 60 bp, Artificial
  Synthetic oligonucleotide
acatgttaaatgcccaaaccgctacgctaagcagccttagcttcgcacgtagctgaatgc

SEQ ID NO: 532224 - DNA, 60 bp, Artificial
  Synthetic oligonucleotide
acatgaacttcagtatattacgtatcccttcctctaaattgttgaagtcgaacggtggta

SEQ ID NO: 532225 - DNA, 60 bp, Artificial
  Synthetic oligonucleotide
acatcgatatccaccactggggcctcgttcataatcacaagatcgattatctctaccagg

SEQ ID NO: 532226 - DNA, 60 bp, Artificial
  Synthetic oligonucleotide
acatcataatcatcccatatacgtatgtcaactaccggggcctcctgcatcatcagtata

SEQ ID NO: 532227 - DNA, 60 bp, Artificial
  Synthetic oligonucleotide
acaggccgattccgacatcaatttgcgacacgcgcggcggtgtgtacccctgggagggta

SEQ ID NO: 532228 - DNA, 60 bp, Artificial
  Synthetic oligonucleotide
acacggggatcatacccctgggagggtaggtaccatcactacgctacgcagcagccttag

SEQ ID NO: 532229 - DNA, 60 bp, Artificial
  Synthetic oligonucleotide
acacgcgcggcggtgtgtacccctgggagggtaggtaccactacgctacgcagcagctta

SEQ ID NO: 532230 - DNA, 60 bp, Artificial
  Synthetic oligonucleotide
acaagttcggtcatgtcctcatgtcggaacgcatcaaacgtggtgtccctatacatgata

SEQ ID NO: 532231 - DNA, 60 bp, Artificial
  Synthetic oligonucleotide
aattttatgacgagaatacccctcatttaaaactaacaggcgcgtcgcagtgcgctgata

SEQ ID NO: 532232 - DNA, 60 bp, Artificial
  Synthetic oligonucleotide
atttaaacggtgaactgcttattgaatatgtctggttcgattacatccattcccaatatc

SEQ ID NO: 532233 - DNA, 60 bp, Artificial
  Synthetic oligonucleotide
atttacccaatggtaaatatctgagcccccaataggtaaatgtgtccccgattgagcccc

SEQ ID NO: 532234 - DNA, 60 bp, Artificial
  Synthetic oligonucleotide
catcatgtttggctctcttgtagtcgcaactctgatgatgcatctgacagtttctgtaat

SEQ ID NO: 532235 - DNA, 60 bp, Artificial
  Synthetic oligonucleotide
atttgagtgcttgtacattattttgaggcagtgttttatgccttcttctaggctgttgaa

SEQ ID NO: 532236 - DNA, 60 bp, Artificial
  Synthetic oligonucleotide
atttggtgtgggtaatacatgaatttggtctgcttaaataatgtcagggaatgtgatatc

SEQ ID NO: 532237 - DNA, 60 bp, Artificial
  Synthetic oligonucleotide
ttattcatatatctggtagtggtgatattcatctattatagtgacagtactatcaaagtt

SEQ ID NO: 532238 - DNA, 60 bp, Artificial
  Synthetic oligonucleotide
catcatattcatcccctatacgtatatcaactaatggggcctcatgcagcatcattatat

SEQ ID NO: 532239 - DNA, 60 bp, Artificial
  Synthetic oligonucleotide
attttggagacaccaataggtaaatggacaccgatacaccagagtccccaattgagacac

SEQ ID NO: 532240 - DNA, 60 bp, Artificial
  Synthetic oligonucleotide
caaaaacatgaatattaattacaggggcttcattcatgatcaatatatcaacaagttcgg

SEQ ID NO: 532241 - DNA, 60 bp, Artificial
  Synthetic oligonucleotide
caaacggagggattatcccttcgtggctataagggataatgaacttgttcttgacaagaa

SEQ ID NO: 532242 - DNA, 60 bp, Artificial
  Synthetic oligonucleotide
caaatggacctacgaacccatgatggccgtatgggatcctgaatttggctttggctagtg

SEQ ID NO: 532243 - DNA, 60 bp, Artificial
  Synthetic oligonucleotide
catactccggatttcctcctccaaagtattgaaatcgaatggaggtacaattccatcatg

SEQ ID NO: 532244 - DNA, 60 bp, Artificial
  Synthetic oligonucleotide
caacttgacattaataataaacaccaaacccttctgattagtatatgtgatcgtcatagt

SEQ ID NO: 532245 - DNA, 60 bp, Artificial
  Synthetic oligonucleotide
caagggtaaatatctgagtccccgataggtaaatgtgtccccaatatatcggggactcaa

SEQ ID NO: 532246 - DNA, 60 bp, Artificial
  Synthetic oligonucleotide
caatcgtcctaaatagtggccatatatcaggatatatggacataattcataaacgtggtt

SEQ ID NO: 532247 - DNA, 60 bp, Artificial
  Synthetic oligonucleotide
ttacctatttaagttatgggccgtaatcatggaggcccataacttgatctataattgcct

SEQ ID NO: 532248 - DNA, 60 bp, Artificial
  Synthetic oligonucleotide
catacacttgagttcataaatacatcatactcatctcctacatctatatcctcaactggt

SEQ ID NO: 532249 - DNA, 60 bp, Artificial
  Synthetic oligonucleotide
caattggagtcatatgacctcaattccgattatacccctgaaaagctgaaaggaaggcgc

SEQ ID NO: 532250 - DNA, 60 bp, Artificial
  Synthetic oligonucleotide
ttacaaggattgaagtgtctttctgtaacttgacatctatgatgaactccaaacccttca

SEQ ID NO: 532251 - DNA, 60 bp, Artificial
  Synthetic oligonucleotide
caattgggcctttaatggtgggccgaattttatggacctcgtattttgggcctaatgagt

SEQ ID NO: 532252 - DNA, 60 bp, Artificial
  Synthetic oligonucleotide
caatttgcgacacgcgcggcggtgtgtacccctgggagggtagggtaccactacgctacg

SEQ ID NO: 532253 - DNA, 60 bp, Artificial
  Synthetic oligonucleotide
cacaataaccaatgggaagactaatggactgggtcaatgcaattgggcctaaatgttaat

SEQ ID NO: 532254 - DNA, 60 bp, Artificial
  Synthetic oligonucleotide
cacctcagaggtaaatatctaggaccccaaaggtagatgaggcaccgatacatcggtgcc

SEQ ID NO: 532255 - DNA, 60 bp, Artificial
  Synthetic oligonucleotide
cactacgctacgcagcagcctcagctacgccggagcttagctcgccaccgttataatatt

SEQ ID NO: 532256 - DNA, 60 bp, Artificial
  Synthetic oligonucleotide
cacttatacagcagcattcgtacatatatcgtagtcatctcctatacgtatatcaattac

SEQ ID NO: 532257 - DNA, 60 bp, Artificial
  Synthetic oligonucleotide
ttaaaatgctttaacattattatttataaggtgctcttacatatcattaatatacaatta

SEQ ID NO: 532258 - DNA, 60 bp, Artificial
  Synthetic oligonucleotide
tgttttggcttatattgggccaatttaatgggttgaaaatgtttgggcctttggaagagg

SEQ ID NO: 532259 - DNA, 60 bp, Artificial
  Synthetic oligonucleotide
cagcacccctcaacttgacattaataataaacaccaaacccttctgattagtatatgtga

SEQ ID NO: 532260 - DNA, 60 bp, Artificial
  Synthetic oligonucleotide
cagcgatattgggcctatgagataaagaaactaccgtggtcatcaacaaagtacacattt

SEQ ID NO: 532261 - DNA, 60 bp, Artificial
  Synthetic oligonucleotide
caggccaaaaggaaattccctatgatgctcccttcaaagccgtaccagtcgaatggaacg

SEQ ID NO: 532262 - DNA, 60 bp, Artificial
  Synthetic oligonucleotide
cagttaccgtaactgtaaaaaataattacatttacctcacaatgtaaaaatcttggaccc

SEQ ID NO: 532263 - DNA, 60 bp, Artificial
  Synthetic oligonucleotide
catggccgtatggtatcatcaaggtcttctttgccagggctggtgatgatgttgagaaca

SEQ ID NO: 532264 - DNA, 60 bp, Artificial
  Synthetic oligonucleotide
atatagacgggtaaataaattaatgctcttatggtaaatgtgtccctgataggtaaatga

SEQ ID NO: 532265 - DNA, 60 bp, Artificial
  Synthetic oligonucleotide
atatataagaggccccaatatatcgggggctcagtgagagaattaatgtccgggttccga

SEQ ID NO: 532266 - DNA, 60 bp, Artificial
  Synthetic oligonucleotide
atatcggtgcctcggagagagaaataaatcccgcatcccgaaaatacccctaagtctgtg

SEQ ID NO: 532267 - DNA, 60 bp, Artificial
  Synthetic oligonucleotide
ttcacaagaacaggagaccgtgtggcgaatagccgaatgtggacaataattgaatcagca

SEQ ID NO: 532268 - DNA, 60 bp, Artificial
  Synthetic oligonucleotide
atatttacacaagggtaaatatctgagtccccgataggtaaatgtgtccccaatatatcg

SEQ ID NO: 532269 - DNA, 60 bp, Artificial
  Synthetic oligonucleotide
atcaattggtgcctcataattagtgttgcctaaaatacccctatttctgtgtctggaagg

SEQ ID NO: 532270 - DNA, 60 bp, Artificial
  Synthetic oligonucleotide
atcaatttgcgacacgcgcggcggtgtgtacccctgggagggtaggtaccggtaccacta

SEQ ID NO: 532271 - DNA, 60 bp, Artificial
  Synthetic oligonucleotide
atcagtataaggcgcgtcggagtgcgccgataaagttaacattctctctcctaaaatcgt

SEQ ID NO: 532272 - DNA, 60 bp, Artificial
  Synthetic oligonucleotide
atccctgtgtctaagaagcgcgtggtattgcgctgaaaaagttaaatttctctctccaaa

SEQ ID NO: 532273 - DNA, 60 bp, Artificial
  Synthetic oligonucleotide
atccggttccccaatatacccctaaatatgtgtctttctgtctctggaaggcgcgtggaa

SEQ ID NO: 532274 - DNA, 60 bp, Artificial
  Synthetic oligonucleotide
atccttgtacatcacctctagcgtggtctgtatgccctcttccagtccgttgaagtcgaa

SEQ ID NO: 532275 - DNA, 60 bp, Artificial
  Synthetic oligonucleotide
atgaacagcgtagggggtggcccggaggggttacgaagcgtgttcattcaacgaccagtg

SEQ ID NO: 532276 - DNA, 60 bp, Artificial
  Synthetic oligonucleotide
atgaacttcttcttggctaatgccggtgactttgttgagctaagttcaatctgtacaagg

SEQ ID NO: 532277 - DNA, 60 bp, Artificial
  Synthetic oligonucleotide
atgaggtaccgataggtaaatgatcaccaatatattggtgatcacgttgtgtctcatatt

SEQ ID NO: 532278 - DNA, 60 bp, Artificial
  Synthetic oligonucleotide
attgagacaccgatatatcggtgactcttaaaaggaatatgaccaaaatacccctatttc

SEQ ID NO: 532279 - DNA, 60 bp, Artificial
  Synthetic oligonucleotide
ttattttcgtggacaccaaaggtaaatgagtccccgatacatcggtgcctctattaggtc

SEQ ID NO: 532280 - DNA, 60 bp, Artificial
  Synthetic oligonucleotide
attatacttgatcgtcatgcatgtaaatatgaactatacatgagtctagtcggcttaaat

SEQ ID NO: 532281 - DNA, 60 bp, Artificial
  Synthetic oligonucleotide
atgtgatatctggacgttaatgatttacgtgtctcattgttttccatatatgtcatagtg

SEQ ID NO: 532282 - DNA, 60 bp, Artificial
  Synthetic oligonucleotide
catcggtgcctctattaggtcctctaaattcaatttccaaaaatacccttatccctgtgt

SEQ ID NO: 532283 - DNA, 60 bp, Artificial
  Synthetic oligonucleotide
atgtatcccttcctccaaattgttgaagtcgaaaggtggtataatcccatcatggccgta

SEQ ID NO: 532284 - DNA, 60 bp, Artificial
  Synthetic oligonucleotide
atggtgtggttaatgtgtaatttgattatgtgtagttagacgttagtactaatcataaca

SEQ ID NO: 532285 - DNA, 60 bp, Artificial
  Synthetic oligonucleotide
ttcaaagccgttgaagtcgaatggaacgcgtatgtcttcgtacgtgtactgaacgatcca

SEQ ID NO: 532286 - DNA, 60 bp, Artificial
  Synthetic oligonucleotide
ttcaaagccgttgaagtcgaattgaaagtgtaattcttcgtacgtgtactgaacgatccc

SEQ ID NO: 532287 - DNA, 60 bp, Artificial
  Synthetic oligonucleotide
atgattccactatgcccgtatggaatcatgaatctccttgttgctagccccggagatcgt

SEQ ID NO: 532288 - DNA, 60 bp, Artificial
  Synthetic oligonucleotide
catgagcacaaacagaaatctcttgagaaactctgggagcgcagcgacaaagcaggcaaa

SEQ ID NO: 532289 - DNA, 60 bp, Artificial
  Synthetic oligonucleotide
tgtttgatagtgacatgaatatcaactatgattacttttactaatgacataataatccag

SEQ ID NO: 532290 - DNA, 60 bp, Artificial
  Synthetic oligonucleotide
catggccgtatggaatcgagaattgccgcttcacaagaacaggagaccgtgtggcgaata

SEQ ID NO: 532291 - DNA, 59 bp, Artificial
  Synthetic oligonucleotide
aggtgaaatttatttaactcgaggtgaattgtcctccaatgcctccaattgaatcggtg

SEQ ID NO: 532292 - DNA, 59 bp, Artificial
  Synthetic oligonucleotide
attacattcagacactgacattgtcgaaacatcataattttttggtttcgcaagattat

SEQ ID NO: 532293 - DNA, 59 bp, Artificial
  Synthetic oligonucleotide
tgtcatagtggagatattttataattgatagtgatatgactacaatgttcattactttt

SEQ ID NO: 532294 - DNA, 58 bp, Artificial
  Synthetic oligonucleotide
ctgtacaaggattgaagtgtcttcctgtaacttgacatctatgaggaattccaaaccc

SEQ ID NO: 532295 - DNA, 57 bp, Artificial
  Synthetic oligonucleotide
aagcgcgtgtgagtggactgaaaaaggtgaccttctctctcctaaaacctctccgat

SEQ ID NO: 532296 - DNA, 57 bp, Artificial
  Synthetic oligonucleotide
ttttaaatggatcagtagcttcgtaactgggccgtccgcgtatattcggcccaagta

SEQ ID NO: 532297 - DNA, 57 bp, Artificial
  Synthetic oligonucleotide
gtaactgggcctatggttattagaccggcccaaaatgcggaacttataagtgggcct

SEQ ID NO: 532298 - DNA, 57 bp, Artificial
  Synthetic oligonucleotide
acagatgaacgcgtatacacatcgtattcatccattacattaatgtctattacagga

SEQ ID NO: 532299 - DNA, 57 bp, Artificial
  Synthetic oligonucleotide
tagaacatatatttgtgatgtatggttattattgatatacgtggtttgtttatgttc

SEQ ID NO: 532300 - DNA, 57 bp, Artificial
  Synthetic oligonucleotide
gatgaactccaaacccttcatgttgttgtatttgatagtcatgtttagttgttgtgg

SEQ ID NO: 532301 - DNA, 56 bp, Artificial
  Synthetic oligonucleotide
accggtggcgagcggggttttttgcccaaatgtgggtcccacattggagatgaaag

SEQ ID NO: 532302 - DNA, 55 bp, Artificial
  Synthetic oligonucleotide
ttaaggcacttccggtcaccaatttgcgacacgcgcggcgggtgtacccctggga

SEQ ID NO: 532303 - DNA, 55 bp, Artificial
  Synthetic oligonucleotide
tggaccccaatatatcggtgtctattggggacattggagactcttattttatact

SEQ ID NO: 532304 - DNA, 55 bp, Artificial
  Synthetic oligonucleotide
tttcccaaatcataaaaccgccataacttccgattccgatctccgatcacgacac

SEQ ID NO: 532305 - DNA, 55 bp, Artificial
  Synthetic oligonucleotide
tgatggccgtatgggatcctgaatttggctttggctagtgccggtgaccgtgtgg

SEQ ID NO: 532306 - DNA, 55 bp, Artificial
  Synthetic oligonucleotide
ttggggttgcaggtgggtcccactttacaggaaaaggaatactggactggacctc

SEQ ID NO: 532307 - DNA, 55 bp, Artificial
  Synthetic oligonucleotide
ttggggttccaagtgggtcccaccatatccaaaagaagaatagtgggccgggcaa

SEQ ID NO: 532308 - DNA, 55 bp, Artificial
  Synthetic oligonucleotide
ttcctccatattgttgaagtcgaaaggtggtatgatcccatcatggccgtatgtg

SEQ ID NO: 532309 - DNA, 55 bp, Artificial
  Synthetic oligonucleotide
tttttattgaatacgtccggttcgattacatccattcccaatatctctgggtttt

SEQ ID NO: 532310 - DNA, 55 bp, Artificial
  Synthetic oligonucleotide
tcatactcatctcctacatctatatcctcaactggtgcttcttccatcattagga

SEQ ID NO: 532311 - DNA, 55 bp, Artificial
  Synthetic oligonucleotide
tcggtgatcaataattgtgaactgaccaaaatacccctgtccctgtgtctggaag

SEQ ID NO: 532312 - DNA, 55 bp, Artificial
  Synthetic oligonucleotide
ccacttgagaaaagaaacacacctcacatgaacgaaacggcagcgcagcggaccc

SEQ ID NO: 532313 - DNA, 55 bp, Artificial
  Synthetic oligonucleotide
ccagccggaacgccaaaactggctgtttccggcatcaatttacaacacgcgcggc

SEQ ID NO: 532314 - DNA, 55 bp, Artificial
  Synthetic oligonucleotide
cccctcatttaaaactaacaggcgcgtcgcagtgcgctgataaagctgtcggagt

SEQ ID NO: 532315 - DNA, 55 bp, Artificial
  Synthetic oligonucleotide
ccgatatatcggagaccagttggtgcctcataattggtcttgcctaaaatacccc

SEQ ID NO: 532316 - DNA, 55 bp, Artificial
  Synthetic oligonucleotide
cctgtatgggatcatgaatttcttcttggctagtgctggtgaccttgttgatgcg

SEQ ID NO: 532317 - DNA, 55 bp, Artificial
  Synthetic oligonucleotide
cgcatcaaacgtggtgtccctatacatgatatgtaacatactccggatttcctcc

SEQ ID NO: 532318 - DNA, 55 bp, Artificial
  Synthetic oligonucleotide
cggaactactttcccaaatcttaaaatcgccataacttccgattccgatctccga

SEQ ID NO: 532319 - DNA, 55 bp, Artificial
  Synthetic oligonucleotide
cgggttccgaaaatacccctaaatatgtgtctgtaaggcgcgtggtagtgcgctg

SEQ ID NO: 532320 - DNA, 55 bp, Artificial
  Synthetic oligonucleotide
ctccaatatatcggagatcaattggtgcctcataattagtgttgcctaaaatacc

SEQ ID NO: 532321 - DNA, 55 bp, Artificial
  Synthetic oligonucleotide
ctccgattgagggccttccggtcatcaatttgcgacacgcgcggcggtgtgtacc

SEQ ID NO: 532322 - DNA, 55 bp, Artificial
  Synthetic oligonucleotide
ctgtgctgttgccggcatcaatttacgacacgcgccggtgtgtgtatccccgggg

SEQ ID NO: 532323 - DNA, 55 bp, Artificial
  Synthetic oligonucleotide
ctgtttgttgttggtgatatgtgtgttaaatatgcattgctggtttgatggttgg

SEQ ID NO: 532324 - DNA, 55 bp, Artificial
  Synthetic oligonucleotide
aaaggtgttcttctctctcctacaatgagacctcggcggtgtgtacccctgggag

SEQ ID NO: 532325 - DNA, 55 bp, Artificial
  Synthetic oligonucleotide
aaatcttggacccaataggtaaattgtccccaatatatcggtgcctattggggac

SEQ ID NO: 532326 - DNA, 55 bp, Artificial
  Synthetic oligonucleotide
aacacgcgcggcagtgtgtacccctgggagggtaggtaccggtaccactacgcta

SEQ ID NO: 532327 - DNA, 55 bp, Artificial
  Synthetic oligonucleotide
accgtgttgttgtctcataaccagtgcagccggtgactcgatgaacagcataggg

SEQ ID NO: 532328 - DNA, 55 bp, Artificial
  Synthetic oligonucleotide
agacactacatattcatcctcaatatgaatatcatttacaggagcttcgtgtatg

SEQ ID NO: 532329 - DNA, 55 bp, Artificial
  Synthetic oligonucleotide
aggctcttccggtcatcaatttgcgacacgtgcggcggtgtgtacccctgggagg

SEQ ID NO: 532330 - DNA, 55 bp, Artificial
  Synthetic oligonucleotide
atactttcccattttgcccttctttatgtgtctggtaggcgcgtgggagtgctct

SEQ ID NO: 532331 - DNA, 55 bp, Artificial
  Synthetic oligonucleotide
attgaagtgtcttccttgagcttcacatcgatggtaaactccattccctttgtgt

SEQ ID NO: 532332 - DNA, 55 bp, Artificial
  Synthetic oligonucleotide
caattacccaaaatgcccttatccctgtgtctaaagggcgcgtgctattgcgctg

SEQ ID NO: 532333 - DNA, 55 bp, Artificial
  Synthetic oligonucleotide
cacttctatcttgaactccactcccttgctgttccgatagttgatagtcatgctc

SEQ ID NO: 532334 - DNA, 55 bp, Artificial
  Synthetic oligonucleotide
cagacccctctggttgttgtatttgatagtcattcttatttggtgtggattgtac

SEQ ID NO: 532335 - DNA, 55 bp, Artificial
  Synthetic oligonucleotide
catgagtctggtcctgttaaataatgctgggaattgtgctatatggacctgaatg

SEQ ID NO: 532336 - DNA, 55 bp, Artificial
  Synthetic oligonucleotide
cattcgtacatatatcgtagtcatctcctatacgtatatcaattactggggcctc

SEQ ID NO: 532337 - DNA, 55 bp, Artificial
  Synthetic oligonucleotide
gcgcctacaaagttacttcctctctcctccgatggtttccaacccctattccggc

SEQ ID NO: 532338 - DNA, 55 bp, Artificial
  Synthetic oligonucleotide
gcggcggtgtatacccctgggagggtaggtaccgtcgattacgggtacactacgc

SEQ ID NO: 532339 - DNA, 55 bp, Artificial
  Synthetic oligonucleotide
gcgtggtctgtatgccctcttccagtccgttgaagtcgaatggcacaatgatccc

SEQ ID NO: 532340 - DNA, 55 bp, Artificial
  Synthetic oligonucleotide
ggacaccaaaggtaaatgagaccccgatacaattggtgtacctattggtgtctca

SEQ ID NO: 532341 - DNA, 55 bp, Artificial
  Synthetic oligonucleotide
ggataatcccatggtgtctgtatgggatcatgaatttcttcttggctaatgccgg

SEQ ID NO: 532342 - DNA, 55 bp, Artificial
  Synthetic oligonucleotide
gggaacagatggcccaattacctatttaagttatgggccgtaatcatggaggccc

SEQ ID NO: 532343 - DNA, 55 bp, Artificial
  Synthetic oligonucleotide
gggccaatttaatgggttgaaaatgtttgggcctttggaagagggccttttatgg

SEQ ID NO: 532344 - DNA, 55 bp, Artificial
  Synthetic oligonucleotide
ggggatgcaacggggactccattctcctccatttcttactttcctgaaatacccc

SEQ ID NO: 532345 - DNA, 55 bp, Artificial
  Synthetic oligonucleotide
ggggtctcggaaagagaaataaatcccggattcccaaaatacccctgtctctgtg

SEQ ID NO: 532346 - DNA, 55 bp, Artificial
  Synthetic oligonucleotide
gggtagctcaggggctctgagtgagtgaatatgatgtgattgcccattaaaggga

SEQ ID NO: 532347 - DNA, 55 bp, Artificial
  Synthetic oligonucleotide
gggtggcccggaggggttacgaagcgtgttcattcaacgaccagtgcagcctatg

SEQ ID NO: 532348 - DNA, 55 bp, Artificial
  Synthetic oligonucleotide
gggtttggagtgatttgggctttgaagatggcttttatggattatggaagtctgt

SEQ ID NO: 532349 - DNA, 55 bp, Artificial
  Synthetic oligonucleotide
gtaccccaatagcctgggtaatttgtactccattacaccgattgtgtctccaatg

SEQ ID NO: 532350 - DNA, 55 bp, Artificial
  Synthetic oligonucleotide
gtcaaatgggctcttaattgagttggaccagtagattcgtaactgggcctatggt

SEQ ID NO: 532351 - DNA, 55 bp, Artificial
  Synthetic oligonucleotide
gtgtgttaaatatgcattgctggtttgtggttggaatttaaacggtgaactgctt

SEQ ID NO: 532352 - DNA, 55 bp, Artificial
  Synthetic oligonucleotide
gttaacattctctctccaaaactcgtcggagatggcgtaactggcagttcccggc

SEQ ID NO: 532353 - DNA, 55 bp, Artificial
  Synthetic oligonucleotide
gacacgcgcgggcggtgggacatgttaaatgcccaaaccgctacgctaagcagcc

SEQ ID NO: 532354 - DNA, 55 bp, Artificial
  Synthetic oligonucleotide
gaatgggcctttggaagagggtcttttatggaatagggctctgtatattgttcct

SEQ ID NO: 532355 - DNA, 55 bp, Artificial
  Synthetic oligonucleotide
gacagtgtttgatgccttcttctaagctgttaaagtcgaatggtggtattatccc

SEQ ID NO: 532356 - DNA, 55 bp, Artificial
  Synthetic oligonucleotide
gaccatgtcctcctgtcgaaactctccaatatgggaatccttgtacatgacctgc

SEQ ID NO: 532357 - DNA, 55 bp, Artificial
  Synthetic oligonucleotide
gactaatggactgggtcaatgcaattgggcctaaatgttaatgggcttggaccag

SEQ ID NO: 532358 - DNA, 55 bp, Artificial
  Synthetic oligonucleotide
cttgtacatgatcctcaacatattatgtatcccttcctccatattgttgaagtcg

SEQ ID NO: 532359 - DNA, 55 bp, Artificial
  Synthetic oligonucleotide
gagaccccgatacatcggtgcctctattgggtccttgaaagttaaattcccaaaa

SEQ ID NO: 532360 - DNA, 55 bp, Artificial
  Synthetic oligonucleotide
gatggtgaattccatcccattcccgttgttatatttgatagtcatttgaatgggg

SEQ ID NO: 532361 - DNA, 55 bp, Artificial
  Synthetic oligonucleotide
gaggttattttcttggacaccaaaggtaaatgagtccccgatacatcgggtcctc

SEQ ID NO: 532362 - DNA, 54 bp, Artificial
  Synthetic oligonucleotide
ttgggcctagggtatgcaattgggcccttaagttatgggctttgagtactggac

SEQ ID NO: 532363 - DNA, 54 bp, Artificial
  Synthetic oligonucleotide
aaatgttaatgggcttggaccagtagattcgagactgggccaatataatcaatt

SEQ ID NO: 532364 - DNA, 54 bp, Artificial
  Synthetic oligonucleotide
gatgactaattactatacacacagaatatattggaaaaaaaaatgggagcgcag

SEQ ID NO: 532365 - DNA, 53 bp, Artificial
  Synthetic oligonucleotide
tcataattggtcttgcctaaaatacccccatttctgtgtctggaaggcgcgtg

SEQ ID NO: 532366 - DNA, 53 bp, Artificial
  Synthetic oligonucleotide
atattggggtctcggagagagaaataatatccggttccccaatatacccctaa

SEQ ID NO: 532367 - DNA, 53 bp, Artificial
  Synthetic oligonucleotide
ggggtattatcccgtcgtggccgtatggtattgtgaacttcctcttgatgaga

SEQ ID NO: 532368 - DNA, 52 bp, Artificial
  Synthetic oligonucleotide
atggtctttattcattaatagtcgtattacattcagacactgacattgtcga

SEQ ID NO: 532369 - DNA, 52 bp, Artificial
  Synthetic oligonucleotide
tctctccaaaaactcaccggaacgccgattggggttcttccggtcatcaatt

SEQ ID NO: 532370 - DNA, 52 bp, Artificial
  Synthetic oligonucleotide
tcatttgaaagtaattatgaacgacacatgagtttagttgtcttaatagtgg

SEQ ID NO: 532371 - DNA, 51 bp, Artificial
  Synthetic oligonucleotide
accacacagaacaaaatgatcatgagaaaatacggccgcgcagcggcacag

SEQ ID NO: 532372 - DNA, 51 bp, Artificial
  Synthetic oligonucleotide
ttttggcctgttcgtggatcatgcactcataaaaaaaatatattgggctgg

SEQ ID NO: 532373 - DNA, 51 bp, Artificial
  Synthetic oligonucleotide
accgtgggcgagcgaaattttggccgtccgaagtgggatccacaagaggac

SEQ ID NO: 532374 - DNA, 51 bp, Artificial
  Synthetic oligonucleotide
actctcttatggttgagtctttgtacatgagcattagtaagtgacatatcc

SEQ ID NO: 532375 - DNA, 51 bp, Artificial
  Synthetic oligonucleotide
ttgatttcacttgaggtgaattgtccaccaatgcctccaattcattcggag

SEQ ID NO: 532376 - DNA, 51 bp, Artificial
  Synthetic oligonucleotide
agaagaattgaattttgaccagtacaaaattcggacccctcaagcgaacgt

SEQ ID NO: 532377 - DNA, 51 bp, Artificial
  Synthetic oligonucleotide
ctatatcctcaactggtgcttcctccatcattaggatgtctattacttgca

SEQ ID NO: 532378 - DNA, 50 bp, Artificial
  Synthetic oligonucleotide
attttaactggtgtggattatacgtgagtctggtcctgttaaataatgtt

SEQ ID NO: 532379 - DNA, 50 bp, Artificial
  Synthetic oligonucleotide
ggggctcagtgagagaattaatgtccgggttccgaaaatacccctaaata

SEQ ID NO: 532380 - DNA, 50 bp, Artificial
  Synthetic oligonucleotide
cttgcctaaattccccaattgtagactccttatacattattttgaggcag

SEQ ID NO: 532381 - DNA, 50 bp, Artificial
  Synthetic oligonucleotide
tatgaatgtcagtggagttacacaaggttgatagttacatgactatcaat

SEQ ID NO: 532382 - DNA, 60 bp, Artificial
  Synthetic oligonucleotide
gtagaagatcgctccttcaagctaagaaggttttcgatgggtatcatccacacttggaag

SEQ ID NO: 532383 - DNA, 60 bp, Artificial
  Synthetic oligonucleotide
gtaaacagtcttctatgttattgggcttctatgttttgggcctaatgtttccgggttttc

SEQ ID NO: 532384 - DNA, 60 bp, Artificial
  Synthetic oligonucleotide
ggtgaaatccttgttcggggatctgaatccccatcttgagaaacagcgagctcgtaagac

SEQ ID NO: 532385 - DNA, 60 bp, Artificial
  Synthetic oligonucleotide
gggttgaataaaataaatggtctaggtctggcccaaatgatataaggcccgtcaggatgt

SEQ ID NO: 532386 - DNA, 60 bp, Artificial
  Synthetic oligonucleotide
gcgtgagctatgcctgctggcaggaagaagagtcgcccacgactcgacgacgccacctgc

SEQ ID NO: 532387 - DNA, 60 bp, Artificial
  Synthetic oligonucleotide
gcaatggtggtgtttcaccgtgttcttcttgtctaccactgcgcccgatttggtgcccct

SEQ ID NO: 532388 - DNA, 60 bp, Artificial
  Synthetic oligonucleotide
gcaacatgagaaggtgaatcatgatcaccttcaagggtttttccagttcaagggtcgacg

SEQ ID NO: 532389 - DNA, 60 bp, Artificial
  Synthetic oligonucleotide
gattaatagtgagtaataagtacgagccgctcatggcccctatgctgaattgtattcatg

SEQ ID NO: 532390 - DNA, 60 bp, Artificial
  Synthetic oligonucleotide
gagcctcttatggcccctatgattagttgtattcatgtagttgttatgtctaattttctt

SEQ ID NO: 532391 - DNA, 60 bp, Artificial
  Synthetic oligonucleotide
gaatttggggattattgccctagtgggtcccacaaacgccggcaacgagaatctgtaatt

SEQ ID NO: 532392 - DNA, 60 bp, Artificial; identical to SEQ ID NO: 391545
  Synthetic oligonucleotide

SEQ ID NO: 532393 - DNA, 60 bp, Artificial
  Synthetic oligonucleotide
gaaacaacgtgcccgaaagaccgatgaagcccgcgactattgcatgaaagaagaaactag

SEQ ID NO: 532394 - DNA, 60 bp, Artificial
  Synthetic oligonucleotide
ctggcaagaagaagagtcgcccacgactcgacgtcgccacctgcaggggtatctccaatg

SEQ ID NO: 532395 - DNA, 60 bp, Artificial
  Synthetic oligonucleotide
ctgctgggtcccacaaaagaagacaacgggacgctgtcattagatctccggtaaggatgg

SEQ ID NO: 532396 - DNA, 60 bp, Artificial
  Synthetic oligonucleotide
ctgcgcatgttagcaataaagctcagtcccctgcgcacgataacctgtgtcccctataaa

SEQ ID NO: 532397 - DNA, 60 bp, Artificial
  Synthetic oligonucleotide
ctcgtaagaccgacgaagctcgcgattactgtatgaaagaggaaactagggtttccggtc

SEQ ID NO: 532398 - DNA, 60 bp, Artificial
  Synthetic oligonucleotide
ctattctgggcttgatccgtaaaatattgggcctgttaaggtctgggtacgtcgcgcgat

SEQ ID NO: 532399 - DNA, 60 bp, Artificial
  Synthetic oligonucleotide
ctatcttttgggtgtatggtcccactggtggggaagggaagtcccagtttgccaagtacc

SEQ ID NO: 532400 - DNA, 60 bp, Artificial
  Synthetic oligonucleotide
ctacgaagcgtcgtcatttacagggctacctacagtgcaaggggaaccgaacccttgcac

SEQ ID NO: 532401 - DNA, 60 bp, Artificial
  Synthetic oligonucleotide
cgtccgatcgcaatggtggtgtttcaccgtgttcttcttgtctaccactgcgcccgattt

SEQ ID NO: 532402 - DNA, 60 bp, Artificial
  Synthetic oligonucleotide
cgtccaaataatttgagctatgtcccctgcgcatgttagcaataaagctcagtcccctgc

SEQ ID NO: 532403 - DNA, 60 bp, Artificial
  Synthetic oligonucleotide
cgtacgctcgcacgtgccaacctctagaccaggagagagaaagctgtagaccctataaat

SEQ ID NO: 532404 - DNA, 60 bp, Artificial
  Synthetic oligonucleotide
cggggatctgaatccccatcttgagaaacagcgagctcgtcggacggacgaagctcgtga

SEQ ID NO: 532405 - DNA, 60 bp, Artificial
  Synthetic oligonucleotide
tttaacacgcttaaacctctagaccaggagagagaaagctgtagaccctataaatagaaa

SEQ ID NO: 532406 - DNA, 60 bp, Artificial
  Synthetic oligonucleotide
ttggcaatcgcgcctacatacgctcctggaacgggcccagatgaccgcactatcttctgg

SEQ ID NO: 532407 - DNA, 60 bp, Artificial
  Synthetic oligonucleotide
tgtctcaaacaccatgatacggaaatgaaatgtgaggaatatgtggattaaacatatgtc

SEQ ID NO: 532408 - DNA, 60 bp, Artificial
  Synthetic oligonucleotide
tgtcatttcacttattcacacgcttaaagctctagacccttggggatatccgtacgctcg

SEQ ID NO: 532409 - DNA, 60 bp, Artificial
  Synthetic oligonucleotide
tggtacttttgttccgatgggttcgaataagcgtaaattgactgagttattggataattc

SEQ ID NO: 532410 - DNA, 60 bp, Artificial
  Synthetic oligonucleotide
tggggattattgtcctgctgggtcccacaaaagaagacaacgggacgctgtcattagatc

SEQ ID NO: 532411 - DNA, 60 bp, Artificial
  Synthetic oligonucleotide
tggggacctgaaccctcatcttgagaaacagcgagctcgtaagacagacgaggctcgcga

SEQ ID NO: 532412 - DNA, 60 bp, Artificial
  Synthetic oligonucleotide
tggctacctcgtgcgaatcacgtgagttttcgctctctcgtttaagatgcctgctgttca

SEQ ID NO: 532413 - DNA, 60 bp, Artificial
  Synthetic oligonucleotide
tggacctctatgttaatggtcgttgtcgcgcagcggcaaaggactcagaaatattttgtg

SEQ ID NO: 532414 - DNA, 60 bp, Artificial
  Synthetic oligonucleotide
tggacctctatgttaatggtcgttgactgactattgaaccacgtgttgaaaaacaaaagg

SEQ ID NO: 532415 - DNA, 60 bp, Artificial
  Synthetic oligonucleotide
tccctctttatttacaactctgccattcgcgttcgatataaaatgcctgccgtccgatcg

SEQ ID NO: 532416 - DNA, 60 bp, Artificial
  Synthetic oligonucleotide
tcccctcccgacctggtgcctctctttgagaacaccagcgtgtcttatgcctgctggcag

SEQ ID NO: 532417 - DNA, 60 bp, Artificial
  Synthetic oligonucleotide
tattgtgagaaacctgaatctagggtttctggtccatgggtatttggtgaatttgtccct

SEQ ID NO: 532418 - DNA, 60 bp, Artificial
  Synthetic oligonucleotide
tatcttctgggtttacggacctgatggtggggaaggccaaatccacctttgctcgagacc

SEQ ID NO: 532419 - DNA, 60 bp, Artificial
  Synthetic oligonucleotide
taggttaatagttagtaataagtacgagcctcttatggctcctttaattaattgtattca

SEQ ID NO: 532420 - DNA, 60 bp, Artificial
  Synthetic oligonucleotide
tagagatggttaaaaatagaactgtgtatagttataagtatgagcctgttgggttcattg

SEQ ID NO: 532421 - DNA, 60 bp, Artificial
  Synthetic oligonucleotide
tacccgaataggatccgcgtgttgtaacagtgtttcattaagggtattttcgtccaaata

SEQ ID NO: 532422 - DNA, 60 bp, Artificial
  Synthetic oligonucleotide
gtttccggtccctatgaatttgggaattacgtcgccggtggttcgaacaaacggaaattg

SEQ ID NO: 532423 - DNA, 60 bp, Artificial
  Synthetic oligonucleotide
gtggaggatctgcagacaacgtcagctatcagtacataggatgtttaggaaataatattg

SEQ ID NO: 532424 - DNA, 60 bp, Artificial
  Synthetic oligonucleotide
gtgcgaatcacgtgagttttcgctctctcgtttaagatgcctgctgttcagtctctctgg

SEQ ID NO: 532425 - DNA, 60 bp, Artificial
  Synthetic oligonucleotide
gtcacatcagtgggccctgagtaatcccttccattgaataaaggagtgacagagagtccc

SEQ ID NO: 532426 - DNA, 60 bp, Artificial
  Synthetic oligonucleotide
gtatttacctggtggcaaggttaatgacatgatgtacatgtattgtaagaagccccagag

SEQ ID NO: 532427 - DNA, 60 bp, Artificial
  Synthetic oligonucleotide
cccagaaatatcgtcgagccatggcgatgaagatgacaaaggagtcacatcagtgggccc

SEQ ID NO: 532428 - DNA, 60 bp, Artificial
  Synthetic oligonucleotide
cagtgggccctgagtaatcccttccattgaataaaggagtgacagagagtccccagaatt

SEQ ID NO: 532429 - DNA, 60 bp, Artificial
  Synthetic oligonucleotide
attgtattcatgtagttgtaatgtctaattttatgcctgactttgagaagattagtcagg

SEQ ID NO: 532430 - DNA, 60 bp, Artificial
  Synthetic oligonucleotide
attgccctagtgggtcccacaaacgccggcaacgagaatctgtaattcgaagtccggtga

SEQ ID NO: 532431 - DNA, 60 bp, Artificial
  Synthetic oligonucleotide
attagtcaggacagagtccatgtaattccctgtagaccatgtggtgtttgtcttaaacac

SEQ ID NO: 532432 - DNA, 60 bp, Artificial
  Synthetic oligonucleotide
atggaggagaaggaaaaagtacctttgctcgagatttgtacagatctgggcattggttct

SEQ ID NO: 532433 - DNA, 60 bp, Artificial
  Synthetic oligonucleotide
atctgtaattcgaagtccggtgagaatggcagaggaaaatccgtccgtcttccgtagagt

SEQ ID NO: 532434 - DNA, 60 bp, Artificial
  Synthetic oligonucleotide
atcgacgttcgcgcgcgatcttttcagaagtgggacatggttttacactcgtggaggatc

SEQ ID NO: 532435 - DNA, 60 bp, Artificial
  Synthetic oligonucleotide
atcctcatctggaagtgatgcgagctccttctgcagaacaggcgaagaagtattgtgaga

SEQ ID NO: 532436 - DNA, 60 bp, Artificial
  Synthetic oligonucleotide
acttgggcaccccttttgcaatttaagggagtctaggatatatatacgaggcgggtgtag

SEQ ID NO: 532437 - DNA, 60 bp, Artificial
  Synthetic oligonucleotide
acgacaacgtattgaaaaagtgaaaatagggaccaaaatgtaaatatatcaaaacttagt

SEQ ID NO: 532438 - DNA, 60 bp, Artificial
  Synthetic oligonucleotide
acctggggggaaatccaatgatatgatgtatatgtactgtaaatcccctaagtgtaattt

SEQ ID NO: 532439 - DNA, 60 bp, Artificial
  Synthetic oligonucleotide
acccttgcacaggtgaagtccctgtttggggaattgaacccccatctggagaaacaacgt

SEQ ID NO: 532440 - DNA, 60 bp, Artificial
  Synthetic oligonucleotide
acccggcctcgtatccccgacctagtatcccttgtgcgattcacgtgagttcatctctta

SEQ ID NO: 532441 - DNA, 60 bp, Artificial
  Synthetic oligonucleotide
acccggcctcagtcctctgtcccctgtacggaaattgataaaatttcctcctggtaccct

SEQ ID NO: 532442 - DNA, 60 bp, Artificial
  Synthetic oligonucleotide
acccgcctcgagaaaaaagacccccccaattctctctgaaatacccctcccttgtaatgg

SEQ ID NO: 532443 - DNA, 60 bp, Artificial
  Synthetic oligonucleotide
acagtgtttcattaagggtattttcgtccaaataatttgagctatgtcccctgcgcatgt

SEQ ID NO: 532444 - DNA, 60 bp, Artificial
  Synthetic oligonucleotide
aagctcgtgactattgtatgaaagaggaaactagggtttccggtccctttgaatttgggg

SEQ ID NO: 532445 - DNA, 60 bp, Artificial
  Synthetic oligonucleotide
aagaaactagggtttctgggcctttcgaatttggtgaatattgccctagtgggtctcata

SEQ ID NO: 532446 - DNA, 60 bp, Artificial
  Synthetic oligonucleotide
aaattagcaaggataggatccatgtaatcccatgtagaccctgtggtgtttgtctcaaac

SEQ ID NO: 532447 - DNA, 60 bp, Artificial
  Synthetic oligonucleotide
aaaacttagtgctcgccaacaaaaagtaaatgatagatacggttaagcggagtaaatata

SEQ ID NO: 532448 - DNA, 60 bp, Artificial
  Synthetic oligonucleotide
ccgggttttccaaatggatcattttacccgaataggatccgcgtgttgtaacagtgtttc

SEQ ID NO: 532449 - DNA, 60 bp, Artificial
  Synthetic oligonucleotide
cgataacaagggagtcgaatacgcgatatggcaacacgagaaggtgagtcacgatcacct

SEQ ID NO: 532450 - DNA, 60 bp, Artificial
  Synthetic oligonucleotide
cgccacctgcagggatatctgcaatgtaagggtcagaggacccttaaacaggtgaaatcc

SEQ ID NO: 532451 - DNA, 60 bp, Artificial
  Synthetic oligonucleotide
ccgacctggtgcctctctttgagaacaccagcgtgtcttatgcctgctggcaggaagagg

SEQ ID NO: 532452 - DNA, 60 bp, Artificial
  Synthetic oligonucleotide
cgcccgatttggtgcccctcttcgaaaatactgccgttagttacgcctgctggcaagaag

SEQ ID NO: 532453 - DNA, 60 bp, Artificial
  Synthetic oligonucleotide
ccccccgatttaactcctttgtttgagaacactcacgtgagttacgcctgctggcaagaa

SEQ ID NO: 532454 - DNA, 60 bp, Artificial
  Synthetic oligonucleotide
cgcgattactgctcgaaggacgaatctagggtttctggtccctgggtgtttggtactttt

SEQ ID NO: 532455 - DNA, 60 bp, Artificial
  Synthetic oligonucleotide
ccccagaattcgaatccggatgaccgcgccattttttgggtttatggacccactggtggg

SEQ ID NO: 532456 - DNA, 60 bp, Artificial
  Synthetic oligonucleotide
cgcggggtacgtttcgtaaataggcaaaacttgggcaccccttttgcaatttaagggagt

SEQ ID NO: 532457 - DNA, 58 bp, Artificial
  Synthetic oligonucleotide
aacatatgtcaagaaccagtaacaaaatcatgtaacgctatacgattgacttaaagaa

SEQ ID NO: 532458 - DNA, 58 bp, Artificial
  Synthetic oligonucleotide
tggtgcccctcttcgaaaatactgccgttagttacgcctgctggcaagaagaggagtc

SEQ ID NO: 532459 - DNA, 57 bp, Artificial
  Synthetic oligonucleotide
gaactgtgtatagttataagtatgagcctgttgggttcattgatcctacttgtaatg

SEQ ID NO: 532460 - DNA, 57 bp, Artificial
  Synthetic oligonucleotide
gttataagtatgagcctgttgggttcattgatcctacttgtaatgtacacgttgtag

SEQ ID NO: 532461 - DNA, 55 bp, Artificial
  Synthetic oligonucleotide
cgcctgctggcaagaagaggagtctccgactacgaagcgtcgtcatttacagggc

SEQ ID NO: 532462 - DNA, 55 bp, Artificial
  Synthetic oligonucleotide
acccggcctcagccccccgtcccccttggtatttttccctcaattgcccctcccc

SEQ ID NO: 532463 - DNA, 55 bp, Artificial
  Synthetic oligonucleotide
cgcttaaagctctagacccttggggatatccgtacgctcgcacgtgccaacctct

SEQ ID NO: 532464 - DNA, 55 bp, Artificial
  Synthetic oligonucleotide
aaagaggaaactagggtttccggtccctttgaatttggggattattgccctagtg

SEQ ID NO: 532465 - DNA, 55 bp, Artificial
  Synthetic oligonucleotide
tacagggctacctacagtgcaaggggaaccgaacccttgcacaggtgaagtccct

SEQ ID NO: 532466 - DNA, 55 bp, Artificial
  Synthetic oligonucleotide
gtttgagaacactcacgtgagttacgcctgctggcaagaagaagagtcgcccacg

SEQ ID NO: 532467 - DNA, 55 bp, Artificial
  Synthetic oligonucleotide
gttattgggcttctatgttttgggcctaatgtttccgggttttccaaatggatca

SEQ ID NO: 532468 - DNA, 55 bp, Artificial
  Synthetic oligonucleotide
gaattaaaggaatggcaggagcgtctgtcggttgatttgaattcaatcctggatg

SEQ ID NO: 532469 - DNA, 55 bp, Artificial
  Synthetic oligonucleotide
gggccctagaaaacccctttccatttgaattaaaggaatggcaggagcgtttgtc

SEQ ID NO: 532470 - DNA, 55 bp, Artificial; identical to SEQ ID NO: 384030
  Synthetic oligonucleotide

SEQ ID NO: 532471 - DNA, 55 bp, Artificial
  Synthetic oligonucleotide
gtaatgtctaattttatgcctgactttgagaagattagtcaggacagagtccatg

SEQ ID NO: 532472 - DNA, 55 bp, Artificial
  Synthetic oligonucleotide
gtacgagccgctcatggcccctatgctgaattgtattcatgtaatagttatgtca

SEQ ID NO: 532473 - DNA, 55 bp, Artificial
  Synthetic oligonucleotide
ctctgccattcgcgttcgatataaaatgcctgccgtccgatcgcaatggtggtgt

SEQ ID NO: 532474 - DNA, 55 bp, Artificial
  Synthetic oligonucleotide
ccgatgggttcgaataagcgtaaattgactgagttattggataattccgataacg

SEQ ID NO: 532475 - DNA, 55 bp, Artificial
  Synthetic oligonucleotide
agaccaggagagagaaagctgtagaccctataaatagaaacccactcgaggcggc

SEQ ID NO: 532476 - DNA, 55 bp, Artificial
  Synthetic oligonucleotide
gtcgttgtcgcgcagcggcaaaggactcagaaatattttgtgtctggaaaacaag

SEQ ID NO: 532477 - DNA, 54 bp, Artificial
  Synthetic oligonucleotide
ataagtacgaaccagttgggtttattgaccctacttgtaatgtacatgttgtag

SEQ ID NO: 532478 - DNA, 54 bp, Artificial
  Synthetic oligonucleotide
atatggacccactggtggggaaggaaaatcgcaatttgcgcgctatctcggttt

SEQ ID NO: 532479 - DNA, 53 bp, Artificial
  Synthetic oligonucleotide
gcggaaggactgaaactgataatatttccgtacgattaaaaacacggagggac

SEQ ID NO: 532480 - DNA, 53 bp, Artificial
  Synthetic oligonucleotide
acctatgtcccctgcgcatgttagcaataaagtgatgtcccctgcgcacgtta

SEQ ID NO: 532481 - DNA, 52 bp, Artificial
  Synthetic oligonucleotide
gcgcgcccggaagacggatgaggccagggattattgcatgaaagaagaaact

SEQ ID NO: 532482 - DNA, 52 bp, Artificial
  Synthetic oligonucleotide
gagatccccggtacgaatggcggaagagaacccctctgtttaccggcgagta

SEQ ID NO: 532483 - DNA, 51 bp, Artificial
  Synthetic oligonucleotide
actcgacgtcgccacctgcaggggtatctccaatgtaagggtcagagaact

SEQ ID NO: 532484 - DNA, 51 bp, Artificial
  Synthetic oligonucleotide
ccccaattctctctgaaatacccctcccttgtaatggctgctattaagtct

SEQ ID NO: 532485 - DNA, 51 bp, Artificial
  Synthetic oligonucleotide
ccaggtatccaaggatataaaataacacgtcgacaaggctggtgtagtatt

SEQ ID NO: 532486 - DNA, 50 bp, Artificial
  Synthetic oligonucleotide
acccgcctcgagattttagacccctcccatttttctctcaattgcccctc

SEQ ID NO: 532487 - DNA, 50 bp, Artificial
  Synthetic oligonucleotide
tcattagatctccggtaaggatggctgaggaaaatccctctgtgttccga

SEQ ID NO: 532488 - DNA, 50 bp, Artificial
  Synthetic oligonucleotide
tcatctcttaaaatgccttctgtgcagtctaagtggtggtgtttcaccat

SEQ ID NO: 532489 - DNA, 50 bp, Artificial
  Synthetic oligonucleotide
aaagctgtagaccctataaatagaaacccactcgaggcggccttagtatt

SEQ ID NO: 532490 - DNA, 50 bp, Artificial
  Synthetic oligonucleotide
ctattcttataagtatgaacctgttggatttattgatccaacatgtaatg

SEQ ID NO: 532491 - DNA, 60 bp, Artificial
  Synthetic oligonucleotide
aaggatgcaaccaagcccgttgcgtacgaaggctattcgttctgacatgagcgagggccg

SEQ ID NO: 532492 - DNA, 60 bp, Artificial
  Synthetic oligonucleotide
ctgtttgctggattggaactgcagtgcaggtcaggggctaaaagtgaggcgatgccggcg

SEQ ID NO: 532493 - DNA, 60 bp, Artificial
  Synthetic oligonucleotide
caacagggcatggcataagctgttgatagttcaacacacccgagggataggagccccgaa

SEQ ID NO: 532494 - DNA, 60 bp, Artificial
  Synthetic oligonucleotide
gcttcaactccatacacacggagcgcccgaggttgagggcctggctctcgtcgagtatgt

SEQ ID NO: 532495 - DNA, 59 bp, Artificial
  Synthetic oligonucleotide
aacggacaaagcgccccgcggtggtgtgactaccgcggggcgccttgctgtttgggcct

SEQ ID NO: 532496 - DNA, 59 bp, Artificial
  Synthetic oligonucleotide
agcgatgggcggcgagagctactgatgttcccgacaccgttcaaggtgctgcacacggc

SEQ ID NO: 532497 - DNA, 59 bp, Artificial
  Synthetic oligonucleotide
gggctccaattcgtcacagaacggattgagtggctcggatctcggtaagacgttcgtgt

SEQ ID NO: 532498 - DNA, 57 bp, Artificial
  Synthetic oligonucleotide
ctgagccaactttcagagttgatctcgcaagggccgtttgcggcgcaggtgcctggt

SEQ ID NO: 532499 - DNA, 57 bp, Artificial
  Synthetic oligonucleotide
gggtcataagactaatatgactttagtattcagtgttagccaagcaatactatgtgc

SEQ ID NO: 532500 - DNA, 55 bp, Artificial
  Synthetic oligonucleotide
cgtttgtcccgagaatctttcgcgtacgtgttgacacctcaacaggttgtgggtt

SEQ ID NO: 532501 - DNA, 55 bp, Artificial
  Synthetic oligonucleotide
ctaaacgacttccaactgcgtagaaggattgtaccatcatccatagttacgcata

SEQ ID NO: 532502 - DNA, 55 bp, Artificial
  Synthetic oligonucleotide
ctgaatagcgttaccacaacatacgtcggcgttccgacaggcaagttggccatgc

SEQ ID NO: 532503 - DNA, 55 bp, Artificial
  Synthetic oligonucleotide
gaagtggaggtcgtacttctacaggtttattaattggtgatgcttactcagcagg

SEQ ID NO: 532504 - DNA, 55 bp, Artificial
  Synthetic oligonucleotide
gccgtacggcagaccgtcaattccgccagctactgtttgcattgcgtggccggac

SEQ ID NO: 532505 - DNA, 55 bp, Artificial
  Synthetic oligonucleotide
gctatgtttatggatgcgttatccatagggtcgaaagttgctggcatttattccg

SEQ ID NO: 532506 - DNA, 55 bp, Artificial
  Synthetic oligonucleotide
ggagttagcacctccattatttgctgccttaaaagaaacctattggcatcaagct

SEQ ID NO: 532507 - DNA, 55 bp, Artificial
  Synthetic oligonucleotide
ggccagaaaggtcagccgatgaaagaagttatcgacacggaactatccacgaccg

SEQ ID NO: 532508 - DNA, 55 bp, Artificial
  Synthetic oligonucleotide
gttgacagctacactattcgctgaagtgattgtaaatacatcacgatagcaagac

SEQ ID NO: 532509 - DNA, 55 bp, Artificial
  Synthetic oligonucleotide
gtttctcatttaagacgtacccagactgataaagatcataccgagggtgcgcgag

SEQ ID NO: 532510 - DNA, 55 bp, Artificial
  Synthetic oligonucleotide
tcactgagaactggccctcatcgtgcatgtcaattaccttcgcacagcgaactcc

SEQ ID NO: 532511 - DNA, 55 bp, Artificial
  Synthetic oligonucleotide
tcctatactccggttactttagcgaatatcaaggagacggatttccagtacatcg

SEQ ID NO: 532512 - DNA, 55 bp, Artificial
  Synthetic oligonucleotide
tctataaatcccggtaacacaaatactactggaggtattcagtagtgaacgcacg

SEQ ID NO: 532513 - DNA, 55 bp, Artificial
  Synthetic oligonucleotide
tgatcgagaagtcgaataaactcggtgctagcgggaagcaacttggccaggactt

SEQ ID NO: 532514 - DNA, 55 bp, Artificial
  Synthetic oligonucleotide
ttgccaatgatcaactgtagtgaaagtattttgagtccctggcgtctgtcctctg

SEQ ID NO: 532515 - DNA, 55 bp, Artificial
  Synthetic oligonucleotide
aacagatacatgttgcaactaatagcttggtgtgtaccgaactaggactcacacc

SEQ ID NO: 532516 - DNA, 55 bp, Artificial
  Synthetic oligonucleotide
acaaccagacagaagctcttaacaacttggcacaatctggtgctctagggactct

SEQ ID NO: 532517 - DNA, 55 bp, Artificial
  Synthetic oligonucleotide
acttaggaaacgggtacttacaggggcacgtttcatctgcgccgtggggttcggg

SEQ ID NO: 532518 - DNA, 55 bp, Artificial
  Synthetic oligonucleotide
atgtggagatcactacgcacttggcagacctcatcccgtttaataggcatgagct

SEQ ID NO: 532519 - DNA, 55 bp, Artificial
  Synthetic oligonucleotide
caaacaatggcgggcgataacacagacggttactcaggagtccccggaattggta

SEQ ID NO: 532520 - DNA, 55 bp, Artificial
  Synthetic oligonucleotide
caacaggccggtgctaatttacgcagcggtacataccacaaggggataggagccc

SEQ ID NO: 532521 - DNA, 55 bp, Artificial
  Synthetic oligonucleotide
cacacgacgacgaaggagtgagtaatggccgctgatctatcggccctcaagggtc

SEQ ID NO: 532522 - DNA, 55 bp, Artificial
  Synthetic oligonucleotide
cagatgggctgctagttttggaaacaatgctatgggacctatgggttcttggcgt

SEQ ID NO: 532523 - DNA, 55 bp, Artificial
  Synthetic oligonucleotide
cagattgacagtatcaccttaagtcagtcagatgtgatagttagtagaggttctc

SEQ ID NO: 532524 - DNA, 55 bp, Artificial
  Synthetic oligonucleotide
cagccgtagcagcaacaagtgtagcaactcctatcattcaggatttgaaagaaag

SEQ ID NO: 532525 - DNA, 55 bp, Artificial
  Synthetic oligonucleotide
caggtcggatgaattaaagattcaatccgaagctaacgagacttatatagaagct

SEQ ID NO: 532526 - DNA, 55 bp, Artificial
  Synthetic oligonucleotide
cccattcagcaaccgtcgaacaaccttggaaaccctctcggaaatcatcaacctt

SEQ ID NO: 532527 - DNA, 55 bp, Artificial
  Synthetic oligonucleotide
ccggctgacgtgtttaaaattcgtgacccgaatacgcgcggtatatccgaagtca

SEQ ID NO: 532528 - DNA, 55 bp, Artificial
  Synthetic oligonucleotide
cggctagagccatgaagacttgacattaactgaatctcttcgtaaggtataccaa

SEQ ID NO: 532529 - DNA, 55 bp, Artificial
  Synthetic oligonucleotide
ccggttgcctcggcttaaacgcagatgcaaaatggggaggtatcgacggcggctt

SEQ ID NO: 532530 - DNA, 55 bp, Artificial
  Synthetic oligonucleotide
cggcacttcctaacatcgtaggttacactgcccacactcttttaactgctgcgag

SEQ ID NO: 532531 - DNA, 55 bp, Artificial
  Synthetic oligonucleotide
cgctcgactcccacgaagatatctcgatccgctggcacaacaaacaggccctcgt

SEQ ID NO: 532532 - DNA, 54 bp, Artificial
  Synthetic oligonucleotide
aaaagtgcaagccatcatggacaatgcactagaagcggtgcacggtaccgcatt

SEQ ID NO: 532533 - DNA, 53 bp, Artificial
  Synthetic oligonucleotide
cgaaacggcgaaagtgtgcccgagttttcgcaggtaaaagcaccttttaggta

SEQ ID NO: 532534 - DNA, 53 bp, Artificial
  Synthetic oligonucleotide
taggaatcacctatcagcaattcttgcaagagggctaccccgtatcactggcc

SEQ ID NO: 532535 - DNA, 53 bp, Artificial
  Synthetic oligonucleotide
aaccatcccgcaaatcgcccgtatatgttctaaatgttttgcaattatgcgtt

SEQ ID NO: 532536 - DNA, 52 bp, Artificial
  Synthetic oligonucleotide
ctgcggctgacggtctcagctaattcaccatgagaagggatattaagatcgg

SEQ ID NO: 532537 - DNA, 52 bp, Artificial
  Synthetic oligonucleotide
gccggatcaaacccgacgttcgacagtgagctaatcgcacggcaggtgaccg

SEQ ID NO: 532538 - DNA, 51 bp, Artificial
  Synthetic oligonucleotide
tagaggtggggaagatcttacgacaaatattgtccccgcctgtcagaaatg

SEQ ID NO: 532539 - DNA, 51 bp, Artificial
  Synthetic oligonucleotide
gaagctattggacctcaagttcaggtaactaatggagacatctctgttatt

SEQ ID NO: 532540 - DNA, 50 bp, Artificial
  Synthetic oligonucleotide
gtagaaccaatctgatttactgccaagaataacaactccttcattcatac

SEQ ID NO: 532541 - DNA, 50 bp, Artificial
  Synthetic oligonucleotide
tgatgaaagactcactcaacggccggttggatgttttagagcccgggaaa

SEQ ID NO: 532542 - DNA, 50 bp, Artificial
  Synthetic oligonucleotide
tgtaatcgagagtgtagatccaggtggccaatcgcaaggaacgattaaaa

SEQ ID NO: 532543 - DNA, 60 bp, Artificial
  Synthetic oligonucleotide
tccgggccgtacggtcgggaaccctccagagggaagaagccacacggagtagaacggaaa

SEQ ID NO: 532544 - DNA, 60 bp, Artificial
  Synthetic oligonucleotide
gtgggatgctcctcccgattccgtccaatccccccccccgagaggtcccccaggaatggc

SEQ ID NO: 532545 - DNA, 60 bp, Artificial
  Synthetic oligonucleotide
gtgagcctcgtgccgaccgaagggcgcgatgggggagggggatcctccgagaggggatac

SEQ ID NO: 532546 - DNA, 60 bp, Artificial
  Synthetic oligonucleotide
ggaagagtatatcctacgggaatccccggtctcccctcacgtccagcccctccccggtcc

SEQ ID NO: 532547 - DNA, 60 bp, Artificial
  Synthetic oligonucleotide
gcgtgggggagccgtgggtccgtgggatgctcctcccgattccgtccaatcccccccccc

SEQ ID NO: 532548 - DNA, 60 bp, Artificial
  Synthetic oligonucleotide
gcaagaggcggacggtcctcagtgctcttactcttttctgtaaagaggagactgctggac

SEQ ID NO: 532549 - DNA, 60 bp, Artificial
  Synthetic oligonucleotide
gaggggatacccactaaagagagggagataccctgagggagactgctcccaagaagttcc

SEQ ID NO: 532550 - DNA, 60 bp, Artificial
  Synthetic oligonucleotide
ctcacgcggcaggagtaagaccatagcgtaggaagagatgctaggagttgggggagaccg

SEQ ID NO: 532551 - DNA, 60 bp, Artificial
  Synthetic oligonucleotide
cggggctagccagtgggtgttccgccccccaagaggcacgagtgaggcttatcccgggga

SEQ ID NO: 532552 - DNA, 60 bp, Artificial
  Synthetic oligonucleotide
cggagatctctctcgagttctcctattcttcctcttgtggatacccactgctcgagaatg

SEQ ID NO: 532553 - DNA, 60 bp, Artificial
  Synthetic oligonucleotide
ccttctccgtccctatccttctttccaattattcctttgatgtttcccagccagggatta

SEQ ID NO: 532554 - DNA, 60 bp, Artificial
  Synthetic oligonucleotide
atggagcggcctcccgattcgaacggcccgacgccagaactggagagcactccgggccgt

SEQ ID NO: 532555 - DNA, 60 bp, Artificial
  Synthetic oligonucleotide
atcccggggaactcggcgaatcgtccccacatagcagagccccggaccctcttccaaaga

SEQ ID NO: 532556 - DNA, 60 bp, Artificial
  Synthetic oligonucleotide
agaacggaaaaatcacctccagaggaccccttcagcgaacagaaggctctctcacgcggc

SEQ ID NO: 532557 - DNA, 58 bp, Artificial
  Synthetic oligonucleotide
cccctcgctgctccctcgagggggttcacacccccaactggcgggccggctgttcttc

SEQ ID NO: 532558 - DNA, 57 bp, Artificial
  Synthetic oligonucleotide
gagacgcaaacctgtgagtggacacccgctttattcactggggacgacaactctggg

SEQ ID NO: 532559 - DNA, 55 bp, Artificial
  Synthetic oligonucleotide
agtgctcttactcttttctgtaaagaggagactgctggactcgtcgccccagtcc

SEQ ID NO: 532560 - DNA, 55 bp, Artificial
  Synthetic oligonucleotide
tcccgattcgaacggcccgacgccagaactggagagcactccgggccgtacggtc

SEQ ID NO: 532561 - DNA, 54 bp, Artificial
  Synthetic oligonucleotide
gccacacggagtagaacggaaaaatcacctccagaggaccccttcagcgaacag

SEQ ID NO: 532562 - DNA, 53 bp, Artificial
  Synthetic oligonucleotide
ccccaggaatggcgggaccccactcggcagggtccgcgtaccatcctttctta

SEQ ID NO: 532563 - DNA, 60 bp, Artificial
  Synthetic oligonucleotide
catcctccagtcaatgtcaaatggtagagtggaacctgttgggctgcttattcatggtag

SEQ ID NO: 532564 - DNA, 60 bp, Artificial
  Synthetic oligonucleotide
cattttctggtctgagaaattctgtccctgtagtgaatagagaagcaacaagccagggtg

SEQ ID NO: 532565 - DNA, 60 bp, Artificial
  Synthetic oligonucleotide
ctatctgatggtctcagacttgctgagtatgaaaggaggtgtgctgattggtcaatgcca

SEQ ID NO: 532566 - DNA, 60 bp, Artificial
  Synthetic oligonucleotide
ctctcccttctacgaccttttcccgaccaacatctcatgtcggattaaactggatgatct

SEQ ID NO: 532567 - DNA, 60 bp, Artificial
  Synthetic oligonucleotide
gagtgagatgagagatttgactaaagagatgacacaaatgagcagcgatctcgagatttt

SEQ ID NO: 532568 - DNA, 60 bp, Artificial
  Synthetic oligonucleotide
gatactgcatcccgtgatattggtgctctgcgtagacgttgtaagttgtgttttgagatg

SEQ ID NO: 532569 - DNA, 60 bp, Artificial
  Synthetic oligonucleotide
gcagccctagcggcctttgatttgaccactagcatcctagatgcgtttcgaaacatgagc

SEQ ID NO: 532570 - DNA, 60 bp, Artificial
  Synthetic oligonucleotide
gctaatctgaccgtggagctgtgaagcgctcaaccccgagtgttgtatacagtcgtaatg

SEQ ID NO: 532571 - DNA, 60 bp, Artificial
  Synthetic oligonucleotide
gtataaacctaatcacaccctaggtggaatggaaatacgaggtattcgtctagtaagaca

SEQ ID NO: 532572 - DNA, 60 bp, Artificial
  Synthetic oligonucleotide
gtatcatgcttatgatggtaatctctacttgattgaaggggctatgccatctggttgtgc

SEQ ID NO: 532573 - DNA, 60 bp, Artificial
  Synthetic oligonucleotide
gttaaatactcagggaagtgtggttagttaggtactaactgtgatcctaataagcggtga

SEQ ID NO: 532574 - DNA, 60 bp, Artificial
  Synthetic oligonucleotide
tagaagacacttttggcatgactgtaactcctgcatcaaaacttggtgaccactttaacg

SEQ ID NO: 532575 - DNA, 60 bp, Artificial
  Synthetic oligonucleotide
tatatcatgcagctaagtggatgggtgatcttacctatgaggatgccatctgggttgatg

SEQ ID NO: 532576 - DNA, 60 bp, Artificial
  Synthetic oligonucleotide
tatctccatgggaaacccggatgcggtaaatctctcgcttctgctgaactagctaaagcc

SEQ ID NO: 532577 - DNA, 60 bp, Artificial
  Synthetic oligonucleotide
tcccgctagacatgttttacaagtcgtggtattccgctagactttttcgcagacacatgg

SEQ ID NO: 532578 - DNA, 60 bp, Artificial
  Synthetic oligonucleotide
tcttatctaatttctttgggcgttcgcgtctatacaaaacattggacatgccaaaatgtg

SEQ ID NO: 532579 - DNA, 60 bp, Artificial
  Synthetic oligonucleotide
tgacattttggccgacctgcatgaagacccagacctggtgagaagattgcatgaacctgt

SEQ ID NO: 532580 - DNA, 60 bp, Artificial
  Synthetic oligonucleotide
tgcaacaactagcatacctgttacagttagcattgcacccatgtatacatcattttctgg

SEQ ID NO: 532581 - DNA, 60 bp, Artificial
  Synthetic oligonucleotide
ttctggactgtgttcattacaccggtggtaccattgagttataacacaggtgcaacaact

SEQ ID NO: 532582 - DNA, 60 bp, Artificial
  Synthetic oligonucleotide
ttgagagtggattgaggagcactggattttgcgtgggacaacgcgacatttttgtgtacg

SEQ ID NO: 532583 - DNA, 60 bp, Artificial
  Synthetic oligonucleotide
cagtgatctctaatactgctggtttcgagattaatgcttctactgctgaggttggtacgt

SEQ ID NO: 532584 - DNA, 60 bp, Artificial
  Synthetic oligonucleotide
caggagggccggttacgtatactatatcagttgcccctattgaatcaaaatttcatggtg

SEQ ID NO: 532585 - DNA, 60 bp, Artificial
  Synthetic oligonucleotide
aaagcgacacttccgcgccagattaaatcaaaccacatgcttctgtccaacctagttgga

SEQ ID NO: 532586 - DNA, 60 bp, Artificial
  Synthetic oligonucleotide
acctaatcacaccctaggtggaatggaaatacaaggtattcgtctagtaagacacttgta

SEQ ID NO: 532587 - DNA, 60 bp, Artificial
  Synthetic oligonucleotide
actgacattggtatctttggtcaaaactgcacctatcatttcttgatgcgttcgggtttc

SEQ ID NO: 532588 - DNA, 60 bp, Artificial
  Synthetic oligonucleotide
agttccaaccccatttgccccgacgcacaccaagttgaagaggtctccagtgtatggtgt

SEQ ID NO: 532589 - DNA, 60 bp, Artificial
  Synthetic oligonucleotide
atattcgtatggtgtaatgtcagtggttggatgcccagtcctgagggactgtgcatccag

SEQ ID NO: 532590 - DNA, 60 bp, Artificial
  Synthetic oligonucleotide
atggtacatccgatcgtttattagctttgactgccggtacaggttgcatctcctctcagg

SEQ ID NO: 532591 - DNA, 60 bp, Artificial
  Synthetic oligonucleotide
atggtagtcggctttcgagctgcaacctattaccagaagatcaccaatggtgcaatgtgc

SEQ ID NO: 532592 - DNA, 60 bp, Artificial
  Synthetic oligonucleotide
cacctaacctacccatgtctctatcgtccctactagttttaggcagtattgtacgctctt

SEQ ID NO: 532593 - DNA, 60 bp, Artificial
  Synthetic oligonucleotide
attagtcaggtacaaactgtgatcccaataagcggtgaagctcttagctcgccctaggac

SEQ ID NO: 532594 - DNA, 59 bp, Artificial
  Synthetic oligonucleotide
ggattgagctccgtaacgtgtttatccctcttgctgaatgtaagcgttatgatattaag

SEQ ID NO: 532595 - DNA, 59 bp, Artificial
  Synthetic oligonucleotide
attgtggataacatttatgtgctgccagtacaaaatcacattgaggactgggagagata

SEQ ID NO: 532596 - DNA, 58 bp, Artificial
  Synthetic oligonucleotide
tattctgtccaccgtaataggtggttgagggttaacggaaaaggggtggctagtgttc

SEQ ID NO: 532597 - DNA, 57 bp, Artificial
  Synthetic oligonucleotide
ggcatgtacatgacttgttattcagaggtgaccattggagacaaaacattcagggca

SEQ ID NO: 532598 - DNA, 55 bp, Artificial
  Synthetic oligonucleotide
cccattcaatggggatcccgcagtgctaacctaactgaatatgaagtcatagatg

SEQ ID NO: 532599 - DNA, 55 bp, Artificial
  Synthetic oligonucleotide
agcaggtggacaacaagcaaattggacactgtatgggagattggttgcccctgaa

SEQ ID NO: 532600 - DNA, 55 bp, Artificial
  Synthetic oligonucleotide
ccctaggtggaatggaaatacgaggtattcgtctagtaagacactcgtaggacct

SEQ ID NO: 532601 - DNA, 55 bp, Artificial
  Synthetic oligonucleotide
cagcttggataacaactggcctttcagtgctggctagcattgtaagcctgggtag

SEQ ID NO: 532602 - DNA, 55 bp, Artificial
  Synthetic oligonucleotide
ccgtttctcctctagaactaacaggaaagttattcatgatattggtgttacggct

SEQ ID NO: 532603 - DNA, 55 bp, Artificial
  Synthetic oligonucleotide
gtcggattaaactggatgatcttttaagactccctaacccagaattcctccgggg

SEQ ID NO: 532604 - DNA, 55 bp, Artificial
  Synthetic oligonucleotide
cctggtcttactacttcgctatctcaaccgcttgctatacctacccgtatggcgg

SEQ ID NO: 532605 - DNA, 55 bp, Artificial
  Synthetic oligonucleotide
catttgtaatccacttcggtggattgcgagtgcatgatttcctggtttcagaaca

SEQ ID NO: 532606 - DNA, 55 bp, Artificial
  Synthetic oligonucleotide
ggtcacgatccgtacaaacctaatcacaccctaggtggaatggaaatacgaggta

SEQ ID NO: 532607 - DNA, 55 bp, Artificial
  Synthetic oligonucleotide
gggtttaccgctcatactgtagcgagggtaggagaattcatcaacacggaatagg

SEQ ID NO: 532608 - DNA, 55 bp, Artificial
  Synthetic oligonucleotide
gggcttctcaatgagtctggttttgaaataggtcatggtacatctgatcgtctcc

SEQ ID NO: 532609 - DNA, 55 bp, Artificial
  Synthetic oligonucleotide
cgtggaggagtgtggttattctgataggatcatgcagataacatctggaaattca

SEQ ID NO: 532610 - DNA, 55 bp, Artificial
  Synthetic oligonucleotide
ctagttggacgtgcctttgctcttgaaccgtacacttcaacaagtacgggaggac

SEQ ID NO: 532611 - DNA, 55 bp, Artificial
  Synthetic oligonucleotide
caccggtggtaccattgagttataacacaggtgcaacaactagcatacctgttac

SEQ ID NO: 532612 - DNA, 55 bp, Artificial
  Synthetic oligonucleotide
aactggatgatcttttaagactccctaacccagaattcctccggggtactcctgt

SEQ ID NO: 532613 - DNA, 55 bp, Artificial
  Synthetic oligonucleotide
caaatggtagagtggaacctgttgggctgcttattcatggtagtcctggctctgg

SEQ ID NO: 532614 - DNA, 55 bp, Artificial
  Synthetic oligonucleotide
caagaattcttaccacgctcacgatggtaatctttacttgattgagggagctatg

SEQ ID NO: 532615 - DNA, 55 bp, Artificial
  Synthetic oligonucleotide
gactttgttagtatggatacgaagagccgactgccgttggagtgtatcctccgga

SEQ ID NO: 532616 - DNA, 55 bp, Artificial
  Synthetic oligonucleotide
gactccctaacccagaattcctccggggtattcctgtggatctagcttatactgg

SEQ ID NO: 532617 - DNA, 54 bp, Artificial
  Synthetic oligonucleotide
ttgctgctgccattacactgatggcaatgagggtcaatggacctagatggttgg

SEQ ID NO: 532618 - DNA, 54 bp, Artificial
  Synthetic oligonucleotide
cttgaaggtgtgagaaagaaggtgggtgaagttccaaccccatttgctccgacg

SEQ ID NO: 532619 - DNA, 53 bp, Artificial
  Synthetic oligonucleotide
tgagtaagcttcaaagagagtaccaagccagatcttcatgtggtagtaaactt

SEQ ID NO: 532620 - DNA, 52 bp, Artificial
  Synthetic oligonucleotide
tcacgatctgggacccaacacatgcttcactcatgtttaaatgttggttccc

SEQ ID NO: 532621 - DNA, 52 bp, Artificial
  Synthetic oligonucleotide
ttgctaaaagtgaaggcccatacaatggatttagtcaacaacctctcaagaa

SEQ ID NO: 532622 - DNA, 51 bp, Artificial
  Synthetic oligonucleotide
cggtacccggatatgatatttcatggaccatgctgaatagtgtggttatgg

SEQ ID NO: 532623 - DNA, 51 bp, Artificial
  Synthetic oligonucleotide
acagcttatcatgatgtgatttcttaccgtgccatgaccactcgcggtttt

SEQ ID NO: 532624 - DNA, 51 bp, Artificial
  Synthetic oligonucleotide
aattcacccgaatccgtggcgtatccatggaaataagtttacctaattgta

SEQ ID NO: 532625 - DNA, 50 bp, Artificial
  Synthetic oligonucleotide
atacaacacctgcctctgtccgtcttcccttcatgggtccagcatctgtt

SEQ ID NO: 532626 - DNA, 50 bp, Artificial
  Synthetic oligonucleotide
tctggttttgttgctgtatccaatattccccccggggcactaattggacc

SEQ ID NO: 532627 - DNA, 50 bp, Artificial
  Synthetic oligonucleotide
catttaacgtgtaccctatacgataattggggtggattctggatgcctag

SEQ ID NO: 532628 - DNA, 50 bp, Artificial
  Synthetic oligonucleotide
ctttgtgtgcctttttacgttatgacaccattcgtgaagaccgcagactt

SEQ ID NO: 532629 - DNA, 60 bp, Artificial
  Synthetic oligonucleotide
cgaacaagacacaacttgaacgactaggcccactaagcccaataacaatgttcatgctta

SEQ ID NO: 532630 - DNA, 60 bp, Artificial
  Synthetic oligonucleotide
cgctattttgctccttttgccaaaaggaggaagctaatgaaggtggagttactacgacta

SEQ ID NO: 532631 - DNA, 60 bp, Artificial
  Synthetic oligonucleotide
cggctatgttcaaaatttggtgcatttatgatgtgttttgataggtctccgtgtcacttc

SEQ ID NO: 532632 - DNA, 60 bp, Artificial
  Synthetic oligonucleotide
cggtaacgcagtggcatgaacaggacgtgtaaaagctgaacaaccgatgtgtatgtatat

SEQ ID NO: 532633 - DNA, 60 bp, Artificial
  Synthetic oligonucleotide
cgtacactactgttcatgtttttgtcaattttgaactatgacctatatttttcatgggtg

SEQ ID NO: 532634 - DNA, 60 bp, Artificial
  Synthetic oligonucleotide
ctatgacctatatttttcatgggtgaaaaattctgagaaaattcctataaatcataaata

SEQ ID NO: 532635 - DNA, 60 bp, Artificial
  Synthetic oligonucleotide
gaatgactgctaaggagaaaaagcccattagcccaataacattgtccgtacatcactgtt

SEQ ID NO: 532636 - DNA, 60 bp, Artificial
  Synthetic oligonucleotide
gagtatttttcccgactccaaatggggggtatttccctaggcaagcctttgctacgccgg

SEQ ID NO: 532637 - DNA, 60 bp, Artificial
  Synthetic oligonucleotide
ggaggtaacaatgacgatggagttactacgaccaaaacctaattaatttgcattaacgaa

SEQ ID NO: 532638 - DNA, 60 bp, Artificial
  Synthetic oligonucleotide
ggctagccttagcttcgccggagcagactaggtttgactttagctcacattgtccatgcg

SEQ ID NO: 532639 - DNA, 60 bp, Artificial
  Synthetic oligonucleotide
ggggggtatttccctaggctagcgttagcttcgccggagctgactaggtttgactttagc

SEQ ID NO: 532640 - DNA, 60 bp, Artificial
  Synthetic oligonucleotide
gtgtcacttctttgctttggcactggaaccagtaccccaattggtattggggtattgggg

SEQ ID NO: 532641 - DNA, 60 bp, Artificial
  Synthetic oligonucleotide
gtgttttgataggtctccgtgtcatttctttgctttggcactggaaccagtaccccaatt

SEQ ID NO: 532642 - DNA, 60 bp, Artificial
  Synthetic oligonucleotide
ttcatgggtgaaaaattctgagaaaattcctataaatcataaatattggaaaactactat

SEQ ID NO: 532643 - DNA, 60 bp, Artificial
  Synthetic oligonucleotide
ttgtcaattttgaactatgacctatatttttcatgggtgaaaaattctgagaaaattcct

SEQ ID NO: 532644 - DNA, 60 bp, Artificial
  Synthetic oligonucleotide
tttctatgtctccgtgtcacttctttgctttggcaggggaaccgataccccaataccaat

SEQ ID NO: 532645 - DNA, 60 bp, Artificial
  Synthetic oligonucleotide
tttggcttcgggagtattttttctgaatccaaatggggggtatttccctaggctagcctt

SEQ ID NO: 532646 - DNA, 60 bp, Artificial
  Synthetic oligonucleotide
aaaagcccactaagcccaatagcaatgtacgtacactactgttcatgtttttgtcaattt

SEQ ID NO: 532647 - DNA, 60 bp, Artificial
  Synthetic oligonucleotide
aaggggacacttctaaggcttaatttgtttgacctagattttgatggagtcgttttttgg

SEQ ID NO: 532648 - DNA, 60 bp, Artificial
  Synthetic oligonucleotide
aataacaatgttcatgcttaactgttcatgatttgccgattttgaacttcaacctatatt

SEQ ID NO: 532649 - DNA, 60 bp, Artificial
  Synthetic oligonucleotide
acaagaaagacgaacaagacacaacttgaacgactaggcccactaagcccaataacaatg

SEQ ID NO: 532650 - DNA, 60 bp, Artificial
  Synthetic oligonucleotide
accggatggccgcccgctgccccccccatttgggcctggcccatttcgcgcgcgtttttg

SEQ ID NO: 532651 - DNA, 60 bp, Artificial
  Synthetic oligonucleotide
accggatggccgccgctgccacccatttgggcctgggcctgatactcgcgcgctattttg

SEQ ID NO: 532652 - DNA, 60 bp, Artificial
  Synthetic oligonucleotide
actatgttcaaaatttgggaaacatctgaagtgttttgataggtctccgtgtcatttctt

SEQ ID NO: 532653 - DNA, 60 bp, Artificial
  Synthetic oligonucleotide
agcttaaattggtcaacctatattttgctacggtcattttttggtcaccggagtattttt

SEQ ID NO: 532654 - DNA, 60 bp, Artificial
  Synthetic oligonucleotide
atctgatgtgttttgataggtctccgtgtcatttctttgctttggcgttggaccccaatt

SEQ ID NO: 532655 - DNA, 60 bp, Artificial
  Synthetic oligonucleotide
ccgataccccaataccaattggggtactggggaacacttataagcttaatttgtttgacc

SEQ ID NO: 532656 - DNA, 60 bp, Artificial
  Synthetic oligonucleotide
cccaatatcaatgtccgtacattactattcatgtttttgtcaattttgaactatgaccta

SEQ ID NO: 532657 - DNA, 60 bp, Artificial
  Synthetic oligonucleotide
ccactattgggcttaatggcccattaagactgttcatgcattaactgttcatgaagttgc

SEQ ID NO: 532658 - DNA, 60 bp, Artificial
  Synthetic oligonucleotide
atgttcaaaatttgaggtcattttgatgtgttttgctatgtctccgtgtcaattcttgtg

SEQ ID NO: 532659 - DNA, 60 bp, Artificial
  Synthetic oligonucleotide
atttgggccgggcccaacactcaacacccgcgcgcgtttttgctccttttgctaaaagga

SEQ ID NO: 532660 - DNA, 60 bp, Artificial
  Synthetic oligonucleotide
caataccaattggggtactggggaacacttataagcttaatttgtttgacctagattttg

SEQ ID NO: 532661 - DNA, 56 bp, Artificial
  Synthetic oligonucleotide
tactccaattggtattggggtattggggtacacttataaggcaaaatcctttgacc

SEQ ID NO: 532662 - DNA, 55 bp, Artificial
  Synthetic oligonucleotide
ccgtgtcacttctttgctttggcaggggaaccgataccccaataccaattggggt

SEQ ID NO: 532663 - DNA, 55 bp, Artificial
  Synthetic oligonucleotide
ccgtgtcatttctttgctttggcaggggaaccagtactccaattggtattggggt

SEQ ID NO: 532664 - DNA, 55 bp, Artificial
  Synthetic oligonucleotide
cttcgccggagcagactaggtttgactttagctcacattgtccatgcggccatcc

SEQ ID NO: 532665 - DNA, 55 bp, Artificial
  Synthetic oligonucleotide
gataggtctccgtgtcatttctttgctttggcgttggaccccaattccccaattg

SEQ ID NO: 532666 - DNA, 55 bp, Artificial
  Synthetic oligonucleotide
gaggtcattttgatgtgttttgctatgtctccgtgtcaattcttgtgttccgcat

SEQ ID NO: 532667 - DNA, 55 bp, Artificial
  Synthetic oligonucleotide
ggtgcatttatgatgtgttttgataggtctccgtgtcacttctttgctttggcac

SEQ ID NO: 532668 - DNA, 55 bp, Artificial
  Synthetic oligonucleotide
ggggtactggggaacacttataagcttaatttgtttgacctagattttgatagag

SEQ ID NO: 532669 - DNA, 55 bp, Artificial
  Synthetic oligonucleotide
acgatggagttactacgaccaaaacctaattaatttgcattaacgaagaggaacg

SEQ ID NO: 532670 - DNA, 55 bp, Artificial
  Synthetic oligonucleotide
gggaaacatctgaagtgttttgataggtctccgtgtcatttctttgctttggcgt

SEQ ID NO: 532671 - DNA, 55 bp, Artificial
  Synthetic oligonucleotide
ggcccattaagactgttcatgcattaactgttcatgaagttgccgattttgaact

SEQ ID NO: 532672 - DNA, 55 bp, Artificial
  Synthetic oligonucleotide
gccgctgccacccatttgggcctgggcctgatactcgcgcgctattttgctcctt

SEQ ID NO: 532673 - DNA, 55 bp, Artificial
  Synthetic oligonucleotide
gccaaaaggaggaagctaatgaaggtggagttactacgactataaccatacttat

SEQ ID NO: 532674 - DNA, 50 bp, Artificial
  Synthetic oligonucleotide
taggtttgactttagctcaccttgcccaagcggccatcctatataatatt

SEQ ID NO: 532675 - DNA, 50 bp, Artificial
  Synthetic oligonucleotide
taggtttgactttagctcatatgccccaggcggccatcctatataatatt

SEQ ID NO: 532676 - DNA, 50 bp, Artificial
  Synthetic oligonucleotide
taggtttgactttgcatcacctgacccatgcggccatcctatataatatt

SEQ ID NO: 532677 - DNA, 60 bp, Artificial
  Synthetic oligonucleotide
ttctgttactctcgcgcctaacactttcacctggttagctgtacaaggatccctctattc

SEQ ID NO: 532678 - DNA, 60 bp, Artificial
  Synthetic oligonucleotide
tctcaagcggatgccatctgggaacaggtggcatataaacacaccacttgcccggctgtt

SEQ ID NO: 532679 - DNA, 60 bp, Artificial
  Synthetic oligonucleotide
tatgagattgagtttattgagccccttcctccttcggtgaacactctcagagatatttac

SEQ ID NO: 532680 - DNA, 60 bp, Artificial
  Synthetic oligonucleotide
tatctgacctcatggccaaagaccttcctgagatatcttgactcggagaaccctcagtac

SEQ ID NO: 532681 - DNA, 60 bp, Artificial
  Synthetic oligonucleotide
cgcgtgtattggctctccagtgtctcttattgaacctggaaaggaaccgaactacctcgt

SEQ ID NO: 532682 - DNA, 60 bp, Artificial
  Synthetic oligonucleotide
tacggaggttgatggttaacagataccgctgctttatgctctcttgcttccaattgtcga

SEQ ID NO: 532683 - DNA, 60 bp, Artificial
  Synthetic oligonucleotide
ctcatctcccgtttcaaagacctcttaattgaggcagtgttgaggcgagttttattgctt

SEQ ID NO: 532684 - DNA, 60 bp, Artificial
  Synthetic oligonucleotide
ctttaaacgtggatggggcggagtcggtcaaacgatctccgccctcatctattttggcgg

SEQ ID NO: 532685 - DNA, 60 bp, Artificial
  Synthetic oligonucleotide
gaaaccgcttctacgactcccggaactgtggcaatgggtttccagtatgacaatactgat

SEQ ID NO: 532686 - DNA, 60 bp, Artificial
  Synthetic oligonucleotide
taccacagaaggtttggagttccctgggcgttaaaagcgcgaaggtgaaaattcccacgg

SEQ ID NO: 532687 - DNA, 60 bp, Artificial
  Synthetic oligonucleotide
gagcgagttagtccagttgtgtctttcagcaaccatgactctagcgctggtagtgtcaat

SEQ ID NO: 532688 - DNA, 60 bp, Artificial
  Synthetic oligonucleotide
gttgtggcataagcccgggcaagtggtcaaggtttacggaggtagatctgatgaattggt

SEQ ID NO: 532689 - DNA, 60 bp, Artificial
  Synthetic oligonucleotide
gcccagtggagcggaattgggatccgttgttagagccccttccgctatgagccacaatgt

SEQ ID NO: 532690 - DNA, 60 bp, Artificial
  Synthetic oligonucleotide
gccgttatacggctcttaaaatagtgaagggatctcaggaggtctcagtagatgcttcta

SEQ ID NO: 532691 - DNA, 60 bp, Artificial
  Synthetic oligonucleotide
ggaagcgacccatgttaatcaatggccgctctggggttacagttcgtcattcggaggtgg

SEQ ID NO: 532692 - DNA, 60 bp, Artificial
  Synthetic oligonucleotide
gtgagaagtctagtcagactttaactgaccgctaggcaagcgatataacgccaccattga

SEQ ID NO: 532693 - DNA, 60 bp, Artificial
  Synthetic oligonucleotide
ggcgaggaagaagacgttcgtagacaagatatccgaaggatttgtctgcactctttacgg

SEQ ID NO: 532694 - DNA, 60 bp, Artificial
  Synthetic oligonucleotide
aatgaggattttcttaggcggctttcacgagaaggtcgctagagctgcgaggaatcgatt

SEQ ID NO: 532695 - DNA, 60 bp, Artificial
  Synthetic oligonucleotide
ttggtcctcagaacaggcttgagatagccttatggcatcagataccttccaaacctggaa

SEQ ID NO: 532696 - DNA, 60 bp, Artificial
  Synthetic oligonucleotide
actgaaagaccgtgcgatatccagtagacgggtttctcttttcgagaaatatcgtaacca

SEQ ID NO: 532697 - DNA, 60 bp, Artificial
  Synthetic oligonucleotide
agaaggctcaaagaccggtatccaccagccagaccaaggagatgcctccgaggggagtgg

SEQ ID NO: 532698 - DNA, 60 bp, Artificial
  Synthetic oligonucleotide
agaggttataggctttgtgaatattgacgtacgaaactctactcaactgaatcggctgtc

SEQ ID NO: 532699 - DNA, 60 bp, Artificial
  Synthetic oligonucleotide
agcaatggctctgatatacgattcggctgacgtcgtagctgcgaattggaatatccaaag

SEQ ID NO: 532700 - DNA, 60 bp, Artificial
  Synthetic oligonucleotide
agcacgttaccaagaagttctcttggtccctctacatggttgggtgaacaccatgtgttc

SEQ ID NO: 532701 - DNA, 60 bp, Artificial
  Synthetic oligonucleotide
atcagcattcaagagctcagtgggcttagggacatttgtctctgagttcaccggtgaaca

SEQ ID NO: 532702 - DNA, 60 bp, Artificial
  Synthetic oligonucleotide
atcggctgtcgatcattggatccgccttttcaaagtttcgagtattgaagatgactgcag

SEQ ID NO: 532703 - DNA, 60 bp, Artificial
  Synthetic oligonucleotide
atctctggatttgactggtctgttcaagactgggaactttgggctgatctcaaaatgcga

SEQ ID NO: 532704 - DNA, 60 bp, Artificial
  Synthetic oligonucleotide
ttggtagcaatatcaaatggcagtgaaatcataggattcggatcccgggttaagtttaat

SEQ ID NO: 532705 - DNA, 60 bp, Artificial
  Synthetic oligonucleotide
attcccacggccgaaaggaaacctgtacaagtattcggagctgactcttcatcagcattc

SEQ ID NO: 532706 - DNA, 60 bp, Artificial
  Synthetic oligonucleotide
attctcctgttagattagtttgtttgacggatgagggacctgctactgcggtcaacgctg

SEQ ID NO: 532707 - DNA, 60 bp, Artificial
  Synthetic oligonucleotide
cagaatcggtatgggctctagagttaattggcaaggcgcagattacttgttgacagcctc

SEQ ID NO: 532708 - DNA, 60 bp, Artificial
  Synthetic oligonucleotide
catgcaactcgtggttgaatcggtgtatgctcgactggagttgctatccaaagtggaact

SEQ ID NO: 532709 - DNA, 60 bp, Artificial
  Synthetic oligonucleotide
catggttacgaggagtggcctccaactggtcgaaatggagatggaggaagttacggttct

SEQ ID NO: 532710 - DNA, 60 bp, Artificial
  Synthetic oligonucleotide
ccaacttgttaaacctacatgtctgtggtgattgaagtctatgacgaacaatcagtaagc

SEQ ID NO: 532711 - DNA, 58 bp, Artificial
  Synthetic oligonucleotide
ttgtggtccgagatgagcccaatgagcctgaagttgctaggatagtaggcgcgccaac

SEQ ID NO: 532712 - DNA, 57 bp, Artificial
  Synthetic oligonucleotide
tgattgggagaataagctctgtgaggacccttgtatagaccgatttgtgaaacctga

SEQ ID NO: 532713 - DNA, 57 bp, Artificial
  Synthetic oligonucleotide
ccattgagcgtgttcggctccagcaatggagctgttctagataagcatagagatcta

SEQ ID NO: 532714 - DNA, 56 bp, Artificial
  Synthetic oligonucleotide
atgtcccaagtgggccaagataaaggattattgttgtcaggtaggactggtccctg

SEQ ID NO: 532715 - DNA, 55 bp, Artificial
  Synthetic oligonucleotide
ggatcctactgcacctcgagttctaactcacggattcgatgtctaatggcaaagc

SEQ ID NO: 532716 - DNA, 55 bp, Artificial
  Synthetic oligonucleotide
gatgagctcacagctgttgacttggtgcgactgggtctttgtgacccggtcagac

SEQ ID NO: 532717 - DNA, 55 bp, Artificial
  Synthetic oligonucleotide
cgctcgtaggaaatatgaggaattgggtcatgtctgcaaagactacatgccttgt

SEQ ID NO: 532718 - DNA, 55 bp, Artificial
  Synthetic oligonucleotide
ccgcacatcgctgataaatgtgtatggaggggcagatccaacgaagctgaaatgc

SEQ ID NO: 532719 - DNA, 55 bp, Artificial
  Synthetic oligonucleotide
cccgggcaagtggtcaaggtttacggaggtagatctgatgaattggtctcttctg

SEQ ID NO: 532720 - DNA, 54 bp, Artificial
  Synthetic oligonucleotide
gagacgccgaaggtcgacgcagcaagggcagagttctacagttatggccccaat

SEQ ID NO: 532721 - DNA, 54 bp, Artificial
  Synthetic oligonucleotide
tactgcaaagagtgtgcaggtgatacgggctatgcctactctgcgttcaaggaa

SEQ ID NO: 532722 - DNA, 53 bp, Artificial
  Synthetic oligonucleotide
gtgcacctccgagggttgttcagatcccgactgtgtgtttcactcagattcct

SEQ ID NO: 532723 - DNA, 53 bp, Artificial
  Synthetic oligonucleotide
accacccgattacagccgaaatattgctgtctaggagtccaggtctcttcaga

SEQ ID NO: 532724 - DNA, 51 bp, Artificial
  Synthetic oligonucleotide
cgagattcactcaagcgtggtataattatatcacgtcagttagctttactt

SEQ ID NO: 532725 - DNA, 50 bp, Artificial
  Synthetic oligonucleotide
aacatcagggaagcagtcgagcaacttgtcaaagagtaccccagagcacc

SEQ ID NO: 532726 - DNA, 60 bp, Artificial
  Synthetic oligonucleotide
gagattatagtgtcggagaagggtctagtgaaactgaggaaaatttatgcagggttaggt

SEQ ID NO: 532727 - DNA, 60 bp, Artificial
  Synthetic oligonucleotide
ggaagactactagatgtaatagatagctattatatcgaatgtagttatgcctacaattta

SEQ ID NO: 532728 - DNA, 60 bp, Artificial
  Synthetic oligonucleotide
ggggcctacgaccaacaactatcaggttctgttgtggtcaccttggtgtttctagggaaa

SEQ ID NO: 532729 - DNA, 60 bp, Artificial
  Synthetic oligonucleotide
gaaacagtggagatagagaggtgatatacagctcatttgatcaaataagacaaaagactg

SEQ ID NO: 532730 - DNA, 60 bp, Artificial
  Synthetic oligonucleotide
ctcttgggcatgttaatgacccacaaaatttcactgtcatagagtcaaataagtacctca

SEQ ID NO: 532731 - DNA, 60 bp, Artificial
  Synthetic oligonucleotide
ggaaaggccaaaacgagcaggagatttcaaaacgtttatgtggccaagaaagctatgcct

SEQ ID NO: 532732 - DNA, 60 bp, Artificial
  Synthetic oligonucleotide
gctcattattgttgcgtgagaatagtgcatgaaaactcaagcttactgaaaggggttagt

SEQ ID NO: 532733 - DNA, 60 bp, Artificial
  Synthetic oligonucleotide
gtttcaagcactcatgcaagtcgtggatccaaaggccttcatacagaagttcgacaatgg

SEQ ID NO: 532734 - DNA, 60 bp, Artificial
  Synthetic oligonucleotide
ataggatgtgtaatgttttcaactgtcaccatactcttggagtaccaggccgaaagggat

SEQ ID NO: 532735 - DNA, 60 bp, Artificial
  Synthetic oligonucleotide
agtgacggagaggtatatagtgttacgctcttaagaacaataggaccctttcacttgatt

SEQ ID NO: 532736 - DNA, 60 bp, Artificial
  Synthetic oligonucleotide
tatatgcggccttaaggattgtttacctgatgcccttcactcagctatgtttaggagtca

SEQ ID NO: 532737 - DNA, 60 bp, Artificial
  Synthetic oligonucleotide
agggaatggttaacaccattaccctcgttgcctaggggctactctcgtacatcagcaggt

SEQ ID NO: 532738 - DNA, 60 bp, Artificial
  Synthetic oligonucleotide
gcagagaaagtgctactcctttcaagcaatcattgcaagttcacgacaatggactctgta

SEQ ID NO: 532739 - DNA, 60 bp, Artificial
  Synthetic oligonucleotide
agcatagggccattccatttggtgtatttatcaaagggttctttaaccattgagaccaaa

SEQ ID NO: 532740 - DNA, 60 bp, Artificial
  Synthetic oligonucleotide
tcgacaatggaggacgaaacattgattgcatcagggtcagtgaggtgtactcagatgggg

SEQ ID NO: 532741 - DNA, 60 bp, Artificial
  Synthetic oligonucleotide
actgaggcagcattgggtgagtgttttcaaggagtacgtgaaaaacttagggcacgcgaa

SEQ ID NO: 532742 - DNA, 60 bp, Artificial
  Synthetic oligonucleotide
tctagggaaacacccgccccgtttgttcggaaggttctttgggggtccaagttttagaac

SEQ ID NO: 532743 - DNA, 60 bp, Artificial
  Synthetic oligonucleotide
acagcgagatgatggccagaagctataatgagtatgtgcttaaaaaggtgtcaaagacag

SEQ ID NO: 532744 - DNA, 60 bp, Artificial
  Synthetic oligonucleotide
gctagattaactgataatatagcagtgaaacaggtagacttaatacagtctgatgaggac

SEQ ID NO: 532745 - DNA, 56 bp, Artificial
  Synthetic oligonucleotide
gcctaggggctactctcgtacatcagcaggtggctatttgtccacttatggcttat

SEQ ID NO: 532746 - DNA, 55 bp, Artificial
  Synthetic oligonucleotide
ggggcaagtggcattcatatcaagtaatttaaaagagagaatgcaaagggagttc

SEQ ID NO: 532747 - DNA, 55 bp, Artificial
  Synthetic oligonucleotide
ggttgtcctaagaactgatgattacaacgacaaaagcgttctaacacagagaaaa

SEQ ID NO: 532748 - DNA, 55 bp, Artificial
  Synthetic oligonucleotide
gtgctcaccatggaagaaaagaggacctttatcctttcgtaaatatagcattgag

SEQ ID NO: 532749 - DNA, 55 bp, Artificial
  Synthetic oligonucleotide
tcaacgagggcacagggtacagactgtcatgcagttcacaaacagctccaagttc

SEQ ID NO: 532750 - DNA, 55 bp, Artificial
  Synthetic oligonucleotide
ttgatgaattaagtctgtacccacctggttacatctcattgttacaggtggtcac

SEQ ID NO: 532751 - DNA, 55 bp, Artificial
  Synthetic oligonucleotide
tttgctgcccatgccttcggaatactggctgaagaaggtttctcgcctgcaacca

SEQ ID NO: 532752 - DNA, 55 bp, Artificial
  Synthetic oligonucleotide
gcaagtcgtggatccaaaggccttcatacagaagttcgacaatggaggacgaaac

SEQ ID NO: 532753 - DNA, 55 bp, Artificial
  Synthetic oligonucleotide
gatggcttcaacatggacaaactaattgtcttcttgatttctggagcaaacactg

SEQ ID NO: 532754 - DNA, 55 bp, Artificial
  Synthetic oligonucleotide
gagcaagcaaactatataagagcatttcatctggtaacactggcgttatgctcca

SEQ ID NO: 532755 - DNA, 55 bp, Artificial
  Synthetic oligonucleotide
gagaagggtctagtgaaactgaggaaaatttatgcagggttaggtcaagcacagg

SEQ ID NO: 532756 - DNA, 55 bp, Artificial
  Synthetic oligonucleotide
gaccagcccacttcgtgctcgtaccaaatgcagtctttgacattcatgatgagtt

SEQ ID NO: 532757 - DNA, 55 bp, Artificial
  Synthetic oligonucleotide
ccgtacgccgaccgaactactaatcaaccaacttccagcaagactaacagacaac

SEQ ID NO: 532758 - DNA, 55 bp, Artificial
  Synthetic oligonucleotide
atcaggttctgttgtggtcaccttggtgtttctagggaaacacccgccccgtttg

SEQ ID NO: 532759 - DNA, 55 bp, Artificial
  Synthetic oligonucleotide
aggttttgtgaagccaaggctgggcaaacacttgcttgctttagtcacattgtgt

SEQ ID NO: 532760 - DNA, 55 bp, Artificial
  Synthetic oligonucleotide
agcagtgaaacaggtagacttaatacagtctgatgaggactgctatggatcatat

SEQ ID NO: 532761 - DNA, 55 bp, Artificial
  Synthetic oligonucleotide
accctcgttgcctaggggctactctcgtacatcagcaggtggctatttgtccact

SEQ ID NO: 532762 - DNA, 55 bp, Artificial
  Synthetic oligonucleotide
aaaaggttgactctaaaggcaaaggttagttacacgagggaaccaactttctgcg

SEQ ID NO: 532763 - DNA, 54 bp, Artificial
  Synthetic oligonucleotide
aggattgcattatattagcattcgagtatgaattgctgagttatcttggatgga

SEQ ID NO: 532764 - DNA, 53 bp, Artificial
  Synthetic oligonucleotide
caaagggagatgctttcttgcagatggacgaaggaaaggaccaacctgcatca

SEQ ID NO: 532765 - DNA, 51 bp, Artificial
  Synthetic oligonucleotide
aatctgggatgtaggttggggaatttagcggtaatgcgtttcactggagaa

SEQ ID NO: 532766 - DNA, 51 bp, Artificial
  Synthetic oligonucleotide
ttggtggcccaaatgtaagtgagtattttctagaaaaagacactcgtgggc

SEQ ID NO: 532767 - DNA, 60 bp, Artificial
  Synthetic oligonucleotide
agacgggttggatgctgtgatgagtgctgtctctagaatgatatatcatcactggagcat

SEQ ID NO: 532768 - DNA, 60 bp, Artificial
  Synthetic oligonucleotide
gactctcggccgaatcctctacgctctgggagatgtgacagatccaaggcagactgagat

SEQ ID NO: 532769 - DNA, 60 bp, Artificial
  Synthetic oligonucleotide
tggattctctgttccggacttctcgttggaccctaattacacgattgccgaggtgcatgt

SEQ ID NO: 532770 - DNA, 60 bp, Artificial
  Synthetic oligonucleotide
gatatgaagatctgtgtacataggtggatctggaacaagcctccgtcttttcattcctaa

SEQ ID NO: 532771 - DNA, 60 bp, Artificial
  Synthetic oligonucleotide
tctgagttctctaaactagcagtcctatactgggagaggtgtggacgacctagaaactcg

SEQ ID NO: 532772 - DNA, 60 bp, Artificial
  Synthetic oligonucleotide
tcctctgaagaggaatcccaaggtgaatgttagtttctgtacctctgtaccatgatatcg

SEQ ID NO: 532773 - DNA, 60 bp, Artificial
  Synthetic oligonucleotide
gtcttctctgtgatattggttgtgtggtctttcctgtcacttgtctagatggtgttagat

SEQ ID NO: 532774 - DNA, 60 bp, Artificial
  Synthetic oligonucleotide
gtgcttcgaagctgccatgacatacatgatcccaaacaagcagagtgtggagatctttga

SEQ ID NO: 532775 - DNA, 59 bp, Artificial
  Synthetic oligonucleotide
agccgcttctgatatcgtaaatgcgaccacgatgtcgacttccaagttggctgctgcaa

SEQ ID NO: 532776 - DNA, 57 bp, Artificial
  Synthetic oligonucleotide
ttaaaacgttggagtctaccagcccgctaaagcaagttgggttctaacaaagccgtg

SEQ ID NO: 532777 - DNA, 56 bp, Artificial
  Synthetic oligonucleotide
atcatgacatggaacatgaggtctgttgatcccgtggctgtcagaatattccccgc

SEQ ID NO: 532778 - DNA, 55 bp, Artificial
  Synthetic oligonucleotide
ttgctgtgctaaaacagatggccccggagaggaagaggtacacaagacaggtggc

SEQ ID NO: 532779 - DNA, 55 bp, Artificial
  Synthetic oligonucleotide
ggatgtctcgtctaggtgcaggcaatgattacgatgagactgagacagaccccgc

SEQ ID NO: 532780 - DNA, 55 bp, Artificial
  Synthetic oligonucleotide
gctgcccgccttgtgaatgctcatgttaagaccctcactgcttgacaggaggttc

SEQ ID NO: 532781 - DNA, 55 bp, Artificial
  Synthetic oligonucleotide
gatatgaagataaccggggcggcgagagaattcaacctgtccaaacagcctgtcc

SEQ ID NO: 532782 - DNA, 55 bp, Artificial
  Synthetic oligonucleotide
caaccgttccgctattttccaggctgttcgcattttcttttcccctacttcgacc

SEQ ID NO: 532783 - DNA, 51 bp, Artificial
  Synthetic oligonucleotide
agaagaacttaggatcgctctgagaagtccggtcttgtggagcgattgtcc

SEQ ID NO: 532784 - DNA, 60 bp, Artificial
  Synthetic oligonucleotide
acgtttatgctcctggtacacaaggtggttcagctgtagcttttcagaatacgacttatc

SEQ ID NO: 532785 - DNA, 60 bp, Artificial
  Synthetic oligonucleotide
ctgaattgtgtactttctactcaaagcctcgaagatttaaaactatggtgcattggttct

SEQ ID NO: 532786 - DNA, 60 bp, Artificial
  Synthetic oligonucleotide
ggcattttagatcgactaccactgatattggaaacagtacaactggacaatgtggtacga

SEQ ID NO: 532787 - DNA, 60 bp, Artificial
  Synthetic oligonucleotide
taaccgttccgcagtcagtacaaggcgagacgttgttagtagatctgacggaggaacacc

SEQ ID NO: 532788 - DNA, 60 bp, Artificial
  Synthetic oligonucleotide
tggtgacgagactgggtcagttagaattgttcatcgtgaatatgtctctgacgtttatgc

SEQ ID NO: 532789 - DNA, 60 bp, Artificial
  Synthetic oligonucleotide
ttattgcgtttattggatagatatccttataaggtcgagacaaagggaggagtggtggag

SEQ ID NO: 532790 - DNA, 60 bp, Artificial
  Synthetic oligonucleotide
ttcaccgtgaccattgattttccagtgtccgttaaagatacgtcggaaaaaggggtgttg

SEQ ID NO: 532791 - DNA, 55 bp, Artificial
  Synthetic oligonucleotide
caaggcgagacgttgttagtagatctgacggaggaacacccgagggagagtctag

SEQ ID NO: 532792 - DNA, 55 bp, Artificial
  Synthetic oligonucleotide
ctgggtcagttagaattgttcatcgtgaatatgtctctgacgtttatgctcctgg

SEQ ID NO: 532793 - DNA, 55 bp, Artificial
  Synthetic oligonucleotide
gatatccttataaggtcgagacaaagggaggagtggtggagttttgcgcgaagca

SEQ ID NO: 532794 - DNA, 55 bp, Artificial
  Synthetic oligonucleotide
tactcaaagcctcgaagatttaaaactatggtgcattggttctatggggcgaccg

SEQ ID NO: 532795 - DNA, 53 bp, Artificial
  Synthetic oligonucleotide
tgggtttctagcgaaagtataattaagtgattggagtctatacgagaatggtt

SEQ ID NO: 532796 - DNA, 50 bp, Artificial
  Synthetic oligonucleotide
aatcgaccgaagggcgtgtctgggtttactggtgagttatcgtaggacaa

SEQ ID NO: 532797 - DNA, 60 bp, Artificial
  Synthetic oligonucleotide
tctggcggtttcggcgttttgtcgtaatgtacggggtaagcaaactgataggtaggggca

SEQ ID NO: 532798 - DNA, 60 bp, Artificial
  Synthetic oligonucleotide
gtgaatcgccgttagggccactctcctgtagcatctcggcaattccctccgggtcccgca

SEQ ID NO: 532799 - DNA, 60 bp, Artificial
  Synthetic oligonucleotide
ctatctgtttgtcgagaaccgccgctactgcctgactctggcagtatttacacggttcaa

SEQ ID NO: 532800 - DNA, 60 bp, Artificial
  Synthetic oligonucleotide
aggggtattgggtcgggcatataaaccccggggggtactgtaataaaggcgggttggggt

SEQ ID NO: 532801 - DNA, 60 bp, Artificial
  Synthetic oligonucleotide
aaggtacacaggggctatctaagccacccgagggagtggtgtccggcgactctatccctc

SEQ ID NO: 532802 - DNA, 56 bp, Artificial
  Synthetic oligonucleotide
acgttaaagactctctacggctcctattcgttcgatgtgtccgcatctggtggcgt

SEQ ID NO: 532803 - DNA, 55 bp, Artificial
  Synthetic oligonucleotide
atttccgtccgcccggtagctacagtcgccagagtcccggttaggggcctcgtga

SEQ ID NO: 532804 - DNA, 55 bp, Artificial
  Synthetic oligonucleotide
ccctcgggcggttcgagtacagtaagatgcggtcggacccggactacatgcggaa

SEQ ID NO: 532805 - DNA, 55 bp, Artificial
  Synthetic oligonucleotide
cgggtcgatgttggaggtagaggtcccactgcggccgaaaacacaggtggttaac

SEQ ID NO: 532806 - DNA, 55 bp, Artificial
  Synthetic oligonucleotide
cgtgtgtcccattcgtggggtctgggtcacattccgacacatgcggcatggggac

SEQ ID NO: 532807 - DNA, 55 bp, Artificial
  Synthetic oligonucleotide
gcgggaactgtcccgaggtggtctatagtgggcgttctcgaccagatacagggac

SEQ ID NO: 532808 - DNA, 55 bp, Artificial
  Synthetic oligonucleotide
gcgggttagagcggcccatgtgcttgattagcttgtcgtcccggcgacactcgac

SEQ ID NO: 532809 - DNA, 55 bp, Artificial
  Synthetic oligonucleotide
ggcgaggtctaagtagccgaacgtagcagccgctcactggctctttgggcggttc

SEQ ID NO: 532810 - DNA, 55 bp, Artificial
  Synthetic oligonucleotide
acaggaggttgtgcccgaagcgccaccagacgaggcgaaatctggtagctccgac

SEQ ID NO: 532811 - DNA, 53 bp, Artificial
  Synthetic oligonucleotide
tggcacgcaccggaaaacagccgcggcctcgtgagaggctactgtggcgctct

SEQ ID NO: 532812 - DNA, 52 bp, Artificial
  Synthetic oligonucleotide
gaaccctccggcctcgaattggacgacccggcgaccgagataccggggatag

SEQ ID NO: 532813 - DNA, 51 bp, Artificial
  Synthetic oligonucleotide
gtagctaactatgggacgcctatcagccgccgcgagactggcggacgagtt

SEQ ID NO: 532814 - DNA, 60 bp, Artificial
  Synthetic oligonucleotide
cccttcgttctgtccgacaaacctatttaagcccgcaccgtagtttgttattttgaacca

SEQ ID NO: 532815 - DNA, 60 bp, Artificial
  Synthetic oligonucleotide
ggcgcttcgtacgtgccgcttcggccaatcagcgaggcgcagttcacagaggattggggg

SEQ ID NO: 532816 - DNA, 60 bp, Artificial
  Synthetic oligonucleotide
ctgaatcaatagggtggcatgggcatgtgcaagttcttgtagtgccagcggattctccat

SEQ ID NO: 532817 - DNA, 60 bp, Artificial
  Synthetic oligonucleotide
gcgccgaggggagcgtatgagtggaggaaataaaactcacgccttccgactttgaggaag

SEQ ID NO: 532818 - DNA, 55 bp, Artificial
  Synthetic oligonucleotide
tggaaccccgtcaaacaccccggaagcctcgagaagtacgggtacagcctccacg

SEQ ID NO: 532819 - DNA, 55 bp, Artificial
  Synthetic oligonucleotide
tgatttaggaggggtgagaggcgtgagagttctgataacaggtgtaactgggttc

SEQ ID NO: 532820 - DNA, 55 bp, Artificial
  Synthetic oligonucleotide
tgtcattgctgtgatacgatacgacccctctgagcagacgcaagttcacgcgtgg

SEQ ID NO: 532821 - DNA, 55 bp, Artificial
  Synthetic oligonucleotide
gtctacgcgattgccagcccaaaggagcttggacctggcgacgagaggctgtgga

SEQ ID NO: 532822 - DNA, 55 bp, Artificial
  Synthetic oligonucleotide
ggtcgtgaatggagaaccaaactttgagtggggagggtttagatcctggaagtac

SEQ ID NO: 532823 - DNA, 55 bp, Artificial
  Synthetic oligonucleotide
ggggaattttgaagcgtctttcccttgcaaatgctttactcaggctttcagagag

SEQ ID NO: 532824 - DNA, 55 bp, Artificial
  Synthetic oligonucleotide
ggcgagcccagtagaccttgcggcattgtttgggcagctagtggggattctgccc

SEQ ID NO: 532825 - DNA, 55 bp, Artificial
  Synthetic oligonucleotide
ggcagtaactatgacggtgaacactatcgggatagttcagagactgtatgactcg

SEQ ID NO: 532826 - DNA, 55 bp, Artificial
  Synthetic oligonucleotide
gctatcgacgccttgaaacggcccttaagattttccgcagagaccgcctgttcct

SEQ ID NO: 532827 - DNA, 55 bp, Artificial
  Synthetic oligonucleotide
gcgggagtctagcaaggaagcattagacgttgggaggcctctaggcccattaaaa

SEQ ID NO: 532828 - DNA, 55 bp, Artificial
  Synthetic oligonucleotide
gcggagagcctcaggtcataatcctccttccaacccctttctttaaggtggtatt

SEQ ID NO: 532829 - DNA, 55 bp, Artificial
  Synthetic oligonucleotide
gccaggcatgaggatatctgtgataggcaagagacatagtgttgatgtggttctt

SEQ ID NO: 532830 - DNA, 55 bp, Artificial
  Synthetic oligonucleotide
gcaagcaagattagcgaagcgggcatacatgtagagcgtgttatccattttgcag

SEQ ID NO: 532831 - DNA, 55 bp, Artificial
  Synthetic oligonucleotide
gagattccttattgtgtgaatgtccagcatcatatatatcttttcccacgactgc

SEQ ID NO: 532832 - DNA, 55 bp, Artificial
  Synthetic oligonucleotide
tgttgatgggcaagagctagcaagctacactattgatgctccgctcacccacttc

SEQ ID NO: 532833 - DNA, 55 bp, Artificial
  Synthetic oligonucleotide
ctgttgaccaagttggggaaagtaaggacctctggcttgaggctataggtaaagt

SEQ ID NO: 532834 - DNA, 55 bp, Artificial
  Synthetic oligonucleotide
ctcgttagaaggatagtgttgaaggagcttgcaaagatggggaaggtaaagcggg

SEQ ID NO: 532835 - DNA, 55 bp, Artificial
  Synthetic oligonucleotide
ctattctacatgccttttattgaggtatcaaggattaacggggtagaggttgctc

SEQ ID NO: 532836 - DNA, 55 bp, Artificial
  Synthetic oligonucleotide
cggcctctcgaagaacgtttacttcacagtcgcagacgttgccatgatgtttaag

SEQ ID NO: 532837 - DNA, 55 bp, Artificial
  Synthetic oligonucleotide
ccatgagtactacacaattattccagaatcggagattattgaggccctggaagac

SEQ ID NO: 532838 - DNA, 55 bp, Artificial
  Synthetic oligonucleotide
cacggggagcgggacccaggatatcgaaacatttgctccagcgaatgggtttgcc

SEQ ID NO: 532839 - DNA, 54 bp, Artificial
  Synthetic oligonucleotide
ggggaaagtatggacctctggcttgaggctataggtaaagttatcaatactgct

SEQ ID NO: 532840 - DNA, 53 bp, Artificial
  Synthetic oligonucleotide
attccatcacaggtgttcccctggtggctcctcatggggctcttcggcgttgg

SEQ ID NO: 532841 - DNA, 51 bp, Artificial
  Synthetic oligonucleotide
ctatcaggggacatctgtagttggggctactatcgtgtgctataggacgta

SEQ ID NO: 532842 - DNA, 51 bp, Artificial
  Synthetic oligonucleotide
tcacaaggattacctcttggttcactggcaagaactccgctctttacaaac

SEQ ID NO: 532843 - DNA, 50 bp, Artificial
  Synthetic oligonucleotide
ttttatgacccgccagtcgagacaatacagacagagaaactctcatacca

SEQ ID NO: 532844 - DNA, 50 bp, Artificial
  Synthetic oligonucleotide
taggaggctactttgtcagcggaagcaatgtactatgcagacatgatagt

SEQ ID NO: 532845 - DNA, 50 bp, Artificial
  Synthetic oligonucleotide
gaagctctgaaggggcaggagagcagcgtgaaatatgagtatgctatgaa

SEQ ID NO: 532846 - DNA, 50 bp, Artificial
  Synthetic oligonucleotide
aaggcaggcagtacctccgagcgtgtttagggcgaggaaggatacagtaa

SEQ ID NO: 532847 - DNA, 60 bp, Artificial
  Synthetic oligonucleotide
tatcggtggtctttacatcttccaattccagcaactatttaatgacgtaggtatccttgg

SEQ ID NO: 532848 - DNA, 60 bp, Artificial
  Synthetic oligonucleotide
atggggctacgccccaggaagtaaccgttgctgtttgagggtacaatccaccaaagttag

SEQ ID NO: 532849 - DNA, 60 bp, Artificial
  Synthetic oligonucleotide
gaggtgaggagcgcctcacgattaaacaactaggagtgacatggaatcctttaggtatac

SEQ ID NO: 532850 - DNA, 60 bp, Artificial
  Synthetic oligonucleotide
attccctgatctttcattccgccacgaccaagtctatctatatccattactaatacacca

SEQ ID NO: 532851 - DNA, 60 bp, Artificial
  Synthetic oligonucleotide
ctagcgtttgacacggaggggcgggtgaaaatctcgatcacggtgaacaggagcccggag

SEQ ID NO: 532852 - DNA, 60 bp, Artificial
  Synthetic oligonucleotide
tagacgctttagacaaatggcactcgcaagcaaccgaagacgagattgctcaagacattc

SEQ ID NO: 532853 - DNA, 60 bp, Artificial
  Synthetic oligonucleotide
tagacgccgcgcgaagtacttctacttccttaacgccgtaaagcatagaatccgcgattt

SEQ ID NO: 532854 - DNA, 60 bp, Artificial
  Synthetic oligonucleotide
caaagtttagctaatgctaatcaaagtttagaagctgatccgtcttacatttctaccggg

SEQ ID NO: 532855 - DNA, 60 bp, Artificial
  Synthetic oligonucleotide
gatcggagaaagcgatgagcgggtgttgcgtcgttttttagagttgccatcataccgaca

SEQ ID NO: 532856 - DNA, 60 bp, Artificial
  Synthetic oligonucleotide
caacaaaatgaactcgccttattgatgcttaattgattaatgtgtaacccttaaaatcaa

SEQ ID NO: 532857 - DNA, 60 bp, Artificial
  Synthetic oligonucleotide
tacgaaattcagactcgattgatgtctatccatattcgggtctttggatggttgtttgcc

SEQ ID NO: 532858 - DNA, 60 bp, Artificial
  Synthetic oligonucleotide
gatgtttatcagcctgtatctcaaaaggtgcaggttatgataagttggtctactctccac

SEQ ID NO: 532859 - DNA, 60 bp, Artificial
  Synthetic oligonucleotide
tacagcgcacgcgctgtagatgcaaccctagcgcagcaatttcttctcaggttccgcgca

SEQ ID NO: 532860 - DNA, 60 bp, Artificial
  Synthetic oligonucleotide
caaggtggtagacctgtaacagtaacaatagttgacggcgatataatgttgtactctaac

SEQ ID NO: 532861 - DNA, 60 bp, Artificial
  Synthetic oligonucleotide
taatgagggtaagccacttattacccttgtccctggtgtagtcaggaccgtagagtaaac

SEQ ID NO: 532862 - DNA, 60 bp, Artificial
  Synthetic oligonucleotide
gattggtcagatagagatgcacaaacttgggaatgggatgatgggaaaaaaggatatgat

SEQ ID NO: 532863 - DNA, 60 bp, Artificial
  Synthetic oligonucleotide
taagcaatcagattctacattatcaaacctagtacttttatttccacacttataaataca

SEQ ID NO: 532864 - DNA, 60 bp, Artificial
  Synthetic oligonucleotide
taacagttaaaaaaggtggtggtggagatgaatagagatgatgaatttagaagttttaat

SEQ ID NO: 532865 - DNA, 60 bp, Artificial
  Synthetic oligonucleotide
agcaagatgctctcgcgctgcagggggagcgcaccgcggccgccgttgggatgggggcgc

SEQ ID NO: 532866 - DNA, 60 bp, Artificial
  Synthetic oligonucleotide
agccggctcaacagccgtacgcagcgcctcgggcttatgccccaactgcacccgcgtcag

SEQ ID NO: 532867 - DNA, 60 bp, Artificial
  Synthetic oligonucleotide
tcttgtgaacggacttctcaatgctcgtgtaatagacctatcttcccactttctgttatt

SEQ ID NO: 532868 - DNA, 60 bp, Artificial
  Synthetic oligonucleotide
tcgttagcgtatcgccggttgaatgcgcataaagctggtgttgttacgtcgatgagactg

SEQ ID NO: 532869 - DNA, 60 bp, Artificial
  Synthetic oligonucleotide
ctgatattaactaacattacaatagcgttatttgcgtaattttagtggcgtgttgttttt

SEQ ID NO: 532870 - DNA, 60 bp, Artificial
  Synthetic oligonucleotide
agtcattctcagcatagctgcctcctcatcagttggggaggcgggatcaaggaacatatc

SEQ ID NO: 532871 - DNA, 60 bp, Artificial
  Synthetic oligonucleotide
agtcccgcctcaatgaactcaccccgccgaattcagatagggggatcgatgaccaagtac

SEQ ID NO: 532872 - DNA, 60 bp, Artificial
  Synthetic oligonucleotide
agtggctgcgattgcctctatatctccaagaggcaggccggttcgatgaggctatggaag

SEQ ID NO: 532873 - DNA, 60 bp, Artificial
  Synthetic oligonucleotide
agtggttttgtcagagtggtatcgagtgtcgcacaatatatggctcaagggctaagcaga

SEQ ID NO: 532874 - DNA, 60 bp, Artificial
  Synthetic oligonucleotide
agttcacagcgttagctatctcgcaaaagcggaatttaagtttaataacggcgtttataa

SEQ ID NO: 532875 - DNA, 60 bp, Artificial
  Synthetic oligonucleotide
tcctcgctgcggtattgaacacacgaaacgcgaggggtgcatattatgacgatgtttgtg

SEQ ID NO: 532876 - DNA, 60 bp, Artificial
  Synthetic oligonucleotide
tccgttcgggttgacgatttgaatcgaagcctcaatacctcggttcatcgtgattgcggt

SEQ ID NO: 532877 - DNA, 60 bp, Artificial
  Synthetic oligonucleotide
tccggtaacggaacgtttgaattcggtaaaaatggttctaatcacatgggtattacattt

SEQ ID NO: 532878 - DNA, 60 bp, Artificial
  Synthetic oligonucleotide
tcagctttatgccgatgtggaagtactaaagtgtgaagtcaccgcgctacgtcatatctc

SEQ ID NO: 532879 - DNA, 60 bp, Artificial
  Synthetic oligonucleotide
ctcacttacaaatggattaacgcagacaatcctcaagaaatgttagaagttccgttcttc

SEQ ID NO: 532880 - DNA, 60 bp, Artificial
  Synthetic oligonucleotide
atgatatcaacggccctagctaacgcaaatctagatattgccgccggggcaaagttagaa

SEQ ID NO: 532881 - DNA, 60 bp, Artificial
  Synthetic oligonucleotide
tattcagatcctgaaggatgtacttggggagaagagtgctttgggaaagaaatatgtaat

SEQ ID NO: 532882 - DNA, 60 bp, Artificial
  Synthetic oligonucleotide
tatggcgtacatgtgatgctattaaacgtatgtggcgtgaatcgcacccgcaaaccgtag

SEQ ID NO: 532883 - DNA, 60 bp, Artificial
  Synthetic oligonucleotide
ccaaagaatttacgacgactaaaatatgtgtcatcagtaggaatattggtctggaaattg

SEQ ID NO: 532884 - DNA, 60 bp, Artificial
  Synthetic oligonucleotide
ccaagcccaacaagaatacgccttaaatagagcgagtgataaaaacgcgctcatgaactt

SEQ ID NO: 532885 - DNA, 60 bp, Artificial
  Synthetic oligonucleotide
ggtcatctcccgctgtgaacttaaccggttgcgatagttctacggtgagcccgtttactg

SEQ ID NO: 532886 - DNA, 60 bp, Artificial
  Synthetic oligonucleotide
ccagtgtcttgggaagaaagaaaagatgcgattataacaaaatttaaacctgtttatcgc

SEQ ID NO: 532887 - DNA, 60 bp, Artificial
  Synthetic oligonucleotide
cgctcgtgcgggtgtgggtcgggcggacggtcagggtcatcttgtcttgcatgagggtct

SEQ ID NO: 532888 - DNA, 60 bp, Artificial
  Synthetic oligonucleotide
ggggttatgaatgattttctagtcctaatgggtatcgggtttacaactttgctccttgct

SEQ ID NO: 532889 - DNA, 60 bp, Artificial
  Synthetic oligonucleotide
cccatctcgttaccggagctattccaccgtatataattacaactctcatcgccatactca

SEQ ID NO: 532890 - DNA, 60 bp, Artificial
  Synthetic oligonucleotide
cgcgattaatctatcctgacgcgtcagaatgcgacgaggcttcttagcatgagcgcgcca

SEQ ID NO: 532891 - DNA, 60 bp, Artificial
  Synthetic oligonucleotide
ccctaattaaataaccctctgatgggattacattaaaaaagacacttcttagatgaagtg

SEQ ID NO: 532892 - DNA, 60 bp, Artificial
  Synthetic oligonucleotide
gctatcttgaacggcttccattgacgcaatccaaacattcattggcgttatttgttcatc

SEQ ID NO: 532893 - DNA, 60 bp, Artificial
  Synthetic oligonucleotide
gctatggaagagtttcaagagctgctcgctagcccccctcttgctcgcgatcttcgggca

SEQ ID NO: 532894 - DNA, 60 bp, Artificial
  Synthetic oligonucleotide
ccgggaggtatggaagaatgtctaagtacgcacccgtattcgacagtgccaaggtagccc

SEQ ID NO: 532895 - DNA, 60 bp, Artificial
  Synthetic oligonucleotide
ccggtactggcactattatccgtggtccgatgaagactgaggtgtctggatggcaattag

SEQ ID NO: 532896 - DNA, 60 bp, Artificial
  Synthetic oligonucleotide
cgagataatattctcgtgaacagtgtggccaagcaaggggtcagcgatgttaatgagggt

SEQ ID NO: 532897 - DNA, 60 bp, Artificial
  Synthetic oligonucleotide
cgacgacgttcttatggacgaaactgaacacgacacgaccggcccggtaactgagtttaa

SEQ ID NO: 532898 - DNA, 60 bp, Artificial
  Synthetic oligonucleotide
ggcaatgcatgggaggaaaattacttatcgatactttaagtatattagagaaatgattat

SEQ ID NO: 532899 - DNA, 60 bp, Artificial
  Synthetic oligonucleotide
ggatgaaatccaagcgattttaaaaagtgcacccactttaagactgaaagcctttttaat

SEQ ID NO: 532900 - DNA, 60 bp, Artificial
  Synthetic oligonucleotide
ggactatcttaatgagcatcggcgggaactgattaccagtatccccaagctaatcgagac

SEQ ID NO: 532901 - DNA, 60 bp, Artificial
  Synthetic oligonucleotide
gtttcgtacatttaccctgggtaaaacagcgcttgccacggtttattctgaccctaaaaa

SEQ ID NO: 532902 - DNA, 60 bp, Artificial
  Synthetic oligonucleotide
gtttaggcgtaattgataattcgccgagtaaccacagcgttgtcgcatctatccctgaat

SEQ ID NO: 532903 - DNA, 60 bp, Artificial
  Synthetic oligonucleotide
gcaattgggtgtgtgatcccaagtacgccaacatgtccacggaagatgtctacgctgacc

SEQ ID NO: 532904 - DNA, 60 bp, Artificial
  Synthetic oligonucleotide
gcacgttaatgataaaaagttcggttatcctgtagttgctgtcattaacaaaaatggtca

SEQ ID NO: 532905 - DNA, 60 bp, Artificial
  Synthetic oligonucleotide
gcagttgacgacgctagtaaaaagcacaccacaagcgctaaagactatacggctaccagt

SEQ ID NO: 532906 - DNA, 60 bp, Artificial
  Synthetic oligonucleotide
gtggacaaaatacaccattaagatggattaattcatcaataaaggagttaagtgtattat

SEQ ID NO: 532907 - DNA, 60 bp, Artificial
  Synthetic oligonucleotide
cgtactaaatatccataatatgcaactttctggatataaacatcctgccctgttttagac

SEQ ID NO: 532908 - DNA, 60 bp, Artificial
  Synthetic oligonucleotide
gtcattacatgaatacactaactgacgaaatggaatacacagacagtaagggtataaaaa

SEQ ID NO: 532909 - DNA, 60 bp, Artificial
  Synthetic oligonucleotide
gccaagcctcgcctgctgccgacgccatttctgagtatcaatcgtctctcgaaaagctcc

SEQ ID NO: 532910 - DNA, 60 bp, Artificial
  Synthetic oligonucleotide
gtcatatctcgatgaccttggcggctcgtctggttgagcttgatcccgagccaggcgaac

SEQ ID NO: 532911 - DNA, 60 bp, Artificial
  Synthetic oligonucleotide
cggtcgtgcggcaactcacgttctcgtcatggaagaagacgggaatttcgtcggcttcgt

SEQ ID NO: 532912 - DNA, 60 bp, Artificial
  Synthetic oligonucleotide
gccactgtcgcgcgcattttcgggcagcagagcatggccgatgctgacctgaaagaagcc

SEQ ID NO: 532913 - DNA, 60 bp, Artificial
  Synthetic oligonucleotide
catatgctgaacacgcggagcagccagcttgcggcggactggtcaaagctttcctgcaga

SEQ ID NO: 532914 - DNA, 60 bp, Artificial
  Synthetic oligonucleotide
gtatcagattgcaaaaaaattcggtataaatagtagaactttaacattatgggctatgga

SEQ ID NO: 532915 - DNA, 60 bp, Artificial
  Synthetic oligonucleotide
catctgatggtacttgttgacgcggtagctgatacttcggcagatatggtccgtgctgta

SEQ ID NO: 532916 - DNA, 60 bp, Artificial
  Synthetic oligonucleotide
gtactctaacagtttcgccagttctatgaacacttactatcaaggagaatggataatata

SEQ ID NO: 532917 - DNA, 60 bp, Artificial
  Synthetic oligonucleotide
gccgcaacttcggggccactcaggcacgtggcggctataactccaaccgtccgaccgata

SEQ ID NO: 532918 - DNA, 60 bp, Artificial
  Synthetic oligonucleotide
cattaaaagaatattgtgatgtaatacctgttacaaagaatgaaggaacaattccagtaa

SEQ ID NO: 532919 - DNA, 60 bp, Artificial
  Synthetic oligonucleotide
actggccgaggttaagaatcgcgttgacagcagtttcagtgtttccctaacgttaaacct

SEQ ID NO: 532920 - DNA, 60 bp, Artificial
  Synthetic oligonucleotide
ttgcagtaagtttcaagataatcgctgaatatgccatcctcgtaatgataaccagcgttg

SEQ ID NO: 532921 - DNA, 60 bp, Artificial
  Synthetic oligonucleotide
ttgataacggcgcttacatggagttagaacaatggaacagcgctggaacaagaataaaaa

SEQ ID NO: 532922 - DNA, 60 bp, Artificial
  Synthetic oligonucleotide
aagttatatcgctgccgatatatgtgtcattcatgtagcaatgttggtaatcactatatc

SEQ ID NO: 532923 - DNA, 60 bp, Artificial
  Synthetic oligonucleotide
aatatcgagctaaacagttggcacgcattgataaggtgccgactgatattagctataaca

SEQ ID NO: 532924 - DNA, 60 bp, Artificial
  Synthetic oligonucleotide
aatatgcgggttaaagaaatgaccagtatcttatttatctgggtactgtccgcaggccag

SEQ ID NO: 532925 - DNA, 60 bp, Artificial
  Synthetic oligonucleotide
ctgtagatactcaccccgtccatcttgccaaccacttcacccctgcttacatccacgggt

SEQ ID NO: 532926 - DNA, 60 bp, Artificial
  Synthetic oligonucleotide
aacaaagacttgctaattgatcacttacgacgtactaatccatacaaagcacctgaacat

SEQ ID NO: 532927 - DNA, 60 bp, Artificial
  Synthetic oligonucleotide
acgcacaccatccgttatcagtacaccaaggaccctagcgcttccatcggcgatgactgt

SEQ ID NO: 532928 - DNA, 60 bp, Artificial
  Synthetic oligonucleotide
tgtcaacgtgaaatgcgtcattggggtgctacaacattgattgattatagagcatatcta

SEQ ID NO: 532929 - DNA, 60 bp, Artificial
  Synthetic oligonucleotide
cttcatccctacctcacattcctatcaatataagtagctaacacaatagctagtagtcca

SEQ ID NO: 532930 - DNA, 60 bp, Artificial
  Synthetic oligonucleotide
gacatccgagggattactgcgagggtcactgcgcggccaggttgaaggggataccttgtt

SEQ ID NO: 532931 - DNA, 60 bp, Artificial
  Synthetic oligonucleotide
accgctttgaagtcttcggggaatctgggtggagcgattcgatgcttgcaagaggtgaag

SEQ ID NO: 532932 - DNA, 60 bp, Artificial
  Synthetic oligonucleotide
aaattcagaccttttgagccagactgggtccacagagcaaccgatatatgtggggttctt

SEQ ID NO: 532933 - DNA, 60 bp, Artificial
  Synthetic oligonucleotide
aattctacgccctttgagactagtagcttcatttagcgcttgtattgtcttagtggctct

SEQ ID NO: 532934 - DNA, 60 bp, Artificial
  Synthetic oligonucleotide
tgttagatatgatttattaccgataggcacaagacgaaacggggaacggttacacactaa

SEQ ID NO: 532935 - DNA, 60 bp, Artificial
  Synthetic oligonucleotide
accaccttatgacacagtttatcaattagaacttgatttgaaggagggacaataaatgcc

SEQ ID NO: 532936 - DNA, 60 bp, Artificial
  Synthetic oligonucleotide
tgttcttggcctcagctaccgactctcccggcgtcaatgcggcctttacaagacgtcccg

SEQ ID NO: 532937 - DNA, 60 bp, Artificial
  Synthetic oligonucleotide
ttaaaaatcgttgtaattgagacaaaagcaaaagagttaatgcgggttttgttaacccat

SEQ ID NO: 532938 - DNA, 60 bp, Artificial
  Synthetic oligonucleotide
acaacgctaattttagaggtttaactacgcaaagcatacccacaacctatacaacgactg

SEQ ID NO: 532939 - DNA, 60 bp, Artificial
  Synthetic oligonucleotide
ttcctgcagagtgttctggggctaactgataacggagttgatccagcatctgttttggca

SEQ ID NO: 532940 - DNA, 60 bp, Artificial
  Synthetic oligonucleotide
ttcccacaaggctaaccgaatgaagaacaacgcaacgttgcccgaacttaagcttctcgt

SEQ ID NO: 532941 - DNA, 60 bp, Artificial
  Synthetic oligonucleotide
ttattgccaactgaagaaaaatgcagaacaagaaatgagaaattggatgaaggagttagg

SEQ ID NO: 532942 - DNA, 60 bp, Artificial
  Synthetic oligonucleotide
ttacgccatttataagccccgtagatggagttcagtaagaacgttacccacatagcaagt

SEQ ID NO: 532943 - DNA, 60 bp, Artificial
  Synthetic oligonucleotide
tgacatttctttaggagatagaatagaggtaaactttcaatcagttactggatcaattga

SEQ ID NO: 532944 - DNA, 60 bp, Artificial
  Synthetic oligonucleotide
agaggtgaagcgtctgatgggctcgaacccgcgtggatataccgcacaacagtggctgcg

SEQ ID NO: 532945 - DNA, 60 bp, Artificial
  Synthetic oligonucleotide
agacgcgatagaggacgtgagtcttctgccagcagacctcaaggcaatgctggtcatctg

SEQ ID NO: 532946 - DNA, 60 bp, Artificial
  Synthetic oligonucleotide
aagcatgtgttcgtcggtgttcgccagtccctgaacggctacaatgtctgcggttccgaa

SEQ ID NO: 532947 - DNA, 60 bp, Artificial
  Synthetic oligonucleotide
aagcaacggtgaaagagctatccgtatctggagaacagtagaaactgattcatccggtag

SEQ ID NO: 532948 - DNA, 60 bp, Artificial
  Synthetic oligonucleotide
ttgtatgggttaacatggacgcgttgaaaacacatgaccttaacgatttgttgcacttta

SEQ ID NO: 532949 - DNA, 60 bp, Artificial
  Synthetic oligonucleotide
gaacggctactatagagtgattaaaagatttttagcaagggaaaactatcactctaattc

SEQ ID NO: 532950 - DNA, 60 bp, Artificial
  Synthetic oligonucleotide
agaccacaccaaccatgatacctgtgacgacagaattgaaaacctgtcatgcaaatccag

SEQ ID NO: 532951 - DNA, 60 bp, Artificial
  Synthetic oligonucleotide
ttggcgatgtaacgccagatcaactagaaaaacgtttgtatcacgaaatgagaacataca

SEQ ID NO: 532952 - DNA, 60 bp, Artificial
  Synthetic oligonucleotide
aaggccgaggggttaggtaagtttaaggtatcaggtaaggacagcggttctacaggtgat

SEQ ID NO: 532953 - DNA, 60 bp, Artificial
  Synthetic oligonucleotide
aaaacactagcgtcggttaccgcggagatacagtaccagctgcttgatgaaaatagcacc

SEQ ID NO: 532954 - DNA, 60 bp, Artificial
  Synthetic oligonucleotide
tgcacagggcgcgggatcagctattacatatggaagacgctacagcctaacagcattatt

SEQ ID NO: 532955 - DNA, 60 bp, Artificial
  Synthetic oligonucleotide
aagggcgcactctgcggagcatgtgtcccacgagagaatgtgatgaaaagttcgtctcct

SEQ ID NO: 532956 - DNA, 60 bp, Artificial
  Synthetic oligonucleotide
aagtacaggtgatagaaagaatggttttaagtgtagatttaagcaagaagttatgctaag

SEQ ID NO: 532957 - DNA, 60 bp, Artificial
  Synthetic oligonucleotide
actggtcaaagctttcctgcagagtgttctggggctaactgataacggagttgatccagc

SEQ ID NO: 532958 - DNA, 60 bp, Artificial
  Synthetic oligonucleotide
aaccgggatagctggggcggccacgaccgctatgggtgtcagttcattgaagtcttacgg

SEQ ID NO: 532959 - DNA, 60 bp, Artificial
  Synthetic oligonucleotide
ttttgaacacatcatttaccaagaaaaccgcattagagaaattaaccaagagataacggc

SEQ ID NO: 532960 - DNA, 60 bp, Artificial
  Synthetic oligonucleotide
tttaatcgggtatgtgcttgccgagggttgtgaaccagatatgcggctagccgaaataat

SEQ ID NO: 532961 - DNA, 60 bp, Artificial
  Synthetic oligonucleotide
tggaatacggtgctggtcccaaaccgtagaaaccacactcatcaggcaaattgttgaggt

SEQ ID NO: 532962 - DNA, 60 bp, Artificial
  Synthetic oligonucleotide
aagtacattgaggcacttcctgaacgtgacacaatcattactgtttgggtaaagttgcta

SEQ ID NO: 532963 - DNA, 59 bp, Artificial
  Synthetic oligonucleotide
atccaagcccaacaagaaaacgccttaaatagagcgagtgataaaaacgcgcgaacaaa

SEQ ID NO: 532964 - DNA, 59 bp, Artificial
  Synthetic oligonucleotide
aatctacccttgcgcgatggaaatcttcgaggctacctatgagcaagtcgacgccgagt

SEQ ID NO: 532965 - DNA, 59 bp, Artificial
  Synthetic oligonucleotide
ggcagaaatataagttgactaatgatgatggtaaccaaatagctactttcgacagtgat

SEQ ID NO: 532966 - DNA, 59 bp, Artificial
  Synthetic oligonucleotide
cgttccgaatgatttttcgtcgtttcattaggggcctcacaggttctctatggggaggg

SEQ ID NO: 532967 - DNA, 59 bp, Artificial
  Synthetic oligonucleotide
tgtcatgttcggtaaccgtaagtttaaaaggtctagggtggtgtatgagatgttctcag

SEQ ID NO: 532968 - DNA, 59 bp, Artificial
  Synthetic oligonucleotide
caaaccgagtattgatgcaatagcgccacaaatagcgccgatttgaataacatccatcg

SEQ ID NO: 532969 - DNA, 59 bp, Artificial
  Synthetic oligonucleotide
cccattctaggaaaggaataaagggtttatacattccgattatattaatacctgtagcg

SEQ ID NO: 532970 - DNA, 58 bp, Artificial
  Synthetic oligonucleotide
gttttacgaagcattagggacgaagattttaggaacaaagccgaaaaagtgtttttca

SEQ ID NO: 532971 - DNA, 58 bp, Artificial
  Synthetic oligonucleotide
gagcgttatttcgcgcttacaagacacgagatctaacataacgattttaatgcagcga

SEQ ID NO: 532972 - DNA, 58 bp, Artificial
  Synthetic oligonucleotide
gaatcccagatactgaaggtatgtttggtataggaacatatattcacgatgataatgc

SEQ ID NO: 532973 - DNA, 58 bp, Artificial
  Synthetic oligonucleotide
gctgacgcgaacaaggtatacacgaaacaagaagccgatggaacatttgccaaagaat

SEQ ID NO: 532974 - DNA, 57 bp, Artificial
  Synthetic oligonucleotide
catggttcactaaataaatatacataaaggctacattatgagattgagaggctcgcg

SEQ ID NO: 532975 - DNA, 57 bp, Artificial
  Synthetic oligonucleotide
caatagttcatgcccacaaatctaagtttgcttattactactatggagcatactcac

SEQ ID NO: 532976 - DNA, 57 bp, Artificial
  Synthetic oligonucleotide
gcattatcgccgcctatctaacaaacactttctcggatgggagcggctaaacgagaa

SEQ ID NO: 532977 - DNA, 57 bp, Artificial
  Synthetic oligonucleotide
gtgatcataccagacggccgacttggtgtagttccgcccgtaaccctggaggacata

SEQ ID NO: 532978 - DNA, 57 bp, Artificial
  Synthetic oligonucleotide
ttacctttctaaaatttatcaattcgtccaaaactattaaacaaaaactaaacaatg

SEQ ID NO: 532979 - DNA, 57 bp, Artificial
  Synthetic oligonucleotide
agacacttcaggctggatgtctactggtgtaacactactggtttgttcaccggtgtt

SEQ ID NO: 532980 - DNA, 57 bp, Artificial
  Synthetic oligonucleotide
tcgtaaatcatgaggatagcttcataatagtcgcttccattaatgcctccatcagca

SEQ ID NO: 532981 - DNA, 57 bp, Artificial
  Synthetic oligonucleotide
gacgactactgtagttaagaaaaacgctgccgatattgagcagtatcttctcaacat

SEQ ID NO: 532982 - DNA, 57 bp, Artificial
  Synthetic oligonucleotide
gaatactcgttctacttcttcggcacgtatatacacaggttttaaattaggtgtctc

SEQ ID NO: 532983 - DNA, 56 bp, Artificial
  Synthetic oligonucleotide
gcctatattatagcagactggcaataattaactaaccgatattagttactgaggcc

SEQ ID NO: 532984 - DNA, 56 bp, Artificial
  Synthetic oligonucleotide
ggttcaactgttaatctacaaaagcatcatgtaattagtagaaagcagcaaccagc

SEQ ID NO: 532985 - DNA, 56 bp, Artificial
  Synthetic oligonucleotide
gggtgggttaatatggtcgcatatcatggcgtatgaatatggataattgtataatc

SEQ ID NO: 532986 - DNA, 56 bp, Artificial
  Synthetic oligonucleotide
gtatccttggtcctaactgcgctatagagtttgatggtaaccactttgttgtaggt

SEQ ID NO: 532987 - DNA, 56 bp, Artificial
  Synthetic oligonucleotide
atccaacggcaggatgagtatacatggctaaaaaacgcaacacccatggctaaagc

SEQ ID NO: 532988 - DNA, 56 bp, Artificial
  Synthetic oligonucleotide
gacttccacatacacaaaactatgatataaagcaactagccgtaaagtgttcaagc

SEQ ID NO: 532989 - DNA, 56 bp, Artificial
  Synthetic oligonucleotide
ctcccaaacgttctaagtattcatctgtaagaccatatctcactatttgcattgtg

SEQ ID NO: 532990 - DNA, 56 bp, Artificial
  Synthetic oligonucleotide
cttctgtaccaacataaaagacggtaaagcaataccagtttacaaggaacttaaag

SEQ ID NO: 532991 - DNA, 56 bp, Artificial
  Synthetic oligonucleotide
ctcaggatgcggggcgtcttgtaaaggccgcattgacgccgggagagtcggtagct

SEQ ID NO: 532992 - DNA, 56 bp, Artificial
  Synthetic oligonucleotide
gaatacacatgggtgctcctgattacacacgatgagattaaccggaaggtgtccct

SEQ ID NO: 532993 - DNA, 56 bp, Artificial
  Synthetic oligonucleotide
atgacaacgcgaccggcaagtggaaaccctatacgctgacgtccgaagggcagaag

SEQ ID NO: 532994 - DNA, 56 bp, Artificial
  Synthetic oligonucleotide
cgatgtcgaatacgaaacatgtatcaaatattgagttgcacaaaacgtatcacctg

SEQ ID NO: 532995 - DNA, 56 bp, Artificial
  Synthetic oligonucleotide
caacgccttagcgatttgagccgttgagaaattgttacttgtaatcaactgtaata

SEQ ID NO: 532996 - DNA, 56 bp, Artificial
  Synthetic oligonucleotide
caaaattgaagtcaaggtccgtaaccctacgggccctaacccttacacgagataca

SEQ ID NO: 532997 - DNA, 56 bp, Artificial
  Synthetic oligonucleotide
ctaagtatattcagtgaagagagcgtagcatcactaacagatttgaatagctatgc

SEQ ID NO: 532998 - DNA, 56 bp, Artificial
  Synthetic oligonucleotide
tatagcggcgcggtccaacactatgtcgtccccaccgccggcgtcattgacctgaa

SEQ ID NO: 532999 - DNA, 56 bp, Artificial
  Synthetic oligonucleotide
ttcacaaagacaatgggtaggccggctctaaatcgttgcaccaaatgcgaagtgcc

SEQ ID NO: 533000 - DNA, 55 bp, Artificial
  Synthetic oligonucleotide
gctataaggtctcctccgaaggtccggattatttccgtatcctccaggacggctc

SEQ ID NO: 533001 - DNA, 55 bp, Artificial
  Synthetic oligonucleotide
gctgcgagtggccatgagggaaccccggttaactatgccttcagccataatcggt

SEQ ID NO: 533002 - DNA, 55 bp, Artificial
  Synthetic oligonucleotide
gctacagaaaccgaagttattcagggtactccacatgaccctaaagtacctacgg

SEQ ID NO: 533003 - DNA, 55 bp, Artificial
  Synthetic oligonucleotide
gctgggacgacctacgctctgaagttccgcccgatcggcaatggagcctcctgtt

SEQ ID NO: 533004 - DNA, 55 bp, Artificial
  Synthetic oligonucleotide
gctggggtatctggtccaatcaggactgaaggccaccagagagaactgggtccag

SEQ ID NO: 533005 - DNA, 55 bp, Artificial
  Synthetic oligonucleotide
gcgaactgttgcatggtgttatccttggttaattggcatagcgaaacggccgcgc

SEQ ID NO: 533006 - DNA, 55 bp, Artificial
  Synthetic oligonucleotide
gctaccactgctcataagtcgtggttttggatgcgtagccgtatctgcgaacgct

SEQ ID NO: 533007 - DNA, 55 bp, Artificial
  Synthetic oligonucleotide
gcctgtcccttgtctggttctcaaacagagtcttcaatcgttcctccagtctgac

SEQ ID NO: 533008 - DNA, 55 bp, Artificial
  Synthetic oligonucleotide
gcctcaggagctcctcataagctctgtgtaaggctcaccacccctaactaaccca

SEQ ID NO: 533009 - DNA, 55 bp, Artificial
  Synthetic oligonucleotide
gcgtgagacgccaccggaagtaatgcacgagatgtacatggtgttgctgcgcggg

SEQ ID NO: 533010 - DNA, 55 bp, Artificial
  Synthetic oligonucleotide
gctggtgactacatcatcagtaacgaaccttgggattgcaagccattcgcagccc

SEQ ID NO: 533011 - DNA, 55 bp, Artificial
  Synthetic oligonucleotide
gcttctataagtgttattcctactgaaaccacacgaggtatgtggactgctgaag

SEQ ID NO: 533012 - DNA, 55 bp, Artificial
  Synthetic oligonucleotide
gcctcacgcccacggagctaccttcgcaggtactgctgtaaaccacttgccgcct

SEQ ID NO: 533013 - DNA, 55 bp, Artificial
  Synthetic oligonucleotide
gctggtttgtatgatgactggattactattgaaggcgcacagtctgacgcatttg

SEQ ID NO: 533014 - DNA, 55 bp, Artificial
  Synthetic oligonucleotide
gctgtcgtgtatacaatgcgttagacgtgcttacattgcgtgctgtgaggtgtgt

SEQ ID NO: 533015 - DNA, 55 bp, Artificial
  Synthetic oligonucleotide
gcttagcatctacattaccttgaattgccttgttctgtgcaaactgacttgtacc

SEQ ID NO: 533016 - DNA, 55 bp, Artificial
  Synthetic oligonucleotide
gcttatattttgtttagtgtagattatgatgctgcagacaaccgtgatagggcaa

SEQ ID NO: 533017 - DNA, 55 bp, Artificial
  Synthetic oligonucleotide
gcggctccagcgcaagatgacttagcgtctattgccggggaccgcgagttctctg

SEQ ID NO: 533018 - DNA, 55 bp, Artificial
  Synthetic oligonucleotide
gcggactgtgatccagtcatcactcatgcaagggattggcttaacactcctttgc

SEQ ID NO: 533019 - DNA, 55 bp, Artificial
  Synthetic oligonucleotide
gcgcgtgacggtagcgcacatgtgggacctgaaatagcacttacttcgacgtaag

SEQ ID NO: 533020 - DNA, 55 bp, Artificial
  Synthetic oligonucleotide
gcggtcaagttcctgtcgatggaaccgctgctgggtgaagtgaagctgcgctggg

SEQ ID NO: 533021 - DNA, 55 bp, Artificial
  Synthetic oligonucleotide
gctcagtctactgaatatcgcctagttgctgaaacattcgctcaagaaatgacgc

SEQ ID NO: 533022 - DNA, 55 bp, Artificial
  Synthetic oligonucleotide
gcgcgtagatgactgttctattctgtattacgactccgcgttagtggagtcccag

SEQ ID NO: 533023 - DNA, 55 bp, Artificial
  Synthetic oligonucleotide
gcgcgaactcgagccacctgctcgacgtcgtatcgccaacgagctgtttgtgtcg

SEQ ID NO: 533024 - DNA, 55 bp, Artificial
  Synthetic oligonucleotide
gcgccttcaccagaagacggagtgaaagaaacgtcattcaatcagaaagtgacag

SEQ ID NO: 533025 - DNA, 55 bp, Artificial
  Synthetic oligonucleotide
gctattaaacgtatgtggcgtgaatcgcacccgcaaaccgtagctttctggtgcg

SEQ ID NO: 533026 - DNA, 55 bp, Artificial
  Synthetic oligonucleotide
gcggtcactatgtcagatatatactacggttcgttttgcgcgggcttgtttgctc

SEQ ID NO: 533027 - DNA, 55 bp, Artificial
  Synthetic oligonucleotide
gaatttaatcaaccgctcgtcacgttcgttcagatcaccatctcgtgtcacacca

SEQ ID NO: 533028 - DNA, 55 bp, Artificial
  Synthetic oligonucleotide
gaaggattggtgttgaagtggtataaagactcccttgggaaactgacggctggct

SEQ ID NO: 533029 - DNA, 55 bp, Artificial
  Synthetic oligonucleotide
gaatggcgtttggtcatcctcaacaccccattatgccgaaattctaaataacgtc

SEQ ID NO: 533030 - DNA, 55 bp, Artificial
  Synthetic oligonucleotide
gcggttatacgcatgctaaccataaggcggtagggaaaacaataaataaactagg

SEQ ID NO: 533031 - DNA, 55 bp, Artificial
  Synthetic oligonucleotide
gcgcattgcaatagtgctttagatcccgggaataattctcctctgaaatctgttc

SEQ ID NO: 533032 - DNA, 55 bp, Artificial
  Synthetic oligonucleotide
gcgagtataaacaaggagacctcttgaatggctataccaacattcaatcaagagg

SEQ ID NO: 533033 - DNA, 55 bp, Artificial
  Synthetic oligonucleotide
gctcatattctccaactagccttacggttctacctttcgcttctaaatccttgtt

SEQ ID NO: 533034 - DNA, 55 bp, Artificial
  Synthetic oligonucleotide
gcgagaaccagtgatcatcaccatgcaacccggttcgataggtttagagccagcc

SEQ ID NO: 533035 - DNA, 55 bp, Artificial
  Synthetic oligonucleotide
gcggttttggtgatgcgctagaccgatttgatcttaacaatggcgcgcgtctttt

SEQ ID NO: 533036 - DNA, 55 bp, Artificial
  Synthetic oligonucleotide
gaagacgttgcaaaagaagatccaaccgatgcgattggtgcatccgggcggcaag

SEQ ID NO: 533037 - DNA, 55 bp, Artificial
  Synthetic oligonucleotide
gattcgtgggcaatactgacgtctggttcggaagatcactttgatcaccgactgg

SEQ ID NO: 533038 - DNA, 55 bp, Artificial
  Synthetic oligonucleotide
gatgacgttaacgtgctaggacatatgagcgagttaatgacatacttatacgaga

SEQ ID NO: 533039 - DNA, 55 bp, Artificial
  Synthetic oligonucleotide
gatctccgtggcagtattcgcagaacgttatcctacccgagttgaacttgagtcg

SEQ ID NO: 533040 - DNA, 55 bp, Artificial
  Synthetic oligonucleotide
gacccgcagaccatatgggcgtcgtgcatcggcgattaccccaacttcggccggt

SEQ ID NO: 533041 - DNA, 55 bp, Artificial
  Synthetic oligonucleotide
gagtggctgtgcgtcgggataggtaagtacgattacgagtccgttaggtactccg

SEQ ID NO: 533042 - DNA, 55 bp, Artificial
  Synthetic oligonucleotide
gagtaagtcaacgcgatcgcagggagattatcgctattctaaagggttctcttcg

SEQ ID NO: 533043 - DNA, 55 bp, Artificial
  Synthetic oligonucleotide
gaccgaccactacaggattttcttttgagtatgtaggaaaggctacaggggtatt

SEQ ID NO: 533044 - DNA, 55 bp, Artificial
  Synthetic oligonucleotide
gaggtttaactacgcaaagcatacccacaacctatacaacgactgggtattttac

SEQ ID NO: 533045 - DNA, 55 bp, Artificial
  Synthetic oligonucleotide
gaccgcaagatcacatagagcctgaactctgtgtggttgatgtccgggcacaagg

SEQ ID NO: 533046 - DNA, 55 bp, Artificial
  Synthetic oligonucleotide
gaggatcgcttgggtcactggtttgctaatgaaactatttcaaacgcagacaaac

SEQ ID NO: 533047 - DNA, 55 bp, Artificial
  Synthetic oligonucleotide
gacgcaggccagcaatttctactgagctactgttaagaccaaagccagaagtagc

SEQ ID NO: 533048 - DNA, 55 bp, Artificial
  Synthetic oligonucleotide
gactggcaacctctctgttgcatacgtctacgttgtcaagaaatgccttaacagc

SEQ ID NO: 533049 - DNA, 55 bp, Artificial
  Synthetic oligonucleotide
gaggagatctcgatagtcgtaggcttgatcgtatccaccatcaagcggccgccac

SEQ ID NO: 533050 - DNA, 55 bp, Artificial
  Synthetic oligonucleotide
gaggactctttgtggctttctgacaagttcaagcgtgggagatatagtaaagggg

SEQ ID NO: 533051 - DNA, 55 bp, Artificial
  Synthetic oligonucleotide
gaggacgatcattgttacggatgaagttcagtgagcgctcttccgaatcccacca

SEQ ID NO: 533052 - DNA, 55 bp, Artificial
  Synthetic oligonucleotide
gagctcaaaataaccttcagtccacttagtacggtacggaacacgctggccctgg

SEQ ID NO: 533053 - DNA, 55 bp, Artificial
  Synthetic oligonucleotide
gagcctgactgccgacaataacccaccaacccgctcttatcgaccaggtgcaccg

SEQ ID NO: 533054 - DNA, 55 bp, Artificial
  Synthetic oligonucleotide
gagccaggccaatcaaccggaccttctagcacatcgtatgcagtgaccttcatcc

SEQ ID NO: 533055 - DNA, 55 bp, Artificial
  Synthetic oligonucleotide
gacttctcaatgctcgtgtaatagacctatcttcccactttctgttattcggtgg

SEQ ID NO: 533056 - DNA, 55 bp, Artificial
  Synthetic oligonucleotide
gactttaatgcacagggcgcgggatcagctattacatatggaagacgctacagcc

SEQ ID NO: 533057 - DNA, 55 bp, Artificial
  Synthetic oligonucleotide
gagaacaagtgctacaagagcgtatattccccgcattactaattgatgtgtggga

SEQ ID NO: 533058 - DNA, 55 bp, Artificial
  Synthetic oligonucleotide
gagcagccagcttgcggcggactggtcaaagctttcctgcagagtgttctggggc

SEQ ID NO: 533059 - DNA, 55 bp, Artificial
  Synthetic oligonucleotide
gagcaagttggatctgtgagccaaacccaaatacaacatgaagcgccaagaccac

SEQ ID NO: 533060 - DNA, 55 bp, Artificial
  Synthetic oligonucleotide
gagcaacacttgacctttctcatccgcccacatctgacctcgggagaactcaagg

SEQ ID NO: 533061 - DNA, 55 bp, Artificial
  Synthetic oligonucleotide
gagactagtagcttcatttagcgcttgtattgtcttagtggctcttctagccacg

SEQ ID NO: 533062 - DNA, 55 bp, Artificial
  Synthetic oligonucleotide
gagaaggacgtgacttatatagtgaggttgcatcagaaacatttgacgtaccact

SEQ ID NO: 533063 - DNA, 55 bp, Artificial
  Synthetic oligonucleotide
gagacccgtcgaccgcccaacccgtcgaccgtcctgccgagaaacgacccgtcat

SEQ ID NO: 533064 - DNA, 55 bp, Artificial
  Synthetic oligonucleotide
gagaccataggtttaatgtggcgaggctctatatacagaagagtggtaatatagg

SEQ ID NO: 533065 - DNA, 55 bp, Artificial
  Synthetic oligonucleotide
gccgtggaagacgaagattaccaacgcaaagacaaccagattacctggacagtcg

SEQ ID NO: 533066 - DNA, 55 bp, Artificial
  Synthetic oligonucleotide
gccgtgcgcactggctgaacaagaaatacaatagttcattcataccagataatac

SEQ ID NO: 533067 - DNA, 55 bp, Artificial
  Synthetic oligonucleotide
gccgctgtgttcgctatcaacgaagcggtggccgttgtgacactggatgtcatat

SEQ ID NO: 533068 - DNA, 55 bp, Artificial
  Synthetic oligonucleotide
gacagacgcggactcttatatggtacgttatggtattgacggagaaacaccggga

SEQ ID NO: 533069 - DNA, 55 bp, Artificial
  Synthetic oligonucleotide
gccgcagaaaatgtaaggcaggttcccgtagagcctgggttgccggttgcgtttg

SEQ ID NO: 533070 - DNA, 55 bp, Artificial
  Synthetic oligonucleotide
gcccggtggcctatccatccgccgggcgctttctgtttactcaacgccgcggaaa

SEQ ID NO: 533071 - DNA, 55 bp, Artificial
  Synthetic oligonucleotide
gcccctgaaacgcctgatgcgtactccccggaaatccctgccggttctcgttcca

SEQ ID NO: 533072 - DNA, 55 bp, Artificial
  Synthetic oligonucleotide
gcccagagcgtcaacgagtcccagtacagcgcgtacttccgagagctccaggaca

SEQ ID NO: 533073 - DNA, 55 bp, Artificial
  Synthetic oligonucleotide
gcccacgagccatgcgactacgctggtcttaacacccaagctaccatccacgcgc

SEQ ID NO: 533074 - DNA, 55 bp, Artificial
  Synthetic oligonucleotide
gccagatagccaatcggatttcggacatcatcaccgataaccagtggtagggtcg

SEQ ID NO: 533075 - DNA, 55 bp, Artificial
  Synthetic oligonucleotide
gccacttattacccttgtccctggtgtagtcaggaccgtagagtaaactatggtc

SEQ ID NO: 533076 - DNA, 55 bp, Artificial
  Synthetic oligonucleotide
gacagccattgtcgagtccgccctgcggatgtatgcgaatgccggggtaccggat

SEQ ID NO: 533077 - DNA, 55 bp, Artificial
  Synthetic oligonucleotide
gccaaacccaccaacagaaggtttaagggatggaaagtcattatggttagatact

SEQ ID NO: 533078 - DNA, 55 bp, Artificial
  Synthetic oligonucleotide
gcattgctactgatgtcacatgctgaccactatgttaacgattgcatgatgtggg

SEQ ID NO: 533079 - DNA, 55 bp, Artificial
  Synthetic oligonucleotide
gcattctgcatagcagactctgccaatgtaagagcatccataggagtggaagcac

SEQ ID NO: 533080 - DNA, 55 bp, Artificial; identical to SEQ ID NO: 408336
  Synthetic oligonucleotide

SEQ ID NO: 533081 - DNA, 55 bp, Artificial
  Synthetic oligonucleotide
gacaggacaccattatatactttcagcagttagccttgactcaatggggttaatt

SEQ ID NO: 533082 - DNA, 55 bp, Artificial
  Synthetic oligonucleotide
gcaggcgtttttgaacaagcaccctgaagtggactttaacgagcttttagaattc

SEQ ID NO: 533083 - DNA, 55 bp, Artificial
  Synthetic oligonucleotide
gcagcgtgttgatttgccaatccgtaaggttgccccggatacggttgccctgacc

SEQ ID NO: 533084 - DNA, 55 bp, Artificial
  Synthetic oligonucleotide
gcacttgcagctcctggagattgtgattttggagaagcttcatatattaacggta

SEQ ID NO: 533085 - DNA, 55 bp, Artificial
  Synthetic oligonucleotide
gcaccggagatccagaatccgatacaccacgggcagaacacgagttcggggatcc

SEQ ID NO: 533086 - DNA, 55 bp, Artificial
  Synthetic oligonucleotide
gcacaggagctttgattttaacgttgcgatcctcctggtctgttgcaactacgtg

SEQ ID NO: 533087 - DNA, 55 bp, Artificial
  Synthetic oligonucleotide
gcacagcctgaccagagtccttaggtagcattacaggtgcgaggctacctgcctc

SEQ ID NO: 533088 - DNA, 55 bp, Artificial
  Synthetic oligonucleotide
gcaaggtttgcacaaatagcgatcaagaaggagatcaattggttaatgcgatcta

SEQ ID NO: 533089 - DNA, 55 bp, Artificial
  Synthetic oligonucleotide
gcaacgtctgaatgtgcaggtcgatatctcgaaagtcgatgcgcagttccgtgcg

SEQ ID NO: 533090 - DNA, 55 bp, Artificial
  Synthetic oligonucleotide
gacatccgcagggcggtctattaaccctcttccccgacattaacagtatgcgaga

SEQ ID NO: 533091 - DNA, 55 bp, Artificial
  Synthetic oligonucleotide
gattgttcgtaagcctcttcagattcaaaccagttatctatagaatctccgtgaa

SEQ ID NO: 533092 - DNA, 55 bp, Artificial
  Synthetic oligonucleotide
gacccattgccgaagatctgcggttagcaggaataccgcgagatttctgttcatt

SEQ ID NO: 533093 - DNA, 55 bp, Artificial
  Synthetic oligonucleotide
tcgtaatggtagacgcggacatgcgatacgcggggcgcattgatgatgagtagga

SEQ ID NO: 533094 - DNA, 55 bp, Artificial
  Synthetic oligonucleotide
tcgggatcagacccggaacacgatgactctcatgccgtcgctcatgtcggacaag

SEQ ID NO: 533095 - DNA, 55 bp, Artificial
  Synthetic oligonucleotide
tcgctggtaagaaaattgacgtatgtgtagcacaatttgcgggagtttacgcgga

SEQ ID NO: 533096 - DNA, 55 bp, Artificial
  Synthetic oligonucleotide
tcgccgagtaaccacagcgttgtcgcatctatccctgaatacctcaacccatacg

SEQ ID NO: 533097 - DNA, 55 bp, Artificial
  Synthetic oligonucleotide
tcgattcagattgcccttatcaagccccgctactggcggcctgcgttgattcgtg

SEQ ID NO: 533098 - DNA, 55 bp, Artificial
  Synthetic oligonucleotide
tccgaattggacgccatcaactaaagacgctacgatcctacagaaagccgttgat

SEQ ID NO: 533099 - DNA, 55 bp, Artificial
  Synthetic oligonucleotide
tccacgacaaacggccgatcctgcccaatcacatagcgggccgtgccccgggcaa

SEQ ID NO: 533100 - DNA, 55 bp, Artificial
  Synthetic oligonucleotide
tccacccatcagcaacaagaagtcttgccacagcgtcttcgttggtcttcatccc

SEQ ID NO: 533101 - DNA, 55 bp, Artificial
  Synthetic oligonucleotide
tccaaagcgtggctctctcgcatcgtttgtaaactgtttgctatttgcgaggatc

SEQ ID NO: 533102 - DNA, 55 bp, Artificial
  Synthetic oligonucleotide
tcagttagcccagatgtggggtcgcgaaaaggttgtcccgctattgatgtcgcac

SEQ ID NO: 533103 - DNA, 55 bp, Artificial
  Synthetic oligonucleotide
tcacaactatagtgttccctcacgatattaaagtacgtgagtacagcggcggtaa

SEQ ID NO: 533104 - DNA, 55 bp, Artificial
  Synthetic oligonucleotide
tatggttagatacttcaaacggtaaacctggaatccttaagatataccgtggtgg

SEQ ID NO: 533105 - DNA, 55 bp, Artificial
  Synthetic oligonucleotide
tatatgaggcatataagcgaaaacgatacgtgcaaagaaagcaagatgatcaacg

SEQ ID NO: 533106 - DNA, 55 bp, Artificial
  Synthetic oligonucleotide
tagtcattgcagctaaactccagggatcattgcgaatagttgtttgactaggacg

SEQ ID NO: 533107 - DNA, 55 bp, Artificial
  Synthetic oligonucleotide
taggttcgggcgaacaacagtacaaccgtcagattcaatacgtcgtaacggtgcc

SEQ ID NO: 533108 - DNA, 55 bp, Artificial
  Synthetic oligonucleotide
taggcaatcggggcgagttctgaccactgcgcccatagacgatgcgtacgtgccg

SEQ ID NO: 533109 - DNA, 55 bp, Artificial
  Synthetic oligonucleotide
gtgttatgcgtgtcacgcttgccatgatgcaatagataggcgtaacaatgacgcg

SEQ ID NO: 533110 - DNA, 55 bp, Artificial
  Synthetic oligonucleotide
gttacagacatgggagatacactattattggataaggctacttacacatggacag

SEQ ID NO: 533111 - DNA, 55 bp, Artificial
  Synthetic oligonucleotide
gttagcagctagagaaattgtactgttggttttgtgtggaataaagcccattgac

SEQ ID NO: 533112 - DNA, 55 bp, Artificial
  Synthetic oligonucleotide
gttctccacctttcttagagattacaaggcatgtcttgccgtcataactaacgac

SEQ ID NO: 533113 - DNA, 55 bp, Artificial
  Synthetic oligonucleotide
gttctgtttcctgtgttggtgttgcggtgggtgaatcggattgggtgaaggtcag

SEQ ID NO: 533114 - DNA, 55 bp, Artificial
  Synthetic oligonucleotide
gttgccccacccggccttattatgcccgtgacgagggcggtaggattcgacctga

SEQ ID NO: 533115 - DNA, 55 bp, Artificial
  Synthetic oligonucleotide
gttgtctacaaccaaacggtagcgctctaccataattttgtcggagaacttacgc

SEQ ID NO: 533116 - DNA, 55 bp, Artificial
  Synthetic oligonucleotide
taaatcgctgtgctcgtacatcccgcgcccgtaaatcgggtcgaacccgccaacc

SEQ ID NO: 533117 - DNA, 55 bp, Artificial
  Synthetic oligonucleotide
taacatgatactcatgagttccggtattcagtattgcacggaagttttcaaaacg

SEQ ID NO: 533118 - DNA, 55 bp, Artificial
  Synthetic oligonucleotide
taaggcctcaactaagaggccgcaagtttaaatcagttcgatagttaagtagctg

SEQ ID NO: 533119 - DNA, 55 bp, Artificial
  Synthetic oligonucleotide
taatatctaatcgatagcataacgctacagaccgctcaagaacagcacgaacaga

SEQ ID NO: 533120 - DNA, 55 bp, Artificial
  Synthetic oligonucleotide
taccttgttgttcggtaccgatcgcccgtacggtgccatccaccagttcggcgga

SEQ ID NO: 533121 - DNA, 55 bp, Artificial
  Synthetic oligonucleotide
tacgcagcgcctcgggcttatgccccaactgcacccgcgtcagtttcggctcgat

SEQ ID NO: 533122 - DNA, 55 bp, Artificial
  Synthetic oligonucleotide
tacggctacggactaatcggtccataataatctggatttgacgagcttgaccgcc

SEQ ID NO: 533123 - DNA, 55 bp, Artificial
  Synthetic oligonucleotide
tactccgttaccggatagtcgttgggattttacctcttgccaaataccactcttc

SEQ ID NO: 533124 - DNA, 55 bp, Artificial
  Synthetic oligonucleotide
tagaaacctgggcgtgtagtaatctctttagggactacggcgtcccactcgccat

SEQ ID NO: 533125 - DNA, 55 bp, Artificial
  Synthetic oligonucleotide
tagaaccgtgttgttgagtatgctggtagtcgcaaacatacagcaagtccagagc

SEQ ID NO: 533126 - DNA, 55 bp, Artificial
  Synthetic oligonucleotide
ttaagctcaagcccgcggccatcactgcaaagcccgtccggtgagcatgcagtgc

SEQ ID NO: 533127 - DNA, 55 bp, Artificial
  Synthetic oligonucleotide
ttccttggtgattgccacatttatgaggagcacattgagaacgcccagcgctatc

SEQ ID NO: 533128 - DNA, 55 bp, Artificial
  Synthetic oligonucleotide
ttcgctaccgaggatcaactgtcgtcctggatgggcacacccggcccactgaacg

SEQ ID NO: 533129 - DNA, 55 bp, Artificial
  Synthetic oligonucleotide
ttcgttatgcgagttgtacctgtacttgttgtggtacatcttggacgcgtgttcc

SEQ ID NO: 533130 - DNA, 55 bp, Artificial
  Synthetic oligonucleotide
ttctggcggatactctgcccactggagcggcatccgaagggcagttgctgagcct

SEQ ID NO: 533131 - DNA, 55 bp, Artificial
  Synthetic oligonucleotide
ttgaactaccggagccttccgcatggtgatgcagacgctacgcgccactgtcgcg

SEQ ID NO: 533132 - DNA, 55 bp, Artificial
  Synthetic oligonucleotide
ttgaatatacggggatgtgaccatggggctttggagctactttcggaccggtgct

SEQ ID NO: 533133 - DNA, 55 bp, Artificial
  Synthetic oligonucleotide
ttgggtcagacgcttgaccttcagaaccgggccgtcgtgctgcatcttggtcaaa

SEQ ID NO: 533134 - DNA, 55 bp, Artificial
  Synthetic oligonucleotide
tttatcccaaaacacaactctttcgccagcgtctatcaaacgcttcattcgcttg

SEQ ID NO: 533135 - DNA, 55 bp, Artificial
  Synthetic oligonucleotide
tttattaccgataggcacaagacgaaacggggaacggttacacactaaagacggt

SEQ ID NO: 533136 - DNA, 55 bp, Artificial
  Synthetic oligonucleotide
tttccgtaatgaattgcagggcaatctgaactggggactgctgcaaagcgagttc

SEQ ID NO: 533137 - DNA, 55 bp, Artificial
  Synthetic oligonucleotide
tttcgccgttgccttatcaggacgccagcacaacatcaccggttcgcggaaccgc

SEQ ID NO: 533138 - DNA, 55 bp, Artificial
  Synthetic oligonucleotide
tttcgggcagcagagcatggccgatgctgacctgaaagaagcccagaccgcccac

SEQ ID NO: 533139 - DNA, 55 bp, Artificial
  Synthetic oligonucleotide
tttcgtcgtttcattaggggcctcacaggttctctatggggaggggcaggcggct

SEQ ID NO: 533140 - DNA, 55 bp, Artificial
  Synthetic oligonucleotide
tttgattttggcgtcaaatgagttcaaatcgacatcccatttatcagtcatacgg

SEQ ID NO: 533141 - DNA, 55 bp, Artificial
  Synthetic oligonucleotide
ttttaatcatgaattggatgttattcctactcatgcattattaagagaccgacgc

SEQ ID NO: 533142 - DNA, 55 bp, Artificial
  Synthetic oligonucleotide
ttttggggtatgagacctcaaagcttattccgtatttgttggtggcaacaatcgg

SEQ ID NO: 533143 - DNA, 55 bp, Artificial
  Synthetic oligonucleotide
tcgtgtccatccgcttcaacccggtaggcgatgacacctattccgcatgccctgg

SEQ ID NO: 533144 - DNA, 55 bp, Artificial
  Synthetic oligonucleotide
tcgttgaggacgtcggcccctggcccatcccgtaacccacccctactgaagaaca

SEQ ID NO: 533145 - DNA, 55 bp, Artificial
  Synthetic oligonucleotide
tctagcacgctgaatgagcacccatctaccgggagtgatgcggtgatgtatctct

SEQ ID NO: 533146 - DNA, 55 bp, Artificial
  Synthetic oligonucleotide
tctccgtcctttatcagaggacactctctatctgaatcgtgttcatgaaaccact

SEQ ID NO: 533147 - DNA, 55 bp, Artificial
  Synthetic oligonucleotide
tgaagaacaacgcaacgttgcccgaacttaagcttctcgtttcgtggttggaggg

SEQ ID NO: 533148 - DNA, 55 bp, Artificial
  Synthetic oligonucleotide
tgaatggcttgtactacggaatcaatatggaacttgacatgtgcatggactgcgg

SEQ ID NO: 533149 - DNA, 55 bp, Artificial
  Synthetic oligonucleotide
tgaccttggcggctcgtctggttgagcttgatcccgagccaggcgaacgcaccaa

SEQ ID NO: 533150 - DNA, 55 bp, Artificial
  Synthetic oligonucleotide
tgacgtggaccacatccgacccggcgatgaccacagcatggagaacctacgggct

SEQ ID NO: 533151 - DNA, 55 bp, Artificial
  Synthetic oligonucleotide
tgctaaaagtcaaagaaagttataaagtgtccaaaatcactaaagaaagcgttac

SEQ ID NO: 533152 - DNA, 55 bp, Artificial
  Synthetic oligonucleotide
tggagccttcgttctcttggccgtcttgtgttgacaaaggcaggttagccggcct

SEQ ID NO: 533153 - DNA, 55 bp, Artificial
  Synthetic oligonucleotide
tggcgtatgtgttgattcttgtggatccacaccgttaagcaggtggtgaagctcg

SEQ ID NO: 533154 - DNA, 55 bp, Artificial
  Synthetic oligonucleotide
tggctatcgacatcccagggagcgttacagacgacgtaatcgtgcaattcatcgg

SEQ ID NO: 533155 - DNA, 55 bp, Artificial; identical to SEQ ID NO: 472147
  Synthetic oligonucleotide

SEQ ID NO: 533156 - DNA, 55 bp, Artificial
  Synthetic oligonucleotide
tggtactggaaagctactatatctcaatacagcgcagaatgcaacttctgccgcc

SEQ ID NO: 533157 - DNA, 55 bp, Artificial
  Synthetic oligonucleotide
tggtgctaaacaagtacagggtaaaatcctgagtctggaactgacttccgctatc

SEQ ID NO: 533158 - DNA, 55 bp, Artificial
  Synthetic oligonucleotide
tgtgcgaaacaattaaagctgaagaaacacgcctggcggaacgtcgcaaacgtac

SEQ ID NO: 533159 - DNA, 55 bp, Artificial
  Synthetic oligonucleotide
tgtgctgacacgtgaagccgtattagctatgcgaggtgaaggcctcactgttgcg

SEQ ID NO: 533160 - DNA, 55 bp, Artificial
  Synthetic oligonucleotide
ggcgcgtgttcgtgtggggatagagcgccgcatcagcggcatttaatcaacggga

SEQ ID NO: 533161 - DNA, 55 bp, Artificial
  Synthetic oligonucleotide
ggcgtatccaccaagcaataagccaattcagcgttattaacatcataaagatgca

SEQ ID NO: 533162 - DNA, 55 bp, Artificial
  Synthetic oligonucleotide
ggcgtgcttgtgttcaggcaatggtaccgcggagagtaccgtatcatagatgagt

SEQ ID NO: 533163 - DNA, 55 bp, Artificial
  Synthetic oligonucleotide
ggctgaaaacagagcgcctgattttgaaaggggcatatattcaatcaactgcgga

SEQ ID NO: 533164 - DNA, 55 bp, Artificial
  Synthetic oligonucleotide
ggctgctggttgtgcgctcaataacccgcccgtctttgtataaacggtcctcagt

SEQ ID NO: 533165 - DNA, 55 bp, Artificial
  Synthetic oligonucleotide
ggcttctaccagcgcattcgcctcgcccaattctaccagcgtgactggcctgaag

SEQ ID NO: 533166 - DNA, 55 bp, Artificial
  Synthetic oligonucleotide
gggaactaagagaataagtcgggtcttgctgtgcagctaagtcacgttcctgtaa

SEQ ID NO: 533167 - DNA, 55 bp, Artificial
  Synthetic oligonucleotide
gggataacgacgagagaccctatgcaaaggtggtgggagcactgcaacaatgctc

SEQ ID NO: 533168 - DNA, 55 bp, Artificial
  Synthetic oligonucleotide
gggcaaacctttatacaatcttgccccattcttatacacagcaggtacatcaatg

SEQ ID NO: 533169 - DNA, 55 bp, Artificial
  Synthetic oligonucleotide
gggcacggtatcggatgcagtccaacagcgcggggtcgaactgaacatggggaag

SEQ ID NO: 533170 - DNA, 55 bp, Artificial
  Synthetic oligonucleotide
gggcatcttctcagaccccttgccaacgcttatccatgaagtaaaccacttctgc

SEQ ID NO: 533171 - DNA, 55 bp, Artificial
  Synthetic oligonucleotide
gggcgtttaaagaaagcgtgggtcttatcattttccgctacttcaaatgtagccg

SEQ ID NO: 533172 - DNA, 55 bp, Artificial
  Synthetic oligonucleotide
gggctttgccatgacgaggaaacgcgcatttacccataccgatgcattgcggctg

SEQ ID NO: 533173 - DNA, 55 bp, Artificial
  Synthetic oligonucleotide
ggggaatctgggtggagcgattcgatgcttgcaagaggtgaagcgtctgatgggc

SEQ ID NO: 533174 - DNA, 55 bp, Artificial
  Synthetic oligonucleotide
ggggcatatgacatcgttggcttaatcaaggagccaaacggcaccgatttcatcg

SEQ ID NO: 533175 - DNA, 55 bp, Artificial
  Synthetic oligonucleotide
ggggtcgtggttgtacagcggtacgacgatccgaaggtatatcgttgggtacggt

SEQ ID NO: 533176 - DNA, 55 bp, Artificial
  Synthetic oligonucleotide
ggggtgcgctgttttggtggtgtaccaatggtgccttataaatatctcatgattg

SEQ ID NO: 533177 - DNA, 55 bp, Artificial
  Synthetic oligonucleotide
ggaaaacgctgacggtttgatcgccggctcgcagtataactccagcgtgcgcatc

SEQ ID NO: 533178 - DNA, 55 bp, Artificial
  Synthetic oligonucleotide
ggaaatgaagtaccacatcacaccggaacagctgtggaagcttatcgatgagaag

SEQ ID NO: 533179 - DNA, 55 bp, Artificial
  Synthetic oligonucleotide
ggaacaaacactgagttcgtggggtggaacgaagataggacagaaggaagatgta

SEQ ID NO: 533180 - DNA, 55 bp, Artificial
  Synthetic oligonucleotide
ggaacaccacaccctgcgcattcaacctatcggtggcgaaccgaccactatccgt

SEQ ID NO: 533181 - DNA, 55 bp, Artificial
  Synthetic oligonucleotide
ggaacgccaaaggagcaatctttaataagccaacagttataggaagctacggtgt

SEQ ID NO: 533182 - DNA, 55 bp, Artificial
  Synthetic oligonucleotide
ggactggagcaccgaaacactcgtgttccgcaaggtctcgaaagcaaccactctc

SEQ ID NO: 533183 - DNA, 55 bp, Artificial
  Synthetic oligonucleotide
ggagcaacacattaaagatcaacaacagacgcaacctaaaacagccctagatcaa

SEQ ID NO: 533184 - DNA, 55 bp, Artificial
  Synthetic oligonucleotide
ggatggccatttatcaggagtcgatgctgatactttagatggtcgacatgcaaat

SEQ ID NO: 533185 - DNA, 55 bp, Artificial
  Synthetic oligonucleotide
ggattagttccgtgatgactgatgtactcttgggtcagtttccaggcttcttgcc

SEQ ID NO: 533186 - DNA, 55 bp, Artificial
  Synthetic oligonucleotide
ggcaatctgcgtccctatcgtctctaccgtccctaatttacttgcaagctactgt

SEQ ID NO: 533187 - DNA, 55 bp, Artificial
  Synthetic oligonucleotide
ggcagacccaactccgcaacagcgacccgatctgcggctatccggtctggggcat

SEQ ID NO: 533188 - DNA, 55 bp, Artificial
  Synthetic oligonucleotide
ggcagcctatatcctctcaagtgaattccaagcccgcaccgggatcgctcaggcg

SEQ ID NO: 533189 - DNA, 55 bp, Artificial
  Synthetic oligonucleotide
ggccgaaatcccatacgtccccataaggcccgataaaccccagactccccgccga

SEQ ID NO: 533190 - DNA, 55 bp, Artificial
  Synthetic oligonucleotide
ggccgccatgaaccttattggtatcaacaagaagaacgcgggccaaaaggtcggt

SEQ ID NO: 533191 - DNA, 55 bp, Artificial
  Synthetic oligonucleotide
ggccggggtggcctaacgccaggtgtgcgtctcgaaaactgacggtttgaaaagg

SEQ ID NO: 533192 - DNA, 55 bp, Artificial
  Synthetic oligonucleotide
ggcctccttagcgtagtctaagcctccttaacctgtcctgaggctaatctcggga

SEQ ID NO: 533193 - DNA, 55 bp, Artificial
  Synthetic oligonucleotide
ggcgattatgttatcctatgcacgcgtaaatacggcaagcatgtttgggtcagcc

SEQ ID NO: 533194 - DNA, 55 bp, Artificial
  Synthetic oligonucleotide
gtagcgcaacgtaagaagcctgagctggccatgatggataggtttagacttatgc

SEQ ID NO: 533195 - DNA, 55 bp, Artificial
  Synthetic oligonucleotide
gtatggattaccaaatataacgagtacaaattgcctcgcgacatgacaacaacgc

SEQ ID NO: 533196 - DNA, 55 bp, Artificial
  Synthetic oligonucleotide
gtcacactcattcctccgtttcccaataagttgctcctagatgtatggcattagc

SEQ ID NO: 533197 - DNA, 55 bp, Artificial
  Synthetic oligonucleotide
gtcacgggctgaatacttggctcgtgacgacttcccctagtaaagctcacgcctg

SEQ ID NO: 533198 - DNA, 55 bp, Artificial
  Synthetic oligonucleotide
gtcagagcctagcgcttccacatatggcccgcaagccatagtgtactctactaac

SEQ ID NO: 533199 - DNA, 55 bp, Artificial
  Synthetic oligonucleotide
gtcatgcggcttctagggcgactttaccggattgtcaacacattccagccagccg

SEQ ID NO: 533200 - DNA, 55 bp, Artificial
  Synthetic oligonucleotide
gtcccaccttccgtctactcctttagtgatgcatatgacgctctacctttcatga

SEQ ID NO: 533201 - DNA, 55 bp, Artificial
  Synthetic oligonucleotide
gtcgggctccagtggagtttcgaatcgggctcgtttatcgatgacgggcgcacga

SEQ ID NO: 533202 - DNA, 55 bp, Artificial
  Synthetic oligonucleotide
gtcgtacacattagcggtgctatgctctgaatggtgcacgataatttcttttggg

SEQ ID NO: 533203 - DNA, 55 bp, Artificial
  Synthetic oligonucleotide
gtctgtttgcgccccttcaagcgtaatccagtcatcataaattccagcacagcgc

SEQ ID NO: 533204 - DNA, 55 bp, Artificial
  Synthetic oligonucleotide
gtgaaccagaaacaccaccttgtcccccacctcaagctctcgtcctactcgatct

SEQ ID NO: 533205 - DNA, 55 bp, Artificial
  Synthetic oligonucleotide
gtgaagtcttcacgctagagatgcccttagaaggtgtcaaccagaaaagcacgtg

SEQ ID NO: 533206 - DNA, 55 bp, Artificial
  Synthetic oligonucleotide
gtgcgctaggtcggcgttctgagaatcaagatcgtgttctattttgccgagtcag

SEQ ID NO: 533207 - DNA, 55 bp, Artificial
  Synthetic oligonucleotide
gtggacgatgttggcataatctgttaaggcattagatagctcagtgtcggtgacg

SEQ ID NO: 533208 - DNA, 55 bp, Artificial
  Synthetic oligonucleotide
gtggggtcaaggattagttactgttggttggaattcagatgtaaatgacccaaga

SEQ ID NO: 533209 - DNA, 55 bp, Artificial
  Synthetic oligonucleotide
gtggtgatatagatagagagaagttagaagaattatggggaaagggttgggcaaa

SEQ ID NO: 533210 - DNA, 55 bp, Artificial
  Synthetic oligonucleotide
gtggtttctggttacacctcgcaggcagagaaatccctgttcggtaaattgccag

SEQ ID NO: 533211 - DNA, 55 bp, Artificial
  Synthetic oligonucleotide
gggtattatcaccgaaacagaataacgctcctatcattacaaccacctcaactct

SEQ ID NO: 533212 - DNA, 55 bp, Artificial
  Synthetic oligonucleotide
gggtctgtgcatccagtacaccgagaaggggaacatccctctgatcgcagtccac

SEQ ID NO: 533213 - DNA, 55 bp, Artificial
  Synthetic oligonucleotide
gggtgcagtgatacttcgttacttcgtctaacaggccatcggcctcgttatcgag

SEQ ID NO: 533214 - DNA, 55 bp, Artificial
  Synthetic oligonucleotide
gggtgcctcgcaaggattacaaggggccagacggtaagctgtaccaactcggaga

SEQ ID NO: 533215 - DNA, 55 bp, Artificial
  Synthetic oligonucleotide
gggtggcggggcctacgttgctgggcttgcaacgatgcactttctcacaaaggac

SEQ ID NO: 533216 - DNA, 55 bp, Artificial
  Synthetic oligonucleotide
gggtgtagcactcggtgagactaacgatcagttaatcgaacgggtgaacggcaag

SEQ ID NO: 533217 - DNA, 55 bp, Artificial
  Synthetic oligonucleotide
gggtttgcatcggtcgtggacttggtgtttattggttcgattccatgagttcact

SEQ ID NO: 533218 - DNA, 55 bp, Artificial
  Synthetic oligonucleotide
ggtcagcgtttctggctgttagtctatccgcgtcagatcaagtcgctgcgtcacg

SEQ ID NO: 533219 - DNA, 55 bp, Artificial
  Synthetic oligonucleotide
ggtgagcagggacttatcacaacggaagaagtactcaacgcacttgcgtctcagg

SEQ ID NO: 533220 - DNA, 55 bp, Artificial
  Synthetic oligonucleotide
ggttatcagaaagactttagccaattgagttccgagcggatttgcgcgcatcgtg

SEQ ID NO: 533221 - DNA, 55 bp, Artificial
  Synthetic oligonucleotide
ggttgaacggggttcaattcccaactcggaacaaatctgtttaagcggtgattga

SEQ ID NO: 533222 - DNA, 55 bp, Artificial
  Synthetic oligonucleotide
gtaactaggcggtattcagtagactgcgccaattgagtaagcctttgataaccca

SEQ ID NO: 533223 - DNA, 55 bp, Artificial
  Synthetic oligonucleotide
gtaagcctacagcagtatctacaaagctaaacacaccagtagcagcgtcaactag

SEQ ID NO: 533224 - DNA, 55 bp, Artificial
  Synthetic oligonucleotide
gtactcgtcaatatatggatgatacaattgcgtacccagtgtcttgggaagaaag

SEQ ID NO: 533225 - DNA, 55 bp, Artificial
  Synthetic oligonucleotide
gtacttcgacgaagctttaccatcgttctttgtgttcggggagcacactaacggt

SEQ ID NO: 533226 - DNA, 55 bp, Artificial
  Synthetic oligonucleotide
gtagaccaatttaatacgctttactcacggctcggttccgacgtgcaaacgtcca

SEQ ID NO: 533227 - DNA, 55 bp, Artificial
  Synthetic oligonucleotide
gtagagacagttttcagaaccagggacgcccatgtgtatatatgtgcaaatgcgg

SEQ ID NO: 533228 - DNA, 55 bp, Artificial
  Synthetic oligonucleotide
cagtaacaatagttgacggcgatataatgttgtactctaacagtttcgccagttc

SEQ ID NO: 533229 - DNA, 55 bp, Artificial
  Synthetic oligonucleotide
cagtagtggacagctattggggtttgcggtaatccagaaaccgtaggcaacagcc

SEQ ID NO: 533230 - DNA, 55 bp, Artificial
  Synthetic oligonucleotide
cagtggcatccattcttgctgcgcaaataacctataggatagatttacaacctgc

SEQ ID NO: 533231 - DNA, 55 bp, Artificial
  Synthetic oligonucleotide
cagttaattcacaccagtgtttgcggcaaagagatacatacttatcttcgccacc

SEQ ID NO: 533232 - DNA, 55 bp, Artificial
  Synthetic oligonucleotide
cagttggcacgcattgataaggtgccgactgatattagctataacacacgtacca

SEQ ID NO: 533233 - DNA, 55 bp, Artificial
  Synthetic oligonucleotide
catcagcgagtctttacagatcttcattcggcagtctagtagatgcatgaacatg

SEQ ID NO: 533234 - DNA, 55 bp, Artificial
  Synthetic oligonucleotide
catccataagaatcttactaaagatggtaagttcacgggtggcatttacggtttt

SEQ ID NO: 533235 - DNA, 55 bp, Artificial
  Synthetic oligonucleotide
catcgcatgatcgatagcgtagcgttggaagcactagagcatggtgctcacggta

SEQ ID NO: 533236 - DNA, 55 bp, Artificial
  Synthetic oligonucleotide
catctgaacgaacgttcccggggtccggaaaccgacttgcccgtggttgagggac

SEQ ID NO: 533237 - DNA, 55 bp, Artificial
  Synthetic oligonucleotide
catgacgagcccgtactaccgaacgcgattgcaggaaccgacactcgacttcgcg

SEQ ID NO: 533238 - DNA, 55 bp, Artificial
  Synthetic oligonucleotide
catgcgtaccattaacctgcaagacgtaaaagacatcgacgctacttcaacccca

SEQ ID NO: 533239 - DNA, 55 bp, Artificial
  Synthetic oligonucleotide
catggtacctgcgacttctctcacagtctcacatatcttagcaggtgtatattgt

SEQ ID NO: 533240 - DNA, 55 bp, Artificial
  Synthetic oligonucleotide
cattagaagttttagcgcaaggatttgtatcccaagactactagaaaacaacaac

SEQ ID NO: 533241 - DNA, 55 bp, Artificial
  Synthetic oligonucleotide
cattgagtcatcgagcagccgggaggtgaacaatgactcgatttcgactcagtct

SEQ ID NO: 533242 - DNA, 55 bp, Artificial
  Synthetic oligonucleotide
ccaaacggacactaactgcttgtattattgcagtgcttcagcggaacttcgaggg

SEQ ID NO: 533243 - DNA, 55 bp, Artificial
  Synthetic oligonucleotide
ccaacaacggagaagcaataaacttagtgggacgtaccccgctatttgagtgtca

SEQ ID NO: 533244 - DNA, 55 bp, Artificial
  Synthetic oligonucleotide
ccaacgacggtatagtagacaatatcgagatcgcaagaggggaaaaccgcatgac

SEQ ID NO: 533245 - DNA, 55 bp, Artificial
  Synthetic oligonucleotide
caccttgcgaggttgtggctttcatagcgtgtggaggccgcgctatgacaccggg

SEQ ID NO: 533246 - DNA, 55 bp, Artificial
  Synthetic oligonucleotide
cacgattaaagacgttatcccgttcggtgtggcagaagcgattcctggtgggccg

SEQ ID NO: 533247 - DNA, 55 bp, Artificial
  Synthetic oligonucleotide
cacttagggtgccagtgcgttgggcatacatacccattatttaggtgttgagaca

SEQ ID NO: 533248 - DNA, 55 bp, Artificial
  Synthetic oligonucleotide
cagacaatgcctgaatcttagccagtacaaactgagccttagaagtagccagttg

SEQ ID NO: 533249 - DNA, 55 bp, Artificial
  Synthetic oligonucleotide
cagaccttacgcaagctttgttaccgcatatggtcgtttacaattatggaacgct

SEQ ID NO: 533250 - DNA, 55 bp, Artificial
  Synthetic oligonucleotide
cagagatcaagaagcgtgtgcgtgagatggctgaaggcggaacattgctaccgcc

SEQ ID NO: 533251 - DNA, 55 bp, Artificial
  Synthetic oligonucleotide
cagcagacttgcggatgaaagcccgattactggaggcatcggtcttagcaacccg

SEQ ID NO: 533252 - DNA, 55 bp, Artificial
  Synthetic oligonucleotide
cagcagtagaaacgaccattactggttctagtgcatcggaagtttgggtgacgac

SEQ ID NO: 533253 - DNA, 55 bp, Artificial
  Synthetic oligonucleotide
cagccagaagtgggtagatctctttaatagcactcgcttgcgattccagacggaa

SEQ ID NO: 533254 - DNA, 55 bp, Artificial
  Synthetic oligonucleotide
cagctcttattgctaactacgtagaccctacaacttctggatttagcgacagcga

SEQ ID NO: 533255 - DNA, 55 bp, Artificial
  Synthetic oligonucleotide
cagctttcgcatcaggagacataccagcttcaatacacttagctttgacttccgg

SEQ ID NO: 533256 - DNA, 55 bp, Artificial
  Synthetic oligonucleotide
caggcacgtggcggctataactccaaccgtccgaccgatacggtttcgtcgggtg

SEQ ID NO: 533257 - DNA, 55 bp, Artificial
  Synthetic oligonucleotide
caggctgctgagtcgtacgttagtggtaagttcgtaccgctggctaagggtcgtg

SEQ ID NO: 533258 - DNA, 55 bp, Artificial
  Synthetic oligonucleotide
cagggacgcggaccattcgctcggttagattcttgtgtctacctaaactctaggc

SEQ ID NO: 533259 - DNA, 55 bp, Artificial
  Synthetic oligonucleotide
cagggcgaaagattcgtgttggactggaagtaaagtctaaacaaggaacagcagc

SEQ ID NO: 533260 - DNA, 55 bp, Artificial
  Synthetic oligonucleotide
cagggcgtacatcggtcaacaaaccctcatcgtcgtaaacctcgtatgtctgctc

SEQ ID NO: 533261 - DNA, 55 bp, Artificial
  Synthetic oligonucleotide
caggttggttctctccacaaggccagctatagtggaaacactccgggatctgccg

SEQ ID NO: 533262 - DNA, 55 bp, Artificial
  Synthetic oligonucleotide
cagtaaattggagctggcattggaatatatgacggctcatcttttatgcatagcc

SEQ ID NO: 533263 - DNA, 55 bp, Artificial
  Synthetic oligonucleotide
ccctaccgcccagtgactaaatctggtatggatagtgtactaccctttaagcccg

SEQ ID NO: 533264 - DNA, 55 bp, Artificial
  Synthetic oligonucleotide
cccttctggcatggtcatcacactgaacaagggcactttgacgactggttcagtg

SEQ ID NO: 533265 - DNA, 55 bp, Artificial
  Synthetic oligonucleotide
ccgacactgttgtaagtatgaattacgatgctggttctagcatttcaaaataccc

SEQ ID NO: 533266 - DNA, 55 bp, Artificial
  Synthetic oligonucleotide
ccgataccgtttccgcagcacttaaaacgtggcatatggaagctagtgaagctgg

SEQ ID NO: 533267 - DNA, 55 bp, Artificial
  Synthetic oligonucleotide
ccgcagagcgaatgcgagtacactgtcttttaacgatggtatgagaaatcttcgc

SEQ ID NO: 533268 - DNA, 55 bp, Artificial
  Synthetic oligonucleotide
ccgcccaaccctgcgtctcgtggtgcattgctgtttgaatccatagggtcacagc

SEQ ID NO: 533269 - DNA, 55 bp, Artificial
  Synthetic oligonucleotide
ccgcccgcaattcagctccgctcgccaaggtttgggcttctgcccgctcgctggt

SEQ ID NO: 533270 - DNA, 55 bp, Artificial
  Synthetic oligonucleotide
ccggagtcaggcctgcatcatttagctcatgcaatgacaaacatagcattcttaa

SEQ ID NO: 533271 - DNA, 55 bp, Artificial
  Synthetic oligonucleotide
ccggcccacagataaccatttgcttacttccgccgggttataagcgtaccattga

SEQ ID NO: 533272 - DNA, 55 bp, Artificial
  Synthetic oligonucleotide
ccggctagcggacttaaagtagtgtctgtggtacgagtgagtggagactttgacc

SEQ ID NO: 533273 - DNA, 55 bp, Artificial
  Synthetic oligonucleotide
ccgggtaaagtgcgtactagccttccgggaagtatgcaggcaagtatggatggtc

SEQ ID NO: 533274 - DNA, 55 bp, Artificial
  Synthetic oligonucleotide
ccgtcaacataaacggcactcaatggacatatacggggcctgtggcgtccggaga

SEQ ID NO: 533275 - DNA, 55 bp, Artificial
  Synthetic oligonucleotide
ccgtcacgcgatttcagggtaaggatagacccgccaacatttgcatccgccaggt

SEQ ID NO: 533276 - DNA, 55 bp, Artificial
  Synthetic oligonucleotide
ccgtccatgtcgagatcagcactaccttctctgaaccaagcacaactaagatagc

SEQ ID NO: 533277 - DNA, 55 bp, Artificial
  Synthetic oligonucleotide
ccgtcctcggatgagccgatctcattcgcgacgctcctcgacaattacagcgcgc

SEQ ID NO: 533278 - DNA, 55 bp, Artificial
  Synthetic oligonucleotide
ccgtggtatccatccaatcacgataccaagggcaatgggctttgccatgacgagg

SEQ ID NO: 533279 - DNA, 55 bp, Artificial
  Synthetic oligonucleotide
cctcacagccaatgagtgcatgttcagccatattaagcagcatatctctgtcaac

SEQ ID NO: 533280 - DNA, 55 bp, Artificial
  Synthetic oligonucleotide
cctcagccggtattgaccaagcgccaggggcaataatcacatcaagggtgctgat

SEQ ID NO: 533281 - DNA, 55 bp, Artificial
  Synthetic oligonucleotide
ccacgagatttcataagacctacaatgtgggtccacatctctttgtccactgtaa

SEQ ID NO: 533282 - DNA, 55 bp, Artificial
  Synthetic oligonucleotide
ccactggtgttgacggagactggtacttcatggaggacacccggacgttcctggg

SEQ ID NO: 533283 - DNA, 55 bp, Artificial
  Synthetic oligonucleotide
ccacttaacagtaggggctaaaactataactagatcgtagtgctcatccttagcc

SEQ ID NO: 533284 - DNA, 55 bp, Artificial
  Synthetic oligonucleotide
ccagcgtcgtagaaatcgggaacattcggatagctacggaacgcgcgtgatccag

SEQ ID NO: 533285 - DNA, 55 bp, Artificial
  Synthetic oligonucleotide
ccaggacggcaagggtggttttgctcggcgtaaggtaacgtcccgtaaactcctg

SEQ ID NO: 533286 - DNA, 55 bp, Artificial
  Synthetic oligonucleotide
ccagtaaatccgccagcttaaccactctctgcaagttagccacgtcatccactag

SEQ ID NO: 533287 - DNA, 55 bp, Artificial
  Synthetic oligonucleotide
ccagttgaacatcggagtcgtctgcaaatcaattgacccggataccacaccctct

SEQ ID NO: 533288 - DNA, 55 bp, Artificial
  Synthetic oligonucleotide
cccaatcgccctgatcattgcgcatggcaaccagaatcaatttgtgaatgacgcc

SEQ ID NO: 533289 - DNA, 55 bp, Artificial
  Synthetic oligonucleotide
cccaatgacttatgtgttgatttgacaatgctaaaatcagatttaaccacacccg

SEQ ID NO: 533290 - DNA, 55 bp, Artificial
  Synthetic oligonucleotide
cccagtggaagtcctcagtcaactgaacgaagggcgtactgagccttacgggacg

SEQ ID NO: 533291 - DNA, 55 bp, Artificial
  Synthetic oligonucleotide
cccatcaggcggcctggcagtggcccctaacagctcaccagattctaactgggag

SEQ ID NO: 533292 - DNA, 55 bp, Artificial
  Synthetic oligonucleotide
cccctgcattaggcatttgatgtgcagctccctttcgggaacatactcataaccc

SEQ ID NO: 533293 - DNA, 55 bp, Artificial
  Synthetic oligonucleotide
cccggaagggaaggctaagttaatcgaatccagataccatgaaatgtatacggtt

SEQ ID NO: 533294 - DNA, 55 bp, Artificial
  Synthetic oligonucleotide
cccgtacaagaatacttcctggactactgtccttttatcaaaggagggttgctgt

SEQ ID NO: 533295 - DNA, 55 bp, Artificial
  Synthetic oligonucleotide
cccgtcgaattgaccgaccaagagcgcgatagggagccaacgcaccagatcctag

SEQ ID NO: 533296 - DNA, 55 bp, Artificial
  Synthetic oligonucleotide
cccgtcggtcaagctcgtctcgtcactgccgaccttccccagtgagaaccagatc

SEQ ID NO: 533297 - DNA, 55 bp, Artificial
  Synthetic oligonucleotide
cccgttgaagtacgaatccgattccgtcaagaccatgaaggacgaagcggacgac

SEQ ID NO: 533298 - DNA, 55 bp, Artificial
  Synthetic oligonucleotide
ccctaacctgttccgtgtagttaccccggatgagattactggattggtggtttcg

SEQ ID NO: 533299 - DNA, 55 bp, Artificial
  Synthetic oligonucleotide
acagcatccggcccgtgttcaatcgtgcctgtgttgaggataccggccaaagtag

SEQ ID NO: 533300 - DNA, 55 bp, Artificial
  Synthetic oligonucleotide
acatcaggaaccgtcgcgactctgcgcctctacgacccgatcgatagttggggtg

SEQ ID NO: 533301 - DNA, 55 bp, Artificial
  Synthetic oligonucleotide
acatgggccggtgggaaggcgcccgactacatctaccagctgagccatccgctaa

SEQ ID NO: 533302 - DNA, 55 bp, Artificial
  Synthetic oligonucleotide
accgcatactgagcagggttgtaagccccaagcattaagtggaaagacccaccct

SEQ ID NO: 533303 - DNA, 55 bp, Artificial
  Synthetic oligonucleotide
acgacttggccatgattggctggaaagtgggcgagtaccgtgcaacgttgcctcg

SEQ ID NO: 533304 - DNA, 55 bp, Artificial
  Synthetic oligonucleotide
acgcaagaaataagagcgatggtcggattgtcctagtcacctccactcaccatca

SEQ ID NO: 533305 - DNA, 55 bp, Artificial
  Synthetic oligonucleotide
acgccgccacggcacggatcgaaagtttgaccgggacgaacaaacgcagcggtag

SEQ ID NO: 533306 - DNA, 55 bp, Artificial
  Synthetic oligonucleotide
acgttaacgcaacaaacgaacactagtgctcctctagtatcctctagtactgcga

SEQ ID NO: 533307 - DNA, 55 bp, Artificial
  Synthetic oligonucleotide
acttccctgacccatccaacacggtggggaacgtggggactgtgttgccgagtca

SEQ ID NO: 533308 - DNA, 55 bp, Artificial
  Synthetic oligonucleotide
acttggacacgctttccatcaatgttaagaacaacttgagtcccgccatctgagt

SEQ ID NO: 533309 - DNA, 55 bp, Artificial
  Synthetic oligonucleotide
agaaagcatacgataacctttaaagcgattaacactaaaacaagcttatctaaaa

SEQ ID NO: 533310 - DNA, 55 bp, Artificial
  Synthetic oligonucleotide
agacacaccgttcaatggagaattacacctgggctcaaaatacgagaccctagag

SEQ ID NO: 533311 - DNA, 55 bp, Artificial
  Synthetic oligonucleotide
agacctgttacgtgacaaccatagcctgaacgttgtgtatgaagcctttagcaac

SEQ ID NO: 533312 - DNA, 55 bp, Artificial
  Synthetic oligonucleotide
agcgatgttacagatgcggtgagctgaaagacgattatcgtttccgccctggaca

SEQ ID NO: 533313 - DNA, 55 bp, Artificial
  Synthetic oligonucleotide
aggcaccgttatacacttgcccaaagttgccgggcgaaatgagacgtagtgcatt

SEQ ID NO: 533314 - DNA, 55 bp, Artificial
  Synthetic oligonucleotide
agggtgtggtcctggttcgattcgcacaccgtggacggtaacgctgcgcgcgtta

SEQ ID NO: 533315 - DNA, 55 bp, Artificial
  Synthetic oligonucleotide
aggttatccgatcgtttatcgggttatcacctgttatcgggccagcattaactgc

SEQ ID NO: 533316 - DNA, 55 bp, Artificial
  Synthetic oligonucleotide
agtaaaccataaagggcatacagcccacgtattcgggttcactacgctggaccta

SEQ ID NO: 533317 - DNA, 55 bp, Artificial
  Synthetic oligonucleotide
aaaactcttaaggttggcgaccgtatccgttgggtgtcaggacaaaatatgcgcg

SEQ ID NO: 533318 - DNA, 55 bp, Artificial
  Synthetic oligonucleotide
aaacgctgacgcaaccattatacaagcctgtctaacatcgtctggtagtgatgat

SEQ ID NO: 533319 - DNA, 55 bp, Artificial
  Synthetic oligonucleotide
aacaaaggcgtgtcgctcgttaaaacgccgcaagggatgttgttctttggcacgc

SEQ ID NO: 533320 - DNA, 55 bp, Artificial
  Synthetic oligonucleotide
aaccagaagggatggatatccgcgaaccgggttgccaaaggcaagcgtgtcgaca

SEQ ID NO: 533321 - DNA, 55 bp, Artificial
  Synthetic oligonucleotide
aacttgacgggcaatgccgaatcgcccaacttcgaccctggctctcggtgggcca

SEQ ID NO: 533322 - DNA, 55 bp, Artificial
  Synthetic oligonucleotide
aagccccaccccgtctgggctgggactccatcggagtgccggacggattttgtct

SEQ ID NO: 533323 - DNA, 55 bp, Artificial
  Synthetic oligonucleotide
aagcgtcaggggttcgattcctccgtcttccgccaaggagagtgacccacaccgg

SEQ ID NO: 533324 - DNA, 55 bp, Artificial
  Synthetic oligonucleotide
aagtactaaagtgtgaagtcaccgcgctacgtcatatctcgatgaccttggcggc

SEQ ID NO: 533325 - DNA, 55 bp, Artificial
  Synthetic oligonucleotide
aagtctacctgttttaaccttttgttaagacttggcctctagggtcgagttgtcc

SEQ ID NO: 533326 - DNA, 55 bp, Artificial
  Synthetic oligonucleotide
aatactggcccaaaggttaagactggcaatgcttaccggcgtttcaaggttgcct

SEQ ID NO: 533327 - DNA, 55 bp, Artificial
  Synthetic oligonucleotide
aatgcatctactgagtaataatctttgcccgtgtattcatataaccaccaggcgc

SEQ ID NO: 533328 - DNA, 55 bp, Artificial
  Synthetic oligonucleotide
aatgcattaatgaggttatctgccgggatgcgagctgagccaaagatagcacgag

SEQ ID NO: 533329 - DNA, 55 bp, Artificial
  Synthetic oligonucleotide
acaaagtgctcttgatacagcggagactcgccgtggcaacgtagtctcagaagag

SEQ ID NO: 533330 - DNA, 55 bp, Artificial
  Synthetic oligonucleotide
acaacccgatgggatgacgccatgaaactggtttcgatgaagaaagagggcgggc

SEQ ID NO: 533331 - DNA, 55 bp, Artificial
  Synthetic oligonucleotide
acacaacctcggcaaaagtcgctgccgactggattaaagatggttattcggcacg

SEQ ID NO: 533332 - DNA, 55 bp, Artificial
  Synthetic oligonucleotide
acacatcgcagagcgcaagcccgaagaggcaaccgttgtccgccccacagaggac

SEQ ID NO: 533333 - DNA, 55 bp, Artificial
  Synthetic oligonucleotide
acacccacaaggtggcccttgcgctcttgccggtcgtgcttccgcctgatgctgt

SEQ ID NO: 533334 - DNA, 55 bp, Artificial
  Synthetic oligonucleotide
acacgataaggcgcaacccattgaaaacacatgagcggacatttcgaggttttac

SEQ ID NO: 533335 - DNA, 55 bp, Artificial
  Synthetic oligonucleotide
caaatattgagttgcacaaaacgtatcacctgttagatgggtacgagatcgctag

SEQ ID NO: 533336 - DNA, 55 bp, Artificial
  Synthetic oligonucleotide
caactccttcaattcaagccagcaagagaagtcactcacccactcaccaatcccg

SEQ ID NO: 533337 - DNA, 55 bp, Artificial
  Synthetic oligonucleotide
caagccccagttgttaccagcttaagaattgacaagctatcagcaaatcaggtaa

SEQ ID NO: 533338 - DNA, 55 bp, Artificial
  Synthetic oligonucleotide
caaggaacgccatcatattgttcctcgttgtttaggaggtggagattcaccaaac

SEQ ID NO: 533339 - DNA, 55 bp, Artificial
  Synthetic oligonucleotide
caaggaactgatctctggtgacatgggtggcactaatgtatccgtcaccaaaggc

SEQ ID NO: 533340 - DNA, 55 bp, Artificial
  Synthetic oligonucleotide
caaggctcctttaagaacccgcttaaagaagttctgccctggcttcataatgact

SEQ ID NO: 533341 - DNA, 55 bp, Artificial
  Synthetic oligonucleotide
caagtgcttctgggccaaaatacttcatataagtgtcacgcaacgtgtcttcttt

SEQ ID NO: 533342 - DNA, 55 bp, Artificial
  Synthetic oligonucleotide
caatagaaagacgcactgattaacccttaaggtaacacaaccctattatgagcgc

SEQ ID NO: 533343 - DNA, 55 bp, Artificial
  Synthetic oligonucleotide
caatggataccactcaatcaactgttgcttggtcacgtactgactggagacagga

SEQ ID NO: 533344 - DNA, 55 bp, Artificial
  Synthetic oligonucleotide
caattctctaatgagtatggacacaaccactctactaaagagtttagggttggtg

SEQ ID NO: 533345 - DNA, 55 bp, Artificial
  Synthetic oligonucleotide
cacactgtactacagagagaacgccctaagcgggcatctaagcacactagacagg

SEQ ID NO: 533346 - DNA, 55 bp, Artificial
  Synthetic oligonucleotide
cacagagatgcaacaacaaaacgccaacaacgctaataatgaagaaagcaataac

SEQ ID NO: 533347 - DNA, 55 bp, Artificial
  Synthetic oligonucleotide
cacatgatcaacaaacgacttcatatcttcacgcggcaaccagtgagcacctggc

SEQ ID NO: 533348 - DNA, 55 bp, Artificial
  Synthetic oligonucleotide
caccaacgagtgcggccgtgccgcattctcaggacaggttatctcagcctgaagg

SEQ ID NO: 533349 - DNA, 55 bp, Artificial
  Synthetic oligonucleotide
caccattcgtaacgttcacattcggaatggacacatcaaggtggggaagacaggt

SEQ ID NO: 533350 - DNA, 55 bp, Artificial
  Synthetic oligonucleotide
caccgaccttgattgcgtagcgttcgcggactgtgcccataccgccgaagtagcc

SEQ ID NO: 533351 - DNA, 55 bp, Artificial
  Synthetic oligonucleotide
cacctatccagtaacggattttacaggcatagtggctaccacatcgtggacagac

SEQ ID NO: 533352 - DNA, 55 bp, Artificial
  Synthetic oligonucleotide
cacctccacgggcaacacggggcaggggtaacgatgaccatccttactggaaccg

SEQ ID NO: 533353 - DNA, 55 bp, Artificial
  Synthetic oligonucleotide
agtcggggacctggaggctggacgcacaggtcacaacggacggcagaggaagtct

SEQ ID NO: 533354 - DNA, 55 bp, Artificial
  Synthetic oligonucleotide
agttccgtgcaatgaccgtctcggccggggctcgcatcgctatgccgacactgac

SEQ ID NO: 533355 - DNA, 55 bp, Artificial
  Synthetic oligonucleotide
ataagcaaagtcaacgtgctcaggtgaaggcatgtggttgtatccggttaaaacc

SEQ ID NO: 533356 - DNA, 55 bp, Artificial
  Synthetic oligonucleotide
atatccagaccgtaagatatggttgtggacaggctacgaactagaagacttgggg

SEQ ID NO: 533357 - DNA, 55 bp, Artificial
  Synthetic oligonucleotide
atccagaaggccgagagcggggcctaccgcgaggaagtccgcacgtggttcttcg

SEQ ID NO: 533358 - DNA, 55 bp, Artificial
  Synthetic oligonucleotide
atccctcggaagtcgaattcttcgctgaccgcctgtggttcgctggcaccccggc

SEQ ID NO: 533359 - DNA, 55 bp, Artificial
  Synthetic oligonucleotide
atcgctgaatatgccatcctcgtaatgataaccagcgttgtcaatgaactctcgt

SEQ ID NO: 533360 - DNA, 55 bp, Artificial
  Synthetic oligonucleotide
atctcggtaacgtttgagtctgaataacttctttgggtgtgggatgtccgccatt

SEQ ID NO: 533361 - DNA, 55 bp, Artificial
  Synthetic oligonucleotide
atctggagccgtcgcttagcgagcgtttggaggcgcaagccggcgtttgggatgt

SEQ ID NO: 533362 - DNA, 55 bp, Artificial
  Synthetic oligonucleotide
atctggctaacgctgggccggagtttgcggcgttcaacgtaccccattcgaccgg

SEQ ID NO: 533363 - DNA, 55 bp, Artificial
  Synthetic oligonucleotide
atcttcactttcaccccgtcaggctaggcactataaaatcatacttcgtctgtcc

SEQ ID NO: 533364 - DNA, 55 bp, Artificial
  Synthetic oligonucleotide
atggcgagtgatcgtgcatccgtccggaacccgccgaaagacgaagtcctagcgc

SEQ ID NO: 533365 - DNA, 55 bp, Artificial; identical to SEQ ID NO: 334902
  Synthetic oligonucleotide

SEQ ID NO: 533366 - DNA, 55 bp, Artificial
  Synthetic oligonucleotide
atgtcaaaatgaccgctcatatcatacccattataagcgatccagtctccgaagc

SEQ ID NO: 533367 - DNA, 55 bp, Artificial; identical to SEQ ID NO: 336841
  Synthetic oligonucleotide

SEQ ID NO: 533368 - DNA, 55 bp, Artificial
  Synthetic oligonucleotide
attgtgctgcctgatggcacggcgccgcggaatggccgcgtcacctatcagcttt

SEQ ID NO: 533369 - DNA, 55 bp, Artificial
  Synthetic oligonucleotide
caaacatcggttcaaacgacttcagcattgttgtaagttaaacctacggttcaag

SEQ ID NO: 533370 - DNA, 55 bp, Artificial
  Synthetic oligonucleotide
caaagcggtaccgtgaatgattttcgcgatgtcgggtatctccaacttcgtcacc

SEQ ID NO: 533371 - DNA, 55 bp, Artificial
  Synthetic oligonucleotide
cgtactacgttgaacgtccgtgggaaaactctaacctgggcagtggtgagtggcg

SEQ ID NO: 533372 - DNA, 55 bp, Artificial
  Synthetic oligonucleotide
ctggtgcgaccgtaggcaacaacttggggtcaggaaatccgactgcatatgactc

SEQ ID NO: 533373 - DNA, 55 bp, Artificial
  Synthetic oligonucleotide
cggttgtcgcggaacttcgggaccatctggatcactcctcagatcagagctcccc

SEQ ID NO: 533374 - DNA, 55 bp, Artificial
  Synthetic oligonucleotide
cggtgtatggaatgagaatgtacaaaaagggatacccgcatcaagtgcatggaag

SEQ ID NO: 533375 - DNA, 55 bp, Artificial
  Synthetic oligonucleotide
ctggtgcgaccttaaagacggtattcttgccgcagtacgtaatcctggccgcgat

SEQ ID NO: 533376 - DNA, 55 bp, Artificial
  Synthetic oligonucleotide
cggtggcctcttcgaactcttccgattcgcggtcttcgtcggaaatggattcccc

SEQ ID NO: 533377 - DNA, 55 bp, Artificial
  Synthetic oligonucleotide
cggtcacttacccggatcatgttttgacgcgtaaaccattcgatacacttggagc

SEQ ID NO: 533378 - DNA, 55 bp, Artificial
  Synthetic oligonucleotide
cggtaaagcgctcgggctcaatctggtcgactcgccagacctgttactacaggac

SEQ ID NO: 533379 - DNA, 55 bp, Artificial
  Synthetic oligonucleotide
cgggtgaacggcaagttcctccataagttcggcaagcgtaagatgtctgatggta

SEQ ID NO: 533380 - DNA, 55 bp, Artificial
  Synthetic oligonucleotide
ctggttcgatacagcgtaaatgggtgttcccaagtgcgttctaccttctatccgg

SEQ ID NO: 533381 - DNA, 55 bp, Artificial
  Synthetic oligonucleotide
cggcttccattgacgcaatccaaacattcattggcgttatttgttcatctccgtc

SEQ ID NO: 533382 - DNA, 55 bp, Artificial
  Synthetic oligonucleotide
cggcggctacaccagtcaattgcacccctgagatgaacgagaagtttccttgcct

SEQ ID NO: 533383 - DNA, 55 bp, Artificial
  Synthetic oligonucleotide
ctgtaatggtgtagggactacctctaacggtatccccgtacctaaccttatcggg

SEQ ID NO: 533384 - DNA, 55 bp, Artificial
  Synthetic oligonucleotide
ctgtacgccggcgacccatacgaggcagtcgggttttgacaggaggttgtcgagg

SEQ ID NO: 533385 - DNA, 55 bp, Artificial
  Synthetic oligonucleotide
cggcactatgctggccgcgaattaagccagtcgatgtcagccggatatgcgtcgg

SEQ ID NO: 533386 - DNA, 55 bp, Artificial
  Synthetic oligonucleotide
cggcacgcagagttccatgggcttcacgaacaacgcgtacgtgaatggaacctac

SEQ ID NO: 533387 - DNA, 55 bp, Artificial
  Synthetic oligonucleotide
ctgtcgacgaatttgtgcgcgctgagtggcagactgcatagccatatcagagcgc

SEQ ID NO: 533388 - DNA, 55 bp, Artificial
  Synthetic oligonucleotide
cggatagagtgacggctcgaaaaccaattaacctgattggcctccgcatcattac

SEQ ID NO: 533389 - DNA, 55 bp, Artificial
  Synthetic oligonucleotide
cggataatctgccgttggtagaacgttaatttctgccatgaaagcaaaacgtttg

SEQ ID NO: 533390 - DNA, 55 bp, Artificial
  Synthetic oligonucleotide
cggagcgaaccgcttctgggcggcactggcgtaaccccttgtgacagaagggagt

SEQ ID NO: 533391 - DNA, 55 bp, Artificial
  Synthetic oligonucleotide
cggaattcggttacaccaccgacccctacaaccacaactacggctggatcgtcca

SEQ ID NO: 533392 - DNA, 55 bp, Artificial
  Synthetic oligonucleotide
ctgtctgcgtctgcaagtctgggaacattgactatgggagggttggctcttgctg

SEQ ID NO: 533393 - DNA, 55 bp, Artificial
  Synthetic oligonucleotide
ctgtgttaagcaaggtataactgttcaaggtggcgcctcgaagttatttaaggcg

SEQ ID NO: 533394 - DNA, 55 bp, Artificial
  Synthetic oligonucleotide
cttaaagacgaatgtctaagagtaaaggattgctctaagtgtaaatgctccaggg

SEQ ID NO: 533395 - DNA, 55 bp, Artificial
  Synthetic oligonucleotide
cgctggagttttccagttcacctactgccccaaaggtcgtatcctaaacttcttc

SEQ ID NO: 533396 - DNA, 55 bp, Artificial
  Synthetic oligonucleotide
cttacggtgtcgtttacataaactactgtataagtgccagagcgatttggcttag

SEQ ID NO: 533397 - DNA, 55 bp, Artificial
  Synthetic oligonucleotide
cgctgacagtgacgccgatcgacacaacgacactggaggttgttccgcttgaccc

SEQ ID NO: 533398 - DNA, 55 bp, Artificial
  Synthetic oligonucleotide
cgctagtagttgcgttcttagcctttggcttgtggcggattggagccggagcacc

SEQ ID NO: 533399 - DNA, 55 bp, Artificial
  Synthetic oligonucleotide
cgcgtggaggcggcagaagaaccgtttgtgcagtcctcaaccacctcactagcct

SEQ ID NO: 533400 - DNA, 55 bp, Artificial
  Synthetic oligonucleotide
ctaccagtggaggttcggccgtatacccctgtaaggctttgccaagatttcggac

SEQ ID NO: 533401 - DNA, 55 bp, Artificial
  Synthetic oligonucleotide
ctacagaaggtgtttggaggggttgtattggaagataaaagaggattttgtgcag

SEQ ID NO: 533402 - DNA, 55 bp, Artificial
  Synthetic oligonucleotide
ctaatgctaatcaaagtttagaagctgaaccgccttacctttctactgggatcgg

SEQ ID NO: 533403 - DNA, 55 bp, Artificial
  Synthetic oligonucleotide
ctcacgagtgaccttactcacgggcgcgagcattaacgctgaaaataagttcccg

SEQ ID NO: 533404 - DNA, 55 bp, Artificial
  Synthetic oligonucleotide
ctcattcagcgacttgatagactggtcgatagcgtacccctgtttcgaggtcacc

SEQ ID NO: 533405 - DNA, 55 bp, Artificial
  Synthetic oligonucleotide
ctcggtatcatgccttcgccctgatacatccctggctcacgtgcaccgtatataa

SEQ ID NO: 533406 - DNA, 55 bp, Artificial
  Synthetic oligonucleotide
ctcgtgaacagtgtggccaagcaaggggtcagcgatgttaatgagggtaagccac

SEQ ID NO: 533407 - DNA, 55 bp, Artificial
  Synthetic oligonucleotide
ctaagtttccagggcaatcagtagaatttaattctttatgcccatagactggcat

SEQ ID NO: 533408 - DNA, 55 bp, Artificial
  Synthetic oligonucleotide
ctctgcaatccagctgatacatcataacgtcagttgctaatgctgtctcttttgg

SEQ ID NO: 533409 - DNA, 55 bp, Artificial
  Synthetic oligonucleotide
cgttgatccttctgcactcccggcagatgatttggctaacctgggtctggtaacc

SEQ ID NO: 533410 - DNA, 55 bp, Artificial
  Synthetic oligonucleotide
ctgaaagatttggcacctaaatatcttggagctgaatcagatacgtttgacacgc

SEQ ID NO: 533411 - DNA, 55 bp, Artificial
  Synthetic oligonucleotide
cgttgaaacttttacggctgaaggtgataaccgactatcatctacgggattagcc

SEQ ID NO: 533412 - DNA, 55 bp, Artificial
  Synthetic oligonucleotide
cgttcgtaacttctaagacgtctgctgacaaggctattgattacgctgtacgtgc

SEQ ID NO: 533413 - DNA, 55 bp, Artificial
  Synthetic oligonucleotide
ctgaatggaccgattggacttctagatcaatggttcatgctggaagcatatccac

SEQ ID NO: 533414 - DNA, 55 bp, Artificial
  Synthetic oligonucleotide
ctgatgggctcgaacccgcgtggatataccgcacaacagtggctgcgattgcctc

SEQ ID NO: 533415 - DNA, 55 bp, Artificial
  Synthetic oligonucleotide
cgttactgcgcgcccgaccggtaaccctaattcgtagtcttaaaatccccgagtt

SEQ ID NO: 533416 - DNA, 55 bp, Artificial
  Synthetic oligonucleotide
cgtgtcataattggcactaacgagtaatgttttgactcgcctgacgcattgcaaa

SEQ ID NO: 533417 - DNA, 55 bp, Artificial
  Synthetic oligonucleotide
ctgcacgggctacaacgtagctcaccacttcatgcccgctaatgacctccactgg

SEQ ID NO: 533418 - DNA, 55 bp, Artificial
  Synthetic oligonucleotide
cgtgctcaacattacacaggagcatggaccccgtggttaagacaattagatacag

SEQ ID NO: 533419 - DNA, 55 bp, Artificial
  Synthetic oligonucleotide
ctgcgagatgtcgtacatgtatagcgcacttagacgtatggttgtgcgtggacac

SEQ ID NO: 533420 - DNA, 55 bp, Artificial
  Synthetic oligonucleotide
cgtgattgcgtccatggaaaacgttctgcaactgcgcccgttcctggaacagtgc

SEQ ID NO: 533421 - DNA, 55 bp, Artificial
  Synthetic oligonucleotide
cgtcgatggaagggcctggagctgcattgcatctcgccgaccaaggcaaggtcct

SEQ ID NO: 533422 - DNA, 55 bp, Artificial
  Synthetic oligonucleotide
ctgcgagggtcactgcgcggccaggttgaaggggataccttgttgttcggtaccg

SEQ ID NO: 533423 - DNA, 55 bp, Artificial
  Synthetic oligonucleotide
cgtcctgcttttcgtcctccatgtctcgtatagacgtaaagctaaattctaagtc

SEQ ID NO: 533424 - DNA, 55 bp, Artificial
  Synthetic oligonucleotide
ctggggctaactgataacggagttgatccagcatctgttttggcacttcggacac

SEQ ID NO: 533425 - DNA, 55 bp, Artificial
  Synthetic oligonucleotide
cgtatttgttggtggcaacaatcggtttatttgtaggttttttgtatgttttgag

SEQ ID NO: 533426 - DNA, 55 bp, Artificial
  Synthetic oligonucleotide
cgtattgtacgtgctgacgttgactttgttgtttgtcagatctaagatgctggcg

SEQ ID NO: 533427 - DNA, 55 bp, Artificial
  Synthetic oligonucleotide
cgtatcggctacgcctgtttcttagtccaaatactgctggtacttttgataacag

SEQ ID NO: 533428 - DNA, 55 bp, Artificial
  Synthetic oligonucleotide
cgtagcgttgtggatagtgattgctgtctgtgcggcgaccctcttgattttgaca

SEQ ID NO: 533429 - DNA, 55 bp, Artificial
  Synthetic oligonucleotide
cgtagaggggcaatgagcagttatttaaactaactaccccgtcaccattactagc

SEQ ID NO: 533430 - DNA, 55 bp, Artificial
  Synthetic oligonucleotide
cgaggaacaaacattaaatggtgacgtgatacctcctgagtataacacagaacat

SEQ ID NO: 533431 - DNA, 55 bp, Artificial
  Synthetic oligonucleotide
cgagccttaagcccggctaagtcatcaaacctatcgtctatgacatgtcacgggc

SEQ ID NO: 533432 - DNA, 55 bp, Artificial
  Synthetic oligonucleotide
ctttacgtaattaaacataccagaagctatctcgtactttgcacgcgcgactggg

SEQ ID NO: 533433 - DNA, 55 bp, Artificial
  Synthetic oligonucleotide
cttttgacgtaattgcactctaatttaggttcatggttcctttcaccgcgaggca

SEQ ID NO: 533434 - DNA, 55 bp, Artificial
  Synthetic oligonucleotide
cgagccgcgacatagcattggtacgttctagctcaaaggcttctagacccatggc

SEQ ID NO: 533435 - DNA, 55 bp, Artificial
  Synthetic oligonucleotide
gaaacctttgctatcatggaaccacgtatgcaccactgcgatgaatcttggcatg

SEQ ID NO: 533436 - DNA, 55 bp, Artificial
  Synthetic oligonucleotide
cgagacaatgcacaacattaacaatctgtatgatgttcctatgggcaaggaccgt

SEQ ID NO: 533437 - DNA, 55 bp, Artificial
  Synthetic oligonucleotide
cgaccggttttacccatgtcgaagtcttcaaagacaatggcggtgaacggtccgc

SEQ ID NO: 533438 - DNA, 55 bp, Artificial
  Synthetic oligonucleotide
cgaagggtaaagagatcaagacttctgttccggtgactccatacaccgagggtgt

SEQ ID NO: 533439 - DNA, 55 bp, Artificial
  Synthetic oligonucleotide
cgaagcgttacctgcgccgttaccacgtcgttaccggagcgtatcccatgaacct

SEQ ID NO: 533440 - DNA, 55 bp, Artificial
  Synthetic oligonucleotide
cgaagacgcaggtagtcaagaccatccagaactggctagctagattcaacgagag

SEQ ID NO: 533441 - DNA, 55 bp, Artificial
  Synthetic oligonucleotide
gaaagcgaagctgcattgatgagtacgttgcttagcaacaccgctttagcatctc

SEQ ID NO: 533442 - DNA, 55 bp, Artificial
  Synthetic oligonucleotide
gaaaggcctggtgcacccatgcccacgatgaagcccctccgtaaggacgactgga

SEQ ID NO: 533443 - DNA, 55 bp, Artificial
  Synthetic oligonucleotide
cgaacgtccaagcatctggaataggaattgctggcaataggttcgggtcgttcag

SEQ ID NO: 533444 - DNA, 55 bp, Artificial
  Synthetic oligonucleotide
cgaaaggggtggggccatctgatagaggtcgtcagccatggaaacgtccttttca

SEQ ID NO: 533445 - DNA, 55 bp, Artificial
  Synthetic oligonucleotide
cgaaactgggcgcaactgtgacgttatcgttgcgtgtgtcgggttgattggaggg

SEQ ID NO: 533446 - DNA, 55 bp, Artificial
  Synthetic oligonucleotide
cgaaactgaacacgacacgaccggcccggtaactgagtttaatgctggccgactg

SEQ ID NO: 533447 - DNA, 55 bp, Artificial
  Synthetic oligonucleotide
gaactgaggtgattgaccgtcgccagcccggttgcgagaacgcgaactaaaacag

SEQ ID NO: 533448 - DNA, 55 bp, Artificial
  Synthetic oligonucleotide
cctttagaccatgaagtgaggtcaggattggattcgaattcttccttagtcacgt

SEQ ID NO: 533449 - DNA, 55 bp, Artificial
  Synthetic oligonucleotide
cctttaagacggttgatgacttccctttgtatgagcctgatattaatggcgacgg

SEQ ID NO: 533450 - DNA, 55 bp, Artificial
  Synthetic oligonucleotide
ccttgaatttagggtttctttccatagaagtgcgcacagagcagttatgtacagc

SEQ ID NO: 533451 - DNA, 55 bp, Artificial
  Synthetic oligonucleotide
ccttcgcaggtggggtgtgttgctcggtagatgcaacctacacgatcttgcttgc

SEQ ID NO: 533452 - DNA, 55 bp, Artificial
  Synthetic oligonucleotide
ccttactccaaccccgtacgcggccgagattgctaatggtccatccaacatcgct

SEQ ID NO: 533453 - DNA, 55 bp, Artificial
  Synthetic oligonucleotide
ccttacgctgagggccaaagccgtaacgtgaagttgttacgaactcatcacgacg

SEQ ID NO: 533454 - DNA, 55 bp, Artificial
  Synthetic oligonucleotide
cctgggcaggggcgtccgaggaaaaggtatgacatagacctcatctgtcgggagg

SEQ ID NO: 533455 - DNA, 55 bp, Artificial
  Synthetic oligonucleotide
cctggaattgataggttaggtaatcaatcggctccttaacaaatggacgcgcccc

SEQ ID NO: 533456 - DNA, 55 bp, Artificial
  Synthetic oligonucleotide
cctgattgcatataatcggctgcaaggctacacaacccgagtgacttaccaacgt

SEQ ID NO: 533457 - DNA, 55 bp, Artificial
  Synthetic oligonucleotide
cctcggtgaaggaacgtcgtcgtctcaacctggagcactggaactggcatggcgt

SEQ ID NO: 533458 - DNA, 55 bp, Artificial
  Synthetic oligonucleotide
cctcgcgccttcggtgtttctagccacccctcattcctccgggacaccttcagtc

SEQ ID NO: 533459 - DNA, 55 bp, Artificial
  Synthetic oligonucleotide
cgcctcgtttccatgtcatcaatgtgcgctttccgcacagcaaagtcaagcggga

SEQ ID NO: 533460 - DNA, 55 bp, Artificial
  Synthetic oligonucleotide
cttccaattccagcaactatttaatgacgtaggtatccttggtcctaactgcgct

SEQ ID NO: 533461 - DNA, 55 bp, Artificial
  Synthetic oligonucleotide
cgcctggttataatgctggaacaacaaaccctacaaagggttatcacatgcacgt

SEQ ID NO: 533462 - DNA, 55 bp, Artificial
  Synthetic oligonucleotide
cgcctacgccctcttgatcctcagacagcatccccggaaacatatctgtcggcag

SEQ ID NO: 533463 - DNA, 55 bp, Artificial
  Synthetic oligonucleotide
cgccaggtggtaatgatttcggtaaatcgtttggtcgcgtaggtatggttcatcg

SEQ ID NO: 533464 - DNA, 55 bp, Artificial
  Synthetic oligonucleotide
cgcatgccctggcaccgactcgctgggcgacatcaagcagctgcagtatctggaa

SEQ ID NO: 533465 - DNA, 55 bp, Artificial
  Synthetic oligonucleotide
cgcgatgaagcgaatccactggaactgaaggacacacctgtgactactgcatcgt

SEQ ID NO: 533466 - DNA, 55 bp, Artificial
  Synthetic oligonucleotide
cgcagcggtagcgacgcaacaccggatttgatccctttgatccctgctcgtacgg

SEQ ID NO: 533467 - DNA, 55 bp, Artificial
  Synthetic oligonucleotide
cttcgtcattgagctgggttcgaccctgccctccttcaacaaattccagaccacg

SEQ ID NO: 533468 - DNA, 55 bp, Artificial
  Synthetic oligonucleotide
cgcgccatgttccgtaacaacgccctttccactgtgccggtcccgtcttccttcg

SEQ ID NO: 533469 - DNA, 55 bp, Artificial
  Synthetic oligonucleotide
cgcaatcacacgttcttcattaacctgcgtcgggataggcaacacgttcacgttc

SEQ ID NO: 533470 - DNA, 55 bp, Artificial
  Synthetic oligonucleotide
cttctctcgccttccattcatcagaccaataagcaacgatgcccttgcgatgaac

SEQ ID NO: 533471 - DNA, 55 bp, Artificial
  Synthetic oligonucleotide
cgatctgactactcctagtggagctaagctgtatcgcatcaaagcgctcaaggac

SEQ ID NO: 533472 - DNA, 55 bp, Artificial
  Synthetic oligonucleotide
cgattgttaatcgttcactaggaattatttcgaggtgtcgccaccaagccagacg

SEQ ID NO: 533473 - DNA, 55 bp, Artificial
  Synthetic oligonucleotide
cgcaaataaaccctcggagcgtttccctactcagcgagatatgttagcaggggag

SEQ ID NO: 533474 - DNA, 55 bp, Artificial
  Synthetic oligonucleotide
cgcgtcaaccagaaagtcatggtcaatgtcgaaggttagcgtctttgagtggttg

SEQ ID NO: 533475 - DNA, 55 bp, Artificial
  Synthetic oligonucleotide
cgcggtcgggttatccgtgattccgttcgatgactttgacggggcctacggtgcg

SEQ ID NO: 533476 - DNA, 55 bp, Artificial
  Synthetic oligonucleotide
cgcaagctttgaccgagacatactgtattcaaacgacatagaaattaaaggtcgc

SEQ ID NO: 533477 - DNA, 55 bp, Artificial
  Synthetic oligonucleotide
cgcgccgaaggtgttgagttcgttccccaggttctggctgctatcgttaagcgcc

SEQ ID NO: 533478 - DNA, 55 bp, Artificial
  Synthetic oligonucleotide
cttatgttattggctatgaccgtttattttacggccgtctaagtaatgacactcg

SEQ ID NO: 533479 - DNA, 54 bp, Artificial
  Synthetic oligonucleotide
gacatgcgaaccctggaccggccgcaattacttacgagcaagtcaaatggtgac

SEQ ID NO: 533480 - DNA, 54 bp, Artificial
  Synthetic oligonucleotide
tttgatgaagttatacaaaccatctgaacaacataaaccgactgatcatcatat

SEQ ID NO: 533481 - DNA, 54 bp, Artificial
  Synthetic oligonucleotide
tactaacaccgatcgcggcgactagcgcataacttgccagattaatagcctgca

SEQ ID NO: 533482 - DNA, 54 bp, Artificial
  Synthetic oligonucleotide
ggacggtctgacgtggctggcaactaccccgacgctcccggctcccgcatggca

SEQ ID NO: 533483 - DNA, 54 bp, Artificial
  Synthetic oligonucleotide
ttatactacacagagccaccaattgtcaacccaactactttgactacaagtgct

SEQ ID NO: 533484 - DNA, 54 bp, Artificial
  Synthetic oligonucleotide
ctagtgacaagtacttcgaactagaccacactaagattggcttcctttcagatg

SEQ ID NO: 533485 - DNA, 54 bp, Artificial
  Synthetic oligonucleotide
caaactgaggcagctaagatgcttgggattagtcgctcggggttgggtggtatc

SEQ ID NO: 533486 - DNA, 54 bp, Artificial
  Synthetic oligonucleotide
gtcatcttgcccgtaacgtccattacaccagccacaatcgtataaggattctga

SEQ ID NO: 533487 - DNA, 54 bp, Artificial
  Synthetic oligonucleotide
gtaacgtagtcttgcatcaactgtgccacggattggttaggactgtttacggct

SEQ ID NO: 533488 - DNA, 54 bp, Artificial
  Synthetic oligonucleotide
agtatagagatcgacagcctttggaatggcacatggtgcgtaacgctatgcgcc

SEQ ID NO: 533489 - DNA, 54 bp, Artificial
  Synthetic oligonucleotide
cttcaacgtctggaaccctcttcccgattaagtctttttcgggtgaaccgttgg

SEQ ID NO: 533490 - DNA, 54 bp, Artificial
  Synthetic oligonucleotide
cctagtaaaatcggggttctgtttgcgacttgttgccccgttaaccagtaagtc

SEQ ID NO: 533491 - DNA, 54 bp, Artificial
  Synthetic oligonucleotide
gaggtgtggcagtttggtgacacatttgacgtccgcaaattcatgtacggtcgt

SEQ ID NO: 533492 - DNA, 54 bp, Artificial
  Synthetic oligonucleotide
ttcgtattagctctaaggcgggttttccattctacaatggctgcttggagctcc

SEQ ID NO: 533493 - DNA, 54 bp, Artificial
  Synthetic oligonucleotide
ctctaacaattcggcatagttcgtggtctaactctgtgaattctggaccttgtc

SEQ ID NO: 533494 - DNA, 54 bp, Artificial
  Synthetic oligonucleotide
ctaagggagtacaagcaacagcgcccgacgcgcggcctatacgacacaatcacg

SEQ ID NO: 533495 - DNA, 54 bp, Artificial
  Synthetic oligonucleotide
gactttggcgaccccaacgtcgttgagatactatcccagtagaggaagatctca

SEQ ID NO: 533496 - DNA, 54 bp, Artificial
  Synthetic oligonucleotide
gttggctctattggatttggctctgtaggcacatttggtatactaggagtatta

SEQ ID NO: 533497 - DNA, 54 bp, Artificial
  Synthetic oligonucleotide
ctgggtacatgacgttcccgaccggcgttggcgataatatcggcggctggaaga

SEQ ID NO: 533498 - DNA, 54 bp, Artificial
  Synthetic oligonucleotide
ggggcgttgtttagcgaagttcgtttcggctcaatgtgttgcgatacggccggg

SEQ ID NO: 533499 - DNA, 54 bp, Artificial
  Synthetic oligonucleotide
cccgaacaccacggtggtccccaatggcagttttgaagccggtgacgtgaattg

SEQ ID NO: 533500 - DNA, 54 bp, Artificial
  Synthetic oligonucleotide
aacttcccaccagaactggatttccagcttttacggatgctccggctaccactg

SEQ ID NO: 533501 - DNA, 54 bp, Artificial
  Synthetic oligonucleotide
gttagtaatccaccactggcaggacatcgagctagacttgatgcctaagactgg

SEQ ID NO: 533502 - DNA, 54 bp, Artificial
  Synthetic oligonucleotide
gcagcgttggacggatcagagctttagcggtcgccctctagggcacggaaggga

SEQ ID NO: 533503 - DNA, 54 bp, Artificial
  Synthetic oligonucleotide
taagttagcagaacgtatcgtgtttaatgacacattaggtatggaaacgagcga

SEQ ID NO: 533504 - DNA, 54 bp, Artificial
  Synthetic oligonucleotide
tggatgaaggtgattacgtaagctcatcaagcgtcacgcgagtaaaggttaagc

SEQ ID NO: 533505 - DNA, 54 bp, Artificial
  Synthetic oligonucleotide
taatcaggggatttcttaagaaaagtgagaaagtacttgacaaggttacgaaac

SEQ ID NO: 533506 - DNA, 54 bp, Artificial
  Synthetic oligonucleotide
gtgaaaactactaaaatagcgtttgctgtccacgtcccggattcggagcattac

SEQ ID NO: 533507 - DNA, 54 bp, Artificial
  Synthetic oligonucleotide
tacaagcaactgtcccgcgatacactacctttgggttttcgagagccttcaagt

SEQ ID NO: 533508 - DNA, 54 bp, Artificial
  Synthetic oligonucleotide
cgtgaccattgtggctaattttacctaatttagcatctgaaacactcccggttc

SEQ ID NO: 533509 - DNA, 54 bp, Artificial
  Synthetic oligonucleotide
tgcgatagtcggtgctttaattggcgtacttgtatggttatggaacacgaatga

SEQ ID NO: 533510 - DNA, 54 bp, Artificial
  Synthetic oligonucleotide
aaatctgcagttcgtcaagcatcggtcggttccttggtggcgtgcgcatcgcgc

SEQ ID NO: 533511 - DNA, 54 bp, Artificial
  Synthetic oligonucleotide
acacgccgttcatctacggtgacaccgtcacctatcttggcgagacctatttct

SEQ ID NO: 533512 - DNA, 53 bp, Artificial
  Synthetic oligonucleotide
tgtcacacgttggtcaggccggacggtgggcgactcggaagccccaccttctg

SEQ ID NO: 533513 - DNA, 53 bp, Artificial
  Synthetic oligonucleotide
tccaagcagaacagaaaaggtagtaatcaatcaattgggagtagatgaaacat

SEQ ID NO: 533514 - DNA, 53 bp, Artificial
  Synthetic oligonucleotide
acgtgtagtgatccgtgatgagaacggcctgttggtatcggacggagacactc

SEQ ID NO: 533515 - DNA, 53 bp, Artificial
  Synthetic oligonucleotide
tggggtaacccgcaccgtggtccttcagaacaagggcaccgggtccgtcttca

SEQ ID NO: 533516 - DNA, 53 bp, Artificial
  Synthetic oligonucleotide
acgttcacagatgccgtctacccatagccagtcctcgttgtgggagtaagccc

SEQ ID NO: 533517 - DNA, 53 bp, Artificial
  Synthetic oligonucleotide
acatcatgacgttccagaactcgtcgccggttctcgacgggtcggtcacctat

SEQ ID NO: 533518 - DNA, 53 bp, Artificial
  Synthetic oligonucleotide
actcaagctagacaaagtaatcactgaccgggtaaaattggccaacgttacgc

SEQ ID NO: 533519 - DNA, 53 bp, Artificial
  Synthetic oligonucleotide
aaaaaccaaacttgaataacgagattaacgccataggtaacgagcgcataaac

SEQ ID NO: 533520 - DNA, 53 bp, Artificial
  Synthetic oligonucleotide
agctataacacacgtaccaataaggcgtactacaagtcaaaaagtactgtaga

SEQ ID NO: 533521 - DNA, 53 bp, Artificial
  Synthetic oligonucleotide
cgggaactatgagttctatgtcaccaactacagcaagcgcgaaacctgcgatg

SEQ ID NO: 533522 - DNA, 53 bp, Artificial
  Synthetic oligonucleotide
cggcggacgatcgctcgggcatgggtggcaagcccatccatctccattacgtc

SEQ ID NO: 533523 - DNA, 53 bp, Artificial
  Synthetic oligonucleotide
gttactggtatatgcagccagaggatactaacttctgggttgcccacggtgtg

SEQ ID NO: 533524 - DNA, 53 bp, Artificial
  Synthetic oligonucleotide
gttcttagtttcgctccacatggcggaggtattgaagctggttcgtcagaact

SEQ ID NO: 533525 - DNA, 53 bp, Artificial
  Synthetic oligonucleotide
cgtaagacggccgcacacgcccgcagggttacagccacctacggaatcgaccc

SEQ ID NO: 533526 - DNA, 53 bp, Artificial
  Synthetic oligonucleotide
cgcttcacgtttccggacaaaagtcaagtggtctcgcgccggccgcaggctat

SEQ ID NO: 533527 - DNA, 53 bp, Artificial
  Synthetic oligonucleotide
taagttctaccgtgatctcttctatgcacatggagactgcattgtgaagagtc

SEQ ID NO: 533528 - DNA, 53 bp, Artificial
  Synthetic oligonucleotide
catctgaccgacattttactgtcttaccagttaaggtatcaaagaacgtataa

SEQ ID NO: 533529 - DNA, 53 bp, Artificial
  Synthetic oligonucleotide
cgttcaccttgtttacaatcgcgacgttgtggggtatcgaaatggtgctatac

SEQ ID NO: 533530 - DNA, 53 bp, Artificial
  Synthetic oligonucleotide
atgcgaccgggacgctgttgtgctgatcctggacgtaggccagagccgcctcc

SEQ ID NO: 533531 - DNA, 53 bp, Artificial
  Synthetic oligonucleotide
ggggagaacatagtaaggagggactaacaatgagatacactttacctcaaccg

SEQ ID NO: 533532 - DNA, 53 bp, Artificial
  Synthetic oligonucleotide
tcatgacatgggcctcgctgactatcaacccactggcgcctacccgacgaatc

SEQ ID NO: 533533 - DNA, 53 bp, Artificial
  Synthetic oligonucleotide
ggggtaatgtttctcgcgttcaaggttcgccacagtaccaattaaacacttca

SEQ ID NO: 533534 - DNA, 52 bp, Artificial
  Synthetic oligonucleotide
tgccgacaaaatattcgacatactagcacgcgatggtttctcggtacaccaa

SEQ ID NO: 533535 - DNA, 52 bp, Artificial
  Synthetic oligonucleotide
tacgaccacgctggcctatagcggctcccggcaggtctatacggtcacccag

SEQ ID NO: 533536 - DNA, 52 bp, Artificial
  Synthetic oligonucleotide
taatggtgtggatccgcaagagtctactcatacgccacttaaagtctggatg

SEQ ID NO: 533537 - DNA, 52 bp, Artificial
  Synthetic oligonucleotide
gcctctgtaatccaaacccgtcaggtgaatgaccttctgtcttacctagcct

SEQ ID NO: 533538 - DNA, 52 bp, Artificial
  Synthetic oligonucleotide
gggagccatgcggtacttcggagccttgttggagctacgtgcgaagaacaca

SEQ ID NO: 533539 - DNA, 52 bp, Artificial
  Synthetic oligonucleotide
cgctgttcacgtacctggggactcgggtgaaccgccagtctacgaaggaatc

SEQ ID NO: 533540 - DNA, 52 bp, Artificial
  Synthetic oligonucleotide
actgtatgcactagaagatacaggcatatccaacggagccgagttaattgac

SEQ ID NO: 533541 - DNA, 52 bp, Artificial
  Synthetic oligonucleotide
tcaatcttcgggattcccttggagattcccaacaattcaacagttaccgagg

SEQ ID NO: 533542 - DNA, 52 bp, Artificial
  Synthetic oligonucleotide
gccgcgctaggtatggcctttcgtgcgctttaccgctacgacctggcagata

SEQ ID NO: 533543 - DNA, 52 bp, Artificial
  Synthetic oligonucleotide
aaatggaatatctccgtcatctactggctccatgttctcgccacttttcttg

SEQ ID NO: 533544 - DNA, 52 bp, Artificial
  Synthetic oligonucleotide
gttgctgggaactgtcttagccctcggatccagcagaagttccattagaact

SEQ ID NO: 533545 - DNA, 52 bp, Artificial
  Synthetic oligonucleotide
gctcacgccgcgatgaagtcgatctctgacatctccggtccggcagtcaaga

SEQ ID NO: 533546 - DNA, 52 bp, Artificial
  Synthetic oligonucleotide
gtgccccattggtcagccgccaaatggccgcagttcgcgcgcaccagggctt

SEQ ID NO: 533547 - DNA, 52 bp, Artificial
  Synthetic oligonucleotide
tcaccgccttagtaccttctggcaagccgttagctgaacgagttattagctg

SEQ ID NO: 533548 - DNA, 52 bp, Artificial
  Synthetic oligonucleotide
cacgatgaactacatcctaaagcaccccatgaaattcggctatacgcaaatc

SEQ ID NO: 533549 - DNA, 52 bp, Artificial
  Synthetic oligonucleotide
gtgcctaactccatctgcgagggcaactgtaaaggataagatattgcatttg

SEQ ID NO: 533550 - DNA, 52 bp, Artificial
  Synthetic oligonucleotide
atacctagcgaagcaaatgtttctgaagccttagcagcgatattagcgtttt

SEQ ID NO: 533551 - DNA, 52 bp, Artificial
  Synthetic oligonucleotide
ctgcccgaccttgaaggattactgaccatgcgcgctttgctttggctcccct

SEQ ID NO: 533552 - DNA, 52 bp, Artificial
  Synthetic oligonucleotide
gggatcatatgttaaacgttccgacggtatggacacaagcacatcgcctgga

SEQ ID NO: 533553 - DNA, 52 bp, Artificial
  Synthetic oligonucleotide
cttgggccattagcggatccggttccggttcatgtaggaatccacggactca

SEQ ID NO: 533554 - DNA, 52 bp, Artificial
  Synthetic oligonucleotide
ctcgcatggacgtaggtgccacgcgatacctcactcaggatggtcgagagtt

SEQ ID NO: 533555 - DNA, 52 bp, Artificial
  Synthetic oligonucleotide
gtacataacctaaatgacattgatacacacaaccgttcaatcggacttgact

SEQ ID NO: 533556 - DNA, 52 bp, Artificial
  Synthetic oligonucleotide
ggcttcattccgcatgaaactcctattactgtatcacttgaggcgaatagcc

SEQ ID NO: 533557 - DNA, 52 bp, Artificial
  Synthetic oligonucleotide
agggataaatccccattgcaagacattttggggatacatccccatttatagt

SEQ ID NO: 533558 - DNA, 52 bp, Artificial
  Synthetic oligonucleotide
gcgtagttctctattggaacatctcctatctcatcactaggagtacatgtcc

SEQ ID NO: 533559 - DNA, 52 bp, Artificial
  Synthetic oligonucleotide
tcgggccaatgccgatttaagcacgcttcgacgaccttttgcgtaatcgagt

SEQ ID NO: 533560 - DNA, 52 bp, Artificial
  Synthetic oligonucleotide
atggaacggcaggtccccggcttccatccccgctcggtgtcatacaccgaac

SEQ ID NO: 533561 - DNA, 52 bp, Artificial
  Synthetic oligonucleotide
aggtgtaggcgttcaggctgctgtaacccctgccgacattggtgaccaagag

SEQ ID NO: 533562 - DNA, 52 bp, Artificial
  Synthetic oligonucleotide
gatgtcgtaagacttatcagtatccatatcacggattttcaggatagtcagc

SEQ ID NO: 533563 - DNA, 51 bp, Artificial
  Synthetic oligonucleotide
ggttctttgcactcccctactaaatcgagaaggagcacggatcatcatgca

SEQ ID NO: 533564 - DNA, 51 bp, Artificial
  Synthetic oligonucleotide
gcgctttgcaaatacatccatagactcgtattctgttcttgtatacgaatc

SEQ ID NO: 533565 - DNA, 51 bp, Artificial
  Synthetic oligonucleotide
ttctgcactgcatacgtgaaaacgtatgagcaaggatttgctacacactat

SEQ ID NO: 533566 - DNA, 51 bp, Artificial
  Synthetic oligonucleotide
ttgtcgtagacgacttgtgaagtacgaggttcaagccccacttcgtggggc

SEQ ID NO: 533567 - DNA, 51 bp, Artificial
  Synthetic oligonucleotide
gccgggtacagtaatgaaccgcgctcggcccgtgaggcatggaacggtaac

SEQ ID NO: 533568 - DNA, 51 bp, Artificial
  Synthetic oligonucleotide
ttgcggccttcggatacgaagtcatcgctcagatctacctcagaaaagcat

SEQ ID NO: 533569 - DNA, 51 bp, Artificial
  Synthetic oligonucleotide
gcgtttatggctgaccagcctgggaagtgggtactgcaccacgacggtgac

SEQ ID NO: 533570 - DNA, 51 bp, Artificial
  Synthetic oligonucleotide
cgaattaaaagcactgacaccacaaagtcaaatctttggagtattgggtgt

SEQ ID NO: 533571 - DNA, 51 bp, Artificial
  Synthetic oligonucleotide
cagtcgaaaatctacgttcacaacgagcttgtgggcgataagattcagacc

SEQ ID NO: 533572 - DNA, 51 bp, Artificial
  Synthetic oligonucleotide
gctttggattggccgacctgctccgcatattcacgtaaactgatctgcata

SEQ ID NO: 533573 - DNA, 51 bp, Artificial
  Synthetic oligonucleotide
atcggtaaggacttcggtatgttcaagggcgcatcggaagaagatcgcggt

SEQ ID NO: 533574 - DNA, 51 bp, Artificial
  Synthetic oligonucleotide
ctcaataaagctaatgttagtaacattgtaacgcctatgcaactcaaagaa

SEQ ID NO: 533575 - DNA, 51 bp, Artificial
  Synthetic oligonucleotide
tcgcacggtagctgactgagtgggccaggtaagagtccgaccgcagatagg

SEQ ID NO: 533576 - DNA, 51 bp, Artificial
  Synthetic oligonucleotide
tcgccgaccaaggcaaggtccttttcataaccgacactgactatgcgttct

SEQ ID NO: 533577 - DNA, 51 bp, Artificial
  Synthetic oligonucleotide
tcgcctgatatgcctgacgcttgaaacatagctgccatttgttcggcttgc

SEQ ID NO: 533578 - DNA, 51 bp, Artificial
  Synthetic oligonucleotide
tatgaattaaagcgtctgaacgatacaaaacctagtaaccaagcacaagcg

SEQ ID NO: 533579 - DNA, 51 bp, Artificial
  Synthetic oligonucleotide
attgcactaagtagtgcagatcctatgactgacaacctaatgagtcgaact

SEQ ID NO: 533580 - DNA, 51 bp, Artificial
  Synthetic oligonucleotide
caaaggccagtggtttaccatcctgaccaaacgctttaaacctaggcattg

SEQ ID NO: 533581 - DNA, 51 bp, Artificial
  Synthetic oligonucleotide
aaagctatcaaagaagttcattagcggaactcaaaatcaaaggtttgaaac

SEQ ID NO: 533582 - DNA, 51 bp, Artificial
  Synthetic oligonucleotide
tacgtttgttgctaccacgcttatatttagcgcgtttagatgtgccaactt

SEQ ID NO: 533583 - DNA, 51 bp, Artificial
  Synthetic oligonucleotide
tacggacgcgccttgttgttgcggtcagtaagactgttgtttggggagtct

SEQ ID NO: 533584 - DNA, 51 bp, Artificial
  Synthetic oligonucleotide
tgctcaaggcgaacatcgaaagcaggacgaacgaaagggtgtggcggcata

SEQ ID NO: 533585 - DNA, 51 bp, Artificial
  Synthetic oligonucleotide
cgtcaatctatcttctcctacatgtactttcttaacatatgcctcaccatt

SEQ ID NO: 533586 - DNA, 51 bp, Artificial
  Synthetic oligonucleotide
taagatgcatcaacaacgcaaacaggagggatatatgccactacttacatc

SEQ ID NO: 533587 - DNA, 51 bp, Artificial
  Synthetic oligonucleotide
gcattaacccatatgtcatcgtccttacttagcaagtcgtgctcacatggg

SEQ ID NO: 533588 - DNA, 51 bp, Artificial
  Synthetic oligonucleotide
caccccacttgccagcgccaggaccagtcgcaccaactttgatgaacaccg

SEQ ID NO: 533589 - DNA, 51 bp, Artificial
  Synthetic oligonucleotide
acctgacttgttaaagcaattgatcgggtggcagaataaccttcacacttc

SEQ ID NO: 533590 - DNA, 51 bp, Artificial
  Synthetic oligonucleotide
accgcttgtccttcattgaataacgcttgttctatatgtcgactttccata

SEQ ID NO: 533591 - DNA, 51 bp, Artificial
  Synthetic oligonucleotide
tgtggttcacgagaatcccagcggttcgtgttcatgcactcaaccatcaga

SEQ ID NO: 533592 - DNA, 50 bp, Artificial
  Synthetic oligonucleotide
aaagaagagggtgggatatctccagggtaataaaatccatctcgccatcg

SEQ ID NO: 533593 - DNA, 50 bp, Artificial
  Synthetic oligonucleotide
gaaattaccagtatatatgtgggagccattatttaatcggcttacccgca

SEQ ID NO: 533594 - DNA, 50 bp, Artificial
  Synthetic oligonucleotide
ccctgcgactcagaatacataagctaacgaaaactttggatagtgggtca

SEQ ID NO: 533595 - DNA, 50 bp, Artificial
  Synthetic oligonucleotide
ggcgttcttgttgattctttatggaacgcgttaaataacgctggcactgt

SEQ ID NO: 533596 - DNA, 50 bp, Artificial
  Synthetic oligonucleotide
aaaacggcgtttgaagcgctaccgtgacgagagatttgctaaggaagacg

SEQ ID NO: 533597 - DNA, 50 bp, Artificial
  Synthetic oligonucleotide
aatgccgaaagtccctgtgaaaaaggttagatatggtaatcgtggaatgt

SEQ ID NO: 533598 - DNA, 50 bp, Artificial
  Synthetic oligonucleotide
gcctgtcgtgactaaaaaaggtgattataaacttaacccttctaccgaaa

SEQ ID NO: 533599 - DNA, 50 bp, Artificial
  Synthetic oligonucleotide
gtcaaatacctgcataccccagccagcagtctttggcatatgcacagcaa

SEQ ID NO: 533600 - DNA, 50 bp, Artificial
  Synthetic oligonucleotide
tggttcacagacgactacgaaggacttactaaggctcagatagaagcggt

SEQ ID NO: 533601 - DNA, 50 bp, Artificial
  Synthetic oligonucleotide
gttggcagaaggatcagacgggagacctgttaaatgcgtgttaagagcgt

SEQ ID NO: 533602 - DNA, 50 bp, Artificial
  Synthetic oligonucleotide
tgcttctgagcgacaacatttcaacggttggtcccgcatcattgtgtcga

SEQ ID NO: 533603 - DNA, 50 bp, Artificial
  Synthetic oligonucleotide
agattaggttaccagtgttaaatctagcacccttaacgagtaatcgttat

SEQ ID NO: 533604 - DNA, 50 bp, Artificial
  Synthetic oligonucleotide
tagcgacgctcctcagcgatacgcagcaacggacgttcggattctgcata

SEQ ID NO: 533605 - DNA, 50 bp, Artificial
  Synthetic oligonucleotide
tcttgcgaccacgcataacggttgccattttgaccatagatgacatgctc

SEQ ID NO: 533606 - DNA, 50 bp, Artificial
  Synthetic oligonucleotide
tatattagagcgaaccctggcacaccatcgtacattagttgctaaccacc

SEQ ID NO: 533607 - DNA, 50 bp, Artificial
  Synthetic oligonucleotide
tattgactacaggactaacagtctgaactatacccctggactgataccgt

SEQ ID NO: 533608 - DNA, 50 bp, Artificial
  Synthetic oligonucleotide
atcgcaataggatactaacatgaccaatccaacactcattacaaccccat

SEQ ID NO: 533609 - DNA, 50 bp, Artificial
  Synthetic oligonucleotide
atctgcctgatgacttcgagccatggttggaaatccgcgattacggtatt

SEQ ID NO: 533610 - DNA, 55 bp, Artificial
  Synthetic oligonucleotide
cggctacaattcatatgcgtggaacgttacaaacaatttaaacgttgagctcaaa

SEQ ID NO: 533611 - DNA, 55 bp, Artificial
  Synthetic oligonucleotide
cgggatcggacggtctagcttcattctacgcccagcagggtgaatacagaatctc

SEQ ID NO: 533612 - DNA, 55 bp, Artificial
  Synthetic oligonucleotide
cgtgcgaaagctgcgccagtaagacagaggtaaacacgtggaagctacacagccc

SEQ ID NO: 533613 - DNA, 55 bp, Artificial
  Synthetic oligonucleotide
ctcaacttggtgatgacgcagagtctgttgagtctattaagtactatgctccaag

SEQ ID NO: 533614 - DNA, 55 bp, Artificial
  Synthetic oligonucleotide
cttcaaattggacaagtttataactcaacacagaatccttggcagtctggagacg

SEQ ID NO: 533615 - DNA, 55 bp, Artificial
  Synthetic oligonucleotide
cttcgcaaagtcattgctaagctgctaggccgagaagaaccaaggcatggaacgt

SEQ ID NO: 533616 - DNA, 55 bp, Artificial
  Synthetic oligonucleotide
cttctgtgggcggttctattattggtaagcacgcccaccttatactgtgggatga

SEQ ID NO: 533617 - DNA, 55 bp, Artificial
  Synthetic oligonucleotide
cttgggttatgcatatttgccacaggaggttgtaaccgaagaggtgtaccgtgag

SEQ ID NO: 533618 - DNA, 55 bp, Artificial
  Synthetic oligonucleotide
gaaaggcacactcaaacattgcattgggtcatacaatggggagcttgaaactagc

SEQ ID NO: 533619 - DNA, 55 bp, Artificial
  Synthetic oligonucleotide
gaatatggcagtcgataagatcgacgaacggagccagagcaaaggtggcgtgaca

SEQ ID NO: 533620 - DNA, 55 bp, Artificial
  Synthetic oligonucleotide
gacctaatggacaaaggggtacttttaaagaagctagcatacgaggacgaaccgc

SEQ ID NO: 533621 - DNA, 55 bp, Artificial
  Synthetic oligonucleotide
gagagagtagcattaagagaacacgaacgtcgcatagggcgaatccttgaaccac

SEQ ID NO: 533622 - DNA, 55 bp, Artificial
  Synthetic oligonucleotide
gatcacaaccgacccaacagattctgattgcatagagcgagtgattcaaaatgcg

SEQ ID NO: 533623 - DNA, 55 bp, Artificial
  Synthetic oligonucleotide
gatctaaacggaaatacgcacactaacgccgtggttagccctaaagatgtgagcg

SEQ ID NO: 533624 - DNA, 55 bp, Artificial
  Synthetic oligonucleotide
gcagcattacaattagcagcgttacctagcacacctcgaaataagagtgatcagg

SEQ ID NO: 533625 - DNA, 55 bp, Artificial
  Synthetic oligonucleotide
gcagtatcacagagcaactgagacaagccgcagattgcgcaccactgtggagaag

SEQ ID NO: 533626 - DNA, 55 bp, Artificial
  Synthetic oligonucleotide
ttgactttcaggcactatctaagatcgacaaagatgaactgtttatggagctgta

SEQ ID NO: 533627 - DNA, 55 bp, Artificial
  Synthetic oligonucleotide
ttcatatagggcggcgctaaagatgaagactgacttcaaaatgacgaaggagcaa

SEQ ID NO: 533628 - DNA, 55 bp, Artificial
  Synthetic oligonucleotide
tctgagttactgcattctctactgtggttacagcttcctcagcaatctggacagc

SEQ ID NO: 533629 - DNA, 55 bp, Artificial
  Synthetic oligonucleotide
tatcaaatcagttatgatcctgaccaaaacgagggtgtttacgcacttagtgtcg

SEQ ID NO: 533630 - DNA, 55 bp, Artificial
  Synthetic oligonucleotide
gtgatatagtcttgttctaaatcgatactgtcaaacttgtctcggatcaattcgg

SEQ ID NO: 533631 - DNA, 55 bp, Artificial
  Synthetic oligonucleotide
gtcgcgtacaggttgataacctcatgtgatataaatacttccgtccgtgtgaagg

SEQ ID NO: 533632 - DNA, 55 bp, Artificial
  Synthetic oligonucleotide
gtacctgcaaccgaggatacagaagctacctatatagatggctatcacgtagacg

SEQ ID NO: 533633 - DNA, 55 bp, Artificial
  Synthetic oligonucleotide
ggttccattctcttacgaagagagaaagatcaaatggttagacagcaagatacgg

SEQ ID NO: 533634 - DNA, 55 bp, Artificial
  Synthetic oligonucleotide
ggcgcagcacttaatgcagtaccaatcgaaaactgcgtagaaagcgtagggcagg

SEQ ID NO: 533635 - DNA, 55 bp, Artificial
  Synthetic oligonucleotide
ggaggaacgtattcttggcacgtagaccaacacccaagaccagttcggggcaacg

SEQ ID NO: 533636 - DNA, 55 bp, Artificial
  Synthetic oligonucleotide
gctgcgtgttgaattgcgtgggttaatcccatgacacccttcgaatacatagcag

SEQ ID NO: 533637 - DNA, 55 bp, Artificial
  Synthetic oligonucleotide
gcggtgcaattgttcccgtcactaacgagttatacgctcaagttgaggagtggct

SEQ ID NO: 533638 - DNA, 55 bp, Artificial
  Synthetic oligonucleotide
gcggtcgttttaatgccgtatagcaccatacgttgtacacaagcgcaatatcttg

SEQ ID NO: 533639 - DNA, 55 bp, Artificial
  Synthetic oligonucleotide
gcgcccgtacaatgcgtttgattctggcacgttctggggtaagtggatcagacga

SEQ ID NO: 533640 - DNA, 55 bp, Artificial
  Synthetic oligonucleotide
gccttaactggttactggtcgcacgaaatacttacagaggaatggggcgacgtag

SEQ ID NO: 533641 - DNA, 55 bp, Artificial
  Synthetic oligonucleotide
gcctagtccaccacttacatacgtcttcgtgacaacttccgagaacacgttgagg

SEQ ID NO: 533642 - DNA, 55 bp, Artificial
  Synthetic oligonucleotide
gccaatctgctatgtacaagaattcattgcagagaaggagacatacgtgccgagg

SEQ ID NO: 533643 - DNA, 55 bp, Artificial
  Synthetic oligonucleotide
aaacaaccaaagccttttcagtcttgttactctttacagtgtacgtctgtccgtc

SEQ ID NO: 533644 - DNA, 55 bp, Artificial
  Synthetic oligonucleotide
aagttcagagaattacatgaggaaacctttccttaagtgggcaggcaataagtat

SEQ ID NO: 533645 - DNA, 55 bp, Artificial
  Synthetic oligonucleotide
accgccaagcctatactggaaaacaaaacgcttttcgacggcattggtagaatgc

SEQ ID NO: 533646 - DNA, 55 bp, Artificial
  Synthetic oligonucleotide
accttgagcacttggaggattcgatctttgatggtcgtcgcgtagcattgggtgc

SEQ ID NO: 533647 - DNA, 55 bp, Artificial
  Synthetic oligonucleotide
agtaccattactctcatcggcaactcgccaaggatagaaggcttgtagtgccaag

SEQ ID NO: 533648 - DNA, 55 bp, Artificial
  Synthetic oligonucleotide
ataaaggatagctgcttctgtgctaggttagatgtagcagagatatacagaacac

SEQ ID NO: 533649 - DNA, 55 bp, Artificial
  Synthetic oligonucleotide
attgaacttggagatattagcagacagtccactcatctgtgtaccaaagccaagc

SEQ ID NO: 533650 - DNA, 55 bp, Artificial
  Synthetic oligonucleotide
caaccatcacggggactatcggggtaagctgtacacgtttattagccttgatagg

SEQ ID NO: 533651 - DNA, 55 bp, Artificial
  Synthetic oligonucleotide
caaccgcctaaagacgtgctactcattgtctgcaaccttgcaacccttagagcag

SEQ ID NO: 533652 - DNA, 55 bp, Artificial
  Synthetic oligonucleotide
caacggactacctagcacagagcaaggctttatgcttaccgacatgggtaaccgt

SEQ ID NO: 533653 - DNA, 55 bp, Artificial
  Synthetic oligonucleotide
caataatcatgttgaggtcgaacctgtgacgcaagatggcactcgtttctacccc

SEQ ID NO: 533654 - DNA, 55 bp, Artificial
  Synthetic oligonucleotide
caccaatagtcgtgtagccatcgctgatatctactgcccagccaccacgttctgt

SEQ ID NO: 533655 - DNA, 55 bp, Artificial
  Synthetic oligonucleotide
caccgaggttgcttcctgataatattttatcgcagaattgagggtcttcggaccc

SEQ ID NO: 533656 - DNA, 55 bp, Artificial
  Synthetic oligonucleotide
cacgatagagcatcaactagatttgggtagtgatgcggtttcggttgtagagagc

SEQ ID NO: 533657 - DNA, 55 bp, Artificial
  Synthetic oligonucleotide
cacttcagagttgtgctgctggtacaatgtggacagactatgaaattactccact

SEQ ID NO: 533658 - DNA, 55 bp, Artificial
  Synthetic oligonucleotide
cagcatagtgcagttaagcaatgacgtgctgcgctattcagatttacagcttggg

SEQ ID NO: 533659 - DNA, 55 bp, Artificial
  Synthetic oligonucleotide
cgctctttgcaatgcctttggttatcgtgaccttaatgactgtatgtcatcgatg

SEQ ID NO: 533660 - DNA, 55 bp, Artificial
  Synthetic oligonucleotide
cagcgcacaggtaacgtctaataagcccgtttctaatattgtaaccaatacctta

SEQ ID NO: 533661 - DNA, 55 bp, Artificial
  Synthetic oligonucleotide
caggcacggtcttgcgtgatttgttgattaataacttagtgccacagctgggcgc

SEQ ID NO: 533662 - DNA, 55 bp, Artificial
  Synthetic oligonucleotide
caggggcttaaatgacttactctttcgcagtttcaacattggcagacgcagcaaa

SEQ ID NO: 533663 - DNA, 55 bp, Artificial
  Synthetic oligonucleotide
ccaagtcataaccacgctaggatatagcgggtataatttaggagcgaaaccgata

SEQ ID NO: 533664 - DNA, 55 bp, Artificial
  Synthetic oligonucleotide
ccacgatcaaaagagactggtagattcataactctaaagtcgttcgggtttgcta

SEQ ID NO: 533665 - DNA, 55 bp, Artificial
  Synthetic oligonucleotide
ccatagcattaggagtactaccatccaaagacagagtgttatcgaaagcatccct

SEQ ID NO: 533666 - DNA, 55 bp, Artificial
  Synthetic oligonucleotide
ccatatcaaagacggctactggcaagatgaagtactcgcttaccgtactggtaag

SEQ ID NO: 533667 - DNA, 55 bp, Artificial
  Synthetic oligonucleotide
cccgccatctacggtggtaatggagtgacgacttacggatctttaacgtggttcg

SEQ ID NO: 533668 - DNA, 55 bp, Artificial
  Synthetic oligonucleotide
ccgcattgattcatttgagcctaaagatcactgggatggaccgtatcacggcttg

SEQ ID NO: 533669 - DNA, 55 bp, Artificial
  Synthetic oligonucleotide
cgcgttttgattttaacgcaccgatctgaactgttaacgcaagcaggtggaacgc

SEQ ID NO: 533670 - DNA, 55 bp, Artificial
  Synthetic oligonucleotide
cctattcaatactttatactggactttattgatccagtattgcaagcagctgggg

SEQ ID NO: 533671 - DNA, 55 bp, Artificial
  Synthetic oligonucleotide
cgactgacggccattacatcttggtttccaatgcagcaacctctgccacggccac

SEQ ID NO: 533672 - DNA, 54 bp, Artificial
  Synthetic oligonucleotide
cgcctgcgcttttagaatacgcaaaggtagcggggcagcttggtgtaaagggta

SEQ ID NO: 533673 - DNA, 54 bp, Artificial
  Synthetic oligonucleotide
acgcaatcagcaattgacgtataccatatatcatgtagcaagattccccgagat

SEQ ID NO: 533674 - DNA, 54 bp, Artificial
  Synthetic oligonucleotide
cgatgaatggtttgaaaacgattatattcatggaacgcctgacgtggttttgcc

SEQ ID NO: 533675 - DNA, 52 bp, Artificial
  Synthetic oligonucleotide
ggtcccttagaggaaagtacatatgactacagcacaaaagttttcgtcttgt

SEQ ID NO: 533676 - DNA, 51 bp, Artificial
  Synthetic oligonucleotide
tacctataccgctttattagacgtaagcgcaagcgatagcagacttaaaat

SEQ ID NO: 533677 - DNA, 51 bp, Artificial
  Synthetic oligonucleotide
atctagactgtcatctacacgccagattcagttgtctcaagacgttactgg

SEQ ID NO: 533678 - DNA, 51 bp, Artificial
  Synthetic oligonucleotide
gcaaaagggactagacttatttcacttagtcagccagaactctagcaaata

SEQ ID NO: 533679 - DNA, 50 bp, Artificial
  Synthetic oligonucleotide
tagtggtgtaaatcaaatagctggagacgtgcaaggctcacaaccattac

SEQ ID NO: 533680 - DNA, 50 bp, Artificial
  Synthetic oligonucleotide
accaaactactgcgaggaatgcgccaagcccctgcataattacagcagcg

SEQ ID NO: 533681 - DNA, 60 bp, Artificial
  Synthetic oligonucleotide
ggcttattctctagggacccttttgtgtcccggagtaccggttacgtatacgttccttgt

SEQ ID NO: 533682 - DNA, 60 bp, Artificial
  Synthetic oligonucleotide
ggcccgtgaatggtacactgttacagacgtgcccacagtgtctgagcgcatttcaggcct

SEQ ID NO: 533683 - DNA, 60 bp, Artificial
  Synthetic oligonucleotide
ggaccgtaagcaggcgcagacactaatgaatgagtgtgactgacaactaaaacttaacga

SEQ ID NO: 533684 - DNA, 60 bp, Artificial
  Synthetic oligonucleotide
gcggctgatgggtgcttttacgtgaaggcagatggcagagcactcgcagtgtacactgtg

SEQ ID NO: 533685 - DNA, 60 bp, Artificial
  Synthetic oligonucleotide
gccgacaaccaaggcactaagcgcattggagatatgcgctggaccaacggcttgagtagt

SEQ ID NO: 533686 - DNA, 60 bp, Artificial
  Synthetic oligonucleotide
gcccacgactacaaactagcaaccacgatcttggcttcgacctatgacaagggtaggaag

SEQ ID NO: 533687 - DNA, 60 bp, Artificial
  Synthetic oligonucleotide
gcacgatgtcgcaatctgacgtcgctgacaacaacgactgcagaggctttgcattcggcg

SEQ ID NO: 533688 - DNA, 60 bp, Artificial
  Synthetic oligonucleotide
gataaacttagacttacactgtgtaagtttgtcttctacttgtgacatgtctcaagtagt

SEQ ID NO: 533689 - DNA, 60 bp, Artificial
  Synthetic oligonucleotide
gagaggagtatgcagtgttctcattctctgaccaaagtctcagagcatcatacatcaggt

SEQ ID NO: 533690 - DNA, 60 bp, Artificial
  Synthetic oligonucleotide
ctgtggcttgtttgccggaggattctcggcgttttgttaagcggtgtttagaccacttag

SEQ ID NO: 533691 - DNA, 60 bp, Artificial
  Synthetic oligonucleotide
ctgcgattggcgtagtgggacatggctttacaaatctgttcgcatactgtgcaagtactg

SEQ ID NO: 533692 - DNA, 60 bp, Artificial
  Synthetic oligonucleotide
ctctgtcgcttctggaaactctgcgttttcaacattcgacctttggacgccccagttttc

SEQ ID NO: 533693 - DNA, 60 bp, Artificial
  Synthetic oligonucleotide
cgcagttagccgggagatgaaagctatgaaggctctcgcggctactagaagcacgatgtc

SEQ ID NO: 533694 - DNA, 60 bp, Artificial
  Synthetic oligonucleotide
cgagtgtttatgcaagttgtagccatgcagaatgccggagtgtgtgcacgttggtccgtg

SEQ ID NO: 533695 - DNA, 60 bp, Artificial
  Synthetic oligonucleotide
cctgtacaatggacgcctcaacagatggcttagctatgtggatagctacgttggcagctc

SEQ ID NO: 533696 - DNA, 60 bp, Artificial
  Synthetic oligonucleotide
ccgtatctgagaatgtgtcactgtctaaagtgacatccgtacgtagaaatcatcatcttt

SEQ ID NO: 533697 - DNA, 60 bp, Artificial
  Synthetic oligonucleotide
ccggtatacgatcgtgacccctcgctgcgcgcaccactgcgattcgctatgggcagcact

SEQ ID NO: 533698 - DNA, 60 bp, Artificial
  Synthetic oligonucleotide
ccatgcagaggatcttggagtacaagaacggtaaagtgtactggccgcggatgctgtgcg

SEQ ID NO: 533699 - DNA, 60 bp, Artificial
  Synthetic oligonucleotide
ccagttggatgcggagctatacgaagagggcatgcgtgacggctggatcacacaacacgg

SEQ ID NO: 533700 - DNA, 60 bp, Artificial
  Synthetic oligonucleotide
tttttgttgtcgacagggtctggaaaattgtgatggcgatgagagcgcaactaatgctta

SEQ ID NO: 533701 - DNA, 60 bp, Artificial
  Synthetic oligonucleotide
ttctgaatcgacttcgccacgtaagccccataagccggatcggggagcccgacgtgtttc

SEQ ID NO: 533702 - DNA, 60 bp, Artificial
  Synthetic oligonucleotide
ttcacctagcttacttcgaggtcgtgggtgtctgtcccttttgcgaaagggacactcttg

SEQ ID NO: 533703 - DNA, 60 bp, Artificial
  Synthetic oligonucleotide
ttatacagcgttagcgtcaggttacgtcccagcaccccgccactcatataattcgattgt

SEQ ID NO: 533704 - DNA, 60 bp, Artificial
  Synthetic oligonucleotide
ttaccttcctcgtcgaataacggcaccggtcggtaattcactaactttcaactcgttgaa

SEQ ID NO: 533705 - DNA, 60 bp, Artificial
  Synthetic oligonucleotide
tggtcctactcgctacacatatgcgaatggggttgatgaagttctcatacattttggtaa

SEQ ID NO: 533706 - DNA, 60 bp, Artificial
  Synthetic oligonucleotide
tgggccagcgacgaaggagtaacgatggactgggcagaaagtgataccgaggccactaca

SEQ ID NO: 533707 - DNA, 60 bp, Artificial
  Synthetic oligonucleotide
tggacgcattcacaggcccacactgcgcgtactactttagtctggcaaatgcggctgatg

SEQ ID NO: 533708 - DNA, 60 bp, Artificial
  Synthetic oligonucleotide
tgccactatggatgcaacgccagaccgagagtcaggtgaagtgaccgccgcggctttgcg

SEQ ID NO: 533709 - DNA, 60 bp, Artificial
  Synthetic oligonucleotide
tgagacagcaccacgtaccgagattcggtacataccgtcgaggacggtataggggcaaag

SEQ ID NO: 533710 - DNA, 60 bp, Artificial
  Synthetic oligonucleotide
tctgagacagagcatggacgacacatgcaccagaggtggtcgtgctgacatgccaggtgt

SEQ ID NO: 533711 - DNA, 60 bp, Artificial
  Synthetic oligonucleotide
tcccactctcggagcattggctaggtccatacactgggcagacaagctgagctggtttga

SEQ ID NO: 533712 - DNA, 60 bp, Artificial
  Synthetic oligonucleotide
tccagaacatggtcgcatgcgccaagaatgcacctcagatgacagtcaacgcaggcaggc

SEQ ID NO: 533713 - DNA, 60 bp, Artificial
  Synthetic oligonucleotide
tacatcaggtacgatacatgcgagaacaagctacacaacgtggtggcagcgcacgcgggg

SEQ ID NO: 533714 - DNA, 60 bp, Artificial
  Synthetic oligonucleotide
gttgcgtcctcttgaagttgaggagtttaccatttcctcgggtgattctgtggcggagtc

SEQ ID NO: 533715 - DNA, 60 bp, Artificial
  Synthetic oligonucleotide
gtgtggcgcggtccctctgttatacggaggcggaatcccgatgcaactgggtgataacac

SEQ ID NO: 533716 - DNA, 60 bp, Artificial
  Synthetic oligonucleotide
gtgtacatcacaagctgtattccaactgtggtcaaggagaagctagctgacgatttagtc

SEQ ID NO: 533717 - DNA, 60 bp, Artificial
  Synthetic oligonucleotide
gtcccggagtaccggttacgtttacgttccctgtgtggttcgcgtattcgttccgcatgt

SEQ ID NO: 533718 - DNA, 60 bp, Artificial
  Synthetic oligonucleotide
gggtctgcattcagccgtgatggcaaacttggagggactcaagcgaccaaatggctactc

SEQ ID NO: 533719 - DNA, 60 bp, Artificial
  Synthetic oligonucleotide
ggggaccggatgactatcatcagaccatcaacgagtgtcgccagcagtgctatccacttg

SEQ ID NO: 533720 - DNA, 60 bp, Artificial
  Synthetic oligonucleotide
agcggaagaatagtgggtccgcgtcgacttcaaatagcggtaaaatgccggtacgggata

SEQ ID NO: 533721 - DNA, 60 bp, Artificial
  Synthetic oligonucleotide
aggttgtgtcaacccagtcacagatatgcaccatttagcactcgccaagcaacctatgcg

SEQ ID NO: 533722 - DNA, 60 bp, Artificial
  Synthetic oligonucleotide
agtattcgatccccacttttgggaaccgctttgttactatacattgtttcaagatatgtt

SEQ ID NO: 533723 - DNA, 60 bp, Artificial
  Synthetic oligonucleotide
agatatgtctgcactggaggtgtcccgtttcactgatgtgcacaacgttgctcaagacct

SEQ ID NO: 533724 - DNA, 60 bp, Artificial
  Synthetic oligonucleotide
atatctgtcagaagaagggacgaagcacggtatagaggccattatagatacgaacgggag

SEQ ID NO: 533725 - DNA, 60 bp, Artificial
  Synthetic oligonucleotide
atcgccggttggctagatgagcccactgatttcgcacttaagggcatgatgacagcccac

SEQ ID NO: 533726 - DNA, 60 bp, Artificial
  Synthetic oligonucleotide
agagccccactagcactagatgagcgcatcgctatgggcatattgtgcaattgggacctg

SEQ ID NO: 533727 - DNA, 60 bp, Artificial
  Synthetic oligonucleotide
atgaccaccacataaggccggcaccataagcaggcacagacacgaagccaggaccgtaag

SEQ ID NO: 533728 - DNA, 60 bp, Artificial
  Synthetic oligonucleotide
agaaatacagcgttatggtagtgaattctaggtatcctacgatgaaactacttgaggcgg

SEQ ID NO: 533729 - DNA, 60 bp, Artificial
  Synthetic oligonucleotide
actcagacccaacaacaaggcagctgagcggacatgagcagagactagtggctaagtcat

SEQ ID NO: 533730 - DNA, 60 bp, Artificial
  Synthetic oligonucleotide
caaatgtgaattcgccggcagttgcgttcttccaacagactccgggcgtgaagcaggcag

SEQ ID NO: 533731 - DNA, 60 bp, Artificial
  Synthetic oligonucleotide
caacggacgatcagtctaaggcatatgccgtggacgccaagcaagcctactatgcaattg

SEQ ID NO: 533732 - DNA, 60 bp, Artificial
  Synthetic oligonucleotide
actacgttgtattacactcatcgagatggcacctaaggcactcccgaagaatgttcctaa

SEQ ID NO: 533733 - DNA, 60 bp, Artificial
  Synthetic oligonucleotide
aaaggtgctggctctactatcacaactaacgctgaggcagcgggagtcgttgacggcagt

SEQ ID NO: 533734 - DNA, 60 bp, Artificial
  Synthetic oligonucleotide
ccactttggcgagcaattcgatagagtgacgcaggtacacagctcatggctaggtaaaat

SEQ ID NO: 533735 - DNA, 60 bp, Artificial
  Synthetic oligonucleotide
catcatctttacgtgcggccacccgccttacctgaagaccacggggtcttttctgaatcg

SEQ ID NO: 533736 - DNA, 60 bp, Artificial
  Synthetic oligonucleotide
cagtgagcgcacctgtcacttcgccatcacgactattggtcatatggtggcgcagacagc

SEQ ID NO: 533737 - DNA, 60 bp, Artificial; identical to SEQ ID NO: 347923
  Synthetic oligonucleotide

SEQ ID NO: 533738 - DNA, 60 bp, Artificial
  Synthetic oligonucleotide
acaaagtgatccggagacacactgcgattgcgagagcagactcagcgcgcacagccaaca

SEQ ID NO: 533739 - DNA, 60 bp, Artificial
  Synthetic oligonucleotide
cacgaatacacccacaacagaccacatggattccacagacaacatagagcacgacacata

SEQ ID NO: 533740 - DNA, 60 bp, Artificial
  Synthetic oligonucleotide
accagaagggcatggagactacacatgtatgacggtgctatctttgaccaccgcatcacc

SEQ ID NO: 533741 - DNA, 60 bp, Artificial
  Synthetic oligonucleotide
accatgactgactactacagtgacttcagttactgggcgatacccttgcacatcacgggc

SEQ ID NO: 533742 - DNA, 59 bp, Artificial
  Synthetic oligonucleotide
atcaatgtgcgcgattacgtagttgatggctggtatgacccggcgcatgtaacatactg

SEQ ID NO: 533743 - DNA, 58 bp, Artificial
  Synthetic oligonucleotide
ctacccaagtatgtgcctgacgatgtagacacggaagacgacatgtactaagcaacat

SEQ ID NO: 533744 - DNA, 57 bp, Artificial
  Synthetic oligonucleotide
ggtatagcgttatggtggtgaattctaggtatcctacgatgaagctacttgaggcag

SEQ ID NO: 533745 - DNA, 57 bp, Artificial
  Synthetic oligonucleotide
gtccagggagtgcaattttgggacatgaacgacgcagaaggctcagtttcggtacat

SEQ ID NO: 533746 - DNA, 57 bp, Artificial
  Synthetic oligonucleotide
aagcaggcagcgcgagacattgtgcaggctctgggccttacggagcattacaataga

SEQ ID NO: 533747 - DNA, 57 bp, Artificial
  Synthetic oligonucleotide
gtgagaagctcgataagcagacactgaagcagcactaacaggacagagacatgacga

SEQ ID NO: 533748 - DNA, 57 bp, Artificial
  Synthetic oligonucleotide
actgacgaattgattacccaagggctcagcaacgttggactcctgcctttcgagcac

SEQ ID NO: 533749 - DNA, 57 bp, Artificial
  Synthetic oligonucleotide
gaatgtcacttatgtcacccgcccggacccaatgtcatgggcgcaggacaattcggc

SEQ ID NO: 533750 - DNA, 56 bp, Artificial; identical to SEQ ID NO: 318680
  Synthetic oligonucleotide

SEQ ID NO: 533751 - DNA, 55 bp, Artificial
  Synthetic oligonucleotide
gtgagaagcacggcacgaaagcagatgctgcggagcgcgggtgcaacagacacga

SEQ ID NO: 533752 - DNA, 55 bp, Artificial
  Synthetic oligonucleotide
gtgacgcaggagcagacattcagacgacgagtcgagcgcgacagcgggtttcagc

SEQ ID NO: 533753 - DNA, 55 bp, Artificial
  Synthetic oligonucleotide
gtcgtctgagttattctcgcgtatcaggttcatcgtaaccacggctaacgtcgct

SEQ ID NO: 533754 - DNA, 55 bp, Artificial
  Synthetic oligonucleotide
ttcgtcagacttgttctcccgtatcaggttcatcgtaaccacggctaatgtcgct

SEQ ID NO: 533755 - DNA, 55 bp, Artificial
  Synthetic oligonucleotide
agaacgaagtacgtgttaactatatgattcatccaacttgggtcatatacagcgt

SEQ ID NO: 533756 - DNA, 55 bp, Artificial
  Synthetic oligonucleotide
ggtggtgccgtcacaggtaccatcgtacacagagctcttaacaaccgcggggaga

SEQ ID NO: 533757 - DNA, 55 bp, Artificial
  Synthetic oligonucleotide
ggtctgaccctggaggacctacagaaggtgggtggtgtgacaggcggaggcacaa

SEQ ID NO: 533758 - DNA, 55 bp, Artificial
  Synthetic oligonucleotide
ggtcaaggccctaaaatttgaacctgggaaattgcgttccattctgaatactagc

SEQ ID NO: 533759 - DNA, 55 bp, Artificial
  Synthetic oligonucleotide
aacagcggaaacgcaattcgatagatatacacgctattgatcatgagaatattcg

SEQ ID NO: 533760 - DNA, 55 bp, Artificial
  Synthetic oligonucleotide
acggctatcacagtagaaccagagcaggcgggtgtgagctcaagtgcgatggtga

SEQ ID NO: 533761 - DNA, 55 bp, Artificial
  Synthetic oligonucleotide
ccagaggcaatcgaattgtgccgcgttgggaggcagaccaatggaatcgttggag

SEQ ID NO: 533762 - DNA, 55 bp, Artificial
  Synthetic oligonucleotide
cattcttaacctatggacttccaatcataataacgctatggcgttccacgttggg

SEQ ID NO: 533763 - DNA, 55 bp, Artificial
  Synthetic oligonucleotide
cctgggctgttggttccacaaatccgagcatatggcgatttggtgtatgggttag

SEQ ID NO: 533764 - DNA, 55 bp, Artificial
  Synthetic oligonucleotide
cggtgacaagctaatcgtccaggtactgggtgggctgttctcagggcatagactg

SEQ ID NO: 533765 - DNA, 55 bp, Artificial
  Synthetic oligonucleotide
ctcaaggagctaagaaagtagtcgcaggccttaccgacagtatgtcggctagtac

SEQ ID NO: 533766 - DNA, 55 bp, Artificial
  Synthetic oligonucleotide
ctgccagtgcaaagtacgatcacgcactatgccacaccagcagtcggcactgagc

SEQ ID NO: 533767 - DNA, 55 bp, Artificial
  Synthetic oligonucleotide
ctttcggattctggtttggcagggcttactgccctgaaggaccaacaagtttccg

SEQ ID NO: 533768 - DNA, 55 bp, Artificial
  Synthetic oligonucleotide
gaagcaccggctgagttgaagtccagcacggactccatcaagcagccaccatatg

SEQ ID NO: 533769 - DNA, 55 bp, Artificial
  Synthetic oligonucleotide
gacaacgtacatgggcagcctagatgtcgagtcgacacacggagtagtgtcagac

SEQ ID NO: 533770 - DNA, 55 bp, Artificial
  Synthetic oligonucleotide
gcaaaggtgagctatatgctcgaaatagtcgtaactaacacacagccactacctg

SEQ ID NO: 533771 - DNA, 55 bp, Artificial
  Synthetic oligonucleotide
gcaaccacgatcttggcttcgacctatgacaagggtaggaagacaggtctgaccc

SEQ ID NO: 533772 - DNA, 55 bp, Artificial
  Synthetic oligonucleotide
gggcggtgtgggtgttacagagacaactaatggtatgttgagtgcagaggaatca

SEQ ID NO: 533773 - DNA, 55 bp, Artificial
  Synthetic oligonucleotide
gggagtggtataaaatgagcggtcgcgctcacttgaattaatcttttacgtttac

SEQ ID NO: 533774 - DNA, 55 bp, Artificial
  Synthetic oligonucleotide
ggccacccgccttacctgaagaccacggggtcttttctgaatcgacttcgccacg

SEQ ID NO: 533775 - DNA, 55 bp, Artificial
  Synthetic oligonucleotide
ataaccgtcggacgagttaaacaggcgtttaattcggtactcacgccctcgctat

SEQ ID NO: 533776 - DNA, 55 bp, Artificial
  Synthetic oligonucleotide
gctcagctgagttacgaggcaaaataccctgtcgaagaagcgcaagttccggctg

SEQ ID NO: 533777 - DNA, 55 bp, Artificial
  Synthetic oligonucleotide
gcctgcttgaagacgtcaatcgtcacctgtactatccagcgactgaggaatacgg

SEQ ID NO: 533778 - DNA, 55 bp, Artificial
  Synthetic oligonucleotide
gccgttgacagtggacataaactgggagtggtctcaaacagacatgaatatagct

SEQ ID NO: 533779 - DNA, 54 bp, Artificial
  Synthetic oligonucleotide
atagtggagttcctggaccaatttggccaacagtatgaagcactgatgacccca

SEQ ID NO: 533780 - DNA, 53 bp, Artificial
  Synthetic oligonucleotide
acgcaggtaacgactttgaagaagtcttcatcacgacagtttcactgttacca

SEQ ID NO: 533781 - DNA, 52 bp, Artificial
  Synthetic oligonucleotide
acgatgaagggtgcttcaggacttaggcgtttgggtttcagagctgttgtac

SEQ ID NO: 533782 - DNA, 52 bp, Artificial
  Synthetic oligonucleotide
ctactcgcagcttttgcgttcactggtgtggaagacttcatgcctaatgact

SEQ ID NO: 533783 - DNA, 52 bp, Artificial
  Synthetic oligonucleotide
agcacgagaagaagttcgttgctgacaatggctggctagacacggcacacag

SEQ ID NO: 533784 - DNA, 51 bp, Artificial
  Synthetic oligonucleotide
gctcgtcatgtcgcggctcaagaatcggtctctgttggtgatcaccaccaa

SEQ ID NO: 533785 - DNA, 51 bp, Artificial
  Synthetic oligonucleotide
gagaatacacttaccaagagtgcgcactcgctgacgcgaacgctgtgcttc

SEQ ID NO: 533786 - DNA, 51 bp, Artificial
  Synthetic oligonucleotide
ctatggtgactctcagtgtacccttggcgggtgttttcgctgtgcgccacg

SEQ ID NO: 533787 - DNA, 51 bp, Artificial
  Synthetic oligonucleotide
atgagcgagcacgaactatgctcgcagatttcttacttaagaccgagtact

SEQ ID NO: 533788 - DNA, 51 bp, Artificial
  Synthetic oligonucleotide
aatcgtaagagaacttctttccatccgcctgtatgggcgggataataagtt

SEQ ID NO: 533789 - DNA, 51 bp, Artificial
  Synthetic oligonucleotide
ccaaatgtttcctgctaggcgtagctgagttcttacgcatatcgcataaga

SEQ ID NO: 533790 - DNA, 50 bp, Artificial
  Synthetic oligonucleotide
gcgatagtgagtgccctgcaggaaaagttacctggtttcataataagaga

SEQ ID NO: 533791 - DNA, 50 bp, Artificial
  Synthetic oligonucleotide
tgagcactccgtattctactgcagagccgaacccaactatggaattttct

SEQ ID NO: 533792 - DNA, 60 bp, Artificial
  Synthetic oligonucleotide
ctggtgactcatactcggcagggacctcggcaaatctccagtctgcatactttgagagct

SEQ ID NO: 533793 - DNA, 60 bp, Artificial
  Synthetic oligonucleotide
ctgtcaacagtcccaattttggacttactgcgcaacagacggatttcgacctctactatt

SEQ ID NO: 533794 - DNA, 60 bp, Artificial
  Synthetic oligonucleotide
ctgtttcatggtgcccacggtgaatcactgaatgaggccctgaatctgatctacaacacc

SEQ ID NO: 533795 - DNA, 60 bp, Artificial
  Synthetic oligonucleotide
cttgtccgtgacagtgaatgtgtcttgtgcgcccatccaaaacttccacataggaaaaaa

SEQ ID NO: 533796 - DNA, 60 bp, Artificial
  Synthetic oligonucleotide
gaaactgtatgctgaccacccaaccactccttgaatgctgggaaaaacttaattcctcct

SEQ ID NO: 533797 - DNA, 60 bp, Artificial
  Synthetic oligonucleotide
ttccagggttctgttggcgtcgattggaatactgtcttcaatgcgaaggttgataacaac

SEQ ID NO: 533798 - DNA, 60 bp, Artificial
  Synthetic oligonucleotide
ttcatgcgtggaccggcaatgaggatgcctcgtatttctactgctgcactcaacacatct

SEQ ID NO: 533799 - DNA, 60 bp, Artificial
  Synthetic oligonucleotide
gacgtgttaagacgctttcaatgtctcgctgtaagaattggtgttttacaagtttcaatg

SEQ ID NO: 533800 - DNA, 60 bp, Artificial
  Synthetic oligonucleotide
gactctggagtctcttcagaagtttaggtctgatgatttagatggaagttgcggtgtttg

SEQ ID NO: 533801 - DNA, 60 bp, Artificial
  Synthetic oligonucleotide
gagtaaaacggggggactccatctcgcggattcgacggggagtattgggtttcgacgtat

SEQ ID NO: 533802 - DNA, 60 bp, Artificial
  Synthetic oligonucleotide
ttaggttgttagcagccgagtctggtatgcgtgcggtagctgctacggctaattatcagc

SEQ ID NO: 533803 - DNA, 60 bp, Artificial
  Synthetic oligonucleotide
ttacaactaaacctttgccattatatttgcaagaactctttaagtctgataattttcgtg

SEQ ID NO: 533804 - DNA, 60 bp, Artificial
  Synthetic oligonucleotide
gatgtgaacataggaaaactataagtagagtccgataaacggtctaaccgcaatgtcgac

SEQ ID NO: 533805 - DNA, 60 bp, Artificial
  Synthetic oligonucleotide
gatgttaggcgaaagatatcatattgagatgcgtagaggtaccgcagcggaagttgatgc

SEQ ID NO: 533806 - DNA, 60 bp, Artificial
  Synthetic oligonucleotide
gcaatacctgtgcgggtatgtcactaaaaagatgactaaggcggaggacgagcggttaga

SEQ ID NO: 533807 - DNA, 60 bp, Artificial
  Synthetic oligonucleotide
gcgaccgcttgggctcctgtggatgctcctaattggtcggtggtctgtactggtcttagg

SEQ ID NO: 533808 - DNA, 60 bp, Artificial
  Synthetic oligonucleotide
gcggagtatcgacatcatcagtcgtacgtcacgggtgagtttcgtgacgtgctgaacgac

SEQ ID NO: 533809 - DNA, 60 bp, Artificial
  Synthetic oligonucleotide
ttaagtattataggatgtatgctatgtctgtattacttatgcctaggatgaatgctattg

SEQ ID NO: 533810 - DNA, 60 bp, Artificial
  Synthetic oligonucleotide
ggaaagcaagaatatcatcgagggcataatcgcaacggctgtaggtaatggctatatggc

SEQ ID NO: 533811 - DNA, 60 bp, Artificial
  Synthetic oligonucleotide
ggaacgtaaacgactggcaggtgtcaagaaactcctcggtagtgtacaccttgaggcgtc

SEQ ID NO: 533812 - DNA, 60 bp, Artificial
  Synthetic oligonucleotide
cgagaacacgtcacccatccgcaccgtgtcaaccgcgggcgcgcgctctcggtttaccag

SEQ ID NO: 533813 - DNA, 60 bp, Artificial
  Synthetic oligonucleotide
cgatgacgcagttccccatcaaccaatccacgtctgcccctttgtctgcaagggggttag

SEQ ID NO: 533814 - DNA, 60 bp, Artificial
  Synthetic oligonucleotide
cgattactacaagaacacgggttttcgtcctaggtatcctatgcgctcaggtgctgagta

SEQ ID NO: 533815 - DNA, 60 bp, Artificial
  Synthetic oligonucleotide
cgattgtcggcggtgtgacgtatgctaggccacgttcccacaatgcccccgtaaaccacg

SEQ ID NO: 533816 - DNA, 60 bp, Artificial
  Synthetic oligonucleotide
cggggaacaagttatgtcggtatgtggttggatatgagatcggtgaatctggcacgcgac

SEQ ID NO: 533817 - DNA, 60 bp, Artificial
  Synthetic oligonucleotide
cggtatgggagactattacgtagtagatctgctagcgtcgaactcgagcgctgcagctga

SEQ ID NO: 533818 - DNA, 60 bp, Artificial
  Synthetic oligonucleotide
cggtgaatctggcacgcgacatttgcaaggttactgtgtattatcgcgtagtcaacggtt

SEQ ID NO: 533819 - DNA, 60 bp, Artificial
  Synthetic oligonucleotide
cggtgcctactgtcttatggctcgttggtctcgtcctagtgttgttggattgggtgctta

SEQ ID NO: 533820 - DNA, 60 bp, Artificial
  Synthetic oligonucleotide
cgtaagaatcaagctgatggtgctattgatacccagacctatacttttccaaacggtgtt

SEQ ID NO: 533821 - DNA, 60 bp, Artificial
  Synthetic oligonucleotide
cgtcagtggcagattgagatcaaggaacgggttgttgtcttcatcgaacgtaattaactt

SEQ ID NO: 533822 - DNA, 60 bp, Artificial
  Synthetic oligonucleotide
ttgactagttccaagaactttgtttccaagaacatcgagaaactctatcgggattgacct

SEQ ID NO: 533823 - DNA, 60 bp, Artificial
  Synthetic oligonucleotide
ctacccgtgagacggatggtatgccgtggctcgtcgacaaaagggaactctccgccaagt

SEQ ID NO: 533824 - DNA, 60 bp, Artificial
  Synthetic oligonucleotide
ctatctcgtaacgattgttgccatcgaaccatccggcatagctggtccgggaccgaggcc

SEQ ID NO: 533825 - DNA, 60 bp, Artificial
  Synthetic oligonucleotide
ctccagcagagacaggagcagatttccgactatcttcataacaaggatatggattggtct

SEQ ID NO: 533826 - DNA, 60 bp, Artificial
  Synthetic oligonucleotide
ctcgaagctggcgcgacgcggaaactcaaaagaaggagtccggtgatggaactcccccga

SEQ ID NO: 533827 - DNA, 60 bp, Artificial
  Synthetic oligonucleotide
ctcgaagctggcgcgacgcggttgtaaacacgccggtagtgctgtaaacagatgtgaaca

SEQ ID NO: 533828 - DNA, 60 bp, Artificial
  Synthetic oligonucleotide
ctcgtcagatgttcacttccggtcttaggcctctcggatggctgaacactacccagttcg

SEQ ID NO: 533829 - DNA, 60 bp, Artificial
  Synthetic oligonucleotide
ctctattacaggctgaaagtcacatggactattgagttcacggagccccgtagtctcatt

SEQ ID NO: 533830 - DNA, 60 bp, Artificial
  Synthetic oligonucleotide
ctgcaacgtccggaatatctcggaggcggcaagtcaacaatcgctttctcggaggtactg

SEQ ID NO: 533831 - DNA, 60 bp, Artificial
  Synthetic oligonucleotide
ctggacgatgttaagagtacccatcctggcatctatctccgttataaaaagactctggag

SEQ ID NO: 533832 - DNA, 60 bp, Artificial
  Synthetic oligonucleotide
taccgccggtgaattgaccgaggtaagccacgatcgcataaatggatctgcgcttgtatc

SEQ ID NO: 533833 - DNA, 60 bp, Artificial
  Synthetic oligonucleotide
tactacacggcagaggacaccccggcgaacgggtgggagaacaacgtcacgtacaacacg

SEQ ID NO: 533834 - DNA, 60 bp, Artificial
  Synthetic oligonucleotide
tggtgggatggttatttaggagaacctaatgttcttatatctgatgtagagcctgaccat

SEQ ID NO: 533835 - DNA, 60 bp, Artificial
  Synthetic oligonucleotide
tactggttcagcattaatacagaatattctaagtggaacaccttctggtacaacacagtg

SEQ ID NO: 533836 - DNA, 60 bp, Artificial
  Synthetic oligonucleotide
tagccgacggccaagactcacctacgagtggttctccagagcgtatgtgagattgctcgc

SEQ ID NO: 533837 - DNA, 60 bp, Artificial
  Synthetic oligonucleotide
tagccttgctagtgtatcctttggttcaggcgccgcaatgtctacactcgcctccggaat

SEQ ID NO: 533838 - DNA, 60 bp, Artificial
  Synthetic oligonucleotide
tagtattacccgcccaccttggaacaacggaacagaccggaacacgttggaacagaccgg

SEQ ID NO: 533839 - DNA, 60 bp, Artificial
  Synthetic oligonucleotide
tagtcgacgtcctccaatgactcatccaaacaaaataggcccccaaaataggcatgtctg

SEQ ID NO: 533840 - DNA, 60 bp, Artificial
  Synthetic oligonucleotide
tagttagatgaacccatgggcaatggtcggcatagccgcagcccagacggcaacggacat

SEQ ID NO: 533841 - DNA, 60 bp, Artificial
  Synthetic oligonucleotide
tatcggaaatatcgctgaggttagcggagctgaggctgtctctgttgttcctcgtcagat

SEQ ID NO: 533842 - DNA, 60 bp, Artificial
  Synthetic oligonucleotide
tcaacggttgtcctatgttactaagttattcgatggtgcccattgggaaggtgcaagagg

SEQ ID NO: 533843 - DNA, 60 bp, Artificial
  Synthetic oligonucleotide
tcaactcgtaagaatggcagacgcacagccaaacgacgccctacagttaagcgtgttatg

SEQ ID NO: 533844 - DNA, 60 bp, Artificial
  Synthetic oligonucleotide
tggattgatgcgaccgcttgggctcctgtggatgctcctaattggtcggtggtctgtact

SEQ ID NO: 533845 - DNA, 60 bp, Artificial
  Synthetic oligonucleotide
tcctcagcatttacgtaaatatttgccttgtggtgttgttaaatctcaagttacaactaa

SEQ ID NO: 533846 - DNA, 60 bp, Artificial
  Synthetic oligonucleotide
tgctgtctgtccgcctgcctcgctccactaactctatgggtgggatgaaggggtaagccc

SEQ ID NO: 533847 - DNA, 60 bp, Artificial
  Synthetic oligonucleotide
tcgattggaatgacttcatagtggcccctgtggacactcgtcgtgtggatctcaagtatg

SEQ ID NO: 533848 - DNA, 60 bp, Artificial
  Synthetic oligonucleotide
tctatgaaaattagacctgagaaaatctttgttacttctaattttcgcttatctgattgt

SEQ ID NO: 533849 - DNA, 60 bp, Artificial
  Synthetic oligonucleotide
tgcctcagtccggacttaccatgcagggtctttaccctatggttttctccgttctgaaca

SEQ ID NO: 533850 - DNA, 60 bp, Artificial
  Synthetic oligonucleotide
tcttgctttccgagattgaataatttttattctaagatgtgtattaaggaagtgactcag

SEQ ID NO: 533851 - DNA, 60 bp, Artificial
  Synthetic oligonucleotide
tgataacaaccgctgccgtctcctctcggacaaggtccgtcacctgcagtccggaaacga

SEQ ID NO: 533852 - DNA, 60 bp, Artificial
  Synthetic oligonucleotide
ggaggtactgcgtacgggcaatagcgatgacgaggtgactgaaggtgtcgtgggtgagat

SEQ ID NO: 533853 - DNA, 60 bp, Artificial
  Synthetic oligonucleotide
ggcgattgatgaagtcgtctccgagtatcgagaatttgaagttagaaagtcaagatttcg

SEQ ID NO: 533854 - DNA, 60 bp, Artificial
  Synthetic oligonucleotide
ggctacgttttcgacactcgctattctttccgcgacaagtatctctcagttcgtccgagg

SEQ ID NO: 533855 - DNA, 60 bp, Artificial
  Synthetic oligonucleotide
ggctgcagtacggggaacaagttatgtcggtatgtggttggatatgagatcggtgaatct

SEQ ID NO: 533856 - DNA, 60 bp, Artificial
  Synthetic oligonucleotide
gggcaggcttgggccgatcaggtggctaacaagtatttcgttcctgacgtgtggcaggag

SEQ ID NO: 533857 - DNA, 60 bp, Artificial
  Synthetic oligonucleotide
gggcggaggaagaggagctacaagactttcaagtcgtcaaaaagaaacctcgcaaagcta

SEQ ID NO: 533858 - DNA, 60 bp, Artificial
  Synthetic oligonucleotide
gtaaaccacgatttaccgacgtttcccgtctcgtcgtaccataccactacctgacggtcg

SEQ ID NO: 533859 - DNA, 60 bp, Artificial
  Synthetic oligonucleotide
gtacagatgagtaccgagggatctagcccacagggttttcccggttctcgaatctccgta

SEQ ID NO: 533860 - DNA, 60 bp, Artificial
  Synthetic oligonucleotide
gtaccggcccaaggccggtgggaccccccgatatgccccccagggggaggtagccgacgg

SEQ ID NO: 533861 - DNA, 60 bp, Artificial
  Synthetic oligonucleotide
gtactttgattgcgctggaggacatgattaatgtaaatgcagccaatgatattgtgctag

SEQ ID NO: 533862 - DNA, 60 bp, Artificial
  Synthetic oligonucleotide
gtattatggcaccgagggctatgcctaaggggttcataatttttgttgctctactgaccg

SEQ ID NO: 533863 - DNA, 60 bp, Artificial
  Synthetic oligonucleotide
gtccaagtatgtcttgtcctaactgtcacagcgacagcgttctcagtctctgtaatttat

SEQ ID NO: 533864 - DNA, 60 bp, Artificial
  Synthetic oligonucleotide
tgttggacatagcgtgttttctggcgagcaaatgttagataacatttgccaagggctttt

SEQ ID NO: 533865 - DNA, 60 bp, Artificial
  Synthetic oligonucleotide
gtcgagacatccaatggatgggtccgtgcccttatggatcaaactggcacgtcatttggt

SEQ ID NO: 533866 - DNA, 60 bp, Artificial
  Synthetic oligonucleotide
gtgagagttattggcatacaaattagattagctattagcggcgcagattctactaataat

SEQ ID NO: 533867 - DNA, 60 bp, Artificial
  Synthetic oligonucleotide
gttcaaggacttcagtaccgcgctcacctactctcccgatggagcaaggctcgtctacac

SEQ ID NO: 533868 - DNA, 60 bp, Artificial
  Synthetic oligonucleotide
gttcccctcccccccgtggtggtagattggctaggtgtaagtggattgatgcgaccgctt

SEQ ID NO: 533869 - DNA, 60 bp, Artificial
  Synthetic oligonucleotide
gttgacgtcatctgtatcgaatgataattggtccatgttgaatgcaccaccgaagtagaa

SEQ ID NO: 533870 - DNA, 60 bp, Artificial
  Synthetic oligonucleotide
taagccttaagttagttttgtctcatttgtgatgtataaacgttggtgttttacacttaa

SEQ ID NO: 533871 - DNA, 60 bp, Artificial
  Synthetic oligonucleotide
tgtgcttaaagctgacctgtctaatgatattgctcttgctctctccgagcttggtctcag

SEQ ID NO: 533872 - DNA, 60 bp, Artificial
  Synthetic oligonucleotide
agagttctagaccccaaggggaaccctactagtacgcggtagcgttaagggttcccctcc

SEQ ID NO: 533873 - DNA, 60 bp, Artificial
  Synthetic oligonucleotide
ttgcgtagtcgtaacccttctctggtgttcccgtagaaggctggatgttcgggtgacaac

SEQ ID NO: 533874 - DNA, 60 bp, Artificial
  Synthetic oligonucleotide
aggctttatttgccttaaggaacgtaaacgactggcaggtgtcaagaaactcctcggtag

SEQ ID NO: 533875 - DNA, 60 bp, Artificial
  Synthetic oligonucleotide
ccagttctggcagctcactcgtgtcgaatgaaattccctcgggagtgatgtagggatcac

SEQ ID NO: 533876 - DNA, 60 bp, Artificial
  Synthetic oligonucleotide
aggggtctacagactgactgaggacgggcgcgaaatcgcaagacggcttgcggatgttga

SEQ ID NO: 533877 - DNA, 60 bp, Artificial
  Synthetic oligonucleotide
ccactcaaaacacgctagtcccaggcaacaagttctacaccgcttgccgcacggactcca

SEQ ID NO: 533878 - DNA, 60 bp, Artificial
  Synthetic oligonucleotide
ttgcaccaaatgatcggccttccccaattgaaagtcattttgcccttatacttgtccgtg

SEQ ID NO: 533879 - DNA, 60 bp, Artificial
  Synthetic oligonucleotide
ataaatggcattgtatttgatgtaactagatctgatagttctcagttttcatatcaaacg

SEQ ID NO: 533880 - DNA, 60 bp, Artificial
  Synthetic oligonucleotide
ccaattccgaaggtgacgtaaagtacctctctcatgctgactgggccggtgccctaaatg

SEQ ID NO: 533881 - DNA, 60 bp, Artificial
  Synthetic oligonucleotide
atacagtactgttctaaagatggagaattcaccgagtttggttctcgtccatcgtctggc

SEQ ID NO: 533882 - DNA, 60 bp, Artificial
  Synthetic oligonucleotide
atatggcgcttttcggggtgtcccctcttgaggagggaattatcgcgaaggcgtggtcaa

SEQ ID NO: 533883 - DNA, 60 bp, Artificial
  Synthetic oligonucleotide
atatgtaccgtgcgtctcgcacggcctattccaatctcacttgtcggaggtagttagatg

SEQ ID NO: 533884 - DNA, 60 bp, Artificial
  Synthetic oligonucleotide
catatgacgtcaccatccttgatcgcatagtcgtaacctctccatggagttccccaagaa

SEQ ID NO: 533885 - DNA, 60 bp, Artificial
  Synthetic oligonucleotide
caggttaaggagatgttaggcgaaagatatcatattgagatgcgtagaggtaccgcagcg

SEQ ID NO: 533886 - DNA, 60 bp, Artificial
  Synthetic oligonucleotide
cagggttacttggagttacacaaaaagaagcgctttaaacaggttaaggagatgttaggc

SEQ ID NO: 533887 - DNA, 60 bp, Artificial
  Synthetic oligonucleotide
atgcctggaagtgaagtacgatgttcatcgacatatgtgcgttcgaaaagggcgattgat

SEQ ID NO: 533888 - DNA, 60 bp, Artificial
  Synthetic oligonucleotide
cagcggaatgttcgagctgtaagaccaagcgctcggacaccagggcaagactcgaagctg

SEQ ID NO: 533889 - DNA, 60 bp, Artificial
  Synthetic oligonucleotide
atttgcatcctcgttctcggttacattctttcaataagacggttagacgttttattaagt

SEQ ID NO: 533890 - DNA, 60 bp, Artificial
  Synthetic oligonucleotide
caaaactcaacaggctctactacaggcttaaagtcacatggactattgagttcacggagc

SEQ ID NO: 533891 - DNA, 60 bp, Artificial
  Synthetic oligonucleotide
cactacgacgacctaccccctcgcaacaccgctggctacgacctcgacagggacgtgatt

SEQ ID NO: 533892 - DNA, 60 bp, Artificial
  Synthetic oligonucleotide
cacctcaggatatgttcaatcctatcctgtataaggcggtctccaatgactcgttcaaca

SEQ ID NO: 533893 - DNA, 60 bp, Artificial
  Synthetic oligonucleotide
caacaatgctagtgtggtgcgctactgctcgcgatcgagtgagcaacgcgtccaacccca

SEQ ID NO: 533894 - DNA, 60 bp, Artificial
  Synthetic oligonucleotide
caacacagtggttagcacctattgatacagatagataccatgtactatttgataagatga

SEQ ID NO: 533895 - DNA, 60 bp, Artificial
  Synthetic oligonucleotide
caacggacattcttggcgctcggatgacgaatcggagcaatgagcgccagatgcgtgcaa

SEQ ID NO: 533896 - DNA, 60 bp, Artificial
  Synthetic oligonucleotide
caacttcctcaagacgtggaatgaatcggtcgctgaactcgacagcattctttcgactgt

SEQ ID NO: 533897 - DNA, 60 bp, Artificial
  Synthetic oligonucleotide
caattaataggaaacgttcattttcaatttcatattaaagcagctatagggtagtataga

SEQ ID NO: 533898 - DNA, 60 bp, Artificial
  Synthetic oligonucleotide
caagcgtccggtctacggtggcgacttcgtcactcatctacgcgtcaccgtccgtataag

SEQ ID NO: 533899 - DNA, 60 bp, Artificial
  Synthetic oligonucleotide
tttcatacaatccgttggatgaagtagcgtcctcttcccactccacgaagtcgccgtctt

SEQ ID NO: 533900 - DNA, 60 bp, Artificial
  Synthetic oligonucleotide
aacacctcgtaacttccaagacactagcaacggaattgtccggttgtggttcaacacgga

SEQ ID NO: 533901 - DNA, 60 bp, Artificial
  Synthetic oligonucleotide
aacagatgtgaacacacgaaaactataagtcaagctgtcctaacagtttagctgcgttat

SEQ ID NO: 533902 - DNA, 60 bp, Artificial
  Synthetic oligonucleotide
aacagtcgaacacattcgcgtcacccgggaggaagggtatgggagatgtctacgtgtatg

SEQ ID NO: 533903 - DNA, 60 bp, Artificial
  Synthetic oligonucleotide
aagaggcccgcgccgtgttcgcagaactacctttcgccgtcgtggtacctccaaaaggcg

SEQ ID NO: 533904 - DNA, 60 bp, Artificial
  Synthetic oligonucleotide
ttgaggcgtctagaggtactgtggaccagaatatacagtactgttctaaagatggagaat

SEQ ID NO: 533905 - DNA, 60 bp, Artificial
  Synthetic oligonucleotide
cctccggaattacccagggtaccggtaggagtcagcgagtaggtaacatggtgagagtta

SEQ ID NO: 533906 - DNA, 60 bp, Artificial
  Synthetic oligonucleotide
tttcaatgtcgactctccacctaaattcgatcccattactacggagtacctgtgctacgg

SEQ ID NO: 533907 - DNA, 60 bp, Artificial
  Synthetic oligonucleotide
tttattaagttacaaccttccttacgtgttaatactgctgatcttagtaatgttgatata

SEQ ID NO: 533908 - DNA, 60 bp, Artificial
  Synthetic oligonucleotide
aagcgtcctgttgttgctgcgtctacttgtgtgtttgatttgcttgttgaaaatggtgat

SEQ ID NO: 533909 - DNA, 60 bp, Artificial
  Synthetic oligonucleotide
aattatcagcagataaagactgcagagatttaccttacgtataacgaagagccacgcagt

SEQ ID NO: 533910 - DNA, 60 bp, Artificial
  Synthetic oligonucleotide
aattcttatgttttgcaatttttgcagaattttaagtattataggatgtatgctatgtct

SEQ ID NO: 533911 - DNA, 60 bp, Artificial
  Synthetic oligonucleotide
ttgtgctagcatatgaaattaatcgtgagtttggctgttattttacaactcgtagctata

SEQ ID NO: 533912 - DNA, 60 bp, Artificial
  Synthetic oligonucleotide
agaccgtacccttggcgtcgtcgaaaggtgggtctgttaaaaagaagtctggcgacattc

SEQ ID NO: 533913 - DNA, 60 bp, Artificial
  Synthetic oligonucleotide
ttgatgcctactgtgctcactgacaggaattcaacggagtgcatatggcccgcagggccc

SEQ ID NO: 533914 - DNA, 60 bp, Artificial
  Synthetic oligonucleotide
ttggtctcaggcatattacccctacttcagtaagggactttgaatatgtctacaaggaca

SEQ ID NO: 533915 - DNA, 60 bp, Artificial
  Synthetic oligonucleotide
actccgcaaccagcttagtgactctgtcgtcaagcggaagtcgaacaaccagagtacgat

SEQ ID NO: 533916 - DNA, 60 bp, Artificial
  Synthetic oligonucleotide
acccccctaatctgtattgcataaatctgagacccttctatcaacgcgcggcgcaaaatt

SEQ ID NO: 533917 - DNA, 60 bp, Artificial
  Synthetic oligonucleotide
ccctctccgtcgcccacgttccccgaacggacggggattccggagtcggctatcaccgag

SEQ ID NO: 533918 - DNA, 60 bp, Artificial
  Synthetic oligonucleotide
acccccaagctactctgtactggcacgaaagataggccggtctacatgtacgatgacgca

SEQ ID NO: 533919 - DNA, 60 bp, Artificial
  Synthetic oligonucleotide
ccggaaacgatcgtggcaggttctatacattccgccaatggattcctctcaacaaaacaa

SEQ ID NO: 533920 - DNA, 60 bp, Artificial
  Synthetic oligonucleotide
ccggtcattaaagttcgacaagtcgatacaggtccggtacctgattcgcatggccttggg

SEQ ID NO: 533921 - DNA, 60 bp, Artificial
  Synthetic oligonucleotide
ttgtccgtctcgaactgcctactgctactttcgctcatagttggtcactccgagaacacg

SEQ ID NO: 533922 - DNA, 59 bp, Artificial
  Synthetic oligonucleotide
ggatgcacggatcgaatatcacaaagaaccgtaaacatcggggtaattctccggttaaa

SEQ ID NO: 533923 - DNA, 59 bp, Artificial
  Synthetic oligonucleotide
gaaattaatcgtgagtttggctgttattttacaactcgtagctataatgcatcatctgg

SEQ ID NO: 533924 - DNA, 59 bp, Artificial
  Synthetic oligonucleotide
tcagggttggtaatattgaccttccctgagtaacgcacgtaggcatgcctatgaaagga

SEQ ID NO: 533925 - DNA, 59 bp, Artificial
  Synthetic oligonucleotide
ggcgatattgcacctcaggatatgttcaatcctatcctgtacaaggcggtttccaatga

SEQ ID NO: 533926 - DNA, 58 bp, Artificial
  Synthetic oligonucleotide
aatgctattggtgctactcaatcttattatcaacctcaaaatgatgctcatttaataa

SEQ ID NO: 533927 - DNA, 58 bp, Artificial
  Synthetic oligonucleotide
cctttgccattatatttgcaagaactctttaagtctgataattttcgtgtaccgtctg

SEQ ID NO: 533928 - DNA, 58 bp, Artificial
  Synthetic oligonucleotide
gcatcttctttgaattgcttcatggtaagcaaaaggaattttcattgcatgttatcgc

SEQ ID NO: 533929 - DNA, 58 bp, Artificial
  Synthetic oligonucleotide
gcacaagagatcgagctcctgcccaaacacgaatgccatacctatagacggtgggccc

SEQ ID NO: 533930 - DNA, 58 bp, Artificial
  Synthetic oligonucleotide
aggagttgccgcttggtcgttatttgcgcggcaagttgcgggagtccctaggttggga

SEQ ID NO: 533931 - DNA, 57 bp, Artificial
  Synthetic oligonucleotide
aatagcgcgtacctggaagtagtatcttccgaggagaccgatattagattccttagc

SEQ ID NO: 533932 - DNA, 57 bp, Artificial
  Synthetic oligonucleotide
gtcgcatacgcccaaccatcttctggtgtgctgtagccacggacaatgtttgggtgg

SEQ ID NO: 533933 - DNA, 56 bp, Artificial
  Synthetic oligonucleotide
actgctgcactcaacacatctgctcctagtatggatgatactgatggtaccttgca

SEQ ID NO: 533934 - DNA, 56 bp, Artificial
  Synthetic oligonucleotide
cgaagtggcatctcgacgtgggtgtccaacgtctacggcgacgtacagtccggaga

SEQ ID NO: 533935 - DNA, 56 bp, Artificial
  Synthetic oligonucleotide
ctccttgctatgttgcagctatggttcttcctcctgctaaactcaacaggctctac

SEQ ID NO: 533936 - DNA, 56 bp, Artificial
  Synthetic oligonucleotide
ctatatccctatcgccaaaagtattgacaatcataagctgagtaaacgccgaacac

SEQ ID NO: 533937 - DNA, 55 bp, Artificial
  Synthetic oligonucleotide
ccgcgctcacctactctcccgatggagcaaggctcgtctacactgaaaccatccc

SEQ ID NO: 533938 - DNA, 55 bp, Artificial
  Synthetic oligonucleotide
tacgggcgtccgaggtgtcgtctacgtcgatatcgtgctttgccgcccacgcgat

SEQ ID NO: 533939 - DNA, 55 bp, Artificial
  Synthetic oligonucleotide
cgtctcctctcggacaaggtccgtcacctgcagtccggaaacgatcgtggcaggt

SEQ ID NO: 533940 - DNA, 55 bp, Artificial
  Synthetic oligonucleotide
cccgtggtggtagattggctaggtgtaagtggattgatgcgaccgcttgggctcc

SEQ ID NO: 533941 - DNA, 55 bp, Artificial
  Synthetic oligonucleotide
cccgctcctttggagggtcggagtgatcgttaagaagacctctaagaagcaggcg

SEQ ID NO: 533942 - DNA, 55 bp, Artificial
  Synthetic oligonucleotide
taagaccaagcgctcggacaccagggcaagactcgaagctggcgcgacgcggaaa

SEQ ID NO: 533943 - DNA, 55 bp, Artificial
  Synthetic oligonucleotide
taaaaaggtttcggtactacttgcagcggaaggttcggtatttcggtgttggtga

SEQ ID NO: 533944 - DNA, 55 bp, Artificial
  Synthetic oligonucleotide
gtttcttagtgcaggatactgcgccttagttcttcgggtgcagaatactgcgggg

SEQ ID NO: 533945 - DNA, 55 bp, Artificial
  Synthetic oligonucleotide
ttgggcatactcgatagatatgaatttagggtagaagttaagggtaaaatgcgac

SEQ ID NO: 533946 - DNA, 55 bp, Artificial
  Synthetic oligonucleotide
ccccgcgcgccgtgttcgttcggtagtctcggctttccttctattcgtggttatc

SEQ ID NO: 533947 - DNA, 55 bp, Artificial
  Synthetic oligonucleotide
gttagcggagctgaggctgtctctgttgttcctcgtcagatgttcacttccggtc

SEQ ID NO: 533948 - DNA, 55 bp, Artificial
  Synthetic oligonucleotide
gttactaagttattcgatggtgcccattgggaaggtgcaagaggatccgaccaac

SEQ ID NO: 533949 - DNA, 55 bp, Artificial
  Synthetic oligonucleotide
gtgttaggccgtctctcccgtgattatcagggtttcgtaatgaatccatagattc

SEQ ID NO: 533950 - DNA, 55 bp, Artificial
  Synthetic oligonucleotide
ctcaccgacacgcgggagagatacgacgaacacgaaccaagcgagttccgaatcc

SEQ ID NO: 533951 - DNA, 55 bp, Artificial
  Synthetic oligonucleotide
gtcggtatgtggttggatatgagatcggtgaatctggcacgcgacatttgcaagg

SEQ ID NO: 533952 - DNA, 55 bp, Artificial
  Synthetic oligonucleotide
cccagctgaacagcggaggtagtggctggggaatcggaaccgaagacaaggcgct

SEQ ID NO: 533953 - DNA, 55 bp, Artificial
  Synthetic oligonucleotide
agatctagacggagcgcgtcaccccggttcgtcacgtccactccgtagcgttcgc

SEQ ID NO: 533954 - DNA, 55 bp, Artificial
  Synthetic oligonucleotide
tgaatctcgccgcgcgctgacagggagagattggacgcgcgatagcgccaaacag

SEQ ID NO: 533955 - DNA, 55 bp, Artificial
  Synthetic oligonucleotide
cgaatgataattggtccatgttgaatgcaccaccgaagtagaagtgcttgcctag

SEQ ID NO: 533956 - DNA, 55 bp, Artificial
  Synthetic oligonucleotide
cgacactcgctattcttttcgcgacaagtatctctcagttcgtccgagggtcact

SEQ ID NO: 533957 - DNA, 55 bp, Artificial
  Synthetic oligonucleotide
tgcgagattactactctcggatagagcgagatatagctgataactggaaccagcg

SEQ ID NO: 533958 - DNA, 55 bp, Artificial
  Synthetic oligonucleotide
cgacgtttcccgtctcgtcgtaccataccactacctgacggtcgttcgtcgcttc

SEQ ID NO: 533959 - DNA, 55 bp, Artificial
  Synthetic oligonucleotide
tcgagctgtaagaccaagcgctcggacaccagggcaagactcgaagctggcgcga

SEQ ID NO: 533960 - DNA, 55 bp, Artificial
  Synthetic oligonucleotide
aactataagtcaagctgtcctaacagtttagctgcgttatgtcgactgaccgacc

SEQ ID NO: 533961 - DNA, 55 bp, Artificial
  Synthetic oligonucleotide
cgagggatctagcccacagggttttcccggttctcgaatctccgtacagcaccag

SEQ ID NO: 533962 - DNA, 55 bp, Artificial
  Synthetic oligonucleotide
cgccgggttttctaccttcttacctacgggtacgtgggtaggttcttaaagatac

SEQ ID NO: 533963 - DNA, 55 bp, Artificial
  Synthetic oligonucleotide
cgcctgcctcgctccactaactctatgggtgggatgaaggggtaagccctctccg

SEQ ID NO: 533964 - DNA, 55 bp, Artificial
  Synthetic oligonucleotide
cgcggaccaggtattccaatacgtgcgcgagagttatcgacctggtccccgtgcc

SEQ ID NO: 533965 - DNA, 55 bp, Artificial
  Synthetic oligonucleotide
tcaaagttgctcaagctctggcgtatcaatcactaactactgaccagcgtacgag

SEQ ID NO: 533966 - DNA, 55 bp, Artificial
  Synthetic oligonucleotide
aatacagaatattctaagtggaacaccttctggtacaacacagtggttagcacct

SEQ ID NO: 533967 - DNA, 55 bp, Artificial
  Synthetic oligonucleotide
cggcgtcttggatattcgaggactggtgatagtcgcggaagtagttagccgacac

SEQ ID NO: 533968 - DNA, 55 bp, Artificial
  Synthetic oligonucleotide
cctatcctgtataaggcggtctccaatgactcgttcaacaacatcgttaaccgta

SEQ ID NO: 533969 - DNA, 55 bp, Artificial
  Synthetic oligonucleotide
cgggggtagatggagggacggtcactctcaccgcagaaccgtatgaggggacggt

SEQ ID NO: 533970 - DNA, 55 bp, Artificial
  Synthetic oligonucleotide
cgggtcgaaatgtttcaggtcgtcgatgtgagatatcagaagcatcggcttcagg

SEQ ID NO: 533971 - DNA, 55 bp, Artificial
  Synthetic oligonucleotide
ccggttcgtagtaagcgtcctcgacgtacggaccgtttcctcgcttcggagcgag

SEQ ID NO: 533972 - DNA, 55 bp, Artificial
  Synthetic oligonucleotide
cggtcacaagtctatcagaccgctctaacacgagaatccacgaatgcgagtgcta

SEQ ID NO: 533973 - DNA, 55 bp, Artificial
  Synthetic oligonucleotide
acaaatgactcaatttcgattagaccgtgcgctactctgtattggcacgaaaaat

SEQ ID NO: 533974 - DNA, 55 bp, Artificial
  Synthetic oligonucleotide
cttctctggtgttcccgtagaaggctggatgttcgggtgacaaccgtccacatcg

SEQ ID NO: 533975 - DNA, 55 bp, Artificial
  Synthetic oligonucleotide
cttgtcctaactgtcacagcgacagcgttctcagtctctgtaatttatcgggcac

SEQ ID NO: 533976 - DNA, 55 bp, Artificial
  Synthetic oligonucleotide
cagaccggagcagatggggtcacccgcgattggatggtgttttacactgaataac

SEQ ID NO: 533977 - DNA, 55 bp, Artificial
  Synthetic oligonucleotide
gacgagcaggttttacaggcgttagacgttaagtatcttgtatatggacacgaag

SEQ ID NO: 533978 - DNA, 55 bp, Artificial
  Synthetic oligonucleotide
gctcactcgtgtcgaatgaaattccctcgggagtgatgtagggatcacgagctgg

SEQ ID NO: 533979 - DNA, 55 bp, Artificial
  Synthetic oligonucleotide
gctactgctcgcgatcgagtgagcaacgcgtccaaccccaccgctgactcagttc

SEQ ID NO: 533980 - DNA, 55 bp, Artificial
  Synthetic oligonucleotide
gcggtgtttggatttgtggcccccccaggattggtaaagattatgcggtacgtaa

SEQ ID NO: 533981 - DNA, 55 bp, Artificial
  Synthetic oligonucleotide
cacctacgagtggttctccagagcgtatgtgagattgctcgcaccacgcatctcg

SEQ ID NO: 533982 - DNA, 55 bp, Artificial
  Synthetic oligonucleotide
gactggcaggtgtcaagaaactcctcggtagtgtacaccttgaggcgtctagagg

SEQ ID NO: 533983 - DNA, 55 bp, Artificial
  Synthetic oligonucleotide
gcgcaattccccaattaccgtattttaatgaaacaatatgccggtggttcttggg

SEQ ID NO: 533984 - DNA, 55 bp, Artificial
  Synthetic oligonucleotide
caaccccgtaacttaagcctttgctaacgagagtgtcggccatgtcactaactca

SEQ ID NO: 533985 - DNA, 55 bp, Artificial
  Synthetic oligonucleotide
gccgtcccacagagcgaacgcgcacggaactgcctgcgaatatcacttagccgac

SEQ ID NO: 533986 - DNA, 55 bp, Artificial
  Synthetic oligonucleotide
gaggcgtgtaagaatggttttgtaatgacaggcaaatatatgggtaaacgtagag

SEQ ID NO: 533987 - DNA, 55 bp, Artificial
  Synthetic oligonucleotide
caccacgtgtgcgtggtgattatagctttccaattggttctgtacaggaacctga

SEQ ID NO: 533988 - DNA, 55 bp, Artificial
  Synthetic oligonucleotide
gataggcttagtcctcggtccgccggggtccggtaagaccgcgacgactctcgac

SEQ ID NO: 533989 - DNA, 55 bp, Artificial
  Synthetic oligonucleotide
gatcgcatagtcgtaacctctccatggagttccccaagaaggctcgatgtttggg

SEQ ID NO: 533990 - DNA, 55 bp, Artificial
  Synthetic oligonucleotide
gatcggccttccccaattgaaagtcattttgcccttatacttgtccgtgacagtg

SEQ ID NO: 533991 - DNA, 55 bp, Artificial
  Synthetic oligonucleotide
gatgcagccgggcactattcgtagtgataagctgtattatcgtgtttctggaagg

SEQ ID NO: 533992 - DNA, 55 bp, Artificial
  Synthetic oligonucleotide
gatggagaattcaccgagtttggttctcgtccatcgtctggcccagcaactagtc

SEQ ID NO: 533993 - DNA, 55 bp, Artificial
  Synthetic oligonucleotide
caatgtctcgctgtaagaattggtgttttacaagtttcaatgtcgactctccacc

SEQ ID NO: 533994 - DNA, 55 bp, Artificial
  Synthetic oligonucleotide
agcatcaatgagaacttccaccggctcatgtcgtacctccgctctgacccgacga

SEQ ID NO: 533995 - DNA, 55 bp, Artificial
  Synthetic oligonucleotide
ctcctgaggttttgtatgttaatttgaaggatgagcctttacaacagctacttag

SEQ ID NO: 533996 - DNA, 55 bp, Artificial
  Synthetic oligonucleotide
cccacggtgaatcactgaatgaggccctgaatctgatctacaacacctcaaccgc

SEQ ID NO: 533997 - DNA, 55 bp, Artificial
  Synthetic oligonucleotide
gtatagcggtcgttatgctggcccctttaagcgcggtaagagacctagaaaggat

SEQ ID NO: 533998 - DNA, 55 bp, Artificial
  Synthetic oligonucleotide
ctcgcaacaccgctggctacgacctcgacagggacgtgattcgcgtctcgcacga

SEQ ID NO: 533999 - DNA, 55 bp, Artificial
  Synthetic oligonucleotide
agtaggcacgacgctagaataaagaatgcgagtattatggcaccgagggctatgc

SEQ ID NO: 534000 - DNA, 55 bp, Artificial
  Synthetic oligonucleotide
ccacgagatcgacgcgaggagagacacggtaaagaagtggtacgtcgagccggag

SEQ ID NO: 534001 - DNA, 55 bp, Artificial
  Synthetic oligonucleotide
ctctccacctaaattcgatcccattactacggagtacctgtgctacggccgtgag

SEQ ID NO: 534002 - DNA, 55 bp, Artificial
  Synthetic oligonucleotide
gggttcaaccgagctatggtcgagcttagtggtgacccccccgctaacctccgca

SEQ ID NO: 534003 - DNA, 55 bp, Artificial
  Synthetic oligonucleotide
ataagtagagtccgataaacggtctaaccgcaatgtcgactgaccgacccacggt

SEQ ID NO: 534004 - DNA, 55 bp, Artificial
  Synthetic oligonucleotide
ctgcagagatttaccttacgtataacgaagagccacgcagttggaaaccaactgt

SEQ ID NO: 534005 - DNA, 55 bp, Artificial
  Synthetic oligonucleotide
gggaggtcagggtctccggtctgatctggatcgggttaggttgttagcagccgag

SEQ ID NO: 534006 - DNA, 55 bp, Artificial
  Synthetic oligonucleotide
catcggagtaagtcgtgtcgggccgaaggcccgaaccccgacgcagcccgcgagt

SEQ ID NO: 534007 - DNA, 55 bp, Artificial
  Synthetic oligonucleotide
ggcgtcgattggaatactgtcttcaatgcgaaggttgataacaaccgctgccgtc

SEQ ID NO: 534008 - DNA, 55 bp, Artificial
  Synthetic oligonucleotide
atccggagtttgctcggatgtcgaaggacccgggtatcggcgcgtctgctcttcc

SEQ ID NO: 534009 - DNA, 55 bp, Artificial
  Synthetic oligonucleotide
ctggcacgaaagataggccggtctacatgtacgatgacgcagttccccatcaacc

SEQ ID NO: 534010 - DNA, 55 bp, Artificial
  Synthetic oligonucleotide
ggcagggttccaagctgaatccccgcgtggtttcacagattcgtgagcgactgcg

SEQ ID NO: 534011 - DNA, 55 bp, Artificial
  Synthetic oligonucleotide
ggcagacgcacagccaaacgacgccctacagttaagcgtgttatgcgcatggtta

SEQ ID NO: 534012 - DNA, 54 bp, Artificial
  Synthetic oligonucleotide
ctgcgtgggctatgtatcaagattactcccaccgtgcggtctatatcccgcctc

SEQ ID NO: 534013 - DNA, 54 bp, Artificial
  Synthetic oligonucleotide
tatctctcagttcgtccgagggtcactattctctgcaatcatctgcctgactac

SEQ ID NO: 534014 - DNA, 54 bp, Artificial
  Synthetic oligonucleotide
gtgctccaaccacgacacgtcactcgcatccatgccgagacgtggatcatcatt

SEQ ID NO: 534015 - DNA, 54 bp, Artificial
  Synthetic oligonucleotide
tcgccgtgtattcgtgcggagtgagggcgggcgctttcatccgagaatcacccc

SEQ ID NO: 534016 - DNA, 54 bp, Artificial
  Synthetic oligonucleotide
ggatcgttctggcttcgagtagataggtgatctcatgtggacaaaggaggattt

SEQ ID NO: 534017 - DNA, 54 bp, Artificial
  Synthetic oligonucleotide
tgaatcgctcgttacgtggtcagacctgactcgcctcgccttcactatcgcggt

SEQ ID NO: 534018 - DNA, 53 bp, Artificial
  Synthetic oligonucleotide
ttttccggggacgacggtgatagcggtccctgtggagtccttcgcgggaggta

SEQ ID NO: 534019 - DNA, 53 bp, Artificial
  Synthetic oligonucleotide
tcgaagcctccgacgagagcccatagtccaaaatgaagcctcgcgtcccgata

SEQ ID NO: 534020 - DNA, 53 bp, Artificial
  Synthetic oligonucleotide
aacaactaactccacagatgctcccccgatttttcctaatcgcagtcgtcgta

SEQ ID NO: 534021 - DNA, 53 bp, Artificial
  Synthetic oligonucleotide
aagaggctacttcgtatctctccgtggaaagcaaagcgggcatgggagattac

SEQ ID NO: 534022 - DNA, 53 bp, Artificial
  Synthetic oligonucleotide
taatattatagcccaggacacaggacacacctgtgtctacttatacctgagct

SEQ ID NO: 534023 - DNA, 53 bp, Artificial
  Synthetic oligonucleotide
gcggtactgaatcgtactactacgacccgatgtctggtctcgtaggggaccta

SEQ ID NO: 534024 - DNA, 53 bp, Artificial
  Synthetic oligonucleotide
gacgcagaaagggggccaaggactccctgcgaactctaccagcttcaaccttt

SEQ ID NO: 534025 - DNA, 53 bp, Artificial
  Synthetic oligonucleotide
agcgctcgtcgtcttgttggcgtagacgttgaatccgactccaccgtgccaca

SEQ ID NO: 534026 - DNA, 53 bp, Artificial
  Synthetic oligonucleotide
agtcccaggcaacaagttctacaccgcttgccgcacggactccaacccataca

SEQ ID NO: 534027 - DNA, 52 bp, Artificial
  Synthetic oligonucleotide
tctgtggcgtaaaactgtttctgtgcccctaaccagaatttgtaagcgtgaa

SEQ ID NO: 534028 - DNA, 52 bp, Artificial
  Synthetic oligonucleotide
aattttcgtgtaccgtctgtattttatggtggtgttactaatttaatgcgtg

SEQ ID NO: 534029 - DNA, 52 bp, Artificial
  Synthetic oligonucleotide
gtccggttaagtcctaactccgcccggacaagtataaaagccgctcttatcc

SEQ ID NO: 534030 - DNA, 52 bp, Artificial
  Synthetic oligonucleotide
actgacgacaacgacgtttacacaccggcacagtatcgggagcatcaagacg

SEQ ID NO: 534031 - DNA, 52 bp, Artificial
  Synthetic oligonucleotide
agaagagatgggtctttaagaccggttttctttgtgctctccgtgcctgcta

SEQ ID NO: 534032 - DNA, 52 bp, Artificial
  Synthetic oligonucleotide
gaaggggctccgctagtgttacgaaaaggagccccctcggcctcctcagaat

SEQ ID NO: 534033 - DNA, 51 bp, Artificial
  Synthetic oligonucleotide
aaaagagacgcacgtcgacgagaatcgaagtcctagcgagactcgacgagc

SEQ ID NO: 534034 - DNA, 51 bp, Artificial
  Synthetic oligonucleotide
gatgaaagcaagcaactcgccgtacacgcccctgacacatattcgcttcgg

SEQ ID NO: 534035 - DNA, 51 bp, Artificial
  Synthetic oligonucleotide
gatgctcctaattggtcggtggtctgtactggtcttaggaatgacgaaact

SEQ ID NO: 534036 - DNA, 51 bp, Artificial
  Synthetic oligonucleotide
tcattacgggtgctgatccggaggcggagcttccgttgatggggccgacta

SEQ ID NO: 534037 - DNA, 51 bp, Artificial
  Synthetic oligonucleotide
tcggggaaccgctcgttatcttccatgtcccagtcctccggttgatagtta

SEQ ID NO: 534038 - DNA, 50 bp, Artificial
  Synthetic oligonucleotide
cccgactgttcagtacgacggtaattctctggtctacctgaacgcttcca

SEQ ID NO: 534039 - DNA, 50 bp, Artificial
  Synthetic oligonucleotide
ccttcatgcactcctctccagagaccaatcccacgttatagatgtgggac

SEQ ID NO: 534040 - DNA, 50 bp, Artificial
  Synthetic oligonucleotide
cgtgcacagttggatcttaatgatgagattgtacatatatttgcccgttc

SEQ ID NO: 534041 - DNA, 50 bp, Artificial
  Synthetic oligonucleotide
ttgcttgtgttctcggtaagcgtgaatctgattggtacattatcgataca

SEQ ID NO: 534042 - DNA, 50 bp, Artificial
  Synthetic oligonucleotide
tgttagaatactcgtgtaagtccctctccgcgaaataccagccgttcact

SEQ ID NO: 534043 - DNA, 50 bp, Artificial
  Synthetic oligonucleotide
aattgtgaaccagacttggttcggttaagttcggatcgttgggtggtcta

SEQ ID NO: 534044 - DNA, 50 bp, Artificial
  Synthetic oligonucleotide
aagcaagagctagggagcggagaacactcccaaaatggcatacgcacgac

SEQ ID NO: 534045 - DNA, 50 bp, Artificial
  Synthetic oligonucleotide
tactcgtttaaagctggatcaccacgtgtgcgtggtgattatagctttcc

SEQ ID NO: 534046 - DNA, 60 bp, Artificial
  Synthetic oligonucleotide
atacatgtatcaaccctcaccaagtcgtcacataccttcctactcggtgggtgtcacatc

SEQ ID NO: 534047 - DNA, 60 bp, Artificial
  Synthetic oligonucleotide
ccaatacacatcatcctccaagctagccaaccggacaggcacgagggggaatccctggat

SEQ ID NO: 534048 - DNA, 60 bp, Artificial
  Synthetic oligonucleotide
tgaagccttcagagaggcaacacagggcactgaaacggtcctgtcaaagttgcaactggc

SEQ ID NO: 534049 - DNA, 60 bp, Artificial
  Synthetic oligonucleotide
tatttggtctccacaccgatagggccatggctagccgtctctacggagtcccatcgcact

SEQ ID NO: 534050 - DNA, 60 bp, Artificial
  Synthetic oligonucleotide
cttcatgactgtcgggtgggcagagtactgagctacatcaccctcagcgaggtagagggt

SEQ ID NO: 534051 - DNA, 60 bp, Artificial
  Synthetic oligonucleotide
cttgggggccttttcctagttagggatgtagggtaaaggaccaatagagtcgcataagag

SEQ ID NO: 534052 - DNA, 60 bp, Artificial
  Synthetic oligonucleotide
taacgggtcagaccggttctggaggtactcaaggggtctagacccaggattcttcatagc

SEQ ID NO: 534053 - DNA, 60 bp, Artificial
  Synthetic oligonucleotide
gtcaaccatcctgcaggagctaagatgtccacactgccagtgtctactcttcacaggtcc

SEQ ID NO: 534054 - DNA, 60 bp, Artificial
  Synthetic oligonucleotide
gtaaatatgtacccagaggtccccagctcatcccaagtgtccgacgacatagataacgac

SEQ ID NO: 534055 - DNA, 58 bp, Artificial
  Synthetic oligonucleotide
agatgctcttaacacacaggagaaagtcctaagccactctcatgtgatagaatcacac

SEQ ID NO: 534056 - DNA, 56 bp, Artificial
  Synthetic oligonucleotide
aagaggaaacacccggattcactagacactaaccctatcttaggcttaataggtca

SEQ ID NO: 534057 - DNA, 55 bp, Artificial
  Synthetic oligonucleotide
ggatgctgagctagcgcggtagtgtattggtgagtccttctcccttagctacggt

SEQ ID NO: 534058 - DNA, 55 bp, Artificial
  Synthetic oligonucleotide
gccagagcaatggtgtacatatgcttaagcctcatgagactggctgtgaagccgg

SEQ ID NO: 534059 - DNA, 55 bp, Artificial
  Synthetic oligonucleotide
cggcctatcaggatcaagtgcaaacgccggccctgtatcccgcaaactctacaac

SEQ ID NO: 534060 - DNA, 54 bp, Artificial
  Synthetic oligonucleotide
tgagagcacaatacccgaagtgcaactatcgccctacaggggttcttagctgta

SEQ ID NO: 534061 - DNA, 51 bp, Artificial
  Synthetic oligonucleotide
gcttgtccgactgtgacaaagaggccctcagagcacttgtggttcaaacag

SEQ ID NO: 534062 - DNA, 50 bp, Artificial
  Synthetic oligonucleotide
cctatcaggcgtggatgattacttaaggaggaagaagtctcgactatctt

SEQ ID NO: 534063 - DNA, 60 bp, Artificial
  Synthetic oligonucleotide
cttacgcaaggggttcgcgtcgcttccatctgactacgcacccttcaaacatcatcaatg

SEQ ID NO: 534064 - DNA, 60 bp, Artificial
  Synthetic oligonucleotide
ccctaaacgacccccgcctgccggccaacaggcggttttttaccgcgaacactcttccgc

SEQ ID NO: 534065 - DNA, 60 bp, Artificial
  Synthetic oligonucleotide
ccccactagtcgttcccaagtcctcacaaccagttgcccatcaggaaaccgatggaccca

SEQ ID NO: 534066 - DNA, 60 bp, Artificial
  Synthetic oligonucleotide
cagcttccctacgacagcctgctagcaaaggtacctggtttggagatcctcgttaccctg

SEQ ID NO: 534067 - DNA, 60 bp, Artificial
  Synthetic oligonucleotide
ggagcaacgatctatcgaccgtagaaacatccgtaggtcgagtcggacagagtggaggga

SEQ ID NO: 534068 - DNA, 60 bp, Artificial
  Synthetic oligonucleotide
ggcatcactcgaagtgctacttattgaagttaaggtgttagagaacagtaaccaaacccg

SEQ ID NO: 534069 - DNA, 60 bp, Artificial
  Synthetic oligonucleotide
ggttcgcctatccagttccaatctggtagattgatcatggcttttgaaacaggtcgcaac

SEQ ID NO: 534070 - DNA, 60 bp, Artificial
  Synthetic oligonucleotide
ataggttttcacggttatcactctccaaatctacaaacgtggtatggagcaatgttgact

SEQ ID NO: 534071 - DNA, 60 bp, Artificial
  Synthetic oligonucleotide
agccaagcttgtctttgacacaattggtggaaaacatggactaggattatacgacccttg

SEQ ID NO: 534072 - DNA, 60 bp, Artificial
  Synthetic oligonucleotide
actcagatcctcacctatctcgttcgattcacctacgactcgccccggcttgtggctgat

SEQ ID NO: 534073 - DNA, 60 bp, Artificial
  Synthetic oligonucleotide
tccattgtatcccagtggacttaatcttgttttcgggagcgctgtacggcccgtacaaag

SEQ ID NO: 534074 - DNA, 60 bp, Artificial
  Synthetic oligonucleotide
aattggcacacaactacggttatatatccgcagaccgctacaatgccctatttggaatcc

SEQ ID NO: 534075 - DNA, 60 bp, Artificial
  Synthetic oligonucleotide
aacggaagccacatgctccttcgctcagctcgaattcgttagcttcccccaggtagatac

SEQ ID NO: 534076 - DNA, 60 bp, Artificial
  Synthetic oligonucleotide
tgcggattaaacaaccgctcatattttcgaactccacaacgggaggaaagctacgacgct

SEQ ID NO: 534077 - DNA, 60 bp, Artificial; identical to SEQ ID NO: 301747
  Synthetic oligonucleotide

SEQ ID NO: 534078 - DNA, 59 bp, Artificial
  Synthetic oligonucleotide
gtccaagtctacaatgccaccgccgaaagccttctttacgaagcacgtcgtcacggtat

SEQ ID NO: 534079 - DNA, 58 bp, Artificial
  Synthetic oligonucleotide
aaccttcgcagataaagtccgtgaaactggtatacctaaacaaaagattaggtatact

SEQ ID NO: 534080 - DNA, 57 bp, Artificial
  Synthetic oligonucleotide
atttgtcccttggcggtttgatcccctctctcgcattcgtataggtgtctttaactc

SEQ ID NO: 534081 - DNA, 55 bp, Artificial
  Synthetic oligonucleotide
cggacgcaaaatatcgtattgcgtacgccgaaggtcgtgaagaggtgtcagaagc

SEQ ID NO: 534082 - DNA, 55 bp, Artificial
  Synthetic oligonucleotide
cggtcccgcagggcaaggcaaaacccagttcgcctatttcctctctagaactctc

SEQ ID NO: 534083 - DNA, 55 bp, Artificial
  Synthetic oligonucleotide
ctacatagggaatggatccaacttgttatgaactcggactataagtatcactcac

SEQ ID NO: 534084 - DNA, 55 bp, Artificial
  Synthetic oligonucleotide
ctggagggccccactcgacattaaaacatgtagagagatggccaattacacccgg

SEQ ID NO: 534085 - DNA, 55 bp, Artificial
  Synthetic oligonucleotide
gaaattgttacaccccgtgaggagataagcgtttctgctatctctgaacaactgg

SEQ ID NO: 534086 - DNA, 55 bp, Artificial
  Synthetic oligonucleotide
gaacagagttcgcacagcacctatcatcgatgtaccacttcccgagcaccatgac

SEQ ID NO: 534087 - DNA, 55 bp, Artificial
  Synthetic oligonucleotide
gacaaccggcctaagatcactgtgggattaccgacagaatgtctcgagcgtcgcg

SEQ ID NO: 534088 - DNA, 55 bp, Artificial
  Synthetic oligonucleotide
tctcctcaggctccaaactcacagaccccgaccgtgacgcgaaccttgctcaccg

SEQ ID NO: 534089 - DNA, 55 bp, Artificial
  Synthetic oligonucleotide
gtatcgaacccaactggaacaacaggacgtagaggtgtgttagggcgatgtgtag

SEQ ID NO: 534090 - DNA, 55 bp, Artificial
  Synthetic oligonucleotide
acctgtgtcctattctgagtcgaatcggttcgctgtcctggaagtctcgggcacg

SEQ ID NO: 534091 - DNA, 55 bp, Artificial
  Synthetic oligonucleotide
agtcgtggattatcgctcaatacctcggcgaggctattaactcttggtaccccgt

SEQ ID NO: 534092 - DNA, 55 bp, Artificial
  Synthetic oligonucleotide
atccttgatgagatagaacacgctataaaagtctcacatggaatgccgtatgctg

SEQ ID NO: 534093 - DNA, 55 bp, Artificial
  Synthetic oligonucleotide
aactgtcagaacctgtttggttaacacagagagattaaccgcaagacgagtatgc

SEQ ID NO: 534094 - DNA, 55 bp, Artificial
  Synthetic oligonucleotide
cagtctgtcaaacccagctaacatgaactggaccacgctaaccatagacccgtac

SEQ ID NO: 534095 - DNA, 55 bp, Artificial
  Synthetic oligonucleotide
ccacacgtcgttgcagtgttgcagcattccgcaacaaatacggcttatccgccgc

SEQ ID NO: 534096 - DNA, 55 bp, Artificial
  Synthetic oligonucleotide
ccgagacccaatccccgaatacctccttcggctctattttcgacgctatcaacgg

SEQ ID NO: 534097 - DNA, 55 bp, Artificial
  Synthetic oligonucleotide
ccttgccgtatggtgccctaacgggttcatttaatcatgcgatgagggttgctat

SEQ ID NO: 534098 - DNA, 55 bp, Artificial
  Synthetic oligonucleotide
aaaccctcagcagttcattacacccgcaaccgctctaagtgccgaagaatataat

SEQ ID NO: 534099 - DNA, 55 bp, Artificial
  Synthetic oligonucleotide
cgaccgccttctggccgagtgtaacgttaagtccatccgcgaaatcgcccacctt

SEQ ID NO: 534100 - DNA, 55 bp, Artificial
  Synthetic oligonucleotide
cgcgaggctactgccaagagcaagtcaggtgttctttctacaaccctcgactccc

SEQ ID NO: 534101 - DNA, 54 bp, Artificial
  Synthetic oligonucleotide
ccactcttttcaccgttttagacgagaacgaggttactgagattaagtcaattc

SEQ ID NO: 534102 - DNA, 54 bp, Artificial
  Synthetic oligonucleotide
gacattgctatggtgcgttttccaaagcttcgcgctcatgtagatattgttcat

SEQ ID NO: 534103 - DNA, 54 bp, Artificial
  Synthetic oligonucleotide
gctaggaaaaatgcgtcctcaagacctaccgctcatgggccatgtcgttatctg

SEQ ID NO: 534104 - DNA, 54 bp, Artificial
  Synthetic oligonucleotide
attaaagatgtgggaatcaccggacaagaacaaatggatggagcgcaattagaa

SEQ ID NO: 534105 - DNA, 54 bp, Artificial
  Synthetic oligonucleotide
atggctatattctccgagacttcctccaaaacaaacgagcgtttcaatctggga

SEQ ID NO: 534106 - DNA, 53 bp, Artificial
  Synthetic oligonucleotide
ttttcctcagtccgttcggttttctccagtgctgcgacgtacgcgtacgacag

SEQ ID NO: 534107 - DNA, 52 bp, Artificial
  Synthetic oligonucleotide
caaattcccaacacttcttgtgaagggtgatttgtatcgactggacggtgtt

SEQ ID NO: 534108 - DNA, 52 bp, Artificial
  Synthetic oligonucleotide
cgagtcatataagctcatcgatacgaaccgagacatctgtgctcacgtacgg

SEQ ID NO: 534109 - DNA, 51 bp, Artificial
  Synthetic oligonucleotide
ctatcttattggccggtcatgccaggcctgtcggtaaatgcggctggagca

SEQ ID NO: 534110 - DNA, 50 bp, Artificial
  Synthetic oligonucleotide
tgtcaagaagaggccctccgacatcacccagtatagacttgctttcgccg

SEQ ID NO: 534111 - DNA, 50 bp, Artificial
  Synthetic oligonucleotide
ttatgatgacttcttgcaacgctccgatagcgtcgcgaaccctaacccgg

SEQ ID NO: 534112 - DNA, 58 bp, Artificial
  Synthetic oligonucleotide
gtcaccttgcactgtaataaactttctagtatctaatggaatgaacgttgatgttagc

SEQ ID NO: 534113 - DNA, 58 bp, Artificial
  Synthetic oligonucleotide
cctctatccgttgttaacttaactttctgtgctttacttacgtctaattgtaagtctg

SEQ ID NO: 534114 - DNA, 55 bp, Artificial
  Synthetic oligonucleotide
tctccttcctactatatgcctatcatattggagccaaagtaagattttaacccag

SEQ ID NO: 534115 - DNA, 55 bp, Artificial
  Synthetic oligonucleotide
tcctctaaatcagcataccttaagacagcacctcttaaattagcactccttaagt

SEQ ID NO: 534116 - DNA, 55 bp, Artificial
  Synthetic oligonucleotide
ggtgaaataggctattacattgctaagtacaaagatggagacacaagtattgagc

SEQ ID NO: 534117 - DNA, 55 bp, Artificial
  Synthetic oligonucleotide
gctcgtgtgataattacgttgttttctctctcgaattgttccatttcatagccgt

SEQ ID NO: 534118 - DNA, 55 bp, Artificial
  Synthetic oligonucleotide
gatgtttggtagttagtaacgaatcggtgcatcacttttgatttactgtccgccg

SEQ ID NO: 534119 - DNA, 55 bp, Artificial
  Synthetic oligonucleotide
ctttacgtagtggactagcaggaaactcagcgctcacgtcttcatgaggtttctc

SEQ ID NO: 534120 - DNA, 55 bp, Artificial
  Synthetic oligonucleotide
cggtcttttgacggatattagggtctgaaactgacgctactccgatttcacgtac

SEQ ID NO: 534121 - DNA, 55 bp, Artificial
  Synthetic oligonucleotide
cctaggataaatgagctcgaagtcgtaggagctaccgccatcaaacacgaattcc

SEQ ID NO: 534122 - DNA, 55 bp, Artificial
  Synthetic oligonucleotide
ccgtcatctataggaaccataaggtcttcagtgtcttctttatacatactaccta

SEQ ID NO: 534123 - DNA, 55 bp, Artificial
  Synthetic oligonucleotide
ccacctgcaagagcagttactgccatagtagcatgtgcaccaatagatggtaatc

SEQ ID NO: 534124 - DNA, 55 bp, Artificial
  Synthetic oligonucleotide
caccagtagttccgtattcacgttgacctttagcagattgtgctcttccaactgg

SEQ ID NO: 534125 - DNA, 55 bp, Artificial
  Synthetic oligonucleotide
caatgtagagttacatgaagaagtagggtctgtaatcatacctaacttagctcct

SEQ ID NO: 534126 - DNA, 55 bp, Artificial
  Synthetic oligonucleotide
agtactccataataagtgctcctcttactctttattgaacctgttctcctgtatc

SEQ ID NO: 534127 - DNA, 55 bp, Artificial
  Synthetic oligonucleotide
agtacggctgagttattaggagacctatcgtatatcgaggattattatactggtg

SEQ ID NO: 534128 - DNA, 54 bp, Artificial
  Synthetic oligonucleotide
ataatctttaggataaggaacagctaacttaccgtcatcactagggttacgtcc

SEQ ID NO: 534129 - DNA, 60 bp, Artificial
  Synthetic oligonucleotide
ccttccgcccgtcccctaggtcctgccaatgatgtgggggagtcgacacgtcagcgtcgc

SEQ ID NO: 534130 - DNA, 60 bp, Artificial
  Synthetic oligonucleotide
cgagtagccacgggtcgatagtgccattctgcataagctcgtagggattggtgattgcac

SEQ ID NO: 534131 - DNA, 60 bp, Artificial
  Synthetic oligonucleotide
cgtaggggcagtgacttactaccagcacgaaatactaccctccgaatccgtctcagacac

SEQ ID NO: 534132 - DNA, 60 bp, Artificial
  Synthetic oligonucleotide
ctagatactgccgcactccgacgtgagatgcataatcaccgcgaagctgtgctccatagt

SEQ ID NO: 534133 - DNA, 60 bp, Artificial
  Synthetic oligonucleotide
ctgacgtctatattacggttcaatgcgcactgcaaaaggcttaaagacgaacatgggagt

SEQ ID NO: 534134 - DNA, 60 bp, Artificial
  Synthetic oligonucleotide
gaacgtcacgacggcgtatcttgaatgttgcctccatcaagaagagggacaacatgctct

SEQ ID NO: 534135 - DNA, 60 bp, Artificial
  Synthetic oligonucleotide
gcgagcagcagtgcagctgagaagtacacactcaacgttgtgccagcaaagaacacgaac

SEQ ID NO: 534136 - DNA, 60 bp, Artificial
  Synthetic oligonucleotide
gcgatagagaagagtacgcctaagtccaaacagcacagcgctgcagaccactacaagtgg

SEQ ID NO: 534137 - DNA, 60 bp, Artificial
  Synthetic oligonucleotide
ggatgccaaggattacatcgtgctcggtgatatgcgaaagaaggtaccctcggagtggta

SEQ ID NO: 534138 - DNA, 60 bp, Artificial
  Synthetic oligonucleotide
gtcattaaacgatccccgctagggttagaaagcgctacgaacgaagtgacgaacgtacgt

SEQ ID NO: 534139 - DNA, 60 bp, Artificial
  Synthetic oligonucleotide
gtgtggtatgttacaggatacgacaaagttcagatacaataagacagatctgagcatcgt

SEQ ID NO: 534140 - DNA, 60 bp, Artificial
  Synthetic oligonucleotide
gttcaaagcctccagcgactacgtcggcacgttagagagagaatacggtgtggtttggaa

SEQ ID NO: 534141 - DNA, 60 bp, Artificial
  Synthetic oligonucleotide
tatcacaaaagctgggtatatcgatagttacgaggtcgtgcagtgcaccaccgacaggag

SEQ ID NO: 534142 - DNA, 60 bp, Artificial
  Synthetic oligonucleotide
tgagatttacgcgcgagcgtagatccgccctagacgagtggtccaactggcagttaaagc

SEQ ID NO: 534143 - DNA, 60 bp, Artificial
  Synthetic oligonucleotide
tggcctcacggcagcgggtaagaaccgtatgagttgggtggaacgtgccttgggcgatag

SEQ ID NO: 534144 - DNA, 60 bp, Artificial
  Synthetic oligonucleotide
tgggtggaattcgcaaaggatgctttagctacagccggacgtatggtagaagggcgcagt

SEQ ID NO: 534145 - DNA, 60 bp, Artificial
  Synthetic oligonucleotide
ttaccgccaaggtctcaacgactcgtattaccgtcttatccgacaagacgtatcatttca

SEQ ID NO: 534146 - DNA, 60 bp, Artificial
  Synthetic oligonucleotide
agtgatcgtgcccaaattgtcttgcctaggcgtgtttcgccccacagaattaggcttcga

SEQ ID NO: 534147 - DNA, 60 bp, Artificial
  Synthetic oligonucleotide
actacgacagaggtatggacgcggcactcaaacgcgccccctacacagcaggagttatgt

SEQ ID NO: 534148 - DNA, 60 bp, Artificial
  Synthetic oligonucleotide
accttctcggttgggtataaggagcgggtccaggtggatattcatggtggcggagtctgg

SEQ ID NO: 534149 - DNA, 60 bp, Artificial
  Synthetic oligonucleotide
atatacgacattgcttatgctgttgtaccctctgcgggtaatcctggttccatgacgtgg

SEQ ID NO: 534150 - DNA, 60 bp, Artificial
  Synthetic oligonucleotide
atcacgtgcaagagtacgaactgtggctgtctactcgggctcaaggtagaggtaccaccc

SEQ ID NO: 534151 - DNA, 60 bp, Artificial
  Synthetic oligonucleotide
cagcctaccgaggagttcaaccggatatccgagtggtatgctgacagttttaccaaccag

SEQ ID NO: 534152 - DNA, 60 bp, Artificial
  Synthetic oligonucleotide
catgacgtgggcccctgaggggacctactattggcatgagcgctaagctatgagggattc

SEQ ID NO: 534153 - DNA, 60 bp, Artificial
  Synthetic oligonucleotide
aaacgacgaagacgacactatgtttgacaggtacgcaggtactatcatgcgtagtgctag

SEQ ID NO: 534154 - DNA, 60 bp, Artificial
  Synthetic oligonucleotide
cagttccgaggtgatgaggctagtcaggttgcacaagtacgtgcctcaacacaccgcccg

SEQ ID NO: 534155 - DNA, 60 bp, Artificial
  Synthetic oligonucleotide
aacatgctctcgatggttcagacttctgatcaggcccctcctacaatcggacccattacc

SEQ ID NO: 534156 - DNA, 59 bp, Artificial
  Synthetic oligonucleotide
agtaattgcccaaaactcgtcaacacttggcgcatttgcaattcgatgccagatagaat

SEQ ID NO: 534157 - DNA, 58 bp, Artificial
  Synthetic oligonucleotide
acagcgatgcgatattgatgtactatctcgctggtaattctaggattactacttatgt

SEQ ID NO: 534158 - DNA, 57 bp, Artificial
  Synthetic oligonucleotide
accacatcgtgccaggaacattgttcccggctgaagtattgtactcaatggcagaca

SEQ ID NO: 534159 - DNA, 55 bp, Artificial
  Synthetic oligonucleotide
tgcccgtacacgggagccgggcgttccttgtccgattgcggatgtttgggacatg

SEQ ID NO: 534160 - DNA, 55 bp, Artificial
  Synthetic oligonucleotide
ttaatctgggatgaggccacaagggtaaaggaagcgacttctgtgtttgtaacca

SEQ ID NO: 534161 - DNA, 55 bp, Artificial
  Synthetic oligonucleotide
gttggtaagtatatagggtgattagggttaaccccataatttacagggagaagtg

SEQ ID NO: 534162 - DNA, 55 bp, Artificial
  Synthetic oligonucleotide
tggcaatgatacctagaggcactagtttcttaggacatctcaagtgccttaagaa

SEQ ID NO: 534163 - DNA, 55 bp, Artificial
  Synthetic oligonucleotide
tgttgtaccctctgcgggtaatcctggttccatgacgtgggcccctgaggggacc

SEQ ID NO: 534164 - DNA, 55 bp, Artificial
  Synthetic oligonucleotide
ttgtcttgcctaggcgtgtttcgccccacagaattaggcttcgaggacgtccgcc

SEQ ID NO: 534165 - DNA, 55 bp, Artificial
  Synthetic oligonucleotide
gtcaacgtatgtcccgggttcactcgcgaggtaatacgttggttgcgagcagtag

SEQ ID NO: 534166 - DNA, 55 bp, Artificial
  Synthetic oligonucleotide
ggtgtttgtaccggcatcggaatcggtaacgtgggaatgtgattacgctggggtg

SEQ ID NO: 534167 - DNA, 55 bp, Artificial
  Synthetic oligonucleotide
gggtgatacttggagaacgagaccaccaaacttccctccacgcgtctgtggtaac

SEQ ID NO: 534168 - DNA, 55 bp, Artificial
  Synthetic oligonucleotide
gggcgtacgtgggatggtagtctttggaaggacttgcccggctatcgggccatcc

SEQ ID NO: 534169 - DNA, 55 bp, Artificial
  Synthetic oligonucleotide
agcacggccttcactggcctcatgctaagccattcgctgagggtaccgttcgacg

SEQ ID NO: 534170 - DNA, 55 bp, Artificial
  Synthetic oligonucleotide
ggagcgggtccaggtggatattcatggtggcggagtctggaaatggagacgtgtc

SEQ ID NO: 534171 - DNA, 55 bp, Artificial
  Synthetic oligonucleotide
ccagtcctagccgtaaaggcagtaccaagtcctgacaaagaagggttcctaccgg

SEQ ID NO: 534172 - DNA, 55 bp, Artificial
  Synthetic oligonucleotide
cgaaagtgcgtggcgcgaggagcaaacttggacattgataagtggtacaagatcc

SEQ ID NO: 534173 - DNA, 55 bp, Artificial
  Synthetic oligonucleotide
cgagatagggtacacaacccaggtgtctcgaggacaatgcctgaagtacctgtat

SEQ ID NO: 534174 - DNA, 55 bp, Artificial
  Synthetic oligonucleotide
cgagcataaactgcccaatgcttttggtgttcagaggtaccacaatggtgccgtc

SEQ ID NO: 534175 - DNA, 55 bp, Artificial
  Synthetic oligonucleotide
cgagtctggtgtaactgctaaggtcaagcgttcgctgatgacaggcgtcagaggc

SEQ ID NO: 534176 - DNA, 55 bp, Artificial
  Synthetic oligonucleotide
cgcaaacatggtagggagaccgcatcgagagtgtgattgggatgatgaggtcaag

SEQ ID NO: 534177 - DNA, 55 bp, Artificial
  Synthetic oligonucleotide
cggcgtatcttgaatgttgcctccatcaagaagagggacaacatgctctcgatgg

SEQ ID NO: 534178 - DNA, 55 bp, Artificial
  Synthetic oligonucleotide
attgatttacgacgtggatggcagagtgagagggtgtcctgtgcgatcgctagcg

SEQ ID NO: 534179 - DNA, 55 bp, Artificial
  Synthetic oligonucleotide
ctagcggaaatgggaatcgaaccttcagcctacaagtcagtctgctcggtagcag

SEQ ID NO: 534180 - DNA, 55 bp, Artificial
  Synthetic oligonucleotide
agtgtggacggtgtatcggaagcgggtgaaagcagggtcgataggcgcagcagtg

SEQ ID NO: 534181 - DNA, 55 bp, Artificial
  Synthetic oligonucleotide
gagacgacactgtcccagaccaagttactgggccggatctcccagtagctgcccc

SEQ ID NO: 534182 - DNA, 55 bp, Artificial
  Synthetic oligonucleotide
gaggagtaaaggatgagttaaccaggggctaatcccatattataacggaaggagt

SEQ ID NO: 534183 - DNA, 55 bp, Artificial
  Synthetic oligonucleotide
gcacagttagacggatgggtatcacccatttgtcggattaacttatatatagccg

SEQ ID NO: 534184 - DNA, 55 bp, Artificial
  Synthetic oligonucleotide
gcagtgttagcactgctagacgacatggccatacacttggccaaagcgcacacaa

SEQ ID NO: 534185 - DNA, 55 bp, Artificial
  Synthetic oligonucleotide
gcgagattagcatggatgttggacgtgccgaggcactttggtttgcggcgatgcg

SEQ ID NO: 534186 - DNA, 55 bp, Artificial
  Synthetic oligonucleotide
ggagcaatatacgccagtgggcgtgggagcgcacacaagcttcgagggcccacaa

SEQ ID NO: 534187 - DNA, 54 bp, Artificial
  Synthetic oligonucleotide
aaggctcgcccacacgggaactggaccacagttggctgcacattacgagccttt

SEQ ID NO: 534188 - DNA, 54 bp, Artificial
  Synthetic oligonucleotide
gctcccaccccttggtggttgccatgatgtcgagagcagctgacgagtacaagt

SEQ ID NO: 534189 - DNA, 52 bp, Artificial
  Synthetic oligonucleotide
accgccttgtcaggatatcagcggatgtgaatagacgtgtggaacacaacgt

SEQ ID NO: 534190 - DNA, 52 bp, Artificial
  Synthetic oligonucleotide
ggttttgtcgtgttgtgcgcatgcttacggctggtcgccttccaaggcactg

SEQ ID NO: 534191 - DNA, 51 bp, Artificial
  Synthetic oligonucleotide
ccaagggtcaggacgcattcctgaacactttgcgttcggcagagcggcccg

SEQ ID NO: 534192 - DNA, 50 bp, Artificial
  Synthetic oligonucleotide
tggaaagtcaatgacagactcgctcagtccgaagcttatggtcgggttat

SEQ ID NO: 534193 - DNA, 57 bp, Artificial; identical to SEQ ID NO: 297294
  Synthetic oligonucleotide

SEQ ID NO: 534194 - DNA, 50 bp, Artificial; identical to SEQ ID NO: 297295
  Synthetic oligonucleotide

SEQ ID NO: 534195 - DNA, 58 bp, Artificial; identical to SEQ ID NO: 297297
  Synthetic oligonucleotide

SEQ ID NO: 534196 - DNA, 60 bp, Artificial; identical to SEQ ID NO: 297299
  Synthetic oligonucleotide

SEQ ID NO: 534197 - DNA, 60 bp, Artificial; identical to SEQ ID NO: 297302
  Synthetic oligonucleotide

SEQ ID NO: 534198 - DNA, 54 bp, Artificial; identical to SEQ ID NO: 297305
  Synthetic oligonucleotide

SEQ ID NO: 534199 - DNA, 56 bp, Artificial; identical to SEQ ID NO: 297308
  Synthetic oligonucleotide

SEQ ID NO: 534200 - DNA, 59 bp, Artificial; identical to SEQ ID NO: 297311
  Synthetic oligonucleotide

SEQ ID NO: 534201 - DNA, 55 bp, Artificial; identical to SEQ ID NO: 297314
  Synthetic oligonucleotide

SEQ ID NO: 534202 - DNA, 54 bp, Artificial; identical to SEQ ID NO: 297315
  Synthetic oligonucleotide

SEQ ID NO: 534203 - DNA, 58 bp, Artificial; identical to SEQ ID NO: 297320
  Synthetic oligonucleotide

SEQ ID NO: 534204 - DNA, 56 bp, Artificial; identical to SEQ ID NO: 297321
  Synthetic oligonucleotide

SEQ ID NO: 534205 - DNA, 60 bp, Artificial; identical to SEQ ID NO: 297322
  Synthetic oligonucleotide

SEQ ID NO: 534206 - DNA, 54 bp, Artificial; identical to SEQ ID NO: 297326
  Synthetic oligonucleotide

SEQ ID NO: 534207 - DNA, 56 bp, Artificial; identical to SEQ ID NO: 297327
  Synthetic oligonucleotide

SEQ ID NO: 534208 - DNA, 53 bp, Artificial; identical to SEQ ID NO: 297330
  Synthetic oligonucleotide

SEQ ID NO: 534209 - DNA, 58 bp, Artificial; identical to SEQ ID NO: 297332
  Synthetic oligonucleotide

SEQ ID NO: 534210 - DNA, 60 bp, Artificial; identical to SEQ ID NO: 297334
  Synthetic oligonucleotide

SEQ ID NO: 534211 - DNA, 55 bp, Artificial; identical to SEQ ID NO: 297335
  Synthetic oligonucleotide

SEQ ID NO: 534212 - DNA, 58 bp, Artificial; identical to SEQ ID NO: 297338
  Synthetic oligonucleotide

SEQ ID NO: 534213 - DNA, 60 bp, Artificial; identical to SEQ ID NO: 297339
  Synthetic oligonucleotide

SEQ ID NO: 534214 - DNA, 54 bp, Artificial; identical to SEQ ID NO: 297347
  Synthetic oligonucleotide

SEQ ID NO: 534215 - DNA, 51 bp, Artificial; identical to SEQ ID NO: 297350
  Synthetic oligonucleotide

SEQ ID NO: 534216 - DNA, 58 bp, Artificial; identical to SEQ ID NO: 297355
  Synthetic oligonucleotide

SEQ ID NO: 534217 - DNA, 56 bp, Artificial; identical to SEQ ID NO: 297357
  Synthetic oligonucleotide

SEQ ID NO: 534218 - DNA, 60 bp, Artificial; identical to SEQ ID NO: 297358
  Synthetic oligonucleotide

SEQ ID NO: 534219 - DNA, 59 bp, Artificial; identical to SEQ ID NO: 297360
  Synthetic oligonucleotide

SEQ ID NO: 534220 - DNA, 57 bp, Artificial; identical to SEQ ID NO: 297367
  Synthetic oligonucleotide

SEQ ID NO: 534221 - DNA, 50 bp, Artificial; identical to SEQ ID NO: 297370
  Synthetic oligonucleotide

SEQ ID NO: 534222 - DNA, 55 bp, Artificial; identical to SEQ ID NO: 297371
  Synthetic oligonucleotide

SEQ ID NO: 534223 - DNA, 54 bp, Artificial; identical to SEQ ID NO: 297374
  Synthetic oligonucleotide

SEQ ID NO: 534224 - DNA, 59 bp, Artificial; identical to SEQ ID NO: 297375
  Synthetic oligonucleotide

SEQ ID NO: 534225 - DNA, 56 bp, Artificial; identical to SEQ ID NO: 297377
  Synthetic oligonucleotide

SEQ ID NO: 534226 - DNA, 54 bp, Artificial; identical to SEQ ID NO: 297380
  Synthetic oligonucleotide

SEQ ID NO: 534227 - DNA, 52 bp, Artificial; identical to SEQ ID NO: 13288
  Synthetic oligonucleotide

SEQ ID NO: 534228 - DNA, 52 bp, Artificial; identical to SEQ ID NO: 297381
  Synthetic oligonucleotide

SEQ ID NO: 534229 - DNA, 55 bp, Artificial; identical to SEQ ID NO: 297385
  Synthetic oligonucleotide

SEQ ID NO: 534230 - DNA, 50 bp, Artificial; identical to SEQ ID NO: 297386
  Synthetic oligonucleotide

SEQ ID NO: 534231 - DNA, 52 bp, Artificial; identical to SEQ ID NO: 297387
  Synthetic oligonucleotide

SEQ ID NO: 534232 - DNA, 59 bp, Artificial; identical to SEQ ID NO: 15870
  Synthetic oligonucleotide

SEQ ID NO: 534233 - DNA, 58 bp, Artificial; identical to SEQ ID NO: 297388
  Synthetic oligonucleotide

SEQ ID NO: 534234 - DNA, 56 bp, Artificial; identical to SEQ ID NO: 297389
  Synthetic oligonucleotide

SEQ ID NO: 534235 - DNA, 53 bp, Artificial; identical to SEQ ID NO: 297390
  Synthetic oligonucleotide

SEQ ID NO: 534236 - DNA, 50 bp, Artificial; identical to SEQ ID NO: 297391
  Synthetic oligonucleotide

SEQ ID NO: 534237 - DNA, 55 bp, Artificial; identical to SEQ ID NO: 297393
  Synthetic oligonucleotide

SEQ ID NO: 534238 - DNA, 51 bp, Artificial; identical to SEQ ID NO: 297394
  Synthetic oligonucleotide

SEQ ID NO: 534239 - DNA, 60 bp, Artificial; identical to SEQ ID NO: 297395
  Synthetic oligonucleotide

SEQ ID NO: 534240 - DNA, 51 bp, Artificial; identical to SEQ ID NO: 297396
  Synthetic oligonucleotide

SEQ ID NO: 534241 - DNA, 55 bp, Artificial; identical to SEQ ID NO: 297397
  Synthetic oligonucleotide

SEQ ID NO: 534242 - DNA, 59 bp, Artificial; identical to SEQ ID NO: 297398
  Synthetic oligonucleotide

SEQ ID NO: 534243 - DNA, 55 bp, Artificial; identical to SEQ ID NO: 297402
  Synthetic oligonucleotide

SEQ ID NO: 534244 - DNA, 52 bp, Artificial; identical to SEQ ID NO: 297403
  Synthetic oligonucleotide

SEQ ID NO: 534245 - DNA, 55 bp, Artificial; identical to SEQ ID NO: 297406
  Synthetic oligonucleotide

SEQ ID NO: 534246 - DNA, 50 bp, Artificial; identical to SEQ ID NO: 297407
  Synthetic oligonucleotide

SEQ ID NO: 534247 - DNA, 58 bp, Artificial; identical to SEQ ID NO: 297409
  Synthetic oligonucleotide

SEQ ID NO: 534248 - DNA, 51 bp, Artificial; identical to SEQ ID NO: 297410
  Synthetic oligonucleotide

SEQ ID NO: 534249 - DNA, 54 bp, Artificial; identical to SEQ ID NO: 297411
  Synthetic oligonucleotide

SEQ ID NO: 534250 - DNA, 60 bp, Artificial; identical to SEQ ID NO: 297415
  Synthetic oligonucleotide

SEQ ID NO: 534251 - DNA, 57 bp, Artificial; identical to SEQ ID NO: 297417
  Synthetic oligonucleotide

SEQ ID NO: 534252 - DNA, 56 bp, Artificial; identical to SEQ ID NO: 297418
  Synthetic oligonucleotide

SEQ ID NO: 534253 - DNA, 60 bp, Artificial; identical to SEQ ID NO: 297419
  Synthetic oligonucleotide

SEQ ID NO: 534254 - DNA, 58 bp, Artificial; identical to SEQ ID NO: 297422
  Synthetic oligonucleotide

SEQ ID NO: 534255 - DNA, 57 bp, Artificial; identical to SEQ ID NO: 297423
  Synthetic oligonucleotide

SEQ ID NO: 534256 - DNA, 59 bp, Artificial; identical to SEQ ID NO: 297424
  Synthetic oligonucleotide

SEQ ID NO: 534257 - DNA, 54 bp, Artificial; identical to SEQ ID NO: 297426
  Synthetic oligonucleotide

SEQ ID NO: 534258 - DNA, 55 bp, Artificial; identical to SEQ ID NO: 297427
  Synthetic oligonucleotide

SEQ ID NO: 534259 - DNA, 56 bp, Artificial; identical to SEQ ID NO: 297432
  Synthetic oligonucleotide

SEQ ID NO: 534260 - DNA, 54 bp, Artificial; identical to SEQ ID NO: 297435
  Synthetic oligonucleotide

SEQ ID NO: 534261 - DNA, 60 bp, Artificial; identical to SEQ ID NO: 297437
  Synthetic oligonucleotide

SEQ ID NO: 534262 - DNA, 55 bp, Artificial; identical to SEQ ID NO: 297438
  Synthetic oligonucleotide

SEQ ID NO: 534263 - DNA, 52 bp, Artificial; identical to SEQ ID NO: 297439
  Synthetic oligonucleotide

SEQ ID NO: 534264 - DNA, 55 bp, Artificial; identical to SEQ ID NO: 297440
  Synthetic oligonucleotide

SEQ ID NO: 534265 - DNA, 52 bp, Artificial; identical to SEQ ID NO: 297441
  Synthetic oligonucleotide

SEQ ID NO: 534266 - DNA, 60 bp, Artificial; identical to SEQ ID NO: 297444
  Synthetic oligonucleotide

SEQ ID NO: 534267 - DNA, 57 bp, Artificial; identical to SEQ ID NO: 297449
  Synthetic oligonucleotide

SEQ ID NO: 534268 - DNA, 55 bp, Artificial; identical to SEQ ID NO: 297450
  Synthetic oligonucleotide

SEQ ID NO: 534269 - DNA, 54 bp, Artificial; identical to SEQ ID NO: 297452
  Synthetic oligonucleotide

SEQ ID NO: 534270 - DNA, 53 bp, Artificial; identical to SEQ ID NO: 297456
  Synthetic oligonucleotide

SEQ ID NO: 534271 - DNA, 55 bp, Artificial; identical to SEQ ID NO: 297460
  Synthetic oligonucleotide

SEQ ID NO: 534272 - DNA, 56 bp, Artificial; identical to SEQ ID NO: 297461
  Synthetic oligonucleotide

SEQ ID NO: 534273 - DNA, 54 bp, Artificial; identical to SEQ ID NO: 297465
  Synthetic oligonucleotide

SEQ ID NO: 534274 - DNA, 53 bp, Artificial; identical to SEQ ID NO: 297467
  Synthetic oligonucleotide

SEQ ID NO: 534275 - DNA, 52 bp, Artificial; identical to SEQ ID NO: 297472
  Synthetic oligonucleotide

SEQ ID NO: 534276 - DNA, 50 bp, Artificial; identical to SEQ ID NO: 297474
  Synthetic oligonucleotide

SEQ ID NO: 534277 - DNA, 53 bp, Artificial; identical to SEQ ID NO: 297478
  Synthetic oligonucleotide

SEQ ID NO: 534278 - DNA, 59 bp, Artificial; identical to SEQ ID NO: 297479
  Synthetic oligonucleotide

SEQ ID NO: 534279 - DNA, 55 bp, Artificial; identical to SEQ ID NO: 297480
  Synthetic oligonucleotide

SEQ ID NO: 534280 - DNA, 52 bp, Artificial; identical to SEQ ID NO: 297481
  Synthetic oligonucleotide

SEQ ID NO: 534281 - DNA, 50 bp, Artificial; identical to SEQ ID NO: 297482
  Synthetic oligonucleotide

SEQ ID NO: 534282 - DNA, 53 bp, Artificial; identical to SEQ ID NO: 297483
  Synthetic oligonucleotide

SEQ ID NO: 534283 - DNA, 56 bp, Artificial; identical to SEQ ID NO: 297488
  Synthetic oligonucleotide

SEQ ID NO: 534284 - DNA, 51 bp, Artificial; identical to SEQ ID NO: 297490
  Synthetic oligonucleotide

SEQ ID NO: 534285 - DNA, 55 bp, Artificial; identical to SEQ ID NO: 297492
  Synthetic oligonucleotide

SEQ ID NO: 534286 - DNA, 51 bp, Artificial; identical to SEQ ID NO: 297494
  Synthetic oligonucleotide

SEQ ID NO: 534287 - DNA, 59 bp, Artificial; identical to SEQ ID NO: 297495
  Synthetic oligonucleotide

SEQ ID NO: 534288 - DNA, 56 bp, Artificial; identical to SEQ ID NO: 297496
  Synthetic oligonucleotide

SEQ ID NO: 534289 - DNA, 56 bp, Artificial; identical to SEQ ID NO: 297497
  Synthetic oligonucleotide

SEQ ID NO: 534290 - DNA, 54 bp, Artificial; identical to SEQ ID NO: 297502
  Synthetic oligonucleotide

SEQ ID NO: 534291 - DNA, 53 bp, Artificial; identical to SEQ ID NO: 297504
  Synthetic oligonucleotide

SEQ ID NO: 534292 - DNA, 54 bp, Artificial; identical to SEQ ID NO: 297505
  Synthetic oligonucleotide

SEQ ID NO: 534293 - DNA, 52 bp, Artificial; identical to SEQ ID NO: 297510
  Synthetic oligonucleotide

SEQ ID NO: 534294 - DNA, 55 bp, Artificial; identical to SEQ ID NO: 14329
  Synthetic oligonucleotide

SEQ ID NO: 534295 - DNA, 53 bp, Artificial; identical to SEQ ID NO: 297516
  Synthetic oligonucleotide

SEQ ID NO: 534296 - DNA, 55 bp, Artificial; identical to SEQ ID NO: 297517
  Synthetic oligonucleotide

SEQ ID NO: 534297 - DNA, 56 bp, Artificial; identical to SEQ ID NO: 297521
  Synthetic oligonucleotide

SEQ ID NO: 534298 - DNA, 51 bp, Artificial; identical to SEQ ID NO: 297523
  Synthetic oligonucleotide

SEQ ID NO: 534299 - DNA, 55 bp, Artificial; identical to SEQ ID NO: 297527
  Synthetic oligonucleotide

SEQ ID NO: 534300 - DNA, 51 bp, Artificial; identical to SEQ ID NO: 297528
  Synthetic oligonucleotide

SEQ ID NO: 534301 - DNA, 52 bp, Artificial; identical to SEQ ID NO: 297534
  Synthetic oligonucleotide

SEQ ID NO: 534302 - DNA, 53 bp, Artificial; identical to SEQ ID NO: 297536
  Synthetic oligonucleotide

SEQ ID NO: 534303 - DNA, 60 bp, Artificial; identical to SEQ ID NO: 297537
  Synthetic oligonucleotide

SEQ ID NO: 534304 - DNA, 55 bp, Artificial; identical to SEQ ID NO: 297538
  Synthetic oligonucleotide

SEQ ID NO: 534305 - DNA, 52 bp, Artificial; identical to SEQ ID NO: 297541
  Synthetic oligonucleotide

SEQ ID NO: 534306 - DNA, 52 bp, Artificial; identical to SEQ ID NO: 297542
  Synthetic oligonucleotide

SEQ ID NO: 534307 - DNA, 50 bp, Artificial; identical to SEQ ID NO: 297546
  Synthetic oligonucleotide

SEQ ID NO: 534308 - DNA, 51 bp, Artificial; identical to SEQ ID NO: 297551
  Synthetic oligonucleotide

SEQ ID NO: 534309 - DNA, 52 bp, Artificial; identical to SEQ ID NO: 297554
  Synthetic oligonucleotide

SEQ ID NO: 534310 - DNA, 53 bp, Artificial; identical to SEQ ID NO: 297556
  Synthetic oligonucleotide

SEQ ID NO: 534311 - DNA, 60 bp, Artificial; identical to SEQ ID NO: 297561
  Synthetic oligonucleotide

SEQ ID NO: 534312 - DNA, 54 bp, Artificial; identical to SEQ ID NO: 297562
  Synthetic oligonucleotide

SEQ ID NO: 534313 - DNA, 53 bp, Artificial; identical to SEQ ID NO: 297563
  Synthetic oligonucleotide

SEQ ID NO: 534314 - DNA, 54 bp, Artificial; identical to SEQ ID NO: 297564
  Synthetic oligonucleotide

SEQ ID NO: 534315 - DNA, 53 bp, Artificial; identical to SEQ ID NO: 297569
  Synthetic oligonucleotide

SEQ ID NO: 534316 - DNA, 51 bp, Artificial; identical to SEQ ID NO: 297573
  Synthetic oligonucleotide

SEQ ID NO: 534317 - DNA, 50 bp, Artificial; identical to SEQ ID NO: 297579
  Synthetic oligonucleotide

SEQ ID NO: 534318 - DNA, 55 bp, Artificial; identical to SEQ ID NO: 297581
  Synthetic oligonucleotide

SEQ ID NO: 534319 - DNA, 52 bp, Artificial; identical to SEQ ID NO: 297582
  Synthetic oligonucleotide

SEQ ID NO: 534320 - DNA, 54 bp, Artificial; identical to SEQ ID NO: 297585
  Synthetic oligonucleotide

SEQ ID NO: 534321 - DNA, 55 bp, Artificial; identical to SEQ ID NO: 297587
  Synthetic oligonucleotide

SEQ ID NO: 534322 - DNA, 55 bp, Artificial; identical to SEQ ID NO: 297594
  Synthetic oligonucleotide

SEQ ID NO: 534323 - DNA, 56 bp, Artificial; identical to SEQ ID NO: 297595
  Synthetic oligonucleotide

SEQ ID NO: 534324 - DNA, 52 bp, Artificial; identical to SEQ ID NO: 297598
  Synthetic oligonucleotide

SEQ ID NO: 534325 - DNA, 55 bp, Artificial; identical to SEQ ID NO: 297599
  Synthetic oligonucleotide

SEQ ID NO: 534326 - DNA, 58 bp, Artificial; identical to SEQ ID NO: 297600
  Synthetic oligonucleotide

SEQ ID NO: 534327 - DNA, 54 bp, Artificial; identical to SEQ ID NO: 297605
  Synthetic oligonucleotide

SEQ ID NO: 534328 - DNA, 58 bp, Artificial; identical to SEQ ID NO: 297606
  Synthetic oligonucleotide

SEQ ID NO: 534329 - DNA, 52 bp, Artificial; identical to SEQ ID NO: 297607
  Synthetic oligonucleotide

SEQ ID NO: 534330 - DNA, 52 bp, Artificial; identical to SEQ ID NO: 297608
  Synthetic oligonucleotide

SEQ ID NO: 534331 - DNA, 54 bp, Artificial; identical to SEQ ID NO: 297610
  Synthetic oligonucleotide

SEQ ID NO: 534332 - DNA, 60 bp, Artificial; identical to SEQ ID NO: 297611
  Synthetic oligonucleotide

SEQ ID NO: 534333 - DNA, 55 bp, Artificial; identical to SEQ ID NO: 297613
  Synthetic oligonucleotide

SEQ ID NO: 534334 - DNA, 60 bp, Artificial; identical to SEQ ID NO: 297617
  Synthetic oligonucleotide

SEQ ID NO: 534335 - DNA, 58 bp, Artificial; identical to SEQ ID NO: 297618
  Synthetic oligonucleotide

SEQ ID NO: 534336 - DNA, 51 bp, Artificial; identical to SEQ ID NO: 297621
  Synthetic oligonucleotide

SEQ ID NO: 534337 - DNA, 53 bp, Artificial; identical to SEQ ID NO: 297625
  Synthetic oligonucleotide

SEQ ID NO: 534338 - DNA, 50 bp, Artificial; identical to SEQ ID NO: 297626
  Synthetic oligonucleotide

SEQ ID NO: 534339 - DNA, 51 bp, Artificial; identical to SEQ ID NO: 297627
  Synthetic oligonucleotide

SEQ ID NO: 534340 - DNA, 60 bp, Artificial; identical to SEQ ID NO: 297628
  Synthetic oligonucleotide

SEQ ID NO: 534341 - DNA, 55 bp, Artificial; identical to SEQ ID NO: 297630
  Synthetic oligonucleotide

SEQ ID NO: 534342 - DNA, 55 bp, Artificial; identical to SEQ ID NO: 297631
  Synthetic oligonucleotide

SEQ ID NO: 534343 - DNA, 55 bp, Artificial; identical to SEQ ID NO: 297635
  Synthetic oligonucleotide

SEQ ID NO: 534344 - DNA, 52 bp, Artificial; identical to SEQ ID NO: 297639
  Synthetic oligonucleotide

SEQ ID NO: 534345 - DNA, 60 bp, Artificial; identical to SEQ ID NO: 297642
  Synthetic oligonucleotide

SEQ ID NO: 534346 - DNA, 55 bp, Artificial; identical to SEQ ID NO: 297643
  Synthetic oligonucleotide

SEQ ID NO: 534347 - DNA, 50 bp, Artificial; identical to SEQ ID NO: 297644
  Synthetic oligonucleotide

SEQ ID NO: 534348 - DNA, 55 bp, Artificial; identical to SEQ ID NO: 297646
  Synthetic oligonucleotide

SEQ ID NO: 534349 - DNA, 60 bp, Artificial; identical to SEQ ID NO: 297647
  Synthetic oligonucleotide

SEQ ID NO: 534350 - DNA, 53 bp, Artificial; identical to SEQ ID NO: 297649
  Synthetic oligonucleotide

SEQ ID NO: 534351 - DNA, 53 bp, Artificial; identical to SEQ ID NO: 297654
  Synthetic oligonucleotide

SEQ ID NO: 534352 - DNA, 59 bp, Artificial; identical to SEQ ID NO: 297657
  Synthetic oligonucleotide

SEQ ID NO: 534353 - DNA, 55 bp, Artificial; identical to SEQ ID NO: 297661
  Synthetic oligonucleotide

SEQ ID NO: 534354 - DNA, 60 bp, Artificial; identical to SEQ ID NO: 297668
  Synthetic oligonucleotide

SEQ ID NO: 534355 - DNA, 59 bp, Artificial; identical to SEQ ID NO: 297671
  Synthetic oligonucleotide

SEQ ID NO: 534356 - DNA, 58 bp, Artificial; identical to SEQ ID NO: 297680
  Synthetic oligonucleotide

SEQ ID NO: 534357 - DNA, 53 bp, Artificial; identical to SEQ ID NO: 297681
  Synthetic oligonucleotide

SEQ ID NO: 534358 - DNA, 60 bp, Artificial; identical to SEQ ID NO: 297684
  Synthetic oligonucleotide

SEQ ID NO: 534359 - DNA, 58 bp, Artificial; identical to SEQ ID NO: 297685
  Synthetic oligonucleotide

SEQ ID NO: 534360 - DNA, 55 bp, Artificial; identical to SEQ ID NO: 297686
  Synthetic oligonucleotide

SEQ ID NO: 534361 - DNA, 55 bp, Artificial; identical to SEQ ID NO: 297696
  Synthetic oligonucleotide

SEQ ID NO: 534362 - DNA, 53 bp, Artificial; identical to SEQ ID NO: 297698
  Synthetic oligonucleotide

SEQ ID NO: 534363 - DNA, 54 bp, Artificial; identical to SEQ ID NO: 297699
  Synthetic oligonucleotide

SEQ ID NO: 534364 - DNA, 51 bp, Artificial; identical to SEQ ID NO: 297705
  Synthetic oligonucleotide

SEQ ID NO: 534365 - DNA, 57 bp, Artificial; identical to SEQ ID NO: 297707
  Synthetic oligonucleotide

SEQ ID NO: 534366 - DNA, 60 bp, Artificial; identical to SEQ ID NO: 297708
  Synthetic oligonucleotide

SEQ ID NO: 534367 - DNA, 51 bp, Artificial; identical to SEQ ID NO: 297714
  Synthetic oligonucleotide

SEQ ID NO: 534368 - DNA, 59 bp, Artificial; identical to SEQ ID NO: 297716
  Synthetic oligonucleotide

SEQ ID NO: 534369 - DNA, 53 bp, Artificial; identical to SEQ ID NO: 297717
  Synthetic oligonucleotide

SEQ ID NO: 534370 - DNA, 58 bp, Artificial; identical to SEQ ID NO: 297718
  Synthetic oligonucleotide

SEQ ID NO: 534371 - DNA, 59 bp, Artificial; identical to SEQ ID NO: 297722
  Synthetic oligonucleotide

SEQ ID NO: 534372 - DNA, 59 bp, Artificial; identical to SEQ ID NO: 297723
  Synthetic oligonucleotide

SEQ ID NO: 534373 - DNA, 55 bp, Artificial; identical to SEQ ID NO: 297727
  Synthetic oligonucleotide

SEQ ID NO: 534374 - DNA, 60 bp, Artificial; identical to SEQ ID NO: 297728
  Synthetic oligonucleotide

SEQ ID NO: 534375 - DNA, 57 bp, Artificial; identical to SEQ ID NO: 297730
  Synthetic oligonucleotide

SEQ ID NO: 534376 - DNA, 55 bp, Artificial; identical to SEQ ID NO: 297731
  Synthetic oligonucleotide

SEQ ID NO: 534377 - DNA, 51 bp, Artificial; identical to SEQ ID NO: 297733
  Synthetic oligonucleotide

SEQ ID NO: 534378 - DNA, 53 bp, Artificial; identical to SEQ ID NO: 297735
  Synthetic oligonucleotide

SEQ ID NO: 534379 - DNA, 57 bp, Artificial; identical to SEQ ID NO: 297736
  Synthetic oligonucleotide

SEQ ID NO: 534380 - DNA, 50 bp, Artificial; identical to SEQ ID NO: 297738
  Synthetic oligonucleotide

SEQ ID NO: 534381 - DNA, 57 bp, Artificial; identical to SEQ ID NO: 297739
  Synthetic oligonucleotide

SEQ ID NO: 534382 - DNA, 50 bp, Artificial; identical to SEQ ID NO: 297743
  Synthetic oligonucleotide

SEQ ID NO: 534383 - DNA, 60 bp, Artificial; identical to SEQ ID NO: 297745
  Synthetic oligonucleotide

SEQ ID NO: 534384 - DNA, 55 bp, Artificial; identical to SEQ ID NO: 297746
  Synthetic oligonucleotide

SEQ ID NO: 534385 - DNA, 54 bp, Artificial; identical to SEQ ID NO: 297748
  Synthetic oligonucleotide

SEQ ID NO: 534386 - DNA, 53 bp, Artificial; identical to SEQ ID NO: 297751
  Synthetic oligonucleotide

SEQ ID NO: 534387 - DNA, 56 bp, Artificial; identical to SEQ ID NO: 297752
  Synthetic oligonucleotide

SEQ ID NO: 534388 - DNA, 56 bp, Artificial; identical to SEQ ID NO: 297753
  Synthetic oligonucleotide

SEQ ID NO: 534389 - DNA, 51 bp, Artificial; identical to SEQ ID NO: 297756
  Synthetic oligonucleotide

SEQ ID NO: 534390 - DNA, 57 bp, Artificial; identical to SEQ ID NO: 297760
  Synthetic oligonucleotide

SEQ ID NO: 534391 - DNA, 55 bp, Artificial; identical to SEQ ID NO: 297762
  Synthetic oligonucleotide

SEQ ID NO: 534392 - DNA, 55 bp, Artificial; identical to SEQ ID NO: 297766
  Synthetic oligonucleotide

SEQ ID NO: 534393 - DNA, 52 bp, Artificial; identical to SEQ ID NO: 8156
  Synthetic oligonucleotide

SEQ ID NO: 534394 - DNA, 50 bp, Artificial; identical to SEQ ID NO: 297775
  Synthetic oligonucleotide

SEQ ID NO: 534395 - DNA, 57 bp, Artificial; identical to SEQ ID NO: 297780
  Synthetic oligonucleotide

SEQ ID NO: 534396 - DNA, 56 bp, Artificial; identical to SEQ ID NO: 297781
  Synthetic oligonucleotide

SEQ ID NO: 534397 - DNA, 51 bp, Artificial; identical to SEQ ID NO: 297783
  Synthetic oligonucleotide

SEQ ID NO: 534398 - DNA, 57 bp, Artificial; identical to SEQ ID NO: 297784
  Synthetic oligonucleotide

SEQ ID NO: 534399 - DNA, 55 bp, Artificial; identical to SEQ ID NO: 297785
  Synthetic oligonucleotide

SEQ ID NO: 534400 - DNA, 58 bp, Artificial; identical to SEQ ID NO: 297789
  Synthetic oligonucleotide

SEQ ID NO: 534401 - DNA, 59 bp, Artificial; identical to SEQ ID NO: 297791
  Synthetic oligonucleotide

SEQ ID NO: 534402 - DNA, 51 bp, Artificial; identical to SEQ ID NO: 297800
  Synthetic oligonucleotide

SEQ ID NO: 534403 - DNA, 55 bp, Artificial; identical to SEQ ID NO: 297801
  Synthetic oligonucleotide

SEQ ID NO: 534404 - DNA, 54 bp, Artificial; identical to SEQ ID NO: 297802
  Synthetic oligonucleotide

SEQ ID NO: 534405 - DNA, 55 bp, Artificial; identical to SEQ ID NO: 297804
  Synthetic oligonucleotide

SEQ ID NO: 534406 - DNA, 51 bp, Artificial; identical to SEQ ID NO: 297806
  Synthetic oligonucleotide

SEQ ID NO: 534407 - DNA, 54 bp, Artificial; identical to SEQ ID NO: 297808
  Synthetic oligonucleotide

SEQ ID NO: 534408 - DNA, 52 bp, Artificial; identical to SEQ ID NO: 297813
  Synthetic oligonucleotide

SEQ ID NO: 534409 - DNA, 55 bp, Artificial; identical to SEQ ID NO: 297819
  Synthetic oligonucleotide

SEQ ID NO: 534410 - DNA, 53 bp, Artificial; identical to SEQ ID NO: 297820
  Synthetic oligonucleotide

SEQ ID NO: 534411 - DNA, 60 bp, Artificial; identical to SEQ ID NO: 297821
  Synthetic oligonucleotide

SEQ ID NO: 534412 - DNA, 59 bp, Artificial; identical to SEQ ID NO: 297822
  Synthetic oligonucleotide

SEQ ID NO: 534413 - DNA, 54 bp, Artificial; identical to SEQ ID NO: 297823
  Synthetic oligonucleotide

SEQ ID NO: 534414 - DNA, 54 bp, Artificial; identical to SEQ ID NO: 297824
  Synthetic oligonucleotide

SEQ ID NO: 534415 - DNA, 55 bp, Artificial; identical to SEQ ID NO: 297826
  Synthetic oligonucleotide

SEQ ID NO: 534416 - DNA, 55 bp, Artificial; identical to SEQ ID NO: 297827
  Synthetic oligonucleotide

SEQ ID NO: 534417 - DNA, 52 bp, Artificial; identical to SEQ ID NO: 297828
  Synthetic oligonucleotide

SEQ ID NO: 534418 - DNA, 52 bp, Artificial; identical to SEQ ID NO: 297829
  Synthetic oligonucleotide

SEQ ID NO: 534419 - DNA, 51 bp, Artificial; identical to SEQ ID NO: 9426
  Synthetic oligonucleotide

SEQ ID NO: 534420 - DNA, 52 bp, Artificial; identical to SEQ ID NO: 297831
  Synthetic oligonucleotide

SEQ ID NO: 534421 - DNA, 55 bp, Artificial; identical to SEQ ID NO: 297833
  Synthetic oligonucleotide

SEQ ID NO: 534422 - DNA, 60 bp, Artificial; identical to SEQ ID NO: 297834
  Synthetic oligonucleotide

SEQ ID NO: 534423 - DNA, 60 bp, Artificial; identical to SEQ ID NO: 297838
  Synthetic oligonucleotide

SEQ ID NO: 534424 - DNA, 57 bp, Artificial; identical to SEQ ID NO: 297841
  Synthetic oligonucleotide

SEQ ID NO: 534425 - DNA, 54 bp, Artificial; identical to SEQ ID NO: 297849
  Synthetic oligonucleotide

SEQ ID NO: 534426 - DNA, 55 bp, Artificial; identical to SEQ ID NO: 297850
  Synthetic oligonucleotide

SEQ ID NO: 534427 - DNA, 60 bp, Artificial; identical to SEQ ID NO: 297851
  Synthetic oligonucleotide

SEQ ID NO: 534428 - DNA, 55 bp, Artificial; identical to SEQ ID NO: 297852
  Synthetic oligonucleotide

SEQ ID NO: 534429 - DNA, 56 bp, Artificial; identical to SEQ ID NO: 297853
  Synthetic oligonucleotide

SEQ ID NO: 534430 - DNA, 52 bp, Artificial; identical to SEQ ID NO: 297854
  Synthetic oligonucleotide

SEQ ID NO: 534431 - DNA, 60 bp, Artificial; identical to SEQ ID NO: 7114
  Synthetic oligonucleotide

SEQ ID NO: 534432 - DNA, 56 bp, Artificial; identical to SEQ ID NO: 297859
  Synthetic oligonucleotide

SEQ ID NO: 534433 - DNA, 57 bp, Artificial; identical to SEQ ID NO: 297860
  Synthetic oligonucleotide

SEQ ID NO: 534434 - DNA, 55 bp, Artificial; identical to SEQ ID NO: 297864
  Synthetic oligonucleotide

SEQ ID NO: 534435 - DNA, 55 bp, Artificial; identical to SEQ ID NO: 297867
  Synthetic oligonucleotide

SEQ ID NO: 534436 - DNA, 55 bp, Artificial; identical to SEQ ID NO: 297874
  Synthetic oligonucleotide

SEQ ID NO: 534437 - DNA, 57 bp, Artificial; identical to SEQ ID NO: 297875
  Synthetic oligonucleotide

SEQ ID NO: 534438 - DNA, 53 bp, Artificial; identical to SEQ ID NO: 297878
  Synthetic oligonucleotide

SEQ ID NO: 534439 - DNA, 53 bp, Artificial; identical to SEQ ID NO: 297883
  Synthetic oligonucleotide

SEQ ID NO: 534440 - DNA, 57 bp, Artificial; identical to SEQ ID NO: 297887
  Synthetic oligonucleotide

SEQ ID NO: 534441 - DNA, 53 bp, Artificial; identical to SEQ ID NO: 297892
  Synthetic oligonucleotide

SEQ ID NO: 534442 - DNA, 51 bp, Artificial; identical to SEQ ID NO: 297894
  Synthetic oligonucleotide

SEQ ID NO: 534443 - DNA, 50 bp, Artificial; identical to SEQ ID NO: 297896
  Synthetic oligonucleotide

SEQ ID NO: 534444 - DNA, 53 bp, Artificial; identical to SEQ ID NO: 297902
  Synthetic oligonucleotide

SEQ ID NO: 534445 - DNA, 54 bp, Artificial; identical to SEQ ID NO: 297904
  Synthetic oligonucleotide

SEQ ID NO: 534446 - DNA, 57 bp, Artificial; identical to SEQ ID NO: 297907
  Synthetic oligonucleotide

SEQ ID NO: 534447 - DNA, 60 bp, Artificial; identical to SEQ ID NO: 297909
  Synthetic oligonucleotide

SEQ ID NO: 534448 - DNA, 50 bp, Artificial; identical to SEQ ID NO: 297913
  Synthetic oligonucleotide

SEQ ID NO: 534449 - DNA, 55 bp, Artificial; identical to SEQ ID NO: 297914
  Synthetic oligonucleotide

SEQ ID NO: 534450 - DNA, 55 bp, Artificial; identical to SEQ ID NO: 297916
  Synthetic oligonucleotide

SEQ ID NO: 534451 - DNA, 54 bp, Artificial; identical to SEQ ID NO: 297922
  Synthetic oligonucleotide

SEQ ID NO: 534452 - DNA, 54 bp, Artificial; identical to SEQ ID NO: 297923
  Synthetic oligonucleotide

SEQ ID NO: 534453 - DNA, 60 bp, Artificial; identical to SEQ ID NO: 297936
  Synthetic oligonucleotide

SEQ ID NO: 534454 - DNA, 59 bp, Artificial; identical to SEQ ID NO: 297938
  Synthetic oligonucleotide

SEQ ID NO: 534455 - DNA, 59 bp, Artificial; identical to SEQ ID NO: 297941
  Synthetic oligonucleotide

SEQ ID NO: 534456 - DNA, 55 bp, Artificial; identical to SEQ ID NO: 297943
  Synthetic oligonucleotide

SEQ ID NO: 534457 - DNA, 51 bp, Artificial; identical to SEQ ID NO: 297946
  Synthetic oligonucleotide

SEQ ID NO: 534458 - DNA, 55 bp, Artificial; identical to SEQ ID NO: 297948
  Synthetic oligonucleotide

SEQ ID NO: 534459 - DNA, 54 bp, Artificial; identical to SEQ ID NO: 297951
  Synthetic oligonucleotide

SEQ ID NO: 534460 - DNA, 54 bp, Artificial; identical to SEQ ID NO: 297952
  Synthetic oligonucleotide

SEQ ID NO: 534461 - DNA, 56 bp, Artificial; identical to SEQ ID NO: 297954
  Synthetic oligonucleotide

SEQ ID NO: 534462 - DNA, 50 bp, Artificial; identical to SEQ ID NO: 297958
  Synthetic oligonucleotide

SEQ ID NO: 534463 - DNA, 53 bp, Artificial; identical to SEQ ID NO: 297961
  Synthetic oligonucleotide

SEQ ID NO: 534464 - DNA, 51 bp, Artificial; identical to SEQ ID NO: 297967
  Synthetic oligonucleotide

SEQ ID NO: 534465 - DNA, 55 bp, Artificial; identical to SEQ ID NO: 297972
  Synthetic oligonucleotide

SEQ ID NO: 534466 - DNA, 60 bp, Artificial; identical to SEQ ID NO: 297973
  Synthetic oligonucleotide

SEQ ID NO: 534467 - DNA, 57 bp, Artificial; identical to SEQ ID NO: 297974
  Synthetic oligonucleotide

SEQ ID NO: 534468 - DNA, 56 bp, Artificial; identical to SEQ ID NO: 297981
  Synthetic oligonucleotide

SEQ ID NO: 534469 - DNA, 55 bp, Artificial; identical to SEQ ID NO: 297982
  Synthetic oligonucleotide

SEQ ID NO: 534470 - DNA, 60 bp, Artificial; identical to SEQ ID NO: 297984
  Synthetic oligonucleotide

SEQ ID NO: 534471 - DNA, 53 bp, Artificial; identical to SEQ ID NO: 297985
  Synthetic oligonucleotide

SEQ ID NO: 534472 - DNA, 55 bp, Artificial; identical to SEQ ID NO: 13027
  Synthetic oligonucleotide

SEQ ID NO: 534473 - DNA, 56 bp, Artificial; identical to SEQ ID NO: 297991
  Synthetic oligonucleotide

SEQ ID NO: 534474 - DNA, 60 bp, Artificial; identical to SEQ ID NO: 297993
  Synthetic oligonucleotide

SEQ ID NO: 534475 - DNA, 58 bp, Artificial; identical to SEQ ID NO: 297994
  Synthetic oligonucleotide

SEQ ID NO: 534476 - DNA, 52 bp, Artificial; identical to SEQ ID NO: 297996
  Synthetic oligonucleotide

SEQ ID NO: 534477 - DNA, 60 bp, Artificial; identical to SEQ ID NO: 15279
  Synthetic oligonucleotide

SEQ ID NO: 534478 - DNA, 58 bp, Artificial; identical to SEQ ID NO: 297999
  Synthetic oligonucleotide

SEQ ID NO: 534479 - DNA, 60 bp, Artificial; identical to SEQ ID NO: 298000
  Synthetic oligonucleotide

SEQ ID NO: 534480 - DNA, 53 bp, Artificial; identical to SEQ ID NO: 298005
  Synthetic oligonucleotide

SEQ ID NO: 534481 - DNA, 55 bp, Artificial; identical to SEQ ID NO: 298008
  Synthetic oligonucleotide

SEQ ID NO: 534482 - DNA, 55 bp, Artificial; identical to SEQ ID NO: 298010
  Synthetic oligonucleotide

SEQ ID NO: 534483 - DNA, 55 bp, Artificial; identical to SEQ ID NO: 298014
  Synthetic oligonucleotide

SEQ ID NO: 534484 - DNA, 60 bp, Artificial; identical to SEQ ID NO: 298015
  Synthetic oligonucleotide

SEQ ID NO: 534485 - DNA, 58 bp, Artificial; identical to SEQ ID NO: 298016
  Synthetic oligonucleotide

SEQ ID NO: 534486 - DNA, 58 bp, Artificial; identical to SEQ ID NO: 298017
  Synthetic oligonucleotide

SEQ ID NO: 534487 - DNA, 53 bp, Artificial; identical to SEQ ID NO: 298022
  Synthetic oligonucleotide

SEQ ID NO: 534488 - DNA, 54 bp, Artificial; identical to SEQ ID NO: 298024
  Synthetic oligonucleotide

SEQ ID NO: 534489 - DNA, 57 bp, Artificial; identical to SEQ ID NO: 17864
  Synthetic oligonucleotide

SEQ ID NO: 534490 - DNA, 54 bp, Artificial; identical to SEQ ID NO: 298027
  Synthetic oligonucleotide

SEQ ID NO: 534491 - DNA, 52 bp, Artificial; identical to SEQ ID NO: 298030
  Synthetic oligonucleotide

SEQ ID NO: 534492 - DNA, 58 bp, Artificial; identical to SEQ ID NO: 298031
  Synthetic oligonucleotide

SEQ ID NO: 534493 - DNA, 59 bp, Artificial; identical to SEQ ID NO: 298034
  Synthetic oligonucleotide

SEQ ID NO: 534494 - DNA, 53 bp, Artificial; identical to SEQ ID NO: 298035
  Synthetic oligonucleotide

SEQ ID NO: 534495 - DNA, 56 bp, Artificial; identical to SEQ ID NO: 298036
  Synthetic oligonucleotide

SEQ ID NO: 534496 - DNA, 60 bp, Artificial; identical to SEQ ID NO: 298037
  Synthetic oligonucleotide

SEQ ID NO: 534497 - DNA, 57 bp, Artificial; identical to SEQ ID NO: 298041
  Synthetic oligonucleotide

SEQ ID NO: 534498 - DNA, 56 bp, Artificial; identical to SEQ ID NO: 298042
  Synthetic oligonucleotide

SEQ ID NO: 534499 - DNA, 58 bp, Artificial; identical to SEQ ID NO: 298043
  Synthetic oligonucleotide

SEQ ID NO: 534500 - DNA, 51 bp, Artificial; identical to SEQ ID NO: 298044
  Synthetic oligonucleotide

SEQ ID NO: 534501 - DNA, 54 bp, Artificial; identical to SEQ ID NO: 298046
  Synthetic oligonucleotide

SEQ ID NO: 534502 - DNA, 52 bp, Artificial; identical to SEQ ID NO: 298052
  Synthetic oligonucleotide

SEQ ID NO: 534503 - DNA, 55 bp, Artificial; identical to SEQ ID NO: 298053
  Synthetic oligonucleotide

SEQ ID NO: 534504 - DNA, 54 bp, Artificial; identical to SEQ ID NO: 298054
  Synthetic oligonucleotide

SEQ ID NO: 534505 - DNA, 55 bp, Artificial; identical to SEQ ID NO: 298057
  Synthetic oligonucleotide

SEQ ID NO: 534506 - DNA, 55 bp, Artificial; identical to SEQ ID NO: 298058
  Synthetic oligonucleotide

SEQ ID NO: 534507 - DNA, 60 bp, Artificial; identical to SEQ ID NO: 298063
  Synthetic oligonucleotide

SEQ ID NO: 534508 - DNA, 50 bp, Artificial; identical to SEQ ID NO: 298065
  Synthetic oligonucleotide

SEQ ID NO: 534509 - DNA, 56 bp, Artificial; identical to SEQ ID NO: 298066
  Synthetic oligonucleotide

SEQ ID NO: 534510 - DNA, 50 bp, Artificial; identical to SEQ ID NO: 298068
  Synthetic oligonucleotide

SEQ ID NO: 534511 - DNA, 58 bp, Artificial; identical to SEQ ID NO: 298070
  Synthetic oligonucleotide

SEQ ID NO: 534512 - DNA, 59 bp, Artificial; identical to SEQ ID NO: 298071
  Synthetic oligonucleotide

SEQ ID NO: 534513 - DNA, 59 bp, Artificial; identical to SEQ ID NO: 298074
  Synthetic oligonucleotide

SEQ ID NO: 534514 - DNA, 55 bp, Artificial; identical to SEQ ID NO: 298079
  Synthetic oligonucleotide

SEQ ID NO: 534515 - DNA, 55 bp, Artificial; identical to SEQ ID NO: 298083
  Synthetic oligonucleotide

SEQ ID NO: 534516 - DNA, 56 bp, Artificial; identical to SEQ ID NO: 20379
  Synthetic oligonucleotide

SEQ ID NO: 534517 - DNA, 54 bp, Artificial; identical to SEQ ID NO: 298087
  Synthetic oligonucleotide

SEQ ID NO: 534518 - DNA, 57 bp, Artificial; identical to SEQ ID NO: 298090
  Synthetic oligonucleotide

SEQ ID NO: 534519 - DNA, 60 bp, Artificial; identical to SEQ ID NO: 298093
  Synthetic oligonucleotide

SEQ ID NO: 534520 - DNA, 50 bp, Artificial; identical to SEQ ID NO: 298094
  Synthetic oligonucleotide

SEQ ID NO: 534521 - DNA, 60 bp, Artificial; identical to SEQ ID NO: 298096
  Synthetic oligonucleotide

SEQ ID NO: 534522 - DNA, 58 bp, Artificial; identical to SEQ ID NO: 298097
  Synthetic oligonucleotide

SEQ ID NO: 534523 - DNA, 56 bp, Artificial; identical to SEQ ID NO: 298098
  Synthetic oligonucleotide

SEQ ID NO: 534524 - DNA, 59 bp, Artificial; identical to SEQ ID NO: 298099
  Synthetic oligonucleotide

SEQ ID NO: 534525 - DNA, 57 bp, Artificial; identical to SEQ ID NO: 298104
  Synthetic oligonucleotide

SEQ ID NO: 534526 - DNA, 55 bp, Artificial; identical to SEQ ID NO: 298106
  Synthetic oligonucleotide

SEQ ID NO: 534527 - DNA, 60 bp, Artificial; identical to SEQ ID NO: 298107
  Synthetic oligonucleotide

SEQ ID NO: 534528 - DNA, 56 bp, Artificial; identical to SEQ ID NO: 298112
  Synthetic oligonucleotide

SEQ ID NO: 534529 - DNA, 49 bp, Artificial; identical to SEQ ID NO: 298113
  Synthetic oligonucleotide

SEQ ID NO: 534530 - DNA, 51 bp, Artificial; identical to SEQ ID NO: 298116
  Synthetic oligonucleotide

SEQ ID NO: 534531 - DNA, 55 bp, Artificial; identical to SEQ ID NO: 298121
  Synthetic oligonucleotide

SEQ ID NO: 534532 - DNA, 55 bp, Artificial; identical to SEQ ID NO: 298122
  Synthetic oligonucleotide

SEQ ID NO: 534533 - DNA, 60 bp, Artificial; identical to SEQ ID NO: 298126
  Synthetic oligonucleotide

SEQ ID NO: 534534 - DNA, 57 bp, Artificial; identical to SEQ ID NO: 298127
  Synthetic oligonucleotide

SEQ ID NO: 534535 - DNA, 60 bp, Artificial; identical to SEQ ID NO: 298130
  Synthetic oligonucleotide

SEQ ID NO: 534536 - DNA, 60 bp, Artificial; identical to SEQ ID NO: 55800
  Synthetic oligonucleotide

SEQ ID NO: 534537 - DNA, 60 bp, Artificial; identical to SEQ ID NO: 298131
  Synthetic oligonucleotide

SEQ ID NO: 534538 - DNA, 50 bp, Artificial; identical to SEQ ID NO: 298133
  Synthetic oligonucleotide

SEQ ID NO: 534539 - DNA, 52 bp, Artificial; identical to SEQ ID NO: 298134
  Synthetic oligonucleotide

SEQ ID NO: 534540 - DNA, 55 bp, Artificial; identical to SEQ ID NO: 298136
  Synthetic oligonucleotide

SEQ ID NO: 534541 - DNA, 60 bp, Artificial; identical to SEQ ID NO: 298138
  Synthetic oligonucleotide

SEQ ID NO: 534542 - DNA, 57 bp, Artificial; identical to SEQ ID NO: 298142
  Synthetic oligonucleotide

SEQ ID NO: 534543 - DNA, 60 bp, Artificial; identical to SEQ ID NO: 298143
  Synthetic oligonucleotide

SEQ ID NO: 534544 - DNA, 55 bp, Artificial; identical to SEQ ID NO: 298144
  Synthetic oligonucleotide

SEQ ID NO: 534545 - DNA, 59 bp, Artificial; identical to SEQ ID NO: 298146
  Synthetic oligonucleotide

SEQ ID NO: 534546 - DNA, 56 bp, Artificial; identical to SEQ ID NO: 298149
  Synthetic oligonucleotide

SEQ ID NO: 534547 - DNA, 60 bp, Artificial; identical to SEQ ID NO: 298150
  Synthetic oligonucleotide

SEQ ID NO: 534548 - DNA, 58 bp, Artificial; identical to SEQ ID NO: 298151
  Synthetic oligonucleotide

SEQ ID NO: 534549 - DNA, 55 bp, Artificial; identical to SEQ ID NO: 298154
  Synthetic oligonucleotide

SEQ ID NO: 534550 - DNA, 52 bp, Artificial; identical to SEQ ID NO: 298155
  Synthetic oligonucleotide

SEQ ID NO: 534551 - DNA, 57 bp, Artificial; identical to SEQ ID NO: 298157
  Synthetic oligonucleotide

SEQ ID NO: 534552 - DNA, 56 bp, Artificial; identical to SEQ ID NO: 298159
  Synthetic oligonucleotide

SEQ ID NO: 534553 - DNA, 60 bp, Artificial; identical to SEQ ID NO: 298160
  Synthetic oligonucleotide

SEQ ID NO: 534554 - DNA, 52 bp, Artificial; identical to SEQ ID NO: 298161
  Synthetic oligonucleotide

SEQ ID NO: 534555 - DNA, 54 bp, Artificial; identical to SEQ ID NO: 298163
  Synthetic oligonucleotide

SEQ ID NO: 534556 - DNA, 56 bp, Artificial; identical to SEQ ID NO: 298164
  Synthetic oligonucleotide

SEQ ID NO: 534557 - DNA, 55 bp, Artificial; identical to SEQ ID NO: 298166
  Synthetic oligonucleotide

SEQ ID NO: 534558 - DNA, 59 bp, Artificial; identical to SEQ ID NO: 298167
  Synthetic oligonucleotide

SEQ ID NO: 534559 - DNA, 51 bp, Artificial; identical to SEQ ID NO: 7960
  Synthetic oligonucleotide

SEQ ID NO: 534560 - DNA, 55 bp, Artificial; identical to SEQ ID NO: 298170
  Synthetic oligonucleotide

SEQ ID NO: 534561 - DNA, 60 bp, Artificial; identical to SEQ ID NO: 298172
  Synthetic oligonucleotide

SEQ ID NO: 534562 - DNA, 55 bp, Artificial; identical to SEQ ID NO: 298174
  Synthetic oligonucleotide

SEQ ID NO: 534563 - DNA, 58 bp, Artificial; identical to SEQ ID NO: 298176
  Synthetic oligonucleotide

SEQ ID NO: 534564 - DNA, 60 bp, Artificial; identical to SEQ ID NO: 12658
  Synthetic oligonucleotide

SEQ ID NO: 534565 - DNA, 60 bp, Artificial; identical to SEQ ID NO: 298181
  Synthetic oligonucleotide

SEQ ID NO: 534566 - DNA, 59 bp, Artificial; identical to SEQ ID NO: 298184
  Synthetic oligonucleotide

SEQ ID NO: 534567 - DNA, 54 bp, Artificial; identical to SEQ ID NO: 298185
  Synthetic oligonucleotide

SEQ ID NO: 534568 - DNA, 58 bp, Artificial; identical to SEQ ID NO: 298187
  Synthetic oligonucleotide

SEQ ID NO: 534569 - DNA, 59 bp, Artificial; identical to SEQ ID NO: 16836
  Synthetic oligonucleotide

SEQ ID NO: 534570 - DNA, 59 bp, Artificial; identical to SEQ ID NO: 298194
  Synthetic oligonucleotide

SEQ ID NO: 534571 - DNA, 60 bp, Artificial; identical to SEQ ID NO: 298197
  Synthetic oligonucleotide

SEQ ID NO: 534572 - DNA, 60 bp, Artificial; identical to SEQ ID NO: 298202
  Synthetic oligonucleotide

SEQ ID NO: 534573 - DNA, 58 bp, Artificial; identical to SEQ ID NO: 298203
  Synthetic oligonucleotide

SEQ ID NO: 534574 - DNA, 52 bp, Artificial; identical to SEQ ID NO: 298205
  Synthetic oligonucleotide

SEQ ID NO: 534575 - DNA, 51 bp, Artificial; identical to SEQ ID NO: 298208
  Synthetic oligonucleotide

SEQ ID NO: 534576 - DNA, 55 bp, Artificial; identical to SEQ ID NO: 298209
  Synthetic oligonucleotide

SEQ ID NO: 534577 - DNA, 55 bp, Artificial; identical to SEQ ID NO: 298211
  Synthetic oligonucleotide

SEQ ID NO: 534578 - DNA, 52 bp, Artificial; identical to SEQ ID NO: 298213
  Synthetic oligonucleotide

SEQ ID NO: 534579 - DNA, 60 bp, Artificial; identical to SEQ ID NO: 298215
  Synthetic oligonucleotide

SEQ ID NO: 534580 - DNA, 53 bp, Artificial; identical to SEQ ID NO: 298216
  Synthetic oligonucleotide

SEQ ID NO: 534581 - DNA, 59 bp, Artificial; identical to SEQ ID NO: 298218
  Synthetic oligonucleotide

SEQ ID NO: 534582 - DNA, 53 bp, Artificial; identical to SEQ ID NO: 298219
  Synthetic oligonucleotide

SEQ ID NO: 534583 - DNA, 59 bp, Artificial; identical to SEQ ID NO: 298221
  Synthetic oligonucleotide

SEQ ID NO: 534584 - DNA, 58 bp, Artificial; identical to SEQ ID NO: 298223
  Synthetic oligonucleotide

SEQ ID NO: 534585 - DNA, 57 bp, Artificial; identical to SEQ ID NO: 298228
  Synthetic oligonucleotide

SEQ ID NO: 534586 - DNA, 52 bp, Artificial; identical to SEQ ID NO: 298229
  Synthetic oligonucleotide

SEQ ID NO: 534587 - DNA, 60 bp, Artificial; identical to SEQ ID NO: 298232
  Synthetic oligonucleotide

SEQ ID NO: 534588 - DNA, 50 bp, Artificial; identical to SEQ ID NO: 298234
  Synthetic oligonucleotide

SEQ ID NO: 534589 - DNA, 51 bp, Artificial; identical to SEQ ID NO: 298235
  Synthetic oligonucleotide

SEQ ID NO: 534590 - DNA, 59 bp, Artificial; identical to SEQ ID NO: 298237
  Synthetic oligonucleotide

SEQ ID NO: 534591 - DNA, 58 bp, Artificial; identical to SEQ ID NO: 298244
  Synthetic oligonucleotide

SEQ ID NO: 534592 - DNA, 60 bp, Artificial; identical to SEQ ID NO: 298245
  Synthetic oligonucleotide

SEQ ID NO: 534593 - DNA, 57 bp, Artificial; identical to SEQ ID NO: 298247
  Synthetic oligonucleotide

SEQ ID NO: 534594 - DNA, 60 bp, Artificial; identical to SEQ ID NO: 298251
  Synthetic oligonucleotide

SEQ ID NO: 534595 - DNA, 55 bp, Artificial; identical to SEQ ID NO: 298254
  Synthetic oligonucleotide

SEQ ID NO: 534596 - DNA, 50 bp, Artificial; identical to SEQ ID NO: 298256
  Synthetic oligonucleotide

SEQ ID NO: 534597 - DNA, 60 bp, Artificial; identical to SEQ ID NO: 298258
  Synthetic oligonucleotide

SEQ ID NO: 534598 - DNA, 60 bp, Artificial; identical to SEQ ID NO: 298264
  Synthetic oligonucleotide

SEQ ID NO: 534599 - DNA, 51 bp, Artificial; identical to SEQ ID NO: 298266
  Synthetic oligonucleotide

SEQ ID NO: 534600 - DNA, 60 bp, Artificial; identical to SEQ ID NO: 298268
  Synthetic oligonucleotide

SEQ ID NO: 534601 - DNA, 57 bp, Artificial; identical to SEQ ID NO: 298269
  Synthetic oligonucleotide

SEQ ID NO: 534602 - DNA, 60 bp, Artificial; identical to SEQ ID NO: 298270
  Synthetic oligonucleotide

SEQ ID NO: 534603 - DNA, 57 bp, Artificial; identical to SEQ ID NO: 298272
  Synthetic oligonucleotide

SEQ ID NO: 534604 - DNA, 55 bp, Artificial; identical to SEQ ID NO: 298273
  Synthetic oligonucleotide

SEQ ID NO: 534605 - DNA, 60 bp, Artificial; identical to SEQ ID NO: 298275
  Synthetic oligonucleotide

SEQ ID NO: 534606 - DNA, 52 bp, Artificial; identical to SEQ ID NO: 10441
  Synthetic oligonucleotide

SEQ ID NO: 534607 - DNA, 60 bp, Artificial; identical to SEQ ID NO: 298281
  Synthetic oligonucleotide

SEQ ID NO: 534608 - DNA, 59 bp, Artificial; identical to SEQ ID NO: 298282
  Synthetic oligonucleotide

SEQ ID NO: 534609 - DNA, 60 bp, Artificial; identical to SEQ ID NO: 298286
  Synthetic oligonucleotide

SEQ ID NO: 534610 - DNA, 56 bp, Artificial; identical to SEQ ID NO: 298287
  Synthetic oligonucleotide

SEQ ID NO: 534611 - DNA, 60 bp, Artificial; identical to SEQ ID NO: 298288
  Synthetic oligonucleotide

SEQ ID NO: 534612 - DNA, 60 bp, Artificial; identical to SEQ ID NO: 298293
  Synthetic oligonucleotide

SEQ ID NO: 534613 - DNA, 54 bp, Artificial; identical to SEQ ID NO: 298294
  Synthetic oligonucleotide

SEQ ID NO: 534614 - DNA, 50 bp, Artificial; identical to SEQ ID NO: 298302
  Synthetic oligonucleotide

SEQ ID NO: 534615 - DNA, 56 bp, Artificial; identical to SEQ ID NO: 298304
  Synthetic oligonucleotide

SEQ ID NO: 534616 - DNA, 60 bp, Artificial; identical to SEQ ID NO: 298306
  Synthetic oligonucleotide

SEQ ID NO: 534617 - DNA, 54 bp, Artificial; identical to SEQ ID NO: 298308
  Synthetic oligonucleotide

SEQ ID NO: 534618 - DNA, 51 bp, Artificial; identical to SEQ ID NO: 298309
  Synthetic oligonucleotide

SEQ ID NO: 534619 - DNA, 52 bp, Artificial; identical to SEQ ID NO: 298310
  Synthetic oligonucleotide

SEQ ID NO: 534620 - DNA, 56 bp, Artificial; identical to SEQ ID NO: 16572
  Synthetic oligonucleotide

SEQ ID NO: 534621 - DNA, 58 bp, Artificial; identical to SEQ ID NO: 298314
  Synthetic oligonucleotide

SEQ ID NO: 534622 - DNA, 57 bp, Artificial; identical to SEQ ID NO: 298315
  Synthetic oligonucleotide

SEQ ID NO: 534623 - DNA, 57 bp, Artificial; identical to SEQ ID NO: 298316
  Synthetic oligonucleotide

SEQ ID NO: 534624 - DNA, 50 bp, Artificial; identical to SEQ ID NO: 298317
  Synthetic oligonucleotide

SEQ ID NO: 534625 - DNA, 60 bp, Artificial; identical to SEQ ID NO: 298321
  Synthetic oligonucleotide

SEQ ID NO: 534626 - DNA, 56 bp, Artificial; identical to SEQ ID NO: 298324
  Synthetic oligonucleotide

SEQ ID NO: 534627 - DNA, 55 bp, Artificial; identical to SEQ ID NO: 298325
  Synthetic oligonucleotide

SEQ ID NO: 534628 - DNA, 57 bp, Artificial; identical to SEQ ID NO: 298329
  Synthetic oligonucleotide

SEQ ID NO: 534629 - DNA, 60 bp, Artificial; identical to SEQ ID NO: 298330
  Synthetic oligonucleotide

SEQ ID NO: 534630 - DNA, 51 bp, Artificial; identical to SEQ ID NO: 298331
  Synthetic oligonucleotide

SEQ ID NO: 534631 - DNA, 50 bp, Artificial; identical to SEQ ID NO: 298335
  Synthetic oligonucleotide

SEQ ID NO: 534632 - DNA, 57 bp, Artificial; identical to SEQ ID NO: 298340
  Synthetic oligonucleotide

SEQ ID NO: 534633 - DNA, 58 bp, Artificial; identical to SEQ ID NO: 298341
  Synthetic oligonucleotide

SEQ ID NO: 534634 - DNA, 50 bp, Artificial; identical to SEQ ID NO: 298342
  Synthetic oligonucleotide

SEQ ID NO: 534635 - DNA, 52 bp, Artificial; identical to SEQ ID NO: 298345
  Synthetic oligonucleotide

SEQ ID NO: 534636 - DNA, 57 bp, Artificial; identical to SEQ ID NO: 298348
  Synthetic oligonucleotide

SEQ ID NO: 534637 - DNA, 56 bp, Artificial; identical to SEQ ID NO: 298351
  Synthetic oligonucleotide

SEQ ID NO: 534638 - DNA, 54 bp, Artificial; identical to SEQ ID NO: 298353
  Synthetic oligonucleotide

SEQ ID NO: 534639 - DNA, 55 bp, Artificial; identical to SEQ ID NO: 5954
  Synthetic oligonucleotide

SEQ ID NO: 534640 - DNA, 51 bp, Artificial; identical to SEQ ID NO: 298357
  Synthetic oligonucleotide

SEQ ID NO: 534641 - DNA, 55 bp, Artificial; identical to SEQ ID NO: 298360
  Synthetic oligonucleotide

SEQ ID NO: 534642 - DNA, 57 bp, Artificial; identical to SEQ ID NO: 298361
  Synthetic oligonucleotide

SEQ ID NO: 534643 - DNA, 50 bp, Artificial; identical to SEQ ID NO: 5875
  Synthetic oligonucleotide

SEQ ID NO: 534644 - DNA, 56 bp, Artificial; identical to SEQ ID NO: 298362
  Synthetic oligonucleotide

SEQ ID NO: 534645 - DNA, 52 bp, Artificial; identical to SEQ ID NO: 298366
  Synthetic oligonucleotide

SEQ ID NO: 534646 - DNA, 56 bp, Artificial; identical to SEQ ID NO: 298371
  Synthetic oligonucleotide

SEQ ID NO: 534647 - DNA, 55 bp, Artificial; identical to SEQ ID NO: 298372
  Synthetic oligonucleotide

SEQ ID NO: 534648 - DNA, 51 bp, Artificial; identical to SEQ ID NO: 298374
  Synthetic oligonucleotide

SEQ ID NO: 534649 - DNA, 56 bp, Artificial; identical to SEQ ID NO: 298376
  Synthetic oligonucleotide

SEQ ID NO: 534650 - DNA, 55 bp, Artificial; identical to SEQ ID NO: 298378
  Synthetic oligonucleotide

SEQ ID NO: 534651 - DNA, 56 bp, Artificial; identical to SEQ ID NO: 298380
  Synthetic oligonucleotide

SEQ ID NO: 534652 - DNA, 55 bp, Artificial; identical to SEQ ID NO: 298381
  Synthetic oligonucleotide

SEQ ID NO: 534653 - DNA, 58 bp, Artificial; identical to SEQ ID NO: 298382
  Synthetic oligonucleotide

SEQ ID NO: 534654 - DNA, 56 bp, Artificial; identical to SEQ ID NO: 298384
  Synthetic oligonucleotide

SEQ ID NO: 534655 - DNA, 55 bp, Artificial; identical to SEQ ID NO: 20537
  Synthetic oligonucleotide

SEQ ID NO: 534656 - DNA, 58 bp, Artificial; identical to SEQ ID NO: 298397
  Synthetic oligonucleotide

SEQ ID NO: 534657 - DNA, 56 bp, Artificial; identical to SEQ ID NO: 298400
  Synthetic oligonucleotide

SEQ ID NO: 534658 - DNA, 59 bp, Artificial; identical to SEQ ID NO: 298401
  Synthetic oligonucleotide

SEQ ID NO: 534659 - DNA, 60 bp, Artificial; identical to SEQ ID NO: 298402
  Synthetic oligonucleotide

SEQ ID NO: 534660 - DNA, 53 bp, Artificial; identical to SEQ ID NO: 298403
  Synthetic oligonucleotide

SEQ ID NO: 534661 - DNA, 56 bp, Artificial; identical to SEQ ID NO: 298406
  Synthetic oligonucleotide

SEQ ID NO: 534662 - DNA, 52 bp, Artificial; identical to SEQ ID NO: 298408
  Synthetic oligonucleotide

SEQ ID NO: 534663 - DNA, 59 bp, Artificial; identical to SEQ ID NO: 298409
  Synthetic oligonucleotide

SEQ ID NO: 534664 - DNA, 57 bp, Artificial; identical to SEQ ID NO: 298416
  Synthetic oligonucleotide

SEQ ID NO: 534665 - DNA, 48 bp, Artificial; identical to SEQ ID NO: 298419
  Synthetic oligonucleotide

SEQ ID NO: 534666 - DNA, 60 bp, Artificial; identical to SEQ ID NO: 298421
  Synthetic oligonucleotide

SEQ ID NO: 534667 - DNA, 53 bp, Artificial; identical to SEQ ID NO: 298422
  Synthetic oligonucleotide

SEQ ID NO: 534668 - DNA, 60 bp, Artificial; identical to SEQ ID NO: 298426
  Synthetic oligonucleotide

SEQ ID NO: 534669 - DNA, 60 bp, Artificial; identical to SEQ ID NO: 298428
  Synthetic oligonucleotide

SEQ ID NO: 534670 - DNA, 56 bp, Artificial; identical to SEQ ID NO: 298434
  Synthetic oligonucleotide

SEQ ID NO: 534671 - DNA, 56 bp, Artificial; identical to SEQ ID NO: 298441
  Synthetic oligonucleotide

SEQ ID NO: 534672 - DNA, 47 bp, Artificial; identical to SEQ ID NO: 298442
  Synthetic oligonucleotide

SEQ ID NO: 534673 - DNA, 52 bp, Artificial; identical to SEQ ID NO: 298445
  Synthetic oligonucleotide

SEQ ID NO: 534674 - DNA, 57 bp, Artificial; identical to SEQ ID NO: 298447
  Synthetic oligonucleotide

SEQ ID NO: 534675 - DNA, 52 bp, Artificial; identical to SEQ ID NO: 298448
  Synthetic oligonucleotide

SEQ ID NO: 534676 - DNA, 55 bp, Artificial; identical to SEQ ID NO: 298454
  Synthetic oligonucleotide

SEQ ID NO: 534677 - DNA, 51 bp, Artificial; identical to SEQ ID NO: 6844
  Synthetic oligonucleotide

SEQ ID NO: 534678 - DNA, 56 bp, Artificial; identical to SEQ ID NO: 298457
  Synthetic oligonucleotide

SEQ ID NO: 534679 - DNA, 58 bp, Artificial; identical to SEQ ID NO: 298459
  Synthetic oligonucleotide

SEQ ID NO: 534680 - DNA, 54 bp, Artificial; identical to SEQ ID NO: 298461
  Synthetic oligonucleotide

SEQ ID NO: 534681 - DNA, 55 bp, Artificial; identical to SEQ ID NO: 298462
  Synthetic oligonucleotide

SEQ ID NO: 534682 - DNA, 55 bp, Artificial; identical to SEQ ID NO: 11645
  Synthetic oligonucleotide

SEQ ID NO: 534683 - DNA, 54 bp, Artificial; identical to SEQ ID NO: 298475
  Synthetic oligonucleotide

SEQ ID NO: 534684 - DNA, 58 bp, Artificial; identical to SEQ ID NO: 298477
  Synthetic oligonucleotide

SEQ ID NO: 534685 - DNA, 57 bp, Artificial; identical to SEQ ID NO: 298480
  Synthetic oligonucleotide

SEQ ID NO: 534686 - DNA, 59 bp, Artificial; identical to SEQ ID NO: 298488
  Synthetic oligonucleotide

SEQ ID NO: 534687 - DNA, 57 bp, Artificial; identical to SEQ ID NO: 298489
  Synthetic oligonucleotide

SEQ ID NO: 534688 - DNA, 52 bp, Artificial; identical to SEQ ID NO: 298491
  Synthetic oligonucleotide

SEQ ID NO: 534689 - DNA, 55 bp, Artificial; identical to SEQ ID NO: 298493
  Synthetic oligonucleotide

SEQ ID NO: 534690 - DNA, 59 bp, Artificial; identical to SEQ ID NO: 298496
  Synthetic oligonucleotide

SEQ ID NO: 534691 - DNA, 53 bp, Artificial; identical to SEQ ID NO: 298498
  Synthetic oligonucleotide

SEQ ID NO: 534692 - DNA, 60 bp, Artificial; identical to SEQ ID NO: 298499
  Synthetic oligonucleotide

SEQ ID NO: 534693 - DNA, 60 bp, Artificial; identical to SEQ ID NO: 7690
  Synthetic oligonucleotide

SEQ ID NO: 534694 - DNA, 58 bp, Artificial; identical to SEQ ID NO: 298501
  Synthetic oligonucleotide

SEQ ID NO: 534695 - DNA, 50 bp, Artificial; identical to SEQ ID NO: 298502
  Synthetic oligonucleotide

SEQ ID NO: 534696 - DNA, 60 bp, Artificial; identical to SEQ ID NO: 298503
  Synthetic oligonucleotide

SEQ ID NO: 534697 - DNA, 54 bp, Artificial; identical to SEQ ID NO: 298505
  Synthetic oligonucleotide

SEQ ID NO: 534698 - DNA, 59 bp, Artificial; identical to SEQ ID NO: 298507
  Synthetic oligonucleotide

SEQ ID NO: 534699 - DNA, 53 bp, Artificial; identical to SEQ ID NO: 298508
  Synthetic oligonucleotide

SEQ ID NO: 534700 - DNA, 55 bp, Artificial; identical to SEQ ID NO: 298509
  Synthetic oligonucleotide

SEQ ID NO: 534701 - DNA, 60 bp, Artificial; identical to SEQ ID NO: 298510
  Synthetic oligonucleotide

SEQ ID NO: 534702 - DNA, 57 bp, Artificial; identical to SEQ ID NO: 298514
  Synthetic oligonucleotide

SEQ ID NO: 534703 - DNA, 53 bp, Artificial; identical to SEQ ID NO: 298516
  Synthetic oligonucleotide

SEQ ID NO: 534704 - DNA, 59 bp, Artificial; identical to SEQ ID NO: 18615
  Synthetic oligonucleotide

SEQ ID NO: 534705 - DNA, 60 bp, Artificial; identical to SEQ ID NO: 298520
  Synthetic oligonucleotide

SEQ ID NO: 534706 - DNA, 59 bp, Artificial; identical to SEQ ID NO: 298521
  Synthetic oligonucleotide

SEQ ID NO: 534707 - DNA, 58 bp, Artificial; identical to SEQ ID NO: 16223
  Synthetic oligonucleotide

SEQ ID NO: 534708 - DNA, 54 bp, Artificial; identical to SEQ ID NO: 298522
  Synthetic oligonucleotide

SEQ ID NO: 534709 - DNA, 51 bp, Artificial; identical to SEQ ID NO: 298523
  Synthetic oligonucleotide

SEQ ID NO: 534710 - DNA, 55 bp, Artificial; identical to SEQ ID NO: 298524
  Synthetic oligonucleotide

SEQ ID NO: 534711 - DNA, 57 bp, Artificial; identical to SEQ ID NO: 298526
  Synthetic oligonucleotide

SEQ ID NO: 534712 - DNA, 50 bp, Artificial; identical to SEQ ID NO: 298527
  Synthetic oligonucleotide

SEQ ID NO: 534713 - DNA, 57 bp, Artificial; identical to SEQ ID NO: 298528
  Synthetic oligonucleotide

SEQ ID NO: 534714 - DNA, 60 bp, Artificial; identical to SEQ ID NO: 298532
  Synthetic oligonucleotide

SEQ ID NO: 534715 - DNA, 60 bp, Artificial; identical to SEQ ID NO: 298533
  Synthetic oligonucleotide

SEQ ID NO: 534716 - DNA, 56 bp, Artificial; identical to SEQ ID NO: 298534
  Synthetic oligonucleotide

SEQ ID NO: 534717 - DNA, 54 bp, Artificial; identical to SEQ ID NO: 298538
  Synthetic oligonucleotide

SEQ ID NO: 534718 - DNA, 55 bp, Artificial; identical to SEQ ID NO: 298541
  Synthetic oligonucleotide

SEQ ID NO: 534719 - DNA, 60 bp, Artificial; identical to SEQ ID NO: 298542
  Synthetic oligonucleotide

SEQ ID NO: 534720 - DNA, 58 bp, Artificial; identical to SEQ ID NO: 298544
  Synthetic oligonucleotide

SEQ ID NO: 534721 - DNA, 59 bp, Artificial; identical to SEQ ID NO: 298546
  Synthetic oligonucleotide

SEQ ID NO: 534722 - DNA, 51 bp, Artificial; identical to SEQ ID NO: 298550
  Synthetic oligonucleotide

SEQ ID NO: 534723 - DNA, 57 bp, Artificial; identical to SEQ ID NO: 19932
  Synthetic oligonucleotide

SEQ ID NO: 534724 - DNA, 56 bp, Artificial; identical to SEQ ID NO: 298556
  Synthetic oligonucleotide

SEQ ID NO: 534725 - DNA, 57 bp, Artificial; identical to SEQ ID NO: 298561
  Synthetic oligonucleotide

SEQ ID NO: 534726 - DNA, 55 bp, Artificial; identical to SEQ ID NO: 298563
  Synthetic oligonucleotide

SEQ ID NO: 534727 - DNA, 58 bp, Artificial; identical to SEQ ID NO: 19053
  Synthetic oligonucleotide

SEQ ID NO: 534728 - DNA, 52 bp, Artificial; identical to SEQ ID NO: 298564
  Synthetic oligonucleotide

SEQ ID NO: 534729 - DNA, 60 bp, Artificial; identical to SEQ ID NO: 10632
  Synthetic oligonucleotide

SEQ ID NO: 534730 - DNA, 55 bp, Artificial; identical to SEQ ID NO: 298565
  Synthetic oligonucleotide

SEQ ID NO: 534731 - DNA, 58 bp, Artificial; identical to SEQ ID NO: 298566
  Synthetic oligonucleotide

SEQ ID NO: 534732 - DNA, 54 bp, Artificial; identical to SEQ ID NO: 298569
  Synthetic oligonucleotide

SEQ ID NO: 534733 - DNA, 51 bp, Artificial; identical to SEQ ID NO: 298570
  Synthetic oligonucleotide

SEQ ID NO: 534734 - DNA, 57 bp, Artificial; identical to SEQ ID NO: 298576
  Synthetic oligonucleotide

SEQ ID NO: 534735 - DNA, 52 bp, Artificial; identical to SEQ ID NO: 298579
  Synthetic oligonucleotide

SEQ ID NO: 534736 - DNA, 50 bp, Artificial; identical to SEQ ID NO: 298582
  Synthetic oligonucleotide

SEQ ID NO: 534737 - DNA, 58 bp, Artificial; identical to SEQ ID NO: 298583
  Synthetic oligonucleotide

SEQ ID NO: 534738 - DNA, 55 bp, Artificial; identical to SEQ ID NO: 298586
  Synthetic oligonucleotide

SEQ ID NO: 534739 - DNA, 56 bp, Artificial; identical to SEQ ID NO: 298587
  Synthetic oligonucleotide

SEQ ID NO: 534740 - DNA, 56 bp, Artificial; identical to SEQ ID NO: 298588
  Synthetic oligonucleotide

SEQ ID NO: 534741 - DNA, 57 bp, Artificial; identical to SEQ ID NO: 298589
  Synthetic oligonucleotide

SEQ ID NO: 534742 - DNA, 60 bp, Artificial; identical to SEQ ID NO: 5798
  Synthetic oligonucleotide

SEQ ID NO: 534743 - DNA, 58 bp, Artificial; identical to SEQ ID NO: 298590
  Synthetic oligonucleotide

SEQ ID NO: 534744 - DNA, 59 bp, Artificial; identical to SEQ ID NO: 298591
  Synthetic oligonucleotide

SEQ ID NO: 534745 - DNA, 57 bp, Artificial; identical to SEQ ID NO: 298592
  Synthetic oligonucleotide

SEQ ID NO: 534746 - DNA, 56 bp, Artificial; identical to SEQ ID NO: 298594
  Synthetic oligonucleotide

SEQ ID NO: 534747 - DNA, 54 bp, Artificial; identical to SEQ ID NO: 298597
  Synthetic oligonucleotide

SEQ ID NO: 534748 - DNA, 54 bp, Artificial; identical to SEQ ID NO: 298599
  Synthetic oligonucleotide

SEQ ID NO: 534749 - DNA, 56 bp, Artificial; identical to SEQ ID NO: 16074
  Synthetic oligonucleotide

SEQ ID NO: 534750 - DNA, 55 bp, Artificial; identical to SEQ ID NO: 298604
  Synthetic oligonucleotide

SEQ ID NO: 534751 - DNA, 57 bp, Artificial; identical to SEQ ID NO: 298605
  Synthetic oligonucleotide

SEQ ID NO: 534752 - DNA, 60 bp, Artificial; identical to SEQ ID NO: 298606
  Synthetic oligonucleotide

SEQ ID NO: 534753 - DNA, 56 bp, Artificial; identical to SEQ ID NO: 298607
  Synthetic oligonucleotide

SEQ ID NO: 534754 - DNA, 53 bp, Artificial; identical to SEQ ID NO: 298608
  Synthetic oligonucleotide

SEQ ID NO: 534755 - DNA, 55 bp, Artificial; identical to SEQ ID NO: 298609
  Synthetic oligonucleotide

SEQ ID NO: 534756 - DNA, 55 bp, Artificial; identical to SEQ ID NO: 298610
  Synthetic oligonucleotide

SEQ ID NO: 534757 - DNA, 51 bp, Artificial; identical to SEQ ID NO: 298614
  Synthetic oligonucleotide

SEQ ID NO: 534758 - DNA, 56 bp, Artificial; identical to SEQ ID NO: 298615
  Synthetic oligonucleotide

SEQ ID NO: 534759 - DNA, 55 bp, Artificial; identical to SEQ ID NO: 298616
  Synthetic oligonucleotide

SEQ ID NO: 534760 - DNA, 55 bp, Artificial; identical to SEQ ID NO: 298617
  Synthetic oligonucleotide

SEQ ID NO: 534761 - DNA, 52 bp, Artificial; identical to SEQ ID NO: 298620
  Synthetic oligonucleotide

SEQ ID NO: 534762 - DNA, 53 bp, Artificial; identical to SEQ ID NO: 298621
  Synthetic oligonucleotide

SEQ ID NO: 534763 - DNA, 52 bp, Artificial; identical to SEQ ID NO: 298622
  Synthetic oligonucleotide

SEQ ID NO: 534764 - DNA, 54 bp, Artificial; identical to SEQ ID NO: 298624
  Synthetic oligonucleotide

SEQ ID NO: 534765 - DNA, 60 bp, Artificial; identical to SEQ ID NO: 298628
  Synthetic oligonucleotide

SEQ ID NO: 534766 - DNA, 56 bp, Artificial; identical to SEQ ID NO: 298629
  Synthetic oligonucleotide

SEQ ID NO: 534767 - DNA, 60 bp, Artificial; identical to SEQ ID NO: 298630
  Synthetic oligonucleotide

SEQ ID NO: 534768 - DNA, 51 bp, Artificial; identical to SEQ ID NO: 20097
  Synthetic oligonucleotide

SEQ ID NO: 534769 - DNA, 60 bp, Artificial; identical to SEQ ID NO: 298633
  Synthetic oligonucleotide

SEQ ID NO: 534770 - DNA, 57 bp, Artificial; identical to SEQ ID NO: 298634
  Synthetic oligonucleotide

SEQ ID NO: 534771 - DNA, 60 bp, Artificial; identical to SEQ ID NO: 298638
  Synthetic oligonucleotide

SEQ ID NO: 534772 - DNA, 50 bp, Artificial; identical to SEQ ID NO: 298640
  Synthetic oligonucleotide

SEQ ID NO: 534773 - DNA, 57 bp, Artificial; identical to SEQ ID NO: 298641
  Synthetic oligonucleotide

SEQ ID NO: 534774 - DNA, 53 bp, Artificial; identical to SEQ ID NO: 298644
  Synthetic oligonucleotide

SEQ ID NO: 534775 - DNA, 52 bp, Artificial; identical to SEQ ID NO: 298649
  Synthetic oligonucleotide

SEQ ID NO: 534776 - DNA, 56 bp, Artificial; identical to SEQ ID NO: 298650
  Synthetic oligonucleotide

SEQ ID NO: 534777 - DNA, 57 bp, Artificial; identical to SEQ ID NO: 298654
  Synthetic oligonucleotide

SEQ ID NO: 534778 - DNA, 60 bp, Artificial; identical to SEQ ID NO: 298655
  Synthetic oligonucleotide

SEQ ID NO: 534779 - DNA, 57 bp, Artificial; identical to SEQ ID NO: 298662
  Synthetic oligonucleotide

SEQ ID NO: 534780 - DNA, 51 bp, Artificial; identical to SEQ ID NO: 298667
  Synthetic oligonucleotide

SEQ ID NO: 534781 - DNA, 54 bp, Artificial; identical to SEQ ID NO: 298669
  Synthetic oligonucleotide

SEQ ID NO: 534782 - DNA, 56 bp, Artificial; identical to SEQ ID NO: 298670
  Synthetic oligonucleotide

SEQ ID NO: 534783 - DNA, 55 bp, Artificial; identical to SEQ ID NO: 298671
  Synthetic oligonucleotide

SEQ ID NO: 534784 - DNA, 60 bp, Artificial; identical to SEQ ID NO: 298674
  Synthetic oligonucleotide

SEQ ID NO: 534785 - DNA, 60 bp, Artificial; identical to SEQ ID NO: 298678
  Synthetic oligonucleotide

SEQ ID NO: 534786 - DNA, 56 bp, Artificial; identical to SEQ ID NO: 18178
  Synthetic oligonucleotide

SEQ ID NO: 534787 - DNA, 60 bp, Artificial; identical to SEQ ID NO: 298681
  Synthetic oligonucleotide

SEQ ID NO: 534788 - DNA, 56 bp, Artificial; identical to SEQ ID NO: 298686
  Synthetic oligonucleotide

SEQ ID NO: 534789 - DNA, 51 bp, Artificial; identical to SEQ ID NO: 298687
  Synthetic oligonucleotide

SEQ ID NO: 534790 - DNA, 59 bp, Artificial; identical to SEQ ID NO: 298688
  Synthetic oligonucleotide

SEQ ID NO: 534791 - DNA, 60 bp, Artificial; identical to SEQ ID NO: 298693
  Synthetic oligonucleotide

SEQ ID NO: 534792 - DNA, 60 bp, Artificial; identical to SEQ ID NO: 298694
  Synthetic oligonucleotide

SEQ ID NO: 534793 - DNA, 57 bp, Artificial; identical to SEQ ID NO: 298696
  Synthetic oligonucleotide

SEQ ID NO: 534794 - DNA, 60 bp, Artificial; identical to SEQ ID NO: 298697
  Synthetic oligonucleotide

SEQ ID NO: 534795 - DNA, 60 bp, Artificial; identical to SEQ ID NO: 298699
  Synthetic oligonucleotide

SEQ ID NO: 534796 - DNA, 60 bp, Artificial; identical to SEQ ID NO: 298700
  Synthetic oligonucleotide

SEQ ID NO: 534797 - DNA, 59 bp, Artificial; identical to SEQ ID NO: 298702
  Synthetic oligonucleotide

SEQ ID NO: 534798 - DNA, 56 bp, Artificial; identical to SEQ ID NO: 298704
  Synthetic oligonucleotide

SEQ ID NO: 534799 - DNA, 60 bp, Artificial; identical to SEQ ID NO: 298705
  Synthetic oligonucleotide

SEQ ID NO: 534800 - DNA, 55 bp, Artificial; identical to SEQ ID NO: 298711
  Synthetic oligonucleotide

SEQ ID NO: 534801 - DNA, 60 bp, Artificial; identical to SEQ ID NO: 298713
  Synthetic oligonucleotide

SEQ ID NO: 534802 - DNA, 60 bp, Artificial; identical to SEQ ID NO: 298721
  Synthetic oligonucleotide

SEQ ID NO: 534803 - DNA, 51 bp, Artificial; identical to SEQ ID NO: 20587
  Synthetic oligonucleotide

SEQ ID NO: 534804 - DNA, 59 bp, Artificial; identical to SEQ ID NO: 298722
  Synthetic oligonucleotide

SEQ ID NO: 534805 - DNA, 57 bp, Artificial; identical to SEQ ID NO: 298726
  Synthetic oligonucleotide

SEQ ID NO: 534806 - DNA, 56 bp, Artificial; identical to SEQ ID NO: 298727
  Synthetic oligonucleotide

SEQ ID NO: 534807 - DNA, 52 bp, Artificial; identical to SEQ ID NO: 298728
  Synthetic oligonucleotide

SEQ ID NO: 534808 - DNA, 56 bp, Artificial; identical to SEQ ID NO: 298729
  Synthetic oligonucleotide

SEQ ID NO: 534809 - DNA, 57 bp, Artificial; identical to SEQ ID NO: 298732
  Synthetic oligonucleotide

SEQ ID NO: 534810 - DNA, 55 bp, Artificial; identical to SEQ ID NO: 298734
  Synthetic oligonucleotide

SEQ ID NO: 534811 - DNA, 52 bp, Artificial; identical to SEQ ID NO: 298737
  Synthetic oligonucleotide

SEQ ID NO: 534812 - DNA, 48 bp, Artificial; identical to SEQ ID NO: 298738
  Synthetic oligonucleotide

SEQ ID NO: 534813 - DNA, 57 bp, Artificial; identical to SEQ ID NO: 298740
  Synthetic oligonucleotide

SEQ ID NO: 534814 - DNA, 60 bp, Artificial; identical to SEQ ID NO: 298741
  Synthetic oligonucleotide

SEQ ID NO: 534815 - DNA, 60 bp, Artificial; identical to SEQ ID NO: 298746
  Synthetic oligonucleotide

SEQ ID NO: 534816 - DNA, 55 bp, Artificial; identical to SEQ ID NO: 298747
  Synthetic oligonucleotide

SEQ ID NO: 534817 - DNA, 50 bp, Artificial; identical to SEQ ID NO: 298748
  Synthetic oligonucleotide

SEQ ID NO: 534818 - DNA, 55 bp, Artificial; identical to SEQ ID NO: 298751
  Synthetic oligonucleotide

SEQ ID NO: 534819 - DNA, 60 bp, Artificial; identical to SEQ ID NO: 298752
  Synthetic oligonucleotide

SEQ ID NO: 534820 - DNA, 55 bp, Artificial; identical to SEQ ID NO: 298753
  Synthetic oligonucleotide

SEQ ID NO: 534821 - DNA, 51 bp, Artificial; identical to SEQ ID NO: 298755
  Synthetic oligonucleotide

SEQ ID NO: 534822 - DNA, 53 bp, Artificial; identical to SEQ ID NO: 298759
  Synthetic oligonucleotide

SEQ ID NO: 534823 - DNA, 58 bp, Artificial; identical to SEQ ID NO: 298760
  Synthetic oligonucleotide

SEQ ID NO: 534824 - DNA, 53 bp, Artificial; identical to SEQ ID NO: 298763
  Synthetic oligonucleotide

SEQ ID NO: 534825 - DNA, 55 bp, Artificial; identical to SEQ ID NO: 298765
  Synthetic oligonucleotide

SEQ ID NO: 534826 - DNA, 54 bp, Artificial; identical to SEQ ID NO: 298780
  Synthetic oligonucleotide

SEQ ID NO: 534827 - DNA, 55 bp, Artificial; identical to SEQ ID NO: 298783
  Synthetic oligonucleotide

SEQ ID NO: 534828 - DNA, 57 bp, Artificial; identical to SEQ ID NO: 298785
  Synthetic oligonucleotide

SEQ ID NO: 534829 - DNA, 54 bp, Artificial; identical to SEQ ID NO: 298788
  Synthetic oligonucleotide

SEQ ID NO: 534830 - DNA, 55 bp, Artificial; identical to SEQ ID NO: 298789
  Synthetic oligonucleotide

SEQ ID NO: 534831 - DNA, 60 bp, Artificial; identical to SEQ ID NO: 298791
  Synthetic oligonucleotide

SEQ ID NO: 534832 - DNA, 57 bp, Artificial; identical to SEQ ID NO: 298792
  Synthetic oligonucleotide

SEQ ID NO: 534833 - DNA, 55 bp, Artificial; identical to SEQ ID NO: 298796
  Synthetic oligonucleotide

SEQ ID NO: 534834 - DNA, 55 bp, Artificial; identical to SEQ ID NO: 298799
  Synthetic oligonucleotide

SEQ ID NO: 534835 - DNA, 58 bp, Artificial; identical to SEQ ID NO: 298800
  Synthetic oligonucleotide

SEQ ID NO: 534836 - DNA, 60 bp, Artificial; identical to SEQ ID NO: 298801
  Synthetic oligonucleotide

SEQ ID NO: 534837 - DNA, 53 bp, Artificial; identical to SEQ ID NO: 298802
  Synthetic oligonucleotide

SEQ ID NO: 534838 - DNA, 51 bp, Artificial; identical to SEQ ID NO: 298803
  Synthetic oligonucleotide

SEQ ID NO: 534839 - DNA, 59 bp, Artificial; identical to SEQ ID NO: 298805
  Synthetic oligonucleotide

SEQ ID NO: 534840 - DNA, 54 bp, Artificial; identical to SEQ ID NO: 298815
  Synthetic oligonucleotide

SEQ ID NO: 534841 - DNA, 53 bp, Artificial; identical to SEQ ID NO: 298818
  Synthetic oligonucleotide

SEQ ID NO: 534842 - DNA, 57 bp, Artificial; identical to SEQ ID NO: 298819
  Synthetic oligonucleotide

SEQ ID NO: 534843 - DNA, 54 bp, Artificial; identical to SEQ ID NO: 298820
  Synthetic oligonucleotide

SEQ ID NO: 534844 - DNA, 55 bp, Artificial; identical to SEQ ID NO: 298822
  Synthetic oligonucleotide

SEQ ID NO: 534845 - DNA, 56 bp, Artificial; identical to SEQ ID NO: 298826
  Synthetic oligonucleotide

SEQ ID NO: 534846 - DNA, 60 bp, Artificial; identical to SEQ ID NO: 298829
  Synthetic oligonucleotide

SEQ ID NO: 534847 - DNA, 52 bp, Artificial; identical to SEQ ID NO: 298831
  Synthetic oligonucleotide

SEQ ID NO: 534848 - DNA, 60 bp, Artificial; identical to SEQ ID NO: 298835
  Synthetic oligonucleotide

SEQ ID NO: 534849 - DNA, 53 bp, Artificial; identical to SEQ ID NO: 298837
  Synthetic oligonucleotide

SEQ ID NO: 534850 - DNA, 56 bp, Artificial; identical to SEQ ID NO: 298838
  Synthetic oligonucleotide

SEQ ID NO: 534851 - DNA, 53 bp, Artificial; identical to SEQ ID NO: 298840
  Synthetic oligonucleotide

SEQ ID NO: 534852 - DNA, 59 bp, Artificial; identical to SEQ ID NO: 298841
  Synthetic oligonucleotide

SEQ ID NO: 534853 - DNA, 55 bp, Artificial; identical to SEQ ID NO: 298843
  Synthetic oligonucleotide

SEQ ID NO: 534854 - DNA, 60 bp, Artificial; identical to SEQ ID NO: 298844
  Synthetic oligonucleotide

SEQ ID NO: 534855 - DNA, 60 bp, Artificial; identical to SEQ ID NO: 298852
  Synthetic oligonucleotide

SEQ ID NO: 534856 - DNA, 60 bp, Artificial; identical to SEQ ID NO: 298853
  Synthetic oligonucleotide

SEQ ID NO: 534857 - DNA, 60 bp, Artificial; identical to SEQ ID NO: 298856
  Synthetic oligonucleotide

SEQ ID NO: 534858 - DNA, 51 bp, Artificial; identical to SEQ ID NO: 298858
  Synthetic oligonucleotide

SEQ ID NO: 534859 - DNA, 56 bp, Artificial; identical to SEQ ID NO: 298859
  Synthetic oligonucleotide

SEQ ID NO: 534860 - DNA, 57 bp, Artificial; identical to SEQ ID NO: 298861
  Synthetic oligonucleotide

SEQ ID NO: 534861 - DNA, 56 bp, Artificial; identical to SEQ ID NO: 298864
  Synthetic oligonucleotide

SEQ ID NO: 534862 - DNA, 55 bp, Artificial; identical to SEQ ID NO: 298867
  Synthetic oligonucleotide

SEQ ID NO: 534863 - DNA, 60 bp, Artificial; identical to SEQ ID NO: 298874
  Synthetic oligonucleotide

SEQ ID NO: 534864 - DNA, 53 bp, Artificial; identical to SEQ ID NO: 298875
  Synthetic oligonucleotide

SEQ ID NO: 534865 - DNA, 57 bp, Artificial; identical to SEQ ID NO: 298876
  Synthetic oligonucleotide

SEQ ID NO: 534866 - DNA, 58 bp, Artificial; identical to SEQ ID NO: 298880
  Synthetic oligonucleotide

SEQ ID NO: 534867 - DNA, 54 bp, Artificial; identical to SEQ ID NO: 298881
  Synthetic oligonucleotide

SEQ ID NO: 534868 - DNA, 58 bp, Artificial; identical to SEQ ID NO: 298882
  Synthetic oligonucleotide

SEQ ID NO: 534869 - DNA, 58 bp, Artificial; identical to SEQ ID NO: 298885
  Synthetic oligonucleotide

SEQ ID NO: 534870 - DNA, 57 bp, Artificial; identical to SEQ ID NO: 298886
  Synthetic oligonucleotide

SEQ ID NO: 534871 - DNA, 58 bp, Artificial; identical to SEQ ID NO: 8453
  Synthetic oligonucleotide

SEQ ID NO: 534872 - DNA, 52 bp, Artificial; identical to SEQ ID NO: 298887
  Synthetic oligonucleotide

SEQ ID NO: 534873 - DNA, 60 bp, Artificial; identical to SEQ ID NO: 298891
  Synthetic oligonucleotide

SEQ ID NO: 534874 - DNA, 55 bp, Artificial; identical to SEQ ID NO: 298893
  Synthetic oligonucleotide

SEQ ID NO: 534875 - DNA, 50 bp, Artificial; identical to SEQ ID NO: 298897
  Synthetic oligonucleotide

SEQ ID NO: 534876 - DNA, 59 bp, Artificial; identical to SEQ ID NO: 298898
  Synthetic oligonucleotide

SEQ ID NO: 534877 - DNA, 58 bp, Artificial; identical to SEQ ID NO: 298901
  Synthetic oligonucleotide

SEQ ID NO: 534878 - DNA, 57 bp, Artificial; identical to SEQ ID NO: 298906
  Synthetic oligonucleotide

SEQ ID NO: 534879 - DNA, 54 bp, Artificial; identical to SEQ ID NO: 298907
  Synthetic oligonucleotide

SEQ ID NO: 534880 - DNA, 56 bp, Artificial; identical to SEQ ID NO: 298909
  Synthetic oligonucleotide

SEQ ID NO: 534881 - DNA, 54 bp, Artificial; identical to SEQ ID NO: 298914
  Synthetic oligonucleotide

SEQ ID NO: 534882 - DNA, 54 bp, Artificial; identical to SEQ ID NO: 298915
  Synthetic oligonucleotide

SEQ ID NO: 534883 - DNA, 60 bp, Artificial; identical to SEQ ID NO: 298916
  Synthetic oligonucleotide

SEQ ID NO: 534884 - DNA, 53 bp, Artificial; identical to SEQ ID NO: 298919
  Synthetic oligonucleotide

SEQ ID NO: 534885 - DNA, 58 bp, Artificial; identical to SEQ ID NO: 298921
  Synthetic oligonucleotide

SEQ ID NO: 534886 - DNA, 56 bp, Artificial; identical to SEQ ID NO: 298922
  Synthetic oligonucleotide

SEQ ID NO: 534887 - DNA, 51 bp, Artificial; identical to SEQ ID NO: 298924
  Synthetic oligonucleotide

SEQ ID NO: 534888 - DNA, 51 bp, Artificial; identical to SEQ ID NO: 298927
  Synthetic oligonucleotide

SEQ ID NO: 534889 - DNA, 60 bp, Artificial; identical to SEQ ID NO: 298929
  Synthetic oligonucleotide

SEQ ID NO: 534890 - DNA, 56 bp, Artificial; identical to SEQ ID NO: 298933
  Synthetic oligonucleotide

SEQ ID NO: 534891 - DNA, 55 bp, Artificial; identical to SEQ ID NO: 298937
  Synthetic oligonucleotide

SEQ ID NO: 534892 - DNA, 55 bp, Artificial; identical to SEQ ID NO: 298938
  Synthetic oligonucleotide

SEQ ID NO: 534893 - DNA, 59 bp, Artificial; identical to SEQ ID NO: 298939
  Synthetic oligonucleotide

SEQ ID NO: 534894 - DNA, 56 bp, Artificial; identical to SEQ ID NO: 298940
  Synthetic oligonucleotide

SEQ ID NO: 534895 - DNA, 53 bp, Artificial; identical to SEQ ID NO: 298942
  Synthetic oligonucleotide

SEQ ID NO: 534896 - DNA, 56 bp, Artificial; identical to SEQ ID NO: 298944
  Synthetic oligonucleotide

SEQ ID NO: 534897 - DNA, 60 bp, Artificial; identical to SEQ ID NO: 298947
  Synthetic oligonucleotide

SEQ ID NO: 534898 - DNA, 56 bp, Artificial; identical to SEQ ID NO: 298948
  Synthetic oligonucleotide

SEQ ID NO: 534899 - DNA, 60 bp, Artificial; identical to SEQ ID NO: 298949
  Synthetic oligonucleotide

SEQ ID NO: 534900 - DNA, 53 bp, Artificial; identical to SEQ ID NO: 298955
  Synthetic oligonucleotide

SEQ ID NO: 534901 - DNA, 58 bp, Artificial; identical to SEQ ID NO: 298956
  Synthetic oligonucleotide

SEQ ID NO: 534902 - DNA, 54 bp, Artificial; identical to SEQ ID NO: 298959
  Synthetic oligonucleotide

SEQ ID NO: 534903 - DNA, 59 bp, Artificial; identical to SEQ ID NO: 298961
  Synthetic oligonucleotide

SEQ ID NO: 534904 - DNA, 60 bp, Artificial; identical to SEQ ID NO: 298962
  Synthetic oligonucleotide

SEQ ID NO: 534905 - DNA, 55 bp, Artificial; identical to SEQ ID NO: 298964
  Synthetic oligonucleotide

SEQ ID NO: 534906 - DNA, 59 bp, Artificial; identical to SEQ ID NO: 298967
  Synthetic oligonucleotide

SEQ ID NO: 534907 - DNA, 55 bp, Artificial; identical to SEQ ID NO: 298968
  Synthetic oligonucleotide

SEQ ID NO: 534908 - DNA, 57 bp, Artificial; identical to SEQ ID NO: 298971
  Synthetic oligonucleotide

SEQ ID NO: 534909 - DNA, 55 bp, Artificial; identical to SEQ ID NO: 298972
  Synthetic oligonucleotide

SEQ ID NO: 534910 - DNA, 57 bp, Artificial; identical to SEQ ID NO: 298974
  Synthetic oligonucleotide

SEQ ID NO: 534911 - DNA, 60 bp, Artificial; identical to SEQ ID NO: 298975
  Synthetic oligonucleotide

SEQ ID NO: 534912 - DNA, 57 bp, Artificial; identical to SEQ ID NO: 298978
  Synthetic oligonucleotide

SEQ ID NO: 534913 - DNA, 60 bp, Artificial; identical to SEQ ID NO: 298980
  Synthetic oligonucleotide

SEQ ID NO: 534914 - DNA, 60 bp, Artificial; identical to SEQ ID NO: 298982
  Synthetic oligonucleotide

SEQ ID NO: 534915 - DNA, 60 bp, Artificial; identical to SEQ ID NO: 298983
  Synthetic oligonucleotide

SEQ ID NO: 534916 - DNA, 60 bp, Artificial; identical to SEQ ID NO: 298985
  Synthetic oligonucleotide

SEQ ID NO: 534917 - DNA, 53 bp, Artificial; identical to SEQ ID NO: 298986
  Synthetic oligonucleotide

SEQ ID NO: 534918 - DNA, 60 bp, Artificial; identical to SEQ ID NO: 298987
  Synthetic oligonucleotide

SEQ ID NO: 534919 - DNA, 60 bp, Artificial; identical to SEQ ID NO: 6794
  Synthetic oligonucleotide

SEQ ID NO: 534920 - DNA, 51 bp, Artificial; identical to SEQ ID NO: 298989
  Synthetic oligonucleotide

SEQ ID NO: 534921 - DNA, 55 bp, Artificial; identical to SEQ ID NO: 298990
  Synthetic oligonucleotide

SEQ ID NO: 534922 - DNA, 55 bp, Artificial; identical to SEQ ID NO: 298992
  Synthetic oligonucleotide

SEQ ID NO: 534923 - DNA, 50 bp, Artificial; identical to SEQ ID NO: 298995
  Synthetic oligonucleotide

SEQ ID NO: 534924 - DNA, 60 bp, Artificial; identical to SEQ ID NO: 298996
  Synthetic oligonucleotide

SEQ ID NO: 534925 - DNA, 54 bp, Artificial; identical to SEQ ID NO: 298997
  Synthetic oligonucleotide

SEQ ID NO: 534926 - DNA, 55 bp, Artificial; identical to SEQ ID NO: 298998
  Synthetic oligonucleotide

SEQ ID NO: 534927 - DNA, 55 bp, Artificial; identical to SEQ ID NO: 299000
  Synthetic oligonucleotide

SEQ ID NO: 534928 - DNA, 55 bp, Artificial; identical to SEQ ID NO: 299002
  Synthetic oligonucleotide

SEQ ID NO: 534929 - DNA, 60 bp, Artificial; identical to SEQ ID NO: 299009
  Synthetic oligonucleotide

SEQ ID NO: 534930 - DNA, 58 bp, Artificial; identical to SEQ ID NO: 299010
  Synthetic oligonucleotide

SEQ ID NO: 534931 - DNA, 50 bp, Artificial; identical to SEQ ID NO: 299012
  Synthetic oligonucleotide

SEQ ID NO: 534932 - DNA, 57 bp, Artificial; identical to SEQ ID NO: 299014
  Synthetic oligonucleotide

SEQ ID NO: 534933 - DNA, 52 bp, Artificial; identical to SEQ ID NO: 299016
  Synthetic oligonucleotide

SEQ ID NO: 534934 - DNA, 58 bp, Artificial; identical to SEQ ID NO: 299018
  Synthetic oligonucleotide

SEQ ID NO: 534935 - DNA, 55 bp, Artificial; identical to SEQ ID NO: 299019
  Synthetic oligonucleotide

SEQ ID NO: 534936 - DNA, 58 bp, Artificial; identical to SEQ ID NO: 299020
  Synthetic oligonucleotide

SEQ ID NO: 534937 - DNA, 56 bp, Artificial; identical to SEQ ID NO: 299022
  Synthetic oligonucleotide

SEQ ID NO: 534938 - DNA, 54 bp, Artificial; identical to SEQ ID NO: 299024
  Synthetic oligonucleotide

SEQ ID NO: 534939 - DNA, 60 bp, Artificial; identical to SEQ ID NO: 8087
  Synthetic oligonucleotide

SEQ ID NO: 534940 - DNA, 58 bp, Artificial; identical to SEQ ID NO: 299027
  Synthetic oligonucleotide

SEQ ID NO: 534941 - DNA, 60 bp, Artificial; identical to SEQ ID NO: 299028
  Synthetic oligonucleotide

SEQ ID NO: 534942 - DNA, 55 bp, Artificial; identical to SEQ ID NO: 299031
  Synthetic oligonucleotide

SEQ ID NO: 534943 - DNA, 57 bp, Artificial; identical to SEQ ID NO: 299034
  Synthetic oligonucleotide

SEQ ID NO: 534944 - DNA, 59 bp, Artificial; identical to SEQ ID NO: 17152
  Synthetic oligonucleotide

SEQ ID NO: 534945 - DNA, 51 bp, Artificial; identical to SEQ ID NO: 20334
  Synthetic oligonucleotide

SEQ ID NO: 534946 - DNA, 60 bp, Artificial; identical to SEQ ID NO: 299039
  Synthetic oligonucleotide

SEQ ID NO: 534947 - DNA, 51 bp, Artificial; identical to SEQ ID NO: 299043
  Synthetic oligonucleotide

SEQ ID NO: 534948 - DNA, 55 bp, Artificial; identical to SEQ ID NO: 299045
  Synthetic oligonucleotide

SEQ ID NO: 534949 - DNA, 60 bp, Artificial; identical to SEQ ID NO: 299047
  Synthetic oligonucleotide

SEQ ID NO: 534950 - DNA, 54 bp, Artificial; identical to SEQ ID NO: 299049
  Synthetic oligonucleotide

SEQ ID NO: 534951 - DNA, 55 bp, Artificial; identical to SEQ ID NO: 299057
  Synthetic oligonucleotide

SEQ ID NO: 534952 - DNA, 59 bp, Artificial; identical to SEQ ID NO: 299061
  Synthetic oligonucleotide

SEQ ID NO: 534953 - DNA, 56 bp, Artificial; identical to SEQ ID NO: 7124
  Synthetic oligonucleotide

SEQ ID NO: 534954 - DNA, 58 bp, Artificial; identical to SEQ ID NO: 299064
  Synthetic oligonucleotide

SEQ ID NO: 534955 - DNA, 55 bp, Artificial; identical to SEQ ID NO: 299065
  Synthetic oligonucleotide

SEQ ID NO: 534956 - DNA, 55 bp, Artificial; identical to SEQ ID NO: 299066
  Synthetic oligonucleotide

SEQ ID NO: 534957 - DNA, 53 bp, Artificial; identical to SEQ ID NO: 299071
  Synthetic oligonucleotide

SEQ ID NO: 534958 - DNA, 60 bp, Artificial; identical to SEQ ID NO: 299072
  Synthetic oligonucleotide

SEQ ID NO: 534959 - DNA, 59 bp, Artificial; identical to SEQ ID NO: 299074
  Synthetic oligonucleotide

SEQ ID NO: 534960 - DNA, 55 bp, Artificial; identical to SEQ ID NO: 299077
  Synthetic oligonucleotide

SEQ ID NO: 534961 - DNA, 59 bp, Artificial; identical to SEQ ID NO: 299080
  Synthetic oligonucleotide

SEQ ID NO: 534962 - DNA, 60 bp, Artificial; identical to SEQ ID NO: 299083
  Synthetic oligonucleotide

SEQ ID NO: 534963 - DNA, 54 bp, Artificial; identical to SEQ ID NO: 299085
  Synthetic oligonucleotide

SEQ ID NO: 534964 - DNA, 52 bp, Artificial; identical to SEQ ID NO: 299088
  Synthetic oligonucleotide

SEQ ID NO: 534965 - DNA, 60 bp, Artificial; identical to SEQ ID NO: 299091
  Synthetic oligonucleotide

SEQ ID NO: 534966 - DNA, 59 bp, Artificial; identical to SEQ ID NO: 299093
  Synthetic oligonucleotide

SEQ ID NO: 534967 - DNA, 56 bp, Artificial; identical to SEQ ID NO: 299096
  Synthetic oligonucleotide

SEQ ID NO: 534968 - DNA, 59 bp, Artificial; identical to SEQ ID NO: 299097
  Synthetic oligonucleotide

SEQ ID NO: 534969 - DNA, 59 bp, Artificial; identical to SEQ ID NO: 16222
  Synthetic oligonucleotide

SEQ ID NO: 534970 - DNA, 52 bp, Artificial; identical to SEQ ID NO: 299100
  Synthetic oligonucleotide

SEQ ID NO: 534971 - DNA, 55 bp, Artificial; identical to SEQ ID NO: 299106
  Synthetic oligonucleotide

SEQ ID NO: 534972 - DNA, 57 bp, Artificial; identical to SEQ ID NO: 299108
  Synthetic oligonucleotide

SEQ ID NO: 534973 - DNA, 57 bp, Artificial; identical to SEQ ID NO: 299111
  Synthetic oligonucleotide

SEQ ID NO: 534974 - DNA, 55 bp, Artificial; identical to SEQ ID NO: 299112
  Synthetic oligonucleotide

SEQ ID NO: 534975 - DNA, 54 bp, Artificial; identical to SEQ ID NO: 299114
  Synthetic oligonucleotide

SEQ ID NO: 534976 - DNA, 52 bp, Artificial; identical to SEQ ID NO: 299116
  Synthetic oligonucleotide

SEQ ID NO: 534977 - DNA, 60 bp, Artificial; identical to SEQ ID NO: 299117
  Synthetic oligonucleotide

SEQ ID NO: 534978 - DNA, 51 bp, Artificial; identical to SEQ ID NO: 299119
  Synthetic oligonucleotide

SEQ ID NO: 534979 - DNA, 58 bp, Artificial; identical to SEQ ID NO: 299120
  Synthetic oligonucleotide

SEQ ID NO: 534980 - DNA, 58 bp, Artificial; identical to SEQ ID NO: 299121
  Synthetic oligonucleotide

SEQ ID NO: 534981 - DNA, 60 bp, Artificial; identical to SEQ ID NO: 299124
  Synthetic oligonucleotide

SEQ ID NO: 534982 - DNA, 60 bp, Artificial; identical to SEQ ID NO: 299128
  Synthetic oligonucleotide

SEQ ID NO: 534983 - DNA, 53 bp, Artificial; identical to SEQ ID NO: 299130
  Synthetic oligonucleotide

SEQ ID NO: 534984 - DNA, 60 bp, Artificial; identical to SEQ ID NO: 299131
  Synthetic oligonucleotide

SEQ ID NO: 534985 - DNA, 60 bp, Artificial; identical to SEQ ID NO: 299133
  Synthetic oligonucleotide

SEQ ID NO: 534986 - DNA, 59 bp, Artificial; identical to SEQ ID NO: 299136
  Synthetic oligonucleotide

SEQ ID NO: 534987 - DNA, 60 bp, Artificial; identical to SEQ ID NO: 299137
  Synthetic oligonucleotide

SEQ ID NO: 534988 - DNA, 59 bp, Artificial; identical to SEQ ID NO: 299138
  Synthetic oligonucleotide

SEQ ID NO: 534989 - DNA, 55 bp, Artificial; identical to SEQ ID NO: 299139
  Synthetic oligonucleotide

SEQ ID NO: 534990 - DNA, 60 bp, Artificial; identical to SEQ ID NO: 299140
  Synthetic oligonucleotide

SEQ ID NO: 534991 - DNA, 60 bp, Artificial; identical to SEQ ID NO: 299144
  Synthetic oligonucleotide

SEQ ID NO: 534992 - DNA, 56 bp, Artificial; identical to SEQ ID NO: 299150
  Synthetic oligonucleotide

SEQ ID NO: 534993 - DNA, 56 bp, Artificial; identical to SEQ ID NO: 299151
  Synthetic oligonucleotide

SEQ ID NO: 534994 - DNA, 55 bp, Artificial; identical to SEQ ID NO: 299152
  Synthetic oligonucleotide

SEQ ID NO: 534995 - DNA, 57 bp, Artificial; identical to SEQ ID NO: 299153
  Synthetic oligonucleotide

SEQ ID NO: 534996 - DNA, 57 bp, Artificial; identical to SEQ ID NO: 299155
  Synthetic oligonucleotide

SEQ ID NO: 534997 - DNA, 60 bp, Artificial; identical to SEQ ID NO: 299159
  Synthetic oligonucleotide

SEQ ID NO: 534998 - DNA, 60 bp, Artificial; identical to SEQ ID NO: 299160
  Synthetic oligonucleotide

SEQ ID NO: 534999 - DNA, 58 bp, Artificial; identical to SEQ ID NO: 299161
  Synthetic oligonucleotide

SEQ ID NO: 535000 - DNA, 60 bp, Artificial; identical to SEQ ID NO: 299164
  Synthetic oligonucleotide

SEQ ID NO: 535001 - DNA, 55 bp, Artificial; identical to SEQ ID NO: 299168
  Synthetic oligonucleotide

SEQ ID NO: 535002 - DNA, 55 bp, Artificial; identical to SEQ ID NO: 299170
  Synthetic oligonucleotide

SEQ ID NO: 535003 - DNA, 60 bp, Artificial; identical to SEQ ID NO: 299172
  Synthetic oligonucleotide

SEQ ID NO: 535004 - DNA, 58 bp, Artificial; identical to SEQ ID NO: 19383
  Synthetic oligonucleotide

SEQ ID NO: 535005 - DNA, 52 bp, Artificial; identical to SEQ ID NO: 299175
  Synthetic oligonucleotide

SEQ ID NO: 535006 - DNA, 60 bp, Artificial; identical to SEQ ID NO: 13482
  Synthetic oligonucleotide

SEQ ID NO: 535007 - DNA, 60 bp, Artificial; identical to SEQ ID NO: 299180
  Synthetic oligonucleotide

SEQ ID NO: 535008 - DNA, 59 bp, Artificial; identical to SEQ ID NO: 299181
  Synthetic oligonucleotide

SEQ ID NO: 535009 - DNA, 60 bp, Artificial; identical to SEQ ID NO: 299183
  Synthetic oligonucleotide

SEQ ID NO: 535010 - DNA, 57 bp, Artificial; identical to SEQ ID NO: 299185
  Synthetic oligonucleotide

SEQ ID NO: 535011 - DNA, 55 bp, Artificial; identical to SEQ ID NO: 299188
  Synthetic oligonucleotide

SEQ ID NO: 535012 - DNA, 58 bp, Artificial; identical to SEQ ID NO: 299189
  Synthetic oligonucleotide

SEQ ID NO: 535013 - DNA, 60 bp, Artificial; identical to SEQ ID NO: 299190
  Synthetic oligonucleotide

SEQ ID NO: 535014 - DNA, 55 bp, Artificial; identical to SEQ ID NO: 299191
  Synthetic oligonucleotide

SEQ ID NO: 535015 - DNA, 60 bp, Artificial; identical to SEQ ID NO: 299193
  Synthetic oligonucleotide

SEQ ID NO: 535016 - DNA, 58 bp, Artificial; identical to SEQ ID NO: 299195
  Synthetic oligonucleotide

SEQ ID NO: 535017 - DNA, 55 bp, Artificial; identical to SEQ ID NO: 299197
  Synthetic oligonucleotide

SEQ ID NO: 535018 - DNA, 58 bp, Artificial; identical to SEQ ID NO: 299198
  Synthetic oligonucleotide

SEQ ID NO: 535019 - DNA, 57 bp, Artificial; identical to SEQ ID NO: 299200
  Synthetic oligonucleotide

SEQ ID NO: 535020 - DNA, 53 bp, Artificial; identical to SEQ ID NO: 299202
  Synthetic oligonucleotide

SEQ ID NO: 535021 - DNA, 54 bp, Artificial; identical to SEQ ID NO: 299203
  Synthetic oligonucleotide

SEQ ID NO: 535022 - DNA, 59 bp, Artificial; identical to SEQ ID NO: 299205
  Synthetic oligonucleotide

SEQ ID NO: 535023 - DNA, 55 bp, Artificial; identical to SEQ ID NO: 299207
  Synthetic oligonucleotide

SEQ ID NO: 535024 - DNA, 57 bp, Artificial; identical to SEQ ID NO: 5741
  Synthetic oligonucleotide

SEQ ID NO: 535025 - DNA, 54 bp, Artificial; identical to SEQ ID NO: 299209
  Synthetic oligonucleotide

SEQ ID NO: 535026 - DNA, 54 bp, Artificial; identical to SEQ ID NO: 299212
  Synthetic oligonucleotide

SEQ ID NO: 535027 - DNA, 56 bp, Artificial; identical to SEQ ID NO: 299213
  Synthetic oligonucleotide

SEQ ID NO: 535028 - DNA, 59 bp, Artificial; identical to SEQ ID NO: 299216
  Synthetic oligonucleotide

SEQ ID NO: 535029 - DNA, 59 bp, Artificial; identical to SEQ ID NO: 299217
  Synthetic oligonucleotide

SEQ ID NO: 535030 - DNA, 56 bp, Artificial; identical to SEQ ID NO: 299219
  Synthetic oligonucleotide

SEQ ID NO: 535031 - DNA, 56 bp, Artificial; identical to SEQ ID NO: 299220
  Synthetic oligonucleotide

SEQ ID NO: 535032 - DNA, 51 bp, Artificial; identical to SEQ ID NO: 299222
  Synthetic oligonucleotide

SEQ ID NO: 535033 - DNA, 54 bp, Artificial; identical to SEQ ID NO: 299223
  Synthetic oligonucleotide

SEQ ID NO: 535034 - DNA, 52 bp, Artificial; identical to SEQ ID NO: 299225
  Synthetic oligonucleotide

SEQ ID NO: 535035 - DNA, 58 bp, Artificial; identical to SEQ ID NO: 16298
  Synthetic oligonucleotide

SEQ ID NO: 535036 - DNA, 54 bp, Artificial; identical to SEQ ID NO: 299234
  Synthetic oligonucleotide

SEQ ID NO: 535037 - DNA, 51 bp, Artificial; identical to SEQ ID NO: 299238
  Synthetic oligonucleotide

SEQ ID NO: 535038 - DNA, 57 bp, Artificial; identical to SEQ ID NO: 299241
  Synthetic oligonucleotide

SEQ ID NO: 535039 - DNA, 54 bp, Artificial; identical to SEQ ID NO: 299242
  Synthetic oligonucleotide

SEQ ID NO: 535040 - DNA, 56 bp, Artificial; identical to SEQ ID NO: 299245
  Synthetic oligonucleotide

SEQ ID NO: 535041 - DNA, 56 bp, Artificial; identical to SEQ ID NO: 299246
  Synthetic oligonucleotide

SEQ ID NO: 535042 - DNA, 57 bp, Artificial; identical to SEQ ID NO: 16033
  Synthetic oligonucleotide

SEQ ID NO: 535043 - DNA, 55 bp, Artificial; identical to SEQ ID NO: 299250
  Synthetic oligonucleotide

SEQ ID NO: 535044 - DNA, 55 bp, Artificial; identical to SEQ ID NO: 299251
  Synthetic oligonucleotide

SEQ ID NO: 535045 - DNA, 54 bp, Artificial; identical to SEQ ID NO: 299258
  Synthetic oligonucleotide

SEQ ID NO: 535046 - DNA, 54 bp, Artificial; identical to SEQ ID NO: 299262
  Synthetic oligonucleotide

SEQ ID NO: 535047 - DNA, 57 bp, Artificial; identical to SEQ ID NO: 299265
  Synthetic oligonucleotide

SEQ ID NO: 535048 - DNA, 56 bp, Artificial; identical to SEQ ID NO: 299267
  Synthetic oligonucleotide

SEQ ID NO: 535049 - DNA, 56 bp, Artificial; identical to SEQ ID NO: 299271
  Synthetic oligonucleotide

SEQ ID NO: 535050 - DNA, 60 bp, Artificial; identical to SEQ ID NO: 299275
  Synthetic oligonucleotide

SEQ ID NO: 535051 - DNA, 55 bp, Artificial; identical to SEQ ID NO: 299277
  Synthetic oligonucleotide

SEQ ID NO: 535052 - DNA, 54 bp, Artificial; identical to SEQ ID NO: 299278
  Synthetic oligonucleotide

SEQ ID NO: 535053 - DNA, 54 bp, Artificial; identical to SEQ ID NO: 299283
  Synthetic oligonucleotide

SEQ ID NO: 535054 - DNA, 55 bp, Artificial; identical to SEQ ID NO: 299284
  Synthetic oligonucleotide

SEQ ID NO: 535055 - DNA, 51 bp, Artificial; identical to SEQ ID NO: 299288
  Synthetic oligonucleotide

SEQ ID NO: 535056 - DNA, 60 bp, Artificial; identical to SEQ ID NO: 299289
  Synthetic oligonucleotide

SEQ ID NO: 535057 - DNA, 54 bp, Artificial; identical to SEQ ID NO: 299291
  Synthetic oligonucleotide

SEQ ID NO: 535058 - DNA, 59 bp, Artificial; identical to SEQ ID NO: 299292
  Synthetic oligonucleotide

SEQ ID NO: 535059 - DNA, 53 bp, Artificial; identical to SEQ ID NO: 299294
  Synthetic oligonucleotide

SEQ ID NO: 535060 - DNA, 50 bp, Artificial; identical to SEQ ID NO: 299295
  Synthetic oligonucleotide

SEQ ID NO: 535061 - DNA, 50 bp, Artificial; identical to SEQ ID NO: 299299
  Synthetic oligonucleotide

SEQ ID NO: 535062 - DNA, 54 bp, Artificial; identical to SEQ ID NO: 299300
  Synthetic oligonucleotide

SEQ ID NO: 535063 - DNA, 54 bp, Artificial; identical to SEQ ID NO: 299303
  Synthetic oligonucleotide

SEQ ID NO: 535064 - DNA, 54 bp, Artificial; identical to SEQ ID NO: 299305
  Synthetic oligonucleotide

SEQ ID NO: 535065 - DNA, 49 bp, Artificial; identical to SEQ ID NO: 299306
  Synthetic oligonucleotide

SEQ ID NO: 535066 - DNA, 54 bp, Artificial; identical to SEQ ID NO: 299308
  Synthetic oligonucleotide

SEQ ID NO: 535067 - DNA, 55 bp, Artificial; identical to SEQ ID NO: 299312
  Synthetic oligonucleotide

SEQ ID NO: 535068 - DNA, 58 bp, Artificial; identical to SEQ ID NO: 299315
  Synthetic oligonucleotide

SEQ ID NO: 535069 - DNA, 60 bp, Artificial; identical to SEQ ID NO: 299317
  Synthetic oligonucleotide

SEQ ID NO: 535070 - DNA, 59 bp, Artificial; identical to SEQ ID NO: 299319
  Synthetic oligonucleotide

SEQ ID NO: 535071 - DNA, 58 bp, Artificial; identical to SEQ ID NO: 299320
  Synthetic oligonucleotide

SEQ ID NO: 535072 - DNA, 54 bp, Artificial; identical to SEQ ID NO: 299321
  Synthetic oligonucleotide

SEQ ID NO: 535073 - DNA, 54 bp, Artificial; identical to SEQ ID NO: 299323
  Synthetic oligonucleotide

SEQ ID NO: 535074 - DNA, 59 bp, Artificial; identical to SEQ ID NO: 299326
  Synthetic oligonucleotide

SEQ ID NO: 535075 - DNA, 51 bp, Artificial; identical to SEQ ID NO: 299328
  Synthetic oligonucleotide

SEQ ID NO: 535076 - DNA, 55 bp, Artificial; identical to SEQ ID NO: 299329
  Synthetic oligonucleotide

SEQ ID NO: 535077 - DNA, 57 bp, Artificial; identical to SEQ ID NO: 299330
  Synthetic oligonucleotide

SEQ ID NO: 535078 - DNA, 59 bp, Artificial; identical to SEQ ID NO: 299333
  Synthetic oligonucleotide

SEQ ID NO: 535079 - DNA, 59 bp, Artificial; identical to SEQ ID NO: 299335
  Synthetic oligonucleotide

SEQ ID NO: 535080 - DNA, 55 bp, Artificial; identical to SEQ ID NO: 299339
  Synthetic oligonucleotide

SEQ ID NO: 535081 - DNA, 58 bp, Artificial; identical to SEQ ID NO: 299341
  Synthetic oligonucleotide

SEQ ID NO: 535082 - DNA, 59 bp, Artificial; identical to SEQ ID NO: 299342
  Synthetic oligonucleotide

SEQ ID NO: 535083 - DNA, 59 bp, Artificial; identical to SEQ ID NO: 299343
  Synthetic oligonucleotide

SEQ ID NO: 535084 - DNA, 60 bp, Artificial; identical to SEQ ID NO: 299345
  Synthetic oligonucleotide

SEQ ID NO: 535085 - DNA, 56 bp, Artificial; identical to SEQ ID NO: 299347
  Synthetic oligonucleotide

SEQ ID NO: 535086 - DNA, 55 bp, Artificial; identical to SEQ ID NO: 299349
  Synthetic oligonucleotide

SEQ ID NO: 535087 - DNA, 55 bp, Artificial; identical to SEQ ID NO: 299351
  Synthetic oligonucleotide

SEQ ID NO: 535088 - DNA, 50 bp, Artificial; identical to SEQ ID NO: 299354
  Synthetic oligonucleotide

SEQ ID NO: 535089 - DNA, 51 bp, Artificial; identical to SEQ ID NO: 299355
  Synthetic oligonucleotide

SEQ ID NO: 535090 - DNA, 54 bp, Artificial; identical to SEQ ID NO: 299359
  Synthetic oligonucleotide

SEQ ID NO: 535091 - DNA, 55 bp, Artificial; identical to SEQ ID NO: 299361
  Synthetic oligonucleotide

SEQ ID NO: 535092 - DNA, 60 bp, Artificial; identical to SEQ ID NO: 299368
  Synthetic oligonucleotide

SEQ ID NO: 535093 - DNA, 60 bp, Artificial; identical to SEQ ID NO: 299369
  Synthetic oligonucleotide

SEQ ID NO: 535094 - DNA, 55 bp, Artificial; identical to SEQ ID NO: 299372
  Synthetic oligonucleotide

SEQ ID NO: 535095 - DNA, 56 bp, Artificial; identical to SEQ ID NO: 299373
  Synthetic oligonucleotide

SEQ ID NO: 535096 - DNA, 60 bp, Artificial; identical to SEQ ID NO: 299374
  Synthetic oligonucleotide

SEQ ID NO: 535097 - DNA, 55 bp, Artificial; identical to SEQ ID NO: 299376
  Synthetic oligonucleotide

SEQ ID NO: 535098 - DNA, 58 bp, Artificial; identical to SEQ ID NO: 299379
  Synthetic oligonucleotide

SEQ ID NO: 535099 - DNA, 55 bp, Artificial; identical to SEQ ID NO: 299380
  Synthetic oligonucleotide

SEQ ID NO: 535100 - DNA, 54 bp, Artificial; identical to SEQ ID NO: 299381
  Synthetic oligonucleotide

SEQ ID NO: 535101 - DNA, 59 bp, Artificial; identical to SEQ ID NO: 299382
  Synthetic oligonucleotide

SEQ ID NO: 535102 - DNA, 55 bp, Artificial; identical to SEQ ID NO: 299387
  Synthetic oligonucleotide

SEQ ID NO: 535103 - DNA, 59 bp, Artificial; identical to SEQ ID NO: 299388
  Synthetic oligonucleotide

SEQ ID NO: 535104 - DNA, 60 bp, Artificial; identical to SEQ ID NO: 299391
  Synthetic oligonucleotide

SEQ ID NO: 535105 - DNA, 60 bp, Artificial; identical to SEQ ID NO: 299392
  Synthetic oligonucleotide

SEQ ID NO: 535106 - DNA, 57 bp, Artificial; identical to SEQ ID NO: 299393
  Synthetic oligonucleotide

SEQ ID NO: 535107 - DNA, 60 bp, Artificial; identical to SEQ ID NO: 299397
  Synthetic oligonucleotide

SEQ ID NO: 535108 - DNA, 55 bp, Artificial; identical to SEQ ID NO: 299398
  Synthetic oligonucleotide

SEQ ID NO: 535109 - DNA, 56 bp, Artificial; identical to SEQ ID NO: 15905
  Synthetic oligonucleotide

SEQ ID NO: 535110 - DNA, 56 bp, Artificial; identical to SEQ ID NO: 299404
  Synthetic oligonucleotide

SEQ ID NO: 535111 - DNA, 58 bp, Artificial; identical to SEQ ID NO: 299405
  Synthetic oligonucleotide

SEQ ID NO: 535112 - DNA, 56 bp, Artificial; identical to SEQ ID NO: 299409
  Synthetic oligonucleotide

SEQ ID NO: 535113 - DNA, 52 bp, Artificial; identical to SEQ ID NO: 299410
  Synthetic oligonucleotide

SEQ ID NO: 535114 - DNA, 58 bp, Artificial; identical to SEQ ID NO: 16486
  Synthetic oligonucleotide

SEQ ID NO: 535115 - DNA, 57 bp, Artificial; identical to SEQ ID NO: 299415
  Synthetic oligonucleotide

SEQ ID NO: 535116 - DNA, 53 bp, Artificial; identical to SEQ ID NO: 299416
  Synthetic oligonucleotide

SEQ ID NO: 535117 - DNA, 60 bp, Artificial; identical to SEQ ID NO: 299420
  Synthetic oligonucleotide

SEQ ID NO: 535118 - DNA, 55 bp, Artificial; identical to SEQ ID NO: 299423
  Synthetic oligonucleotide

SEQ ID NO: 535119 - DNA, 59 bp, Artificial; identical to SEQ ID NO: 299424
  Synthetic oligonucleotide

SEQ ID NO: 535120 - DNA, 58 bp, Artificial; identical to SEQ ID NO: 299425
  Synthetic oligonucleotide

SEQ ID NO: 535121 - DNA, 50 bp, Artificial; identical to SEQ ID NO: 299426
  Synthetic oligonucleotide

SEQ ID NO: 535122 - DNA, 60 bp, Artificial; identical to SEQ ID NO: 299427
  Synthetic oligonucleotide

SEQ ID NO: 535123 - DNA, 55 bp, Artificial; identical to SEQ ID NO: 299430
  Synthetic oligonucleotide

SEQ ID NO: 535124 - DNA, 57 bp, Artificial; identical to SEQ ID NO: 299435
  Synthetic oligonucleotide

SEQ ID NO: 535125 - DNA, 57 bp, Artificial; identical to SEQ ID NO: 299436
  Synthetic oligonucleotide

SEQ ID NO: 535126 - DNA, 56 bp, Artificial; identical to SEQ ID NO: 299437
  Synthetic oligonucleotide

SEQ ID NO: 535127 - DNA, 51 bp, Artificial; identical to SEQ ID NO: 299444
  Synthetic oligonucleotide

SEQ ID NO: 535128 - DNA, 55 bp, Artificial; identical to SEQ ID NO: 299446
  Synthetic oligonucleotide

SEQ ID NO: 535129 - DNA, 58 bp, Artificial; identical to SEQ ID NO: 299449
  Synthetic oligonucleotide

SEQ ID NO: 535130 - DNA, 56 bp, Artificial; identical to SEQ ID NO: 299451
  Synthetic oligonucleotide

SEQ ID NO: 535131 - DNA, 55 bp, Artificial; identical to SEQ ID NO: 299452
  Synthetic oligonucleotide

SEQ ID NO: 535132 - DNA, 54 bp, Artificial; identical to SEQ ID NO: 299453
  Synthetic oligonucleotide

SEQ ID NO: 535133 - DNA, 56 bp, Artificial; identical to SEQ ID NO: 20457
  Synthetic oligonucleotide

SEQ ID NO: 535134 - DNA, 56 bp, Artificial; identical to SEQ ID NO: 299456
  Synthetic oligonucleotide

SEQ ID NO: 535135 - DNA, 55 bp, Artificial; identical to SEQ ID NO: 299471
  Synthetic oligonucleotide

SEQ ID NO: 535136 - DNA, 56 bp, Artificial; identical to SEQ ID NO: 299472
  Synthetic oligonucleotide

SEQ ID NO: 535137 - DNA, 54 bp, Artificial; identical to SEQ ID NO: 299475
  Synthetic oligonucleotide

SEQ ID NO: 535138 - DNA, 54 bp, Artificial; identical to SEQ ID NO: 299476
  Synthetic oligonucleotide

SEQ ID NO: 535139 - DNA, 55 bp, Artificial; identical to SEQ ID NO: 299478
  Synthetic oligonucleotide

SEQ ID NO: 535140 - DNA, 60 bp, Artificial; identical to SEQ ID NO: 299482
  Synthetic oligonucleotide

SEQ ID NO: 535141 - DNA, 59 bp, Artificial; identical to SEQ ID NO: 299483
  Synthetic oligonucleotide

SEQ ID NO: 535142 - DNA, 60 bp, Artificial; identical to SEQ ID NO: 299484
  Synthetic oligonucleotide

SEQ ID NO: 535143 - DNA, 57 bp, Artificial; identical to SEQ ID NO: 299485
  Synthetic oligonucleotide

SEQ ID NO: 535144 - DNA, 53 bp, Artificial; identical to SEQ ID NO: 299486
  Synthetic oligonucleotide

SEQ ID NO: 535145 - DNA, 52 bp, Artificial; identical to SEQ ID NO: 299489
  Synthetic oligonucleotide

SEQ ID NO: 535146 - DNA, 60 bp, Artificial; identical to SEQ ID NO: 299490
  Synthetic oligonucleotide

SEQ ID NO: 535147 - DNA, 52 bp, Artificial; identical to SEQ ID NO: 299493
  Synthetic oligonucleotide

SEQ ID NO: 535148 - DNA, 58 bp, Artificial; identical to SEQ ID NO: 299496
  Synthetic oligonucleotide

SEQ ID NO: 535149 - DNA, 55 bp, Artificial; identical to SEQ ID NO: 299497
  Synthetic oligonucleotide

SEQ ID NO: 535150 - DNA, 60 bp, Artificial; identical to SEQ ID NO: 299498
  Synthetic oligonucleotide

SEQ ID NO: 535151 - DNA, 59 bp, Artificial; identical to SEQ ID NO: 299509
  Synthetic oligonucleotide

SEQ ID NO: 535152 - DNA, 51 bp, Artificial; identical to SEQ ID NO: 299510
  Synthetic oligonucleotide

SEQ ID NO: 535153 - DNA, 52 bp, Artificial; identical to SEQ ID NO: 299512
  Synthetic oligonucleotide

SEQ ID NO: 535154 - DNA, 60 bp, Artificial; identical to SEQ ID NO: 299514
  Synthetic oligonucleotide

SEQ ID NO: 535155 - DNA, 60 bp, Artificial; identical to SEQ ID NO: 299515
  Synthetic oligonucleotide

SEQ ID NO: 535156 - DNA, 58 bp, Artificial; identical to SEQ ID NO: 299520
  Synthetic oligonucleotide

SEQ ID NO: 535157 - DNA, 60 bp, Artificial; identical to SEQ ID NO: 299522
  Synthetic oligonucleotide

SEQ ID NO: 535158 - DNA, 60 bp, Artificial; identical to SEQ ID NO: 299523
  Synthetic oligonucleotide

SEQ ID NO: 535159 - DNA, 60 bp, Artificial; identical to SEQ ID NO: 299526
  Synthetic oligonucleotide

SEQ ID NO: 535160 - DNA, 53 bp, Artificial; identical to SEQ ID NO: 299528
  Synthetic oligonucleotide

SEQ ID NO: 535161 - DNA, 57 bp, Artificial; identical to SEQ ID NO: 299529
  Synthetic oligonucleotide

SEQ ID NO: 535162 - DNA, 59 bp, Artificial; identical to SEQ ID NO: 299531
  Synthetic oligonucleotide

SEQ ID NO: 535163 - DNA, 53 bp, Artificial; identical to SEQ ID NO: 299533
  Synthetic oligonucleotide

SEQ ID NO: 535164 - DNA, 58 bp, Artificial; identical to SEQ ID NO: 299535
  Synthetic oligonucleotide

SEQ ID NO: 535165 - DNA, 54 bp, Artificial; identical to SEQ ID NO: 299537
  Synthetic oligonucleotide

SEQ ID NO: 535166 - DNA, 60 bp, Artificial; identical to SEQ ID NO: 299542
  Synthetic oligonucleotide

SEQ ID NO: 535167 - DNA, 54 bp, Artificial; identical to SEQ ID NO: 299543
  Synthetic oligonucleotide

SEQ ID NO: 535168 - DNA, 54 bp, Artificial; identical to SEQ ID NO: 299544
  Synthetic oligonucleotide

SEQ ID NO: 535169 - DNA, 55 bp, Artificial; identical to SEQ ID NO: 299547
  Synthetic oligonucleotide

SEQ ID NO: 535170 - DNA, 55 bp, Artificial; identical to SEQ ID NO: 299548
  Synthetic oligonucleotide

SEQ ID NO: 535171 - DNA, 50 bp, Artificial; identical to SEQ ID NO: 299549
  Synthetic oligonucleotide

SEQ ID NO: 535172 - DNA, 52 bp, Artificial; identical to SEQ ID NO: 299551
  Synthetic oligonucleotide

SEQ ID NO: 535173 - DNA, 60 bp, Artificial; identical to SEQ ID NO: 299552
  Synthetic oligonucleotide

SEQ ID NO: 535174 - DNA, 60 bp, Artificial; identical to SEQ ID NO: 299553
  Synthetic oligonucleotide

SEQ ID NO: 535175 - DNA, 60 bp, Artificial; identical to SEQ ID NO: 299556
  Synthetic oligonucleotide

SEQ ID NO: 535176 - DNA, 60 bp, Artificial; identical to SEQ ID NO: 299564
  Synthetic oligonucleotide

SEQ ID NO: 535177 - DNA, 60 bp, Artificial; identical to SEQ ID NO: 299571
  Synthetic oligonucleotide

SEQ ID NO: 535178 - DNA, 59 bp, Artificial; identical to SEQ ID NO: 299572
  Synthetic oligonucleotide

SEQ ID NO: 535179 - DNA, 55 bp, Artificial; identical to SEQ ID NO: 299574
  Synthetic oligonucleotide

SEQ ID NO: 535180 - DNA, 59 bp, Artificial; identical to SEQ ID NO: 299575
  Synthetic oligonucleotide

SEQ ID NO: 535181 - DNA, 60 bp, Artificial; identical to SEQ ID NO: 299576
  Synthetic oligonucleotide

SEQ ID NO: 535182 - DNA, 58 bp, Artificial; identical to SEQ ID NO: 299580
  Synthetic oligonucleotide

SEQ ID NO: 535183 - DNA, 60 bp, Artificial; identical to SEQ ID NO: 299586
  Synthetic oligonucleotide

SEQ ID NO: 535184 - DNA, 59 bp, Artificial; identical to SEQ ID NO: 299587
  Synthetic oligonucleotide

SEQ ID NO: 535185 - DNA, 53 bp, Artificial; identical to SEQ ID NO: 299592
  Synthetic oligonucleotide

SEQ ID NO: 535186 - DNA, 59 bp, Artificial; identical to SEQ ID NO: 299594
  Synthetic oligonucleotide

SEQ ID NO: 535187 - DNA, 55 bp, Artificial; identical to SEQ ID NO: 299595
  Synthetic oligonucleotide

SEQ ID NO: 535188 - DNA, 58 bp, Artificial; identical to SEQ ID NO: 299596
  Synthetic oligonucleotide

SEQ ID NO: 535189 - DNA, 57 bp, Artificial; identical to SEQ ID NO: 299599
  Synthetic oligonucleotide

SEQ ID NO: 535190 - DNA, 55 bp, Artificial; identical to SEQ ID NO: 299601
  Synthetic oligonucleotide

SEQ ID NO: 535191 - DNA, 60 bp, Artificial; identical to SEQ ID NO: 299603
  Synthetic oligonucleotide

SEQ ID NO: 535192 - DNA, 50 bp, Artificial; identical to SEQ ID NO: 299607
  Synthetic oligonucleotide

SEQ ID NO: 535193 - DNA, 60 bp, Artificial; identical to SEQ ID NO: 299608
  Synthetic oligonucleotide

SEQ ID NO: 535194 - DNA, 59 bp, Artificial; identical to SEQ ID NO: 299609
  Synthetic oligonucleotide

SEQ ID NO: 535195 - DNA, 60 bp, Artificial; identical to SEQ ID NO: 299614
  Synthetic oligonucleotide

SEQ ID NO: 535196 - DNA, 60 bp, Artificial; identical to SEQ ID NO: 299616
  Synthetic oligonucleotide

SEQ ID NO: 535197 - DNA, 59 bp, Artificial; identical to SEQ ID NO: 299617
  Synthetic oligonucleotide

SEQ ID NO: 535198 - DNA, 58 bp, Artificial; identical to SEQ ID NO: 299620
  Synthetic oligonucleotide

SEQ ID NO: 535199 - DNA, 55 bp, Artificial; identical to SEQ ID NO: 299626
  Synthetic oligonucleotide

SEQ ID NO: 535200 - DNA, 57 bp, Artificial; identical to SEQ ID NO: 299629
  Synthetic oligonucleotide

SEQ ID NO: 535201 - DNA, 60 bp, Artificial; identical to SEQ ID NO: 299630
  Synthetic oligonucleotide

SEQ ID NO: 535202 - DNA, 51 bp, Artificial; identical to SEQ ID NO: 299632
  Synthetic oligonucleotide

SEQ ID NO: 535203 - DNA, 60 bp, Artificial; identical to SEQ ID NO: 299636
  Synthetic oligonucleotide

SEQ ID NO: 535204 - DNA, 60 bp, Artificial; identical to SEQ ID NO: 7800
  Synthetic oligonucleotide

SEQ ID NO: 535205 - DNA, 51 bp, Artificial; identical to SEQ ID NO: 299646
  Synthetic oligonucleotide

SEQ ID NO: 535206 - DNA, 60 bp, Artificial; identical to SEQ ID NO: 299648
  Synthetic oligonucleotide

SEQ ID NO: 535207 - DNA, 53 bp, Artificial; identical to SEQ ID NO: 299651
  Synthetic oligonucleotide

SEQ ID NO: 535208 - DNA, 59 bp, Artificial; identical to SEQ ID NO: 299652
  Synthetic oligonucleotide

SEQ ID NO: 535209 - DNA, 58 bp, Artificial; identical to SEQ ID NO: 299653
  Synthetic oligonucleotide

SEQ ID NO: 535210 - DNA, 60 bp, Artificial; identical to SEQ ID NO: 299654
  Synthetic oligonucleotide

SEQ ID NO: 535211 - DNA, 55 bp, Artificial; identical to SEQ ID NO: 299656
  Synthetic oligonucleotide

SEQ ID NO: 535212 - DNA, 55 bp, Artificial; identical to SEQ ID NO: 299658
  Synthetic oligonucleotide

SEQ ID NO: 535213 - DNA, 57 bp, Artificial; identical to SEQ ID NO: 299659
  Synthetic oligonucleotide

SEQ ID NO: 535214 - DNA, 58 bp, Artificial; identical to SEQ ID NO: 299662
  Synthetic oligonucleotide

SEQ ID NO: 535215 - DNA, 60 bp, Artificial; identical to SEQ ID NO: 299665
  Synthetic oligonucleotide

SEQ ID NO: 535216 - DNA, 59 bp, Artificial; identical to SEQ ID NO: 299666
  Synthetic oligonucleotide

SEQ ID NO: 535217 - DNA, 57 bp, Artificial; identical to SEQ ID NO: 299667
  Synthetic oligonucleotide

SEQ ID NO: 535218 - DNA, 55 bp, Artificial; identical to SEQ ID NO: 299668
  Synthetic oligonucleotide

SEQ ID NO: 535219 - DNA, 59 bp, Artificial; identical to SEQ ID NO: 299669
  Synthetic oligonucleotide

SEQ ID NO: 535220 - DNA, 60 bp, Artificial; identical to SEQ ID NO: 299670
  Synthetic oligonucleotide

SEQ ID NO: 535221 - DNA, 52 bp, Artificial; identical to SEQ ID NO: 299671
  Synthetic oligonucleotide

SEQ ID NO: 535222 - DNA, 60 bp, Artificial; identical to SEQ ID NO: 299672
  Synthetic oligonucleotide

SEQ ID NO: 535223 - DNA, 60 bp, Artificial; identical to SEQ ID NO: 299673
  Synthetic oligonucleotide

SEQ ID NO: 535224 - DNA, 60 bp, Artificial; identical to SEQ ID NO: 299674
  Synthetic oligonucleotide

SEQ ID NO: 535225 - DNA, 60 bp, Artificial; identical to SEQ ID NO: 299676
  Synthetic oligonucleotide

SEQ ID NO: 535226 - DNA, 58 bp, Artificial; identical to SEQ ID NO: 299677
  Synthetic oligonucleotide

SEQ ID NO: 535227 - DNA, 51 bp, Artificial; identical to SEQ ID NO: 299681
  Synthetic oligonucleotide

SEQ ID NO: 535228 - DNA, 55 bp, Artificial; identical to SEQ ID NO: 299682
  Synthetic oligonucleotide

SEQ ID NO: 535229 - DNA, 57 bp, Artificial; identical to SEQ ID NO: 299683
  Synthetic oligonucleotide

SEQ ID NO: 535230 - DNA, 60 bp, Artificial; identical to SEQ ID NO: 299684
  Synthetic oligonucleotide

SEQ ID NO: 535231 - DNA, 55 bp, Artificial; identical to SEQ ID NO: 299686
  Synthetic oligonucleotide

SEQ ID NO: 535232 - DNA, 60 bp, Artificial; identical to SEQ ID NO: 299688
  Synthetic oligonucleotide

SEQ ID NO: 535233 - DNA, 55 bp, Artificial; identical to SEQ ID NO: 299690
  Synthetic oligonucleotide

SEQ ID NO: 535234 - DNA, 57 bp, Artificial; identical to SEQ ID NO: 299693
  Synthetic oligonucleotide

SEQ ID NO: 535235 - DNA, 58 bp, Artificial; identical to SEQ ID NO: 299694
  Synthetic oligonucleotide

SEQ ID NO: 535236 - DNA, 50 bp, Artificial; identical to SEQ ID NO: 299701
  Synthetic oligonucleotide

SEQ ID NO: 535237 - DNA, 60 bp, Artificial; identical to SEQ ID NO: 299704
  Synthetic oligonucleotide

SEQ ID NO: 535238 - DNA, 55 bp, Artificial; identical to SEQ ID NO: 299705
  Synthetic oligonucleotide

SEQ ID NO: 535239 - DNA, 52 bp, Artificial; identical to SEQ ID NO: 299706
  Synthetic oligonucleotide

SEQ ID NO: 535240 - DNA, 52 bp, Artificial; identical to SEQ ID NO: 299708
  Synthetic oligonucleotide

SEQ ID NO: 535241 - DNA, 60 bp, Artificial; identical to SEQ ID NO: 299709
  Synthetic oligonucleotide

SEQ ID NO: 535242 - DNA, 60 bp, Artificial; identical to SEQ ID NO: 299711
  Synthetic oligonucleotide

SEQ ID NO: 535243 - DNA, 50 bp, Artificial; identical to SEQ ID NO: 299713
  Synthetic oligonucleotide

SEQ ID NO: 535244 - DNA, 55 bp, Artificial; identical to SEQ ID NO: 299720
  Synthetic oligonucleotide

SEQ ID NO: 535245 - DNA, 55 bp, Artificial; identical to SEQ ID NO: 299725
  Synthetic oligonucleotide

SEQ ID NO: 535246 - DNA, 53 bp, Artificial; identical to SEQ ID NO: 299727
  Synthetic oligonucleotide

SEQ ID NO: 535247 - DNA, 50 bp, Artificial; identical to SEQ ID NO: 299731
  Synthetic oligonucleotide

SEQ ID NO: 535248 - DNA, 60 bp, Artificial; identical to SEQ ID NO: 299732
  Synthetic oligonucleotide

SEQ ID NO: 535249 - DNA, 55 bp, Artificial; identical to SEQ ID NO: 299734
  Synthetic oligonucleotide

SEQ ID NO: 535250 - DNA, 54 bp, Artificial; identical to SEQ ID NO: 19824
  Synthetic oligonucleotide

SEQ ID NO: 535251 - DNA, 51 bp, Artificial; identical to SEQ ID NO: 299736
  Synthetic oligonucleotide

SEQ ID NO: 535252 - DNA, 54 bp, Artificial; identical to SEQ ID NO: 299737
  Synthetic oligonucleotide

SEQ ID NO: 535253 - DNA, 55 bp, Artificial; identical to SEQ ID NO: 299740
  Synthetic oligonucleotide

SEQ ID NO: 535254 - DNA, 55 bp, Artificial; identical to SEQ ID NO: 299741
  Synthetic oligonucleotide

SEQ ID NO: 535255 - DNA, 57 bp, Artificial; identical to SEQ ID NO: 299742
  Synthetic oligonucleotide

SEQ ID NO: 535256 - DNA, 59 bp, Artificial; identical to SEQ ID NO: 299743
  Synthetic oligonucleotide

SEQ ID NO: 535257 - DNA, 52 bp, Artificial; identical to SEQ ID NO: 299745
  Synthetic oligonucleotide

SEQ ID NO: 535258 - DNA, 60 bp, Artificial; identical to SEQ ID NO: 299747
  Synthetic oligonucleotide

SEQ ID NO: 535259 - DNA, 55 bp, Artificial; identical to SEQ ID NO: 299748
  Synthetic oligonucleotide

SEQ ID NO: 535260 - DNA, 59 bp, Artificial; identical to SEQ ID NO: 299752
  Synthetic oligonucleotide

SEQ ID NO: 535261 - DNA, 57 bp, Artificial; identical to SEQ ID NO: 299753
  Synthetic oligonucleotide

SEQ ID NO: 535262 - DNA, 53 bp, Artificial; identical to SEQ ID NO: 299756
  Synthetic oligonucleotide

SEQ ID NO: 535263 - DNA, 56 bp, Artificial; identical to SEQ ID NO: 299761
  Synthetic oligonucleotide

SEQ ID NO: 535264 - DNA, 55 bp, Artificial; identical to SEQ ID NO: 299766
  Synthetic oligonucleotide

SEQ ID NO: 535265 - DNA, 60 bp, Artificial; identical to SEQ ID NO: 299777
  Synthetic oligonucleotide

SEQ ID NO: 535266 - DNA, 55 bp, Artificial; identical to SEQ ID NO: 299778
  Synthetic oligonucleotide

SEQ ID NO: 535267 - DNA, 59 bp, Artificial; identical to SEQ ID NO: 299779
  Synthetic oligonucleotide

SEQ ID NO: 535268 - DNA, 56 bp, Artificial; identical to SEQ ID NO: 299781
  Synthetic oligonucleotide

SEQ ID NO: 535269 - DNA, 59 bp, Artificial; identical to SEQ ID NO: 299782
  Synthetic oligonucleotide

SEQ ID NO: 535270 - DNA, 57 bp, Artificial; identical to SEQ ID NO: 299783
  Synthetic oligonucleotide

SEQ ID NO: 535271 - DNA, 60 bp, Artificial; identical to SEQ ID NO: 299790
  Synthetic oligonucleotide

SEQ ID NO: 535272 - DNA, 56 bp, Artificial; identical to SEQ ID NO: 299794
  Synthetic oligonucleotide

SEQ ID NO: 535273 - DNA, 55 bp, Artificial; identical to SEQ ID NO: 299796
  Synthetic oligonucleotide

SEQ ID NO: 535274 - DNA, 56 bp, Artificial; identical to SEQ ID NO: 299799
  Synthetic oligonucleotide

SEQ ID NO: 535275 - DNA, 55 bp, Artificial; identical to SEQ ID NO: 299800
  Synthetic oligonucleotide

SEQ ID NO: 535276 - DNA, 58 bp, Artificial; identical to SEQ ID NO: 299801
  Synthetic oligonucleotide

SEQ ID NO: 535277 - DNA, 51 bp, Artificial; identical to SEQ ID NO: 299802
  Synthetic oligonucleotide

SEQ ID NO: 535278 - DNA, 60 bp, Artificial; identical to SEQ ID NO: 299803
  Synthetic oligonucleotide

SEQ ID NO: 535279 - DNA, 60 bp, Artificial; identical to SEQ ID NO: 299804
  Synthetic oligonucleotide

SEQ ID NO: 535280 - DNA, 60 bp, Artificial; identical to SEQ ID NO: 299806
  Synthetic oligonucleotide

SEQ ID NO: 535281 - DNA, 55 bp, Artificial; identical to SEQ ID NO: 299807
  Synthetic oligonucleotide

SEQ ID NO: 535282 - DNA, 58 bp, Artificial; identical to SEQ ID NO: 299811
  Synthetic oligonucleotide

SEQ ID NO: 535283 - DNA, 56 bp, Artificial; identical to SEQ ID NO: 299812
  Synthetic oligonucleotide

SEQ ID NO: 535284 - DNA, 59 bp, Artificial; identical to SEQ ID NO: 299815
  Synthetic oligonucleotide

SEQ ID NO: 535285 - DNA, 51 bp, Artificial; identical to SEQ ID NO: 299817
  Synthetic oligonucleotide

SEQ ID NO: 535286 - DNA, 50 bp, Artificial; identical to SEQ ID NO: 299818
  Synthetic oligonucleotide

SEQ ID NO: 535287 - DNA, 53 bp, Artificial; identical to SEQ ID NO: 299823
  Synthetic oligonucleotide

SEQ ID NO: 535288 - DNA, 55 bp, Artificial; identical to SEQ ID NO: 299826
  Synthetic oligonucleotide

SEQ ID NO: 535289 - DNA, 57 bp, Artificial; identical to SEQ ID NO: 299827
  Synthetic oligonucleotide

SEQ ID NO: 535290 - DNA, 56 bp, Artificial; identical to SEQ ID NO: 299829
  Synthetic oligonucleotide

SEQ ID NO: 535291 - DNA, 59 bp, Artificial; identical to SEQ ID NO: 299831
  Synthetic oligonucleotide

SEQ ID NO: 535292 - DNA, 60 bp, Artificial; identical to SEQ ID NO: 299833
  Synthetic oligonucleotide

SEQ ID NO: 535293 - DNA, 52 bp, Artificial; identical to SEQ ID NO: 299844
  Synthetic oligonucleotide

SEQ ID NO: 535294 - DNA, 60 bp, Artificial; identical to SEQ ID NO: 299845
  Synthetic oligonucleotide

SEQ ID NO: 535295 - DNA, 60 bp, Artificial; identical to SEQ ID NO: 299848
  Synthetic oligonucleotide

SEQ ID NO: 535296 - DNA, 60 bp, Artificial; identical to SEQ ID NO: 299850
  Synthetic oligonucleotide

SEQ ID NO: 535297 - DNA, 55 bp, Artificial; identical to SEQ ID NO: 299854
  Synthetic oligonucleotide

SEQ ID NO: 535298 - DNA, 58 bp, Artificial; identical to SEQ ID NO: 299856
  Synthetic oligonucleotide

SEQ ID NO: 535299 - DNA, 60 bp, Artificial; identical to SEQ ID NO: 299857
  Synthetic oligonucleotide

SEQ ID NO: 535300 - DNA, 56 bp, Artificial; identical to SEQ ID NO: 19289
  Synthetic oligonucleotide

SEQ ID NO: 535301 - DNA, 57 bp, Artificial; identical to SEQ ID NO: 299859
  Synthetic oligonucleotide

SEQ ID NO: 535302 - DNA, 55 bp, Artificial; identical to SEQ ID NO: 299860
  Synthetic oligonucleotide

SEQ ID NO: 535303 - DNA, 55 bp, Artificial; identical to SEQ ID NO: 299861
  Synthetic oligonucleotide

SEQ ID NO: 535304 - DNA, 55 bp, Artificial; identical to SEQ ID NO: 299865
  Synthetic oligonucleotide

SEQ ID NO: 535305 - DNA, 57 bp, Artificial; identical to SEQ ID NO: 299867
  Synthetic oligonucleotide

SEQ ID NO: 535306 - DNA, 60 bp, Artificial; identical to SEQ ID NO: 299870
  Synthetic oligonucleotide

SEQ ID NO: 535307 - DNA, 57 bp, Artificial; identical to SEQ ID NO: 299871
  Synthetic oligonucleotide

SEQ ID NO: 535308 - DNA, 57 bp, Artificial; identical to SEQ ID NO: 6742
  Synthetic oligonucleotide

SEQ ID NO: 535309 - DNA, 55 bp, Artificial; identical to SEQ ID NO: 299873
  Synthetic oligonucleotide

SEQ ID NO: 535310 - DNA, 53 bp, Artificial; identical to SEQ ID NO: 299874
  Synthetic oligonucleotide

SEQ ID NO: 535311 - DNA, 50 bp, Artificial; identical to SEQ ID NO: 299876
  Synthetic oligonucleotide

SEQ ID NO: 535312 - DNA, 54 bp, Artificial; identical to SEQ ID NO: 299877
  Synthetic oligonucleotide

SEQ ID NO: 535313 - DNA, 55 bp, Artificial; identical to SEQ ID NO: 299878
  Synthetic oligonucleotide

SEQ ID NO: 535314 - DNA, 55 bp, Artificial; identical to SEQ ID NO: 299880
  Synthetic oligonucleotide

SEQ ID NO: 535315 - DNA, 56 bp, Artificial; identical to SEQ ID NO: 299884
  Synthetic oligonucleotide

SEQ ID NO: 535316 - DNA, 56 bp, Artificial; identical to SEQ ID NO: 299886
  Synthetic oligonucleotide

SEQ ID NO: 535317 - DNA, 58 bp, Artificial; identical to SEQ ID NO: 299887
  Synthetic oligonucleotide

SEQ ID NO: 535318 - DNA, 60 bp, Artificial; identical to SEQ ID NO: 299888
  Synthetic oligonucleotide

SEQ ID NO: 535319 - DNA, 60 bp, Artificial; identical to SEQ ID NO: 299892
  Synthetic oligonucleotide

SEQ ID NO: 535320 - DNA, 59 bp, Artificial; identical to SEQ ID NO: 299893
  Synthetic oligonucleotide

SEQ ID NO: 535321 - DNA, 60 bp, Artificial; identical to SEQ ID NO: 299895
  Synthetic oligonucleotide

SEQ ID NO: 535322 - DNA, 51 bp, Artificial; identical to SEQ ID NO: 299896
  Synthetic oligonucleotide

SEQ ID NO: 535323 - DNA, 55 bp, Artificial; identical to SEQ ID NO: 299897
  Synthetic oligonucleotide

SEQ ID NO: 535324 - DNA, 60 bp, Artificial; identical to SEQ ID NO: 299902
  Synthetic oligonucleotide

SEQ ID NO: 535325 - DNA, 60 bp, Artificial; identical to SEQ ID NO: 10612
  Synthetic oligonucleotide

SEQ ID NO: 535326 - DNA, 55 bp, Artificial; identical to SEQ ID NO: 299903
  Synthetic oligonucleotide

SEQ ID NO: 535327 - DNA, 55 bp, Artificial; identical to SEQ ID NO: 299911
  Synthetic oligonucleotide

SEQ ID NO: 535328 - DNA, 53 bp, Artificial; identical to SEQ ID NO: 299912
  Synthetic oligonucleotide

SEQ ID NO: 535329 - DNA, 57 bp, Artificial; identical to SEQ ID NO: 299913
  Synthetic oligonucleotide

SEQ ID NO: 535330 - DNA, 50 bp, Artificial; identical to SEQ ID NO: 299914
  Synthetic oligonucleotide

SEQ ID NO: 535331 - DNA, 56 bp, Artificial; identical to SEQ ID NO: 299915
  Synthetic oligonucleotide

SEQ ID NO: 535332 - DNA, 59 bp, Artificial; identical to SEQ ID NO: 299918
  Synthetic oligonucleotide

SEQ ID NO: 535333 - DNA, 59 bp, Artificial; identical to SEQ ID NO: 299919
  Synthetic oligonucleotide

SEQ ID NO: 535334 - DNA, 60 bp, Artificial; identical to SEQ ID NO: 299920
  Synthetic oligonucleotide

SEQ ID NO: 535335 - DNA, 60 bp, Artificial; identical to SEQ ID NO: 299924
  Synthetic oligonucleotide

SEQ ID NO: 535336 - DNA, 60 bp, Artificial; identical to SEQ ID NO: 299926
  Synthetic oligonucleotide

SEQ ID NO: 535337 - DNA, 60 bp, Artificial; identical to SEQ ID NO: 299927
  Synthetic oligonucleotide

SEQ ID NO: 535338 - DNA, 51 bp, Artificial; identical to SEQ ID NO: 299928
  Synthetic oligonucleotide

SEQ ID NO: 535339 - DNA, 60 bp, Artificial; identical to SEQ ID NO: 299930
  Synthetic oligonucleotide

SEQ ID NO: 535340 - DNA, 57 bp, Artificial; identical to SEQ ID NO: 299933
  Synthetic oligonucleotide

SEQ ID NO: 535341 - DNA, 54 bp, Artificial; identical to SEQ ID NO: 299939
  Synthetic oligonucleotide

SEQ ID NO: 535342 - DNA, 60 bp, Artificial; identical to SEQ ID NO: 299940
  Synthetic oligonucleotide

SEQ ID NO: 535343 - DNA, 55 bp, Artificial; identical to SEQ ID NO: 299941
  Synthetic oligonucleotide

SEQ ID NO: 535344 - DNA, 51 bp, Artificial; identical to SEQ ID NO: 299942
  Synthetic oligonucleotide

SEQ ID NO: 535345 - DNA, 57 bp, Artificial; identical to SEQ ID NO: 299944
  Synthetic oligonucleotide

SEQ ID NO: 535346 - DNA, 60 bp, Artificial; identical to SEQ ID NO: 299948
  Synthetic oligonucleotide

SEQ ID NO: 535347 - DNA, 57 bp, Artificial; identical to SEQ ID NO: 299954
  Synthetic oligonucleotide

SEQ ID NO: 535348 - DNA, 60 bp, Artificial; identical to SEQ ID NO: 299955
  Synthetic oligonucleotide

SEQ ID NO: 535349 - DNA, 52 bp, Artificial; identical to SEQ ID NO: 299958
  Synthetic oligonucleotide

SEQ ID NO: 535350 - DNA, 59 bp, Artificial; identical to SEQ ID NO: 299960
  Synthetic oligonucleotide

SEQ ID NO: 535351 - DNA, 52 bp, Artificial; identical to SEQ ID NO: 299965
  Synthetic oligonucleotide

SEQ ID NO: 535352 - DNA, 55 bp, Artificial; identical to SEQ ID NO: 299967
  Synthetic oligonucleotide

SEQ ID NO: 535353 - DNA, 59 bp, Artificial; identical to SEQ ID NO: 18962
  Synthetic oligonucleotide

SEQ ID NO: 535354 - DNA, 57 bp, Artificial; identical to SEQ ID NO: 299971
  Synthetic oligonucleotide

SEQ ID NO: 535355 - DNA, 55 bp, Artificial; identical to SEQ ID NO: 299976
  Synthetic oligonucleotide

SEQ ID NO: 535356 - DNA, 54 bp, Artificial; identical to SEQ ID NO: 11940
  Synthetic oligonucleotide

SEQ ID NO: 535357 - DNA, 54 bp, Artificial; identical to SEQ ID NO: 299977
  Synthetic oligonucleotide

SEQ ID NO: 535358 - DNA, 57 bp, Artificial; identical to SEQ ID NO: 299980
  Synthetic oligonucleotide

SEQ ID NO: 535359 - DNA, 50 bp, Artificial; identical to SEQ ID NO: 299983
  Synthetic oligonucleotide

SEQ ID NO: 535360 - DNA, 52 bp, Artificial; identical to SEQ ID NO: 299987
  Synthetic oligonucleotide

SEQ ID NO: 535361 - DNA, 60 bp, Artificial; identical to SEQ ID NO: 299989
  Synthetic oligonucleotide

SEQ ID NO: 535362 - DNA, 52 bp, Artificial; identical to SEQ ID NO: 299991
  Synthetic oligonucleotide

SEQ ID NO: 535363 - DNA, 54 bp, Artificial; identical to SEQ ID NO: 299992
  Synthetic oligonucleotide

SEQ ID NO: 535364 - DNA, 56 bp, Artificial; identical to SEQ ID NO: 299996
  Synthetic oligonucleotide

SEQ ID NO: 535365 - DNA, 60 bp, Artificial; identical to SEQ ID NO: 299997
  Synthetic oligonucleotide

SEQ ID NO: 535366 - DNA, 54 bp, Artificial; identical to SEQ ID NO: 299999
  Synthetic oligonucleotide

SEQ ID NO: 535367 - DNA, 55 bp, Artificial; identical to SEQ ID NO: 300004
  Synthetic oligonucleotide

SEQ ID NO: 535368 - DNA, 55 bp, Artificial; identical to SEQ ID NO: 300007
  Synthetic oligonucleotide

SEQ ID NO: 535369 - DNA, 60 bp, Artificial; identical to SEQ ID NO: 300008
  Synthetic oligonucleotide

SEQ ID NO: 535370 - DNA, 59 bp, Artificial; identical to SEQ ID NO: 18952
  Synthetic oligonucleotide

SEQ ID NO: 535371 - DNA, 56 bp, Artificial; identical to SEQ ID NO: 300010
  Synthetic oligonucleotide

SEQ ID NO: 535372 - DNA, 58 bp, Artificial; identical to SEQ ID NO: 300015
  Synthetic oligonucleotide

SEQ ID NO: 535373 - DNA, 58 bp, Artificial; identical to SEQ ID NO: 300019
  Synthetic oligonucleotide

SEQ ID NO: 535374 - DNA, 60 bp, Artificial; identical to SEQ ID NO: 300022
  Synthetic oligonucleotide

SEQ ID NO: 535375 - DNA, 55 bp, Artificial; identical to SEQ ID NO: 300027
  Synthetic oligonucleotide

SEQ ID NO: 535376 - DNA, 57 bp, Artificial; identical to SEQ ID NO: 300028
  Synthetic oligonucleotide

SEQ ID NO: 535377 - DNA, 52 bp, Artificial; identical to SEQ ID NO: 300029
  Synthetic oligonucleotide

SEQ ID NO: 535378 - DNA, 57 bp, Artificial; identical to SEQ ID NO: 300037
  Synthetic oligonucleotide

SEQ ID NO: 535379 - DNA, 51 bp, Artificial; identical to SEQ ID NO: 15955
  Synthetic oligonucleotide

SEQ ID NO: 535380 - DNA, 51 bp, Artificial; identical to SEQ ID NO: 300039
  Synthetic oligonucleotide

SEQ ID NO: 535381 - DNA, 56 bp, Artificial; identical to SEQ ID NO: 20247
  Synthetic oligonucleotide

SEQ ID NO: 535382 - DNA, 55 bp, Artificial; identical to SEQ ID NO: 300040
  Synthetic oligonucleotide

SEQ ID NO: 535383 - DNA, 60 bp, Artificial; identical to SEQ ID NO: 300042
  Synthetic oligonucleotide

SEQ ID NO: 535384 - DNA, 52 bp, Artificial; identical to SEQ ID NO: 300046
  Synthetic oligonucleotide

SEQ ID NO: 535385 - DNA, 56 bp, Artificial; identical to SEQ ID NO: 300049
  Synthetic oligonucleotide

SEQ ID NO: 535386 - DNA, 55 bp, Artificial; identical to SEQ ID NO: 300050
  Synthetic oligonucleotide

SEQ ID NO: 535387 - DNA, 55 bp, Artificial; identical to SEQ ID NO: 300052
  Synthetic oligonucleotide

SEQ ID NO: 535388 - DNA, 60 bp, Artificial; identical to SEQ ID NO: 300054
  Synthetic oligonucleotide

SEQ ID NO: 535389 - DNA, 50 bp, Artificial; identical to SEQ ID NO: 300057
  Synthetic oligonucleotide

SEQ ID NO: 535390 - DNA, 60 bp, Artificial; identical to SEQ ID NO: 300061
  Synthetic oligonucleotide

SEQ ID NO: 535391 - DNA, 59 bp, Artificial; identical to SEQ ID NO: 300064
  Synthetic oligonucleotide

SEQ ID NO: 535392 - DNA, 51 bp, Artificial; identical to SEQ ID NO: 300066
  Synthetic oligonucleotide

SEQ ID NO: 535393 - DNA, 57 bp, Artificial; identical to SEQ ID NO: 300067
  Synthetic oligonucleotide

SEQ ID NO: 535394 - DNA, 53 bp, Artificial; identical to SEQ ID NO: 300068
  Synthetic oligonucleotide

SEQ ID NO: 535395 - DNA, 60 bp, Artificial; identical to SEQ ID NO: 300070
  Synthetic oligonucleotide

SEQ ID NO: 535396 - DNA, 60 bp, Artificial; identical to SEQ ID NO: 300074
  Synthetic oligonucleotide

SEQ ID NO: 535397 - DNA, 57 bp, Artificial; identical to SEQ ID NO: 300075
  Synthetic oligonucleotide

SEQ ID NO: 535398 - DNA, 60 bp, Artificial; identical to SEQ ID NO: 300076
  Synthetic oligonucleotide

SEQ ID NO: 535399 - DNA, 56 bp, Artificial; identical to SEQ ID NO: 300079
  Synthetic oligonucleotide

SEQ ID NO: 535400 - DNA, 55 bp, Artificial; identical to SEQ ID NO: 300082
  Synthetic oligonucleotide

SEQ ID NO: 535401 - DNA, 55 bp, Artificial; identical to SEQ ID NO: 300086
  Synthetic oligonucleotide

SEQ ID NO: 535402 - DNA, 55 bp, Artificial; identical to SEQ ID NO: 300087
  Synthetic oligonucleotide

SEQ ID NO: 535403 - DNA, 55 bp, Artificial; identical to SEQ ID NO: 300088
  Synthetic oligonucleotide

SEQ ID NO: 535404 - DNA, 56 bp, Artificial; identical to SEQ ID NO: 300089
  Synthetic oligonucleotide

SEQ ID NO: 535405 - DNA, 58 bp, Artificial; identical to SEQ ID NO: 300090
  Synthetic oligonucleotide

SEQ ID NO: 535406 - DNA, 60 bp, Artificial; identical to SEQ ID NO: 300091
  Synthetic oligonucleotide

SEQ ID NO: 535407 - DNA, 56 bp, Artificial; identical to SEQ ID NO: 300093
  Synthetic oligonucleotide

SEQ ID NO: 535408 - DNA, 56 bp, Artificial; identical to SEQ ID NO: 300094
  Synthetic oligonucleotide

SEQ ID NO: 535409 - DNA, 50 bp, Artificial; identical to SEQ ID NO: 300097
  Synthetic oligonucleotide

SEQ ID NO: 535410 - DNA, 60 bp, Artificial; identical to SEQ ID NO: 300098
  Synthetic oligonucleotide

SEQ ID NO: 535411 - DNA, 60 bp, Artificial; identical to SEQ ID NO: 300099
  Synthetic oligonucleotide

SEQ ID NO: 535412 - DNA, 60 bp, Artificial; identical to SEQ ID NO: 300100
  Synthetic oligonucleotide

SEQ ID NO: 535413 - DNA, 60 bp, Artificial; identical to SEQ ID NO: 300103
  Synthetic oligonucleotide

SEQ ID NO: 535414 - DNA, 50 bp, Artificial; identical to SEQ ID NO: 300106
  Synthetic oligonucleotide

SEQ ID NO: 535415 - DNA, 59 bp, Artificial; identical to SEQ ID NO: 300115
  Synthetic oligonucleotide

SEQ ID NO: 535416 - DNA, 58 bp, Artificial; identical to SEQ ID NO: 300121
  Synthetic oligonucleotide

SEQ ID NO: 535417 - DNA, 57 bp, Artificial; identical to SEQ ID NO: 300122
  Synthetic oligonucleotide

SEQ ID NO: 535418 - DNA, 54 bp, Artificial; identical to SEQ ID NO: 300125
  Synthetic oligonucleotide

SEQ ID NO: 535419 - DNA, 55 bp, Artificial; identical to SEQ ID NO: 300128
  Synthetic oligonucleotide

SEQ ID NO: 535420 - DNA, 53 bp, Artificial; identical to SEQ ID NO: 300131
  Synthetic oligonucleotide

SEQ ID NO: 535421 - DNA, 51 bp, Artificial; identical to SEQ ID NO: 300133
  Synthetic oligonucleotide

SEQ ID NO: 535422 - DNA, 56 bp, Artificial; identical to SEQ ID NO: 300134
  Synthetic oligonucleotide

SEQ ID NO: 535423 - DNA, 57 bp, Artificial; identical to SEQ ID NO: 300136
  Synthetic oligonucleotide

SEQ ID NO: 535424 - DNA, 55 bp, Artificial; identical to SEQ ID NO: 300138
  Synthetic oligonucleotide

SEQ ID NO: 535425 - DNA, 55 bp, Artificial; identical to SEQ ID NO: 300139
  Synthetic oligonucleotide

SEQ ID NO: 535426 - DNA, 54 bp, Artificial; identical to SEQ ID NO: 300141
  Synthetic oligonucleotide

SEQ ID NO: 535427 - DNA, 58 bp, Artificial; identical to SEQ ID NO: 300146
  Synthetic oligonucleotide

SEQ ID NO: 535428 - DNA, 60 bp, Artificial; identical to SEQ ID NO: 300152
  Synthetic oligonucleotide

SEQ ID NO: 535429 - DNA, 58 bp, Artificial; identical to SEQ ID NO: 300154
  Synthetic oligonucleotide

SEQ ID NO: 535430 - DNA, 57 bp, Artificial; identical to SEQ ID NO: 300155
  Synthetic oligonucleotide

SEQ ID NO: 535431 - DNA, 60 bp, Artificial; identical to SEQ ID NO: 300156
  Synthetic oligonucleotide

SEQ ID NO: 535432 - DNA, 58 bp, Artificial; identical to SEQ ID NO: 300157
  Synthetic oligonucleotide

SEQ ID NO: 535433 - DNA, 59 bp, Artificial; identical to SEQ ID NO: 300158
  Synthetic oligonucleotide

SEQ ID NO: 535434 - DNA, 53 bp, Artificial; identical to SEQ ID NO: 300159
  Synthetic oligonucleotide

SEQ ID NO: 535435 - DNA, 56 bp, Artificial; identical to SEQ ID NO: 300160
  Synthetic oligonucleotide

SEQ ID NO: 535436 - DNA, 56 bp, Artificial; identical to SEQ ID NO: 300161
  Synthetic oligonucleotide

SEQ ID NO: 535437 - DNA, 57 bp, Artificial; identical to SEQ ID NO: 300162
  Synthetic oligonucleotide

SEQ ID NO: 535438 - DNA, 57 bp, Artificial; identical to SEQ ID NO: 300166
  Synthetic oligonucleotide

SEQ ID NO: 535439 - DNA, 55 bp, Artificial; identical to SEQ ID NO: 300167
  Synthetic oligonucleotide

SEQ ID NO: 535440 - DNA, 55 bp, Artificial; identical to SEQ ID NO: 300169
  Synthetic oligonucleotide

SEQ ID NO: 535441 - DNA, 55 bp, Artificial; identical to SEQ ID NO: 300170
  Synthetic oligonucleotide

SEQ ID NO: 535442 - DNA, 56 bp, Artificial; identical to SEQ ID NO: 300171
  Synthetic oligonucleotide

SEQ ID NO: 535443 - DNA, 56 bp, Artificial; identical to SEQ ID NO: 300172
  Synthetic oligonucleotide

SEQ ID NO: 535444 - DNA, 58 bp, Artificial; identical to SEQ ID NO: 300173
  Synthetic oligonucleotide

SEQ ID NO: 535445 - DNA, 55 bp, Artificial; identical to SEQ ID NO: 300175
  Synthetic oligonucleotide

SEQ ID NO: 535446 - DNA, 55 bp, Artificial; identical to SEQ ID NO: 300179
  Synthetic oligonucleotide

SEQ ID NO: 535447 - DNA, 55 bp, Artificial; identical to SEQ ID NO: 300182
  Synthetic oligonucleotide

SEQ ID NO: 535448 - DNA, 60 bp, Artificial; identical to SEQ ID NO: 12448
  Synthetic oligonucleotide

SEQ ID NO: 535449 - DNA, 52 bp, Artificial; identical to SEQ ID NO: 300183
  Synthetic oligonucleotide

SEQ ID NO: 535450 - DNA, 57 bp, Artificial; identical to SEQ ID NO: 300188
  Synthetic oligonucleotide

SEQ ID NO: 535451 - DNA, 55 bp, Artificial; identical to SEQ ID NO: 300189
  Synthetic oligonucleotide

SEQ ID NO: 535452 - DNA, 58 bp, Artificial; identical to SEQ ID NO: 300190
  Synthetic oligonucleotide

SEQ ID NO: 535453 - DNA, 59 bp, Artificial; identical to SEQ ID NO: 300191
  Synthetic oligonucleotide

SEQ ID NO: 535454 - DNA, 55 bp, Artificial; identical to SEQ ID NO: 300192
  Synthetic oligonucleotide

SEQ ID NO: 535455 - DNA, 60 bp, Artificial; identical to SEQ ID NO: 300196
  Synthetic oligonucleotide

SEQ ID NO: 535456 - DNA, 60 bp, Artificial; identical to SEQ ID NO: 300199
  Synthetic oligonucleotide

SEQ ID NO: 535457 - DNA, 52 bp, Artificial; identical to SEQ ID NO: 300200
  Synthetic oligonucleotide

SEQ ID NO: 535458 - DNA, 57 bp, Artificial; identical to SEQ ID NO: 300201
  Synthetic oligonucleotide

SEQ ID NO: 535459 - DNA, 53 bp, Artificial; identical to SEQ ID NO: 300202
  Synthetic oligonucleotide

SEQ ID NO: 535460 - DNA, 60 bp, Artificial; identical to SEQ ID NO: 300203
  Synthetic oligonucleotide

SEQ ID NO: 535461 - DNA, 51 bp, Artificial; identical to SEQ ID NO: 300204
  Synthetic oligonucleotide

SEQ ID NO: 535462 - DNA, 55 bp, Artificial; identical to SEQ ID NO: 300206
  Synthetic oligonucleotide

SEQ ID NO: 535463 - DNA, 55 bp, Artificial; identical to SEQ ID NO: 300208
  Synthetic oligonucleotide

SEQ ID NO: 535464 - DNA, 56 bp, Artificial; identical to SEQ ID NO: 300209
  Synthetic oligonucleotide

SEQ ID NO: 535465 - DNA, 51 bp, Artificial; identical to SEQ ID NO: 300213
  Synthetic oligonucleotide

SEQ ID NO: 535466 - DNA, 56 bp, Artificial; identical to SEQ ID NO: 300214
  Synthetic oligonucleotide

SEQ ID NO: 535467 - DNA, 58 bp, Artificial; identical to SEQ ID NO: 300216
  Synthetic oligonucleotide

SEQ ID NO: 535468 - DNA, 58 bp, Artificial; identical to SEQ ID NO: 300219
  Synthetic oligonucleotide

SEQ ID NO: 535469 - DNA, 53 bp, Artificial; identical to SEQ ID NO: 300222
  Synthetic oligonucleotide

SEQ ID NO: 535470 - DNA, 60 bp, Artificial; identical to SEQ ID NO: 300225
  Synthetic oligonucleotide

SEQ ID NO: 535471 - DNA, 49 bp, Artificial; identical to SEQ ID NO: 300229
  Synthetic oligonucleotide

SEQ ID NO: 535472 - DNA, 60 bp, Artificial; identical to SEQ ID NO: 300230
  Synthetic oligonucleotide

SEQ ID NO: 535473 - DNA, 50 bp, Artificial; identical to SEQ ID NO: 16083
  Synthetic oligonucleotide

SEQ ID NO: 535474 - DNA, 56 bp, Artificial; identical to SEQ ID NO: 17707
  Synthetic oligonucleotide

SEQ ID NO: 535475 - DNA, 54 bp, Artificial; identical to SEQ ID NO: 300233
  Synthetic oligonucleotide

SEQ ID NO: 535476 - DNA, 58 bp, Artificial; identical to SEQ ID NO: 300237
  Synthetic oligonucleotide

SEQ ID NO: 535477 - DNA, 56 bp, Artificial; identical to SEQ ID NO: 300241
  Synthetic oligonucleotide

SEQ ID NO: 535478 - DNA, 52 bp, Artificial; identical to SEQ ID NO: 11222
  Synthetic oligonucleotide

SEQ ID NO: 535479 - DNA, 56 bp, Artificial; identical to SEQ ID NO: 300247
  Synthetic oligonucleotide

SEQ ID NO: 535480 - DNA, 60 bp, Artificial; identical to SEQ ID NO: 300248
  Synthetic oligonucleotide

SEQ ID NO: 535481 - DNA, 58 bp, Artificial; identical to SEQ ID NO: 300251
  Synthetic oligonucleotide

SEQ ID NO: 535482 - DNA, 52 bp, Artificial; identical to SEQ ID NO: 300253
  Synthetic oligonucleotide

SEQ ID NO: 535483 - DNA, 60 bp, Artificial; identical to SEQ ID NO: 300258
  Synthetic oligonucleotide

SEQ ID NO: 535484 - DNA, 51 bp, Artificial; identical to SEQ ID NO: 300260
  Synthetic oligonucleotide

SEQ ID NO: 535485 - DNA, 55 bp, Artificial; identical to SEQ ID NO: 300267
  Synthetic oligonucleotide

SEQ ID NO: 535486 - DNA, 60 bp, Artificial; identical to SEQ ID NO: 300269
  Synthetic oligonucleotide

SEQ ID NO: 535487 - DNA, 60 bp, Artificial; identical to SEQ ID NO: 300270
  Synthetic oligonucleotide

SEQ ID NO: 535488 - DNA, 54 bp, Artificial; identical to SEQ ID NO: 300273
  Synthetic oligonucleotide

SEQ ID NO: 535489 - DNA, 55 bp, Artificial; identical to SEQ ID NO: 300274
  Synthetic oligonucleotide

SEQ ID NO: 535490 - DNA, 60 bp, Artificial; identical to SEQ ID NO: 300275
  Synthetic oligonucleotide

SEQ ID NO: 535491 - DNA, 57 bp, Artificial; identical to SEQ ID NO: 300277
  Synthetic oligonucleotide

SEQ ID NO: 535492 - DNA, 60 bp, Artificial; identical to SEQ ID NO: 300280
  Synthetic oligonucleotide

SEQ ID NO: 535493 - DNA, 56 bp, Artificial; identical to SEQ ID NO: 300287
  Synthetic oligonucleotide

SEQ ID NO: 535494 - DNA, 55 bp, Artificial; identical to SEQ ID NO: 300289
  Synthetic oligonucleotide

SEQ ID NO: 535495 - DNA, 60 bp, Artificial; identical to SEQ ID NO: 300291
  Synthetic oligonucleotide

SEQ ID NO: 535496 - DNA, 54 bp, Artificial; identical to SEQ ID NO: 300295
  Synthetic oligonucleotide

SEQ ID NO: 535497 - DNA, 56 bp, Artificial; identical to SEQ ID NO: 300303
  Synthetic oligonucleotide

SEQ ID NO: 535498 - DNA, 55 bp, Artificial; identical to SEQ ID NO: 300305
  Synthetic oligonucleotide

SEQ ID NO: 535499 - DNA, 60 bp, Artificial; identical to SEQ ID NO: 300306
  Synthetic oligonucleotide

SEQ ID NO: 535500 - DNA, 51 bp, Artificial; identical to SEQ ID NO: 300311
  Synthetic oligonucleotide

SEQ ID NO: 535501 - DNA, 54 bp, Artificial; identical to SEQ ID NO: 16482
  Synthetic oligonucleotide

SEQ ID NO: 535502 - DNA, 55 bp, Artificial; identical to SEQ ID NO: 300315
  Synthetic oligonucleotide

SEQ ID NO: 535503 - DNA, 59 bp, Artificial; identical to SEQ ID NO: 300316
  Synthetic oligonucleotide

SEQ ID NO: 535504 - DNA, 60 bp, Artificial; identical to SEQ ID NO: 300323
  Synthetic oligonucleotide

SEQ ID NO: 535505 - DNA, 60 bp, Artificial; identical to SEQ ID NO: 300328
  Synthetic oligonucleotide

SEQ ID NO: 535506 - DNA, 60 bp, Artificial; identical to SEQ ID NO: 300330
  Synthetic oligonucleotide

SEQ ID NO: 535507 - DNA, 54 bp, Artificial; identical to SEQ ID NO: 300331
  Synthetic oligonucleotide

SEQ ID NO: 535508 - DNA, 58 bp, Artificial; identical to SEQ ID NO: 300335
  Synthetic oligonucleotide

SEQ ID NO: 535509 - DNA, 60 bp, Artificial; identical to SEQ ID NO: 300337
  Synthetic oligonucleotide

SEQ ID NO: 535510 - DNA, 55 bp, Artificial; identical to SEQ ID NO: 300340
  Synthetic oligonucleotide

SEQ ID NO: 535511 - DNA, 54 bp, Artificial; identical to SEQ ID NO: 300346
  Synthetic oligonucleotide

SEQ ID NO: 535512 - DNA, 60 bp, Artificial; identical to SEQ ID NO: 300348
  Synthetic oligonucleotide

SEQ ID NO: 535513 - DNA, 57 bp, Artificial; identical to SEQ ID NO: 300351
  Synthetic oligonucleotide

SEQ ID NO: 535514 - DNA, 52 bp, Artificial; identical to SEQ ID NO: 300352
  Synthetic oligonucleotide

SEQ ID NO: 535515 - DNA, 59 bp, Artificial; identical to SEQ ID NO: 300355
  Synthetic oligonucleotide

SEQ ID NO: 535516 - DNA, 60 bp, Artificial; identical to SEQ ID NO: 300357
  Synthetic oligonucleotide

SEQ ID NO: 535517 - DNA, 57 bp, Artificial; identical to SEQ ID NO: 300359
  Synthetic oligonucleotide

SEQ ID NO: 535518 - DNA, 58 bp, Artificial; identical to SEQ ID NO: 300360
  Synthetic oligonucleotide

SEQ ID NO: 535519 - DNA, 59 bp, Artificial; identical to SEQ ID NO: 300361
  Synthetic oligonucleotide

SEQ ID NO: 535520 - DNA, 60 bp, Artificial; identical to SEQ ID NO: 300362
  Synthetic oligonucleotide

SEQ ID NO: 535521 - DNA, 58 bp, Artificial; identical to SEQ ID NO: 300363
  Synthetic oligonucleotide

SEQ ID NO: 535522 - DNA, 56 bp, Artificial; identical to SEQ ID NO: 300365
  Synthetic oligonucleotide

SEQ ID NO: 535523 - DNA, 58 bp, Artificial; identical to SEQ ID NO: 300368
  Synthetic oligonucleotide

SEQ ID NO: 535524 - DNA, 60 bp, Artificial; identical to SEQ ID NO: 300369
  Synthetic oligonucleotide

SEQ ID NO: 535525 - DNA, 50 bp, Artificial; identical to SEQ ID NO: 300373
  Synthetic oligonucleotide

SEQ ID NO: 535526 - DNA, 55 bp, Artificial; identical to SEQ ID NO: 300375
  Synthetic oligonucleotide

SEQ ID NO: 535527 - DNA, 55 bp, Artificial; identical to SEQ ID NO: 300380
  Synthetic oligonucleotide

SEQ ID NO: 535528 - DNA, 57 bp, Artificial; identical to SEQ ID NO: 300383
  Synthetic oligonucleotide

SEQ ID NO: 535529 - DNA, 55 bp, Artificial; identical to SEQ ID NO: 12589
  Synthetic oligonucleotide

SEQ ID NO: 535530 - DNA, 60 bp, Artificial; identical to SEQ ID NO: 300385
  Synthetic oligonucleotide

SEQ ID NO: 535531 - DNA, 51 bp, Artificial; identical to SEQ ID NO: 300388
  Synthetic oligonucleotide

SEQ ID NO: 535532 - DNA, 54 bp, Artificial; identical to SEQ ID NO: 300392
  Synthetic oligonucleotide

SEQ ID NO: 535533 - DNA, 60 bp, Artificial; identical to SEQ ID NO: 300395
  Synthetic oligonucleotide

SEQ ID NO: 535534 - DNA, 54 bp, Artificial; identical to SEQ ID NO: 300397
  Synthetic oligonucleotide

SEQ ID NO: 535535 - DNA, 55 bp, Artificial; identical to SEQ ID NO: 300398
  Synthetic oligonucleotide

SEQ ID NO: 535536 - DNA, 51 bp, Artificial; identical to SEQ ID NO: 300400
  Synthetic oligonucleotide

SEQ ID NO: 535537 - DNA, 60 bp, Artificial; identical to SEQ ID NO: 300401
  Synthetic oligonucleotide

SEQ ID NO: 535538 - DNA, 54 bp, Artificial; identical to SEQ ID NO: 300404
  Synthetic oligonucleotide

SEQ ID NO: 535539 - DNA, 59 bp, Artificial; identical to SEQ ID NO: 300407
  Synthetic oligonucleotide

SEQ ID NO: 535540 - DNA, 59 bp, Artificial; identical to SEQ ID NO: 300412
  Synthetic oligonucleotide

SEQ ID NO: 535541 - DNA, 52 bp, Artificial; identical to SEQ ID NO: 300414
  Synthetic oligonucleotide

SEQ ID NO: 535542 - DNA, 52 bp, Artificial; identical to SEQ ID NO: 300415
  Synthetic oligonucleotide

SEQ ID NO: 535543 - DNA, 55 bp, Artificial; identical to SEQ ID NO: 300418
  Synthetic oligonucleotide

SEQ ID NO: 535544 - DNA, 59 bp, Artificial; identical to SEQ ID NO: 300421
  Synthetic oligonucleotide

SEQ ID NO: 535545 - DNA, 58 bp, Artificial; identical to SEQ ID NO: 300422
  Synthetic oligonucleotide

SEQ ID NO: 535546 - DNA, 60 bp, Artificial; identical to SEQ ID NO: 300425
  Synthetic oligonucleotide

SEQ ID NO: 535547 - DNA, 55 bp, Artificial; identical to SEQ ID NO: 300427
  Synthetic oligonucleotide

SEQ ID NO: 535548 - DNA, 56 bp, Artificial; identical to SEQ ID NO: 300429
  Synthetic oligonucleotide

SEQ ID NO: 535549 - DNA, 55 bp, Artificial; identical to SEQ ID NO: 300430
  Synthetic oligonucleotide

SEQ ID NO: 535550 - DNA, 59 bp, Artificial; identical to SEQ ID NO: 300432
  Synthetic oligonucleotide

SEQ ID NO: 535551 - DNA, 59 bp, Artificial; identical to SEQ ID NO: 300433
  Synthetic oligonucleotide

SEQ ID NO: 535552 - DNA, 60 bp, Artificial; identical to SEQ ID NO: 300434
  Synthetic oligonucleotide

SEQ ID NO: 535553 - DNA, 59 bp, Artificial; identical to SEQ ID NO: 300435
  Synthetic oligonucleotide

SEQ ID NO: 535554 - DNA, 60 bp, Artificial; identical to SEQ ID NO: 300437
  Synthetic oligonucleotide

SEQ ID NO: 535555 - DNA, 55 bp, Artificial; identical to SEQ ID NO: 300440
  Synthetic oligonucleotide

SEQ ID NO: 535556 - DNA, 56 bp, Artificial; identical to SEQ ID NO: 300443
  Synthetic oligonucleotide

SEQ ID NO: 535557 - DNA, 59 bp, Artificial; identical to SEQ ID NO: 300444
  Synthetic oligonucleotide

SEQ ID NO: 535558 - DNA, 56 bp, Artificial; identical to SEQ ID NO: 300447
  Synthetic oligonucleotide

SEQ ID NO: 535559 - DNA, 58 bp, Artificial; identical to SEQ ID NO: 300450
  Synthetic oligonucleotide

SEQ ID NO: 535560 - DNA, 54 bp, Artificial; identical to SEQ ID NO: 300452
  Synthetic oligonucleotide

SEQ ID NO: 535561 - DNA, 54 bp, Artificial; identical to SEQ ID NO: 300454
  Synthetic oligonucleotide

SEQ ID NO: 535562 - DNA, 60 bp, Artificial; identical to SEQ ID NO: 300457
  Synthetic oligonucleotide

SEQ ID NO: 535563 - DNA, 55 bp, Artificial; identical to SEQ ID NO: 300458
  Synthetic oligonucleotide

SEQ ID NO: 535564 - DNA, 57 bp, Artificial; identical to SEQ ID NO: 300461
  Synthetic oligonucleotide

SEQ ID NO: 535565 - DNA, 53 bp, Artificial; identical to SEQ ID NO: 300463
  Synthetic oligonucleotide

SEQ ID NO: 535566 - DNA, 60 bp, Artificial; identical to SEQ ID NO: 300464
  Synthetic oligonucleotide

SEQ ID NO: 535567 - DNA, 60 bp, Artificial; identical to SEQ ID NO: 300466
  Synthetic oligonucleotide

SEQ ID NO: 535568 - DNA, 57 bp, Artificial; identical to SEQ ID NO: 300468
  Synthetic oligonucleotide

SEQ ID NO: 535569 - DNA, 53 bp, Artificial; identical to SEQ ID NO: 300469
  Synthetic oligonucleotide

SEQ ID NO: 535570 - DNA, 56 bp, Artificial; identical to SEQ ID NO: 300470
  Synthetic oligonucleotide

SEQ ID NO: 535571 - DNA, 57 bp, Artificial; identical to SEQ ID NO: 300471
  Synthetic oligonucleotide

SEQ ID NO: 535572 - DNA, 53 bp, Artificial; identical to SEQ ID NO: 300472
  Synthetic oligonucleotide

SEQ ID NO: 535573 - DNA, 54 bp, Artificial; identical to SEQ ID NO: 300474
  Synthetic oligonucleotide

SEQ ID NO: 535574 - DNA, 58 bp, Artificial; identical to SEQ ID NO: 300477
  Synthetic oligonucleotide

SEQ ID NO: 535575 - DNA, 60 bp, Artificial; identical to SEQ ID NO: 300486
  Synthetic oligonucleotide

SEQ ID NO: 535576 - DNA, 53 bp, Artificial; identical to SEQ ID NO: 300489
  Synthetic oligonucleotide

SEQ ID NO: 535577 - DNA, 57 bp, Artificial; identical to SEQ ID NO: 300492
  Synthetic oligonucleotide

SEQ ID NO: 535578 - DNA, 59 bp, Artificial; identical to SEQ ID NO: 300493
  Synthetic oligonucleotide

SEQ ID NO: 535579 - DNA, 57 bp, Artificial; identical to SEQ ID NO: 300494
  Synthetic oligonucleotide

SEQ ID NO: 535580 - DNA, 60 bp, Artificial; identical to SEQ ID NO: 184
  Synthetic oligonucleotide

SEQ ID NO: 535581 - DNA, 55 bp, Artificial; identical to SEQ ID NO: 300499
  Synthetic oligonucleotide

SEQ ID NO: 535582 - DNA, 52 bp, Artificial; identical to SEQ ID NO: 300500
  Synthetic oligonucleotide

SEQ ID NO: 535583 - DNA, 55 bp, Artificial; identical to SEQ ID NO: 300507
  Synthetic oligonucleotide

SEQ ID NO: 535584 - DNA, 60 bp, Artificial; identical to SEQ ID NO: 14109
  Synthetic oligonucleotide

SEQ ID NO: 535585 - DNA, 60 bp, Artificial; identical to SEQ ID NO: 9901
  Synthetic oligonucleotide

SEQ ID NO: 535586 - DNA, 55 bp, Artificial; identical to SEQ ID NO: 300510
  Synthetic oligonucleotide

SEQ ID NO: 535587 - DNA, 53 bp, Artificial; identical to SEQ ID NO: 300511
  Synthetic oligonucleotide

SEQ ID NO: 535588 - DNA, 58 bp, Artificial; identical to SEQ ID NO: 300512
  Synthetic oligonucleotide

SEQ ID NO: 535589 - DNA, 60 bp, Artificial; identical to SEQ ID NO: 300514
  Synthetic oligonucleotide

SEQ ID NO: 535590 - DNA, 56 bp, Artificial; identical to SEQ ID NO: 300516
  Synthetic oligonucleotide

SEQ ID NO: 535591 - DNA, 52 bp, Artificial; identical to SEQ ID NO: 300517
  Synthetic oligonucleotide

SEQ ID NO: 535592 - DNA, 57 bp, Artificial; identical to SEQ ID NO: 300520
  Synthetic oligonucleotide

SEQ ID NO: 535593 - DNA, 60 bp, Artificial; identical to SEQ ID NO: 300521
  Synthetic oligonucleotide

SEQ ID NO: 535594 - DNA, 57 bp, Artificial; identical to SEQ ID NO: 300526
  Synthetic oligonucleotide

SEQ ID NO: 535595 - DNA, 51 bp, Artificial; identical to SEQ ID NO: 300527
  Synthetic oligonucleotide

SEQ ID NO: 535596 - DNA, 55 bp, Artificial; identical to SEQ ID NO: 300530
  Synthetic oligonucleotide

SEQ ID NO: 535597 - DNA, 52 bp, Artificial; identical to SEQ ID NO: 300532
  Synthetic oligonucleotide

SEQ ID NO: 535598 - DNA, 51 bp, Artificial; identical to SEQ ID NO: 300533
  Synthetic oligonucleotide

SEQ ID NO: 535599 - DNA, 55 bp, Artificial; identical to SEQ ID NO: 300534
  Synthetic oligonucleotide

SEQ ID NO: 535600 - DNA, 60 bp, Artificial; identical to SEQ ID NO: 300536
  Synthetic oligonucleotide

SEQ ID NO: 535601 - DNA, 56 bp, Artificial; identical to SEQ ID NO: 300537
  Synthetic oligonucleotide

SEQ ID NO: 535602 - DNA, 55 bp, Artificial; identical to SEQ ID NO: 300542
  Synthetic oligonucleotide

SEQ ID NO: 535603 - DNA, 58 bp, Artificial; identical to SEQ ID NO: 300546
  Synthetic oligonucleotide

SEQ ID NO: 535604 - DNA, 53 bp, Artificial; identical to SEQ ID NO: 300547
  Synthetic oligonucleotide

SEQ ID NO: 535605 - DNA, 60 bp, Artificial; identical to SEQ ID NO: 300548
  Synthetic oligonucleotide

SEQ ID NO: 535606 - DNA, 56 bp, Artificial; identical to SEQ ID NO: 20505
  Synthetic oligonucleotide

SEQ ID NO: 535607 - DNA, 57 bp, Artificial; identical to SEQ ID NO: 300556
  Synthetic oligonucleotide

SEQ ID NO: 535608 - DNA, 50 bp, Artificial; identical to SEQ ID NO: 300557
  Synthetic oligonucleotide

SEQ ID NO: 535609 - DNA, 58 bp, Artificial; identical to SEQ ID NO: 300560
  Synthetic oligonucleotide

SEQ ID NO: 535610 - DNA, 60 bp, Artificial; identical to SEQ ID NO: 300561
  Synthetic oligonucleotide

SEQ ID NO: 535611 - DNA, 60 bp, Artificial; identical to SEQ ID NO: 300563
  Synthetic oligonucleotide

SEQ ID NO: 535612 - DNA, 57 bp, Artificial; identical to SEQ ID NO: 300564
  Synthetic oligonucleotide

SEQ ID NO: 535613 - DNA, 55 bp, Artificial; identical to SEQ ID NO: 300565
  Synthetic oligonucleotide

SEQ ID NO: 535614 - DNA, 55 bp, Artificial; identical to SEQ ID NO: 300566
  Synthetic oligonucleotide

SEQ ID NO: 535615 - DNA, 60 bp, Artificial; identical to SEQ ID NO: 300567
  Synthetic oligonucleotide

SEQ ID NO: 535616 - DNA, 55 bp, Artificial; identical to SEQ ID NO: 300568
  Synthetic oligonucleotide

SEQ ID NO: 535617 - DNA, 55 bp, Artificial; identical to SEQ ID NO: 300570
  Synthetic oligonucleotide

SEQ ID NO: 535618 - DNA, 58 bp, Artificial; identical to SEQ ID NO: 300572
  Synthetic oligonucleotide

SEQ ID NO: 535619 - DNA, 57 bp, Artificial; identical to SEQ ID NO: 300574
  Synthetic oligonucleotide

SEQ ID NO: 535620 - DNA, 52 bp, Artificial; identical to SEQ ID NO: 300577
  Synthetic oligonucleotide

SEQ ID NO: 535621 - DNA, 55 bp, Artificial; identical to SEQ ID NO: 300579
  Synthetic oligonucleotide

SEQ ID NO: 535622 - DNA, 60 bp, Artificial; identical to SEQ ID NO: 300581
  Synthetic oligonucleotide

SEQ ID NO: 535623 - DNA, 53 bp, Artificial; identical to SEQ ID NO: 300585
  Synthetic oligonucleotide

SEQ ID NO: 535624 - DNA, 60 bp, Artificial; identical to SEQ ID NO: 10176
  Synthetic oligonucleotide

SEQ ID NO: 535625 - DNA, 60 bp, Artificial; identical to SEQ ID NO: 300587
  Synthetic oligonucleotide

SEQ ID NO: 535626 - DNA, 60 bp, Artificial; identical to SEQ ID NO: 300591
  Synthetic oligonucleotide

SEQ ID NO: 535627 - DNA, 59 bp, Artificial; identical to SEQ ID NO: 300592
  Synthetic oligonucleotide

SEQ ID NO: 535628 - DNA, 59 bp, Artificial; identical to SEQ ID NO: 300593
  Synthetic oligonucleotide

SEQ ID NO: 535629 - DNA, 58 bp, Artificial; identical to SEQ ID NO: 300595
  Synthetic oligonucleotide

SEQ ID NO: 535630 - DNA, 60 bp, Artificial; identical to SEQ ID NO: 300600
  Synthetic oligonucleotide

SEQ ID NO: 535631 - DNA, 60 bp, Artificial; identical to SEQ ID NO: 300601
  Synthetic oligonucleotide

SEQ ID NO: 535632 - DNA, 60 bp, Artificial; identical to SEQ ID NO: 300602
  Synthetic oligonucleotide

SEQ ID NO: 535633 - DNA, 60 bp, Artificial; identical to SEQ ID NO: 300604
  Synthetic oligonucleotide

SEQ ID NO: 535634 - DNA, 58 bp, Artificial; identical to SEQ ID NO: 300605
  Synthetic oligonucleotide

SEQ ID NO: 535635 - DNA, 60 bp, Artificial; identical to SEQ ID NO: 300606
  Synthetic oligonucleotide

SEQ ID NO: 535636 - DNA, 60 bp, Artificial; identical to SEQ ID NO: 300607
  Synthetic oligonucleotide

SEQ ID NO: 535637 - DNA, 60 bp, Artificial; identical to SEQ ID NO: 300611
  Synthetic oligonucleotide

SEQ ID NO: 535638 - DNA, 57 bp, Artificial; identical to SEQ ID NO: 300614
  Synthetic oligonucleotide

SEQ ID NO: 535639 - DNA, 60 bp, Artificial; identical to SEQ ID NO: 300615
  Synthetic oligonucleotide

SEQ ID NO: 535640 - DNA, 60 bp, Artificial; identical to SEQ ID NO: 13717
  Synthetic oligonucleotide

SEQ ID NO: 535641 - DNA, 58 bp, Artificial; identical to SEQ ID NO: 300616
  Synthetic oligonucleotide

SEQ ID NO: 535642 - DNA, 58 bp, Artificial; identical to SEQ ID NO: 300617
  Synthetic oligonucleotide

SEQ ID NO: 535643 - DNA, 60 bp, Artificial; identical to SEQ ID NO: 300620
  Synthetic oligonucleotide

SEQ ID NO: 535644 - DNA, 60 bp, Artificial; identical to SEQ ID NO: 300621
  Synthetic oligonucleotide

SEQ ID NO: 535645 - DNA, 60 bp, Artificial; identical to SEQ ID NO: 300625
  Synthetic oligonucleotide

SEQ ID NO: 535646 - DNA, 60 bp, Artificial; identical to SEQ ID NO: 7808
  Synthetic oligonucleotide

SEQ ID NO: 535647 - DNA, 55 bp, Artificial; identical to SEQ ID NO: 7186
  Synthetic oligonucleotide

SEQ ID NO: 535648 - DNA, 57 bp, Artificial; identical to SEQ ID NO: 300627
  Synthetic oligonucleotide

SEQ ID NO: 535649 - DNA, 56 bp, Artificial; identical to SEQ ID NO: 300630
  Synthetic oligonucleotide

SEQ ID NO: 535650 - DNA, 50 bp, Artificial; identical to SEQ ID NO: 300634
  Synthetic oligonucleotide

SEQ ID NO: 535651 - DNA, 51 bp, Artificial; identical to SEQ ID NO: 300637
  Synthetic oligonucleotide

SEQ ID NO: 535652 - DNA, 59 bp, Artificial; identical to SEQ ID NO: 300642
  Synthetic oligonucleotide

SEQ ID NO: 535653 - DNA, 55 bp, Artificial; identical to SEQ ID NO: 300645
  Synthetic oligonucleotide

SEQ ID NO: 535654 - DNA, 57 bp, Artificial; identical to SEQ ID NO: 300646
  Synthetic oligonucleotide

SEQ ID NO: 535655 - DNA, 55 bp, Artificial; identical to SEQ ID NO: 300648
  Synthetic oligonucleotide

SEQ ID NO: 535656 - DNA, 50 bp, Artificial; identical to SEQ ID NO: 300651
  Synthetic oligonucleotide

SEQ ID NO: 535657 - DNA, 60 bp, Artificial; identical to SEQ ID NO: 7293
  Synthetic oligonucleotide

SEQ ID NO: 535658 - DNA, 58 bp, Artificial; identical to SEQ ID NO: 300656
  Synthetic oligonucleotide

SEQ ID NO: 535659 - DNA, 56 bp, Artificial; identical to SEQ ID NO: 300658
  Synthetic oligonucleotide

SEQ ID NO: 535660 - DNA, 60 bp, Artificial; identical to SEQ ID NO: 300659
  Synthetic oligonucleotide

SEQ ID NO: 535661 - DNA, 58 bp, Artificial; identical to SEQ ID NO: 300665
  Synthetic oligonucleotide

SEQ ID NO: 535662 - DNA, 58 bp, Artificial; identical to SEQ ID NO: 300666
  Synthetic oligonucleotide

SEQ ID NO: 535663 - DNA, 51 bp, Artificial; identical to SEQ ID NO: 300667
  Synthetic oligonucleotide

SEQ ID NO: 535664 - DNA, 53 bp, Artificial; identical to SEQ ID NO: 300668
  Synthetic oligonucleotide

SEQ ID NO: 535665 - DNA, 52 bp, Artificial; identical to SEQ ID NO: 300670
  Synthetic oligonucleotide

SEQ ID NO: 535666 - DNA, 56 bp, Artificial; identical to SEQ ID NO: 300673
  Synthetic oligonucleotide

SEQ ID NO: 535667 - DNA, 53 bp, Artificial; identical to SEQ ID NO: 300674
  Synthetic oligonucleotide

SEQ ID NO: 535668 - DNA, 54 bp, Artificial; identical to SEQ ID NO: 300675
  Synthetic oligonucleotide

SEQ ID NO: 535669 - DNA, 56 bp, Artificial; identical to SEQ ID NO: 300676
  Synthetic oligonucleotide

SEQ ID NO: 535670 - DNA, 57 bp, Artificial; identical to SEQ ID NO: 300682
  Synthetic oligonucleotide

SEQ ID NO: 535671 - DNA, 60 bp, Artificial; identical to SEQ ID NO: 300685
  Synthetic oligonucleotide

SEQ ID NO: 535672 - DNA, 60 bp, Artificial; identical to SEQ ID NO: 300689
  Synthetic oligonucleotide

SEQ ID NO: 535673 - DNA, 56 bp, Artificial; identical to SEQ ID NO: 300691
  Synthetic oligonucleotide

SEQ ID NO: 535674 - DNA, 58 bp, Artificial; identical to SEQ ID NO: 300692
  Synthetic oligonucleotide

SEQ ID NO: 535675 - DNA, 57 bp, Artificial; identical to SEQ ID NO: 300693
  Synthetic oligonucleotide

SEQ ID NO: 535676 - DNA, 52 bp, Artificial; identical to SEQ ID NO: 300694
  Synthetic oligonucleotide

SEQ ID NO: 535677 - DNA, 59 bp, Artificial; identical to SEQ ID NO: 300695
  Synthetic oligonucleotide

SEQ ID NO: 535678 - DNA, 60 bp, Artificial; identical to SEQ ID NO: 300696
  Synthetic oligonucleotide

SEQ ID NO: 535679 - DNA, 60 bp, Artificial; identical to SEQ ID NO: 300699
  Synthetic oligonucleotide

SEQ ID NO: 535680 - DNA, 60 bp, Artificial; identical to SEQ ID NO: 300702
  Synthetic oligonucleotide

SEQ ID NO: 535681 - DNA, 60 bp, Artificial; identical to SEQ ID NO: 300703
  Synthetic oligonucleotide

SEQ ID NO: 535682 - DNA, 60 bp, Artificial; identical to SEQ ID NO: 300705
  Synthetic oligonucleotide

SEQ ID NO: 535683 - DNA, 52 bp, Artificial; identical to SEQ ID NO: 300706
  Synthetic oligonucleotide

SEQ ID NO: 535684 - DNA, 60 bp, Artificial; identical to SEQ ID NO: 11487
  Synthetic oligonucleotide

SEQ ID NO: 535685 - DNA, 54 bp, Artificial; identical to SEQ ID NO: 300707
  Synthetic oligonucleotide

SEQ ID NO: 535686 - DNA, 54 bp, Artificial; identical to SEQ ID NO: 300713
  Synthetic oligonucleotide

SEQ ID NO: 535687 - DNA, 57 bp, Artificial; identical to SEQ ID NO: 300714
  Synthetic oligonucleotide

SEQ ID NO: 535688 - DNA, 57 bp, Artificial; identical to SEQ ID NO: 300721
  Synthetic oligonucleotide

SEQ ID NO: 535689 - DNA, 56 bp, Artificial; identical to SEQ ID NO: 300724
  Synthetic oligonucleotide

SEQ ID NO: 535690 - DNA, 55 bp, Artificial; identical to SEQ ID NO: 300725
  Synthetic oligonucleotide

SEQ ID NO: 535691 - DNA, 55 bp, Artificial; identical to SEQ ID NO: 300729
  Synthetic oligonucleotide

SEQ ID NO: 535692 - DNA, 60 bp, Artificial; identical to SEQ ID NO: 300730
  Synthetic oligonucleotide

SEQ ID NO: 535693 - DNA, 58 bp, Artificial; identical to SEQ ID NO: 300731
  Synthetic oligonucleotide

SEQ ID NO: 535694 - DNA, 52 bp, Artificial; identical to SEQ ID NO: 300735
  Synthetic oligonucleotide

SEQ ID NO: 535695 - DNA, 55 bp, Artificial; identical to SEQ ID NO: 300736
  Synthetic oligonucleotide

SEQ ID NO: 535696 - DNA, 51 bp, Artificial; identical to SEQ ID NO: 300739
  Synthetic oligonucleotide

SEQ ID NO: 535697 - DNA, 60 bp, Artificial; identical to SEQ ID NO: 300741
  Synthetic oligonucleotide

SEQ ID NO: 535698 - DNA, 60 bp, Artificial; identical to SEQ ID NO: 300744
  Synthetic oligonucleotide

SEQ ID NO: 535699 - DNA, 60 bp, Artificial; identical to SEQ ID NO: 300745
  Synthetic oligonucleotide

SEQ ID NO: 535700 - DNA, 60 bp, Artificial; identical to SEQ ID NO: 300746
  Synthetic oligonucleotide

SEQ ID NO: 535701 - DNA, 58 bp, Artificial; identical to SEQ ID NO: 300748
  Synthetic oligonucleotide

SEQ ID NO: 535702 - DNA, 60 bp, Artificial; identical to SEQ ID NO: 300751
  Synthetic oligonucleotide

SEQ ID NO: 535703 - DNA, 53 bp, Artificial; identical to SEQ ID NO: 300752
  Synthetic oligonucleotide

SEQ ID NO: 535704 - DNA, 58 bp, Artificial; identical to SEQ ID NO: 14316
  Synthetic oligonucleotide

SEQ ID NO: 535705 - DNA, 56 bp, Artificial; identical to SEQ ID NO: 300756
  Synthetic oligonucleotide

SEQ ID NO: 535706 - DNA, 50 bp, Artificial; identical to SEQ ID NO: 300759
  Synthetic oligonucleotide

SEQ ID NO: 535707 - DNA, 59 bp, Artificial; identical to SEQ ID NO: 300762
  Synthetic oligonucleotide

SEQ ID NO: 535708 - DNA, 51 bp, Artificial; identical to SEQ ID NO: 300765
  Synthetic oligonucleotide

SEQ ID NO: 535709 - DNA, 58 bp, Artificial; identical to SEQ ID NO: 300772
  Synthetic oligonucleotide

SEQ ID NO: 535710 - DNA, 57 bp, Artificial; identical to SEQ ID NO: 300776
  Synthetic oligonucleotide

SEQ ID NO: 535711 - DNA, 60 bp, Artificial; identical to SEQ ID NO: 300777
  Synthetic oligonucleotide

SEQ ID NO: 535712 - DNA, 53 bp, Artificial; identical to SEQ ID NO: 300778
  Synthetic oligonucleotide

SEQ ID NO: 535713 - DNA, 56 bp, Artificial; identical to SEQ ID NO: 300780
  Synthetic oligonucleotide

SEQ ID NO: 535714 - DNA, 55 bp, Artificial; identical to SEQ ID NO: 300781
  Synthetic oligonucleotide

SEQ ID NO: 535715 - DNA, 56 bp, Artificial; identical to SEQ ID NO: 300783
  Synthetic oligonucleotide

SEQ ID NO: 535716 - DNA, 58 bp, Artificial; identical to SEQ ID NO: 300788
  Synthetic oligonucleotide

SEQ ID NO: 535717 - DNA, 55 bp, Artificial; identical to SEQ ID NO: 300790
  Synthetic oligonucleotide

SEQ ID NO: 535718 - DNA, 52 bp, Artificial; identical to SEQ ID NO: 300792
  Synthetic oligonucleotide

SEQ ID NO: 535719 - DNA, 56 bp, Artificial; identical to SEQ ID NO: 300795
  Synthetic oligonucleotide

SEQ ID NO: 535720 - DNA, 60 bp, Artificial; identical to SEQ ID NO: 300798
  Synthetic oligonucleotide

SEQ ID NO: 535721 - DNA, 55 bp, Artificial; identical to SEQ ID NO: 300799
  Synthetic oligonucleotide

SEQ ID NO: 535722 - DNA, 60 bp, Artificial; identical to SEQ ID NO: 300801
  Synthetic oligonucleotide

SEQ ID NO: 535723 - DNA, 57 bp, Artificial; identical to SEQ ID NO: 300805
  Synthetic oligonucleotide

SEQ ID NO: 535724 - DNA, 53 bp, Artificial; identical to SEQ ID NO: 300810
  Synthetic oligonucleotide

SEQ ID NO: 535725 - DNA, 57 bp, Artificial; identical to SEQ ID NO: 300811
  Synthetic oligonucleotide

SEQ ID NO: 535726 - DNA, 58 bp, Artificial; identical to SEQ ID NO: 300812
  Synthetic oligonucleotide

SEQ ID NO: 535727 - DNA, 56 bp, Artificial; identical to SEQ ID NO: 300817
  Synthetic oligonucleotide

SEQ ID NO: 535728 - DNA, 56 bp, Artificial; identical to SEQ ID NO: 300818
  Synthetic oligonucleotide

SEQ ID NO: 535729 - DNA, 60 bp, Artificial; identical to SEQ ID NO: 300819
  Synthetic oligonucleotide

SEQ ID NO: 535730 - DNA, 55 bp, Artificial; identical to SEQ ID NO: 300823
  Synthetic oligonucleotide

SEQ ID NO: 535731 - DNA, 58 bp, Artificial; identical to SEQ ID NO: 300825
  Synthetic oligonucleotide

SEQ ID NO: 535732 - DNA, 60 bp, Artificial; identical to SEQ ID NO: 300826
  Synthetic oligonucleotide

SEQ ID NO: 535733 - DNA, 59 bp, Artificial; identical to SEQ ID NO: 300829
  Synthetic oligonucleotide

SEQ ID NO: 535734 - DNA, 58 bp, Artificial; identical to SEQ ID NO: 300831
  Synthetic oligonucleotide

SEQ ID NO: 535735 - DNA, 58 bp, Artificial; identical to SEQ ID NO: 300833
  Synthetic oligonucleotide

SEQ ID NO: 535736 - DNA, 60 bp, Artificial; identical to SEQ ID NO: 300834
  Synthetic oligonucleotide

SEQ ID NO: 535737 - DNA, 55 bp, Artificial; identical to SEQ ID NO: 300836
  Synthetic oligonucleotide

SEQ ID NO: 535738 - DNA, 60 bp, Artificial; identical to SEQ ID NO: 300837
  Synthetic oligonucleotide

SEQ ID NO: 535739 - DNA, 59 bp, Artificial; identical to SEQ ID NO: 300838
  Synthetic oligonucleotide

SEQ ID NO: 535740 - DNA, 51 bp, Artificial; identical to SEQ ID NO: 10873
  Synthetic oligonucleotide

SEQ ID NO: 535741 - DNA, 60 bp, Artificial; identical to SEQ ID NO: 300845
  Synthetic oligonucleotide

SEQ ID NO: 535742 - DNA, 60 bp, Artificial; identical to SEQ ID NO: 300846
  Synthetic oligonucleotide

SEQ ID NO: 535743 - DNA, 60 bp, Artificial; identical to SEQ ID NO: 300848
  Synthetic oligonucleotide

SEQ ID NO: 535744 - DNA, 59 bp, Artificial; identical to SEQ ID NO: 300851
  Synthetic oligonucleotide

SEQ ID NO: 535745 - DNA, 55 bp, Artificial; identical to SEQ ID NO: 300852
  Synthetic oligonucleotide

SEQ ID NO: 535746 - DNA, 53 bp, Artificial; identical to SEQ ID NO: 300853
  Synthetic oligonucleotide

SEQ ID NO: 535747 - DNA, 60 bp, Artificial; identical to SEQ ID NO: 300854
  Synthetic oligonucleotide

SEQ ID NO: 535748 - DNA, 55 bp, Artificial; identical to SEQ ID NO: 300855
  Synthetic oligonucleotide

SEQ ID NO: 535749 - DNA, 58 bp, Artificial; identical to SEQ ID NO: 300857
  Synthetic oligonucleotide

SEQ ID NO: 535750 - DNA, 49 bp, Artificial; identical to SEQ ID NO: 17912
  Synthetic oligonucleotide

SEQ ID NO: 535751 - DNA, 60 bp, Artificial; identical to SEQ ID NO: 300860
  Synthetic oligonucleotide

SEQ ID NO: 535752 - DNA, 53 bp, Artificial; identical to SEQ ID NO: 300861
  Synthetic oligonucleotide

SEQ ID NO: 535753 - DNA, 54 bp, Artificial; identical to SEQ ID NO: 300862
  Synthetic oligonucleotide

SEQ ID NO: 535754 - DNA, 60 bp, Artificial; identical to SEQ ID NO: 300864
  Synthetic oligonucleotide

SEQ ID NO: 535755 - DNA, 57 bp, Artificial; identical to SEQ ID NO: 300867
  Synthetic oligonucleotide

SEQ ID NO: 535756 - DNA, 55 bp, Artificial; identical to SEQ ID NO: 300868
  Synthetic oligonucleotide

SEQ ID NO: 535757 - DNA, 57 bp, Artificial; identical to SEQ ID NO: 300871
  Synthetic oligonucleotide

SEQ ID NO: 535758 - DNA, 55 bp, Artificial; identical to SEQ ID NO: 300872
  Synthetic oligonucleotide

SEQ ID NO: 535759 - DNA, 52 bp, Artificial; identical to SEQ ID NO: 300880
  Synthetic oligonucleotide

SEQ ID NO: 535760 - DNA, 60 bp, Artificial; identical to SEQ ID NO: 300882
  Synthetic oligonucleotide

SEQ ID NO: 535761 - DNA, 60 bp, Artificial; identical to SEQ ID NO: 300884
  Synthetic oligonucleotide

SEQ ID NO: 535762 - DNA, 54 bp, Artificial; identical to SEQ ID NO: 300885
  Synthetic oligonucleotide

SEQ ID NO: 535763 - DNA, 58 bp, Artificial; identical to SEQ ID NO: 300887
  Synthetic oligonucleotide

SEQ ID NO: 535764 - DNA, 55 bp, Artificial; identical to SEQ ID NO: 300889
  Synthetic oligonucleotide

SEQ ID NO: 535765 - DNA, 60 bp, Artificial; identical to SEQ ID NO: 11959
  Synthetic oligonucleotide

SEQ ID NO: 535766 - DNA, 50 bp, Artificial; identical to SEQ ID NO: 300891
  Synthetic oligonucleotide

SEQ ID NO: 535767 - DNA, 56 bp, Artificial; identical to SEQ ID NO: 300892
  Synthetic oligonucleotide

SEQ ID NO: 535768 - DNA, 55 bp, Artificial; identical to SEQ ID NO: 300893
  Synthetic oligonucleotide

SEQ ID NO: 535769 - DNA, 54 bp, Artificial; identical to SEQ ID NO: 300895
  Synthetic oligonucleotide

SEQ ID NO: 535770 - DNA, 55 bp, Artificial; identical to SEQ ID NO: 300896
  Synthetic oligonucleotide

SEQ ID NO: 535771 - DNA, 54 bp, Artificial; identical to SEQ ID NO: 300898
  Synthetic oligonucleotide

SEQ ID NO: 535772 - DNA, 54 bp, Artificial; identical to SEQ ID NO: 300899
  Synthetic oligonucleotide

SEQ ID NO: 535773 - DNA, 60 bp, Artificial; identical to SEQ ID NO: 300903
  Synthetic oligonucleotide

SEQ ID NO: 535774 - DNA, 52 bp, Artificial; identical to SEQ ID NO: 300904
  Synthetic oligonucleotide

SEQ ID NO: 535775 - DNA, 55 bp, Artificial; identical to SEQ ID NO: 300906
  Synthetic oligonucleotide

SEQ ID NO: 535776 - DNA, 60 bp, Artificial; identical to SEQ ID NO: 300907
  Synthetic oligonucleotide

SEQ ID NO: 535777 - DNA, 50 bp, Artificial; identical to SEQ ID NO: 17769
  Synthetic oligonucleotide

SEQ ID NO: 535778 - DNA, 51 bp, Artificial; identical to SEQ ID NO: 300918
  Synthetic oligonucleotide

SEQ ID NO: 535779 - DNA, 60 bp, Artificial; identical to SEQ ID NO: 300920
  Synthetic oligonucleotide

SEQ ID NO: 535780 - DNA, 56 bp, Artificial; identical to SEQ ID NO: 300922
  Synthetic oligonucleotide

SEQ ID NO: 535781 - DNA, 55 bp, Artificial; identical to SEQ ID NO: 300924
  Synthetic oligonucleotide

SEQ ID NO: 535782 - DNA, 54 bp, Artificial; identical to SEQ ID NO: 300926
  Synthetic oligonucleotide

SEQ ID NO: 535783 - DNA, 59 bp, Artificial; identical to SEQ ID NO: 300927
  Synthetic oligonucleotide

SEQ ID NO: 535784 - DNA, 60 bp, Artificial; identical to SEQ ID NO: 300935
  Synthetic oligonucleotide

SEQ ID NO: 535785 - DNA, 60 bp, Artificial; identical to SEQ ID NO: 300939
  Synthetic oligonucleotide

SEQ ID NO: 535786 - DNA, 56 bp, Artificial; identical to SEQ ID NO: 300941
  Synthetic oligonucleotide

SEQ ID NO: 535787 - DNA, 60 bp, Artificial; identical to SEQ ID NO: 300942
  Synthetic oligonucleotide

SEQ ID NO: 535788 - DNA, 57 bp, Artificial; identical to SEQ ID NO: 300943
  Synthetic oligonucleotide

SEQ ID NO: 535789 - DNA, 52 bp, Artificial; identical to SEQ ID NO: 300945
  Synthetic oligonucleotide

SEQ ID NO: 535790 - DNA, 54 bp, Artificial; identical to SEQ ID NO: 7810
  Synthetic oligonucleotide

SEQ ID NO: 535791 - DNA, 50 bp, Artificial; identical to SEQ ID NO: 300947
  Synthetic oligonucleotide

SEQ ID NO: 535792 - DNA, 54 bp, Artificial; identical to SEQ ID NO: 300950
  Synthetic oligonucleotide

SEQ ID NO: 535793 - DNA, 59 bp, Artificial; identical to SEQ ID NO: 300952
  Synthetic oligonucleotide

SEQ ID NO: 535794 - DNA, 60 bp, Artificial; identical to SEQ ID NO: 300953
  Synthetic oligonucleotide

SEQ ID NO: 535795 - DNA, 53 bp, Artificial; identical to SEQ ID NO: 300954
  Synthetic oligonucleotide

SEQ ID NO: 535796 - DNA, 57 bp, Artificial; identical to SEQ ID NO: 300955
  Synthetic oligonucleotide

SEQ ID NO: 535797 - DNA, 55 bp, Artificial; identical to SEQ ID NO: 300956
  Synthetic oligonucleotide

SEQ ID NO: 535798 - DNA, 53 bp, Artificial; identical to SEQ ID NO: 6815
  Synthetic oligonucleotide

SEQ ID NO: 535799 - DNA, 60 bp, Artificial; identical to SEQ ID NO: 300957
  Synthetic oligonucleotide

SEQ ID NO: 535800 - DNA, 56 bp, Artificial; identical to SEQ ID NO: 300962
  Synthetic oligonucleotide

SEQ ID NO: 535801 - DNA, 57 bp, Artificial; identical to SEQ ID NO: 300964
  Synthetic oligonucleotide

SEQ ID NO: 535802 - DNA, 53 bp, Artificial; identical to SEQ ID NO: 300968
  Synthetic oligonucleotide

SEQ ID NO: 535803 - DNA, 60 bp, Artificial; identical to SEQ ID NO: 300975
  Synthetic oligonucleotide

SEQ ID NO: 535804 - DNA, 55 bp, Artificial; identical to SEQ ID NO: 300976
  Synthetic oligonucleotide

SEQ ID NO: 535805 - DNA, 59 bp, Artificial; identical to SEQ ID NO: 300977
  Synthetic oligonucleotide

SEQ ID NO: 535806 - DNA, 57 bp, Artificial; identical to SEQ ID NO: 300982
  Synthetic oligonucleotide

SEQ ID NO: 535807 - DNA, 59 bp, Artificial; identical to SEQ ID NO: 300983
  Synthetic oligonucleotide

SEQ ID NO: 535808 - DNA, 51 bp, Artificial; identical to SEQ ID NO: 300985
  Synthetic oligonucleotide

SEQ ID NO: 535809 - DNA, 55 bp, Artificial; identical to SEQ ID NO: 300986
  Synthetic oligonucleotide

SEQ ID NO: 535810 - DNA, 58 bp, Artificial; identical to SEQ ID NO: 300987
  Synthetic oligonucleotide

SEQ ID NO: 535811 - DNA, 60 bp, Artificial; identical to SEQ ID NO: 300988
  Synthetic oligonucleotide

SEQ ID NO: 535812 - DNA, 60 bp, Artificial; identical to SEQ ID NO: 300989
  Synthetic oligonucleotide

SEQ ID NO: 535813 - DNA, 52 bp, Artificial; identical to SEQ ID NO: 301000
  Synthetic oligonucleotide

SEQ ID NO: 535814 - DNA, 57 bp, Artificial; identical to SEQ ID NO: 301001
  Synthetic oligonucleotide

SEQ ID NO: 535815 - DNA, 60 bp, Artificial; identical to SEQ ID NO: 301002
  Synthetic oligonucleotide

SEQ ID NO: 535816 - DNA, 59 bp, Artificial; identical to SEQ ID NO: 301003
  Synthetic oligonucleotide

SEQ ID NO: 535817 - DNA, 54 bp, Artificial; identical to SEQ ID NO: 301008
  Synthetic oligonucleotide

SEQ ID NO: 535818 - DNA, 55 bp, Artificial; identical to SEQ ID NO: 301014
  Synthetic oligonucleotide

SEQ ID NO: 535819 - DNA, 53 bp, Artificial; identical to SEQ ID NO: 301015
  Synthetic oligonucleotide

SEQ ID NO: 535820 - DNA, 60 bp, Artificial; identical to SEQ ID NO: 301016
  Synthetic oligonucleotide

SEQ ID NO: 535821 - DNA, 58 bp, Artificial; identical to SEQ ID NO: 301017
  Synthetic oligonucleotide

SEQ ID NO: 535822 - DNA, 53 bp, Artificial; identical to SEQ ID NO: 301019
  Synthetic oligonucleotide

SEQ ID NO: 535823 - DNA, 54 bp, Artificial; identical to SEQ ID NO: 301021
  Synthetic oligonucleotide

SEQ ID NO: 535824 - DNA, 51 bp, Artificial; identical to SEQ ID NO: 301022
  Synthetic oligonucleotide

SEQ ID NO: 535825 - DNA, 55 bp, Artificial; identical to SEQ ID NO: 301023
  Synthetic oligonucleotide

SEQ ID NO: 535826 - DNA, 59 bp, Artificial; identical to SEQ ID NO: 301028
  Synthetic oligonucleotide

SEQ ID NO: 535827 - DNA, 53 bp, Artificial; identical to SEQ ID NO: 301030
  Synthetic oligonucleotide

SEQ ID NO: 535828 - DNA, 59 bp, Artificial; identical to SEQ ID NO: 301031
  Synthetic oligonucleotide

SEQ ID NO: 535829 - DNA, 58 bp, Artificial; identical to SEQ ID NO: 13251
  Synthetic oligonucleotide

SEQ ID NO: 535830 - DNA, 57 bp, Artificial; identical to SEQ ID NO: 301035
  Synthetic oligonucleotide

SEQ ID NO: 535831 - DNA, 55 bp, Artificial; identical to SEQ ID NO: 301038
  Synthetic oligonucleotide

SEQ ID NO: 535832 - DNA, 55 bp, Artificial; identical to SEQ ID NO: 301041
  Synthetic oligonucleotide

SEQ ID NO: 535833 - DNA, 56 bp, Artificial; identical to SEQ ID NO: 301042
  Synthetic oligonucleotide

SEQ ID NO: 535834 - DNA, 59 bp, Artificial; identical to SEQ ID NO: 301044
  Synthetic oligonucleotide

SEQ ID NO: 535835 - DNA, 59 bp, Artificial; identical to SEQ ID NO: 301047
  Synthetic oligonucleotide

SEQ ID NO: 535836 - DNA, 54 bp, Artificial; identical to SEQ ID NO: 301051
  Synthetic oligonucleotide

SEQ ID NO: 535837 - DNA, 55 bp, Artificial; identical to SEQ ID NO: 301052
  Synthetic oligonucleotide

SEQ ID NO: 535838 - DNA, 60 bp, Artificial; identical to SEQ ID NO: 301056
  Synthetic oligonucleotide

SEQ ID NO: 535839 - DNA, 60 bp, Artificial; identical to SEQ ID NO: 301057
  Synthetic oligonucleotide

SEQ ID NO: 535840 - DNA, 56 bp, Artificial; identical to SEQ ID NO: 301059
  Synthetic oligonucleotide

SEQ ID NO: 535841 - DNA, 56 bp, Artificial; identical to SEQ ID NO: 301061
  Synthetic oligonucleotide

SEQ ID NO: 535842 - DNA, 56 bp, Artificial; identical to SEQ ID NO: 301068
  Synthetic oligonucleotide

SEQ ID NO: 535843 - DNA, 56 bp, Artificial; identical to SEQ ID NO: 301071
  Synthetic oligonucleotide

SEQ ID NO: 535844 - DNA, 60 bp, Artificial; identical to SEQ ID NO: 301072
  Synthetic oligonucleotide

SEQ ID NO: 535845 - DNA, 60 bp, Artificial; identical to SEQ ID NO: 301074
  Synthetic oligonucleotide

SEQ ID NO: 535846 - DNA, 50 bp, Artificial; identical to SEQ ID NO: 301078
  Synthetic oligonucleotide

SEQ ID NO: 535847 - DNA, 57 bp, Artificial; identical to SEQ ID NO: 301081
  Synthetic oligonucleotide

SEQ ID NO: 535848 - DNA, 51 bp, Artificial; identical to SEQ ID NO: 301083
  Synthetic oligonucleotide

SEQ ID NO: 535849 - DNA, 60 bp, Artificial; identical to SEQ ID NO: 301086
  Synthetic oligonucleotide

SEQ ID NO: 535850 - DNA, 60 bp, Artificial; identical to SEQ ID NO: 301094
  Synthetic oligonucleotide

SEQ ID NO: 535851 - DNA, 60 bp, Artificial; identical to SEQ ID NO: 301099
  Synthetic oligonucleotide

SEQ ID NO: 535852 - DNA, 60 bp, Artificial; identical to SEQ ID NO: 301101
  Synthetic oligonucleotide

SEQ ID NO: 535853 - DNA, 55 bp, Artificial; identical to SEQ ID NO: 301102
  Synthetic oligonucleotide

SEQ ID NO: 535854 - DNA, 56 bp, Artificial; identical to SEQ ID NO: 301103
  Synthetic oligonucleotide

SEQ ID NO: 535855 - DNA, 55 bp, Artificial; identical to SEQ ID NO: 301104
  Synthetic oligonucleotide

SEQ ID NO: 535856 - DNA, 54 bp, Artificial; identical to SEQ ID NO: 301106
  Synthetic oligonucleotide

SEQ ID NO: 535857 - DNA, 57 bp, Artificial; identical to SEQ ID NO: 301107
  Synthetic oligonucleotide

SEQ ID NO: 535858 - DNA, 60 bp, Artificial; identical to SEQ ID NO: 301108
  Synthetic oligonucleotide

SEQ ID NO: 535859 - DNA, 53 bp, Artificial; identical to SEQ ID NO: 301109
  Synthetic oligonucleotide

SEQ ID NO: 535860 - DNA, 60 bp, Artificial; identical to SEQ ID NO: 301111
  Synthetic oligonucleotide

SEQ ID NO: 535861 - DNA, 60 bp, Artificial; identical to SEQ ID NO: 301114
  Synthetic oligonucleotide

SEQ ID NO: 535862 - DNA, 60 bp, Artificial; identical to SEQ ID NO: 301116
  Synthetic oligonucleotide

SEQ ID NO: 535863 - DNA, 55 bp, Artificial; identical to SEQ ID NO: 301118
  Synthetic oligonucleotide

SEQ ID NO: 535864 - DNA, 57 bp, Artificial; identical to SEQ ID NO: 301119
  Synthetic oligonucleotide

SEQ ID NO: 535865 - DNA, 60 bp, Artificial; identical to SEQ ID NO: 12233
  Synthetic oligonucleotide

SEQ ID NO: 535866 - DNA, 60 bp, Artificial; identical to SEQ ID NO: 301126
  Synthetic oligonucleotide

SEQ ID NO: 535867 - DNA, 59 bp, Artificial; identical to SEQ ID NO: 301129
  Synthetic oligonucleotide

SEQ ID NO: 535868 - DNA, 55 bp, Artificial; identical to SEQ ID NO: 301130
  Synthetic oligonucleotide

SEQ ID NO: 535869 - DNA, 60 bp, Artificial; identical to SEQ ID NO: 301131
  Synthetic oligonucleotide

SEQ ID NO: 535870 - DNA, 58 bp, Artificial; identical to SEQ ID NO: 301133
  Synthetic oligonucleotide

SEQ ID NO: 535871 - DNA, 60 bp, Artificial; identical to SEQ ID NO: 81023
  Synthetic oligonucleotide

SEQ ID NO: 535872 - DNA, 58 bp, Artificial; identical to SEQ ID NO: 301137
  Synthetic oligonucleotide

SEQ ID NO: 535873 - DNA, 55 bp, Artificial; identical to SEQ ID NO: 301139
  Synthetic oligonucleotide

SEQ ID NO: 535874 - DNA, 59 bp, Artificial; identical to SEQ ID NO: 301140
  Synthetic oligonucleotide

SEQ ID NO: 535875 - DNA, 53 bp, Artificial; identical to SEQ ID NO: 301141
  Synthetic oligonucleotide

SEQ ID NO: 535876 - DNA, 52 bp, Artificial; identical to SEQ ID NO: 301144
  Synthetic oligonucleotide

SEQ ID NO: 535877 - DNA, 50 bp, Artificial; identical to SEQ ID NO: 301148
  Synthetic oligonucleotide

SEQ ID NO: 535878 - DNA, 55 bp, Artificial; identical to SEQ ID NO: 301154
  Synthetic oligonucleotide

SEQ ID NO: 535879 - DNA, 59 bp, Artificial; identical to SEQ ID NO: 301155
  Synthetic oligonucleotide

SEQ ID NO: 535880 - DNA, 54 bp, Artificial; identical to SEQ ID NO: 301160
  Synthetic oligonucleotide

SEQ ID NO: 535881 - DNA, 58 bp, Artificial; identical to SEQ ID NO: 301162
  Synthetic oligonucleotide

SEQ ID NO: 535882 - DNA, 60 bp, Artificial; identical to SEQ ID NO: 301171
  Synthetic oligonucleotide

SEQ ID NO: 535883 - DNA, 55 bp, Artificial; identical to SEQ ID NO: 301172
  Synthetic oligonucleotide

SEQ ID NO: 535884 - DNA, 55 bp, Artificial; identical to SEQ ID NO: 301173
  Synthetic oligonucleotide

SEQ ID NO: 535885 - DNA, 51 bp, Artificial; identical to SEQ ID NO: 301174
  Synthetic oligonucleotide

SEQ ID NO: 535886 - DNA, 54 bp, Artificial; identical to SEQ ID NO: 301177
  Synthetic oligonucleotide

SEQ ID NO: 535887 - DNA, 53 bp, Artificial; identical to SEQ ID NO: 301178
  Synthetic oligonucleotide

SEQ ID NO: 535888 - DNA, 55 bp, Artificial; identical to SEQ ID NO: 301179
  Synthetic oligonucleotide

SEQ ID NO: 535889 - DNA, 53 bp, Artificial; identical to SEQ ID NO: 301181
  Synthetic oligonucleotide

SEQ ID NO: 535890 - DNA, 57 bp, Artificial; identical to SEQ ID NO: 301183
  Synthetic oligonucleotide

SEQ ID NO: 535891 - DNA, 55 bp, Artificial; identical to SEQ ID NO: 301184
  Synthetic oligonucleotide

SEQ ID NO: 535892 - DNA, 55 bp, Artificial; identical to SEQ ID NO: 301187
  Synthetic oligonucleotide

SEQ ID NO: 535893 - DNA, 57 bp, Artificial; identical to SEQ ID NO: 301189
  Synthetic oligonucleotide

SEQ ID NO: 535894 - DNA, 56 bp, Artificial; identical to SEQ ID NO: 301192
  Synthetic oligonucleotide

SEQ ID NO: 535895 - DNA, 53 bp, Artificial; identical to SEQ ID NO: 301194
  Synthetic oligonucleotide

SEQ ID NO: 535896 - DNA, 54 bp, Artificial; identical to SEQ ID NO: 301196
  Synthetic oligonucleotide

SEQ ID NO: 535897 - DNA, 60 bp, Artificial; identical to SEQ ID NO: 301200
  Synthetic oligonucleotide

SEQ ID NO: 535898 - DNA, 49 bp, Artificial; identical to SEQ ID NO: 301202
  Synthetic oligonucleotide

SEQ ID NO: 535899 - DNA, 57 bp, Artificial; identical to SEQ ID NO: 301209
  Synthetic oligonucleotide

SEQ ID NO: 535900 - DNA, 59 bp, Artificial; identical to SEQ ID NO: 301210
  Synthetic oligonucleotide

SEQ ID NO: 535901 - DNA, 48 bp, Artificial; identical to SEQ ID NO: 301217
  Synthetic oligonucleotide

SEQ ID NO: 535902 - DNA, 55 bp, Artificial; identical to SEQ ID NO: 301220
  Synthetic oligonucleotide

SEQ ID NO: 535903 - DNA, 58 bp, Artificial; identical to SEQ ID NO: 301221
  Synthetic oligonucleotide

SEQ ID NO: 535904 - DNA, 57 bp, Artificial; identical to SEQ ID NO: 301223
  Synthetic oligonucleotide

SEQ ID NO: 535905 - DNA, 52 bp, Artificial; identical to SEQ ID NO: 301229
  Synthetic oligonucleotide

SEQ ID NO: 535906 - DNA, 51 bp, Artificial; identical to SEQ ID NO: 301230
  Synthetic oligonucleotide

SEQ ID NO: 535907 - DNA, 55 bp, Artificial; identical to SEQ ID NO: 301232
  Synthetic oligonucleotide

SEQ ID NO: 535908 - DNA, 54 bp, Artificial; identical to SEQ ID NO: 301237
  Synthetic oligonucleotide

SEQ ID NO: 535909 - DNA, 55 bp, Artificial; identical to SEQ ID NO: 301241
  Synthetic oligonucleotide

SEQ ID NO: 535910 - DNA, 60 bp, Artificial; identical to SEQ ID NO: 301244
  Synthetic oligonucleotide

SEQ ID NO: 535911 - DNA, 59 bp, Artificial; identical to SEQ ID NO: 301246
  Synthetic oligonucleotide

SEQ ID NO: 535912 - DNA, 58 bp, Artificial; identical to SEQ ID NO: 301250
  Synthetic oligonucleotide

SEQ ID NO: 535913 - DNA, 56 bp, Artificial; identical to SEQ ID NO: 16995
  Synthetic oligonucleotide

SEQ ID NO: 535914 - DNA, 56 bp, Artificial; identical to SEQ ID NO: 301251
  Synthetic oligonucleotide

SEQ ID NO: 535915 - DNA, 57 bp, Artificial; identical to SEQ ID NO: 301252
  Synthetic oligonucleotide

SEQ ID NO: 535916 - DNA, 51 bp, Artificial; identical to SEQ ID NO: 301255
  Synthetic oligonucleotide

SEQ ID NO: 535917 - DNA, 58 bp, Artificial; identical to SEQ ID NO: 301256
  Synthetic oligonucleotide

SEQ ID NO: 535918 - DNA, 51 bp, Artificial; identical to SEQ ID NO: 301260
  Synthetic oligonucleotide

SEQ ID NO: 535919 - DNA, 50 bp, Artificial; identical to SEQ ID NO: 301261
  Synthetic oligonucleotide

SEQ ID NO: 535920 - DNA, 52 bp, Artificial; identical to SEQ ID NO: 301264
  Synthetic oligonucleotide

SEQ ID NO: 535921 - DNA, 52 bp, Artificial; identical to SEQ ID NO: 301265
  Synthetic oligonucleotide

SEQ ID NO: 535922 - DNA, 54 bp, Artificial; identical to SEQ ID NO: 301267
  Synthetic oligonucleotide

SEQ ID NO: 535923 - DNA, 54 bp, Artificial; identical to SEQ ID NO: 301270
  Synthetic oligonucleotide

SEQ ID NO: 535924 - DNA, 55 bp, Artificial; identical to SEQ ID NO: 301272
  Synthetic oligonucleotide

SEQ ID NO: 535925 - DNA, 55 bp, Artificial; identical to SEQ ID NO: 301273
  Synthetic oligonucleotide

SEQ ID NO: 535926 - DNA, 58 bp, Artificial; identical to SEQ ID NO: 301274
  Synthetic oligonucleotide

SEQ ID NO: 535927 - DNA, 52 bp, Artificial; identical to SEQ ID NO: 18784
  Synthetic oligonucleotide

SEQ ID NO: 535928 - DNA, 60 bp, Artificial; identical to SEQ ID NO: 301275
  Synthetic oligonucleotide

SEQ ID NO: 535929 - DNA, 60 bp, Artificial; identical to SEQ ID NO: 14812
  Synthetic oligonucleotide

SEQ ID NO: 535930 - DNA, 56 bp, Artificial; identical to SEQ ID NO: 301287
  Synthetic oligonucleotide

SEQ ID NO: 535931 - DNA, 55 bp, Artificial; identical to SEQ ID NO: 301290
  Synthetic oligonucleotide

SEQ ID NO: 535932 - DNA, 53 bp, Artificial; identical to SEQ ID NO: 301291
  Synthetic oligonucleotide

SEQ ID NO: 535933 - DNA, 55 bp, Artificial; identical to SEQ ID NO: 301292
  Synthetic oligonucleotide

SEQ ID NO: 535934 - DNA, 54 bp, Artificial; identical to SEQ ID NO: 301293
  Synthetic oligonucleotide

SEQ ID NO: 535935 - DNA, 58 bp, Artificial; identical to SEQ ID NO: 301295
  Synthetic oligonucleotide

SEQ ID NO: 535936 - DNA, 51 bp, Artificial; identical to SEQ ID NO: 301296
  Synthetic oligonucleotide

SEQ ID NO: 535937 - DNA, 54 bp, Artificial; identical to SEQ ID NO: 301297
  Synthetic oligonucleotide

SEQ ID NO: 535938 - DNA, 60 bp, Artificial; identical to SEQ ID NO: 301298
  Synthetic oligonucleotide

SEQ ID NO: 535939 - DNA, 60 bp, Artificial; identical to SEQ ID NO: 301301
  Synthetic oligonucleotide

SEQ ID NO: 535940 - DNA, 59 bp, Artificial; identical to SEQ ID NO: 301304
  Synthetic oligonucleotide

SEQ ID NO: 535941 - DNA, 55 bp, Artificial; identical to SEQ ID NO: 301306
  Synthetic oligonucleotide

SEQ ID NO: 535942 - DNA, 58 bp, Artificial; identical to SEQ ID NO: 301309
  Synthetic oligonucleotide

SEQ ID NO: 535943 - DNA, 51 bp, Artificial; identical to SEQ ID NO: 6401
  Synthetic oligonucleotide

SEQ ID NO: 535944 - DNA, 59 bp, Artificial; identical to SEQ ID NO: 301311
  Synthetic oligonucleotide

SEQ ID NO: 535945 - DNA, 58 bp, Artificial; identical to SEQ ID NO: 301315
  Synthetic oligonucleotide

SEQ ID NO: 535946 - DNA, 55 bp, Artificial; identical to SEQ ID NO: 301316
  Synthetic oligonucleotide

SEQ ID NO: 535947 - DNA, 57 bp, Artificial; identical to SEQ ID NO: 301318
  Synthetic oligonucleotide

SEQ ID NO: 535948 - DNA, 50 bp, Artificial; identical to SEQ ID NO: 301319
  Synthetic oligonucleotide

SEQ ID NO: 535949 - DNA, 51 bp, Artificial; identical to SEQ ID NO: 301320
  Synthetic oligonucleotide

SEQ ID NO: 535950 - DNA, 60 bp, Artificial; identical to SEQ ID NO: 14358
  Synthetic oligonucleotide

SEQ ID NO: 535951 - DNA, 52 bp, Artificial; identical to SEQ ID NO: 301324
  Synthetic oligonucleotide

SEQ ID NO: 535952 - DNA, 57 bp, Artificial; identical to SEQ ID NO: 301329
  Synthetic oligonucleotide

SEQ ID NO: 535953 - DNA, 52 bp, Artificial; identical to SEQ ID NO: 301330
  Synthetic oligonucleotide

SEQ ID NO: 535954 - DNA, 60 bp, Artificial; identical to SEQ ID NO: 301331
  Synthetic oligonucleotide

SEQ ID NO: 535955 - DNA, 52 bp, Artificial; identical to SEQ ID NO: 301337
  Synthetic oligonucleotide

SEQ ID NO: 535956 - DNA, 57 bp, Artificial; identical to SEQ ID NO: 301339
  Synthetic oligonucleotide

SEQ ID NO: 535957 - DNA, 55 bp, Artificial; identical to SEQ ID NO: 301340
  Synthetic oligonucleotide

SEQ ID NO: 535958 - DNA, 55 bp, Artificial; identical to SEQ ID NO: 301343
  Synthetic oligonucleotide

SEQ ID NO: 535959 - DNA, 57 bp, Artificial; identical to SEQ ID NO: 301346
  Synthetic oligonucleotide

SEQ ID NO: 535960 - DNA, 55 bp, Artificial; identical to SEQ ID NO: 18246
  Synthetic oligonucleotide

SEQ ID NO: 535961 - DNA, 55 bp, Artificial; identical to SEQ ID NO: 301347
  Synthetic oligonucleotide

SEQ ID NO: 535962 - DNA, 60 bp, Artificial; identical to SEQ ID NO: 301350
  Synthetic oligonucleotide

SEQ ID NO: 535963 - DNA, 53 bp, Artificial; identical to SEQ ID NO: 301353
  Synthetic oligonucleotide

SEQ ID NO: 535964 - DNA, 60 bp, Artificial; identical to SEQ ID NO: 301354
  Synthetic oligonucleotide

SEQ ID NO: 535965 - DNA, 53 bp, Artificial; identical to SEQ ID NO: 301358
  Synthetic oligonucleotide

SEQ ID NO: 535966 - DNA, 55 bp, Artificial; identical to SEQ ID NO: 301360
  Synthetic oligonucleotide

SEQ ID NO: 535967 - DNA, 60 bp, Artificial; identical to SEQ ID NO: 301363
  Synthetic oligonucleotide

SEQ ID NO: 535968 - DNA, 55 bp, Artificial; identical to SEQ ID NO: 301365
  Synthetic oligonucleotide

SEQ ID NO: 535969 - DNA, 55 bp, Artificial; identical to SEQ ID NO: 301366
  Synthetic oligonucleotide

SEQ ID NO: 535970 - DNA, 56 bp, Artificial; identical to SEQ ID NO: 301367
  Synthetic oligonucleotide

SEQ ID NO: 535971 - DNA, 54 bp, Artificial; identical to SEQ ID NO: 301369
  Synthetic oligonucleotide

SEQ ID NO: 535972 - DNA, 55 bp, Artificial; identical to SEQ ID NO: 301371
  Synthetic oligonucleotide

SEQ ID NO: 535973 - DNA, 52 bp, Artificial; identical to SEQ ID NO: 301372
  Synthetic oligonucleotide

SEQ ID NO: 535974 - DNA, 53 bp, Artificial; identical to SEQ ID NO: 301376
  Synthetic oligonucleotide

SEQ ID NO: 535975 - DNA, 55 bp, Artificial; identical to SEQ ID NO: 301381
  Synthetic oligonucleotide

SEQ ID NO: 535976 - DNA, 56 bp, Artificial; identical to SEQ ID NO: 301382
  Synthetic oligonucleotide

SEQ ID NO: 535977 - DNA, 58 bp, Artificial; identical to SEQ ID NO: 301384
  Synthetic oligonucleotide

SEQ ID NO: 535978 - DNA, 60 bp, Artificial; identical to SEQ ID NO: 301385
  Synthetic oligonucleotide

SEQ ID NO: 535979 - DNA, 52 bp, Artificial; identical to SEQ ID NO: 301387
  Synthetic oligonucleotide

SEQ ID NO: 535980 - DNA, 60 bp, Artificial; identical to SEQ ID NO: 301388
  Synthetic oligonucleotide

SEQ ID NO: 535981 - DNA, 55 bp, Artificial; identical to SEQ ID NO: 301390
  Synthetic oligonucleotide

SEQ ID NO: 535982 - DNA, 55 bp, Artificial; identical to SEQ ID NO: 301393
  Synthetic oligonucleotide

SEQ ID NO: 535983 - DNA, 52 bp, Artificial; identical to SEQ ID NO: 301394
  Synthetic oligonucleotide

SEQ ID NO: 535984 - DNA, 60 bp, Artificial; identical to SEQ ID NO: 301397
  Synthetic oligonucleotide

SEQ ID NO: 535985 - DNA, 60 bp, Artificial; identical to SEQ ID NO: 301399
  Synthetic oligonucleotide

SEQ ID NO: 535986 - DNA, 60 bp, Artificial; identical to SEQ ID NO: 301400
  Synthetic oligonucleotide

SEQ ID NO: 535987 - DNA, 59 bp, Artificial; identical to SEQ ID NO: 301405
  Synthetic oligonucleotide

SEQ ID NO: 535988 - DNA, 56 bp, Artificial; identical to SEQ ID NO: 301408
  Synthetic oligonucleotide

SEQ ID NO: 535989 - DNA, 60 bp, Artificial; identical to SEQ ID NO: 301416
  Synthetic oligonucleotide

SEQ ID NO: 535990 - DNA, 55 bp, Artificial; identical to SEQ ID NO: 301419
  Synthetic oligonucleotide

SEQ ID NO: 535991 - DNA, 56 bp, Artificial; identical to SEQ ID NO: 301420
  Synthetic oligonucleotide

SEQ ID NO: 535992 - DNA, 57 bp, Artificial; identical to SEQ ID NO: 301422
  Synthetic oligonucleotide

SEQ ID NO: 535993 - DNA, 47 bp, Artificial; identical to SEQ ID NO: 301423
  Synthetic oligonucleotide

SEQ ID NO: 535994 - DNA, 55 bp, Artificial; identical to SEQ ID NO: 301424
  Synthetic oligonucleotide

SEQ ID NO: 535995 - DNA, 51 bp, Artificial; identical to SEQ ID NO: 301428
  Synthetic oligonucleotide

SEQ ID NO: 535996 - DNA, 59 bp, Artificial; identical to SEQ ID NO: 301430
  Synthetic oligonucleotide

SEQ ID NO: 535997 - DNA, 54 bp, Artificial; identical to SEQ ID NO: 301431
  Synthetic oligonucleotide

SEQ ID NO: 535998 - DNA, 57 bp, Artificial; identical to SEQ ID NO: 301435
  Synthetic oligonucleotide

SEQ ID NO: 535999 - DNA, 54 bp, Artificial; identical to SEQ ID NO: 301437
  Synthetic oligonucleotide

SEQ ID NO: 536000 - DNA, 57 bp, Artificial; identical to SEQ ID NO: 301445
  Synthetic oligonucleotide

SEQ ID NO: 536001 - DNA, 53 bp, Artificial; identical to SEQ ID NO: 301449
  Synthetic oligonucleotide

SEQ ID NO: 536002 - DNA, 55 bp, Artificial; identical to SEQ ID NO: 301451
  Synthetic oligonucleotide

SEQ ID NO: 536003 - DNA, 52 bp, Artificial; identical to SEQ ID NO: 301453
  Synthetic oligonucleotide

SEQ ID NO: 536004 - DNA, 53 bp, Artificial; identical to SEQ ID NO: 301457
  Synthetic oligonucleotide

SEQ ID NO: 536005 - DNA, 58 bp, Artificial; identical to SEQ ID NO: 301462
  Synthetic oligonucleotide

SEQ ID NO: 536006 - DNA, 55 bp, Artificial; identical to SEQ ID NO: 301463
  Synthetic oligonucleotide

SEQ ID NO: 536007 - DNA, 60 bp, Artificial; identical to SEQ ID NO: 301464
  Synthetic oligonucleotide

SEQ ID NO: 536008 - DNA, 56 bp, Artificial; identical to SEQ ID NO: 301465
  Synthetic oligonucleotide

SEQ ID NO: 536009 - DNA, 51 bp, Artificial; identical to SEQ ID NO: 301467
  Synthetic oligonucleotide

SEQ ID NO: 536010 - DNA, 57 bp, Artificial; identical to SEQ ID NO: 301469
  Synthetic oligonucleotide

SEQ ID NO: 536011 - DNA, 58 bp, Artificial; identical to SEQ ID NO: 301470
  Synthetic oligonucleotide

SEQ ID NO: 536012 - DNA, 57 bp, Artificial; identical to SEQ ID NO: 301471
  Synthetic oligonucleotide

SEQ ID NO: 536013 - DNA, 52 bp, Artificial; identical to SEQ ID NO: 301475
  Synthetic oligonucleotide

SEQ ID NO: 536014 - DNA, 50 bp, Artificial; identical to SEQ ID NO: 301476
  Synthetic oligonucleotide

SEQ ID NO: 536015 - DNA, 57 bp, Artificial; identical to SEQ ID NO: 301479
  Synthetic oligonucleotide

SEQ ID NO: 536016 - DNA, 50 bp, Artificial; identical to SEQ ID NO: 301480
  Synthetic oligonucleotide

SEQ ID NO: 536017 - DNA, 54 bp, Artificial; identical to SEQ ID NO: 301481
  Synthetic oligonucleotide

SEQ ID NO: 536018 - DNA, 56 bp, Artificial; identical to SEQ ID NO: 301486
  Synthetic oligonucleotide

SEQ ID NO: 536019 - DNA, 56 bp, Artificial; identical to SEQ ID NO: 301487
  Synthetic oligonucleotide

SEQ ID NO: 536020 - DNA, 50 bp, Artificial; identical to SEQ ID NO: 13864
  Synthetic oligonucleotide

SEQ ID NO: 536021 - DNA, 60 bp, Artificial; identical to SEQ ID NO: 301489
  Synthetic oligonucleotide

SEQ ID NO: 536022 - DNA, 58 bp, Artificial; identical to SEQ ID NO: 301492
  Synthetic oligonucleotide

SEQ ID NO: 536023 - DNA, 60 bp, Artificial; identical to SEQ ID NO: 301494
  Synthetic oligonucleotide

SEQ ID NO: 536024 - DNA, 59 bp, Artificial; identical to SEQ ID NO: 301499
  Synthetic oligonucleotide

SEQ ID NO: 536025 - DNA, 60 bp, Artificial; identical to SEQ ID NO: 301502
  Synthetic oligonucleotide

SEQ ID NO: 536026 - DNA, 58 bp, Artificial; identical to SEQ ID NO: 301507
  Synthetic oligonucleotide

SEQ ID NO: 536027 - DNA, 53 bp, Artificial; identical to SEQ ID NO: 301508
  Synthetic oligonucleotide

SEQ ID NO: 536028 - DNA, 56 bp, Artificial; identical to SEQ ID NO: 301509
  Synthetic oligonucleotide

SEQ ID NO: 536029 - DNA, 57 bp, Artificial; identical to SEQ ID NO: 301513
  Synthetic oligonucleotide

SEQ ID NO: 536030 - DNA, 58 bp, Artificial; identical to SEQ ID NO: 301515
  Synthetic oligonucleotide

SEQ ID NO: 536031 - DNA, 60 bp, Artificial; identical to SEQ ID NO: 301516
  Synthetic oligonucleotide

SEQ ID NO: 536032 - DNA, 53 bp, Artificial; identical to SEQ ID NO: 301519
  Synthetic oligonucleotide

SEQ ID NO: 536033 - DNA, 50 bp, Artificial; identical to SEQ ID NO: 301520
  Synthetic oligonucleotide

SEQ ID NO: 536034 - DNA, 56 bp, Artificial; identical to SEQ ID NO: 301522
  Synthetic oligonucleotide

SEQ ID NO: 536035 - DNA, 60 bp, Artificial; identical to SEQ ID NO: 301523
  Synthetic oligonucleotide

SEQ ID NO: 536036 - DNA, 60 bp, Artificial; identical to SEQ ID NO: 301528
  Synthetic oligonucleotide

SEQ ID NO: 536037 - DNA, 57 bp, Artificial; identical to SEQ ID NO: 301531
  Synthetic oligonucleotide

SEQ ID NO: 536038 - DNA, 58 bp, Artificial; identical to SEQ ID NO: 301532
  Synthetic oligonucleotide

SEQ ID NO: 536039 - DNA, 58 bp, Artificial; identical to SEQ ID NO: 17479
  Synthetic oligonucleotide

SEQ ID NO: 536040 - DNA, 55 bp, Artificial; identical to SEQ ID NO: 301535
  Synthetic oligonucleotide

SEQ ID NO: 536041 - DNA, 56 bp, Artificial; identical to SEQ ID NO: 301536
  Synthetic oligonucleotide

SEQ ID NO: 536042 - DNA, 56 bp, Artificial; identical to SEQ ID NO: 301537
  Synthetic oligonucleotide

SEQ ID NO: 536043 - DNA, 59 bp, Artificial; identical to SEQ ID NO: 301539
  Synthetic oligonucleotide

SEQ ID NO: 536044 - DNA, 50 bp, Artificial; identical to SEQ ID NO: 301544
  Synthetic oligonucleotide

SEQ ID NO: 536045 - DNA, 50 bp, Artificial; identical to SEQ ID NO: 301545
  Synthetic oligonucleotide

SEQ ID NO: 536046 - DNA, 60 bp, Artificial; identical to SEQ ID NO: 301547
  Synthetic oligonucleotide

SEQ ID NO: 536047 - DNA, 52 bp, Artificial; identical to SEQ ID NO: 301548
  Synthetic oligonucleotide

SEQ ID NO: 536048 - DNA, 55 bp, Artificial; identical to SEQ ID NO: 301550
  Synthetic oligonucleotide

SEQ ID NO: 536049 - DNA, 51 bp, Artificial; identical to SEQ ID NO: 301554
  Synthetic oligonucleotide

SEQ ID NO: 536050 - DNA, 52 bp, Artificial; identical to SEQ ID NO: 301557
  Synthetic oligonucleotide

SEQ ID NO: 536051 - DNA, 54 bp, Artificial; identical to SEQ ID NO: 301560
  Synthetic oligonucleotide

SEQ ID NO: 536052 - DNA, 55 bp, Artificial; identical to SEQ ID NO: 301563
  Synthetic oligonucleotide

SEQ ID NO: 536053 - DNA, 52 bp, Artificial; identical to SEQ ID NO: 301564
  Synthetic oligonucleotide

SEQ ID NO: 536054 - DNA, 59 bp, Artificial; identical to SEQ ID NO: 301565
  Synthetic oligonucleotide

SEQ ID NO: 536055 - DNA, 60 bp, Artificial; identical to SEQ ID NO: 301566
  Synthetic oligonucleotide

SEQ ID NO: 536056 - DNA, 57 bp, Artificial; identical to SEQ ID NO: 301568
  Synthetic oligonucleotide

SEQ ID NO: 536057 - DNA, 55 bp, Artificial; identical to SEQ ID NO: 301575
  Synthetic oligonucleotide

SEQ ID NO: 536058 - DNA, 55 bp, Artificial; identical to SEQ ID NO: 301576
  Synthetic oligonucleotide

SEQ ID NO: 536059 - DNA, 50 bp, Artificial; identical to SEQ ID NO: 301579
  Synthetic oligonucleotide

SEQ ID NO: 536060 - DNA, 58 bp, Artificial; identical to SEQ ID NO: 301580
  Synthetic oligonucleotide

SEQ ID NO: 536061 - DNA, 51 bp, Artificial; identical to SEQ ID NO: 301581
  Synthetic oligonucleotide

SEQ ID NO: 536062 - DNA, 50 bp, Artificial; identical to SEQ ID NO: 301586
  Synthetic oligonucleotide

SEQ ID NO: 536063 - DNA, 59 bp, Artificial; identical to SEQ ID NO: 17552
  Synthetic oligonucleotide

SEQ ID NO: 536064 - DNA, 57 bp, Artificial; identical to SEQ ID NO: 301592
  Synthetic oligonucleotide

SEQ ID NO: 536065 - DNA, 56 bp, Artificial; identical to SEQ ID NO: 18053
  Synthetic oligonucleotide

SEQ ID NO: 536066 - DNA, 55 bp, Artificial; identical to SEQ ID NO: 301597
  Synthetic oligonucleotide

SEQ ID NO: 536067 - DNA, 60 bp, Artificial; identical to SEQ ID NO: 301603
  Synthetic oligonucleotide

SEQ ID NO: 536068 - DNA, 54 bp, Artificial; identical to SEQ ID NO: 301606
  Synthetic oligonucleotide

SEQ ID NO: 536069 - DNA, 55 bp, Artificial; identical to SEQ ID NO: 301607
  Synthetic oligonucleotide

SEQ ID NO: 536070 - DNA, 55 bp, Artificial; identical to SEQ ID NO: 301609
  Synthetic oligonucleotide

SEQ ID NO: 536071 - DNA, 55 bp, Artificial; identical to SEQ ID NO: 301610
  Synthetic oligonucleotide

SEQ ID NO: 536072 - DNA, 51 bp, Artificial; identical to SEQ ID NO: 301612
  Synthetic oligonucleotide

SEQ ID NO: 536073 - DNA, 59 bp, Artificial; identical to SEQ ID NO: 301613
  Synthetic oligonucleotide

SEQ ID NO: 536074 - DNA, 58 bp, Artificial; identical to SEQ ID NO: 301614
  Synthetic oligonucleotide

SEQ ID NO: 536075 - DNA, 59 bp, Artificial; identical to SEQ ID NO: 301615
  Synthetic oligonucleotide

SEQ ID NO: 536076 - DNA, 56 bp, Artificial; identical to SEQ ID NO: 301617
  Synthetic oligonucleotide

SEQ ID NO: 536077 - DNA, 56 bp, Artificial; identical to SEQ ID NO: 301620
  Synthetic oligonucleotide

SEQ ID NO: 536078 - DNA, 52 bp, Artificial; identical to SEQ ID NO: 301621
  Synthetic oligonucleotide

SEQ ID NO: 536079 - DNA, 57 bp, Artificial; identical to SEQ ID NO: 19453
  Synthetic oligonucleotide

SEQ ID NO: 536080 - DNA, 52 bp, Artificial; identical to SEQ ID NO: 301629
  Synthetic oligonucleotide

SEQ ID NO: 536081 - DNA, 50 bp, Artificial; identical to SEQ ID NO: 301631
  Synthetic oligonucleotide

SEQ ID NO: 536082 - DNA, 53 bp, Artificial; identical to SEQ ID NO: 301632
  Synthetic oligonucleotide

SEQ ID NO: 536083 - DNA, 53 bp, Artificial; identical to SEQ ID NO: 301633
  Synthetic oligonucleotide

SEQ ID NO: 536084 - DNA, 54 bp, Artificial; identical to SEQ ID NO: 301634
  Synthetic oligonucleotide

SEQ ID NO: 536085 - DNA, 55 bp, Artificial; identical to SEQ ID NO: 301637
  Synthetic oligonucleotide

SEQ ID NO: 536086 - DNA, 49 bp, Artificial; identical to SEQ ID NO: 17052
  Synthetic oligonucleotide

SEQ ID NO: 536087 - DNA, 50 bp, Artificial; identical to SEQ ID NO: 301640
  Synthetic oligonucleotide

SEQ ID NO: 536088 - DNA, 53 bp, Artificial; identical to SEQ ID NO: 301643
  Synthetic oligonucleotide

SEQ ID NO: 536089 - DNA, 53 bp, Artificial; identical to SEQ ID NO: 301644
  Synthetic oligonucleotide

SEQ ID NO: 536090 - DNA, 55 bp, Artificial; identical to SEQ ID NO: 301646
  Synthetic oligonucleotide

SEQ ID NO: 536091 - DNA, 60 bp, Artificial; identical to SEQ ID NO: 301647
  Synthetic oligonucleotide

SEQ ID NO: 536092 - DNA, 60 bp, Artificial; identical to SEQ ID NO: 301648
  Synthetic oligonucleotide

SEQ ID NO: 536093 - DNA, 54 bp, Artificial; identical to SEQ ID NO: 301652
  Synthetic oligonucleotide

SEQ ID NO: 536094 - DNA, 53 bp, Artificial; identical to SEQ ID NO: 301658
  Synthetic oligonucleotide

SEQ ID NO: 536095 - DNA, 58 bp, Artificial; identical to SEQ ID NO: 301663
  Synthetic oligonucleotide

SEQ ID NO: 536096 - DNA, 58 bp, Artificial; identical to SEQ ID NO: 301671
  Synthetic oligonucleotide

SEQ ID NO: 536097 - DNA, 50 bp, Artificial; identical to SEQ ID NO: 301676
  Synthetic oligonucleotide

SEQ ID NO: 536098 - DNA, 60 bp, Artificial; identical to SEQ ID NO: 301678
  Synthetic oligonucleotide

SEQ ID NO: 536099 - DNA, 59 bp, Artificial; identical to SEQ ID NO: 301679
  Synthetic oligonucleotide

SEQ ID NO: 536100 - DNA, 50 bp, Artificial; identical to SEQ ID NO: 12962
  Synthetic oligonucleotide

SEQ ID NO: 536101 - DNA, 55 bp, Artificial; identical to SEQ ID NO: 301681
  Synthetic oligonucleotide

SEQ ID NO: 536102 - DNA, 54 bp, Artificial; identical to SEQ ID NO: 301684
  Synthetic oligonucleotide

SEQ ID NO: 536103 - DNA, 58 bp, Artificial; identical to SEQ ID NO: 301685
  Synthetic oligonucleotide

SEQ ID NO: 536104 - DNA, 59 bp, Artificial; identical to SEQ ID NO: 301686
  Synthetic oligonucleotide

SEQ ID NO: 536105 - DNA, 55 bp, Artificial; identical to SEQ ID NO: 301687
  Synthetic oligonucleotide

SEQ ID NO: 536106 - DNA, 54 bp, Artificial; identical to SEQ ID NO: 301691
  Synthetic oligonucleotide

SEQ ID NO: 536107 - DNA, 53 bp, Artificial; identical to SEQ ID NO: 301692
  Synthetic oligonucleotide

SEQ ID NO: 536108 - DNA, 60 bp, Artificial; identical to SEQ ID NO: 301697
  Synthetic oligonucleotide

SEQ ID NO: 536109 - DNA, 55 bp, Artificial; identical to SEQ ID NO: 301698
  Synthetic oligonucleotide

SEQ ID NO: 536110 - DNA, 59 bp, Artificial; identical to SEQ ID NO: 301705
  Synthetic oligonucleotide

SEQ ID NO: 536111 - DNA, 54 bp, Artificial; identical to SEQ ID NO: 301708
  Synthetic oligonucleotide

SEQ ID NO: 536112 - DNA, 59 bp, Artificial; identical to SEQ ID NO: 301711
  Synthetic oligonucleotide

SEQ ID NO: 536113 - DNA, 56 bp, Artificial; identical to SEQ ID NO: 301714
  Synthetic oligonucleotide

SEQ ID NO: 536114 - DNA, 52 bp, Artificial; identical to SEQ ID NO: 301716
  Synthetic oligonucleotide

SEQ ID NO: 536115 - DNA, 51 bp, Artificial; identical to SEQ ID NO: 301718
  Synthetic oligonucleotide

SEQ ID NO: 536116 - DNA, 56 bp, Artificial; identical to SEQ ID NO: 301723
  Synthetic oligonucleotide

SEQ ID NO: 536117 - DNA, 60 bp, Artificial; identical to SEQ ID NO: 301724
  Synthetic oligonucleotide

SEQ ID NO: 536118 - DNA, 60 bp, Artificial; identical to SEQ ID NO: 301725
  Synthetic oligonucleotide

SEQ ID NO: 536119 - DNA, 60 bp, Artificial; identical to SEQ ID NO: 301727
  Synthetic oligonucleotide

SEQ ID NO: 536120 - DNA, 51 bp, Artificial; identical to SEQ ID NO: 301728
  Synthetic oligonucleotide

SEQ ID NO: 536121 - DNA, 55 bp, Artificial; identical to SEQ ID NO: 301730
  Synthetic oligonucleotide

SEQ ID NO: 536122 - DNA, 50 bp, Artificial; identical to SEQ ID NO: 301731
  Synthetic oligonucleotide

SEQ ID NO: 536123 - DNA, 60 bp, Artificial; identical to SEQ ID NO: 301732
  Synthetic oligonucleotide

SEQ ID NO: 536124 - DNA, 60 bp, Artificial; identical to SEQ ID NO: 301733
  Synthetic oligonucleotide

SEQ ID NO: 536125 - DNA, 53 bp, Artificial; identical to SEQ ID NO: 301741
  Synthetic oligonucleotide

SEQ ID NO: 536126 - DNA, 53 bp, Artificial; identical to SEQ ID NO: 301743
  Synthetic oligonucleotide

SEQ ID NO: 536127 - DNA, 60 bp, Artificial; identical to SEQ ID NO: 301746
  Synthetic oligonucleotide

SEQ ID NO: 536128 - DNA, 60 bp, Artificial; identical to SEQ ID NO: 301748
  Synthetic oligonucleotide

SEQ ID NO: 536129 - DNA, 55 bp, Artificial; identical to SEQ ID NO: 301752
  Synthetic oligonucleotide

SEQ ID NO: 536130 - DNA, 58 bp, Artificial; identical to SEQ ID NO: 301757
  Synthetic oligonucleotide

SEQ ID NO: 536131 - DNA, 57 bp, Artificial; identical to SEQ ID NO: 301758
  Synthetic oligonucleotide

SEQ ID NO: 536132 - DNA, 56 bp, Artificial; identical to SEQ ID NO: 301760
  Synthetic oligonucleotide

SEQ ID NO: 536133 - DNA, 53 bp, Artificial; identical to SEQ ID NO: 301763
  Synthetic oligonucleotide

SEQ ID NO: 536134 - DNA, 59 bp, Artificial; identical to SEQ ID NO: 301766
  Synthetic oligonucleotide

SEQ ID NO: 536135 - DNA, 53 bp, Artificial; identical to SEQ ID NO: 301767
  Synthetic oligonucleotide

SEQ ID NO: 536136 - DNA, 60 bp, Artificial; identical to SEQ ID NO: 13022
  Synthetic oligonucleotide

SEQ ID NO: 536137 - DNA, 56 bp, Artificial; identical to SEQ ID NO: 301770
  Synthetic oligonucleotide

SEQ ID NO: 536138 - DNA, 57 bp, Artificial; identical to SEQ ID NO: 301771
  Synthetic oligonucleotide

SEQ ID NO: 536139 - DNA, 60 bp, Artificial; identical to SEQ ID NO: 301773
  Synthetic oligonucleotide

SEQ ID NO: 536140 - DNA, 55 bp, Artificial; identical to SEQ ID NO: 301774
  Synthetic oligonucleotide

SEQ ID NO: 536141 - DNA, 51 bp, Artificial; identical to SEQ ID NO: 301775
  Synthetic oligonucleotide

SEQ ID NO: 536142 - DNA, 60 bp, Artificial; identical to SEQ ID NO: 301779
  Synthetic oligonucleotide

SEQ ID NO: 536143 - DNA, 55 bp, Artificial; identical to SEQ ID NO: 301780
  Synthetic oligonucleotide

SEQ ID NO: 536144 - DNA, 60 bp, Artificial; identical to SEQ ID NO: 301781
  Synthetic oligonucleotide

SEQ ID NO: 536145 - DNA, 53 bp, Artificial; identical to SEQ ID NO: 301782
  Synthetic oligonucleotide

SEQ ID NO: 536146 - DNA, 53 bp, Artificial; identical to SEQ ID NO: 301786
  Synthetic oligonucleotide

SEQ ID NO: 536147 - DNA, 54 bp, Artificial; identical to SEQ ID NO: 301793
  Synthetic oligonucleotide

SEQ ID NO: 536148 - DNA, 51 bp, Artificial; identical to SEQ ID NO: 301794
  Synthetic oligonucleotide

SEQ ID NO: 536149 - DNA, 55 bp, Artificial; identical to SEQ ID NO: 301802
  Synthetic oligonucleotide

SEQ ID NO: 536150 - DNA, 57 bp, Artificial; identical to SEQ ID NO: 301804
  Synthetic oligonucleotide

SEQ ID NO: 536151 - DNA, 54 bp, Artificial; identical to SEQ ID NO: 301805
  Synthetic oligonucleotide

SEQ ID NO: 536152 - DNA, 59 bp, Artificial; identical to SEQ ID NO: 301806
  Synthetic oligonucleotide

SEQ ID NO: 536153 - DNA, 59 bp, Artificial; identical to SEQ ID NO: 301807
  Synthetic oligonucleotide

SEQ ID NO: 536154 - DNA, 54 bp, Artificial; identical to SEQ ID NO: 301808
  Synthetic oligonucleotide

SEQ ID NO: 536155 - DNA, 52 bp, Artificial; identical to SEQ ID NO: 301810
  Synthetic oligonucleotide

SEQ ID NO: 536156 - DNA, 57 bp, Artificial; identical to SEQ ID NO: 301811
  Synthetic oligonucleotide

SEQ ID NO: 536157 - DNA, 53 bp, Artificial; identical to SEQ ID NO: 301814
  Synthetic oligonucleotide

SEQ ID NO: 536158 - DNA, 58 bp, Artificial; identical to SEQ ID NO: 301815
  Synthetic oligonucleotide

SEQ ID NO: 536159 - DNA, 55 bp, Artificial; identical to SEQ ID NO: 301816
  Synthetic oligonucleotide

SEQ ID NO: 536160 - DNA, 55 bp, Artificial; identical to SEQ ID NO: 301817
  Synthetic oligonucleotide

SEQ ID NO: 536161 - DNA, 55 bp, Artificial; identical to SEQ ID NO: 301819
  Synthetic oligonucleotide

SEQ ID NO: 536162 - DNA, 57 bp, Artificial; identical to SEQ ID NO: 301822
  Synthetic oligonucleotide

SEQ ID NO: 536163 - DNA, 60 bp, Artificial; identical to SEQ ID NO: 12320
  Synthetic oligonucleotide

SEQ ID NO: 536164 - DNA, 60 bp, Artificial; identical to SEQ ID NO: 301823
  Synthetic oligonucleotide

SEQ ID NO: 536165 - DNA, 56 bp, Artificial; identical to SEQ ID NO: 301824
  Synthetic oligonucleotide

SEQ ID NO: 536166 - DNA, 52 bp, Artificial; identical to SEQ ID NO: 301829
  Synthetic oligonucleotide

SEQ ID NO: 536167 - DNA, 50 bp, Artificial; identical to SEQ ID NO: 301835
  Synthetic oligonucleotide

SEQ ID NO: 536168 - DNA, 60 bp, Artificial; identical to SEQ ID NO: 301836
  Synthetic oligonucleotide

SEQ ID NO: 536169 - DNA, 60 bp, Artificial; identical to SEQ ID NO: 301838
  Synthetic oligonucleotide

SEQ ID NO: 536170 - DNA, 50 bp, Artificial; identical to SEQ ID NO: 301839
  Synthetic oligonucleotide

SEQ ID NO: 536171 - DNA, 54 bp, Artificial; identical to SEQ ID NO: 301842
  Synthetic oligonucleotide

SEQ ID NO: 536172 - DNA, 54 bp, Artificial; identical to SEQ ID NO: 301843
  Synthetic oligonucleotide

SEQ ID NO: 536173 - DNA, 60 bp, Artificial; identical to SEQ ID NO: 301844
  Synthetic oligonucleotide

SEQ ID NO: 536174 - DNA, 60 bp, Artificial; identical to SEQ ID NO: 301847
  Synthetic oligonucleotide

SEQ ID NO: 536175 - DNA, 56 bp, Artificial; identical to SEQ ID NO: 301850
  Synthetic oligonucleotide

SEQ ID NO: 536176 - DNA, 51 bp, Artificial; identical to SEQ ID NO: 301859
  Synthetic oligonucleotide

SEQ ID NO: 536177 - DNA, 55 bp, Artificial; identical to SEQ ID NO: 301860
  Synthetic oligonucleotide

SEQ ID NO: 536178 - DNA, 60 bp, Artificial; identical to SEQ ID NO: 301861
  Synthetic oligonucleotide

SEQ ID NO: 536179 - DNA, 58 bp, Artificial; identical to SEQ ID NO: 301864
  Synthetic oligonucleotide

SEQ ID NO: 536180 - DNA, 60 bp, Artificial; identical to SEQ ID NO: 5835
  Synthetic oligonucleotide

SEQ ID NO: 536181 - DNA, 53 bp, Artificial; identical to SEQ ID NO: 301880
  Synthetic oligonucleotide

SEQ ID NO: 536182 - DNA, 60 bp, Artificial; identical to SEQ ID NO: 301881
  Synthetic oligonucleotide

SEQ ID NO: 536183 - DNA, 60 bp, Artificial; identical to SEQ ID NO: 301884
  Synthetic oligonucleotide

SEQ ID NO: 536184 - DNA, 55 bp, Artificial; identical to SEQ ID NO: 301885
  Synthetic oligonucleotide

SEQ ID NO: 536185 - DNA, 55 bp, Artificial; identical to SEQ ID NO: 301887
  Synthetic oligonucleotide

SEQ ID NO: 536186 - DNA, 60 bp, Artificial; identical to SEQ ID NO: 15716
  Synthetic oligonucleotide

SEQ ID NO: 536187 - DNA, 51 bp, Artificial; identical to SEQ ID NO: 301889
  Synthetic oligonucleotide

SEQ ID NO: 536188 - DNA, 52 bp, Artificial; identical to SEQ ID NO: 301893
  Synthetic oligonucleotide

SEQ ID NO: 536189 - DNA, 59 bp, Artificial; identical to SEQ ID NO: 301894
  Synthetic oligonucleotide

SEQ ID NO: 536190 - DNA, 54 bp, Artificial; identical to SEQ ID NO: 301897
  Synthetic oligonucleotide

SEQ ID NO: 536191 - DNA, 59 bp, Artificial; identical to SEQ ID NO: 301901
  Synthetic oligonucleotide

SEQ ID NO: 536192 - DNA, 60 bp, Artificial; identical to SEQ ID NO: 301902
  Synthetic oligonucleotide

SEQ ID NO: 536193 - DNA, 53 bp, Artificial; identical to SEQ ID NO: 301903
  Synthetic oligonucleotide

SEQ ID NO: 536194 - DNA, 53 bp, Artificial; identical to SEQ ID NO: 301904
  Synthetic oligonucleotide

SEQ ID NO: 536195 - DNA, 50 bp, Artificial; identical to SEQ ID NO: 301912
  Synthetic oligonucleotide

SEQ ID NO: 536196 - DNA, 53 bp, Artificial; identical to SEQ ID NO: 301919
  Synthetic oligonucleotide

SEQ ID NO: 536197 - DNA, 55 bp, Artificial; identical to SEQ ID NO: 301924
  Synthetic oligonucleotide

SEQ ID NO: 536198 - DNA, 51 bp, Artificial; identical to SEQ ID NO: 301925
  Synthetic oligonucleotide

SEQ ID NO: 536199 - DNA, 55 bp, Artificial; identical to SEQ ID NO: 16382
  Synthetic oligonucleotide

SEQ ID NO: 536200 - DNA, 55 bp, Artificial; identical to SEQ ID NO: 301928
  Synthetic oligonucleotide

SEQ ID NO: 536201 - DNA, 52 bp, Artificial; identical to SEQ ID NO: 301931
  Synthetic oligonucleotide

SEQ ID NO: 536202 - DNA, 52 bp, Artificial; identical to SEQ ID NO: 301932
  Synthetic oligonucleotide

SEQ ID NO: 536203 - DNA, 58 bp, Artificial; identical to SEQ ID NO: 301934
  Synthetic oligonucleotide

SEQ ID NO: 536204 - DNA, 50 bp, Artificial; identical to SEQ ID NO: 301936
  Synthetic oligonucleotide

SEQ ID NO: 536205 - DNA, 55 bp, Artificial; identical to SEQ ID NO: 301937
  Synthetic oligonucleotide

SEQ ID NO: 536206 - DNA, 53 bp, Artificial; identical to SEQ ID NO: 301939
  Synthetic oligonucleotide

SEQ ID NO: 536207 - DNA, 54 bp, Artificial; identical to SEQ ID NO: 301940
  Synthetic oligonucleotide

SEQ ID NO: 536208 - DNA, 57 bp, Artificial; identical to SEQ ID NO: 301942
  Synthetic oligonucleotide

SEQ ID NO: 536209 - DNA, 55 bp, Artificial; identical to SEQ ID NO: 301943
  Synthetic oligonucleotide

SEQ ID NO: 536210 - DNA, 56 bp, Artificial; identical to SEQ ID NO: 301945
  Synthetic oligonucleotide

SEQ ID NO: 536211 - DNA, 60 bp, Artificial; identical to SEQ ID NO: 301947
  Synthetic oligonucleotide

SEQ ID NO: 536212 - DNA, 58 bp, Artificial; identical to SEQ ID NO: 301950
  Synthetic oligonucleotide

SEQ ID NO: 536213 - DNA, 58 bp, Artificial; identical to SEQ ID NO: 301951
  Synthetic oligonucleotide

SEQ ID NO: 536214 - DNA, 56 bp, Artificial; identical to SEQ ID NO: 301952
  Synthetic oligonucleotide

SEQ ID NO: 536215 - DNA, 56 bp, Artificial; identical to SEQ ID NO: 301953
  Synthetic oligonucleotide

SEQ ID NO: 536216 - DNA, 59 bp, Artificial; identical to SEQ ID NO: 301954
  Synthetic oligonucleotide

SEQ ID NO: 536217 - DNA, 55 bp, Artificial; identical to SEQ ID NO: 301956
  Synthetic oligonucleotide

SEQ ID NO: 536218 - DNA, 50 bp, Artificial; identical to SEQ ID NO: 301957
  Synthetic oligonucleotide

SEQ ID NO: 536219 - DNA, 60 bp, Artificial; identical to SEQ ID NO: 301959
  Synthetic oligonucleotide

SEQ ID NO: 536220 - DNA, 60 bp, Artificial; identical to SEQ ID NO: 301962
  Synthetic oligonucleotide

SEQ ID NO: 536221 - DNA, 52 bp, Artificial; identical to SEQ ID NO: 301964
  Synthetic oligonucleotide

SEQ ID NO: 536222 - DNA, 55 bp, Artificial; identical to SEQ ID NO: 301966
  Synthetic oligonucleotide

SEQ ID NO: 536223 - DNA, 55 bp, Artificial; identical to SEQ ID NO: 301967
  Synthetic oligonucleotide

SEQ ID NO: 536224 - DNA, 59 bp, Artificial; identical to SEQ ID NO: 301969
  Synthetic oligonucleotide

SEQ ID NO: 536225 - DNA, 54 bp, Artificial; identical to SEQ ID NO: 301972
  Synthetic oligonucleotide

SEQ ID NO: 536226 - DNA, 54 bp, Artificial; identical to SEQ ID NO: 301974
  Synthetic oligonucleotide

SEQ ID NO: 536227 - DNA, 60 bp, Artificial; identical to SEQ ID NO: 301978
  Synthetic oligonucleotide

SEQ ID NO: 536228 - DNA, 58 bp, Artificial; identical to SEQ ID NO: 12739
  Synthetic oligonucleotide

SEQ ID NO: 536229 - DNA, 60 bp, Artificial; identical to SEQ ID NO: 301979
  Synthetic oligonucleotide

SEQ ID NO: 536230 - DNA, 50 bp, Artificial; identical to SEQ ID NO: 301982
  Synthetic oligonucleotide

SEQ ID NO: 536231 - DNA, 60 bp, Artificial; identical to SEQ ID NO: 301983
  Synthetic oligonucleotide

SEQ ID NO: 536232 - DNA, 57 bp, Artificial; identical to SEQ ID NO: 301986
  Synthetic oligonucleotide

SEQ ID NO: 536233 - DNA, 55 bp, Artificial; identical to SEQ ID NO: 301987
  Synthetic oligonucleotide

SEQ ID NO: 536234 - DNA, 55 bp, Artificial; identical to SEQ ID NO: 301989
  Synthetic oligonucleotide

SEQ ID NO: 536235 - DNA, 54 bp, Artificial; identical to SEQ ID NO: 301992
  Synthetic oligonucleotide

SEQ ID NO: 536236 - DNA, 54 bp, Artificial; identical to SEQ ID NO: 301993
  Synthetic oligonucleotide

SEQ ID NO: 536237 - DNA, 55 bp, Artificial; identical to SEQ ID NO: 301995
  Synthetic oligonucleotide

SEQ ID NO: 536238 - DNA, 55 bp, Artificial; identical to SEQ ID NO: 302001
  Synthetic oligonucleotide

SEQ ID NO: 536239 - DNA, 52 bp, Artificial; identical to SEQ ID NO: 302005
  Synthetic oligonucleotide

SEQ ID NO: 536240 - DNA, 59 bp, Artificial; identical to SEQ ID NO: 302006
  Synthetic oligonucleotide

SEQ ID NO: 536241 - DNA, 60 bp, Artificial; identical to SEQ ID NO: 302008
  Synthetic oligonucleotide

SEQ ID NO: 536242 - DNA, 58 bp, Artificial; identical to SEQ ID NO: 17146
  Synthetic oligonucleotide

SEQ ID NO: 536243 - DNA, 59 bp, Artificial; identical to SEQ ID NO: 302010
  Synthetic oligonucleotide

SEQ ID NO: 536244 - DNA, 56 bp, Artificial; identical to SEQ ID NO: 302011
  Synthetic oligonucleotide

SEQ ID NO: 536245 - DNA, 57 bp, Artificial; identical to SEQ ID NO: 302012
  Synthetic oligonucleotide

SEQ ID NO: 536246 - DNA, 60 bp, Artificial; identical to SEQ ID NO: 302013
  Synthetic oligonucleotide

SEQ ID NO: 536247 - DNA, 57 bp, Artificial; identical to SEQ ID NO: 302016
  Synthetic oligonucleotide

SEQ ID NO: 536248 - DNA, 57 bp, Artificial; identical to SEQ ID NO: 302021
  Synthetic oligonucleotide

SEQ ID NO: 536249 - DNA, 56 bp, Artificial; identical to SEQ ID NO: 302027
  Synthetic oligonucleotide

SEQ ID NO: 536250 - DNA, 60 bp, Artificial; identical to SEQ ID NO: 302028
  Synthetic oligonucleotide

SEQ ID NO: 536251 - DNA, 55 bp, Artificial; identical to SEQ ID NO: 302030
  Synthetic oligonucleotide

SEQ ID NO: 536252 - DNA, 58 bp, Artificial; identical to SEQ ID NO: 302032
  Synthetic oligonucleotide

SEQ ID NO: 536253 - DNA, 54 bp, Artificial; identical to SEQ ID NO: 302033
  Synthetic oligonucleotide

SEQ ID NO: 536254 - DNA, 53 bp, Artificial; identical to SEQ ID NO: 302035
  Synthetic oligonucleotide

SEQ ID NO: 536255 - DNA, 60 bp, Artificial; identical to SEQ ID NO: 302037
  Synthetic oligonucleotide

SEQ ID NO: 536256 - DNA, 55 bp, Artificial; identical to SEQ ID NO: 302043
  Synthetic oligonucleotide

SEQ ID NO: 536257 - DNA, 53 bp, Artificial; identical to SEQ ID NO: 302046
  Synthetic oligonucleotide

SEQ ID NO: 536258 - DNA, 57 bp, Artificial; identical to SEQ ID NO: 302050
  Synthetic oligonucleotide

SEQ ID NO: 536259 - DNA, 51 bp, Artificial; identical to SEQ ID NO: 17733
  Synthetic oligonucleotide

SEQ ID NO: 536260 - DNA, 53 bp, Artificial; identical to SEQ ID NO: 19059
  Synthetic oligonucleotide

SEQ ID NO: 536261 - DNA, 54 bp, Artificial; identical to SEQ ID NO: 302052
  Synthetic oligonucleotide

SEQ ID NO: 536262 - DNA, 55 bp, Artificial; identical to SEQ ID NO: 302053
  Synthetic oligonucleotide

SEQ ID NO: 536263 - DNA, 55 bp, Artificial; identical to SEQ ID NO: 302054
  Synthetic oligonucleotide

SEQ ID NO: 536264 - DNA, 60 bp, Artificial; identical to SEQ ID NO: 302059
  Synthetic oligonucleotide

SEQ ID NO: 536265 - DNA, 55 bp, Artificial; identical to SEQ ID NO: 302063
  Synthetic oligonucleotide

SEQ ID NO: 536266 - DNA, 55 bp, Artificial; identical to SEQ ID NO: 302065
  Synthetic oligonucleotide

SEQ ID NO: 536267 - DNA, 56 bp, Artificial; identical to SEQ ID NO: 302071
  Synthetic oligonucleotide

SEQ ID NO: 536268 - DNA, 55 bp, Artificial; identical to SEQ ID NO: 302076
  Synthetic oligonucleotide

SEQ ID NO: 536269 - DNA, 59 bp, Artificial; identical to SEQ ID NO: 302078
  Synthetic oligonucleotide

SEQ ID NO: 536270 - DNA, 54 bp, Artificial; identical to SEQ ID NO: 302079
  Synthetic oligonucleotide

SEQ ID NO: 536271 - DNA, 57 bp, Artificial; identical to SEQ ID NO: 302080
  Synthetic oligonucleotide

SEQ ID NO: 536272 - DNA, 58 bp, Artificial; identical to SEQ ID NO: 302084
  Synthetic oligonucleotide

SEQ ID NO: 536273 - DNA, 51 bp, Artificial; identical to SEQ ID NO: 302085
  Synthetic oligonucleotide

SEQ ID NO: 536274 - DNA, 51 bp, Artificial; identical to SEQ ID NO: 302091
  Synthetic oligonucleotide

SEQ ID NO: 536275 - DNA, 56 bp, Artificial; identical to SEQ ID NO: 302092
  Synthetic oligonucleotide

SEQ ID NO: 536276 - DNA, 55 bp, Artificial; identical to SEQ ID NO: 302093
  Synthetic oligonucleotide

SEQ ID NO: 536277 - DNA, 56 bp, Artificial; identical to SEQ ID NO: 302101
  Synthetic oligonucleotide

SEQ ID NO: 536278 - DNA, 60 bp, Artificial; identical to SEQ ID NO: 302103
  Synthetic oligonucleotide

SEQ ID NO: 536279 - DNA, 55 bp, Artificial; identical to SEQ ID NO: 302106
  Synthetic oligonucleotide

SEQ ID NO: 536280 - DNA, 60 bp, Artificial; identical to SEQ ID NO: 302107
  Synthetic oligonucleotide

SEQ ID NO: 536281 - DNA, 50 bp, Artificial; identical to SEQ ID NO: 302108
  Synthetic oligonucleotide

SEQ ID NO: 536282 - DNA, 57 bp, Artificial; identical to SEQ ID NO: 302111
  Synthetic oligonucleotide

SEQ ID NO: 536283 - DNA, 55 bp, Artificial; identical to SEQ ID NO: 302113
  Synthetic oligonucleotide

SEQ ID NO: 536284 - DNA, 59 bp, Artificial; identical to SEQ ID NO: 17497
  Synthetic oligonucleotide

SEQ ID NO: 536285 - DNA, 55 bp, Artificial; identical to SEQ ID NO: 302114
  Synthetic oligonucleotide

SEQ ID NO: 536286 - DNA, 58 bp, Artificial; identical to SEQ ID NO: 302115
  Synthetic oligonucleotide

SEQ ID NO: 536287 - DNA, 55 bp, Artificial; identical to SEQ ID NO: 302116
  Synthetic oligonucleotide

SEQ ID NO: 536288 - DNA, 60 bp, Artificial; identical to SEQ ID NO: 302120
  Synthetic oligonucleotide

SEQ ID NO: 536289 - DNA, 57 bp, Artificial; identical to SEQ ID NO: 18953
  Synthetic oligonucleotide

SEQ ID NO: 536290 - DNA, 53 bp, Artificial; identical to SEQ ID NO: 302121
  Synthetic oligonucleotide

SEQ ID NO: 536291 - DNA, 55 bp, Artificial; identical to SEQ ID NO: 302123
  Synthetic oligonucleotide

SEQ ID NO: 536292 - DNA, 55 bp, Artificial; identical to SEQ ID NO: 302130
  Synthetic oligonucleotide

SEQ ID NO: 536293 - DNA, 53 bp, Artificial; identical to SEQ ID NO: 302135
  Synthetic oligonucleotide

SEQ ID NO: 536294 - DNA, 54 bp, Artificial; identical to SEQ ID NO: 302139
  Synthetic oligonucleotide

SEQ ID NO: 536295 - DNA, 59 bp, Artificial; identical to SEQ ID NO: 302144
  Synthetic oligonucleotide

SEQ ID NO: 536296 - DNA, 56 bp, Artificial; identical to SEQ ID NO: 302148
  Synthetic oligonucleotide

SEQ ID NO: 536297 - DNA, 56 bp, Artificial; identical to SEQ ID NO: 302153
  Synthetic oligonucleotide

SEQ ID NO: 536298 - DNA, 60 bp, Artificial; identical to SEQ ID NO: 302155
  Synthetic oligonucleotide

SEQ ID NO: 536299 - DNA, 52 bp, Artificial; identical to SEQ ID NO: 302161
  Synthetic oligonucleotide

SEQ ID NO: 536300 - DNA, 55 bp, Artificial; identical to SEQ ID NO: 302163
  Synthetic oligonucleotide

SEQ ID NO: 536301 - DNA, 56 bp, Artificial; identical to SEQ ID NO: 302167
  Synthetic oligonucleotide

SEQ ID NO: 536302 - DNA, 60 bp, Artificial; identical to SEQ ID NO: 302168
  Synthetic oligonucleotide

SEQ ID NO: 536303 - DNA, 55 bp, Artificial; identical to SEQ ID NO: 302171
  Synthetic oligonucleotide

SEQ ID NO: 536304 - DNA, 60 bp, Artificial; identical to SEQ ID NO: 302172
  Synthetic oligonucleotide

SEQ ID NO: 536305 - DNA, 60 bp, Artificial; identical to SEQ ID NO: 302175
  Synthetic oligonucleotide

SEQ ID NO: 536306 - DNA, 58 bp, Artificial; identical to SEQ ID NO: 17525
  Synthetic oligonucleotide

SEQ ID NO: 536307 - DNA, 50 bp, Artificial; identical to SEQ ID NO: 302176
  Synthetic oligonucleotide

SEQ ID NO: 536308 - DNA, 56 bp, Artificial; identical to SEQ ID NO: 11027
  Synthetic oligonucleotide

SEQ ID NO: 536309 - DNA, 57 bp, Artificial; identical to SEQ ID NO: 302184
  Synthetic oligonucleotide

SEQ ID NO: 536310 - DNA, 60 bp, Artificial; identical to SEQ ID NO: 302185
  Synthetic oligonucleotide

SEQ ID NO: 536311 - DNA, 50 bp, Artificial; identical to SEQ ID NO: 13000
  Synthetic oligonucleotide

SEQ ID NO: 536312 - DNA, 55 bp, Artificial; identical to SEQ ID NO: 13943
  Synthetic oligonucleotide

SEQ ID NO: 536313 - DNA, 54 bp, Artificial; identical to SEQ ID NO: 302187
  Synthetic oligonucleotide

SEQ ID NO: 536314 - DNA, 59 bp, Artificial; identical to SEQ ID NO: 302188
  Synthetic oligonucleotide

SEQ ID NO: 536315 - DNA, 60 bp, Artificial; identical to SEQ ID NO: 302191
  Synthetic oligonucleotide

SEQ ID NO: 536316 - DNA, 59 bp, Artificial; identical to SEQ ID NO: 18708
  Synthetic oligonucleotide

SEQ ID NO: 536317 - DNA, 53 bp, Artificial; identical to SEQ ID NO: 302192
  Synthetic oligonucleotide

SEQ ID NO: 536318 - DNA, 55 bp, Artificial; identical to SEQ ID NO: 302195
  Synthetic oligonucleotide

SEQ ID NO: 536319 - DNA, 53 bp, Artificial; identical to SEQ ID NO: 302196
  Synthetic oligonucleotide

SEQ ID NO: 536320 - DNA, 55 bp, Artificial; identical to SEQ ID NO: 302197
  Synthetic oligonucleotide

SEQ ID NO: 536321 - DNA, 60 bp, Artificial; identical to SEQ ID NO: 302202
  Synthetic oligonucleotide

SEQ ID NO: 536322 - DNA, 56 bp, Artificial; identical to SEQ ID NO: 302203
  Synthetic oligonucleotide

SEQ ID NO: 536323 - DNA, 56 bp, Artificial; identical to SEQ ID NO: 302204
  Synthetic oligonucleotide

SEQ ID NO: 536324 - DNA, 60 bp, Artificial; identical to SEQ ID NO: 302205
  Synthetic oligonucleotide

SEQ ID NO: 536325 - DNA, 57 bp, Artificial; identical to SEQ ID NO: 302211
  Synthetic oligonucleotide

SEQ ID NO: 536326 - DNA, 55 bp, Artificial; identical to SEQ ID NO: 302213
  Synthetic oligonucleotide

SEQ ID NO: 536327 - DNA, 60 bp, Artificial; identical to SEQ ID NO: 302214
  Synthetic oligonucleotide

SEQ ID NO: 536328 - DNA, 59 bp, Artificial; identical to SEQ ID NO: 302216
  Synthetic oligonucleotide

SEQ ID NO: 536329 - DNA, 58 bp, Artificial; identical to SEQ ID NO: 302218
  Synthetic oligonucleotide

SEQ ID NO: 536330 - DNA, 56 bp, Artificial; identical to SEQ ID NO: 302219
  Synthetic oligonucleotide

SEQ ID NO: 536331 - DNA, 55 bp, Artificial; identical to SEQ ID NO: 302220
  Synthetic oligonucleotide

SEQ ID NO: 536332 - DNA, 60 bp, Artificial; identical to SEQ ID NO: 302224
  Synthetic oligonucleotide

SEQ ID NO: 536333 - DNA, 55 bp, Artificial; identical to SEQ ID NO: 302234
  Synthetic oligonucleotide

SEQ ID NO: 536334 - DNA, 57 bp, Artificial; identical to SEQ ID NO: 302240
  Synthetic oligonucleotide

SEQ ID NO: 536335 - DNA, 55 bp, Artificial; identical to SEQ ID NO: 302241
  Synthetic oligonucleotide

SEQ ID NO: 536336 - DNA, 60 bp, Artificial; identical to SEQ ID NO: 302245
  Synthetic oligonucleotide

SEQ ID NO: 536337 - DNA, 54 bp, Artificial; identical to SEQ ID NO: 14952
  Synthetic oligonucleotide

SEQ ID NO: 536338 - DNA, 59 bp, Artificial; identical to SEQ ID NO: 302255
  Synthetic oligonucleotide

SEQ ID NO: 536339 - DNA, 50 bp, Artificial; identical to SEQ ID NO: 302256
  Synthetic oligonucleotide

SEQ ID NO: 536340 - DNA, 60 bp, Artificial; identical to SEQ ID NO: 302257
  Synthetic oligonucleotide

SEQ ID NO: 536341 - DNA, 60 bp, Artificial; identical to SEQ ID NO: 302260
  Synthetic oligonucleotide

SEQ ID NO: 536342 - DNA, 60 bp, Artificial; identical to SEQ ID NO: 302264
  Synthetic oligonucleotide

SEQ ID NO: 536343 - DNA, 60 bp, Artificial; identical to SEQ ID NO: 10687
  Synthetic oligonucleotide

SEQ ID NO: 536344 - DNA, 52 bp, Artificial; identical to SEQ ID NO: 16543
  Synthetic oligonucleotide

SEQ ID NO: 536345 - DNA, 59 bp, Artificial; identical to SEQ ID NO: 302270
  Synthetic oligonucleotide

SEQ ID NO: 536346 - DNA, 57 bp, Artificial; identical to SEQ ID NO: 302272
  Synthetic oligonucleotide

SEQ ID NO: 536347 - DNA, 60 bp, Artificial; identical to SEQ ID NO: 302273
  Synthetic oligonucleotide

SEQ ID NO: 536348 - DNA, 55 bp, Artificial; identical to SEQ ID NO: 302282
  Synthetic oligonucleotide

SEQ ID NO: 536349 - DNA, 56 bp, Artificial; identical to SEQ ID NO: 302284
  Synthetic oligonucleotide

SEQ ID NO: 536350 - DNA, 59 bp, Artificial; identical to SEQ ID NO: 302286
  Synthetic oligonucleotide

SEQ ID NO: 536351 - DNA, 55 bp, Artificial; identical to SEQ ID NO: 302287
  Synthetic oligonucleotide

SEQ ID NO: 536352 - DNA, 60 bp, Artificial; identical to SEQ ID NO: 302288
  Synthetic oligonucleotide

SEQ ID NO: 536353 - DNA, 54 bp, Artificial; identical to SEQ ID NO: 302289
  Synthetic oligonucleotide

SEQ ID NO: 536354 - DNA, 60 bp, Artificial; identical to SEQ ID NO: 302291
  Synthetic oligonucleotide

SEQ ID NO: 536355 - DNA, 60 bp, Artificial; identical to SEQ ID NO: 302294
  Synthetic oligonucleotide

SEQ ID NO: 536356 - DNA, 54 bp, Artificial; identical to SEQ ID NO: 11094
  Synthetic oligonucleotide

SEQ ID NO: 536357 - DNA, 53 bp, Artificial; identical to SEQ ID NO: 18765
  Synthetic oligonucleotide

SEQ ID NO: 536358 - DNA, 55 bp, Artificial; identical to SEQ ID NO: 302297
  Synthetic oligonucleotide

SEQ ID NO: 536359 - DNA, 55 bp, Artificial; identical to SEQ ID NO: 302303
  Synthetic oligonucleotide

SEQ ID NO: 536360 - DNA, 59 bp, Artificial; identical to SEQ ID NO: 302304
  Synthetic oligonucleotide

SEQ ID NO: 536361 - DNA, 57 bp, Artificial; identical to SEQ ID NO: 10305
  Synthetic oligonucleotide

SEQ ID NO: 536362 - DNA, 54 bp, Artificial; identical to SEQ ID NO: 302308
  Synthetic oligonucleotide

SEQ ID NO: 536363 - DNA, 60 bp, Artificial; identical to SEQ ID NO: 302311
  Synthetic oligonucleotide

SEQ ID NO: 536364 - DNA, 59 bp, Artificial; identical to SEQ ID NO: 302314
  Synthetic oligonucleotide

SEQ ID NO: 536365 - DNA, 55 bp, Artificial; identical to SEQ ID NO: 302315
  Synthetic oligonucleotide

SEQ ID NO: 536366 - DNA, 55 bp, Artificial; identical to SEQ ID NO: 302316
  Synthetic oligonucleotide

SEQ ID NO: 536367 - DNA, 55 bp, Artificial; identical to SEQ ID NO: 302317
  Synthetic oligonucleotide

SEQ ID NO: 536368 - DNA, 56 bp, Artificial; identical to SEQ ID NO: 302320
  Synthetic oligonucleotide

SEQ ID NO: 536369 - DNA, 55 bp, Artificial; identical to SEQ ID NO: 302321
  Synthetic oligonucleotide

SEQ ID NO: 536370 - DNA, 56 bp, Artificial; identical to SEQ ID NO: 302323
  Synthetic oligonucleotide

SEQ ID NO: 536371 - DNA, 60 bp, Artificial; identical to SEQ ID NO: 302325
  Synthetic oligonucleotide

SEQ ID NO: 536372 - DNA, 55 bp, Artificial; identical to SEQ ID NO: 302326
  Synthetic oligonucleotide

SEQ ID NO: 536373 - DNA, 57 bp, Artificial; identical to SEQ ID NO: 302327
  Synthetic oligonucleotide

SEQ ID NO: 536374 - DNA, 59 bp, Artificial; identical to SEQ ID NO: 302333
  Synthetic oligonucleotide

SEQ ID NO: 536375 - DNA, 46 bp, Artificial; identical to SEQ ID NO: 302334
  Synthetic oligonucleotide

SEQ ID NO: 536376 - DNA, 51 bp, Artificial; identical to SEQ ID NO: 302342
  Synthetic oligonucleotide

SEQ ID NO: 536377 - DNA, 55 bp, Artificial; identical to SEQ ID NO: 302345
  Synthetic oligonucleotide

SEQ ID NO: 536378 - DNA, 59 bp, Artificial; identical to SEQ ID NO: 302352
  Synthetic oligonucleotide

SEQ ID NO: 536379 - DNA, 60 bp, Artificial; identical to SEQ ID NO: 302357
  Synthetic oligonucleotide

SEQ ID NO: 536380 - DNA, 55 bp, Artificial; identical to SEQ ID NO: 302362
  Synthetic oligonucleotide

SEQ ID NO: 536381 - DNA, 55 bp, Artificial; identical to SEQ ID NO: 5991
  Synthetic oligonucleotide

SEQ ID NO: 536382 - DNA, 60 bp, Artificial; identical to SEQ ID NO: 302364
  Synthetic oligonucleotide

SEQ ID NO: 536383 - DNA, 60 bp, Artificial; identical to SEQ ID NO: 302372
  Synthetic oligonucleotide

SEQ ID NO: 536384 - DNA, 55 bp, Artificial; identical to SEQ ID NO: 302377
  Synthetic oligonucleotide

SEQ ID NO: 536385 - DNA, 60 bp, Artificial; identical to SEQ ID NO: 302378
  Synthetic oligonucleotide

SEQ ID NO: 536386 - DNA, 55 bp, Artificial; identical to SEQ ID NO: 302379
  Synthetic oligonucleotide

SEQ ID NO: 536387 - DNA, 51 bp, Artificial; identical to SEQ ID NO: 302380
  Synthetic oligonucleotide

SEQ ID NO: 536388 - DNA, 53 bp, Artificial; identical to SEQ ID NO: 302382
  Synthetic oligonucleotide

SEQ ID NO: 536389 - DNA, 60 bp, Artificial; identical to SEQ ID NO: 302388
  Synthetic oligonucleotide

SEQ ID NO: 536390 - DNA, 60 bp, Artificial; identical to SEQ ID NO: 302391
  Synthetic oligonucleotide

SEQ ID NO: 536391 - DNA, 57 bp, Artificial; identical to SEQ ID NO: 302392
  Synthetic oligonucleotide

SEQ ID NO: 536392 - DNA, 57 bp, Artificial; identical to SEQ ID NO: 302395
  Synthetic oligonucleotide

SEQ ID NO: 536393 - DNA, 56 bp, Artificial; identical to SEQ ID NO: 302402
  Synthetic oligonucleotide

SEQ ID NO: 536394 - DNA, 52 bp, Artificial; identical to SEQ ID NO: 302407
  Synthetic oligonucleotide

SEQ ID NO: 536395 - DNA, 60 bp, Artificial; identical to SEQ ID NO: 302409
  Synthetic oligonucleotide

SEQ ID NO: 536396 - DNA, 57 bp, Artificial; identical to SEQ ID NO: 302410
  Synthetic oligonucleotide

SEQ ID NO: 536397 - DNA, 55 bp, Artificial; identical to SEQ ID NO: 302411
  Synthetic oligonucleotide

SEQ ID NO: 536398 - DNA, 58 bp, Artificial; identical to SEQ ID NO: 302412
  Synthetic oligonucleotide

SEQ ID NO: 536399 - DNA, 55 bp, Artificial; identical to SEQ ID NO: 302416
  Synthetic oligonucleotide

SEQ ID NO: 536400 - DNA, 54 bp, Artificial; identical to SEQ ID NO: 302417
  Synthetic oligonucleotide

SEQ ID NO: 536401 - DNA, 59 bp, Artificial; identical to SEQ ID NO: 302418
  Synthetic oligonucleotide

SEQ ID NO: 536402 - DNA, 55 bp, Artificial; identical to SEQ ID NO: 302423
  Synthetic oligonucleotide

SEQ ID NO: 536403 - DNA, 57 bp, Artificial; identical to SEQ ID NO: 302425
  Synthetic oligonucleotide

SEQ ID NO: 536404 - DNA, 59 bp, Artificial; identical to SEQ ID NO: 302426
  Synthetic oligonucleotide

SEQ ID NO: 536405 - DNA, 50 bp, Artificial; identical to SEQ ID NO: 302427
  Synthetic oligonucleotide

SEQ ID NO: 536406 - DNA, 60 bp, Artificial; identical to SEQ ID NO: 302428
  Synthetic oligonucleotide

SEQ ID NO: 536407 - DNA, 60 bp, Artificial; identical to SEQ ID NO: 302429
  Synthetic oligonucleotide

SEQ ID NO: 536408 - DNA, 55 bp, Artificial; identical to SEQ ID NO: 302435
  Synthetic oligonucleotide

SEQ ID NO: 536409 - DNA, 59 bp, Artificial; identical to SEQ ID NO: 302436
  Synthetic oligonucleotide

SEQ ID NO: 536410 - DNA, 58 bp, Artificial; identical to SEQ ID NO: 302437
  Synthetic oligonucleotide

SEQ ID NO: 536411 - DNA, 51 bp, Artificial; identical to SEQ ID NO: 302438
  Synthetic oligonucleotide

SEQ ID NO: 536412 - DNA, 59 bp, Artificial; identical to SEQ ID NO: 302439
  Synthetic oligonucleotide

SEQ ID NO: 536413 - DNA, 60 bp, Artificial; identical to SEQ ID NO: 302443
  Synthetic oligonucleotide

SEQ ID NO: 536414 - DNA, 55 bp, Artificial; identical to SEQ ID NO: 302444
  Synthetic oligonucleotide

SEQ ID NO: 536415 - DNA, 60 bp, Artificial; identical to SEQ ID NO: 11337
  Synthetic oligonucleotide

SEQ ID NO: 536416 - DNA, 55 bp, Artificial; identical to SEQ ID NO: 302448
  Synthetic oligonucleotide

SEQ ID NO: 536417 - DNA, 55 bp, Artificial; identical to SEQ ID NO: 302449
  Synthetic oligonucleotide

SEQ ID NO: 536418 - DNA, 55 bp, Artificial; identical to SEQ ID NO: 302450
  Synthetic oligonucleotide

SEQ ID NO: 536419 - DNA, 55 bp, Artificial; identical to SEQ ID NO: 302455
  Synthetic oligonucleotide

SEQ ID NO: 536420 - DNA, 51 bp, Artificial; identical to SEQ ID NO: 302459
  Synthetic oligonucleotide

SEQ ID NO: 536421 - DNA, 55 bp, Artificial; identical to SEQ ID NO: 302464
  Synthetic oligonucleotide

SEQ ID NO: 536422 - DNA, 54 bp, Artificial; identical to SEQ ID NO: 302465
  Synthetic oligonucleotide

SEQ ID NO: 536423 - DNA, 50 bp, Artificial; identical to SEQ ID NO: 302466
  Synthetic oligonucleotide

SEQ ID NO: 536424 - DNA, 53 bp, Artificial; identical to SEQ ID NO: 302468
  Synthetic oligonucleotide

SEQ ID NO: 536425 - DNA, 60 bp, Artificial; identical to SEQ ID NO: 302469
  Synthetic oligonucleotide

SEQ ID NO: 536426 - DNA, 53 bp, Artificial; identical to SEQ ID NO: 302470
  Synthetic oligonucleotide

SEQ ID NO: 536427 - DNA, 58 bp, Artificial; identical to SEQ ID NO: 302472
  Synthetic oligonucleotide

SEQ ID NO: 536428 - DNA, 55 bp, Artificial; identical to SEQ ID NO: 302480
  Synthetic oligonucleotide

SEQ ID NO: 536429 - DNA, 60 bp, Artificial; identical to SEQ ID NO: 302489
  Synthetic oligonucleotide

SEQ ID NO: 536430 - DNA, 60 bp, Artificial; identical to SEQ ID NO: 302490
  Synthetic oligonucleotide

SEQ ID NO: 536431 - DNA, 57 bp, Artificial; identical to SEQ ID NO: 302491
  Synthetic oligonucleotide

SEQ ID NO: 536432 - DNA, 60 bp, Artificial; identical to SEQ ID NO: 302492
  Synthetic oligonucleotide

SEQ ID NO: 536433 - DNA, 56 bp, Artificial; identical to SEQ ID NO: 302494
  Synthetic oligonucleotide

SEQ ID NO: 536434 - DNA, 51 bp, Artificial; identical to SEQ ID NO: 302506
  Synthetic oligonucleotide

SEQ ID NO: 536435 - DNA, 54 bp, Artificial; identical to SEQ ID NO: 302509
  Synthetic oligonucleotide

SEQ ID NO: 536436 - DNA, 53 bp, Artificial; identical to SEQ ID NO: 302514
  Synthetic oligonucleotide

SEQ ID NO: 536437 - DNA, 60 bp, Artificial; identical to SEQ ID NO: 302516
  Synthetic oligonucleotide

SEQ ID NO: 536438 - DNA, 55 bp, Artificial; identical to SEQ ID NO: 302517
  Synthetic oligonucleotide

SEQ ID NO: 536439 - DNA, 60 bp, Artificial; identical to SEQ ID NO: 302518
  Synthetic oligonucleotide

SEQ ID NO: 536440 - DNA, 51 bp, Artificial; identical to SEQ ID NO: 302521
  Synthetic oligonucleotide

SEQ ID NO: 536441 - DNA, 60 bp, Artificial; identical to SEQ ID NO: 302523
  Synthetic oligonucleotide

SEQ ID NO: 536442 - DNA, 60 bp, Artificial; identical to SEQ ID NO: 302529
  Synthetic oligonucleotide

SEQ ID NO: 536443 - DNA, 60 bp, Artificial; identical to SEQ ID NO: 302530
  Synthetic oligonucleotide

SEQ ID NO: 536444 - DNA, 55 bp, Artificial; identical to SEQ ID NO: 302532
  Synthetic oligonucleotide

SEQ ID NO: 536445 - DNA, 54 bp, Artificial; identical to SEQ ID NO: 302535
  Synthetic oligonucleotide

SEQ ID NO: 536446 - DNA, 60 bp, Artificial; identical to SEQ ID NO: 302536
  Synthetic oligonucleotide

SEQ ID NO: 536447 - DNA, 55 bp, Artificial; identical to SEQ ID NO: 10000
  Synthetic oligonucleotide

SEQ ID NO: 536448 - DNA, 58 bp, Artificial; identical to SEQ ID NO: 302542
  Synthetic oligonucleotide

SEQ ID NO: 536449 - DNA, 58 bp, Artificial; identical to SEQ ID NO: 302543
  Synthetic oligonucleotide

SEQ ID NO: 536450 - DNA, 51 bp, Artificial; identical to SEQ ID NO: 302546
  Synthetic oligonucleotide

SEQ ID NO: 536451 - DNA, 59 bp, Artificial; identical to SEQ ID NO: 302550
  Synthetic oligonucleotide

SEQ ID NO: 536452 - DNA, 60 bp, Artificial; identical to SEQ ID NO: 302555
  Synthetic oligonucleotide

SEQ ID NO: 536453 - DNA, 56 bp, Artificial; identical to SEQ ID NO: 302556
  Synthetic oligonucleotide

SEQ ID NO: 536454 - DNA, 56 bp, Artificial; identical to SEQ ID NO: 302559
  Synthetic oligonucleotide

SEQ ID NO: 536455 - DNA, 52 bp, Artificial; identical to SEQ ID NO: 302562
  Synthetic oligonucleotide

SEQ ID NO: 536456 - DNA, 56 bp, Artificial; identical to SEQ ID NO: 302565
  Synthetic oligonucleotide

SEQ ID NO: 536457 - DNA, 53 bp, Artificial; identical to SEQ ID NO: 302566
  Synthetic oligonucleotide

SEQ ID NO: 536458 - DNA, 55 bp, Artificial; identical to SEQ ID NO: 302572
  Synthetic oligonucleotide

SEQ ID NO: 536459 - DNA, 60 bp, Artificial; identical to SEQ ID NO: 302574
  Synthetic oligonucleotide

SEQ ID NO: 536460 - DNA, 54 bp, Artificial; identical to SEQ ID NO: 302576
  Synthetic oligonucleotide

SEQ ID NO: 536461 - DNA, 60 bp, Artificial; identical to SEQ ID NO: 302580
  Synthetic oligonucleotide

SEQ ID NO: 536462 - DNA, 55 bp, Artificial; identical to SEQ ID NO: 302582
  Synthetic oligonucleotide

SEQ ID NO: 536463 - DNA, 60 bp, Artificial; identical to SEQ ID NO: 302583
  Synthetic oligonucleotide

SEQ ID NO: 536464 - DNA, 50 bp, Artificial; identical to SEQ ID NO: 302585
  Synthetic oligonucleotide

SEQ ID NO: 536465 - DNA, 60 bp, Artificial; identical to SEQ ID NO: 302586
  Synthetic oligonucleotide

SEQ ID NO: 536466 - DNA, 52 bp, Artificial; identical to SEQ ID NO: 302587
  Synthetic oligonucleotide

SEQ ID NO: 536467 - DNA, 59 bp, Artificial; identical to SEQ ID NO: 302589
  Synthetic oligonucleotide

SEQ ID NO: 536468 - DNA, 60 bp, Artificial; identical to SEQ ID NO: 302595
  Synthetic oligonucleotide

SEQ ID NO: 536469 - DNA, 58 bp, Artificial; identical to SEQ ID NO: 302598
  Synthetic oligonucleotide

SEQ ID NO: 536470 - DNA, 55 bp, Artificial; identical to SEQ ID NO: 302599
  Synthetic oligonucleotide

SEQ ID NO: 536471 - DNA, 51 bp, Artificial; identical to SEQ ID NO: 302604
  Synthetic oligonucleotide

SEQ ID NO: 536472 - DNA, 53 bp, Artificial; identical to SEQ ID NO: 302605
  Synthetic oligonucleotide

SEQ ID NO: 536473 - DNA, 53 bp, Artificial; identical to SEQ ID NO: 302608
  Synthetic oligonucleotide

SEQ ID NO: 536474 - DNA, 57 bp, Artificial; identical to SEQ ID NO: 302609
  Synthetic oligonucleotide

SEQ ID NO: 536475 - DNA, 57 bp, Artificial; identical to SEQ ID NO: 302611
  Synthetic oligonucleotide

SEQ ID NO: 536476 - DNA, 59 bp, Artificial; identical to SEQ ID NO: 302613
  Synthetic oligonucleotide

SEQ ID NO: 536477 - DNA, 60 bp, Artificial; identical to SEQ ID NO: 6302
  Synthetic oligonucleotide

SEQ ID NO: 536478 - DNA, 50 bp, Artificial; identical to SEQ ID NO: 302621
  Synthetic oligonucleotide

SEQ ID NO: 536479 - DNA, 55 bp, Artificial; identical to SEQ ID NO: 302622
  Synthetic oligonucleotide

SEQ ID NO: 536480 - DNA, 60 bp, Artificial; identical to SEQ ID NO: 302627
  Synthetic oligonucleotide

SEQ ID NO: 536481 - DNA, 59 bp, Artificial; identical to SEQ ID NO: 302628
  Synthetic oligonucleotide

SEQ ID NO: 536482 - DNA, 60 bp, Artificial; identical to SEQ ID NO: 302634
  Synthetic oligonucleotide

SEQ ID NO: 536483 - DNA, 60 bp, Artificial; identical to SEQ ID NO: 302636
  Synthetic oligonucleotide

SEQ ID NO: 536484 - DNA, 50 bp, Artificial; identical to SEQ ID NO: 302638
  Synthetic oligonucleotide

SEQ ID NO: 536485 - DNA, 60 bp, Artificial; identical to SEQ ID NO: 302640
  Synthetic oligonucleotide

SEQ ID NO: 536486 - DNA, 60 bp, Artificial; identical to SEQ ID NO: 302641
  Synthetic oligonucleotide

SEQ ID NO: 536487 - DNA, 50 bp, Artificial; identical to SEQ ID NO: 302642
  Synthetic oligonucleotide

SEQ ID NO: 536488 - DNA, 56 bp, Artificial; identical to SEQ ID NO: 302643
  Synthetic oligonucleotide

SEQ ID NO: 536489 - DNA, 55 bp, Artificial; identical to SEQ ID NO: 15003
  Synthetic oligonucleotide

SEQ ID NO: 536490 - DNA, 55 bp, Artificial; identical to SEQ ID NO: 302645
  Synthetic oligonucleotide

SEQ ID NO: 536491 - DNA, 60 bp, Artificial; identical to SEQ ID NO: 302650
  Synthetic oligonucleotide

SEQ ID NO: 536492 - DNA, 55 bp, Artificial; identical to SEQ ID NO: 302651
  Synthetic oligonucleotide

SEQ ID NO: 536493 - DNA, 60 bp, Artificial; identical to SEQ ID NO: 302653
  Synthetic oligonucleotide

SEQ ID NO: 536494 - DNA, 58 bp, Artificial; identical to SEQ ID NO: 302655
  Synthetic oligonucleotide

SEQ ID NO: 536495 - DNA, 54 bp, Artificial; identical to SEQ ID NO: 302656
  Synthetic oligonucleotide

SEQ ID NO: 536496 - DNA, 55 bp, Artificial; identical to SEQ ID NO: 302657
  Synthetic oligonucleotide

SEQ ID NO: 536497 - DNA, 56 bp, Artificial; identical to SEQ ID NO: 302660
  Synthetic oligonucleotide

SEQ ID NO: 536498 - DNA, 58 bp, Artificial; identical to SEQ ID NO: 302661
  Synthetic oligonucleotide

SEQ ID NO: 536499 - DNA, 50 bp, Artificial; identical to SEQ ID NO: 302663
  Synthetic oligonucleotide

SEQ ID NO: 536500 - DNA, 57 bp, Artificial; identical to SEQ ID NO: 302664
  Synthetic oligonucleotide

SEQ ID NO: 536501 - DNA, 50 bp, Artificial; identical to SEQ ID NO: 302666
  Synthetic oligonucleotide

SEQ ID NO: 536502 - DNA, 56 bp, Artificial; identical to SEQ ID NO: 19078
  Synthetic oligonucleotide

SEQ ID NO: 536503 - DNA, 55 bp, Artificial; identical to SEQ ID NO: 302674
  Synthetic oligonucleotide

SEQ ID NO: 536504 - DNA, 57 bp, Artificial; identical to SEQ ID NO: 302676
  Synthetic oligonucleotide

SEQ ID NO: 536505 - DNA, 60 bp, Artificial; identical to SEQ ID NO: 302678
  Synthetic oligonucleotide

SEQ ID NO: 536506 - DNA, 55 bp, Artificial; identical to SEQ ID NO: 302679
  Synthetic oligonucleotide

SEQ ID NO: 536507 - DNA, 51 bp, Artificial; identical to SEQ ID NO: 302683
  Synthetic oligonucleotide

SEQ ID NO: 536508 - DNA, 57 bp, Artificial; identical to SEQ ID NO: 302684
  Synthetic oligonucleotide

SEQ ID NO: 536509 - DNA, 55 bp, Artificial; identical to SEQ ID NO: 302687
  Synthetic oligonucleotide

SEQ ID NO: 536510 - DNA, 55 bp, Artificial; identical to SEQ ID NO: 302688
  Synthetic oligonucleotide

SEQ ID NO: 536511 - DNA, 56 bp, Artificial; identical to SEQ ID NO: 302689
  Synthetic oligonucleotide

SEQ ID NO: 536512 - DNA, 60 bp, Artificial; identical to SEQ ID NO: 302696
  Synthetic oligonucleotide

SEQ ID NO: 536513 - DNA, 60 bp, Artificial; identical to SEQ ID NO: 302699
  Synthetic oligonucleotide

SEQ ID NO: 536514 - DNA, 58 bp, Artificial; identical to SEQ ID NO: 302701
  Synthetic oligonucleotide

SEQ ID NO: 536515 - DNA, 53 bp, Artificial; identical to SEQ ID NO: 302702
  Synthetic oligonucleotide

SEQ ID NO: 536516 - DNA, 54 bp, Artificial; identical to SEQ ID NO: 302705
  Synthetic oligonucleotide

SEQ ID NO: 536517 - DNA, 56 bp, Artificial; identical to SEQ ID NO: 302706
  Synthetic oligonucleotide

SEQ ID NO: 536518 - DNA, 57 bp, Artificial; identical to SEQ ID NO: 302709
  Synthetic oligonucleotide

SEQ ID NO: 536519 - DNA, 58 bp, Artificial; identical to SEQ ID NO: 302714
  Synthetic oligonucleotide

SEQ ID NO: 536520 - DNA, 51 bp, Artificial; identical to SEQ ID NO: 302717
  Synthetic oligonucleotide

SEQ ID NO: 536521 - DNA, 60 bp, Artificial; identical to SEQ ID NO: 302719
  Synthetic oligonucleotide

SEQ ID NO: 536522 - DNA, 53 bp, Artificial; identical to SEQ ID NO: 302720
  Synthetic oligonucleotide

SEQ ID NO: 536523 - DNA, 54 bp, Artificial; identical to SEQ ID NO: 302721
  Synthetic oligonucleotide

SEQ ID NO: 536524 - DNA, 58 bp, Artificial; identical to SEQ ID NO: 302722
  Synthetic oligonucleotide

SEQ ID NO: 536525 - DNA, 50 bp, Artificial; identical to SEQ ID NO: 302725
  Synthetic oligonucleotide

SEQ ID NO: 536526 - DNA, 56 bp, Artificial; identical to SEQ ID NO: 302727
  Synthetic oligonucleotide

SEQ ID NO: 536527 - DNA, 55 bp, Artificial; identical to SEQ ID NO: 302733
  Synthetic oligonucleotide

SEQ ID NO: 536528 - DNA, 60 bp, Artificial; identical to SEQ ID NO: 6689
  Synthetic oligonucleotide

SEQ ID NO: 536529 - DNA, 53 bp, Artificial; identical to SEQ ID NO: 302748
  Synthetic oligonucleotide

SEQ ID NO: 536530 - DNA, 56 bp, Artificial; identical to SEQ ID NO: 302749
  Synthetic oligonucleotide

SEQ ID NO: 536531 - DNA, 60 bp, Artificial; identical to SEQ ID NO: 302754
  Synthetic oligonucleotide

SEQ ID NO: 536532 - DNA, 53 bp, Artificial; identical to SEQ ID NO: 302755
  Synthetic oligonucleotide

SEQ ID NO: 536533 - DNA, 53 bp, Artificial; identical to SEQ ID NO: 302756
  Synthetic oligonucleotide

SEQ ID NO: 536534 - DNA, 52 bp, Artificial; identical to SEQ ID NO: 11261
  Synthetic oligonucleotide

SEQ ID NO: 536535 - DNA, 57 bp, Artificial; identical to SEQ ID NO: 302761
  Synthetic oligonucleotide

SEQ ID NO: 536536 - DNA, 52 bp, Artificial; identical to SEQ ID NO: 302762
  Synthetic oligonucleotide

SEQ ID NO: 536537 - DNA, 59 bp, Artificial; identical to SEQ ID NO: 302764
  Synthetic oligonucleotide

SEQ ID NO: 536538 - DNA, 51 bp, Artificial; identical to SEQ ID NO: 302765
  Synthetic oligonucleotide

SEQ ID NO: 536539 - DNA, 53 bp, Artificial; identical to SEQ ID NO: 159
  Synthetic oligonucleotide

SEQ ID NO: 536540 - DNA, 55 bp, Artificial; identical to SEQ ID NO: 302767
  Synthetic oligonucleotide

SEQ ID NO: 536541 - DNA, 57 bp, Artificial; identical to SEQ ID NO: 302768
  Synthetic oligonucleotide

SEQ ID NO: 536542 - DNA, 60 bp, Artificial; identical to SEQ ID NO: 302770
  Synthetic oligonucleotide

SEQ ID NO: 536543 - DNA, 57 bp, Artificial; identical to SEQ ID NO: 302772
  Synthetic oligonucleotide

SEQ ID NO: 536544 - DNA, 53 bp, Artificial; identical to SEQ ID NO: 302777
  Synthetic oligonucleotide

SEQ ID NO: 536545 - DNA, 56 bp, Artificial; identical to SEQ ID NO: 302778
  Synthetic oligonucleotide

SEQ ID NO: 536546 - DNA, 58 bp, Artificial; identical to SEQ ID NO: 302780
  Synthetic oligonucleotide

SEQ ID NO: 536547 - DNA, 58 bp, Artificial; identical to SEQ ID NO: 302783
  Synthetic oligonucleotide

SEQ ID NO: 536548 - DNA, 60 bp, Artificial; identical to SEQ ID NO: 302784
  Synthetic oligonucleotide

SEQ ID NO: 536549 - DNA, 57 bp, Artificial; identical to SEQ ID NO: 302785
  Synthetic oligonucleotide

SEQ ID NO: 536550 - DNA, 55 bp, Artificial; identical to SEQ ID NO: 302789
  Synthetic oligonucleotide

SEQ ID NO: 536551 - DNA, 60 bp, Artificial; identical to SEQ ID NO: 302792
  Synthetic oligonucleotide

SEQ ID NO: 536552 - DNA, 60 bp, Artificial; identical to SEQ ID NO: 302793
  Synthetic oligonucleotide

SEQ ID NO: 536553 - DNA, 60 bp, Artificial; identical to SEQ ID NO: 302798
  Synthetic oligonucleotide

SEQ ID NO: 536554 - DNA, 60 bp, Artificial; identical to SEQ ID NO: 302799
  Synthetic oligonucleotide

SEQ ID NO: 536555 - DNA, 58 bp, Artificial; identical to SEQ ID NO: 302801
  Synthetic oligonucleotide

SEQ ID NO: 536556 - DNA, 56 bp, Artificial; identical to SEQ ID NO: 302802
  Synthetic oligonucleotide

SEQ ID NO: 536557 - DNA, 57 bp, Artificial; identical to SEQ ID NO: 302803
  Synthetic oligonucleotide

SEQ ID NO: 536558 - DNA, 56 bp, Artificial; identical to SEQ ID NO: 302809
  Synthetic oligonucleotide

SEQ ID NO: 536559 - DNA, 53 bp, Artificial; identical to SEQ ID NO: 302813
  Synthetic oligonucleotide

SEQ ID NO: 536560 - DNA, 58 bp, Artificial; identical to SEQ ID NO: 302815
  Synthetic oligonucleotide

SEQ ID NO: 536561 - DNA, 57 bp, Artificial; identical to SEQ ID NO: 302817
  Synthetic oligonucleotide

SEQ ID NO: 536562 - DNA, 60 bp, Artificial; identical to SEQ ID NO: 302820
  Synthetic oligonucleotide

SEQ ID NO: 536563 - DNA, 58 bp, Artificial; identical to SEQ ID NO: 302821
  Synthetic oligonucleotide

SEQ ID NO: 536564 - DNA, 52 bp, Artificial; identical to SEQ ID NO: 302824
  Synthetic oligonucleotide

SEQ ID NO: 536565 - DNA, 58 bp, Artificial; identical to SEQ ID NO: 302826
  Synthetic oligonucleotide

SEQ ID NO: 536566 - DNA, 51 bp, Artificial; identical to SEQ ID NO: 302830
  Synthetic oligonucleotide

SEQ ID NO: 536567 - DNA, 52 bp, Artificial; identical to SEQ ID NO: 302831
  Synthetic oligonucleotide

SEQ ID NO: 536568 - DNA, 58 bp, Artificial; identical to SEQ ID NO: 302833
  Synthetic oligonucleotide

SEQ ID NO: 536569 - DNA, 52 bp, Artificial; identical to SEQ ID NO: 302838
  Synthetic oligonucleotide

SEQ ID NO: 536570 - DNA, 60 bp, Artificial; identical to SEQ ID NO: 302840
  Synthetic oligonucleotide

SEQ ID NO: 536571 - DNA, 49 bp, Artificial; identical to SEQ ID NO: 302845
  Synthetic oligonucleotide

SEQ ID NO: 536572 - DNA, 53 bp, Artificial; identical to SEQ ID NO: 302849
  Synthetic oligonucleotide

SEQ ID NO: 536573 - DNA, 55 bp, Artificial; identical to SEQ ID NO: 302852
  Synthetic oligonucleotide

SEQ ID NO: 536574 - DNA, 54 bp, Artificial; identical to SEQ ID NO: 302855
  Synthetic oligonucleotide

SEQ ID NO: 536575 - DNA, 56 bp, Artificial; identical to SEQ ID NO: 302860
  Synthetic oligonucleotide

SEQ ID NO: 536576 - DNA, 55 bp, Artificial; identical to SEQ ID NO: 302864
  Synthetic oligonucleotide

SEQ ID NO: 536577 - DNA, 51 bp, Artificial; identical to SEQ ID NO: 302866
  Synthetic oligonucleotide

SEQ ID NO: 536578 - DNA, 60 bp, Artificial; identical to SEQ ID NO: 302868
  Synthetic oligonucleotide

SEQ ID NO: 536579 - DNA, 55 bp, Artificial; identical to SEQ ID NO: 302869
  Synthetic oligonucleotide

SEQ ID NO: 536580 - DNA, 59 bp, Artificial; identical to SEQ ID NO: 302870
  Synthetic oligonucleotide

SEQ ID NO: 536581 - DNA, 55 bp, Artificial; identical to SEQ ID NO: 302873
  Synthetic oligonucleotide

SEQ ID NO: 536582 - DNA, 60 bp, Artificial; identical to SEQ ID NO: 302874
  Synthetic oligonucleotide

SEQ ID NO: 536583 - DNA, 55 bp, Artificial; identical to SEQ ID NO: 302877
  Synthetic oligonucleotide

SEQ ID NO: 536584 - DNA, 55 bp, Artificial; identical to SEQ ID NO: 302878
  Synthetic oligonucleotide

SEQ ID NO: 536585 - DNA, 52 bp, Artificial; identical to SEQ ID NO: 302881
  Synthetic oligonucleotide

SEQ ID NO: 536586 - DNA, 59 bp, Artificial; identical to SEQ ID NO: 302883
  Synthetic oligonucleotide

SEQ ID NO: 536587 - DNA, 60 bp, Artificial; identical to SEQ ID NO: 302884
  Synthetic oligonucleotide

SEQ ID NO: 536588 - DNA, 60 bp, Artificial; identical to SEQ ID NO: 302888
  Synthetic oligonucleotide

SEQ ID NO: 536589 - DNA, 55 bp, Artificial; identical to SEQ ID NO: 302889
  Synthetic oligonucleotide

SEQ ID NO: 536590 - DNA, 57 bp, Artificial; identical to SEQ ID NO: 302891
  Synthetic oligonucleotide

SEQ ID NO: 536591 - DNA, 55 bp, Artificial; identical to SEQ ID NO: 302896
  Synthetic oligonucleotide

SEQ ID NO: 536592 - DNA, 57 bp, Artificial; identical to SEQ ID NO: 302900
  Synthetic oligonucleotide

SEQ ID NO: 536593 - DNA, 52 bp, Artificial; identical to SEQ ID NO: 302901
  Synthetic oligonucleotide

SEQ ID NO: 536594 - DNA, 55 bp, Artificial; identical to SEQ ID NO: 302905
  Synthetic oligonucleotide

SEQ ID NO: 536595 - DNA, 56 bp, Artificial; identical to SEQ ID NO: 302909
  Synthetic oligonucleotide

SEQ ID NO: 536596 - DNA, 58 bp, Artificial; identical to SEQ ID NO: 302913
  Synthetic oligonucleotide

SEQ ID NO: 536597 - DNA, 59 bp, Artificial; identical to SEQ ID NO: 302914
  Synthetic oligonucleotide

SEQ ID NO: 536598 - DNA, 55 bp, Artificial; identical to SEQ ID NO: 302919
  Synthetic oligonucleotide

SEQ ID NO: 536599 - DNA, 50 bp, Artificial; identical to SEQ ID NO: 302923
  Synthetic oligonucleotide

SEQ ID NO: 536600 - DNA, 60 bp, Artificial; identical to SEQ ID NO: 302925
  Synthetic oligonucleotide

SEQ ID NO: 536601 - DNA, 55 bp, Artificial; identical to SEQ ID NO: 302926
  Synthetic oligonucleotide

SEQ ID NO: 536602 - DNA, 60 bp, Artificial; identical to SEQ ID NO: 302929
  Synthetic oligonucleotide

SEQ ID NO: 536603 - DNA, 60 bp, Artificial; identical to SEQ ID NO: 302932
  Synthetic oligonucleotide

SEQ ID NO: 536604 - DNA, 56 bp, Artificial; identical to SEQ ID NO: 302935
  Synthetic oligonucleotide

SEQ ID NO: 536605 - DNA, 60 bp, Artificial; identical to SEQ ID NO: 302937
  Synthetic oligonucleotide

SEQ ID NO: 536606 - DNA, 57 bp, Artificial; identical to SEQ ID NO: 302939
  Synthetic oligonucleotide

SEQ ID NO: 536607 - DNA, 55 bp, Artificial; identical to SEQ ID NO: 302941
  Synthetic oligonucleotide

SEQ ID NO: 536608 - DNA, 55 bp, Artificial; identical to SEQ ID NO: 302942
  Synthetic oligonucleotide

SEQ ID NO: 536609 - DNA, 50 bp, Artificial; identical to SEQ ID NO: 302943
  Synthetic oligonucleotide

SEQ ID NO: 536610 - DNA, 60 bp, Artificial; identical to SEQ ID NO: 302945
  Synthetic oligonucleotide

SEQ ID NO: 536611 - DNA, 60 bp, Artificial; identical to SEQ ID NO: 302947
  Synthetic oligonucleotide

SEQ ID NO: 536612 - DNA, 60 bp, Artificial; identical to SEQ ID NO: 302949
  Synthetic oligonucleotide

SEQ ID NO: 536613 - DNA, 55 bp, Artificial; identical to SEQ ID NO: 302951
  Synthetic oligonucleotide

SEQ ID NO: 536614 - DNA, 60 bp, Artificial; identical to SEQ ID NO: 302952
  Synthetic oligonucleotide

SEQ ID NO: 536615 - DNA, 54 bp, Artificial; identical to SEQ ID NO: 302953
  Synthetic oligonucleotide

SEQ ID NO: 536616 - DNA, 60 bp, Artificial; identical to SEQ ID NO: 302956
  Synthetic oligonucleotide

SEQ ID NO: 536617 - DNA, 60 bp, Artificial; identical to SEQ ID NO: 302957
  Synthetic oligonucleotide

SEQ ID NO: 536618 - DNA, 58 bp, Artificial; identical to SEQ ID NO: 302961
  Synthetic oligonucleotide

SEQ ID NO: 536619 - DNA, 56 bp, Artificial; identical to SEQ ID NO: 302962
  Synthetic oligonucleotide

SEQ ID NO: 536620 - DNA, 53 bp, Artificial; identical to SEQ ID NO: 302963
  Synthetic oligonucleotide

SEQ ID NO: 536621 - DNA, 58 bp, Artificial; identical to SEQ ID NO: 302968
  Synthetic oligonucleotide

SEQ ID NO: 536622 - DNA, 56 bp, Artificial; identical to SEQ ID NO: 14851
  Synthetic oligonucleotide

SEQ ID NO: 536623 - DNA, 54 bp, Artificial; identical to SEQ ID NO: 302972
  Synthetic oligonucleotide

SEQ ID NO: 536624 - DNA, 57 bp, Artificial; identical to SEQ ID NO: 302974
  Synthetic oligonucleotide

SEQ ID NO: 536625 - DNA, 54 bp, Artificial; identical to SEQ ID NO: 302978
  Synthetic oligonucleotide

SEQ ID NO: 536626 - DNA, 60 bp, Artificial; identical to SEQ ID NO: 302982
  Synthetic oligonucleotide

SEQ ID NO: 536627 - DNA, 50 bp, Artificial; identical to SEQ ID NO: 302983
  Synthetic oligonucleotide

SEQ ID NO: 536628 - DNA, 57 bp, Artificial; identical to SEQ ID NO: 302984
  Synthetic oligonucleotide

SEQ ID NO: 536629 - DNA, 51 bp, Artificial; identical to SEQ ID NO: 302985
  Synthetic oligonucleotide

SEQ ID NO: 536630 - DNA, 59 bp, Artificial; identical to SEQ ID NO: 302988
  Synthetic oligonucleotide

SEQ ID NO: 536631 - DNA, 55 bp, Artificial; identical to SEQ ID NO: 302989
  Synthetic oligonucleotide

SEQ ID NO: 536632 - DNA, 60 bp, Artificial; identical to SEQ ID NO: 302997
  Synthetic oligonucleotide

SEQ ID NO: 536633 - DNA, 59 bp, Artificial; identical to SEQ ID NO: 302998
  Synthetic oligonucleotide

SEQ ID NO: 536634 - DNA, 51 bp, Artificial; identical to SEQ ID NO: 303003
  Synthetic oligonucleotide

SEQ ID NO: 536635 - DNA, 56 bp, Artificial; identical to SEQ ID NO: 303004
  Synthetic oligonucleotide

SEQ ID NO: 536636 - DNA, 55 bp, Artificial; identical to SEQ ID NO: 303005
  Synthetic oligonucleotide

SEQ ID NO: 536637 - DNA, 60 bp, Artificial; identical to SEQ ID NO: 303006
  Synthetic oligonucleotide

SEQ ID NO: 536638 - DNA, 58 bp, Artificial; identical to SEQ ID NO: 18742
  Synthetic oligonucleotide

SEQ ID NO: 536639 - DNA, 58 bp, Artificial; identical to SEQ ID NO: 303009
  Synthetic oligonucleotide

SEQ ID NO: 536640 - DNA, 57 bp, Artificial; identical to SEQ ID NO: 303013
  Synthetic oligonucleotide

SEQ ID NO: 536641 - DNA, 60 bp, Artificial; identical to SEQ ID NO: 303015
  Synthetic oligonucleotide

SEQ ID NO: 536642 - DNA, 59 bp, Artificial; identical to SEQ ID NO: 303017
  Synthetic oligonucleotide

SEQ ID NO: 536643 - DNA, 55 bp, Artificial; identical to SEQ ID NO: 303018
  Synthetic oligonucleotide

SEQ ID NO: 536644 - DNA, 51 bp, Artificial; identical to SEQ ID NO: 303020
  Synthetic oligonucleotide

SEQ ID NO: 536645 - DNA, 60 bp, Artificial; identical to SEQ ID NO: 9546
  Synthetic oligonucleotide

SEQ ID NO: 536646 - DNA, 60 bp, Artificial; identical to SEQ ID NO: 303024
  Synthetic oligonucleotide

SEQ ID NO: 536647 - DNA, 60 bp, Artificial; identical to SEQ ID NO: 303025
  Synthetic oligonucleotide

SEQ ID NO: 536648 - DNA, 51 bp, Artificial; identical to SEQ ID NO: 303026
  Synthetic oligonucleotide

SEQ ID NO: 536649 - DNA, 54 bp, Artificial; identical to SEQ ID NO: 303028
  Synthetic oligonucleotide

SEQ ID NO: 536650 - DNA, 54 bp, Artificial; identical to SEQ ID NO: 303031
  Synthetic oligonucleotide

SEQ ID NO: 536651 - DNA, 58 bp, Artificial; identical to SEQ ID NO: 303035
  Synthetic oligonucleotide

SEQ ID NO: 536652 - DNA, 60 bp, Artificial; identical to SEQ ID NO: 303036
  Synthetic oligonucleotide

SEQ ID NO: 536653 - DNA, 53 bp, Artificial; identical to SEQ ID NO: 303039
  Synthetic oligonucleotide

SEQ ID NO: 536654 - DNA, 58 bp, Artificial; identical to SEQ ID NO: 303040
  Synthetic oligonucleotide

SEQ ID NO: 536655 - DNA, 57 bp, Artificial; identical to SEQ ID NO: 303041
  Synthetic oligonucleotide

SEQ ID NO: 536656 - DNA, 54 bp, Artificial; identical to SEQ ID NO: 303042
  Synthetic oligonucleotide

SEQ ID NO: 536657 - DNA, 54 bp, Artificial; identical to SEQ ID NO: 303043
  Synthetic oligonucleotide

SEQ ID NO: 536658 - DNA, 51 bp, Artificial; identical to SEQ ID NO: 303047
  Synthetic oligonucleotide

SEQ ID NO: 536659 - DNA, 55 bp, Artificial; identical to SEQ ID NO: 303051
  Synthetic oligonucleotide

SEQ ID NO: 536660 - DNA, 59 bp, Artificial; identical to SEQ ID NO: 303055
  Synthetic oligonucleotide

SEQ ID NO: 536661 - DNA, 50 bp, Artificial; identical to SEQ ID NO: 303056
  Synthetic oligonucleotide

SEQ ID NO: 536662 - DNA, 54 bp, Artificial; identical to SEQ ID NO: 303058
  Synthetic oligonucleotide

SEQ ID NO: 536663 - DNA, 57 bp, Artificial; identical to SEQ ID NO: 303059
  Synthetic oligonucleotide

SEQ ID NO: 536664 - DNA, 54 bp, Artificial; identical to SEQ ID NO: 303064
  Synthetic oligonucleotide

SEQ ID NO: 536665 - DNA, 59 bp, Artificial; identical to SEQ ID NO: 303065
  Synthetic oligonucleotide

SEQ ID NO: 536666 - DNA, 58 bp, Artificial; identical to SEQ ID NO: 303067
  Synthetic oligonucleotide

SEQ ID NO: 536667 - DNA, 60 bp, Artificial; identical to SEQ ID NO: 303072
  Synthetic oligonucleotide

SEQ ID NO: 536668 - DNA, 54 bp, Artificial; identical to SEQ ID NO: 303073
  Synthetic oligonucleotide

SEQ ID NO: 536669 - DNA, 55 bp, Artificial; identical to SEQ ID NO: 303074
  Synthetic oligonucleotide

SEQ ID NO: 536670 - DNA, 57 bp, Artificial; identical to SEQ ID NO: 303079
  Synthetic oligonucleotide

SEQ ID NO: 536671 - DNA, 52 bp, Artificial; identical to SEQ ID NO: 303084
  Synthetic oligonucleotide

SEQ ID NO: 536672 - DNA, 57 bp, Artificial; identical to SEQ ID NO: 303089
  Synthetic oligonucleotide

SEQ ID NO: 536673 - DNA, 51 bp, Artificial; identical to SEQ ID NO: 303091
  Synthetic oligonucleotide

SEQ ID NO: 536674 - DNA, 55 bp, Artificial; identical to SEQ ID NO: 303092
  Synthetic oligonucleotide

SEQ ID NO: 536675 - DNA, 52 bp, Artificial; identical to SEQ ID NO: 303094
  Synthetic oligonucleotide

SEQ ID NO: 536676 - DNA, 60 bp, Artificial; identical to SEQ ID NO: 303096
  Synthetic oligonucleotide

SEQ ID NO: 536677 - DNA, 55 bp, Artificial; identical to SEQ ID NO: 303098
  Synthetic oligonucleotide

SEQ ID NO: 536678 - DNA, 57 bp, Artificial; identical to SEQ ID NO: 303099
  Synthetic oligonucleotide

SEQ ID NO: 536679 - DNA, 48 bp, Artificial; identical to SEQ ID NO: 303100
  Synthetic oligonucleotide

SEQ ID NO: 536680 - DNA, 54 bp, Artificial; identical to SEQ ID NO: 303104
  Synthetic oligonucleotide

SEQ ID NO: 536681 - DNA, 57 bp, Artificial; identical to SEQ ID NO: 303107
  Synthetic oligonucleotide

SEQ ID NO: 536682 - DNA, 55 bp, Artificial; identical to SEQ ID NO: 303109
  Synthetic oligonucleotide

SEQ ID NO: 536683 - DNA, 60 bp, Artificial; identical to SEQ ID NO: 303111
  Synthetic oligonucleotide

SEQ ID NO: 536684 - DNA, 57 bp, Artificial; identical to SEQ ID NO: 303112
  Synthetic oligonucleotide

SEQ ID NO: 536685 - DNA, 57 bp, Artificial; identical to SEQ ID NO: 17939
  Synthetic oligonucleotide

SEQ ID NO: 536686 - DNA, 55 bp, Artificial; identical to SEQ ID NO: 303124
  Synthetic oligonucleotide

SEQ ID NO: 536687 - DNA, 55 bp, Artificial; identical to SEQ ID NO: 303126
  Synthetic oligonucleotide

SEQ ID NO: 536688 - DNA, 56 bp, Artificial; identical to SEQ ID NO: 303127
  Synthetic oligonucleotide

SEQ ID NO: 536689 - DNA, 51 bp, Artificial; identical to SEQ ID NO: 303128
  Synthetic oligonucleotide

SEQ ID NO: 536690 - DNA, 55 bp, Artificial; identical to SEQ ID NO: 303130
  Synthetic oligonucleotide

SEQ ID NO: 536691 - DNA, 60 bp, Artificial; identical to SEQ ID NO: 303132
  Synthetic oligonucleotide

SEQ ID NO: 536692 - DNA, 58 bp, Artificial; identical to SEQ ID NO: 303133
  Synthetic oligonucleotide

SEQ ID NO: 536693 - DNA, 56 bp, Artificial; identical to SEQ ID NO: 303134
  Synthetic oligonucleotide

SEQ ID NO: 536694 - DNA, 55 bp, Artificial; identical to SEQ ID NO: 303135
  Synthetic oligonucleotide

SEQ ID NO: 536695 - DNA, 59 bp, Artificial; identical to SEQ ID NO: 303138
  Synthetic oligonucleotide

SEQ ID NO: 536696 - DNA, 55 bp, Artificial; identical to SEQ ID NO: 303142
  Synthetic oligonucleotide

SEQ ID NO: 536697 - DNA, 60 bp, Artificial; identical to SEQ ID NO: 303143
  Synthetic oligonucleotide

SEQ ID NO: 536698 - DNA, 57 bp, Artificial; identical to SEQ ID NO: 303144
  Synthetic oligonucleotide

SEQ ID NO: 536699 - DNA, 55 bp, Artificial; identical to SEQ ID NO: 303147
  Synthetic oligonucleotide

SEQ ID NO: 536700 - DNA, 60 bp, Artificial; identical to SEQ ID NO: 303149
  Synthetic oligonucleotide

SEQ ID NO: 536701 - DNA, 57 bp, Artificial; identical to SEQ ID NO: 303151
  Synthetic oligonucleotide

SEQ ID NO: 536702 - DNA, 58 bp, Artificial; identical to SEQ ID NO: 303156
  Synthetic oligonucleotide

SEQ ID NO: 536703 - DNA, 60 bp, Artificial; identical to SEQ ID NO: 303160
  Synthetic oligonucleotide

SEQ ID NO: 536704 - DNA, 55 bp, Artificial; identical to SEQ ID NO: 303163
  Synthetic oligonucleotide

SEQ ID NO: 536705 - DNA, 59 bp, Artificial; identical to SEQ ID NO: 303164
  Synthetic oligonucleotide

SEQ ID NO: 536706 - DNA, 51 bp, Artificial; identical to SEQ ID NO: 303166
  Synthetic oligonucleotide

SEQ ID NO: 536707 - DNA, 58 bp, Artificial; identical to SEQ ID NO: 303167
  Synthetic oligonucleotide

SEQ ID NO: 536708 - DNA, 60 bp, Artificial; identical to SEQ ID NO: 303169
  Synthetic oligonucleotide

SEQ ID NO: 536709 - DNA, 60 bp, Artificial; identical to SEQ ID NO: 303171
  Synthetic oligonucleotide

SEQ ID NO: 536710 - DNA, 55 bp, Artificial; identical to SEQ ID NO: 303172
  Synthetic oligonucleotide

SEQ ID NO: 536711 - DNA, 58 bp, Artificial; identical to SEQ ID NO: 303173
  Synthetic oligonucleotide

SEQ ID NO: 536712 - DNA, 55 bp, Artificial; identical to SEQ ID NO: 303175
  Synthetic oligonucleotide

SEQ ID NO: 536713 - DNA, 60 bp, Artificial; identical to SEQ ID NO: 303177
  Synthetic oligonucleotide

SEQ ID NO: 536714 - DNA, 52 bp, Artificial; identical to SEQ ID NO: 303178
  Synthetic oligonucleotide

SEQ ID NO: 536715 - DNA, 60 bp, Artificial; identical to SEQ ID NO: 303181
  Synthetic oligonucleotide

SEQ ID NO: 536716 - DNA, 59 bp, Artificial; identical to SEQ ID NO: 303182
  Synthetic oligonucleotide

SEQ ID NO: 536717 - DNA, 60 bp, Artificial; identical to SEQ ID NO: 303185
  Synthetic oligonucleotide

SEQ ID NO: 536718 - DNA, 60 bp, Artificial; identical to SEQ ID NO: 303190
  Synthetic oligonucleotide

SEQ ID NO: 536719 - DNA, 56 bp, Artificial; identical to SEQ ID NO: 303191
  Synthetic oligonucleotide

SEQ ID NO: 536720 - DNA, 60 bp, Artificial; identical to SEQ ID NO: 303192
  Synthetic oligonucleotide

SEQ ID NO: 536721 - DNA, 55 bp, Artificial; identical to SEQ ID NO: 303195
  Synthetic oligonucleotide

SEQ ID NO: 536722 - DNA, 60 bp, Artificial; identical to SEQ ID NO: 303197
  Synthetic oligonucleotide

SEQ ID NO: 536723 - DNA, 58 bp, Artificial; identical to SEQ ID NO: 303199
  Synthetic oligonucleotide

SEQ ID NO: 536724 - DNA, 57 bp, Artificial; identical to SEQ ID NO: 303203
  Synthetic oligonucleotide

SEQ ID NO: 536725 - DNA, 60 bp, Artificial; identical to SEQ ID NO: 12633
  Synthetic oligonucleotide

SEQ ID NO: 536726 - DNA, 55 bp, Artificial; identical to SEQ ID NO: 303212
  Synthetic oligonucleotide

SEQ ID NO: 536727 - DNA, 55 bp, Artificial; identical to SEQ ID NO: 303214
  Synthetic oligonucleotide

SEQ ID NO: 536728 - DNA, 55 bp, Artificial; identical to SEQ ID NO: 303215
  Synthetic oligonucleotide

SEQ ID NO: 536729 - DNA, 60 bp, Artificial; identical to SEQ ID NO: 7612
  Synthetic oligonucleotide

SEQ ID NO: 536730 - DNA, 56 bp, Artificial; identical to SEQ ID NO: 303218
  Synthetic oligonucleotide

SEQ ID NO: 536731 - DNA, 60 bp, Artificial; identical to SEQ ID NO: 303219
  Synthetic oligonucleotide

SEQ ID NO: 536732 - DNA, 60 bp, Artificial; identical to SEQ ID NO: 303220
  Synthetic oligonucleotide

SEQ ID NO: 536733 - DNA, 60 bp, Artificial; identical to SEQ ID NO: 303221
  Synthetic oligonucleotide

SEQ ID NO: 536734 - DNA, 60 bp, Artificial; identical to SEQ ID NO: 303222
  Synthetic oligonucleotide

SEQ ID NO: 536735 - DNA, 60 bp, Artificial; identical to SEQ ID NO: 11107
  Synthetic oligonucleotide

SEQ ID NO: 536736 - DNA, 58 bp, Artificial; identical to SEQ ID NO: 18141
  Synthetic oligonucleotide

SEQ ID NO: 536737 - DNA, 51 bp, Artificial; identical to SEQ ID NO: 303224
  Synthetic oligonucleotide

SEQ ID NO: 536738 - DNA, 60 bp, Artificial; identical to SEQ ID NO: 303225
  Synthetic oligonucleotide

SEQ ID NO: 536739 - DNA, 50 bp, Artificial; identical to SEQ ID NO: 303228
  Synthetic oligonucleotide

SEQ ID NO: 536740 - DNA, 59 bp, Artificial; identical to SEQ ID NO: 303237
  Synthetic oligonucleotide

SEQ ID NO: 536741 - DNA, 55 bp, Artificial; identical to SEQ ID NO: 303244
  Synthetic oligonucleotide

SEQ ID NO: 536742 - DNA, 54 bp, Artificial; identical to SEQ ID NO: 303245
  Synthetic oligonucleotide

SEQ ID NO: 536743 - DNA, 57 bp, Artificial; identical to SEQ ID NO: 303248
  Synthetic oligonucleotide

SEQ ID NO: 536744 - DNA, 60 bp, Artificial; identical to SEQ ID NO: 303249
  Synthetic oligonucleotide

SEQ ID NO: 536745 - DNA, 52 bp, Artificial; identical to SEQ ID NO: 303254
  Synthetic oligonucleotide

SEQ ID NO: 536746 - DNA, 60 bp, Artificial; identical to SEQ ID NO: 14497
  Synthetic oligonucleotide

SEQ ID NO: 536747 - DNA, 59 bp, Artificial; identical to SEQ ID NO: 303260
  Synthetic oligonucleotide

SEQ ID NO: 536748 - DNA, 58 bp, Artificial; identical to SEQ ID NO: 303261
  Synthetic oligonucleotide

SEQ ID NO: 536749 - DNA, 58 bp, Artificial; identical to SEQ ID NO: 303264
  Synthetic oligonucleotide

SEQ ID NO: 536750 - DNA, 55 bp, Artificial; identical to SEQ ID NO: 303265
  Synthetic oligonucleotide

SEQ ID NO: 536751 - DNA, 57 bp, Artificial; identical to SEQ ID NO: 303270
  Synthetic oligonucleotide

SEQ ID NO: 536752 - DNA, 58 bp, Artificial; identical to SEQ ID NO: 303272
  Synthetic oligonucleotide

SEQ ID NO: 536753 - DNA, 53 bp, Artificial; identical to SEQ ID NO: 303274
  Synthetic oligonucleotide

SEQ ID NO: 536754 - DNA, 55 bp, Artificial; identical to SEQ ID NO: 303276
  Synthetic oligonucleotide

SEQ ID NO: 536755 - DNA, 53 bp, Artificial; identical to SEQ ID NO: 303278
  Synthetic oligonucleotide

SEQ ID NO: 536756 - DNA, 53 bp, Artificial; identical to SEQ ID NO: 17130
  Synthetic oligonucleotide

SEQ ID NO: 536757 - DNA, 55 bp, Artificial; identical to SEQ ID NO: 303279
  Synthetic oligonucleotide

SEQ ID NO: 536758 - DNA, 50 bp, Artificial; identical to SEQ ID NO: 303280
  Synthetic oligonucleotide

SEQ ID NO: 536759 - DNA, 57 bp, Artificial; identical to SEQ ID NO: 303281
  Synthetic oligonucleotide

SEQ ID NO: 536760 - DNA, 53 bp, Artificial; identical to SEQ ID NO: 303282
  Synthetic oligonucleotide

SEQ ID NO: 536761 - DNA, 60 bp, Artificial; identical to SEQ ID NO: 303283
  Synthetic oligonucleotide

SEQ ID NO: 536762 - DNA, 60 bp, Artificial; identical to SEQ ID NO: 303286
  Synthetic oligonucleotide

SEQ ID NO: 536763 - DNA, 57 bp, Artificial; identical to SEQ ID NO: 303288
  Synthetic oligonucleotide

SEQ ID NO: 536764 - DNA, 52 bp, Artificial; identical to SEQ ID NO: 303289
  Synthetic oligonucleotide

SEQ ID NO: 536765 - DNA, 55 bp, Artificial; identical to SEQ ID NO: 303293
  Synthetic oligonucleotide

SEQ ID NO: 536766 - DNA, 60 bp, Artificial; identical to SEQ ID NO: 303294
  Synthetic oligonucleotide

SEQ ID NO: 536767 - DNA, 55 bp, Artificial; identical to SEQ ID NO: 303295
  Synthetic oligonucleotide

SEQ ID NO: 536768 - DNA, 53 bp, Artificial; identical to SEQ ID NO: 303299
  Synthetic oligonucleotide

SEQ ID NO: 536769 - DNA, 58 bp, Artificial; identical to SEQ ID NO: 303300
  Synthetic oligonucleotide

SEQ ID NO: 536770 - DNA, 60 bp, Artificial; identical to SEQ ID NO: 303302
  Synthetic oligonucleotide

SEQ ID NO: 536771 - DNA, 57 bp, Artificial; identical to SEQ ID NO: 303309
  Synthetic oligonucleotide

SEQ ID NO: 536772 - DNA, 58 bp, Artificial; identical to SEQ ID NO: 303312
  Synthetic oligonucleotide

SEQ ID NO: 536773 - DNA, 60 bp, Artificial; identical to SEQ ID NO: 303314
  Synthetic oligonucleotide

SEQ ID NO: 536774 - DNA, 57 bp, Artificial; identical to SEQ ID NO: 303315
  Synthetic oligonucleotide

SEQ ID NO: 536775 - DNA, 60 bp, Artificial; identical to SEQ ID NO: 303316
  Synthetic oligonucleotide

SEQ ID NO: 536776 - DNA, 57 bp, Artificial; identical to SEQ ID NO: 303320
  Synthetic oligonucleotide

SEQ ID NO: 536777 - DNA, 55 bp, Artificial; identical to SEQ ID NO: 303321
  Synthetic oligonucleotide

SEQ ID NO: 536778 - DNA, 53 bp, Artificial; identical to SEQ ID NO: 303322
  Synthetic oligonucleotide

SEQ ID NO: 536779 - DNA, 60 bp, Artificial; identical to SEQ ID NO: 303323
  Synthetic oligonucleotide

SEQ ID NO: 536780 - DNA, 56 bp, Artificial; identical to SEQ ID NO: 303330
  Synthetic oligonucleotide

SEQ ID NO: 536781 - DNA, 58 bp, Artificial; identical to SEQ ID NO: 303331
  Synthetic oligonucleotide

SEQ ID NO: 536782 - DNA, 60 bp, Artificial; identical to SEQ ID NO: 303340
  Synthetic oligonucleotide

SEQ ID NO: 536783 - DNA, 58 bp, Artificial; identical to SEQ ID NO: 303342
  Synthetic oligonucleotide

SEQ ID NO: 536784 - DNA, 59 bp, Artificial; identical to SEQ ID NO: 303352
  Synthetic oligonucleotide

SEQ ID NO: 536785 - DNA, 60 bp, Artificial; identical to SEQ ID NO: 303353
  Synthetic oligonucleotide

SEQ ID NO: 536786 - DNA, 59 bp, Artificial; identical to SEQ ID NO: 303354
  Synthetic oligonucleotide

SEQ ID NO: 536787 - DNA, 55 bp, Artificial; identical to SEQ ID NO: 303355
  Synthetic oligonucleotide

SEQ ID NO: 536788 - DNA, 54 bp, Artificial; identical to SEQ ID NO: 303356
  Synthetic oligonucleotide

SEQ ID NO: 536789 - DNA, 54 bp, Artificial; identical to SEQ ID NO: 10813
  Synthetic oligonucleotide

SEQ ID NO: 536790 - DNA, 60 bp, Artificial; identical to SEQ ID NO: 303358
  Synthetic oligonucleotide

SEQ ID NO: 536791 - DNA, 60 bp, Artificial; identical to SEQ ID NO: 10783
  Synthetic oligonucleotide

SEQ ID NO: 536792 - DNA, 60 bp, Artificial; identical to SEQ ID NO: 303361
  Synthetic oligonucleotide

SEQ ID NO: 536793 - DNA, 57 bp, Artificial; identical to SEQ ID NO: 18332
  Synthetic oligonucleotide

SEQ ID NO: 536794 - DNA, 60 bp, Artificial; identical to SEQ ID NO: 303371
  Synthetic oligonucleotide

SEQ ID NO: 536795 - DNA, 59 bp, Artificial; identical to SEQ ID NO: 303373
  Synthetic oligonucleotide

SEQ ID NO: 536796 - DNA, 60 bp, Artificial; identical to SEQ ID NO: 303378
  Synthetic oligonucleotide

SEQ ID NO: 536797 - DNA, 55 bp, Artificial; identical to SEQ ID NO: 303379
  Synthetic oligonucleotide

SEQ ID NO: 536798 - DNA, 58 bp, Artificial; identical to SEQ ID NO: 303383
  Synthetic oligonucleotide

SEQ ID NO: 536799 - DNA, 60 bp, Artificial; identical to SEQ ID NO: 303385
  Synthetic oligonucleotide

SEQ ID NO: 536800 - DNA, 60 bp, Artificial; identical to SEQ ID NO: 303386
  Synthetic oligonucleotide

SEQ ID NO: 536801 - DNA, 60 bp, Artificial; identical to SEQ ID NO: 303387
  Synthetic oligonucleotide

SEQ ID NO: 536802 - DNA, 59 bp, Artificial; identical to SEQ ID NO: 303388
  Synthetic oligonucleotide

SEQ ID NO: 536803 - DNA, 56 bp, Artificial; identical to SEQ ID NO: 303390
  Synthetic oligonucleotide

SEQ ID NO: 536804 - DNA, 60 bp, Artificial; identical to SEQ ID NO: 303391
  Synthetic oligonucleotide

SEQ ID NO: 536805 - DNA, 60 bp, Artificial; identical to SEQ ID NO: 303396
  Synthetic oligonucleotide

SEQ ID NO: 536806 - DNA, 59 bp, Artificial; identical to SEQ ID NO: 303397
  Synthetic oligonucleotide

SEQ ID NO: 536807 - DNA, 60 bp, Artificial; identical to SEQ ID NO: 303399
  Synthetic oligonucleotide

SEQ ID NO: 536808 - DNA, 51 bp, Artificial; identical to SEQ ID NO: 303400
  Synthetic oligonucleotide

SEQ ID NO: 536809 - DNA, 60 bp, Artificial; identical to SEQ ID NO: 303402
  Synthetic oligonucleotide

SEQ ID NO: 536810 - DNA, 59 bp, Artificial; identical to SEQ ID NO: 303403
  Synthetic oligonucleotide

SEQ ID NO: 536811 - DNA, 60 bp, Artificial; identical to SEQ ID NO: 303409
  Synthetic oligonucleotide

SEQ ID NO: 536812 - DNA, 55 bp, Artificial; identical to SEQ ID NO: 303410
  Synthetic oligonucleotide

SEQ ID NO: 536813 - DNA, 58 bp, Artificial; identical to SEQ ID NO: 303411
  Synthetic oligonucleotide

SEQ ID NO: 536814 - DNA, 54 bp, Artificial; identical to SEQ ID NO: 303416
  Synthetic oligonucleotide

SEQ ID NO: 536815 - DNA, 53 bp, Artificial; identical to SEQ ID NO: 303417
  Synthetic oligonucleotide

SEQ ID NO: 536816 - DNA, 60 bp, Artificial; identical to SEQ ID NO: 303418
  Synthetic oligonucleotide

SEQ ID NO: 536817 - DNA, 59 bp, Artificial; identical to SEQ ID NO: 17500
  Synthetic oligonucleotide

SEQ ID NO: 536818 - DNA, 60 bp, Artificial; identical to SEQ ID NO: 303423
  Synthetic oligonucleotide

SEQ ID NO: 536819 - DNA, 60 bp, Artificial; identical to SEQ ID NO: 303424
  Synthetic oligonucleotide

SEQ ID NO: 536820 - DNA, 60 bp, Artificial; identical to SEQ ID NO: 303426
  Synthetic oligonucleotide

SEQ ID NO: 536821 - DNA, 60 bp, Artificial; identical to SEQ ID NO: 303428
  Synthetic oligonucleotide

SEQ ID NO: 536822 - DNA, 54 bp, Artificial; identical to SEQ ID NO: 303429
  Synthetic oligonucleotide

SEQ ID NO: 536823 - DNA, 60 bp, Artificial; identical to SEQ ID NO: 303432
  Synthetic oligonucleotide

SEQ ID NO: 536824 - DNA, 58 bp, Artificial; identical to SEQ ID NO: 303434
  Synthetic oligonucleotide

SEQ ID NO: 536825 - DNA, 50 bp, Artificial; identical to SEQ ID NO: 303437
  Synthetic oligonucleotide

SEQ ID NO: 536826 - DNA, 60 bp, Artificial; identical to SEQ ID NO: 303439
  Synthetic oligonucleotide

SEQ ID NO: 536827 - DNA, 55 bp, Artificial; identical to SEQ ID NO: 303442
  Synthetic oligonucleotide

SEQ ID NO: 536828 - DNA, 60 bp, Artificial; identical to SEQ ID NO: 303443
  Synthetic oligonucleotide

SEQ ID NO: 536829 - DNA, 50 bp, Artificial; identical to SEQ ID NO: 303446
  Synthetic oligonucleotide

SEQ ID NO: 536830 - DNA, 58 bp, Artificial; identical to SEQ ID NO: 303449
  Synthetic oligonucleotide

SEQ ID NO: 536831 - DNA, 56 bp, Artificial; identical to SEQ ID NO: 303454
  Synthetic oligonucleotide

SEQ ID NO: 536832 - DNA, 55 bp, Artificial; identical to SEQ ID NO: 303456
  Synthetic oligonucleotide

SEQ ID NO: 536833 - DNA, 54 bp, Artificial; identical to SEQ ID NO: 303457
  Synthetic oligonucleotide

SEQ ID NO: 536834 - DNA, 54 bp, Artificial; identical to SEQ ID NO: 303460
  Synthetic oligonucleotide

SEQ ID NO: 536835 - DNA, 55 bp, Artificial; identical to SEQ ID NO: 303461
  Synthetic oligonucleotide

SEQ ID NO: 536836 - DNA, 60 bp, Artificial; identical to SEQ ID NO: 303464
  Synthetic oligonucleotide

SEQ ID NO: 536837 - DNA, 59 bp, Artificial; identical to SEQ ID NO: 303465
  Synthetic oligonucleotide

SEQ ID NO: 536838 - DNA, 60 bp, Artificial; identical to SEQ ID NO: 303466
  Synthetic oligonucleotide

SEQ ID NO: 536839 - DNA, 51 bp, Artificial; identical to SEQ ID NO: 303467
  Synthetic oligonucleotide

SEQ ID NO: 536840 - DNA, 59 bp, Artificial; identical to SEQ ID NO: 303470
  Synthetic oligonucleotide

SEQ ID NO: 536841 - DNA, 55 bp, Artificial; identical to SEQ ID NO: 303471
  Synthetic oligonucleotide

SEQ ID NO: 536842 - DNA, 55 bp, Artificial; identical to SEQ ID NO: 303473
  Synthetic oligonucleotide

SEQ ID NO: 536843 - DNA, 57 bp, Artificial; identical to SEQ ID NO: 303474
  Synthetic oligonucleotide

SEQ ID NO: 536844 - DNA, 56 bp, Artificial; identical to SEQ ID NO: 303475
  Synthetic oligonucleotide

SEQ ID NO: 536845 - DNA, 60 bp, Artificial; identical to SEQ ID NO: 303481
  Synthetic oligonucleotide

SEQ ID NO: 536846 - DNA, 60 bp, Artificial; identical to SEQ ID NO: 303486
  Synthetic oligonucleotide

SEQ ID NO: 536847 - DNA, 59 bp, Artificial; identical to SEQ ID NO: 303491
  Synthetic oligonucleotide

SEQ ID NO: 536848 - DNA, 58 bp, Artificial; identical to SEQ ID NO: 303492
  Synthetic oligonucleotide

SEQ ID NO: 536849 - DNA, 60 bp, Artificial; identical to SEQ ID NO: 303498
  Synthetic oligonucleotide

SEQ ID NO: 536850 - DNA, 60 bp, Artificial; identical to SEQ ID NO: 303500
  Synthetic oligonucleotide

SEQ ID NO: 536851 - DNA, 60 bp, Artificial; identical to SEQ ID NO: 303501
  Synthetic oligonucleotide

SEQ ID NO: 536852 - DNA, 56 bp, Artificial; identical to SEQ ID NO: 303503
  Synthetic oligonucleotide

SEQ ID NO: 536853 - DNA, 50 bp, Artificial; identical to SEQ ID NO: 303506
  Synthetic oligonucleotide

SEQ ID NO: 536854 - DNA, 59 bp, Artificial; identical to SEQ ID NO: 303511
  Synthetic oligonucleotide

SEQ ID NO: 536855 - DNA, 56 bp, Artificial; identical to SEQ ID NO: 303512
  Synthetic oligonucleotide

SEQ ID NO: 536856 - DNA, 54 bp, Artificial; identical to SEQ ID NO: 303513
  Synthetic oligonucleotide

SEQ ID NO: 536857 - DNA, 51 bp, Artificial; identical to SEQ ID NO: 303514
  Synthetic oligonucleotide

SEQ ID NO: 536858 - DNA, 60 bp, Artificial; identical to SEQ ID NO: 303515
  Synthetic oligonucleotide

SEQ ID NO: 536859 - DNA, 52 bp, Artificial; identical to SEQ ID NO: 303516
  Synthetic oligonucleotide

SEQ ID NO: 536860 - DNA, 58 bp, Artificial; identical to SEQ ID NO: 303517
  Synthetic oligonucleotide

SEQ ID NO: 536861 - DNA, 58 bp, Artificial; identical to SEQ ID NO: 303522
  Synthetic oligonucleotide

SEQ ID NO: 536862 - DNA, 54 bp, Artificial; identical to SEQ ID NO: 303523
  Synthetic oligonucleotide

SEQ ID NO: 536863 - DNA, 50 bp, Artificial; identical to SEQ ID NO: 303524
  Synthetic oligonucleotide

SEQ ID NO: 536864 - DNA, 54 bp, Artificial; identical to SEQ ID NO: 303527
  Synthetic oligonucleotide

SEQ ID NO: 536865 - DNA, 56 bp, Artificial; identical to SEQ ID NO: 303530
  Synthetic oligonucleotide

SEQ ID NO: 536866 - DNA, 58 bp, Artificial; identical to SEQ ID NO: 303534
  Synthetic oligonucleotide

SEQ ID NO: 536867 - DNA, 59 bp, Artificial; identical to SEQ ID NO: 303535
  Synthetic oligonucleotide

SEQ ID NO: 536868 - DNA, 50 bp, Artificial; identical to SEQ ID NO: 303539
  Synthetic oligonucleotide

SEQ ID NO: 536869 - DNA, 58 bp, Artificial; identical to SEQ ID NO: 303542
  Synthetic oligonucleotide

SEQ ID NO: 536870 - DNA, 53 bp, Artificial; identical to SEQ ID NO: 303544
  Synthetic oligonucleotide

SEQ ID NO: 536871 - DNA, 56 bp, Artificial; identical to SEQ ID NO: 303546
  Synthetic oligonucleotide

SEQ ID NO: 536872 - DNA, 55 bp, Artificial; identical to SEQ ID NO: 303548
  Synthetic oligonucleotide

SEQ ID NO: 536873 - DNA, 55 bp, Artificial; identical to SEQ ID NO: 303550
  Synthetic oligonucleotide

SEQ ID NO: 536874 - DNA, 55 bp, Artificial; identical to SEQ ID NO: 303553
  Synthetic oligonucleotide

SEQ ID NO: 536875 - DNA, 56 bp, Artificial; identical to SEQ ID NO: 303554
  Synthetic oligonucleotide

SEQ ID NO: 536876 - DNA, 56 bp, Artificial; identical to SEQ ID NO: 303555
  Synthetic oligonucleotide

SEQ ID NO: 536877 - DNA, 60 bp, Artificial; identical to SEQ ID NO: 303556
  Synthetic oligonucleotide

SEQ ID NO: 536878 - DNA, 60 bp, Artificial; identical to SEQ ID NO: 303558
  Synthetic oligonucleotide

SEQ ID NO: 536879 - DNA, 60 bp, Artificial; identical to SEQ ID NO: 303562
  Synthetic oligonucleotide

SEQ ID NO: 536880 - DNA, 60 bp, Artificial; identical to SEQ ID NO: 303567
  Synthetic oligonucleotide

SEQ ID NO: 536881 - DNA, 60 bp, Artificial; identical to SEQ ID NO: 303568
  Synthetic oligonucleotide

SEQ ID NO: 536882 - DNA, 55 bp, Artificial; identical to SEQ ID NO: 303569
  Synthetic oligonucleotide

SEQ ID NO: 536883 - DNA, 56 bp, Artificial; identical to SEQ ID NO: 303570
  Synthetic oligonucleotide

SEQ ID NO: 536884 - DNA, 60 bp, Artificial; identical to SEQ ID NO: 11457
  Synthetic oligonucleotide

SEQ ID NO: 536885 - DNA, 55 bp, Artificial; identical to SEQ ID NO: 303573
  Synthetic oligonucleotide

SEQ ID NO: 536886 - DNA, 60 bp, Artificial; identical to SEQ ID NO: 303574
  Synthetic oligonucleotide

SEQ ID NO: 536887 - DNA, 60 bp, Artificial; identical to SEQ ID NO: 303579
  Synthetic oligonucleotide

SEQ ID NO: 536888 - DNA, 54 bp, Artificial; identical to SEQ ID NO: 303580
  Synthetic oligonucleotide

SEQ ID NO: 536889 - DNA, 55 bp, Artificial; identical to SEQ ID NO: 16904
  Synthetic oligonucleotide

SEQ ID NO: 536890 - DNA, 60 bp, Artificial; identical to SEQ ID NO: 303582
  Synthetic oligonucleotide

SEQ ID NO: 536891 - DNA, 58 bp, Artificial; identical to SEQ ID NO: 303584
  Synthetic oligonucleotide

SEQ ID NO: 536892 - DNA, 58 bp, Artificial; identical to SEQ ID NO: 303587
  Synthetic oligonucleotide

SEQ ID NO: 536893 - DNA, 56 bp, Artificial; identical to SEQ ID NO: 303590
  Synthetic oligonucleotide

SEQ ID NO: 536894 - DNA, 59 bp, Artificial; identical to SEQ ID NO: 303591
  Synthetic oligonucleotide

SEQ ID NO: 536895 - DNA, 55 bp, Artificial; identical to SEQ ID NO: 303592
  Synthetic oligonucleotide

SEQ ID NO: 536896 - DNA, 56 bp, Artificial; identical to SEQ ID NO: 7112
  Synthetic oligonucleotide

SEQ ID NO: 536897 - DNA, 54 bp, Artificial; identical to SEQ ID NO: 303601
  Synthetic oligonucleotide

SEQ ID NO: 536898 - DNA, 60 bp, Artificial; identical to SEQ ID NO: 303602
  Synthetic oligonucleotide

SEQ ID NO: 536899 - DNA, 60 bp, Artificial; identical to SEQ ID NO: 303603
  Synthetic oligonucleotide

SEQ ID NO: 536900 - DNA, 60 bp, Artificial; identical to SEQ ID NO: 303604
  Synthetic oligonucleotide

SEQ ID NO: 536901 - DNA, 56 bp, Artificial; identical to SEQ ID NO: 303606
  Synthetic oligonucleotide

SEQ ID NO: 536902 - DNA, 55 bp, Artificial; identical to SEQ ID NO: 303607
  Synthetic oligonucleotide

SEQ ID NO: 536903 - DNA, 52 bp, Artificial; identical to SEQ ID NO: 303608
  Synthetic oligonucleotide

SEQ ID NO: 536904 - DNA, 60 bp, Artificial; identical to SEQ ID NO: 303620
  Synthetic oligonucleotide

SEQ ID NO: 536905 - DNA, 57 bp, Artificial; identical to SEQ ID NO: 303621
  Synthetic oligonucleotide

SEQ ID NO: 536906 - DNA, 55 bp, Artificial; identical to SEQ ID NO: 303624
  Synthetic oligonucleotide

SEQ ID NO: 536907 - DNA, 58 bp, Artificial; identical to SEQ ID NO: 303626
  Synthetic oligonucleotide

SEQ ID NO: 536908 - DNA, 58 bp, Artificial; identical to SEQ ID NO: 303627
  Synthetic oligonucleotide

SEQ ID NO: 536909 - DNA, 60 bp, Artificial; identical to SEQ ID NO: 303628
  Synthetic oligonucleotide

SEQ ID NO: 536910 - DNA, 56 bp, Artificial; identical to SEQ ID NO: 303636
  Synthetic oligonucleotide

SEQ ID NO: 536911 - DNA, 52 bp, Artificial; identical to SEQ ID NO: 303638
  Synthetic oligonucleotide

SEQ ID NO: 536912 - DNA, 60 bp, Artificial; identical to SEQ ID NO: 303646
  Synthetic oligonucleotide

SEQ ID NO: 536913 - DNA, 54 bp, Artificial; identical to SEQ ID NO: 303647
  Synthetic oligonucleotide

SEQ ID NO: 536914 - DNA, 51 bp, Artificial; identical to SEQ ID NO: 303649
  Synthetic oligonucleotide

SEQ ID NO: 536915 - DNA, 60 bp, Artificial; identical to SEQ ID NO: 7168
  Synthetic oligonucleotide

SEQ ID NO: 536916 - DNA, 58 bp, Artificial; identical to SEQ ID NO: 303653
  Synthetic oligonucleotide

SEQ ID NO: 536917 - DNA, 60 bp, Artificial; identical to SEQ ID NO: 303657
  Synthetic oligonucleotide

SEQ ID NO: 536918 - DNA, 52 bp, Artificial; identical to SEQ ID NO: 303658
  Synthetic oligonucleotide

SEQ ID NO: 536919 - DNA, 51 bp, Artificial; identical to SEQ ID NO: 303660
  Synthetic oligonucleotide

SEQ ID NO: 536920 - DNA, 60 bp, Artificial; identical to SEQ ID NO: 303661
  Synthetic oligonucleotide

SEQ ID NO: 536921 - DNA, 60 bp, Artificial; identical to SEQ ID NO: 303662
  Synthetic oligonucleotide

SEQ ID NO: 536922 - DNA, 55 bp, Artificial; identical to SEQ ID NO: 303664
  Synthetic oligonucleotide

SEQ ID NO: 536923 - DNA, 60 bp, Artificial; identical to SEQ ID NO: 303668
  Synthetic oligonucleotide

SEQ ID NO: 536924 - DNA, 59 bp, Artificial; identical to SEQ ID NO: 303669
  Synthetic oligonucleotide

SEQ ID NO: 536925 - DNA, 57 bp, Artificial; identical to SEQ ID NO: 303673
  Synthetic oligonucleotide

SEQ ID NO: 536926 - DNA, 55 bp, Artificial; identical to SEQ ID NO: 303674
  Synthetic oligonucleotide

SEQ ID NO: 536927 - DNA, 55 bp, Artificial; identical to SEQ ID NO: 303675
  Synthetic oligonucleotide

SEQ ID NO: 536928 - DNA, 55 bp, Artificial; identical to SEQ ID NO: 303677
  Synthetic oligonucleotide

SEQ ID NO: 536929 - DNA, 60 bp, Artificial; identical to SEQ ID NO: 303679
  Synthetic oligonucleotide

SEQ ID NO: 536930 - DNA, 56 bp, Artificial; identical to SEQ ID NO: 303681
  Synthetic oligonucleotide

SEQ ID NO: 536931 - DNA, 58 bp, Artificial; identical to SEQ ID NO: 303682
  Synthetic oligonucleotide

SEQ ID NO: 536932 - DNA, 55 bp, Artificial; identical to SEQ ID NO: 303683
  Synthetic oligonucleotide

SEQ ID NO: 536933 - DNA, 56 bp, Artificial; identical to SEQ ID NO: 303684
  Synthetic oligonucleotide

SEQ ID NO: 536934 - DNA, 55 bp, Artificial; identical to SEQ ID NO: 303685
  Synthetic oligonucleotide

SEQ ID NO: 536935 - DNA, 60 bp, Artificial; identical to SEQ ID NO: 303686
  Synthetic oligonucleotide

SEQ ID NO: 536936 - DNA, 57 bp, Artificial; identical to SEQ ID NO: 303687
  Synthetic oligonucleotide

SEQ ID NO: 536937 - DNA, 50 bp, Artificial; identical to SEQ ID NO: 303689
  Synthetic oligonucleotide

SEQ ID NO: 536938 - DNA, 54 bp, Artificial; identical to SEQ ID NO: 303691
  Synthetic oligonucleotide

SEQ ID NO: 536939 - DNA, 56 bp, Artificial; identical to SEQ ID NO: 303692
  Synthetic oligonucleotide

SEQ ID NO: 536940 - DNA, 60 bp, Artificial; identical to SEQ ID NO: 303693
  Synthetic oligonucleotide

SEQ ID NO: 536941 - DNA, 55 bp, Artificial; identical to SEQ ID NO: 303694
  Synthetic oligonucleotide

SEQ ID NO: 536942 - DNA, 58 bp, Artificial; identical to SEQ ID NO: 303695
  Synthetic oligonucleotide

SEQ ID NO: 536943 - DNA, 60 bp, Artificial; identical to SEQ ID NO: 303696
  Synthetic oligonucleotide

SEQ ID NO: 536944 - DNA, 60 bp, Artificial; identical to SEQ ID NO: 303697
  Synthetic oligonucleotide

SEQ ID NO: 536945 - DNA, 59 bp, Artificial; identical to SEQ ID NO: 303699
  Synthetic oligonucleotide

SEQ ID NO: 536946 - DNA, 57 bp, Artificial; identical to SEQ ID NO: 303700
  Synthetic oligonucleotide

SEQ ID NO: 536947 - DNA, 59 bp, Artificial; identical to SEQ ID NO: 17601
  Synthetic oligonucleotide

SEQ ID NO: 536948 - DNA, 53 bp, Artificial; identical to SEQ ID NO: 303705
  Synthetic oligonucleotide

SEQ ID NO: 536949 - DNA, 60 bp, Artificial; identical to SEQ ID NO: 303711
  Synthetic oligonucleotide

SEQ ID NO: 536950 - DNA, 60 bp, Artificial; identical to SEQ ID NO: 303713
  Synthetic oligonucleotide

SEQ ID NO: 536951 - DNA, 54 bp, Artificial; identical to SEQ ID NO: 303717
  Synthetic oligonucleotide

SEQ ID NO: 536952 - DNA, 60 bp, Artificial; identical to SEQ ID NO: 303718
  Synthetic oligonucleotide

SEQ ID NO: 536953 - DNA, 60 bp, Artificial; identical to SEQ ID NO: 303719
  Synthetic oligonucleotide

SEQ ID NO: 536954 - DNA, 59 bp, Artificial; identical to SEQ ID NO: 303720
  Synthetic oligonucleotide

SEQ ID NO: 536955 - DNA, 59 bp, Artificial; identical to SEQ ID NO: 303724
  Synthetic oligonucleotide

SEQ ID NO: 536956 - DNA, 55 bp, Artificial; identical to SEQ ID NO: 303725
  Synthetic oligonucleotide

SEQ ID NO: 536957 - DNA, 55 bp, Artificial; identical to SEQ ID NO: 303727
  Synthetic oligonucleotide

SEQ ID NO: 536958 - DNA, 55 bp, Artificial; identical to SEQ ID NO: 303731
  Synthetic oligonucleotide

SEQ ID NO: 536959 - DNA, 56 bp, Artificial; identical to SEQ ID NO: 303734
  Synthetic oligonucleotide

SEQ ID NO: 536960 - DNA, 60 bp, Artificial; identical to SEQ ID NO: 303738
  Synthetic oligonucleotide

SEQ ID NO: 536961 - DNA, 55 bp, Artificial; identical to SEQ ID NO: 303739
  Synthetic oligonucleotide

SEQ ID NO: 536962 - DNA, 60 bp, Artificial; identical to SEQ ID NO: 303744
  Synthetic oligonucleotide

SEQ ID NO: 536963 - DNA, 51 bp, Artificial; identical to SEQ ID NO: 8012
  Synthetic oligonucleotide

SEQ ID NO: 536964 - DNA, 56 bp, Artificial; identical to SEQ ID NO: 303745
  Synthetic oligonucleotide

SEQ ID NO: 536965 - DNA, 55 bp, Artificial; identical to SEQ ID NO: 303749
  Synthetic oligonucleotide

SEQ ID NO: 536966 - DNA, 54 bp, Artificial; identical to SEQ ID NO: 303751
  Synthetic oligonucleotide

SEQ ID NO: 536967 - DNA, 55 bp, Artificial; identical to SEQ ID NO: 303754
  Synthetic oligonucleotide

SEQ ID NO: 536968 - DNA, 55 bp, Artificial; identical to SEQ ID NO: 303755
  Synthetic oligonucleotide

SEQ ID NO: 536969 - DNA, 55 bp, Artificial; identical to SEQ ID NO: 303759
  Synthetic oligonucleotide

SEQ ID NO: 536970 - DNA, 58 bp, Artificial; identical to SEQ ID NO: 303761
  Synthetic oligonucleotide

SEQ ID NO: 536971 - DNA, 55 bp, Artificial; identical to SEQ ID NO: 303764
  Synthetic oligonucleotide

SEQ ID NO: 536972 - DNA, 56 bp, Artificial; identical to SEQ ID NO: 303765
  Synthetic oligonucleotide

SEQ ID NO: 536973 - DNA, 51 bp, Artificial; identical to SEQ ID NO: 303766
  Synthetic oligonucleotide

SEQ ID NO: 536974 - DNA, 60 bp, Artificial; identical to SEQ ID NO: 303771
  Synthetic oligonucleotide

SEQ ID NO: 536975 - DNA, 60 bp, Artificial; identical to SEQ ID NO: 303772
  Synthetic oligonucleotide

SEQ ID NO: 536976 - DNA, 60 bp, Artificial; identical to SEQ ID NO: 303774
  Synthetic oligonucleotide

SEQ ID NO: 536977 - DNA, 55 bp, Artificial; identical to SEQ ID NO: 303776
  Synthetic oligonucleotide

SEQ ID NO: 536978 - DNA, 51 bp, Artificial; identical to SEQ ID NO: 303779
  Synthetic oligonucleotide

SEQ ID NO: 536979 - DNA, 55 bp, Artificial; identical to SEQ ID NO: 303780
  Synthetic oligonucleotide

SEQ ID NO: 536980 - DNA, 55 bp, Artificial; identical to SEQ ID NO: 303782
  Synthetic oligonucleotide

SEQ ID NO: 536981 - DNA, 50 bp, Artificial; identical to SEQ ID NO: 6014
  Synthetic oligonucleotide

SEQ ID NO: 536982 - DNA, 52 bp, Artificial; identical to SEQ ID NO: 303786
  Synthetic oligonucleotide

SEQ ID NO: 536983 - DNA, 60 bp, Artificial; identical to SEQ ID NO: 303789
  Synthetic oligonucleotide

SEQ ID NO: 536984 - DNA, 58 bp, Artificial; identical to SEQ ID NO: 20241
  Synthetic oligonucleotide

SEQ ID NO: 536985 - DNA, 58 bp, Artificial; identical to SEQ ID NO: 303793
  Synthetic oligonucleotide

SEQ ID NO: 536986 - DNA, 59 bp, Artificial; identical to SEQ ID NO: 18344
  Synthetic oligonucleotide

SEQ ID NO: 536987 - DNA, 60 bp, Artificial; identical to SEQ ID NO: 303799
  Synthetic oligonucleotide

SEQ ID NO: 536988 - DNA, 56 bp, Artificial; identical to SEQ ID NO: 303805
  Synthetic oligonucleotide

SEQ ID NO: 536989 - DNA, 56 bp, Artificial; identical to SEQ ID NO: 303806
  Synthetic oligonucleotide

SEQ ID NO: 536990 - DNA, 60 bp, Artificial; identical to SEQ ID NO: 6047
  Synthetic oligonucleotide

SEQ ID NO: 536991 - DNA, 60 bp, Artificial; identical to SEQ ID NO: 303810
  Synthetic oligonucleotide

SEQ ID NO: 536992 - DNA, 57 bp, Artificial; identical to SEQ ID NO: 303814
  Synthetic oligonucleotide

SEQ ID NO: 536993 - DNA, 60 bp, Artificial; identical to SEQ ID NO: 303815
  Synthetic oligonucleotide

SEQ ID NO: 536994 - DNA, 53 bp, Artificial; identical to SEQ ID NO: 303816
  Synthetic oligonucleotide

SEQ ID NO: 536995 - DNA, 55 bp, Artificial; identical to SEQ ID NO: 303818
  Synthetic oligonucleotide

SEQ ID NO: 536996 - DNA, 52 bp, Artificial; identical to SEQ ID NO: 303819
  Synthetic oligonucleotide

SEQ ID NO: 536997 - DNA, 53 bp, Artificial; identical to SEQ ID NO: 303820
  Synthetic oligonucleotide

SEQ ID NO: 536998 - DNA, 56 bp, Artificial; identical to SEQ ID NO: 303821
  Synthetic oligonucleotide

SEQ ID NO: 536999 - DNA, 55 bp, Artificial; identical to SEQ ID NO: 303823
  Synthetic oligonucleotide

SEQ ID NO: 537000 - DNA, 60 bp, Artificial; identical to SEQ ID NO: 303831
  Synthetic oligonucleotide

SEQ ID NO: 537001 - DNA, 57 bp, Artificial; identical to SEQ ID NO: 303834
  Synthetic oligonucleotide

SEQ ID NO: 537002 - DNA, 55 bp, Artificial; identical to SEQ ID NO: 303835
  Synthetic oligonucleotide

SEQ ID NO: 537003 - DNA, 56 bp, Artificial; identical to SEQ ID NO: 303838
  Synthetic oligonucleotide

SEQ ID NO: 537004 - DNA, 60 bp, Artificial; identical to SEQ ID NO: 303840
  Synthetic oligonucleotide

SEQ ID NO: 537005 - DNA, 52 bp, Artificial; identical to SEQ ID NO: 303842
  Synthetic oligonucleotide

SEQ ID NO: 537006 - DNA, 52 bp, Artificial; identical to SEQ ID NO: 303844
  Synthetic oligonucleotide

SEQ ID NO: 537007 - DNA, 52 bp, Artificial; identical to SEQ ID NO: 303845
  Synthetic oligonucleotide

SEQ ID NO: 537008 - DNA, 58 bp, Artificial; identical to SEQ ID NO: 303849
  Synthetic oligonucleotide

SEQ ID NO: 537009 - DNA, 54 bp, Artificial; identical to SEQ ID NO: 303850
  Synthetic oligonucleotide

SEQ ID NO: 537010 - DNA, 59 bp, Artificial; identical to SEQ ID NO: 303851
  Synthetic oligonucleotide

SEQ ID NO: 537011 - DNA, 55 bp, Artificial; identical to SEQ ID NO: 303858
  Synthetic oligonucleotide

SEQ ID NO: 537012 - DNA, 55 bp, Artificial; identical to SEQ ID NO: 303859
  Synthetic oligonucleotide

SEQ ID NO: 537013 - DNA, 58 bp, Artificial; identical to SEQ ID NO: 303861
  Synthetic oligonucleotide

SEQ ID NO: 537014 - DNA, 57 bp, Artificial; identical to SEQ ID NO: 303862
  Synthetic oligonucleotide

SEQ ID NO: 537015 - DNA, 57 bp, Artificial; identical to SEQ ID NO: 303863
  Synthetic oligonucleotide

SEQ ID NO: 537016 - DNA, 57 bp, Artificial; identical to SEQ ID NO: 303864
  Synthetic oligonucleotide

SEQ ID NO: 537017 - DNA, 56 bp, Artificial; identical to SEQ ID NO: 303865
  Synthetic oligonucleotide

SEQ ID NO: 537018 - DNA, 60 bp, Artificial; identical to SEQ ID NO: 303868
  Synthetic oligonucleotide

SEQ ID NO: 537019 - DNA, 60 bp, Artificial; identical to SEQ ID NO: 303871
  Synthetic oligonucleotide

SEQ ID NO: 537020 - DNA, 56 bp, Artificial; identical to SEQ ID NO: 303874
  Synthetic oligonucleotide

SEQ ID NO: 537021 - DNA, 60 bp, Artificial; identical to SEQ ID NO: 303875
  Synthetic oligonucleotide

SEQ ID NO: 537022 - DNA, 54 bp, Artificial; identical to SEQ ID NO: 303876
  Synthetic oligonucleotide

SEQ ID NO: 537023 - DNA, 59 bp, Artificial; identical to SEQ ID NO: 15699
  Synthetic oligonucleotide

SEQ ID NO: 537024 - DNA, 52 bp, Artificial; identical to SEQ ID NO: 303879
  Synthetic oligonucleotide

SEQ ID NO: 537025 - DNA, 52 bp, Artificial; identical to SEQ ID NO: 303883
  Synthetic oligonucleotide

SEQ ID NO: 537026 - DNA, 55 bp, Artificial; identical to SEQ ID NO: 303884
  Synthetic oligonucleotide

SEQ ID NO: 537027 - DNA, 56 bp, Artificial; identical to SEQ ID NO: 17349
  Synthetic oligonucleotide

SEQ ID NO: 537028 - DNA, 55 bp, Artificial; identical to SEQ ID NO: 303886
  Synthetic oligonucleotide

SEQ ID NO: 537029 - DNA, 54 bp, Artificial; identical to SEQ ID NO: 303888
  Synthetic oligonucleotide

SEQ ID NO: 537030 - DNA, 55 bp, Artificial; identical to SEQ ID NO: 303894
  Synthetic oligonucleotide

SEQ ID NO: 537031 - DNA, 60 bp, Artificial; identical to SEQ ID NO: 303896
  Synthetic oligonucleotide

SEQ ID NO: 537032 - DNA, 56 bp, Artificial; identical to SEQ ID NO: 303902
  Synthetic oligonucleotide

SEQ ID NO: 537033 - DNA, 55 bp, Artificial; identical to SEQ ID NO: 303906
  Synthetic oligonucleotide

SEQ ID NO: 537034 - DNA, 55 bp, Artificial; identical to SEQ ID NO: 13537
  Synthetic oligonucleotide

SEQ ID NO: 537035 - DNA, 55 bp, Artificial; identical to SEQ ID NO: 303920
  Synthetic oligonucleotide

SEQ ID NO: 537036 - DNA, 56 bp, Artificial; identical to SEQ ID NO: 303922
  Synthetic oligonucleotide

SEQ ID NO: 537037 - DNA, 58 bp, Artificial; identical to SEQ ID NO: 303923
  Synthetic oligonucleotide

SEQ ID NO: 537038 - DNA, 55 bp, Artificial; identical to SEQ ID NO: 303926
  Synthetic oligonucleotide

SEQ ID NO: 537039 - DNA, 51 bp, Artificial; identical to SEQ ID NO: 303929
  Synthetic oligonucleotide

SEQ ID NO: 537040 - DNA, 56 bp, Artificial; identical to SEQ ID NO: 303930
  Synthetic oligonucleotide

SEQ ID NO: 537041 - DNA, 60 bp, Artificial; identical to SEQ ID NO: 303933
  Synthetic oligonucleotide

SEQ ID NO: 537042 - DNA, 53 bp, Artificial; identical to SEQ ID NO: 17544
  Synthetic oligonucleotide

SEQ ID NO: 537043 - DNA, 60 bp, Artificial; identical to SEQ ID NO: 303934
  Synthetic oligonucleotide

SEQ ID NO: 537044 - DNA, 60 bp, Artificial; identical to SEQ ID NO: 303935
  Synthetic oligonucleotide

SEQ ID NO: 537045 - DNA, 60 bp, Artificial; identical to SEQ ID NO: 303939
  Synthetic oligonucleotide

SEQ ID NO: 537046 - DNA, 55 bp, Artificial; identical to SEQ ID NO: 303940
  Synthetic oligonucleotide

SEQ ID NO: 537047 - DNA, 55 bp, Artificial; identical to SEQ ID NO: 303941
  Synthetic oligonucleotide

SEQ ID NO: 537048 - DNA, 56 bp, Artificial; identical to SEQ ID NO: 303944
  Synthetic oligonucleotide

SEQ ID NO: 537049 - DNA, 58 bp, Artificial; identical to SEQ ID NO: 303945
  Synthetic oligonucleotide

SEQ ID NO: 537050 - DNA, 60 bp, Artificial; identical to SEQ ID NO: 303946
  Synthetic oligonucleotide

SEQ ID NO: 537051 - DNA, 60 bp, Artificial; identical to SEQ ID NO: 303948
  Synthetic oligonucleotide

SEQ ID NO: 537052 - DNA, 60 bp, Artificial; identical to SEQ ID NO: 12841
  Synthetic oligonucleotide

SEQ ID NO: 537053 - DNA, 60 bp, Artificial; identical to SEQ ID NO: 303954
  Synthetic oligonucleotide

SEQ ID NO: 537054 - DNA, 51 bp, Artificial; identical to SEQ ID NO: 303963
  Synthetic oligonucleotide

SEQ ID NO: 537055 - DNA, 55 bp, Artificial; identical to SEQ ID NO: 303964
  Synthetic oligonucleotide

SEQ ID NO: 537056 - DNA, 54 bp, Artificial; identical to SEQ ID NO: 303968
  Synthetic oligonucleotide

SEQ ID NO: 537057 - DNA, 53 bp, Artificial; identical to SEQ ID NO: 303971
  Synthetic oligonucleotide

SEQ ID NO: 537058 - DNA, 59 bp, Artificial; identical to SEQ ID NO: 303972
  Synthetic oligonucleotide

SEQ ID NO: 537059 - DNA, 54 bp, Artificial; identical to SEQ ID NO: 303976
  Synthetic oligonucleotide

SEQ ID NO: 537060 - DNA, 60 bp, Artificial; identical to SEQ ID NO: 303977
  Synthetic oligonucleotide

SEQ ID NO: 537061 - DNA, 54 bp, Artificial; identical to SEQ ID NO: 303980
  Synthetic oligonucleotide

SEQ ID NO: 537062 - DNA, 51 bp, Artificial; identical to SEQ ID NO: 303983
  Synthetic oligonucleotide

SEQ ID NO: 537063 - DNA, 60 bp, Artificial; identical to SEQ ID NO: 303985
  Synthetic oligonucleotide

SEQ ID NO: 537064 - DNA, 55 bp, Artificial; identical to SEQ ID NO: 303988
  Synthetic oligonucleotide

SEQ ID NO: 537065 - DNA, 60 bp, Artificial; identical to SEQ ID NO: 303990
  Synthetic oligonucleotide

SEQ ID NO: 537066 - DNA, 60 bp, Artificial; identical to SEQ ID NO: 303991
  Synthetic oligonucleotide

SEQ ID NO: 537067 - DNA, 56 bp, Artificial; identical to SEQ ID NO: 303992
  Synthetic oligonucleotide

SEQ ID NO: 537068 - DNA, 59 bp, Artificial; identical to SEQ ID NO: 303993
  Synthetic oligonucleotide

SEQ ID NO: 537069 - DNA, 57 bp, Artificial; identical to SEQ ID NO: 303994
  Synthetic oligonucleotide

SEQ ID NO: 537070 - DNA, 58 bp, Artificial; identical to SEQ ID NO: 303997
  Synthetic oligonucleotide

SEQ ID NO: 537071 - DNA, 55 bp, Artificial; identical to SEQ ID NO: 303998
  Synthetic oligonucleotide

SEQ ID NO: 537072 - DNA, 60 bp, Artificial; identical to SEQ ID NO: 304004
  Synthetic oligonucleotide

SEQ ID NO: 537073 - DNA, 60 bp, Artificial; identical to SEQ ID NO: 304006
  Synthetic oligonucleotide

SEQ ID NO: 537074 - DNA, 59 bp, Artificial; identical to SEQ ID NO: 304011
  Synthetic oligonucleotide

SEQ ID NO: 537075 - DNA, 55 bp, Artificial; identical to SEQ ID NO: 304014
  Synthetic oligonucleotide

SEQ ID NO: 537076 - DNA, 60 bp, Artificial; identical to SEQ ID NO: 10207
  Synthetic oligonucleotide

SEQ ID NO: 537077 - DNA, 60 bp, Artificial; identical to SEQ ID NO: 304019
  Synthetic oligonucleotide

SEQ ID NO: 537078 - DNA, 52 bp, Artificial; identical to SEQ ID NO: 304020
  Synthetic oligonucleotide

SEQ ID NO: 537079 - DNA, 55 bp, Artificial; identical to SEQ ID NO: 304022
  Synthetic oligonucleotide

SEQ ID NO: 537080 - DNA, 55 bp, Artificial; identical to SEQ ID NO: 304023
  Synthetic oligonucleotide

SEQ ID NO: 537081 - DNA, 52 bp, Artificial; identical to SEQ ID NO: 304024
  Synthetic oligonucleotide

SEQ ID NO: 537082 - DNA, 60 bp, Artificial; identical to SEQ ID NO: 304025
  Synthetic oligonucleotide

SEQ ID NO: 537083 - DNA, 54 bp, Artificial; identical to SEQ ID NO: 304026
  Synthetic oligonucleotide

SEQ ID NO: 537084 - DNA, 60 bp, Artificial; identical to SEQ ID NO: 304029
  Synthetic oligonucleotide

SEQ ID NO: 537085 - DNA, 60 bp, Artificial; identical to SEQ ID NO: 304030
  Synthetic oligonucleotide

SEQ ID NO: 537086 - DNA, 60 bp, Artificial; identical to SEQ ID NO: 304031
  Synthetic oligonucleotide

SEQ ID NO: 537087 - DNA, 57 bp, Artificial; identical to SEQ ID NO: 304032
  Synthetic oligonucleotide

SEQ ID NO: 537088 - DNA, 60 bp, Artificial; identical to SEQ ID NO: 304037
  Synthetic oligonucleotide

SEQ ID NO: 537089 - DNA, 55 bp, Artificial; identical to SEQ ID NO: 304040
  Synthetic oligonucleotide

SEQ ID NO: 537090 - DNA, 53 bp, Artificial; identical to SEQ ID NO: 304042
  Synthetic oligonucleotide

SEQ ID NO: 537091 - DNA, 55 bp, Artificial; identical to SEQ ID NO: 304044
  Synthetic oligonucleotide

SEQ ID NO: 537092 - DNA, 57 bp, Artificial; identical to SEQ ID NO: 304045
  Synthetic oligonucleotide

SEQ ID NO: 537093 - DNA, 58 bp, Artificial; identical to SEQ ID NO: 304046
  Synthetic oligonucleotide

SEQ ID NO: 537094 - DNA, 57 bp, Artificial; identical to SEQ ID NO: 304047
  Synthetic oligonucleotide

SEQ ID NO: 537095 - DNA, 52 bp, Artificial; identical to SEQ ID NO: 304048
  Synthetic oligonucleotide

SEQ ID NO: 537096 - DNA, 55 bp, Artificial; identical to SEQ ID NO: 304049
  Synthetic oligonucleotide

SEQ ID NO: 537097 - DNA, 60 bp, Artificial; identical to SEQ ID NO: 304050
  Synthetic oligonucleotide

SEQ ID NO: 537098 - DNA, 60 bp, Artificial; identical to SEQ ID NO: 304053
  Synthetic oligonucleotide

SEQ ID NO: 537099 - DNA, 60 bp, Artificial; identical to SEQ ID NO: 304058
  Synthetic oligonucleotide

SEQ ID NO: 537100 - DNA, 55 bp, Artificial; identical to SEQ ID NO: 304061
  Synthetic oligonucleotide

SEQ ID NO: 537101 - DNA, 56 bp, Artificial; identical to SEQ ID NO: 304062
  Synthetic oligonucleotide

SEQ ID NO: 537102 - DNA, 57 bp, Artificial; identical to SEQ ID NO: 304063
  Synthetic oligonucleotide

SEQ ID NO: 537103 - DNA, 57 bp, Artificial; identical to SEQ ID NO: 304064
  Synthetic oligonucleotide

SEQ ID NO: 537104 - DNA, 56 bp, Artificial; identical to SEQ ID NO: 304065
  Synthetic oligonucleotide

SEQ ID NO: 537105 - DNA, 57 bp, Artificial; identical to SEQ ID NO: 304066
  Synthetic oligonucleotide

SEQ ID NO: 537106 - DNA, 55 bp, Artificial; identical to SEQ ID NO: 304067
  Synthetic oligonucleotide

SEQ ID NO: 537107 - DNA, 60 bp, Artificial; identical to SEQ ID NO: 304073
  Synthetic oligonucleotide

SEQ ID NO: 537108 - DNA, 54 bp, Artificial; identical to SEQ ID NO: 304080
  Synthetic oligonucleotide

SEQ ID NO: 537109 - DNA, 57 bp, Artificial; identical to SEQ ID NO: 304081
  Synthetic oligonucleotide

SEQ ID NO: 537110 - DNA, 53 bp, Artificial; identical to SEQ ID NO: 304086
  Synthetic oligonucleotide

SEQ ID NO: 537111 - DNA, 59 bp, Artificial; identical to SEQ ID NO: 304090
  Synthetic oligonucleotide

SEQ ID NO: 537112 - DNA, 55 bp, Artificial; identical to SEQ ID NO: 304091
  Synthetic oligonucleotide

SEQ ID NO: 537113 - DNA, 59 bp, Artificial; identical to SEQ ID NO: 304093
  Synthetic oligonucleotide

SEQ ID NO: 537114 - DNA, 55 bp, Artificial; identical to SEQ ID NO: 304094
  Synthetic oligonucleotide

SEQ ID NO: 537115 - DNA, 60 bp, Artificial; identical to SEQ ID NO: 304099
  Synthetic oligonucleotide

SEQ ID NO: 537116 - DNA, 60 bp, Artificial; identical to SEQ ID NO: 304100
  Synthetic oligonucleotide

SEQ ID NO: 537117 - DNA, 55 bp, Artificial; identical to SEQ ID NO: 304101
  Synthetic oligonucleotide

SEQ ID NO: 537118 - DNA, 54 bp, Artificial; identical to SEQ ID NO: 304105
  Synthetic oligonucleotide

SEQ ID NO: 537119 - DNA, 55 bp, Artificial; identical to SEQ ID NO: 304107
  Synthetic oligonucleotide

SEQ ID NO: 537120 - DNA, 60 bp, Artificial; identical to SEQ ID NO: 304112
  Synthetic oligonucleotide

SEQ ID NO: 537121 - DNA, 57 bp, Artificial; identical to SEQ ID NO: 304114
  Synthetic oligonucleotide

SEQ ID NO: 537122 - DNA, 55 bp, Artificial; identical to SEQ ID NO: 304115
  Synthetic oligonucleotide

SEQ ID NO: 537123 - DNA, 55 bp, Artificial; identical to SEQ ID NO: 304118
  Synthetic oligonucleotide

SEQ ID NO: 537124 - DNA, 60 bp, Artificial; identical to SEQ ID NO: 304120
  Synthetic oligonucleotide

SEQ ID NO: 537125 - DNA, 60 bp, Artificial; identical to SEQ ID NO: 9353
  Synthetic oligonucleotide

SEQ ID NO: 537126 - DNA, 57 bp, Artificial; identical to SEQ ID NO: 304125
  Synthetic oligonucleotide

SEQ ID NO: 537127 - DNA, 60 bp, Artificial; identical to SEQ ID NO: 304127
  Synthetic oligonucleotide

SEQ ID NO: 537128 - DNA, 58 bp, Artificial; identical to SEQ ID NO: 304128
  Synthetic oligonucleotide

SEQ ID NO: 537129 - DNA, 53 bp, Artificial; identical to SEQ ID NO: 304129
  Synthetic oligonucleotide

SEQ ID NO: 537130 - DNA, 60 bp, Artificial; identical to SEQ ID NO: 304130
  Synthetic oligonucleotide

SEQ ID NO: 537131 - DNA, 60 bp, Artificial; identical to SEQ ID NO: 304132
  Synthetic oligonucleotide

SEQ ID NO: 537132 - DNA, 60 bp, Artificial; identical to SEQ ID NO: 304134
  Synthetic oligonucleotide

SEQ ID NO: 537133 - DNA, 60 bp, Artificial; identical to SEQ ID NO: 304135
  Synthetic oligonucleotide

SEQ ID NO: 537134 - DNA, 59 bp, Artificial; identical to SEQ ID NO: 304137
  Synthetic oligonucleotide

SEQ ID NO: 537135 - DNA, 59 bp, Artificial; identical to SEQ ID NO: 304142
  Synthetic oligonucleotide

SEQ ID NO: 537136 - DNA, 55 bp, Artificial; identical to SEQ ID NO: 304149
  Synthetic oligonucleotide

SEQ ID NO: 537137 - DNA, 54 bp, Artificial; identical to SEQ ID NO: 304151
  Synthetic oligonucleotide

SEQ ID NO: 537138 - DNA, 52 bp, Artificial; identical to SEQ ID NO: 304152
  Synthetic oligonucleotide

SEQ ID NO: 537139 - DNA, 55 bp, Artificial; identical to SEQ ID NO: 304153
  Synthetic oligonucleotide

SEQ ID NO: 537140 - DNA, 60 bp, Artificial; identical to SEQ ID NO: 304154
  Synthetic oligonucleotide

SEQ ID NO: 537141 - DNA, 60 bp, Artificial; identical to SEQ ID NO: 304155
  Synthetic oligonucleotide

SEQ ID NO: 537142 - DNA, 56 bp, Artificial; identical to SEQ ID NO: 304157
  Synthetic oligonucleotide

SEQ ID NO: 537143 - DNA, 55 bp, Artificial; identical to SEQ ID NO: 304158
  Synthetic oligonucleotide

SEQ ID NO: 537144 - DNA, 60 bp, Artificial; identical to SEQ ID NO: 304159
  Synthetic oligonucleotide

SEQ ID NO: 537145 - DNA, 51 bp, Artificial; identical to SEQ ID NO: 304160
  Synthetic oligonucleotide

SEQ ID NO: 537146 - DNA, 55 bp, Artificial; identical to SEQ ID NO: 304163
  Synthetic oligonucleotide

SEQ ID NO: 537147 - DNA, 60 bp, Artificial; identical to SEQ ID NO: 304164
  Synthetic oligonucleotide

SEQ ID NO: 537148 - DNA, 60 bp, Artificial; identical to SEQ ID NO: 304171
  Synthetic oligonucleotide

SEQ ID NO: 537149 - DNA, 53 bp, Artificial; identical to SEQ ID NO: 304172
  Synthetic oligonucleotide

SEQ ID NO: 537150 - DNA, 57 bp, Artificial; identical to SEQ ID NO: 304174
  Synthetic oligonucleotide

SEQ ID NO: 537151 - DNA, 55 bp, Artificial; identical to SEQ ID NO: 304175
  Synthetic oligonucleotide

SEQ ID NO: 537152 - DNA, 55 bp, Artificial; identical to SEQ ID NO: 304176
  Synthetic oligonucleotide

SEQ ID NO: 537153 - DNA, 60 bp, Artificial; identical to SEQ ID NO: 304179
  Synthetic oligonucleotide

SEQ ID NO: 537154 - DNA, 53 bp, Artificial; identical to SEQ ID NO: 304185
  Synthetic oligonucleotide

SEQ ID NO: 537155 - DNA, 55 bp, Artificial; identical to SEQ ID NO: 304188
  Synthetic oligonucleotide

SEQ ID NO: 537156 - DNA, 50 bp, Artificial; identical to SEQ ID NO: 304192
  Synthetic oligonucleotide

SEQ ID NO: 537157 - DNA, 60 bp, Artificial; identical to SEQ ID NO: 304194
  Synthetic oligonucleotide

SEQ ID NO: 537158 - DNA, 60 bp, Artificial; identical to SEQ ID NO: 304195
  Synthetic oligonucleotide

SEQ ID NO: 537159 - DNA, 57 bp, Artificial; identical to SEQ ID NO: 304196
  Synthetic oligonucleotide

SEQ ID NO: 537160 - DNA, 55 bp, Artificial; identical to SEQ ID NO: 304197
  Synthetic oligonucleotide

SEQ ID NO: 537161 - DNA, 60 bp, Artificial; identical to SEQ ID NO: 304203
  Synthetic oligonucleotide

SEQ ID NO: 537162 - DNA, 54 bp, Artificial; identical to SEQ ID NO: 304207
  Synthetic oligonucleotide

SEQ ID NO: 537163 - DNA, 60 bp, Artificial; identical to SEQ ID NO: 304208
  Synthetic oligonucleotide

SEQ ID NO: 537164 - DNA, 60 bp, Artificial; identical to SEQ ID NO: 304209
  Synthetic oligonucleotide

SEQ ID NO: 537165 - DNA, 55 bp, Artificial; identical to SEQ ID NO: 304210
  Synthetic oligonucleotide

SEQ ID NO: 537166 - DNA, 58 bp, Artificial; identical to SEQ ID NO: 304211
  Synthetic oligonucleotide

SEQ ID NO: 537167 - DNA, 60 bp, Artificial; identical to SEQ ID NO: 304213
  Synthetic oligonucleotide

SEQ ID NO: 537168 - DNA, 55 bp, Artificial; identical to SEQ ID NO: 304215
  Synthetic oligonucleotide

SEQ ID NO: 537169 - DNA, 58 bp, Artificial; identical to SEQ ID NO: 304216
  Synthetic oligonucleotide

SEQ ID NO: 537170 - DNA, 55 bp, Artificial; identical to SEQ ID NO: 304217
  Synthetic oligonucleotide

SEQ ID NO: 537171 - DNA, 56 bp, Artificial; identical to SEQ ID NO: 304218
  Synthetic oligonucleotide

SEQ ID NO: 537172 - DNA, 58 bp, Artificial; identical to SEQ ID NO: 304219
  Synthetic oligonucleotide

SEQ ID NO: 537173 - DNA, 54 bp, Artificial; identical to SEQ ID NO: 304220
  Synthetic oligonucleotide

SEQ ID NO: 537174 - DNA, 52 bp, Artificial; identical to SEQ ID NO: 304221
  Synthetic oligonucleotide

SEQ ID NO: 537175 - DNA, 60 bp, Artificial; identical to SEQ ID NO: 304222
  Synthetic oligonucleotide

SEQ ID NO: 537176 - DNA, 60 bp, Artificial; identical to SEQ ID NO: 304226
  Synthetic oligonucleotide

SEQ ID NO: 537177 - DNA, 56 bp, Artificial; identical to SEQ ID NO: 304227
  Synthetic oligonucleotide

SEQ ID NO: 537178 - DNA, 60 bp, Artificial; identical to SEQ ID NO: 304230
  Synthetic oligonucleotide

SEQ ID NO: 537179 - DNA, 54 bp, Artificial; identical to SEQ ID NO: 304231
  Synthetic oligonucleotide

SEQ ID NO: 537180 - DNA, 53 bp, Artificial; identical to SEQ ID NO: 304234
  Synthetic oligonucleotide

SEQ ID NO: 537181 - DNA, 55 bp, Artificial; identical to SEQ ID NO: 304235
  Synthetic oligonucleotide

SEQ ID NO: 537182 - DNA, 57 bp, Artificial; identical to SEQ ID NO: 304236
  Synthetic oligonucleotide

SEQ ID NO: 537183 - DNA, 60 bp, Artificial; identical to SEQ ID NO: 304238
  Synthetic oligonucleotide

SEQ ID NO: 537184 - DNA, 53 bp, Artificial; identical to SEQ ID NO: 304240
  Synthetic oligonucleotide

SEQ ID NO: 537185 - DNA, 54 bp, Artificial; identical to SEQ ID NO: 304241
  Synthetic oligonucleotide

SEQ ID NO: 537186 - DNA, 60 bp, Artificial; identical to SEQ ID NO: 304242
  Synthetic oligonucleotide

SEQ ID NO: 537187 - DNA, 57 bp, Artificial; identical to SEQ ID NO: 304245
  Synthetic oligonucleotide

SEQ ID NO: 537188 - DNA, 60 bp, Artificial; identical to SEQ ID NO: 304246
  Synthetic oligonucleotide

SEQ ID NO: 537189 - DNA, 58 bp, Artificial; identical to SEQ ID NO: 304247
  Synthetic oligonucleotide

SEQ ID NO: 537190 - DNA, 51 bp, Artificial; identical to SEQ ID NO: 304249
  Synthetic oligonucleotide

SEQ ID NO: 537191 - DNA, 51 bp, Artificial; identical to SEQ ID NO: 304252
  Synthetic oligonucleotide

SEQ ID NO: 537192 - DNA, 56 bp, Artificial; identical to SEQ ID NO: 304253
  Synthetic oligonucleotide

SEQ ID NO: 537193 - DNA, 60 bp, Artificial; identical to SEQ ID NO: 304254
  Synthetic oligonucleotide

SEQ ID NO: 537194 - DNA, 55 bp, Artificial; identical to SEQ ID NO: 12911
  Synthetic oligonucleotide

SEQ ID NO: 537195 - DNA, 55 bp, Artificial; identical to SEQ ID NO: 304257
  Synthetic oligonucleotide

SEQ ID NO: 537196 - DNA, 52 bp, Artificial; identical to SEQ ID NO: 304259
  Synthetic oligonucleotide

SEQ ID NO: 537197 - DNA, 56 bp, Artificial; identical to SEQ ID NO: 304261
  Synthetic oligonucleotide

SEQ ID NO: 537198 - DNA, 60 bp, Artificial; identical to SEQ ID NO: 304263
  Synthetic oligonucleotide

SEQ ID NO: 537199 - DNA, 60 bp, Artificial; identical to SEQ ID NO: 304264
  Synthetic oligonucleotide

SEQ ID NO: 537200 - DNA, 60 bp, Artificial; identical to SEQ ID NO: 304266
  Synthetic oligonucleotide

SEQ ID NO: 537201 - DNA, 58 bp, Artificial; identical to SEQ ID NO: 304268
  Synthetic oligonucleotide

SEQ ID NO: 537202 - DNA, 55 bp, Artificial; identical to SEQ ID NO: 304269
  Synthetic oligonucleotide

SEQ ID NO: 537203 - DNA, 60 bp, Artificial; identical to SEQ ID NO: 304273
  Synthetic oligonucleotide

SEQ ID NO: 537204 - DNA, 56 bp, Artificial; identical to SEQ ID NO: 304274
  Synthetic oligonucleotide

SEQ ID NO: 537205 - DNA, 60 bp, Artificial; identical to SEQ ID NO: 304281
  Synthetic oligonucleotide

SEQ ID NO: 537206 - DNA, 60 bp, Artificial; identical to SEQ ID NO: 304283
  Synthetic oligonucleotide

SEQ ID NO: 537207 - DNA, 60 bp, Artificial; identical to SEQ ID NO: 304284
  Synthetic oligonucleotide

SEQ ID NO: 537208 - DNA, 52 bp, Artificial; identical to SEQ ID NO: 304286
  Synthetic oligonucleotide

SEQ ID NO: 537209 - DNA, 60 bp, Artificial; identical to SEQ ID NO: 304289
  Synthetic oligonucleotide

SEQ ID NO: 537210 - DNA, 57 bp, Artificial; identical to SEQ ID NO: 304290
  Synthetic oligonucleotide

SEQ ID NO: 537211 - DNA, 60 bp, Artificial; identical to SEQ ID NO: 304291
  Synthetic oligonucleotide

SEQ ID NO: 537212 - DNA, 56 bp, Artificial; identical to SEQ ID NO: 304292
  Synthetic oligonucleotide

SEQ ID NO: 537213 - DNA, 59 bp, Artificial; identical to SEQ ID NO: 304295
  Synthetic oligonucleotide

SEQ ID NO: 537214 - DNA, 56 bp, Artificial; identical to SEQ ID NO: 304296
  Synthetic oligonucleotide

SEQ ID NO: 537215 - DNA, 57 bp, Artificial; identical to SEQ ID NO: 304297
  Synthetic oligonucleotide

SEQ ID NO: 537216 - DNA, 57 bp, Artificial; identical to SEQ ID NO: 304299
  Synthetic oligonucleotide

SEQ ID NO: 537217 - DNA, 56 bp, Artificial; identical to SEQ ID NO: 304300
  Synthetic oligonucleotide

SEQ ID NO: 537218 - DNA, 55 bp, Artificial; identical to SEQ ID NO: 304302
  Synthetic oligonucleotide

SEQ ID NO: 537219 - DNA, 54 bp, Artificial; identical to SEQ ID NO: 304309
  Synthetic oligonucleotide

SEQ ID NO: 537220 - DNA, 59 bp, Artificial; identical to SEQ ID NO: 304312
  Synthetic oligonucleotide

SEQ ID NO: 537221 - DNA, 60 bp, Artificial; identical to SEQ ID NO: 304315
  Synthetic oligonucleotide

SEQ ID NO: 537222 - DNA, 55 bp, Artificial; identical to SEQ ID NO: 304318
  Synthetic oligonucleotide

SEQ ID NO: 537223 - DNA, 60 bp, Artificial; identical to SEQ ID NO: 304319
  Synthetic oligonucleotide

SEQ ID NO: 537224 - DNA, 52 bp, Artificial; identical to SEQ ID NO: 304323
  Synthetic oligonucleotide

SEQ ID NO: 537225 - DNA, 54 bp, Artificial; identical to SEQ ID NO: 304324
  Synthetic oligonucleotide

SEQ ID NO: 537226 - DNA, 58 bp, Artificial; identical to SEQ ID NO: 304325
  Synthetic oligonucleotide

SEQ ID NO: 537227 - DNA, 55 bp, Artificial; identical to SEQ ID NO: 304326
  Synthetic oligonucleotide

SEQ ID NO: 537228 - DNA, 60 bp, Artificial; identical to SEQ ID NO: 304327
  Synthetic oligonucleotide

SEQ ID NO: 537229 - DNA, 60 bp, Artificial; identical to SEQ ID NO: 304330
  Synthetic oligonucleotide

SEQ ID NO: 537230 - DNA, 54 bp, Artificial; identical to SEQ ID NO: 304332
  Synthetic oligonucleotide

SEQ ID NO: 537231 - DNA, 53 bp, Artificial; identical to SEQ ID NO: 304335
  Synthetic oligonucleotide

SEQ ID NO: 537232 - DNA, 56 bp, Artificial; identical to SEQ ID NO: 304336
  Synthetic oligonucleotide

SEQ ID NO: 537233 - DNA, 54 bp, Artificial; identical to SEQ ID NO: 304338
  Synthetic oligonucleotide

SEQ ID NO: 537234 - DNA, 54 bp, Artificial; identical to SEQ ID NO: 304340
  Synthetic oligonucleotide

SEQ ID NO: 537235 - DNA, 59 bp, Artificial; identical to SEQ ID NO: 304344
  Synthetic oligonucleotide

SEQ ID NO: 537236 - DNA, 55 bp, Artificial; identical to SEQ ID NO: 304348
  Synthetic oligonucleotide

SEQ ID NO: 537237 - DNA, 60 bp, Artificial; identical to SEQ ID NO: 304352
  Synthetic oligonucleotide

SEQ ID NO: 537238 - DNA, 60 bp, Artificial; identical to SEQ ID NO: 304353
  Synthetic oligonucleotide

SEQ ID NO: 537239 - DNA, 59 bp, Artificial; identical to SEQ ID NO: 304355
  Synthetic oligonucleotide

SEQ ID NO: 537240 - DNA, 54 bp, Artificial; identical to SEQ ID NO: 304356
  Synthetic oligonucleotide

SEQ ID NO: 537241 - DNA, 58 bp, Artificial; identical to SEQ ID NO: 304358
  Synthetic oligonucleotide

SEQ ID NO: 537242 - DNA, 58 bp, Artificial; identical to SEQ ID NO: 304359
  Synthetic oligonucleotide

SEQ ID NO: 537243 - DNA, 53 bp, Artificial; identical to SEQ ID NO: 304363
  Synthetic oligonucleotide

SEQ ID NO: 537244 - DNA, 54 bp, Artificial; identical to SEQ ID NO: 304365
  Synthetic oligonucleotide

SEQ ID NO: 537245 - DNA, 56 bp, Artificial; identical to SEQ ID NO: 304369
  Synthetic oligonucleotide

SEQ ID NO: 537246 - DNA, 51 bp, Artificial; identical to SEQ ID NO: 304370
  Synthetic oligonucleotide

SEQ ID NO: 537247 - DNA, 53 bp, Artificial; identical to SEQ ID NO: 304376
  Synthetic oligonucleotide

SEQ ID NO: 537248 - DNA, 60 bp, Artificial; identical to SEQ ID NO: 304379
  Synthetic oligonucleotide

SEQ ID NO: 537249 - DNA, 55 bp, Artificial; identical to SEQ ID NO: 304381
  Synthetic oligonucleotide

SEQ ID NO: 537250 - DNA, 51 bp, Artificial; identical to SEQ ID NO: 304382
  Synthetic oligonucleotide

SEQ ID NO: 537251 - DNA, 56 bp, Artificial; identical to SEQ ID NO: 304384
  Synthetic oligonucleotide

SEQ ID NO: 537252 - DNA, 59 bp, Artificial; identical to SEQ ID NO: 304388
  Synthetic oligonucleotide

SEQ ID NO: 537253 - DNA, 58 bp, Artificial; identical to SEQ ID NO: 304389
  Synthetic oligonucleotide

SEQ ID NO: 537254 - DNA, 60 bp, Artificial; identical to SEQ ID NO: 304392
  Synthetic oligonucleotide

SEQ ID NO: 537255 - DNA, 55 bp, Artificial; identical to SEQ ID NO: 304401
  Synthetic oligonucleotide

SEQ ID NO: 537256 - DNA, 55 bp, Artificial; identical to SEQ ID NO: 304404
  Synthetic oligonucleotide

SEQ ID NO: 537257 - DNA, 54 bp, Artificial; identical to SEQ ID NO: 304405
  Synthetic oligonucleotide

SEQ ID NO: 537258 - DNA, 55 bp, Artificial; identical to SEQ ID NO: 304410
  Synthetic oligonucleotide

SEQ ID NO: 537259 - DNA, 59 bp, Artificial; identical to SEQ ID NO: 20184
  Synthetic oligonucleotide

SEQ ID NO: 537260 - DNA, 59 bp, Artificial; identical to SEQ ID NO: 304414
  Synthetic oligonucleotide

SEQ ID NO: 537261 - DNA, 55 bp, Artificial; identical to SEQ ID NO: 304415
  Synthetic oligonucleotide

SEQ ID NO: 537262 - DNA, 60 bp, Artificial; identical to SEQ ID NO: 304416
  Synthetic oligonucleotide

SEQ ID NO: 537263 - DNA, 60 bp, Artificial; identical to SEQ ID NO: 304417
  Synthetic oligonucleotide

SEQ ID NO: 537264 - DNA, 57 bp, Artificial; identical to SEQ ID NO: 304420
  Synthetic oligonucleotide

SEQ ID NO: 537265 - DNA, 51 bp, Artificial; identical to SEQ ID NO: 304422
  Synthetic oligonucleotide

SEQ ID NO: 537266 - DNA, 58 bp, Artificial; identical to SEQ ID NO: 304423
  Synthetic oligonucleotide

SEQ ID NO: 537267 - DNA, 56 bp, Artificial; identical to SEQ ID NO: 304425
  Synthetic oligonucleotide

SEQ ID NO: 537268 - DNA, 60 bp, Artificial; identical to SEQ ID NO: 304427
  Synthetic oligonucleotide

SEQ ID NO: 537269 - DNA, 60 bp, Artificial; identical to SEQ ID NO: 304428
  Synthetic oligonucleotide

SEQ ID NO: 537270 - DNA, 59 bp, Artificial; identical to SEQ ID NO: 304436
  Synthetic oligonucleotide

SEQ ID NO: 537271 - DNA, 56 bp, Artificial; identical to SEQ ID NO: 304439
  Synthetic oligonucleotide

SEQ ID NO: 537272 - DNA, 57 bp, Artificial; identical to SEQ ID NO: 19698
  Synthetic oligonucleotide

SEQ ID NO: 537273 - DNA, 51 bp, Artificial; identical to SEQ ID NO: 304443
  Synthetic oligonucleotide

SEQ ID NO: 537274 - DNA, 53 bp, Artificial; identical to SEQ ID NO: 7406
  Synthetic oligonucleotide

SEQ ID NO: 537275 - DNA, 54 bp, Artificial; identical to SEQ ID NO: 304444
  Synthetic oligonucleotide

SEQ ID NO: 537276 - DNA, 60 bp, Artificial; identical to SEQ ID NO: 304445
  Synthetic oligonucleotide

SEQ ID NO: 537277 - DNA, 54 bp, Artificial; identical to SEQ ID NO: 304450
  Synthetic oligonucleotide

SEQ ID NO: 537278 - DNA, 60 bp, Artificial; identical to SEQ ID NO: 304454
  Synthetic oligonucleotide

SEQ ID NO: 537279 - DNA, 52 bp, Artificial; identical to SEQ ID NO: 304455
  Synthetic oligonucleotide

SEQ ID NO: 537280 - DNA, 51 bp, Artificial; identical to SEQ ID NO: 304457
  Synthetic oligonucleotide

SEQ ID NO: 537281 - DNA, 53 bp, Artificial; identical to SEQ ID NO: 304459
  Synthetic oligonucleotide

SEQ ID NO: 537282 - DNA, 51 bp, Artificial; identical to SEQ ID NO: 304460
  Synthetic oligonucleotide

SEQ ID NO: 537283 - DNA, 57 bp, Artificial; identical to SEQ ID NO: 304462
  Synthetic oligonucleotide

SEQ ID NO: 537284 - DNA, 55 bp, Artificial; identical to SEQ ID NO: 304463
  Synthetic oligonucleotide

SEQ ID NO: 537285 - DNA, 50 bp, Artificial; identical to SEQ ID NO: 304464
  Synthetic oligonucleotide

SEQ ID NO: 537286 - DNA, 60 bp, Artificial; identical to SEQ ID NO: 304465
  Synthetic oligonucleotide

SEQ ID NO: 537287 - DNA, 54 bp, Artificial; identical to SEQ ID NO: 304469
  Synthetic oligonucleotide

SEQ ID NO: 537288 - DNA, 55 bp, Artificial; identical to SEQ ID NO: 304472
  Synthetic oligonucleotide

SEQ ID NO: 537289 - DNA, 53 bp, Artificial; identical to SEQ ID NO: 304474
  Synthetic oligonucleotide

SEQ ID NO: 537290 - DNA, 57 bp, Artificial; identical to SEQ ID NO: 304475
  Synthetic oligonucleotide

SEQ ID NO: 537291 - DNA, 54 bp, Artificial; identical to SEQ ID NO: 304476
  Synthetic oligonucleotide

SEQ ID NO: 537292 - DNA, 60 bp, Artificial; identical to SEQ ID NO: 7904
  Synthetic oligonucleotide

SEQ ID NO: 537293 - DNA, 51 bp, Artificial; identical to SEQ ID NO: 304477
  Synthetic oligonucleotide

SEQ ID NO: 537294 - DNA, 57 bp, Artificial; identical to SEQ ID NO: 304478
  Synthetic oligonucleotide

SEQ ID NO: 537295 - DNA, 58 bp, Artificial; identical to SEQ ID NO: 304480
  Synthetic oligonucleotide

SEQ ID NO: 537296 - DNA, 52 bp, Artificial; identical to SEQ ID NO: 304481
  Synthetic oligonucleotide

SEQ ID NO: 537297 - DNA, 60 bp, Artificial; identical to SEQ ID NO: 304482
  Synthetic oligonucleotide

SEQ ID NO: 537298 - DNA, 60 bp, Artificial; identical to SEQ ID NO: 304483
  Synthetic oligonucleotide

SEQ ID NO: 537299 - DNA, 60 bp, Artificial; identical to SEQ ID NO: 304484
  Synthetic oligonucleotide

SEQ ID NO: 537300 - DNA, 60 bp, Artificial; identical to SEQ ID NO: 304486
  Synthetic oligonucleotide

SEQ ID NO: 537301 - DNA, 55 bp, Artificial; identical to SEQ ID NO: 304489
  Synthetic oligonucleotide

SEQ ID NO: 537302 - DNA, 51 bp, Artificial; identical to SEQ ID NO: 304492
  Synthetic oligonucleotide

SEQ ID NO: 537303 - DNA, 54 bp, Artificial; identical to SEQ ID NO: 304494
  Synthetic oligonucleotide

SEQ ID NO: 537304 - DNA, 55 bp, Artificial; identical to SEQ ID NO: 304498
  Synthetic oligonucleotide

SEQ ID NO: 537305 - DNA, 51 bp, Artificial; identical to SEQ ID NO: 304502
  Synthetic oligonucleotide

SEQ ID NO: 537306 - DNA, 60 bp, Artificial; identical to SEQ ID NO: 304503
  Synthetic oligonucleotide

SEQ ID NO: 537307 - DNA, 59 bp, Artificial; identical to SEQ ID NO: 304504
  Synthetic oligonucleotide

SEQ ID NO: 537308 - DNA, 55 bp, Artificial; identical to SEQ ID NO: 304505
  Synthetic oligonucleotide

SEQ ID NO: 537309 - DNA, 54 bp, Artificial; identical to SEQ ID NO: 304507
  Synthetic oligonucleotide

SEQ ID NO: 537310 - DNA, 55 bp, Artificial; identical to SEQ ID NO: 304508
  Synthetic oligonucleotide

SEQ ID NO: 537311 - DNA, 57 bp, Artificial; identical to SEQ ID NO: 304510
  Synthetic oligonucleotide

SEQ ID NO: 537312 - DNA, 60 bp, Artificial; identical to SEQ ID NO: 304517
  Synthetic oligonucleotide

SEQ ID NO: 537313 - DNA, 60 bp, Artificial; identical to SEQ ID NO: 12036
  Synthetic oligonucleotide

SEQ ID NO: 537314 - DNA, 58 bp, Artificial; identical to SEQ ID NO: 304522
  Synthetic oligonucleotide

SEQ ID NO: 537315 - DNA, 55 bp, Artificial; identical to SEQ ID NO: 304524
  Synthetic oligonucleotide

SEQ ID NO: 537316 - DNA, 54 bp, Artificial; identical to SEQ ID NO: 304526
  Synthetic oligonucleotide

SEQ ID NO: 537317 - DNA, 49 bp, Artificial; identical to SEQ ID NO: 304527
  Synthetic oligonucleotide

SEQ ID NO: 537318 - DNA, 54 bp, Artificial; identical to SEQ ID NO: 304529
  Synthetic oligonucleotide

SEQ ID NO: 537319 - DNA, 60 bp, Artificial; identical to SEQ ID NO: 304531
  Synthetic oligonucleotide

SEQ ID NO: 537320 - DNA, 60 bp, Artificial; identical to SEQ ID NO: 304532
  Synthetic oligonucleotide

SEQ ID NO: 537321 - DNA, 56 bp, Artificial; identical to SEQ ID NO: 304533
  Synthetic oligonucleotide

SEQ ID NO: 537322 - DNA, 55 bp, Artificial; identical to SEQ ID NO: 304534
  Synthetic oligonucleotide

SEQ ID NO: 537323 - DNA, 60 bp, Artificial; identical to SEQ ID NO: 304538
  Synthetic oligonucleotide

SEQ ID NO: 537324 - DNA, 51 bp, Artificial; identical to SEQ ID NO: 304539
  Synthetic oligonucleotide

SEQ ID NO: 537325 - DNA, 54 bp, Artificial; identical to SEQ ID NO: 304540
  Synthetic oligonucleotide

SEQ ID NO: 537326 - DNA, 58 bp, Artificial; identical to SEQ ID NO: 304541
  Synthetic oligonucleotide

SEQ ID NO: 537327 - DNA, 60 bp, Artificial; identical to SEQ ID NO: 304543
  Synthetic oligonucleotide

SEQ ID NO: 537328 - DNA, 56 bp, Artificial; identical to SEQ ID NO: 304545
  Synthetic oligonucleotide

SEQ ID NO: 537329 - DNA, 52 bp, Artificial; identical to SEQ ID NO: 304551
  Synthetic oligonucleotide

SEQ ID NO: 537330 - DNA, 55 bp, Artificial; identical to SEQ ID NO: 304554
  Synthetic oligonucleotide

SEQ ID NO: 537331 - DNA, 51 bp, Artificial; identical to SEQ ID NO: 304555
  Synthetic oligonucleotide

SEQ ID NO: 537332 - DNA, 54 bp, Artificial; identical to SEQ ID NO: 304558
  Synthetic oligonucleotide

SEQ ID NO: 537333 - DNA, 55 bp, Artificial; identical to SEQ ID NO: 304559
  Synthetic oligonucleotide

SEQ ID NO: 537334 - DNA, 51 bp, Artificial; identical to SEQ ID NO: 304560
  Synthetic oligonucleotide

SEQ ID NO: 537335 - DNA, 60 bp, Artificial; identical to SEQ ID NO: 304563
  Synthetic oligonucleotide

SEQ ID NO: 537336 - DNA, 59 bp, Artificial; identical to SEQ ID NO: 304565
  Synthetic oligonucleotide

SEQ ID NO: 537337 - DNA, 57 bp, Artificial; identical to SEQ ID NO: 304568
  Synthetic oligonucleotide

SEQ ID NO: 537338 - DNA, 53 bp, Artificial; identical to SEQ ID NO: 304571
  Synthetic oligonucleotide

SEQ ID NO: 537339 - DNA, 56 bp, Artificial; identical to SEQ ID NO: 304573
  Synthetic oligonucleotide

SEQ ID NO: 537340 - DNA, 58 bp, Artificial; identical to SEQ ID NO: 304574
  Synthetic oligonucleotide

SEQ ID NO: 537341 - DNA, 58 bp, Artificial; identical to SEQ ID NO: 304575
  Synthetic oligonucleotide

SEQ ID NO: 537342 - DNA, 60 bp, Artificial; identical to SEQ ID NO: 304576
  Synthetic oligonucleotide

SEQ ID NO: 537343 - DNA, 57 bp, Artificial; identical to SEQ ID NO: 304577
  Synthetic oligonucleotide

SEQ ID NO: 537344 - DNA, 54 bp, Artificial; identical to SEQ ID NO: 304579
  Synthetic oligonucleotide

SEQ ID NO: 537345 - DNA, 55 bp, Artificial; identical to SEQ ID NO: 304583
  Synthetic oligonucleotide

SEQ ID NO: 537346 - DNA, 55 bp, Artificial; identical to SEQ ID NO: 304591
  Synthetic oligonucleotide

SEQ ID NO: 537347 - DNA, 53 bp, Artificial; identical to SEQ ID NO: 304593
  Synthetic oligonucleotide

SEQ ID NO: 537348 - DNA, 54 bp, Artificial; identical to SEQ ID NO: 304601
  Synthetic oligonucleotide

SEQ ID NO: 537349 - DNA, 56 bp, Artificial; identical to SEQ ID NO: 304602
  Synthetic oligonucleotide

SEQ ID NO: 537350 - DNA, 53 bp, Artificial; identical to SEQ ID NO: 304603
  Synthetic oligonucleotide

SEQ ID NO: 537351 - DNA, 55 bp, Artificial; identical to SEQ ID NO: 304604
  Synthetic oligonucleotide

SEQ ID NO: 537352 - DNA, 56 bp, Artificial; identical to SEQ ID NO: 304605
  Synthetic oligonucleotide

SEQ ID NO: 537353 - DNA, 55 bp, Artificial; identical to SEQ ID NO: 16115
  Synthetic oligonucleotide

SEQ ID NO: 537354 - DNA, 57 bp, Artificial; identical to SEQ ID NO: 304610
  Synthetic oligonucleotide

SEQ ID NO: 537355 - DNA, 52 bp, Artificial; identical to SEQ ID NO: 304611
  Synthetic oligonucleotide

SEQ ID NO: 537356 - DNA, 59 bp, Artificial; identical to SEQ ID NO: 304614
  Synthetic oligonucleotide

SEQ ID NO: 537357 - DNA, 60 bp, Artificial; identical to SEQ ID NO: 304616
  Synthetic oligonucleotide

SEQ ID NO: 537358 - DNA, 60 bp, Artificial; identical to SEQ ID NO: 304618
  Synthetic oligonucleotide

SEQ ID NO: 537359 - DNA, 56 bp, Artificial; identical to SEQ ID NO: 304620
  Synthetic oligonucleotide

SEQ ID NO: 537360 - DNA, 50 bp, Artificial; identical to SEQ ID NO: 304622
  Synthetic oligonucleotide

SEQ ID NO: 537361 - DNA, 51 bp, Artificial; identical to SEQ ID NO: 304623
  Synthetic oligonucleotide

SEQ ID NO: 537362 - DNA, 58 bp, Artificial; identical to SEQ ID NO: 304626
  Synthetic oligonucleotide

SEQ ID NO: 537363 - DNA, 55 bp, Artificial; identical to SEQ ID NO: 304627
  Synthetic oligonucleotide

SEQ ID NO: 537364 - DNA, 57 bp, Artificial; identical to SEQ ID NO: 18915
  Synthetic oligonucleotide

SEQ ID NO: 537365 - DNA, 58 bp, Artificial; identical to SEQ ID NO: 304628
  Synthetic oligonucleotide

SEQ ID NO: 537366 - DNA, 53 bp, Artificial; identical to SEQ ID NO: 304630
  Synthetic oligonucleotide

SEQ ID NO: 537367 - DNA, 60 bp, Artificial; identical to SEQ ID NO: 10323
  Synthetic oligonucleotide

SEQ ID NO: 537368 - DNA, 53 bp, Artificial; identical to SEQ ID NO: 304635
  Synthetic oligonucleotide

SEQ ID NO: 537369 - DNA, 56 bp, Artificial; identical to SEQ ID NO: 304638
  Synthetic oligonucleotide

SEQ ID NO: 537370 - DNA, 60 bp, Artificial; identical to SEQ ID NO: 304641
  Synthetic oligonucleotide

SEQ ID NO: 537371 - DNA, 53 bp, Artificial; identical to SEQ ID NO: 304642
  Synthetic oligonucleotide

SEQ ID NO: 537372 - DNA, 54 bp, Artificial; identical to SEQ ID NO: 304643
  Synthetic oligonucleotide

SEQ ID NO: 537373 - DNA, 51 bp, Artificial; identical to SEQ ID NO: 304645
  Synthetic oligonucleotide

SEQ ID NO: 537374 - DNA, 58 bp, Artificial; identical to SEQ ID NO: 304649
  Synthetic oligonucleotide

SEQ ID NO: 537375 - DNA, 56 bp, Artificial; identical to SEQ ID NO: 304650
  Synthetic oligonucleotide

SEQ ID NO: 537376 - DNA, 60 bp, Artificial; identical to SEQ ID NO: 304651
  Synthetic oligonucleotide

SEQ ID NO: 537377 - DNA, 59 bp, Artificial; identical to SEQ ID NO: 304652
  Synthetic oligonucleotide

SEQ ID NO: 537378 - DNA, 59 bp, Artificial; identical to SEQ ID NO: 304653
  Synthetic oligonucleotide

SEQ ID NO: 537379 - DNA, 58 bp, Artificial; identical to SEQ ID NO: 304656
  Synthetic oligonucleotide

SEQ ID NO: 537380 - DNA, 57 bp, Artificial; identical to SEQ ID NO: 304658
  Synthetic oligonucleotide

SEQ ID NO: 537381 - DNA, 53 bp, Artificial; identical to SEQ ID NO: 304664
  Synthetic oligonucleotide

SEQ ID NO: 537382 - DNA, 60 bp, Artificial; identical to SEQ ID NO: 304666
  Synthetic oligonucleotide

SEQ ID NO: 537383 - DNA, 60 bp, Artificial; identical to SEQ ID NO: 304672
  Synthetic oligonucleotide

SEQ ID NO: 537384 - DNA, 50 bp, Artificial; identical to SEQ ID NO: 304675
  Synthetic oligonucleotide

SEQ ID NO: 537385 - DNA, 57 bp, Artificial; identical to SEQ ID NO: 304677
  Synthetic oligonucleotide

SEQ ID NO: 537386 - DNA, 60 bp, Artificial; identical to SEQ ID NO: 304678
  Synthetic oligonucleotide

SEQ ID NO: 537387 - DNA, 58 bp, Artificial; identical to SEQ ID NO: 304679
  Synthetic oligonucleotide

SEQ ID NO: 537388 - DNA, 55 bp, Artificial; identical to SEQ ID NO: 304680
  Synthetic oligonucleotide

SEQ ID NO: 537389 - DNA, 57 bp, Artificial; identical to SEQ ID NO: 304682
  Synthetic oligonucleotide

SEQ ID NO: 537390 - DNA, 59 bp, Artificial; identical to SEQ ID NO: 304684
  Synthetic oligonucleotide

SEQ ID NO: 537391 - DNA, 60 bp, Artificial; identical to SEQ ID NO: 304687
  Synthetic oligonucleotide

SEQ ID NO: 537392 - DNA, 60 bp, Artificial; identical to SEQ ID NO: 304697
  Synthetic oligonucleotide

SEQ ID NO: 537393 - DNA, 60 bp, Artificial; identical to SEQ ID NO: 304698
  Synthetic oligonucleotide

SEQ ID NO: 537394 - DNA, 60 bp, Artificial; identical to SEQ ID NO: 304699
  Synthetic oligonucleotide

SEQ ID NO: 537395 - DNA, 54 bp, Artificial; identical to SEQ ID NO: 304700
  Synthetic oligonucleotide

SEQ ID NO: 537396 - DNA, 56 bp, Artificial; identical to SEQ ID NO: 304707
  Synthetic oligonucleotide

SEQ ID NO: 537397 - DNA, 57 bp, Artificial; identical to SEQ ID NO: 304708
  Synthetic oligonucleotide

SEQ ID NO: 537398 - DNA, 60 bp, Artificial; identical to SEQ ID NO: 304710
  Synthetic oligonucleotide

SEQ ID NO: 537399 - DNA, 60 bp, Artificial; identical to SEQ ID NO: 304711
  Synthetic oligonucleotide

SEQ ID NO: 537400 - DNA, 59 bp, Artificial; identical to SEQ ID NO: 304714
  Synthetic oligonucleotide

SEQ ID NO: 537401 - DNA, 56 bp, Artificial; identical to SEQ ID NO: 304715
  Synthetic oligonucleotide

SEQ ID NO: 537402 - DNA, 55 bp, Artificial; identical to SEQ ID NO: 304719
  Synthetic oligonucleotide

SEQ ID NO: 537403 - DNA, 53 bp, Artificial; identical to SEQ ID NO: 304723
  Synthetic oligonucleotide

SEQ ID NO: 537404 - DNA, 53 bp, Artificial; identical to SEQ ID NO: 304724
  Synthetic oligonucleotide

SEQ ID NO: 537405 - DNA, 55 bp, Artificial; identical to SEQ ID NO: 304726
  Synthetic oligonucleotide

SEQ ID NO: 537406 - DNA, 53 bp, Artificial; identical to SEQ ID NO: 304727
  Synthetic oligonucleotide

SEQ ID NO: 537407 - DNA, 60 bp, Artificial; identical to SEQ ID NO: 304729
  Synthetic oligonucleotide

SEQ ID NO: 537408 - DNA, 55 bp, Artificial; identical to SEQ ID NO: 304731
  Synthetic oligonucleotide

SEQ ID NO: 537409 - DNA, 55 bp, Artificial; identical to SEQ ID NO: 304732
  Synthetic oligonucleotide

SEQ ID NO: 537410 - DNA, 58 bp, Artificial; identical to SEQ ID NO: 304736
  Synthetic oligonucleotide

SEQ ID NO: 537411 - DNA, 60 bp, Artificial; identical to SEQ ID NO: 304738
  Synthetic oligonucleotide

SEQ ID NO: 537412 - DNA, 52 bp, Artificial; identical to SEQ ID NO: 304744
  Synthetic oligonucleotide

SEQ ID NO: 537413 - DNA, 58 bp, Artificial; identical to SEQ ID NO: 304748
  Synthetic oligonucleotide

SEQ ID NO: 537414 - DNA, 55 bp, Artificial; identical to SEQ ID NO: 304753
  Synthetic oligonucleotide

SEQ ID NO: 537415 - DNA, 57 bp, Artificial; identical to SEQ ID NO: 304754
  Synthetic oligonucleotide

SEQ ID NO: 537416 - DNA, 57 bp, Artificial; identical to SEQ ID NO: 304758
  Synthetic oligonucleotide

SEQ ID NO: 537417 - DNA, 59 bp, Artificial; identical to SEQ ID NO: 304766
  Synthetic oligonucleotide

SEQ ID NO: 537418 - DNA, 60 bp, Artificial; identical to SEQ ID NO: 304774
  Synthetic oligonucleotide

SEQ ID NO: 537419 - DNA, 57 bp, Artificial; identical to SEQ ID NO: 304777
  Synthetic oligonucleotide

SEQ ID NO: 537420 - DNA, 50 bp, Artificial; identical to SEQ ID NO: 12421
  Synthetic oligonucleotide

SEQ ID NO: 537421 - DNA, 55 bp, Artificial; identical to SEQ ID NO: 304778
  Synthetic oligonucleotide

SEQ ID NO: 537422 - DNA, 56 bp, Artificial; identical to SEQ ID NO: 304779
  Synthetic oligonucleotide

SEQ ID NO: 537423 - DNA, 52 bp, Artificial; identical to SEQ ID NO: 304780
  Synthetic oligonucleotide

SEQ ID NO: 537424 - DNA, 50 bp, Artificial; identical to SEQ ID NO: 304781
  Synthetic oligonucleotide

SEQ ID NO: 537425 - DNA, 54 bp, Artificial; identical to SEQ ID NO: 304786
  Synthetic oligonucleotide

SEQ ID NO: 537426 - DNA, 54 bp, Artificial; identical to SEQ ID NO: 304787
  Synthetic oligonucleotide

SEQ ID NO: 537427 - DNA, 57 bp, Artificial; identical to SEQ ID NO: 304788
  Synthetic oligonucleotide

SEQ ID NO: 537428 - DNA, 54 bp, Artificial; identical to SEQ ID NO: 304789
  Synthetic oligonucleotide

SEQ ID NO: 537429 - DNA, 50 bp, Artificial; identical to SEQ ID NO: 304790
  Synthetic oligonucleotide

SEQ ID NO: 537430 - DNA, 55 bp, Artificial; identical to SEQ ID NO: 304792
  Synthetic oligonucleotide

SEQ ID NO: 537431 - DNA, 51 bp, Artificial; identical to SEQ ID NO: 7825
  Synthetic oligonucleotide

SEQ ID NO: 537432 - DNA, 59 bp, Artificial; identical to SEQ ID NO: 304793
  Synthetic oligonucleotide

SEQ ID NO: 537433 - DNA, 58 bp, Artificial; identical to SEQ ID NO: 304795
  Synthetic oligonucleotide

SEQ ID NO: 537434 - DNA, 57 bp, Artificial; identical to SEQ ID NO: 304799
  Synthetic oligonucleotide

SEQ ID NO: 537435 - DNA, 57 bp, Artificial; identical to SEQ ID NO: 304800
  Synthetic oligonucleotide

SEQ ID NO: 537436 - DNA, 60 bp, Artificial; identical to SEQ ID NO: 14082
  Synthetic oligonucleotide

SEQ ID NO: 537437 - DNA, 58 bp, Artificial; identical to SEQ ID NO: 304803
  Synthetic oligonucleotide

SEQ ID NO: 537438 - DNA, 60 bp, Artificial; identical to SEQ ID NO: 304804
  Synthetic oligonucleotide

SEQ ID NO: 537439 - DNA, 60 bp, Artificial; identical to SEQ ID NO: 304809
  Synthetic oligonucleotide

SEQ ID NO: 537440 - DNA, 58 bp, Artificial; identical to SEQ ID NO: 304812
  Synthetic oligonucleotide

SEQ ID NO: 537441 - DNA, 55 bp, Artificial; identical to SEQ ID NO: 304816
  Synthetic oligonucleotide

SEQ ID NO: 537442 - DNA, 55 bp, Artificial; identical to SEQ ID NO: 6861
  Synthetic oligonucleotide

SEQ ID NO: 537443 - DNA, 60 bp, Artificial; identical to SEQ ID NO: 304821
  Synthetic oligonucleotide

SEQ ID NO: 537444 - DNA, 55 bp, Artificial; identical to SEQ ID NO: 304825
  Synthetic oligonucleotide

SEQ ID NO: 537445 - DNA, 60 bp, Artificial; identical to SEQ ID NO: 304826
  Synthetic oligonucleotide

SEQ ID NO: 537446 - DNA, 51 bp, Artificial; identical to SEQ ID NO: 304827
  Synthetic oligonucleotide

SEQ ID NO: 537447 - DNA, 52 bp, Artificial; identical to SEQ ID NO: 304829
  Synthetic oligonucleotide

SEQ ID NO: 537448 - DNA, 60 bp, Artificial; identical to SEQ ID NO: 304833
  Synthetic oligonucleotide

SEQ ID NO: 537449 - DNA, 57 bp, Artificial; identical to SEQ ID NO: 304839
  Synthetic oligonucleotide

SEQ ID NO: 537450 - DNA, 57 bp, Artificial; identical to SEQ ID NO: 304840
  Synthetic oligonucleotide

SEQ ID NO: 537451 - DNA, 60 bp, Artificial; identical to SEQ ID NO: 304841
  Synthetic oligonucleotide

SEQ ID NO: 537452 - DNA, 57 bp, Artificial; identical to SEQ ID NO: 304843
  Synthetic oligonucleotide

SEQ ID NO: 537453 - DNA, 60 bp, Artificial; identical to SEQ ID NO: 304844
  Synthetic oligonucleotide

SEQ ID NO: 537454 - DNA, 60 bp, Artificial; identical to SEQ ID NO: 304846
  Synthetic oligonucleotide

SEQ ID NO: 537455 - DNA, 55 bp, Artificial; identical to SEQ ID NO: 304848
  Synthetic oligonucleotide

SEQ ID NO: 537456 - DNA, 53 bp, Artificial; identical to SEQ ID NO: 304849
  Synthetic oligonucleotide

SEQ ID NO: 537457 - DNA, 55 bp, Artificial; identical to SEQ ID NO: 304851
  Synthetic oligonucleotide

SEQ ID NO: 537458 - DNA, 60 bp, Artificial; identical to SEQ ID NO: 304852
  Synthetic oligonucleotide

SEQ ID NO: 537459 - DNA, 60 bp, Artificial; identical to SEQ ID NO: 304854
  Synthetic oligonucleotide

SEQ ID NO: 537460 - DNA, 60 bp, Artificial; identical to SEQ ID NO: 8050
  Synthetic oligonucleotide

SEQ ID NO: 537461 - DNA, 60 bp, Artificial; identical to SEQ ID NO: 304858
  Synthetic oligonucleotide

SEQ ID NO: 537462 - DNA, 54 bp, Artificial; identical to SEQ ID NO: 304860
  Synthetic oligonucleotide

SEQ ID NO: 537463 - DNA, 55 bp, Artificial; identical to SEQ ID NO: 304862
  Synthetic oligonucleotide

SEQ ID NO: 537464 - DNA, 60 bp, Artificial; identical to SEQ ID NO: 304866
  Synthetic oligonucleotide

SEQ ID NO: 537465 - DNA, 52 bp, Artificial; identical to SEQ ID NO: 304868
  Synthetic oligonucleotide

SEQ ID NO: 537466 - DNA, 54 bp, Artificial; identical to SEQ ID NO: 18051
  Synthetic oligonucleotide

SEQ ID NO: 537467 - DNA, 54 bp, Artificial; identical to SEQ ID NO: 304870
  Synthetic oligonucleotide

SEQ ID NO: 537468 - DNA, 59 bp, Artificial; identical to SEQ ID NO: 304871
  Synthetic oligonucleotide

SEQ ID NO: 537469 - DNA, 52 bp, Artificial; identical to SEQ ID NO: 304875
  Synthetic oligonucleotide

SEQ ID NO: 537470 - DNA, 54 bp, Artificial; identical to SEQ ID NO: 304884
  Synthetic oligonucleotide

SEQ ID NO: 537471 - DNA, 55 bp, Artificial; identical to SEQ ID NO: 304885
  Synthetic oligonucleotide

SEQ ID NO: 537472 - DNA, 60 bp, Artificial; identical to SEQ ID NO: 10427
  Synthetic oligonucleotide

SEQ ID NO: 537473 - DNA, 50 bp, Artificial; identical to SEQ ID NO: 304889
  Synthetic oligonucleotide

SEQ ID NO: 537474 - DNA, 55 bp, Artificial; identical to SEQ ID NO: 304890
  Synthetic oligonucleotide

SEQ ID NO: 537475 - DNA, 52 bp, Artificial; identical to SEQ ID NO: 18148
  Synthetic oligonucleotide

SEQ ID NO: 537476 - DNA, 60 bp, Artificial; identical to SEQ ID NO: 304894
  Synthetic oligonucleotide

SEQ ID NO: 537477 - DNA, 53 bp, Artificial; identical to SEQ ID NO: 304898
  Synthetic oligonucleotide

SEQ ID NO: 537478 - DNA, 59 bp, Artificial; identical to SEQ ID NO: 304899
  Synthetic oligonucleotide

SEQ ID NO: 537479 - DNA, 55 bp, Artificial; identical to SEQ ID NO: 304900
  Synthetic oligonucleotide

SEQ ID NO: 537480 - DNA, 60 bp, Artificial; identical to SEQ ID NO: 304901
  Synthetic oligonucleotide

SEQ ID NO: 537481 - DNA, 51 bp, Artificial; identical to SEQ ID NO: 20378
  Synthetic oligonucleotide

SEQ ID NO: 537482 - DNA, 55 bp, Artificial; identical to SEQ ID NO: 304909
  Synthetic oligonucleotide

SEQ ID NO: 537483 - DNA, 58 bp, Artificial; identical to SEQ ID NO: 304911
  Synthetic oligonucleotide

SEQ ID NO: 537484 - DNA, 54 bp, Artificial; identical to SEQ ID NO: 304915
  Synthetic oligonucleotide

SEQ ID NO: 537485 - DNA, 57 bp, Artificial; identical to SEQ ID NO: 304916
  Synthetic oligonucleotide

SEQ ID NO: 537486 - DNA, 55 bp, Artificial; identical to SEQ ID NO: 304918
  Synthetic oligonucleotide

SEQ ID NO: 537487 - DNA, 55 bp, Artificial; identical to SEQ ID NO: 304920
  Synthetic oligonucleotide

SEQ ID NO: 537488 - DNA, 53 bp, Artificial; identical to SEQ ID NO: 304921
  Synthetic oligonucleotide

SEQ ID NO: 537489 - DNA, 55 bp, Artificial; identical to SEQ ID NO: 304923
  Synthetic oligonucleotide

SEQ ID NO: 537490 - DNA, 50 bp, Artificial; identical to SEQ ID NO: 304926
  Synthetic oligonucleotide

SEQ ID NO: 537491 - DNA, 51 bp, Artificial; identical to SEQ ID NO: 14432
  Synthetic oligonucleotide

SEQ ID NO: 537492 - DNA, 55 bp, Artificial; identical to SEQ ID NO: 304928
  Synthetic oligonucleotide

SEQ ID NO: 537493 - DNA, 54 bp, Artificial; identical to SEQ ID NO: 304929
  Synthetic oligonucleotide

SEQ ID NO: 537494 - DNA, 55 bp, Artificial; identical to SEQ ID NO: 8388
  Synthetic oligonucleotide

SEQ ID NO: 537495 - DNA, 56 bp, Artificial; identical to SEQ ID NO: 304931
  Synthetic oligonucleotide

SEQ ID NO: 537496 - DNA, 55 bp, Artificial; identical to SEQ ID NO: 304933
  Synthetic oligonucleotide

SEQ ID NO: 537497 - DNA, 55 bp, Artificial; identical to SEQ ID NO: 304934
  Synthetic oligonucleotide

SEQ ID NO: 537498 - DNA, 60 bp, Artificial; identical to SEQ ID NO: 304935
  Synthetic oligonucleotide

SEQ ID NO: 537499 - DNA, 54 bp, Artificial; identical to SEQ ID NO: 10285
  Synthetic oligonucleotide

SEQ ID NO: 537500 - DNA, 60 bp, Artificial; identical to SEQ ID NO: 304943
  Synthetic oligonucleotide

SEQ ID NO: 537501 - DNA, 60 bp, Artificial; identical to SEQ ID NO: 304945
  Synthetic oligonucleotide

SEQ ID NO: 537502 - DNA, 51 bp, Artificial; identical to SEQ ID NO: 304946
  Synthetic oligonucleotide

SEQ ID NO: 537503 - DNA, 60 bp, Artificial; identical to SEQ ID NO: 304947
  Synthetic oligonucleotide

SEQ ID NO: 537504 - DNA, 60 bp, Artificial; identical to SEQ ID NO: 304950
  Synthetic oligonucleotide

SEQ ID NO: 537505 - DNA, 58 bp, Artificial; identical to SEQ ID NO: 304953
  Synthetic oligonucleotide

SEQ ID NO: 537506 - DNA, 60 bp, Artificial; identical to SEQ ID NO: 304954
  Synthetic oligonucleotide

SEQ ID NO: 537507 - DNA, 60 bp, Artificial; identical to SEQ ID NO: 10936
  Synthetic oligonucleotide

SEQ ID NO: 537508 - DNA, 53 bp, Artificial; identical to SEQ ID NO: 304956
  Synthetic oligonucleotide

SEQ ID NO: 537509 - DNA, 59 bp, Artificial; identical to SEQ ID NO: 304957
  Synthetic oligonucleotide

SEQ ID NO: 537510 - DNA, 60 bp, Artificial; identical to SEQ ID NO: 304960
  Synthetic oligonucleotide

SEQ ID NO: 537511 - DNA, 57 bp, Artificial; identical to SEQ ID NO: 304961
  Synthetic oligonucleotide

SEQ ID NO: 537512 - DNA, 60 bp, Artificial; identical to SEQ ID NO: 304962
  Synthetic oligonucleotide

SEQ ID NO: 537513 - DNA, 55 bp, Artificial; identical to SEQ ID NO: 304964
  Synthetic oligonucleotide

SEQ ID NO: 537514 - DNA, 54 bp, Artificial; identical to SEQ ID NO: 304966
  Synthetic oligonucleotide

SEQ ID NO: 537515 - DNA, 57 bp, Artificial; identical to SEQ ID NO: 304967
  Synthetic oligonucleotide

SEQ ID NO: 537516 - DNA, 56 bp, Artificial; identical to SEQ ID NO: 304970
  Synthetic oligonucleotide

SEQ ID NO: 537517 - DNA, 60 bp, Artificial; identical to SEQ ID NO: 10701
  Synthetic oligonucleotide

SEQ ID NO: 537518 - DNA, 51 bp, Artificial; identical to SEQ ID NO: 304976
  Synthetic oligonucleotide

SEQ ID NO: 537519 - DNA, 55 bp, Artificial; identical to SEQ ID NO: 304982
  Synthetic oligonucleotide

SEQ ID NO: 537520 - DNA, 60 bp, Artificial; identical to SEQ ID NO: 304984
  Synthetic oligonucleotide

SEQ ID NO: 537521 - DNA, 53 bp, Artificial; identical to SEQ ID NO: 304985
  Synthetic oligonucleotide

SEQ ID NO: 537522 - DNA, 56 bp, Artificial; identical to SEQ ID NO: 304990
  Synthetic oligonucleotide

SEQ ID NO: 537523 - DNA, 59 bp, Artificial; identical to SEQ ID NO: 304991
  Synthetic oligonucleotide

SEQ ID NO: 537524 - DNA, 60 bp, Artificial; identical to SEQ ID NO: 304995
  Synthetic oligonucleotide

SEQ ID NO: 537525 - DNA, 56 bp, Artificial; identical to SEQ ID NO: 305000
  Synthetic oligonucleotide

SEQ ID NO: 537526 - DNA, 55 bp, Artificial; identical to SEQ ID NO: 305003
  Synthetic oligonucleotide

SEQ ID NO: 537527 - DNA, 60 bp, Artificial; identical to SEQ ID NO: 305007
  Synthetic oligonucleotide

SEQ ID NO: 537528 - DNA, 60 bp, Artificial; identical to SEQ ID NO: 305010
  Synthetic oligonucleotide

SEQ ID NO: 537529 - DNA, 53 bp, Artificial; identical to SEQ ID NO: 305012
  Synthetic oligonucleotide

SEQ ID NO: 537530 - DNA, 54 bp, Artificial; identical to SEQ ID NO: 305015
  Synthetic oligonucleotide

SEQ ID NO: 537531 - DNA, 59 bp, Artificial; identical to SEQ ID NO: 305016
  Synthetic oligonucleotide

SEQ ID NO: 537532 - DNA, 55 bp, Artificial; identical to SEQ ID NO: 305017
  Synthetic oligonucleotide

SEQ ID NO: 537533 - DNA, 52 bp, Artificial; identical to SEQ ID NO: 305021
  Synthetic oligonucleotide

SEQ ID NO: 537534 - DNA, 60 bp, Artificial; identical to SEQ ID NO: 305024
  Synthetic oligonucleotide

SEQ ID NO: 537535 - DNA, 60 bp, Artificial; identical to SEQ ID NO: 305025
  Synthetic oligonucleotide

SEQ ID NO: 537536 - DNA, 54 bp, Artificial; identical to SEQ ID NO: 305028
  Synthetic oligonucleotide

SEQ ID NO: 537537 - DNA, 51 bp, Artificial; identical to SEQ ID NO: 305037
  Synthetic oligonucleotide

SEQ ID NO: 537538 - DNA, 58 bp, Artificial; identical to SEQ ID NO: 305040
  Synthetic oligonucleotide

SEQ ID NO: 537539 - DNA, 60 bp, Artificial; identical to SEQ ID NO: 305043
  Synthetic oligonucleotide

SEQ ID NO: 537540 - DNA, 55 bp, Artificial; identical to SEQ ID NO: 305045
  Synthetic oligonucleotide

SEQ ID NO: 537541 - DNA, 56 bp, Artificial; identical to SEQ ID NO: 305052
  Synthetic oligonucleotide

SEQ ID NO: 537542 - DNA, 60 bp, Artificial; identical to SEQ ID NO: 305055
  Synthetic oligonucleotide

SEQ ID NO: 537543 - DNA, 58 bp, Artificial; identical to SEQ ID NO: 305058
  Synthetic oligonucleotide

SEQ ID NO: 537544 - DNA, 52 bp, Artificial; identical to SEQ ID NO: 305059
  Synthetic oligonucleotide

SEQ ID NO: 537545 - DNA, 60 bp, Artificial; identical to SEQ ID NO: 305062
  Synthetic oligonucleotide

SEQ ID NO: 537546 - DNA, 55 bp, Artificial; identical to SEQ ID NO: 305065
  Synthetic oligonucleotide

SEQ ID NO: 537547 - DNA, 57 bp, Artificial; identical to SEQ ID NO: 305066
  Synthetic oligonucleotide

SEQ ID NO: 537548 - DNA, 57 bp, Artificial; identical to SEQ ID NO: 305070
  Synthetic oligonucleotide

SEQ ID NO: 537549 - DNA, 56 bp, Artificial; identical to SEQ ID NO: 305075
  Synthetic oligonucleotide

SEQ ID NO: 537550 - DNA, 58 bp, Artificial; identical to SEQ ID NO: 305077
  Synthetic oligonucleotide

SEQ ID NO: 537551 - DNA, 58 bp, Artificial; identical to SEQ ID NO: 305078
  Synthetic oligonucleotide

SEQ ID NO: 537552 - DNA, 55 bp, Artificial; identical to SEQ ID NO: 305085
  Synthetic oligonucleotide

SEQ ID NO: 537553 - DNA, 60 bp, Artificial; identical to SEQ ID NO: 14684
  Synthetic oligonucleotide

SEQ ID NO: 537554 - DNA, 53 bp, Artificial; identical to SEQ ID NO: 305087
  Synthetic oligonucleotide

SEQ ID NO: 537555 - DNA, 58 bp, Artificial; identical to SEQ ID NO: 305088
  Synthetic oligonucleotide

SEQ ID NO: 537556 - DNA, 54 bp, Artificial; identical to SEQ ID NO: 305091
  Synthetic oligonucleotide

SEQ ID NO: 537557 - DNA, 57 bp, Artificial; identical to SEQ ID NO: 305099
  Synthetic oligonucleotide

SEQ ID NO: 537558 - DNA, 59 bp, Artificial; identical to SEQ ID NO: 305100
  Synthetic oligonucleotide

SEQ ID NO: 537559 - DNA, 50 bp, Artificial; identical to SEQ ID NO: 305101
  Synthetic oligonucleotide

SEQ ID NO: 537560 - DNA, 55 bp, Artificial; identical to SEQ ID NO: 305102
  Synthetic oligonucleotide

SEQ ID NO: 537561 - DNA, 60 bp, Artificial; identical to SEQ ID NO: 305104
  Synthetic oligonucleotide

SEQ ID NO: 537562 - DNA, 52 bp, Artificial; identical to SEQ ID NO: 305105
  Synthetic oligonucleotide

SEQ ID NO: 537563 - DNA, 60 bp, Artificial; identical to SEQ ID NO: 305108
  Synthetic oligonucleotide

SEQ ID NO: 537564 - DNA, 56 bp, Artificial; identical to SEQ ID NO: 305110
  Synthetic oligonucleotide

SEQ ID NO: 537565 - DNA, 60 bp, Artificial; identical to SEQ ID NO: 305111
  Synthetic oligonucleotide

SEQ ID NO: 537566 - DNA, 55 bp, Artificial; identical to SEQ ID NO: 305114
  Synthetic oligonucleotide

SEQ ID NO: 537567 - DNA, 59 bp, Artificial; identical to SEQ ID NO: 305117
  Synthetic oligonucleotide

SEQ ID NO: 537568 - DNA, 58 bp, Artificial; identical to SEQ ID NO: 305119
  Synthetic oligonucleotide

SEQ ID NO: 537569 - DNA, 60 bp, Artificial; identical to SEQ ID NO: 305122
  Synthetic oligonucleotide

SEQ ID NO: 537570 - DNA, 60 bp, Artificial; identical to SEQ ID NO: 305123
  Synthetic oligonucleotide

SEQ ID NO: 537571 - DNA, 60 bp, Artificial; identical to SEQ ID NO: 305129
  Synthetic oligonucleotide

SEQ ID NO: 537572 - DNA, 55 bp, Artificial; identical to SEQ ID NO: 305131
  Synthetic oligonucleotide

SEQ ID NO: 537573 - DNA, 58 bp, Artificial; identical to SEQ ID NO: 305135
  Synthetic oligonucleotide

SEQ ID NO: 537574 - DNA, 60 bp, Artificial; identical to SEQ ID NO: 305137
  Synthetic oligonucleotide

SEQ ID NO: 537575 - DNA, 59 bp, Artificial; identical to SEQ ID NO: 305138
  Synthetic oligonucleotide

SEQ ID NO: 537576 - DNA, 53 bp, Artificial; identical to SEQ ID NO: 305145
  Synthetic oligonucleotide

SEQ ID NO: 537577 - DNA, 58 bp, Artificial; identical to SEQ ID NO: 305148
  Synthetic oligonucleotide

SEQ ID NO: 537578 - DNA, 57 bp, Artificial; identical to SEQ ID NO: 305150
  Synthetic oligonucleotide

SEQ ID NO: 537579 - DNA, 55 bp, Artificial; identical to SEQ ID NO: 11169
  Synthetic oligonucleotide

SEQ ID NO: 537580 - DNA, 60 bp, Artificial; identical to SEQ ID NO: 305152
  Synthetic oligonucleotide

SEQ ID NO: 537581 - DNA, 55 bp, Artificial; identical to SEQ ID NO: 305153
  Synthetic oligonucleotide

SEQ ID NO: 537582 - DNA, 58 bp, Artificial; identical to SEQ ID NO: 305157
  Synthetic oligonucleotide

SEQ ID NO: 537583 - DNA, 59 bp, Artificial; identical to SEQ ID NO: 305159
  Synthetic oligonucleotide

SEQ ID NO: 537584 - DNA, 51 bp, Artificial; identical to SEQ ID NO: 305160
  Synthetic oligonucleotide

SEQ ID NO: 537585 - DNA, 60 bp, Artificial; identical to SEQ ID NO: 305162
  Synthetic oligonucleotide

SEQ ID NO: 537586 - DNA, 55 bp, Artificial; identical to SEQ ID NO: 305167
  Synthetic oligonucleotide

SEQ ID NO: 537587 - DNA, 54 bp, Artificial; identical to SEQ ID NO: 305168
  Synthetic oligonucleotide

SEQ ID NO: 537588 - DNA, 60 bp, Artificial; identical to SEQ ID NO: 305170
  Synthetic oligonucleotide

SEQ ID NO: 537589 - DNA, 60 bp, Artificial; identical to SEQ ID NO: 305174
  Synthetic oligonucleotide

SEQ ID NO: 537590 - DNA, 60 bp, Artificial; identical to SEQ ID NO: 305175
  Synthetic oligonucleotide

SEQ ID NO: 537591 - DNA, 55 bp, Artificial; identical to SEQ ID NO: 305182
  Synthetic oligonucleotide

SEQ ID NO: 537592 - DNA, 58 bp, Artificial; identical to SEQ ID NO: 305184
  Synthetic oligonucleotide

SEQ ID NO: 537593 - DNA, 60 bp, Artificial; identical to SEQ ID NO: 305185
  Synthetic oligonucleotide

SEQ ID NO: 537594 - DNA, 58 bp, Artificial; identical to SEQ ID NO: 305189
  Synthetic oligonucleotide

SEQ ID NO: 537595 - DNA, 57 bp, Artificial; identical to SEQ ID NO: 305190
  Synthetic oligonucleotide

SEQ ID NO: 537596 - DNA, 60 bp, Artificial; identical to SEQ ID NO: 305191
  Synthetic oligonucleotide

SEQ ID NO: 537597 - DNA, 59 bp, Artificial; identical to SEQ ID NO: 305193
  Synthetic oligonucleotide

SEQ ID NO: 537598 - DNA, 60 bp, Artificial; identical to SEQ ID NO: 305194
  Synthetic oligonucleotide

SEQ ID NO: 537599 - DNA, 60 bp, Artificial; identical to SEQ ID NO: 305200
  Synthetic oligonucleotide

SEQ ID NO: 537600 - DNA, 55 bp, Artificial; identical to SEQ ID NO: 305201
  Synthetic oligonucleotide

SEQ ID NO: 537601 - DNA, 53 bp, Artificial; identical to SEQ ID NO: 305203
  Synthetic oligonucleotide

SEQ ID NO: 537602 - DNA, 60 bp, Artificial; identical to SEQ ID NO: 305204
  Synthetic oligonucleotide

SEQ ID NO: 537603 - DNA, 57 bp, Artificial; identical to SEQ ID NO: 305205
  Synthetic oligonucleotide

SEQ ID NO: 537604 - DNA, 60 bp, Artificial; identical to SEQ ID NO: 305206
  Synthetic oligonucleotide

SEQ ID NO: 537605 - DNA, 60 bp, Artificial; identical to SEQ ID NO: 305209
  Synthetic oligonucleotide

SEQ ID NO: 537606 - DNA, 59 bp, Artificial; identical to SEQ ID NO: 305211
  Synthetic oligonucleotide

SEQ ID NO: 537607 - DNA, 60 bp, Artificial; identical to SEQ ID NO: 305212
  Synthetic oligonucleotide

SEQ ID NO: 537608 - DNA, 54 bp, Artificial; identical to SEQ ID NO: 305213
  Synthetic oligonucleotide

SEQ ID NO: 537609 - DNA, 56 bp, Artificial; identical to SEQ ID NO: 305217
  Synthetic oligonucleotide

SEQ ID NO: 537610 - DNA, 60 bp, Artificial; identical to SEQ ID NO: 305219
  Synthetic oligonucleotide

SEQ ID NO: 537611 - DNA, 56 bp, Artificial; identical to SEQ ID NO: 18414
  Synthetic oligonucleotide

SEQ ID NO: 537612 - DNA, 59 bp, Artificial; identical to SEQ ID NO: 305220
  Synthetic oligonucleotide

SEQ ID NO: 537613 - DNA, 57 bp, Artificial; identical to SEQ ID NO: 305222
  Synthetic oligonucleotide

SEQ ID NO: 537614 - DNA, 57 bp, Artificial; identical to SEQ ID NO: 305224
  Synthetic oligonucleotide

SEQ ID NO: 537615 - DNA, 55 bp, Artificial; identical to SEQ ID NO: 305229
  Synthetic oligonucleotide

SEQ ID NO: 537616 - DNA, 58 bp, Artificial; identical to SEQ ID NO: 305232
  Synthetic oligonucleotide

SEQ ID NO: 537617 - DNA, 54 bp, Artificial; identical to SEQ ID NO: 305234
  Synthetic oligonucleotide

SEQ ID NO: 537618 - DNA, 53 bp, Artificial; identical to SEQ ID NO: 305236
  Synthetic oligonucleotide

SEQ ID NO: 537619 - DNA, 56 bp, Artificial; identical to SEQ ID NO: 305237
  Synthetic oligonucleotide

SEQ ID NO: 537620 - DNA, 50 bp, Artificial; identical to SEQ ID NO: 305238
  Synthetic oligonucleotide

SEQ ID NO: 537621 - DNA, 52 bp, Artificial; identical to SEQ ID NO: 305239
  Synthetic oligonucleotide

SEQ ID NO: 537622 - DNA, 56 bp, Artificial; identical to SEQ ID NO: 305240
  Synthetic oligonucleotide

SEQ ID NO: 537623 - DNA, 52 bp, Artificial; identical to SEQ ID NO: 305242
  Synthetic oligonucleotide

SEQ ID NO: 537624 - DNA, 52 bp, Artificial; identical to SEQ ID NO: 305243
  Synthetic oligonucleotide

SEQ ID NO: 537625 - DNA, 54 bp, Artificial; identical to SEQ ID NO: 305247
  Synthetic oligonucleotide

SEQ ID NO: 537626 - DNA, 51 bp, Artificial; identical to SEQ ID NO: 305248
  Synthetic oligonucleotide

SEQ ID NO: 537627 - DNA, 50 bp, Artificial; identical to SEQ ID NO: 305250
  Synthetic oligonucleotide

SEQ ID NO: 537628 - DNA, 58 bp, Artificial; identical to SEQ ID NO: 305251
  Synthetic oligonucleotide

SEQ ID NO: 537629 - DNA, 58 bp, Artificial; identical to SEQ ID NO: 305252
  Synthetic oligonucleotide

SEQ ID NO: 537630 - DNA, 56 bp, Artificial; identical to SEQ ID NO: 305253
  Synthetic oligonucleotide

SEQ ID NO: 537631 - DNA, 58 bp, Artificial; identical to SEQ ID NO: 305255
  Synthetic oligonucleotide

SEQ ID NO: 537632 - DNA, 56 bp, Artificial; identical to SEQ ID NO: 305256
  Synthetic oligonucleotide

SEQ ID NO: 537633 - DNA, 55 bp, Artificial; identical to SEQ ID NO: 305259
  Synthetic oligonucleotide

SEQ ID NO: 537634 - DNA, 59 bp, Artificial; identical to SEQ ID NO: 305260
  Synthetic oligonucleotide

SEQ ID NO: 537635 - DNA, 55 bp, Artificial; identical to SEQ ID NO: 305262
  Synthetic oligonucleotide

SEQ ID NO: 537636 - DNA, 52 bp, Artificial; identical to SEQ ID NO: 305263
  Synthetic oligonucleotide

SEQ ID NO: 537637 - DNA, 55 bp, Artificial; identical to SEQ ID NO: 305265
  Synthetic oligonucleotide

SEQ ID NO: 537638 - DNA, 55 bp, Artificial; identical to SEQ ID NO: 305271
  Synthetic oligonucleotide

SEQ ID NO: 537639 - DNA, 51 bp, Artificial; identical to SEQ ID NO: 305273
  Synthetic oligonucleotide

SEQ ID NO: 537640 - DNA, 60 bp, Artificial; identical to SEQ ID NO: 305275
  Synthetic oligonucleotide

SEQ ID NO: 537641 - DNA, 56 bp, Artificial; identical to SEQ ID NO: 305276
  Synthetic oligonucleotide

SEQ ID NO: 537642 - DNA, 55 bp, Artificial; identical to SEQ ID NO: 305282
  Synthetic oligonucleotide

SEQ ID NO: 537643 - DNA, 60 bp, Artificial; identical to SEQ ID NO: 305285
  Synthetic oligonucleotide

SEQ ID NO: 537644 - DNA, 57 bp, Artificial; identical to SEQ ID NO: 305286
  Synthetic oligonucleotide

SEQ ID NO: 537645 - DNA, 60 bp, Artificial; identical to SEQ ID NO: 305289
  Synthetic oligonucleotide

SEQ ID NO: 537646 - DNA, 57 bp, Artificial; identical to SEQ ID NO: 305292
  Synthetic oligonucleotide

SEQ ID NO: 537647 - DNA, 60 bp, Artificial; identical to SEQ ID NO: 305295
  Synthetic oligonucleotide

SEQ ID NO: 537648 - DNA, 53 bp, Artificial; identical to SEQ ID NO: 305297
  Synthetic oligonucleotide

SEQ ID NO: 537649 - DNA, 55 bp, Artificial; identical to SEQ ID NO: 305299
  Synthetic oligonucleotide

SEQ ID NO: 537650 - DNA, 59 bp, Artificial; identical to SEQ ID NO: 305300
  Synthetic oligonucleotide

SEQ ID NO: 537651 - DNA, 55 bp, Artificial; identical to SEQ ID NO: 305304
  Synthetic oligonucleotide

SEQ ID NO: 537652 - DNA, 60 bp, Artificial; identical to SEQ ID NO: 305306
  Synthetic oligonucleotide

SEQ ID NO: 537653 - DNA, 52 bp, Artificial; identical to SEQ ID NO: 305307
  Synthetic oligonucleotide

SEQ ID NO: 537654 - DNA, 60 bp, Artificial; identical to SEQ ID NO: 305311
  Synthetic oligonucleotide

SEQ ID NO: 537655 - DNA, 51 bp, Artificial; identical to SEQ ID NO: 305312
  Synthetic oligonucleotide

SEQ ID NO: 537656 - DNA, 52 bp, Artificial; identical to SEQ ID NO: 305313
  Synthetic oligonucleotide

SEQ ID NO: 537657 - DNA, 56 bp, Artificial; identical to SEQ ID NO: 305315
  Synthetic oligonucleotide

SEQ ID NO: 537658 - DNA, 58 bp, Artificial; identical to SEQ ID NO: 305317
  Synthetic oligonucleotide

SEQ ID NO: 537659 - DNA, 52 bp, Artificial; identical to SEQ ID NO: 305320
  Synthetic oligonucleotide

SEQ ID NO: 537660 - DNA, 55 bp, Artificial; identical to SEQ ID NO: 305324
  Synthetic oligonucleotide

SEQ ID NO: 537661 - DNA, 57 bp, Artificial; identical to SEQ ID NO: 305328
  Synthetic oligonucleotide

SEQ ID NO: 537662 - DNA, 60 bp, Artificial; identical to SEQ ID NO: 14484
  Synthetic oligonucleotide

SEQ ID NO: 537663 - DNA, 60 bp, Artificial; identical to SEQ ID NO: 305333
  Synthetic oligonucleotide

SEQ ID NO: 537664 - DNA, 59 bp, Artificial; identical to SEQ ID NO: 305335
  Synthetic oligonucleotide

SEQ ID NO: 537665 - DNA, 60 bp, Artificial; identical to SEQ ID NO: 305336
  Synthetic oligonucleotide

SEQ ID NO: 537666 - DNA, 58 bp, Artificial; identical to SEQ ID NO: 305337
  Synthetic oligonucleotide

SEQ ID NO: 537667 - DNA, 54 bp, Artificial; identical to SEQ ID NO: 305344
  Synthetic oligonucleotide

SEQ ID NO: 537668 - DNA, 55 bp, Artificial; identical to SEQ ID NO: 305345
  Synthetic oligonucleotide

SEQ ID NO: 537669 - DNA, 55 bp, Artificial; identical to SEQ ID NO: 305346
  Synthetic oligonucleotide

SEQ ID NO: 537670 - DNA, 53 bp, Artificial; identical to SEQ ID NO: 305351
  Synthetic oligonucleotide

SEQ ID NO: 537671 - DNA, 52 bp, Artificial; identical to SEQ ID NO: 305352
  Synthetic oligonucleotide

SEQ ID NO: 537672 - DNA, 50 bp, Artificial; identical to SEQ ID NO: 305355
  Synthetic oligonucleotide

SEQ ID NO: 537673 - DNA, 55 bp, Artificial; identical to SEQ ID NO: 305357
  Synthetic oligonucleotide

SEQ ID NO: 537674 - DNA, 54 bp, Artificial; identical to SEQ ID NO: 18170
  Synthetic oligonucleotide

SEQ ID NO: 537675 - DNA, 52 bp, Artificial; identical to SEQ ID NO: 305360
  Synthetic oligonucleotide

SEQ ID NO: 537676 - DNA, 59 bp, Artificial; identical to SEQ ID NO: 19301
  Synthetic oligonucleotide

SEQ ID NO: 537677 - DNA, 51 bp, Artificial; identical to SEQ ID NO: 305367
  Synthetic oligonucleotide

SEQ ID NO: 537678 - DNA, 55 bp, Artificial; identical to SEQ ID NO: 305368
  Synthetic oligonucleotide

SEQ ID NO: 537679 - DNA, 60 bp, Artificial; identical to SEQ ID NO: 305369
  Synthetic oligonucleotide

SEQ ID NO: 537680 - DNA, 52 bp, Artificial; identical to SEQ ID NO: 305374
  Synthetic oligonucleotide

SEQ ID NO: 537681 - DNA, 59 bp, Artificial; identical to SEQ ID NO: 305377
  Synthetic oligonucleotide

SEQ ID NO: 537682 - DNA, 60 bp, Artificial; identical to SEQ ID NO: 305378
  Synthetic oligonucleotide

SEQ ID NO: 537683 - DNA, 56 bp, Artificial; identical to SEQ ID NO: 305379
  Synthetic oligonucleotide

SEQ ID NO: 537684 - DNA, 55 bp, Artificial; identical to SEQ ID NO: 305381
  Synthetic oligonucleotide

SEQ ID NO: 537685 - DNA, 50 bp, Artificial; identical to SEQ ID NO: 305382
  Synthetic oligonucleotide

SEQ ID NO: 537686 - DNA, 54 bp, Artificial; identical to SEQ ID NO: 18975
  Synthetic oligonucleotide

SEQ ID NO: 537687 - DNA, 55 bp, Artificial; identical to SEQ ID NO: 305385
  Synthetic oligonucleotide

SEQ ID NO: 537688 - DNA, 48 bp, Artificial; identical to SEQ ID NO: 305387
  Synthetic oligonucleotide

SEQ ID NO: 537689 - DNA, 50 bp, Artificial; identical to SEQ ID NO: 305388
  Synthetic oligonucleotide

SEQ ID NO: 537690 - DNA, 51 bp, Artificial; identical to SEQ ID NO: 305389
  Synthetic oligonucleotide

SEQ ID NO: 537691 - DNA, 51 bp, Artificial; identical to SEQ ID NO: 305390
  Synthetic oligonucleotide

SEQ ID NO: 537692 - DNA, 57 bp, Artificial; identical to SEQ ID NO: 305391
  Synthetic oligonucleotide

SEQ ID NO: 537693 - DNA, 57 bp, Artificial; identical to SEQ ID NO: 305393
  Synthetic oligonucleotide

SEQ ID NO: 537694 - DNA, 54 bp, Artificial; identical to SEQ ID NO: 305395
  Synthetic oligonucleotide

SEQ ID NO: 537695 - DNA, 58 bp, Artificial; identical to SEQ ID NO: 305397
  Synthetic oligonucleotide

SEQ ID NO: 537696 - DNA, 60 bp, Artificial; identical to SEQ ID NO: 305398
  Synthetic oligonucleotide

SEQ ID NO: 537697 - DNA, 58 bp, Artificial; identical to SEQ ID NO: 305399
  Synthetic oligonucleotide

SEQ ID NO: 537698 - DNA, 49 bp, Artificial; identical to SEQ ID NO: 305400
  Synthetic oligonucleotide

SEQ ID NO: 537699 - DNA, 55 bp, Artificial; identical to SEQ ID NO: 305401
  Synthetic oligonucleotide

SEQ ID NO: 537700 - DNA, 57 bp, Artificial; identical to SEQ ID NO: 305402
  Synthetic oligonucleotide

SEQ ID NO: 537701 - DNA, 56 bp, Artificial; identical to SEQ ID NO: 305403
  Synthetic oligonucleotide

SEQ ID NO: 537702 - DNA, 56 bp, Artificial; identical to SEQ ID NO: 305404
  Synthetic oligonucleotide

SEQ ID NO: 537703 - DNA, 55 bp, Artificial; identical to SEQ ID NO: 305405
  Synthetic oligonucleotide

SEQ ID NO: 537704 - DNA, 52 bp, Artificial; identical to SEQ ID NO: 305407
  Synthetic oligonucleotide

SEQ ID NO: 537705 - DNA, 52 bp, Artificial; identical to SEQ ID NO: 305409
  Synthetic oligonucleotide

SEQ ID NO: 537706 - DNA, 52 bp, Artificial; identical to SEQ ID NO: 305412
  Synthetic oligonucleotide

SEQ ID NO: 537707 - DNA, 57 bp, Artificial; identical to SEQ ID NO: 305414
  Synthetic oligonucleotide

SEQ ID NO: 537708 - DNA, 60 bp, Artificial; identical to SEQ ID NO: 10927
  Synthetic oligonucleotide

SEQ ID NO: 537709 - DNA, 54 bp, Artificial; identical to SEQ ID NO: 305420
  Synthetic oligonucleotide

SEQ ID NO: 537710 - DNA, 58 bp, Artificial; identical to SEQ ID NO: 305421
  Synthetic oligonucleotide

SEQ ID NO: 537711 - DNA, 58 bp, Artificial; identical to SEQ ID NO: 305427
  Synthetic oligonucleotide

SEQ ID NO: 537712 - DNA, 59 bp, Artificial; identical to SEQ ID NO: 305428
  Synthetic oligonucleotide

SEQ ID NO: 537713 - DNA, 59 bp, Artificial; identical to SEQ ID NO: 305429
  Synthetic oligonucleotide

SEQ ID NO: 537714 - DNA, 55 bp, Artificial; identical to SEQ ID NO: 305430
  Synthetic oligonucleotide

SEQ ID NO: 537715 - DNA, 60 bp, Artificial; identical to SEQ ID NO: 305431
  Synthetic oligonucleotide

SEQ ID NO: 537716 - DNA, 60 bp, Artificial; identical to SEQ ID NO: 305432
  Synthetic oligonucleotide

SEQ ID NO: 537717 - DNA, 59 bp, Artificial; identical to SEQ ID NO: 305434
  Synthetic oligonucleotide

SEQ ID NO: 537718 - DNA, 50 bp, Artificial; identical to SEQ ID NO: 305437
  Synthetic oligonucleotide

SEQ ID NO: 537719 - DNA, 58 bp, Artificial; identical to SEQ ID NO: 305440
  Synthetic oligonucleotide

SEQ ID NO: 537720 - DNA, 55 bp, Artificial; identical to SEQ ID NO: 305444
  Synthetic oligonucleotide

SEQ ID NO: 537721 - DNA, 57 bp, Artificial; identical to SEQ ID NO: 305445
  Synthetic oligonucleotide

SEQ ID NO: 537722 - DNA, 55 bp, Artificial; identical to SEQ ID NO: 305447
  Synthetic oligonucleotide

SEQ ID NO: 537723 - DNA, 58 bp, Artificial; identical to SEQ ID NO: 305448
  Synthetic oligonucleotide

SEQ ID NO: 537724 - DNA, 60 bp, Artificial; identical to SEQ ID NO: 305451
  Synthetic oligonucleotide

SEQ ID NO: 537725 - DNA, 59 bp, Artificial; identical to SEQ ID NO: 305453
  Synthetic oligonucleotide

SEQ ID NO: 537726 - DNA, 58 bp, Artificial; identical to SEQ ID NO: 305455
  Synthetic oligonucleotide

SEQ ID NO: 537727 - DNA, 57 bp, Artificial; identical to SEQ ID NO: 305456
  Synthetic oligonucleotide

SEQ ID NO: 537728 - DNA, 55 bp, Artificial; identical to SEQ ID NO: 305457
  Synthetic oligonucleotide

SEQ ID NO: 537729 - DNA, 60 bp, Artificial; identical to SEQ ID NO: 305460
  Synthetic oligonucleotide

SEQ ID NO: 537730 - DNA, 57 bp, Artificial; identical to SEQ ID NO: 305467
  Synthetic oligonucleotide

SEQ ID NO: 537731 - DNA, 55 bp, Artificial; identical to SEQ ID NO: 305468
  Synthetic oligonucleotide

SEQ ID NO: 537732 - DNA, 55 bp, Artificial; identical to SEQ ID NO: 305469
  Synthetic oligonucleotide

SEQ ID NO: 537733 - DNA, 60 bp, Artificial; identical to SEQ ID NO: 305470
  Synthetic oligonucleotide

SEQ ID NO: 537734 - DNA, 55 bp, Artificial; identical to SEQ ID NO: 305472
  Synthetic oligonucleotide

SEQ ID NO: 537735 - DNA, 53 bp, Artificial; identical to SEQ ID NO: 12637
  Synthetic oligonucleotide

SEQ ID NO: 537736 - DNA, 60 bp, Artificial; identical to SEQ ID NO: 305477
  Synthetic oligonucleotide

SEQ ID NO: 537737 - DNA, 53 bp, Artificial; identical to SEQ ID NO: 305478
  Synthetic oligonucleotide

SEQ ID NO: 537738 - DNA, 55 bp, Artificial; identical to SEQ ID NO: 305479
  Synthetic oligonucleotide

SEQ ID NO: 537739 - DNA, 52 bp, Artificial; identical to SEQ ID NO: 305480
  Synthetic oligonucleotide

SEQ ID NO: 537740 - DNA, 52 bp, Artificial; identical to SEQ ID NO: 305481
  Synthetic oligonucleotide

SEQ ID NO: 537741 - DNA, 58 bp, Artificial; identical to SEQ ID NO: 305482
  Synthetic oligonucleotide

SEQ ID NO: 537742 - DNA, 60 bp, Artificial; identical to SEQ ID NO: 305485
  Synthetic oligonucleotide

SEQ ID NO: 537743 - DNA, 60 bp, Artificial; identical to SEQ ID NO: 305488
  Synthetic oligonucleotide

SEQ ID NO: 537744 - DNA, 58 bp, Artificial; identical to SEQ ID NO: 305491
  Synthetic oligonucleotide

SEQ ID NO: 537745 - DNA, 59 bp, Artificial; identical to SEQ ID NO: 305494
  Synthetic oligonucleotide

SEQ ID NO: 537746 - DNA, 60 bp, Artificial; identical to SEQ ID NO: 305497
  Synthetic oligonucleotide

SEQ ID NO: 537747 - DNA, 55 bp, Artificial; identical to SEQ ID NO: 305498
  Synthetic oligonucleotide

SEQ ID NO: 537748 - DNA, 56 bp, Artificial; identical to SEQ ID NO: 16831
  Synthetic oligonucleotide

SEQ ID NO: 537749 - DNA, 51 bp, Artificial; identical to SEQ ID NO: 305501
  Synthetic oligonucleotide

SEQ ID NO: 537750 - DNA, 60 bp, Artificial; identical to SEQ ID NO: 15467
  Synthetic oligonucleotide

SEQ ID NO: 537751 - DNA, 55 bp, Artificial; identical to SEQ ID NO: 305502
  Synthetic oligonucleotide

SEQ ID NO: 537752 - DNA, 60 bp, Artificial; identical to SEQ ID NO: 305504
  Synthetic oligonucleotide

SEQ ID NO: 537753 - DNA, 60 bp, Artificial; identical to SEQ ID NO: 305505
  Synthetic oligonucleotide

SEQ ID NO: 537754 - DNA, 51 bp, Artificial; identical to SEQ ID NO: 305506
  Synthetic oligonucleotide

SEQ ID NO: 537755 - DNA, 59 bp, Artificial; identical to SEQ ID NO: 305508
  Synthetic oligonucleotide

SEQ ID NO: 537756 - DNA, 60 bp, Artificial; identical to SEQ ID NO: 305509
  Synthetic oligonucleotide

SEQ ID NO: 537757 - DNA, 55 bp, Artificial; identical to SEQ ID NO: 305510
  Synthetic oligonucleotide

SEQ ID NO: 537758 - DNA, 60 bp, Artificial; identical to SEQ ID NO: 305512
  Synthetic oligonucleotide

SEQ ID NO: 537759 - DNA, 56 bp, Artificial; identical to SEQ ID NO: 305513
  Synthetic oligonucleotide

SEQ ID NO: 537760 - DNA, 56 bp, Artificial; identical to SEQ ID NO: 305518
  Synthetic oligonucleotide

SEQ ID NO: 537761 - DNA, 60 bp, Artificial; identical to SEQ ID NO: 305521
  Synthetic oligonucleotide

SEQ ID NO: 537762 - DNA, 60 bp, Artificial; identical to SEQ ID NO: 305523
  Synthetic oligonucleotide

SEQ ID NO: 537763 - DNA, 58 bp, Artificial; identical to SEQ ID NO: 305526
  Synthetic oligonucleotide

SEQ ID NO: 537764 - DNA, 58 bp, Artificial; identical to SEQ ID NO: 305527
  Synthetic oligonucleotide

SEQ ID NO: 537765 - DNA, 55 bp, Artificial; identical to SEQ ID NO: 305528
  Synthetic oligonucleotide

SEQ ID NO: 537766 - DNA, 54 bp, Artificial; identical to SEQ ID NO: 305529
  Synthetic oligonucleotide

SEQ ID NO: 537767 - DNA, 60 bp, Artificial; identical to SEQ ID NO: 305530
  Synthetic oligonucleotide

SEQ ID NO: 537768 - DNA, 55 bp, Artificial; identical to SEQ ID NO: 305533
  Synthetic oligonucleotide

SEQ ID NO: 537769 - DNA, 55 bp, Artificial; identical to SEQ ID NO: 305536
  Synthetic oligonucleotide

SEQ ID NO: 537770 - DNA, 60 bp, Artificial; identical to SEQ ID NO: 305539
  Synthetic oligonucleotide

SEQ ID NO: 537771 - DNA, 56 bp, Artificial; identical to SEQ ID NO: 305541
  Synthetic oligonucleotide

SEQ ID NO: 537772 - DNA, 59 bp, Artificial; identical to SEQ ID NO: 305542
  Synthetic oligonucleotide

SEQ ID NO: 537773 - DNA, 57 bp, Artificial; identical to SEQ ID NO: 305544
  Synthetic oligonucleotide

SEQ ID NO: 537774 - DNA, 57 bp, Artificial; identical to SEQ ID NO: 305545
  Synthetic oligonucleotide

SEQ ID NO: 537775 - DNA, 53 bp, Artificial; identical to SEQ ID NO: 305547
  Synthetic oligonucleotide

SEQ ID NO: 537776 - DNA, 60 bp, Artificial; identical to SEQ ID NO: 305548
  Synthetic oligonucleotide

SEQ ID NO: 537777 - DNA, 56 bp, Artificial; identical to SEQ ID NO: 6995
  Synthetic oligonucleotide

SEQ ID NO: 537778 - DNA, 56 bp, Artificial; identical to SEQ ID NO: 305551
  Synthetic oligonucleotide

SEQ ID NO: 537779 - DNA, 58 bp, Artificial; identical to SEQ ID NO: 305553
  Synthetic oligonucleotide

SEQ ID NO: 537780 - DNA, 55 bp, Artificial; identical to SEQ ID NO: 305556
  Synthetic oligonucleotide

SEQ ID NO: 537781 - DNA, 60 bp, Artificial; identical to SEQ ID NO: 305558
  Synthetic oligonucleotide

SEQ ID NO: 537782 - DNA, 53 bp, Artificial; identical to SEQ ID NO: 305560
  Synthetic oligonucleotide

SEQ ID NO: 537783 - DNA, 60 bp, Artificial; identical to SEQ ID NO: 305561
  Synthetic oligonucleotide

SEQ ID NO: 537784 - DNA, 60 bp, Artificial; identical to SEQ ID NO: 305572
  Synthetic oligonucleotide

SEQ ID NO: 537785 - DNA, 55 bp, Artificial; identical to SEQ ID NO: 11344
  Synthetic oligonucleotide

SEQ ID NO: 537786 - DNA, 56 bp, Artificial; identical to SEQ ID NO: 305574
  Synthetic oligonucleotide

SEQ ID NO: 537787 - DNA, 51 bp, Artificial; identical to SEQ ID NO: 305577
  Synthetic oligonucleotide

SEQ ID NO: 537788 - DNA, 58 bp, Artificial; identical to SEQ ID NO: 305579
  Synthetic oligonucleotide

SEQ ID NO: 537789 - DNA, 53 bp, Artificial; identical to SEQ ID NO: 305581
  Synthetic oligonucleotide

SEQ ID NO: 537790 - DNA, 58 bp, Artificial; identical to SEQ ID NO: 305582
  Synthetic oligonucleotide

SEQ ID NO: 537791 - DNA, 55 bp, Artificial; identical to SEQ ID NO: 305585
  Synthetic oligonucleotide

SEQ ID NO: 537792 - DNA, 60 bp, Artificial; identical to SEQ ID NO: 305586
  Synthetic oligonucleotide

SEQ ID NO: 537793 - DNA, 59 bp, Artificial; identical to SEQ ID NO: 305587
  Synthetic oligonucleotide

SEQ ID NO: 537794 - DNA, 60 bp, Artificial; identical to SEQ ID NO: 305590
  Synthetic oligonucleotide

SEQ ID NO: 537795 - DNA, 59 bp, Artificial; identical to SEQ ID NO: 305593
  Synthetic oligonucleotide

SEQ ID NO: 537796 - DNA, 54 bp, Artificial; identical to SEQ ID NO: 305594
  Synthetic oligonucleotide

SEQ ID NO: 537797 - DNA, 54 bp, Artificial; identical to SEQ ID NO: 305595
  Synthetic oligonucleotide

SEQ ID NO: 537798 - DNA, 50 bp, Artificial; identical to SEQ ID NO: 305597
  Synthetic oligonucleotide

SEQ ID NO: 537799 - DNA, 55 bp, Artificial; identical to SEQ ID NO: 19706
  Synthetic oligonucleotide

SEQ ID NO: 537800 - DNA, 55 bp, Artificial; identical to SEQ ID NO: 305600
  Synthetic oligonucleotide

SEQ ID NO: 537801 - DNA, 54 bp, Artificial; identical to SEQ ID NO: 305604
  Synthetic oligonucleotide

SEQ ID NO: 537802 - DNA, 59 bp, Artificial; identical to SEQ ID NO: 305606
  Synthetic oligonucleotide

SEQ ID NO: 537803 - DNA, 54 bp, Artificial; identical to SEQ ID NO: 305607
  Synthetic oligonucleotide

SEQ ID NO: 537804 - DNA, 51 bp, Artificial; identical to SEQ ID NO: 305609
  Synthetic oligonucleotide

SEQ ID NO: 537805 - DNA, 55 bp, Artificial; identical to SEQ ID NO: 305610
  Synthetic oligonucleotide

SEQ ID NO: 537806 - DNA, 58 bp, Artificial; identical to SEQ ID NO: 305611
  Synthetic oligonucleotide

SEQ ID NO: 537807 - DNA, 58 bp, Artificial; identical to SEQ ID NO: 18375
  Synthetic oligonucleotide

SEQ ID NO: 537808 - DNA, 55 bp, Artificial; identical to SEQ ID NO: 305617
  Synthetic oligonucleotide

SEQ ID NO: 537809 - DNA, 58 bp, Artificial; identical to SEQ ID NO: 305618
  Synthetic oligonucleotide

SEQ ID NO: 537810 - DNA, 56 bp, Artificial; identical to SEQ ID NO: 305623
  Synthetic oligonucleotide

SEQ ID NO: 537811 - DNA, 60 bp, Artificial; identical to SEQ ID NO: 305625
  Synthetic oligonucleotide

SEQ ID NO: 537812 - DNA, 58 bp, Artificial; identical to SEQ ID NO: 7576
  Synthetic oligonucleotide

SEQ ID NO: 537813 - DNA, 59 bp, Artificial; identical to SEQ ID NO: 305633
  Synthetic oligonucleotide

SEQ ID NO: 537814 - DNA, 59 bp, Artificial; identical to SEQ ID NO: 305634
  Synthetic oligonucleotide

SEQ ID NO: 537815 - DNA, 56 bp, Artificial; identical to SEQ ID NO: 305635
  Synthetic oligonucleotide

SEQ ID NO: 537816 - DNA, 60 bp, Artificial; identical to SEQ ID NO: 305636
  Synthetic oligonucleotide

SEQ ID NO: 537817 - DNA, 60 bp, Artificial; identical to SEQ ID NO: 305641
  Synthetic oligonucleotide

SEQ ID NO: 537818 - DNA, 60 bp, Artificial; identical to SEQ ID NO: 305642
  Synthetic oligonucleotide

SEQ ID NO: 537819 - DNA, 59 bp, Artificial; identical to SEQ ID NO: 305644
  Synthetic oligonucleotide

SEQ ID NO: 537820 - DNA, 57 bp, Artificial; identical to SEQ ID NO: 305647
  Synthetic oligonucleotide

SEQ ID NO: 537821 - DNA, 52 bp, Artificial; identical to SEQ ID NO: 305652
  Synthetic oligonucleotide

SEQ ID NO: 537822 - DNA, 55 bp, Artificial; identical to SEQ ID NO: 305654
  Synthetic oligonucleotide

SEQ ID NO: 537823 - DNA, 50 bp, Artificial; identical to SEQ ID NO: 305657
  Synthetic oligonucleotide

SEQ ID NO: 537824 - DNA, 53 bp, Artificial; identical to SEQ ID NO: 305661
  Synthetic oligonucleotide

SEQ ID NO: 537825 - DNA, 57 bp, Artificial; identical to SEQ ID NO: 305669
  Synthetic oligonucleotide

SEQ ID NO: 537826 - DNA, 50 bp, Artificial; identical to SEQ ID NO: 305670
  Synthetic oligonucleotide

SEQ ID NO: 537827 - DNA, 51 bp, Artificial; identical to SEQ ID NO: 305673
  Synthetic oligonucleotide

SEQ ID NO: 537828 - DNA, 55 bp, Artificial; identical to SEQ ID NO: 305684
  Synthetic oligonucleotide

SEQ ID NO: 537829 - DNA, 55 bp, Artificial; identical to SEQ ID NO: 305685
  Synthetic oligonucleotide

SEQ ID NO: 537830 - DNA, 55 bp, Artificial; identical to SEQ ID NO: 305686
  Synthetic oligonucleotide

SEQ ID NO: 537831 - DNA, 55 bp, Artificial; identical to SEQ ID NO: 305688
  Synthetic oligonucleotide

SEQ ID NO: 537832 - DNA, 60 bp, Artificial; identical to SEQ ID NO: 305692
  Synthetic oligonucleotide

SEQ ID NO: 537833 - DNA, 60 bp, Artificial; identical to SEQ ID NO: 305696
  Synthetic oligonucleotide

SEQ ID NO: 537834 - DNA, 60 bp, Artificial; identical to SEQ ID NO: 305697
  Synthetic oligonucleotide

SEQ ID NO: 537835 - DNA, 60 bp, Artificial; identical to SEQ ID NO: 305698
  Synthetic oligonucleotide

SEQ ID NO: 537836 - DNA, 53 bp, Artificial; identical to SEQ ID NO: 305699
  Synthetic oligonucleotide

SEQ ID NO: 537837 - DNA, 55 bp, Artificial; identical to SEQ ID NO: 305702
  Synthetic oligonucleotide

SEQ ID NO: 537838 - DNA, 53 bp, Artificial; identical to SEQ ID NO: 305704
  Synthetic oligonucleotide

SEQ ID NO: 537839 - DNA, 60 bp, Artificial; identical to SEQ ID NO: 305705
  Synthetic oligonucleotide

SEQ ID NO: 537840 - DNA, 58 bp, Artificial; identical to SEQ ID NO: 305706
  Synthetic oligonucleotide

SEQ ID NO: 537841 - DNA, 52 bp, Artificial; identical to SEQ ID NO: 305707
  Synthetic oligonucleotide

SEQ ID NO: 537842 - DNA, 60 bp, Artificial; identical to SEQ ID NO: 305711
  Synthetic oligonucleotide

SEQ ID NO: 537843 - DNA, 57 bp, Artificial; identical to SEQ ID NO: 305712
  Synthetic oligonucleotide

SEQ ID NO: 537844 - DNA, 54 bp, Artificial; identical to SEQ ID NO: 305718
  Synthetic oligonucleotide

SEQ ID NO: 537845 - DNA, 60 bp, Artificial; identical to SEQ ID NO: 305721
  Synthetic oligonucleotide

SEQ ID NO: 537846 - DNA, 60 bp, Artificial; identical to SEQ ID NO: 305723
  Synthetic oligonucleotide

SEQ ID NO: 537847 - DNA, 50 bp, Artificial; identical to SEQ ID NO: 305724
  Synthetic oligonucleotide

SEQ ID NO: 537848 - DNA, 55 bp, Artificial; identical to SEQ ID NO: 305726
  Synthetic oligonucleotide

SEQ ID NO: 537849 - DNA, 60 bp, Artificial; identical to SEQ ID NO: 305729
  Synthetic oligonucleotide

SEQ ID NO: 537850 - DNA, 60 bp, Artificial; identical to SEQ ID NO: 305732
  Synthetic oligonucleotide

SEQ ID NO: 537851 - DNA, 59 bp, Artificial; identical to SEQ ID NO: 305733
  Synthetic oligonucleotide

SEQ ID NO: 537852 - DNA, 54 bp, Artificial; identical to SEQ ID NO: 305734
  Synthetic oligonucleotide

SEQ ID NO: 537853 - DNA, 56 bp, Artificial; identical to SEQ ID NO: 305735
  Synthetic oligonucleotide

SEQ ID NO: 537854 - DNA, 55 bp, Artificial; identical to SEQ ID NO: 305736
  Synthetic oligonucleotide

SEQ ID NO: 537855 - DNA, 55 bp, Artificial; identical to SEQ ID NO: 305737
  Synthetic oligonucleotide

SEQ ID NO: 537856 - DNA, 56 bp, Artificial; identical to SEQ ID NO: 305742
  Synthetic oligonucleotide

SEQ ID NO: 537857 - DNA, 60 bp, Artificial; identical to SEQ ID NO: 305745
  Synthetic oligonucleotide

SEQ ID NO: 537858 - DNA, 55 bp, Artificial; identical to SEQ ID NO: 305746
  Synthetic oligonucleotide

SEQ ID NO: 537859 - DNA, 60 bp, Artificial; identical to SEQ ID NO: 305747
  Synthetic oligonucleotide

SEQ ID NO: 537860 - DNA, 55 bp, Artificial; identical to SEQ ID NO: 305750
  Synthetic oligonucleotide

SEQ ID NO: 537861 - DNA, 58 bp, Artificial; identical to SEQ ID NO: 305751
  Synthetic oligonucleotide

SEQ ID NO: 537862 - DNA, 51 bp, Artificial; identical to SEQ ID NO: 305753
  Synthetic oligonucleotide

SEQ ID NO: 537863 - DNA, 50 bp, Artificial; identical to SEQ ID NO: 305754
  Synthetic oligonucleotide

SEQ ID NO: 537864 - DNA, 55 bp, Artificial; identical to SEQ ID NO: 305755
  Synthetic oligonucleotide

SEQ ID NO: 537865 - DNA, 54 bp, Artificial; identical to SEQ ID NO: 305756
  Synthetic oligonucleotide

SEQ ID NO: 537866 - DNA, 60 bp, Artificial; identical to SEQ ID NO: 305757
  Synthetic oligonucleotide

SEQ ID NO: 537867 - DNA, 56 bp, Artificial; identical to SEQ ID NO: 305758
  Synthetic oligonucleotide

SEQ ID NO: 537868 - DNA, 60 bp, Artificial; identical to SEQ ID NO: 305764
  Synthetic oligonucleotide

SEQ ID NO: 537869 - DNA, 60 bp, Artificial; identical to SEQ ID NO: 305765
  Synthetic oligonucleotide

SEQ ID NO: 537870 - DNA, 60 bp, Artificial; identical to SEQ ID NO: 305771
  Synthetic oligonucleotide

SEQ ID NO: 537871 - DNA, 60 bp, Artificial; identical to SEQ ID NO: 305772
  Synthetic oligonucleotide

SEQ ID NO: 537872 - DNA, 53 bp, Artificial; identical to SEQ ID NO: 305773
  Synthetic oligonucleotide

SEQ ID NO: 537873 - DNA, 57 bp, Artificial; identical to SEQ ID NO: 187
  Synthetic oligonucleotide

SEQ ID NO: 537874 - DNA, 60 bp, Artificial; identical to SEQ ID NO: 305778
  Synthetic oligonucleotide

SEQ ID NO: 537875 - DNA, 60 bp, Artificial; identical to SEQ ID NO: 305786
  Synthetic oligonucleotide

SEQ ID NO: 537876 - DNA, 60 bp, Artificial; identical to SEQ ID NO: 305788
  Synthetic oligonucleotide

SEQ ID NO: 537877 - DNA, 60 bp, Artificial; identical to SEQ ID NO: 305791
  Synthetic oligonucleotide

SEQ ID NO: 537878 - DNA, 50 bp, Artificial; identical to SEQ ID NO: 305793
  Synthetic oligonucleotide

SEQ ID NO: 537879 - DNA, 53 bp, Artificial; identical to SEQ ID NO: 305794
  Synthetic oligonucleotide

SEQ ID NO: 537880 - DNA, 60 bp, Artificial; identical to SEQ ID NO: 305795
  Synthetic oligonucleotide

SEQ ID NO: 537881 - DNA, 60 bp, Artificial; identical to SEQ ID NO: 305798
  Synthetic oligonucleotide

SEQ ID NO: 537882 - DNA, 60 bp, Artificial; identical to SEQ ID NO: 305799
  Synthetic oligonucleotide

SEQ ID NO: 537883 - DNA, 58 bp, Artificial; identical to SEQ ID NO: 305801
  Synthetic oligonucleotide

SEQ ID NO: 537884 - DNA, 53 bp, Artificial; identical to SEQ ID NO: 305805
  Synthetic oligonucleotide

SEQ ID NO: 537885 - DNA, 54 bp, Artificial; identical to SEQ ID NO: 305806
  Synthetic oligonucleotide

SEQ ID NO: 537886 - DNA, 58 bp, Artificial; identical to SEQ ID NO: 305809
  Synthetic oligonucleotide

SEQ ID NO: 537887 - DNA, 55 bp, Artificial; identical to SEQ ID NO: 305811
  Synthetic oligonucleotide

SEQ ID NO: 537888 - DNA, 54 bp, Artificial; identical to SEQ ID NO: 305814
  Synthetic oligonucleotide

SEQ ID NO: 537889 - DNA, 58 bp, Artificial; identical to SEQ ID NO: 305816
  Synthetic oligonucleotide

SEQ ID NO: 537890 - DNA, 52 bp, Artificial; identical to SEQ ID NO: 305828
  Synthetic oligonucleotide

SEQ ID NO: 537891 - DNA, 60 bp, Artificial; identical to SEQ ID NO: 305832
  Synthetic oligonucleotide

SEQ ID NO: 537892 - DNA, 60 bp, Artificial; identical to SEQ ID NO: 305837
  Synthetic oligonucleotide

SEQ ID NO: 537893 - DNA, 59 bp, Artificial; identical to SEQ ID NO: 305840
  Synthetic oligonucleotide

SEQ ID NO: 537894 - DNA, 54 bp, Artificial; identical to SEQ ID NO: 305843
  Synthetic oligonucleotide

SEQ ID NO: 537895 - DNA, 55 bp, Artificial; identical to SEQ ID NO: 305846
  Synthetic oligonucleotide

SEQ ID NO: 537896 - DNA, 59 bp, Artificial; identical to SEQ ID NO: 305847
  Synthetic oligonucleotide

SEQ ID NO: 537897 - DNA, 57 bp, Artificial; identical to SEQ ID NO: 305848
  Synthetic oligonucleotide

SEQ ID NO: 537898 - DNA, 60 bp, Artificial; identical to SEQ ID NO: 305850
  Synthetic oligonucleotide

SEQ ID NO: 537899 - DNA, 56 bp, Artificial; identical to SEQ ID NO: 305852
  Synthetic oligonucleotide

SEQ ID NO: 537900 - DNA, 55 bp, Artificial; identical to SEQ ID NO: 305856
  Synthetic oligonucleotide

SEQ ID NO: 537901 - DNA, 55 bp, Artificial; identical to SEQ ID NO: 305858
  Synthetic oligonucleotide

SEQ ID NO: 537902 - DNA, 56 bp, Artificial; identical to SEQ ID NO: 305859
  Synthetic oligonucleotide

SEQ ID NO: 537903 - DNA, 55 bp, Artificial; identical to SEQ ID NO: 305863
  Synthetic oligonucleotide

SEQ ID NO: 537904 - DNA, 60 bp, Artificial; identical to SEQ ID NO: 305867
  Synthetic oligonucleotide

SEQ ID NO: 537905 - DNA, 55 bp, Artificial; identical to SEQ ID NO: 305869
  Synthetic oligonucleotide

SEQ ID NO: 537906 - DNA, 53 bp, Artificial; identical to SEQ ID NO: 305872
  Synthetic oligonucleotide

SEQ ID NO: 537907 - DNA, 57 bp, Artificial; identical to SEQ ID NO: 305875
  Synthetic oligonucleotide

SEQ ID NO: 537908 - DNA, 57 bp, Artificial; identical to SEQ ID NO: 19355
  Synthetic oligonucleotide

SEQ ID NO: 537909 - DNA, 55 bp, Artificial; identical to SEQ ID NO: 8429
  Synthetic oligonucleotide

SEQ ID NO: 537910 - DNA, 55 bp, Artificial; identical to SEQ ID NO: 305880
  Synthetic oligonucleotide

SEQ ID NO: 537911 - DNA, 60 bp, Artificial; identical to SEQ ID NO: 305881
  Synthetic oligonucleotide

SEQ ID NO: 537912 - DNA, 57 bp, Artificial; identical to SEQ ID NO: 305882
  Synthetic oligonucleotide

SEQ ID NO: 537913 - DNA, 53 bp, Artificial; identical to SEQ ID NO: 305883
  Synthetic oligonucleotide

SEQ ID NO: 537914 - DNA, 58 bp, Artificial; identical to SEQ ID NO: 305884
  Synthetic oligonucleotide

SEQ ID NO: 537915 - DNA, 60 bp, Artificial; identical to SEQ ID NO: 305889
  Synthetic oligonucleotide

SEQ ID NO: 537916 - DNA, 60 bp, Artificial; identical to SEQ ID NO: 29276
  Synthetic oligonucleotide

SEQ ID NO: 537917 - DNA, 60 bp, Artificial; identical to SEQ ID NO: 305890
  Synthetic oligonucleotide

SEQ ID NO: 537918 - DNA, 56 bp, Artificial; identical to SEQ ID NO: 19242
  Synthetic oligonucleotide

SEQ ID NO: 537919 - DNA, 57 bp, Artificial; identical to SEQ ID NO: 305892
  Synthetic oligonucleotide

SEQ ID NO: 537920 - DNA, 53 bp, Artificial; identical to SEQ ID NO: 305902
  Synthetic oligonucleotide

SEQ ID NO: 537921 - DNA, 55 bp, Artificial; identical to SEQ ID NO: 305903
  Synthetic oligonucleotide

SEQ ID NO: 537922 - DNA, 59 bp, Artificial; identical to SEQ ID NO: 305905
  Synthetic oligonucleotide

SEQ ID NO: 537923 - DNA, 55 bp, Artificial; identical to SEQ ID NO: 305906
  Synthetic oligonucleotide

SEQ ID NO: 537924 - DNA, 55 bp, Artificial; identical to SEQ ID NO: 305907
  Synthetic oligonucleotide

SEQ ID NO: 537925 - DNA, 60 bp, Artificial; identical to SEQ ID NO: 305913
  Synthetic oligonucleotide

SEQ ID NO: 537926 - DNA, 55 bp, Artificial; identical to SEQ ID NO: 305914
  Synthetic oligonucleotide

SEQ ID NO: 537927 - DNA, 53 bp, Artificial; identical to SEQ ID NO: 305916
  Synthetic oligonucleotide

SEQ ID NO: 537928 - DNA, 60 bp, Artificial; identical to SEQ ID NO: 305919
  Synthetic oligonucleotide

SEQ ID NO: 537929 - DNA, 56 bp, Artificial; identical to SEQ ID NO: 305920
  Synthetic oligonucleotide

SEQ ID NO: 537930 - DNA, 59 bp, Artificial; identical to SEQ ID NO: 305922
  Synthetic oligonucleotide

SEQ ID NO: 537931 - DNA, 55 bp, Artificial; identical to SEQ ID NO: 305923
  Synthetic oligonucleotide

SEQ ID NO: 537932 - DNA, 59 bp, Artificial; identical to SEQ ID NO: 305926
  Synthetic oligonucleotide

SEQ ID NO: 537933 - DNA, 55 bp, Artificial; identical to SEQ ID NO: 305927
  Synthetic oligonucleotide

SEQ ID NO: 537934 - DNA, 59 bp, Artificial; identical to SEQ ID NO: 305928
  Synthetic oligonucleotide

SEQ ID NO: 537935 - DNA, 55 bp, Artificial; identical to SEQ ID NO: 305929
  Synthetic oligonucleotide

SEQ ID NO: 537936 - DNA, 56 bp, Artificial; identical to SEQ ID NO: 305930
  Synthetic oligonucleotide

SEQ ID NO: 537937 - DNA, 59 bp, Artificial; identical to SEQ ID NO: 305931
  Synthetic oligonucleotide

SEQ ID NO: 537938 - DNA, 55 bp, Artificial; identical to SEQ ID NO: 305932
  Synthetic oligonucleotide

SEQ ID NO: 537939 - DNA, 58 bp, Artificial; identical to SEQ ID NO: 305933
  Synthetic oligonucleotide

SEQ ID NO: 537940 - DNA, 58 bp, Artificial; identical to SEQ ID NO: 305940
  Synthetic oligonucleotide

SEQ ID NO: 537941 - DNA, 60 bp, Artificial; identical to SEQ ID NO: 305941
  Synthetic oligonucleotide

SEQ ID NO: 537942 - DNA, 60 bp, Artificial; identical to SEQ ID NO: 305950
  Synthetic oligonucleotide

SEQ ID NO: 537943 - DNA, 53 bp, Artificial; identical to SEQ ID NO: 305953
  Synthetic oligonucleotide

SEQ ID NO: 537944 - DNA, 59 bp, Artificial; identical to SEQ ID NO: 305955
  Synthetic oligonucleotide

SEQ ID NO: 537945 - DNA, 56 bp, Artificial; identical to SEQ ID NO: 305956
  Synthetic oligonucleotide

SEQ ID NO: 537946 - DNA, 60 bp, Artificial; identical to SEQ ID NO: 305957
  Synthetic oligonucleotide

SEQ ID NO: 537947 - DNA, 57 bp, Artificial; identical to SEQ ID NO: 305958
  Synthetic oligonucleotide

SEQ ID NO: 537948 - DNA, 60 bp, Artificial; identical to SEQ ID NO: 305959
  Synthetic oligonucleotide

SEQ ID NO: 537949 - DNA, 58 bp, Artificial; identical to SEQ ID NO: 305961
  Synthetic oligonucleotide

SEQ ID NO: 537950 - DNA, 57 bp, Artificial; identical to SEQ ID NO: 305962
  Synthetic oligonucleotide

SEQ ID NO: 537951 - DNA, 55 bp, Artificial; identical to SEQ ID NO: 305964
  Synthetic oligonucleotide

SEQ ID NO: 537952 - DNA, 59 bp, Artificial; identical to SEQ ID NO: 305968
  Synthetic oligonucleotide

SEQ ID NO: 537953 - DNA, 60 bp, Artificial; identical to SEQ ID NO: 305969
  Synthetic oligonucleotide

SEQ ID NO: 537954 - DNA, 57 bp, Artificial; identical to SEQ ID NO: 305974
  Synthetic oligonucleotide

SEQ ID NO: 537955 - DNA, 58 bp, Artificial; identical to SEQ ID NO: 305979
  Synthetic oligonucleotide

SEQ ID NO: 537956 - DNA, 57 bp, Artificial; identical to SEQ ID NO: 305980
  Synthetic oligonucleotide

SEQ ID NO: 537957 - DNA, 60 bp, Artificial; identical to SEQ ID NO: 10449
  Synthetic oligonucleotide

SEQ ID NO: 537958 - DNA, 60 bp, Artificial; identical to SEQ ID NO: 305981
  Synthetic oligonucleotide

SEQ ID NO: 537959 - DNA, 60 bp, Artificial; identical to SEQ ID NO: 305983
  Synthetic oligonucleotide

SEQ ID NO: 537960 - DNA, 55 bp, Artificial; identical to SEQ ID NO: 305987
  Synthetic oligonucleotide

SEQ ID NO: 537961 - DNA, 58 bp, Artificial; identical to SEQ ID NO: 305989
  Synthetic oligonucleotide

SEQ ID NO: 537962 - DNA, 60 bp, Artificial; identical to SEQ ID NO: 305990
  Synthetic oligonucleotide

SEQ ID NO: 537963 - DNA, 58 bp, Artificial; identical to SEQ ID NO: 305996
  Synthetic oligonucleotide

SEQ ID NO: 537964 - DNA, 53 bp, Artificial; identical to SEQ ID NO: 305999
  Synthetic oligonucleotide

SEQ ID NO: 537965 - DNA, 58 bp, Artificial; identical to SEQ ID NO: 306001
  Synthetic oligonucleotide

SEQ ID NO: 537966 - DNA, 57 bp, Artificial; identical to SEQ ID NO: 306011
  Synthetic oligonucleotide

SEQ ID NO: 537967 - DNA, 60 bp, Artificial; identical to SEQ ID NO: 306012
  Synthetic oligonucleotide

SEQ ID NO: 537968 - DNA, 60 bp, Artificial; identical to SEQ ID NO: 306013
  Synthetic oligonucleotide

SEQ ID NO: 537969 - DNA, 60 bp, Artificial; identical to SEQ ID NO: 306014
  Synthetic oligonucleotide

SEQ ID NO: 537970 - DNA, 57 bp, Artificial; identical to SEQ ID NO: 306015
  Synthetic oligonucleotide

SEQ ID NO: 537971 - DNA, 60 bp, Artificial; identical to SEQ ID NO: 306016
  Synthetic oligonucleotide

SEQ ID NO: 537972 - DNA, 58 bp, Artificial; identical to SEQ ID NO: 306017
  Synthetic oligonucleotide

SEQ ID NO: 537973 - DNA, 52 bp, Artificial; identical to SEQ ID NO: 306018
  Synthetic oligonucleotide

SEQ ID NO: 537974 - DNA, 60 bp, Artificial; identical to SEQ ID NO: 306019
  Synthetic oligonucleotide

SEQ ID NO: 537975 - DNA, 50 bp, Artificial; identical to SEQ ID NO: 306022
  Synthetic oligonucleotide

SEQ ID NO: 537976 - DNA, 60 bp, Artificial; identical to SEQ ID NO: 306023
  Synthetic oligonucleotide

SEQ ID NO: 537977 - DNA, 52 bp, Artificial; identical to SEQ ID NO: 306024
  Synthetic oligonucleotide

SEQ ID NO: 537978 - DNA, 58 bp, Artificial; identical to SEQ ID NO: 306025
  Synthetic oligonucleotide

SEQ ID NO: 537979 - DNA, 60 bp, Artificial; identical to SEQ ID NO: 306026
  Synthetic oligonucleotide

SEQ ID NO: 537980 - DNA, 60 bp, Artificial; identical to SEQ ID NO: 306027
  Synthetic oligonucleotide

SEQ ID NO: 537981 - DNA, 59 bp, Artificial; identical to SEQ ID NO: 306028
  Synthetic oligonucleotide

SEQ ID NO: 537982 - DNA, 50 bp, Artificial; identical to SEQ ID NO: 306030
  Synthetic oligonucleotide

SEQ ID NO: 537983 - DNA, 55 bp, Artificial; identical to SEQ ID NO: 306031
  Synthetic oligonucleotide

SEQ ID NO: 537984 - DNA, 60 bp, Artificial; identical to SEQ ID NO: 306034
  Synthetic oligonucleotide

SEQ ID NO: 537985 - DNA, 58 bp, Artificial; identical to SEQ ID NO: 306035
  Synthetic oligonucleotide

SEQ ID NO: 537986 - DNA, 56 bp, Artificial; identical to SEQ ID NO: 306036
  Synthetic oligonucleotide

SEQ ID NO: 537987 - DNA, 55 bp, Artificial; identical to SEQ ID NO: 306042
  Synthetic oligonucleotide

SEQ ID NO: 537988 - DNA, 56 bp, Artificial; identical to SEQ ID NO: 306043
  Synthetic oligonucleotide

SEQ ID NO: 537989 - DNA, 57 bp, Artificial; identical to SEQ ID NO: 306045
  Synthetic oligonucleotide

SEQ ID NO: 537990 - DNA, 55 bp, Artificial; identical to SEQ ID NO: 306046
  Synthetic oligonucleotide

SEQ ID NO: 537991 - DNA, 58 bp, Artificial; identical to SEQ ID NO: 306047
  Synthetic oligonucleotide

SEQ ID NO: 537992 - DNA, 60 bp, Artificial; identical to SEQ ID NO: 306048
  Synthetic oligonucleotide

SEQ ID NO: 537993 - DNA, 60 bp, Artificial; identical to SEQ ID NO: 306049
  Synthetic oligonucleotide

SEQ ID NO: 537994 - DNA, 56 bp, Artificial; identical to SEQ ID NO: 306053
  Synthetic oligonucleotide

SEQ ID NO: 537995 - DNA, 60 bp, Artificial; identical to SEQ ID NO: 306062
  Synthetic oligonucleotide

SEQ ID NO: 537996 - DNA, 60 bp, Artificial; identical to SEQ ID NO: 306065
  Synthetic oligonucleotide

SEQ ID NO: 537997 - DNA, 60 bp, Artificial; identical to SEQ ID NO: 306066
  Synthetic oligonucleotide

SEQ ID NO: 537998 - DNA, 55 bp, Artificial; identical to SEQ ID NO: 306068
  Synthetic oligonucleotide

SEQ ID NO: 537999 - DNA, 52 bp, Artificial; identical to SEQ ID NO: 306072
  Synthetic oligonucleotide

SEQ ID NO: 538000 - DNA, 57 bp, Artificial; identical to SEQ ID NO: 306073
  Synthetic oligonucleotide

SEQ ID NO: 538001 - DNA, 59 bp, Artificial; identical to SEQ ID NO: 306074
  Synthetic oligonucleotide

SEQ ID NO: 538002 - DNA, 60 bp, Artificial; identical to SEQ ID NO: 306077
  Synthetic oligonucleotide

SEQ ID NO: 538003 - DNA, 58 bp, Artificial; identical to SEQ ID NO: 306079
  Synthetic oligonucleotide

SEQ ID NO: 538004 - DNA, 56 bp, Artificial; identical to SEQ ID NO: 306080
  Synthetic oligonucleotide

SEQ ID NO: 538005 - DNA, 60 bp, Artificial; identical to SEQ ID NO: 306081
  Synthetic oligonucleotide

SEQ ID NO: 538006 - DNA, 57 bp, Artificial; identical to SEQ ID NO: 306084
  Synthetic oligonucleotide

SEQ ID NO: 538007 - DNA, 59 bp, Artificial; identical to SEQ ID NO: 12973
  Synthetic oligonucleotide

SEQ ID NO: 538008 - DNA, 60 bp, Artificial; identical to SEQ ID NO: 306086
  Synthetic oligonucleotide

SEQ ID NO: 538009 - DNA, 56 bp, Artificial; identical to SEQ ID NO: 306087
  Synthetic oligonucleotide

SEQ ID NO: 538010 - DNA, 60 bp, Artificial; identical to SEQ ID NO: 306089
  Synthetic oligonucleotide

SEQ ID NO: 538011 - DNA, 60 bp, Artificial; identical to SEQ ID NO: 306090
  Synthetic oligonucleotide

SEQ ID NO: 538012 - DNA, 60 bp, Artificial; identical to SEQ ID NO: 306091
  Synthetic oligonucleotide

SEQ ID NO: 538013 - DNA, 60 bp, Artificial; identical to SEQ ID NO: 306092
  Synthetic oligonucleotide

SEQ ID NO: 538014 - DNA, 55 bp, Artificial; identical to SEQ ID NO: 306099
  Synthetic oligonucleotide

SEQ ID NO: 538015 - DNA, 60 bp, Artificial; identical to SEQ ID NO: 306102
  Synthetic oligonucleotide

SEQ ID NO: 538016 - DNA, 53 bp, Artificial; identical to SEQ ID NO: 306104
  Synthetic oligonucleotide

SEQ ID NO: 538017 - DNA, 60 bp, Artificial; identical to SEQ ID NO: 306110
  Synthetic oligonucleotide

SEQ ID NO: 538018 - DNA, 60 bp, Artificial; identical to SEQ ID NO: 306114
  Synthetic oligonucleotide

SEQ ID NO: 538019 - DNA, 55 bp, Artificial; identical to SEQ ID NO: 10124
  Synthetic oligonucleotide

SEQ ID NO: 538020 - DNA, 60 bp, Artificial; identical to SEQ ID NO: 12966
  Synthetic oligonucleotide

SEQ ID NO: 538021 - DNA, 55 bp, Artificial; identical to SEQ ID NO: 306118
  Synthetic oligonucleotide

SEQ ID NO: 538022 - DNA, 60 bp, Artificial; identical to SEQ ID NO: 306120
  Synthetic oligonucleotide

SEQ ID NO: 538023 - DNA, 60 bp, Artificial; identical to SEQ ID NO: 306121
  Synthetic oligonucleotide

SEQ ID NO: 538024 - DNA, 55 bp, Artificial; identical to SEQ ID NO: 306122
  Synthetic oligonucleotide

SEQ ID NO: 538025 - DNA, 55 bp, Artificial; identical to SEQ ID NO: 306125
  Synthetic oligonucleotide

SEQ ID NO: 538026 - DNA, 59 bp, Artificial; identical to SEQ ID NO: 306127
  Synthetic oligonucleotide

SEQ ID NO: 538027 - DNA, 55 bp, Artificial; identical to SEQ ID NO: 306131
  Synthetic oligonucleotide

SEQ ID NO: 538028 - DNA, 59 bp, Artificial; identical to SEQ ID NO: 306132
  Synthetic oligonucleotide

SEQ ID NO: 538029 - DNA, 53 bp, Artificial; identical to SEQ ID NO: 306133
  Synthetic oligonucleotide

SEQ ID NO: 538030 - DNA, 55 bp, Artificial; identical to SEQ ID NO: 306136
  Synthetic oligonucleotide

SEQ ID NO: 538031 - DNA, 58 bp, Artificial; identical to SEQ ID NO: 306138
  Synthetic oligonucleotide

SEQ ID NO: 538032 - DNA, 60 bp, Artificial; identical to SEQ ID NO: 306145
  Synthetic oligonucleotide

SEQ ID NO: 538033 - DNA, 56 bp, Artificial; identical to SEQ ID NO: 306150
  Synthetic oligonucleotide

SEQ ID NO: 538034 - DNA, 58 bp, Artificial; identical to SEQ ID NO: 306151
  Synthetic oligonucleotide

SEQ ID NO: 538035 - DNA, 58 bp, Artificial; identical to SEQ ID NO: 306152
  Synthetic oligonucleotide

SEQ ID NO: 538036 - DNA, 57 bp, Artificial; identical to SEQ ID NO: 306154
  Synthetic oligonucleotide

SEQ ID NO: 538037 - DNA, 56 bp, Artificial; identical to SEQ ID NO: 306155
  Synthetic oligonucleotide

SEQ ID NO: 538038 - DNA, 58 bp, Artificial; identical to SEQ ID NO: 306157
  Synthetic oligonucleotide

SEQ ID NO: 538039 - DNA, 58 bp, Artificial; identical to SEQ ID NO: 306158
  Synthetic oligonucleotide

SEQ ID NO: 538040 - DNA, 60 bp, Artificial; identical to SEQ ID NO: 306159
  Synthetic oligonucleotide

SEQ ID NO: 538041 - DNA, 60 bp, Artificial; identical to SEQ ID NO: 306162
  Synthetic oligonucleotide

SEQ ID NO: 538042 - DNA, 50 bp, Artificial; identical to SEQ ID NO: 306163
  Synthetic oligonucleotide

SEQ ID NO: 538043 - DNA, 56 bp, Artificial; identical to SEQ ID NO: 306164
  Synthetic oligonucleotide

SEQ ID NO: 538044 - DNA, 58 bp, Artificial; identical to SEQ ID NO: 306168
  Synthetic oligonucleotide

SEQ ID NO: 538045 - DNA, 60 bp, Artificial; identical to SEQ ID NO: 306172
  Synthetic oligonucleotide

SEQ ID NO: 538046 - DNA, 55 bp, Artificial; identical to SEQ ID NO: 306174
  Synthetic oligonucleotide

SEQ ID NO: 538047 - DNA, 49 bp, Artificial; identical to SEQ ID NO: 306175
  Synthetic oligonucleotide

SEQ ID NO: 538048 - DNA, 56 bp, Artificial; identical to SEQ ID NO: 306176
  Synthetic oligonucleotide

SEQ ID NO: 538049 - DNA, 58 bp, Artificial; identical to SEQ ID NO: 306178
  Synthetic oligonucleotide

SEQ ID NO: 538050 - DNA, 60 bp, Artificial; identical to SEQ ID NO: 306182
  Synthetic oligonucleotide

SEQ ID NO: 538051 - DNA, 50 bp, Artificial; identical to SEQ ID NO: 306183
  Synthetic oligonucleotide

SEQ ID NO: 538052 - DNA, 60 bp, Artificial; identical to SEQ ID NO: 306184
  Synthetic oligonucleotide

SEQ ID NO: 538053 - DNA, 50 bp, Artificial; identical to SEQ ID NO: 306187
  Synthetic oligonucleotide

SEQ ID NO: 538054 - DNA, 52 bp, Artificial; identical to SEQ ID NO: 306188
  Synthetic oligonucleotide

SEQ ID NO: 538055 - DNA, 55 bp, Artificial; identical to SEQ ID NO: 306189
  Synthetic oligonucleotide

SEQ ID NO: 538056 - DNA, 55 bp, Artificial; identical to SEQ ID NO: 306191
  Synthetic oligonucleotide

SEQ ID NO: 538057 - DNA, 52 bp, Artificial; identical to SEQ ID NO: 306195
  Synthetic oligonucleotide

SEQ ID NO: 538058 - DNA, 55 bp, Artificial; identical to SEQ ID NO: 306196
  Synthetic oligonucleotide

SEQ ID NO: 538059 - DNA, 56 bp, Artificial; identical to SEQ ID NO: 306197
  Synthetic oligonucleotide

SEQ ID NO: 538060 - DNA, 59 bp, Artificial; identical to SEQ ID NO: 306198
  Synthetic oligonucleotide

SEQ ID NO: 538061 - DNA, 56 bp, Artificial; identical to SEQ ID NO: 14935
  Synthetic oligonucleotide

SEQ ID NO: 538062 - DNA, 56 bp, Artificial; identical to SEQ ID NO: 306202
  Synthetic oligonucleotide

SEQ ID NO: 538063 - DNA, 51 bp, Artificial; identical to SEQ ID NO: 14338
  Synthetic oligonucleotide

SEQ ID NO: 538064 - DNA, 59 bp, Artificial; identical to SEQ ID NO: 306203
  Synthetic oligonucleotide

SEQ ID NO: 538065 - DNA, 53 bp, Artificial; identical to SEQ ID NO: 306206
  Synthetic oligonucleotide

SEQ ID NO: 538066 - DNA, 60 bp, Artificial; identical to SEQ ID NO: 306207
  Synthetic oligonucleotide

SEQ ID NO: 538067 - DNA, 50 bp, Artificial; identical to SEQ ID NO: 306208
  Synthetic oligonucleotide

SEQ ID NO: 538068 - DNA, 56 bp, Artificial; identical to SEQ ID NO: 306209
  Synthetic oligonucleotide

SEQ ID NO: 538069 - DNA, 60 bp, Artificial; identical to SEQ ID NO: 306210
  Synthetic oligonucleotide

SEQ ID NO: 538070 - DNA, 58 bp, Artificial; identical to SEQ ID NO: 13015
  Synthetic oligonucleotide

SEQ ID NO: 538071 - DNA, 60 bp, Artificial; identical to SEQ ID NO: 306216
  Synthetic oligonucleotide

SEQ ID NO: 538072 - DNA, 58 bp, Artificial; identical to SEQ ID NO: 306217
  Synthetic oligonucleotide

SEQ ID NO: 538073 - DNA, 57 bp, Artificial; identical to SEQ ID NO: 306219
  Synthetic oligonucleotide

SEQ ID NO: 538074 - DNA, 56 bp, Artificial; identical to SEQ ID NO: 14823
  Synthetic oligonucleotide

SEQ ID NO: 538075 - DNA, 58 bp, Artificial; identical to SEQ ID NO: 306228
  Synthetic oligonucleotide

SEQ ID NO: 538076 - DNA, 60 bp, Artificial; identical to SEQ ID NO: 306229
  Synthetic oligonucleotide

SEQ ID NO: 538077 - DNA, 60 bp, Artificial; identical to SEQ ID NO: 306230
  Synthetic oligonucleotide

SEQ ID NO: 538078 - DNA, 60 bp, Artificial; identical to SEQ ID NO: 306231
  Synthetic oligonucleotide

SEQ ID NO: 538079 - DNA, 58 bp, Artificial; identical to SEQ ID NO: 306232
  Synthetic oligonucleotide

SEQ ID NO: 538080 - DNA, 55 bp, Artificial; identical to SEQ ID NO: 306234
  Synthetic oligonucleotide

SEQ ID NO: 538081 - DNA, 55 bp, Artificial; identical to SEQ ID NO: 306235
  Synthetic oligonucleotide

SEQ ID NO: 538082 - DNA, 60 bp, Artificial; identical to SEQ ID NO: 306236
  Synthetic oligonucleotide

SEQ ID NO: 538083 - DNA, 55 bp, Artificial; identical to SEQ ID NO: 306238
  Synthetic oligonucleotide

SEQ ID NO: 538084 - DNA, 56 bp, Artificial; identical to SEQ ID NO: 7264
  Synthetic oligonucleotide

SEQ ID NO: 538085 - DNA, 54 bp, Artificial; identical to SEQ ID NO: 306243
  Synthetic oligonucleotide

SEQ ID NO: 538086 - DNA, 55 bp, Artificial; identical to SEQ ID NO: 306246
  Synthetic oligonucleotide

SEQ ID NO: 538087 - DNA, 58 bp, Artificial; identical to SEQ ID NO: 306247
  Synthetic oligonucleotide

SEQ ID NO: 538088 - DNA, 60 bp, Artificial; identical to SEQ ID NO: 306249
  Synthetic oligonucleotide

SEQ ID NO: 538089 - DNA, 55 bp, Artificial; identical to SEQ ID NO: 306251
  Synthetic oligonucleotide

SEQ ID NO: 538090 - DNA, 54 bp, Artificial; identical to SEQ ID NO: 306255
  Synthetic oligonucleotide

SEQ ID NO: 538091 - DNA, 60 bp, Artificial; identical to SEQ ID NO: 306260
  Synthetic oligonucleotide

SEQ ID NO: 538092 - DNA, 55 bp, Artificial; identical to SEQ ID NO: 306262
  Synthetic oligonucleotide

SEQ ID NO: 538093 - DNA, 58 bp, Artificial; identical to SEQ ID NO: 306265
  Synthetic oligonucleotide

SEQ ID NO: 538094 - DNA, 59 bp, Artificial; identical to SEQ ID NO: 19538
  Synthetic oligonucleotide

SEQ ID NO: 538095 - DNA, 60 bp, Artificial; identical to SEQ ID NO: 306267
  Synthetic oligonucleotide

SEQ ID NO: 538096 - DNA, 56 bp, Artificial; identical to SEQ ID NO: 306268
  Synthetic oligonucleotide

SEQ ID NO: 538097 - DNA, 53 bp, Artificial; identical to SEQ ID NO: 306271
  Synthetic oligonucleotide

SEQ ID NO: 538098 - DNA, 52 bp, Artificial; identical to SEQ ID NO: 20506
  Synthetic oligonucleotide

SEQ ID NO: 538099 - DNA, 55 bp, Artificial; identical to SEQ ID NO: 306276
  Synthetic oligonucleotide

SEQ ID NO: 538100 - DNA, 59 bp, Artificial; identical to SEQ ID NO: 306277
  Synthetic oligonucleotide

SEQ ID NO: 538101 - DNA, 55 bp, Artificial; identical to SEQ ID NO: 306279
  Synthetic oligonucleotide

SEQ ID NO: 538102 - DNA, 60 bp, Artificial; identical to SEQ ID NO: 306280
  Synthetic oligonucleotide

SEQ ID NO: 538103 - DNA, 60 bp, Artificial; identical to SEQ ID NO: 306282
  Synthetic oligonucleotide

SEQ ID NO: 538104 - DNA, 58 bp, Artificial; identical to SEQ ID NO: 14450
  Synthetic oligonucleotide

SEQ ID NO: 538105 - DNA, 55 bp, Artificial; identical to SEQ ID NO: 306286
  Synthetic oligonucleotide

SEQ ID NO: 538106 - DNA, 54 bp, Artificial; identical to SEQ ID NO: 306287
  Synthetic oligonucleotide

SEQ ID NO: 538107 - DNA, 60 bp, Artificial; identical to SEQ ID NO: 306293
  Synthetic oligonucleotide

SEQ ID NO: 538108 - DNA, 56 bp, Artificial; identical to SEQ ID NO: 306294
  Synthetic oligonucleotide

SEQ ID NO: 538109 - DNA, 53 bp, Artificial; identical to SEQ ID NO: 306298
  Synthetic oligonucleotide

SEQ ID NO: 538110 - DNA, 60 bp, Artificial; identical to SEQ ID NO: 306300
  Synthetic oligonucleotide

SEQ ID NO: 538111 - DNA, 60 bp, Artificial; identical to SEQ ID NO: 306304
  Synthetic oligonucleotide

SEQ ID NO: 538112 - DNA, 54 bp, Artificial; identical to SEQ ID NO: 306305
  Synthetic oligonucleotide

SEQ ID NO: 538113 - DNA, 58 bp, Artificial; identical to SEQ ID NO: 306311
  Synthetic oligonucleotide

SEQ ID NO: 538114 - DNA, 60 bp, Artificial; identical to SEQ ID NO: 13970
  Synthetic oligonucleotide

SEQ ID NO: 538115 - DNA, 55 bp, Artificial; identical to SEQ ID NO: 306312
  Synthetic oligonucleotide

SEQ ID NO: 538116 - DNA, 58 bp, Artificial; identical to SEQ ID NO: 306319
  Synthetic oligonucleotide

SEQ ID NO: 538117 - DNA, 58 bp, Artificial; identical to SEQ ID NO: 306322
  Synthetic oligonucleotide

SEQ ID NO: 538118 - DNA, 53 bp, Artificial; identical to SEQ ID NO: 306324
  Synthetic oligonucleotide

SEQ ID NO: 538119 - DNA, 57 bp, Artificial; identical to SEQ ID NO: 306327
  Synthetic oligonucleotide

SEQ ID NO: 538120 - DNA, 60 bp, Artificial; identical to SEQ ID NO: 306329
  Synthetic oligonucleotide

SEQ ID NO: 538121 - DNA, 57 bp, Artificial; identical to SEQ ID NO: 306332
  Synthetic oligonucleotide

SEQ ID NO: 538122 - DNA, 51 bp, Artificial; identical to SEQ ID NO: 306334
  Synthetic oligonucleotide

SEQ ID NO: 538123 - DNA, 58 bp, Artificial; identical to SEQ ID NO: 306339
  Synthetic oligonucleotide

SEQ ID NO: 538124 - DNA, 60 bp, Artificial; identical to SEQ ID NO: 306342
  Synthetic oligonucleotide

SEQ ID NO: 538125 - DNA, 59 bp, Artificial; identical to SEQ ID NO: 306343
  Synthetic oligonucleotide

SEQ ID NO: 538126 - DNA, 58 bp, Artificial; identical to SEQ ID NO: 19451
  Synthetic oligonucleotide

SEQ ID NO: 538127 - DNA, 54 bp, Artificial; identical to SEQ ID NO: 306349
  Synthetic oligonucleotide

SEQ ID NO: 538128 - DNA, 56 bp, Artificial; identical to SEQ ID NO: 306350
  Synthetic oligonucleotide

SEQ ID NO: 538129 - DNA, 60 bp, Artificial; identical to SEQ ID NO: 306353
  Synthetic oligonucleotide

SEQ ID NO: 538130 - DNA, 55 bp, Artificial; identical to SEQ ID NO: 306357
  Synthetic oligonucleotide

SEQ ID NO: 538131 - DNA, 54 bp, Artificial; identical to SEQ ID NO: 306358
  Synthetic oligonucleotide

SEQ ID NO: 538132 - DNA, 59 bp, Artificial; identical to SEQ ID NO: 306359
  Synthetic oligonucleotide

SEQ ID NO: 538133 - DNA, 55 bp, Artificial; identical to SEQ ID NO: 306363
  Synthetic oligonucleotide

SEQ ID NO: 538134 - DNA, 52 bp, Artificial; identical to SEQ ID NO: 306365
  Synthetic oligonucleotide

SEQ ID NO: 538135 - DNA, 59 bp, Artificial; identical to SEQ ID NO: 306366
  Synthetic oligonucleotide

SEQ ID NO: 538136 - DNA, 58 bp, Artificial; identical to SEQ ID NO: 306367
  Synthetic oligonucleotide

SEQ ID NO: 538137 - DNA, 57 bp, Artificial; identical to SEQ ID NO: 306370
  Synthetic oligonucleotide

SEQ ID NO: 538138 - DNA, 56 bp, Artificial; identical to SEQ ID NO: 306371
  Synthetic oligonucleotide

SEQ ID NO: 538139 - DNA, 60 bp, Artificial; identical to SEQ ID NO: 11369
  Synthetic oligonucleotide

SEQ ID NO: 538140 - DNA, 54 bp, Artificial; identical to SEQ ID NO: 306375
  Synthetic oligonucleotide

SEQ ID NO: 538141 - DNA, 56 bp, Artificial; identical to SEQ ID NO: 20513
  Synthetic oligonucleotide

SEQ ID NO: 538142 - DNA, 55 bp, Artificial; identical to SEQ ID NO: 8529
  Synthetic oligonucleotide

SEQ ID NO: 538143 - DNA, 58 bp, Artificial; identical to SEQ ID NO: 306383
  Synthetic oligonucleotide

SEQ ID NO: 538144 - DNA, 55 bp, Artificial; identical to SEQ ID NO: 306386
  Synthetic oligonucleotide

SEQ ID NO: 538145 - DNA, 58 bp, Artificial; identical to SEQ ID NO: 306387
  Synthetic oligonucleotide

SEQ ID NO: 538146 - DNA, 60 bp, Artificial; identical to SEQ ID NO: 306392
  Synthetic oligonucleotide

SEQ ID NO: 538147 - DNA, 60 bp, Artificial; identical to SEQ ID NO: 306393
  Synthetic oligonucleotide

SEQ ID NO: 538148 - DNA, 60 bp, Artificial; identical to SEQ ID NO: 306397
  Synthetic oligonucleotide

SEQ ID NO: 538149 - DNA, 53 bp, Artificial; identical to SEQ ID NO: 306398
  Synthetic oligonucleotide

SEQ ID NO: 538150 - DNA, 57 bp, Artificial; identical to SEQ ID NO: 306399
  Synthetic oligonucleotide

SEQ ID NO: 538151 - DNA, 60 bp, Artificial; identical to SEQ ID NO: 306400
  Synthetic oligonucleotide

SEQ ID NO: 538152 - DNA, 54 bp, Artificial; identical to SEQ ID NO: 306401
  Synthetic oligonucleotide

SEQ ID NO: 538153 - DNA, 57 bp, Artificial; identical to SEQ ID NO: 306402
  Synthetic oligonucleotide

SEQ ID NO: 538154 - DNA, 54 bp, Artificial; identical to SEQ ID NO: 306406
  Synthetic oligonucleotide

SEQ ID NO: 538155 - DNA, 53 bp, Artificial; identical to SEQ ID NO: 306407
  Synthetic oligonucleotide

SEQ ID NO: 538156 - DNA, 60 bp, Artificial; identical to SEQ ID NO: 13472
  Synthetic oligonucleotide

SEQ ID NO: 538157 - DNA, 53 bp, Artificial; identical to SEQ ID NO: 306416
  Synthetic oligonucleotide

SEQ ID NO: 538158 - DNA, 55 bp, Artificial; identical to SEQ ID NO: 306418
  Synthetic oligonucleotide

SEQ ID NO: 538159 - DNA, 55 bp, Artificial; identical to SEQ ID NO: 306423
  Synthetic oligonucleotide

SEQ ID NO: 538160 - DNA, 56 bp, Artificial; identical to SEQ ID NO: 306424
  Synthetic oligonucleotide

SEQ ID NO: 538161 - DNA, 54 bp, Artificial; identical to SEQ ID NO: 306425
  Synthetic oligonucleotide

SEQ ID NO: 538162 - DNA, 60 bp, Artificial; identical to SEQ ID NO: 306426
  Synthetic oligonucleotide

SEQ ID NO: 538163 - DNA, 60 bp, Artificial; identical to SEQ ID NO: 306429
  Synthetic oligonucleotide

SEQ ID NO: 538164 - DNA, 56 bp, Artificial; identical to SEQ ID NO: 306432
  Synthetic oligonucleotide

SEQ ID NO: 538165 - DNA, 55 bp, Artificial; identical to SEQ ID NO: 306434
  Synthetic oligonucleotide

SEQ ID NO: 538166 - DNA, 56 bp, Artificial; identical to SEQ ID NO: 306437
  Synthetic oligonucleotide

SEQ ID NO: 538167 - DNA, 53 bp, Artificial; identical to SEQ ID NO: 306438
  Synthetic oligonucleotide

SEQ ID NO: 538168 - DNA, 56 bp, Artificial; identical to SEQ ID NO: 306439
  Synthetic oligonucleotide

SEQ ID NO: 538169 - DNA, 60 bp, Artificial; identical to SEQ ID NO: 306441
  Synthetic oligonucleotide

SEQ ID NO: 538170 - DNA, 55 bp, Artificial; identical to SEQ ID NO: 306443
  Synthetic oligonucleotide

SEQ ID NO: 538171 - DNA, 55 bp, Artificial; identical to SEQ ID NO: 306444
  Synthetic oligonucleotide

SEQ ID NO: 538172 - DNA, 60 bp, Artificial; identical to SEQ ID NO: 306446
  Synthetic oligonucleotide

SEQ ID NO: 538173 - DNA, 50 bp, Artificial; identical to SEQ ID NO: 306448
  Synthetic oligonucleotide

SEQ ID NO: 538174 - DNA, 57 bp, Artificial; identical to SEQ ID NO: 306455
  Synthetic oligonucleotide

SEQ ID NO: 538175 - DNA, 56 bp, Artificial; identical to SEQ ID NO: 306459
  Synthetic oligonucleotide

SEQ ID NO: 538176 - DNA, 53 bp, Artificial; identical to SEQ ID NO: 306460
  Synthetic oligonucleotide

SEQ ID NO: 538177 - DNA, 60 bp, Artificial; identical to SEQ ID NO: 306461
  Synthetic oligonucleotide

SEQ ID NO: 538178 - DNA, 50 bp, Artificial; identical to SEQ ID NO: 306462
  Synthetic oligonucleotide

SEQ ID NO: 538179 - DNA, 50 bp, Artificial; identical to SEQ ID NO: 306463
  Synthetic oligonucleotide

SEQ ID NO: 538180 - DNA, 56 bp, Artificial; identical to SEQ ID NO: 306464
  Synthetic oligonucleotide

SEQ ID NO: 538181 - DNA, 60 bp, Artificial; identical to SEQ ID NO: 62738
  Synthetic oligonucleotide

SEQ ID NO: 538182 - DNA, 52 bp, Artificial; identical to SEQ ID NO: 306470
  Synthetic oligonucleotide

SEQ ID NO: 538183 - DNA, 55 bp, Artificial; identical to SEQ ID NO: 306471
  Synthetic oligonucleotide

SEQ ID NO: 538184 - DNA, 58 bp, Artificial; identical to SEQ ID NO: 306473
  Synthetic oligonucleotide

SEQ ID NO: 538185 - DNA, 54 bp, Artificial; identical to SEQ ID NO: 306476
  Synthetic oligonucleotide

SEQ ID NO: 538186 - DNA, 59 bp, Artificial; identical to SEQ ID NO: 306477
  Synthetic oligonucleotide

SEQ ID NO: 538187 - DNA, 56 bp, Artificial; identical to SEQ ID NO: 306479
  Synthetic oligonucleotide

SEQ ID NO: 538188 - DNA, 55 bp, Artificial; identical to SEQ ID NO: 306481
  Synthetic oligonucleotide

SEQ ID NO: 538189 - DNA, 60 bp, Artificial; identical to SEQ ID NO: 306482
  Synthetic oligonucleotide

SEQ ID NO: 538190 - DNA, 60 bp, Artificial; identical to SEQ ID NO: 306486
  Synthetic oligonucleotide

SEQ ID NO: 538191 - DNA, 58 bp, Artificial; identical to SEQ ID NO: 20384
  Synthetic oligonucleotide

SEQ ID NO: 538192 - DNA, 60 bp, Artificial; identical to SEQ ID NO: 306490
  Synthetic oligonucleotide

SEQ ID NO: 538193 - DNA, 59 bp, Artificial; identical to SEQ ID NO: 306492
  Synthetic oligonucleotide

SEQ ID NO: 538194 - DNA, 55 bp, Artificial; identical to SEQ ID NO: 306493
  Synthetic oligonucleotide

SEQ ID NO: 538195 - DNA, 53 bp, Artificial; identical to SEQ ID NO: 306494
  Synthetic oligonucleotide

SEQ ID NO: 538196 - DNA, 56 bp, Artificial; identical to SEQ ID NO: 306495
  Synthetic oligonucleotide

SEQ ID NO: 538197 - DNA, 55 bp, Artificial; identical to SEQ ID NO: 306499
  Synthetic oligonucleotide

SEQ ID NO: 538198 - DNA, 50 bp, Artificial; identical to SEQ ID NO: 306504
  Synthetic oligonucleotide

SEQ ID NO: 538199 - DNA, 57 bp, Artificial; identical to SEQ ID NO: 306506
  Synthetic oligonucleotide

SEQ ID NO: 538200 - DNA, 60 bp, Artificial; identical to SEQ ID NO: 306508
  Synthetic oligonucleotide

SEQ ID NO: 538201 - DNA, 50 bp, Artificial; identical to SEQ ID NO: 306510
  Synthetic oligonucleotide

SEQ ID NO: 538202 - DNA, 59 bp, Artificial; identical to SEQ ID NO: 306511
  Synthetic oligonucleotide

SEQ ID NO: 538203 - DNA, 55 bp, Artificial; identical to SEQ ID NO: 306516
  Synthetic oligonucleotide

SEQ ID NO: 538204 - DNA, 57 bp, Artificial; identical to SEQ ID NO: 306521
  Synthetic oligonucleotide

SEQ ID NO: 538205 - DNA, 53 bp, Artificial; identical to SEQ ID NO: 306524
  Synthetic oligonucleotide

SEQ ID NO: 538206 - DNA, 56 bp, Artificial; identical to SEQ ID NO: 306525
  Synthetic oligonucleotide

SEQ ID NO: 538207 - DNA, 60 bp, Artificial; identical to SEQ ID NO: 306528
  Synthetic oligonucleotide

SEQ ID NO: 538208 - DNA, 52 bp, Artificial; identical to SEQ ID NO: 306532
  Synthetic oligonucleotide

SEQ ID NO: 538209 - DNA, 59 bp, Artificial; identical to SEQ ID NO: 306535
  Synthetic oligonucleotide

SEQ ID NO: 538210 - DNA, 53 bp, Artificial; identical to SEQ ID NO: 306539
  Synthetic oligonucleotide

SEQ ID NO: 538211 - DNA, 60 bp, Artificial; identical to SEQ ID NO: 306541
  Synthetic oligonucleotide

SEQ ID NO: 538212 - DNA, 60 bp, Artificial; identical to SEQ ID NO: 306543
  Synthetic oligonucleotide

SEQ ID NO: 538213 - DNA, 55 bp, Artificial; identical to SEQ ID NO: 306546
  Synthetic oligonucleotide

SEQ ID NO: 538214 - DNA, 55 bp, Artificial; identical to SEQ ID NO: 306550
  Synthetic oligonucleotide

SEQ ID NO: 538215 - DNA, 56 bp, Artificial; identical to SEQ ID NO: 306552
  Synthetic oligonucleotide

SEQ ID NO: 538216 - DNA, 58 bp, Artificial; identical to SEQ ID NO: 306554
  Synthetic oligonucleotide

SEQ ID NO: 538217 - DNA, 55 bp, Artificial; identical to SEQ ID NO: 306557
  Synthetic oligonucleotide

SEQ ID NO: 538218 - DNA, 52 bp, Artificial; identical to SEQ ID NO: 10540
  Synthetic oligonucleotide

SEQ ID NO: 538219 - DNA, 60 bp, Artificial; identical to SEQ ID NO: 306559
  Synthetic oligonucleotide

SEQ ID NO: 538220 - DNA, 60 bp, Artificial; identical to SEQ ID NO: 306562
  Synthetic oligonucleotide

SEQ ID NO: 538221 - DNA, 60 bp, Artificial; identical to SEQ ID NO: 306563
  Synthetic oligonucleotide

SEQ ID NO: 538222 - DNA, 60 bp, Artificial; identical to SEQ ID NO: 306564
  Synthetic oligonucleotide

SEQ ID NO: 538223 - DNA, 60 bp, Artificial; identical to SEQ ID NO: 306566
  Synthetic oligonucleotide

SEQ ID NO: 538224 - DNA, 57 bp, Artificial; identical to SEQ ID NO: 306569
  Synthetic oligonucleotide

SEQ ID NO: 538225 - DNA, 56 bp, Artificial; identical to SEQ ID NO: 306570
  Synthetic oligonucleotide

SEQ ID NO: 538226 - DNA, 58 bp, Artificial; identical to SEQ ID NO: 306573
  Synthetic oligonucleotide

SEQ ID NO: 538227 - DNA, 56 bp, Artificial; identical to SEQ ID NO: 15689
  Synthetic oligonucleotide

SEQ ID NO: 538228 - DNA, 57 bp, Artificial; identical to SEQ ID NO: 306574
  Synthetic oligonucleotide

SEQ ID NO: 538229 - DNA, 55 bp, Artificial; identical to SEQ ID NO: 306577
  Synthetic oligonucleotide

SEQ ID NO: 538230 - DNA, 57 bp, Artificial; identical to SEQ ID NO: 306580
  Synthetic oligonucleotide

SEQ ID NO: 538231 - DNA, 60 bp, Artificial; identical to SEQ ID NO: 306581
  Synthetic oligonucleotide

SEQ ID NO: 538232 - DNA, 59 bp, Artificial; identical to SEQ ID NO: 306588
  Synthetic oligonucleotide

SEQ ID NO: 538233 - DNA, 60 bp, Artificial; identical to SEQ ID NO: 306589
  Synthetic oligonucleotide

SEQ ID NO: 538234 - DNA, 57 bp, Artificial; identical to SEQ ID NO: 306592
  Synthetic oligonucleotide

SEQ ID NO: 538235 - DNA, 54 bp, Artificial; identical to SEQ ID NO: 306593
  Synthetic oligonucleotide

SEQ ID NO: 538236 - DNA, 60 bp, Artificial; identical to SEQ ID NO: 306595
  Synthetic oligonucleotide

SEQ ID NO: 538237 - DNA, 57 bp, Artificial; identical to SEQ ID NO: 306599
  Synthetic oligonucleotide

SEQ ID NO: 538238 - DNA, 60 bp, Artificial; identical to SEQ ID NO: 306600
  Synthetic oligonucleotide

SEQ ID NO: 538239 - DNA, 60 bp, Artificial; identical to SEQ ID NO: 306606
  Synthetic oligonucleotide

SEQ ID NO: 538240 - DNA, 60 bp, Artificial; identical to SEQ ID NO: 6810
  Synthetic oligonucleotide

SEQ ID NO: 538241 - DNA, 53 bp, Artificial; identical to SEQ ID NO: 306608
  Synthetic oligonucleotide

SEQ ID NO: 538242 - DNA, 60 bp, Artificial; identical to SEQ ID NO: 306609
  Synthetic oligonucleotide

SEQ ID NO: 538243 - DNA, 60 bp, Artificial; identical to SEQ ID NO: 306610
  Synthetic oligonucleotide

SEQ ID NO: 538244 - DNA, 60 bp, Artificial; identical to SEQ ID NO: 306611
  Synthetic oligonucleotide

SEQ ID NO: 538245 - DNA, 59 bp, Artificial; identical to SEQ ID NO: 306614
  Synthetic oligonucleotide

SEQ ID NO: 538246 - DNA, 58 bp, Artificial; identical to SEQ ID NO: 306618
  Synthetic oligonucleotide

SEQ ID NO: 538247 - DNA, 60 bp, Artificial; identical to SEQ ID NO: 306619
  Synthetic oligonucleotide

SEQ ID NO: 538248 - DNA, 54 bp, Artificial; identical to SEQ ID NO: 306620
  Synthetic oligonucleotide

SEQ ID NO: 538249 - DNA, 60 bp, Artificial; identical to SEQ ID NO: 306625
  Synthetic oligonucleotide

SEQ ID NO: 538250 - DNA, 60 bp, Artificial; identical to SEQ ID NO: 306633
  Synthetic oligonucleotide

SEQ ID NO: 538251 - DNA, 55 bp, Artificial; identical to SEQ ID NO: 306635
  Synthetic oligonucleotide

SEQ ID NO: 538252 - DNA, 58 bp, Artificial; identical to SEQ ID NO: 306636
  Synthetic oligonucleotide

SEQ ID NO: 538253 - DNA, 59 bp, Artificial; identical to SEQ ID NO: 306638
  Synthetic oligonucleotide

SEQ ID NO: 538254 - DNA, 60 bp, Artificial; identical to SEQ ID NO: 306639
  Synthetic oligonucleotide

SEQ ID NO: 538255 - DNA, 55 bp, Artificial; identical to SEQ ID NO: 306640
  Synthetic oligonucleotide

SEQ ID NO: 538256 - DNA, 60 bp, Artificial; identical to SEQ ID NO: 306641
  Synthetic oligonucleotide

SEQ ID NO: 538257 - DNA, 59 bp, Artificial; identical to SEQ ID NO: 306644
  Synthetic oligonucleotide

SEQ ID NO: 538258 - DNA, 56 bp, Artificial; identical to SEQ ID NO: 306645
  Synthetic oligonucleotide

SEQ ID NO: 538259 - DNA, 60 bp, Artificial; identical to SEQ ID NO: 306650
  Synthetic oligonucleotide

SEQ ID NO: 538260 - DNA, 55 bp, Artificial; identical to SEQ ID NO: 306651
  Synthetic oligonucleotide

SEQ ID NO: 538261 - DNA, 60 bp, Artificial; identical to SEQ ID NO: 306655
  Synthetic oligonucleotide

SEQ ID NO: 538262 - DNA, 60 bp, Artificial; identical to SEQ ID NO: 306663
  Synthetic oligonucleotide

SEQ ID NO: 538263 - DNA, 59 bp, Artificial; identical to SEQ ID NO: 306664
  Synthetic oligonucleotide

SEQ ID NO: 538264 - DNA, 60 bp, Artificial; identical to SEQ ID NO: 306667
  Synthetic oligonucleotide

SEQ ID NO: 538265 - DNA, 57 bp, Artificial; identical to SEQ ID NO: 306670
  Synthetic oligonucleotide

SEQ ID NO: 538266 - DNA, 59 bp, Artificial; identical to SEQ ID NO: 306672
  Synthetic oligonucleotide

SEQ ID NO: 538267 - DNA, 57 bp, Artificial; identical to SEQ ID NO: 306675
  Synthetic oligonucleotide

SEQ ID NO: 538268 - DNA, 60 bp, Artificial; identical to SEQ ID NO: 306677
  Synthetic oligonucleotide

SEQ ID NO: 538269 - DNA, 59 bp, Artificial; identical to SEQ ID NO: 19963
  Synthetic oligonucleotide

SEQ ID NO: 538270 - DNA, 50 bp, Artificial; identical to SEQ ID NO: 306678
  Synthetic oligonucleotide

SEQ ID NO: 538271 - DNA, 53 bp, Artificial; identical to SEQ ID NO: 306679
  Synthetic oligonucleotide

SEQ ID NO: 538272 - DNA, 50 bp, Artificial; identical to SEQ ID NO: 306686
  Synthetic oligonucleotide

SEQ ID NO: 538273 - DNA, 55 bp, Artificial; identical to SEQ ID NO: 306687
  Synthetic oligonucleotide

SEQ ID NO: 538274 - DNA, 59 bp, Artificial; identical to SEQ ID NO: 306690
  Synthetic oligonucleotide

SEQ ID NO: 538275 - DNA, 53 bp, Artificial; identical to SEQ ID NO: 306692
  Synthetic oligonucleotide

SEQ ID NO: 538276 - DNA, 60 bp, Artificial; identical to SEQ ID NO: 306694
  Synthetic oligonucleotide

SEQ ID NO: 538277 - DNA, 60 bp, Artificial; identical to SEQ ID NO: 306696
  Synthetic oligonucleotide

SEQ ID NO: 538278 - DNA, 50 bp, Artificial; identical to SEQ ID NO: 306697
  Synthetic oligonucleotide

SEQ ID NO: 538279 - DNA, 60 bp, Artificial; identical to SEQ ID NO: 306699
  Synthetic oligonucleotide

SEQ ID NO: 538280 - DNA, 53 bp, Artificial; identical to SEQ ID NO: 306702
  Synthetic oligonucleotide

SEQ ID NO: 538281 - DNA, 60 bp, Artificial; identical to SEQ ID NO: 306705
  Synthetic oligonucleotide

SEQ ID NO: 538282 - DNA, 54 bp, Artificial; identical to SEQ ID NO: 306706
  Synthetic oligonucleotide

SEQ ID NO: 538283 - DNA, 55 bp, Artificial; identical to SEQ ID NO: 306707
  Synthetic oligonucleotide

SEQ ID NO: 538284 - DNA, 56 bp, Artificial; identical to SEQ ID NO: 306708
  Synthetic oligonucleotide

SEQ ID NO: 538285 - DNA, 60 bp, Artificial; identical to SEQ ID NO: 306709
  Synthetic oligonucleotide

SEQ ID NO: 538286 - DNA, 60 bp, Artificial; identical to SEQ ID NO: 306716
  Synthetic oligonucleotide

SEQ ID NO: 538287 - DNA, 55 bp, Artificial; identical to SEQ ID NO: 306717
  Synthetic oligonucleotide

SEQ ID NO: 538288 - DNA, 56 bp, Artificial; identical to SEQ ID NO: 306718
  Synthetic oligonucleotide

SEQ ID NO: 538289 - DNA, 58 bp, Artificial; identical to SEQ ID NO: 306721
  Synthetic oligonucleotide

SEQ ID NO: 538290 - DNA, 58 bp, Artificial; identical to SEQ ID NO: 306722
  Synthetic oligonucleotide

SEQ ID NO: 538291 - DNA, 60 bp, Artificial; identical to SEQ ID NO: 306723
  Synthetic oligonucleotide

SEQ ID NO: 538292 - DNA, 58 bp, Artificial; identical to SEQ ID NO: 306724
  Synthetic oligonucleotide

SEQ ID NO: 538293 - DNA, 50 bp, Artificial; identical to SEQ ID NO: 306726
  Synthetic oligonucleotide

SEQ ID NO: 538294 - DNA, 55 bp, Artificial; identical to SEQ ID NO: 306729
  Synthetic oligonucleotide

SEQ ID NO: 538295 - DNA, 60 bp, Artificial; identical to SEQ ID NO: 306731
  Synthetic oligonucleotide

SEQ ID NO: 538296 - DNA, 52 bp, Artificial; identical to SEQ ID NO: 306732
  Synthetic oligonucleotide

SEQ ID NO: 538297 - DNA, 60 bp, Artificial; identical to SEQ ID NO: 306733
  Synthetic oligonucleotide

SEQ ID NO: 538298 - DNA, 60 bp, Artificial; identical to SEQ ID NO: 306735
  Synthetic oligonucleotide

SEQ ID NO: 538299 - DNA, 56 bp, Artificial; identical to SEQ ID NO: 306736
  Synthetic oligonucleotide

SEQ ID NO: 538300 - DNA, 54 bp, Artificial; identical to SEQ ID NO: 306738
  Synthetic oligonucleotide

SEQ ID NO: 538301 - DNA, 59 bp, Artificial; identical to SEQ ID NO: 306743
  Synthetic oligonucleotide

SEQ ID NO: 538302 - DNA, 55 bp, Artificial; identical to SEQ ID NO: 306752
  Synthetic oligonucleotide

SEQ ID NO: 538303 - DNA, 57 bp, Artificial; identical to SEQ ID NO: 306754
  Synthetic oligonucleotide

SEQ ID NO: 538304 - DNA, 55 bp, Artificial; identical to SEQ ID NO: 306755
  Synthetic oligonucleotide

SEQ ID NO: 538305 - DNA, 59 bp, Artificial; identical to SEQ ID NO: 306758
  Synthetic oligonucleotide

SEQ ID NO: 538306 - DNA, 57 bp, Artificial; identical to SEQ ID NO: 306759
  Synthetic oligonucleotide

SEQ ID NO: 538307 - DNA, 60 bp, Artificial; identical to SEQ ID NO: 12882
  Synthetic oligonucleotide

SEQ ID NO: 538308 - DNA, 55 bp, Artificial; identical to SEQ ID NO: 306762
  Synthetic oligonucleotide

SEQ ID NO: 538309 - DNA, 60 bp, Artificial; identical to SEQ ID NO: 306763
  Synthetic oligonucleotide

SEQ ID NO: 538310 - DNA, 58 bp, Artificial; identical to SEQ ID NO: 306764
  Synthetic oligonucleotide

SEQ ID NO: 538311 - DNA, 50 bp, Artificial; identical to SEQ ID NO: 306772
  Synthetic oligonucleotide

SEQ ID NO: 538312 - DNA, 56 bp, Artificial; identical to SEQ ID NO: 306773
  Synthetic oligonucleotide

SEQ ID NO: 538313 - DNA, 60 bp, Artificial; identical to SEQ ID NO: 13247
  Synthetic oligonucleotide

SEQ ID NO: 538314 - DNA, 60 bp, Artificial; identical to SEQ ID NO: 6955
  Synthetic oligonucleotide

SEQ ID NO: 538315 - DNA, 55 bp, Artificial; identical to SEQ ID NO: 306777
  Synthetic oligonucleotide

SEQ ID NO: 538316 - DNA, 60 bp, Artificial; identical to SEQ ID NO: 306780
  Synthetic oligonucleotide

SEQ ID NO: 538317 - DNA, 58 bp, Artificial; identical to SEQ ID NO: 306781
  Synthetic oligonucleotide

SEQ ID NO: 538318 - DNA, 60 bp, Artificial; identical to SEQ ID NO: 306782
  Synthetic oligonucleotide

SEQ ID NO: 538319 - DNA, 59 bp, Artificial; identical to SEQ ID NO: 306787
  Synthetic oligonucleotide

SEQ ID NO: 538320 - DNA, 55 bp, Artificial; identical to SEQ ID NO: 306790
  Synthetic oligonucleotide

SEQ ID NO: 538321 - DNA, 60 bp, Artificial; identical to SEQ ID NO: 306793
  Synthetic oligonucleotide

SEQ ID NO: 538322 - DNA, 56 bp, Artificial; identical to SEQ ID NO: 306794
  Synthetic oligonucleotide

SEQ ID NO: 538323 - DNA, 57 bp, Artificial; identical to SEQ ID NO: 306801
  Synthetic oligonucleotide

SEQ ID NO: 538324 - DNA, 60 bp, Artificial; identical to SEQ ID NO: 306802
  Synthetic oligonucleotide

SEQ ID NO: 538325 - DNA, 57 bp, Artificial; identical to SEQ ID NO: 16587
  Synthetic oligonucleotide

SEQ ID NO: 538326 - DNA, 60 bp, Artificial; identical to SEQ ID NO: 306803
  Synthetic oligonucleotide

SEQ ID NO: 538327 - DNA, 54 bp, Artificial; identical to SEQ ID NO: 306805
  Synthetic oligonucleotide

SEQ ID NO: 538328 - DNA, 55 bp, Artificial; identical to SEQ ID NO: 306808
  Synthetic oligonucleotide

SEQ ID NO: 538329 - DNA, 59 bp, Artificial; identical to SEQ ID NO: 306812
  Synthetic oligonucleotide

SEQ ID NO: 538330 - DNA, 53 bp, Artificial; identical to SEQ ID NO: 306813
  Synthetic oligonucleotide

SEQ ID NO: 538331 - DNA, 57 bp, Artificial; identical to SEQ ID NO: 306814
  Synthetic oligonucleotide

SEQ ID NO: 538332 - DNA, 55 bp, Artificial; identical to SEQ ID NO: 306815
  Synthetic oligonucleotide

SEQ ID NO: 538333 - DNA, 59 bp, Artificial; identical to SEQ ID NO: 306818
  Synthetic oligonucleotide

SEQ ID NO: 538334 - DNA, 60 bp, Artificial; identical to SEQ ID NO: 306820
  Synthetic oligonucleotide

SEQ ID NO: 538335 - DNA, 60 bp, Artificial; identical to SEQ ID NO: 306822
  Synthetic oligonucleotide

SEQ ID NO: 538336 - DNA, 57 bp, Artificial; identical to SEQ ID NO: 306823
  Synthetic oligonucleotide

SEQ ID NO: 538337 - DNA, 60 bp, Artificial; identical to SEQ ID NO: 306825
  Synthetic oligonucleotide

SEQ ID NO: 538338 - DNA, 58 bp, Artificial; identical to SEQ ID NO: 306833
  Synthetic oligonucleotide

SEQ ID NO: 538339 - DNA, 60 bp, Artificial; identical to SEQ ID NO: 306836
  Synthetic oligonucleotide

SEQ ID NO: 538340 - DNA, 58 bp, Artificial; identical to SEQ ID NO: 306837
  Synthetic oligonucleotide

SEQ ID NO: 538341 - DNA, 60 bp, Artificial; identical to SEQ ID NO: 306843
  Synthetic oligonucleotide

SEQ ID NO: 538342 - DNA, 60 bp, Artificial; identical to SEQ ID NO: 306847
  Synthetic oligonucleotide

SEQ ID NO: 538343 - DNA, 60 bp, Artificial; identical to SEQ ID NO: 306850
  Synthetic oligonucleotide

SEQ ID NO: 538344 - DNA, 60 bp, Artificial; identical to SEQ ID NO: 306852
  Synthetic oligonucleotide

SEQ ID NO: 538345 - DNA, 54 bp, Artificial; identical to SEQ ID NO: 306855
  Synthetic oligonucleotide

SEQ ID NO: 538346 - DNA, 55 bp, Artificial; identical to SEQ ID NO: 306857
  Synthetic oligonucleotide

SEQ ID NO: 538347 - DNA, 55 bp, Artificial; identical to SEQ ID NO: 306858
  Synthetic oligonucleotide

SEQ ID NO: 538348 - DNA, 55 bp, Artificial; identical to SEQ ID NO: 306860
  Synthetic oligonucleotide

SEQ ID NO: 538349 - DNA, 50 bp, Artificial; identical to SEQ ID NO: 306864
  Synthetic oligonucleotide

SEQ ID NO: 538350 - DNA, 55 bp, Artificial; identical to SEQ ID NO: 306865
  Synthetic oligonucleotide

SEQ ID NO: 538351 - DNA, 56 bp, Artificial; identical to SEQ ID NO: 306866
  Synthetic oligonucleotide

SEQ ID NO: 538352 - DNA, 54 bp, Artificial; identical to SEQ ID NO: 18245
  Synthetic oligonucleotide

SEQ ID NO: 538353 - DNA, 60 bp, Artificial; identical to SEQ ID NO: 306871
  Synthetic oligonucleotide

SEQ ID NO: 538354 - DNA, 60 bp, Artificial; identical to SEQ ID NO: 306872
  Synthetic oligonucleotide

SEQ ID NO: 538355 - DNA, 51 bp, Artificial; identical to SEQ ID NO: 306873
  Synthetic oligonucleotide

SEQ ID NO: 538356 - DNA, 57 bp, Artificial; identical to SEQ ID NO: 306876
  Synthetic oligonucleotide

SEQ ID NO: 538357 - DNA, 58 bp, Artificial; identical to SEQ ID NO: 306877
  Synthetic oligonucleotide

SEQ ID NO: 538358 - DNA, 59 bp, Artificial; identical to SEQ ID NO: 19297
  Synthetic oligonucleotide

SEQ ID NO: 538359 - DNA, 54 bp, Artificial; identical to SEQ ID NO: 306882
  Synthetic oligonucleotide

SEQ ID NO: 538360 - DNA, 59 bp, Artificial; identical to SEQ ID NO: 306885
  Synthetic oligonucleotide

SEQ ID NO: 538361 - DNA, 60 bp, Artificial; identical to SEQ ID NO: 306886
  Synthetic oligonucleotide

SEQ ID NO: 538362 - DNA, 56 bp, Artificial; identical to SEQ ID NO: 306887
  Synthetic oligonucleotide

SEQ ID NO: 538363 - DNA, 60 bp, Artificial; identical to SEQ ID NO: 306888
  Synthetic oligonucleotide

SEQ ID NO: 538364 - DNA, 55 bp, Artificial; identical to SEQ ID NO: 306890
  Synthetic oligonucleotide

SEQ ID NO: 538365 - DNA, 58 bp, Artificial; identical to SEQ ID NO: 306893
  Synthetic oligonucleotide

SEQ ID NO: 538366 - DNA, 56 bp, Artificial; identical to SEQ ID NO: 306896
  Synthetic oligonucleotide

SEQ ID NO: 538367 - DNA, 59 bp, Artificial; identical to SEQ ID NO: 306897
  Synthetic oligonucleotide

SEQ ID NO: 538368 - DNA, 60 bp, Artificial; identical to SEQ ID NO: 306899
  Synthetic oligonucleotide

SEQ ID NO: 538369 - DNA, 59 bp, Artificial; identical to SEQ ID NO: 306905
  Synthetic oligonucleotide

SEQ ID NO: 538370 - DNA, 60 bp, Artificial; identical to SEQ ID NO: 306906
  Synthetic oligonucleotide

SEQ ID NO: 538371 - DNA, 60 bp, Artificial; identical to SEQ ID NO: 306911
  Synthetic oligonucleotide

SEQ ID NO: 538372 - DNA, 55 bp, Artificial; identical to SEQ ID NO: 306913
  Synthetic oligonucleotide

SEQ ID NO: 538373 - DNA, 55 bp, Artificial; identical to SEQ ID NO: 306914
  Synthetic oligonucleotide

SEQ ID NO: 538374 - DNA, 51 bp, Artificial; identical to SEQ ID NO: 306915
  Synthetic oligonucleotide

SEQ ID NO: 538375 - DNA, 60 bp, Artificial; identical to SEQ ID NO: 306917
  Synthetic oligonucleotide

SEQ ID NO: 538376 - DNA, 55 bp, Artificial; identical to SEQ ID NO: 306919
  Synthetic oligonucleotide

SEQ ID NO: 538377 - DNA, 55 bp, Artificial; identical to SEQ ID NO: 306922
  Synthetic oligonucleotide

SEQ ID NO: 538378 - DNA, 51 bp, Artificial; identical to SEQ ID NO: 306923
  Synthetic oligonucleotide

SEQ ID NO: 538379 - DNA, 56 bp, Artificial; identical to SEQ ID NO: 306925
  Synthetic oligonucleotide

SEQ ID NO: 538380 - DNA, 60 bp, Artificial; identical to SEQ ID NO: 306926
  Synthetic oligonucleotide

SEQ ID NO: 538381 - DNA, 59 bp, Artificial; identical to SEQ ID NO: 306927
  Synthetic oligonucleotide

SEQ ID NO: 538382 - DNA, 60 bp, Artificial; identical to SEQ ID NO: 306929
  Synthetic oligonucleotide

SEQ ID NO: 538383 - DNA, 51 bp, Artificial; identical to SEQ ID NO: 306935
  Synthetic oligonucleotide

SEQ ID NO: 538384 - DNA, 60 bp, Artificial; identical to SEQ ID NO: 306936
  Synthetic oligonucleotide

SEQ ID NO: 538385 - DNA, 50 bp, Artificial; identical to SEQ ID NO: 306937
  Synthetic oligonucleotide

SEQ ID NO: 538386 - DNA, 59 bp, Artificial; identical to SEQ ID NO: 306946
  Synthetic oligonucleotide

SEQ ID NO: 538387 - DNA, 51 bp, Artificial; identical to SEQ ID NO: 306947
  Synthetic oligonucleotide

SEQ ID NO: 538388 - DNA, 58 bp, Artificial; identical to SEQ ID NO: 306956
  Synthetic oligonucleotide

SEQ ID NO: 538389 - DNA, 51 bp, Artificial; identical to SEQ ID NO: 306959
  Synthetic oligonucleotide

SEQ ID NO: 538390 - DNA, 60 bp, Artificial; identical to SEQ ID NO: 306960
  Synthetic oligonucleotide

SEQ ID NO: 538391 - DNA, 60 bp, Artificial; identical to SEQ ID NO: 306961
  Synthetic oligonucleotide

SEQ ID NO: 538392 - DNA, 55 bp, Artificial; identical to SEQ ID NO: 306964
  Synthetic oligonucleotide

SEQ ID NO: 538393 - DNA, 53 bp, Artificial; identical to SEQ ID NO: 306965
  Synthetic oligonucleotide

SEQ ID NO: 538394 - DNA, 60 bp, Artificial; identical to SEQ ID NO: 306966
  Synthetic oligonucleotide

SEQ ID NO: 538395 - DNA, 58 bp, Artificial; identical to SEQ ID NO: 306967
  Synthetic oligonucleotide

SEQ ID NO: 538396 - DNA, 60 bp, Artificial; identical to SEQ ID NO: 306968
  Synthetic oligonucleotide

SEQ ID NO: 538397 - DNA, 60 bp, Artificial; identical to SEQ ID NO: 306969
  Synthetic oligonucleotide

SEQ ID NO: 538398 - DNA, 57 bp, Artificial; identical to SEQ ID NO: 306971
  Synthetic oligonucleotide

SEQ ID NO: 538399 - DNA, 60 bp, Artificial; identical to SEQ ID NO: 306974
  Synthetic oligonucleotide

SEQ ID NO: 538400 - DNA, 56 bp, Artificial; identical to SEQ ID NO: 306976
  Synthetic oligonucleotide

SEQ ID NO: 538401 - DNA, 60 bp, Artificial; identical to SEQ ID NO: 12790
  Synthetic oligonucleotide

SEQ ID NO: 538402 - DNA, 56 bp, Artificial; identical to SEQ ID NO: 306978
  Synthetic oligonucleotide

SEQ ID NO: 538403 - DNA, 60 bp, Artificial; identical to SEQ ID NO: 306980
  Synthetic oligonucleotide

SEQ ID NO: 538404 - DNA, 60 bp, Artificial; identical to SEQ ID NO: 306982
  Synthetic oligonucleotide

SEQ ID NO: 538405 - DNA, 59 bp, Artificial; identical to SEQ ID NO: 306983
  Synthetic oligonucleotide

SEQ ID NO: 538406 - DNA, 60 bp, Artificial; identical to SEQ ID NO: 306985
  Synthetic oligonucleotide

SEQ ID NO: 538407 - DNA, 60 bp, Artificial; identical to SEQ ID NO: 306989
  Synthetic oligonucleotide

SEQ ID NO: 538408 - DNA, 52 bp, Artificial; identical to SEQ ID NO: 306991
  Synthetic oligonucleotide

SEQ ID NO: 538409 - DNA, 54 bp, Artificial; identical to SEQ ID NO: 306999
  Synthetic oligonucleotide

SEQ ID NO: 538410 - DNA, 55 bp, Artificial; identical to SEQ ID NO: 307000
  Synthetic oligonucleotide

SEQ ID NO: 538411 - DNA, 60 bp, Artificial; identical to SEQ ID NO: 307004
  Synthetic oligonucleotide

SEQ ID NO: 538412 - DNA, 55 bp, Artificial; identical to SEQ ID NO: 307006
  Synthetic oligonucleotide

SEQ ID NO: 538413 - DNA, 53 bp, Artificial; identical to SEQ ID NO: 307012
  Synthetic oligonucleotide

SEQ ID NO: 538414 - DNA, 60 bp, Artificial; identical to SEQ ID NO: 307013
  Synthetic oligonucleotide

SEQ ID NO: 538415 - DNA, 52 bp, Artificial; identical to SEQ ID NO: 307014
  Synthetic oligonucleotide

SEQ ID NO: 538416 - DNA, 60 bp, Artificial; identical to SEQ ID NO: 307015
  Synthetic oligonucleotide

SEQ ID NO: 538417 - DNA, 58 bp, Artificial; identical to SEQ ID NO: 307017
  Synthetic oligonucleotide

SEQ ID NO: 538418 - DNA, 52 bp, Artificial; identical to SEQ ID NO: 307022
  Synthetic oligonucleotide

SEQ ID NO: 538419 - DNA, 60 bp, Artificial; identical to SEQ ID NO: 307023
  Synthetic oligonucleotide

SEQ ID NO: 538420 - DNA, 57 bp, Artificial; identical to SEQ ID NO: 307026
  Synthetic oligonucleotide

SEQ ID NO: 538421 - DNA, 50 bp, Artificial; identical to SEQ ID NO: 307029
  Synthetic oligonucleotide

SEQ ID NO: 538422 - DNA, 53 bp, Artificial; identical to SEQ ID NO: 307031
  Synthetic oligonucleotide

SEQ ID NO: 538423 - DNA, 54 bp, Artificial; identical to SEQ ID NO: 307034
  Synthetic oligonucleotide

SEQ ID NO: 538424 - DNA, 60 bp, Artificial; identical to SEQ ID NO: 307036
  Synthetic oligonucleotide

SEQ ID NO: 538425 - DNA, 59 bp, Artificial; identical to SEQ ID NO: 307037
  Synthetic oligonucleotide

SEQ ID NO: 538426 - DNA, 59 bp, Artificial; identical to SEQ ID NO: 307039
  Synthetic oligonucleotide

SEQ ID NO: 538427 - DNA, 55 bp, Artificial; identical to SEQ ID NO: 307043
  Synthetic oligonucleotide

SEQ ID NO: 538428 - DNA, 53 bp, Artificial; identical to SEQ ID NO: 307047
  Synthetic oligonucleotide

SEQ ID NO: 538429 - DNA, 55 bp, Artificial; identical to SEQ ID NO: 307048
  Synthetic oligonucleotide

SEQ ID NO: 538430 - DNA, 51 bp, Artificial; identical to SEQ ID NO: 307050
  Synthetic oligonucleotide

SEQ ID NO: 538431 - DNA, 60 bp, Artificial; identical to SEQ ID NO: 307058
  Synthetic oligonucleotide

SEQ ID NO: 538432 - DNA, 60 bp, Artificial; identical to SEQ ID NO: 307059
  Synthetic oligonucleotide

SEQ ID NO: 538433 - DNA, 58 bp, Artificial; identical to SEQ ID NO: 17153
  Synthetic oligonucleotide

SEQ ID NO: 538434 - DNA, 58 bp, Artificial; identical to SEQ ID NO: 307060
  Synthetic oligonucleotide

SEQ ID NO: 538435 - DNA, 55 bp, Artificial; identical to SEQ ID NO: 307062
  Synthetic oligonucleotide

SEQ ID NO: 538436 - DNA, 56 bp, Artificial; identical to SEQ ID NO: 307064
  Synthetic oligonucleotide

SEQ ID NO: 538437 - DNA, 60 bp, Artificial; identical to SEQ ID NO: 307066
  Synthetic oligonucleotide

SEQ ID NO: 538438 - DNA, 57 bp, Artificial; identical to SEQ ID NO: 307067
  Synthetic oligonucleotide

SEQ ID NO: 538439 - DNA, 59 bp, Artificial; identical to SEQ ID NO: 307068
  Synthetic oligonucleotide

SEQ ID NO: 538440 - DNA, 54 bp, Artificial; identical to SEQ ID NO: 307069
  Synthetic oligonucleotide

SEQ ID NO: 538441 - DNA, 60 bp, Artificial; identical to SEQ ID NO: 307070
  Synthetic oligonucleotide

SEQ ID NO: 538442 - DNA, 53 bp, Artificial; identical to SEQ ID NO: 307071
  Synthetic oligonucleotide

SEQ ID NO: 538443 - DNA, 53 bp, Artificial; identical to SEQ ID NO: 307072
  Synthetic oligonucleotide

SEQ ID NO: 538444 - DNA, 55 bp, Artificial; identical to SEQ ID NO: 307073
  Synthetic oligonucleotide

SEQ ID NO: 538445 - DNA, 54 bp, Artificial; identical to SEQ ID NO: 307075
  Synthetic oligonucleotide

SEQ ID NO: 538446 - DNA, 60 bp, Artificial; identical to SEQ ID NO: 307077
  Synthetic oligonucleotide

SEQ ID NO: 538447 - DNA, 60 bp, Artificial; identical to SEQ ID NO: 307079
  Synthetic oligonucleotide

SEQ ID NO: 538448 - DNA, 58 bp, Artificial; identical to SEQ ID NO: 307081
  Synthetic oligonucleotide

SEQ ID NO: 538449 - DNA, 51 bp, Artificial; identical to SEQ ID NO: 307086
  Synthetic oligonucleotide

SEQ ID NO: 538450 - DNA, 53 bp, Artificial; identical to SEQ ID NO: 307088
  Synthetic oligonucleotide

SEQ ID NO: 538451 - DNA, 57 bp, Artificial; identical to SEQ ID NO: 307090
  Synthetic oligonucleotide

SEQ ID NO: 538452 - DNA, 51 bp, Artificial; identical to SEQ ID NO: 307092
  Synthetic oligonucleotide

SEQ ID NO: 538453 - DNA, 60 bp, Artificial; identical to SEQ ID NO: 307097
  Synthetic oligonucleotide

SEQ ID NO: 538454 - DNA, 56 bp, Artificial; identical to SEQ ID NO: 307099
  Synthetic oligonucleotide

SEQ ID NO: 538455 - DNA, 60 bp, Artificial; identical to SEQ ID NO: 307100
  Synthetic oligonucleotide

SEQ ID NO: 538456 - DNA, 59 bp, Artificial; identical to SEQ ID NO: 11478
  Synthetic oligonucleotide

SEQ ID NO: 538457 - DNA, 50 bp, Artificial; identical to SEQ ID NO: 307102
  Synthetic oligonucleotide

SEQ ID NO: 538458 - DNA, 51 bp, Artificial; identical to SEQ ID NO: 307104
  Synthetic oligonucleotide

SEQ ID NO: 538459 - DNA, 55 bp, Artificial; identical to SEQ ID NO: 307106
  Synthetic oligonucleotide

SEQ ID NO: 538460 - DNA, 60 bp, Artificial; identical to SEQ ID NO: 307107
  Synthetic oligonucleotide

SEQ ID NO: 538461 - DNA, 55 bp, Artificial; identical to SEQ ID NO: 307109
  Synthetic oligonucleotide

SEQ ID NO: 538462 - DNA, 60 bp, Artificial; identical to SEQ ID NO: 307111
  Synthetic oligonucleotide

SEQ ID NO: 538463 - DNA, 56 bp, Artificial; identical to SEQ ID NO: 307113
  Synthetic oligonucleotide

SEQ ID NO: 538464 - DNA, 60 bp, Artificial; identical to SEQ ID NO: 307118
  Synthetic oligonucleotide

SEQ ID NO: 538465 - DNA, 55 bp, Artificial; identical to SEQ ID NO: 307120
  Synthetic oligonucleotide

SEQ ID NO: 538466 - DNA, 56 bp, Artificial; identical to SEQ ID NO: 307121
  Synthetic oligonucleotide

SEQ ID NO: 538467 - DNA, 60 bp, Artificial; identical to SEQ ID NO: 307126
  Synthetic oligonucleotide

SEQ ID NO: 538468 - DNA, 58 bp, Artificial; identical to SEQ ID NO: 307127
  Synthetic oligonucleotide

SEQ ID NO: 538469 - DNA, 60 bp, Artificial; identical to SEQ ID NO: 307130
  Synthetic oligonucleotide

SEQ ID NO: 538470 - DNA, 60 bp, Artificial; identical to SEQ ID NO: 307131
  Synthetic oligonucleotide

SEQ ID NO: 538471 - DNA, 60 bp, Artificial; identical to SEQ ID NO: 307133
  Synthetic oligonucleotide

SEQ ID NO: 538472 - DNA, 60 bp, Artificial; identical to SEQ ID NO: 307135
  Synthetic oligonucleotide

SEQ ID NO: 538473 - DNA, 58 bp, Artificial; identical to SEQ ID NO: 307138
  Synthetic oligonucleotide

SEQ ID NO: 538474 - DNA, 59 bp, Artificial; identical to SEQ ID NO: 307139
  Synthetic oligonucleotide

SEQ ID NO: 538475 - DNA, 60 bp, Artificial; identical to SEQ ID NO: 307146
  Synthetic oligonucleotide

SEQ ID NO: 538476 - DNA, 60 bp, Artificial; identical to SEQ ID NO: 307150
  Synthetic oligonucleotide

SEQ ID NO: 538477 - DNA, 60 bp, Artificial; identical to SEQ ID NO: 307152
  Synthetic oligonucleotide

SEQ ID NO: 538478 - DNA, 55 bp, Artificial; identical to SEQ ID NO: 307153
  Synthetic oligonucleotide

SEQ ID NO: 538479 - DNA, 60 bp, Artificial; identical to SEQ ID NO: 307155
  Synthetic oligonucleotide

SEQ ID NO: 538480 - DNA, 55 bp, Artificial; identical to SEQ ID NO: 307156
  Synthetic oligonucleotide

SEQ ID NO: 538481 - DNA, 56 bp, Artificial; identical to SEQ ID NO: 307157
  Synthetic oligonucleotide

SEQ ID NO: 538482 - DNA, 56 bp, Artificial; identical to SEQ ID NO: 307161
  Synthetic oligonucleotide

SEQ ID NO: 538483 - DNA, 55 bp, Artificial; identical to SEQ ID NO: 307164
  Synthetic oligonucleotide

SEQ ID NO: 538484 - DNA, 51 bp, Artificial; identical to SEQ ID NO: 307165
  Synthetic oligonucleotide

SEQ ID NO: 538485 - DNA, 51 bp, Artificial; identical to SEQ ID NO: 307170
  Synthetic oligonucleotide

SEQ ID NO: 538486 - DNA, 60 bp, Artificial; identical to SEQ ID NO: 307171
  Synthetic oligonucleotide

SEQ ID NO: 538487 - DNA, 60 bp, Artificial; identical to SEQ ID NO: 307177
  Synthetic oligonucleotide

SEQ ID NO: 538488 - DNA, 58 bp, Artificial; identical to SEQ ID NO: 307178
  Synthetic oligonucleotide

SEQ ID NO: 538489 - DNA, 60 bp, Artificial; identical to SEQ ID NO: 8141
  Synthetic oligonucleotide

SEQ ID NO: 538490 - DNA, 55 bp, Artificial; identical to SEQ ID NO: 307180
  Synthetic oligonucleotide

SEQ ID NO: 538491 - DNA, 60 bp, Artificial; identical to SEQ ID NO: 307181
  Synthetic oligonucleotide

SEQ ID NO: 538492 - DNA, 60 bp, Artificial; identical to SEQ ID NO: 307183
  Synthetic oligonucleotide

SEQ ID NO: 538493 - DNA, 56 bp, Artificial; identical to SEQ ID NO: 307185
  Synthetic oligonucleotide

SEQ ID NO: 538494 - DNA, 59 bp, Artificial; identical to SEQ ID NO: 19842
  Synthetic oligonucleotide

SEQ ID NO: 538495 - DNA, 57 bp, Artificial; identical to SEQ ID NO: 307192
  Synthetic oligonucleotide

SEQ ID NO: 538496 - DNA, 60 bp, Artificial; identical to SEQ ID NO: 307195
  Synthetic oligonucleotide

SEQ ID NO: 538497 - DNA, 57 bp, Artificial; identical to SEQ ID NO: 307200
  Synthetic oligonucleotide

SEQ ID NO: 538498 - DNA, 58 bp, Artificial; identical to SEQ ID NO: 307204
  Synthetic oligonucleotide

SEQ ID NO: 538499 - DNA, 54 bp, Artificial; identical to SEQ ID NO: 307205
  Synthetic oligonucleotide

SEQ ID NO: 538500 - DNA, 60 bp, Artificial; identical to SEQ ID NO: 307206
  Synthetic oligonucleotide

SEQ ID NO: 538501 - DNA, 55 bp, Artificial; identical to SEQ ID NO: 307208
  Synthetic oligonucleotide

SEQ ID NO: 538502 - DNA, 57 bp, Artificial; identical to SEQ ID NO: 307209
  Synthetic oligonucleotide

SEQ ID NO: 538503 - DNA, 60 bp, Artificial; identical to SEQ ID NO: 7166
  Synthetic oligonucleotide

SEQ ID NO: 538504 - DNA, 56 bp, Artificial; identical to SEQ ID NO: 307216
  Synthetic oligonucleotide

SEQ ID NO: 538505 - DNA, 52 bp, Artificial; identical to SEQ ID NO: 307217
  Synthetic oligonucleotide

SEQ ID NO: 538506 - DNA, 60 bp, Artificial; identical to SEQ ID NO: 307221
  Synthetic oligonucleotide

SEQ ID NO: 538507 - DNA, 60 bp, Artificial; identical to SEQ ID NO: 307229
  Synthetic oligonucleotide

SEQ ID NO: 538508 - DNA, 60 bp, Artificial; identical to SEQ ID NO: 307236
  Synthetic oligonucleotide

SEQ ID NO: 538509 - DNA, 53 bp, Artificial; identical to SEQ ID NO: 307238
  Synthetic oligonucleotide

SEQ ID NO: 538510 - DNA, 60 bp, Artificial; identical to SEQ ID NO: 307239
  Synthetic oligonucleotide

SEQ ID NO: 538511 - DNA, 60 bp, Artificial; identical to SEQ ID NO: 307240
  Synthetic oligonucleotide

SEQ ID NO: 538512 - DNA, 57 bp, Artificial; identical to SEQ ID NO: 307243
  Synthetic oligonucleotide

SEQ ID NO: 538513 - DNA, 60 bp, Artificial; identical to SEQ ID NO: 307245
  Synthetic oligonucleotide

SEQ ID NO: 538514 - DNA, 60 bp, Artificial; identical to SEQ ID NO: 307246
  Synthetic oligonucleotide

SEQ ID NO: 538515 - DNA, 59 bp, Artificial; identical to SEQ ID NO: 307250
  Synthetic oligonucleotide

SEQ ID NO: 538516 - DNA, 55 bp, Artificial; identical to SEQ ID NO: 307252
  Synthetic oligonucleotide

SEQ ID NO: 538517 - DNA, 55 bp, Artificial; identical to SEQ ID NO: 307260
  Synthetic oligonucleotide

SEQ ID NO: 538518 - DNA, 57 bp, Artificial; identical to SEQ ID NO: 307265
  Synthetic oligonucleotide

SEQ ID NO: 538519 - DNA, 60 bp, Artificial; identical to SEQ ID NO: 307269
  Synthetic oligonucleotide

SEQ ID NO: 538520 - DNA, 55 bp, Artificial; identical to SEQ ID NO: 307275
  Synthetic oligonucleotide

SEQ ID NO: 538521 - DNA, 56 bp, Artificial; identical to SEQ ID NO: 307278
  Synthetic oligonucleotide

SEQ ID NO: 538522 - DNA, 57 bp, Artificial; identical to SEQ ID NO: 307279
  Synthetic oligonucleotide

SEQ ID NO: 538523 - DNA, 55 bp, Artificial; identical to SEQ ID NO: 307280
  Synthetic oligonucleotide

SEQ ID NO: 538524 - DNA, 60 bp, Artificial; identical to SEQ ID NO: 307281
  Synthetic oligonucleotide

SEQ ID NO: 538525 - DNA, 55 bp, Artificial; identical to SEQ ID NO: 307285
  Synthetic oligonucleotide

SEQ ID NO: 538526 - DNA, 57 bp, Artificial; identical to SEQ ID NO: 307287
  Synthetic oligonucleotide

SEQ ID NO: 538527 - DNA, 60 bp, Artificial; identical to SEQ ID NO: 307289
  Synthetic oligonucleotide

SEQ ID NO: 538528 - DNA, 60 bp, Artificial; identical to SEQ ID NO: 307290
  Synthetic oligonucleotide

SEQ ID NO: 538529 - DNA, 53 bp, Artificial; identical to SEQ ID NO: 307294
  Synthetic oligonucleotide

SEQ ID NO: 538530 - DNA, 56 bp, Artificial; identical to SEQ ID NO: 307295
  Synthetic oligonucleotide

SEQ ID NO: 538531 - DNA, 50 bp, Artificial; identical to SEQ ID NO: 307296
  Synthetic oligonucleotide

SEQ ID NO: 538532 - DNA, 51 bp, Artificial; identical to SEQ ID NO: 307299
  Synthetic oligonucleotide

SEQ ID NO: 538533 - DNA, 53 bp, Artificial; identical to SEQ ID NO: 307300
  Synthetic oligonucleotide

SEQ ID NO: 538534 - DNA, 55 bp, Artificial; identical to SEQ ID NO: 307302
  Synthetic oligonucleotide

SEQ ID NO: 538535 - DNA, 60 bp, Artificial; identical to SEQ ID NO: 307306
  Synthetic oligonucleotide

SEQ ID NO: 538536 - DNA, 60 bp, Artificial; identical to SEQ ID NO: 10271
  Synthetic oligonucleotide

SEQ ID NO: 538537 - DNA, 59 bp, Artificial; identical to SEQ ID NO: 307308
  Synthetic oligonucleotide

SEQ ID NO: 538538 - DNA, 60 bp, Artificial; identical to SEQ ID NO: 307309
  Synthetic oligonucleotide

SEQ ID NO: 538539 - DNA, 60 bp, Artificial; identical to SEQ ID NO: 307310
  Synthetic oligonucleotide

SEQ ID NO: 538540 - DNA, 60 bp, Artificial; identical to SEQ ID NO: 307311
  Synthetic oligonucleotide

SEQ ID NO: 538541 - DNA, 57 bp, Artificial; identical to SEQ ID NO: 307312
  Synthetic oligonucleotide

SEQ ID NO: 538542 - DNA, 55 bp, Artificial; identical to SEQ ID NO: 307313
  Synthetic oligonucleotide

SEQ ID NO: 538543 - DNA, 55 bp, Artificial; identical to SEQ ID NO: 307314
  Synthetic oligonucleotide

SEQ ID NO: 538544 - DNA, 60 bp, Artificial; identical to SEQ ID NO: 307317
  Synthetic oligonucleotide

SEQ ID NO: 538545 - DNA, 50 bp, Artificial; identical to SEQ ID NO: 19477
  Synthetic oligonucleotide

SEQ ID NO: 538546 - DNA, 60 bp, Artificial; identical to SEQ ID NO: 307321
  Synthetic oligonucleotide

SEQ ID NO: 538547 - DNA, 54 bp, Artificial; identical to SEQ ID NO: 307322
  Synthetic oligonucleotide

SEQ ID NO: 538548 - DNA, 60 bp, Artificial; identical to SEQ ID NO: 307323
  Synthetic oligonucleotide

SEQ ID NO: 538549 - DNA, 50 bp, Artificial; identical to SEQ ID NO: 307327
  Synthetic oligonucleotide

SEQ ID NO: 538550 - DNA, 60 bp, Artificial; identical to SEQ ID NO: 307329
  Synthetic oligonucleotide

SEQ ID NO: 538551 - DNA, 53 bp, Artificial; identical to SEQ ID NO: 307331
  Synthetic oligonucleotide

SEQ ID NO: 538552 - DNA, 56 bp, Artificial; identical to SEQ ID NO: 307336
  Synthetic oligonucleotide

SEQ ID NO: 538553 - DNA, 55 bp, Artificial; identical to SEQ ID NO: 307338
  Synthetic oligonucleotide

SEQ ID NO: 538554 - DNA, 60 bp, Artificial; identical to SEQ ID NO: 307341
  Synthetic oligonucleotide

SEQ ID NO: 538555 - DNA, 58 bp, Artificial; identical to SEQ ID NO: 307342
  Synthetic oligonucleotide

SEQ ID NO: 538556 - DNA, 55 bp, Artificial; identical to SEQ ID NO: 307343
  Synthetic oligonucleotide

SEQ ID NO: 538557 - DNA, 59 bp, Artificial; identical to SEQ ID NO: 307345
  Synthetic oligonucleotide

SEQ ID NO: 538558 - DNA, 54 bp, Artificial; identical to SEQ ID NO: 307346
  Synthetic oligonucleotide

SEQ ID NO: 538559 - DNA, 55 bp, Artificial; identical to SEQ ID NO: 307348
  Synthetic oligonucleotide

SEQ ID NO: 538560 - DNA, 57 bp, Artificial; identical to SEQ ID NO: 307349
  Synthetic oligonucleotide

SEQ ID NO: 538561 - DNA, 55 bp, Artificial; identical to SEQ ID NO: 307350
  Synthetic oligonucleotide

SEQ ID NO: 538562 - DNA, 60 bp, Artificial; identical to SEQ ID NO: 307357
  Synthetic oligonucleotide

SEQ ID NO: 538563 - DNA, 49 bp, Artificial; identical to SEQ ID NO: 307358
  Synthetic oligonucleotide

SEQ ID NO: 538564 - DNA, 49 bp, Artificial; identical to SEQ ID NO: 307359
  Synthetic oligonucleotide

SEQ ID NO: 538565 - DNA, 58 bp, Artificial; identical to SEQ ID NO: 307360
  Synthetic oligonucleotide

SEQ ID NO: 538566 - DNA, 57 bp, Artificial; identical to SEQ ID NO: 307361
  Synthetic oligonucleotide

SEQ ID NO: 538567 - DNA, 60 bp, Artificial; identical to SEQ ID NO: 307364
  Synthetic oligonucleotide

SEQ ID NO: 538568 - DNA, 60 bp, Artificial; identical to SEQ ID NO: 307370
  Synthetic oligonucleotide

SEQ ID NO: 538569 - DNA, 60 bp, Artificial; identical to SEQ ID NO: 307371
  Synthetic oligonucleotide

SEQ ID NO: 538570 - DNA, 60 bp, Artificial; identical to SEQ ID NO: 307372
  Synthetic oligonucleotide

SEQ ID NO: 538571 - DNA, 55 bp, Artificial; identical to SEQ ID NO: 307375
  Synthetic oligonucleotide

SEQ ID NO: 538572 - DNA, 60 bp, Artificial; identical to SEQ ID NO: 307379
  Synthetic oligonucleotide

SEQ ID NO: 538573 - DNA, 60 bp, Artificial; identical to SEQ ID NO: 307386
  Synthetic oligonucleotide

SEQ ID NO: 538574 - DNA, 57 bp, Artificial; identical to SEQ ID NO: 307391
  Synthetic oligonucleotide

SEQ ID NO: 538575 - DNA, 50 bp, Artificial; identical to SEQ ID NO: 307393
  Synthetic oligonucleotide

SEQ ID NO: 538576 - DNA, 55 bp, Artificial; identical to SEQ ID NO: 307394
  Synthetic oligonucleotide

SEQ ID NO: 538577 - DNA, 56 bp, Artificial; identical to SEQ ID NO: 307395
  Synthetic oligonucleotide

SEQ ID NO: 538578 - DNA, 54 bp, Artificial; identical to SEQ ID NO: 307397
  Synthetic oligonucleotide

SEQ ID NO: 538579 - DNA, 56 bp, Artificial; identical to SEQ ID NO: 307398
  Synthetic oligonucleotide

SEQ ID NO: 538580 - DNA, 52 bp, Artificial; identical to SEQ ID NO: 307399
  Synthetic oligonucleotide

SEQ ID NO: 538581 - DNA, 59 bp, Artificial; identical to SEQ ID NO: 307405
  Synthetic oligonucleotide

SEQ ID NO: 538582 - DNA, 50 bp, Artificial; identical to SEQ ID NO: 307409
  Synthetic oligonucleotide

SEQ ID NO: 538583 - DNA, 58 bp, Artificial; identical to SEQ ID NO: 307411
  Synthetic oligonucleotide

SEQ ID NO: 538584 - DNA, 59 bp, Artificial; identical to SEQ ID NO: 307414
  Synthetic oligonucleotide

SEQ ID NO: 538585 - DNA, 60 bp, Artificial; identical to SEQ ID NO: 307417
  Synthetic oligonucleotide

SEQ ID NO: 538586 - DNA, 60 bp, Artificial; identical to SEQ ID NO: 307418
  Synthetic oligonucleotide

SEQ ID NO: 538587 - DNA, 57 bp, Artificial; identical to SEQ ID NO: 14468
  Synthetic oligonucleotide

SEQ ID NO: 538588 - DNA, 60 bp, Artificial; identical to SEQ ID NO: 307419
  Synthetic oligonucleotide

SEQ ID NO: 538589 - DNA, 58 bp, Artificial; identical to SEQ ID NO: 307420
  Synthetic oligonucleotide

SEQ ID NO: 538590 - DNA, 59 bp, Artificial; identical to SEQ ID NO: 307421
  Synthetic oligonucleotide

SEQ ID NO: 538591 - DNA, 58 bp, Artificial; identical to SEQ ID NO: 307422
  Synthetic oligonucleotide

SEQ ID NO: 538592 - DNA, 60 bp, Artificial; identical to SEQ ID NO: 307424
  Synthetic oligonucleotide

SEQ ID NO: 538593 - DNA, 56 bp, Artificial; identical to SEQ ID NO: 307426
  Synthetic oligonucleotide

SEQ ID NO: 538594 - DNA, 59 bp, Artificial; identical to SEQ ID NO: 307428
  Synthetic oligonucleotide

SEQ ID NO: 538595 - DNA, 55 bp, Artificial; identical to SEQ ID NO: 307429
  Synthetic oligonucleotide

SEQ ID NO: 538596 - DNA, 60 bp, Artificial; identical to SEQ ID NO: 307430
  Synthetic oligonucleotide

SEQ ID NO: 538597 - DNA, 60 bp, Artificial; identical to SEQ ID NO: 307431
  Synthetic oligonucleotide

SEQ ID NO: 538598 - DNA, 51 bp, Artificial; identical to SEQ ID NO: 307433
  Synthetic oligonucleotide

SEQ ID NO: 538599 - DNA, 56 bp, Artificial; identical to SEQ ID NO: 307437
  Synthetic oligonucleotide

SEQ ID NO: 538600 - DNA, 56 bp, Artificial; identical to SEQ ID NO: 307438
  Synthetic oligonucleotide

SEQ ID NO: 538601 - DNA, 56 bp, Artificial; identical to SEQ ID NO: 307439
  Synthetic oligonucleotide

SEQ ID NO: 538602 - DNA, 60 bp, Artificial; identical to SEQ ID NO: 307442
  Synthetic oligonucleotide

SEQ ID NO: 538603 - DNA, 55 bp, Artificial; identical to SEQ ID NO: 307446
  Synthetic oligonucleotide

SEQ ID NO: 538604 - DNA, 60 bp, Artificial; identical to SEQ ID NO: 307448
  Synthetic oligonucleotide

SEQ ID NO: 538605 - DNA, 59 bp, Artificial; identical to SEQ ID NO: 307451
  Synthetic oligonucleotide

SEQ ID NO: 538606 - DNA, 60 bp, Artificial; identical to SEQ ID NO: 307454
  Synthetic oligonucleotide

SEQ ID NO: 538607 - DNA, 55 bp, Artificial; identical to SEQ ID NO: 307455
  Synthetic oligonucleotide

SEQ ID NO: 538608 - DNA, 58 bp, Artificial; identical to SEQ ID NO: 307458
  Synthetic oligonucleotide

SEQ ID NO: 538609 - DNA, 59 bp, Artificial; identical to SEQ ID NO: 307460
  Synthetic oligonucleotide

SEQ ID NO: 538610 - DNA, 60 bp, Artificial; identical to SEQ ID NO: 307461
  Synthetic oligonucleotide

SEQ ID NO: 538611 - DNA, 55 bp, Artificial; identical to SEQ ID NO: 307464
  Synthetic oligonucleotide

SEQ ID NO: 538612 - DNA, 59 bp, Artificial; identical to SEQ ID NO: 307469
  Synthetic oligonucleotide

SEQ ID NO: 538613 - DNA, 53 bp, Artificial; identical to SEQ ID NO: 307470
  Synthetic oligonucleotide

SEQ ID NO: 538614 - DNA, 55 bp, Artificial; identical to SEQ ID NO: 307473
  Synthetic oligonucleotide

SEQ ID NO: 538615 - DNA, 54 bp, Artificial; identical to SEQ ID NO: 307474
  Synthetic oligonucleotide

SEQ ID NO: 538616 - DNA, 53 bp, Artificial; identical to SEQ ID NO: 307476
  Synthetic oligonucleotide

SEQ ID NO: 538617 - DNA, 56 bp, Artificial; identical to SEQ ID NO: 307477
  Synthetic oligonucleotide

SEQ ID NO: 538618 - DNA, 58 bp, Artificial; identical to SEQ ID NO: 307480
  Synthetic oligonucleotide

SEQ ID NO: 538619 - DNA, 55 bp, Artificial; identical to SEQ ID NO: 307481
  Synthetic oligonucleotide

SEQ ID NO: 538620 - DNA, 54 bp, Artificial; identical to SEQ ID NO: 307482
  Synthetic oligonucleotide

SEQ ID NO: 538621 - DNA, 55 bp, Artificial; identical to SEQ ID NO: 307484
  Synthetic oligonucleotide

SEQ ID NO: 538622 - DNA, 57 bp, Artificial; identical to SEQ ID NO: 307485
  Synthetic oligonucleotide

SEQ ID NO: 538623 - DNA, 60 bp, Artificial; identical to SEQ ID NO: 307486
  Synthetic oligonucleotide

SEQ ID NO: 538624 - DNA, 50 bp, Artificial; identical to SEQ ID NO: 307490
  Synthetic oligonucleotide

SEQ ID NO: 538625 - DNA, 55 bp, Artificial; identical to SEQ ID NO: 307499
  Synthetic oligonucleotide

SEQ ID NO: 538626 - DNA, 55 bp, Artificial; identical to SEQ ID NO: 307508
  Synthetic oligonucleotide

SEQ ID NO: 538627 - DNA, 50 bp, Artificial; identical to SEQ ID NO: 307509
  Synthetic oligonucleotide

SEQ ID NO: 538628 - DNA, 51 bp, Artificial; identical to SEQ ID NO: 307510
  Synthetic oligonucleotide

SEQ ID NO: 538629 - DNA, 54 bp, Artificial; identical to SEQ ID NO: 307513
  Synthetic oligonucleotide

SEQ ID NO: 538630 - DNA, 54 bp, Artificial; identical to SEQ ID NO: 307515
  Synthetic oligonucleotide

SEQ ID NO: 538631 - DNA, 56 bp, Artificial; identical to SEQ ID NO: 307516
  Synthetic oligonucleotide

SEQ ID NO: 538632 - DNA, 57 bp, Artificial; identical to SEQ ID NO: 307517
  Synthetic oligonucleotide

SEQ ID NO: 538633 - DNA, 55 bp, Artificial; identical to SEQ ID NO: 307518
  Synthetic oligonucleotide

SEQ ID NO: 538634 - DNA, 54 bp, Artificial; identical to SEQ ID NO: 307522
  Synthetic oligonucleotide

SEQ ID NO: 538635 - DNA, 58 bp, Artificial; identical to SEQ ID NO: 307524
  Synthetic oligonucleotide

SEQ ID NO: 538636 - DNA, 51 bp, Artificial; identical to SEQ ID NO: 307527
  Synthetic oligonucleotide

SEQ ID NO: 538637 - DNA, 58 bp, Artificial; identical to SEQ ID NO: 307530
  Synthetic oligonucleotide

SEQ ID NO: 538638 - DNA, 60 bp, Artificial; identical to SEQ ID NO: 307532
  Synthetic oligonucleotide

SEQ ID NO: 538639 - DNA, 60 bp, Artificial; identical to SEQ ID NO: 307538
  Synthetic oligonucleotide

SEQ ID NO: 538640 - DNA, 60 bp, Artificial; identical to SEQ ID NO: 307540
  Synthetic oligonucleotide

SEQ ID NO: 538641 - DNA, 55 bp, Artificial; identical to SEQ ID NO: 307543
  Synthetic oligonucleotide

SEQ ID NO: 538642 - DNA, 58 bp, Artificial; identical to SEQ ID NO: 307546
  Synthetic oligonucleotide

SEQ ID NO: 538643 - DNA, 54 bp, Artificial; identical to SEQ ID NO: 19521
  Synthetic oligonucleotide

SEQ ID NO: 538644 - DNA, 55 bp, Artificial; identical to SEQ ID NO: 307547
  Synthetic oligonucleotide

SEQ ID NO: 538645 - DNA, 55 bp, Artificial; identical to SEQ ID NO: 307550
  Synthetic oligonucleotide

SEQ ID NO: 538646 - DNA, 60 bp, Artificial; identical to SEQ ID NO: 307551
  Synthetic oligonucleotide

SEQ ID NO: 538647 - DNA, 60 bp, Artificial; identical to SEQ ID NO: 307552
  Synthetic oligonucleotide

SEQ ID NO: 538648 - DNA, 56 bp, Artificial; identical to SEQ ID NO: 307559
  Synthetic oligonucleotide

SEQ ID NO: 538649 - DNA, 60 bp, Artificial; identical to SEQ ID NO: 307560
  Synthetic oligonucleotide

SEQ ID NO: 538650 - DNA, 60 bp, Artificial; identical to SEQ ID NO: 307565
  Synthetic oligonucleotide

SEQ ID NO: 538651 - DNA, 56 bp, Artificial; identical to SEQ ID NO: 307566
  Synthetic oligonucleotide

SEQ ID NO: 538652 - DNA, 60 bp, Artificial; identical to SEQ ID NO: 307568
  Synthetic oligonucleotide

SEQ ID NO: 538653 - DNA, 55 bp, Artificial; identical to SEQ ID NO: 307574
  Synthetic oligonucleotide

SEQ ID NO: 538654 - DNA, 53 bp, Artificial; identical to SEQ ID NO: 307575
  Synthetic oligonucleotide

SEQ ID NO: 538655 - DNA, 55 bp, Artificial; identical to SEQ ID NO: 307580
  Synthetic oligonucleotide

SEQ ID NO: 538656 - DNA, 60 bp, Artificial; identical to SEQ ID NO: 307582
  Synthetic oligonucleotide

SEQ ID NO: 538657 - DNA, 52 bp, Artificial; identical to SEQ ID NO: 307584
  Synthetic oligonucleotide

SEQ ID NO: 538658 - DNA, 53 bp, Artificial; identical to SEQ ID NO: 307587
  Synthetic oligonucleotide

SEQ ID NO: 538659 - DNA, 55 bp, Artificial; identical to SEQ ID NO: 307588
  Synthetic oligonucleotide

SEQ ID NO: 538660 - DNA, 55 bp, Artificial; identical to SEQ ID NO: 307590
  Synthetic oligonucleotide

SEQ ID NO: 538661 - DNA, 60 bp, Artificial; identical to SEQ ID NO: 307591
  Synthetic oligonucleotide

SEQ ID NO: 538662 - DNA, 55 bp, Artificial; identical to SEQ ID NO: 307594
  Synthetic oligonucleotide

SEQ ID NO: 538663 - DNA, 58 bp, Artificial; identical to SEQ ID NO: 307602
  Synthetic oligonucleotide

SEQ ID NO: 538664 - DNA, 52 bp, Artificial; identical to SEQ ID NO: 307604
  Synthetic oligonucleotide

SEQ ID NO: 538665 - DNA, 59 bp, Artificial; identical to SEQ ID NO: 307606
  Synthetic oligonucleotide

SEQ ID NO: 538666 - DNA, 50 bp, Artificial; identical to SEQ ID NO: 307607
  Synthetic oligonucleotide

SEQ ID NO: 538667 - DNA, 55 bp, Artificial; identical to SEQ ID NO: 307608
  Synthetic oligonucleotide

SEQ ID NO: 538668 - DNA, 60 bp, Artificial; identical to SEQ ID NO: 307609
  Synthetic oligonucleotide

SEQ ID NO: 538669 - DNA, 59 bp, Artificial; identical to SEQ ID NO: 307614
  Synthetic oligonucleotide

SEQ ID NO: 538670 - DNA, 53 bp, Artificial; identical to SEQ ID NO: 307619
  Synthetic oligonucleotide

SEQ ID NO: 538671 - DNA, 57 bp, Artificial; identical to SEQ ID NO: 307620
  Synthetic oligonucleotide

SEQ ID NO: 538672 - DNA, 60 bp, Artificial; identical to SEQ ID NO: 307622
  Synthetic oligonucleotide

SEQ ID NO: 538673 - DNA, 55 bp, Artificial; identical to SEQ ID NO: 307623
  Synthetic oligonucleotide

SEQ ID NO: 538674 - DNA, 57 bp, Artificial; identical to SEQ ID NO: 307624
  Synthetic oligonucleotide

SEQ ID NO: 538675 - DNA, 59 bp, Artificial; identical to SEQ ID NO: 307626
  Synthetic oligonucleotide

SEQ ID NO: 538676 - DNA, 60 bp, Artificial; identical to SEQ ID NO: 307627
  Synthetic oligonucleotide

SEQ ID NO: 538677 - DNA, 50 bp, Artificial; identical to SEQ ID NO: 307630
  Synthetic oligonucleotide

SEQ ID NO: 538678 - DNA, 58 bp, Artificial; identical to SEQ ID NO: 307632
  Synthetic oligonucleotide

SEQ ID NO: 538679 - DNA, 53 bp, Artificial; identical to SEQ ID NO: 307634
  Synthetic oligonucleotide

SEQ ID NO: 538680 - DNA, 57 bp, Artificial; identical to SEQ ID NO: 307640
  Synthetic oligonucleotide

SEQ ID NO: 538681 - DNA, 58 bp, Artificial; identical to SEQ ID NO: 307641
  Synthetic oligonucleotide

SEQ ID NO: 538682 - DNA, 57 bp, Artificial; identical to SEQ ID NO: 307644
  Synthetic oligonucleotide

SEQ ID NO: 538683 - DNA, 50 bp, Artificial; identical to SEQ ID NO: 307646
  Synthetic oligonucleotide

SEQ ID NO: 538684 - DNA, 52 bp, Artificial; identical to SEQ ID NO: 307647
  Synthetic oligonucleotide

SEQ ID NO: 538685 - DNA, 60 bp, Artificial; identical to SEQ ID NO: 307650
  Synthetic oligonucleotide

SEQ ID NO: 538686 - DNA, 60 bp, Artificial; identical to SEQ ID NO: 307652
  Synthetic oligonucleotide

SEQ ID NO: 538687 - DNA, 55 bp, Artificial; identical to SEQ ID NO: 307654
  Synthetic oligonucleotide

SEQ ID NO: 538688 - DNA, 56 bp, Artificial; identical to SEQ ID NO: 307655
  Synthetic oligonucleotide

SEQ ID NO: 538689 - DNA, 59 bp, Artificial; identical to SEQ ID NO: 307657
  Synthetic oligonucleotide

SEQ ID NO: 538690 - DNA, 57 bp, Artificial; identical to SEQ ID NO: 307662
  Synthetic oligonucleotide

SEQ ID NO: 538691 - DNA, 56 bp, Artificial; identical to SEQ ID NO: 307666
  Synthetic oligonucleotide

SEQ ID NO: 538692 - DNA, 60 bp, Artificial; identical to SEQ ID NO: 307668
  Synthetic oligonucleotide

SEQ ID NO: 538693 - DNA, 60 bp, Artificial; identical to SEQ ID NO: 307669
  Synthetic oligonucleotide

SEQ ID NO: 538694 - DNA, 60 bp, Artificial; identical to SEQ ID NO: 11516
  Synthetic oligonucleotide

SEQ ID NO: 538695 - DNA, 60 bp, Artificial; identical to SEQ ID NO: 307673
  Synthetic oligonucleotide

SEQ ID NO: 538696 - DNA, 60 bp, Artificial; identical to SEQ ID NO: 307680
  Synthetic oligonucleotide

SEQ ID NO: 538697 - DNA, 59 bp, Artificial; identical to SEQ ID NO: 307683
  Synthetic oligonucleotide

SEQ ID NO: 538698 - DNA, 60 bp, Artificial; identical to SEQ ID NO: 307688
  Synthetic oligonucleotide

SEQ ID NO: 538699 - DNA, 56 bp, Artificial; identical to SEQ ID NO: 307691
  Synthetic oligonucleotide

SEQ ID NO: 538700 - DNA, 60 bp, Artificial; identical to SEQ ID NO: 307692
  Synthetic oligonucleotide

SEQ ID NO: 538701 - DNA, 54 bp, Artificial; identical to SEQ ID NO: 307694
  Synthetic oligonucleotide

SEQ ID NO: 538702 - DNA, 53 bp, Artificial; identical to SEQ ID NO: 307695
  Synthetic oligonucleotide

SEQ ID NO: 538703 - DNA, 53 bp, Artificial; identical to SEQ ID NO: 307697
  Synthetic oligonucleotide

SEQ ID NO: 538704 - DNA, 51 bp, Artificial; identical to SEQ ID NO: 307701
  Synthetic oligonucleotide

SEQ ID NO: 538705 - DNA, 51 bp, Artificial; identical to SEQ ID NO: 307703
  Synthetic oligonucleotide

SEQ ID NO: 538706 - DNA, 60 bp, Artificial; identical to SEQ ID NO: 307704
  Synthetic oligonucleotide

SEQ ID NO: 538707 - DNA, 59 bp, Artificial; identical to SEQ ID NO: 307711
  Synthetic oligonucleotide

SEQ ID NO: 538708 - DNA, 58 bp, Artificial; identical to SEQ ID NO: 19470
  Synthetic oligonucleotide

SEQ ID NO: 538709 - DNA, 54 bp, Artificial; identical to SEQ ID NO: 307714
  Synthetic oligonucleotide

SEQ ID NO: 538710 - DNA, 59 bp, Artificial; identical to SEQ ID NO: 307717
  Synthetic oligonucleotide

SEQ ID NO: 538711 - DNA, 57 bp, Artificial; identical to SEQ ID NO: 307722
  Synthetic oligonucleotide

SEQ ID NO: 538712 - DNA, 59 bp, Artificial; identical to SEQ ID NO: 307723
  Synthetic oligonucleotide

SEQ ID NO: 538713 - DNA, 55 bp, Artificial; identical to SEQ ID NO: 307724
  Synthetic oligonucleotide

SEQ ID NO: 538714 - DNA, 57 bp, Artificial; identical to SEQ ID NO: 307725
  Synthetic oligonucleotide

SEQ ID NO: 538715 - DNA, 54 bp, Artificial; identical to SEQ ID NO: 19402
  Synthetic oligonucleotide

SEQ ID NO: 538716 - DNA, 58 bp, Artificial; identical to SEQ ID NO: 307733
  Synthetic oligonucleotide

SEQ ID NO: 538717 - DNA, 54 bp, Artificial; identical to SEQ ID NO: 307737
  Synthetic oligonucleotide

SEQ ID NO: 538718 - DNA, 53 bp, Artificial; identical to SEQ ID NO: 307740
  Synthetic oligonucleotide

SEQ ID NO: 538719 - DNA, 53 bp, Artificial; identical to SEQ ID NO: 307743
  Synthetic oligonucleotide

SEQ ID NO: 538720 - DNA, 60 bp, Artificial; identical to SEQ ID NO: 307746
  Synthetic oligonucleotide

SEQ ID NO: 538721 - DNA, 60 bp, Artificial; identical to SEQ ID NO: 307751
  Synthetic oligonucleotide

SEQ ID NO: 538722 - DNA, 54 bp, Artificial; identical to SEQ ID NO: 307754
  Synthetic oligonucleotide

SEQ ID NO: 538723 - DNA, 56 bp, Artificial; identical to SEQ ID NO: 307755
  Synthetic oligonucleotide

SEQ ID NO: 538724 - DNA, 53 bp, Artificial; identical to SEQ ID NO: 307758
  Synthetic oligonucleotide

SEQ ID NO: 538725 - DNA, 60 bp, Artificial; identical to SEQ ID NO: 307761
  Synthetic oligonucleotide

SEQ ID NO: 538726 - DNA, 56 bp, Artificial; identical to SEQ ID NO: 307762
  Synthetic oligonucleotide

SEQ ID NO: 538727 - DNA, 58 bp, Artificial; identical to SEQ ID NO: 307765
  Synthetic oligonucleotide

SEQ ID NO: 538728 - DNA, 60 bp, Artificial; identical to SEQ ID NO: 307769
  Synthetic oligonucleotide

SEQ ID NO: 538729 - DNA, 55 bp, Artificial; identical to SEQ ID NO: 307770
  Synthetic oligonucleotide

SEQ ID NO: 538730 - DNA, 55 bp, Artificial; identical to SEQ ID NO: 307775
  Synthetic oligonucleotide

SEQ ID NO: 538731 - DNA, 59 bp, Artificial; identical to SEQ ID NO: 307777
  Synthetic oligonucleotide

SEQ ID NO: 538732 - DNA, 60 bp, Artificial; identical to SEQ ID NO: 307779
  Synthetic oligonucleotide

SEQ ID NO: 538733 - DNA, 55 bp, Artificial; identical to SEQ ID NO: 307780
  Synthetic oligonucleotide

SEQ ID NO: 538734 - DNA, 58 bp, Artificial; identical to SEQ ID NO: 307782
  Synthetic oligonucleotide

SEQ ID NO: 538735 - DNA, 57 bp, Artificial; identical to SEQ ID NO: 307783
  Synthetic oligonucleotide

SEQ ID NO: 538736 - DNA, 50 bp, Artificial; identical to SEQ ID NO: 307790
  Synthetic oligonucleotide

SEQ ID NO: 538737 - DNA, 53 bp, Artificial; identical to SEQ ID NO: 307794
  Synthetic oligonucleotide

SEQ ID NO: 538738 - DNA, 55 bp, Artificial; identical to SEQ ID NO: 307797
  Synthetic oligonucleotide

SEQ ID NO: 538739 - DNA, 52 bp, Artificial; identical to SEQ ID NO: 307799
  Synthetic oligonucleotide

SEQ ID NO: 538740 - DNA, 59 bp, Artificial; identical to SEQ ID NO: 307801
  Synthetic oligonucleotide

SEQ ID NO: 538741 - DNA, 54 bp, Artificial; identical to SEQ ID NO: 307805
  Synthetic oligonucleotide

SEQ ID NO: 538742 - DNA, 53 bp, Artificial; identical to SEQ ID NO: 307808
  Synthetic oligonucleotide

SEQ ID NO: 538743 - DNA, 60 bp, Artificial; identical to SEQ ID NO: 307813
  Synthetic oligonucleotide

SEQ ID NO: 538744 - DNA, 57 bp, Artificial; identical to SEQ ID NO: 307816
  Synthetic oligonucleotide

SEQ ID NO: 538745 - DNA, 54 bp, Artificial; identical to SEQ ID NO: 307817
  Synthetic oligonucleotide

SEQ ID NO: 538746 - DNA, 55 bp, Artificial; identical to SEQ ID NO: 307821
  Synthetic oligonucleotide

SEQ ID NO: 538747 - DNA, 52 bp, Artificial; identical to SEQ ID NO: 307822
  Synthetic oligonucleotide

SEQ ID NO: 538748 - DNA, 52 bp, Artificial; identical to SEQ ID NO: 14383
  Synthetic oligonucleotide

SEQ ID NO: 538749 - DNA, 55 bp, Artificial; identical to SEQ ID NO: 307834
  Synthetic oligonucleotide

SEQ ID NO: 538750 - DNA, 58 bp, Artificial; identical to SEQ ID NO: 307835
  Synthetic oligonucleotide

SEQ ID NO: 538751 - DNA, 58 bp, Artificial; identical to SEQ ID NO: 307836
  Synthetic oligonucleotide

SEQ ID NO: 538752 - DNA, 55 bp, Artificial; identical to SEQ ID NO: 307838
  Synthetic oligonucleotide

SEQ ID NO: 538753 - DNA, 56 bp, Artificial; identical to SEQ ID NO: 307839
  Synthetic oligonucleotide

SEQ ID NO: 538754 - DNA, 55 bp, Artificial; identical to SEQ ID NO: 307842
  Synthetic oligonucleotide

SEQ ID NO: 538755 - DNA, 60 bp, Artificial; identical to SEQ ID NO: 15318
  Synthetic oligonucleotide

SEQ ID NO: 538756 - DNA, 55 bp, Artificial; identical to SEQ ID NO: 307843
  Synthetic oligonucleotide

SEQ ID NO: 538757 - DNA, 57 bp, Artificial; identical to SEQ ID NO: 307844
  Synthetic oligonucleotide

SEQ ID NO: 538758 - DNA, 57 bp, Artificial; identical to SEQ ID NO: 307845
  Synthetic oligonucleotide

SEQ ID NO: 538759 - DNA, 60 bp, Artificial; identical to SEQ ID NO: 307847
  Synthetic oligonucleotide

SEQ ID NO: 538760 - DNA, 58 bp, Artificial; identical to SEQ ID NO: 307849
  Synthetic oligonucleotide

SEQ ID NO: 538761 - DNA, 57 bp, Artificial; identical to SEQ ID NO: 307853
  Synthetic oligonucleotide

SEQ ID NO: 538762 - DNA, 55 bp, Artificial; identical to SEQ ID NO: 307854
  Synthetic oligonucleotide

SEQ ID NO: 538763 - DNA, 60 bp, Artificial; identical to SEQ ID NO: 307858
  Synthetic oligonucleotide

SEQ ID NO: 538764 - DNA, 59 bp, Artificial; identical to SEQ ID NO: 307862
  Synthetic oligonucleotide

SEQ ID NO: 538765 - DNA, 58 bp, Artificial; identical to SEQ ID NO: 307864
  Synthetic oligonucleotide

SEQ ID NO: 538766 - DNA, 60 bp, Artificial; identical to SEQ ID NO: 307867
  Synthetic oligonucleotide

SEQ ID NO: 538767 - DNA, 60 bp, Artificial; identical to SEQ ID NO: 307868
  Synthetic oligonucleotide

SEQ ID NO: 538768 - DNA, 55 bp, Artificial; identical to SEQ ID NO: 307869
  Synthetic oligonucleotide

SEQ ID NO: 538769 - DNA, 53 bp, Artificial; identical to SEQ ID NO: 307870
  Synthetic oligonucleotide

SEQ ID NO: 538770 - DNA, 53 bp, Artificial; identical to SEQ ID NO: 307875
  Synthetic oligonucleotide

SEQ ID NO: 538771 - DNA, 55 bp, Artificial; identical to SEQ ID NO: 307879
  Synthetic oligonucleotide

SEQ ID NO: 538772 - DNA, 58 bp, Artificial; identical to SEQ ID NO: 307880
  Synthetic oligonucleotide

SEQ ID NO: 538773 - DNA, 56 bp, Artificial; identical to SEQ ID NO: 307881
  Synthetic oligonucleotide

SEQ ID NO: 538774 - DNA, 58 bp, Artificial; identical to SEQ ID NO: 307886
  Synthetic oligonucleotide

SEQ ID NO: 538775 - DNA, 53 bp, Artificial; identical to SEQ ID NO: 307903
  Synthetic oligonucleotide

SEQ ID NO: 538776 - DNA, 58 bp, Artificial; identical to SEQ ID NO: 17617
  Synthetic oligonucleotide

SEQ ID NO: 538777 - DNA, 55 bp, Artificial; identical to SEQ ID NO: 307905
  Synthetic oligonucleotide

SEQ ID NO: 538778 - DNA, 57 bp, Artificial; identical to SEQ ID NO: 307907
  Synthetic oligonucleotide

SEQ ID NO: 538779 - DNA, 51 bp, Artificial; identical to SEQ ID NO: 307910
  Synthetic oligonucleotide

SEQ ID NO: 538780 - DNA, 59 bp, Artificial; identical to SEQ ID NO: 307916
  Synthetic oligonucleotide

SEQ ID NO: 538781 - DNA, 56 bp, Artificial; identical to SEQ ID NO: 307917
  Synthetic oligonucleotide

SEQ ID NO: 538782 - DNA, 54 bp, Artificial; identical to SEQ ID NO: 307919
  Synthetic oligonucleotide

SEQ ID NO: 538783 - DNA, 57 bp, Artificial; identical to SEQ ID NO: 307920
  Synthetic oligonucleotide

SEQ ID NO: 538784 - DNA, 50 bp, Artificial; identical to SEQ ID NO: 307921
  Synthetic oligonucleotide

SEQ ID NO: 538785 - DNA, 60 bp, Artificial; identical to SEQ ID NO: 307924
  Synthetic oligonucleotide

SEQ ID NO: 538786 - DNA, 55 bp, Artificial; identical to SEQ ID NO: 307925
  Synthetic oligonucleotide

SEQ ID NO: 538787 - DNA, 55 bp, Artificial; identical to SEQ ID NO: 307928
  Synthetic oligonucleotide

SEQ ID NO: 538788 - DNA, 60 bp, Artificial; identical to SEQ ID NO: 8299
  Synthetic oligonucleotide

SEQ ID NO: 538789 - DNA, 57 bp, Artificial; identical to SEQ ID NO: 307930
  Synthetic oligonucleotide

SEQ ID NO: 538790 - DNA, 60 bp, Artificial; identical to SEQ ID NO: 307932
  Synthetic oligonucleotide

SEQ ID NO: 538791 - DNA, 59 bp, Artificial; identical to SEQ ID NO: 307938
  Synthetic oligonucleotide

SEQ ID NO: 538792 - DNA, 55 bp, Artificial; identical to SEQ ID NO: 307939
  Synthetic oligonucleotide

SEQ ID NO: 538793 - DNA, 56 bp, Artificial; identical to SEQ ID NO: 307941
  Synthetic oligonucleotide

SEQ ID NO: 538794 - DNA, 58 bp, Artificial; identical to SEQ ID NO: 307943
  Synthetic oligonucleotide

SEQ ID NO: 538795 - DNA, 58 bp, Artificial; identical to SEQ ID NO: 307949
  Synthetic oligonucleotide

SEQ ID NO: 538796 - DNA, 55 bp, Artificial; identical to SEQ ID NO: 307950
  Synthetic oligonucleotide

SEQ ID NO: 538797 - DNA, 56 bp, Artificial; identical to SEQ ID NO: 307952
  Synthetic oligonucleotide

SEQ ID NO: 538798 - DNA, 53 bp, Artificial; identical to SEQ ID NO: 307955
  Synthetic oligonucleotide

SEQ ID NO: 538799 - DNA, 55 bp, Artificial; identical to SEQ ID NO: 307956
  Synthetic oligonucleotide

SEQ ID NO: 538800 - DNA, 51 bp, Artificial; identical to SEQ ID NO: 307958
  Synthetic oligonucleotide

SEQ ID NO: 538801 - DNA, 60 bp, Artificial; identical to SEQ ID NO: 307959
  Synthetic oligonucleotide

SEQ ID NO: 538802 - DNA, 52 bp, Artificial; identical to SEQ ID NO: 307963
  Synthetic oligonucleotide

SEQ ID NO: 538803 - DNA, 60 bp, Artificial; identical to SEQ ID NO: 307965
  Synthetic oligonucleotide

SEQ ID NO: 538804 - DNA, 55 bp, Artificial; identical to SEQ ID NO: 307966
  Synthetic oligonucleotide

SEQ ID NO: 538805 - DNA, 56 bp, Artificial; identical to SEQ ID NO: 307967
  Synthetic oligonucleotide

SEQ ID NO: 538806 - DNA, 58 bp, Artificial; identical to SEQ ID NO: 307969
  Synthetic oligonucleotide

SEQ ID NO: 538807 - DNA, 60 bp, Artificial; identical to SEQ ID NO: 307971
  Synthetic oligonucleotide

SEQ ID NO: 538808 - DNA, 60 bp, Artificial; identical to SEQ ID NO: 307973
  Synthetic oligonucleotide

SEQ ID NO: 538809 - DNA, 60 bp, Artificial; identical to SEQ ID NO: 307975
  Synthetic oligonucleotide

SEQ ID NO: 538810 - DNA, 59 bp, Artificial; identical to SEQ ID NO: 307982
  Synthetic oligonucleotide

SEQ ID NO: 538811 - DNA, 56 bp, Artificial; identical to SEQ ID NO: 10270
  Synthetic oligonucleotide

SEQ ID NO: 538812 - DNA, 60 bp, Artificial; identical to SEQ ID NO: 307985
  Synthetic oligonucleotide

SEQ ID NO: 538813 - DNA, 55 bp, Artificial; identical to SEQ ID NO: 307986
  Synthetic oligonucleotide

SEQ ID NO: 538814 - DNA, 51 bp, Artificial; identical to SEQ ID NO: 307988
  Synthetic oligonucleotide

SEQ ID NO: 538815 - DNA, 59 bp, Artificial; identical to SEQ ID NO: 307992
  Synthetic oligonucleotide

SEQ ID NO: 538816 - DNA, 56 bp, Artificial; identical to SEQ ID NO: 307993
  Synthetic oligonucleotide

SEQ ID NO: 538817 - DNA, 51 bp, Artificial; identical to SEQ ID NO: 307995
  Synthetic oligonucleotide

SEQ ID NO: 538818 - DNA, 57 bp, Artificial; identical to SEQ ID NO: 308007
  Synthetic oligonucleotide

SEQ ID NO: 538819 - DNA, 55 bp, Artificial; identical to SEQ ID NO: 308013
  Synthetic oligonucleotide

SEQ ID NO: 538820 - DNA, 60 bp, Artificial; identical to SEQ ID NO: 308017
  Synthetic oligonucleotide

SEQ ID NO: 538821 - DNA, 54 bp, Artificial; identical to SEQ ID NO: 308018
  Synthetic oligonucleotide

SEQ ID NO: 538822 - DNA, 54 bp, Artificial; identical to SEQ ID NO: 308019
  Synthetic oligonucleotide

SEQ ID NO: 538823 - DNA, 56 bp, Artificial; identical to SEQ ID NO: 20147
  Synthetic oligonucleotide

SEQ ID NO: 538824 - DNA, 55 bp, Artificial; identical to SEQ ID NO: 308020
  Synthetic oligonucleotide

SEQ ID NO: 538825 - DNA, 60 bp, Artificial; identical to SEQ ID NO: 308021
  Synthetic oligonucleotide

SEQ ID NO: 538826 - DNA, 59 bp, Artificial; identical to SEQ ID NO: 308023
  Synthetic oligonucleotide

SEQ ID NO: 538827 - DNA, 58 bp, Artificial; identical to SEQ ID NO: 308024
  Synthetic oligonucleotide

SEQ ID NO: 538828 - DNA, 60 bp, Artificial; identical to SEQ ID NO: 57319
  Synthetic oligonucleotide

SEQ ID NO: 538829 - DNA, 60 bp, Artificial; identical to SEQ ID NO: 308027
  Synthetic oligonucleotide

SEQ ID NO: 538830 - DNA, 57 bp, Artificial; identical to SEQ ID NO: 308030
  Synthetic oligonucleotide

SEQ ID NO: 538831 - DNA, 60 bp, Artificial; identical to SEQ ID NO: 308031
  Synthetic oligonucleotide

SEQ ID NO: 538832 - DNA, 53 bp, Artificial; identical to SEQ ID NO: 308032
  Synthetic oligonucleotide

SEQ ID NO: 538833 - DNA, 59 bp, Artificial; identical to SEQ ID NO: 308033
  Synthetic oligonucleotide

SEQ ID NO: 538834 - DNA, 54 bp, Artificial; identical to SEQ ID NO: 308034
  Synthetic oligonucleotide

SEQ ID NO: 538835 - DNA, 57 bp, Artificial; identical to SEQ ID NO: 308035
  Synthetic oligonucleotide

SEQ ID NO: 538836 - DNA, 57 bp, Artificial; identical to SEQ ID NO: 308038
  Synthetic oligonucleotide

SEQ ID NO: 538837 - DNA, 50 bp, Artificial; identical to SEQ ID NO: 308039
  Synthetic oligonucleotide

SEQ ID NO: 538838 - DNA, 57 bp, Artificial; identical to SEQ ID NO: 308040
  Synthetic oligonucleotide

SEQ ID NO: 538839 - DNA, 57 bp, Artificial; identical to SEQ ID NO: 308041
  Synthetic oligonucleotide

SEQ ID NO: 538840 - DNA, 58 bp, Artificial; identical to SEQ ID NO: 308043
  Synthetic oligonucleotide

SEQ ID NO: 538841 - DNA, 58 bp, Artificial; identical to SEQ ID NO: 308049
  Synthetic oligonucleotide

SEQ ID NO: 538842 - DNA, 58 bp, Artificial; identical to SEQ ID NO: 308050
  Synthetic oligonucleotide

SEQ ID NO: 538843 - DNA, 59 bp, Artificial; identical to SEQ ID NO: 308056
  Synthetic oligonucleotide

SEQ ID NO: 538844 - DNA, 59 bp, Artificial; identical to SEQ ID NO: 308057
  Synthetic oligonucleotide

SEQ ID NO: 538845 - DNA, 56 bp, Artificial; identical to SEQ ID NO: 308058
  Synthetic oligonucleotide

SEQ ID NO: 538846 - DNA, 58 bp, Artificial; identical to SEQ ID NO: 308060
  Synthetic oligonucleotide

SEQ ID NO: 538847 - DNA, 55 bp, Artificial; identical to SEQ ID NO: 308063
  Synthetic oligonucleotide

SEQ ID NO: 538848 - DNA, 55 bp, Artificial; identical to SEQ ID NO: 308065
  Synthetic oligonucleotide

SEQ ID NO: 538849 - DNA, 51 bp, Artificial; identical to SEQ ID NO: 308066
  Synthetic oligonucleotide

SEQ ID NO: 538850 - DNA, 60 bp, Artificial; identical to SEQ ID NO: 308080
  Synthetic oligonucleotide

SEQ ID NO: 538851 - DNA, 60 bp, Artificial; identical to SEQ ID NO: 308081
  Synthetic oligonucleotide

SEQ ID NO: 538852 - DNA, 55 bp, Artificial; identical to SEQ ID NO: 308083
  Synthetic oligonucleotide

SEQ ID NO: 538853 - DNA, 58 bp, Artificial; identical to SEQ ID NO: 308086
  Synthetic oligonucleotide

SEQ ID NO: 538854 - DNA, 60 bp, Artificial; identical to SEQ ID NO: 308087
  Synthetic oligonucleotide

SEQ ID NO: 538855 - DNA, 58 bp, Artificial; identical to SEQ ID NO: 308090
  Synthetic oligonucleotide

SEQ ID NO: 538856 - DNA, 59 bp, Artificial; identical to SEQ ID NO: 308091
  Synthetic oligonucleotide

SEQ ID NO: 538857 - DNA, 60 bp, Artificial; identical to SEQ ID NO: 308092
  Synthetic oligonucleotide

SEQ ID NO: 538858 - DNA, 54 bp, Artificial; identical to SEQ ID NO: 308093
  Synthetic oligonucleotide

SEQ ID NO: 538859 - DNA, 60 bp, Artificial; identical to SEQ ID NO: 308094
  Synthetic oligonucleotide

SEQ ID NO: 538860 - DNA, 59 bp, Artificial; identical to SEQ ID NO: 308095
  Synthetic oligonucleotide

SEQ ID NO: 538861 - DNA, 60 bp, Artificial; identical to SEQ ID NO: 308099
  Synthetic oligonucleotide

SEQ ID NO: 538862 - DNA, 55 bp, Artificial; identical to SEQ ID NO: 308102
  Synthetic oligonucleotide

SEQ ID NO: 538863 - DNA, 53 bp, Artificial; identical to SEQ ID NO: 308105
  Synthetic oligonucleotide

SEQ ID NO: 538864 - DNA, 58 bp, Artificial; identical to SEQ ID NO: 16617
  Synthetic oligonucleotide

SEQ ID NO: 538865 - DNA, 60 bp, Artificial; identical to SEQ ID NO: 308108
  Synthetic oligonucleotide

SEQ ID NO: 538866 - DNA, 58 bp, Artificial; identical to SEQ ID NO: 308110
  Synthetic oligonucleotide

SEQ ID NO: 538867 - DNA, 50 bp, Artificial; identical to SEQ ID NO: 308111
  Synthetic oligonucleotide

SEQ ID NO: 538868 - DNA, 56 bp, Artificial; identical to SEQ ID NO: 308113
  Synthetic oligonucleotide

SEQ ID NO: 538869 - DNA, 60 bp, Artificial; identical to SEQ ID NO: 308116
  Synthetic oligonucleotide

SEQ ID NO: 538870 - DNA, 53 bp, Artificial; identical to SEQ ID NO: 308122
  Synthetic oligonucleotide

SEQ ID NO: 538871 - DNA, 54 bp, Artificial; identical to SEQ ID NO: 308126
  Synthetic oligonucleotide

SEQ ID NO: 538872 - DNA, 55 bp, Artificial; identical to SEQ ID NO: 308127
  Synthetic oligonucleotide

SEQ ID NO: 538873 - DNA, 58 bp, Artificial; identical to SEQ ID NO: 308129
  Synthetic oligonucleotide

SEQ ID NO: 538874 - DNA, 54 bp, Artificial; identical to SEQ ID NO: 308130
  Synthetic oligonucleotide

SEQ ID NO: 538875 - DNA, 57 bp, Artificial; identical to SEQ ID NO: 18961
  Synthetic oligonucleotide

SEQ ID NO: 538876 - DNA, 60 bp, Artificial; identical to SEQ ID NO: 308139
  Synthetic oligonucleotide

SEQ ID NO: 538877 - DNA, 51 bp, Artificial; identical to SEQ ID NO: 308140
  Synthetic oligonucleotide

SEQ ID NO: 538878 - DNA, 54 bp, Artificial; identical to SEQ ID NO: 308143
  Synthetic oligonucleotide

SEQ ID NO: 538879 - DNA, 60 bp, Artificial; identical to SEQ ID NO: 308145
  Synthetic oligonucleotide

SEQ ID NO: 538880 - DNA, 60 bp, Artificial; identical to SEQ ID NO: 308146
  Synthetic oligonucleotide

SEQ ID NO: 538881 - DNA, 60 bp, Artificial; identical to SEQ ID NO: 308149
  Synthetic oligonucleotide

SEQ ID NO: 538882 - DNA, 60 bp, Artificial; identical to SEQ ID NO: 308150
  Synthetic oligonucleotide

SEQ ID NO: 538883 - DNA, 58 bp, Artificial; identical to SEQ ID NO: 308152
  Synthetic oligonucleotide

SEQ ID NO: 538884 - DNA, 60 bp, Artificial; identical to SEQ ID NO: 308154
  Synthetic oligonucleotide

SEQ ID NO: 538885 - DNA, 59 bp, Artificial; identical to SEQ ID NO: 308158
  Synthetic oligonucleotide

SEQ ID NO: 538886 - DNA, 55 bp, Artificial; identical to SEQ ID NO: 308159
  Synthetic oligonucleotide

SEQ ID NO: 538887 - DNA, 55 bp, Artificial; identical to SEQ ID NO: 308162
  Synthetic oligonucleotide

SEQ ID NO: 538888 - DNA, 53 bp, Artificial; identical to SEQ ID NO: 308163
  Synthetic oligonucleotide

SEQ ID NO: 538889 - DNA, 53 bp, Artificial; identical to SEQ ID NO: 308165
  Synthetic oligonucleotide

SEQ ID NO: 538890 - DNA, 58 bp, Artificial; identical to SEQ ID NO: 308168
  Synthetic oligonucleotide

SEQ ID NO: 538891 - DNA, 51 bp, Artificial; identical to SEQ ID NO: 308171
  Synthetic oligonucleotide

SEQ ID NO: 538892 - DNA, 55 bp, Artificial; identical to SEQ ID NO: 308172
  Synthetic oligonucleotide

SEQ ID NO: 538893 - DNA, 59 bp, Artificial; identical to SEQ ID NO: 308173
  Synthetic oligonucleotide

SEQ ID NO: 538894 - DNA, 52 bp, Artificial; identical to SEQ ID NO: 308175
  Synthetic oligonucleotide

SEQ ID NO: 538895 - DNA, 60 bp, Artificial; identical to SEQ ID NO: 308177
  Synthetic oligonucleotide

SEQ ID NO: 538896 - DNA, 60 bp, Artificial; identical to SEQ ID NO: 308179
  Synthetic oligonucleotide

SEQ ID NO: 538897 - DNA, 60 bp, Artificial; identical to SEQ ID NO: 308181
  Synthetic oligonucleotide

SEQ ID NO: 538898 - DNA, 50 bp, Artificial; identical to SEQ ID NO: 308182
  Synthetic oligonucleotide

SEQ ID NO: 538899 - DNA, 51 bp, Artificial; identical to SEQ ID NO: 308184
  Synthetic oligonucleotide

SEQ ID NO: 538900 - DNA, 60 bp, Artificial; identical to SEQ ID NO: 308185
  Synthetic oligonucleotide

SEQ ID NO: 538901 - DNA, 54 bp, Artificial; identical to SEQ ID NO: 308194
  Synthetic oligonucleotide

SEQ ID NO: 538902 - DNA, 50 bp, Artificial; identical to SEQ ID NO: 308195
  Synthetic oligonucleotide

SEQ ID NO: 538903 - DNA, 59 bp, Artificial; identical to SEQ ID NO: 308197
  Synthetic oligonucleotide

SEQ ID NO: 538904 - DNA, 54 bp, Artificial; identical to SEQ ID NO: 308199
  Synthetic oligonucleotide

SEQ ID NO: 538905 - DNA, 58 bp, Artificial; identical to SEQ ID NO: 308201
  Synthetic oligonucleotide

SEQ ID NO: 538906 - DNA, 53 bp, Artificial; identical to SEQ ID NO: 308202
  Synthetic oligonucleotide

SEQ ID NO: 538907 - DNA, 59 bp, Artificial; identical to SEQ ID NO: 308203
  Synthetic oligonucleotide

SEQ ID NO: 538908 - DNA, 60 bp, Artificial; identical to SEQ ID NO: 14191
  Synthetic oligonucleotide

SEQ ID NO: 538909 - DNA, 56 bp, Artificial; identical to SEQ ID NO: 308209
  Synthetic oligonucleotide

SEQ ID NO: 538910 - DNA, 58 bp, Artificial; identical to SEQ ID NO: 308212
  Synthetic oligonucleotide

SEQ ID NO: 538911 - DNA, 60 bp, Artificial; identical to SEQ ID NO: 308213
  Synthetic oligonucleotide

SEQ ID NO: 538912 - DNA, 51 bp, Artificial; identical to SEQ ID NO: 308214
  Synthetic oligonucleotide

SEQ ID NO: 538913 - DNA, 59 bp, Artificial; identical to SEQ ID NO: 308215
  Synthetic oligonucleotide

SEQ ID NO: 538914 - DNA, 53 bp, Artificial; identical to SEQ ID NO: 308216
  Synthetic oligonucleotide

SEQ ID NO: 538915 - DNA, 53 bp, Artificial; identical to SEQ ID NO: 308225
  Synthetic oligonucleotide

SEQ ID NO: 538916 - DNA, 50 bp, Artificial; identical to SEQ ID NO: 308227
  Synthetic oligonucleotide

SEQ ID NO: 538917 - DNA, 57 bp, Artificial; identical to SEQ ID NO: 308229
  Synthetic oligonucleotide

SEQ ID NO: 538918 - DNA, 54 bp, Artificial; identical to SEQ ID NO: 20350
  Synthetic oligonucleotide

SEQ ID NO: 538919 - DNA, 60 bp, Artificial; identical to SEQ ID NO: 308230
  Synthetic oligonucleotide

SEQ ID NO: 538920 - DNA, 59 bp, Artificial; identical to SEQ ID NO: 308231
  Synthetic oligonucleotide

SEQ ID NO: 538921 - DNA, 52 bp, Artificial; identical to SEQ ID NO: 308232
  Synthetic oligonucleotide

SEQ ID NO: 538922 - DNA, 54 bp, Artificial; identical to SEQ ID NO: 308237
  Synthetic oligonucleotide

SEQ ID NO: 538923 - DNA, 59 bp, Artificial; identical to SEQ ID NO: 308242
  Synthetic oligonucleotide

SEQ ID NO: 538924 - DNA, 55 bp, Artificial; identical to SEQ ID NO: 308244
  Synthetic oligonucleotide

SEQ ID NO: 538925 - DNA, 60 bp, Artificial; identical to SEQ ID NO: 12216
  Synthetic oligonucleotide

SEQ ID NO: 538926 - DNA, 59 bp, Artificial; identical to SEQ ID NO: 308247
  Synthetic oligonucleotide

SEQ ID NO: 538927 - DNA, 59 bp, Artificial; identical to SEQ ID NO: 308249
  Synthetic oligonucleotide

SEQ ID NO: 538928 - DNA, 57 bp, Artificial; identical to SEQ ID NO: 308252
  Synthetic oligonucleotide

SEQ ID NO: 538929 - DNA, 54 bp, Artificial; identical to SEQ ID NO: 308255
  Synthetic oligonucleotide

SEQ ID NO: 538930 - DNA, 59 bp, Artificial; identical to SEQ ID NO: 308257
  Synthetic oligonucleotide

SEQ ID NO: 538931 - DNA, 58 bp, Artificial; identical to SEQ ID NO: 308259
  Synthetic oligonucleotide

SEQ ID NO: 538932 - DNA, 60 bp, Artificial; identical to SEQ ID NO: 308267
  Synthetic oligonucleotide

SEQ ID NO: 538933 - DNA, 56 bp, Artificial; identical to SEQ ID NO: 308269
  Synthetic oligonucleotide

SEQ ID NO: 538934 - DNA, 58 bp, Artificial; identical to SEQ ID NO: 308270
  Synthetic oligonucleotide

SEQ ID NO: 538935 - DNA, 57 bp, Artificial; identical to SEQ ID NO: 308276
  Synthetic oligonucleotide

SEQ ID NO: 538936 - DNA, 60 bp, Artificial; identical to SEQ ID NO: 308279
  Synthetic oligonucleotide

SEQ ID NO: 538937 - DNA, 55 bp, Artificial; identical to SEQ ID NO: 308281
  Synthetic oligonucleotide

SEQ ID NO: 538938 - DNA, 56 bp, Artificial; identical to SEQ ID NO: 308282
  Synthetic oligonucleotide

SEQ ID NO: 538939 - DNA, 57 bp, Artificial; identical to SEQ ID NO: 308284
  Synthetic oligonucleotide

SEQ ID NO: 538940 - DNA, 56 bp, Artificial; identical to SEQ ID NO: 308286
  Synthetic oligonucleotide

SEQ ID NO: 538941 - DNA, 60 bp, Artificial; identical to SEQ ID NO: 308291
  Synthetic oligonucleotide

SEQ ID NO: 538942 - DNA, 57 bp, Artificial; identical to SEQ ID NO: 308294
  Synthetic oligonucleotide

SEQ ID NO: 538943 - DNA, 53 bp, Artificial; identical to SEQ ID NO: 308295
  Synthetic oligonucleotide

SEQ ID NO: 538944 - DNA, 60 bp, Artificial; identical to SEQ ID NO: 13077
  Synthetic oligonucleotide

SEQ ID NO: 538945 - DNA, 55 bp, Artificial; identical to SEQ ID NO: 308298
  Synthetic oligonucleotide

SEQ ID NO: 538946 - DNA, 57 bp, Artificial; identical to SEQ ID NO: 308303
  Synthetic oligonucleotide

SEQ ID NO: 538947 - DNA, 54 bp, Artificial; identical to SEQ ID NO: 308305
  Synthetic oligonucleotide

SEQ ID NO: 538948 - DNA, 56 bp, Artificial; identical to SEQ ID NO: 308306
  Synthetic oligonucleotide

SEQ ID NO: 538949 - DNA, 56 bp, Artificial; identical to SEQ ID NO: 308307
  Synthetic oligonucleotide

SEQ ID NO: 538950 - DNA, 57 bp, Artificial; identical to SEQ ID NO: 308308
  Synthetic oligonucleotide

SEQ ID NO: 538951 - DNA, 58 bp, Artificial; identical to SEQ ID NO: 308309
  Synthetic oligonucleotide

SEQ ID NO: 538952 - DNA, 60 bp, Artificial; identical to SEQ ID NO: 308312
  Synthetic oligonucleotide

SEQ ID NO: 538953 - DNA, 57 bp, Artificial; identical to SEQ ID NO: 19339
  Synthetic oligonucleotide

SEQ ID NO: 538954 - DNA, 60 bp, Artificial; identical to SEQ ID NO: 308316
  Synthetic oligonucleotide

SEQ ID NO: 538955 - DNA, 58 bp, Artificial; identical to SEQ ID NO: 308318
  Synthetic oligonucleotide

SEQ ID NO: 538956 - DNA, 54 bp, Artificial; identical to SEQ ID NO: 308319
  Synthetic oligonucleotide

SEQ ID NO: 538957 - DNA, 52 bp, Artificial; identical to SEQ ID NO: 308320
  Synthetic oligonucleotide

SEQ ID NO: 538958 - DNA, 56 bp, Artificial; identical to SEQ ID NO: 308323
  Synthetic oligonucleotide

SEQ ID NO: 538959 - DNA, 54 bp, Artificial; identical to SEQ ID NO: 308324
  Synthetic oligonucleotide

SEQ ID NO: 538960 - DNA, 60 bp, Artificial; identical to SEQ ID NO: 308325
  Synthetic oligonucleotide

SEQ ID NO: 538961 - DNA, 60 bp, Artificial; identical to SEQ ID NO: 308326
  Synthetic oligonucleotide

SEQ ID NO: 538962 - DNA, 58 bp, Artificial; identical to SEQ ID NO: 308327
  Synthetic oligonucleotide

SEQ ID NO: 538963 - DNA, 54 bp, Artificial; identical to SEQ ID NO: 308328
  Synthetic oligonucleotide

SEQ ID NO: 538964 - DNA, 60 bp, Artificial; identical to SEQ ID NO: 11950
  Synthetic oligonucleotide

SEQ ID NO: 538965 - DNA, 60 bp, Artificial; identical to SEQ ID NO: 13787
  Synthetic oligonucleotide

SEQ ID NO: 538966 - DNA, 60 bp, Artificial; identical to SEQ ID NO: 308332
  Synthetic oligonucleotide

SEQ ID NO: 538967 - DNA, 59 bp, Artificial; identical to SEQ ID NO: 308333
  Synthetic oligonucleotide

SEQ ID NO: 538968 - DNA, 55 bp, Artificial; identical to SEQ ID NO: 308334
  Synthetic oligonucleotide

SEQ ID NO: 538969 - DNA, 60 bp, Artificial; identical to SEQ ID NO: 308335
  Synthetic oligonucleotide

SEQ ID NO: 538970 - DNA, 59 bp, Artificial; identical to SEQ ID NO: 17762
  Synthetic oligonucleotide

SEQ ID NO: 538971 - DNA, 55 bp, Artificial; identical to SEQ ID NO: 308337
  Synthetic oligonucleotide

SEQ ID NO: 538972 - DNA, 60 bp, Artificial; identical to SEQ ID NO: 308340
  Synthetic oligonucleotide

SEQ ID NO: 538973 - DNA, 60 bp, Artificial; identical to SEQ ID NO: 308341
  Synthetic oligonucleotide

SEQ ID NO: 538974 - DNA, 54 bp, Artificial; identical to SEQ ID NO: 308346
  Synthetic oligonucleotide

SEQ ID NO: 538975 - DNA, 57 bp, Artificial; identical to SEQ ID NO: 308352
  Synthetic oligonucleotide

SEQ ID NO: 538976 - DNA, 60 bp, Artificial; identical to SEQ ID NO: 308357
  Synthetic oligonucleotide

SEQ ID NO: 538977 - DNA, 54 bp, Artificial; identical to SEQ ID NO: 308360
  Synthetic oligonucleotide

SEQ ID NO: 538978 - DNA, 60 bp, Artificial; identical to SEQ ID NO: 308366
  Synthetic oligonucleotide

SEQ ID NO: 538979 - DNA, 58 bp, Artificial; identical to SEQ ID NO: 308368
  Synthetic oligonucleotide

SEQ ID NO: 538980 - DNA, 53 bp, Artificial; identical to SEQ ID NO: 308372
  Synthetic oligonucleotide

SEQ ID NO: 538981 - DNA, 58 bp, Artificial; identical to SEQ ID NO: 308375
  Synthetic oligonucleotide

SEQ ID NO: 538982 - DNA, 58 bp, Artificial; identical to SEQ ID NO: 308381
  Synthetic oligonucleotide

SEQ ID NO: 538983 - DNA, 54 bp, Artificial; identical to SEQ ID NO: 308384
  Synthetic oligonucleotide

SEQ ID NO: 538984 - DNA, 58 bp, Artificial; identical to SEQ ID NO: 308385
  Synthetic oligonucleotide

SEQ ID NO: 538985 - DNA, 55 bp, Artificial; identical to SEQ ID NO: 308386
  Synthetic oligonucleotide

SEQ ID NO: 538986 - DNA, 60 bp, Artificial; identical to SEQ ID NO: 308387
  Synthetic oligonucleotide

SEQ ID NO: 538987 - DNA, 60 bp, Artificial; identical to SEQ ID NO: 308388
  Synthetic oligonucleotide

SEQ ID NO: 538988 - DNA, 60 bp, Artificial; identical to SEQ ID NO: 308397
  Synthetic oligonucleotide

SEQ ID NO: 538989 - DNA, 57 bp, Artificial; identical to SEQ ID NO: 308398
  Synthetic oligonucleotide

SEQ ID NO: 538990 - DNA, 60 bp, Artificial; identical to SEQ ID NO: 308403
  Synthetic oligonucleotide

SEQ ID NO: 538991 - DNA, 60 bp, Artificial; identical to SEQ ID NO: 308404
  Synthetic oligonucleotide

SEQ ID NO: 538992 - DNA, 53 bp, Artificial; identical to SEQ ID NO: 308408
  Synthetic oligonucleotide

SEQ ID NO: 538993 - DNA, 57 bp, Artificial; identical to SEQ ID NO: 308410
  Synthetic oligonucleotide

SEQ ID NO: 538994 - DNA, 60 bp, Artificial; identical to SEQ ID NO: 308416
  Synthetic oligonucleotide

SEQ ID NO: 538995 - DNA, 51 bp, Artificial; identical to SEQ ID NO: 14726
  Synthetic oligonucleotide

SEQ ID NO: 538996 - DNA, 60 bp, Artificial; identical to SEQ ID NO: 10033
  Synthetic oligonucleotide

SEQ ID NO: 538997 - DNA, 60 bp, Artificial; identical to SEQ ID NO: 308424
  Synthetic oligonucleotide

SEQ ID NO: 538998 - DNA, 57 bp, Artificial; identical to SEQ ID NO: 308426
  Synthetic oligonucleotide

SEQ ID NO: 538999 - DNA, 60 bp, Artificial; identical to SEQ ID NO: 308428
  Synthetic oligonucleotide

SEQ ID NO: 539000 - DNA, 54 bp, Artificial; identical to SEQ ID NO: 308430
  Synthetic oligonucleotide

SEQ ID NO: 539001 - DNA, 56 bp, Artificial; identical to SEQ ID NO: 308432
  Synthetic oligonucleotide

SEQ ID NO: 539002 - DNA, 60 bp, Artificial; identical to SEQ ID NO: 308437
  Synthetic oligonucleotide

SEQ ID NO: 539003 - DNA, 58 bp, Artificial; identical to SEQ ID NO: 17148
  Synthetic oligonucleotide

SEQ ID NO: 539004 - DNA, 56 bp, Artificial; identical to SEQ ID NO: 308440
  Synthetic oligonucleotide

SEQ ID NO: 539005 - DNA, 60 bp, Artificial; identical to SEQ ID NO: 308441
  Synthetic oligonucleotide

SEQ ID NO: 539006 - DNA, 52 bp, Artificial; identical to SEQ ID NO: 308443
  Synthetic oligonucleotide

SEQ ID NO: 539007 - DNA, 57 bp, Artificial; identical to SEQ ID NO: 308444
  Synthetic oligonucleotide

SEQ ID NO: 539008 - DNA, 60 bp, Artificial; identical to SEQ ID NO: 308445
  Synthetic oligonucleotide

SEQ ID NO: 539009 - DNA, 55 bp, Artificial; identical to SEQ ID NO: 308446
  Synthetic oligonucleotide

SEQ ID NO: 539010 - DNA, 60 bp, Artificial; identical to SEQ ID NO: 308449
  Synthetic oligonucleotide

SEQ ID NO: 539011 - DNA, 60 bp, Artificial; identical to SEQ ID NO: 308450
  Synthetic oligonucleotide

SEQ ID NO: 539012 - DNA, 60 bp, Artificial; identical to SEQ ID NO: 308452
  Synthetic oligonucleotide

SEQ ID NO: 539013 - DNA, 54 bp, Artificial; identical to SEQ ID NO: 308454
  Synthetic oligonucleotide

SEQ ID NO: 539014 - DNA, 60 bp, Artificial; identical to SEQ ID NO: 308456
  Synthetic oligonucleotide

SEQ ID NO: 539015 - DNA, 58 bp, Artificial; identical to SEQ ID NO: 308459
  Synthetic oligonucleotide

SEQ ID NO: 539016 - DNA, 58 bp, Artificial; identical to SEQ ID NO: 308461
  Synthetic oligonucleotide

SEQ ID NO: 539017 - DNA, 55 bp, Artificial; identical to SEQ ID NO: 308467
  Synthetic oligonucleotide

SEQ ID NO: 539018 - DNA, 55 bp, Artificial; identical to SEQ ID NO: 308468
  Synthetic oligonucleotide

SEQ ID NO: 539019 - DNA, 59 bp, Artificial; identical to SEQ ID NO: 308469
  Synthetic oligonucleotide

SEQ ID NO: 539020 - DNA, 55 bp, Artificial; identical to SEQ ID NO: 308470
  Synthetic oligonucleotide

SEQ ID NO: 539021 - DNA, 55 bp, Artificial; identical to SEQ ID NO: 308472
  Synthetic oligonucleotide

SEQ ID NO: 539022 - DNA, 54 bp, Artificial; identical to SEQ ID NO: 308473
  Synthetic oligonucleotide

SEQ ID NO: 539023 - DNA, 55 bp, Artificial; identical to SEQ ID NO: 308474
  Synthetic oligonucleotide

SEQ ID NO: 539024 - DNA, 58 bp, Artificial; identical to SEQ ID NO: 308475
  Synthetic oligonucleotide

SEQ ID NO: 539025 - DNA, 54 bp, Artificial; identical to SEQ ID NO: 308476
  Synthetic oligonucleotide

SEQ ID NO: 539026 - DNA, 52 bp, Artificial; identical to SEQ ID NO: 308478
  Synthetic oligonucleotide

SEQ ID NO: 539027 - DNA, 57 bp, Artificial; identical to SEQ ID NO: 10737
  Synthetic oligonucleotide

SEQ ID NO: 539028 - DNA, 54 bp, Artificial; identical to SEQ ID NO: 308485
  Synthetic oligonucleotide

SEQ ID NO: 539029 - DNA, 56 bp, Artificial; identical to SEQ ID NO: 308486
  Synthetic oligonucleotide

SEQ ID NO: 539030 - DNA, 55 bp, Artificial; identical to SEQ ID NO: 308487
  Synthetic oligonucleotide

SEQ ID NO: 539031 - DNA, 55 bp, Artificial; identical to SEQ ID NO: 308488
  Synthetic oligonucleotide

SEQ ID NO: 539032 - DNA, 60 bp, Artificial; identical to SEQ ID NO: 308489
  Synthetic oligonucleotide

SEQ ID NO: 539033 - DNA, 57 bp, Artificial; identical to SEQ ID NO: 308490
  Synthetic oligonucleotide

SEQ ID NO: 539034 - DNA, 52 bp, Artificial; identical to SEQ ID NO: 308494
  Synthetic oligonucleotide

SEQ ID NO: 539035 - DNA, 58 bp, Artificial; identical to SEQ ID NO: 308496
  Synthetic oligonucleotide

SEQ ID NO: 539036 - DNA, 58 bp, Artificial; identical to SEQ ID NO: 308499
  Synthetic oligonucleotide

SEQ ID NO: 539037 - DNA, 53 bp, Artificial; identical to SEQ ID NO: 19354
  Synthetic oligonucleotide

SEQ ID NO: 539038 - DNA, 58 bp, Artificial; identical to SEQ ID NO: 308501
  Synthetic oligonucleotide

SEQ ID NO: 539039 - DNA, 53 bp, Artificial; identical to SEQ ID NO: 308504
  Synthetic oligonucleotide

SEQ ID NO: 539040 - DNA, 56 bp, Artificial; identical to SEQ ID NO: 17199
  Synthetic oligonucleotide

SEQ ID NO: 539041 - DNA, 50 bp, Artificial; identical to SEQ ID NO: 308509
  Synthetic oligonucleotide

SEQ ID NO: 539042 - DNA, 60 bp, Artificial; identical to SEQ ID NO: 308511
  Synthetic oligonucleotide

SEQ ID NO: 539043 - DNA, 55 bp, Artificial; identical to SEQ ID NO: 308516
  Synthetic oligonucleotide

SEQ ID NO: 539044 - DNA, 57 bp, Artificial; identical to SEQ ID NO: 308518
  Synthetic oligonucleotide

SEQ ID NO: 539045 - DNA, 55 bp, Artificial; identical to SEQ ID NO: 308519
  Synthetic oligonucleotide

SEQ ID NO: 539046 - DNA, 54 bp, Artificial; identical to SEQ ID NO: 308520
  Synthetic oligonucleotide

SEQ ID NO: 539047 - DNA, 51 bp, Artificial; identical to SEQ ID NO: 308523
  Synthetic oligonucleotide

SEQ ID NO: 539048 - DNA, 54 bp, Artificial; identical to SEQ ID NO: 308529
  Synthetic oligonucleotide

SEQ ID NO: 539049 - DNA, 55 bp, Artificial; identical to SEQ ID NO: 308530
  Synthetic oligonucleotide

SEQ ID NO: 539050 - DNA, 56 bp, Artificial; identical to SEQ ID NO: 308531
  Synthetic oligonucleotide

SEQ ID NO: 539051 - DNA, 59 bp, Artificial; identical to SEQ ID NO: 308533
  Synthetic oligonucleotide

SEQ ID NO: 539052 - DNA, 60 bp, Artificial; identical to SEQ ID NO: 308536
  Synthetic oligonucleotide

SEQ ID NO: 539053 - DNA, 57 bp, Artificial; identical to SEQ ID NO: 308541
  Synthetic oligonucleotide

SEQ ID NO: 539054 - DNA, 58 bp, Artificial; identical to SEQ ID NO: 308542
  Synthetic oligonucleotide

SEQ ID NO: 539055 - DNA, 51 bp, Artificial; identical to SEQ ID NO: 308543
  Synthetic oligonucleotide

SEQ ID NO: 539056 - DNA, 53 bp, Artificial; identical to SEQ ID NO: 308544
  Synthetic oligonucleotide

SEQ ID NO: 539057 - DNA, 53 bp, Artificial; identical to SEQ ID NO: 308549
  Synthetic oligonucleotide

SEQ ID NO: 539058 - DNA, 54 bp, Artificial; identical to SEQ ID NO: 308551
  Synthetic oligonucleotide

SEQ ID NO: 539059 - DNA, 51 bp, Artificial; identical to SEQ ID NO: 308552
  Synthetic oligonucleotide

SEQ ID NO: 539060 - DNA, 51 bp, Artificial; identical to SEQ ID NO: 308553
  Synthetic oligonucleotide

SEQ ID NO: 539061 - DNA, 54 bp, Artificial; identical to SEQ ID NO: 308555
  Synthetic oligonucleotide

SEQ ID NO: 539062 - DNA, 60 bp, Artificial; identical to SEQ ID NO: 308556
  Synthetic oligonucleotide

SEQ ID NO: 539063 - DNA, 57 bp, Artificial; identical to SEQ ID NO: 308561
  Synthetic oligonucleotide

SEQ ID NO: 539064 - DNA, 60 bp, Artificial; identical to SEQ ID NO: 308562
  Synthetic oligonucleotide

SEQ ID NO: 539065 - DNA, 58 bp, Artificial; identical to SEQ ID NO: 308564
  Synthetic oligonucleotide

SEQ ID NO: 539066 - DNA, 59 bp, Artificial; identical to SEQ ID NO: 308565
  Synthetic oligonucleotide

SEQ ID NO: 539067 - DNA, 58 bp, Artificial; identical to SEQ ID NO: 308566
  Synthetic oligonucleotide

SEQ ID NO: 539068 - DNA, 59 bp, Artificial; identical to SEQ ID NO: 308570
  Synthetic oligonucleotide

SEQ ID NO: 539069 - DNA, 59 bp, Artificial; identical to SEQ ID NO: 308572
  Synthetic oligonucleotide

SEQ ID NO: 539070 - DNA, 60 bp, Artificial; identical to SEQ ID NO: 308575
  Synthetic oligonucleotide

SEQ ID NO: 539071 - DNA, 60 bp, Artificial; identical to SEQ ID NO: 308577
  Synthetic oligonucleotide

SEQ ID NO: 539072 - DNA, 58 bp, Artificial; identical to SEQ ID NO: 308583
  Synthetic oligonucleotide

SEQ ID NO: 539073 - DNA, 56 bp, Artificial; identical to SEQ ID NO: 308584
  Synthetic oligonucleotide

SEQ ID NO: 539074 - DNA, 58 bp, Artificial; identical to SEQ ID NO: 308585
  Synthetic oligonucleotide

SEQ ID NO: 539075 - DNA, 57 bp, Artificial; identical to SEQ ID NO: 308586
  Synthetic oligonucleotide

SEQ ID NO: 539076 - DNA, 60 bp, Artificial; identical to SEQ ID NO: 308588
  Synthetic oligonucleotide

SEQ ID NO: 539077 - DNA, 59 bp, Artificial; identical to SEQ ID NO: 308589
  Synthetic oligonucleotide

SEQ ID NO: 539078 - DNA, 60 bp, Artificial; identical to SEQ ID NO: 308592
  Synthetic oligonucleotide

SEQ ID NO: 539079 - DNA, 60 bp, Artificial; identical to SEQ ID NO: 308593
  Synthetic oligonucleotide

SEQ ID NO: 539080 - DNA, 60 bp, Artificial; identical to SEQ ID NO: 308594
  Synthetic oligonucleotide

SEQ ID NO: 539081 - DNA, 60 bp, Artificial; identical to SEQ ID NO: 9782
  Synthetic oligonucleotide

SEQ ID NO: 539082 - DNA, 51 bp, Artificial; identical to SEQ ID NO: 308596
  Synthetic oligonucleotide

SEQ ID NO: 539083 - DNA, 59 bp, Artificial; identical to SEQ ID NO: 308598
  Synthetic oligonucleotide

SEQ ID NO: 539084 - DNA, 50 bp, Artificial; identical to SEQ ID NO: 308601
  Synthetic oligonucleotide

SEQ ID NO: 539085 - DNA, 58 bp, Artificial; identical to SEQ ID NO: 18027
  Synthetic oligonucleotide

SEQ ID NO: 539086 - DNA, 58 bp, Artificial; identical to SEQ ID NO: 308603
  Synthetic oligonucleotide

SEQ ID NO: 539087 - DNA, 60 bp, Artificial; identical to SEQ ID NO: 308604
  Synthetic oligonucleotide

SEQ ID NO: 539088 - DNA, 60 bp, Artificial; identical to SEQ ID NO: 308605
  Synthetic oligonucleotide

SEQ ID NO: 539089 - DNA, 55 bp, Artificial; identical to SEQ ID NO: 308606
  Synthetic oligonucleotide

SEQ ID NO: 539090 - DNA, 59 bp, Artificial; identical to SEQ ID NO: 308611
  Synthetic oligonucleotide

SEQ ID NO: 539091 - DNA, 60 bp, Artificial; identical to SEQ ID NO: 308612
  Synthetic oligonucleotide

SEQ ID NO: 539092 - DNA, 57 bp, Artificial; identical to SEQ ID NO: 15907
  Synthetic oligonucleotide

SEQ ID NO: 539093 - DNA, 56 bp, Artificial; identical to SEQ ID NO: 308615
  Synthetic oligonucleotide

SEQ ID NO: 539094 - DNA, 60 bp, Artificial; identical to SEQ ID NO: 308619
  Synthetic oligonucleotide

SEQ ID NO: 539095 - DNA, 55 bp, Artificial; identical to SEQ ID NO: 308621
  Synthetic oligonucleotide

SEQ ID NO: 539096 - DNA, 56 bp, Artificial; identical to SEQ ID NO: 308623
  Synthetic oligonucleotide

SEQ ID NO: 539097 - DNA, 60 bp, Artificial; identical to SEQ ID NO: 308625
  Synthetic oligonucleotide

SEQ ID NO: 539098 - DNA, 60 bp, Artificial; identical to SEQ ID NO: 308627
  Synthetic oligonucleotide

SEQ ID NO: 539099 - DNA, 51 bp, Artificial; identical to SEQ ID NO: 308628
  Synthetic oligonucleotide

SEQ ID NO: 539100 - DNA, 54 bp, Artificial; identical to SEQ ID NO: 308629
  Synthetic oligonucleotide

SEQ ID NO: 539101 - DNA, 60 bp, Artificial; identical to SEQ ID NO: 308630
  Synthetic oligonucleotide

SEQ ID NO: 539102 - DNA, 60 bp, Artificial; identical to SEQ ID NO: 308632
  Synthetic oligonucleotide

SEQ ID NO: 539103 - DNA, 60 bp, Artificial; identical to SEQ ID NO: 308634
  Synthetic oligonucleotide

SEQ ID NO: 539104 - DNA, 57 bp, Artificial; identical to SEQ ID NO: 308635
  Synthetic oligonucleotide

SEQ ID NO: 539105 - DNA, 58 bp, Artificial; identical to SEQ ID NO: 308637
  Synthetic oligonucleotide

SEQ ID NO: 539106 - DNA, 60 bp, Artificial; identical to SEQ ID NO: 308639
  Synthetic oligonucleotide

SEQ ID NO: 539107 - DNA, 59 bp, Artificial; identical to SEQ ID NO: 308641
  Synthetic oligonucleotide

SEQ ID NO: 539108 - DNA, 52 bp, Artificial; identical to SEQ ID NO: 308642
  Synthetic oligonucleotide

SEQ ID NO: 539109 - DNA, 60 bp, Artificial; identical to SEQ ID NO: 308644
  Synthetic oligonucleotide

SEQ ID NO: 539110 - DNA, 54 bp, Artificial; identical to SEQ ID NO: 308646
  Synthetic oligonucleotide

SEQ ID NO: 539111 - DNA, 52 bp, Artificial; identical to SEQ ID NO: 308648
  Synthetic oligonucleotide

SEQ ID NO: 539112 - DNA, 55 bp, Artificial; identical to SEQ ID NO: 308649
  Synthetic oligonucleotide

SEQ ID NO: 539113 - DNA, 60 bp, Artificial; identical to SEQ ID NO: 308652
  Synthetic oligonucleotide

SEQ ID NO: 539114 - DNA, 54 bp, Artificial; identical to SEQ ID NO: 308655
  Synthetic oligonucleotide

SEQ ID NO: 539115 - DNA, 60 bp, Artificial; identical to SEQ ID NO: 308659
  Synthetic oligonucleotide

SEQ ID NO: 539116 - DNA, 55 bp, Artificial; identical to SEQ ID NO: 308660
  Synthetic oligonucleotide

SEQ ID NO: 539117 - DNA, 60 bp, Artificial; identical to SEQ ID NO: 308664
  Synthetic oligonucleotide

SEQ ID NO: 539118 - DNA, 54 bp, Artificial; identical to SEQ ID NO: 308666
  Synthetic oligonucleotide

SEQ ID NO: 539119 - DNA, 58 bp, Artificial; identical to SEQ ID NO: 308667
  Synthetic oligonucleotide

SEQ ID NO: 539120 - DNA, 59 bp, Artificial; identical to SEQ ID NO: 308668
  Synthetic oligonucleotide

SEQ ID NO: 539121 - DNA, 59 bp, Artificial; identical to SEQ ID NO: 308672
  Synthetic oligonucleotide

SEQ ID NO: 539122 - DNA, 51 bp, Artificial; identical to SEQ ID NO: 308675
  Synthetic oligonucleotide

SEQ ID NO: 539123 - DNA, 55 bp, Artificial; identical to SEQ ID NO: 308680
  Synthetic oligonucleotide

SEQ ID NO: 539124 - DNA, 51 bp, Artificial; identical to SEQ ID NO: 308681
  Synthetic oligonucleotide

SEQ ID NO: 539125 - DNA, 60 bp, Artificial; identical to SEQ ID NO: 308682
  Synthetic oligonucleotide

SEQ ID NO: 539126 - DNA, 58 bp, Artificial; identical to SEQ ID NO: 308683
  Synthetic oligonucleotide

SEQ ID NO: 539127 - DNA, 54 bp, Artificial; identical to SEQ ID NO: 10049
  Synthetic oligonucleotide

SEQ ID NO: 539128 - DNA, 60 bp, Artificial; identical to SEQ ID NO: 308689
  Synthetic oligonucleotide

SEQ ID NO: 539129 - DNA, 60 bp, Artificial; identical to SEQ ID NO: 308693
  Synthetic oligonucleotide

SEQ ID NO: 539130 - DNA, 60 bp, Artificial; identical to SEQ ID NO: 308694
  Synthetic oligonucleotide

SEQ ID NO: 539131 - DNA, 59 bp, Artificial; identical to SEQ ID NO: 308697
  Synthetic oligonucleotide

SEQ ID NO: 539132 - DNA, 60 bp, Artificial; identical to SEQ ID NO: 308698
  Synthetic oligonucleotide

SEQ ID NO: 539133 - DNA, 60 bp, Artificial; identical to SEQ ID NO: 308699
  Synthetic oligonucleotide

SEQ ID NO: 539134 - DNA, 60 bp, Artificial; identical to SEQ ID NO: 308705
  Synthetic oligonucleotide

SEQ ID NO: 539135 - DNA, 56 bp, Artificial; identical to SEQ ID NO: 308707
  Synthetic oligonucleotide

SEQ ID NO: 539136 - DNA, 60 bp, Artificial; identical to SEQ ID NO: 5957
  Synthetic oligonucleotide

SEQ ID NO: 539137 - DNA, 59 bp, Artificial; identical to SEQ ID NO: 308710
  Synthetic oligonucleotide

SEQ ID NO: 539138 - DNA, 60 bp, Artificial; identical to SEQ ID NO: 308711
  Synthetic oligonucleotide

SEQ ID NO: 539139 - DNA, 60 bp, Artificial; identical to SEQ ID NO: 308712
  Synthetic oligonucleotide

SEQ ID NO: 539140 - DNA, 55 bp, Artificial; identical to SEQ ID NO: 308718
  Synthetic oligonucleotide

SEQ ID NO: 539141 - DNA, 60 bp, Artificial; identical to SEQ ID NO: 308721
  Synthetic oligonucleotide

SEQ ID NO: 539142 - DNA, 55 bp, Artificial; identical to SEQ ID NO: 308722
  Synthetic oligonucleotide

SEQ ID NO: 539143 - DNA, 55 bp, Artificial; identical to SEQ ID NO: 308726
  Synthetic oligonucleotide

SEQ ID NO: 539144 - DNA, 60 bp, Artificial; identical to SEQ ID NO: 308727
  Synthetic oligonucleotide

SEQ ID NO: 539145 - DNA, 60 bp, Artificial; identical to SEQ ID NO: 308729
  Synthetic oligonucleotide

SEQ ID NO: 539146 - DNA, 59 bp, Artificial; identical to SEQ ID NO: 308731
  Synthetic oligonucleotide

SEQ ID NO: 539147 - DNA, 60 bp, Artificial; identical to SEQ ID NO: 308733
  Synthetic oligonucleotide

SEQ ID NO: 539148 - DNA, 55 bp, Artificial; identical to SEQ ID NO: 308734
  Synthetic oligonucleotide

SEQ ID NO: 539149 - DNA, 60 bp, Artificial; identical to SEQ ID NO: 10358
  Synthetic oligonucleotide

SEQ ID NO: 539150 - DNA, 60 bp, Artificial; identical to SEQ ID NO: 308736
  Synthetic oligonucleotide

SEQ ID NO: 539151 - DNA, 60 bp, Artificial; identical to SEQ ID NO: 308739
  Synthetic oligonucleotide

SEQ ID NO: 539152 - DNA, 55 bp, Artificial; identical to SEQ ID NO: 308740
  Synthetic oligonucleotide

SEQ ID NO: 539153 - DNA, 52 bp, Artificial; identical to SEQ ID NO: 10724
  Synthetic oligonucleotide

SEQ ID NO: 539154 - DNA, 57 bp, Artificial; identical to SEQ ID NO: 308748
  Synthetic oligonucleotide

SEQ ID NO: 539155 - DNA, 60 bp, Artificial; identical to SEQ ID NO: 308749
  Synthetic oligonucleotide

SEQ ID NO: 539156 - DNA, 59 bp, Artificial; identical to SEQ ID NO: 308753
  Synthetic oligonucleotide

SEQ ID NO: 539157 - DNA, 57 bp, Artificial; identical to SEQ ID NO: 308756
  Synthetic oligonucleotide

SEQ ID NO: 539158 - DNA, 57 bp, Artificial; identical to SEQ ID NO: 308757
  Synthetic oligonucleotide

SEQ ID NO: 539159 - DNA, 60 bp, Artificial; identical to SEQ ID NO: 308758
  Synthetic oligonucleotide

SEQ ID NO: 539160 - DNA, 52 bp, Artificial; identical to SEQ ID NO: 308759
  Synthetic oligonucleotide

SEQ ID NO: 539161 - DNA, 60 bp, Artificial; identical to SEQ ID NO: 308760
  Synthetic oligonucleotide

SEQ ID NO: 539162 - DNA, 59 bp, Artificial; identical to SEQ ID NO: 308762
  Synthetic oligonucleotide

SEQ ID NO: 539163 - DNA, 60 bp, Artificial; identical to SEQ ID NO: 308764
  Synthetic oligonucleotide

SEQ ID NO: 539164 - DNA, 60 bp, Artificial; identical to SEQ ID NO: 308765
  Synthetic oligonucleotide

SEQ ID NO: 539165 - DNA, 50 bp, Artificial; identical to SEQ ID NO: 308766
  Synthetic oligonucleotide

SEQ ID NO: 539166 - DNA, 59 bp, Artificial; identical to SEQ ID NO: 308771
  Synthetic oligonucleotide

SEQ ID NO: 539167 - DNA, 55 bp, Artificial; identical to SEQ ID NO: 308772
  Synthetic oligonucleotide

SEQ ID NO: 539168 - DNA, 59 bp, Artificial; identical to SEQ ID NO: 308777
  Synthetic oligonucleotide

SEQ ID NO: 539169 - DNA, 60 bp, Artificial; identical to SEQ ID NO: 308778
  Synthetic oligonucleotide

SEQ ID NO: 539170 - DNA, 58 bp, Artificial; identical to SEQ ID NO: 308780
  Synthetic oligonucleotide

SEQ ID NO: 539171 - DNA, 55 bp, Artificial; identical to SEQ ID NO: 308783
  Synthetic oligonucleotide

SEQ ID NO: 539172 - DNA, 58 bp, Artificial; identical to SEQ ID NO: 308785
  Synthetic oligonucleotide

SEQ ID NO: 539173 - DNA, 51 bp, Artificial; identical to SEQ ID NO: 308786
  Synthetic oligonucleotide

SEQ ID NO: 539174 - DNA, 55 bp, Artificial; identical to SEQ ID NO: 308791
  Synthetic oligonucleotide

SEQ ID NO: 539175 - DNA, 59 bp, Artificial; identical to SEQ ID NO: 308794
  Synthetic oligonucleotide

SEQ ID NO: 539176 - DNA, 59 bp, Artificial; identical to SEQ ID NO: 308803
  Synthetic oligonucleotide

SEQ ID NO: 539177 - DNA, 59 bp, Artificial; identical to SEQ ID NO: 308804
  Synthetic oligonucleotide

SEQ ID NO: 539178 - DNA, 58 bp, Artificial; identical to SEQ ID NO: 308805
  Synthetic oligonucleotide

SEQ ID NO: 539179 - DNA, 56 bp, Artificial; identical to SEQ ID NO: 308809
  Synthetic oligonucleotide

SEQ ID NO: 539180 - DNA, 55 bp, Artificial; identical to SEQ ID NO: 308811
  Synthetic oligonucleotide

SEQ ID NO: 539181 - DNA, 59 bp, Artificial; identical to SEQ ID NO: 308812
  Synthetic oligonucleotide

SEQ ID NO: 539182 - DNA, 60 bp, Artificial; identical to SEQ ID NO: 308813
  Synthetic oligonucleotide

SEQ ID NO: 539183 - DNA, 56 bp, Artificial; identical to SEQ ID NO: 308815
  Synthetic oligonucleotide

SEQ ID NO: 539184 - DNA, 60 bp, Artificial; identical to SEQ ID NO: 308817
  Synthetic oligonucleotide

SEQ ID NO: 539185 - DNA, 60 bp, Artificial; identical to SEQ ID NO: 308818
  Synthetic oligonucleotide

SEQ ID NO: 539186 - DNA, 51 bp, Artificial; identical to SEQ ID NO: 308819
  Synthetic oligonucleotide

SEQ ID NO: 539187 - DNA, 57 bp, Artificial; identical to SEQ ID NO: 308820
  Synthetic oligonucleotide

SEQ ID NO: 539188 - DNA, 56 bp, Artificial; identical to SEQ ID NO: 308821
  Synthetic oligonucleotide

SEQ ID NO: 539189 - DNA, 60 bp, Artificial; identical to SEQ ID NO: 308822
  Synthetic oligonucleotide

SEQ ID NO: 539190 - DNA, 60 bp, Artificial; identical to SEQ ID NO: 308823
  Synthetic oligonucleotide

SEQ ID NO: 539191 - DNA, 59 bp, Artificial; identical to SEQ ID NO: 308824
  Synthetic oligonucleotide

SEQ ID NO: 539192 - DNA, 56 bp, Artificial; identical to SEQ ID NO: 308825
  Synthetic oligonucleotide

SEQ ID NO: 539193 - DNA, 59 bp, Artificial; identical to SEQ ID NO: 308827
  Synthetic oligonucleotide

SEQ ID NO: 539194 - DNA, 57 bp, Artificial; identical to SEQ ID NO: 308829
  Synthetic oligonucleotide

SEQ ID NO: 539195 - DNA, 59 bp, Artificial; identical to SEQ ID NO: 308830
  Synthetic oligonucleotide

SEQ ID NO: 539196 - DNA, 55 bp, Artificial; identical to SEQ ID NO: 308832
  Synthetic oligonucleotide

SEQ ID NO: 539197 - DNA, 50 bp, Artificial; identical to SEQ ID NO: 308833
  Synthetic oligonucleotide

SEQ ID NO: 539198 - DNA, 60 bp, Artificial; identical to SEQ ID NO: 308838
  Synthetic oligonucleotide

SEQ ID NO: 539199 - DNA, 59 bp, Artificial; identical to SEQ ID NO: 308839
  Synthetic oligonucleotide

SEQ ID NO: 539200 - DNA, 59 bp, Artificial; identical to SEQ ID NO: 308841
  Synthetic oligonucleotide

SEQ ID NO: 539201 - DNA, 55 bp, Artificial; identical to SEQ ID NO: 308842
  Synthetic oligonucleotide

SEQ ID NO: 539202 - DNA, 51 bp, Artificial; identical to SEQ ID NO: 308846
  Synthetic oligonucleotide

SEQ ID NO: 539203 - DNA, 60 bp, Artificial; identical to SEQ ID NO: 308847
  Synthetic oligonucleotide

SEQ ID NO: 539204 - DNA, 59 bp, Artificial; identical to SEQ ID NO: 308848
  Synthetic oligonucleotide

SEQ ID NO: 539205 - DNA, 54 bp, Artificial; identical to SEQ ID NO: 308852
  Synthetic oligonucleotide

SEQ ID NO: 539206 - DNA, 58 bp, Artificial; identical to SEQ ID NO: 308853
  Synthetic oligonucleotide

SEQ ID NO: 539207 - DNA, 56 bp, Artificial; identical to SEQ ID NO: 308854
  Synthetic oligonucleotide

SEQ ID NO: 539208 - DNA, 60 bp, Artificial; identical to SEQ ID NO: 308856
  Synthetic oligonucleotide

SEQ ID NO: 539209 - DNA, 60 bp, Artificial; identical to SEQ ID NO: 308857
  Synthetic oligonucleotide

SEQ ID NO: 539210 - DNA, 51 bp, Artificial; identical to SEQ ID NO: 308858
  Synthetic oligonucleotide

SEQ ID NO: 539211 - DNA, 54 bp, Artificial; identical to SEQ ID NO: 308860
  Synthetic oligonucleotide

SEQ ID NO: 539212 - DNA, 57 bp, Artificial; identical to SEQ ID NO: 308861
  Synthetic oligonucleotide

SEQ ID NO: 539213 - DNA, 56 bp, Artificial; identical to SEQ ID NO: 308862
  Synthetic oligonucleotide

SEQ ID NO: 539214 - DNA, 53 bp, Artificial; identical to SEQ ID NO: 308863
  Synthetic oligonucleotide

SEQ ID NO: 539215 - DNA, 60 bp, Artificial; identical to SEQ ID NO: 10825
  Synthetic oligonucleotide

SEQ ID NO: 539216 - DNA, 60 bp, Artificial; identical to SEQ ID NO: 308865
  Synthetic oligonucleotide

SEQ ID NO: 539217 - DNA, 57 bp, Artificial; identical to SEQ ID NO: 308866
  Synthetic oligonucleotide

SEQ ID NO: 539218 - DNA, 58 bp, Artificial; identical to SEQ ID NO: 308867
  Synthetic oligonucleotide

SEQ ID NO: 539219 - DNA, 60 bp, Artificial; identical to SEQ ID NO: 308868
  Synthetic oligonucleotide

SEQ ID NO: 539220 - DNA, 60 bp, Artificial; identical to SEQ ID NO: 308870
  Synthetic oligonucleotide

SEQ ID NO: 539221 - DNA, 57 bp, Artificial; identical to SEQ ID NO: 308873
  Synthetic oligonucleotide

SEQ ID NO: 539222 - DNA, 60 bp, Artificial; identical to SEQ ID NO: 11143
  Synthetic oligonucleotide

SEQ ID NO: 539223 - DNA, 60 bp, Artificial; identical to SEQ ID NO: 5775
  Synthetic oligonucleotide

SEQ ID NO: 539224 - DNA, 60 bp, Artificial; identical to SEQ ID NO: 308875
  Synthetic oligonucleotide

SEQ ID NO: 539225 - DNA, 56 bp, Artificial; identical to SEQ ID NO: 308877
  Synthetic oligonucleotide

SEQ ID NO: 539226 - DNA, 60 bp, Artificial; identical to SEQ ID NO: 6482
  Synthetic oligonucleotide

SEQ ID NO: 539227 - DNA, 51 bp, Artificial; identical to SEQ ID NO: 308882
  Synthetic oligonucleotide

SEQ ID NO: 539228 - DNA, 60 bp, Artificial; identical to SEQ ID NO: 12197
  Synthetic oligonucleotide

SEQ ID NO: 539229 - DNA, 60 bp, Artificial; identical to SEQ ID NO: 308883
  Synthetic oligonucleotide

SEQ ID NO: 539230 - DNA, 60 bp, Artificial; identical to SEQ ID NO: 308884
  Synthetic oligonucleotide

SEQ ID NO: 539231 - DNA, 60 bp, Artificial; identical to SEQ ID NO: 308885
  Synthetic oligonucleotide

SEQ ID NO: 539232 - DNA, 60 bp, Artificial; identical to SEQ ID NO: 308886
  Synthetic oligonucleotide

SEQ ID NO: 539233 - DNA, 55 bp, Artificial; identical to SEQ ID NO: 308888
  Synthetic oligonucleotide

SEQ ID NO: 539234 - DNA, 55 bp, Artificial; identical to SEQ ID NO: 6630
  Synthetic oligonucleotide

SEQ ID NO: 539235 - DNA, 60 bp, Artificial; identical to SEQ ID NO: 308889
  Synthetic oligonucleotide

SEQ ID NO: 539236 - DNA, 56 bp, Artificial; identical to SEQ ID NO: 308891
  Synthetic oligonucleotide

SEQ ID NO: 539237 - DNA, 56 bp, Artificial; identical to SEQ ID NO: 308893
  Synthetic oligonucleotide

SEQ ID NO: 539238 - DNA, 57 bp, Artificial; identical to SEQ ID NO: 308895
  Synthetic oligonucleotide

SEQ ID NO: 539239 - DNA, 52 bp, Artificial; identical to SEQ ID NO: 12515
  Synthetic oligonucleotide

SEQ ID NO: 539240 - DNA, 50 bp, Artificial; identical to SEQ ID NO: 308899
  Synthetic oligonucleotide

SEQ ID NO: 539241 - DNA, 55 bp, Artificial; identical to SEQ ID NO: 308900
  Synthetic oligonucleotide

SEQ ID NO: 539242 - DNA, 60 bp, Artificial; identical to SEQ ID NO: 308904
  Synthetic oligonucleotide

SEQ ID NO: 539243 - DNA, 55 bp, Artificial; identical to SEQ ID NO: 308913
  Synthetic oligonucleotide

SEQ ID NO: 539244 - DNA, 55 bp, Artificial; identical to SEQ ID NO: 308915
  Synthetic oligonucleotide

SEQ ID NO: 539245 - DNA, 60 bp, Artificial; identical to SEQ ID NO: 8140
  Synthetic oligonucleotide

SEQ ID NO: 539246 - DNA, 50 bp, Artificial; identical to SEQ ID NO: 308917
  Synthetic oligonucleotide

SEQ ID NO: 539247 - DNA, 60 bp, Artificial; identical to SEQ ID NO: 308919
  Synthetic oligonucleotide

SEQ ID NO: 539248 - DNA, 58 bp, Artificial; identical to SEQ ID NO: 308924
  Synthetic oligonucleotide

SEQ ID NO: 539249 - DNA, 55 bp, Artificial; identical to SEQ ID NO: 308928
  Synthetic oligonucleotide

SEQ ID NO: 539250 - DNA, 55 bp, Artificial; identical to SEQ ID NO: 308930
  Synthetic oligonucleotide

SEQ ID NO: 539251 - DNA, 56 bp, Artificial; identical to SEQ ID NO: 308932
  Synthetic oligonucleotide

SEQ ID NO: 539252 - DNA, 55 bp, Artificial; identical to SEQ ID NO: 16217
  Synthetic oligonucleotide

SEQ ID NO: 539253 - DNA, 52 bp, Artificial; identical to SEQ ID NO: 308937
  Synthetic oligonucleotide

SEQ ID NO: 539254 - DNA, 54 bp, Artificial; identical to SEQ ID NO: 308940
  Synthetic oligonucleotide

SEQ ID NO: 539255 - DNA, 53 bp, Artificial; identical to SEQ ID NO: 308942
  Synthetic oligonucleotide

SEQ ID NO: 539256 - DNA, 60 bp, Artificial; identical to SEQ ID NO: 308943
  Synthetic oligonucleotide

SEQ ID NO: 539257 - DNA, 60 bp, Artificial; identical to SEQ ID NO: 308947
  Synthetic oligonucleotide

SEQ ID NO: 539258 - DNA, 57 bp, Artificial; identical to SEQ ID NO: 308949
  Synthetic oligonucleotide

SEQ ID NO: 539259 - DNA, 60 bp, Artificial; identical to SEQ ID NO: 308951
  Synthetic oligonucleotide

SEQ ID NO: 539260 - DNA, 60 bp, Artificial; identical to SEQ ID NO: 308953
  Synthetic oligonucleotide

SEQ ID NO: 539261 - DNA, 55 bp, Artificial; identical to SEQ ID NO: 308957
  Synthetic oligonucleotide

SEQ ID NO: 539262 - DNA, 54 bp, Artificial; identical to SEQ ID NO: 20166
  Synthetic oligonucleotide

SEQ ID NO: 539263 - DNA, 58 bp, Artificial; identical to SEQ ID NO: 308960
  Synthetic oligonucleotide

SEQ ID NO: 539264 - DNA, 50 bp, Artificial; identical to SEQ ID NO: 15161
  Synthetic oligonucleotide

SEQ ID NO: 539265 - DNA, 60 bp, Artificial; identical to SEQ ID NO: 308963
  Synthetic oligonucleotide

SEQ ID NO: 539266 - DNA, 59 bp, Artificial; identical to SEQ ID NO: 308967
  Synthetic oligonucleotide

SEQ ID NO: 539267 - DNA, 58 bp, Artificial; identical to SEQ ID NO: 16157
  Synthetic oligonucleotide

SEQ ID NO: 539268 - DNA, 59 bp, Artificial; identical to SEQ ID NO: 308969
  Synthetic oligonucleotide

SEQ ID NO: 539269 - DNA, 60 bp, Artificial; identical to SEQ ID NO: 308972
  Synthetic oligonucleotide

SEQ ID NO: 539270 - DNA, 55 bp, Artificial; identical to SEQ ID NO: 308973
  Synthetic oligonucleotide

SEQ ID NO: 539271 - DNA, 60 bp, Artificial; identical to SEQ ID NO: 308974
  Synthetic oligonucleotide

SEQ ID NO: 539272 - DNA, 55 bp, Artificial; identical to SEQ ID NO: 308976
  Synthetic oligonucleotide

SEQ ID NO: 539273 - DNA, 56 bp, Artificial; identical to SEQ ID NO: 16495
  Synthetic oligonucleotide

SEQ ID NO: 539274 - DNA, 57 bp, Artificial; identical to SEQ ID NO: 308983
  Synthetic oligonucleotide

SEQ ID NO: 539275 - DNA, 55 bp, Artificial; identical to SEQ ID NO: 308984
  Synthetic oligonucleotide

SEQ ID NO: 539276 - DNA, 60 bp, Artificial; identical to SEQ ID NO: 308986
  Synthetic oligonucleotide

SEQ ID NO: 539277 - DNA, 57 bp, Artificial; identical to SEQ ID NO: 308987
  Synthetic oligonucleotide

SEQ ID NO: 539278 - DNA, 60 bp, Artificial; identical to SEQ ID NO: 14249
  Synthetic oligonucleotide

SEQ ID NO: 539279 - DNA, 50 bp, Artificial; identical to SEQ ID NO: 308989
  Synthetic oligonucleotide

SEQ ID NO: 539280 - DNA, 60 bp, Artificial; identical to SEQ ID NO: 308990
  Synthetic oligonucleotide

SEQ ID NO: 539281 - DNA, 56 bp, Artificial; identical to SEQ ID NO: 308993
  Synthetic oligonucleotide

SEQ ID NO: 539282 - DNA, 51 bp, Artificial; identical to SEQ ID NO: 308995
  Synthetic oligonucleotide

SEQ ID NO: 539283 - DNA, 59 bp, Artificial; identical to SEQ ID NO: 308996
  Synthetic oligonucleotide

SEQ ID NO: 539284 - DNA, 55 bp, Artificial; identical to SEQ ID NO: 308999
  Synthetic oligonucleotide

SEQ ID NO: 539285 - DNA, 59 bp, Artificial; identical to SEQ ID NO: 309000
  Synthetic oligonucleotide

SEQ ID NO: 539286 - DNA, 60 bp, Artificial; identical to SEQ ID NO: 309002
  Synthetic oligonucleotide

SEQ ID NO: 539287 - DNA, 60 bp, Artificial; identical to SEQ ID NO: 309004
  Synthetic oligonucleotide

SEQ ID NO: 539288 - DNA, 60 bp, Artificial; identical to SEQ ID NO: 309008
  Synthetic oligonucleotide

SEQ ID NO: 539289 - DNA, 58 bp, Artificial; identical to SEQ ID NO: 309009
  Synthetic oligonucleotide

SEQ ID NO: 539290 - DNA, 60 bp, Artificial; identical to SEQ ID NO: 309011
  Synthetic oligonucleotide

SEQ ID NO: 539291 - DNA, 57 bp, Artificial; identical to SEQ ID NO: 309014
  Synthetic oligonucleotide

SEQ ID NO: 539292 - DNA, 54 bp, Artificial; identical to SEQ ID NO: 309015
  Synthetic oligonucleotide

SEQ ID NO: 539293 - DNA, 60 bp, Artificial; identical to SEQ ID NO: 309016
  Synthetic oligonucleotide

SEQ ID NO: 539294 - DNA, 59 bp, Artificial; identical to SEQ ID NO: 309018
  Synthetic oligonucleotide

SEQ ID NO: 539295 - DNA, 60 bp, Artificial; identical to SEQ ID NO: 309020
  Synthetic oligonucleotide

SEQ ID NO: 539296 - DNA, 58 bp, Artificial; identical to SEQ ID NO: 309022
  Synthetic oligonucleotide

SEQ ID NO: 539297 - DNA, 60 bp, Artificial; identical to SEQ ID NO: 309023
  Synthetic oligonucleotide

SEQ ID NO: 539298 - DNA, 53 bp, Artificial; identical to SEQ ID NO: 309024
  Synthetic oligonucleotide

SEQ ID NO: 539299 - DNA, 59 bp, Artificial; identical to SEQ ID NO: 309026
  Synthetic oligonucleotide

SEQ ID NO: 539300 - DNA, 60 bp, Artificial; identical to SEQ ID NO: 309028
  Synthetic oligonucleotide

SEQ ID NO: 539301 - DNA, 60 bp, Artificial; identical to SEQ ID NO: 309032
  Synthetic oligonucleotide

SEQ ID NO: 539302 - DNA, 52 bp, Artificial; identical to SEQ ID NO: 309036
  Synthetic oligonucleotide

SEQ ID NO: 539303 - DNA, 60 bp, Artificial; identical to SEQ ID NO: 11577
  Synthetic oligonucleotide

SEQ ID NO: 539304 - DNA, 56 bp, Artificial; identical to SEQ ID NO: 309039
  Synthetic oligonucleotide

SEQ ID NO: 539305 - DNA, 60 bp, Artificial; identical to SEQ ID NO: 309041
  Synthetic oligonucleotide

SEQ ID NO: 539306 - DNA, 56 bp, Artificial; identical to SEQ ID NO: 309042
  Synthetic oligonucleotide

SEQ ID NO: 539307 - DNA, 60 bp, Artificial; identical to SEQ ID NO: 309043
  Synthetic oligonucleotide

SEQ ID NO: 539308 - DNA, 54 bp, Artificial; identical to SEQ ID NO: 309046
  Synthetic oligonucleotide

SEQ ID NO: 539309 - DNA, 60 bp, Artificial; identical to SEQ ID NO: 309048
  Synthetic oligonucleotide

SEQ ID NO: 539310 - DNA, 60 bp, Artificial; identical to SEQ ID NO: 309049
  Synthetic oligonucleotide

SEQ ID NO: 539311 - DNA, 57 bp, Artificial; identical to SEQ ID NO: 309050
  Synthetic oligonucleotide

SEQ ID NO: 539312 - DNA, 60 bp, Artificial; identical to SEQ ID NO: 309052
  Synthetic oligonucleotide

SEQ ID NO: 539313 - DNA, 55 bp, Artificial; identical to SEQ ID NO: 309056
  Synthetic oligonucleotide

SEQ ID NO: 539314 - DNA, 60 bp, Artificial; identical to SEQ ID NO: 309057
  Synthetic oligonucleotide

SEQ ID NO: 539315 - DNA, 60 bp, Artificial; identical to SEQ ID NO: 309058
  Synthetic oligonucleotide

SEQ ID NO: 539316 - DNA, 51 bp, Artificial; identical to SEQ ID NO: 309059
  Synthetic oligonucleotide

SEQ ID NO: 539317 - DNA, 58 bp, Artificial; identical to SEQ ID NO: 309060
  Synthetic oligonucleotide

SEQ ID NO: 539318 - DNA, 55 bp, Artificial; identical to SEQ ID NO: 309063
  Synthetic oligonucleotide

SEQ ID NO: 539319 - DNA, 55 bp, Artificial; identical to SEQ ID NO: 309064
  Synthetic oligonucleotide

SEQ ID NO: 539320 - DNA, 60 bp, Artificial; identical to SEQ ID NO: 309065
  Synthetic oligonucleotide

SEQ ID NO: 539321 - DNA, 52 bp, Artificial; identical to SEQ ID NO: 309066
  Synthetic oligonucleotide

SEQ ID NO: 539322 - DNA, 54 bp, Artificial; identical to SEQ ID NO: 16894
  Synthetic oligonucleotide

SEQ ID NO: 539323 - DNA, 59 bp, Artificial; identical to SEQ ID NO: 309067
  Synthetic oligonucleotide

SEQ ID NO: 539324 - DNA, 57 bp, Artificial; identical to SEQ ID NO: 309071
  Synthetic oligonucleotide

SEQ ID NO: 539325 - DNA, 55 bp, Artificial; identical to SEQ ID NO: 309072
  Synthetic oligonucleotide

SEQ ID NO: 539326 - DNA, 60 bp, Artificial; identical to SEQ ID NO: 309073
  Synthetic oligonucleotide

SEQ ID NO: 539327 - DNA, 58 bp, Artificial; identical to SEQ ID NO: 309074
  Synthetic oligonucleotide

SEQ ID NO: 539328 - DNA, 57 bp, Artificial; identical to SEQ ID NO: 309077
  Synthetic oligonucleotide

SEQ ID NO: 539329 - DNA, 57 bp, Artificial; identical to SEQ ID NO: 309080
  Synthetic oligonucleotide

SEQ ID NO: 539330 - DNA, 57 bp, Artificial; identical to SEQ ID NO: 309083
  Synthetic oligonucleotide

SEQ ID NO: 539331 - DNA, 59 bp, Artificial; identical to SEQ ID NO: 309086
  Synthetic oligonucleotide

SEQ ID NO: 539332 - DNA, 55 bp, Artificial; identical to SEQ ID NO: 309087
  Synthetic oligonucleotide

SEQ ID NO: 539333 - DNA, 55 bp, Artificial; identical to SEQ ID NO: 309088
  Synthetic oligonucleotide

SEQ ID NO: 539334 - DNA, 60 bp, Artificial; identical to SEQ ID NO: 309089
  Synthetic oligonucleotide

SEQ ID NO: 539335 - DNA, 59 bp, Artificial; identical to SEQ ID NO: 309090
  Synthetic oligonucleotide

SEQ ID NO: 539336 - DNA, 54 bp, Artificial; identical to SEQ ID NO: 309092
  Synthetic oligonucleotide

SEQ ID NO: 539337 - DNA, 54 bp, Artificial; identical to SEQ ID NO: 309093
  Synthetic oligonucleotide

SEQ ID NO: 539338 - DNA, 58 bp, Artificial; identical to SEQ ID NO: 309095
  Synthetic oligonucleotide

SEQ ID NO: 539339 - DNA, 55 bp, Artificial; identical to SEQ ID NO: 309097
  Synthetic oligonucleotide

SEQ ID NO: 539340 - DNA, 60 bp, Artificial; identical to SEQ ID NO: 309098
  Synthetic oligonucleotide

SEQ ID NO: 539341 - DNA, 57 bp, Artificial; identical to SEQ ID NO: 309099
  Synthetic oligonucleotide

SEQ ID NO: 539342 - DNA, 52 bp, Artificial; identical to SEQ ID NO: 309100
  Synthetic oligonucleotide

SEQ ID NO: 539343 - DNA, 53 bp, Artificial; identical to SEQ ID NO: 309101
  Synthetic oligonucleotide

SEQ ID NO: 539344 - DNA, 55 bp, Artificial; identical to SEQ ID NO: 309103
  Synthetic oligonucleotide

SEQ ID NO: 539345 - DNA, 52 bp, Artificial; identical to SEQ ID NO: 309105
  Synthetic oligonucleotide

SEQ ID NO: 539346 - DNA, 60 bp, Artificial; identical to SEQ ID NO: 309106
  Synthetic oligonucleotide

SEQ ID NO: 539347 - DNA, 60 bp, Artificial; identical to SEQ ID NO: 8187
  Synthetic oligonucleotide

SEQ ID NO: 539348 - DNA, 57 bp, Artificial; identical to SEQ ID NO: 309107
  Synthetic oligonucleotide

SEQ ID NO: 539349 - DNA, 52 bp, Artificial; identical to SEQ ID NO: 309111
  Synthetic oligonucleotide

SEQ ID NO: 539350 - DNA, 60 bp, Artificial; identical to SEQ ID NO: 309112
  Synthetic oligonucleotide

SEQ ID NO: 539351 - DNA, 60 bp, Artificial; identical to SEQ ID NO: 309113
  Synthetic oligonucleotide

SEQ ID NO: 539352 - DNA, 60 bp, Artificial; identical to SEQ ID NO: 309115
  Synthetic oligonucleotide

SEQ ID NO: 539353 - DNA, 55 bp, Artificial; identical to SEQ ID NO: 309117
  Synthetic oligonucleotide

SEQ ID NO: 539354 - DNA, 60 bp, Artificial; identical to SEQ ID NO: 309120
  Synthetic oligonucleotide

SEQ ID NO: 539355 - DNA, 59 bp, Artificial; identical to SEQ ID NO: 309124
  Synthetic oligonucleotide

SEQ ID NO: 539356 - DNA, 57 bp, Artificial; identical to SEQ ID NO: 309131
  Synthetic oligonucleotide

SEQ ID NO: 539357 - DNA, 58 bp, Artificial; identical to SEQ ID NO: 309134
  Synthetic oligonucleotide

SEQ ID NO: 539358 - DNA, 55 bp, Artificial; identical to SEQ ID NO: 309135
  Synthetic oligonucleotide

SEQ ID NO: 539359 - DNA, 57 bp, Artificial; identical to SEQ ID NO: 309137
  Synthetic oligonucleotide

SEQ ID NO: 539360 - DNA, 55 bp, Artificial; identical to SEQ ID NO: 309138
  Synthetic oligonucleotide

SEQ ID NO: 539361 - DNA, 53 bp, Artificial; identical to SEQ ID NO: 309139
  Synthetic oligonucleotide

SEQ ID NO: 539362 - DNA, 57 bp, Artificial; identical to SEQ ID NO: 16492
  Synthetic oligonucleotide

SEQ ID NO: 539363 - DNA, 53 bp, Artificial; identical to SEQ ID NO: 309140
  Synthetic oligonucleotide

SEQ ID NO: 539364 - DNA, 56 bp, Artificial; identical to SEQ ID NO: 309141
  Synthetic oligonucleotide

SEQ ID NO: 539365 - DNA, 57 bp, Artificial; identical to SEQ ID NO: 309143
  Synthetic oligonucleotide

SEQ ID NO: 539366 - DNA, 59 bp, Artificial; identical to SEQ ID NO: 309145
  Synthetic oligonucleotide

SEQ ID NO: 539367 - DNA, 57 bp, Artificial; identical to SEQ ID NO: 18593
  Synthetic oligonucleotide

SEQ ID NO: 539368 - DNA, 59 bp, Artificial; identical to SEQ ID NO: 309149
  Synthetic oligonucleotide

SEQ ID NO: 539369 - DNA, 55 bp, Artificial; identical to SEQ ID NO: 309150
  Synthetic oligonucleotide

SEQ ID NO: 539370 - DNA, 58 bp, Artificial; identical to SEQ ID NO: 309151
  Synthetic oligonucleotide

SEQ ID NO: 539371 - DNA, 52 bp, Artificial; identical to SEQ ID NO: 309155
  Synthetic oligonucleotide

SEQ ID NO: 539372 - DNA, 60 bp, Artificial; identical to SEQ ID NO: 10807
  Synthetic oligonucleotide

SEQ ID NO: 539373 - DNA, 59 bp, Artificial; identical to SEQ ID NO: 309157
  Synthetic oligonucleotide

SEQ ID NO: 539374 - DNA, 59 bp, Artificial; identical to SEQ ID NO: 309158
  Synthetic oligonucleotide

SEQ ID NO: 539375 - DNA, 59 bp, Artificial; identical to SEQ ID NO: 16156
  Synthetic oligonucleotide

SEQ ID NO: 539376 - DNA, 58 bp, Artificial; identical to SEQ ID NO: 309162
  Synthetic oligonucleotide

SEQ ID NO: 539377 - DNA, 55 bp, Artificial; identical to SEQ ID NO: 309164
  Synthetic oligonucleotide

SEQ ID NO: 539378 - DNA, 56 bp, Artificial; identical to SEQ ID NO: 309165
  Synthetic oligonucleotide

SEQ ID NO: 539379 - DNA, 55 bp, Artificial; identical to SEQ ID NO: 309167
  Synthetic oligonucleotide

SEQ ID NO: 539380 - DNA, 55 bp, Artificial; identical to SEQ ID NO: 15894
  Synthetic oligonucleotide

SEQ ID NO: 539381 - DNA, 60 bp, Artificial; identical to SEQ ID NO: 6447
  Synthetic oligonucleotide

SEQ ID NO: 539382 - DNA, 57 bp, Artificial; identical to SEQ ID NO: 309174
  Synthetic oligonucleotide

SEQ ID NO: 539383 - DNA, 56 bp, Artificial; identical to SEQ ID NO: 309176
  Synthetic oligonucleotide

SEQ ID NO: 539384 - DNA, 53 bp, Artificial; identical to SEQ ID NO: 19835
  Synthetic oligonucleotide

SEQ ID NO: 539385 - DNA, 60 bp, Artificial; identical to SEQ ID NO: 309180
  Synthetic oligonucleotide

SEQ ID NO: 539386 - DNA, 60 bp, Artificial; identical to SEQ ID NO: 309181
  Synthetic oligonucleotide

SEQ ID NO: 539387 - DNA, 54 bp, Artificial; identical to SEQ ID NO: 309183
  Synthetic oligonucleotide

SEQ ID NO: 539388 - DNA, 50 bp, Artificial; identical to SEQ ID NO: 309185
  Synthetic oligonucleotide

SEQ ID NO: 539389 - DNA, 52 bp, Artificial; identical to SEQ ID NO: 309187
  Synthetic oligonucleotide

SEQ ID NO: 539390 - DNA, 56 bp, Artificial; identical to SEQ ID NO: 309188
  Synthetic oligonucleotide

SEQ ID NO: 539391 - DNA, 60 bp, Artificial; identical to SEQ ID NO: 309189
  Synthetic oligonucleotide

SEQ ID NO: 539392 - DNA, 58 bp, Artificial; identical to SEQ ID NO: 309192
  Synthetic oligonucleotide

SEQ ID NO: 539393 - DNA, 60 bp, Artificial; identical to SEQ ID NO: 309194
  Synthetic oligonucleotide

SEQ ID NO: 539394 - DNA, 58 bp, Artificial; identical to SEQ ID NO: 309200
  Synthetic oligonucleotide

SEQ ID NO: 539395 - DNA, 59 bp, Artificial; identical to SEQ ID NO: 309203
  Synthetic oligonucleotide

SEQ ID NO: 539396 - DNA, 57 bp, Artificial; identical to SEQ ID NO: 17535
  Synthetic oligonucleotide

SEQ ID NO: 539397 - DNA, 60 bp, Artificial; identical to SEQ ID NO: 309205
  Synthetic oligonucleotide

SEQ ID NO: 539398 - DNA, 55 bp, Artificial; identical to SEQ ID NO: 309208
  Synthetic oligonucleotide

SEQ ID NO: 539399 - DNA, 51 bp, Artificial; identical to SEQ ID NO: 309210
  Synthetic oligonucleotide

SEQ ID NO: 539400 - DNA, 57 bp, Artificial; identical to SEQ ID NO: 309211
  Synthetic oligonucleotide

SEQ ID NO: 539401 - DNA, 53 bp, Artificial; identical to SEQ ID NO: 7872
  Synthetic oligonucleotide

SEQ ID NO: 539402 - DNA, 57 bp, Artificial; identical to SEQ ID NO: 309214
  Synthetic oligonucleotide

SEQ ID NO: 539403 - DNA, 54 bp, Artificial; identical to SEQ ID NO: 309217
  Synthetic oligonucleotide

SEQ ID NO: 539404 - DNA, 60 bp, Artificial; identical to SEQ ID NO: 309218
  Synthetic oligonucleotide

SEQ ID NO: 539405 - DNA, 58 bp, Artificial; identical to SEQ ID NO: 309219
  Synthetic oligonucleotide

SEQ ID NO: 539406 - DNA, 55 bp, Artificial; identical to SEQ ID NO: 309223
  Synthetic oligonucleotide

SEQ ID NO: 539407 - DNA, 54 bp, Artificial; identical to SEQ ID NO: 309224
  Synthetic oligonucleotide

SEQ ID NO: 539408 - DNA, 60 bp, Artificial; identical to SEQ ID NO: 309227
  Synthetic oligonucleotide

SEQ ID NO: 539409 - DNA, 55 bp, Artificial; identical to SEQ ID NO: 309231
  Synthetic oligonucleotide

SEQ ID NO: 539410 - DNA, 60 bp, Artificial; identical to SEQ ID NO: 309232
  Synthetic oligonucleotide

SEQ ID NO: 539411 - DNA, 56 bp, Artificial; identical to SEQ ID NO: 309233
  Synthetic oligonucleotide

SEQ ID NO: 539412 - DNA, 57 bp, Artificial; identical to SEQ ID NO: 309234
  Synthetic oligonucleotide

SEQ ID NO: 539413 - DNA, 52 bp, Artificial; identical to SEQ ID NO: 309235
  Synthetic oligonucleotide

SEQ ID NO: 539414 - DNA, 60 bp, Artificial; identical to SEQ ID NO: 14507
  Synthetic oligonucleotide

SEQ ID NO: 539415 - DNA, 59 bp, Artificial; identical to SEQ ID NO: 11141
  Synthetic oligonucleotide

SEQ ID NO: 539416 - DNA, 53 bp, Artificial; identical to SEQ ID NO: 309240
  Synthetic oligonucleotide

SEQ ID NO: 539417 - DNA, 57 bp, Artificial; identical to SEQ ID NO: 309242
  Synthetic oligonucleotide

SEQ ID NO: 539418 - DNA, 58 bp, Artificial; identical to SEQ ID NO: 309244
  Synthetic oligonucleotide

SEQ ID NO: 539419 - DNA, 56 bp, Artificial; identical to SEQ ID NO: 309245
  Synthetic oligonucleotide

SEQ ID NO: 539420 - DNA, 50 bp, Artificial; identical to SEQ ID NO: 15582
  Synthetic oligonucleotide

SEQ ID NO: 539421 - DNA, 60 bp, Artificial; identical to SEQ ID NO: 309250
  Synthetic oligonucleotide

SEQ ID NO: 539422 - DNA, 53 bp, Artificial; identical to SEQ ID NO: 309252
  Synthetic oligonucleotide

SEQ ID NO: 539423 - DNA, 60 bp, Artificial; identical to SEQ ID NO: 309259
  Synthetic oligonucleotide

SEQ ID NO: 539424 - DNA, 50 bp, Artificial; identical to SEQ ID NO: 309260
  Synthetic oligonucleotide

SEQ ID NO: 539425 - DNA, 56 bp, Artificial; identical to SEQ ID NO: 309265
  Synthetic oligonucleotide

SEQ ID NO: 539426 - DNA, 59 bp, Artificial; identical to SEQ ID NO: 309268
  Synthetic oligonucleotide

SEQ ID NO: 539427 - DNA, 53 bp, Artificial; identical to SEQ ID NO: 309269
  Synthetic oligonucleotide

SEQ ID NO: 539428 - DNA, 58 bp, Artificial; identical to SEQ ID NO: 309270
  Synthetic oligonucleotide

SEQ ID NO: 539429 - DNA, 57 bp, Artificial; identical to SEQ ID NO: 309271
  Synthetic oligonucleotide

SEQ ID NO: 539430 - DNA, 55 bp, Artificial; identical to SEQ ID NO: 309272
  Synthetic oligonucleotide

SEQ ID NO: 539431 - DNA, 59 bp, Artificial; identical to SEQ ID NO: 309273
  Synthetic oligonucleotide

SEQ ID NO: 539432 - DNA, 59 bp, Artificial; identical to SEQ ID NO: 309274
  Synthetic oligonucleotide

SEQ ID NO: 539433 - DNA, 55 bp, Artificial; identical to SEQ ID NO: 309276
  Synthetic oligonucleotide

SEQ ID NO: 539434 - DNA, 52 bp, Artificial; identical to SEQ ID NO: 309281
  Synthetic oligonucleotide

SEQ ID NO: 539435 - DNA, 55 bp, Artificial; identical to SEQ ID NO: 309283
  Synthetic oligonucleotide

SEQ ID NO: 539436 - DNA, 55 bp, Artificial; identical to SEQ ID NO: 309285
  Synthetic oligonucleotide

SEQ ID NO: 539437 - DNA, 57 bp, Artificial; identical to SEQ ID NO: 309287
  Synthetic oligonucleotide

SEQ ID NO: 539438 - DNA, 58 bp, Artificial; identical to SEQ ID NO: 309288
  Synthetic oligonucleotide

SEQ ID NO: 539439 - DNA, 54 bp, Artificial; identical to SEQ ID NO: 309298
  Synthetic oligonucleotide

SEQ ID NO: 539440 - DNA, 53 bp, Artificial; identical to SEQ ID NO: 309299
  Synthetic oligonucleotide

SEQ ID NO: 539441 - DNA, 56 bp, Artificial; identical to SEQ ID NO: 309303
  Synthetic oligonucleotide

SEQ ID NO: 539442 - DNA, 58 bp, Artificial; identical to SEQ ID NO: 309304
  Synthetic oligonucleotide

SEQ ID NO: 539443 - DNA, 52 bp, Artificial; identical to SEQ ID NO: 309305
  Synthetic oligonucleotide

SEQ ID NO: 539444 - DNA, 51 bp, Artificial; identical to SEQ ID NO: 309306
  Synthetic oligonucleotide

SEQ ID NO: 539445 - DNA, 55 bp, Artificial; identical to SEQ ID NO: 309307
  Synthetic oligonucleotide

SEQ ID NO: 539446 - DNA, 56 bp, Artificial; identical to SEQ ID NO: 17464
  Synthetic oligonucleotide

SEQ ID NO: 539447 - DNA, 56 bp, Artificial; identical to SEQ ID NO: 309308
  Synthetic oligonucleotide

SEQ ID NO: 539448 - DNA, 58 bp, Artificial; identical to SEQ ID NO: 309309
  Synthetic oligonucleotide

SEQ ID NO: 539449 - DNA, 55 bp, Artificial; identical to SEQ ID NO: 309314
  Synthetic oligonucleotide

SEQ ID NO: 539450 - DNA, 53 bp, Artificial; identical to SEQ ID NO: 309316
  Synthetic oligonucleotide

SEQ ID NO: 539451 - DNA, 52 bp, Artificial; identical to SEQ ID NO: 309318
  Synthetic oligonucleotide

SEQ ID NO: 539452 - DNA, 56 bp, Artificial; identical to SEQ ID NO: 309323
  Synthetic oligonucleotide

SEQ ID NO: 539453 - DNA, 57 bp, Artificial; identical to SEQ ID NO: 309324
  Synthetic oligonucleotide

SEQ ID NO: 539454 - DNA, 55 bp, Artificial; identical to SEQ ID NO: 309326
  Synthetic oligonucleotide

SEQ ID NO: 539455 - DNA, 52 bp, Artificial; identical to SEQ ID NO: 309332
  Synthetic oligonucleotide

SEQ ID NO: 539456 - DNA, 60 bp, Artificial; identical to SEQ ID NO: 309339
  Synthetic oligonucleotide

SEQ ID NO: 539457 - DNA, 60 bp, Artificial; identical to SEQ ID NO: 309340
  Synthetic oligonucleotide

SEQ ID NO: 539458 - DNA, 58 bp, Artificial; identical to SEQ ID NO: 309342
  Synthetic oligonucleotide

SEQ ID NO: 539459 - DNA, 60 bp, Artificial; identical to SEQ ID NO: 309343
  Synthetic oligonucleotide

SEQ ID NO: 539460 - DNA, 60 bp, Artificial; identical to SEQ ID NO: 309345
  Synthetic oligonucleotide

SEQ ID NO: 539461 - DNA, 58 bp, Artificial; identical to SEQ ID NO: 309347
  Synthetic oligonucleotide

SEQ ID NO: 539462 - DNA, 55 bp, Artificial; identical to SEQ ID NO: 309350
  Synthetic oligonucleotide

SEQ ID NO: 539463 - DNA, 60 bp, Artificial; identical to SEQ ID NO: 309355
  Synthetic oligonucleotide

SEQ ID NO: 539464 - DNA, 51 bp, Artificial; identical to SEQ ID NO: 309356
  Synthetic oligonucleotide

SEQ ID NO: 539465 - DNA, 60 bp, Artificial; identical to SEQ ID NO: 309357
  Synthetic oligonucleotide

SEQ ID NO: 539466 - DNA, 60 bp, Artificial; identical to SEQ ID NO: 309363
  Synthetic oligonucleotide

SEQ ID NO: 539467 - DNA, 55 bp, Artificial; identical to SEQ ID NO: 309364
  Synthetic oligonucleotide

SEQ ID NO: 539468 - DNA, 53 bp, Artificial; identical to SEQ ID NO: 309365
  Synthetic oligonucleotide

SEQ ID NO: 539469 - DNA, 55 bp, Artificial; identical to SEQ ID NO: 309368
  Synthetic oligonucleotide

SEQ ID NO: 539470 - DNA, 60 bp, Artificial; identical to SEQ ID NO: 309372
  Synthetic oligonucleotide

SEQ ID NO: 539471 - DNA, 58 bp, Artificial; identical to SEQ ID NO: 309373
  Synthetic oligonucleotide

SEQ ID NO: 539472 - DNA, 55 bp, Artificial; identical to SEQ ID NO: 309376
  Synthetic oligonucleotide

SEQ ID NO: 539473 - DNA, 56 bp, Artificial; identical to SEQ ID NO: 309378
  Synthetic oligonucleotide

SEQ ID NO: 539474 - DNA, 58 bp, Artificial; identical to SEQ ID NO: 7407
  Synthetic oligonucleotide

SEQ ID NO: 539475 - DNA, 58 bp, Artificial; identical to SEQ ID NO: 309380
  Synthetic oligonucleotide

SEQ ID NO: 539476 - DNA, 60 bp, Artificial; identical to SEQ ID NO: 309381
  Synthetic oligonucleotide

SEQ ID NO: 539477 - DNA, 60 bp, Artificial; identical to SEQ ID NO: 309383
  Synthetic oligonucleotide

SEQ ID NO: 539478 - DNA, 60 bp, Artificial; identical to SEQ ID NO: 309389
  Synthetic oligonucleotide

SEQ ID NO: 539479 - DNA, 55 bp, Artificial; identical to SEQ ID NO: 309390
  Synthetic oligonucleotide

SEQ ID NO: 539480 - DNA, 59 bp, Artificial; identical to SEQ ID NO: 309392
  Synthetic oligonucleotide

SEQ ID NO: 539481 - DNA, 55 bp, Artificial; identical to SEQ ID NO: 309393
  Synthetic oligonucleotide

SEQ ID NO: 539482 - DNA, 58 bp, Artificial; identical to SEQ ID NO: 309395
  Synthetic oligonucleotide

SEQ ID NO: 539483 - DNA, 51 bp, Artificial; identical to SEQ ID NO: 309400
  Synthetic oligonucleotide

SEQ ID NO: 539484 - DNA, 50 bp, Artificial; identical to SEQ ID NO: 309402
  Synthetic oligonucleotide

SEQ ID NO: 539485 - DNA, 50 bp, Artificial; identical to SEQ ID NO: 309403
  Synthetic oligonucleotide

SEQ ID NO: 539486 - DNA, 57 bp, Artificial; identical to SEQ ID NO: 309404
  Synthetic oligonucleotide

SEQ ID NO: 539487 - DNA, 56 bp, Artificial; identical to SEQ ID NO: 309412
  Synthetic oligonucleotide

SEQ ID NO: 539488 - DNA, 53 bp, Artificial; identical to SEQ ID NO: 309413
  Synthetic oligonucleotide

SEQ ID NO: 539489 - DNA, 55 bp, Artificial; identical to SEQ ID NO: 309414
  Synthetic oligonucleotide

SEQ ID NO: 539490 - DNA, 60 bp, Artificial; identical to SEQ ID NO: 309415
  Synthetic oligonucleotide

SEQ ID NO: 539491 - DNA, 57 bp, Artificial; identical to SEQ ID NO: 309419
  Synthetic oligonucleotide

SEQ ID NO: 539492 - DNA, 55 bp, Artificial; identical to SEQ ID NO: 309421
  Synthetic oligonucleotide

SEQ ID NO: 539493 - DNA, 55 bp, Artificial; identical to SEQ ID NO: 309422
  Synthetic oligonucleotide

SEQ ID NO: 539494 - DNA, 59 bp, Artificial; identical to SEQ ID NO: 309423
  Synthetic oligonucleotide

SEQ ID NO: 539495 - DNA, 55 bp, Artificial; identical to SEQ ID NO: 309424
  Synthetic oligonucleotide

SEQ ID NO: 539496 - DNA, 56 bp, Artificial; identical to SEQ ID NO: 16283
  Synthetic oligonucleotide

SEQ ID NO: 539497 - DNA, 53 bp, Artificial; identical to SEQ ID NO: 309428
  Synthetic oligonucleotide

SEQ ID NO: 539498 - DNA, 51 bp, Artificial; identical to SEQ ID NO: 11406
  Synthetic oligonucleotide

SEQ ID NO: 539499 - DNA, 50 bp, Artificial; identical to SEQ ID NO: 309431
  Synthetic oligonucleotide

SEQ ID NO: 539500 - DNA, 58 bp, Artificial; identical to SEQ ID NO: 309432
  Synthetic oligonucleotide

SEQ ID NO: 539501 - DNA, 60 bp, Artificial; identical to SEQ ID NO: 309433
  Synthetic oligonucleotide

SEQ ID NO: 539502 - DNA, 51 bp, Artificial; identical to SEQ ID NO: 309434
  Synthetic oligonucleotide

SEQ ID NO: 539503 - DNA, 52 bp, Artificial; identical to SEQ ID NO: 309437
  Synthetic oligonucleotide

SEQ ID NO: 539504 - DNA, 53 bp, Artificial; identical to SEQ ID NO: 309438
  Synthetic oligonucleotide

SEQ ID NO: 539505 - DNA, 57 bp, Artificial; identical to SEQ ID NO: 309439
  Synthetic oligonucleotide

SEQ ID NO: 539506 - DNA, 55 bp, Artificial; identical to SEQ ID NO: 309443
  Synthetic oligonucleotide

SEQ ID NO: 539507 - DNA, 52 bp, Artificial; identical to SEQ ID NO: 309444
  Synthetic oligonucleotide

SEQ ID NO: 539508 - DNA, 56 bp, Artificial; identical to SEQ ID NO: 6174
  Synthetic oligonucleotide

SEQ ID NO: 539509 - DNA, 60 bp, Artificial; identical to SEQ ID NO: 309449
  Synthetic oligonucleotide

SEQ ID NO: 539510 - DNA, 59 bp, Artificial; identical to SEQ ID NO: 309452
  Synthetic oligonucleotide

SEQ ID NO: 539511 - DNA, 59 bp, Artificial; identical to SEQ ID NO: 309454
  Synthetic oligonucleotide

SEQ ID NO: 539512 - DNA, 56 bp, Artificial; identical to SEQ ID NO: 309459
  Synthetic oligonucleotide

SEQ ID NO: 539513 - DNA, 55 bp, Artificial; identical to SEQ ID NO: 309463
  Synthetic oligonucleotide

SEQ ID NO: 539514 - DNA, 55 bp, Artificial; identical to SEQ ID NO: 309464
  Synthetic oligonucleotide

SEQ ID NO: 539515 - DNA, 50 bp, Artificial; identical to SEQ ID NO: 309468
  Synthetic oligonucleotide

SEQ ID NO: 539516 - DNA, 51 bp, Artificial; identical to SEQ ID NO: 309471
  Synthetic oligonucleotide

SEQ ID NO: 539517 - DNA, 60 bp, Artificial; identical to SEQ ID NO: 8659
  Synthetic oligonucleotide

SEQ ID NO: 539518 - DNA, 60 bp, Artificial; identical to SEQ ID NO: 309472
  Synthetic oligonucleotide

SEQ ID NO: 539519 - DNA, 60 bp, Artificial; identical to SEQ ID NO: 309473
  Synthetic oligonucleotide

SEQ ID NO: 539520 - DNA, 55 bp, Artificial; identical to SEQ ID NO: 309474
  Synthetic oligonucleotide

SEQ ID NO: 539521 - DNA, 60 bp, Artificial; identical to SEQ ID NO: 309475
  Synthetic oligonucleotide

SEQ ID NO: 539522 - DNA, 60 bp, Artificial; identical to SEQ ID NO: 309476
  Synthetic oligonucleotide

SEQ ID NO: 539523 - DNA, 52 bp, Artificial; identical to SEQ ID NO: 309478
  Synthetic oligonucleotide

SEQ ID NO: 539524 - DNA, 51 bp, Artificial; identical to SEQ ID NO: 12061
  Synthetic oligonucleotide

SEQ ID NO: 539525 - DNA, 50 bp, Artificial; identical to SEQ ID NO: 309482
  Synthetic oligonucleotide

SEQ ID NO: 539526 - DNA, 57 bp, Artificial; identical to SEQ ID NO: 309484
  Synthetic oligonucleotide

SEQ ID NO: 539527 - DNA, 55 bp, Artificial; identical to SEQ ID NO: 11722
  Synthetic oligonucleotide

SEQ ID NO: 539528 - DNA, 55 bp, Artificial; identical to SEQ ID NO: 309489
  Synthetic oligonucleotide

SEQ ID NO: 539529 - DNA, 51 bp, Artificial; identical to SEQ ID NO: 309492
  Synthetic oligonucleotide

SEQ ID NO: 539530 - DNA, 51 bp, Artificial; identical to SEQ ID NO: 309494
  Synthetic oligonucleotide

SEQ ID NO: 539531 - DNA, 52 bp, Artificial; identical to SEQ ID NO: 309498
  Synthetic oligonucleotide

SEQ ID NO: 539532 - DNA, 51 bp, Artificial; identical to SEQ ID NO: 309499
  Synthetic oligonucleotide

SEQ ID NO: 539533 - DNA, 60 bp, Artificial; identical to SEQ ID NO: 309502
  Synthetic oligonucleotide

SEQ ID NO: 539534 - DNA, 58 bp, Artificial; identical to SEQ ID NO: 309504
  Synthetic oligonucleotide

SEQ ID NO: 539535 - DNA, 59 bp, Artificial; identical to SEQ ID NO: 309505
  Synthetic oligonucleotide

SEQ ID NO: 539536 - DNA, 59 bp, Artificial; identical to SEQ ID NO: 309507
  Synthetic oligonucleotide

SEQ ID NO: 539537 - DNA, 60 bp, Artificial; identical to SEQ ID NO: 309508
  Synthetic oligonucleotide

SEQ ID NO: 539538 - DNA, 57 bp, Artificial; identical to SEQ ID NO: 309510
  Synthetic oligonucleotide

SEQ ID NO: 539539 - DNA, 55 bp, Artificial; identical to SEQ ID NO: 309511
  Synthetic oligonucleotide

SEQ ID NO: 539540 - DNA, 58 bp, Artificial; identical to SEQ ID NO: 309512
  Synthetic oligonucleotide

SEQ ID NO: 539541 - DNA, 50 bp, Artificial; identical to SEQ ID NO: 309513
  Synthetic oligonucleotide

SEQ ID NO: 539542 - DNA, 60 bp, Artificial; identical to SEQ ID NO: 309515
  Synthetic oligonucleotide

SEQ ID NO: 539543 - DNA, 60 bp, Artificial; identical to SEQ ID NO: 309519
  Synthetic oligonucleotide

SEQ ID NO: 539544 - DNA, 60 bp, Artificial; identical to SEQ ID NO: 309523
  Synthetic oligonucleotide

SEQ ID NO: 539545 - DNA, 52 bp, Artificial; identical to SEQ ID NO: 8755
  Synthetic oligonucleotide

SEQ ID NO: 539546 - DNA, 57 bp, Artificial; identical to SEQ ID NO: 309524
  Synthetic oligonucleotide

SEQ ID NO: 539547 - DNA, 55 bp, Artificial; identical to SEQ ID NO: 309531
  Synthetic oligonucleotide

SEQ ID NO: 539548 - DNA, 60 bp, Artificial; identical to SEQ ID NO: 8412
  Synthetic oligonucleotide

SEQ ID NO: 539549 - DNA, 53 bp, Artificial; identical to SEQ ID NO: 309536
  Synthetic oligonucleotide

SEQ ID NO: 539550 - DNA, 58 bp, Artificial; identical to SEQ ID NO: 309537
  Synthetic oligonucleotide

SEQ ID NO: 539551 - DNA, 56 bp, Artificial; identical to SEQ ID NO: 15097
  Synthetic oligonucleotide

SEQ ID NO: 539552 - DNA, 60 bp, Artificial; identical to SEQ ID NO: 309543
  Synthetic oligonucleotide

SEQ ID NO: 539553 - DNA, 52 bp, Artificial; identical to SEQ ID NO: 309544
  Synthetic oligonucleotide

SEQ ID NO: 539554 - DNA, 60 bp, Artificial; identical to SEQ ID NO: 309545
  Synthetic oligonucleotide

SEQ ID NO: 539555 - DNA, 60 bp, Artificial; identical to SEQ ID NO: 309550
  Synthetic oligonucleotide

SEQ ID NO: 539556 - DNA, 59 bp, Artificial; identical to SEQ ID NO: 309551
  Synthetic oligonucleotide

SEQ ID NO: 539557 - DNA, 56 bp, Artificial; identical to SEQ ID NO: 309552
  Synthetic oligonucleotide

SEQ ID NO: 539558 - DNA, 60 bp, Artificial; identical to SEQ ID NO: 15861
  Synthetic oligonucleotide

SEQ ID NO: 539559 - DNA, 55 bp, Artificial; identical to SEQ ID NO: 309555
  Synthetic oligonucleotide

SEQ ID NO: 539560 - DNA, 59 bp, Artificial; identical to SEQ ID NO: 309556
  Synthetic oligonucleotide

SEQ ID NO: 539561 - DNA, 55 bp, Artificial; identical to SEQ ID NO: 309561
  Synthetic oligonucleotide

SEQ ID NO: 539562 - DNA, 55 bp, Artificial; identical to SEQ ID NO: 309562
  Synthetic oligonucleotide

SEQ ID NO: 539563 - DNA, 51 bp, Artificial; identical to SEQ ID NO: 309566
  Synthetic oligonucleotide

SEQ ID NO: 539564 - DNA, 57 bp, Artificial; identical to SEQ ID NO: 309567
  Synthetic oligonucleotide

SEQ ID NO: 539565 - DNA, 55 bp, Artificial; identical to SEQ ID NO: 309569
  Synthetic oligonucleotide

SEQ ID NO: 539566 - DNA, 57 bp, Artificial; identical to SEQ ID NO: 309570
  Synthetic oligonucleotide

SEQ ID NO: 539567 - DNA, 60 bp, Artificial; identical to SEQ ID NO: 309576
  Synthetic oligonucleotide

SEQ ID NO: 539568 - DNA, 55 bp, Artificial; identical to SEQ ID NO: 309577
  Synthetic oligonucleotide

SEQ ID NO: 539569 - DNA, 59 bp, Artificial; identical to SEQ ID NO: 309578
  Synthetic oligonucleotide

SEQ ID NO: 539570 - DNA, 55 bp, Artificial; identical to SEQ ID NO: 309579
  Synthetic oligonucleotide

SEQ ID NO: 539571 - DNA, 60 bp, Artificial; identical to SEQ ID NO: 14874
  Synthetic oligonucleotide

SEQ ID NO: 539572 - DNA, 55 bp, Artificial; identical to SEQ ID NO: 309581
  Synthetic oligonucleotide

SEQ ID NO: 539573 - DNA, 56 bp, Artificial; identical to SEQ ID NO: 309582
  Synthetic oligonucleotide

SEQ ID NO: 539574 - DNA, 58 bp, Artificial; identical to SEQ ID NO: 309583
  Synthetic oligonucleotide

SEQ ID NO: 539575 - DNA, 55 bp, Artificial; identical to SEQ ID NO: 309584
  Synthetic oligonucleotide

SEQ ID NO: 539576 - DNA, 54 bp, Artificial; identical to SEQ ID NO: 309585
  Synthetic oligonucleotide

SEQ ID NO: 539577 - DNA, 55 bp, Artificial; identical to SEQ ID NO: 309588
  Synthetic oligonucleotide

SEQ ID NO: 539578 - DNA, 56 bp, Artificial; identical to SEQ ID NO: 309590
  Synthetic oligonucleotide

SEQ ID NO: 539579 - DNA, 60 bp, Artificial; identical to SEQ ID NO: 309592
  Synthetic oligonucleotide

SEQ ID NO: 539580 - DNA, 59 bp, Artificial; identical to SEQ ID NO: 309593
  Synthetic oligonucleotide

SEQ ID NO: 539581 - DNA, 55 bp, Artificial; identical to SEQ ID NO: 309595
  Synthetic oligonucleotide

SEQ ID NO: 539582 - DNA, 60 bp, Artificial; identical to SEQ ID NO: 309596
  Synthetic oligonucleotide

SEQ ID NO: 539583 - DNA, 60 bp, Artificial; identical to SEQ ID NO: 309597
  Synthetic oligonucleotide

SEQ ID NO: 539584 - DNA, 60 bp, Artificial; identical to SEQ ID NO: 309598
  Synthetic oligonucleotide

SEQ ID NO: 539585 - DNA, 60 bp, Artificial; identical to SEQ ID NO: 309599
  Synthetic oligonucleotide

SEQ ID NO: 539586 - DNA, 57 bp, Artificial; identical to SEQ ID NO: 309602
  Synthetic oligonucleotide

SEQ ID NO: 539587 - DNA, 60 bp, Artificial; identical to SEQ ID NO: 309603
  Synthetic oligonucleotide

SEQ ID NO: 539588 - DNA, 60 bp, Artificial; identical to SEQ ID NO: 309608
  Synthetic oligonucleotide

SEQ ID NO: 539589 - DNA, 59 bp, Artificial; identical to SEQ ID NO: 309609
  Synthetic oligonucleotide

SEQ ID NO: 539590 - DNA, 60 bp, Artificial; identical to SEQ ID NO: 309610
  Synthetic oligonucleotide

SEQ ID NO: 539591 - DNA, 50 bp, Artificial; identical to SEQ ID NO: 309611
  Synthetic oligonucleotide

SEQ ID NO: 539592 - DNA, 57 bp, Artificial; identical to SEQ ID NO: 309614
  Synthetic oligonucleotide

SEQ ID NO: 539593 - DNA, 50 bp, Artificial; identical to SEQ ID NO: 309615
  Synthetic oligonucleotide

SEQ ID NO: 539594 - DNA, 60 bp, Artificial; identical to SEQ ID NO: 309616
  Synthetic oligonucleotide

SEQ ID NO: 539595 - DNA, 59 bp, Artificial; identical to SEQ ID NO: 309618
  Synthetic oligonucleotide

SEQ ID NO: 539596 - DNA, 60 bp, Artificial; identical to SEQ ID NO: 309623
  Synthetic oligonucleotide

SEQ ID NO: 539597 - DNA, 60 bp, Artificial; identical to SEQ ID NO: 309625
  Synthetic oligonucleotide

SEQ ID NO: 539598 - DNA, 60 bp, Artificial; identical to SEQ ID NO: 309626
  Synthetic oligonucleotide

SEQ ID NO: 539599 - DNA, 57 bp, Artificial; identical to SEQ ID NO: 309628
  Synthetic oligonucleotide

SEQ ID NO: 539600 - DNA, 60 bp, Artificial; identical to SEQ ID NO: 309629
  Synthetic oligonucleotide

SEQ ID NO: 539601 - DNA, 59 bp, Artificial; identical to SEQ ID NO: 309632
  Synthetic oligonucleotide

SEQ ID NO: 539602 - DNA, 59 bp, Artificial; identical to SEQ ID NO: 309640
  Synthetic oligonucleotide

SEQ ID NO: 539603 - DNA, 54 bp, Artificial; identical to SEQ ID NO: 309643
  Synthetic oligonucleotide

SEQ ID NO: 539604 - DNA, 59 bp, Artificial; identical to SEQ ID NO: 309644
  Synthetic oligonucleotide

SEQ ID NO: 539605 - DNA, 55 bp, Artificial; identical to SEQ ID NO: 309647
  Synthetic oligonucleotide

SEQ ID NO: 539606 - DNA, 55 bp, Artificial; identical to SEQ ID NO: 309648
  Synthetic oligonucleotide

SEQ ID NO: 539607 - DNA, 54 bp, Artificial; identical to SEQ ID NO: 309650
  Synthetic oligonucleotide

SEQ ID NO: 539608 - DNA, 60 bp, Artificial; identical to SEQ ID NO: 309651
  Synthetic oligonucleotide

SEQ ID NO: 539609 - DNA, 55 bp, Artificial; identical to SEQ ID NO: 309655
  Synthetic oligonucleotide

SEQ ID NO: 539610 - DNA, 50 bp, Artificial; identical to SEQ ID NO: 309656
  Synthetic oligonucleotide

SEQ ID NO: 539611 - DNA, 60 bp, Artificial; identical to SEQ ID NO: 309663
  Synthetic oligonucleotide

SEQ ID NO: 539612 - DNA, 60 bp, Artificial; identical to SEQ ID NO: 309664
  Synthetic oligonucleotide

SEQ ID NO: 539613 - DNA, 55 bp, Artificial; identical to SEQ ID NO: 309666
  Synthetic oligonucleotide

SEQ ID NO: 539614 - DNA, 59 bp, Artificial; identical to SEQ ID NO: 309668
  Synthetic oligonucleotide

SEQ ID NO: 539615 - DNA, 55 bp, Artificial; identical to SEQ ID NO: 309669
  Synthetic oligonucleotide

SEQ ID NO: 539616 - DNA, 60 bp, Artificial; identical to SEQ ID NO: 309670
  Synthetic oligonucleotide

SEQ ID NO: 539617 - DNA, 60 bp, Artificial; identical to SEQ ID NO: 309671
  Synthetic oligonucleotide

SEQ ID NO: 539618 - DNA, 51 bp, Artificial; identical to SEQ ID NO: 309672
  Synthetic oligonucleotide

SEQ ID NO: 539619 - DNA, 60 bp, Artificial; identical to SEQ ID NO: 309674
  Synthetic oligonucleotide

SEQ ID NO: 539620 - DNA, 60 bp, Artificial; identical to SEQ ID NO: 309678
  Synthetic oligonucleotide

SEQ ID NO: 539621 - DNA, 60 bp, Artificial; identical to SEQ ID NO: 309680
  Synthetic oligonucleotide

SEQ ID NO: 539622 - DNA, 56 bp, Artificial; identical to SEQ ID NO: 18456
  Synthetic oligonucleotide

SEQ ID NO: 539623 - DNA, 60 bp, Artificial; identical to SEQ ID NO: 309682
  Synthetic oligonucleotide

SEQ ID NO: 539624 - DNA, 51 bp, Artificial; identical to SEQ ID NO: 309683
  Synthetic oligonucleotide

SEQ ID NO: 539625 - DNA, 60 bp, Artificial; identical to SEQ ID NO: 309685
  Synthetic oligonucleotide

SEQ ID NO: 539626 - DNA, 55 bp, Artificial; identical to SEQ ID NO: 309686
  Synthetic oligonucleotide

SEQ ID NO: 539627 - DNA, 60 bp, Artificial; identical to SEQ ID NO: 309688
  Synthetic oligonucleotide

SEQ ID NO: 539628 - DNA, 58 bp, Artificial; identical to SEQ ID NO: 309689
  Synthetic oligonucleotide

SEQ ID NO: 539629 - DNA, 58 bp, Artificial; identical to SEQ ID NO: 309692
  Synthetic oligonucleotide

SEQ ID NO: 539630 - DNA, 56 bp, Artificial; identical to SEQ ID NO: 309694
  Synthetic oligonucleotide

SEQ ID NO: 539631 - DNA, 60 bp, Artificial; identical to SEQ ID NO: 309700
  Synthetic oligonucleotide

SEQ ID NO: 539632 - DNA, 54 bp, Artificial; identical to SEQ ID NO: 309701
  Synthetic oligonucleotide

SEQ ID NO: 539633 - DNA, 60 bp, Artificial; identical to SEQ ID NO: 309703
  Synthetic oligonucleotide

SEQ ID NO: 539634 - DNA, 54 bp, Artificial; identical to SEQ ID NO: 309704
  Synthetic oligonucleotide

SEQ ID NO: 539635 - DNA, 60 bp, Artificial; identical to SEQ ID NO: 309705
  Synthetic oligonucleotide

SEQ ID NO: 539636 - DNA, 55 bp, Artificial; identical to SEQ ID NO: 309706
  Synthetic oligonucleotide

SEQ ID NO: 539637 - DNA, 60 bp, Artificial; identical to SEQ ID NO: 309707
  Synthetic oligonucleotide

SEQ ID NO: 539638 - DNA, 52 bp, Artificial; identical to SEQ ID NO: 309709
  Synthetic oligonucleotide

SEQ ID NO: 539639 - DNA, 57 bp, Artificial; identical to SEQ ID NO: 309711
  Synthetic oligonucleotide

SEQ ID NO: 539640 - DNA, 56 bp, Artificial; identical to SEQ ID NO: 309713
  Synthetic oligonucleotide

SEQ ID NO: 539641 - DNA, 55 bp, Artificial; identical to SEQ ID NO: 309716
  Synthetic oligonucleotide

SEQ ID NO: 539642 - DNA, 58 bp, Artificial; identical to SEQ ID NO: 309717
  Synthetic oligonucleotide

SEQ ID NO: 539643 - DNA, 55 bp, Artificial; identical to SEQ ID NO: 309721
  Synthetic oligonucleotide

SEQ ID NO: 539644 - DNA, 60 bp, Artificial; identical to SEQ ID NO: 309724
  Synthetic oligonucleotide

SEQ ID NO: 539645 - DNA, 55 bp, Artificial; identical to SEQ ID NO: 309725
  Synthetic oligonucleotide

SEQ ID NO: 539646 - DNA, 57 bp, Artificial; identical to SEQ ID NO: 309728
  Synthetic oligonucleotide

SEQ ID NO: 539647 - DNA, 60 bp, Artificial; identical to SEQ ID NO: 309729
  Synthetic oligonucleotide

SEQ ID NO: 539648 - DNA, 59 bp, Artificial; identical to SEQ ID NO: 309731
  Synthetic oligonucleotide

SEQ ID NO: 539649 - DNA, 55 bp, Artificial; identical to SEQ ID NO: 309734
  Synthetic oligonucleotide

SEQ ID NO: 539650 - DNA, 56 bp, Artificial; identical to SEQ ID NO: 309736
  Synthetic oligonucleotide

SEQ ID NO: 539651 - DNA, 58 bp, Artificial; identical to SEQ ID NO: 16798
  Synthetic oligonucleotide

SEQ ID NO: 539652 - DNA, 55 bp, Artificial; identical to SEQ ID NO: 309738
  Synthetic oligonucleotide

SEQ ID NO: 539653 - DNA, 59 bp, Artificial; identical to SEQ ID NO: 309741
  Synthetic oligonucleotide

SEQ ID NO: 539654 - DNA, 56 bp, Artificial; identical to SEQ ID NO: 309742
  Synthetic oligonucleotide

SEQ ID NO: 539655 - DNA, 55 bp, Artificial; identical to SEQ ID NO: 309747
  Synthetic oligonucleotide

SEQ ID NO: 539656 - DNA, 55 bp, Artificial; identical to SEQ ID NO: 309751
  Synthetic oligonucleotide

SEQ ID NO: 539657 - DNA, 60 bp, Artificial; identical to SEQ ID NO: 309755
  Synthetic oligonucleotide

SEQ ID NO: 539658 - DNA, 54 bp, Artificial; identical to SEQ ID NO: 309756
  Synthetic oligonucleotide

SEQ ID NO: 539659 - DNA, 60 bp, Artificial; identical to SEQ ID NO: 309761
  Synthetic oligonucleotide

SEQ ID NO: 539660 - DNA, 54 bp, Artificial; identical to SEQ ID NO: 309763
  Synthetic oligonucleotide

SEQ ID NO: 539661 - DNA, 60 bp, Artificial; identical to SEQ ID NO: 309764
  Synthetic oligonucleotide

SEQ ID NO: 539662 - DNA, 60 bp, Artificial; identical to SEQ ID NO: 309766
  Synthetic oligonucleotide

SEQ ID NO: 539663 - DNA, 60 bp, Artificial; identical to SEQ ID NO: 309768
  Synthetic oligonucleotide

SEQ ID NO: 539664 - DNA, 60 bp, Artificial; identical to SEQ ID NO: 309769
  Synthetic oligonucleotide

SEQ ID NO: 539665 - DNA, 55 bp, Artificial; identical to SEQ ID NO: 309770
  Synthetic oligonucleotide

SEQ ID NO: 539666 - DNA, 56 bp, Artificial; identical to SEQ ID NO: 309773
  Synthetic oligonucleotide

SEQ ID NO: 539667 - DNA, 54 bp, Artificial; identical to SEQ ID NO: 309774
  Synthetic oligonucleotide

SEQ ID NO: 539668 - DNA, 50 bp, Artificial; identical to SEQ ID NO: 309777
  Synthetic oligonucleotide

SEQ ID NO: 539669 - DNA, 60 bp, Artificial; identical to SEQ ID NO: 309780
  Synthetic oligonucleotide

SEQ ID NO: 539670 - DNA, 54 bp, Artificial; identical to SEQ ID NO: 309781
  Synthetic oligonucleotide

SEQ ID NO: 539671 - DNA, 58 bp, Artificial; identical to SEQ ID NO: 309785
  Synthetic oligonucleotide

SEQ ID NO: 539672 - DNA, 56 bp, Artificial; identical to SEQ ID NO: 309786
  Synthetic oligonucleotide

SEQ ID NO: 539673 - DNA, 60 bp, Artificial; identical to SEQ ID NO: 309789
  Synthetic oligonucleotide

SEQ ID NO: 539674 - DNA, 58 bp, Artificial; identical to SEQ ID NO: 309792
  Synthetic oligonucleotide

SEQ ID NO: 539675 - DNA, 58 bp, Artificial; identical to SEQ ID NO: 309794
  Synthetic oligonucleotide

SEQ ID NO: 539676 - DNA, 55 bp, Artificial; identical to SEQ ID NO: 309795
  Synthetic oligonucleotide

SEQ ID NO: 539677 - DNA, 55 bp, Artificial; identical to SEQ ID NO: 309796
  Synthetic oligonucleotide

SEQ ID NO: 539678 - DNA, 55 bp, Artificial; identical to SEQ ID NO: 309797
  Synthetic oligonucleotide

SEQ ID NO: 539679 - DNA, 59 bp, Artificial; identical to SEQ ID NO: 309798
  Synthetic oligonucleotide

SEQ ID NO: 539680 - DNA, 60 bp, Artificial; identical to SEQ ID NO: 309799
  Synthetic oligonucleotide

SEQ ID NO: 539681 - DNA, 60 bp, Artificial; identical to SEQ ID NO: 309804
  Synthetic oligonucleotide

SEQ ID NO: 539682 - DNA, 54 bp, Artificial; identical to SEQ ID NO: 309808
  Synthetic oligonucleotide

SEQ ID NO: 539683 - DNA, 54 bp, Artificial; identical to SEQ ID NO: 309809
  Synthetic oligonucleotide

SEQ ID NO: 539684 - DNA, 60 bp, Artificial; identical to SEQ ID NO: 309810
  Synthetic oligonucleotide

SEQ ID NO: 539685 - DNA, 60 bp, Artificial; identical to SEQ ID NO: 309811
  Synthetic oligonucleotide

SEQ ID NO: 539686 - DNA, 55 bp, Artificial; identical to SEQ ID NO: 309812
  Synthetic oligonucleotide

SEQ ID NO: 539687 - DNA, 60 bp, Artificial; identical to SEQ ID NO: 309814
  Synthetic oligonucleotide

SEQ ID NO: 539688 - DNA, 60 bp, Artificial; identical to SEQ ID NO: 309817
  Synthetic oligonucleotide

SEQ ID NO: 539689 - DNA, 60 bp, Artificial; identical to SEQ ID NO: 309819
  Synthetic oligonucleotide

SEQ ID NO: 539690 - DNA, 60 bp, Artificial; identical to SEQ ID NO: 309820
  Synthetic oligonucleotide

SEQ ID NO: 539691 - DNA, 55 bp, Artificial; identical to SEQ ID NO: 309822
  Synthetic oligonucleotide

SEQ ID NO: 539692 - DNA, 58 bp, Artificial; identical to SEQ ID NO: 17943
  Synthetic oligonucleotide

SEQ ID NO: 539693 - DNA, 51 bp, Artificial; identical to SEQ ID NO: 309825
  Synthetic oligonucleotide

SEQ ID NO: 539694 - DNA, 58 bp, Artificial; identical to SEQ ID NO: 309830
  Synthetic oligonucleotide

SEQ ID NO: 539695 - DNA, 60 bp, Artificial; identical to SEQ ID NO: 309831
  Synthetic oligonucleotide

SEQ ID NO: 539696 - DNA, 60 bp, Artificial; identical to SEQ ID NO: 309832
  Synthetic oligonucleotide

SEQ ID NO: 539697 - DNA, 60 bp, Artificial; identical to SEQ ID NO: 309836
  Synthetic oligonucleotide

SEQ ID NO: 539698 - DNA, 60 bp, Artificial; identical to SEQ ID NO: 309838
  Synthetic oligonucleotide

SEQ ID NO: 539699 - DNA, 60 bp, Artificial; identical to SEQ ID NO: 309839
  Synthetic oligonucleotide

SEQ ID NO: 539700 - DNA, 55 bp, Artificial; identical to SEQ ID NO: 309841
  Synthetic oligonucleotide

SEQ ID NO: 539701 - DNA, 60 bp, Artificial; identical to SEQ ID NO: 309842
  Synthetic oligonucleotide

SEQ ID NO: 539702 - DNA, 57 bp, Artificial; identical to SEQ ID NO: 309843
  Synthetic oligonucleotide

SEQ ID NO: 539703 - DNA, 55 bp, Artificial; identical to SEQ ID NO: 309844
  Synthetic oligonucleotide

SEQ ID NO: 539704 - DNA, 59 bp, Artificial; identical to SEQ ID NO: 309845
  Synthetic oligonucleotide

SEQ ID NO: 539705 - DNA, 59 bp, Artificial; identical to SEQ ID NO: 309846
  Synthetic oligonucleotide

SEQ ID NO: 539706 - DNA, 60 bp, Artificial; identical to SEQ ID NO: 309849
  Synthetic oligonucleotide

SEQ ID NO: 539707 - DNA, 55 bp, Artificial; identical to SEQ ID NO: 309851
  Synthetic oligonucleotide

SEQ ID NO: 539708 - DNA, 50 bp, Artificial; identical to SEQ ID NO: 309852
  Synthetic oligonucleotide

SEQ ID NO: 539709 - DNA, 53 bp, Artificial; identical to SEQ ID NO: 309853
  Synthetic oligonucleotide

SEQ ID NO: 539710 - DNA, 60 bp, Artificial; identical to SEQ ID NO: 309856
  Synthetic oligonucleotide

SEQ ID NO: 539711 - DNA, 55 bp, Artificial; identical to SEQ ID NO: 309860
  Synthetic oligonucleotide

SEQ ID NO: 539712 - DNA, 55 bp, Artificial; identical to SEQ ID NO: 309863
  Synthetic oligonucleotide

SEQ ID NO: 539713 - DNA, 60 bp, Artificial; identical to SEQ ID NO: 14624
  Synthetic oligonucleotide

SEQ ID NO: 539714 - DNA, 60 bp, Artificial; identical to SEQ ID NO: 15383
  Synthetic oligonucleotide

SEQ ID NO: 539715 - DNA, 55 bp, Artificial; identical to SEQ ID NO: 309869
  Synthetic oligonucleotide

SEQ ID NO: 539716 - DNA, 58 bp, Artificial; identical to SEQ ID NO: 309871
  Synthetic oligonucleotide

SEQ ID NO: 539717 - DNA, 58 bp, Artificial; identical to SEQ ID NO: 309874
  Synthetic oligonucleotide

SEQ ID NO: 539718 - DNA, 55 bp, Artificial; identical to SEQ ID NO: 309877
  Synthetic oligonucleotide

SEQ ID NO: 539719 - DNA, 59 bp, Artificial; identical to SEQ ID NO: 309879
  Synthetic oligonucleotide

SEQ ID NO: 539720 - DNA, 52 bp, Artificial; identical to SEQ ID NO: 309883
  Synthetic oligonucleotide

SEQ ID NO: 539721 - DNA, 54 bp, Artificial; identical to SEQ ID NO: 309884
  Synthetic oligonucleotide

SEQ ID NO: 539722 - DNA, 54 bp, Artificial; identical to SEQ ID NO: 309885
  Synthetic oligonucleotide

SEQ ID NO: 539723 - DNA, 55 bp, Artificial; identical to SEQ ID NO: 309887
  Synthetic oligonucleotide

SEQ ID NO: 539724 - DNA, 60 bp, Artificial; identical to SEQ ID NO: 309891
  Synthetic oligonucleotide

SEQ ID NO: 539725 - DNA, 52 bp, Artificial; identical to SEQ ID NO: 309893
  Synthetic oligonucleotide

SEQ ID NO: 539726 - DNA, 60 bp, Artificial; identical to SEQ ID NO: 309894
  Synthetic oligonucleotide

SEQ ID NO: 539727 - DNA, 60 bp, Artificial; identical to SEQ ID NO: 309895
  Synthetic oligonucleotide

SEQ ID NO: 539728 - DNA, 60 bp, Artificial; identical to SEQ ID NO: 309897
  Synthetic oligonucleotide

SEQ ID NO: 539729 - DNA, 60 bp, Artificial; identical to SEQ ID NO: 309903
  Synthetic oligonucleotide

SEQ ID NO: 539730 - DNA, 55 bp, Artificial; identical to SEQ ID NO: 18884
  Synthetic oligonucleotide

SEQ ID NO: 539731 - DNA, 56 bp, Artificial; identical to SEQ ID NO: 309905
  Synthetic oligonucleotide

SEQ ID NO: 539732 - DNA, 58 bp, Artificial; identical to SEQ ID NO: 309906
  Synthetic oligonucleotide

SEQ ID NO: 539733 - DNA, 58 bp, Artificial; identical to SEQ ID NO: 309907
  Synthetic oligonucleotide

SEQ ID NO: 539734 - DNA, 60 bp, Artificial; identical to SEQ ID NO: 309908
  Synthetic oligonucleotide

SEQ ID NO: 539735 - DNA, 59 bp, Artificial; identical to SEQ ID NO: 309909
  Synthetic oligonucleotide

SEQ ID NO: 539736 - DNA, 53 bp, Artificial; identical to SEQ ID NO: 309912
  Synthetic oligonucleotide

SEQ ID NO: 539737 - DNA, 56 bp, Artificial; identical to SEQ ID NO: 309914
  Synthetic oligonucleotide

SEQ ID NO: 539738 - DNA, 54 bp, Artificial; identical to SEQ ID NO: 309916
  Synthetic oligonucleotide

SEQ ID NO: 539739 - DNA, 55 bp, Artificial; identical to SEQ ID NO: 309919
  Synthetic oligonucleotide

SEQ ID NO: 539740 - DNA, 58 bp, Artificial; identical to SEQ ID NO: 309920
  Synthetic oligonucleotide

SEQ ID NO: 539741 - DNA, 60 bp, Artificial; identical to SEQ ID NO: 309921
  Synthetic oligonucleotide

SEQ ID NO: 539742 - DNA, 60 bp, Artificial; identical to SEQ ID NO: 309923
  Synthetic oligonucleotide

SEQ ID NO: 539743 - DNA, 55 bp, Artificial; identical to SEQ ID NO: 309925
  Synthetic oligonucleotide

SEQ ID NO: 539744 - DNA, 58 bp, Artificial; identical to SEQ ID NO: 309928
  Synthetic oligonucleotide

SEQ ID NO: 539745 - DNA, 59 bp, Artificial; identical to SEQ ID NO: 309929
  Synthetic oligonucleotide

SEQ ID NO: 539746 - DNA, 60 bp, Artificial; identical to SEQ ID NO: 309930
  Synthetic oligonucleotide

SEQ ID NO: 539747 - DNA, 60 bp, Artificial; identical to SEQ ID NO: 309931
  Synthetic oligonucleotide

SEQ ID NO: 539748 - DNA, 60 bp, Artificial; identical to SEQ ID NO: 309932
  Synthetic oligonucleotide

SEQ ID NO: 539749 - DNA, 56 bp, Artificial; identical to SEQ ID NO: 309934
  Synthetic oligonucleotide

SEQ ID NO: 539750 - DNA, 53 bp, Artificial; identical to SEQ ID NO: 309936
  Synthetic oligonucleotide

SEQ ID NO: 539751 - DNA, 55 bp, Artificial; identical to SEQ ID NO: 309940
  Synthetic oligonucleotide

SEQ ID NO: 539752 - DNA, 60 bp, Artificial; identical to SEQ ID NO: 309944
  Synthetic oligonucleotide

SEQ ID NO: 539753 - DNA, 60 bp, Artificial; identical to SEQ ID NO: 309946
  Synthetic oligonucleotide

SEQ ID NO: 539754 - DNA, 55 bp, Artificial; identical to SEQ ID NO: 309948
  Synthetic oligonucleotide

SEQ ID NO: 539755 - DNA, 60 bp, Artificial; identical to SEQ ID NO: 309950
  Synthetic oligonucleotide

SEQ ID NO: 539756 - DNA, 60 bp, Artificial; identical to SEQ ID NO: 309951
  Synthetic oligonucleotide

SEQ ID NO: 539757 - DNA, 51 bp, Artificial; identical to SEQ ID NO: 309956
  Synthetic oligonucleotide

SEQ ID NO: 539758 - DNA, 54 bp, Artificial; identical to SEQ ID NO: 309958
  Synthetic oligonucleotide

SEQ ID NO: 539759 - DNA, 60 bp, Artificial; identical to SEQ ID NO: 309960
  Synthetic oligonucleotide

SEQ ID NO: 539760 - DNA, 56 bp, Artificial; identical to SEQ ID NO: 309963
  Synthetic oligonucleotide

SEQ ID NO: 539761 - DNA, 60 bp, Artificial; identical to SEQ ID NO: 309964
  Synthetic oligonucleotide

SEQ ID NO: 539762 - DNA, 57 bp, Artificial; identical to SEQ ID NO: 309965
  Synthetic oligonucleotide

SEQ ID NO: 539763 - DNA, 56 bp, Artificial; identical to SEQ ID NO: 309966
  Synthetic oligonucleotide

SEQ ID NO: 539764 - DNA, 60 bp, Artificial; identical to SEQ ID NO: 309969
  Synthetic oligonucleotide

SEQ ID NO: 539765 - DNA, 60 bp, Artificial; identical to SEQ ID NO: 309970
  Synthetic oligonucleotide

SEQ ID NO: 539766 - DNA, 60 bp, Artificial; identical to SEQ ID NO: 10852
  Synthetic oligonucleotide

SEQ ID NO: 539767 - DNA, 58 bp, Artificial; identical to SEQ ID NO: 309971
  Synthetic oligonucleotide

SEQ ID NO: 539768 - DNA, 55 bp, Artificial; identical to SEQ ID NO: 309972
  Synthetic oligonucleotide

SEQ ID NO: 539769 - DNA, 50 bp, Artificial; identical to SEQ ID NO: 309973
  Synthetic oligonucleotide

SEQ ID NO: 539770 - DNA, 53 bp, Artificial; identical to SEQ ID NO: 309974
  Synthetic oligonucleotide

SEQ ID NO: 539771 - DNA, 50 bp, Artificial; identical to SEQ ID NO: 309976
  Synthetic oligonucleotide

SEQ ID NO: 539772 - DNA, 55 bp, Artificial; identical to SEQ ID NO: 309979
  Synthetic oligonucleotide

SEQ ID NO: 539773 - DNA, 57 bp, Artificial; identical to SEQ ID NO: 309980
  Synthetic oligonucleotide

SEQ ID NO: 539774 - DNA, 50 bp, Artificial; identical to SEQ ID NO: 309982
  Synthetic oligonucleotide

SEQ ID NO: 539775 - DNA, 50 bp, Artificial; identical to SEQ ID NO: 309988
  Synthetic oligonucleotide

SEQ ID NO: 539776 - DNA, 55 bp, Artificial; identical to SEQ ID NO: 309991
  Synthetic oligonucleotide

SEQ ID NO: 539777 - DNA, 59 bp, Artificial; identical to SEQ ID NO: 309992
  Synthetic oligonucleotide

SEQ ID NO: 539778 - DNA, 60 bp, Artificial; identical to SEQ ID NO: 309993
  Synthetic oligonucleotide

SEQ ID NO: 539779 - DNA, 55 bp, Artificial; identical to SEQ ID NO: 309996
  Synthetic oligonucleotide

SEQ ID NO: 539780 - DNA, 55 bp, Artificial; identical to SEQ ID NO: 309997
  Synthetic oligonucleotide

SEQ ID NO: 539781 - DNA, 60 bp, Artificial; identical to SEQ ID NO: 309999
  Synthetic oligonucleotide

SEQ ID NO: 539782 - DNA, 60 bp, Artificial; identical to SEQ ID NO: 310001
  Synthetic oligonucleotide

SEQ ID NO: 539783 - DNA, 60 bp, Artificial; identical to SEQ ID NO: 310002
  Synthetic oligonucleotide

SEQ ID NO: 539784 - DNA, 55 bp, Artificial; identical to SEQ ID NO: 310005
  Synthetic oligonucleotide

SEQ ID NO: 539785 - DNA, 55 bp, Artificial; identical to SEQ ID NO: 310007
  Synthetic oligonucleotide

SEQ ID NO: 539786 - DNA, 60 bp, Artificial; identical to SEQ ID NO: 310011
  Synthetic oligonucleotide

SEQ ID NO: 539787 - DNA, 55 bp, Artificial; identical to SEQ ID NO: 310014
  Synthetic oligonucleotide

SEQ ID NO: 539788 - DNA, 54 bp, Artificial; identical to SEQ ID NO: 310016
  Synthetic oligonucleotide

SEQ ID NO: 539789 - DNA, 59 bp, Artificial; identical to SEQ ID NO: 310017
  Synthetic oligonucleotide

SEQ ID NO: 539790 - DNA, 60 bp, Artificial; identical to SEQ ID NO: 310020
  Synthetic oligonucleotide

SEQ ID NO: 539791 - DNA, 60 bp, Artificial; identical to SEQ ID NO: 310022
  Synthetic oligonucleotide

SEQ ID NO: 539792 - DNA, 57 bp, Artificial; identical to SEQ ID NO: 17100
  Synthetic oligonucleotide

SEQ ID NO: 539793 - DNA, 58 bp, Artificial; identical to SEQ ID NO: 310024
  Synthetic oligonucleotide

SEQ ID NO: 539794 - DNA, 60 bp, Artificial; identical to SEQ ID NO: 310029
  Synthetic oligonucleotide

SEQ ID NO: 539795 - DNA, 60 bp, Artificial; identical to SEQ ID NO: 310030
  Synthetic oligonucleotide

SEQ ID NO: 539796 - DNA, 58 bp, Artificial; identical to SEQ ID NO: 310039
  Synthetic oligonucleotide

SEQ ID NO: 539797 - DNA, 55 bp, Artificial; identical to SEQ ID NO: 310041
  Synthetic oligonucleotide

SEQ ID NO: 539798 - DNA, 59 bp, Artificial; identical to SEQ ID NO: 310043
  Synthetic oligonucleotide

SEQ ID NO: 539799 - DNA, 59 bp, Artificial; identical to SEQ ID NO: 310048
  Synthetic oligonucleotide

SEQ ID NO: 539800 - DNA, 58 bp, Artificial; identical to SEQ ID NO: 310050
  Synthetic oligonucleotide

SEQ ID NO: 539801 - DNA, 60 bp, Artificial; identical to SEQ ID NO: 310054
  Synthetic oligonucleotide

SEQ ID NO: 539802 - DNA, 60 bp, Artificial; identical to SEQ ID NO: 310056
  Synthetic oligonucleotide

SEQ ID NO: 539803 - DNA, 55 bp, Artificial; identical to SEQ ID NO: 310058
  Synthetic oligonucleotide

SEQ ID NO: 539804 - DNA, 55 bp, Artificial; identical to SEQ ID NO: 310060
  Synthetic oligonucleotide

SEQ ID NO: 539805 - DNA, 50 bp, Artificial; identical to SEQ ID NO: 310065
  Synthetic oligonucleotide

SEQ ID NO: 539806 - DNA, 59 bp, Artificial; identical to SEQ ID NO: 310069
  Synthetic oligonucleotide

SEQ ID NO: 539807 - DNA, 58 bp, Artificial; identical to SEQ ID NO: 310073
  Synthetic oligonucleotide

SEQ ID NO: 539808 - DNA, 52 bp, Artificial; identical to SEQ ID NO: 310075
  Synthetic oligonucleotide

SEQ ID NO: 539809 - DNA, 54 bp, Artificial; identical to SEQ ID NO: 310082
  Synthetic oligonucleotide

SEQ ID NO: 539810 - DNA, 55 bp, Artificial; identical to SEQ ID NO: 310083
  Synthetic oligonucleotide

SEQ ID NO: 539811 - DNA, 60 bp, Artificial; identical to SEQ ID NO: 310084
  Synthetic oligonucleotide

SEQ ID NO: 539812 - DNA, 55 bp, Artificial; identical to SEQ ID NO: 20453
  Synthetic oligonucleotide

SEQ ID NO: 539813 - DNA, 53 bp, Artificial; identical to SEQ ID NO: 310085
  Synthetic oligonucleotide

SEQ ID NO: 539814 - DNA, 54 bp, Artificial; identical to SEQ ID NO: 310086
  Synthetic oligonucleotide

SEQ ID NO: 539815 - DNA, 60 bp, Artificial; identical to SEQ ID NO: 310089
  Synthetic oligonucleotide

SEQ ID NO: 539816 - DNA, 57 bp, Artificial; identical to SEQ ID NO: 310090
  Synthetic oligonucleotide

SEQ ID NO: 539817 - DNA, 59 bp, Artificial; identical to SEQ ID NO: 310092
  Synthetic oligonucleotide

SEQ ID NO: 539818 - DNA, 55 bp, Artificial; identical to SEQ ID NO: 310093
  Synthetic oligonucleotide

SEQ ID NO: 539819 - DNA, 52 bp, Artificial; identical to SEQ ID NO: 310094
  Synthetic oligonucleotide

SEQ ID NO: 539820 - DNA, 60 bp, Artificial; identical to SEQ ID NO: 310096
  Synthetic oligonucleotide

SEQ ID NO: 539821 - DNA, 60 bp, Artificial; identical to SEQ ID NO: 15288
  Synthetic oligonucleotide

SEQ ID NO: 539822 - DNA, 57 bp, Artificial; identical to SEQ ID NO: 310097
  Synthetic oligonucleotide

SEQ ID NO: 539823 - DNA, 60 bp, Artificial; identical to SEQ ID NO: 310098
  Synthetic oligonucleotide

SEQ ID NO: 539824 - DNA, 57 bp, Artificial; identical to SEQ ID NO: 310100
  Synthetic oligonucleotide

SEQ ID NO: 539825 - DNA, 60 bp, Artificial; identical to SEQ ID NO: 310102
  Synthetic oligonucleotide

SEQ ID NO: 539826 - DNA, 56 bp, Artificial; identical to SEQ ID NO: 310104
  Synthetic oligonucleotide

SEQ ID NO: 539827 - DNA, 52 bp, Artificial; identical to SEQ ID NO: 310105
  Synthetic oligonucleotide

SEQ ID NO: 539828 - DNA, 60 bp, Artificial; identical to SEQ ID NO: 310106
  Synthetic oligonucleotide

SEQ ID NO: 539829 - DNA, 51 bp, Artificial; identical to SEQ ID NO: 310109
  Synthetic oligonucleotide

SEQ ID NO: 539830 - DNA, 56 bp, Artificial; identical to SEQ ID NO: 310111
  Synthetic oligonucleotide

SEQ ID NO: 539831 - DNA, 56 bp, Artificial; identical to SEQ ID NO: 310115
  Synthetic oligonucleotide

SEQ ID NO: 539832 - DNA, 58 bp, Artificial; identical to SEQ ID NO: 310116
  Synthetic oligonucleotide

SEQ ID NO: 539833 - DNA, 58 bp, Artificial; identical to SEQ ID NO: 310118
  Synthetic oligonucleotide

SEQ ID NO: 539834 - DNA, 59 bp, Artificial; identical to SEQ ID NO: 310126
  Synthetic oligonucleotide

SEQ ID NO: 539835 - DNA, 53 bp, Artificial; identical to SEQ ID NO: 310127
  Synthetic oligonucleotide

SEQ ID NO: 539836 - DNA, 53 bp, Artificial; identical to SEQ ID NO: 310129
  Synthetic oligonucleotide

SEQ ID NO: 539837 - DNA, 54 bp, Artificial; identical to SEQ ID NO: 310130
  Synthetic oligonucleotide

SEQ ID NO: 539838 - DNA, 56 bp, Artificial; identical to SEQ ID NO: 310131
  Synthetic oligonucleotide

SEQ ID NO: 539839 - DNA, 56 bp, Artificial; identical to SEQ ID NO: 310135
  Synthetic oligonucleotide

SEQ ID NO: 539840 - DNA, 58 bp, Artificial; identical to SEQ ID NO: 310136
  Synthetic oligonucleotide

SEQ ID NO: 539841 - DNA, 51 bp, Artificial; identical to SEQ ID NO: 310137
  Synthetic oligonucleotide

SEQ ID NO: 539842 - DNA, 56 bp, Artificial; identical to SEQ ID NO: 310138
  Synthetic oligonucleotide

SEQ ID NO: 539843 - DNA, 53 bp, Artificial; identical to SEQ ID NO: 310139
  Synthetic oligonucleotide

SEQ ID NO: 539844 - DNA, 58 bp, Artificial; identical to SEQ ID NO: 310142
  Synthetic oligonucleotide

SEQ ID NO: 539845 - DNA, 51 bp, Artificial; identical to SEQ ID NO: 310144
  Synthetic oligonucleotide

SEQ ID NO: 539846 - DNA, 60 bp, Artificial; identical to SEQ ID NO: 310145
  Synthetic oligonucleotide

SEQ ID NO: 539847 - DNA, 55 bp, Artificial; identical to SEQ ID NO: 310146
  Synthetic oligonucleotide

SEQ ID NO: 539848 - DNA, 59 bp, Artificial; identical to SEQ ID NO: 310147
  Synthetic oligonucleotide

SEQ ID NO: 539849 - DNA, 59 bp, Artificial; identical to SEQ ID NO: 310149
  Synthetic oligonucleotide

SEQ ID NO: 539850 - DNA, 60 bp, Artificial; identical to SEQ ID NO: 310152
  Synthetic oligonucleotide

SEQ ID NO: 539851 - DNA, 53 bp, Artificial; identical to SEQ ID NO: 310154
  Synthetic oligonucleotide

SEQ ID NO: 539852 - DNA, 60 bp, Artificial; identical to SEQ ID NO: 105664
  Synthetic oligonucleotide

SEQ ID NO: 539853 - DNA, 60 bp, Artificial; identical to SEQ ID NO: 310157
  Synthetic oligonucleotide

SEQ ID NO: 539854 - DNA, 60 bp, Artificial; identical to SEQ ID NO: 6915
  Synthetic oligonucleotide

SEQ ID NO: 539855 - DNA, 55 bp, Artificial; identical to SEQ ID NO: 310162
  Synthetic oligonucleotide

SEQ ID NO: 539856 - DNA, 60 bp, Artificial; identical to SEQ ID NO: 310164
  Synthetic oligonucleotide

SEQ ID NO: 539857 - DNA, 58 bp, Artificial; identical to SEQ ID NO: 310165
  Synthetic oligonucleotide

SEQ ID NO: 539858 - DNA, 60 bp, Artificial; identical to SEQ ID NO: 310166
  Synthetic oligonucleotide

SEQ ID NO: 539859 - DNA, 60 bp, Artificial; identical to SEQ ID NO: 310168
  Synthetic oligonucleotide

SEQ ID NO: 539860 - DNA, 54 bp, Artificial; identical to SEQ ID NO: 310173
  Synthetic oligonucleotide

SEQ ID NO: 539861 - DNA, 51 bp, Artificial; identical to SEQ ID NO: 310174
  Synthetic oligonucleotide

SEQ ID NO: 539862 - DNA, 59 bp, Artificial; identical to SEQ ID NO: 19033
  Synthetic oligonucleotide

SEQ ID NO: 539863 - DNA, 59 bp, Artificial; identical to SEQ ID NO: 310177
  Synthetic oligonucleotide

SEQ ID NO: 539864 - DNA, 60 bp, Artificial; identical to SEQ ID NO: 310179
  Synthetic oligonucleotide

SEQ ID NO: 539865 - DNA, 60 bp, Artificial; identical to SEQ ID NO: 310182
  Synthetic oligonucleotide

SEQ ID NO: 539866 - DNA, 60 bp, Artificial; identical to SEQ ID NO: 310184
  Synthetic oligonucleotide

SEQ ID NO: 539867 - DNA, 60 bp, Artificial; identical to SEQ ID NO: 310186
  Synthetic oligonucleotide

SEQ ID NO: 539868 - DNA, 59 bp, Artificial; identical to SEQ ID NO: 310188
  Synthetic oligonucleotide

SEQ ID NO: 539869 - DNA, 60 bp, Artificial; identical to SEQ ID NO: 310190
  Synthetic oligonucleotide

SEQ ID NO: 539870 - DNA, 56 bp, Artificial; identical to SEQ ID NO: 310191
  Synthetic oligonucleotide

SEQ ID NO: 539871 - DNA, 60 bp, Artificial; identical to SEQ ID NO: 12792
  Synthetic oligonucleotide

SEQ ID NO: 539872 - DNA, 60 bp, Artificial; identical to SEQ ID NO: 310196
  Synthetic oligonucleotide

SEQ ID NO: 539873 - DNA, 60 bp, Artificial; identical to SEQ ID NO: 12292
  Synthetic oligonucleotide

SEQ ID NO: 539874 - DNA, 58 bp, Artificial; identical to SEQ ID NO: 310204
  Synthetic oligonucleotide

SEQ ID NO: 539875 - DNA, 53 bp, Artificial; identical to SEQ ID NO: 310205
  Synthetic oligonucleotide

SEQ ID NO: 539876 - DNA, 59 bp, Artificial; identical to SEQ ID NO: 310206
  Synthetic oligonucleotide

SEQ ID NO: 539877 - DNA, 56 bp, Artificial; identical to SEQ ID NO: 310208
  Synthetic oligonucleotide

SEQ ID NO: 539878 - DNA, 58 bp, Artificial; identical to SEQ ID NO: 310209
  Synthetic oligonucleotide

SEQ ID NO: 539879 - DNA, 60 bp, Artificial; identical to SEQ ID NO: 310211
  Synthetic oligonucleotide

SEQ ID NO: 539880 - DNA, 60 bp, Artificial; identical to SEQ ID NO: 310212
  Synthetic oligonucleotide

SEQ ID NO: 539881 - DNA, 53 bp, Artificial; identical to SEQ ID NO: 310213
  Synthetic oligonucleotide

SEQ ID NO: 539882 - DNA, 60 bp, Artificial; identical to SEQ ID NO: 6830
  Synthetic oligonucleotide

SEQ ID NO: 539883 - DNA, 55 bp, Artificial; identical to SEQ ID NO: 310215
  Synthetic oligonucleotide

SEQ ID NO: 539884 - DNA, 58 bp, Artificial; identical to SEQ ID NO: 310218
  Synthetic oligonucleotide

SEQ ID NO: 539885 - DNA, 57 bp, Artificial; identical to SEQ ID NO: 310219
  Synthetic oligonucleotide

SEQ ID NO: 539886 - DNA, 51 bp, Artificial; identical to SEQ ID NO: 310220
  Synthetic oligonucleotide

SEQ ID NO: 539887 - DNA, 60 bp, Artificial; identical to SEQ ID NO: 310221
  Synthetic oligonucleotide

SEQ ID NO: 539888 - DNA, 60 bp, Artificial; identical to SEQ ID NO: 310222
  Synthetic oligonucleotide

SEQ ID NO: 539889 - DNA, 60 bp, Artificial; identical to SEQ ID NO: 310223
  Synthetic oligonucleotide

SEQ ID NO: 539890 - DNA, 58 bp, Artificial; identical to SEQ ID NO: 310224
  Synthetic oligonucleotide

SEQ ID NO: 539891 - DNA, 60 bp, Artificial; identical to SEQ ID NO: 310226
  Synthetic oligonucleotide

SEQ ID NO: 539892 - DNA, 58 bp, Artificial; identical to SEQ ID NO: 310227
  Synthetic oligonucleotide

SEQ ID NO: 539893 - DNA, 59 bp, Artificial; identical to SEQ ID NO: 310229
  Synthetic oligonucleotide

SEQ ID NO: 539894 - DNA, 55 bp, Artificial; identical to SEQ ID NO: 310230
  Synthetic oligonucleotide

SEQ ID NO: 539895 - DNA, 60 bp, Artificial; identical to SEQ ID NO: 310231
  Synthetic oligonucleotide

SEQ ID NO: 539896 - DNA, 60 bp, Artificial; identical to SEQ ID NO: 310232
  Synthetic oligonucleotide

SEQ ID NO: 539897 - DNA, 60 bp, Artificial; identical to SEQ ID NO: 8474
  Synthetic oligonucleotide

SEQ ID NO: 539898 - DNA, 60 bp, Artificial; identical to SEQ ID NO: 12020
  Synthetic oligonucleotide

SEQ ID NO: 539899 - DNA, 60 bp, Artificial; identical to SEQ ID NO: 310233
  Synthetic oligonucleotide

SEQ ID NO: 539900 - DNA, 60 bp, Artificial; identical to SEQ ID NO: 310235
  Synthetic oligonucleotide

SEQ ID NO: 539901 - DNA, 60 bp, Artificial; identical to SEQ ID NO: 14850
  Synthetic oligonucleotide

SEQ ID NO: 539902 - DNA, 53 bp, Artificial; identical to SEQ ID NO: 310236
  Synthetic oligonucleotide

SEQ ID NO: 539903 - DNA, 60 bp, Artificial; identical to SEQ ID NO: 310237
  Synthetic oligonucleotide

SEQ ID NO: 539904 - DNA, 59 bp, Artificial; identical to SEQ ID NO: 310241
  Synthetic oligonucleotide

SEQ ID NO: 539905 - DNA, 60 bp, Artificial; identical to SEQ ID NO: 310243
  Synthetic oligonucleotide

SEQ ID NO: 539906 - DNA, 51 bp, Artificial; identical to SEQ ID NO: 310246
  Synthetic oligonucleotide

SEQ ID NO: 539907 - DNA, 56 bp, Artificial; identical to SEQ ID NO: 16374
  Synthetic oligonucleotide

SEQ ID NO: 539908 - DNA, 60 bp, Artificial; identical to SEQ ID NO: 310247
  Synthetic oligonucleotide

SEQ ID NO: 539909 - DNA, 58 bp, Artificial; identical to SEQ ID NO: 18667
  Synthetic oligonucleotide

SEQ ID NO: 539910 - DNA, 55 bp, Artificial; identical to SEQ ID NO: 310249
  Synthetic oligonucleotide

SEQ ID NO: 539911 - DNA, 55 bp, Artificial; identical to SEQ ID NO: 310253
  Synthetic oligonucleotide

SEQ ID NO: 539912 - DNA, 60 bp, Artificial; identical to SEQ ID NO: 7945
  Synthetic oligonucleotide

SEQ ID NO: 539913 - DNA, 60 bp, Artificial; identical to SEQ ID NO: 310254
  Synthetic oligonucleotide

SEQ ID NO: 539914 - DNA, 60 bp, Artificial; identical to SEQ ID NO: 15052
  Synthetic oligonucleotide

SEQ ID NO: 539915 - DNA, 60 bp, Artificial; identical to SEQ ID NO: 310259
  Synthetic oligonucleotide

SEQ ID NO: 539916 - DNA, 53 bp, Artificial; identical to SEQ ID NO: 310261
  Synthetic oligonucleotide

SEQ ID NO: 539917 - DNA, 59 bp, Artificial; identical to SEQ ID NO: 310262
  Synthetic oligonucleotide

SEQ ID NO: 539918 - DNA, 57 bp, Artificial; identical to SEQ ID NO: 18046
  Synthetic oligonucleotide

SEQ ID NO: 539919 - DNA, 59 bp, Artificial; identical to SEQ ID NO: 310264
  Synthetic oligonucleotide

SEQ ID NO: 539920 - DNA, 53 bp, Artificial; identical to SEQ ID NO: 310266
  Synthetic oligonucleotide

SEQ ID NO: 539921 - DNA, 60 bp, Artificial; identical to SEQ ID NO: 310267
  Synthetic oligonucleotide

SEQ ID NO: 539922 - DNA, 55 bp, Artificial; identical to SEQ ID NO: 310269
  Synthetic oligonucleotide

SEQ ID NO: 539923 - DNA, 50 bp, Artificial; identical to SEQ ID NO: 310271
  Synthetic oligonucleotide

SEQ ID NO: 539924 - DNA, 58 bp, Artificial; identical to SEQ ID NO: 310272
  Synthetic oligonucleotide

SEQ ID NO: 539925 - DNA, 55 bp, Artificial; identical to SEQ ID NO: 310274
  Synthetic oligonucleotide

SEQ ID NO: 539926 - DNA, 57 bp, Artificial; identical to SEQ ID NO: 310275
  Synthetic oligonucleotide

SEQ ID NO: 539927 - DNA, 55 bp, Artificial; identical to SEQ ID NO: 310276
  Synthetic oligonucleotide

SEQ ID NO: 539928 - DNA, 60 bp, Artificial; identical to SEQ ID NO: 310279
  Synthetic oligonucleotide

SEQ ID NO: 539929 - DNA, 60 bp, Artificial; identical to SEQ ID NO: 310282
  Synthetic oligonucleotide

SEQ ID NO: 539930 - DNA, 57 bp, Artificial; identical to SEQ ID NO: 310283
  Synthetic oligonucleotide

SEQ ID NO: 539931 - DNA, 53 bp, Artificial; identical to SEQ ID NO: 310284
  Synthetic oligonucleotide

SEQ ID NO: 539932 - DNA, 59 bp, Artificial; identical to SEQ ID NO: 310285
  Synthetic oligonucleotide

SEQ ID NO: 539933 - DNA, 60 bp, Artificial; identical to SEQ ID NO: 310286
  Synthetic oligonucleotide

SEQ ID NO: 539934 - DNA, 58 bp, Artificial; identical to SEQ ID NO: 310288
  Synthetic oligonucleotide

SEQ ID NO: 539935 - DNA, 55 bp, Artificial; identical to SEQ ID NO: 310289
  Synthetic oligonucleotide

SEQ ID NO: 539936 - DNA, 50 bp, Artificial; identical to SEQ ID NO: 310290
  Synthetic oligonucleotide

SEQ ID NO: 539937 - DNA, 54 bp, Artificial; identical to SEQ ID NO: 310295
  Synthetic oligonucleotide

SEQ ID NO: 539938 - DNA, 55 bp, Artificial; identical to SEQ ID NO: 310297
  Synthetic oligonucleotide

SEQ ID NO: 539939 - DNA, 60 bp, Artificial; identical to SEQ ID NO: 310298
  Synthetic oligonucleotide

SEQ ID NO: 539940 - DNA, 55 bp, Artificial; identical to SEQ ID NO: 310302
  Synthetic oligonucleotide

SEQ ID NO: 539941 - DNA, 54 bp, Artificial; identical to SEQ ID NO: 310304
  Synthetic oligonucleotide

SEQ ID NO: 539942 - DNA, 57 bp, Artificial; identical to SEQ ID NO: 310311
  Synthetic oligonucleotide

SEQ ID NO: 539943 - DNA, 55 bp, Artificial; identical to SEQ ID NO: 310314
  Synthetic oligonucleotide

SEQ ID NO: 539944 - DNA, 55 bp, Artificial; identical to SEQ ID NO: 310316
  Synthetic oligonucleotide

SEQ ID NO: 539945 - DNA, 60 bp, Artificial; identical to SEQ ID NO: 310319
  Synthetic oligonucleotide

SEQ ID NO: 539946 - DNA, 58 bp, Artificial; identical to SEQ ID NO: 310320
  Synthetic oligonucleotide

SEQ ID NO: 539947 - DNA, 60 bp, Artificial; identical to SEQ ID NO: 310323
  Synthetic oligonucleotide

SEQ ID NO: 539948 - DNA, 60 bp, Artificial; identical to SEQ ID NO: 310328
  Synthetic oligonucleotide

SEQ ID NO: 539949 - DNA, 52 bp, Artificial; identical to SEQ ID NO: 310331
  Synthetic oligonucleotide

SEQ ID NO: 539950 - DNA, 60 bp, Artificial; identical to SEQ ID NO: 310334
  Synthetic oligonucleotide

SEQ ID NO: 539951 - DNA, 55 bp, Artificial; identical to SEQ ID NO: 310336
  Synthetic oligonucleotide

SEQ ID NO: 539952 - DNA, 54 bp, Artificial; identical to SEQ ID NO: 310340
  Synthetic oligonucleotide

SEQ ID NO: 539953 - DNA, 57 bp, Artificial; identical to SEQ ID NO: 310341
  Synthetic oligonucleotide

SEQ ID NO: 539954 - DNA, 58 bp, Artificial; identical to SEQ ID NO: 310342
  Synthetic oligonucleotide

SEQ ID NO: 539955 - DNA, 60 bp, Artificial; identical to SEQ ID NO: 310346
  Synthetic oligonucleotide

SEQ ID NO: 539956 - DNA, 60 bp, Artificial; identical to SEQ ID NO: 310354
  Synthetic oligonucleotide

SEQ ID NO: 539957 - DNA, 53 bp, Artificial; identical to SEQ ID NO: 310355
  Synthetic oligonucleotide

SEQ ID NO: 539958 - DNA, 60 bp, Artificial; identical to SEQ ID NO: 310356
  Synthetic oligonucleotide

SEQ ID NO: 539959 - DNA, 60 bp, Artificial; identical to SEQ ID NO: 310357
  Synthetic oligonucleotide

SEQ ID NO: 539960 - DNA, 60 bp, Artificial; identical to SEQ ID NO: 310358
  Synthetic oligonucleotide

SEQ ID NO: 539961 - DNA, 58 bp, Artificial; identical to SEQ ID NO: 310359
  Synthetic oligonucleotide

SEQ ID NO: 539962 - DNA, 50 bp, Artificial; identical to SEQ ID NO: 310361
  Synthetic oligonucleotide

SEQ ID NO: 539963 - DNA, 60 bp, Artificial; identical to SEQ ID NO: 310365
  Synthetic oligonucleotide

SEQ ID NO: 539964 - DNA, 57 bp, Artificial; identical to SEQ ID NO: 310368
  Synthetic oligonucleotide

SEQ ID NO: 539965 - DNA, 57 bp, Artificial; identical to SEQ ID NO: 310369
  Synthetic oligonucleotide

SEQ ID NO: 539966 - DNA, 55 bp, Artificial; identical to SEQ ID NO: 310371
  Synthetic oligonucleotide

SEQ ID NO: 539967 - DNA, 51 bp, Artificial; identical to SEQ ID NO: 310374
  Synthetic oligonucleotide

SEQ ID NO: 539968 - DNA, 53 bp, Artificial; identical to SEQ ID NO: 310375
  Synthetic oligonucleotide

SEQ ID NO: 539969 - DNA, 60 bp, Artificial; identical to SEQ ID NO: 310376
  Synthetic oligonucleotide

SEQ ID NO: 539970 - DNA, 58 bp, Artificial; identical to SEQ ID NO: 310377
  Synthetic oligonucleotide

SEQ ID NO: 539971 - DNA, 60 bp, Artificial; identical to SEQ ID NO: 310378
  Synthetic oligonucleotide

SEQ ID NO: 539972 - DNA, 59 bp, Artificial; identical to SEQ ID NO: 310379
  Synthetic oligonucleotide

SEQ ID NO: 539973 - DNA, 54 bp, Artificial; identical to SEQ ID NO: 310384
  Synthetic oligonucleotide

SEQ ID NO: 539974 - DNA, 53 bp, Artificial; identical to SEQ ID NO: 310385
  Synthetic oligonucleotide

SEQ ID NO: 539975 - DNA, 55 bp, Artificial; identical to SEQ ID NO: 310390
  Synthetic oligonucleotide

SEQ ID NO: 539976 - DNA, 53 bp, Artificial; identical to SEQ ID NO: 310394
  Synthetic oligonucleotide

SEQ ID NO: 539977 - DNA, 60 bp, Artificial; identical to SEQ ID NO: 310395
  Synthetic oligonucleotide

SEQ ID NO: 539978 - DNA, 60 bp, Artificial; identical to SEQ ID NO: 310398
  Synthetic oligonucleotide

SEQ ID NO: 539979 - DNA, 53 bp, Artificial; identical to SEQ ID NO: 310400
  Synthetic oligonucleotide

SEQ ID NO: 539980 - DNA, 57 bp, Artificial; identical to SEQ ID NO: 310401
  Synthetic oligonucleotide

SEQ ID NO: 539981 - DNA, 60 bp, Artificial; identical to SEQ ID NO: 310402
  Synthetic oligonucleotide

SEQ ID NO: 539982 - DNA, 60 bp, Artificial; identical to SEQ ID NO: 310404
  Synthetic oligonucleotide

SEQ ID NO: 539983 - DNA, 53 bp, Artificial; identical to SEQ ID NO: 310406
  Synthetic oligonucleotide

SEQ ID NO: 539984 - DNA, 60 bp, Artificial; identical to SEQ ID NO: 6816
  Synthetic oligonucleotide

SEQ ID NO: 539985 - DNA, 59 bp, Artificial; identical to SEQ ID NO: 310411
  Synthetic oligonucleotide

SEQ ID NO: 539986 - DNA, 57 bp, Artificial; identical to SEQ ID NO: 310412
  Synthetic oligonucleotide

SEQ ID NO: 539987 - DNA, 60 bp, Artificial; identical to SEQ ID NO: 310413
  Synthetic oligonucleotide

SEQ ID NO: 539988 - DNA, 52 bp, Artificial; identical to SEQ ID NO: 310415
  Synthetic oligonucleotide

SEQ ID NO: 539989 - DNA, 54 bp, Artificial; identical to SEQ ID NO: 310418
  Synthetic oligonucleotide

SEQ ID NO: 539990 - DNA, 57 bp, Artificial; identical to SEQ ID NO: 310419
  Synthetic oligonucleotide

SEQ ID NO: 539991 - DNA, 53 bp, Artificial; identical to SEQ ID NO: 310420
  Synthetic oligonucleotide

SEQ ID NO: 539992 - DNA, 60 bp, Artificial; identical to SEQ ID NO: 310421
  Synthetic oligonucleotide

SEQ ID NO: 539993 - DNA, 60 bp, Artificial; identical to SEQ ID NO: 310422
  Synthetic oligonucleotide

SEQ ID NO: 539994 - DNA, 60 bp, Artificial; identical to SEQ ID NO: 310426
  Synthetic oligonucleotide

SEQ ID NO: 539995 - DNA, 53 bp, Artificial; identical to SEQ ID NO: 310427
  Synthetic oligonucleotide

SEQ ID NO: 539996 - DNA, 60 bp, Artificial; identical to SEQ ID NO: 310428
  Synthetic oligonucleotide

SEQ ID NO: 539997 - DNA, 58 bp, Artificial; identical to SEQ ID NO: 310430
  Synthetic oligonucleotide

SEQ ID NO: 539998 - DNA, 60 bp, Artificial; identical to SEQ ID NO: 310431
  Synthetic oligonucleotide

SEQ ID NO: 539999 - DNA, 60 bp, Artificial; identical to SEQ ID NO: 12777
  Synthetic oligonucleotide

SEQ ID NO: 540000 - DNA, 51 bp, Artificial; identical to SEQ ID NO: 310433
  Synthetic oligonucleotide

SEQ ID NO: 540001 - DNA, 60 bp, Artificial; identical to SEQ ID NO: 310434
  Synthetic oligonucleotide

SEQ ID NO: 540002 - DNA, 60 bp, Artificial; identical to SEQ ID NO: 310436
  Synthetic oligonucleotide

SEQ ID NO: 540003 - DNA, 60 bp, Artificial; identical to SEQ ID NO: 310437
  Synthetic oligonucleotide

SEQ ID NO: 540004 - DNA, 56 bp, Artificial; identical to SEQ ID NO: 310438
  Synthetic oligonucleotide

SEQ ID NO: 540005 - DNA, 51 bp, Artificial; identical to SEQ ID NO: 310440
  Synthetic oligonucleotide

SEQ ID NO: 540006 - DNA, 58 bp, Artificial; identical to SEQ ID NO: 310442
  Synthetic oligonucleotide

SEQ ID NO: 540007 - DNA, 59 bp, Artificial; identical to SEQ ID NO: 12028
  Synthetic oligonucleotide

SEQ ID NO: 540008 - DNA, 60 bp, Artificial; identical to SEQ ID NO: 310449
  Synthetic oligonucleotide

SEQ ID NO: 540009 - DNA, 60 bp, Artificial; identical to SEQ ID NO: 310450
  Synthetic oligonucleotide

SEQ ID NO: 540010 - DNA, 58 bp, Artificial; identical to SEQ ID NO: 310451
  Synthetic oligonucleotide

SEQ ID NO: 540011 - DNA, 56 bp, Artificial; identical to SEQ ID NO: 310452
  Synthetic oligonucleotide

SEQ ID NO: 540012 - DNA, 51 bp, Artificial; identical to SEQ ID NO: 310454
  Synthetic oligonucleotide

SEQ ID NO: 540013 - DNA, 60 bp, Artificial; identical to SEQ ID NO: 310456
  Synthetic oligonucleotide

SEQ ID NO: 540014 - DNA, 55 bp, Artificial; identical to SEQ ID NO: 310458
  Synthetic oligonucleotide

SEQ ID NO: 540015 - DNA, 60 bp, Artificial; identical to SEQ ID NO: 310460
  Synthetic oligonucleotide

SEQ ID NO: 540016 - DNA, 59 bp, Artificial; identical to SEQ ID NO: 310462
  Synthetic oligonucleotide

SEQ ID NO: 540017 - DNA, 60 bp, Artificial; identical to SEQ ID NO: 310463
  Synthetic oligonucleotide

SEQ ID NO: 540018 - DNA, 59 bp, Artificial; identical to SEQ ID NO: 5824
  Synthetic oligonucleotide

SEQ ID NO: 540019 - DNA, 50 bp, Artificial; identical to SEQ ID NO: 310470
  Synthetic oligonucleotide

SEQ ID NO: 540020 - DNA, 55 bp, Artificial; identical to SEQ ID NO: 310471
  Synthetic oligonucleotide

SEQ ID NO: 540021 - DNA, 59 bp, Artificial; identical to SEQ ID NO: 310473
  Synthetic oligonucleotide

SEQ ID NO: 540022 - DNA, 60 bp, Artificial; identical to SEQ ID NO: 310474
  Synthetic oligonucleotide

SEQ ID NO: 540023 - DNA, 60 bp, Artificial; identical to SEQ ID NO: 310475
  Synthetic oligonucleotide

SEQ ID NO: 540024 - DNA, 60 bp, Artificial; identical to SEQ ID NO: 310476
  Synthetic oligonucleotide

SEQ ID NO: 540025 - DNA, 60 bp, Artificial; identical to SEQ ID NO: 310477
  Synthetic oligonucleotide

SEQ ID NO: 540026 - DNA, 50 bp, Artificial; identical to SEQ ID NO: 310478
  Synthetic oligonucleotide

SEQ ID NO: 540027 - DNA, 52 bp, Artificial; identical to SEQ ID NO: 310479
  Synthetic oligonucleotide

SEQ ID NO: 540028 - DNA, 54 bp, Artificial; identical to SEQ ID NO: 9571
  Synthetic oligonucleotide

SEQ ID NO: 540029 - DNA, 57 bp, Artificial; identical to SEQ ID NO: 17819
  Synthetic oligonucleotide

SEQ ID NO: 540030 - DNA, 55 bp, Artificial; identical to SEQ ID NO: 310481
  Synthetic oligonucleotide

SEQ ID NO: 540031 - DNA, 55 bp, Artificial; identical to SEQ ID NO: 310484
  Synthetic oligonucleotide

SEQ ID NO: 540032 - DNA, 60 bp, Artificial; identical to SEQ ID NO: 310487
  Synthetic oligonucleotide

SEQ ID NO: 540033 - DNA, 55 bp, Artificial; identical to SEQ ID NO: 310488
  Synthetic oligonucleotide

SEQ ID NO: 540034 - DNA, 60 bp, Artificial; identical to SEQ ID NO: 310490
  Synthetic oligonucleotide

SEQ ID NO: 540035 - DNA, 60 bp, Artificial; identical to SEQ ID NO: 310492
  Synthetic oligonucleotide

SEQ ID NO: 540036 - DNA, 60 bp, Artificial; identical to SEQ ID NO: 310494
  Synthetic oligonucleotide

SEQ ID NO: 540037 - DNA, 60 bp, Artificial; identical to SEQ ID NO: 310495
  Synthetic oligonucleotide

SEQ ID NO: 540038 - DNA, 55 bp, Artificial; identical to SEQ ID NO: 310496
  Synthetic oligonucleotide

SEQ ID NO: 540039 - DNA, 53 bp, Artificial; identical to SEQ ID NO: 310497
  Synthetic oligonucleotide

SEQ ID NO: 540040 - DNA, 59 bp, Artificial; identical to SEQ ID NO: 310498
  Synthetic oligonucleotide

SEQ ID NO: 540041 - DNA, 60 bp, Artificial; identical to SEQ ID NO: 310500
  Synthetic oligonucleotide

SEQ ID NO: 540042 - DNA, 60 bp, Artificial; identical to SEQ ID NO: 310501
  Synthetic oligonucleotide

SEQ ID NO: 540043 - DNA, 60 bp, Artificial; identical to SEQ ID NO: 310502
  Synthetic oligonucleotide

SEQ ID NO: 540044 - DNA, 54 bp, Artificial; identical to SEQ ID NO: 310503
  Synthetic oligonucleotide

SEQ ID NO: 540045 - DNA, 60 bp, Artificial; identical to SEQ ID NO: 310505
  Synthetic oligonucleotide

SEQ ID NO: 540046 - DNA, 60 bp, Artificial; identical to SEQ ID NO: 310506
  Synthetic oligonucleotide

SEQ ID NO: 540047 - DNA, 60 bp, Artificial; identical to SEQ ID NO: 310508
  Synthetic oligonucleotide

SEQ ID NO: 540048 - DNA, 53 bp, Artificial; identical to SEQ ID NO: 310510
  Synthetic oligonucleotide

SEQ ID NO: 540049 - DNA, 51 bp, Artificial; identical to SEQ ID NO: 310513
  Synthetic oligonucleotide

SEQ ID NO: 540050 - DNA, 54 bp, Artificial; identical to SEQ ID NO: 310514
  Synthetic oligonucleotide

SEQ ID NO: 540051 - DNA, 58 bp, Artificial; identical to SEQ ID NO: 310515
  Synthetic oligonucleotide

SEQ ID NO: 540052 - DNA, 57 bp, Artificial; identical to SEQ ID NO: 310516
  Synthetic oligonucleotide

SEQ ID NO: 540053 - DNA, 60 bp, Artificial; identical to SEQ ID NO: 310518
  Synthetic oligonucleotide

SEQ ID NO: 540054 - DNA, 60 bp, Artificial; identical to SEQ ID NO: 310519
  Synthetic oligonucleotide

SEQ ID NO: 540055 - DNA, 55 bp, Artificial; identical to SEQ ID NO: 310520
  Synthetic oligonucleotide

SEQ ID NO: 540056 - DNA, 56 bp, Artificial; identical to SEQ ID NO: 310521
  Synthetic oligonucleotide

SEQ ID NO: 540057 - DNA, 58 bp, Artificial; identical to SEQ ID NO: 310525
  Synthetic oligonucleotide

SEQ ID NO: 540058 - DNA, 55 bp, Artificial; identical to SEQ ID NO: 310526
  Synthetic oligonucleotide

SEQ ID NO: 540059 - DNA, 59 bp, Artificial; identical to SEQ ID NO: 310529
  Synthetic oligonucleotide

SEQ ID NO: 540060 - DNA, 56 bp, Artificial; identical to SEQ ID NO: 310531
  Synthetic oligonucleotide

SEQ ID NO: 540061 - DNA, 56 bp, Artificial; identical to SEQ ID NO: 310534
  Synthetic oligonucleotide

SEQ ID NO: 540062 - DNA, 58 bp, Artificial; identical to SEQ ID NO: 310536
  Synthetic oligonucleotide

SEQ ID NO: 540063 - DNA, 54 bp, Artificial; identical to SEQ ID NO: 310539
  Synthetic oligonucleotide

SEQ ID NO: 540064 - DNA, 50 bp, Artificial; identical to SEQ ID NO: 310540
  Synthetic oligonucleotide

SEQ ID NO: 540065 - DNA, 60 bp, Artificial; identical to SEQ ID NO: 310541
  Synthetic oligonucleotide

SEQ ID NO: 540066 - DNA, 59 bp, Artificial; identical to SEQ ID NO: 13751
  Synthetic oligonucleotide

SEQ ID NO: 540067 - DNA, 53 bp, Artificial; identical to SEQ ID NO: 17961
  Synthetic oligonucleotide

SEQ ID NO: 540068 - DNA, 57 bp, Artificial; identical to SEQ ID NO: 310545
  Synthetic oligonucleotide

SEQ ID NO: 540069 - DNA, 55 bp, Artificial; identical to SEQ ID NO: 310547
  Synthetic oligonucleotide

SEQ ID NO: 540070 - DNA, 53 bp, Artificial; identical to SEQ ID NO: 310548
  Synthetic oligonucleotide

SEQ ID NO: 540071 - DNA, 60 bp, Artificial; identical to SEQ ID NO: 310551
  Synthetic oligonucleotide

SEQ ID NO: 540072 - DNA, 54 bp, Artificial; identical to SEQ ID NO: 310554
  Synthetic oligonucleotide

SEQ ID NO: 540073 - DNA, 55 bp, Artificial; identical to SEQ ID NO: 310555
  Synthetic oligonucleotide

SEQ ID NO: 540074 - DNA, 60 bp, Artificial; identical to SEQ ID NO: 310557
  Synthetic oligonucleotide

SEQ ID NO: 540075 - DNA, 58 bp, Artificial; identical to SEQ ID NO: 310558
  Synthetic oligonucleotide

SEQ ID NO: 540076 - DNA, 52 bp, Artificial; identical to SEQ ID NO: 310560
  Synthetic oligonucleotide

SEQ ID NO: 540077 - DNA, 58 bp, Artificial; identical to SEQ ID NO: 310563
  Synthetic oligonucleotide

SEQ ID NO: 540078 - DNA, 56 bp, Artificial; identical to SEQ ID NO: 16129
  Synthetic oligonucleotide

SEQ ID NO: 540079 - DNA, 53 bp, Artificial; identical to SEQ ID NO: 310566
  Synthetic oligonucleotide

SEQ ID NO: 540080 - DNA, 60 bp, Artificial; identical to SEQ ID NO: 310569
  Synthetic oligonucleotide

SEQ ID NO: 540081 - DNA, 60 bp, Artificial; identical to SEQ ID NO: 310573
  Synthetic oligonucleotide

SEQ ID NO: 540082 - DNA, 54 bp, Artificial; identical to SEQ ID NO: 310575
  Synthetic oligonucleotide

SEQ ID NO: 540083 - DNA, 55 bp, Artificial; identical to SEQ ID NO: 310576
  Synthetic oligonucleotide

SEQ ID NO: 540084 - DNA, 50 bp, Artificial; identical to SEQ ID NO: 310577
  Synthetic oligonucleotide

SEQ ID NO: 540085 - DNA, 55 bp, Artificial; identical to SEQ ID NO: 310579
  Synthetic oligonucleotide

SEQ ID NO: 540086 - DNA, 55 bp, Artificial; identical to SEQ ID NO: 310580
  Synthetic oligonucleotide

SEQ ID NO: 540087 - DNA, 52 bp, Artificial; identical to SEQ ID NO: 310581
  Synthetic oligonucleotide

SEQ ID NO: 540088 - DNA, 60 bp, Artificial; identical to SEQ ID NO: 11565
  Synthetic oligonucleotide

SEQ ID NO: 540089 - DNA, 60 bp, Artificial; identical to SEQ ID NO: 310584
  Synthetic oligonucleotide

SEQ ID NO: 540090 - DNA, 60 bp, Artificial; identical to SEQ ID NO: 310586
  Synthetic oligonucleotide

SEQ ID NO: 540091 - DNA, 53 bp, Artificial; identical to SEQ ID NO: 310587
  Synthetic oligonucleotide

SEQ ID NO: 540092 - DNA, 53 bp, Artificial; identical to SEQ ID NO: 310588
  Synthetic oligonucleotide

SEQ ID NO: 540093 - DNA, 60 bp, Artificial; identical to SEQ ID NO: 310589
  Synthetic oligonucleotide

SEQ ID NO: 540094 - DNA, 52 bp, Artificial; identical to SEQ ID NO: 310593
  Synthetic oligonucleotide

SEQ ID NO: 540095 - DNA, 59 bp, Artificial; identical to SEQ ID NO: 310595
  Synthetic oligonucleotide

SEQ ID NO: 540096 - DNA, 55 bp, Artificial; identical to SEQ ID NO: 310596
  Synthetic oligonucleotide

SEQ ID NO: 540097 - DNA, 58 bp, Artificial; identical to SEQ ID NO: 310602
  Synthetic oligonucleotide

SEQ ID NO: 540098 - DNA, 56 bp, Artificial; identical to SEQ ID NO: 18325
  Synthetic oligonucleotide

SEQ ID NO: 540099 - DNA, 58 bp, Artificial; identical to SEQ ID NO: 310608
  Synthetic oligonucleotide

SEQ ID NO: 540100 - DNA, 60 bp, Artificial; identical to SEQ ID NO: 310612
  Synthetic oligonucleotide

SEQ ID NO: 540101 - DNA, 60 bp, Artificial; identical to SEQ ID NO: 310613
  Synthetic oligonucleotide

SEQ ID NO: 540102 - DNA, 58 bp, Artificial; identical to SEQ ID NO: 310614
  Synthetic oligonucleotide

SEQ ID NO: 540103 - DNA, 55 bp, Artificial; identical to SEQ ID NO: 310615
  Synthetic oligonucleotide

SEQ ID NO: 540104 - DNA, 60 bp, Artificial; identical to SEQ ID NO: 310616
  Synthetic oligonucleotide

SEQ ID NO: 540105 - DNA, 55 bp, Artificial; identical to SEQ ID NO: 310617
  Synthetic oligonucleotide

SEQ ID NO: 540106 - DNA, 50 bp, Artificial; identical to SEQ ID NO: 310618
  Synthetic oligonucleotide

SEQ ID NO: 540107 - DNA, 54 bp, Artificial; identical to SEQ ID NO: 310620
  Synthetic oligonucleotide

SEQ ID NO: 540108 - DNA, 60 bp, Artificial; identical to SEQ ID NO: 310621
  Synthetic oligonucleotide

SEQ ID NO: 540109 - DNA, 59 bp, Artificial; identical to SEQ ID NO: 310622
  Synthetic oligonucleotide

SEQ ID NO: 540110 - DNA, 57 bp, Artificial; identical to SEQ ID NO: 310624
  Synthetic oligonucleotide

SEQ ID NO: 540111 - DNA, 60 bp, Artificial; identical to SEQ ID NO: 310626
  Synthetic oligonucleotide

SEQ ID NO: 540112 - DNA, 60 bp, Artificial; identical to SEQ ID NO: 310629
  Synthetic oligonucleotide

SEQ ID NO: 540113 - DNA, 55 bp, Artificial; identical to SEQ ID NO: 310630
  Synthetic oligonucleotide

SEQ ID NO: 540114 - DNA, 60 bp, Artificial; identical to SEQ ID NO: 13991
  Synthetic oligonucleotide

SEQ ID NO: 540115 - DNA, 60 bp, Artificial; identical to SEQ ID NO: 310636
  Synthetic oligonucleotide

SEQ ID NO: 540116 - DNA, 60 bp, Artificial; identical to SEQ ID NO: 310638
  Synthetic oligonucleotide

SEQ ID NO: 540117 - DNA, 52 bp, Artificial; identical to SEQ ID NO: 310641
  Synthetic oligonucleotide

SEQ ID NO: 540118 - DNA, 60 bp, Artificial; identical to SEQ ID NO: 310643
  Synthetic oligonucleotide

SEQ ID NO: 540119 - DNA, 60 bp, Artificial; identical to SEQ ID NO: 310644
  Synthetic oligonucleotide

SEQ ID NO: 540120 - DNA, 50 bp, Artificial; identical to SEQ ID NO: 310645
  Synthetic oligonucleotide

SEQ ID NO: 540121 - DNA, 58 bp, Artificial; identical to SEQ ID NO: 310647
  Synthetic oligonucleotide

SEQ ID NO: 540122 - DNA, 60 bp, Artificial; identical to SEQ ID NO: 310650
  Synthetic oligonucleotide

SEQ ID NO: 540123 - DNA, 60 bp, Artificial; identical to SEQ ID NO: 310651
  Synthetic oligonucleotide

SEQ ID NO: 540124 - DNA, 52 bp, Artificial; identical to SEQ ID NO: 310653
  Synthetic oligonucleotide

SEQ ID NO: 540125 - DNA, 60 bp, Artificial; identical to SEQ ID NO: 310654
  Synthetic oligonucleotide

SEQ ID NO: 540126 - DNA, 53 bp, Artificial; identical to SEQ ID NO: 310655
  Synthetic oligonucleotide

SEQ ID NO: 540127 - DNA, 60 bp, Artificial; identical to SEQ ID NO: 310658
  Synthetic oligonucleotide

SEQ ID NO: 540128 - DNA, 60 bp, Artificial; identical to SEQ ID NO: 310659
  Synthetic oligonucleotide

SEQ ID NO: 540129 - DNA, 58 bp, Artificial; identical to SEQ ID NO: 310661
  Synthetic oligonucleotide

SEQ ID NO: 540130 - DNA, 60 bp, Artificial; identical to SEQ ID NO: 310662
  Synthetic oligonucleotide

SEQ ID NO: 540131 - DNA, 52 bp, Artificial; identical to SEQ ID NO: 310664
  Synthetic oligonucleotide

SEQ ID NO: 540132 - DNA, 58 bp, Artificial; identical to SEQ ID NO: 310665
  Synthetic oligonucleotide

SEQ ID NO: 540133 - DNA, 60 bp, Artificial; identical to SEQ ID NO: 310667
  Synthetic oligonucleotide

SEQ ID NO: 540134 - DNA, 60 bp, Artificial; identical to SEQ ID NO: 310668
  Synthetic oligonucleotide

SEQ ID NO: 540135 - DNA, 58 bp, Artificial; identical to SEQ ID NO: 310671
  Synthetic oligonucleotide

SEQ ID NO: 540136 - DNA, 59 bp, Artificial; identical to SEQ ID NO: 310672
  Synthetic oligonucleotide

SEQ ID NO: 540137 - DNA, 60 bp, Artificial; identical to SEQ ID NO: 310673
  Synthetic oligonucleotide

SEQ ID NO: 540138 - DNA, 52 bp, Artificial; identical to SEQ ID NO: 310675
  Synthetic oligonucleotide

SEQ ID NO: 540139 - DNA, 54 bp, Artificial; identical to SEQ ID NO: 310676
  Synthetic oligonucleotide

SEQ ID NO: 540140 - DNA, 55 bp, Artificial; identical to SEQ ID NO: 310677
  Synthetic oligonucleotide

SEQ ID NO: 540141 - DNA, 56 bp, Artificial; identical to SEQ ID NO: 310678
  Synthetic oligonucleotide

SEQ ID NO: 540142 - DNA, 59 bp, Artificial; identical to SEQ ID NO: 310680
  Synthetic oligonucleotide

SEQ ID NO: 540143 - DNA, 60 bp, Artificial; identical to SEQ ID NO: 310681
  Synthetic oligonucleotide

SEQ ID NO: 540144 - DNA, 51 bp, Artificial; identical to SEQ ID NO: 310683
  Synthetic oligonucleotide

SEQ ID NO: 540145 - DNA, 60 bp, Artificial; identical to SEQ ID NO: 11885
  Synthetic oligonucleotide

SEQ ID NO: 540146 - DNA, 58 bp, Artificial; identical to SEQ ID NO: 310685
  Synthetic oligonucleotide

SEQ ID NO: 540147 - DNA, 60 bp, Artificial; identical to SEQ ID NO: 310686
  Synthetic oligonucleotide

SEQ ID NO: 540148 - DNA, 57 bp, Artificial; identical to SEQ ID NO: 310691
  Synthetic oligonucleotide

SEQ ID NO: 540149 - DNA, 58 bp, Artificial; identical to SEQ ID NO: 310696
  Synthetic oligonucleotide

SEQ ID NO: 540150 - DNA, 57 bp, Artificial; identical to SEQ ID NO: 310697
  Synthetic oligonucleotide

SEQ ID NO: 540151 - DNA, 59 bp, Artificial; identical to SEQ ID NO: 310701
  Synthetic oligonucleotide

SEQ ID NO: 540152 - DNA, 51 bp, Artificial; identical to SEQ ID NO: 310702
  Synthetic oligonucleotide

SEQ ID NO: 540153 - DNA, 55 bp, Artificial; identical to SEQ ID NO: 310705
  Synthetic oligonucleotide

SEQ ID NO: 540154 - DNA, 50 bp, Artificial; identical to SEQ ID NO: 310706
  Synthetic oligonucleotide

SEQ ID NO: 540155 - DNA, 55 bp, Artificial; identical to SEQ ID NO: 310710
  Synthetic oligonucleotide

SEQ ID NO: 540156 - DNA, 60 bp, Artificial; identical to SEQ ID NO: 310711
  Synthetic oligonucleotide

SEQ ID NO: 540157 - DNA, 60 bp, Artificial; identical to SEQ ID NO: 310716
  Synthetic oligonucleotide

SEQ ID NO: 540158 - DNA, 53 bp, Artificial; identical to SEQ ID NO: 310718
  Synthetic oligonucleotide

SEQ ID NO: 540159 - DNA, 54 bp, Artificial; identical to SEQ ID NO: 310719
  Synthetic oligonucleotide

SEQ ID NO: 540160 - DNA, 57 bp, Artificial; identical to SEQ ID NO: 310720
  Synthetic oligonucleotide

SEQ ID NO: 540161 - DNA, 55 bp, Artificial; identical to SEQ ID NO: 310722
  Synthetic oligonucleotide

SEQ ID NO: 540162 - DNA, 60 bp, Artificial; identical to SEQ ID NO: 310723
  Synthetic oligonucleotide

SEQ ID NO: 540163 - DNA, 55 bp, Artificial; identical to SEQ ID NO: 310728
  Synthetic oligonucleotide

SEQ ID NO: 540164 - DNA, 57 bp, Artificial; identical to SEQ ID NO: 310729
  Synthetic oligonucleotide

SEQ ID NO: 540165 - DNA, 58 bp, Artificial; identical to SEQ ID NO: 310730
  Synthetic oligonucleotide

SEQ ID NO: 540166 - DNA, 59 bp, Artificial; identical to SEQ ID NO: 12443
  Synthetic oligonucleotide

SEQ ID NO: 540167 - DNA, 52 bp, Artificial; identical to SEQ ID NO: 310732
  Synthetic oligonucleotide

SEQ ID NO: 540168 - DNA, 60 bp, Artificial; identical to SEQ ID NO: 6453
  Synthetic oligonucleotide

SEQ ID NO: 540169 - DNA, 50 bp, Artificial; identical to SEQ ID NO: 14758
  Synthetic oligonucleotide

SEQ ID NO: 540170 - DNA, 58 bp, Artificial; identical to SEQ ID NO: 310742
  Synthetic oligonucleotide

SEQ ID NO: 540171 - DNA, 60 bp, Artificial; identical to SEQ ID NO: 7276
  Synthetic oligonucleotide

SEQ ID NO: 540172 - DNA, 60 bp, Artificial; identical to SEQ ID NO: 310750
  Synthetic oligonucleotide

SEQ ID NO: 540173 - DNA, 58 bp, Artificial; identical to SEQ ID NO: 17488
  Synthetic oligonucleotide

SEQ ID NO: 540174 - DNA, 55 bp, Artificial; identical to SEQ ID NO: 310753
  Synthetic oligonucleotide

SEQ ID NO: 540175 - DNA, 59 bp, Artificial; identical to SEQ ID NO: 310758
  Synthetic oligonucleotide

SEQ ID NO: 540176 - DNA, 57 bp, Artificial; identical to SEQ ID NO: 310761
  Synthetic oligonucleotide

SEQ ID NO: 540177 - DNA, 60 bp, Artificial; identical to SEQ ID NO: 310762
  Synthetic oligonucleotide

SEQ ID NO: 540178 - DNA, 60 bp, Artificial; identical to SEQ ID NO: 310764
  Synthetic oligonucleotide

SEQ ID NO: 540179 - DNA, 53 bp, Artificial; identical to SEQ ID NO: 310765
  Synthetic oligonucleotide

SEQ ID NO: 540180 - DNA, 60 bp, Artificial; identical to SEQ ID NO: 310766
  Synthetic oligonucleotide

SEQ ID NO: 540181 - DNA, 54 bp, Artificial; identical to SEQ ID NO: 310769
  Synthetic oligonucleotide

SEQ ID NO: 540182 - DNA, 59 bp, Artificial; identical to SEQ ID NO: 310771
  Synthetic oligonucleotide

SEQ ID NO: 540183 - DNA, 60 bp, Artificial; identical to SEQ ID NO: 310774
  Synthetic oligonucleotide

SEQ ID NO: 540184 - DNA, 60 bp, Artificial; identical to SEQ ID NO: 310775
  Synthetic oligonucleotide

SEQ ID NO: 540185 - DNA, 60 bp, Artificial; identical to SEQ ID NO: 310776
  Synthetic oligonucleotide

SEQ ID NO: 540186 - DNA, 57 bp, Artificial; identical to SEQ ID NO: 310779
  Synthetic oligonucleotide

SEQ ID NO: 540187 - DNA, 55 bp, Artificial; identical to SEQ ID NO: 310781
  Synthetic oligonucleotide

SEQ ID NO: 540188 - DNA, 55 bp, Artificial; identical to SEQ ID NO: 310782
  Synthetic oligonucleotide

SEQ ID NO: 540189 - DNA, 57 bp, Artificial; identical to SEQ ID NO: 310783
  Synthetic oligonucleotide

SEQ ID NO: 540190 - DNA, 59 bp, Artificial; identical to SEQ ID NO: 310784
  Synthetic oligonucleotide

SEQ ID NO: 540191 - DNA, 53 bp, Artificial; identical to SEQ ID NO: 310785
  Synthetic oligonucleotide

SEQ ID NO: 540192 - DNA, 60 bp, Artificial; identical to SEQ ID NO: 310788
  Synthetic oligonucleotide

SEQ ID NO: 540193 - DNA, 55 bp, Artificial; identical to SEQ ID NO: 310789
  Synthetic oligonucleotide

SEQ ID NO: 540194 - DNA, 57 bp, Artificial; identical to SEQ ID NO: 310792
  Synthetic oligonucleotide

SEQ ID NO: 540195 - DNA, 54 bp, Artificial; identical to SEQ ID NO: 310793
  Synthetic oligonucleotide

SEQ ID NO: 540196 - DNA, 54 bp, Artificial; identical to SEQ ID NO: 310794
  Synthetic oligonucleotide

SEQ ID NO: 540197 - DNA, 60 bp, Artificial; identical to SEQ ID NO: 7735
  Synthetic oligonucleotide

SEQ ID NO: 540198 - DNA, 60 bp, Artificial; identical to SEQ ID NO: 310795
  Synthetic oligonucleotide

SEQ ID NO: 540199 - DNA, 60 bp, Artificial; identical to SEQ ID NO: 310796
  Synthetic oligonucleotide

SEQ ID NO: 540200 - DNA, 50 bp, Artificial; identical to SEQ ID NO: 310797
  Synthetic oligonucleotide

SEQ ID NO: 540201 - DNA, 59 bp, Artificial; identical to SEQ ID NO: 310799
  Synthetic oligonucleotide

SEQ ID NO: 540202 - DNA, 58 bp, Artificial; identical to SEQ ID NO: 310801
  Synthetic oligonucleotide

SEQ ID NO: 540203 - DNA, 60 bp, Artificial; identical to SEQ ID NO: 310805
  Synthetic oligonucleotide

SEQ ID NO: 540204 - DNA, 55 bp, Artificial; identical to SEQ ID NO: 310807
  Synthetic oligonucleotide

SEQ ID NO: 540205 - DNA, 58 bp, Artificial; identical to SEQ ID NO: 310808
  Synthetic oligonucleotide

SEQ ID NO: 540206 - DNA, 52 bp, Artificial; identical to SEQ ID NO: 310810
  Synthetic oligonucleotide

SEQ ID NO: 540207 - DNA, 60 bp, Artificial; identical to SEQ ID NO: 310811
  Synthetic oligonucleotide

SEQ ID NO: 540208 - DNA, 60 bp, Artificial; identical to SEQ ID NO: 310815
  Synthetic oligonucleotide

SEQ ID NO: 540209 - DNA, 55 bp, Artificial; identical to SEQ ID NO: 310816
  Synthetic oligonucleotide

SEQ ID NO: 540210 - DNA, 55 bp, Artificial; identical to SEQ ID NO: 310819
  Synthetic oligonucleotide

SEQ ID NO: 540211 - DNA, 60 bp, Artificial; identical to SEQ ID NO: 310821
  Synthetic oligonucleotide

SEQ ID NO: 540212 - DNA, 60 bp, Artificial; identical to SEQ ID NO: 310823
  Synthetic oligonucleotide

SEQ ID NO: 540213 - DNA, 59 bp, Artificial; identical to SEQ ID NO: 310825
  Synthetic oligonucleotide

SEQ ID NO: 540214 - DNA, 60 bp, Artificial; identical to SEQ ID NO: 310826
  Synthetic oligonucleotide

SEQ ID NO: 540215 - DNA, 59 bp, Artificial; identical to SEQ ID NO: 310828
  Synthetic oligonucleotide

SEQ ID NO: 540216 - DNA, 59 bp, Artificial; identical to SEQ ID NO: 310830
  Synthetic oligonucleotide

SEQ ID NO: 540217 - DNA, 55 bp, Artificial; identical to SEQ ID NO: 310832
  Synthetic oligonucleotide

SEQ ID NO: 540218 - DNA, 51 bp, Artificial; identical to SEQ ID NO: 310835
  Synthetic oligonucleotide

SEQ ID NO: 540219 - DNA, 60 bp, Artificial; identical to SEQ ID NO: 310837
  Synthetic oligonucleotide

SEQ ID NO: 540220 - DNA, 53 bp, Artificial; identical to SEQ ID NO: 310838
  Synthetic oligonucleotide

SEQ ID NO: 540221 - DNA, 60 bp, Artificial; identical to SEQ ID NO: 310840
  Synthetic oligonucleotide

SEQ ID NO: 540222 - DNA, 55 bp, Artificial; identical to SEQ ID NO: 310841
  Synthetic oligonucleotide

SEQ ID NO: 540223 - DNA, 51 bp, Artificial; identical to SEQ ID NO: 310845
  Synthetic oligonucleotide

SEQ ID NO: 540224 - DNA, 60 bp, Artificial; identical to SEQ ID NO: 310846
  Synthetic oligonucleotide

SEQ ID NO: 540225 - DNA, 55 bp, Artificial; identical to SEQ ID NO: 310847
  Synthetic oligonucleotide

SEQ ID NO: 540226 - DNA, 58 bp, Artificial; identical to SEQ ID NO: 310851
  Synthetic oligonucleotide

SEQ ID NO: 540227 - DNA, 52 bp, Artificial; identical to SEQ ID NO: 310858
  Synthetic oligonucleotide

SEQ ID NO: 540228 - DNA, 51 bp, Artificial; identical to SEQ ID NO: 310859
  Synthetic oligonucleotide

SEQ ID NO: 540229 - DNA, 55 bp, Artificial; identical to SEQ ID NO: 310860
  Synthetic oligonucleotide

SEQ ID NO: 540230 - DNA, 60 bp, Artificial; identical to SEQ ID NO: 310862
  Synthetic oligonucleotide

SEQ ID NO: 540231 - DNA, 51 bp, Artificial; identical to SEQ ID NO: 310865
  Synthetic oligonucleotide

SEQ ID NO: 540232 - DNA, 55 bp, Artificial; identical to SEQ ID NO: 310866
  Synthetic oligonucleotide

SEQ ID NO: 540233 - DNA, 60 bp, Artificial; identical to SEQ ID NO: 310867
  Synthetic oligonucleotide

SEQ ID NO: 540234 - DNA, 58 bp, Artificial; identical to SEQ ID NO: 310868
  Synthetic oligonucleotide

SEQ ID NO: 540235 - DNA, 53 bp, Artificial; identical to SEQ ID NO: 310870
  Synthetic oligonucleotide

SEQ ID NO: 540236 - DNA, 59 bp, Artificial; identical to SEQ ID NO: 310873
  Synthetic oligonucleotide

SEQ ID NO: 540237 - DNA, 58 bp, Artificial; identical to SEQ ID NO: 310874
  Synthetic oligonucleotide

SEQ ID NO: 540238 - DNA, 60 bp, Artificial; identical to SEQ ID NO: 310875
  Synthetic oligonucleotide

SEQ ID NO: 540239 - DNA, 55 bp, Artificial; identical to SEQ ID NO: 310876
  Synthetic oligonucleotide

SEQ ID NO: 540240 - DNA, 51 bp, Artificial; identical to SEQ ID NO: 310877
  Synthetic oligonucleotide

SEQ ID NO: 540241 - DNA, 55 bp, Artificial; identical to SEQ ID NO: 310881
  Synthetic oligonucleotide

SEQ ID NO: 540242 - DNA, 60 bp, Artificial; identical to SEQ ID NO: 310882
  Synthetic oligonucleotide

SEQ ID NO: 540243 - DNA, 55 bp, Artificial; identical to SEQ ID NO: 310883
  Synthetic oligonucleotide

SEQ ID NO: 540244 - DNA, 59 bp, Artificial; identical to SEQ ID NO: 310886
  Synthetic oligonucleotide

SEQ ID NO: 540245 - DNA, 52 bp, Artificial; identical to SEQ ID NO: 310889
  Synthetic oligonucleotide

SEQ ID NO: 540246 - DNA, 60 bp, Artificial; identical to SEQ ID NO: 310890
  Synthetic oligonucleotide

SEQ ID NO: 540247 - DNA, 59 bp, Artificial; identical to SEQ ID NO: 310893
  Synthetic oligonucleotide

SEQ ID NO: 540248 - DNA, 59 bp, Artificial; identical to SEQ ID NO: 310895
  Synthetic oligonucleotide

SEQ ID NO: 540249 - DNA, 52 bp, Artificial; identical to SEQ ID NO: 310897
  Synthetic oligonucleotide

SEQ ID NO: 540250 - DNA, 60 bp, Artificial; identical to SEQ ID NO: 310905
  Synthetic oligonucleotide

SEQ ID NO: 540251 - DNA, 54 bp, Artificial; identical to SEQ ID NO: 310906
  Synthetic oligonucleotide

SEQ ID NO: 540252 - DNA, 60 bp, Artificial; identical to SEQ ID NO: 310911
  Synthetic oligonucleotide

SEQ ID NO: 540253 - DNA, 60 bp, Artificial; identical to SEQ ID NO: 310912
  Synthetic oligonucleotide

SEQ ID NO: 540254 - DNA, 60 bp, Artificial; identical to SEQ ID NO: 310914
  Synthetic oligonucleotide

SEQ ID NO: 540255 - DNA, 52 bp, Artificial; identical to SEQ ID NO: 310916
  Synthetic oligonucleotide

SEQ ID NO: 540256 - DNA, 52 bp, Artificial; identical to SEQ ID NO: 310918
  Synthetic oligonucleotide

SEQ ID NO: 540257 - DNA, 55 bp, Artificial; identical to SEQ ID NO: 310923
  Synthetic oligonucleotide

SEQ ID NO: 540258 - DNA, 60 bp, Artificial; identical to SEQ ID NO: 9846
  Synthetic oligonucleotide

SEQ ID NO: 540259 - DNA, 60 bp, Artificial; identical to SEQ ID NO: 310925
  Synthetic oligonucleotide

SEQ ID NO: 540260 - DNA, 60 bp, Artificial; identical to SEQ ID NO: 310926
  Synthetic oligonucleotide

SEQ ID NO: 540261 - DNA, 56 bp, Artificial; identical to SEQ ID NO: 310930
  Synthetic oligonucleotide

SEQ ID NO: 540262 - DNA, 51 bp, Artificial; identical to SEQ ID NO: 310931
  Synthetic oligonucleotide

SEQ ID NO: 540263 - DNA, 50 bp, Artificial; identical to SEQ ID NO: 310935
  Synthetic oligonucleotide

SEQ ID NO: 540264 - DNA, 52 bp, Artificial; identical to SEQ ID NO: 310936
  Synthetic oligonucleotide

SEQ ID NO: 540265 - DNA, 60 bp, Artificial; identical to SEQ ID NO: 310937
  Synthetic oligonucleotide

SEQ ID NO: 540266 - DNA, 60 bp, Artificial; identical to SEQ ID NO: 310938
  Synthetic oligonucleotide

SEQ ID NO: 540267 - DNA, 55 bp, Artificial; identical to SEQ ID NO: 310941
  Synthetic oligonucleotide

SEQ ID NO: 540268 - DNA, 51 bp, Artificial; identical to SEQ ID NO: 310943
  Synthetic oligonucleotide

SEQ ID NO: 540269 - DNA, 60 bp, Artificial; identical to SEQ ID NO: 310944
  Synthetic oligonucleotide

SEQ ID NO: 540270 - DNA, 54 bp, Artificial; identical to SEQ ID NO: 310947
  Synthetic oligonucleotide

SEQ ID NO: 540271 - DNA, 56 bp, Artificial; identical to SEQ ID NO: 18050
  Synthetic oligonucleotide

SEQ ID NO: 540272 - DNA, 51 bp, Artificial; identical to SEQ ID NO: 310950
  Synthetic oligonucleotide

SEQ ID NO: 540273 - DNA, 51 bp, Artificial; identical to SEQ ID NO: 310952
  Synthetic oligonucleotide

SEQ ID NO: 540274 - DNA, 55 bp, Artificial; identical to SEQ ID NO: 310953
  Synthetic oligonucleotide

SEQ ID NO: 540275 - DNA, 57 bp, Artificial; identical to SEQ ID NO: 310957
  Synthetic oligonucleotide

SEQ ID NO: 540276 - DNA, 55 bp, Artificial; identical to SEQ ID NO: 310959
  Synthetic oligonucleotide

SEQ ID NO: 540277 - DNA, 52 bp, Artificial; identical to SEQ ID NO: 310964
  Synthetic oligonucleotide

SEQ ID NO: 540278 - DNA, 58 bp, Artificial; identical to SEQ ID NO: 310966
  Synthetic oligonucleotide

SEQ ID NO: 540279 - DNA, 56 bp, Artificial; identical to SEQ ID NO: 310973
  Synthetic oligonucleotide

SEQ ID NO: 540280 - DNA, 60 bp, Artificial; identical to SEQ ID NO: 310975
  Synthetic oligonucleotide

SEQ ID NO: 540281 - DNA, 53 bp, Artificial; identical to SEQ ID NO: 310976
  Synthetic oligonucleotide

SEQ ID NO: 540282 - DNA, 52 bp, Artificial; identical to SEQ ID NO: 310978
  Synthetic oligonucleotide

SEQ ID NO: 540283 - DNA, 57 bp, Artificial; identical to SEQ ID NO: 310979
  Synthetic oligonucleotide

SEQ ID NO: 540284 - DNA, 55 bp, Artificial; identical to SEQ ID NO: 310981
  Synthetic oligonucleotide

SEQ ID NO: 540285 - DNA, 55 bp, Artificial; identical to SEQ ID NO: 310983
  Synthetic oligonucleotide

SEQ ID NO: 540286 - DNA, 60 bp, Artificial; identical to SEQ ID NO: 310984
  Synthetic oligonucleotide

SEQ ID NO: 540287 - DNA, 54 bp, Artificial; identical to SEQ ID NO: 310987
  Synthetic oligonucleotide

SEQ ID NO: 540288 - DNA, 56 bp, Artificial; identical to SEQ ID NO: 310993
  Synthetic oligonucleotide

SEQ ID NO: 540289 - DNA, 60 bp, Artificial; identical to SEQ ID NO: 310995
  Synthetic oligonucleotide

SEQ ID NO: 540290 - DNA, 60 bp, Artificial; identical to SEQ ID NO: 12619
  Synthetic oligonucleotide

SEQ ID NO: 540291 - DNA, 58 bp, Artificial; identical to SEQ ID NO: 310997
  Synthetic oligonucleotide

SEQ ID NO: 540292 - DNA, 60 bp, Artificial; identical to SEQ ID NO: 310998
  Synthetic oligonucleotide

SEQ ID NO: 540293 - DNA, 55 bp, Artificial; identical to SEQ ID NO: 310999
  Synthetic oligonucleotide

SEQ ID NO: 540294 - DNA, 60 bp, Artificial; identical to SEQ ID NO: 311000
  Synthetic oligonucleotide

SEQ ID NO: 540295 - DNA, 51 bp, Artificial; identical to SEQ ID NO: 311001
  Synthetic oligonucleotide

SEQ ID NO: 540296 - DNA, 55 bp, Artificial; identical to SEQ ID NO: 311002
  Synthetic oligonucleotide

SEQ ID NO: 540297 - DNA, 56 bp, Artificial; identical to SEQ ID NO: 18137
  Synthetic oligonucleotide

SEQ ID NO: 540298 - DNA, 58 bp, Artificial; identical to SEQ ID NO: 15983
  Synthetic oligonucleotide

SEQ ID NO: 540299 - DNA, 56 bp, Artificial; identical to SEQ ID NO: 311008
  Synthetic oligonucleotide

SEQ ID NO: 540300 - DNA, 55 bp, Artificial; identical to SEQ ID NO: 311009
  Synthetic oligonucleotide

SEQ ID NO: 540301 - DNA, 60 bp, Artificial; identical to SEQ ID NO: 311010
  Synthetic oligonucleotide

SEQ ID NO: 540302 - DNA, 51 bp, Artificial; identical to SEQ ID NO: 311011
  Synthetic oligonucleotide

SEQ ID NO: 540303 - DNA, 51 bp, Artificial; identical to SEQ ID NO: 311012
  Synthetic oligonucleotide

SEQ ID NO: 540304 - DNA, 60 bp, Artificial; identical to SEQ ID NO: 311013
  Synthetic oligonucleotide

SEQ ID NO: 540305 - DNA, 54 bp, Artificial; identical to SEQ ID NO: 311015
  Synthetic oligonucleotide

SEQ ID NO: 540306 - DNA, 55 bp, Artificial; identical to SEQ ID NO: 311017
  Synthetic oligonucleotide

SEQ ID NO: 540307 - DNA, 52 bp, Artificial; identical to SEQ ID NO: 311018
  Synthetic oligonucleotide

SEQ ID NO: 540308 - DNA, 58 bp, Artificial; identical to SEQ ID NO: 311019
  Synthetic oligonucleotide

SEQ ID NO: 540309 - DNA, 56 bp, Artificial; identical to SEQ ID NO: 311020
  Synthetic oligonucleotide

SEQ ID NO: 540310 - DNA, 60 bp, Artificial; identical to SEQ ID NO: 311022
  Synthetic oligonucleotide

SEQ ID NO: 540311 - DNA, 56 bp, Artificial; identical to SEQ ID NO: 311026
  Synthetic oligonucleotide

SEQ ID NO: 540312 - DNA, 58 bp, Artificial; identical to SEQ ID NO: 311027
  Synthetic oligonucleotide

SEQ ID NO: 540313 - DNA, 54 bp, Artificial; identical to SEQ ID NO: 311028
  Synthetic oligonucleotide

SEQ ID NO: 540314 - DNA, 53 bp, Artificial; identical to SEQ ID NO: 311030
  Synthetic oligonucleotide

SEQ ID NO: 540315 - DNA, 55 bp, Artificial; identical to SEQ ID NO: 311033
  Synthetic oligonucleotide

SEQ ID NO: 540316 - DNA, 57 bp, Artificial; identical to SEQ ID NO: 311035
  Synthetic oligonucleotide

SEQ ID NO: 540317 - DNA, 54 bp, Artificial; identical to SEQ ID NO: 311037
  Synthetic oligonucleotide

SEQ ID NO: 540318 - DNA, 55 bp, Artificial; identical to SEQ ID NO: 311038
  Synthetic oligonucleotide

SEQ ID NO: 540319 - DNA, 58 bp, Artificial; identical to SEQ ID NO: 311039
  Synthetic oligonucleotide

SEQ ID NO: 540320 - DNA, 55 bp, Artificial; identical to SEQ ID NO: 311041
  Synthetic oligonucleotide

SEQ ID NO: 540321 - DNA, 58 bp, Artificial; identical to SEQ ID NO: 311046
  Synthetic oligonucleotide

SEQ ID NO: 540322 - DNA, 58 bp, Artificial; identical to SEQ ID NO: 311048
  Synthetic oligonucleotide

SEQ ID NO: 540323 - DNA, 56 bp, Artificial; identical to SEQ ID NO: 311052
  Synthetic oligonucleotide

SEQ ID NO: 540324 - DNA, 53 bp, Artificial; identical to SEQ ID NO: 311054
  Synthetic oligonucleotide

SEQ ID NO: 540325 - DNA, 56 bp, Artificial; identical to SEQ ID NO: 311056
  Synthetic oligonucleotide

SEQ ID NO: 540326 - DNA, 51 bp, Artificial; identical to SEQ ID NO: 311057
  Synthetic oligonucleotide

SEQ ID NO: 540327 - DNA, 60 bp, Artificial; identical to SEQ ID NO: 311060
  Synthetic oligonucleotide

SEQ ID NO: 540328 - DNA, 52 bp, Artificial; identical to SEQ ID NO: 311062
  Synthetic oligonucleotide

SEQ ID NO: 540329 - DNA, 53 bp, Artificial; identical to SEQ ID NO: 311063
  Synthetic oligonucleotide

SEQ ID NO: 540330 - DNA, 58 bp, Artificial; identical to SEQ ID NO: 311065
  Synthetic oligonucleotide

SEQ ID NO: 540331 - DNA, 58 bp, Artificial; identical to SEQ ID NO: 311067
  Synthetic oligonucleotide

SEQ ID NO: 540332 - DNA, 60 bp, Artificial; identical to SEQ ID NO: 311068
  Synthetic oligonucleotide

SEQ ID NO: 540333 - DNA, 53 bp, Artificial; identical to SEQ ID NO: 311069
  Synthetic oligonucleotide

SEQ ID NO: 540334 - DNA, 52 bp, Artificial; identical to SEQ ID NO: 311070
  Synthetic oligonucleotide

SEQ ID NO: 540335 - DNA, 54 bp, Artificial; identical to SEQ ID NO: 311071
  Synthetic oligonucleotide

SEQ ID NO: 540336 - DNA, 58 bp, Artificial; identical to SEQ ID NO: 311074
  Synthetic oligonucleotide

SEQ ID NO: 540337 - DNA, 59 bp, Artificial; identical to SEQ ID NO: 311076
  Synthetic oligonucleotide

SEQ ID NO: 540338 - DNA, 53 bp, Artificial; identical to SEQ ID NO: 10607
  Synthetic oligonucleotide

SEQ ID NO: 540339 - DNA, 55 bp, Artificial; identical to SEQ ID NO: 311077
  Synthetic oligonucleotide

SEQ ID NO: 540340 - DNA, 55 bp, Artificial; identical to SEQ ID NO: 311078
  Synthetic oligonucleotide

SEQ ID NO: 540341 - DNA, 56 bp, Artificial; identical to SEQ ID NO: 311080
  Synthetic oligonucleotide

SEQ ID NO: 540342 - DNA, 55 bp, Artificial; identical to SEQ ID NO: 311081
  Synthetic oligonucleotide

SEQ ID NO: 540343 - DNA, 59 bp, Artificial; identical to SEQ ID NO: 311085
  Synthetic oligonucleotide

SEQ ID NO: 540344 - DNA, 55 bp, Artificial; identical to SEQ ID NO: 311088
  Synthetic oligonucleotide

SEQ ID NO: 540345 - DNA, 60 bp, Artificial; identical to SEQ ID NO: 311089
  Synthetic oligonucleotide

SEQ ID NO: 540346 - DNA, 53 bp, Artificial; identical to SEQ ID NO: 311091
  Synthetic oligonucleotide

SEQ ID NO: 540347 - DNA, 52 bp, Artificial; identical to SEQ ID NO: 311093
  Synthetic oligonucleotide

SEQ ID NO: 540348 - DNA, 57 bp, Artificial; identical to SEQ ID NO: 311094
  Synthetic oligonucleotide

SEQ ID NO: 540349 - DNA, 53 bp, Artificial; identical to SEQ ID NO: 311097
  Synthetic oligonucleotide

SEQ ID NO: 540350 - DNA, 51 bp, Artificial; identical to SEQ ID NO: 311098
  Synthetic oligonucleotide

SEQ ID NO: 540351 - DNA, 53 bp, Artificial; identical to SEQ ID NO: 311099
  Synthetic oligonucleotide

SEQ ID NO: 540352 - DNA, 54 bp, Artificial; identical to SEQ ID NO: 311100
  Synthetic oligonucleotide

SEQ ID NO: 540353 - DNA, 58 bp, Artificial; identical to SEQ ID NO: 311102
  Synthetic oligonucleotide

SEQ ID NO: 540354 - DNA, 56 bp, Artificial; identical to SEQ ID NO: 311104
  Synthetic oligonucleotide

SEQ ID NO: 540355 - DNA, 55 bp, Artificial; identical to SEQ ID NO: 311113
  Synthetic oligonucleotide

SEQ ID NO: 540356 - DNA, 53 bp, Artificial; identical to SEQ ID NO: 311114
  Synthetic oligonucleotide

SEQ ID NO: 540357 - DNA, 53 bp, Artificial; identical to SEQ ID NO: 311115
  Synthetic oligonucleotide

SEQ ID NO: 540358 - DNA, 54 bp, Artificial; identical to SEQ ID NO: 311116
  Synthetic oligonucleotide

SEQ ID NO: 540359 - DNA, 54 bp, Artificial; identical to SEQ ID NO: 311118
  Synthetic oligonucleotide

SEQ ID NO: 540360 - DNA, 55 bp, Artificial; identical to SEQ ID NO: 311119
  Synthetic oligonucleotide

SEQ ID NO: 540361 - DNA, 60 bp, Artificial; identical to SEQ ID NO: 311122
  Synthetic oligonucleotide

SEQ ID NO: 540362 - DNA, 58 bp, Artificial; identical to SEQ ID NO: 311123
  Synthetic oligonucleotide

SEQ ID NO: 540363 - DNA, 55 bp, Artificial; identical to SEQ ID NO: 311129
  Synthetic oligonucleotide

SEQ ID NO: 540364 - DNA, 60 bp, Artificial; identical to SEQ ID NO: 311130
  Synthetic oligonucleotide

SEQ ID NO: 540365 - DNA, 59 bp, Artificial; identical to SEQ ID NO: 311139
  Synthetic oligonucleotide

SEQ ID NO: 540366 - DNA, 57 bp, Artificial; identical to SEQ ID NO: 311140
  Synthetic oligonucleotide

SEQ ID NO: 540367 - DNA, 55 bp, Artificial; identical to SEQ ID NO: 311143
  Synthetic oligonucleotide

SEQ ID NO: 540368 - DNA, 53 bp, Artificial; identical to SEQ ID NO: 311145
  Synthetic oligonucleotide

SEQ ID NO: 540369 - DNA, 54 bp, Artificial; identical to SEQ ID NO: 311147
  Synthetic oligonucleotide

SEQ ID NO: 540370 - DNA, 60 bp, Artificial; identical to SEQ ID NO: 311148
  Synthetic oligonucleotide

SEQ ID NO: 540371 - DNA, 55 bp, Artificial; identical to SEQ ID NO: 311149
  Synthetic oligonucleotide

SEQ ID NO: 540372 - DNA, 57 bp, Artificial; identical to SEQ ID NO: 311152
  Synthetic oligonucleotide

SEQ ID NO: 540373 - DNA, 57 bp, Artificial; identical to SEQ ID NO: 311156
  Synthetic oligonucleotide

SEQ ID NO: 540374 - DNA, 60 bp, Artificial; identical to SEQ ID NO: 311158
  Synthetic oligonucleotide

SEQ ID NO: 540375 - DNA, 54 bp, Artificial; identical to SEQ ID NO: 311164
  Synthetic oligonucleotide

SEQ ID NO: 540376 - DNA, 57 bp, Artificial; identical to SEQ ID NO: 311165
  Synthetic oligonucleotide

SEQ ID NO: 540377 - DNA, 56 bp, Artificial; identical to SEQ ID NO: 311166
  Synthetic oligonucleotide

SEQ ID NO: 540378 - DNA, 57 bp, Artificial; identical to SEQ ID NO: 311167
  Synthetic oligonucleotide

SEQ ID NO: 540379 - DNA, 54 bp, Artificial; identical to SEQ ID NO: 311169
  Synthetic oligonucleotide

SEQ ID NO: 540380 - DNA, 56 bp, Artificial; identical to SEQ ID NO: 311171
  Synthetic oligonucleotide

SEQ ID NO: 540381 - DNA, 59 bp, Artificial; identical to SEQ ID NO: 311178
  Synthetic oligonucleotide

SEQ ID NO: 540382 - DNA, 60 bp, Artificial; identical to SEQ ID NO: 311183
  Synthetic oligonucleotide

SEQ ID NO: 540383 - DNA, 60 bp, Artificial; identical to SEQ ID NO: 311185
  Synthetic oligonucleotide

SEQ ID NO: 540384 - DNA, 55 bp, Artificial; identical to SEQ ID NO: 311186
  Synthetic oligonucleotide

SEQ ID NO: 540385 - DNA, 60 bp, Artificial; identical to SEQ ID NO: 311187
  Synthetic oligonucleotide

SEQ ID NO: 540386 - DNA, 55 bp, Artificial; identical to SEQ ID NO: 311190
  Synthetic oligonucleotide

SEQ ID NO: 540387 - DNA, 56 bp, Artificial; identical to SEQ ID NO: 82
  Synthetic oligonucleotide

SEQ ID NO: 540388 - DNA, 53 bp, Artificial; identical to SEQ ID NO: 20279
  Synthetic oligonucleotide

SEQ ID NO: 540389 - DNA, 58 bp, Artificial; identical to SEQ ID NO: 311195
  Synthetic oligonucleotide

SEQ ID NO: 540390 - DNA, 59 bp, Artificial; identical to SEQ ID NO: 311197
  Synthetic oligonucleotide

SEQ ID NO: 540391 - DNA, 60 bp, Artificial; identical to SEQ ID NO: 311200
  Synthetic oligonucleotide

SEQ ID NO: 540392 - DNA, 60 bp, Artificial; identical to SEQ ID NO: 311202
  Synthetic oligonucleotide

SEQ ID NO: 540393 - DNA, 55 bp, Artificial; identical to SEQ ID NO: 311205
  Synthetic oligonucleotide

SEQ ID NO: 540394 - DNA, 60 bp, Artificial; identical to SEQ ID NO: 311206
  Synthetic oligonucleotide

SEQ ID NO: 540395 - DNA, 55 bp, Artificial; identical to SEQ ID NO: 311208
  Synthetic oligonucleotide

SEQ ID NO: 540396 - DNA, 55 bp, Artificial; identical to SEQ ID NO: 311209
  Synthetic oligonucleotide

SEQ ID NO: 540397 - DNA, 60 bp, Artificial; identical to SEQ ID NO: 311220
  Synthetic oligonucleotide

SEQ ID NO: 540398 - DNA, 57 bp, Artificial; identical to SEQ ID NO: 6140
  Synthetic oligonucleotide

SEQ ID NO: 540399 - DNA, 54 bp, Artificial; identical to SEQ ID NO: 311221
  Synthetic oligonucleotide

SEQ ID NO: 540400 - DNA, 55 bp, Artificial; identical to SEQ ID NO: 311222
  Synthetic oligonucleotide

SEQ ID NO: 540401 - DNA, 54 bp, Artificial; identical to SEQ ID NO: 311228
  Synthetic oligonucleotide

SEQ ID NO: 540402 - DNA, 56 bp, Artificial; identical to SEQ ID NO: 311229
  Synthetic oligonucleotide

SEQ ID NO: 540403 - DNA, 60 bp, Artificial; identical to SEQ ID NO: 311230
  Synthetic oligonucleotide

SEQ ID NO: 540404 - DNA, 53 bp, Artificial; identical to SEQ ID NO: 311231
  Synthetic oligonucleotide

SEQ ID NO: 540405 - DNA, 60 bp, Artificial; identical to SEQ ID NO: 311233
  Synthetic oligonucleotide

SEQ ID NO: 540406 - DNA, 55 bp, Artificial; identical to SEQ ID NO: 311236
  Synthetic oligonucleotide

SEQ ID NO: 540407 - DNA, 57 bp, Artificial; identical to SEQ ID NO: 311237
  Synthetic oligonucleotide

SEQ ID NO: 540408 - DNA, 60 bp, Artificial; identical to SEQ ID NO: 311243
  Synthetic oligonucleotide

SEQ ID NO: 540409 - DNA, 57 bp, Artificial; identical to SEQ ID NO: 311245
  Synthetic oligonucleotide

SEQ ID NO: 540410 - DNA, 57 bp, Artificial; identical to SEQ ID NO: 311248
  Synthetic oligonucleotide

SEQ ID NO: 540411 - DNA, 60 bp, Artificial; identical to SEQ ID NO: 311250
  Synthetic oligonucleotide

SEQ ID NO: 540412 - DNA, 56 bp, Artificial; identical to SEQ ID NO: 311252
  Synthetic oligonucleotide

SEQ ID NO: 540413 - DNA, 60 bp, Artificial; identical to SEQ ID NO: 311253
  Synthetic oligonucleotide

SEQ ID NO: 540414 - DNA, 58 bp, Artificial; identical to SEQ ID NO: 16335
  Synthetic oligonucleotide

SEQ ID NO: 540415 - DNA, 57 bp, Artificial; identical to SEQ ID NO: 311259
  Synthetic oligonucleotide

SEQ ID NO: 540416 - DNA, 53 bp, Artificial; identical to SEQ ID NO: 311262
  Synthetic oligonucleotide

SEQ ID NO: 540417 - DNA, 54 bp, Artificial; identical to SEQ ID NO: 11303
  Synthetic oligonucleotide

SEQ ID NO: 540418 - DNA, 59 bp, Artificial; identical to SEQ ID NO: 311264
  Synthetic oligonucleotide

SEQ ID NO: 540419 - DNA, 60 bp, Artificial; identical to SEQ ID NO: 311266
  Synthetic oligonucleotide

SEQ ID NO: 540420 - DNA, 53 bp, Artificial; identical to SEQ ID NO: 311267
  Synthetic oligonucleotide

SEQ ID NO: 540421 - DNA, 50 bp, Artificial; identical to SEQ ID NO: 311268
  Synthetic oligonucleotide

SEQ ID NO: 540422 - DNA, 57 bp, Artificial; identical to SEQ ID NO: 311270
  Synthetic oligonucleotide

SEQ ID NO: 540423 - DNA, 53 bp, Artificial; identical to SEQ ID NO: 311271
  Synthetic oligonucleotide

SEQ ID NO: 540424 - DNA, 55 bp, Artificial; identical to SEQ ID NO: 311274
  Synthetic oligonucleotide

SEQ ID NO: 540425 - DNA, 55 bp, Artificial; identical to SEQ ID NO: 311275
  Synthetic oligonucleotide

SEQ ID NO: 540426 - DNA, 60 bp, Artificial; identical to SEQ ID NO: 311276
  Synthetic oligonucleotide

SEQ ID NO: 540427 - DNA, 57 bp, Artificial; identical to SEQ ID NO: 311277
  Synthetic oligonucleotide

SEQ ID NO: 540428 - DNA, 51 bp, Artificial; identical to SEQ ID NO: 311280
  Synthetic oligonucleotide

SEQ ID NO: 540429 - DNA, 57 bp, Artificial; identical to SEQ ID NO: 311283
  Synthetic oligonucleotide

SEQ ID NO: 540430 - DNA, 49 bp, Artificial; identical to SEQ ID NO: 311285
  Synthetic oligonucleotide

SEQ ID NO: 540431 - DNA, 53 bp, Artificial; identical to SEQ ID NO: 311287
  Synthetic oligonucleotide

SEQ ID NO: 540432 - DNA, 55 bp, Artificial; identical to SEQ ID NO: 311289
  Synthetic oligonucleotide

SEQ ID NO: 540433 - DNA, 57 bp, Artificial; identical to SEQ ID NO: 311290
  Synthetic oligonucleotide

SEQ ID NO: 540434 - DNA, 60 bp, Artificial; identical to SEQ ID NO: 311292
  Synthetic oligonucleotide

SEQ ID NO: 540435 - DNA, 55 bp, Artificial; identical to SEQ ID NO: 311293
  Synthetic oligonucleotide

SEQ ID NO: 540436 - DNA, 57 bp, Artificial; identical to SEQ ID NO: 311294
  Synthetic oligonucleotide

SEQ ID NO: 540437 - DNA, 59 bp, Artificial; identical to SEQ ID NO: 311299
  Synthetic oligonucleotide

SEQ ID NO: 540438 - DNA, 60 bp, Artificial; identical to SEQ ID NO: 311301
  Synthetic oligonucleotide

SEQ ID NO: 540439 - DNA, 56 bp, Artificial; identical to SEQ ID NO: 311302
  Synthetic oligonucleotide

SEQ ID NO: 540440 - DNA, 60 bp, Artificial; identical to SEQ ID NO: 311304
  Synthetic oligonucleotide

SEQ ID NO: 540441 - DNA, 57 bp, Artificial; identical to SEQ ID NO: 311305
  Synthetic oligonucleotide

SEQ ID NO: 540442 - DNA, 56 bp, Artificial; identical to SEQ ID NO: 311311
  Synthetic oligonucleotide

SEQ ID NO: 540443 - DNA, 55 bp, Artificial; identical to SEQ ID NO: 311313
  Synthetic oligonucleotide

SEQ ID NO: 540444 - DNA, 54 bp, Artificial; identical to SEQ ID NO: 311319
  Synthetic oligonucleotide

SEQ ID NO: 540445 - DNA, 60 bp, Artificial; identical to SEQ ID NO: 311322
  Synthetic oligonucleotide

SEQ ID NO: 540446 - DNA, 59 bp, Artificial; identical to SEQ ID NO: 311323
  Synthetic oligonucleotide

SEQ ID NO: 540447 - DNA, 57 bp, Artificial; identical to SEQ ID NO: 311324
  Synthetic oligonucleotide

SEQ ID NO: 540448 - DNA, 55 bp, Artificial; identical to SEQ ID NO: 311326
  Synthetic oligonucleotide

SEQ ID NO: 540449 - DNA, 52 bp, Artificial; identical to SEQ ID NO: 311327
  Synthetic oligonucleotide

SEQ ID NO: 540450 - DNA, 54 bp, Artificial; identical to SEQ ID NO: 311328
  Synthetic oligonucleotide

SEQ ID NO: 540451 - DNA, 58 bp, Artificial; identical to SEQ ID NO: 311329
  Synthetic oligonucleotide

SEQ ID NO: 540452 - DNA, 54 bp, Artificial; identical to SEQ ID NO: 311331
  Synthetic oligonucleotide

SEQ ID NO: 540453 - DNA, 57 bp, Artificial; identical to SEQ ID NO: 311333
  Synthetic oligonucleotide

SEQ ID NO: 540454 - DNA, 60 bp, Artificial; identical to SEQ ID NO: 311337
  Synthetic oligonucleotide

SEQ ID NO: 540455 - DNA, 59 bp, Artificial; identical to SEQ ID NO: 311340
  Synthetic oligonucleotide

SEQ ID NO: 540456 - DNA, 55 bp, Artificial; identical to SEQ ID NO: 311347
  Synthetic oligonucleotide

SEQ ID NO: 540457 - DNA, 60 bp, Artificial; identical to SEQ ID NO: 311349
  Synthetic oligonucleotide

SEQ ID NO: 540458 - DNA, 55 bp, Artificial; identical to SEQ ID NO: 311350
  Synthetic oligonucleotide

SEQ ID NO: 540459 - DNA, 60 bp, Artificial; identical to SEQ ID NO: 6515
  Synthetic oligonucleotide

SEQ ID NO: 540460 - DNA, 55 bp, Artificial; identical to SEQ ID NO: 311358
  Synthetic oligonucleotide

SEQ ID NO: 540461 - DNA, 59 bp, Artificial; identical to SEQ ID NO: 311359
  Synthetic oligonucleotide

SEQ ID NO: 540462 - DNA, 60 bp, Artificial; identical to SEQ ID NO: 311361
  Synthetic oligonucleotide

SEQ ID NO: 540463 - DNA, 55 bp, Artificial; identical to SEQ ID NO: 311363
  Synthetic oligonucleotide

SEQ ID NO: 540464 - DNA, 60 bp, Artificial; identical to SEQ ID NO: 311365
  Synthetic oligonucleotide

SEQ ID NO: 540465 - DNA, 59 bp, Artificial; identical to SEQ ID NO: 311366
  Synthetic oligonucleotide

SEQ ID NO: 540466 - DNA, 60 bp, Artificial; identical to SEQ ID NO: 311367
  Synthetic oligonucleotide

SEQ ID NO: 540467 - DNA, 60 bp, Artificial; identical to SEQ ID NO: 311368
  Synthetic oligonucleotide

SEQ ID NO: 540468 - DNA, 60 bp, Artificial; identical to SEQ ID NO: 311369
  Synthetic oligonucleotide

SEQ ID NO: 540469 - DNA, 54 bp, Artificial; identical to SEQ ID NO: 311372
  Synthetic oligonucleotide

SEQ ID NO: 540470 - DNA, 54 bp, Artificial; identical to SEQ ID NO: 311375
  Synthetic oligonucleotide

SEQ ID NO: 540471 - DNA, 54 bp, Artificial; identical to SEQ ID NO: 311376
  Synthetic oligonucleotide

SEQ ID NO: 540472 - DNA, 56 bp, Artificial; identical to SEQ ID NO: 311381
  Synthetic oligonucleotide

SEQ ID NO: 540473 - DNA, 60 bp, Artificial; identical to SEQ ID NO: 311383
  Synthetic oligonucleotide

SEQ ID NO: 540474 - DNA, 60 bp, Artificial; identical to SEQ ID NO: 311387
  Synthetic oligonucleotide

SEQ ID NO: 540475 - DNA, 55 bp, Artificial; identical to SEQ ID NO: 311388
  Synthetic oligonucleotide

SEQ ID NO: 540476 - DNA, 55 bp, Artificial; identical to SEQ ID NO: 311390
  Synthetic oligonucleotide

SEQ ID NO: 540477 - DNA, 60 bp, Artificial; identical to SEQ ID NO: 311391
  Synthetic oligonucleotide

SEQ ID NO: 540478 - DNA, 51 bp, Artificial; identical to SEQ ID NO: 311393
  Synthetic oligonucleotide

SEQ ID NO: 540479 - DNA, 55 bp, Artificial; identical to SEQ ID NO: 311395
  Synthetic oligonucleotide

SEQ ID NO: 540480 - DNA, 57 bp, Artificial; identical to SEQ ID NO: 311398
  Synthetic oligonucleotide

SEQ ID NO: 540481 - DNA, 60 bp, Artificial; identical to SEQ ID NO: 311400
  Synthetic oligonucleotide

SEQ ID NO: 540482 - DNA, 51 bp, Artificial; identical to SEQ ID NO: 311402
  Synthetic oligonucleotide

SEQ ID NO: 540483 - DNA, 58 bp, Artificial; identical to SEQ ID NO: 311404
  Synthetic oligonucleotide

SEQ ID NO: 540484 - DNA, 60 bp, Artificial; identical to SEQ ID NO: 311406
  Synthetic oligonucleotide

SEQ ID NO: 540485 - DNA, 60 bp, Artificial; identical to SEQ ID NO: 311407
  Synthetic oligonucleotide

SEQ ID NO: 540486 - DNA, 50 bp, Artificial; identical to SEQ ID NO: 311408
  Synthetic oligonucleotide

SEQ ID NO: 540487 - DNA, 60 bp, Artificial; identical to SEQ ID NO: 311409
  Synthetic oligonucleotide

SEQ ID NO: 540488 - DNA, 58 bp, Artificial; identical to SEQ ID NO: 311411
  Synthetic oligonucleotide

SEQ ID NO: 540489 - DNA, 50 bp, Artificial; identical to SEQ ID NO: 10639
  Synthetic oligonucleotide

SEQ ID NO: 540490 - DNA, 58 bp, Artificial; identical to SEQ ID NO: 311414
  Synthetic oligonucleotide

SEQ ID NO: 540491 - DNA, 59 bp, Artificial; identical to SEQ ID NO: 311418
  Synthetic oligonucleotide

SEQ ID NO: 540492 - DNA, 59 bp, Artificial; identical to SEQ ID NO: 311419
  Synthetic oligonucleotide

SEQ ID NO: 540493 - DNA, 56 bp, Artificial; identical to SEQ ID NO: 311421
  Synthetic oligonucleotide

SEQ ID NO: 540494 - DNA, 57 bp, Artificial; identical to SEQ ID NO: 311422
  Synthetic oligonucleotide

SEQ ID NO: 540495 - DNA, 60 bp, Artificial; identical to SEQ ID NO: 311425
  Synthetic oligonucleotide

SEQ ID NO: 540496 - DNA, 60 bp, Artificial; identical to SEQ ID NO: 311429
  Synthetic oligonucleotide

SEQ ID NO: 540497 - DNA, 60 bp, Artificial; identical to SEQ ID NO: 311430
  Synthetic oligonucleotide

SEQ ID NO: 540498 - DNA, 53 bp, Artificial; identical to SEQ ID NO: 311431
  Synthetic oligonucleotide

SEQ ID NO: 540499 - DNA, 56 bp, Artificial; identical to SEQ ID NO: 311432
  Synthetic oligonucleotide

SEQ ID NO: 540500 - DNA, 60 bp, Artificial; identical to SEQ ID NO: 311434
  Synthetic oligonucleotide

SEQ ID NO: 540501 - DNA, 53 bp, Artificial; identical to SEQ ID NO: 311435
  Synthetic oligonucleotide

SEQ ID NO: 540502 - DNA, 50 bp, Artificial; identical to SEQ ID NO: 311438
  Synthetic oligonucleotide

SEQ ID NO: 540503 - DNA, 55 bp, Artificial; identical to SEQ ID NO: 311440
  Synthetic oligonucleotide

SEQ ID NO: 540504 - DNA, 55 bp, Artificial; identical to SEQ ID NO: 311443
  Synthetic oligonucleotide

SEQ ID NO: 540505 - DNA, 56 bp, Artificial; identical to SEQ ID NO: 311446
  Synthetic oligonucleotide

SEQ ID NO: 540506 - DNA, 59 bp, Artificial; identical to SEQ ID NO: 311447
  Synthetic oligonucleotide

SEQ ID NO: 540507 - DNA, 60 bp, Artificial; identical to SEQ ID NO: 311453
  Synthetic oligonucleotide

SEQ ID NO: 540508 - DNA, 60 bp, Artificial; identical to SEQ ID NO: 311456
  Synthetic oligonucleotide

SEQ ID NO: 540509 - DNA, 55 bp, Artificial; identical to SEQ ID NO: 311459
  Synthetic oligonucleotide

SEQ ID NO: 540510 - DNA, 59 bp, Artificial; identical to SEQ ID NO: 311461
  Synthetic oligonucleotide

SEQ ID NO: 540511 - DNA, 58 bp, Artificial; identical to SEQ ID NO: 311462
  Synthetic oligonucleotide

SEQ ID NO: 540512 - DNA, 60 bp, Artificial; identical to SEQ ID NO: 311463
  Synthetic oligonucleotide

SEQ ID NO: 540513 - DNA, 60 bp, Artificial; identical to SEQ ID NO: 311465
  Synthetic oligonucleotide

SEQ ID NO: 540514 - DNA, 60 bp, Artificial; identical to SEQ ID NO: 311471
  Synthetic oligonucleotide

SEQ ID NO: 540515 - DNA, 59 bp, Artificial; identical to SEQ ID NO: 311475
  Synthetic oligonucleotide

SEQ ID NO: 540516 - DNA, 54 bp, Artificial; identical to SEQ ID NO: 311479
  Synthetic oligonucleotide

SEQ ID NO: 540517 - DNA, 60 bp, Artificial; identical to SEQ ID NO: 311485
  Synthetic oligonucleotide

SEQ ID NO: 540518 - DNA, 54 bp, Artificial; identical to SEQ ID NO: 311488
  Synthetic oligonucleotide

SEQ ID NO: 540519 - DNA, 60 bp, Artificial; identical to SEQ ID NO: 311489
  Synthetic oligonucleotide

SEQ ID NO: 540520 - DNA, 57 bp, Artificial; identical to SEQ ID NO: 311490
  Synthetic oligonucleotide

SEQ ID NO: 540521 - DNA, 55 bp, Artificial; identical to SEQ ID NO: 311492
  Synthetic oligonucleotide

SEQ ID NO: 540522 - DNA, 57 bp, Artificial; identical to SEQ ID NO: 16350
  Synthetic oligonucleotide

SEQ ID NO: 540523 - DNA, 56 bp, Artificial; identical to SEQ ID NO: 311497
  Synthetic oligonucleotide

SEQ ID NO: 540524 - DNA, 57 bp, Artificial; identical to SEQ ID NO: 311498
  Synthetic oligonucleotide

SEQ ID NO: 540525 - DNA, 55 bp, Artificial; identical to SEQ ID NO: 311500
  Synthetic oligonucleotide

SEQ ID NO: 540526 - DNA, 60 bp, Artificial; identical to SEQ ID NO: 311501
  Synthetic oligonucleotide

SEQ ID NO: 540527 - DNA, 60 bp, Artificial; identical to SEQ ID NO: 311503
  Synthetic oligonucleotide

SEQ ID NO: 540528 - DNA, 59 bp, Artificial; identical to SEQ ID NO: 311513
  Synthetic oligonucleotide

SEQ ID NO: 540529 - DNA, 57 bp, Artificial; identical to SEQ ID NO: 311515
  Synthetic oligonucleotide

SEQ ID NO: 540530 - DNA, 52 bp, Artificial; identical to SEQ ID NO: 311516
  Synthetic oligonucleotide

SEQ ID NO: 540531 - DNA, 60 bp, Artificial; identical to SEQ ID NO: 311518
  Synthetic oligonucleotide

SEQ ID NO: 540532 - DNA, 58 bp, Artificial; identical to SEQ ID NO: 311523
  Synthetic oligonucleotide

SEQ ID NO: 540533 - DNA, 52 bp, Artificial; identical to SEQ ID NO: 311526
  Synthetic oligonucleotide

SEQ ID NO: 540534 - DNA, 55 bp, Artificial; identical to SEQ ID NO: 16537
  Synthetic oligonucleotide

SEQ ID NO: 540535 - DNA, 60 bp, Artificial; identical to SEQ ID NO: 311527
  Synthetic oligonucleotide

SEQ ID NO: 540536 - DNA, 57 bp, Artificial; identical to SEQ ID NO: 311532
  Synthetic oligonucleotide

SEQ ID NO: 540537 - DNA, 51 bp, Artificial; identical to SEQ ID NO: 311534
  Synthetic oligonucleotide

SEQ ID NO: 540538 - DNA, 55 bp, Artificial; identical to SEQ ID NO: 311536
  Synthetic oligonucleotide

SEQ ID NO: 540539 - DNA, 56 bp, Artificial; identical to SEQ ID NO: 311542
  Synthetic oligonucleotide

SEQ ID NO: 540540 - DNA, 60 bp, Artificial; identical to SEQ ID NO: 311544
  Synthetic oligonucleotide

SEQ ID NO: 540541 - DNA, 55 bp, Artificial; identical to SEQ ID NO: 311550
  Synthetic oligonucleotide

SEQ ID NO: 540542 - DNA, 60 bp, Artificial; identical to SEQ ID NO: 311551
  Synthetic oligonucleotide

SEQ ID NO: 540543 - DNA, 58 bp, Artificial; identical to SEQ ID NO: 311552
  Synthetic oligonucleotide

SEQ ID NO: 540544 - DNA, 60 bp, Artificial; identical to SEQ ID NO: 311553
  Synthetic oligonucleotide

SEQ ID NO: 540545 - DNA, 60 bp, Artificial; identical to SEQ ID NO: 311557
  Synthetic oligonucleotide

SEQ ID NO: 540546 - DNA, 55 bp, Artificial; identical to SEQ ID NO: 18853
  Synthetic oligonucleotide

SEQ ID NO: 540547 - DNA, 55 bp, Artificial; identical to SEQ ID NO: 198
  Synthetic oligonucleotide

SEQ ID NO: 540548 - DNA, 57 bp, Artificial; identical to SEQ ID NO: 311560
  Synthetic oligonucleotide

SEQ ID NO: 540549 - DNA, 52 bp, Artificial; identical to SEQ ID NO: 311564
  Synthetic oligonucleotide

SEQ ID NO: 540550 - DNA, 54 bp, Artificial; identical to SEQ ID NO: 311565
  Synthetic oligonucleotide

SEQ ID NO: 540551 - DNA, 53 bp, Artificial; identical to SEQ ID NO: 311566
  Synthetic oligonucleotide

SEQ ID NO: 540552 - DNA, 53 bp, Artificial; identical to SEQ ID NO: 7135
  Synthetic oligonucleotide

SEQ ID NO: 540553 - DNA, 54 bp, Artificial; identical to SEQ ID NO: 18579
  Synthetic oligonucleotide

SEQ ID NO: 540554 - DNA, 60 bp, Artificial; identical to SEQ ID NO: 8254
  Synthetic oligonucleotide

SEQ ID NO: 540555 - DNA, 58 bp, Artificial; identical to SEQ ID NO: 311572
  Synthetic oligonucleotide

SEQ ID NO: 540556 - DNA, 60 bp, Artificial; identical to SEQ ID NO: 311573
  Synthetic oligonucleotide

SEQ ID NO: 540557 - DNA, 56 bp, Artificial; identical to SEQ ID NO: 311575
  Synthetic oligonucleotide

SEQ ID NO: 540558 - DNA, 60 bp, Artificial; identical to SEQ ID NO: 311577
  Synthetic oligonucleotide

SEQ ID NO: 540559 - DNA, 56 bp, Artificial; identical to SEQ ID NO: 311581
  Synthetic oligonucleotide

SEQ ID NO: 540560 - DNA, 57 bp, Artificial; identical to SEQ ID NO: 311582
  Synthetic oligonucleotide

SEQ ID NO: 540561 - DNA, 52 bp, Artificial; identical to SEQ ID NO: 311585
  Synthetic oligonucleotide

SEQ ID NO: 540562 - DNA, 57 bp, Artificial; identical to SEQ ID NO: 311588
  Synthetic oligonucleotide

SEQ ID NO: 540563 - DNA, 60 bp, Artificial; identical to SEQ ID NO: 311589
  Synthetic oligonucleotide

SEQ ID NO: 540564 - DNA, 60 bp, Artificial; identical to SEQ ID NO: 114870
  Synthetic oligonucleotide

SEQ ID NO: 540565 - DNA, 56 bp, Artificial; identical to SEQ ID NO: 311592
  Synthetic oligonucleotide

SEQ ID NO: 540566 - DNA, 52 bp, Artificial; identical to SEQ ID NO: 311594
  Synthetic oligonucleotide

SEQ ID NO: 540567 - DNA, 60 bp, Artificial; identical to SEQ ID NO: 311595
  Synthetic oligonucleotide

SEQ ID NO: 540568 - DNA, 58 bp, Artificial; identical to SEQ ID NO: 311596
  Synthetic oligonucleotide

SEQ ID NO: 540569 - DNA, 60 bp, Artificial; identical to SEQ ID NO: 13933
  Synthetic oligonucleotide

SEQ ID NO: 540570 - DNA, 60 bp, Artificial; identical to SEQ ID NO: 311599
  Synthetic oligonucleotide

SEQ ID NO: 540571 - DNA, 51 bp, Artificial; identical to SEQ ID NO: 311600
  Synthetic oligonucleotide

SEQ ID NO: 540572 - DNA, 53 bp, Artificial; identical to SEQ ID NO: 311601
  Synthetic oligonucleotide

SEQ ID NO: 540573 - DNA, 55 bp, Artificial; identical to SEQ ID NO: 311606
  Synthetic oligonucleotide

SEQ ID NO: 540574 - DNA, 52 bp, Artificial; identical to SEQ ID NO: 311607
  Synthetic oligonucleotide

SEQ ID NO: 540575 - DNA, 60 bp, Artificial; identical to SEQ ID NO: 311610
  Synthetic oligonucleotide

SEQ ID NO: 540576 - DNA, 50 bp, Artificial; identical to SEQ ID NO: 11744
  Synthetic oligonucleotide

SEQ ID NO: 540577 - DNA, 51 bp, Artificial; identical to SEQ ID NO: 311614
  Synthetic oligonucleotide

SEQ ID NO: 540578 - DNA, 55 bp, Artificial; identical to SEQ ID NO: 311615
  Synthetic oligonucleotide

SEQ ID NO: 540579 - DNA, 60 bp, Artificial; identical to SEQ ID NO: 311618
  Synthetic oligonucleotide

SEQ ID NO: 540580 - DNA, 55 bp, Artificial; identical to SEQ ID NO: 311620
  Synthetic oligonucleotide

SEQ ID NO: 540581 - DNA, 54 bp, Artificial; identical to SEQ ID NO: 311622
  Synthetic oligonucleotide

SEQ ID NO: 540582 - DNA, 60 bp, Artificial; identical to SEQ ID NO: 311623
  Synthetic oligonucleotide

SEQ ID NO: 540583 - DNA, 55 bp, Artificial; identical to SEQ ID NO: 311626
  Synthetic oligonucleotide

SEQ ID NO: 540584 - DNA, 60 bp, Artificial; identical to SEQ ID NO: 311629
  Synthetic oligonucleotide

SEQ ID NO: 540585 - DNA, 60 bp, Artificial; identical to SEQ ID NO: 311630
  Synthetic oligonucleotide

SEQ ID NO: 540586 - DNA, 60 bp, Artificial; identical to SEQ ID NO: 311631
  Synthetic oligonucleotide

SEQ ID NO: 540587 - DNA, 60 bp, Artificial; identical to SEQ ID NO: 311636
  Synthetic oligonucleotide

SEQ ID NO: 540588 - DNA, 55 bp, Artificial; identical to SEQ ID NO: 311639
  Synthetic oligonucleotide

SEQ ID NO: 540589 - DNA, 60 bp, Artificial; identical to SEQ ID NO: 311642
  Synthetic oligonucleotide

SEQ ID NO: 540590 - DNA, 59 bp, Artificial; identical to SEQ ID NO: 311643
  Synthetic oligonucleotide

SEQ ID NO: 540591 - DNA, 55 bp, Artificial; identical to SEQ ID NO: 311647
  Synthetic oligonucleotide

SEQ ID NO: 540592 - DNA, 52 bp, Artificial; identical to SEQ ID NO: 311648
  Synthetic oligonucleotide

SEQ ID NO: 540593 - DNA, 58 bp, Artificial; identical to SEQ ID NO: 311652
  Synthetic oligonucleotide

SEQ ID NO: 540594 - DNA, 57 bp, Artificial; identical to SEQ ID NO: 311653
  Synthetic oligonucleotide

SEQ ID NO: 540595 - DNA, 59 bp, Artificial; identical to SEQ ID NO: 311654
  Synthetic oligonucleotide

SEQ ID NO: 540596 - DNA, 60 bp, Artificial; identical to SEQ ID NO: 311668
  Synthetic oligonucleotide

SEQ ID NO: 540597 - DNA, 60 bp, Artificial; identical to SEQ ID NO: 311669
  Synthetic oligonucleotide

SEQ ID NO: 540598 - DNA, 60 bp, Artificial; identical to SEQ ID NO: 311671
  Synthetic oligonucleotide

SEQ ID NO: 540599 - DNA, 60 bp, Artificial; identical to SEQ ID NO: 311672
  Synthetic oligonucleotide

SEQ ID NO: 540600 - DNA, 60 bp, Artificial; identical to SEQ ID NO: 311678
  Synthetic oligonucleotide

SEQ ID NO: 540601 - DNA, 54 bp, Artificial; identical to SEQ ID NO: 311679
  Synthetic oligonucleotide

SEQ ID NO: 540602 - DNA, 59 bp, Artificial; identical to SEQ ID NO: 16553
  Synthetic oligonucleotide

SEQ ID NO: 540603 - DNA, 60 bp, Artificial; identical to SEQ ID NO: 311685
  Synthetic oligonucleotide

SEQ ID NO: 540604 - DNA, 60 bp, Artificial; identical to SEQ ID NO: 311687
  Synthetic oligonucleotide

SEQ ID NO: 540605 - DNA, 60 bp, Artificial; identical to SEQ ID NO: 311689
  Synthetic oligonucleotide

SEQ ID NO: 540606 - DNA, 58 bp, Artificial; identical to SEQ ID NO: 311691
  Synthetic oligonucleotide

SEQ ID NO: 540607 - DNA, 56 bp, Artificial; identical to SEQ ID NO: 311693
  Synthetic oligonucleotide

SEQ ID NO: 540608 - DNA, 60 bp, Artificial; identical to SEQ ID NO: 311694
  Synthetic oligonucleotide

SEQ ID NO: 540609 - DNA, 60 bp, Artificial; identical to SEQ ID NO: 311696
  Synthetic oligonucleotide

SEQ ID NO: 540610 - DNA, 55 bp, Artificial; identical to SEQ ID NO: 311697
  Synthetic oligonucleotide

SEQ ID NO: 540611 - DNA, 60 bp, Artificial; identical to SEQ ID NO: 6011
  Synthetic oligonucleotide

SEQ ID NO: 540612 - DNA, 59 bp, Artificial; identical to SEQ ID NO: 311698
  Synthetic oligonucleotide

SEQ ID NO: 540613 - DNA, 56 bp, Artificial; identical to SEQ ID NO: 311700
  Synthetic oligonucleotide

SEQ ID NO: 540614 - DNA, 60 bp, Artificial; identical to SEQ ID NO: 311702
  Synthetic oligonucleotide

SEQ ID NO: 540615 - DNA, 60 bp, Artificial; identical to SEQ ID NO: 311706
  Synthetic oligonucleotide

SEQ ID NO: 540616 - DNA, 55 bp, Artificial; identical to SEQ ID NO: 311709
  Synthetic oligonucleotide

SEQ ID NO: 540617 - DNA, 60 bp, Artificial; identical to SEQ ID NO: 311711
  Synthetic oligonucleotide

SEQ ID NO: 540618 - DNA, 56 bp, Artificial; identical to SEQ ID NO: 311721
  Synthetic oligonucleotide

SEQ ID NO: 540619 - DNA, 60 bp, Artificial; identical to SEQ ID NO: 311722
  Synthetic oligonucleotide

SEQ ID NO: 540620 - DNA, 50 bp, Artificial; identical to SEQ ID NO: 311724
  Synthetic oligonucleotide

SEQ ID NO: 540621 - DNA, 60 bp, Artificial; identical to SEQ ID NO: 311727
  Synthetic oligonucleotide

SEQ ID NO: 540622 - DNA, 60 bp, Artificial; identical to SEQ ID NO: 311730
  Synthetic oligonucleotide

SEQ ID NO: 540623 - DNA, 60 bp, Artificial; identical to SEQ ID NO: 311731
  Synthetic oligonucleotide

SEQ ID NO: 540624 - DNA, 56 bp, Artificial; identical to SEQ ID NO: 311732
  Synthetic oligonucleotide

SEQ ID NO: 540625 - DNA, 60 bp, Artificial; identical to SEQ ID NO: 311734
  Synthetic oligonucleotide

SEQ ID NO: 540626 - DNA, 58 bp, Artificial; identical to SEQ ID NO: 311739
  Synthetic oligonucleotide

SEQ ID NO: 540627 - DNA, 56 bp, Artificial; identical to SEQ ID NO: 311744
  Synthetic oligonucleotide

SEQ ID NO: 540628 - DNA, 55 bp, Artificial; identical to SEQ ID NO: 311745
  Synthetic oligonucleotide

SEQ ID NO: 540629 - DNA, 60 bp, Artificial; identical to SEQ ID NO: 311748
  Synthetic oligonucleotide

SEQ ID NO: 540630 - DNA, 60 bp, Artificial; identical to SEQ ID NO: 311749
  Synthetic oligonucleotide

SEQ ID NO: 540631 - DNA, 52 bp, Artificial; identical to SEQ ID NO: 311752
  Synthetic oligonucleotide

SEQ ID NO: 540632 - DNA, 55 bp, Artificial; identical to SEQ ID NO: 311753
  Synthetic oligonucleotide

SEQ ID NO: 540633 - DNA, 56 bp, Artificial; identical to SEQ ID NO: 311754
  Synthetic oligonucleotide

SEQ ID NO: 540634 - DNA, 54 bp, Artificial; identical to SEQ ID NO: 311755
  Synthetic oligonucleotide

SEQ ID NO: 540635 - DNA, 57 bp, Artificial; identical to SEQ ID NO: 311757
  Synthetic oligonucleotide

SEQ ID NO: 540636 - DNA, 59 bp, Artificial; identical to SEQ ID NO: 18616
  Synthetic oligonucleotide

SEQ ID NO: 540637 - DNA, 51 bp, Artificial; identical to SEQ ID NO: 311759
  Synthetic oligonucleotide

SEQ ID NO: 540638 - DNA, 60 bp, Artificial; identical to SEQ ID NO: 311761
  Synthetic oligonucleotide

SEQ ID NO: 540639 - DNA, 60 bp, Artificial; identical to SEQ ID NO: 311766
  Synthetic oligonucleotide

SEQ ID NO: 540640 - DNA, 55 bp, Artificial; identical to SEQ ID NO: 311773
  Synthetic oligonucleotide

SEQ ID NO: 540641 - DNA, 57 bp, Artificial; identical to SEQ ID NO: 311778
  Synthetic oligonucleotide

SEQ ID NO: 540642 - DNA, 57 bp, Artificial; identical to SEQ ID NO: 311779
  Synthetic oligonucleotide

SEQ ID NO: 540643 - DNA, 52 bp, Artificial; identical to SEQ ID NO: 311781
  Synthetic oligonucleotide

SEQ ID NO: 540644 - DNA, 57 bp, Artificial; identical to SEQ ID NO: 311782
  Synthetic oligonucleotide

SEQ ID NO: 540645 - DNA, 58 bp, Artificial; identical to SEQ ID NO: 311783
  Synthetic oligonucleotide

SEQ ID NO: 540646 - DNA, 52 bp, Artificial; identical to SEQ ID NO: 311784
  Synthetic oligonucleotide

SEQ ID NO: 540647 - DNA, 53 bp, Artificial; identical to SEQ ID NO: 311785
  Synthetic oligonucleotide

SEQ ID NO: 540648 - DNA, 58 bp, Artificial; identical to SEQ ID NO: 311786
  Synthetic oligonucleotide

SEQ ID NO: 540649 - DNA, 51 bp, Artificial; identical to SEQ ID NO: 311787
  Synthetic oligonucleotide

SEQ ID NO: 540650 - DNA, 57 bp, Artificial; identical to SEQ ID NO: 311789
  Synthetic oligonucleotide

SEQ ID NO: 540651 - DNA, 55 bp, Artificial; identical to SEQ ID NO: 311790
  Synthetic oligonucleotide

SEQ ID NO: 540652 - DNA, 55 bp, Artificial; identical to SEQ ID NO: 11057
  Synthetic oligonucleotide

SEQ ID NO: 540653 - DNA, 58 bp, Artificial; identical to SEQ ID NO: 311793
  Synthetic oligonucleotide

SEQ ID NO: 540654 - DNA, 54 bp, Artificial; identical to SEQ ID NO: 311797
  Synthetic oligonucleotide

SEQ ID NO: 540655 - DNA, 55 bp, Artificial; identical to SEQ ID NO: 311798
  Synthetic oligonucleotide

SEQ ID NO: 540656 - DNA, 51 bp, Artificial; identical to SEQ ID NO: 311799
  Synthetic oligonucleotide

SEQ ID NO: 540657 - DNA, 59 bp, Artificial; identical to SEQ ID NO: 311800
  Synthetic oligonucleotide

SEQ ID NO: 540658 - DNA, 56 bp, Artificial; identical to SEQ ID NO: 311805
  Synthetic oligonucleotide

SEQ ID NO: 540659 - DNA, 52 bp, Artificial; identical to SEQ ID NO: 311808
  Synthetic oligonucleotide

SEQ ID NO: 540660 - DNA, 59 bp, Artificial; identical to SEQ ID NO: 311810
  Synthetic oligonucleotide

SEQ ID NO: 540661 - DNA, 54 bp, Artificial; identical to SEQ ID NO: 19071
  Synthetic oligonucleotide

SEQ ID NO: 540662 - DNA, 60 bp, Artificial; identical to SEQ ID NO: 311811
  Synthetic oligonucleotide

SEQ ID NO: 540663 - DNA, 50 bp, Artificial; identical to SEQ ID NO: 311812
  Synthetic oligonucleotide

SEQ ID NO: 540664 - DNA, 55 bp, Artificial; identical to SEQ ID NO: 311814
  Synthetic oligonucleotide

SEQ ID NO: 540665 - DNA, 56 bp, Artificial; identical to SEQ ID NO: 311815
  Synthetic oligonucleotide

SEQ ID NO: 540666 - DNA, 60 bp, Artificial; identical to SEQ ID NO: 311818
  Synthetic oligonucleotide

SEQ ID NO: 540667 - DNA, 54 bp, Artificial; identical to SEQ ID NO: 311821
  Synthetic oligonucleotide

SEQ ID NO: 540668 - DNA, 58 bp, Artificial; identical to SEQ ID NO: 311822
  Synthetic oligonucleotide

SEQ ID NO: 540669 - DNA, 60 bp, Artificial; identical to SEQ ID NO: 311823
  Synthetic oligonucleotide

SEQ ID NO: 540670 - DNA, 51 bp, Artificial; identical to SEQ ID NO: 311829
  Synthetic oligonucleotide

SEQ ID NO: 540671 - DNA, 60 bp, Artificial; identical to SEQ ID NO: 311832
  Synthetic oligonucleotide

SEQ ID NO: 540672 - DNA, 58 bp, Artificial; identical to SEQ ID NO: 311833
  Synthetic oligonucleotide

SEQ ID NO: 540673 - DNA, 60 bp, Artificial; identical to SEQ ID NO: 311834
  Synthetic oligonucleotide

SEQ ID NO: 540674 - DNA, 53 bp, Artificial; identical to SEQ ID NO: 311835
  Synthetic oligonucleotide

SEQ ID NO: 540675 - DNA, 52 bp, Artificial; identical to SEQ ID NO: 311838
  Synthetic oligonucleotide

SEQ ID NO: 540676 - DNA, 60 bp, Artificial; identical to SEQ ID NO: 311839
  Synthetic oligonucleotide

SEQ ID NO: 540677 - DNA, 57 bp, Artificial; identical to SEQ ID NO: 311840
  Synthetic oligonucleotide

SEQ ID NO: 540678 - DNA, 60 bp, Artificial; identical to SEQ ID NO: 311841
  Synthetic oligonucleotide

SEQ ID NO: 540679 - DNA, 58 bp, Artificial; identical to SEQ ID NO: 311842
  Synthetic oligonucleotide

SEQ ID NO: 540680 - DNA, 54 bp, Artificial; identical to SEQ ID NO: 311843
  Synthetic oligonucleotide

SEQ ID NO: 540681 - DNA, 58 bp, Artificial; identical to SEQ ID NO: 311844
  Synthetic oligonucleotide

SEQ ID NO: 540682 - DNA, 58 bp, Artificial; identical to SEQ ID NO: 311846
  Synthetic oligonucleotide

SEQ ID NO: 540683 - DNA, 60 bp, Artificial; identical to SEQ ID NO: 8468
  Synthetic oligonucleotide

SEQ ID NO: 540684 - DNA, 54 bp, Artificial; identical to SEQ ID NO: 311847
  Synthetic oligonucleotide

SEQ ID NO: 540685 - DNA, 60 bp, Artificial; identical to SEQ ID NO: 311849
  Synthetic oligonucleotide

SEQ ID NO: 540686 - DNA, 56 bp, Artificial; identical to SEQ ID NO: 311851
  Synthetic oligonucleotide

SEQ ID NO: 540687 - DNA, 57 bp, Artificial; identical to SEQ ID NO: 311853
  Synthetic oligonucleotide

SEQ ID NO: 540688 - DNA, 55 bp, Artificial; identical to SEQ ID NO: 311858
  Synthetic oligonucleotide

SEQ ID NO: 540689 - DNA, 54 bp, Artificial; identical to SEQ ID NO: 16075
  Synthetic oligonucleotide

SEQ ID NO: 540690 - DNA, 57 bp, Artificial; identical to SEQ ID NO: 311862
  Synthetic oligonucleotide

SEQ ID NO: 540691 - DNA, 54 bp, Artificial; identical to SEQ ID NO: 17451
  Synthetic oligonucleotide

SEQ ID NO: 540692 - DNA, 60 bp, Artificial; identical to SEQ ID NO: 311865
  Synthetic oligonucleotide

SEQ ID NO: 540693 - DNA, 54 bp, Artificial; identical to SEQ ID NO: 311866
  Synthetic oligonucleotide

SEQ ID NO: 540694 - DNA, 58 bp, Artificial; identical to SEQ ID NO: 311867
  Synthetic oligonucleotide

SEQ ID NO: 540695 - DNA, 60 bp, Artificial; identical to SEQ ID NO: 311870
  Synthetic oligonucleotide

SEQ ID NO: 540696 - DNA, 52 bp, Artificial; identical to SEQ ID NO: 15522
  Synthetic oligonucleotide

SEQ ID NO: 540697 - DNA, 52 bp, Artificial; identical to SEQ ID NO: 311875
  Synthetic oligonucleotide

SEQ ID NO: 540698 - DNA, 55 bp, Artificial; identical to SEQ ID NO: 311881
  Synthetic oligonucleotide

SEQ ID NO: 540699 - DNA, 60 bp, Artificial; identical to SEQ ID NO: 311888
  Synthetic oligonucleotide

SEQ ID NO: 540700 - DNA, 56 bp, Artificial; identical to SEQ ID NO: 311889
  Synthetic oligonucleotide

SEQ ID NO: 540701 - DNA, 54 bp, Artificial; identical to SEQ ID NO: 311891
  Synthetic oligonucleotide

SEQ ID NO: 540702 - DNA, 60 bp, Artificial; identical to SEQ ID NO: 311892
  Synthetic oligonucleotide

SEQ ID NO: 540703 - DNA, 58 bp, Artificial; identical to SEQ ID NO: 311899
  Synthetic oligonucleotide

SEQ ID NO: 540704 - DNA, 60 bp, Artificial; identical to SEQ ID NO: 311901
  Synthetic oligonucleotide

SEQ ID NO: 540705 - DNA, 55 bp, Artificial; identical to SEQ ID NO: 311902
  Synthetic oligonucleotide

SEQ ID NO: 540706 - DNA, 52 bp, Artificial; identical to SEQ ID NO: 311903
  Synthetic oligonucleotide

SEQ ID NO: 540707 - DNA, 58 bp, Artificial; identical to SEQ ID NO: 311906
  Synthetic oligonucleotide

SEQ ID NO: 540708 - DNA, 50 bp, Artificial; identical to SEQ ID NO: 311907
  Synthetic oligonucleotide

SEQ ID NO: 540709 - DNA, 58 bp, Artificial; identical to SEQ ID NO: 311910
  Synthetic oligonucleotide

SEQ ID NO: 540710 - DNA, 53 bp, Artificial; identical to SEQ ID NO: 311912
  Synthetic oligonucleotide

SEQ ID NO: 540711 - DNA, 60 bp, Artificial; identical to SEQ ID NO: 311915
  Synthetic oligonucleotide

SEQ ID NO: 540712 - DNA, 60 bp, Artificial; identical to SEQ ID NO: 311916
  Synthetic oligonucleotide

SEQ ID NO: 540713 - DNA, 57 bp, Artificial; identical to SEQ ID NO: 311917
  Synthetic oligonucleotide

SEQ ID NO: 540714 - DNA, 60 bp, Artificial; identical to SEQ ID NO: 311919
  Synthetic oligonucleotide

SEQ ID NO: 540715 - DNA, 56 bp, Artificial; identical to SEQ ID NO: 14675
  Synthetic oligonucleotide

SEQ ID NO: 540716 - DNA, 57 bp, Artificial; identical to SEQ ID NO: 311926
  Synthetic oligonucleotide

SEQ ID NO: 540717 - DNA, 55 bp, Artificial; identical to SEQ ID NO: 311927
  Synthetic oligonucleotide

SEQ ID NO: 540718 - DNA, 60 bp, Artificial; identical to SEQ ID NO: 311931
  Synthetic oligonucleotide

SEQ ID NO: 540719 - DNA, 60 bp, Artificial; identical to SEQ ID NO: 11999
  Synthetic oligonucleotide

SEQ ID NO: 540720 - DNA, 60 bp, Artificial; identical to SEQ ID NO: 311947
  Synthetic oligonucleotide

SEQ ID NO: 540721 - DNA, 55 bp, Artificial; identical to SEQ ID NO: 311948
  Synthetic oligonucleotide

SEQ ID NO: 540722 - DNA, 51 bp, Artificial; identical to SEQ ID NO: 311953
  Synthetic oligonucleotide

SEQ ID NO: 540723 - DNA, 52 bp, Artificial; identical to SEQ ID NO: 20186
  Synthetic oligonucleotide

SEQ ID NO: 540724 - DNA, 50 bp, Artificial; identical to SEQ ID NO: 311957
  Synthetic oligonucleotide

SEQ ID NO: 540725 - DNA, 51 bp, Artificial; identical to SEQ ID NO: 311958
  Synthetic oligonucleotide

SEQ ID NO: 540726 - DNA, 58 bp, Artificial; identical to SEQ ID NO: 311959
  Synthetic oligonucleotide

SEQ ID NO: 540727 - DNA, 60 bp, Artificial; identical to SEQ ID NO: 311965
  Synthetic oligonucleotide

SEQ ID NO: 540728 - DNA, 60 bp, Artificial; identical to SEQ ID NO: 311966
  Synthetic oligonucleotide

SEQ ID NO: 540729 - DNA, 60 bp, Artificial; identical to SEQ ID NO: 311970
  Synthetic oligonucleotide

SEQ ID NO: 540730 - DNA, 56 bp, Artificial; identical to SEQ ID NO: 311973
  Synthetic oligonucleotide

SEQ ID NO: 540731 - DNA, 53 bp, Artificial; identical to SEQ ID NO: 311974
  Synthetic oligonucleotide

SEQ ID NO: 540732 - DNA, 56 bp, Artificial; identical to SEQ ID NO: 18506
  Synthetic oligonucleotide

SEQ ID NO: 540733 - DNA, 58 bp, Artificial; identical to SEQ ID NO: 311977
  Synthetic oligonucleotide

SEQ ID NO: 540734 - DNA, 59 bp, Artificial; identical to SEQ ID NO: 311981
  Synthetic oligonucleotide

SEQ ID NO: 540735 - DNA, 55 bp, Artificial; identical to SEQ ID NO: 311982
  Synthetic oligonucleotide

SEQ ID NO: 540736 - DNA, 55 bp, Artificial; identical to SEQ ID NO: 311983
  Synthetic oligonucleotide

SEQ ID NO: 540737 - DNA, 58 bp, Artificial; identical to SEQ ID NO: 311985
  Synthetic oligonucleotide

SEQ ID NO: 540738 - DNA, 52 bp, Artificial; identical to SEQ ID NO: 311986
  Synthetic oligonucleotide

SEQ ID NO: 540739 - DNA, 55 bp, Artificial; identical to SEQ ID NO: 311987
  Synthetic oligonucleotide

SEQ ID NO: 540740 - DNA, 53 bp, Artificial; identical to SEQ ID NO: 311990
  Synthetic oligonucleotide

SEQ ID NO: 540741 - DNA, 55 bp, Artificial; identical to SEQ ID NO: 311992
  Synthetic oligonucleotide

SEQ ID NO: 540742 - DNA, 55 bp, Artificial; identical to SEQ ID NO: 311994
  Synthetic oligonucleotide

SEQ ID NO: 540743 - DNA, 60 bp, Artificial; identical to SEQ ID NO: 311999
  Synthetic oligonucleotide

SEQ ID NO: 540744 - DNA, 52 bp, Artificial; identical to SEQ ID NO: 312000
  Synthetic oligonucleotide

SEQ ID NO: 540745 - DNA, 54 bp, Artificial; identical to SEQ ID NO: 312001
  Synthetic oligonucleotide

SEQ ID NO: 540746 - DNA, 57 bp, Artificial; identical to SEQ ID NO: 18044
  Synthetic oligonucleotide

SEQ ID NO: 540747 - DNA, 50 bp, Artificial; identical to SEQ ID NO: 312005
  Synthetic oligonucleotide

SEQ ID NO: 540748 - DNA, 55 bp, Artificial; identical to SEQ ID NO: 312006
  Synthetic oligonucleotide

SEQ ID NO: 540749 - DNA, 58 bp, Artificial; identical to SEQ ID NO: 312007
  Synthetic oligonucleotide

SEQ ID NO: 540750 - DNA, 60 bp, Artificial; identical to SEQ ID NO: 312009
  Synthetic oligonucleotide

SEQ ID NO: 540751 - DNA, 57 bp, Artificial; identical to SEQ ID NO: 312010
  Synthetic oligonucleotide

SEQ ID NO: 540752 - DNA, 50 bp, Artificial; identical to SEQ ID NO: 312012
  Synthetic oligonucleotide

SEQ ID NO: 540753 - DNA, 50 bp, Artificial; identical to SEQ ID NO: 312013
  Synthetic oligonucleotide

SEQ ID NO: 540754 - DNA, 57 bp, Artificial; identical to SEQ ID NO: 312016
  Synthetic oligonucleotide

SEQ ID NO: 540755 - DNA, 51 bp, Artificial; identical to SEQ ID NO: 312019
  Synthetic oligonucleotide

SEQ ID NO: 540756 - DNA, 54 bp, Artificial; identical to SEQ ID NO: 312020
  Synthetic oligonucleotide

SEQ ID NO: 540757 - DNA, 51 bp, Artificial; identical to SEQ ID NO: 312021
  Synthetic oligonucleotide

SEQ ID NO: 540758 - DNA, 54 bp, Artificial; identical to SEQ ID NO: 312024
  Synthetic oligonucleotide

SEQ ID NO: 540759 - DNA, 57 bp, Artificial; identical to SEQ ID NO: 312026
  Synthetic oligonucleotide

SEQ ID NO: 540760 - DNA, 53 bp, Artificial; identical to SEQ ID NO: 312029
  Synthetic oligonucleotide

SEQ ID NO: 540761 - DNA, 53 bp, Artificial; identical to SEQ ID NO: 312030
  Synthetic oligonucleotide

SEQ ID NO: 540762 - DNA, 54 bp, Artificial; identical to SEQ ID NO: 312031
  Synthetic oligonucleotide

SEQ ID NO: 540763 - DNA, 59 bp, Artificial; identical to SEQ ID NO: 6926
  Synthetic oligonucleotide

SEQ ID NO: 540764 - DNA, 59 bp, Artificial; identical to SEQ ID NO: 312038
  Synthetic oligonucleotide

SEQ ID NO: 540765 - DNA, 54 bp, Artificial; identical to SEQ ID NO: 312045
  Synthetic oligonucleotide

SEQ ID NO: 540766 - DNA, 51 bp, Artificial; identical to SEQ ID NO: 312046
  Synthetic oligonucleotide

SEQ ID NO: 540767 - DNA, 55 bp, Artificial; identical to SEQ ID NO: 312049
  Synthetic oligonucleotide

SEQ ID NO: 540768 - DNA, 57 bp, Artificial; identical to SEQ ID NO: 312052
  Synthetic oligonucleotide

SEQ ID NO: 540769 - DNA, 53 bp, Artificial; identical to SEQ ID NO: 312053
  Synthetic oligonucleotide

SEQ ID NO: 540770 - DNA, 55 bp, Artificial; identical to SEQ ID NO: 312055
  Synthetic oligonucleotide

SEQ ID NO: 540771 - DNA, 54 bp, Artificial; identical to SEQ ID NO: 312057
  Synthetic oligonucleotide

SEQ ID NO: 540772 - DNA, 55 bp, Artificial; identical to SEQ ID NO: 312060
  Synthetic oligonucleotide

SEQ ID NO: 540773 - DNA, 53 bp, Artificial; identical to SEQ ID NO: 20392
  Synthetic oligonucleotide

SEQ ID NO: 540774 - DNA, 51 bp, Artificial; identical to SEQ ID NO: 312064
  Synthetic oligonucleotide

SEQ ID NO: 540775 - DNA, 51 bp, Artificial; identical to SEQ ID NO: 312065
  Synthetic oligonucleotide

SEQ ID NO: 540776 - DNA, 57 bp, Artificial; identical to SEQ ID NO: 312067
  Synthetic oligonucleotide

SEQ ID NO: 540777 - DNA, 52 bp, Artificial; identical to SEQ ID NO: 312068
  Synthetic oligonucleotide

SEQ ID NO: 540778 - DNA, 58 bp, Artificial; identical to SEQ ID NO: 312071
  Synthetic oligonucleotide

SEQ ID NO: 540779 - DNA, 52 bp, Artificial; identical to SEQ ID NO: 312074
  Synthetic oligonucleotide

SEQ ID NO: 540780 - DNA, 53 bp, Artificial; identical to SEQ ID NO: 312077
  Synthetic oligonucleotide

SEQ ID NO: 540781 - DNA, 53 bp, Artificial; identical to SEQ ID NO: 312078
  Synthetic oligonucleotide

SEQ ID NO: 540782 - DNA, 54 bp, Artificial; identical to SEQ ID NO: 312080
  Synthetic oligonucleotide

SEQ ID NO: 540783 - DNA, 54 bp, Artificial; identical to SEQ ID NO: 312083
  Synthetic oligonucleotide

SEQ ID NO: 540784 - DNA, 56 bp, Artificial; identical to SEQ ID NO: 312084
  Synthetic oligonucleotide

SEQ ID NO: 540785 - DNA, 59 bp, Artificial; identical to SEQ ID NO: 312085
  Synthetic oligonucleotide

SEQ ID NO: 540786 - DNA, 52 bp, Artificial; identical to SEQ ID NO: 312087
  Synthetic oligonucleotide

SEQ ID NO: 540787 - DNA, 52 bp, Artificial; identical to SEQ ID NO: 312090
  Synthetic oligonucleotide

SEQ ID NO: 540788 - DNA, 56 bp, Artificial; identical to SEQ ID NO: 312096
  Synthetic oligonucleotide

SEQ ID NO: 540789 - DNA, 59 bp, Artificial; identical to SEQ ID NO: 312097
  Synthetic oligonucleotide

SEQ ID NO: 540790 - DNA, 60 bp, Artificial; identical to SEQ ID NO: 312099
  Synthetic oligonucleotide

SEQ ID NO: 540791 - DNA, 55 bp, Artificial; identical to SEQ ID NO: 312100
  Synthetic oligonucleotide

SEQ ID NO: 540792 - DNA, 54 bp, Artificial; identical to SEQ ID NO: 312115
  Synthetic oligonucleotide

SEQ ID NO: 540793 - DNA, 59 bp, Artificial; identical to SEQ ID NO: 312117
  Synthetic oligonucleotide

SEQ ID NO: 540794 - DNA, 53 bp, Artificial; identical to SEQ ID NO: 312118
  Synthetic oligonucleotide

SEQ ID NO: 540795 - DNA, 55 bp, Artificial; identical to SEQ ID NO: 16196
  Synthetic oligonucleotide

SEQ ID NO: 540796 - DNA, 52 bp, Artificial; identical to SEQ ID NO: 312121
  Synthetic oligonucleotide

SEQ ID NO: 540797 - DNA, 52 bp, Artificial; identical to SEQ ID NO: 312124
  Synthetic oligonucleotide

SEQ ID NO: 540798 - DNA, 53 bp, Artificial; identical to SEQ ID NO: 312126
  Synthetic oligonucleotide

SEQ ID NO: 540799 - DNA, 54 bp, Artificial; identical to SEQ ID NO: 312128
  Synthetic oligonucleotide

SEQ ID NO: 540800 - DNA, 55 bp, Artificial; identical to SEQ ID NO: 312131
  Synthetic oligonucleotide

SEQ ID NO: 540801 - DNA, 59 bp, Artificial; identical to SEQ ID NO: 312132
  Synthetic oligonucleotide

SEQ ID NO: 540802 - DNA, 55 bp, Artificial; identical to SEQ ID NO: 312133
  Synthetic oligonucleotide

SEQ ID NO: 540803 - DNA, 57 bp, Artificial; identical to SEQ ID NO: 312134
  Synthetic oligonucleotide

SEQ ID NO: 540804 - DNA, 55 bp, Artificial; identical to SEQ ID NO: 312137
  Synthetic oligonucleotide

SEQ ID NO: 540805 - DNA, 56 bp, Artificial; identical to SEQ ID NO: 312138
  Synthetic oligonucleotide

SEQ ID NO: 540806 - DNA, 60 bp, Artificial; identical to SEQ ID NO: 312139
  Synthetic oligonucleotide

SEQ ID NO: 540807 - DNA, 55 bp, Artificial; identical to SEQ ID NO: 312140
  Synthetic oligonucleotide

SEQ ID NO: 540808 - DNA, 50 bp, Artificial; identical to SEQ ID NO: 312141
  Synthetic oligonucleotide

SEQ ID NO: 540809 - DNA, 58 bp, Artificial; identical to SEQ ID NO: 312143
  Synthetic oligonucleotide

SEQ ID NO: 540810 - DNA, 57 bp, Artificial; identical to SEQ ID NO: 312144
  Synthetic oligonucleotide

SEQ ID NO: 540811 - DNA, 53 bp, Artificial; identical to SEQ ID NO: 312145
  Synthetic oligonucleotide

SEQ ID NO: 540812 - DNA, 60 bp, Artificial; identical to SEQ ID NO: 312148
  Synthetic oligonucleotide

SEQ ID NO: 540813 - DNA, 58 bp, Artificial; identical to SEQ ID NO: 312151
  Synthetic oligonucleotide

SEQ ID NO: 540814 - DNA, 60 bp, Artificial; identical to SEQ ID NO: 312154
  Synthetic oligonucleotide

SEQ ID NO: 540815 - DNA, 60 bp, Artificial; identical to SEQ ID NO: 312155
  Synthetic oligonucleotide

SEQ ID NO: 540816 - DNA, 55 bp, Artificial; identical to SEQ ID NO: 312156
  Synthetic oligonucleotide

SEQ ID NO: 540817 - DNA, 55 bp, Artificial; identical to SEQ ID NO: 312159
  Synthetic oligonucleotide

SEQ ID NO: 540818 - DNA, 57 bp, Artificial; identical to SEQ ID NO: 312162
  Synthetic oligonucleotide

SEQ ID NO: 540819 - DNA, 58 bp, Artificial; identical to SEQ ID NO: 312167
  Synthetic oligonucleotide

SEQ ID NO: 540820 - DNA, 51 bp, Artificial; identical to SEQ ID NO: 312169
  Synthetic oligonucleotide

SEQ ID NO: 540821 - DNA, 54 bp, Artificial; identical to SEQ ID NO: 312170
  Synthetic oligonucleotide

SEQ ID NO: 540822 - DNA, 60 bp, Artificial; identical to SEQ ID NO: 40770
  Synthetic oligonucleotide

SEQ ID NO: 540823 - DNA, 57 bp, Artificial; identical to SEQ ID NO: 312174
  Synthetic oligonucleotide

SEQ ID NO: 540824 - DNA, 53 bp, Artificial; identical to SEQ ID NO: 312175
  Synthetic oligonucleotide

SEQ ID NO: 540825 - DNA, 55 bp, Artificial; identical to SEQ ID NO: 312176
  Synthetic oligonucleotide

SEQ ID NO: 540826 - DNA, 55 bp, Artificial; identical to SEQ ID NO: 312180
  Synthetic oligonucleotide

SEQ ID NO: 540827 - DNA, 55 bp, Artificial; identical to SEQ ID NO: 312181
  Synthetic oligonucleotide

SEQ ID NO: 540828 - DNA, 58 bp, Artificial; identical to SEQ ID NO: 17587
  Synthetic oligonucleotide

SEQ ID NO: 540829 - DNA, 59 bp, Artificial; identical to SEQ ID NO: 312182
  Synthetic oligonucleotide

SEQ ID NO: 540830 - DNA, 50 bp, Artificial; identical to SEQ ID NO: 312183
  Synthetic oligonucleotide

SEQ ID NO: 540831 - DNA, 59 bp, Artificial; identical to SEQ ID NO: 312184
  Synthetic oligonucleotide

SEQ ID NO: 540832 - DNA, 60 bp, Artificial; identical to SEQ ID NO: 312185
  Synthetic oligonucleotide

SEQ ID NO: 540833 - DNA, 55 bp, Artificial; identical to SEQ ID NO: 312186
  Synthetic oligonucleotide

SEQ ID NO: 540834 - DNA, 56 bp, Artificial; identical to SEQ ID NO: 312187
  Synthetic oligonucleotide

SEQ ID NO: 540835 - DNA, 56 bp, Artificial; identical to SEQ ID NO: 312192
  Synthetic oligonucleotide

SEQ ID NO: 540836 - DNA, 53 bp, Artificial; identical to SEQ ID NO: 312206
  Synthetic oligonucleotide

SEQ ID NO: 540837 - DNA, 52 bp, Artificial; identical to SEQ ID NO: 312208
  Synthetic oligonucleotide

SEQ ID NO: 540838 - DNA, 55 bp, Artificial; identical to SEQ ID NO: 312212
  Synthetic oligonucleotide

SEQ ID NO: 540839 - DNA, 56 bp, Artificial; identical to SEQ ID NO: 312213
  Synthetic oligonucleotide

SEQ ID NO: 540840 - DNA, 58 bp, Artificial; identical to SEQ ID NO: 312217
  Synthetic oligonucleotide

SEQ ID NO: 540841 - DNA, 59 bp, Artificial; identical to SEQ ID NO: 312218
  Synthetic oligonucleotide

SEQ ID NO: 540842 - DNA, 51 bp, Artificial; identical to SEQ ID NO: 312220
  Synthetic oligonucleotide

SEQ ID NO: 540843 - DNA, 52 bp, Artificial; identical to SEQ ID NO: 312221
  Synthetic oligonucleotide

SEQ ID NO: 540844 - DNA, 60 bp, Artificial; identical to SEQ ID NO: 312224
  Synthetic oligonucleotide

SEQ ID NO: 540845 - DNA, 57 bp, Artificial; identical to SEQ ID NO: 312226
  Synthetic oligonucleotide

SEQ ID NO: 540846 - DNA, 60 bp, Artificial; identical to SEQ ID NO: 312227
  Synthetic oligonucleotide

SEQ ID NO: 540847 - DNA, 54 bp, Artificial; identical to SEQ ID NO: 312229
  Synthetic oligonucleotide

SEQ ID NO: 540848 - DNA, 53 bp, Artificial; identical to SEQ ID NO: 312232
  Synthetic oligonucleotide

SEQ ID NO: 540849 - DNA, 60 bp, Artificial; identical to SEQ ID NO: 312236
  Synthetic oligonucleotide

SEQ ID NO: 540850 - DNA, 55 bp, Artificial; identical to SEQ ID NO: 312237
  Synthetic oligonucleotide

SEQ ID NO: 540851 - DNA, 56 bp, Artificial; identical to SEQ ID NO: 312241
  Synthetic oligonucleotide

SEQ ID NO: 540852 - DNA, 56 bp, Artificial; identical to SEQ ID NO: 312242
  Synthetic oligonucleotide

SEQ ID NO: 540853 - DNA, 55 bp, Artificial; identical to SEQ ID NO: 312248
  Synthetic oligonucleotide

SEQ ID NO: 540854 - DNA, 54 bp, Artificial; identical to SEQ ID NO: 312249
  Synthetic oligonucleotide

SEQ ID NO: 540855 - DNA, 49 bp, Artificial; identical to SEQ ID NO: 312250
  Synthetic oligonucleotide

SEQ ID NO: 540856 - DNA, 54 bp, Artificial; identical to SEQ ID NO: 312252
  Synthetic oligonucleotide

SEQ ID NO: 540857 - DNA, 50 bp, Artificial; identical to SEQ ID NO: 312255
  Synthetic oligonucleotide

SEQ ID NO: 540858 - DNA, 58 bp, Artificial; identical to SEQ ID NO: 312257
  Synthetic oligonucleotide

SEQ ID NO: 540859 - DNA, 58 bp, Artificial; identical to SEQ ID NO: 312258
  Synthetic oligonucleotide

SEQ ID NO: 540860 - DNA, 60 bp, Artificial; identical to SEQ ID NO: 312259
  Synthetic oligonucleotide

SEQ ID NO: 540861 - DNA, 59 bp, Artificial; identical to SEQ ID NO: 312262
  Synthetic oligonucleotide

SEQ ID NO: 540862 - DNA, 60 bp, Artificial; identical to SEQ ID NO: 312263
  Synthetic oligonucleotide

SEQ ID NO: 540863 - DNA, 52 bp, Artificial; identical to SEQ ID NO: 312265
  Synthetic oligonucleotide

SEQ ID NO: 540864 - DNA, 52 bp, Artificial; identical to SEQ ID NO: 312266
  Synthetic oligonucleotide

SEQ ID NO: 540865 - DNA, 58 bp, Artificial; identical to SEQ ID NO: 312271
  Synthetic oligonucleotide

SEQ ID NO: 540866 - DNA, 60 bp, Artificial; identical to SEQ ID NO: 312272
  Synthetic oligonucleotide

SEQ ID NO: 540867 - DNA, 60 bp, Artificial; identical to SEQ ID NO: 312285
  Synthetic oligonucleotide

SEQ ID NO: 540868 - DNA, 55 bp, Artificial; identical to SEQ ID NO: 312289
  Synthetic oligonucleotide

SEQ ID NO: 540869 - DNA, 58 bp, Artificial; identical to SEQ ID NO: 312290
  Synthetic oligonucleotide

SEQ ID NO: 540870 - DNA, 60 bp, Artificial; identical to SEQ ID NO: 312292
  Synthetic oligonucleotide

SEQ ID NO: 540871 - DNA, 54 bp, Artificial; identical to SEQ ID NO: 312298
  Synthetic oligonucleotide

SEQ ID NO: 540872 - DNA, 56 bp, Artificial; identical to SEQ ID NO: 312301
  Synthetic oligonucleotide

SEQ ID NO: 540873 - DNA, 53 bp, Artificial; identical to SEQ ID NO: 312303
  Synthetic oligonucleotide

SEQ ID NO: 540874 - DNA, 52 bp, Artificial; identical to SEQ ID NO: 312306
  Synthetic oligonucleotide

SEQ ID NO: 540875 - DNA, 58 bp, Artificial; identical to SEQ ID NO: 312308
  Synthetic oligonucleotide

SEQ ID NO: 540876 - DNA, 56 bp, Artificial; identical to SEQ ID NO: 312310
  Synthetic oligonucleotide

SEQ ID NO: 540877 - DNA, 53 bp, Artificial; identical to SEQ ID NO: 312311
  Synthetic oligonucleotide

SEQ ID NO: 540878 - DNA, 55 bp, Artificial; identical to SEQ ID NO: 312315
  Synthetic oligonucleotide

SEQ ID NO: 540879 - DNA, 54 bp, Artificial; identical to SEQ ID NO: 312322
  Synthetic oligonucleotide

SEQ ID NO: 540880 - DNA, 52 bp, Artificial; identical to SEQ ID NO: 312324
  Synthetic oligonucleotide

SEQ ID NO: 540881 - DNA, 49 bp, Artificial; identical to SEQ ID NO: 312328
  Synthetic oligonucleotide

SEQ ID NO: 540882 - DNA, 55 bp, Artificial; identical to SEQ ID NO: 312329
  Synthetic oligonucleotide

SEQ ID NO: 540883 - DNA, 53 bp, Artificial; identical to SEQ ID NO: 312334
  Synthetic oligonucleotide

SEQ ID NO: 540884 - DNA, 53 bp, Artificial; identical to SEQ ID NO: 312336
  Synthetic oligonucleotide

SEQ ID NO: 540885 - DNA, 54 bp, Artificial; identical to SEQ ID NO: 312337
  Synthetic oligonucleotide

SEQ ID NO: 540886 - DNA, 56 bp, Artificial; identical to SEQ ID NO: 17724
  Synthetic oligonucleotide

SEQ ID NO: 540887 - DNA, 55 bp, Artificial; identical to SEQ ID NO: 312342
  Synthetic oligonucleotide

SEQ ID NO: 540888 - DNA, 55 bp, Artificial; identical to SEQ ID NO: 312344
  Synthetic oligonucleotide

SEQ ID NO: 540889 - DNA, 55 bp, Artificial; identical to SEQ ID NO: 312345
  Synthetic oligonucleotide

SEQ ID NO: 540890 - DNA, 55 bp, Artificial; identical to SEQ ID NO: 312347
  Synthetic oligonucleotide

SEQ ID NO: 540891 - DNA, 54 bp, Artificial; identical to SEQ ID NO: 312349
  Synthetic oligonucleotide

SEQ ID NO: 540892 - DNA, 60 bp, Artificial; identical to SEQ ID NO: 312351
  Synthetic oligonucleotide

SEQ ID NO: 540893 - DNA, 59 bp, Artificial; identical to SEQ ID NO: 312354
  Synthetic oligonucleotide

SEQ ID NO: 540894 - DNA, 51 bp, Artificial; identical to SEQ ID NO: 312355
  Synthetic oligonucleotide

SEQ ID NO: 540895 - DNA, 52 bp, Artificial; identical to SEQ ID NO: 312356
  Synthetic oligonucleotide

SEQ ID NO: 540896 - DNA, 50 bp, Artificial; identical to SEQ ID NO: 312357
  Synthetic oligonucleotide

SEQ ID NO: 540897 - DNA, 50 bp, Artificial; identical to SEQ ID NO: 312362
  Synthetic oligonucleotide

SEQ ID NO: 540898 - DNA, 57 bp, Artificial; identical to SEQ ID NO: 20163
  Synthetic oligonucleotide

SEQ ID NO: 540899 - DNA, 55 bp, Artificial; identical to SEQ ID NO: 312364
  Synthetic oligonucleotide

SEQ ID NO: 540900 - DNA, 60 bp, Artificial; identical to SEQ ID NO: 312365
  Synthetic oligonucleotide

SEQ ID NO: 540901 - DNA, 58 bp, Artificial; identical to SEQ ID NO: 312367
  Synthetic oligonucleotide

SEQ ID NO: 540902 - DNA, 58 bp, Artificial; identical to SEQ ID NO: 312371
  Synthetic oligonucleotide

SEQ ID NO: 540903 - DNA, 54 bp, Artificial; identical to SEQ ID NO: 312372
  Synthetic oligonucleotide

SEQ ID NO: 540904 - DNA, 59 bp, Artificial; identical to SEQ ID NO: 312373
  Synthetic oligonucleotide

SEQ ID NO: 540905 - DNA, 54 bp, Artificial; identical to SEQ ID NO: 312374
  Synthetic oligonucleotide

SEQ ID NO: 540906 - DNA, 50 bp, Artificial; identical to SEQ ID NO: 312375
  Synthetic oligonucleotide

SEQ ID NO: 540907 - DNA, 54 bp, Artificial; identical to SEQ ID NO: 312376
  Synthetic oligonucleotide

SEQ ID NO: 540908 - DNA, 55 bp, Artificial; identical to SEQ ID NO: 312381
  Synthetic oligonucleotide

SEQ ID NO: 540909 - DNA, 57 bp, Artificial; identical to SEQ ID NO: 312387
  Synthetic oligonucleotide

SEQ ID NO: 540910 - DNA, 59 bp, Artificial; identical to SEQ ID NO: 312398
  Synthetic oligonucleotide

SEQ ID NO: 540911 - DNA, 57 bp, Artificial; identical to SEQ ID NO: 312401
  Synthetic oligonucleotide

SEQ ID NO: 540912 - DNA, 56 bp, Artificial; identical to SEQ ID NO: 312402
  Synthetic oligonucleotide

SEQ ID NO: 540913 - DNA, 55 bp, Artificial; identical to SEQ ID NO: 312405
  Synthetic oligonucleotide

SEQ ID NO: 540914 - DNA, 54 bp, Artificial; identical to SEQ ID NO: 312410
  Synthetic oligonucleotide

SEQ ID NO: 540915 - DNA, 58 bp, Artificial; identical to SEQ ID NO: 312411
  Synthetic oligonucleotide

SEQ ID NO: 540916 - DNA, 55 bp, Artificial; identical to SEQ ID NO: 312415
  Synthetic oligonucleotide

SEQ ID NO: 540917 - DNA, 60 bp, Artificial; identical to SEQ ID NO: 312421
  Synthetic oligonucleotide

SEQ ID NO: 540918 - DNA, 58 bp, Artificial; identical to SEQ ID NO: 312423
  Synthetic oligonucleotide

SEQ ID NO: 540919 - DNA, 58 bp, Artificial; identical to SEQ ID NO: 312424
  Synthetic oligonucleotide

SEQ ID NO: 540920 - DNA, 54 bp, Artificial; identical to SEQ ID NO: 312425
  Synthetic oligonucleotide

SEQ ID NO: 540921 - DNA, 57 bp, Artificial; identical to SEQ ID NO: 312429
  Synthetic oligonucleotide

SEQ ID NO: 540922 - DNA, 58 bp, Artificial; identical to SEQ ID NO: 312431
  Synthetic oligonucleotide

SEQ ID NO: 540923 - DNA, 56 bp, Artificial; identical to SEQ ID NO: 312432
  Synthetic oligonucleotide

SEQ ID NO: 540924 - DNA, 54 bp, Artificial; identical to SEQ ID NO: 312433
  Synthetic oligonucleotide

SEQ ID NO: 540925 - DNA, 57 bp, Artificial; identical to SEQ ID NO: 312434
  Synthetic oligonucleotide

SEQ ID NO: 540926 - DNA, 58 bp, Artificial; identical to SEQ ID NO: 312435
  Synthetic oligonucleotide

SEQ ID NO: 540927 - DNA, 56 bp, Artificial; identical to SEQ ID NO: 312436
  Synthetic oligonucleotide

SEQ ID NO: 540928 - DNA, 60 bp, Artificial; identical to SEQ ID NO: 312438
  Synthetic oligonucleotide

SEQ ID NO: 540929 - DNA, 51 bp, Artificial; identical to SEQ ID NO: 312439
  Synthetic oligonucleotide

SEQ ID NO: 540930 - DNA, 55 bp, Artificial; identical to SEQ ID NO: 312442
  Synthetic oligonucleotide

SEQ ID NO: 540931 - DNA, 58 bp, Artificial; identical to SEQ ID NO: 312444
  Synthetic oligonucleotide

SEQ ID NO: 540932 - DNA, 57 bp, Artificial; identical to SEQ ID NO: 312452
  Synthetic oligonucleotide

SEQ ID NO: 540933 - DNA, 57 bp, Artificial; identical to SEQ ID NO: 312456
  Synthetic oligonucleotide

SEQ ID NO: 540934 - DNA, 52 bp, Artificial; identical to SEQ ID NO: 312457
  Synthetic oligonucleotide

SEQ ID NO: 540935 - DNA, 51 bp, Artificial; identical to SEQ ID NO: 312458
  Synthetic oligonucleotide

SEQ ID NO: 540936 - DNA, 60 bp, Artificial; identical to SEQ ID NO: 312459
  Synthetic oligonucleotide

SEQ ID NO: 540937 - DNA, 60 bp, Artificial; identical to SEQ ID NO: 312463
  Synthetic oligonucleotide

SEQ ID NO: 540938 - DNA, 55 bp, Artificial; identical to SEQ ID NO: 312466
  Synthetic oligonucleotide

SEQ ID NO: 540939 - DNA, 55 bp, Artificial; identical to SEQ ID NO: 312468
  Synthetic oligonucleotide

SEQ ID NO: 540940 - DNA, 57 bp, Artificial; identical to SEQ ID NO: 312469
  Synthetic oligonucleotide

SEQ ID NO: 540941 - DNA, 55 bp, Artificial; identical to SEQ ID NO: 312475
  Synthetic oligonucleotide

SEQ ID NO: 540942 - DNA, 58 bp, Artificial; identical to SEQ ID NO: 312476
  Synthetic oligonucleotide

SEQ ID NO: 540943 - DNA, 55 bp, Artificial; identical to SEQ ID NO: 312477
  Synthetic oligonucleotide

SEQ ID NO: 540944 - DNA, 53 bp, Artificial; identical to SEQ ID NO: 312480
  Synthetic oligonucleotide

SEQ ID NO: 540945 - DNA, 55 bp, Artificial; identical to SEQ ID NO: 312485
  Synthetic oligonucleotide

SEQ ID NO: 540946 - DNA, 54 bp, Artificial; identical to SEQ ID NO: 10876
  Synthetic oligonucleotide

SEQ ID NO: 540947 - DNA, 60 bp, Artificial; identical to SEQ ID NO: 312487
  Synthetic oligonucleotide

SEQ ID NO: 540948 - DNA, 60 bp, Artificial; identical to SEQ ID NO: 312488
  Synthetic oligonucleotide

SEQ ID NO: 540949 - DNA, 55 bp, Artificial; identical to SEQ ID NO: 312490
  Synthetic oligonucleotide

SEQ ID NO: 540950 - DNA, 53 bp, Artificial; identical to SEQ ID NO: 312497
  Synthetic oligonucleotide

SEQ ID NO: 540951 - DNA, 55 bp, Artificial; identical to SEQ ID NO: 312498
  Synthetic oligonucleotide

SEQ ID NO: 540952 - DNA, 58 bp, Artificial; identical to SEQ ID NO: 312502
  Synthetic oligonucleotide

SEQ ID NO: 540953 - DNA, 60 bp, Artificial; identical to SEQ ID NO: 312505
  Synthetic oligonucleotide

SEQ ID NO: 540954 - DNA, 54 bp, Artificial; identical to SEQ ID NO: 312509
  Synthetic oligonucleotide

SEQ ID NO: 540955 - DNA, 57 bp, Artificial; identical to SEQ ID NO: 312510
  Synthetic oligonucleotide

SEQ ID NO: 540956 - DNA, 52 bp, Artificial; identical to SEQ ID NO: 312511
  Synthetic oligonucleotide

SEQ ID NO: 540957 - DNA, 60 bp, Artificial; identical to SEQ ID NO: 312513
  Synthetic oligonucleotide

SEQ ID NO: 540958 - DNA, 51 bp, Artificial; identical to SEQ ID NO: 312521
  Synthetic oligonucleotide

SEQ ID NO: 540959 - DNA, 60 bp, Artificial; identical to SEQ ID NO: 312522
  Synthetic oligonucleotide

SEQ ID NO: 540960 - DNA, 52 bp, Artificial; identical to SEQ ID NO: 312528
  Synthetic oligonucleotide

SEQ ID NO: 540961 - DNA, 60 bp, Artificial; identical to SEQ ID NO: 312529
  Synthetic oligonucleotide

SEQ ID NO: 540962 - DNA, 54 bp, Artificial; identical to SEQ ID NO: 312530
  Synthetic oligonucleotide

SEQ ID NO: 540963 - DNA, 60 bp, Artificial; identical to SEQ ID NO: 312532
  Synthetic oligonucleotide

SEQ ID NO: 540964 - DNA, 60 bp, Artificial; identical to SEQ ID NO: 312534
  Synthetic oligonucleotide

SEQ ID NO: 540965 - DNA, 55 bp, Artificial; identical to SEQ ID NO: 312535
  Synthetic oligonucleotide

SEQ ID NO: 540966 - DNA, 55 bp, Artificial; identical to SEQ ID NO: 312536
  Synthetic oligonucleotide

SEQ ID NO: 540967 - DNA, 52 bp, Artificial; identical to SEQ ID NO: 312539
  Synthetic oligonucleotide

SEQ ID NO: 540968 - DNA, 51 bp, Artificial; identical to SEQ ID NO: 312540
  Synthetic oligonucleotide

SEQ ID NO: 540969 - DNA, 55 bp, Artificial; identical to SEQ ID NO: 312549
  Synthetic oligonucleotide

SEQ ID NO: 540970 - DNA, 50 bp, Artificial; identical to SEQ ID NO: 312550
  Synthetic oligonucleotide

SEQ ID NO: 540971 - DNA, 53 bp, Artificial; identical to SEQ ID NO: 312551
  Synthetic oligonucleotide

SEQ ID NO: 540972 - DNA, 50 bp, Artificial; identical to SEQ ID NO: 312553
  Synthetic oligonucleotide

SEQ ID NO: 540973 - DNA, 60 bp, Artificial; identical to SEQ ID NO: 312557
  Synthetic oligonucleotide

SEQ ID NO: 540974 - DNA, 60 bp, Artificial; identical to SEQ ID NO: 15697
  Synthetic oligonucleotide

SEQ ID NO: 540975 - DNA, 57 bp, Artificial; identical to SEQ ID NO: 312561
  Synthetic oligonucleotide

SEQ ID NO: 540976 - DNA, 55 bp, Artificial; identical to SEQ ID NO: 312563
  Synthetic oligonucleotide

SEQ ID NO: 540977 - DNA, 60 bp, Artificial; identical to SEQ ID NO: 312568
  Synthetic oligonucleotide

SEQ ID NO: 540978 - DNA, 60 bp, Artificial; identical to SEQ ID NO: 312572
  Synthetic oligonucleotide

SEQ ID NO: 540979 - DNA, 55 bp, Artificial; identical to SEQ ID NO: 312574
  Synthetic oligonucleotide

SEQ ID NO: 540980 - DNA, 54 bp, Artificial; identical to SEQ ID NO: 312575
  Synthetic oligonucleotide

SEQ ID NO: 540981 - DNA, 55 bp, Artificial; identical to SEQ ID NO: 312577
  Synthetic oligonucleotide

SEQ ID NO: 540982 - DNA, 52 bp, Artificial; identical to SEQ ID NO: 312578
  Synthetic oligonucleotide

SEQ ID NO: 540983 - DNA, 55 bp, Artificial; identical to SEQ ID NO: 312581
  Synthetic oligonucleotide

SEQ ID NO: 540984 - DNA, 60 bp, Artificial; identical to SEQ ID NO: 312582
  Synthetic oligonucleotide

SEQ ID NO: 540985 - DNA, 55 bp, Artificial; identical to SEQ ID NO: 312593
  Synthetic oligonucleotide

SEQ ID NO: 540986 - DNA, 51 bp, Artificial; identical to SEQ ID NO: 312594
  Synthetic oligonucleotide

SEQ ID NO: 540987 - DNA, 58 bp, Artificial; identical to SEQ ID NO: 16152
  Synthetic oligonucleotide

SEQ ID NO: 540988 - DNA, 60 bp, Artificial; identical to SEQ ID NO: 312602
  Synthetic oligonucleotide

SEQ ID NO: 540989 - DNA, 60 bp, Artificial; identical to SEQ ID NO: 312606
  Synthetic oligonucleotide

SEQ ID NO: 540990 - DNA, 59 bp, Artificial; identical to SEQ ID NO: 312610
  Synthetic oligonucleotide

SEQ ID NO: 540991 - DNA, 48 bp, Artificial; identical to SEQ ID NO: 312611
  Synthetic oligonucleotide

SEQ ID NO: 540992 - DNA, 57 bp, Artificial; identical to SEQ ID NO: 15908
  Synthetic oligonucleotide

SEQ ID NO: 540993 - DNA, 56 bp, Artificial; identical to SEQ ID NO: 312614
  Synthetic oligonucleotide

SEQ ID NO: 540994 - DNA, 58 bp, Artificial; identical to SEQ ID NO: 312616
  Synthetic oligonucleotide

SEQ ID NO: 540995 - DNA, 54 bp, Artificial; identical to SEQ ID NO: 312618
  Synthetic oligonucleotide

SEQ ID NO: 540996 - DNA, 54 bp, Artificial; identical to SEQ ID NO: 312623
  Synthetic oligonucleotide

SEQ ID NO: 540997 - DNA, 56 bp, Artificial; identical to SEQ ID NO: 312624
  Synthetic oligonucleotide

SEQ ID NO: 540998 - DNA, 56 bp, Artificial; identical to SEQ ID NO: 312627
  Synthetic oligonucleotide

SEQ ID NO: 540999 - DNA, 58 bp, Artificial; identical to SEQ ID NO: 312629
  Synthetic oligonucleotide

SEQ ID NO: 541000 - DNA, 56 bp, Artificial; identical to SEQ ID NO: 312631
  Synthetic oligonucleotide

SEQ ID NO: 541001 - DNA, 59 bp, Artificial; identical to SEQ ID NO: 312632
  Synthetic oligonucleotide

SEQ ID NO: 541002 - DNA, 54 bp, Artificial; identical to SEQ ID NO: 312633
  Synthetic oligonucleotide

SEQ ID NO: 541003 - DNA, 59 bp, Artificial; identical to SEQ ID NO: 312634
  Synthetic oligonucleotide

SEQ ID NO: 541004 - DNA, 58 bp, Artificial; identical to SEQ ID NO: 312637
  Synthetic oligonucleotide

SEQ ID NO: 541005 - DNA, 60 bp, Artificial; identical to SEQ ID NO: 312645
  Synthetic oligonucleotide

SEQ ID NO: 541006 - DNA, 55 bp, Artificial; identical to SEQ ID NO: 312647
  Synthetic oligonucleotide

SEQ ID NO: 541007 - DNA, 59 bp, Artificial; identical to SEQ ID NO: 312649
  Synthetic oligonucleotide

SEQ ID NO: 541008 - DNA, 60 bp, Artificial; identical to SEQ ID NO: 312650
  Synthetic oligonucleotide

SEQ ID NO: 541009 - DNA, 55 bp, Artificial; identical to SEQ ID NO: 312654
  Synthetic oligonucleotide

SEQ ID NO: 541010 - DNA, 51 bp, Artificial; identical to SEQ ID NO: 312655
  Synthetic oligonucleotide

SEQ ID NO: 541011 - DNA, 60 bp, Artificial; identical to SEQ ID NO: 312657
  Synthetic oligonucleotide

SEQ ID NO: 541012 - DNA, 58 bp, Artificial; identical to SEQ ID NO: 312660
  Synthetic oligonucleotide

SEQ ID NO: 541013 - DNA, 60 bp, Artificial; identical to SEQ ID NO: 312661
  Synthetic oligonucleotide

SEQ ID NO: 541014 - DNA, 54 bp, Artificial; identical to SEQ ID NO: 312662
  Synthetic oligonucleotide

SEQ ID NO: 541015 - DNA, 55 bp, Artificial; identical to SEQ ID NO: 312667
  Synthetic oligonucleotide

SEQ ID NO: 541016 - DNA, 57 bp, Artificial; identical to SEQ ID NO: 312670
  Synthetic oligonucleotide

SEQ ID NO: 541017 - DNA, 59 bp, Artificial; identical to SEQ ID NO: 312672
  Synthetic oligonucleotide

SEQ ID NO: 541018 - DNA, 55 bp, Artificial; identical to SEQ ID NO: 312674
  Synthetic oligonucleotide

SEQ ID NO: 541019 - DNA, 58 bp, Artificial; identical to SEQ ID NO: 312678
  Synthetic oligonucleotide

SEQ ID NO: 541020 - DNA, 53 bp, Artificial; identical to SEQ ID NO: 312681
  Synthetic oligonucleotide

SEQ ID NO: 541021 - DNA, 60 bp, Artificial; identical to SEQ ID NO: 312683
  Synthetic oligonucleotide

SEQ ID NO: 541022 - DNA, 57 bp, Artificial; identical to SEQ ID NO: 312687
  Synthetic oligonucleotide

SEQ ID NO: 541023 - DNA, 56 bp, Artificial; identical to SEQ ID NO: 312688
  Synthetic oligonucleotide

SEQ ID NO: 541024 - DNA, 60 bp, Artificial; identical to SEQ ID NO: 312691
  Synthetic oligonucleotide

SEQ ID NO: 541025 - DNA, 60 bp, Artificial; identical to SEQ ID NO: 312694
  Synthetic oligonucleotide

SEQ ID NO: 541026 - DNA, 55 bp, Artificial; identical to SEQ ID NO: 312817
  Synthetic oligonucleotide

SEQ ID NO: 541027 - DNA, 60 bp, Artificial; identical to SEQ ID NO: 312819
  Synthetic oligonucleotide

SEQ ID NO: 541028 - DNA, 51 bp, Artificial; identical to SEQ ID NO: 312820
  Synthetic oligonucleotide

SEQ ID NO: 541029 - DNA, 55 bp, Artificial; identical to SEQ ID NO: 312821
  Synthetic oligonucleotide

SEQ ID NO: 541030 - DNA, 59 bp, Artificial; identical to SEQ ID NO: 312822
  Synthetic oligonucleotide

SEQ ID NO: 541031 - DNA, 59 bp, Artificial; identical to SEQ ID NO: 312823
  Synthetic oligonucleotide

SEQ ID NO: 541032 - DNA, 52 bp, Artificial; identical to SEQ ID NO: 312824
  Synthetic oligonucleotide

SEQ ID NO: 541033 - DNA, 55 bp, Artificial; identical to SEQ ID NO: 312827
  Synthetic oligonucleotide

SEQ ID NO: 541034 - DNA, 55 bp, Artificial; identical to SEQ ID NO: 312828
  Synthetic oligonucleotide

SEQ ID NO: 541035 - DNA, 59 bp, Artificial; identical to SEQ ID NO: 312829
  Synthetic oligonucleotide

SEQ ID NO: 541036 - DNA, 50 bp, Artificial; identical to SEQ ID NO: 312834
  Synthetic oligonucleotide

SEQ ID NO: 541037 - DNA, 53 bp, Artificial; identical to SEQ ID NO: 312835
  Synthetic oligonucleotide

SEQ ID NO: 541038 - DNA, 55 bp, Artificial; identical to SEQ ID NO: 312837
  Synthetic oligonucleotide

SEQ ID NO: 541039 - DNA, 60 bp, Artificial; identical to SEQ ID NO: 312838
  Synthetic oligonucleotide

SEQ ID NO: 541040 - DNA, 55 bp, Artificial; identical to SEQ ID NO: 312840
  Synthetic oligonucleotide

SEQ ID NO: 541041 - DNA, 54 bp, Artificial; identical to SEQ ID NO: 18329
  Synthetic oligonucleotide

SEQ ID NO: 541042 - DNA, 50 bp, Artificial; identical to SEQ ID NO: 16875
  Synthetic oligonucleotide

SEQ ID NO: 541043 - DNA, 60 bp, Artificial; identical to SEQ ID NO: 312845
  Synthetic oligonucleotide

SEQ ID NO: 541044 - DNA, 53 bp, Artificial; identical to SEQ ID NO: 312846
  Synthetic oligonucleotide

SEQ ID NO: 541045 - DNA, 57 bp, Artificial; identical to SEQ ID NO: 312847
  Synthetic oligonucleotide

SEQ ID NO: 541046 - DNA, 53 bp, Artificial; identical to SEQ ID NO: 312850
  Synthetic oligonucleotide

SEQ ID NO: 541047 - DNA, 54 bp, Artificial; identical to SEQ ID NO: 312854
  Synthetic oligonucleotide

SEQ ID NO: 541048 - DNA, 57 bp, Artificial; identical to SEQ ID NO: 312857
  Synthetic oligonucleotide

SEQ ID NO: 541049 - DNA, 50 bp, Artificial; identical to SEQ ID NO: 312859
  Synthetic oligonucleotide

SEQ ID NO: 541050 - DNA, 58 bp, Artificial; identical to SEQ ID NO: 312860
  Synthetic oligonucleotide

SEQ ID NO: 541051 - DNA, 54 bp, Artificial; identical to SEQ ID NO: 312865
  Synthetic oligonucleotide

SEQ ID NO: 541052 - DNA, 60 bp, Artificial; identical to SEQ ID NO: 312871
  Synthetic oligonucleotide

SEQ ID NO: 541053 - DNA, 55 bp, Artificial; identical to SEQ ID NO: 312876
  Synthetic oligonucleotide

SEQ ID NO: 541054 - DNA, 54 bp, Artificial; identical to SEQ ID NO: 312877
  Synthetic oligonucleotide

SEQ ID NO: 541055 - DNA, 60 bp, Artificial; identical to SEQ ID NO: 312878
  Synthetic oligonucleotide

SEQ ID NO: 541056 - DNA, 60 bp, Artificial; identical to SEQ ID NO: 312880
  Synthetic oligonucleotide

SEQ ID NO: 541057 - DNA, 57 bp, Artificial; identical to SEQ ID NO: 312891
  Synthetic oligonucleotide

SEQ ID NO: 541058 - DNA, 60 bp, Artificial; identical to SEQ ID NO: 12912
  Synthetic oligonucleotide

SEQ ID NO: 541059 - DNA, 55 bp, Artificial; identical to SEQ ID NO: 312912
  Synthetic oligonucleotide

SEQ ID NO: 541060 - DNA, 55 bp, Artificial; identical to SEQ ID NO: 312913
  Synthetic oligonucleotide

SEQ ID NO: 541061 - DNA, 51 bp, Artificial; identical to SEQ ID NO: 312914
  Synthetic oligonucleotide

SEQ ID NO: 541062 - DNA, 51 bp, Artificial; identical to SEQ ID NO: 312917
  Synthetic oligonucleotide

SEQ ID NO: 541063 - DNA, 57 bp, Artificial; identical to SEQ ID NO: 312925
  Synthetic oligonucleotide

SEQ ID NO: 541064 - DNA, 55 bp, Artificial; identical to SEQ ID NO: 312927
  Synthetic oligonucleotide

SEQ ID NO: 541065 - DNA, 56 bp, Artificial; identical to SEQ ID NO: 312928
  Synthetic oligonucleotide

SEQ ID NO: 541066 - DNA, 54 bp, Artificial; identical to SEQ ID NO: 312930
  Synthetic oligonucleotide

SEQ ID NO: 541067 - DNA, 54 bp, Artificial; identical to SEQ ID NO: 312932
  Synthetic oligonucleotide

SEQ ID NO: 541068 - DNA, 49 bp, Artificial; identical to SEQ ID NO: 18212
  Synthetic oligonucleotide

SEQ ID NO: 541069 - DNA, 54 bp, Artificial; identical to SEQ ID NO: 312941
  Synthetic oligonucleotide

SEQ ID NO: 541070 - DNA, 57 bp, Artificial; identical to SEQ ID NO: 312942
  Synthetic oligonucleotide

SEQ ID NO: 541071 - DNA, 52 bp, Artificial; identical to SEQ ID NO: 312946
  Synthetic oligonucleotide

SEQ ID NO: 541072 - DNA, 60 bp, Artificial; identical to SEQ ID NO: 312952
  Synthetic oligonucleotide

SEQ ID NO: 541073 - DNA, 56 bp, Artificial; identical to SEQ ID NO: 312953
  Synthetic oligonucleotide

SEQ ID NO: 541074 - DNA, 55 bp, Artificial; identical to SEQ ID NO: 312955
  Synthetic oligonucleotide

SEQ ID NO: 541075 - DNA, 50 bp, Artificial; identical to SEQ ID NO: 312961
  Synthetic oligonucleotide

SEQ ID NO: 541076 - DNA, 58 bp, Artificial; identical to SEQ ID NO: 312962
  Synthetic oligonucleotide

SEQ ID NO: 541077 - DNA, 57 bp, Artificial; identical to SEQ ID NO: 312972
  Synthetic oligonucleotide

SEQ ID NO: 541078 - DNA, 58 bp, Artificial; identical to SEQ ID NO: 312973
  Synthetic oligonucleotide

SEQ ID NO: 541079 - DNA, 52 bp, Artificial; identical to SEQ ID NO: 312976
  Synthetic oligonucleotide

SEQ ID NO: 541080 - DNA, 53 bp, Artificial; identical to SEQ ID NO: 312978
  Synthetic oligonucleotide

SEQ ID NO: 541081 - DNA, 50 bp, Artificial; identical to SEQ ID NO: 312979
  Synthetic oligonucleotide

SEQ ID NO: 541082 - DNA, 57 bp, Artificial; identical to SEQ ID NO: 312982
  Synthetic oligonucleotide

SEQ ID NO: 541083 - DNA, 60 bp, Artificial; identical to SEQ ID NO: 312983
  Synthetic oligonucleotide

SEQ ID NO: 541084 - DNA, 59 bp, Artificial; identical to SEQ ID NO: 312984
  Synthetic oligonucleotide

SEQ ID NO: 541085 - DNA, 57 bp, Artificial; identical to SEQ ID NO: 312988
  Synthetic oligonucleotide

SEQ ID NO: 541086 - DNA, 60 bp, Artificial; identical to SEQ ID NO: 312990
  Synthetic oligonucleotide

SEQ ID NO: 541087 - DNA, 60 bp, Artificial; identical to SEQ ID NO: 312994
  Synthetic oligonucleotide

SEQ ID NO: 541088 - DNA, 55 bp, Artificial; identical to SEQ ID NO: 312996
  Synthetic oligonucleotide

SEQ ID NO: 541089 - DNA, 60 bp, Artificial; identical to SEQ ID NO: 313000
  Synthetic oligonucleotide

SEQ ID NO: 541090 - DNA, 53 bp, Artificial; identical to SEQ ID NO: 313002
  Synthetic oligonucleotide

SEQ ID NO: 541091 - DNA, 59 bp, Artificial; identical to SEQ ID NO: 9329
  Synthetic oligonucleotide

SEQ ID NO: 541092 - DNA, 55 bp, Artificial; identical to SEQ ID NO: 313005
  Synthetic oligonucleotide

SEQ ID NO: 541093 - DNA, 58 bp, Artificial; identical to SEQ ID NO: 313006
  Synthetic oligonucleotide

SEQ ID NO: 541094 - DNA, 52 bp, Artificial; identical to SEQ ID NO: 313035
  Synthetic oligonucleotide

SEQ ID NO: 541095 - DNA, 60 bp, Artificial; identical to SEQ ID NO: 313036
  Synthetic oligonucleotide

SEQ ID NO: 541096 - DNA, 60 bp, Artificial; identical to SEQ ID NO: 313037
  Synthetic oligonucleotide

SEQ ID NO: 541097 - DNA, 55 bp, Artificial; identical to SEQ ID NO: 313044
  Synthetic oligonucleotide

SEQ ID NO: 541098 - DNA, 55 bp, Artificial; identical to SEQ ID NO: 313045
  Synthetic oligonucleotide

SEQ ID NO: 541099 - DNA, 52 bp, Artificial; identical to SEQ ID NO: 313048
  Synthetic oligonucleotide

SEQ ID NO: 541100 - DNA, 49 bp, Artificial; identical to SEQ ID NO: 313053
  Synthetic oligonucleotide

SEQ ID NO: 541101 - DNA, 54 bp, Artificial; identical to SEQ ID NO: 313061
  Synthetic oligonucleotide

SEQ ID NO: 541102 - DNA, 57 bp, Artificial; identical to SEQ ID NO: 313063
  Synthetic oligonucleotide

SEQ ID NO: 541103 - DNA, 53 bp, Artificial; identical to SEQ ID NO: 313064
  Synthetic oligonucleotide

SEQ ID NO: 541104 - DNA, 60 bp, Artificial; identical to SEQ ID NO: 313066
  Synthetic oligonucleotide

SEQ ID NO: 541105 - DNA, 55 bp, Artificial; identical to SEQ ID NO: 313068
  Synthetic oligonucleotide

SEQ ID NO: 541106 - DNA, 55 bp, Artificial; identical to SEQ ID NO: 313071
  Synthetic oligonucleotide

SEQ ID NO: 541107 - DNA, 58 bp, Artificial; identical to SEQ ID NO: 313080
  Synthetic oligonucleotide

SEQ ID NO: 541108 - DNA, 53 bp, Artificial; identical to SEQ ID NO: 313081
  Synthetic oligonucleotide

SEQ ID NO: 541109 - DNA, 54 bp, Artificial; identical to SEQ ID NO: 313084
  Synthetic oligonucleotide

SEQ ID NO: 541110 - DNA, 55 bp, Artificial; identical to SEQ ID NO: 313085
  Synthetic oligonucleotide

SEQ ID NO: 541111 - DNA, 51 bp, Artificial; identical to SEQ ID NO: 313090
  Synthetic oligonucleotide

SEQ ID NO: 541112 - DNA, 54 bp, Artificial; identical to SEQ ID NO: 313091
  Synthetic oligonucleotide

SEQ ID NO: 541113 - DNA, 57 bp, Artificial; identical to SEQ ID NO: 313096
  Synthetic oligonucleotide

SEQ ID NO: 541114 - DNA, 55 bp, Artificial; identical to SEQ ID NO: 313099
  Synthetic oligonucleotide

SEQ ID NO: 541115 - DNA, 52 bp, Artificial; identical to SEQ ID NO: 313104
  Synthetic oligonucleotide

SEQ ID NO: 541116 - DNA, 56 bp, Artificial; identical to SEQ ID NO: 313107
  Synthetic oligonucleotide

SEQ ID NO: 541117 - DNA, 55 bp, Artificial; identical to SEQ ID NO: 6833
  Synthetic oligonucleotide

SEQ ID NO: 541118 - DNA, 56 bp, Artificial; identical to SEQ ID NO: 313113
  Synthetic oligonucleotide

SEQ ID NO: 541119 - DNA, 59 bp, Artificial; identical to SEQ ID NO: 313117
  Synthetic oligonucleotide

SEQ ID NO: 541120 - DNA, 52 bp, Artificial; identical to SEQ ID NO: 313118
  Synthetic oligonucleotide

SEQ ID NO: 541121 - DNA, 60 bp, Artificial; identical to SEQ ID NO: 313119
  Synthetic oligonucleotide

SEQ ID NO: 541122 - DNA, 55 bp, Artificial; identical to SEQ ID NO: 313123
  Synthetic oligonucleotide

SEQ ID NO: 541123 - DNA, 55 bp, Artificial; identical to SEQ ID NO: 16679
  Synthetic oligonucleotide

SEQ ID NO: 541124 - DNA, 53 bp, Artificial; identical to SEQ ID NO: 313125
  Synthetic oligonucleotide

SEQ ID NO: 541125 - DNA, 60 bp, Artificial; identical to SEQ ID NO: 313132
  Synthetic oligonucleotide

SEQ ID NO: 541126 - DNA, 57 bp, Artificial; identical to SEQ ID NO: 313133
  Synthetic oligonucleotide

SEQ ID NO: 541127 - DNA, 57 bp, Artificial; identical to SEQ ID NO: 313134
  Synthetic oligonucleotide

SEQ ID NO: 541128 - DNA, 58 bp, Artificial; identical to SEQ ID NO: 313136
  Synthetic oligonucleotide

SEQ ID NO: 541129 - DNA, 55 bp, Artificial; identical to SEQ ID NO: 313138
  Synthetic oligonucleotide

SEQ ID NO: 541130 - DNA, 52 bp, Artificial; identical to SEQ ID NO: 313143
  Synthetic oligonucleotide

SEQ ID NO: 541131 - DNA, 53 bp, Artificial; identical to SEQ ID NO: 313144
  Synthetic oligonucleotide

SEQ ID NO: 541132 - DNA, 60 bp, Artificial; identical to SEQ ID NO: 313145
  Synthetic oligonucleotide

SEQ ID NO: 541133 - DNA, 51 bp, Artificial; identical to SEQ ID NO: 15739
  Synthetic oligonucleotide

SEQ ID NO: 541134 - DNA, 54 bp, Artificial; identical to SEQ ID NO: 17817
  Synthetic oligonucleotide

SEQ ID NO: 541135 - DNA, 55 bp, Artificial; identical to SEQ ID NO: 313149
  Synthetic oligonucleotide

SEQ ID NO: 541136 - DNA, 51 bp, Artificial; identical to SEQ ID NO: 313150
  Synthetic oligonucleotide

SEQ ID NO: 541137 - DNA, 53 bp, Artificial; identical to SEQ ID NO: 313151
  Synthetic oligonucleotide

SEQ ID NO: 541138 - DNA, 55 bp, Artificial; identical to SEQ ID NO: 313154
  Synthetic oligonucleotide

SEQ ID NO: 541139 - DNA, 56 bp, Artificial; identical to SEQ ID NO: 313155
  Synthetic oligonucleotide

SEQ ID NO: 541140 - DNA, 55 bp, Artificial; identical to SEQ ID NO: 7418
  Synthetic oligonucleotide

SEQ ID NO: 541141 - DNA, 56 bp, Artificial; identical to SEQ ID NO: 313159
  Synthetic oligonucleotide

SEQ ID NO: 541142 - DNA, 59 bp, Artificial; identical to SEQ ID NO: 313161
  Synthetic oligonucleotide

SEQ ID NO: 541143 - DNA, 57 bp, Artificial; identical to SEQ ID NO: 313162
  Synthetic oligonucleotide

SEQ ID NO: 541144 - DNA, 57 bp, Artificial; identical to SEQ ID NO: 313163
  Synthetic oligonucleotide

SEQ ID NO: 541145 - DNA, 49 bp, Artificial; identical to SEQ ID NO: 313164
  Synthetic oligonucleotide

SEQ ID NO: 541146 - DNA, 55 bp, Artificial; identical to SEQ ID NO: 313171
  Synthetic oligonucleotide

SEQ ID NO: 541147 - DNA, 58 bp, Artificial; identical to SEQ ID NO: 313173
  Synthetic oligonucleotide

SEQ ID NO: 541148 - DNA, 58 bp, Artificial; identical to SEQ ID NO: 18890
  Synthetic oligonucleotide

SEQ ID NO: 541149 - DNA, 60 bp, Artificial; identical to SEQ ID NO: 313178
  Synthetic oligonucleotide

SEQ ID NO: 541150 - DNA, 58 bp, Artificial; identical to SEQ ID NO: 313179
  Synthetic oligonucleotide

SEQ ID NO: 541151 - DNA, 53 bp, Artificial; identical to SEQ ID NO: 313181
  Synthetic oligonucleotide

SEQ ID NO: 541152 - DNA, 53 bp, Artificial; identical to SEQ ID NO: 313185
  Synthetic oligonucleotide

SEQ ID NO: 541153 - DNA, 58 bp, Artificial; identical to SEQ ID NO: 8657
  Synthetic oligonucleotide

SEQ ID NO: 541154 - DNA, 51 bp, Artificial; identical to SEQ ID NO: 313189
  Synthetic oligonucleotide

SEQ ID NO: 541155 - DNA, 55 bp, Artificial; identical to SEQ ID NO: 313194
  Synthetic oligonucleotide

SEQ ID NO: 541156 - DNA, 60 bp, Artificial; identical to SEQ ID NO: 313197
  Synthetic oligonucleotide

SEQ ID NO: 541157 - DNA, 58 bp, Artificial; identical to SEQ ID NO: 313198
  Synthetic oligonucleotide

SEQ ID NO: 541158 - DNA, 58 bp, Artificial; identical to SEQ ID NO: 313200
  Synthetic oligonucleotide

SEQ ID NO: 541159 - DNA, 60 bp, Artificial; identical to SEQ ID NO: 313201
  Synthetic oligonucleotide

SEQ ID NO: 541160 - DNA, 60 bp, Artificial; identical to SEQ ID NO: 313206
  Synthetic oligonucleotide

SEQ ID NO: 541161 - DNA, 58 bp, Artificial; identical to SEQ ID NO: 313208
  Synthetic oligonucleotide

SEQ ID NO: 541162 - DNA, 60 bp, Artificial; identical to SEQ ID NO: 313211
  Synthetic oligonucleotide

SEQ ID NO: 541163 - DNA, 58 bp, Artificial; identical to SEQ ID NO: 313213
  Synthetic oligonucleotide

SEQ ID NO: 541164 - DNA, 56 bp, Artificial; identical to SEQ ID NO: 17403
  Synthetic oligonucleotide

SEQ ID NO: 541165 - DNA, 56 bp, Artificial; identical to SEQ ID NO: 313217
  Synthetic oligonucleotide

SEQ ID NO: 541166 - DNA, 56 bp, Artificial; identical to SEQ ID NO: 313221
  Synthetic oligonucleotide

SEQ ID NO: 541167 - DNA, 60 bp, Artificial; identical to SEQ ID NO: 313223
  Synthetic oligonucleotide

SEQ ID NO: 541168 - DNA, 60 bp, Artificial; identical to SEQ ID NO: 313225
  Synthetic oligonucleotide

SEQ ID NO: 541169 - DNA, 56 bp, Artificial; identical to SEQ ID NO: 313227
  Synthetic oligonucleotide

SEQ ID NO: 541170 - DNA, 55 bp, Artificial; identical to SEQ ID NO: 6353
  Synthetic oligonucleotide

SEQ ID NO: 541171 - DNA, 55 bp, Artificial; identical to SEQ ID NO: 313229
  Synthetic oligonucleotide

SEQ ID NO: 541172 - DNA, 51 bp, Artificial; identical to SEQ ID NO: 16203
  Synthetic oligonucleotide

SEQ ID NO: 541173 - DNA, 55 bp, Artificial; identical to SEQ ID NO: 313233
  Synthetic oligonucleotide

SEQ ID NO: 541174 - DNA, 60 bp, Artificial; identical to SEQ ID NO: 313241
  Synthetic oligonucleotide

SEQ ID NO: 541175 - DNA, 54 bp, Artificial; identical to SEQ ID NO: 313243
  Synthetic oligonucleotide

SEQ ID NO: 541176 - DNA, 59 bp, Artificial; identical to SEQ ID NO: 313246
  Synthetic oligonucleotide

SEQ ID NO: 541177 - DNA, 60 bp, Artificial; identical to SEQ ID NO: 313247
  Synthetic oligonucleotide

SEQ ID NO: 541178 - DNA, 58 bp, Artificial; identical to SEQ ID NO: 313254
  Synthetic oligonucleotide

SEQ ID NO: 541179 - DNA, 52 bp, Artificial; identical to SEQ ID NO: 313259
  Synthetic oligonucleotide

SEQ ID NO: 541180 - DNA, 57 bp, Artificial; identical to SEQ ID NO: 313260
  Synthetic oligonucleotide

SEQ ID NO: 541181 - DNA, 55 bp, Artificial; identical to SEQ ID NO: 313261
  Synthetic oligonucleotide

SEQ ID NO: 541182 - DNA, 55 bp, Artificial; identical to SEQ ID NO: 313263
  Synthetic oligonucleotide

SEQ ID NO: 541183 - DNA, 60 bp, Artificial; identical to SEQ ID NO: 313264
  Synthetic oligonucleotide

SEQ ID NO: 541184 - DNA, 56 bp, Artificial; identical to SEQ ID NO: 313266
  Synthetic oligonucleotide

SEQ ID NO: 541185 - DNA, 60 bp, Artificial; identical to SEQ ID NO: 313268
  Synthetic oligonucleotide

SEQ ID NO: 541186 - DNA, 58 bp, Artificial; identical to SEQ ID NO: 313270
  Synthetic oligonucleotide

SEQ ID NO: 541187 - DNA, 52 bp, Artificial; identical to SEQ ID NO: 313271
  Synthetic oligonucleotide

SEQ ID NO: 541188 - DNA, 59 bp, Artificial; identical to SEQ ID NO: 313272
  Synthetic oligonucleotide

SEQ ID NO: 541189 - DNA, 60 bp, Artificial; identical to SEQ ID NO: 313273
  Synthetic oligonucleotide

SEQ ID NO: 541190 - DNA, 56 bp, Artificial; identical to SEQ ID NO: 313274
  Synthetic oligonucleotide

SEQ ID NO: 541191 - DNA, 56 bp, Artificial; identical to SEQ ID NO: 313275
  Synthetic oligonucleotide

SEQ ID NO: 541192 - DNA, 55 bp, Artificial; identical to SEQ ID NO: 313278
  Synthetic oligonucleotide

SEQ ID NO: 541193 - DNA, 55 bp, Artificial; identical to SEQ ID NO: 313282
  Synthetic oligonucleotide

SEQ ID NO: 541194 - DNA, 58 bp, Artificial; identical to SEQ ID NO: 313286
  Synthetic oligonucleotide

SEQ ID NO: 541195 - DNA, 53 bp, Artificial; identical to SEQ ID NO: 313287
  Synthetic oligonucleotide

SEQ ID NO: 541196 - DNA, 58 bp, Artificial; identical to SEQ ID NO: 313291
  Synthetic oligonucleotide

SEQ ID NO: 541197 - DNA, 60 bp, Artificial; identical to SEQ ID NO: 313296
  Synthetic oligonucleotide

SEQ ID NO: 541198 - DNA, 54 bp, Artificial; identical to SEQ ID NO: 313299
  Synthetic oligonucleotide

SEQ ID NO: 541199 - DNA, 50 bp, Artificial; identical to SEQ ID NO: 313300
  Synthetic oligonucleotide

SEQ ID NO: 541200 - DNA, 57 bp, Artificial; identical to SEQ ID NO: 313301
  Synthetic oligonucleotide

SEQ ID NO: 541201 - DNA, 53 bp, Artificial; identical to SEQ ID NO: 313304
  Synthetic oligonucleotide

SEQ ID NO: 541202 - DNA, 50 bp, Artificial; identical to SEQ ID NO: 313306
  Synthetic oligonucleotide

SEQ ID NO: 541203 - DNA, 52 bp, Artificial; identical to SEQ ID NO: 313308
  Synthetic oligonucleotide

SEQ ID NO: 541204 - DNA, 57 bp, Artificial; identical to SEQ ID NO: 313315
  Synthetic oligonucleotide

SEQ ID NO: 541205 - DNA, 54 bp, Artificial; identical to SEQ ID NO: 313317
  Synthetic oligonucleotide

SEQ ID NO: 541206 - DNA, 55 bp, Artificial; identical to SEQ ID NO: 313319
  Synthetic oligonucleotide

SEQ ID NO: 541207 - DNA, 53 bp, Artificial; identical to SEQ ID NO: 313320
  Synthetic oligonucleotide

SEQ ID NO: 541208 - DNA, 52 bp, Artificial; identical to SEQ ID NO: 313321
  Synthetic oligonucleotide

SEQ ID NO: 541209 - DNA, 60 bp, Artificial; identical to SEQ ID NO: 313323
  Synthetic oligonucleotide

SEQ ID NO: 541210 - DNA, 55 bp, Artificial; identical to SEQ ID NO: 313325
  Synthetic oligonucleotide

SEQ ID NO: 541211 - DNA, 55 bp, Artificial; identical to SEQ ID NO: 313331
  Synthetic oligonucleotide

SEQ ID NO: 541212 - DNA, 55 bp, Artificial; identical to SEQ ID NO: 313334
  Synthetic oligonucleotide

SEQ ID NO: 541213 - DNA, 50 bp, Artificial; identical to SEQ ID NO: 313338
  Synthetic oligonucleotide

SEQ ID NO: 541214 - DNA, 56 bp, Artificial; identical to SEQ ID NO: 18791
  Synthetic oligonucleotide

SEQ ID NO: 541215 - DNA, 56 bp, Artificial; identical to SEQ ID NO: 313346
  Synthetic oligonucleotide

SEQ ID NO: 541216 - DNA, 60 bp, Artificial; identical to SEQ ID NO: 313348
  Synthetic oligonucleotide

SEQ ID NO: 541217 - DNA, 59 bp, Artificial; identical to SEQ ID NO: 313349
  Synthetic oligonucleotide

SEQ ID NO: 541218 - DNA, 55 bp, Artificial; identical to SEQ ID NO: 313352
  Synthetic oligonucleotide

SEQ ID NO: 541219 - DNA, 52 bp, Artificial; identical to SEQ ID NO: 313353
  Synthetic oligonucleotide

SEQ ID NO: 541220 - DNA, 55 bp, Artificial; identical to SEQ ID NO: 313354
  Synthetic oligonucleotide

SEQ ID NO: 541221 - DNA, 55 bp, Artificial; identical to SEQ ID NO: 313359
  Synthetic oligonucleotide

SEQ ID NO: 541222 - DNA, 52 bp, Artificial; identical to SEQ ID NO: 313360
  Synthetic oligonucleotide

SEQ ID NO: 541223 - DNA, 60 bp, Artificial; identical to SEQ ID NO: 313363
  Synthetic oligonucleotide

SEQ ID NO: 541224 - DNA, 55 bp, Artificial; identical to SEQ ID NO: 313368
  Synthetic oligonucleotide

SEQ ID NO: 541225 - DNA, 55 bp, Artificial; identical to SEQ ID NO: 313373
  Synthetic oligonucleotide

SEQ ID NO: 541226 - DNA, 60 bp, Artificial; identical to SEQ ID NO: 313375
  Synthetic oligonucleotide

SEQ ID NO: 541227 - DNA, 56 bp, Artificial; identical to SEQ ID NO: 313379
  Synthetic oligonucleotide

SEQ ID NO: 541228 - DNA, 60 bp, Artificial; identical to SEQ ID NO: 313381
  Synthetic oligonucleotide

SEQ ID NO: 541229 - DNA, 60 bp, Artificial; identical to SEQ ID NO: 313382
  Synthetic oligonucleotide

SEQ ID NO: 541230 - DNA, 55 bp, Artificial; identical to SEQ ID NO: 313385
  Synthetic oligonucleotide

SEQ ID NO: 541231 - DNA, 54 bp, Artificial; identical to SEQ ID NO: 313393
  Synthetic oligonucleotide

SEQ ID NO: 541232 - DNA, 50 bp, Artificial; identical to SEQ ID NO: 9370
  Synthetic oligonucleotide

SEQ ID NO: 541233 - DNA, 55 bp, Artificial; identical to SEQ ID NO: 313396
  Synthetic oligonucleotide

SEQ ID NO: 541234 - DNA, 55 bp, Artificial; identical to SEQ ID NO: 313399
  Synthetic oligonucleotide

SEQ ID NO: 541235 - DNA, 54 bp, Artificial; identical to SEQ ID NO: 313402
  Synthetic oligonucleotide

SEQ ID NO: 541236 - DNA, 60 bp, Artificial; identical to SEQ ID NO: 313403
  Synthetic oligonucleotide

SEQ ID NO: 541237 - DNA, 55 bp, Artificial; identical to SEQ ID NO: 313405
  Synthetic oligonucleotide

SEQ ID NO: 541238 - DNA, 60 bp, Artificial; identical to SEQ ID NO: 313406
  Synthetic oligonucleotide

SEQ ID NO: 541239 - DNA, 50 bp, Artificial; identical to SEQ ID NO: 313410
  Synthetic oligonucleotide

SEQ ID NO: 541240 - DNA, 52 bp, Artificial; identical to SEQ ID NO: 313411
  Synthetic oligonucleotide

SEQ ID NO: 541241 - DNA, 55 bp, Artificial; identical to SEQ ID NO: 313419
  Synthetic oligonucleotide

SEQ ID NO: 541242 - DNA, 55 bp, Artificial; identical to SEQ ID NO: 313425
  Synthetic oligonucleotide

SEQ ID NO: 541243 - DNA, 56 bp, Artificial; identical to SEQ ID NO: 313426
  Synthetic oligonucleotide

SEQ ID NO: 541244 - DNA, 55 bp, Artificial; identical to SEQ ID NO: 313430
  Synthetic oligonucleotide

SEQ ID NO: 541245 - DNA, 58 bp, Artificial; identical to SEQ ID NO: 313431
  Synthetic oligonucleotide

SEQ ID NO: 541246 - DNA, 55 bp, Artificial; identical to SEQ ID NO: 313432
  Synthetic oligonucleotide

SEQ ID NO: 541247 - DNA, 55 bp, Artificial; identical to SEQ ID NO: 313434
  Synthetic oligonucleotide

SEQ ID NO: 541248 - DNA, 55 bp, Artificial; identical to SEQ ID NO: 313435
  Synthetic oligonucleotide

SEQ ID NO: 541249 - DNA, 60 bp, Artificial; identical to SEQ ID NO: 313436
  Synthetic oligonucleotide

SEQ ID NO: 541250 - DNA, 60 bp, Artificial; identical to SEQ ID NO: 313437
  Synthetic oligonucleotide

SEQ ID NO: 541251 - DNA, 58 bp, Artificial; identical to SEQ ID NO: 313439
  Synthetic oligonucleotide

SEQ ID NO: 541252 - DNA, 57 bp, Artificial; identical to SEQ ID NO: 313441
  Synthetic oligonucleotide

SEQ ID NO: 541253 - DNA, 56 bp, Artificial; identical to SEQ ID NO: 313442
  Synthetic oligonucleotide

SEQ ID NO: 541254 - DNA, 56 bp, Artificial; identical to SEQ ID NO: 313443
  Synthetic oligonucleotide

SEQ ID NO: 541255 - DNA, 60 bp, Artificial; identical to SEQ ID NO: 313444
  Synthetic oligonucleotide

SEQ ID NO: 541256 - DNA, 58 bp, Artificial; identical to SEQ ID NO: 313445
  Synthetic oligonucleotide

SEQ ID NO: 541257 - DNA, 55 bp, Artificial; identical to SEQ ID NO: 313446
  Synthetic oligonucleotide

SEQ ID NO: 541258 - DNA, 55 bp, Artificial; identical to SEQ ID NO: 313447
  Synthetic oligonucleotide

SEQ ID NO: 541259 - DNA, 57 bp, Artificial; identical to SEQ ID NO: 313448
  Synthetic oligonucleotide

SEQ ID NO: 541260 - DNA, 60 bp, Artificial; identical to SEQ ID NO: 313449
  Synthetic oligonucleotide

SEQ ID NO: 541261 - DNA, 53 bp, Artificial; identical to SEQ ID NO: 8204
  Synthetic oligonucleotide

SEQ ID NO: 541262 - DNA, 53 bp, Artificial; identical to SEQ ID NO: 313455
  Synthetic oligonucleotide

SEQ ID NO: 541263 - DNA, 59 bp, Artificial; identical to SEQ ID NO: 313457
  Synthetic oligonucleotide

SEQ ID NO: 541264 - DNA, 60 bp, Artificial; identical to SEQ ID NO: 313458
  Synthetic oligonucleotide

SEQ ID NO: 541265 - DNA, 57 bp, Artificial; identical to SEQ ID NO: 313461
  Synthetic oligonucleotide

SEQ ID NO: 541266 - DNA, 55 bp, Artificial; identical to SEQ ID NO: 313468
  Synthetic oligonucleotide

SEQ ID NO: 541267 - DNA, 53 bp, Artificial; identical to SEQ ID NO: 313470
  Synthetic oligonucleotide

SEQ ID NO: 541268 - DNA, 57 bp, Artificial; identical to SEQ ID NO: 313471
  Synthetic oligonucleotide

SEQ ID NO: 541269 - DNA, 59 bp, Artificial; identical to SEQ ID NO: 313475
  Synthetic oligonucleotide

SEQ ID NO: 541270 - DNA, 56 bp, Artificial; identical to SEQ ID NO: 14878
  Synthetic oligonucleotide

SEQ ID NO: 541271 - DNA, 57 bp, Artificial; identical to SEQ ID NO: 313477
  Synthetic oligonucleotide

SEQ ID NO: 541272 - DNA, 50 bp, Artificial; identical to SEQ ID NO: 313478
  Synthetic oligonucleotide

SEQ ID NO: 541273 - DNA, 56 bp, Artificial; identical to SEQ ID NO: 313483
  Synthetic oligonucleotide

SEQ ID NO: 541274 - DNA, 60 bp, Artificial; identical to SEQ ID NO: 313486
  Synthetic oligonucleotide

SEQ ID NO: 541275 - DNA, 59 bp, Artificial; identical to SEQ ID NO: 313487
  Synthetic oligonucleotide

SEQ ID NO: 541276 - DNA, 60 bp, Artificial; identical to SEQ ID NO: 313489
  Synthetic oligonucleotide

SEQ ID NO: 541277 - DNA, 60 bp, Artificial; identical to SEQ ID NO: 313491
  Synthetic oligonucleotide

SEQ ID NO: 541278 - DNA, 56 bp, Artificial; identical to SEQ ID NO: 15864
  Synthetic oligonucleotide

SEQ ID NO: 541279 - DNA, 60 bp, Artificial; identical to SEQ ID NO: 313494
  Synthetic oligonucleotide

SEQ ID NO: 541280 - DNA, 55 bp, Artificial; identical to SEQ ID NO: 313496
  Synthetic oligonucleotide

SEQ ID NO: 541281 - DNA, 54 bp, Artificial; identical to SEQ ID NO: 313497
  Synthetic oligonucleotide

SEQ ID NO: 541282 - DNA, 58 bp, Artificial; identical to SEQ ID NO: 313499
  Synthetic oligonucleotide

SEQ ID NO: 541283 - DNA, 52 bp, Artificial; identical to SEQ ID NO: 313501
  Synthetic oligonucleotide

SEQ ID NO: 541284 - DNA, 60 bp, Artificial; identical to SEQ ID NO: 313504
  Synthetic oligonucleotide

SEQ ID NO: 541285 - DNA, 55 bp, Artificial; identical to SEQ ID NO: 313506
  Synthetic oligonucleotide

SEQ ID NO: 541286 - DNA, 53 bp, Artificial; identical to SEQ ID NO: 16206
  Synthetic oligonucleotide

SEQ ID NO: 541287 - DNA, 60 bp, Artificial; identical to SEQ ID NO: 313508
  Synthetic oligonucleotide

SEQ ID NO: 541288 - DNA, 56 bp, Artificial; identical to SEQ ID NO: 313509
  Synthetic oligonucleotide

SEQ ID NO: 541289 - DNA, 58 bp, Artificial; identical to SEQ ID NO: 313510
  Synthetic oligonucleotide

SEQ ID NO: 541290 - DNA, 55 bp, Artificial; identical to SEQ ID NO: 313511
  Synthetic oligonucleotide

SEQ ID NO: 541291 - DNA, 54 bp, Artificial; identical to SEQ ID NO: 313512
  Synthetic oligonucleotide

SEQ ID NO: 541292 - DNA, 53 bp, Artificial; identical to SEQ ID NO: 313513
  Synthetic oligonucleotide

SEQ ID NO: 541293 - DNA, 53 bp, Artificial; identical to SEQ ID NO: 313514
  Synthetic oligonucleotide

SEQ ID NO: 541294 - DNA, 54 bp, Artificial; identical to SEQ ID NO: 313515
  Synthetic oligonucleotide

SEQ ID NO: 541295 - DNA, 54 bp, Artificial; identical to SEQ ID NO: 313516
  Synthetic oligonucleotide

SEQ ID NO: 541296 - DNA, 60 bp, Artificial; identical to SEQ ID NO: 313519
  Synthetic oligonucleotide

SEQ ID NO: 541297 - DNA, 59 bp, Artificial; identical to SEQ ID NO: 313520
  Synthetic oligonucleotide

SEQ ID NO: 541298 - DNA, 60 bp, Artificial; identical to SEQ ID NO: 313521
  Synthetic oligonucleotide

SEQ ID NO: 541299 - DNA, 55 bp, Artificial; identical to SEQ ID NO: 313525
  Synthetic oligonucleotide

SEQ ID NO: 541300 - DNA, 51 bp, Artificial; identical to SEQ ID NO: 313526
  Synthetic oligonucleotide

SEQ ID NO: 541301 - DNA, 60 bp, Artificial; identical to SEQ ID NO: 313528
  Synthetic oligonucleotide

SEQ ID NO: 541302 - DNA, 60 bp, Artificial; identical to SEQ ID NO: 313530
  Synthetic oligonucleotide

SEQ ID NO: 541303 - DNA, 58 bp, Artificial; identical to SEQ ID NO: 313531
  Synthetic oligonucleotide

SEQ ID NO: 541304 - DNA, 60 bp, Artificial; identical to SEQ ID NO: 313535
  Synthetic oligonucleotide

SEQ ID NO: 541305 - DNA, 60 bp, Artificial; identical to SEQ ID NO: 313536
  Synthetic oligonucleotide

SEQ ID NO: 541306 - DNA, 56 bp, Artificial; identical to SEQ ID NO: 313538
  Synthetic oligonucleotide

SEQ ID NO: 541307 - DNA, 57 bp, Artificial; identical to SEQ ID NO: 313540
  Synthetic oligonucleotide

SEQ ID NO: 541308 - DNA, 55 bp, Artificial; identical to SEQ ID NO: 313542
  Synthetic oligonucleotide

SEQ ID NO: 541309 - DNA, 57 bp, Artificial; identical to SEQ ID NO: 313543
  Synthetic oligonucleotide

SEQ ID NO: 541310 - DNA, 53 bp, Artificial; identical to SEQ ID NO: 313547
  Synthetic oligonucleotide

SEQ ID NO: 541311 - DNA, 55 bp, Artificial; identical to SEQ ID NO: 313548
  Synthetic oligonucleotide

SEQ ID NO: 541312 - DNA, 55 bp, Artificial; identical to SEQ ID NO: 313550
  Synthetic oligonucleotide

SEQ ID NO: 541313 - DNA, 55 bp, Artificial; identical to SEQ ID NO: 313553
  Synthetic oligonucleotide

SEQ ID NO: 541314 - DNA, 60 bp, Artificial; identical to SEQ ID NO: 313554
  Synthetic oligonucleotide

SEQ ID NO: 541315 - DNA, 55 bp, Artificial; identical to SEQ ID NO: 313559
  Synthetic oligonucleotide

SEQ ID NO: 541316 - DNA, 51 bp, Artificial; identical to SEQ ID NO: 313561
  Synthetic oligonucleotide

SEQ ID NO: 541317 - DNA, 53 bp, Artificial; identical to SEQ ID NO: 313562
  Synthetic oligonucleotide

SEQ ID NO: 541318 - DNA, 56 bp, Artificial; identical to SEQ ID NO: 313569
  Synthetic oligonucleotide

SEQ ID NO: 541319 - DNA, 57 bp, Artificial; identical to SEQ ID NO: 313570
  Synthetic oligonucleotide

SEQ ID NO: 541320 - DNA, 55 bp, Artificial; identical to SEQ ID NO: 313572
  Synthetic oligonucleotide

SEQ ID NO: 541321 - DNA, 54 bp, Artificial; identical to SEQ ID NO: 313573
  Synthetic oligonucleotide

SEQ ID NO: 541322 - DNA, 50 bp, Artificial; identical to SEQ ID NO: 313574
  Synthetic oligonucleotide

SEQ ID NO: 541323 - DNA, 55 bp, Artificial; identical to SEQ ID NO: 313575
  Synthetic oligonucleotide

SEQ ID NO: 541324 - DNA, 54 bp, Artificial; identical to SEQ ID NO: 313577
  Synthetic oligonucleotide

SEQ ID NO: 541325 - DNA, 59 bp, Artificial; identical to SEQ ID NO: 313578
  Synthetic oligonucleotide

SEQ ID NO: 541326 - DNA, 54 bp, Artificial; identical to SEQ ID NO: 313579
  Synthetic oligonucleotide

SEQ ID NO: 541327 - DNA, 51 bp, Artificial; identical to SEQ ID NO: 313590
  Synthetic oligonucleotide

SEQ ID NO: 541328 - DNA, 55 bp, Artificial; identical to SEQ ID NO: 313591
  Synthetic oligonucleotide

SEQ ID NO: 541329 - DNA, 54 bp, Artificial; identical to SEQ ID NO: 313592
  Synthetic oligonucleotide

SEQ ID NO: 541330 - DNA, 55 bp, Artificial; identical to SEQ ID NO: 313593
  Synthetic oligonucleotide

SEQ ID NO: 541331 - DNA, 56 bp, Artificial; identical to SEQ ID NO: 313596
  Synthetic oligonucleotide

SEQ ID NO: 541332 - DNA, 60 bp, Artificial; identical to SEQ ID NO: 313603
  Synthetic oligonucleotide

SEQ ID NO: 541333 - DNA, 54 bp, Artificial; identical to SEQ ID NO: 313604
  Synthetic oligonucleotide

SEQ ID NO: 541334 - DNA, 57 bp, Artificial; identical to SEQ ID NO: 313605
  Synthetic oligonucleotide

SEQ ID NO: 541335 - DNA, 58 bp, Artificial; identical to SEQ ID NO: 313609
  Synthetic oligonucleotide

SEQ ID NO: 541336 - DNA, 54 bp, Artificial; identical to SEQ ID NO: 313612
  Synthetic oligonucleotide

SEQ ID NO: 541337 - DNA, 58 bp, Artificial; identical to SEQ ID NO: 7283
  Synthetic oligonucleotide

SEQ ID NO: 541338 - DNA, 56 bp, Artificial; identical to SEQ ID NO: 313614
  Synthetic oligonucleotide

SEQ ID NO: 541339 - DNA, 53 bp, Artificial; identical to SEQ ID NO: 313616
  Synthetic oligonucleotide

SEQ ID NO: 541340 - DNA, 60 bp, Artificial; identical to SEQ ID NO: 313620
  Synthetic oligonucleotide

SEQ ID NO: 541341 - DNA, 60 bp, Artificial; identical to SEQ ID NO: 313624
  Synthetic oligonucleotide

SEQ ID NO: 541342 - DNA, 55 bp, Artificial; identical to SEQ ID NO: 17055
  Synthetic oligonucleotide

SEQ ID NO: 541343 - DNA, 56 bp, Artificial; identical to SEQ ID NO: 313625
  Synthetic oligonucleotide

SEQ ID NO: 541344 - DNA, 56 bp, Artificial; identical to SEQ ID NO: 313626
  Synthetic oligonucleotide

SEQ ID NO: 541345 - DNA, 53 bp, Artificial; identical to SEQ ID NO: 313628
  Synthetic oligonucleotide

SEQ ID NO: 541346 - DNA, 54 bp, Artificial; identical to SEQ ID NO: 313629
  Synthetic oligonucleotide

SEQ ID NO: 541347 - DNA, 58 bp, Artificial; identical to SEQ ID NO: 313633
  Synthetic oligonucleotide

SEQ ID NO: 541348 - DNA, 52 bp, Artificial; identical to SEQ ID NO: 11914
  Synthetic oligonucleotide

SEQ ID NO: 541349 - DNA, 55 bp, Artificial; identical to SEQ ID NO: 313635
  Synthetic oligonucleotide

SEQ ID NO: 541350 - DNA, 60 bp, Artificial; identical to SEQ ID NO: 313636
  Synthetic oligonucleotide

SEQ ID NO: 541351 - DNA, 59 bp, Artificial; identical to SEQ ID NO: 313639
  Synthetic oligonucleotide

SEQ ID NO: 541352 - DNA, 53 bp, Artificial; identical to SEQ ID NO: 313641
  Synthetic oligonucleotide

SEQ ID NO: 541353 - DNA, 53 bp, Artificial; identical to SEQ ID NO: 313645
  Synthetic oligonucleotide

SEQ ID NO: 541354 - DNA, 55 bp, Artificial; identical to SEQ ID NO: 313647
  Synthetic oligonucleotide

SEQ ID NO: 541355 - DNA, 52 bp, Artificial; identical to SEQ ID NO: 313649
  Synthetic oligonucleotide

SEQ ID NO: 541356 - DNA, 56 bp, Artificial; identical to SEQ ID NO: 313650
  Synthetic oligonucleotide

SEQ ID NO: 541357 - DNA, 60 bp, Artificial; identical to SEQ ID NO: 313651
  Synthetic oligonucleotide

SEQ ID NO: 541358 - DNA, 57 bp, Artificial; identical to SEQ ID NO: 313653
  Synthetic oligonucleotide

SEQ ID NO: 541359 - DNA, 52 bp, Artificial; identical to SEQ ID NO: 313654
  Synthetic oligonucleotide

SEQ ID NO: 541360 - DNA, 56 bp, Artificial; identical to SEQ ID NO: 313659
  Synthetic oligonucleotide

SEQ ID NO: 541361 - DNA, 53 bp, Artificial; identical to SEQ ID NO: 313666
  Synthetic oligonucleotide

SEQ ID NO: 541362 - DNA, 55 bp, Artificial; identical to SEQ ID NO: 313669
  Synthetic oligonucleotide

SEQ ID NO: 541363 - DNA, 55 bp, Artificial; identical to SEQ ID NO: 313674
  Synthetic oligonucleotide

SEQ ID NO: 541364 - DNA, 60 bp, Artificial; identical to SEQ ID NO: 313678
  Synthetic oligonucleotide

SEQ ID NO: 541365 - DNA, 50 bp, Artificial; identical to SEQ ID NO: 313682
  Synthetic oligonucleotide

SEQ ID NO: 541366 - DNA, 55 bp, Artificial; identical to SEQ ID NO: 313685
  Synthetic oligonucleotide

SEQ ID NO: 541367 - DNA, 55 bp, Artificial; identical to SEQ ID NO: 19923
  Synthetic oligonucleotide

SEQ ID NO: 541368 - DNA, 60 bp, Artificial; identical to SEQ ID NO: 313690
  Synthetic oligonucleotide

SEQ ID NO: 541369 - DNA, 60 bp, Artificial; identical to SEQ ID NO: 313691
  Synthetic oligonucleotide

SEQ ID NO: 541370 - DNA, 50 bp, Artificial; identical to SEQ ID NO: 313692
  Synthetic oligonucleotide

SEQ ID NO: 541371 - DNA, 58 bp, Artificial; identical to SEQ ID NO: 313693
  Synthetic oligonucleotide

SEQ ID NO: 541372 - DNA, 54 bp, Artificial; identical to SEQ ID NO: 313694
  Synthetic oligonucleotide

SEQ ID NO: 541373 - DNA, 52 bp, Artificial; identical to SEQ ID NO: 313697
  Synthetic oligonucleotide

SEQ ID NO: 541374 - DNA, 58 bp, Artificial; identical to SEQ ID NO: 313698
  Synthetic oligonucleotide

SEQ ID NO: 541375 - DNA, 55 bp, Artificial; identical to SEQ ID NO: 313700
  Synthetic oligonucleotide

SEQ ID NO: 541376 - DNA, 55 bp, Artificial; identical to SEQ ID NO: 313701
  Synthetic oligonucleotide

SEQ ID NO: 541377 - DNA, 60 bp, Artificial; identical to SEQ ID NO: 313710
  Synthetic oligonucleotide

SEQ ID NO: 541378 - DNA, 54 bp, Artificial; identical to SEQ ID NO: 313712
  Synthetic oligonucleotide

SEQ ID NO: 541379 - DNA, 58 bp, Artificial; identical to SEQ ID NO: 11234
  Synthetic oligonucleotide

SEQ ID NO: 541380 - DNA, 53 bp, Artificial; identical to SEQ ID NO: 313717
  Synthetic oligonucleotide

SEQ ID NO: 541381 - DNA, 52 bp, Artificial; identical to SEQ ID NO: 313722
  Synthetic oligonucleotide

SEQ ID NO: 541382 - DNA, 55 bp, Artificial; identical to SEQ ID NO: 313723
  Synthetic oligonucleotide

SEQ ID NO: 541383 - DNA, 60 bp, Artificial; identical to SEQ ID NO: 313728
  Synthetic oligonucleotide

SEQ ID NO: 541384 - DNA, 52 bp, Artificial; identical to SEQ ID NO: 313735
  Synthetic oligonucleotide

SEQ ID NO: 541385 - DNA, 60 bp, Artificial; identical to SEQ ID NO: 313736
  Synthetic oligonucleotide

SEQ ID NO: 541386 - DNA, 57 bp, Artificial; identical to SEQ ID NO: 313738
  Synthetic oligonucleotide

SEQ ID NO: 541387 - DNA, 51 bp, Artificial; identical to SEQ ID NO: 313739
  Synthetic oligonucleotide

SEQ ID NO: 541388 - DNA, 60 bp, Artificial; identical to SEQ ID NO: 313742
  Synthetic oligonucleotide

SEQ ID NO: 541389 - DNA, 60 bp, Artificial; identical to SEQ ID NO: 313747
  Synthetic oligonucleotide

SEQ ID NO: 541390 - DNA, 56 bp, Artificial; identical to SEQ ID NO: 313749
  Synthetic oligonucleotide

SEQ ID NO: 541391 - DNA, 60 bp, Artificial; identical to SEQ ID NO: 313750
  Synthetic oligonucleotide

SEQ ID NO: 541392 - DNA, 60 bp, Artificial; identical to SEQ ID NO: 313752
  Synthetic oligonucleotide

SEQ ID NO: 541393 - DNA, 58 bp, Artificial; identical to SEQ ID NO: 313753
  Synthetic oligonucleotide

SEQ ID NO: 541394 - DNA, 52 bp, Artificial; identical to SEQ ID NO: 313755
  Synthetic oligonucleotide

SEQ ID NO: 541395 - DNA, 55 bp, Artificial; identical to SEQ ID NO: 313758
  Synthetic oligonucleotide

SEQ ID NO: 541396 - DNA, 57 bp, Artificial; identical to SEQ ID NO: 13726
  Synthetic oligonucleotide

SEQ ID NO: 541397 - DNA, 60 bp, Artificial; identical to SEQ ID NO: 313760
  Synthetic oligonucleotide

SEQ ID NO: 541398 - DNA, 48 bp, Artificial; identical to SEQ ID NO: 313764
  Synthetic oligonucleotide

SEQ ID NO: 541399 - DNA, 57 bp, Artificial; identical to SEQ ID NO: 18005
  Synthetic oligonucleotide

SEQ ID NO: 541400 - DNA, 60 bp, Artificial; identical to SEQ ID NO: 313772
  Synthetic oligonucleotide

SEQ ID NO: 541401 - DNA, 57 bp, Artificial; identical to SEQ ID NO: 313774
  Synthetic oligonucleotide

SEQ ID NO: 541402 - DNA, 55 bp, Artificial; identical to SEQ ID NO: 313775
  Synthetic oligonucleotide

SEQ ID NO: 541403 - DNA, 56 bp, Artificial; identical to SEQ ID NO: 313776
  Synthetic oligonucleotide

SEQ ID NO: 541404 - DNA, 54 bp, Artificial; identical to SEQ ID NO: 313778
  Synthetic oligonucleotide

SEQ ID NO: 541405 - DNA, 55 bp, Artificial; identical to SEQ ID NO: 313781
  Synthetic oligonucleotide

SEQ ID NO: 541406 - DNA, 55 bp, Artificial; identical to SEQ ID NO: 313782
  Synthetic oligonucleotide

SEQ ID NO: 541407 - DNA, 55 bp, Artificial; identical to SEQ ID NO: 313783
  Synthetic oligonucleotide

SEQ ID NO: 541408 - DNA, 60 bp, Artificial; identical to SEQ ID NO: 313784
  Synthetic oligonucleotide

SEQ ID NO: 541409 - DNA, 55 bp, Artificial; identical to SEQ ID NO: 313785
  Synthetic oligonucleotide

SEQ ID NO: 541410 - DNA, 55 bp, Artificial; identical to SEQ ID NO: 313786
  Synthetic oligonucleotide

SEQ ID NO: 541411 - DNA, 55 bp, Artificial; identical to SEQ ID NO: 19244
  Synthetic oligonucleotide

SEQ ID NO: 541412 - DNA, 59 bp, Artificial; identical to SEQ ID NO: 313798
  Synthetic oligonucleotide

SEQ ID NO: 541413 - DNA, 51 bp, Artificial; identical to SEQ ID NO: 19719
  Synthetic oligonucleotide

SEQ ID NO: 541414 - DNA, 55 bp, Artificial; identical to SEQ ID NO: 313802
  Synthetic oligonucleotide

SEQ ID NO: 541415 - DNA, 55 bp, Artificial; identical to SEQ ID NO: 313803
  Synthetic oligonucleotide

SEQ ID NO: 541416 - DNA, 59 bp, Artificial; identical to SEQ ID NO: 313804
  Synthetic oligonucleotide

SEQ ID NO: 541417 - DNA, 60 bp, Artificial; identical to SEQ ID NO: 313807
  Synthetic oligonucleotide

SEQ ID NO: 541418 - DNA, 51 bp, Artificial; identical to SEQ ID NO: 313814
  Synthetic oligonucleotide

SEQ ID NO: 541419 - DNA, 54 bp, Artificial; identical to SEQ ID NO: 19741
  Synthetic oligonucleotide

SEQ ID NO: 541420 - DNA, 59 bp, Artificial; identical to SEQ ID NO: 313816
  Synthetic oligonucleotide

SEQ ID NO: 541421 - DNA, 55 bp, Artificial; identical to SEQ ID NO: 313817
  Synthetic oligonucleotide

SEQ ID NO: 541422 - DNA, 60 bp, Artificial; identical to SEQ ID NO: 313824
  Synthetic oligonucleotide

SEQ ID NO: 541423 - DNA, 59 bp, Artificial; identical to SEQ ID NO: 313827
  Synthetic oligonucleotide

SEQ ID NO: 541424 - DNA, 60 bp, Artificial; identical to SEQ ID NO: 313829
  Synthetic oligonucleotide

SEQ ID NO: 541425 - DNA, 54 bp, Artificial; identical to SEQ ID NO: 313830
  Synthetic oligonucleotide

SEQ ID NO: 541426 - DNA, 55 bp, Artificial; identical to SEQ ID NO: 313835
  Synthetic oligonucleotide

SEQ ID NO: 541427 - DNA, 60 bp, Artificial; identical to SEQ ID NO: 313837
  Synthetic oligonucleotide

SEQ ID NO: 541428 - DNA, 54 bp, Artificial; identical to SEQ ID NO: 313838
  Synthetic oligonucleotide

SEQ ID NO: 541429 - DNA, 58 bp, Artificial; identical to SEQ ID NO: 313839
  Synthetic oligonucleotide

SEQ ID NO: 541430 - DNA, 57 bp, Artificial; identical to SEQ ID NO: 313840
  Synthetic oligonucleotide

SEQ ID NO: 541431 - DNA, 60 bp, Artificial; identical to SEQ ID NO: 313841
  Synthetic oligonucleotide

SEQ ID NO: 541432 - DNA, 60 bp, Artificial; identical to SEQ ID NO: 313848
  Synthetic oligonucleotide

SEQ ID NO: 541433 - DNA, 56 bp, Artificial; identical to SEQ ID NO: 313851
  Synthetic oligonucleotide

SEQ ID NO: 541434 - DNA, 57 bp, Artificial; identical to SEQ ID NO: 313857
  Synthetic oligonucleotide

SEQ ID NO: 541435 - DNA, 60 bp, Artificial; identical to SEQ ID NO: 313862
  Synthetic oligonucleotide

SEQ ID NO: 541436 - DNA, 58 bp, Artificial; identical to SEQ ID NO: 313866
  Synthetic oligonucleotide

SEQ ID NO: 541437 - DNA, 60 bp, Artificial; identical to SEQ ID NO: 313869
  Synthetic oligonucleotide

SEQ ID NO: 541438 - DNA, 60 bp, Artificial; identical to SEQ ID NO: 313875
  Synthetic oligonucleotide

SEQ ID NO: 541439 - DNA, 55 bp, Artificial; identical to SEQ ID NO: 313880
  Synthetic oligonucleotide

SEQ ID NO: 541440 - DNA, 57 bp, Artificial; identical to SEQ ID NO: 313886
  Synthetic oligonucleotide

SEQ ID NO: 541441 - DNA, 57 bp, Artificial; identical to SEQ ID NO: 313889
  Synthetic oligonucleotide

SEQ ID NO: 541442 - DNA, 60 bp, Artificial; identical to SEQ ID NO: 313890
  Synthetic oligonucleotide

SEQ ID NO: 541443 - DNA, 60 bp, Artificial; identical to SEQ ID NO: 313895
  Synthetic oligonucleotide

SEQ ID NO: 541444 - DNA, 60 bp, Artificial; identical to SEQ ID NO: 313899
  Synthetic oligonucleotide

SEQ ID NO: 541445 - DNA, 59 bp, Artificial; identical to SEQ ID NO: 313902
  Synthetic oligonucleotide

SEQ ID NO: 541446 - DNA, 53 bp, Artificial; identical to SEQ ID NO: 313904
  Synthetic oligonucleotide

SEQ ID NO: 541447 - DNA, 58 bp, Artificial; identical to SEQ ID NO: 313905
  Synthetic oligonucleotide

SEQ ID NO: 541448 - DNA, 57 bp, Artificial; identical to SEQ ID NO: 313907
  Synthetic oligonucleotide

SEQ ID NO: 541449 - DNA, 52 bp, Artificial; identical to SEQ ID NO: 313908
  Synthetic oligonucleotide

SEQ ID NO: 541450 - DNA, 54 bp, Artificial; identical to SEQ ID NO: 313909
  Synthetic oligonucleotide

SEQ ID NO: 541451 - DNA, 59 bp, Artificial; identical to SEQ ID NO: 17168
  Synthetic oligonucleotide

SEQ ID NO: 541452 - DNA, 59 bp, Artificial; identical to SEQ ID NO: 313911
  Synthetic oligonucleotide

SEQ ID NO: 541453 - DNA, 53 bp, Artificial; identical to SEQ ID NO: 313916
  Synthetic oligonucleotide

SEQ ID NO: 541454 - DNA, 55 bp, Artificial; identical to SEQ ID NO: 313920
  Synthetic oligonucleotide

SEQ ID NO: 541455 - DNA, 60 bp, Artificial; identical to SEQ ID NO: 6074
  Synthetic oligonucleotide

SEQ ID NO: 541456 - DNA, 54 bp, Artificial; identical to SEQ ID NO: 313928
  Synthetic oligonucleotide

SEQ ID NO: 541457 - DNA, 60 bp, Artificial; identical to SEQ ID NO: 313929
  Synthetic oligonucleotide

SEQ ID NO: 541458 - DNA, 60 bp, Artificial; identical to SEQ ID NO: 313930
  Synthetic oligonucleotide

SEQ ID NO: 541459 - DNA, 54 bp, Artificial; identical to SEQ ID NO: 313931
  Synthetic oligonucleotide

SEQ ID NO: 541460 - DNA, 54 bp, Artificial; identical to SEQ ID NO: 313935
  Synthetic oligonucleotide

SEQ ID NO: 541461 - DNA, 58 bp, Artificial; identical to SEQ ID NO: 313938
  Synthetic oligonucleotide

SEQ ID NO: 541462 - DNA, 58 bp, Artificial; identical to SEQ ID NO: 313944
  Synthetic oligonucleotide

SEQ ID NO: 541463 - DNA, 59 bp, Artificial; identical to SEQ ID NO: 313947
  Synthetic oligonucleotide

SEQ ID NO: 541464 - DNA, 55 bp, Artificial; identical to SEQ ID NO: 313948
  Synthetic oligonucleotide

SEQ ID NO: 541465 - DNA, 51 bp, Artificial; identical to SEQ ID NO: 313950
  Synthetic oligonucleotide

SEQ ID NO: 541466 - DNA, 55 bp, Artificial; identical to SEQ ID NO: 313951
  Synthetic oligonucleotide

SEQ ID NO: 541467 - DNA, 52 bp, Artificial; identical to SEQ ID NO: 313952
  Synthetic oligonucleotide

SEQ ID NO: 541468 - DNA, 56 bp, Artificial; identical to SEQ ID NO: 313955
  Synthetic oligonucleotide

SEQ ID NO: 541469 - DNA, 60 bp, Artificial; identical to SEQ ID NO: 313960
  Synthetic oligonucleotide

SEQ ID NO: 541470 - DNA, 58 bp, Artificial; identical to SEQ ID NO: 313961
  Synthetic oligonucleotide

SEQ ID NO: 541471 - DNA, 60 bp, Artificial; identical to SEQ ID NO: 313962
  Synthetic oligonucleotide

SEQ ID NO: 541472 - DNA, 60 bp, Artificial; identical to SEQ ID NO: 313966
  Synthetic oligonucleotide

SEQ ID NO: 541473 - DNA, 59 bp, Artificial; identical to SEQ ID NO: 313969
  Synthetic oligonucleotide

SEQ ID NO: 541474 - DNA, 56 bp, Artificial; identical to SEQ ID NO: 313971
  Synthetic oligonucleotide

SEQ ID NO: 541475 - DNA, 52 bp, Artificial; identical to SEQ ID NO: 313972
  Synthetic oligonucleotide

SEQ ID NO: 541476 - DNA, 55 bp, Artificial; identical to SEQ ID NO: 313978
  Synthetic oligonucleotide

SEQ ID NO: 541477 - DNA, 60 bp, Artificial; identical to SEQ ID NO: 313979
  Synthetic oligonucleotide

SEQ ID NO: 541478 - DNA, 53 bp, Artificial; identical to SEQ ID NO: 313980
  Synthetic oligonucleotide

SEQ ID NO: 541479 - DNA, 60 bp, Artificial; identical to SEQ ID NO: 313981
  Synthetic oligonucleotide

SEQ ID NO: 541480 - DNA, 55 bp, Artificial; identical to SEQ ID NO: 12353
  Synthetic oligonucleotide

SEQ ID NO: 541481 - DNA, 55 bp, Artificial; identical to SEQ ID NO: 313982
  Synthetic oligonucleotide

SEQ ID NO: 541482 - DNA, 52 bp, Artificial; identical to SEQ ID NO: 313983
  Synthetic oligonucleotide

SEQ ID NO: 541483 - DNA, 59 bp, Artificial; identical to SEQ ID NO: 19305
  Synthetic oligonucleotide

SEQ ID NO: 541484 - DNA, 56 bp, Artificial; identical to SEQ ID NO: 313989
  Synthetic oligonucleotide

SEQ ID NO: 541485 - DNA, 60 bp, Artificial; identical to SEQ ID NO: 313990
  Synthetic oligonucleotide

SEQ ID NO: 541486 - DNA, 55 bp, Artificial; identical to SEQ ID NO: 313991
  Synthetic oligonucleotide

SEQ ID NO: 541487 - DNA, 55 bp, Artificial; identical to SEQ ID NO: 313992
  Synthetic oligonucleotide

SEQ ID NO: 541488 - DNA, 58 bp, Artificial; identical to SEQ ID NO: 313993
  Synthetic oligonucleotide

SEQ ID NO: 541489 - DNA, 53 bp, Artificial; identical to SEQ ID NO: 313997
  Synthetic oligonucleotide

SEQ ID NO: 541490 - DNA, 60 bp, Artificial; identical to SEQ ID NO: 314000
  Synthetic oligonucleotide

SEQ ID NO: 541491 - DNA, 57 bp, Artificial; identical to SEQ ID NO: 314002
  Synthetic oligonucleotide

SEQ ID NO: 541492 - DNA, 54 bp, Artificial; identical to SEQ ID NO: 314004
  Synthetic oligonucleotide

SEQ ID NO: 541493 - DNA, 60 bp, Artificial; identical to SEQ ID NO: 314005
  Synthetic oligonucleotide

SEQ ID NO: 541494 - DNA, 55 bp, Artificial; identical to SEQ ID NO: 314006
  Synthetic oligonucleotide

SEQ ID NO: 541495 - DNA, 58 bp, Artificial; identical to SEQ ID NO: 314012
  Synthetic oligonucleotide

SEQ ID NO: 541496 - DNA, 57 bp, Artificial; identical to SEQ ID NO: 19548
  Synthetic oligonucleotide

SEQ ID NO: 541497 - DNA, 55 bp, Artificial; identical to SEQ ID NO: 314016
  Synthetic oligonucleotide

SEQ ID NO: 541498 - DNA, 60 bp, Artificial; identical to SEQ ID NO: 314017
  Synthetic oligonucleotide

SEQ ID NO: 541499 - DNA, 60 bp, Artificial; identical to SEQ ID NO: 314018
  Synthetic oligonucleotide

SEQ ID NO: 541500 - DNA, 60 bp, Artificial; identical to SEQ ID NO: 314024
  Synthetic oligonucleotide

SEQ ID NO: 541501 - DNA, 53 bp, Artificial; identical to SEQ ID NO: 314025
  Synthetic oligonucleotide

SEQ ID NO: 541502 - DNA, 59 bp, Artificial; identical to SEQ ID NO: 314029
  Synthetic oligonucleotide

SEQ ID NO: 541503 - DNA, 54 bp, Artificial; identical to SEQ ID NO: 314030
  Synthetic oligonucleotide

SEQ ID NO: 541504 - DNA, 55 bp, Artificial; identical to SEQ ID NO: 314031
  Synthetic oligonucleotide

SEQ ID NO: 541505 - DNA, 60 bp, Artificial; identical to SEQ ID NO: 314033
  Synthetic oligonucleotide

SEQ ID NO: 541506 - DNA, 51 bp, Artificial; identical to SEQ ID NO: 314045
  Synthetic oligonucleotide

SEQ ID NO: 541507 - DNA, 54 bp, Artificial; identical to SEQ ID NO: 314048
  Synthetic oligonucleotide

SEQ ID NO: 541508 - DNA, 57 bp, Artificial; identical to SEQ ID NO: 16941
  Synthetic oligonucleotide

SEQ ID NO: 541509 - DNA, 60 bp, Artificial; identical to SEQ ID NO: 314062
  Synthetic oligonucleotide

SEQ ID NO: 541510 - DNA, 54 bp, Artificial; identical to SEQ ID NO: 314064
  Synthetic oligonucleotide

SEQ ID NO: 541511 - DNA, 53 bp, Artificial; identical to SEQ ID NO: 314065
  Synthetic oligonucleotide

SEQ ID NO: 541512 - DNA, 55 bp, Artificial; identical to SEQ ID NO: 314069
  Synthetic oligonucleotide

SEQ ID NO: 541513 - DNA, 54 bp, Artificial; identical to SEQ ID NO: 314070
  Synthetic oligonucleotide

SEQ ID NO: 541514 - DNA, 57 bp, Artificial; identical to SEQ ID NO: 19220
  Synthetic oligonucleotide

SEQ ID NO: 541515 - DNA, 54 bp, Artificial; identical to SEQ ID NO: 314072
  Synthetic oligonucleotide

SEQ ID NO: 541516 - DNA, 59 bp, Artificial; identical to SEQ ID NO: 314074
  Synthetic oligonucleotide

SEQ ID NO: 541517 - DNA, 58 bp, Artificial; identical to SEQ ID NO: 314075
  Synthetic oligonucleotide

SEQ ID NO: 541518 - DNA, 54 bp, Artificial; identical to SEQ ID NO: 314076
  Synthetic oligonucleotide

SEQ ID NO: 541519 - DNA, 55 bp, Artificial; identical to SEQ ID NO: 314079
  Synthetic oligonucleotide

SEQ ID NO: 541520 - DNA, 56 bp, Artificial; identical to SEQ ID NO: 314080
  Synthetic oligonucleotide

SEQ ID NO: 541521 - DNA, 50 bp, Artificial; identical to SEQ ID NO: 314081
  Synthetic oligonucleotide

SEQ ID NO: 541522 - DNA, 59 bp, Artificial; identical to SEQ ID NO: 314083
  Synthetic oligonucleotide

SEQ ID NO: 541523 - DNA, 57 bp, Artificial; identical to SEQ ID NO: 314086
  Synthetic oligonucleotide

SEQ ID NO: 541524 - DNA, 53 bp, Artificial; identical to SEQ ID NO: 314087
  Synthetic oligonucleotide

SEQ ID NO: 541525 - DNA, 58 bp, Artificial; identical to SEQ ID NO: 314089
  Synthetic oligonucleotide

SEQ ID NO: 541526 - DNA, 59 bp, Artificial; identical to SEQ ID NO: 314090
  Synthetic oligonucleotide

SEQ ID NO: 541527 - DNA, 58 bp, Artificial; identical to SEQ ID NO: 314091
  Synthetic oligonucleotide

SEQ ID NO: 541528 - DNA, 57 bp, Artificial; identical to SEQ ID NO: 314092
  Synthetic oligonucleotide

SEQ ID NO: 541529 - DNA, 60 bp, Artificial; identical to SEQ ID NO: 314097
  Synthetic oligonucleotide

SEQ ID NO: 541530 - DNA, 60 bp, Artificial; identical to SEQ ID NO: 314102
  Synthetic oligonucleotide

SEQ ID NO: 541531 - DNA, 53 bp, Artificial; identical to SEQ ID NO: 314105
  Synthetic oligonucleotide

SEQ ID NO: 541532 - DNA, 58 bp, Artificial; identical to SEQ ID NO: 314107
  Synthetic oligonucleotide

SEQ ID NO: 541533 - DNA, 55 bp, Artificial; identical to SEQ ID NO: 314111
  Synthetic oligonucleotide

SEQ ID NO: 541534 - DNA, 58 bp, Artificial; identical to SEQ ID NO: 314112
  Synthetic oligonucleotide

SEQ ID NO: 541535 - DNA, 54 bp, Artificial; identical to SEQ ID NO: 314120
  Synthetic oligonucleotide

SEQ ID NO: 541536 - DNA, 55 bp, Artificial; identical to SEQ ID NO: 314121
  Synthetic oligonucleotide

SEQ ID NO: 541537 - DNA, 60 bp, Artificial; identical to SEQ ID NO: 314123
  Synthetic oligonucleotide

SEQ ID NO: 541538 - DNA, 54 bp, Artificial; identical to SEQ ID NO: 314131
  Synthetic oligonucleotide

SEQ ID NO: 541539 - DNA, 60 bp, Artificial; identical to SEQ ID NO: 314133
  Synthetic oligonucleotide

SEQ ID NO: 541540 - DNA, 54 bp, Artificial; identical to SEQ ID NO: 314135
  Synthetic oligonucleotide

SEQ ID NO: 541541 - DNA, 55 bp, Artificial; identical to SEQ ID NO: 314137
  Synthetic oligonucleotide

SEQ ID NO: 541542 - DNA, 52 bp, Artificial; identical to SEQ ID NO: 314142
  Synthetic oligonucleotide

SEQ ID NO: 541543 - DNA, 56 bp, Artificial; identical to SEQ ID NO: 314143
  Synthetic oligonucleotide

SEQ ID NO: 541544 - DNA, 57 bp, Artificial; identical to SEQ ID NO: 314144
  Synthetic oligonucleotide

SEQ ID NO: 541545 - DNA, 57 bp, Artificial; identical to SEQ ID NO: 314145
  Synthetic oligonucleotide

SEQ ID NO: 541546 - DNA, 50 bp, Artificial; identical to SEQ ID NO: 314148
  Synthetic oligonucleotide

SEQ ID NO: 541547 - DNA, 59 bp, Artificial; identical to SEQ ID NO: 314149
  Synthetic oligonucleotide

SEQ ID NO: 541548 - DNA, 58 bp, Artificial; identical to SEQ ID NO: 314151
  Synthetic oligonucleotide

SEQ ID NO: 541549 - DNA, 59 bp, Artificial; identical to SEQ ID NO: 314152
  Synthetic oligonucleotide

SEQ ID NO: 541550 - DNA, 53 bp, Artificial; identical to SEQ ID NO: 314153
  Synthetic oligonucleotide

SEQ ID NO: 541551 - DNA, 57 bp, Artificial; identical to SEQ ID NO: 314154
  Synthetic oligonucleotide

SEQ ID NO: 541552 - DNA, 56 bp, Artificial; identical to SEQ ID NO: 314155
  Synthetic oligonucleotide

SEQ ID NO: 541553 - DNA, 59 bp, Artificial; identical to SEQ ID NO: 314157
  Synthetic oligonucleotide

SEQ ID NO: 541554 - DNA, 60 bp, Artificial; identical to SEQ ID NO: 314158
  Synthetic oligonucleotide

SEQ ID NO: 541555 - DNA, 59 bp, Artificial; identical to SEQ ID NO: 314159
  Synthetic oligonucleotide

SEQ ID NO: 541556 - DNA, 55 bp, Artificial; identical to SEQ ID NO: 314163
  Synthetic oligonucleotide

SEQ ID NO: 541557 - DNA, 60 bp, Artificial; identical to SEQ ID NO: 314164
  Synthetic oligonucleotide

SEQ ID NO: 541558 - DNA, 54 bp, Artificial; identical to SEQ ID NO: 314167
  Synthetic oligonucleotide

SEQ ID NO: 541559 - DNA, 52 bp, Artificial; identical to SEQ ID NO: 314168
  Synthetic oligonucleotide

SEQ ID NO: 541560 - DNA, 55 bp, Artificial; identical to SEQ ID NO: 314172
  Synthetic oligonucleotide

SEQ ID NO: 541561 - DNA, 60 bp, Artificial; identical to SEQ ID NO: 314173
  Synthetic oligonucleotide

SEQ ID NO: 541562 - DNA, 60 bp, Artificial; identical to SEQ ID NO: 314174
  Synthetic oligonucleotide

SEQ ID NO: 541563 - DNA, 60 bp, Artificial; identical to SEQ ID NO: 49057
  Synthetic oligonucleotide

SEQ ID NO: 541564 - DNA, 58 bp, Artificial; identical to SEQ ID NO: 19102
  Synthetic oligonucleotide

SEQ ID NO: 541565 - DNA, 59 bp, Artificial; identical to SEQ ID NO: 314180
  Synthetic oligonucleotide

SEQ ID NO: 541566 - DNA, 55 bp, Artificial; identical to SEQ ID NO: 314181
  Synthetic oligonucleotide

SEQ ID NO: 541567 - DNA, 57 bp, Artificial; identical to SEQ ID NO: 314182
  Synthetic oligonucleotide

SEQ ID NO: 541568 - DNA, 60 bp, Artificial; identical to SEQ ID NO: 314183
  Synthetic oligonucleotide

SEQ ID NO: 541569 - DNA, 55 bp, Artificial; identical to SEQ ID NO: 314185
  Synthetic oligonucleotide

SEQ ID NO: 541570 - DNA, 58 bp, Artificial; identical to SEQ ID NO: 314186
  Synthetic oligonucleotide

SEQ ID NO: 541571 - DNA, 60 bp, Artificial; identical to SEQ ID NO: 314193
  Synthetic oligonucleotide

SEQ ID NO: 541572 - DNA, 55 bp, Artificial; identical to SEQ ID NO: 314197
  Synthetic oligonucleotide

SEQ ID NO: 541573 - DNA, 60 bp, Artificial; identical to SEQ ID NO: 314198
  Synthetic oligonucleotide

SEQ ID NO: 541574 - DNA, 58 bp, Artificial; identical to SEQ ID NO: 314200
  Synthetic oligonucleotide

SEQ ID NO: 541575 - DNA, 57 bp, Artificial; identical to SEQ ID NO: 314204
  Synthetic oligonucleotide

SEQ ID NO: 541576 - DNA, 55 bp, Artificial; identical to SEQ ID NO: 314205
  Synthetic oligonucleotide

SEQ ID NO: 541577 - DNA, 60 bp, Artificial; identical to SEQ ID NO: 314206
  Synthetic oligonucleotide

SEQ ID NO: 541578 - DNA, 50 bp, Artificial; identical to SEQ ID NO: 6831
  Synthetic oligonucleotide

SEQ ID NO: 541579 - DNA, 60 bp, Artificial; identical to SEQ ID NO: 314208
  Synthetic oligonucleotide

SEQ ID NO: 541580 - DNA, 60 bp, Artificial; identical to SEQ ID NO: 314209
  Synthetic oligonucleotide

SEQ ID NO: 541581 - DNA, 54 bp, Artificial; identical to SEQ ID NO: 314210
  Synthetic oligonucleotide

SEQ ID NO: 541582 - DNA, 54 bp, Artificial; identical to SEQ ID NO: 314211
  Synthetic oligonucleotide

SEQ ID NO: 541583 - DNA, 57 bp, Artificial; identical to SEQ ID NO: 314212
  Synthetic oligonucleotide

SEQ ID NO: 541584 - DNA, 58 bp, Artificial; identical to SEQ ID NO: 314214
  Synthetic oligonucleotide

SEQ ID NO: 541585 - DNA, 52 bp, Artificial; identical to SEQ ID NO: 314216
  Synthetic oligonucleotide

SEQ ID NO: 541586 - DNA, 60 bp, Artificial; identical to SEQ ID NO: 314218
  Synthetic oligonucleotide

SEQ ID NO: 541587 - DNA, 55 bp, Artificial; identical to SEQ ID NO: 314219
  Synthetic oligonucleotide

SEQ ID NO: 541588 - DNA, 60 bp, Artificial; identical to SEQ ID NO: 314221
  Synthetic oligonucleotide

SEQ ID NO: 541589 - DNA, 57 bp, Artificial; identical to SEQ ID NO: 314222
  Synthetic oligonucleotide

SEQ ID NO: 541590 - DNA, 58 bp, Artificial; identical to SEQ ID NO: 314223
  Synthetic oligonucleotide

SEQ ID NO: 541591 - DNA, 58 bp, Artificial; identical to SEQ ID NO: 314226
  Synthetic oligonucleotide

SEQ ID NO: 541592 - DNA, 60 bp, Artificial; identical to SEQ ID NO: 314228
  Synthetic oligonucleotide

SEQ ID NO: 541593 - DNA, 54 bp, Artificial; identical to SEQ ID NO: 19763
  Synthetic oligonucleotide

SEQ ID NO: 541594 - DNA, 53 bp, Artificial; identical to SEQ ID NO: 314233
  Synthetic oligonucleotide

SEQ ID NO: 541595 - DNA, 58 bp, Artificial; identical to SEQ ID NO: 314239
  Synthetic oligonucleotide

SEQ ID NO: 541596 - DNA, 60 bp, Artificial; identical to SEQ ID NO: 314244
  Synthetic oligonucleotide

SEQ ID NO: 541597 - DNA, 55 bp, Artificial; identical to SEQ ID NO: 314247
  Synthetic oligonucleotide

SEQ ID NO: 541598 - DNA, 56 bp, Artificial; identical to SEQ ID NO: 314250
  Synthetic oligonucleotide

SEQ ID NO: 541599 - DNA, 58 bp, Artificial; identical to SEQ ID NO: 314252
  Synthetic oligonucleotide

SEQ ID NO: 541600 - DNA, 60 bp, Artificial; identical to SEQ ID NO: 314255
  Synthetic oligonucleotide

SEQ ID NO: 541601 - DNA, 60 bp, Artificial; identical to SEQ ID NO: 314259
  Synthetic oligonucleotide

SEQ ID NO: 541602 - DNA, 60 bp, Artificial; identical to SEQ ID NO: 314262
  Synthetic oligonucleotide

SEQ ID NO: 541603 - DNA, 60 bp, Artificial; identical to SEQ ID NO: 314267
  Synthetic oligonucleotide

SEQ ID NO: 541604 - DNA, 60 bp, Artificial; identical to SEQ ID NO: 314268
  Synthetic oligonucleotide

SEQ ID NO: 541605 - DNA, 53 bp, Artificial; identical to SEQ ID NO: 314269
  Synthetic oligonucleotide

SEQ ID NO: 541606 - DNA, 57 bp, Artificial; identical to SEQ ID NO: 314270
  Synthetic oligonucleotide

SEQ ID NO: 541607 - DNA, 57 bp, Artificial; identical to SEQ ID NO: 14750
  Synthetic oligonucleotide

SEQ ID NO: 541608 - DNA, 56 bp, Artificial; identical to SEQ ID NO: 314276
  Synthetic oligonucleotide

SEQ ID NO: 541609 - DNA, 60 bp, Artificial; identical to SEQ ID NO: 314279
  Synthetic oligonucleotide

SEQ ID NO: 541610 - DNA, 58 bp, Artificial; identical to SEQ ID NO: 314285
  Synthetic oligonucleotide

SEQ ID NO: 541611 - DNA, 55 bp, Artificial; identical to SEQ ID NO: 314286
  Synthetic oligonucleotide

SEQ ID NO: 541612 - DNA, 55 bp, Artificial; identical to SEQ ID NO: 314289
  Synthetic oligonucleotide

SEQ ID NO: 541613 - DNA, 60 bp, Artificial; identical to SEQ ID NO: 314290
  Synthetic oligonucleotide

SEQ ID NO: 541614 - DNA, 59 bp, Artificial; identical to SEQ ID NO: 314295
  Synthetic oligonucleotide

SEQ ID NO: 541615 - DNA, 60 bp, Artificial; identical to SEQ ID NO: 314299
  Synthetic oligonucleotide

SEQ ID NO: 541616 - DNA, 60 bp, Artificial; identical to SEQ ID NO: 314300
  Synthetic oligonucleotide

SEQ ID NO: 541617 - DNA, 56 bp, Artificial; identical to SEQ ID NO: 314301
  Synthetic oligonucleotide

SEQ ID NO: 541618 - DNA, 59 bp, Artificial; identical to SEQ ID NO: 18603
  Synthetic oligonucleotide

SEQ ID NO: 541619 - DNA, 59 bp, Artificial; identical to SEQ ID NO: 314305
  Synthetic oligonucleotide

SEQ ID NO: 541620 - DNA, 55 bp, Artificial; identical to SEQ ID NO: 314306
  Synthetic oligonucleotide

SEQ ID NO: 541621 - DNA, 55 bp, Artificial; identical to SEQ ID NO: 314310
  Synthetic oligonucleotide

SEQ ID NO: 541622 - DNA, 56 bp, Artificial; identical to SEQ ID NO: 314312
  Synthetic oligonucleotide

SEQ ID NO: 541623 - DNA, 55 bp, Artificial; identical to SEQ ID NO: 314316
  Synthetic oligonucleotide

SEQ ID NO: 541624 - DNA, 56 bp, Artificial; identical to SEQ ID NO: 17159
  Synthetic oligonucleotide

SEQ ID NO: 541625 - DNA, 55 bp, Artificial; identical to SEQ ID NO: 314318
  Synthetic oligonucleotide

SEQ ID NO: 541626 - DNA, 58 bp, Artificial; identical to SEQ ID NO: 314322
  Synthetic oligonucleotide

SEQ ID NO: 541627 - DNA, 55 bp, Artificial; identical to SEQ ID NO: 314324
  Synthetic oligonucleotide

SEQ ID NO: 541628 - DNA, 60 bp, Artificial; identical to SEQ ID NO: 314326
  Synthetic oligonucleotide

SEQ ID NO: 541629 - DNA, 59 bp, Artificial; identical to SEQ ID NO: 314327
  Synthetic oligonucleotide

SEQ ID NO: 541630 - DNA, 55 bp, Artificial; identical to SEQ ID NO: 314328
  Synthetic oligonucleotide

SEQ ID NO: 541631 - DNA, 59 bp, Artificial; identical to SEQ ID NO: 314329
  Synthetic oligonucleotide

SEQ ID NO: 541632 - DNA, 60 bp, Artificial; identical to SEQ ID NO: 13940
  Synthetic oligonucleotide

SEQ ID NO: 541633 - DNA, 55 bp, Artificial; identical to SEQ ID NO: 5843
  Synthetic oligonucleotide

SEQ ID NO: 541634 - DNA, 55 bp, Artificial; identical to SEQ ID NO: 314336
  Synthetic oligonucleotide

SEQ ID NO: 541635 - DNA, 60 bp, Artificial; identical to SEQ ID NO: 314340
  Synthetic oligonucleotide

SEQ ID NO: 541636 - DNA, 56 bp, Artificial; identical to SEQ ID NO: 314345
  Synthetic oligonucleotide

SEQ ID NO: 541637 - DNA, 53 bp, Artificial; identical to SEQ ID NO: 314346
  Synthetic oligonucleotide

SEQ ID NO: 541638 - DNA, 54 bp, Artificial; identical to SEQ ID NO: 314351
  Synthetic oligonucleotide

SEQ ID NO: 541639 - DNA, 52 bp, Artificial; identical to SEQ ID NO: 314353
  Synthetic oligonucleotide

SEQ ID NO: 541640 - DNA, 55 bp, Artificial; identical to SEQ ID NO: 314355
  Synthetic oligonucleotide

SEQ ID NO: 541641 - DNA, 60 bp, Artificial; identical to SEQ ID NO: 314356
  Synthetic oligonucleotide

SEQ ID NO: 541642 - DNA, 54 bp, Artificial; identical to SEQ ID NO: 314360
  Synthetic oligonucleotide

SEQ ID NO: 541643 - DNA, 54 bp, Artificial; identical to SEQ ID NO: 314361
  Synthetic oligonucleotide

SEQ ID NO: 541644 - DNA, 55 bp, Artificial; identical to SEQ ID NO: 314364
  Synthetic oligonucleotide

SEQ ID NO: 541645 - DNA, 52 bp, Artificial; identical to SEQ ID NO: 314368
  Synthetic oligonucleotide

SEQ ID NO: 541646 - DNA, 60 bp, Artificial; identical to SEQ ID NO: 314372
  Synthetic oligonucleotide

SEQ ID NO: 541647 - DNA, 57 bp, Artificial; identical to SEQ ID NO: 314375
  Synthetic oligonucleotide

SEQ ID NO: 541648 - DNA, 58 bp, Artificial; identical to SEQ ID NO: 314378
  Synthetic oligonucleotide

SEQ ID NO: 541649 - DNA, 52 bp, Artificial; identical to SEQ ID NO: 314380
  Synthetic oligonucleotide

SEQ ID NO: 541650 - DNA, 56 bp, Artificial; identical to SEQ ID NO: 314382
  Synthetic oligonucleotide

SEQ ID NO: 541651 - DNA, 57 bp, Artificial; identical to SEQ ID NO: 314383
  Synthetic oligonucleotide

SEQ ID NO: 541652 - DNA, 59 bp, Artificial; identical to SEQ ID NO: 314384
  Synthetic oligonucleotide

SEQ ID NO: 541653 - DNA, 55 bp, Artificial; identical to SEQ ID NO: 314385
  Synthetic oligonucleotide

SEQ ID NO: 541654 - DNA, 54 bp, Artificial; identical to SEQ ID NO: 314386
  Synthetic oligonucleotide

SEQ ID NO: 541655 - DNA, 55 bp, Artificial; identical to SEQ ID NO: 314387
  Synthetic oligonucleotide

SEQ ID NO: 541656 - DNA, 60 bp, Artificial; identical to SEQ ID NO: 314390
  Synthetic oligonucleotide

SEQ ID NO: 541657 - DNA, 56 bp, Artificial; identical to SEQ ID NO: 314391
  Synthetic oligonucleotide

SEQ ID NO: 541658 - DNA, 53 bp, Artificial; identical to SEQ ID NO: 314395
  Synthetic oligonucleotide

SEQ ID NO: 541659 - DNA, 59 bp, Artificial; identical to SEQ ID NO: 314399
  Synthetic oligonucleotide

SEQ ID NO: 541660 - DNA, 56 bp, Artificial; identical to SEQ ID NO: 314402
  Synthetic oligonucleotide

SEQ ID NO: 541661 - DNA, 53 bp, Artificial; identical to SEQ ID NO: 314404
  Synthetic oligonucleotide

SEQ ID NO: 541662 - DNA, 53 bp, Artificial; identical to SEQ ID NO: 314405
  Synthetic oligonucleotide

SEQ ID NO: 541663 - DNA, 56 bp, Artificial; identical to SEQ ID NO: 314407
  Synthetic oligonucleotide

SEQ ID NO: 541664 - DNA, 53 bp, Artificial; identical to SEQ ID NO: 314408
  Synthetic oligonucleotide

SEQ ID NO: 541665 - DNA, 52 bp, Artificial; identical to SEQ ID NO: 314409
  Synthetic oligonucleotide

SEQ ID NO: 541666 - DNA, 60 bp, Artificial; identical to SEQ ID NO: 314413
  Synthetic oligonucleotide

SEQ ID NO: 541667 - DNA, 53 bp, Artificial; identical to SEQ ID NO: 314415
  Synthetic oligonucleotide

SEQ ID NO: 541668 - DNA, 54 bp, Artificial; identical to SEQ ID NO: 314416
  Synthetic oligonucleotide

SEQ ID NO: 541669 - DNA, 55 bp, Artificial; identical to SEQ ID NO: 314418
  Synthetic oligonucleotide

SEQ ID NO: 541670 - DNA, 59 bp, Artificial; identical to SEQ ID NO: 314421
  Synthetic oligonucleotide

SEQ ID NO: 541671 - DNA, 55 bp, Artificial; identical to SEQ ID NO: 314423
  Synthetic oligonucleotide

SEQ ID NO: 541672 - DNA, 57 bp, Artificial; identical to SEQ ID NO: 314424
  Synthetic oligonucleotide

SEQ ID NO: 541673 - DNA, 60 bp, Artificial; identical to SEQ ID NO: 314427
  Synthetic oligonucleotide

SEQ ID NO: 541674 - DNA, 60 bp, Artificial; identical to SEQ ID NO: 314432
  Synthetic oligonucleotide

SEQ ID NO: 541675 - DNA, 53 bp, Artificial; identical to SEQ ID NO: 314434
  Synthetic oligonucleotide

SEQ ID NO: 541676 - DNA, 55 bp, Artificial; identical to SEQ ID NO: 314436
  Synthetic oligonucleotide

SEQ ID NO: 541677 - DNA, 56 bp, Artificial; identical to SEQ ID NO: 314437
  Synthetic oligonucleotide

SEQ ID NO: 541678 - DNA, 55 bp, Artificial; identical to SEQ ID NO: 314442
  Synthetic oligonucleotide

SEQ ID NO: 541679 - DNA, 60 bp, Artificial; identical to SEQ ID NO: 314447
  Synthetic oligonucleotide

SEQ ID NO: 541680 - DNA, 58 bp, Artificial; identical to SEQ ID NO: 314448
  Synthetic oligonucleotide

SEQ ID NO: 541681 - DNA, 53 bp, Artificial; identical to SEQ ID NO: 314450
  Synthetic oligonucleotide

SEQ ID NO: 541682 - DNA, 55 bp, Artificial; identical to SEQ ID NO: 314451
  Synthetic oligonucleotide

SEQ ID NO: 541683 - DNA, 55 bp, Artificial; identical to SEQ ID NO: 314453
  Synthetic oligonucleotide

SEQ ID NO: 541684 - DNA, 52 bp, Artificial; identical to SEQ ID NO: 314459
  Synthetic oligonucleotide

SEQ ID NO: 541685 - DNA, 58 bp, Artificial; identical to SEQ ID NO: 314461
  Synthetic oligonucleotide

SEQ ID NO: 541686 - DNA, 59 bp, Artificial; identical to SEQ ID NO: 314462
  Synthetic oligonucleotide

SEQ ID NO: 541687 - DNA, 60 bp, Artificial; identical to SEQ ID NO: 314465
  Synthetic oligonucleotide

SEQ ID NO: 541688 - DNA, 60 bp, Artificial; identical to SEQ ID NO: 314470
  Synthetic oligonucleotide

SEQ ID NO: 541689 - DNA, 60 bp, Artificial; identical to SEQ ID NO: 314472
  Synthetic oligonucleotide

SEQ ID NO: 541690 - DNA, 58 bp, Artificial; identical to SEQ ID NO: 314473
  Synthetic oligonucleotide

SEQ ID NO: 541691 - DNA, 60 bp, Artificial; identical to SEQ ID NO: 314475
  Synthetic oligonucleotide

SEQ ID NO: 541692 - DNA, 57 bp, Artificial; identical to SEQ ID NO: 314476
  Synthetic oligonucleotide

SEQ ID NO: 541693 - DNA, 60 bp, Artificial; identical to SEQ ID NO: 314480
  Synthetic oligonucleotide

SEQ ID NO: 541694 - DNA, 59 bp, Artificial; identical to SEQ ID NO: 314492
  Synthetic oligonucleotide

SEQ ID NO: 541695 - DNA, 58 bp, Artificial; identical to SEQ ID NO: 314495
  Synthetic oligonucleotide

SEQ ID NO: 541696 - DNA, 55 bp, Artificial; identical to SEQ ID NO: 314497
  Synthetic oligonucleotide

SEQ ID NO: 541697 - DNA, 59 bp, Artificial; identical to SEQ ID NO: 314501
  Synthetic oligonucleotide

SEQ ID NO: 541698 - DNA, 60 bp, Artificial; identical to SEQ ID NO: 314504
  Synthetic oligonucleotide

SEQ ID NO: 541699 - DNA, 55 bp, Artificial; identical to SEQ ID NO: 314506
  Synthetic oligonucleotide

SEQ ID NO: 541700 - DNA, 60 bp, Artificial; identical to SEQ ID NO: 314510
  Synthetic oligonucleotide

SEQ ID NO: 541701 - DNA, 60 bp, Artificial; identical to SEQ ID NO: 14517
  Synthetic oligonucleotide

SEQ ID NO: 541702 - DNA, 57 bp, Artificial; identical to SEQ ID NO: 314511
  Synthetic oligonucleotide

SEQ ID NO: 541703 - DNA, 58 bp, Artificial; identical to SEQ ID NO: 314515
  Synthetic oligonucleotide

SEQ ID NO: 541704 - DNA, 56 bp, Artificial; identical to SEQ ID NO: 314516
  Synthetic oligonucleotide

SEQ ID NO: 541705 - DNA, 60 bp, Artificial; identical to SEQ ID NO: 314522
  Synthetic oligonucleotide

SEQ ID NO: 541706 - DNA, 55 bp, Artificial; identical to SEQ ID NO: 314523
  Synthetic oligonucleotide

SEQ ID NO: 541707 - DNA, 55 bp, Artificial; identical to SEQ ID NO: 314525
  Synthetic oligonucleotide

SEQ ID NO: 541708 - DNA, 55 bp, Artificial; identical to SEQ ID NO: 314528
  Synthetic oligonucleotide

SEQ ID NO: 541709 - DNA, 53 bp, Artificial; identical to SEQ ID NO: 314529
  Synthetic oligonucleotide

SEQ ID NO: 541710 - DNA, 60 bp, Artificial; identical to SEQ ID NO: 314532
  Synthetic oligonucleotide

SEQ ID NO: 541711 - DNA, 58 bp, Artificial; identical to SEQ ID NO: 314533
  Synthetic oligonucleotide

SEQ ID NO: 541712 - DNA, 59 bp, Artificial; identical to SEQ ID NO: 314539
  Synthetic oligonucleotide

SEQ ID NO: 541713 - DNA, 49 bp, Artificial; identical to SEQ ID NO: 314541
  Synthetic oligonucleotide

SEQ ID NO: 541714 - DNA, 52 bp, Artificial; identical to SEQ ID NO: 314542
  Synthetic oligonucleotide

SEQ ID NO: 541715 - DNA, 56 bp, Artificial; identical to SEQ ID NO: 314543
  Synthetic oligonucleotide

SEQ ID NO: 541716 - DNA, 57 bp, Artificial; identical to SEQ ID NO: 314548
  Synthetic oligonucleotide

SEQ ID NO: 541717 - DNA, 54 bp, Artificial; identical to SEQ ID NO: 314553
  Synthetic oligonucleotide

SEQ ID NO: 541718 - DNA, 60 bp, Artificial; identical to SEQ ID NO: 314554
  Synthetic oligonucleotide

SEQ ID NO: 541719 - DNA, 53 bp, Artificial; identical to SEQ ID NO: 314560
  Synthetic oligonucleotide

SEQ ID NO: 541720 - DNA, 60 bp, Artificial; identical to SEQ ID NO: 314563
  Synthetic oligonucleotide

SEQ ID NO: 541721 - DNA, 60 bp, Artificial; identical to SEQ ID NO: 314564
  Synthetic oligonucleotide

SEQ ID NO: 541722 - DNA, 55 bp, Artificial; identical to SEQ ID NO: 314565
  Synthetic oligonucleotide

SEQ ID NO: 541723 - DNA, 50 bp, Artificial; identical to SEQ ID NO: 314566
  Synthetic oligonucleotide

SEQ ID NO: 541724 - DNA, 59 bp, Artificial; identical to SEQ ID NO: 314567
  Synthetic oligonucleotide

SEQ ID NO: 541725 - DNA, 60 bp, Artificial; identical to SEQ ID NO: 314570
  Synthetic oligonucleotide

SEQ ID NO: 541726 - DNA, 60 bp, Artificial; identical to SEQ ID NO: 314571
  Synthetic oligonucleotide

SEQ ID NO: 541727 - DNA, 54 bp, Artificial; identical to SEQ ID NO: 11244
  Synthetic oligonucleotide

SEQ ID NO: 541728 - DNA, 60 bp, Artificial; identical to SEQ ID NO: 314574
  Synthetic oligonucleotide

SEQ ID NO: 541729 - DNA, 58 bp, Artificial; identical to SEQ ID NO: 314575
  Synthetic oligonucleotide

SEQ ID NO: 541730 - DNA, 52 bp, Artificial; identical to SEQ ID NO: 314576
  Synthetic oligonucleotide

SEQ ID NO: 541731 - DNA, 55 bp, Artificial; identical to SEQ ID NO: 314577
  Synthetic oligonucleotide

SEQ ID NO: 541732 - DNA, 56 bp, Artificial; identical to SEQ ID NO: 314580
  Synthetic oligonucleotide

SEQ ID NO: 541733 - DNA, 60 bp, Artificial; identical to SEQ ID NO: 314582
  Synthetic oligonucleotide

SEQ ID NO: 541734 - DNA, 60 bp, Artificial; identical to SEQ ID NO: 314583
  Synthetic oligonucleotide

SEQ ID NO: 541735 - DNA, 54 bp, Artificial; identical to SEQ ID NO: 314596
  Synthetic oligonucleotide

SEQ ID NO: 541736 - DNA, 59 bp, Artificial; identical to SEQ ID NO: 314601
  Synthetic oligonucleotide

SEQ ID NO: 541737 - DNA, 59 bp, Artificial; identical to SEQ ID NO: 314602
  Synthetic oligonucleotide

SEQ ID NO: 541738 - DNA, 59 bp, Artificial; identical to SEQ ID NO: 314604
  Synthetic oligonucleotide

SEQ ID NO: 541739 - DNA, 55 bp, Artificial; identical to SEQ ID NO: 314607
  Synthetic oligonucleotide

SEQ ID NO: 541740 - DNA, 60 bp, Artificial; identical to SEQ ID NO: 314610
  Synthetic oligonucleotide

SEQ ID NO: 541741 - DNA, 60 bp, Artificial; identical to SEQ ID NO: 314611
  Synthetic oligonucleotide

SEQ ID NO: 541742 - DNA, 60 bp, Artificial; identical to SEQ ID NO: 314614
  Synthetic oligonucleotide

SEQ ID NO: 541743 - DNA, 60 bp, Artificial; identical to SEQ ID NO: 10924
  Synthetic oligonucleotide

SEQ ID NO: 541744 - DNA, 60 bp, Artificial; identical to SEQ ID NO: 314617
  Synthetic oligonucleotide

SEQ ID NO: 541745 - DNA, 57 bp, Artificial; identical to SEQ ID NO: 314618
  Synthetic oligonucleotide

SEQ ID NO: 541746 - DNA, 55 bp, Artificial; identical to SEQ ID NO: 314620
  Synthetic oligonucleotide

SEQ ID NO: 541747 - DNA, 60 bp, Artificial; identical to SEQ ID NO: 314624
  Synthetic oligonucleotide

SEQ ID NO: 541748 - DNA, 59 bp, Artificial; identical to SEQ ID NO: 314631
  Synthetic oligonucleotide

SEQ ID NO: 541749 - DNA, 59 bp, Artificial; identical to SEQ ID NO: 314633
  Synthetic oligonucleotide

SEQ ID NO: 541750 - DNA, 59 bp, Artificial; identical to SEQ ID NO: 19292
  Synthetic oligonucleotide

SEQ ID NO: 541751 - DNA, 56 bp, Artificial; identical to SEQ ID NO: 314638
  Synthetic oligonucleotide

SEQ ID NO: 541752 - DNA, 60 bp, Artificial; identical to SEQ ID NO: 314641
  Synthetic oligonucleotide

SEQ ID NO: 541753 - DNA, 60 bp, Artificial; identical to SEQ ID NO: 314643
  Synthetic oligonucleotide

SEQ ID NO: 541754 - DNA, 57 bp, Artificial; identical to SEQ ID NO: 314646
  Synthetic oligonucleotide

SEQ ID NO: 541755 - DNA, 53 bp, Artificial; identical to SEQ ID NO: 314647
  Synthetic oligonucleotide

SEQ ID NO: 541756 - DNA, 54 bp, Artificial; identical to SEQ ID NO: 314650
  Synthetic oligonucleotide

SEQ ID NO: 541757 - DNA, 58 bp, Artificial; identical to SEQ ID NO: 10231
  Synthetic oligonucleotide

SEQ ID NO: 541758 - DNA, 52 bp, Artificial; identical to SEQ ID NO: 314654
  Synthetic oligonucleotide

SEQ ID NO: 541759 - DNA, 54 bp, Artificial; identical to SEQ ID NO: 314655
  Synthetic oligonucleotide

SEQ ID NO: 541760 - DNA, 55 bp, Artificial; identical to SEQ ID NO: 314657
  Synthetic oligonucleotide

SEQ ID NO: 541761 - DNA, 60 bp, Artificial; identical to SEQ ID NO: 12545
  Synthetic oligonucleotide

SEQ ID NO: 541762 - DNA, 60 bp, Artificial; identical to SEQ ID NO: 314661
  Synthetic oligonucleotide

SEQ ID NO: 541763 - DNA, 55 bp, Artificial; identical to SEQ ID NO: 314662
  Synthetic oligonucleotide

SEQ ID NO: 541764 - DNA, 60 bp, Artificial; identical to SEQ ID NO: 314663
  Synthetic oligonucleotide

SEQ ID NO: 541765 - DNA, 60 bp, Artificial; identical to SEQ ID NO: 314664
  Synthetic oligonucleotide

SEQ ID NO: 541766 - DNA, 60 bp, Artificial; identical to SEQ ID NO: 314665
  Synthetic oligonucleotide

SEQ ID NO: 541767 - DNA, 55 bp, Artificial; identical to SEQ ID NO: 13302
  Synthetic oligonucleotide

SEQ ID NO: 541768 - DNA, 57 bp, Artificial; identical to SEQ ID NO: 13200
  Synthetic oligonucleotide

SEQ ID NO: 541769 - DNA, 57 bp, Artificial; identical to SEQ ID NO: 314668
  Synthetic oligonucleotide

SEQ ID NO: 541770 - DNA, 55 bp, Artificial; identical to SEQ ID NO: 314669
  Synthetic oligonucleotide

SEQ ID NO: 541771 - DNA, 51 bp, Artificial; identical to SEQ ID NO: 314671
  Synthetic oligonucleotide

SEQ ID NO: 541772 - DNA, 53 bp, Artificial; identical to SEQ ID NO: 314672
  Synthetic oligonucleotide

SEQ ID NO: 541773 - DNA, 54 bp, Artificial; identical to SEQ ID NO: 314679
  Synthetic oligonucleotide

SEQ ID NO: 541774 - DNA, 54 bp, Artificial; identical to SEQ ID NO: 314683
  Synthetic oligonucleotide

SEQ ID NO: 541775 - DNA, 54 bp, Artificial; identical to SEQ ID NO: 314684
  Synthetic oligonucleotide

SEQ ID NO: 541776 - DNA, 58 bp, Artificial; identical to SEQ ID NO: 314685
  Synthetic oligonucleotide

SEQ ID NO: 541777 - DNA, 58 bp, Artificial; identical to SEQ ID NO: 314687
  Synthetic oligonucleotide

SEQ ID NO: 541778 - DNA, 54 bp, Artificial; identical to SEQ ID NO: 314699
  Synthetic oligonucleotide

SEQ ID NO: 541779 - DNA, 55 bp, Artificial; identical to SEQ ID NO: 314701
  Synthetic oligonucleotide

SEQ ID NO: 541780 - DNA, 56 bp, Artificial; identical to SEQ ID NO: 314702
  Synthetic oligonucleotide

SEQ ID NO: 541781 - DNA, 54 bp, Artificial; identical to SEQ ID NO: 314704
  Synthetic oligonucleotide

SEQ ID NO: 541782 - DNA, 52 bp, Artificial; identical to SEQ ID NO: 314705
  Synthetic oligonucleotide

SEQ ID NO: 541783 - DNA, 55 bp, Artificial; identical to SEQ ID NO: 314709
  Synthetic oligonucleotide

SEQ ID NO: 541784 - DNA, 52 bp, Artificial; identical to SEQ ID NO: 314710
  Synthetic oligonucleotide

SEQ ID NO: 541785 - DNA, 51 bp, Artificial; identical to SEQ ID NO: 314711
  Synthetic oligonucleotide

SEQ ID NO: 541786 - DNA, 58 bp, Artificial; identical to SEQ ID NO: 314712
  Synthetic oligonucleotide

SEQ ID NO: 541787 - DNA, 60 bp, Artificial; identical to SEQ ID NO: 314717
  Synthetic oligonucleotide

SEQ ID NO: 541788 - DNA, 56 bp, Artificial; identical to SEQ ID NO: 314718
  Synthetic oligonucleotide

SEQ ID NO: 541789 - DNA, 52 bp, Artificial; identical to SEQ ID NO: 314719
  Synthetic oligonucleotide

SEQ ID NO: 541790 - DNA, 51 bp, Artificial; identical to SEQ ID NO: 314720
  Synthetic oligonucleotide

SEQ ID NO: 541791 - DNA, 51 bp, Artificial; identical to SEQ ID NO: 314721
  Synthetic oligonucleotide

SEQ ID NO: 541792 - DNA, 54 bp, Artificial; identical to SEQ ID NO: 314722
  Synthetic oligonucleotide

SEQ ID NO: 541793 - DNA, 55 bp, Artificial; identical to SEQ ID NO: 314725
  Synthetic oligonucleotide

SEQ ID NO: 541794 - DNA, 52 bp, Artificial; identical to SEQ ID NO: 314727
  Synthetic oligonucleotide

SEQ ID NO: 541795 - DNA, 57 bp, Artificial; identical to SEQ ID NO: 8071
  Synthetic oligonucleotide

SEQ ID NO: 541796 - DNA, 56 bp, Artificial; identical to SEQ ID NO: 314731
  Synthetic oligonucleotide

SEQ ID NO: 541797 - DNA, 55 bp, Artificial; identical to SEQ ID NO: 314732
  Synthetic oligonucleotide

SEQ ID NO: 541798 - DNA, 60 bp, Artificial; identical to SEQ ID NO: 314733
  Synthetic oligonucleotide

SEQ ID NO: 541799 - DNA, 51 bp, Artificial; identical to SEQ ID NO: 314736
  Synthetic oligonucleotide

SEQ ID NO: 541800 - DNA, 60 bp, Artificial; identical to SEQ ID NO: 11150
  Synthetic oligonucleotide

SEQ ID NO: 541801 - DNA, 55 bp, Artificial; identical to SEQ ID NO: 9594
  Synthetic oligonucleotide

SEQ ID NO: 541802 - DNA, 55 bp, Artificial; identical to SEQ ID NO: 314740
  Synthetic oligonucleotide

SEQ ID NO: 541803 - DNA, 60 bp, Artificial; identical to SEQ ID NO: 314742
  Synthetic oligonucleotide

SEQ ID NO: 541804 - DNA, 54 bp, Artificial; identical to SEQ ID NO: 314747
  Synthetic oligonucleotide

SEQ ID NO: 541805 - DNA, 60 bp, Artificial; identical to SEQ ID NO: 314748
  Synthetic oligonucleotide

SEQ ID NO: 541806 - DNA, 56 bp, Artificial; identical to SEQ ID NO: 314749
  Synthetic oligonucleotide

SEQ ID NO: 541807 - DNA, 55 bp, Artificial; identical to SEQ ID NO: 314751
  Synthetic oligonucleotide

SEQ ID NO: 541808 - DNA, 57 bp, Artificial; identical to SEQ ID NO: 314752
  Synthetic oligonucleotide

SEQ ID NO: 541809 - DNA, 60 bp, Artificial; identical to SEQ ID NO: 314754
  Synthetic oligonucleotide

SEQ ID NO: 541810 - DNA, 59 bp, Artificial; identical to SEQ ID NO: 17586
  Synthetic oligonucleotide

SEQ ID NO: 541811 - DNA, 60 bp, Artificial; identical to SEQ ID NO: 314758
  Synthetic oligonucleotide

SEQ ID NO: 541812 - DNA, 56 bp, Artificial; identical to SEQ ID NO: 314759
  Synthetic oligonucleotide

SEQ ID NO: 541813 - DNA, 59 bp, Artificial; identical to SEQ ID NO: 314760
  Synthetic oligonucleotide

SEQ ID NO: 541814 - DNA, 57 bp, Artificial; identical to SEQ ID NO: 314767
  Synthetic oligonucleotide

SEQ ID NO: 541815 - DNA, 53 bp, Artificial; identical to SEQ ID NO: 314768
  Synthetic oligonucleotide

SEQ ID NO: 541816 - DNA, 50 bp, Artificial; identical to SEQ ID NO: 314770
  Synthetic oligonucleotide

SEQ ID NO: 541817 - DNA, 59 bp, Artificial; identical to SEQ ID NO: 314771
  Synthetic oligonucleotide

SEQ ID NO: 541818 - DNA, 59 bp, Artificial; identical to SEQ ID NO: 314772
  Synthetic oligonucleotide

SEQ ID NO: 541819 - DNA, 55 bp, Artificial; identical to SEQ ID NO: 314773
  Synthetic oligonucleotide

SEQ ID NO: 541820 - DNA, 60 bp, Artificial; identical to SEQ ID NO: 314775
  Synthetic oligonucleotide

SEQ ID NO: 541821 - DNA, 52 bp, Artificial; identical to SEQ ID NO: 314776
  Synthetic oligonucleotide

SEQ ID NO: 541822 - DNA, 57 bp, Artificial; identical to SEQ ID NO: 314778
  Synthetic oligonucleotide

SEQ ID NO: 541823 - DNA, 53 bp, Artificial; identical to SEQ ID NO: 314780
  Synthetic oligonucleotide

SEQ ID NO: 541824 - DNA, 60 bp, Artificial; identical to SEQ ID NO: 314781
  Synthetic oligonucleotide

SEQ ID NO: 541825 - DNA, 57 bp, Artificial; identical to SEQ ID NO: 314782
  Synthetic oligonucleotide

SEQ ID NO: 541826 - DNA, 60 bp, Artificial; identical to SEQ ID NO: 314786
  Synthetic oligonucleotide

SEQ ID NO: 541827 - DNA, 58 bp, Artificial; identical to SEQ ID NO: 314788
  Synthetic oligonucleotide

SEQ ID NO: 541828 - DNA, 56 bp, Artificial; identical to SEQ ID NO: 314789
  Synthetic oligonucleotide

SEQ ID NO: 541829 - DNA, 55 bp, Artificial; identical to SEQ ID NO: 314791
  Synthetic oligonucleotide

SEQ ID NO: 541830 - DNA, 60 bp, Artificial; identical to SEQ ID NO: 12851
  Synthetic oligonucleotide

SEQ ID NO: 541831 - DNA, 60 bp, Artificial; identical to SEQ ID NO: 314792
  Synthetic oligonucleotide

SEQ ID NO: 541832 - DNA, 55 bp, Artificial; identical to SEQ ID NO: 314795
  Synthetic oligonucleotide

SEQ ID NO: 541833 - DNA, 59 bp, Artificial; identical to SEQ ID NO: 314797
  Synthetic oligonucleotide

SEQ ID NO: 541834 - DNA, 60 bp, Artificial; identical to SEQ ID NO: 314801
  Synthetic oligonucleotide

SEQ ID NO: 541835 - DNA, 60 bp, Artificial; identical to SEQ ID NO: 314802
  Synthetic oligonucleotide

SEQ ID NO: 541836 - DNA, 57 bp, Artificial; identical to SEQ ID NO: 314804
  Synthetic oligonucleotide

SEQ ID NO: 541837 - DNA, 55 bp, Artificial; identical to SEQ ID NO: 314805
  Synthetic oligonucleotide

SEQ ID NO: 541838 - DNA, 55 bp, Artificial; identical to SEQ ID NO: 314807
  Synthetic oligonucleotide

SEQ ID NO: 541839 - DNA, 51 bp, Artificial; identical to SEQ ID NO: 314809
  Synthetic oligonucleotide

SEQ ID NO: 541840 - DNA, 60 bp, Artificial; identical to SEQ ID NO: 314812
  Synthetic oligonucleotide

SEQ ID NO: 541841 - DNA, 58 bp, Artificial; identical to SEQ ID NO: 16254
  Synthetic oligonucleotide

SEQ ID NO: 541842 - DNA, 55 bp, Artificial; identical to SEQ ID NO: 314817
  Synthetic oligonucleotide

SEQ ID NO: 541843 - DNA, 50 bp, Artificial; identical to SEQ ID NO: 314819
  Synthetic oligonucleotide

SEQ ID NO: 541844 - DNA, 50 bp, Artificial; identical to SEQ ID NO: 10979
  Synthetic oligonucleotide

SEQ ID NO: 541845 - DNA, 60 bp, Artificial; identical to SEQ ID NO: 314821
  Synthetic oligonucleotide

SEQ ID NO: 541846 - DNA, 55 bp, Artificial; identical to SEQ ID NO: 314822
  Synthetic oligonucleotide

SEQ ID NO: 541847 - DNA, 55 bp, Artificial; identical to SEQ ID NO: 314823
  Synthetic oligonucleotide

SEQ ID NO: 541848 - DNA, 54 bp, Artificial; identical to SEQ ID NO: 314824
  Synthetic oligonucleotide

SEQ ID NO: 541849 - DNA, 54 bp, Artificial; identical to SEQ ID NO: 314825
  Synthetic oligonucleotide

SEQ ID NO: 541850 - DNA, 55 bp, Artificial; identical to SEQ ID NO: 314826
  Synthetic oligonucleotide

SEQ ID NO: 541851 - DNA, 56 bp, Artificial; identical to SEQ ID NO: 314827
  Synthetic oligonucleotide

SEQ ID NO: 541852 - DNA, 56 bp, Artificial; identical to SEQ ID NO: 314828
  Synthetic oligonucleotide

SEQ ID NO: 541853 - DNA, 56 bp, Artificial; identical to SEQ ID NO: 314829
  Synthetic oligonucleotide

SEQ ID NO: 541854 - DNA, 59 bp, Artificial; identical to SEQ ID NO: 314831
  Synthetic oligonucleotide

SEQ ID NO: 541855 - DNA, 60 bp, Artificial; identical to SEQ ID NO: 10496
  Synthetic oligonucleotide

SEQ ID NO: 541856 - DNA, 60 bp, Artificial; identical to SEQ ID NO: 314835
  Synthetic oligonucleotide

SEQ ID NO: 541857 - DNA, 50 bp, Artificial; identical to SEQ ID NO: 314836
  Synthetic oligonucleotide

SEQ ID NO: 541858 - DNA, 59 bp, Artificial; identical to SEQ ID NO: 314838
  Synthetic oligonucleotide

SEQ ID NO: 541859 - DNA, 55 bp, Artificial; identical to SEQ ID NO: 314839
  Synthetic oligonucleotide

SEQ ID NO: 541860 - DNA, 55 bp, Artificial; identical to SEQ ID NO: 314841
  Synthetic oligonucleotide

SEQ ID NO: 541861 - DNA, 55 bp, Artificial; identical to SEQ ID NO: 314843
  Synthetic oligonucleotide

SEQ ID NO: 541862 - DNA, 55 bp, Artificial; identical to SEQ ID NO: 314845
  Synthetic oligonucleotide

SEQ ID NO: 541863 - DNA, 60 bp, Artificial; identical to SEQ ID NO: 314847
  Synthetic oligonucleotide

SEQ ID NO: 541864 - DNA, 52 bp, Artificial; identical to SEQ ID NO: 314848
  Synthetic oligonucleotide

SEQ ID NO: 541865 - DNA, 53 bp, Artificial; identical to SEQ ID NO: 314854
  Synthetic oligonucleotide

SEQ ID NO: 541866 - DNA, 54 bp, Artificial; identical to SEQ ID NO: 314855
  Synthetic oligonucleotide

SEQ ID NO: 541867 - DNA, 56 bp, Artificial; identical to SEQ ID NO: 314856
  Synthetic oligonucleotide

SEQ ID NO: 541868 - DNA, 57 bp, Artificial; identical to SEQ ID NO: 314859
  Synthetic oligonucleotide

SEQ ID NO: 541869 - DNA, 60 bp, Artificial; identical to SEQ ID NO: 314860
  Synthetic oligonucleotide

SEQ ID NO: 541870 - DNA, 55 bp, Artificial; identical to SEQ ID NO: 314862
  Synthetic oligonucleotide

SEQ ID NO: 541871 - DNA, 60 bp, Artificial; identical to SEQ ID NO: 314863
  Synthetic oligonucleotide

SEQ ID NO: 541872 - DNA, 56 bp, Artificial; identical to SEQ ID NO: 314864
  Synthetic oligonucleotide

SEQ ID NO: 541873 - DNA, 52 bp, Artificial; identical to SEQ ID NO: 314865
  Synthetic oligonucleotide

SEQ ID NO: 541874 - DNA, 60 bp, Artificial; identical to SEQ ID NO: 314867
  Synthetic oligonucleotide

SEQ ID NO: 541875 - DNA, 52 bp, Artificial; identical to SEQ ID NO: 314868
  Synthetic oligonucleotide

SEQ ID NO: 541876 - DNA, 54 bp, Artificial; identical to SEQ ID NO: 314870
  Synthetic oligonucleotide

SEQ ID NO: 541877 - DNA, 57 bp, Artificial; identical to SEQ ID NO: 314874
  Synthetic oligonucleotide

SEQ ID NO: 541878 - DNA, 60 bp, Artificial; identical to SEQ ID NO: 14456
  Synthetic oligonucleotide

SEQ ID NO: 541879 - DNA, 52 bp, Artificial; identical to SEQ ID NO: 314878
  Synthetic oligonucleotide

SEQ ID NO: 541880 - DNA, 57 bp, Artificial; identical to SEQ ID NO: 17499
  Synthetic oligonucleotide

SEQ ID NO: 541881 - DNA, 59 bp, Artificial; identical to SEQ ID NO: 314883
  Synthetic oligonucleotide

SEQ ID NO: 541882 - DNA, 55 bp, Artificial; identical to SEQ ID NO: 314884
  Synthetic oligonucleotide

SEQ ID NO: 541883 - DNA, 60 bp, Artificial; identical to SEQ ID NO: 314885
  Synthetic oligonucleotide

SEQ ID NO: 541884 - DNA, 58 bp, Artificial; identical to SEQ ID NO: 314890
  Synthetic oligonucleotide

SEQ ID NO: 541885 - DNA, 60 bp, Artificial; identical to SEQ ID NO: 314892
  Synthetic oligonucleotide

SEQ ID NO: 541886 - DNA, 55 bp, Artificial; identical to SEQ ID NO: 314893
  Synthetic oligonucleotide

SEQ ID NO: 541887 - DNA, 60 bp, Artificial; identical to SEQ ID NO: 314895
  Synthetic oligonucleotide

SEQ ID NO: 541888 - DNA, 53 bp, Artificial; identical to SEQ ID NO: 314896
  Synthetic oligonucleotide

SEQ ID NO: 541889 - DNA, 55 bp, Artificial; identical to SEQ ID NO: 314897
  Synthetic oligonucleotide

SEQ ID NO: 541890 - DNA, 60 bp, Artificial; identical to SEQ ID NO: 8679
  Synthetic oligonucleotide

SEQ ID NO: 541891 - DNA, 60 bp, Artificial; identical to SEQ ID NO: 8668
  Synthetic oligonucleotide

SEQ ID NO: 541892 - DNA, 56 bp, Artificial; identical to SEQ ID NO: 314902
  Synthetic oligonucleotide

SEQ ID NO: 541893 - DNA, 60 bp, Artificial; identical to SEQ ID NO: 15776
  Synthetic oligonucleotide

SEQ ID NO: 541894 - DNA, 60 bp, Artificial; identical to SEQ ID NO: 314905
  Synthetic oligonucleotide

SEQ ID NO: 541895 - DNA, 55 bp, Artificial; identical to SEQ ID NO: 314910
  Synthetic oligonucleotide

SEQ ID NO: 541896 - DNA, 57 bp, Artificial; identical to SEQ ID NO: 314911
  Synthetic oligonucleotide

SEQ ID NO: 541897 - DNA, 53 bp, Artificial; identical to SEQ ID NO: 314914
  Synthetic oligonucleotide

SEQ ID NO: 541898 - DNA, 52 bp, Artificial; identical to SEQ ID NO: 314915
  Synthetic oligonucleotide

SEQ ID NO: 541899 - DNA, 55 bp, Artificial; identical to SEQ ID NO: 314916
  Synthetic oligonucleotide

SEQ ID NO: 541900 - DNA, 53 bp, Artificial; identical to SEQ ID NO: 314918
  Synthetic oligonucleotide

SEQ ID NO: 541901 - DNA, 57 bp, Artificial; identical to SEQ ID NO: 314919
  Synthetic oligonucleotide

SEQ ID NO: 541902 - DNA, 55 bp, Artificial; identical to SEQ ID NO: 16091
  Synthetic oligonucleotide

SEQ ID NO: 541903 - DNA, 55 bp, Artificial; identical to SEQ ID NO: 314922
  Synthetic oligonucleotide

SEQ ID NO: 541904 - DNA, 55 bp, Artificial; identical to SEQ ID NO: 314924
  Synthetic oligonucleotide

SEQ ID NO: 541905 - DNA, 57 bp, Artificial; identical to SEQ ID NO: 314925
  Synthetic oligonucleotide

SEQ ID NO: 541906 - DNA, 55 bp, Artificial; identical to SEQ ID NO: 314928
  Synthetic oligonucleotide

SEQ ID NO: 541907 - DNA, 60 bp, Artificial; identical to SEQ ID NO: 314937
  Synthetic oligonucleotide

SEQ ID NO: 541908 - DNA, 60 bp, Artificial; identical to SEQ ID NO: 314938
  Synthetic oligonucleotide

SEQ ID NO: 541909 - DNA, 60 bp, Artificial; identical to SEQ ID NO: 314939
  Synthetic oligonucleotide

SEQ ID NO: 541910 - DNA, 55 bp, Artificial; identical to SEQ ID NO: 314941
  Synthetic oligonucleotide

SEQ ID NO: 541911 - DNA, 52 bp, Artificial; identical to SEQ ID NO: 314943
  Synthetic oligonucleotide

SEQ ID NO: 541912 - DNA, 60 bp, Artificial; identical to SEQ ID NO: 314951
  Synthetic oligonucleotide

SEQ ID NO: 541913 - DNA, 55 bp, Artificial; identical to SEQ ID NO: 314954
  Synthetic oligonucleotide

SEQ ID NO: 541914 - DNA, 58 bp, Artificial; identical to SEQ ID NO: 314955
  Synthetic oligonucleotide

SEQ ID NO: 541915 - DNA, 58 bp, Artificial; identical to SEQ ID NO: 314956
  Synthetic oligonucleotide

SEQ ID NO: 541916 - DNA, 51 bp, Artificial; identical to SEQ ID NO: 314958
  Synthetic oligonucleotide

SEQ ID NO: 541917 - DNA, 51 bp, Artificial; identical to SEQ ID NO: 314960
  Synthetic oligonucleotide

SEQ ID NO: 541918 - DNA, 53 bp, Artificial; identical to SEQ ID NO: 314961
  Synthetic oligonucleotide

SEQ ID NO: 541919 - DNA, 56 bp, Artificial; identical to SEQ ID NO: 314962
  Synthetic oligonucleotide

SEQ ID NO: 541920 - DNA, 58 bp, Artificial; identical to SEQ ID NO: 314964
  Synthetic oligonucleotide

SEQ ID NO: 541921 - DNA, 58 bp, Artificial; identical to SEQ ID NO: 314965
  Synthetic oligonucleotide

SEQ ID NO: 541922 - DNA, 53 bp, Artificial; identical to SEQ ID NO: 314966
  Synthetic oligonucleotide

SEQ ID NO: 541923 - DNA, 59 bp, Artificial; identical to SEQ ID NO: 314967
  Synthetic oligonucleotide

SEQ ID NO: 541924 - DNA, 58 bp, Artificial; identical to SEQ ID NO: 314969
  Synthetic oligonucleotide

SEQ ID NO: 541925 - DNA, 51 bp, Artificial; identical to SEQ ID NO: 314971
  Synthetic oligonucleotide

SEQ ID NO: 541926 - DNA, 52 bp, Artificial; identical to SEQ ID NO: 314972
  Synthetic oligonucleotide

SEQ ID NO: 541927 - DNA, 56 bp, Artificial; identical to SEQ ID NO: 314973
  Synthetic oligonucleotide

SEQ ID NO: 541928 - DNA, 52 bp, Artificial; identical to SEQ ID NO: 17950
  Synthetic oligonucleotide

SEQ ID NO: 541929 - DNA, 50 bp, Artificial; identical to SEQ ID NO: 314975
  Synthetic oligonucleotide

SEQ ID NO: 541930 - DNA, 56 bp, Artificial; identical to SEQ ID NO: 314978
  Synthetic oligonucleotide

SEQ ID NO: 541931 - DNA, 53 bp, Artificial; identical to SEQ ID NO: 314979
  Synthetic oligonucleotide

SEQ ID NO: 541932 - DNA, 56 bp, Artificial; identical to SEQ ID NO: 314980
  Synthetic oligonucleotide

SEQ ID NO: 541933 - DNA, 51 bp, Artificial; identical to SEQ ID NO: 314982
  Synthetic oligonucleotide

SEQ ID NO: 541934 - DNA, 54 bp, Artificial; identical to SEQ ID NO: 314984
  Synthetic oligonucleotide

SEQ ID NO: 541935 - DNA, 55 bp, Artificial; identical to SEQ ID NO: 314985
  Synthetic oligonucleotide

SEQ ID NO: 541936 - DNA, 60 bp, Artificial; identical to SEQ ID NO: 314987
  Synthetic oligonucleotide

SEQ ID NO: 541937 - DNA, 56 bp, Artificial; identical to SEQ ID NO: 314988
  Synthetic oligonucleotide

SEQ ID NO: 541938 - DNA, 55 bp, Artificial; identical to SEQ ID NO: 314992
  Synthetic oligonucleotide

SEQ ID NO: 541939 - DNA, 56 bp, Artificial; identical to SEQ ID NO: 314993
  Synthetic oligonucleotide

SEQ ID NO: 541940 - DNA, 56 bp, Artificial; identical to SEQ ID NO: 314994
  Synthetic oligonucleotide

SEQ ID NO: 541941 - DNA, 55 bp, Artificial; identical to SEQ ID NO: 314995
  Synthetic oligonucleotide

SEQ ID NO: 541942 - DNA, 60 bp, Artificial; identical to SEQ ID NO: 314996
  Synthetic oligonucleotide

SEQ ID NO: 541943 - DNA, 58 bp, Artificial; identical to SEQ ID NO: 314997
  Synthetic oligonucleotide

SEQ ID NO: 541944 - DNA, 57 bp, Artificial; identical to SEQ ID NO: 314999
  Synthetic oligonucleotide

SEQ ID NO: 541945 - DNA, 55 bp, Artificial; identical to SEQ ID NO: 315001
  Synthetic oligonucleotide

SEQ ID NO: 541946 - DNA, 58 bp, Artificial; identical to SEQ ID NO: 315004
  Synthetic oligonucleotide

SEQ ID NO: 541947 - DNA, 53 bp, Artificial; identical to SEQ ID NO: 315008
  Synthetic oligonucleotide

SEQ ID NO: 541948 - DNA, 53 bp, Artificial; identical to SEQ ID NO: 315009
  Synthetic oligonucleotide

SEQ ID NO: 541949 - DNA, 54 bp, Artificial; identical to SEQ ID NO: 315012
  Synthetic oligonucleotide

SEQ ID NO: 541950 - DNA, 60 bp, Artificial; identical to SEQ ID NO: 315013
  Synthetic oligonucleotide

SEQ ID NO: 541951 - DNA, 51 bp, Artificial; identical to SEQ ID NO: 13715
  Synthetic oligonucleotide

SEQ ID NO: 541952 - DNA, 55 bp, Artificial; identical to SEQ ID NO: 315015
  Synthetic oligonucleotide

SEQ ID NO: 541953 - DNA, 55 bp, Artificial; identical to SEQ ID NO: 315017
  Synthetic oligonucleotide

SEQ ID NO: 541954 - DNA, 55 bp, Artificial; identical to SEQ ID NO: 315020
  Synthetic oligonucleotide

SEQ ID NO: 541955 - DNA, 60 bp, Artificial; identical to SEQ ID NO: 315025
  Synthetic oligonucleotide

SEQ ID NO: 541956 - DNA, 55 bp, Artificial; identical to SEQ ID NO: 315027
  Synthetic oligonucleotide

SEQ ID NO: 541957 - DNA, 60 bp, Artificial; identical to SEQ ID NO: 315031
  Synthetic oligonucleotide

SEQ ID NO: 541958 - DNA, 60 bp, Artificial; identical to SEQ ID NO: 112633
  Synthetic oligonucleotide

SEQ ID NO: 541959 - DNA, 55 bp, Artificial; identical to SEQ ID NO: 315033
  Synthetic oligonucleotide

SEQ ID NO: 541960 - DNA, 56 bp, Artificial; identical to SEQ ID NO: 315035
  Synthetic oligonucleotide

SEQ ID NO: 541961 - DNA, 55 bp, Artificial; identical to SEQ ID NO: 315037
  Synthetic oligonucleotide

SEQ ID NO: 541962 - DNA, 55 bp, Artificial; identical to SEQ ID NO: 315039
  Synthetic oligonucleotide

SEQ ID NO: 541963 - DNA, 50 bp, Artificial; identical to SEQ ID NO: 315040
  Synthetic oligonucleotide

SEQ ID NO: 541964 - DNA, 58 bp, Artificial; identical to SEQ ID NO: 315045
  Synthetic oligonucleotide

SEQ ID NO: 541965 - DNA, 57 bp, Artificial; identical to SEQ ID NO: 16767
  Synthetic oligonucleotide

SEQ ID NO: 541966 - DNA, 57 bp, Artificial; identical to SEQ ID NO: 315046
  Synthetic oligonucleotide

SEQ ID NO: 541967 - DNA, 58 bp, Artificial; identical to SEQ ID NO: 315048
  Synthetic oligonucleotide

SEQ ID NO: 541968 - DNA, 60 bp, Artificial; identical to SEQ ID NO: 315051
  Synthetic oligonucleotide

SEQ ID NO: 541969 - DNA, 60 bp, Artificial; identical to SEQ ID NO: 315053
  Synthetic oligonucleotide

SEQ ID NO: 541970 - DNA, 60 bp, Artificial; identical to SEQ ID NO: 315057
  Synthetic oligonucleotide

SEQ ID NO: 541971 - DNA, 57 bp, Artificial; identical to SEQ ID NO: 315058
  Synthetic oligonucleotide

SEQ ID NO: 541972 - DNA, 54 bp, Artificial; identical to SEQ ID NO: 315061
  Synthetic oligonucleotide

SEQ ID NO: 541973 - DNA, 58 bp, Artificial; identical to SEQ ID NO: 315064
  Synthetic oligonucleotide

SEQ ID NO: 541974 - DNA, 60 bp, Artificial; identical to SEQ ID NO: 315067
  Synthetic oligonucleotide

SEQ ID NO: 541975 - DNA, 60 bp, Artificial; identical to SEQ ID NO: 315068
  Synthetic oligonucleotide

SEQ ID NO: 541976 - DNA, 51 bp, Artificial; identical to SEQ ID NO: 315072
  Synthetic oligonucleotide

SEQ ID NO: 541977 - DNA, 58 bp, Artificial; identical to SEQ ID NO: 315073
  Synthetic oligonucleotide

SEQ ID NO: 541978 - DNA, 50 bp, Artificial; identical to SEQ ID NO: 315075
  Synthetic oligonucleotide

SEQ ID NO: 541979 - DNA, 52 bp, Artificial; identical to SEQ ID NO: 19463
  Synthetic oligonucleotide

SEQ ID NO: 541980 - DNA, 52 bp, Artificial; identical to SEQ ID NO: 315080
  Synthetic oligonucleotide

SEQ ID NO: 541981 - DNA, 52 bp, Artificial; identical to SEQ ID NO: 315082
  Synthetic oligonucleotide

SEQ ID NO: 541982 - DNA, 53 bp, Artificial; identical to SEQ ID NO: 315084
  Synthetic oligonucleotide

SEQ ID NO: 541983 - DNA, 51 bp, Artificial; identical to SEQ ID NO: 315085
  Synthetic oligonucleotide

SEQ ID NO: 541984 - DNA, 51 bp, Artificial; identical to SEQ ID NO: 315089
  Synthetic oligonucleotide

SEQ ID NO: 541985 - DNA, 51 bp, Artificial; identical to SEQ ID NO: 315090
  Synthetic oligonucleotide

SEQ ID NO: 541986 - DNA, 60 bp, Artificial; identical to SEQ ID NO: 315091
  Synthetic oligonucleotide

SEQ ID NO: 541987 - DNA, 58 bp, Artificial; identical to SEQ ID NO: 315093
  Synthetic oligonucleotide

SEQ ID NO: 541988 - DNA, 58 bp, Artificial; identical to SEQ ID NO: 315096
  Synthetic oligonucleotide

SEQ ID NO: 541989 - DNA, 55 bp, Artificial; identical to SEQ ID NO: 315097
  Synthetic oligonucleotide

SEQ ID NO: 541990 - DNA, 53 bp, Artificial; identical to SEQ ID NO: 19353
  Synthetic oligonucleotide

SEQ ID NO: 541991 - DNA, 52 bp, Artificial; identical to SEQ ID NO: 315098
  Synthetic oligonucleotide

SEQ ID NO: 541992 - DNA, 52 bp, Artificial; identical to SEQ ID NO: 315099
  Synthetic oligonucleotide

SEQ ID NO: 541993 - DNA, 59 bp, Artificial; identical to SEQ ID NO: 315102
  Synthetic oligonucleotide

SEQ ID NO: 541994 - DNA, 54 bp, Artificial; identical to SEQ ID NO: 315103
  Synthetic oligonucleotide

SEQ ID NO: 541995 - DNA, 53 bp, Artificial; identical to SEQ ID NO: 14526
  Synthetic oligonucleotide

SEQ ID NO: 541996 - DNA, 53 bp, Artificial; identical to SEQ ID NO: 315107
  Synthetic oligonucleotide

SEQ ID NO: 541997 - DNA, 56 bp, Artificial; identical to SEQ ID NO: 315109
  Synthetic oligonucleotide

SEQ ID NO: 541998 - DNA, 55 bp, Artificial; identical to SEQ ID NO: 315110
  Synthetic oligonucleotide

SEQ ID NO: 541999 - DNA, 57 bp, Artificial; identical to SEQ ID NO: 315111
  Synthetic oligonucleotide

SEQ ID NO: 542000 - DNA, 53 bp, Artificial; identical to SEQ ID NO: 315112
  Synthetic oligonucleotide

SEQ ID NO: 542001 - DNA, 54 bp, Artificial; identical to SEQ ID NO: 315113
  Synthetic oligonucleotide

SEQ ID NO: 542002 - DNA, 56 bp, Artificial; identical to SEQ ID NO: 315114
  Synthetic oligonucleotide

SEQ ID NO: 542003 - DNA, 55 bp, Artificial; identical to SEQ ID NO: 315115
  Synthetic oligonucleotide

SEQ ID NO: 542004 - DNA, 57 bp, Artificial; identical to SEQ ID NO: 16882
  Synthetic oligonucleotide

SEQ ID NO: 542005 - DNA, 54 bp, Artificial; identical to SEQ ID NO: 315117
  Synthetic oligonucleotide

SEQ ID NO: 542006 - DNA, 58 bp, Artificial; identical to SEQ ID NO: 315118
  Synthetic oligonucleotide

SEQ ID NO: 542007 - DNA, 60 bp, Artificial; identical to SEQ ID NO: 10531
  Synthetic oligonucleotide

SEQ ID NO: 542008 - DNA, 58 bp, Artificial; identical to SEQ ID NO: 315120
  Synthetic oligonucleotide

SEQ ID NO: 542009 - DNA, 60 bp, Artificial; identical to SEQ ID NO: 315121
  Synthetic oligonucleotide

SEQ ID NO: 542010 - DNA, 54 bp, Artificial; identical to SEQ ID NO: 315124
  Synthetic oligonucleotide

SEQ ID NO: 542011 - DNA, 59 bp, Artificial; identical to SEQ ID NO: 315129
  Synthetic oligonucleotide

SEQ ID NO: 542012 - DNA, 60 bp, Artificial; identical to SEQ ID NO: 315130
  Synthetic oligonucleotide

SEQ ID NO: 542013 - DNA, 55 bp, Artificial; identical to SEQ ID NO: 315132
  Synthetic oligonucleotide

SEQ ID NO: 542014 - DNA, 56 bp, Artificial; identical to SEQ ID NO: 315133
  Synthetic oligonucleotide

SEQ ID NO: 542015 - DNA, 55 bp, Artificial; identical to SEQ ID NO: 315135
  Synthetic oligonucleotide

SEQ ID NO: 542016 - DNA, 52 bp, Artificial; identical to SEQ ID NO: 315136
  Synthetic oligonucleotide

SEQ ID NO: 542017 - DNA, 57 bp, Artificial; identical to SEQ ID NO: 315137
  Synthetic oligonucleotide

SEQ ID NO: 542018 - DNA, 58 bp, Artificial; identical to SEQ ID NO: 315141
  Synthetic oligonucleotide

SEQ ID NO: 542019 - DNA, 56 bp, Artificial; identical to SEQ ID NO: 315142
  Synthetic oligonucleotide

SEQ ID NO: 542020 - DNA, 60 bp, Artificial; identical to SEQ ID NO: 315143
  Synthetic oligonucleotide

SEQ ID NO: 542021 - DNA, 57 bp, Artificial; identical to SEQ ID NO: 315146
  Synthetic oligonucleotide

SEQ ID NO: 542022 - DNA, 50 bp, Artificial; identical to SEQ ID NO: 315155
  Synthetic oligonucleotide

SEQ ID NO: 542023 - DNA, 60 bp, Artificial; identical to SEQ ID NO: 315156
  Synthetic oligonucleotide

SEQ ID NO: 542024 - DNA, 57 bp, Artificial; identical to SEQ ID NO: 315157
  Synthetic oligonucleotide

SEQ ID NO: 542025 - DNA, 57 bp, Artificial; identical to SEQ ID NO: 315158
  Synthetic oligonucleotide

SEQ ID NO: 542026 - DNA, 59 bp, Artificial; identical to SEQ ID NO: 315160
  Synthetic oligonucleotide

SEQ ID NO: 542027 - DNA, 50 bp, Artificial; identical to SEQ ID NO: 315164
  Synthetic oligonucleotide

SEQ ID NO: 542028 - DNA, 59 bp, Artificial; identical to SEQ ID NO: 315171
  Synthetic oligonucleotide

SEQ ID NO: 542029 - DNA, 54 bp, Artificial; identical to SEQ ID NO: 315173
  Synthetic oligonucleotide

SEQ ID NO: 542030 - DNA, 59 bp, Artificial; identical to SEQ ID NO: 315177
  Synthetic oligonucleotide

SEQ ID NO: 542031 - DNA, 59 bp, Artificial; identical to SEQ ID NO: 315178
  Synthetic oligonucleotide

SEQ ID NO: 542032 - DNA, 60 bp, Artificial; identical to SEQ ID NO: 315182
  Synthetic oligonucleotide

SEQ ID NO: 542033 - DNA, 57 bp, Artificial; identical to SEQ ID NO: 315183
  Synthetic oligonucleotide

SEQ ID NO: 542034 - DNA, 52 bp, Artificial; identical to SEQ ID NO: 315185
  Synthetic oligonucleotide

SEQ ID NO: 542035 - DNA, 55 bp, Artificial; identical to SEQ ID NO: 315188
  Synthetic oligonucleotide

SEQ ID NO: 542036 - DNA, 59 bp, Artificial; identical to SEQ ID NO: 315189
  Synthetic oligonucleotide

SEQ ID NO: 542037 - DNA, 55 bp, Artificial; identical to SEQ ID NO: 315191
  Synthetic oligonucleotide

SEQ ID NO: 542038 - DNA, 54 bp, Artificial; identical to SEQ ID NO: 315193
  Synthetic oligonucleotide

SEQ ID NO: 542039 - DNA, 56 bp, Artificial; identical to SEQ ID NO: 315194
  Synthetic oligonucleotide

SEQ ID NO: 542040 - DNA, 60 bp, Artificial; identical to SEQ ID NO: 315196
  Synthetic oligonucleotide

SEQ ID NO: 542041 - DNA, 53 bp, Artificial; identical to SEQ ID NO: 315200
  Synthetic oligonucleotide

SEQ ID NO: 542042 - DNA, 59 bp, Artificial; identical to SEQ ID NO: 315203
  Synthetic oligonucleotide

SEQ ID NO: 542043 - DNA, 60 bp, Artificial; identical to SEQ ID NO: 315204
  Synthetic oligonucleotide

SEQ ID NO: 542044 - DNA, 50 bp, Artificial; identical to SEQ ID NO: 315208
  Synthetic oligonucleotide

SEQ ID NO: 542045 - DNA, 56 bp, Artificial; identical to SEQ ID NO: 315211
  Synthetic oligonucleotide

SEQ ID NO: 542046 - DNA, 60 bp, Artificial; identical to SEQ ID NO: 315214
  Synthetic oligonucleotide

SEQ ID NO: 542047 - DNA, 54 bp, Artificial; identical to SEQ ID NO: 315215
  Synthetic oligonucleotide

SEQ ID NO: 542048 - DNA, 55 bp, Artificial; identical to SEQ ID NO: 315216
  Synthetic oligonucleotide

SEQ ID NO: 542049 - DNA, 60 bp, Artificial; identical to SEQ ID NO: 315217
  Synthetic oligonucleotide

SEQ ID NO: 542050 - DNA, 60 bp, Artificial; identical to SEQ ID NO: 315219
  Synthetic oligonucleotide

SEQ ID NO: 542051 - DNA, 55 bp, Artificial; identical to SEQ ID NO: 315221
  Synthetic oligonucleotide

SEQ ID NO: 542052 - DNA, 60 bp, Artificial; identical to SEQ ID NO: 315223
  Synthetic oligonucleotide

SEQ ID NO: 542053 - DNA, 58 bp, Artificial; identical to SEQ ID NO: 14439
  Synthetic oligonucleotide

SEQ ID NO: 542054 - DNA, 60 bp, Artificial; identical to SEQ ID NO: 13670
  Synthetic oligonucleotide

SEQ ID NO: 542055 - DNA, 58 bp, Artificial; identical to SEQ ID NO: 315224
  Synthetic oligonucleotide

SEQ ID NO: 542056 - DNA, 57 bp, Artificial; identical to SEQ ID NO: 315225
  Synthetic oligonucleotide

SEQ ID NO: 542057 - DNA, 56 bp, Artificial; identical to SEQ ID NO: 315236
  Synthetic oligonucleotide

SEQ ID NO: 542058 - DNA, 51 bp, Artificial; identical to SEQ ID NO: 315241
  Synthetic oligonucleotide

SEQ ID NO: 542059 - DNA, 53 bp, Artificial; identical to SEQ ID NO: 315246
  Synthetic oligonucleotide

SEQ ID NO: 542060 - DNA, 60 bp, Artificial; identical to SEQ ID NO: 315249
  Synthetic oligonucleotide

SEQ ID NO: 542061 - DNA, 52 bp, Artificial; identical to SEQ ID NO: 315253
  Synthetic oligonucleotide

SEQ ID NO: 542062 - DNA, 57 bp, Artificial; identical to SEQ ID NO: 315254
  Synthetic oligonucleotide

SEQ ID NO: 542063 - DNA, 58 bp, Artificial; identical to SEQ ID NO: 315255
  Synthetic oligonucleotide

SEQ ID NO: 542064 - DNA, 56 bp, Artificial; identical to SEQ ID NO: 315256
  Synthetic oligonucleotide

SEQ ID NO: 542065 - DNA, 53 bp, Artificial; identical to SEQ ID NO: 315260
  Synthetic oligonucleotide

SEQ ID NO: 542066 - DNA, 55 bp, Artificial; identical to SEQ ID NO: 315261
  Synthetic oligonucleotide

SEQ ID NO: 542067 - DNA, 54 bp, Artificial; identical to SEQ ID NO: 315262
  Synthetic oligonucleotide

SEQ ID NO: 542068 - DNA, 54 bp, Artificial; identical to SEQ ID NO: 315265
  Synthetic oligonucleotide

SEQ ID NO: 542069 - DNA, 54 bp, Artificial; identical to SEQ ID NO: 315267
  Synthetic oligonucleotide

SEQ ID NO: 542070 - DNA, 58 bp, Artificial; identical to SEQ ID NO: 315269
  Synthetic oligonucleotide

SEQ ID NO: 542071 - DNA, 60 bp, Artificial; identical to SEQ ID NO: 315271
  Synthetic oligonucleotide

SEQ ID NO: 542072 - DNA, 58 bp, Artificial; identical to SEQ ID NO: 315274
  Synthetic oligonucleotide

SEQ ID NO: 542073 - DNA, 55 bp, Artificial; identical to SEQ ID NO: 315280
  Synthetic oligonucleotide

SEQ ID NO: 542074 - DNA, 60 bp, Artificial; identical to SEQ ID NO: 315284
  Synthetic oligonucleotide

SEQ ID NO: 542075 - DNA, 51 bp, Artificial; identical to SEQ ID NO: 315286
  Synthetic oligonucleotide

SEQ ID NO: 542076 - DNA, 52 bp, Artificial; identical to SEQ ID NO: 315288
  Synthetic oligonucleotide

SEQ ID NO: 542077 - DNA, 55 bp, Artificial; identical to SEQ ID NO: 315292
  Synthetic oligonucleotide

SEQ ID NO: 542078 - DNA, 51 bp, Artificial; identical to SEQ ID NO: 315293
  Synthetic oligonucleotide

SEQ ID NO: 542079 - DNA, 60 bp, Artificial; identical to SEQ ID NO: 315294
  Synthetic oligonucleotide

SEQ ID NO: 542080 - DNA, 53 bp, Artificial; identical to SEQ ID NO: 315295
  Synthetic oligonucleotide

SEQ ID NO: 542081 - DNA, 58 bp, Artificial; identical to SEQ ID NO: 315296
  Synthetic oligonucleotide

SEQ ID NO: 542082 - DNA, 53 bp, Artificial; identical to SEQ ID NO: 315297
  Synthetic oligonucleotide

SEQ ID NO: 542083 - DNA, 54 bp, Artificial; identical to SEQ ID NO: 315298
  Synthetic oligonucleotide

SEQ ID NO: 542084 - DNA, 56 bp, Artificial; identical to SEQ ID NO: 315300
  Synthetic oligonucleotide

SEQ ID NO: 542085 - DNA, 53 bp, Artificial; identical to SEQ ID NO: 315302
  Synthetic oligonucleotide

SEQ ID NO: 542086 - DNA, 60 bp, Artificial; identical to SEQ ID NO: 5906
  Synthetic oligonucleotide

SEQ ID NO: 542087 - DNA, 54 bp, Artificial; identical to SEQ ID NO: 315311
  Synthetic oligonucleotide

SEQ ID NO: 542088 - DNA, 55 bp, Artificial; identical to SEQ ID NO: 315312
  Synthetic oligonucleotide

SEQ ID NO: 542089 - DNA, 60 bp, Artificial; identical to SEQ ID NO: 315313
  Synthetic oligonucleotide

SEQ ID NO: 542090 - DNA, 56 bp, Artificial; identical to SEQ ID NO: 315317
  Synthetic oligonucleotide

SEQ ID NO: 542091 - DNA, 51 bp, Artificial; identical to SEQ ID NO: 315319
  Synthetic oligonucleotide

SEQ ID NO: 542092 - DNA, 58 bp, Artificial; identical to SEQ ID NO: 315320
  Synthetic oligonucleotide

SEQ ID NO: 542093 - DNA, 60 bp, Artificial; identical to SEQ ID NO: 315321
  Synthetic oligonucleotide

SEQ ID NO: 542094 - DNA, 55 bp, Artificial; identical to SEQ ID NO: 315325
  Synthetic oligonucleotide

SEQ ID NO: 542095 - DNA, 60 bp, Artificial; identical to SEQ ID NO: 315326
  Synthetic oligonucleotide

SEQ ID NO: 542096 - DNA, 53 bp, Artificial; identical to SEQ ID NO: 315332
  Synthetic oligonucleotide

SEQ ID NO: 542097 - DNA, 60 bp, Artificial; identical to SEQ ID NO: 315334
  Synthetic oligonucleotide

SEQ ID NO: 542098 - DNA, 58 bp, Artificial; identical to SEQ ID NO: 315335
  Synthetic oligonucleotide

SEQ ID NO: 542099 - DNA, 60 bp, Artificial; identical to SEQ ID NO: 315336
  Synthetic oligonucleotide

SEQ ID NO: 542100 - DNA, 54 bp, Artificial; identical to SEQ ID NO: 315341
  Synthetic oligonucleotide

SEQ ID NO: 542101 - DNA, 57 bp, Artificial; identical to SEQ ID NO: 315345
  Synthetic oligonucleotide

SEQ ID NO: 542102 - DNA, 53 bp, Artificial; identical to SEQ ID NO: 315349
  Synthetic oligonucleotide

SEQ ID NO: 542103 - DNA, 53 bp, Artificial; identical to SEQ ID NO: 315350
  Synthetic oligonucleotide

SEQ ID NO: 542104 - DNA, 59 bp, Artificial; identical to SEQ ID NO: 315359
  Synthetic oligonucleotide

SEQ ID NO: 542105 - DNA, 55 bp, Artificial; identical to SEQ ID NO: 315360
  Synthetic oligonucleotide

SEQ ID NO: 542106 - DNA, 55 bp, Artificial; identical to SEQ ID NO: 315362
  Synthetic oligonucleotide

SEQ ID NO: 542107 - DNA, 57 bp, Artificial; identical to SEQ ID NO: 315363
  Synthetic oligonucleotide

SEQ ID NO: 542108 - DNA, 55 bp, Artificial; identical to SEQ ID NO: 315364
  Synthetic oligonucleotide

SEQ ID NO: 542109 - DNA, 56 bp, Artificial; identical to SEQ ID NO: 315365
  Synthetic oligonucleotide

SEQ ID NO: 542110 - DNA, 60 bp, Artificial; identical to SEQ ID NO: 315366
  Synthetic oligonucleotide

SEQ ID NO: 542111 - DNA, 57 bp, Artificial; identical to SEQ ID NO: 315374
  Synthetic oligonucleotide

SEQ ID NO: 542112 - DNA, 56 bp, Artificial; identical to SEQ ID NO: 315375
  Synthetic oligonucleotide

SEQ ID NO: 542113 - DNA, 55 bp, Artificial; identical to SEQ ID NO: 315380
  Synthetic oligonucleotide

SEQ ID NO: 542114 - DNA, 51 bp, Artificial; identical to SEQ ID NO: 315381
  Synthetic oligonucleotide

SEQ ID NO: 542115 - DNA, 55 bp, Artificial; identical to SEQ ID NO: 315383
  Synthetic oligonucleotide

SEQ ID NO: 542116 - DNA, 52 bp, Artificial; identical to SEQ ID NO: 315384
  Synthetic oligonucleotide

SEQ ID NO: 542117 - DNA, 53 bp, Artificial; identical to SEQ ID NO: 315385
  Synthetic oligonucleotide

SEQ ID NO: 542118 - DNA, 59 bp, Artificial; identical to SEQ ID NO: 315386
  Synthetic oligonucleotide

SEQ ID NO: 542119 - DNA, 55 bp, Artificial; identical to SEQ ID NO: 315388
  Synthetic oligonucleotide

SEQ ID NO: 542120 - DNA, 55 bp, Artificial; identical to SEQ ID NO: 315389
  Synthetic oligonucleotide

SEQ ID NO: 542121 - DNA, 57 bp, Artificial; identical to SEQ ID NO: 315390
  Synthetic oligonucleotide

SEQ ID NO: 542122 - DNA, 57 bp, Artificial; identical to SEQ ID NO: 315391
  Synthetic oligonucleotide

SEQ ID NO: 542123 - DNA, 55 bp, Artificial; identical to SEQ ID NO: 315392
  Synthetic oligonucleotide

SEQ ID NO: 542124 - DNA, 60 bp, Artificial; identical to SEQ ID NO: 315393
  Synthetic oligonucleotide

SEQ ID NO: 542125 - DNA, 54 bp, Artificial; identical to SEQ ID NO: 315394
  Synthetic oligonucleotide

SEQ ID NO: 542126 - DNA, 60 bp, Artificial; identical to SEQ ID NO: 315396
  Synthetic oligonucleotide

SEQ ID NO: 542127 - DNA, 51 bp, Artificial; identical to SEQ ID NO: 315397
  Synthetic oligonucleotide

SEQ ID NO: 542128 - DNA, 55 bp, Artificial; identical to SEQ ID NO: 315398
  Synthetic oligonucleotide

SEQ ID NO: 542129 - DNA, 55 bp, Artificial; identical to SEQ ID NO: 315399
  Synthetic oligonucleotide

SEQ ID NO: 542130 - DNA, 60 bp, Artificial; identical to SEQ ID NO: 8381
  Synthetic oligonucleotide

SEQ ID NO: 542131 - DNA, 58 bp, Artificial; identical to SEQ ID NO: 315409
  Synthetic oligonucleotide

SEQ ID NO: 542132 - DNA, 56 bp, Artificial; identical to SEQ ID NO: 315413
  Synthetic oligonucleotide

SEQ ID NO: 542133 - DNA, 56 bp, Artificial; identical to SEQ ID NO: 315414
  Synthetic oligonucleotide

SEQ ID NO: 542134 - DNA, 56 bp, Artificial; identical to SEQ ID NO: 315415
  Synthetic oligonucleotide

SEQ ID NO: 542135 - DNA, 60 bp, Artificial; identical to SEQ ID NO: 315418
  Synthetic oligonucleotide

SEQ ID NO: 542136 - DNA, 58 bp, Artificial; identical to SEQ ID NO: 315419
  Synthetic oligonucleotide

SEQ ID NO: 542137 - DNA, 55 bp, Artificial; identical to SEQ ID NO: 315422
  Synthetic oligonucleotide

SEQ ID NO: 542138 - DNA, 60 bp, Artificial; identical to SEQ ID NO: 315424
  Synthetic oligonucleotide

SEQ ID NO: 542139 - DNA, 59 bp, Artificial; identical to SEQ ID NO: 315425
  Synthetic oligonucleotide

SEQ ID NO: 542140 - DNA, 54 bp, Artificial; identical to SEQ ID NO: 315429
  Synthetic oligonucleotide

SEQ ID NO: 542141 - DNA, 59 bp, Artificial; identical to SEQ ID NO: 315430
  Synthetic oligonucleotide

SEQ ID NO: 542142 - DNA, 59 bp, Artificial; identical to SEQ ID NO: 315435
  Synthetic oligonucleotide

SEQ ID NO: 542143 - DNA, 60 bp, Artificial; identical to SEQ ID NO: 315440
  Synthetic oligonucleotide

SEQ ID NO: 542144 - DNA, 55 bp, Artificial; identical to SEQ ID NO: 315441
  Synthetic oligonucleotide

SEQ ID NO: 542145 - DNA, 58 bp, Artificial; identical to SEQ ID NO: 16510
  Synthetic oligonucleotide

SEQ ID NO: 542146 - DNA, 56 bp, Artificial; identical to SEQ ID NO: 315447
  Synthetic oligonucleotide

SEQ ID NO: 542147 - DNA, 60 bp, Artificial; identical to SEQ ID NO: 315448
  Synthetic oligonucleotide

SEQ ID NO: 542148 - DNA, 60 bp, Artificial; identical to SEQ ID NO: 315451
  Synthetic oligonucleotide

SEQ ID NO: 542149 - DNA, 60 bp, Artificial; identical to SEQ ID NO: 315455
  Synthetic oligonucleotide

SEQ ID NO: 542150 - DNA, 52 bp, Artificial; identical to SEQ ID NO: 315456
  Synthetic oligonucleotide

SEQ ID NO: 542151 - DNA, 53 bp, Artificial; identical to SEQ ID NO: 315462
  Synthetic oligonucleotide

SEQ ID NO: 542152 - DNA, 58 bp, Artificial; identical to SEQ ID NO: 315463
  Synthetic oligonucleotide

SEQ ID NO: 542153 - DNA, 52 bp, Artificial; identical to SEQ ID NO: 315467
  Synthetic oligonucleotide

SEQ ID NO: 542154 - DNA, 55 bp, Artificial; identical to SEQ ID NO: 315468
  Synthetic oligonucleotide

SEQ ID NO: 542155 - DNA, 54 bp, Artificial; identical to SEQ ID NO: 19303
  Synthetic oligonucleotide

SEQ ID NO: 542156 - DNA, 56 bp, Artificial; identical to SEQ ID NO: 315473
  Synthetic oligonucleotide

SEQ ID NO: 542157 - DNA, 56 bp, Artificial; identical to SEQ ID NO: 315475
  Synthetic oligonucleotide

SEQ ID NO: 542158 - DNA, 59 bp, Artificial; identical to SEQ ID NO: 315480
  Synthetic oligonucleotide

SEQ ID NO: 542159 - DNA, 53 bp, Artificial; identical to SEQ ID NO: 315481
  Synthetic oligonucleotide

SEQ ID NO: 542160 - DNA, 52 bp, Artificial; identical to SEQ ID NO: 315484
  Synthetic oligonucleotide

SEQ ID NO: 542161 - DNA, 54 bp, Artificial; identical to SEQ ID NO: 315488
  Synthetic oligonucleotide

SEQ ID NO: 542162 - DNA, 56 bp, Artificial; identical to SEQ ID NO: 315492
  Synthetic oligonucleotide

SEQ ID NO: 542163 - DNA, 52 bp, Artificial; identical to SEQ ID NO: 315499
  Synthetic oligonucleotide

SEQ ID NO: 542164 - DNA, 55 bp, Artificial; identical to SEQ ID NO: 315500
  Synthetic oligonucleotide

SEQ ID NO: 542165 - DNA, 51 bp, Artificial; identical to SEQ ID NO: 315501
  Synthetic oligonucleotide

SEQ ID NO: 542166 - DNA, 55 bp, Artificial; identical to SEQ ID NO: 315506
  Synthetic oligonucleotide

SEQ ID NO: 542167 - DNA, 51 bp, Artificial; identical to SEQ ID NO: 12346
  Synthetic oligonucleotide

SEQ ID NO: 542168 - DNA, 60 bp, Artificial; identical to SEQ ID NO: 315516
  Synthetic oligonucleotide

SEQ ID NO: 542169 - DNA, 60 bp, Artificial; identical to SEQ ID NO: 315517
  Synthetic oligonucleotide

SEQ ID NO: 542170 - DNA, 59 bp, Artificial; identical to SEQ ID NO: 315518
  Synthetic oligonucleotide

SEQ ID NO: 542171 - DNA, 57 bp, Artificial; identical to SEQ ID NO: 315521
  Synthetic oligonucleotide

SEQ ID NO: 542172 - DNA, 60 bp, Artificial; identical to SEQ ID NO: 315525
  Synthetic oligonucleotide

SEQ ID NO: 542173 - DNA, 55 bp, Artificial; identical to SEQ ID NO: 315526
  Synthetic oligonucleotide

SEQ ID NO: 542174 - DNA, 58 bp, Artificial; identical to SEQ ID NO: 18516
  Synthetic oligonucleotide

SEQ ID NO: 542175 - DNA, 58 bp, Artificial; identical to SEQ ID NO: 315528
  Synthetic oligonucleotide

SEQ ID NO: 542176 - DNA, 55 bp, Artificial; identical to SEQ ID NO: 315529
  Synthetic oligonucleotide

SEQ ID NO: 542177 - DNA, 55 bp, Artificial; identical to SEQ ID NO: 315533
  Synthetic oligonucleotide

SEQ ID NO: 542178 - DNA, 57 bp, Artificial; identical to SEQ ID NO: 315539
  Synthetic oligonucleotide

SEQ ID NO: 542179 - DNA, 55 bp, Artificial; identical to SEQ ID NO: 10412
  Synthetic oligonucleotide

SEQ ID NO: 542180 - DNA, 55 bp, Artificial; identical to SEQ ID NO: 315546
  Synthetic oligonucleotide

SEQ ID NO: 542181 - DNA, 57 bp, Artificial; identical to SEQ ID NO: 315549
  Synthetic oligonucleotide

SEQ ID NO: 542182 - DNA, 57 bp, Artificial; identical to SEQ ID NO: 315550
  Synthetic oligonucleotide

SEQ ID NO: 542183 - DNA, 60 bp, Artificial; identical to SEQ ID NO: 315551
  Synthetic oligonucleotide

SEQ ID NO: 542184 - DNA, 55 bp, Artificial; identical to SEQ ID NO: 315552
  Synthetic oligonucleotide

SEQ ID NO: 542185 - DNA, 57 bp, Artificial; identical to SEQ ID NO: 20275
  Synthetic oligonucleotide

SEQ ID NO: 542186 - DNA, 53 bp, Artificial; identical to SEQ ID NO: 315558
  Synthetic oligonucleotide

SEQ ID NO: 542187 - DNA, 58 bp, Artificial; identical to SEQ ID NO: 19405
  Synthetic oligonucleotide

SEQ ID NO: 542188 - DNA, 60 bp, Artificial; identical to SEQ ID NO: 315560
  Synthetic oligonucleotide

SEQ ID NO: 542189 - DNA, 58 bp, Artificial; identical to SEQ ID NO: 315563
  Synthetic oligonucleotide

SEQ ID NO: 542190 - DNA, 60 bp, Artificial; identical to SEQ ID NO: 315565
  Synthetic oligonucleotide

SEQ ID NO: 542191 - DNA, 51 bp, Artificial; identical to SEQ ID NO: 315567
  Synthetic oligonucleotide

SEQ ID NO: 542192 - DNA, 55 bp, Artificial; identical to SEQ ID NO: 315575
  Synthetic oligonucleotide

SEQ ID NO: 542193 - DNA, 53 bp, Artificial; identical to SEQ ID NO: 315576
  Synthetic oligonucleotide

SEQ ID NO: 542194 - DNA, 56 bp, Artificial; identical to SEQ ID NO: 315580
  Synthetic oligonucleotide

SEQ ID NO: 542195 - DNA, 50 bp, Artificial; identical to SEQ ID NO: 315584
  Synthetic oligonucleotide

SEQ ID NO: 542196 - DNA, 55 bp, Artificial; identical to SEQ ID NO: 315590
  Synthetic oligonucleotide

SEQ ID NO: 542197 - DNA, 56 bp, Artificial; identical to SEQ ID NO: 315592
  Synthetic oligonucleotide

SEQ ID NO: 542198 - DNA, 57 bp, Artificial; identical to SEQ ID NO: 315593
  Synthetic oligonucleotide

SEQ ID NO: 542199 - DNA, 53 bp, Artificial; identical to SEQ ID NO: 315594
  Synthetic oligonucleotide

SEQ ID NO: 542200 - DNA, 60 bp, Artificial; identical to SEQ ID NO: 315597
  Synthetic oligonucleotide

SEQ ID NO: 542201 - DNA, 55 bp, Artificial; identical to SEQ ID NO: 315598
  Synthetic oligonucleotide

SEQ ID NO: 542202 - DNA, 55 bp, Artificial; identical to SEQ ID NO: 315600
  Synthetic oligonucleotide

SEQ ID NO: 542203 - DNA, 58 bp, Artificial; identical to SEQ ID NO: 315601
  Synthetic oligonucleotide

SEQ ID NO: 542204 - DNA, 59 bp, Artificial; identical to SEQ ID NO: 315603
  Synthetic oligonucleotide

SEQ ID NO: 542205 - DNA, 54 bp, Artificial; identical to SEQ ID NO: 315606
  Synthetic oligonucleotide

SEQ ID NO: 542206 - DNA, 55 bp, Artificial; identical to SEQ ID NO: 315610
  Synthetic oligonucleotide

SEQ ID NO: 542207 - DNA, 59 bp, Artificial; identical to SEQ ID NO: 16816
  Synthetic oligonucleotide

SEQ ID NO: 542208 - DNA, 56 bp, Artificial; identical to SEQ ID NO: 315612
  Synthetic oligonucleotide

SEQ ID NO: 542209 - DNA, 51 bp, Artificial; identical to SEQ ID NO: 315614
  Synthetic oligonucleotide

SEQ ID NO: 542210 - DNA, 55 bp, Artificial; identical to SEQ ID NO: 315615
  Synthetic oligonucleotide

SEQ ID NO: 542211 - DNA, 52 bp, Artificial; identical to SEQ ID NO: 315617
  Synthetic oligonucleotide

SEQ ID NO: 542212 - DNA, 54 bp, Artificial; identical to SEQ ID NO: 19387
  Synthetic oligonucleotide

SEQ ID NO: 542213 - DNA, 52 bp, Artificial; identical to SEQ ID NO: 315618
  Synthetic oligonucleotide

SEQ ID NO: 542214 - DNA, 58 bp, Artificial; identical to SEQ ID NO: 315621
  Synthetic oligonucleotide

SEQ ID NO: 542215 - DNA, 54 bp, Artificial; identical to SEQ ID NO: 315622
  Synthetic oligonucleotide

SEQ ID NO: 542216 - DNA, 55 bp, Artificial; identical to SEQ ID NO: 315627
  Synthetic oligonucleotide

SEQ ID NO: 542217 - DNA, 55 bp, Artificial; identical to SEQ ID NO: 315630
  Synthetic oligonucleotide

SEQ ID NO: 542218 - DNA, 60 bp, Artificial; identical to SEQ ID NO: 315631
  Synthetic oligonucleotide

SEQ ID NO: 542219 - DNA, 56 bp, Artificial; identical to SEQ ID NO: 315632
  Synthetic oligonucleotide

SEQ ID NO: 542220 - DNA, 52 bp, Artificial; identical to SEQ ID NO: 315634
  Synthetic oligonucleotide

SEQ ID NO: 542221 - DNA, 55 bp, Artificial; identical to SEQ ID NO: 15976
  Synthetic oligonucleotide

SEQ ID NO: 542222 - DNA, 55 bp, Artificial; identical to SEQ ID NO: 315641
  Synthetic oligonucleotide

SEQ ID NO: 542223 - DNA, 53 bp, Artificial; identical to SEQ ID NO: 315642
  Synthetic oligonucleotide

SEQ ID NO: 542224 - DNA, 56 bp, Artificial; identical to SEQ ID NO: 315643
  Synthetic oligonucleotide

SEQ ID NO: 542225 - DNA, 55 bp, Artificial; identical to SEQ ID NO: 315644
  Synthetic oligonucleotide

SEQ ID NO: 542226 - DNA, 60 bp, Artificial; identical to SEQ ID NO: 315647
  Synthetic oligonucleotide

SEQ ID NO: 542227 - DNA, 55 bp, Artificial; identical to SEQ ID NO: 315650
  Synthetic oligonucleotide

SEQ ID NO: 542228 - DNA, 60 bp, Artificial; identical to SEQ ID NO: 315653
  Synthetic oligonucleotide

SEQ ID NO: 542229 - DNA, 55 bp, Artificial; identical to SEQ ID NO: 315654
  Synthetic oligonucleotide

SEQ ID NO: 542230 - DNA, 55 bp, Artificial; identical to SEQ ID NO: 19001
  Synthetic oligonucleotide

SEQ ID NO: 542231 - DNA, 59 bp, Artificial; identical to SEQ ID NO: 315668
  Synthetic oligonucleotide

SEQ ID NO: 542232 - DNA, 56 bp, Artificial; identical to SEQ ID NO: 315669
  Synthetic oligonucleotide

SEQ ID NO: 542233 - DNA, 54 bp, Artificial; identical to SEQ ID NO: 315671
  Synthetic oligonucleotide

SEQ ID NO: 542234 - DNA, 57 bp, Artificial; identical to SEQ ID NO: 315675
  Synthetic oligonucleotide

SEQ ID NO: 542235 - DNA, 55 bp, Artificial; identical to SEQ ID NO: 20586
  Synthetic oligonucleotide

SEQ ID NO: 542236 - DNA, 58 bp, Artificial; identical to SEQ ID NO: 315676
  Synthetic oligonucleotide

SEQ ID NO: 542237 - DNA, 54 bp, Artificial; identical to SEQ ID NO: 315680
  Synthetic oligonucleotide

SEQ ID NO: 542238 - DNA, 55 bp, Artificial; identical to SEQ ID NO: 315685
  Synthetic oligonucleotide

SEQ ID NO: 542239 - DNA, 55 bp, Artificial; identical to SEQ ID NO: 5738
  Synthetic oligonucleotide

SEQ ID NO: 542240 - DNA, 53 bp, Artificial; identical to SEQ ID NO: 315690
  Synthetic oligonucleotide

SEQ ID NO: 542241 - DNA, 60 bp, Artificial; identical to SEQ ID NO: 315696
  Synthetic oligonucleotide

SEQ ID NO: 542242 - DNA, 60 bp, Artificial; identical to SEQ ID NO: 315698
  Synthetic oligonucleotide

SEQ ID NO: 542243 - DNA, 60 bp, Artificial; identical to SEQ ID NO: 315699
  Synthetic oligonucleotide

SEQ ID NO: 542244 - DNA, 59 bp, Artificial; identical to SEQ ID NO: 315701
  Synthetic oligonucleotide

SEQ ID NO: 542245 - DNA, 58 bp, Artificial; identical to SEQ ID NO: 315702
  Synthetic oligonucleotide

SEQ ID NO: 542246 - DNA, 59 bp, Artificial; identical to SEQ ID NO: 315703
  Synthetic oligonucleotide

SEQ ID NO: 542247 - DNA, 60 bp, Artificial; identical to SEQ ID NO: 315707
  Synthetic oligonucleotide

SEQ ID NO: 542248 - DNA, 58 bp, Artificial; identical to SEQ ID NO: 315708
  Synthetic oligonucleotide

SEQ ID NO: 542249 - DNA, 58 bp, Artificial; identical to SEQ ID NO: 315712
  Synthetic oligonucleotide

SEQ ID NO: 542250 - DNA, 58 bp, Artificial; identical to SEQ ID NO: 315713
  Synthetic oligonucleotide

SEQ ID NO: 542251 - DNA, 57 bp, Artificial; identical to SEQ ID NO: 315716
  Synthetic oligonucleotide

SEQ ID NO: 542252 - DNA, 53 bp, Artificial; identical to SEQ ID NO: 315719
  Synthetic oligonucleotide

SEQ ID NO: 542253 - DNA, 57 bp, Artificial; identical to SEQ ID NO: 315721
  Synthetic oligonucleotide

SEQ ID NO: 542254 - DNA, 60 bp, Artificial; identical to SEQ ID NO: 315723
  Synthetic oligonucleotide

SEQ ID NO: 542255 - DNA, 51 bp, Artificial; identical to SEQ ID NO: 11376
  Synthetic oligonucleotide

SEQ ID NO: 542256 - DNA, 54 bp, Artificial; identical to SEQ ID NO: 315727
  Synthetic oligonucleotide

SEQ ID NO: 542257 - DNA, 50 bp, Artificial; identical to SEQ ID NO: 315728
  Synthetic oligonucleotide

SEQ ID NO: 542258 - DNA, 51 bp, Artificial; identical to SEQ ID NO: 315729
  Synthetic oligonucleotide

SEQ ID NO: 542259 - DNA, 53 bp, Artificial; identical to SEQ ID NO: 315731
  Synthetic oligonucleotide

SEQ ID NO: 542260 - DNA, 56 bp, Artificial; identical to SEQ ID NO: 315732
  Synthetic oligonucleotide

SEQ ID NO: 542261 - DNA, 60 bp, Artificial; identical to SEQ ID NO: 315734
  Synthetic oligonucleotide

SEQ ID NO: 542262 - DNA, 59 bp, Artificial; identical to SEQ ID NO: 315736
  Synthetic oligonucleotide

SEQ ID NO: 542263 - DNA, 54 bp, Artificial; identical to SEQ ID NO: 315738
  Synthetic oligonucleotide

SEQ ID NO: 542264 - DNA, 55 bp, Artificial; identical to SEQ ID NO: 315739
  Synthetic oligonucleotide

SEQ ID NO: 542265 - DNA, 52 bp, Artificial; identical to SEQ ID NO: 315740
  Synthetic oligonucleotide

SEQ ID NO: 542266 - DNA, 57 bp, Artificial; identical to SEQ ID NO: 315742
  Synthetic oligonucleotide

SEQ ID NO: 542267 - DNA, 52 bp, Artificial; identical to SEQ ID NO: 315744
  Synthetic oligonucleotide

SEQ ID NO: 542268 - DNA, 55 bp, Artificial; identical to SEQ ID NO: 315745
  Synthetic oligonucleotide

SEQ ID NO: 542269 - DNA, 56 bp, Artificial; identical to SEQ ID NO: 315746
  Synthetic oligonucleotide

SEQ ID NO: 542270 - DNA, 50 bp, Artificial; identical to SEQ ID NO: 315747
  Synthetic oligonucleotide

SEQ ID NO: 542271 - DNA, 59 bp, Artificial; identical to SEQ ID NO: 315749
  Synthetic oligonucleotide

SEQ ID NO: 542272 - DNA, 53 bp, Artificial; identical to SEQ ID NO: 315751
  Synthetic oligonucleotide

SEQ ID NO: 542273 - DNA, 57 bp, Artificial; identical to SEQ ID NO: 315752
  Synthetic oligonucleotide

SEQ ID NO: 542274 - DNA, 55 bp, Artificial; identical to SEQ ID NO: 315753
  Synthetic oligonucleotide

SEQ ID NO: 542275 - DNA, 58 bp, Artificial; identical to SEQ ID NO: 18328
  Synthetic oligonucleotide

SEQ ID NO: 542276 - DNA, 60 bp, Artificial; identical to SEQ ID NO: 315754
  Synthetic oligonucleotide

SEQ ID NO: 542277 - DNA, 60 bp, Artificial; identical to SEQ ID NO: 315755
  Synthetic oligonucleotide

SEQ ID NO: 542278 - DNA, 60 bp, Artificial; identical to SEQ ID NO: 315756
  Synthetic oligonucleotide

SEQ ID NO: 542279 - DNA, 60 bp, Artificial; identical to SEQ ID NO: 315757
  Synthetic oligonucleotide

SEQ ID NO: 542280 - DNA, 55 bp, Artificial; identical to SEQ ID NO: 315758
  Synthetic oligonucleotide

SEQ ID NO: 542281 - DNA, 55 bp, Artificial; identical to SEQ ID NO: 315759
  Synthetic oligonucleotide

SEQ ID NO: 542282 - DNA, 60 bp, Artificial; identical to SEQ ID NO: 315764
  Synthetic oligonucleotide

SEQ ID NO: 542283 - DNA, 60 bp, Artificial; identical to SEQ ID NO: 315765
  Synthetic oligonucleotide

SEQ ID NO: 542284 - DNA, 51 bp, Artificial; identical to SEQ ID NO: 315766
  Synthetic oligonucleotide

SEQ ID NO: 542285 - DNA, 57 bp, Artificial; identical to SEQ ID NO: 315768
  Synthetic oligonucleotide

SEQ ID NO: 542286 - DNA, 60 bp, Artificial; identical to SEQ ID NO: 315770
  Synthetic oligonucleotide

SEQ ID NO: 542287 - DNA, 55 bp, Artificial; identical to SEQ ID NO: 19757
  Synthetic oligonucleotide

SEQ ID NO: 542288 - DNA, 60 bp, Artificial; identical to SEQ ID NO: 315772
  Synthetic oligonucleotide

SEQ ID NO: 542289 - DNA, 51 bp, Artificial; identical to SEQ ID NO: 315773
  Synthetic oligonucleotide

SEQ ID NO: 542290 - DNA, 58 bp, Artificial; identical to SEQ ID NO: 315777
  Synthetic oligonucleotide

SEQ ID NO: 542291 - DNA, 55 bp, Artificial; identical to SEQ ID NO: 315778
  Synthetic oligonucleotide

SEQ ID NO: 542292 - DNA, 55 bp, Artificial; identical to SEQ ID NO: 315780
  Synthetic oligonucleotide

SEQ ID NO: 542293 - DNA, 52 bp, Artificial; identical to SEQ ID NO: 315781
  Synthetic oligonucleotide

SEQ ID NO: 542294 - DNA, 59 bp, Artificial; identical to SEQ ID NO: 315782
  Synthetic oligonucleotide

SEQ ID NO: 542295 - DNA, 55 bp, Artificial; identical to SEQ ID NO: 315784
  Synthetic oligonucleotide

SEQ ID NO: 542296 - DNA, 56 bp, Artificial; identical to SEQ ID NO: 315787
  Synthetic oligonucleotide

SEQ ID NO: 542297 - DNA, 52 bp, Artificial; identical to SEQ ID NO: 315789
  Synthetic oligonucleotide

SEQ ID NO: 542298 - DNA, 59 bp, Artificial; identical to SEQ ID NO: 315790
  Synthetic oligonucleotide

SEQ ID NO: 542299 - DNA, 55 bp, Artificial; identical to SEQ ID NO: 315791
  Synthetic oligonucleotide

SEQ ID NO: 542300 - DNA, 52 bp, Artificial; identical to SEQ ID NO: 315794
  Synthetic oligonucleotide

SEQ ID NO: 542301 - DNA, 60 bp, Artificial; identical to SEQ ID NO: 315796
  Synthetic oligonucleotide

SEQ ID NO: 542302 - DNA, 58 bp, Artificial; identical to SEQ ID NO: 315798
  Synthetic oligonucleotide

SEQ ID NO: 542303 - DNA, 60 bp, Artificial; identical to SEQ ID NO: 315799
  Synthetic oligonucleotide

SEQ ID NO: 542304 - DNA, 55 bp, Artificial; identical to SEQ ID NO: 315800
  Synthetic oligonucleotide

SEQ ID NO: 542305 - DNA, 56 bp, Artificial; identical to SEQ ID NO: 315801
  Synthetic oligonucleotide

SEQ ID NO: 542306 - DNA, 60 bp, Artificial; identical to SEQ ID NO: 315803
  Synthetic oligonucleotide

SEQ ID NO: 542307 - DNA, 57 bp, Artificial; identical to SEQ ID NO: 315804
  Synthetic oligonucleotide

SEQ ID NO: 542308 - DNA, 55 bp, Artificial; identical to SEQ ID NO: 315805
  Synthetic oligonucleotide

SEQ ID NO: 542309 - DNA, 60 bp, Artificial; identical to SEQ ID NO: 6903
  Synthetic oligonucleotide

SEQ ID NO: 542310 - DNA, 60 bp, Artificial; identical to SEQ ID NO: 315809
  Synthetic oligonucleotide

SEQ ID NO: 542311 - DNA, 54 bp, Artificial; identical to SEQ ID NO: 315814
  Synthetic oligonucleotide

SEQ ID NO: 542312 - DNA, 56 bp, Artificial; identical to SEQ ID NO: 18062
  Synthetic oligonucleotide

SEQ ID NO: 542313 - DNA, 60 bp, Artificial; identical to SEQ ID NO: 315817
  Synthetic oligonucleotide

SEQ ID NO: 542314 - DNA, 60 bp, Artificial; identical to SEQ ID NO: 315818
  Synthetic oligonucleotide

SEQ ID NO: 542315 - DNA, 54 bp, Artificial; identical to SEQ ID NO: 315821
  Synthetic oligonucleotide

SEQ ID NO: 542316 - DNA, 58 bp, Artificial; identical to SEQ ID NO: 315822
  Synthetic oligonucleotide

SEQ ID NO: 542317 - DNA, 57 bp, Artificial; identical to SEQ ID NO: 315824
  Synthetic oligonucleotide

SEQ ID NO: 542318 - DNA, 51 bp, Artificial; identical to SEQ ID NO: 315827
  Synthetic oligonucleotide

SEQ ID NO: 542319 - DNA, 56 bp, Artificial; identical to SEQ ID NO: 315832
  Synthetic oligonucleotide

SEQ ID NO: 542320 - DNA, 56 bp, Artificial; identical to SEQ ID NO: 315834
  Synthetic oligonucleotide

SEQ ID NO: 542321 - DNA, 60 bp, Artificial; identical to SEQ ID NO: 315837
  Synthetic oligonucleotide

SEQ ID NO: 542322 - DNA, 54 bp, Artificial; identical to SEQ ID NO: 315838
  Synthetic oligonucleotide

SEQ ID NO: 542323 - DNA, 60 bp, Artificial; identical to SEQ ID NO: 315839
  Synthetic oligonucleotide

SEQ ID NO: 542324 - DNA, 50 bp, Artificial; identical to SEQ ID NO: 315843
  Synthetic oligonucleotide

SEQ ID NO: 542325 - DNA, 55 bp, Artificial; identical to SEQ ID NO: 315844
  Synthetic oligonucleotide

SEQ ID NO: 542326 - DNA, 55 bp, Artificial; identical to SEQ ID NO: 315847
  Synthetic oligonucleotide

SEQ ID NO: 542327 - DNA, 54 bp, Artificial; identical to SEQ ID NO: 315848
  Synthetic oligonucleotide

SEQ ID NO: 542328 - DNA, 60 bp, Artificial; identical to SEQ ID NO: 315849
  Synthetic oligonucleotide

SEQ ID NO: 542329 - DNA, 55 bp, Artificial; identical to SEQ ID NO: 315850
  Synthetic oligonucleotide

SEQ ID NO: 542330 - DNA, 60 bp, Artificial; identical to SEQ ID NO: 315852
  Synthetic oligonucleotide

SEQ ID NO: 542331 - DNA, 56 bp, Artificial; identical to SEQ ID NO: 315853
  Synthetic oligonucleotide

SEQ ID NO: 542332 - DNA, 60 bp, Artificial; identical to SEQ ID NO: 315854
  Synthetic oligonucleotide

SEQ ID NO: 542333 - DNA, 59 bp, Artificial; identical to SEQ ID NO: 315855
  Synthetic oligonucleotide

SEQ ID NO: 542334 - DNA, 60 bp, Artificial; identical to SEQ ID NO: 315856
  Synthetic oligonucleotide

SEQ ID NO: 542335 - DNA, 58 bp, Artificial; identical to SEQ ID NO: 315857
  Synthetic oligonucleotide

SEQ ID NO: 542336 - DNA, 60 bp, Artificial; identical to SEQ ID NO: 315858
  Synthetic oligonucleotide

SEQ ID NO: 542337 - DNA, 60 bp, Artificial; identical to SEQ ID NO: 315862
  Synthetic oligonucleotide

SEQ ID NO: 542338 - DNA, 59 bp, Artificial; identical to SEQ ID NO: 19464
  Synthetic oligonucleotide

SEQ ID NO: 542339 - DNA, 60 bp, Artificial; identical to SEQ ID NO: 315863
  Synthetic oligonucleotide

SEQ ID NO: 542340 - DNA, 50 bp, Artificial; identical to SEQ ID NO: 315866
  Synthetic oligonucleotide

SEQ ID NO: 542341 - DNA, 53 bp, Artificial; identical to SEQ ID NO: 315869
  Synthetic oligonucleotide

SEQ ID NO: 542342 - DNA, 56 bp, Artificial; identical to SEQ ID NO: 315870
  Synthetic oligonucleotide

SEQ ID NO: 542343 - DNA, 59 bp, Artificial; identical to SEQ ID NO: 315871
  Synthetic oligonucleotide

SEQ ID NO: 542344 - DNA, 56 bp, Artificial; identical to SEQ ID NO: 19266
  Synthetic oligonucleotide

SEQ ID NO: 542345 - DNA, 54 bp, Artificial; identical to SEQ ID NO: 315872
  Synthetic oligonucleotide

SEQ ID NO: 542346 - DNA, 54 bp, Artificial; identical to SEQ ID NO: 315873
  Synthetic oligonucleotide

SEQ ID NO: 542347 - DNA, 56 bp, Artificial; identical to SEQ ID NO: 315874
  Synthetic oligonucleotide

SEQ ID NO: 542348 - DNA, 57 bp, Artificial; identical to SEQ ID NO: 18423
  Synthetic oligonucleotide

SEQ ID NO: 542349 - DNA, 55 bp, Artificial; identical to SEQ ID NO: 315877
  Synthetic oligonucleotide

SEQ ID NO: 542350 - DNA, 57 bp, Artificial; identical to SEQ ID NO: 315878
  Synthetic oligonucleotide

SEQ ID NO: 542351 - DNA, 60 bp, Artificial; identical to SEQ ID NO: 315880
  Synthetic oligonucleotide

SEQ ID NO: 542352 - DNA, 58 bp, Artificial; identical to SEQ ID NO: 315881
  Synthetic oligonucleotide

SEQ ID NO: 542353 - DNA, 58 bp, Artificial; identical to SEQ ID NO: 315883
  Synthetic oligonucleotide

SEQ ID NO: 542354 - DNA, 56 bp, Artificial; identical to SEQ ID NO: 315886
  Synthetic oligonucleotide

SEQ ID NO: 542355 - DNA, 53 bp, Artificial; identical to SEQ ID NO: 315888
  Synthetic oligonucleotide

SEQ ID NO: 542356 - DNA, 56 bp, Artificial; identical to SEQ ID NO: 315889
  Synthetic oligonucleotide

SEQ ID NO: 542357 - DNA, 55 bp, Artificial; identical to SEQ ID NO: 315890
  Synthetic oligonucleotide

SEQ ID NO: 542358 - DNA, 60 bp, Artificial; identical to SEQ ID NO: 315891
  Synthetic oligonucleotide

SEQ ID NO: 542359 - DNA, 55 bp, Artificial; identical to SEQ ID NO: 315893
  Synthetic oligonucleotide

SEQ ID NO: 542360 - DNA, 60 bp, Artificial; identical to SEQ ID NO: 315896
  Synthetic oligonucleotide

SEQ ID NO: 542361 - DNA, 60 bp, Artificial; identical to SEQ ID NO: 315899
  Synthetic oligonucleotide

SEQ ID NO: 542362 - DNA, 59 bp, Artificial; identical to SEQ ID NO: 315903
  Synthetic oligonucleotide

SEQ ID NO: 542363 - DNA, 54 bp, Artificial; identical to SEQ ID NO: 315905
  Synthetic oligonucleotide

SEQ ID NO: 542364 - DNA, 57 bp, Artificial; identical to SEQ ID NO: 315906
  Synthetic oligonucleotide

SEQ ID NO: 542365 - DNA, 54 bp, Artificial; identical to SEQ ID NO: 315913
  Synthetic oligonucleotide

SEQ ID NO: 542366 - DNA, 50 bp, Artificial; identical to SEQ ID NO: 315914
  Synthetic oligonucleotide

SEQ ID NO: 542367 - DNA, 55 bp, Artificial; identical to SEQ ID NO: 315918
  Synthetic oligonucleotide

SEQ ID NO: 542368 - DNA, 56 bp, Artificial; identical to SEQ ID NO: 315920
  Synthetic oligonucleotide

SEQ ID NO: 542369 - DNA, 54 bp, Artificial; identical to SEQ ID NO: 315921
  Synthetic oligonucleotide

SEQ ID NO: 542370 - DNA, 59 bp, Artificial; identical to SEQ ID NO: 315922
  Synthetic oligonucleotide

SEQ ID NO: 542371 - DNA, 57 bp, Artificial; identical to SEQ ID NO: 315926
  Synthetic oligonucleotide

SEQ ID NO: 542372 - DNA, 60 bp, Artificial; identical to SEQ ID NO: 315930
  Synthetic oligonucleotide

SEQ ID NO: 542373 - DNA, 55 bp, Artificial; identical to SEQ ID NO: 315931
  Synthetic oligonucleotide

SEQ ID NO: 542374 - DNA, 55 bp, Artificial; identical to SEQ ID NO: 315932
  Synthetic oligonucleotide

SEQ ID NO: 542375 - DNA, 55 bp, Artificial; identical to SEQ ID NO: 315936
  Synthetic oligonucleotide

SEQ ID NO: 542376 - DNA, 54 bp, Artificial; identical to SEQ ID NO: 315937
  Synthetic oligonucleotide

SEQ ID NO: 542377 - DNA, 58 bp, Artificial; identical to SEQ ID NO: 315938
  Synthetic oligonucleotide

SEQ ID NO: 542378 - DNA, 57 bp, Artificial; identical to SEQ ID NO: 13483
  Synthetic oligonucleotide

SEQ ID NO: 542379 - DNA, 60 bp, Artificial; identical to SEQ ID NO: 315940
  Synthetic oligonucleotide

SEQ ID NO: 542380 - DNA, 60 bp, Artificial; identical to SEQ ID NO: 315942
  Synthetic oligonucleotide

SEQ ID NO: 542381 - DNA, 55 bp, Artificial; identical to SEQ ID NO: 315946
  Synthetic oligonucleotide

SEQ ID NO: 542382 - DNA, 57 bp, Artificial; identical to SEQ ID NO: 315948
  Synthetic oligonucleotide

SEQ ID NO: 542383 - DNA, 54 bp, Artificial; identical to SEQ ID NO: 315950
  Synthetic oligonucleotide

SEQ ID NO: 542384 - DNA, 60 bp, Artificial; identical to SEQ ID NO: 315951
  Synthetic oligonucleotide

SEQ ID NO: 542385 - DNA, 57 bp, Artificial; identical to SEQ ID NO: 315953
  Synthetic oligonucleotide

SEQ ID NO: 542386 - DNA, 60 bp, Artificial; identical to SEQ ID NO: 32534
  Synthetic oligonucleotide

SEQ ID NO: 542387 - DNA, 59 bp, Artificial; identical to SEQ ID NO: 315954
  Synthetic oligonucleotide

SEQ ID NO: 542388 - DNA, 56 bp, Artificial; identical to SEQ ID NO: 315956
  Synthetic oligonucleotide

SEQ ID NO: 542389 - DNA, 60 bp, Artificial; identical to SEQ ID NO: 315959
  Synthetic oligonucleotide

SEQ ID NO: 542390 - DNA, 60 bp, Artificial; identical to SEQ ID NO: 315962
  Synthetic oligonucleotide

SEQ ID NO: 542391 - DNA, 60 bp, Artificial; identical to SEQ ID NO: 315963
  Synthetic oligonucleotide

SEQ ID NO: 542392 - DNA, 60 bp, Artificial; identical to SEQ ID NO: 315964
  Synthetic oligonucleotide

SEQ ID NO: 542393 - DNA, 60 bp, Artificial; identical to SEQ ID NO: 7408
  Synthetic oligonucleotide

SEQ ID NO: 542394 - DNA, 60 bp, Artificial; identical to SEQ ID NO: 315965
  Synthetic oligonucleotide

SEQ ID NO: 542395 - DNA, 51 bp, Artificial; identical to SEQ ID NO: 315966
  Synthetic oligonucleotide

SEQ ID NO: 542396 - DNA, 51 bp, Artificial; identical to SEQ ID NO: 315970
  Synthetic oligonucleotide

SEQ ID NO: 542397 - DNA, 60 bp, Artificial; identical to SEQ ID NO: 124077
  Synthetic oligonucleotide

SEQ ID NO: 542398 - DNA, 56 bp, Artificial; identical to SEQ ID NO: 315971
  Synthetic oligonucleotide

SEQ ID NO: 542399 - DNA, 57 bp, Artificial; identical to SEQ ID NO: 315973
  Synthetic oligonucleotide

SEQ ID NO: 542400 - DNA, 60 bp, Artificial; identical to SEQ ID NO: 315975
  Synthetic oligonucleotide

SEQ ID NO: 542401 - DNA, 57 bp, Artificial; identical to SEQ ID NO: 315978
  Synthetic oligonucleotide

SEQ ID NO: 542402 - DNA, 58 bp, Artificial; identical to SEQ ID NO: 315980
  Synthetic oligonucleotide

SEQ ID NO: 542403 - DNA, 57 bp, Artificial; identical to SEQ ID NO: 315982
  Synthetic oligonucleotide

SEQ ID NO: 542404 - DNA, 59 bp, Artificial; identical to SEQ ID NO: 315984
  Synthetic oligonucleotide

SEQ ID NO: 542405 - DNA, 51 bp, Artificial; identical to SEQ ID NO: 315985
  Synthetic oligonucleotide

SEQ ID NO: 542406 - DNA, 55 bp, Artificial; identical to SEQ ID NO: 315989
  Synthetic oligonucleotide

SEQ ID NO: 542407 - DNA, 54 bp, Artificial; identical to SEQ ID NO: 315992
  Synthetic oligonucleotide

SEQ ID NO: 542408 - DNA, 60 bp, Artificial; identical to SEQ ID NO: 315993
  Synthetic oligonucleotide

SEQ ID NO: 542409 - DNA, 55 bp, Artificial; identical to SEQ ID NO: 315994
  Synthetic oligonucleotide

SEQ ID NO: 542410 - DNA, 60 bp, Artificial; identical to SEQ ID NO: 315995
  Synthetic oligonucleotide

SEQ ID NO: 542411 - DNA, 55 bp, Artificial; identical to SEQ ID NO: 315996
  Synthetic oligonucleotide

SEQ ID NO: 542412 - DNA, 60 bp, Artificial; identical to SEQ ID NO: 315997
  Synthetic oligonucleotide

SEQ ID NO: 542413 - DNA, 58 bp, Artificial; identical to SEQ ID NO: 315999
  Synthetic oligonucleotide

SEQ ID NO: 542414 - DNA, 56 bp, Artificial; identical to SEQ ID NO: 316000
  Synthetic oligonucleotide

SEQ ID NO: 542415 - DNA, 57 bp, Artificial; identical to SEQ ID NO: 316001
  Synthetic oligonucleotide

SEQ ID NO: 542416 - DNA, 58 bp, Artificial; identical to SEQ ID NO: 316003
  Synthetic oligonucleotide

SEQ ID NO: 542417 - DNA, 55 bp, Artificial; identical to SEQ ID NO: 316004
  Synthetic oligonucleotide

SEQ ID NO: 542418 - DNA, 58 bp, Artificial; identical to SEQ ID NO: 316005
  Synthetic oligonucleotide

SEQ ID NO: 542419 - DNA, 60 bp, Artificial; identical to SEQ ID NO: 316006
  Synthetic oligonucleotide

SEQ ID NO: 542420 - DNA, 51 bp, Artificial; identical to SEQ ID NO: 316009
  Synthetic oligonucleotide

SEQ ID NO: 542421 - DNA, 60 bp, Artificial; identical to SEQ ID NO: 316010
  Synthetic oligonucleotide

SEQ ID NO: 542422 - DNA, 59 bp, Artificial; identical to SEQ ID NO: 316011
  Synthetic oligonucleotide

SEQ ID NO: 542423 - DNA, 55 bp, Artificial; identical to SEQ ID NO: 316013
  Synthetic oligonucleotide

SEQ ID NO: 542424 - DNA, 60 bp, Artificial; identical to SEQ ID NO: 316014
  Synthetic oligonucleotide

SEQ ID NO: 542425 - DNA, 60 bp, Artificial; identical to SEQ ID NO: 316015
  Synthetic oligonucleotide

SEQ ID NO: 542426 - DNA, 60 bp, Artificial; identical to SEQ ID NO: 316017
  Synthetic oligonucleotide

SEQ ID NO: 542427 - DNA, 60 bp, Artificial; identical to SEQ ID NO: 316020
  Synthetic oligonucleotide

SEQ ID NO: 542428 - DNA, 60 bp, Artificial; identical to SEQ ID NO: 316021
  Synthetic oligonucleotide

SEQ ID NO: 542429 - DNA, 59 bp, Artificial; identical to SEQ ID NO: 316022
  Synthetic oligonucleotide

SEQ ID NO: 542430 - DNA, 60 bp, Artificial; identical to SEQ ID NO: 316026
  Synthetic oligonucleotide

SEQ ID NO: 542431 - DNA, 59 bp, Artificial; identical to SEQ ID NO: 316030
  Synthetic oligonucleotide

SEQ ID NO: 542432 - DNA, 55 bp, Artificial; identical to SEQ ID NO: 316032
  Synthetic oligonucleotide

SEQ ID NO: 542433 - DNA, 55 bp, Artificial; identical to SEQ ID NO: 316036
  Synthetic oligonucleotide

SEQ ID NO: 542434 - DNA, 54 bp, Artificial; identical to SEQ ID NO: 316038
  Synthetic oligonucleotide

SEQ ID NO: 542435 - DNA, 54 bp, Artificial; identical to SEQ ID NO: 316039
  Synthetic oligonucleotide

SEQ ID NO: 542436 - DNA, 59 bp, Artificial; identical to SEQ ID NO: 316043
  Synthetic oligonucleotide

SEQ ID NO: 542437 - DNA, 52 bp, Artificial; identical to SEQ ID NO: 316047
  Synthetic oligonucleotide

SEQ ID NO: 542438 - DNA, 51 bp, Artificial; identical to SEQ ID NO: 316051
  Synthetic oligonucleotide

SEQ ID NO: 542439 - DNA, 60 bp, Artificial; identical to SEQ ID NO: 316052
  Synthetic oligonucleotide

SEQ ID NO: 542440 - DNA, 56 bp, Artificial; identical to SEQ ID NO: 316053
  Synthetic oligonucleotide

SEQ ID NO: 542441 - DNA, 60 bp, Artificial; identical to SEQ ID NO: 316054
  Synthetic oligonucleotide

SEQ ID NO: 542442 - DNA, 59 bp, Artificial; identical to SEQ ID NO: 316055
  Synthetic oligonucleotide

SEQ ID NO: 542443 - DNA, 58 bp, Artificial; identical to SEQ ID NO: 316057
  Synthetic oligonucleotide

SEQ ID NO: 542444 - DNA, 60 bp, Artificial; identical to SEQ ID NO: 316058
  Synthetic oligonucleotide

SEQ ID NO: 542445 - DNA, 59 bp, Artificial; identical to SEQ ID NO: 316060
  Synthetic oligonucleotide

SEQ ID NO: 542446 - DNA, 55 bp, Artificial; identical to SEQ ID NO: 18000
  Synthetic oligonucleotide

SEQ ID NO: 542447 - DNA, 60 bp, Artificial; identical to SEQ ID NO: 316068
  Synthetic oligonucleotide

SEQ ID NO: 542448 - DNA, 59 bp, Artificial; identical to SEQ ID NO: 11695
  Synthetic oligonucleotide

SEQ ID NO: 542449 - DNA, 56 bp, Artificial; identical to SEQ ID NO: 316073
  Synthetic oligonucleotide

SEQ ID NO: 542450 - DNA, 53 bp, Artificial; identical to SEQ ID NO: 316074
  Synthetic oligonucleotide

SEQ ID NO: 542451 - DNA, 60 bp, Artificial; identical to SEQ ID NO: 316076
  Synthetic oligonucleotide

SEQ ID NO: 542452 - DNA, 59 bp, Artificial; identical to SEQ ID NO: 316078
  Synthetic oligonucleotide

SEQ ID NO: 542453 - DNA, 52 bp, Artificial; identical to SEQ ID NO: 316079
  Synthetic oligonucleotide

SEQ ID NO: 542454 - DNA, 55 bp, Artificial; identical to SEQ ID NO: 316081
  Synthetic oligonucleotide

SEQ ID NO: 542455 - DNA, 57 bp, Artificial; identical to SEQ ID NO: 11741
  Synthetic oligonucleotide

SEQ ID NO: 542456 - DNA, 52 bp, Artificial; identical to SEQ ID NO: 316082
  Synthetic oligonucleotide

SEQ ID NO: 542457 - DNA, 55 bp, Artificial; identical to SEQ ID NO: 316084
  Synthetic oligonucleotide

SEQ ID NO: 542458 - DNA, 60 bp, Artificial; identical to SEQ ID NO: 316095
  Synthetic oligonucleotide

SEQ ID NO: 542459 - DNA, 58 bp, Artificial; identical to SEQ ID NO: 316098
  Synthetic oligonucleotide

SEQ ID NO: 542460 - DNA, 50 bp, Artificial; identical to SEQ ID NO: 316099
  Synthetic oligonucleotide

SEQ ID NO: 542461 - DNA, 54 bp, Artificial; identical to SEQ ID NO: 316100
  Synthetic oligonucleotide

SEQ ID NO: 542462 - DNA, 60 bp, Artificial; identical to SEQ ID NO: 316103
  Synthetic oligonucleotide

SEQ ID NO: 542463 - DNA, 60 bp, Artificial; identical to SEQ ID NO: 316104
  Synthetic oligonucleotide

SEQ ID NO: 542464 - DNA, 54 bp, Artificial; identical to SEQ ID NO: 316109
  Synthetic oligonucleotide

SEQ ID NO: 542465 - DNA, 58 bp, Artificial; identical to SEQ ID NO: 316111
  Synthetic oligonucleotide

SEQ ID NO: 542466 - DNA, 59 bp, Artificial; identical to SEQ ID NO: 316116
  Synthetic oligonucleotide

SEQ ID NO: 542467 - DNA, 55 bp, Artificial; identical to SEQ ID NO: 316118
  Synthetic oligonucleotide

SEQ ID NO: 542468 - DNA, 51 bp, Artificial; identical to SEQ ID NO: 316120
  Synthetic oligonucleotide

SEQ ID NO: 542469 - DNA, 60 bp, Artificial; identical to SEQ ID NO: 316122
  Synthetic oligonucleotide

SEQ ID NO: 542470 - DNA, 52 bp, Artificial; identical to SEQ ID NO: 316125
  Synthetic oligonucleotide

SEQ ID NO: 542471 - DNA, 60 bp, Artificial; identical to SEQ ID NO: 10551
  Synthetic oligonucleotide

SEQ ID NO: 542472 - DNA, 53 bp, Artificial; identical to SEQ ID NO: 316128
  Synthetic oligonucleotide

SEQ ID NO: 542473 - DNA, 54 bp, Artificial; identical to SEQ ID NO: 316130
  Synthetic oligonucleotide

SEQ ID NO: 542474 - DNA, 60 bp, Artificial; identical to SEQ ID NO: 316131
  Synthetic oligonucleotide

SEQ ID NO: 542475 - DNA, 52 bp, Artificial; identical to SEQ ID NO: 316132
  Synthetic oligonucleotide

SEQ ID NO: 542476 - DNA, 52 bp, Artificial; identical to SEQ ID NO: 316133
  Synthetic oligonucleotide

SEQ ID NO: 542477 - DNA, 59 bp, Artificial; identical to SEQ ID NO: 316137
  Synthetic oligonucleotide

SEQ ID NO: 542478 - DNA, 53 bp, Artificial; identical to SEQ ID NO: 316139
  Synthetic oligonucleotide

SEQ ID NO: 542479 - DNA, 56 bp, Artificial; identical to SEQ ID NO: 316140
  Synthetic oligonucleotide

SEQ ID NO: 542480 - DNA, 56 bp, Artificial; identical to SEQ ID NO: 316141
  Synthetic oligonucleotide

SEQ ID NO: 542481 - DNA, 53 bp, Artificial; identical to SEQ ID NO: 316143
  Synthetic oligonucleotide

SEQ ID NO: 542482 - DNA, 57 bp, Artificial; identical to SEQ ID NO: 316144
  Synthetic oligonucleotide

SEQ ID NO: 542483 - DNA, 51 bp, Artificial; identical to SEQ ID NO: 316145
  Synthetic oligonucleotide

SEQ ID NO: 542484 - DNA, 51 bp, Artificial; identical to SEQ ID NO: 316147
  Synthetic oligonucleotide

SEQ ID NO: 542485 - DNA, 60 bp, Artificial; identical to SEQ ID NO: 316148
  Synthetic oligonucleotide

SEQ ID NO: 542486 - DNA, 55 bp, Artificial; identical to SEQ ID NO: 316149
  Synthetic oligonucleotide

SEQ ID NO: 542487 - DNA, 50 bp, Artificial; identical to SEQ ID NO: 316151
  Synthetic oligonucleotide

SEQ ID NO: 542488 - DNA, 55 bp, Artificial; identical to SEQ ID NO: 316153
  Synthetic oligonucleotide

SEQ ID NO: 542489 - DNA, 58 bp, Artificial; identical to SEQ ID NO: 316154
  Synthetic oligonucleotide

SEQ ID NO: 542490 - DNA, 55 bp, Artificial; identical to SEQ ID NO: 316155
  Synthetic oligonucleotide

SEQ ID NO: 542491 - DNA, 52 bp, Artificial; identical to SEQ ID NO: 316156
  Synthetic oligonucleotide

SEQ ID NO: 542492 - DNA, 60 bp, Artificial; identical to SEQ ID NO: 316162
  Synthetic oligonucleotide

SEQ ID NO: 542493 - DNA, 58 bp, Artificial; identical to SEQ ID NO: 316164
  Synthetic oligonucleotide

SEQ ID NO: 542494 - DNA, 52 bp, Artificial; identical to SEQ ID NO: 316168
  Synthetic oligonucleotide

SEQ ID NO: 542495 - DNA, 55 bp, Artificial; identical to SEQ ID NO: 316172
  Synthetic oligonucleotide

SEQ ID NO: 542496 - DNA, 60 bp, Artificial; identical to SEQ ID NO: 316175
  Synthetic oligonucleotide

SEQ ID NO: 542497 - DNA, 57 bp, Artificial; identical to SEQ ID NO: 10598
  Synthetic oligonucleotide

SEQ ID NO: 542498 - DNA, 60 bp, Artificial; identical to SEQ ID NO: 316179
  Synthetic oligonucleotide

SEQ ID NO: 542499 - DNA, 60 bp, Artificial; identical to SEQ ID NO: 316181
  Synthetic oligonucleotide

SEQ ID NO: 542500 - DNA, 60 bp, Artificial; identical to SEQ ID NO: 316183
  Synthetic oligonucleotide

SEQ ID NO: 542501 - DNA, 50 bp, Artificial; identical to SEQ ID NO: 316184
  Synthetic oligonucleotide

SEQ ID NO: 542502 - DNA, 55 bp, Artificial; identical to SEQ ID NO: 316185
  Synthetic oligonucleotide

SEQ ID NO: 542503 - DNA, 57 bp, Artificial; identical to SEQ ID NO: 316194
  Synthetic oligonucleotide

SEQ ID NO: 542504 - DNA, 58 bp, Artificial; identical to SEQ ID NO: 316197
  Synthetic oligonucleotide

SEQ ID NO: 542505 - DNA, 60 bp, Artificial; identical to SEQ ID NO: 316200
  Synthetic oligonucleotide

SEQ ID NO: 542506 - DNA, 60 bp, Artificial; identical to SEQ ID NO: 316201
  Synthetic oligonucleotide

SEQ ID NO: 542507 - DNA, 59 bp, Artificial; identical to SEQ ID NO: 316203
  Synthetic oligonucleotide

SEQ ID NO: 542508 - DNA, 60 bp, Artificial; identical to SEQ ID NO: 316206
  Synthetic oligonucleotide

SEQ ID NO: 542509 - DNA, 53 bp, Artificial; identical to SEQ ID NO: 316207
  Synthetic oligonucleotide

SEQ ID NO: 542510 - DNA, 60 bp, Artificial; identical to SEQ ID NO: 316208
  Synthetic oligonucleotide

SEQ ID NO: 542511 - DNA, 60 bp, Artificial; identical to SEQ ID NO: 316209
  Synthetic oligonucleotide

SEQ ID NO: 542512 - DNA, 60 bp, Artificial; identical to SEQ ID NO: 316213
  Synthetic oligonucleotide

SEQ ID NO: 542513 - DNA, 55 bp, Artificial; identical to SEQ ID NO: 316216
  Synthetic oligonucleotide

SEQ ID NO: 542514 - DNA, 55 bp, Artificial; identical to SEQ ID NO: 316221
  Synthetic oligonucleotide

SEQ ID NO: 542515 - DNA, 60 bp, Artificial; identical to SEQ ID NO: 316224
  Synthetic oligonucleotide

SEQ ID NO: 542516 - DNA, 57 bp, Artificial; identical to SEQ ID NO: 316225
  Synthetic oligonucleotide

SEQ ID NO: 542517 - DNA, 60 bp, Artificial; identical to SEQ ID NO: 316228
  Synthetic oligonucleotide

SEQ ID NO: 542518 - DNA, 50 bp, Artificial; identical to SEQ ID NO: 316230
  Synthetic oligonucleotide

SEQ ID NO: 542519 - DNA, 60 bp, Artificial; identical to SEQ ID NO: 316231
  Synthetic oligonucleotide

SEQ ID NO: 542520 - DNA, 53 bp, Artificial; identical to SEQ ID NO: 316235
  Synthetic oligonucleotide

SEQ ID NO: 542521 - DNA, 60 bp, Artificial; identical to SEQ ID NO: 11866
  Synthetic oligonucleotide

SEQ ID NO: 542522 - DNA, 60 bp, Artificial; identical to SEQ ID NO: 316236
  Synthetic oligonucleotide

SEQ ID NO: 542523 - DNA, 52 bp, Artificial; identical to SEQ ID NO: 316239
  Synthetic oligonucleotide

SEQ ID NO: 542524 - DNA, 53 bp, Artificial; identical to SEQ ID NO: 316241
  Synthetic oligonucleotide

SEQ ID NO: 542525 - DNA, 53 bp, Artificial; identical to SEQ ID NO: 316246
  Synthetic oligonucleotide

SEQ ID NO: 542526 - DNA, 56 bp, Artificial; identical to SEQ ID NO: 19500
  Synthetic oligonucleotide

SEQ ID NO: 542527 - DNA, 55 bp, Artificial; identical to SEQ ID NO: 316251
  Synthetic oligonucleotide

SEQ ID NO: 542528 - DNA, 60 bp, Artificial; identical to SEQ ID NO: 316252
  Synthetic oligonucleotide

SEQ ID NO: 542529 - DNA, 60 bp, Artificial; identical to SEQ ID NO: 316253
  Synthetic oligonucleotide

SEQ ID NO: 542530 - DNA, 57 bp, Artificial; identical to SEQ ID NO: 10460
  Synthetic oligonucleotide

SEQ ID NO: 542531 - DNA, 53 bp, Artificial; identical to SEQ ID NO: 316259
  Synthetic oligonucleotide

SEQ ID NO: 542532 - DNA, 56 bp, Artificial; identical to SEQ ID NO: 316262
  Synthetic oligonucleotide

SEQ ID NO: 542533 - DNA, 56 bp, Artificial; identical to SEQ ID NO: 316264
  Synthetic oligonucleotide

SEQ ID NO: 542534 - DNA, 60 bp, Artificial; identical to SEQ ID NO: 316268
  Synthetic oligonucleotide

SEQ ID NO: 542535 - DNA, 58 bp, Artificial; identical to SEQ ID NO: 316270
  Synthetic oligonucleotide

SEQ ID NO: 542536 - DNA, 52 bp, Artificial; identical to SEQ ID NO: 316271
  Synthetic oligonucleotide

SEQ ID NO: 542537 - DNA, 60 bp, Artificial; identical to SEQ ID NO: 316273
  Synthetic oligonucleotide

SEQ ID NO: 542538 - DNA, 59 bp, Artificial; identical to SEQ ID NO: 316275
  Synthetic oligonucleotide

SEQ ID NO: 542539 - DNA, 57 bp, Artificial; identical to SEQ ID NO: 316276
  Synthetic oligonucleotide

SEQ ID NO: 542540 - DNA, 54 bp, Artificial; identical to SEQ ID NO: 316277
  Synthetic oligonucleotide

SEQ ID NO: 542541 - DNA, 58 bp, Artificial; identical to SEQ ID NO: 316282
  Synthetic oligonucleotide

SEQ ID NO: 542542 - DNA, 58 bp, Artificial; identical to SEQ ID NO: 316285
  Synthetic oligonucleotide

SEQ ID NO: 542543 - DNA, 57 bp, Artificial; identical to SEQ ID NO: 316287
  Synthetic oligonucleotide

SEQ ID NO: 542544 - DNA, 54 bp, Artificial; identical to SEQ ID NO: 316288
  Synthetic oligonucleotide

SEQ ID NO: 542545 - DNA, 58 bp, Artificial; identical to SEQ ID NO: 316291
  Synthetic oligonucleotide

SEQ ID NO: 542546 - DNA, 56 bp, Artificial; identical to SEQ ID NO: 316293
  Synthetic oligonucleotide

SEQ ID NO: 542547 - DNA, 50 bp, Artificial; identical to SEQ ID NO: 316295
  Synthetic oligonucleotide

SEQ ID NO: 542548 - DNA, 60 bp, Artificial; identical to SEQ ID NO: 316297
  Synthetic oligonucleotide

SEQ ID NO: 542549 - DNA, 59 bp, Artificial; identical to SEQ ID NO: 316299
  Synthetic oligonucleotide

SEQ ID NO: 542550 - DNA, 55 bp, Artificial; identical to SEQ ID NO: 316304
  Synthetic oligonucleotide

SEQ ID NO: 542551 - DNA, 59 bp, Artificial; identical to SEQ ID NO: 316305
  Synthetic oligonucleotide

SEQ ID NO: 542552 - DNA, 55 bp, Artificial; identical to SEQ ID NO: 316306
  Synthetic oligonucleotide

SEQ ID NO: 542553 - DNA, 60 bp, Artificial; identical to SEQ ID NO: 316307
  Synthetic oligonucleotide

SEQ ID NO: 542554 - DNA, 55 bp, Artificial; identical to SEQ ID NO: 316308
  Synthetic oligonucleotide

SEQ ID NO: 542555 - DNA, 60 bp, Artificial; identical to SEQ ID NO: 316309
  Synthetic oligonucleotide

SEQ ID NO: 542556 - DNA, 57 bp, Artificial; identical to SEQ ID NO: 316313
  Synthetic oligonucleotide

SEQ ID NO: 542557 - DNA, 56 bp, Artificial; identical to SEQ ID NO: 316314
  Synthetic oligonucleotide

SEQ ID NO: 542558 - DNA, 55 bp, Artificial; identical to SEQ ID NO: 316316
  Synthetic oligonucleotide

SEQ ID NO: 542559 - DNA, 60 bp, Artificial; identical to SEQ ID NO: 316319
  Synthetic oligonucleotide

SEQ ID NO: 542560 - DNA, 52 bp, Artificial; identical to SEQ ID NO: 316321
  Synthetic oligonucleotide

SEQ ID NO: 542561 - DNA, 50 bp, Artificial; identical to SEQ ID NO: 316322
  Synthetic oligonucleotide

SEQ ID NO: 542562 - DNA, 54 bp, Artificial; identical to SEQ ID NO: 10684
  Synthetic oligonucleotide

SEQ ID NO: 542563 - DNA, 55 bp, Artificial; identical to SEQ ID NO: 316324
  Synthetic oligonucleotide

SEQ ID NO: 542564 - DNA, 50 bp, Artificial; identical to SEQ ID NO: 316326
  Synthetic oligonucleotide

SEQ ID NO: 542565 - DNA, 56 bp, Artificial; identical to SEQ ID NO: 316330
  Synthetic oligonucleotide

SEQ ID NO: 542566 - DNA, 60 bp, Artificial; identical to SEQ ID NO: 316332
  Synthetic oligonucleotide

SEQ ID NO: 542567 - DNA, 58 bp, Artificial; identical to SEQ ID NO: 316335
  Synthetic oligonucleotide

SEQ ID NO: 542568 - DNA, 57 bp, Artificial; identical to SEQ ID NO: 316339
  Synthetic oligonucleotide

SEQ ID NO: 542569 - DNA, 55 bp, Artificial; identical to SEQ ID NO: 316342
  Synthetic oligonucleotide

SEQ ID NO: 542570 - DNA, 58 bp, Artificial; identical to SEQ ID NO: 316344
  Synthetic oligonucleotide

SEQ ID NO: 542571 - DNA, 59 bp, Artificial; identical to SEQ ID NO: 316345
  Synthetic oligonucleotide

SEQ ID NO: 542572 - DNA, 55 bp, Artificial; identical to SEQ ID NO: 316352
  Synthetic oligonucleotide

SEQ ID NO: 542573 - DNA, 51 bp, Artificial; identical to SEQ ID NO: 316356
  Synthetic oligonucleotide

SEQ ID NO: 542574 - DNA, 60 bp, Artificial; identical to SEQ ID NO: 316360
  Synthetic oligonucleotide

SEQ ID NO: 542575 - DNA, 52 bp, Artificial; identical to SEQ ID NO: 316361
  Synthetic oligonucleotide

SEQ ID NO: 542576 - DNA, 55 bp, Artificial; identical to SEQ ID NO: 316362
  Synthetic oligonucleotide

SEQ ID NO: 542577 - DNA, 55 bp, Artificial; identical to SEQ ID NO: 316369
  Synthetic oligonucleotide

SEQ ID NO: 542578 - DNA, 60 bp, Artificial; identical to SEQ ID NO: 316370
  Synthetic oligonucleotide

SEQ ID NO: 542579 - DNA, 50 bp, Artificial; identical to SEQ ID NO: 316371
  Synthetic oligonucleotide

SEQ ID NO: 542580 - DNA, 58 bp, Artificial; identical to SEQ ID NO: 316374
  Synthetic oligonucleotide

SEQ ID NO: 542581 - DNA, 57 bp, Artificial; identical to SEQ ID NO: 316377
  Synthetic oligonucleotide

SEQ ID NO: 542582 - DNA, 57 bp, Artificial; identical to SEQ ID NO: 316380
  Synthetic oligonucleotide

SEQ ID NO: 542583 - DNA, 57 bp, Artificial; identical to SEQ ID NO: 316381
  Synthetic oligonucleotide

SEQ ID NO: 542584 - DNA, 60 bp, Artificial; identical to SEQ ID NO: 316382
  Synthetic oligonucleotide

SEQ ID NO: 542585 - DNA, 58 bp, Artificial; identical to SEQ ID NO: 316386
  Synthetic oligonucleotide

SEQ ID NO: 542586 - DNA, 56 bp, Artificial; identical to SEQ ID NO: 316387
  Synthetic oligonucleotide

SEQ ID NO: 542587 - DNA, 59 bp, Artificial; identical to SEQ ID NO: 316392
  Synthetic oligonucleotide

SEQ ID NO: 542588 - DNA, 54 bp, Artificial; identical to SEQ ID NO: 316394
  Synthetic oligonucleotide

SEQ ID NO: 542589 - DNA, 56 bp, Artificial; identical to SEQ ID NO: 316399
  Synthetic oligonucleotide

SEQ ID NO: 542590 - DNA, 60 bp, Artificial; identical to SEQ ID NO: 316403
  Synthetic oligonucleotide

SEQ ID NO: 542591 - DNA, 55 bp, Artificial; identical to SEQ ID NO: 316404
  Synthetic oligonucleotide

SEQ ID NO: 542592 - DNA, 55 bp, Artificial; identical to SEQ ID NO: 316406
  Synthetic oligonucleotide

SEQ ID NO: 542593 - DNA, 56 bp, Artificial; identical to SEQ ID NO: 316407
  Synthetic oligonucleotide

SEQ ID NO: 542594 - DNA, 52 bp, Artificial; identical to SEQ ID NO: 18514
  Synthetic oligonucleotide

SEQ ID NO: 542595 - DNA, 55 bp, Artificial; identical to SEQ ID NO: 316411
  Synthetic oligonucleotide

SEQ ID NO: 542596 - DNA, 55 bp, Artificial; identical to SEQ ID NO: 316416
  Synthetic oligonucleotide

SEQ ID NO: 542597 - DNA, 51 bp, Artificial; identical to SEQ ID NO: 316417
  Synthetic oligonucleotide

SEQ ID NO: 542598 - DNA, 60 bp, Artificial; identical to SEQ ID NO: 316420
  Synthetic oligonucleotide

SEQ ID NO: 542599 - DNA, 60 bp, Artificial; identical to SEQ ID NO: 316421
  Synthetic oligonucleotide

SEQ ID NO: 542600 - DNA, 52 bp, Artificial; identical to SEQ ID NO: 316422
  Synthetic oligonucleotide

SEQ ID NO: 542601 - DNA, 58 bp, Artificial; identical to SEQ ID NO: 316425
  Synthetic oligonucleotide

SEQ ID NO: 542602 - DNA, 60 bp, Artificial; identical to SEQ ID NO: 316427
  Synthetic oligonucleotide

SEQ ID NO: 542603 - DNA, 58 bp, Artificial; identical to SEQ ID NO: 316429
  Synthetic oligonucleotide

SEQ ID NO: 542604 - DNA, 60 bp, Artificial; identical to SEQ ID NO: 316431
  Synthetic oligonucleotide

SEQ ID NO: 542605 - DNA, 57 bp, Artificial; identical to SEQ ID NO: 316433
  Synthetic oligonucleotide

SEQ ID NO: 542606 - DNA, 59 bp, Artificial; identical to SEQ ID NO: 316435
  Synthetic oligonucleotide

SEQ ID NO: 542607 - DNA, 56 bp, Artificial; identical to SEQ ID NO: 316438
  Synthetic oligonucleotide

SEQ ID NO: 542608 - DNA, 57 bp, Artificial; identical to SEQ ID NO: 316440
  Synthetic oligonucleotide

SEQ ID NO: 542609 - DNA, 60 bp, Artificial; identical to SEQ ID NO: 316442
  Synthetic oligonucleotide

SEQ ID NO: 542610 - DNA, 54 bp, Artificial; identical to SEQ ID NO: 316444
  Synthetic oligonucleotide

SEQ ID NO: 542611 - DNA, 60 bp, Artificial; identical to SEQ ID NO: 316445
  Synthetic oligonucleotide

SEQ ID NO: 542612 - DNA, 59 bp, Artificial; identical to SEQ ID NO: 316446
  Synthetic oligonucleotide

SEQ ID NO: 542613 - DNA, 57 bp, Artificial; identical to SEQ ID NO: 316447
  Synthetic oligonucleotide

SEQ ID NO: 542614 - DNA, 51 bp, Artificial; identical to SEQ ID NO: 316450
  Synthetic oligonucleotide

SEQ ID NO: 542615 - DNA, 60 bp, Artificial; identical to SEQ ID NO: 316451
  Synthetic oligonucleotide

SEQ ID NO: 542616 - DNA, 60 bp, Artificial; identical to SEQ ID NO: 316452
  Synthetic oligonucleotide

SEQ ID NO: 542617 - DNA, 57 bp, Artificial; identical to SEQ ID NO: 316455
  Synthetic oligonucleotide

SEQ ID NO: 542618 - DNA, 57 bp, Artificial; identical to SEQ ID NO: 316456
  Synthetic oligonucleotide

SEQ ID NO: 542619 - DNA, 54 bp, Artificial; identical to SEQ ID NO: 316459
  Synthetic oligonucleotide

SEQ ID NO: 542620 - DNA, 60 bp, Artificial; identical to SEQ ID NO: 316463
  Synthetic oligonucleotide

SEQ ID NO: 542621 - DNA, 60 bp, Artificial; identical to SEQ ID NO: 11114
  Synthetic oligonucleotide

SEQ ID NO: 542622 - DNA, 58 bp, Artificial; identical to SEQ ID NO: 316465
  Synthetic oligonucleotide

SEQ ID NO: 542623 - DNA, 51 bp, Artificial; identical to SEQ ID NO: 316468
  Synthetic oligonucleotide

SEQ ID NO: 542624 - DNA, 60 bp, Artificial; identical to SEQ ID NO: 316469
  Synthetic oligonucleotide

SEQ ID NO: 542625 - DNA, 56 bp, Artificial; identical to SEQ ID NO: 316471
  Synthetic oligonucleotide

SEQ ID NO: 542626 - DNA, 60 bp, Artificial; identical to SEQ ID NO: 316473
  Synthetic oligonucleotide

SEQ ID NO: 542627 - DNA, 55 bp, Artificial; identical to SEQ ID NO: 17591
  Synthetic oligonucleotide

SEQ ID NO: 542628 - DNA, 60 bp, Artificial; identical to SEQ ID NO: 316479
  Synthetic oligonucleotide

SEQ ID NO: 542629 - DNA, 60 bp, Artificial; identical to SEQ ID NO: 316482
  Synthetic oligonucleotide

SEQ ID NO: 542630 - DNA, 60 bp, Artificial; identical to SEQ ID NO: 316486
  Synthetic oligonucleotide

SEQ ID NO: 542631 - DNA, 58 bp, Artificial; identical to SEQ ID NO: 316487
  Synthetic oligonucleotide

SEQ ID NO: 542632 - DNA, 57 bp, Artificial; identical to SEQ ID NO: 316488
  Synthetic oligonucleotide

SEQ ID NO: 542633 - DNA, 60 bp, Artificial; identical to SEQ ID NO: 316490
  Synthetic oligonucleotide

SEQ ID NO: 542634 - DNA, 57 bp, Artificial; identical to SEQ ID NO: 316491
  Synthetic oligonucleotide

SEQ ID NO: 542635 - DNA, 60 bp, Artificial; identical to SEQ ID NO: 316496
  Synthetic oligonucleotide

SEQ ID NO: 542636 - DNA, 60 bp, Artificial; identical to SEQ ID NO: 316499
  Synthetic oligonucleotide

SEQ ID NO: 542637 - DNA, 55 bp, Artificial; identical to SEQ ID NO: 316502
  Synthetic oligonucleotide

SEQ ID NO: 542638 - DNA, 60 bp, Artificial; identical to SEQ ID NO: 316504
  Synthetic oligonucleotide

SEQ ID NO: 542639 - DNA, 51 bp, Artificial; identical to SEQ ID NO: 316505
  Synthetic oligonucleotide

SEQ ID NO: 542640 - DNA, 60 bp, Artificial; identical to SEQ ID NO: 316506
  Synthetic oligonucleotide

SEQ ID NO: 542641 - DNA, 60 bp, Artificial; identical to SEQ ID NO: 316507
  Synthetic oligonucleotide

SEQ ID NO: 542642 - DNA, 54 bp, Artificial; identical to SEQ ID NO: 316508
  Synthetic oligonucleotide

SEQ ID NO: 542643 - DNA, 60 bp, Artificial; identical to SEQ ID NO: 316510
  Synthetic oligonucleotide

SEQ ID NO: 542644 - DNA, 60 bp, Artificial; identical to SEQ ID NO: 316511
  Synthetic oligonucleotide

SEQ ID NO: 542645 - DNA, 60 bp, Artificial; identical to SEQ ID NO: 316514
  Synthetic oligonucleotide

SEQ ID NO: 542646 - DNA, 60 bp, Artificial; identical to SEQ ID NO: 9253
  Synthetic oligonucleotide

SEQ ID NO: 542647 - DNA, 58 bp, Artificial; identical to SEQ ID NO: 316516
  Synthetic oligonucleotide

SEQ ID NO: 542648 - DNA, 51 bp, Artificial; identical to SEQ ID NO: 316517
  Synthetic oligonucleotide

SEQ ID NO: 542649 - DNA, 59 bp, Artificial; identical to SEQ ID NO: 316519
  Synthetic oligonucleotide

SEQ ID NO: 542650 - DNA, 55 bp, Artificial; identical to SEQ ID NO: 316520
  Synthetic oligonucleotide

SEQ ID NO: 542651 - DNA, 60 bp, Artificial; identical to SEQ ID NO: 316521
  Synthetic oligonucleotide

SEQ ID NO: 542652 - DNA, 60 bp, Artificial; identical to SEQ ID NO: 316522
  Synthetic oligonucleotide

SEQ ID NO: 542653 - DNA, 58 bp, Artificial; identical to SEQ ID NO: 316523
  Synthetic oligonucleotide

SEQ ID NO: 542654 - DNA, 60 bp, Artificial; identical to SEQ ID NO: 316524
  Synthetic oligonucleotide

SEQ ID NO: 542655 - DNA, 60 bp, Artificial; identical to SEQ ID NO: 316526
  Synthetic oligonucleotide

SEQ ID NO: 542656 - DNA, 58 bp, Artificial; identical to SEQ ID NO: 316527
  Synthetic oligonucleotide

SEQ ID NO: 542657 - DNA, 59 bp, Artificial; identical to SEQ ID NO: 316528
  Synthetic oligonucleotide

SEQ ID NO: 542658 - DNA, 60 bp, Artificial; identical to SEQ ID NO: 316530
  Synthetic oligonucleotide

SEQ ID NO: 542659 - DNA, 58 bp, Artificial; identical to SEQ ID NO: 316531
  Synthetic oligonucleotide

SEQ ID NO: 542660 - DNA, 56 bp, Artificial; identical to SEQ ID NO: 316533
  Synthetic oligonucleotide

SEQ ID NO: 542661 - DNA, 58 bp, Artificial; identical to SEQ ID NO: 10361
  Synthetic oligonucleotide

SEQ ID NO: 542662 - DNA, 60 bp, Artificial; identical to SEQ ID NO: 316534
  Synthetic oligonucleotide

SEQ ID NO: 542663 - DNA, 60 bp, Artificial; identical to SEQ ID NO: 316538
  Synthetic oligonucleotide

SEQ ID NO: 542664 - DNA, 50 bp, Artificial; identical to SEQ ID NO: 316539
  Synthetic oligonucleotide

SEQ ID NO: 542665 - DNA, 56 bp, Artificial; identical to SEQ ID NO: 316540
  Synthetic oligonucleotide

SEQ ID NO: 542666 - DNA, 57 bp, Artificial; identical to SEQ ID NO: 316543
  Synthetic oligonucleotide

SEQ ID NO: 542667 - DNA, 53 bp, Artificial; identical to SEQ ID NO: 16384
  Synthetic oligonucleotide

SEQ ID NO: 542668 - DNA, 55 bp, Artificial; identical to SEQ ID NO: 316549
  Synthetic oligonucleotide

SEQ ID NO: 542669 - DNA, 59 bp, Artificial; identical to SEQ ID NO: 316551
  Synthetic oligonucleotide

SEQ ID NO: 542670 - DNA, 60 bp, Artificial; identical to SEQ ID NO: 316552
  Synthetic oligonucleotide

SEQ ID NO: 542671 - DNA, 51 bp, Artificial; identical to SEQ ID NO: 316555
  Synthetic oligonucleotide

SEQ ID NO: 542672 - DNA, 60 bp, Artificial; identical to SEQ ID NO: 316557
  Synthetic oligonucleotide

SEQ ID NO: 542673 - DNA, 52 bp, Artificial; identical to SEQ ID NO: 316559
  Synthetic oligonucleotide

SEQ ID NO: 542674 - DNA, 60 bp, Artificial; identical to SEQ ID NO: 316560
  Synthetic oligonucleotide

SEQ ID NO: 542675 - DNA, 60 bp, Artificial; identical to SEQ ID NO: 316568
  Synthetic oligonucleotide

SEQ ID NO: 542676 - DNA, 55 bp, Artificial; identical to SEQ ID NO: 316569
  Synthetic oligonucleotide

SEQ ID NO: 542677 - DNA, 57 bp, Artificial; identical to SEQ ID NO: 316570
  Synthetic oligonucleotide

SEQ ID NO: 542678 - DNA, 55 bp, Artificial; identical to SEQ ID NO: 316571
  Synthetic oligonucleotide

SEQ ID NO: 542679 - DNA, 55 bp, Artificial; identical to SEQ ID NO: 316576
  Synthetic oligonucleotide

SEQ ID NO: 542680 - DNA, 51 bp, Artificial; identical to SEQ ID NO: 316577
  Synthetic oligonucleotide

SEQ ID NO: 542681 - DNA, 59 bp, Artificial; identical to SEQ ID NO: 316578
  Synthetic oligonucleotide

SEQ ID NO: 542682 - DNA, 51 bp, Artificial; identical to SEQ ID NO: 316581
  Synthetic oligonucleotide

SEQ ID NO: 542683 - DNA, 57 bp, Artificial; identical to SEQ ID NO: 316584
  Synthetic oligonucleotide

SEQ ID NO: 542684 - DNA, 52 bp, Artificial; identical to SEQ ID NO: 316585
  Synthetic oligonucleotide

SEQ ID NO: 542685 - DNA, 53 bp, Artificial; identical to SEQ ID NO: 316586
  Synthetic oligonucleotide

SEQ ID NO: 542686 - DNA, 53 bp, Artificial; identical to SEQ ID NO: 316589
  Synthetic oligonucleotide

SEQ ID NO: 542687 - DNA, 57 bp, Artificial; identical to SEQ ID NO: 7051
  Synthetic oligonucleotide

SEQ ID NO: 542688 - DNA, 54 bp, Artificial; identical to SEQ ID NO: 8072
  Synthetic oligonucleotide

SEQ ID NO: 542689 - DNA, 55 bp, Artificial; identical to SEQ ID NO: 316597
  Synthetic oligonucleotide

SEQ ID NO: 542690 - DNA, 57 bp, Artificial; identical to SEQ ID NO: 316598
  Synthetic oligonucleotide

SEQ ID NO: 542691 - DNA, 60 bp, Artificial; identical to SEQ ID NO: 316601
  Synthetic oligonucleotide

SEQ ID NO: 542692 - DNA, 55 bp, Artificial; identical to SEQ ID NO: 316602
  Synthetic oligonucleotide

SEQ ID NO: 542693 - DNA, 55 bp, Artificial; identical to SEQ ID NO: 316603
  Synthetic oligonucleotide

SEQ ID NO: 542694 - DNA, 53 bp, Artificial; identical to SEQ ID NO: 316605
  Synthetic oligonucleotide

SEQ ID NO: 542695 - DNA, 55 bp, Artificial; identical to SEQ ID NO: 316607
  Synthetic oligonucleotide

SEQ ID NO: 542696 - DNA, 60 bp, Artificial; identical to SEQ ID NO: 316609
  Synthetic oligonucleotide

SEQ ID NO: 542697 - DNA, 53 bp, Artificial; identical to SEQ ID NO: 316610
  Synthetic oligonucleotide

SEQ ID NO: 542698 - DNA, 52 bp, Artificial; identical to SEQ ID NO: 316612
  Synthetic oligonucleotide

SEQ ID NO: 542699 - DNA, 59 bp, Artificial; identical to SEQ ID NO: 316614
  Synthetic oligonucleotide

SEQ ID NO: 542700 - DNA, 52 bp, Artificial; identical to SEQ ID NO: 316615
  Synthetic oligonucleotide

SEQ ID NO: 542701 - DNA, 55 bp, Artificial; identical to SEQ ID NO: 316620
  Synthetic oligonucleotide

SEQ ID NO: 542702 - DNA, 54 bp, Artificial; identical to SEQ ID NO: 316622
  Synthetic oligonucleotide

SEQ ID NO: 542703 - DNA, 60 bp, Artificial; identical to SEQ ID NO: 316624
  Synthetic oligonucleotide

SEQ ID NO: 542704 - DNA, 54 bp, Artificial; identical to SEQ ID NO: 316625
  Synthetic oligonucleotide

SEQ ID NO: 542705 - DNA, 55 bp, Artificial; identical to SEQ ID NO: 316628
  Synthetic oligonucleotide

SEQ ID NO: 542706 - DNA, 56 bp, Artificial; identical to SEQ ID NO: 316629
  Synthetic oligonucleotide

SEQ ID NO: 542707 - DNA, 58 bp, Artificial; identical to SEQ ID NO: 316634
  Synthetic oligonucleotide

SEQ ID NO: 542708 - DNA, 55 bp, Artificial; identical to SEQ ID NO: 316635
  Synthetic oligonucleotide

SEQ ID NO: 542709 - DNA, 55 bp, Artificial; identical to SEQ ID NO: 316636
  Synthetic oligonucleotide

SEQ ID NO: 542710 - DNA, 54 bp, Artificial; identical to SEQ ID NO: 316639
  Synthetic oligonucleotide

SEQ ID NO: 542711 - DNA, 57 bp, Artificial; identical to SEQ ID NO: 316640
  Synthetic oligonucleotide

SEQ ID NO: 542712 - DNA, 50 bp, Artificial; identical to SEQ ID NO: 15286
  Synthetic oligonucleotide

SEQ ID NO: 542713 - DNA, 60 bp, Artificial; identical to SEQ ID NO: 316652
  Synthetic oligonucleotide

SEQ ID NO: 542714 - DNA, 58 bp, Artificial; identical to SEQ ID NO: 316653
  Synthetic oligonucleotide

SEQ ID NO: 542715 - DNA, 56 bp, Artificial; identical to SEQ ID NO: 316654
  Synthetic oligonucleotide

SEQ ID NO: 542716 - DNA, 55 bp, Artificial; identical to SEQ ID NO: 316656
  Synthetic oligonucleotide

SEQ ID NO: 542717 - DNA, 55 bp, Artificial; identical to SEQ ID NO: 316658
  Synthetic oligonucleotide

SEQ ID NO: 542718 - DNA, 60 bp, Artificial; identical to SEQ ID NO: 316662
  Synthetic oligonucleotide

SEQ ID NO: 542719 - DNA, 60 bp, Artificial; identical to SEQ ID NO: 316665
  Synthetic oligonucleotide

SEQ ID NO: 542720 - DNA, 57 bp, Artificial; identical to SEQ ID NO: 316674
  Synthetic oligonucleotide

SEQ ID NO: 542721 - DNA, 52 bp, Artificial; identical to SEQ ID NO: 316675
  Synthetic oligonucleotide

SEQ ID NO: 542722 - DNA, 55 bp, Artificial; identical to SEQ ID NO: 316681
  Synthetic oligonucleotide

SEQ ID NO: 542723 - DNA, 52 bp, Artificial; identical to SEQ ID NO: 316684
  Synthetic oligonucleotide

SEQ ID NO: 542724 - DNA, 58 bp, Artificial; identical to SEQ ID NO: 316685
  Synthetic oligonucleotide

SEQ ID NO: 542725 - DNA, 57 bp, Artificial; identical to SEQ ID NO: 316686
  Synthetic oligonucleotide

SEQ ID NO: 542726 - DNA, 57 bp, Artificial; identical to SEQ ID NO: 316689
  Synthetic oligonucleotide

SEQ ID NO: 542727 - DNA, 53 bp, Artificial; identical to SEQ ID NO: 316690
  Synthetic oligonucleotide

SEQ ID NO: 542728 - DNA, 59 bp, Artificial; identical to SEQ ID NO: 18345
  Synthetic oligonucleotide

SEQ ID NO: 542729 - DNA, 55 bp, Artificial; identical to SEQ ID NO: 316692
  Synthetic oligonucleotide

SEQ ID NO: 542730 - DNA, 60 bp, Artificial; identical to SEQ ID NO: 316694
  Synthetic oligonucleotide

SEQ ID NO: 542731 - DNA, 60 bp, Artificial; identical to SEQ ID NO: 316695
  Synthetic oligonucleotide

SEQ ID NO: 542732 - DNA, 58 bp, Artificial; identical to SEQ ID NO: 316699
  Synthetic oligonucleotide

SEQ ID NO: 542733 - DNA, 55 bp, Artificial; identical to SEQ ID NO: 316706
  Synthetic oligonucleotide

SEQ ID NO: 542734 - DNA, 59 bp, Artificial; identical to SEQ ID NO: 316707
  Synthetic oligonucleotide

SEQ ID NO: 542735 - DNA, 60 bp, Artificial; identical to SEQ ID NO: 316709
  Synthetic oligonucleotide

SEQ ID NO: 542736 - DNA, 55 bp, Artificial; identical to SEQ ID NO: 316710
  Synthetic oligonucleotide

SEQ ID NO: 542737 - DNA, 53 bp, Artificial; identical to SEQ ID NO: 316715
  Synthetic oligonucleotide

SEQ ID NO: 542738 - DNA, 55 bp, Artificial; identical to SEQ ID NO: 316717
  Synthetic oligonucleotide

SEQ ID NO: 542739 - DNA, 53 bp, Artificial; identical to SEQ ID NO: 316720
  Synthetic oligonucleotide

SEQ ID NO: 542740 - DNA, 60 bp, Artificial; identical to SEQ ID NO: 316722
  Synthetic oligonucleotide

SEQ ID NO: 542741 - DNA, 50 bp, Artificial; identical to SEQ ID NO: 316724
  Synthetic oligonucleotide

SEQ ID NO: 542742 - DNA, 60 bp, Artificial; identical to SEQ ID NO: 316726
  Synthetic oligonucleotide

SEQ ID NO: 542743 - DNA, 55 bp, Artificial; identical to SEQ ID NO: 316727
  Synthetic oligonucleotide

SEQ ID NO: 542744 - DNA, 55 bp, Artificial; identical to SEQ ID NO: 316730
  Synthetic oligonucleotide

SEQ ID NO: 542745 - DNA, 51 bp, Artificial; identical to SEQ ID NO: 316731
  Synthetic oligonucleotide

SEQ ID NO: 542746 - DNA, 60 bp, Artificial; identical to SEQ ID NO: 316734
  Synthetic oligonucleotide

SEQ ID NO: 542747 - DNA, 55 bp, Artificial; identical to SEQ ID NO: 316739
  Synthetic oligonucleotide

SEQ ID NO: 542748 - DNA, 60 bp, Artificial; identical to SEQ ID NO: 316740
  Synthetic oligonucleotide

SEQ ID NO: 542749 - DNA, 55 bp, Artificial; identical to SEQ ID NO: 316742
  Synthetic oligonucleotide

SEQ ID NO: 542750 - DNA, 59 bp, Artificial; identical to SEQ ID NO: 20237
  Synthetic oligonucleotide

SEQ ID NO: 542751 - DNA, 59 bp, Artificial; identical to SEQ ID NO: 316749
  Synthetic oligonucleotide

SEQ ID NO: 542752 - DNA, 57 bp, Artificial; identical to SEQ ID NO: 316750
  Synthetic oligonucleotide

SEQ ID NO: 542753 - DNA, 56 bp, Artificial; identical to SEQ ID NO: 316753
  Synthetic oligonucleotide

SEQ ID NO: 542754 - DNA, 58 bp, Artificial; identical to SEQ ID NO: 316754
  Synthetic oligonucleotide

SEQ ID NO: 542755 - DNA, 56 bp, Artificial; identical to SEQ ID NO: 316756
  Synthetic oligonucleotide

SEQ ID NO: 542756 - DNA, 54 bp, Artificial; identical to SEQ ID NO: 316762
  Synthetic oligonucleotide

SEQ ID NO: 542757 - DNA, 60 bp, Artificial; identical to SEQ ID NO: 316764
  Synthetic oligonucleotide

SEQ ID NO: 542758 - DNA, 60 bp, Artificial; identical to SEQ ID NO: 316765
  Synthetic oligonucleotide

SEQ ID NO: 542759 - DNA, 60 bp, Artificial; identical to SEQ ID NO: 316766
  Synthetic oligonucleotide

SEQ ID NO: 542760 - DNA, 60 bp, Artificial; identical to SEQ ID NO: 316770
  Synthetic oligonucleotide

SEQ ID NO: 542761 - DNA, 52 bp, Artificial; identical to SEQ ID NO: 316773
  Synthetic oligonucleotide

SEQ ID NO: 542762 - DNA, 55 bp, Artificial; identical to SEQ ID NO: 316776
  Synthetic oligonucleotide

SEQ ID NO: 542763 - DNA, 50 bp, Artificial; identical to SEQ ID NO: 316778
  Synthetic oligonucleotide

SEQ ID NO: 542764 - DNA, 55 bp, Artificial; identical to SEQ ID NO: 316779
  Synthetic oligonucleotide

SEQ ID NO: 542765 - DNA, 52 bp, Artificial; identical to SEQ ID NO: 316781
  Synthetic oligonucleotide

SEQ ID NO: 542766 - DNA, 55 bp, Artificial; identical to SEQ ID NO: 316782
  Synthetic oligonucleotide

SEQ ID NO: 542767 - DNA, 60 bp, Artificial; identical to SEQ ID NO: 316786
  Synthetic oligonucleotide

SEQ ID NO: 542768 - DNA, 60 bp, Artificial; identical to SEQ ID NO: 316789
  Synthetic oligonucleotide

SEQ ID NO: 542769 - DNA, 55 bp, Artificial; identical to SEQ ID NO: 316790
  Synthetic oligonucleotide

SEQ ID NO: 542770 - DNA, 50 bp, Artificial; identical to SEQ ID NO: 316791
  Synthetic oligonucleotide

SEQ ID NO: 542771 - DNA, 59 bp, Artificial; identical to SEQ ID NO: 316793
  Synthetic oligonucleotide

SEQ ID NO: 542772 - DNA, 59 bp, Artificial; identical to SEQ ID NO: 316794
  Synthetic oligonucleotide

SEQ ID NO: 542773 - DNA, 58 bp, Artificial; identical to SEQ ID NO: 316797
  Synthetic oligonucleotide

SEQ ID NO: 542774 - DNA, 50 bp, Artificial; identical to SEQ ID NO: 316799
  Synthetic oligonucleotide

SEQ ID NO: 542775 - DNA, 55 bp, Artificial; identical to SEQ ID NO: 316800
  Synthetic oligonucleotide

SEQ ID NO: 542776 - DNA, 60 bp, Artificial; identical to SEQ ID NO: 316802
  Synthetic oligonucleotide

SEQ ID NO: 542777 - DNA, 50 bp, Artificial; identical to SEQ ID NO: 11025
  Synthetic oligonucleotide

SEQ ID NO: 542778 - DNA, 55 bp, Artificial; identical to SEQ ID NO: 12661
  Synthetic oligonucleotide

SEQ ID NO: 542779 - DNA, 60 bp, Artificial; identical to SEQ ID NO: 316807
  Synthetic oligonucleotide

SEQ ID NO: 542780 - DNA, 60 bp, Artificial; identical to SEQ ID NO: 316809
  Synthetic oligonucleotide

SEQ ID NO: 542781 - DNA, 60 bp, Artificial; identical to SEQ ID NO: 316814
  Synthetic oligonucleotide

SEQ ID NO: 542782 - DNA, 60 bp, Artificial; identical to SEQ ID NO: 316815
  Synthetic oligonucleotide

SEQ ID NO: 542783 - DNA, 54 bp, Artificial; identical to SEQ ID NO: 316818
  Synthetic oligonucleotide

SEQ ID NO: 542784 - DNA, 60 bp, Artificial; identical to SEQ ID NO: 316819
  Synthetic oligonucleotide

SEQ ID NO: 542785 - DNA, 52 bp, Artificial; identical to SEQ ID NO: 316821
  Synthetic oligonucleotide

SEQ ID NO: 542786 - DNA, 60 bp, Artificial; identical to SEQ ID NO: 316823
  Synthetic oligonucleotide

SEQ ID NO: 542787 - DNA, 58 bp, Artificial; identical to SEQ ID NO: 19478
  Synthetic oligonucleotide

SEQ ID NO: 542788 - DNA, 53 bp, Artificial; identical to SEQ ID NO: 316825
  Synthetic oligonucleotide

SEQ ID NO: 542789 - DNA, 60 bp, Artificial; identical to SEQ ID NO: 316827
  Synthetic oligonucleotide

SEQ ID NO: 542790 - DNA, 51 bp, Artificial; identical to SEQ ID NO: 12103
  Synthetic oligonucleotide

SEQ ID NO: 542791 - DNA, 59 bp, Artificial; identical to SEQ ID NO: 316829
  Synthetic oligonucleotide

SEQ ID NO: 542792 - DNA, 56 bp, Artificial; identical to SEQ ID NO: 316831
  Synthetic oligonucleotide

SEQ ID NO: 542793 - DNA, 55 bp, Artificial; identical to SEQ ID NO: 316832
  Synthetic oligonucleotide

SEQ ID NO: 542794 - DNA, 57 bp, Artificial; identical to SEQ ID NO: 316833
  Synthetic oligonucleotide

SEQ ID NO: 542795 - DNA, 59 bp, Artificial; identical to SEQ ID NO: 316836
  Synthetic oligonucleotide

SEQ ID NO: 542796 - DNA, 56 bp, Artificial; identical to SEQ ID NO: 316839
  Synthetic oligonucleotide

SEQ ID NO: 542797 - DNA, 53 bp, Artificial; identical to SEQ ID NO: 316841
  Synthetic oligonucleotide

SEQ ID NO: 542798 - DNA, 60 bp, Artificial; identical to SEQ ID NO: 316846
  Synthetic oligonucleotide

SEQ ID NO: 542799 - DNA, 60 bp, Artificial; identical to SEQ ID NO: 316848
  Synthetic oligonucleotide

SEQ ID NO: 542800 - DNA, 60 bp, Artificial; identical to SEQ ID NO: 316849
  Synthetic oligonucleotide

SEQ ID NO: 542801 - DNA, 60 bp, Artificial; identical to SEQ ID NO: 316852
  Synthetic oligonucleotide

SEQ ID NO: 542802 - DNA, 60 bp, Artificial; identical to SEQ ID NO: 316853
  Synthetic oligonucleotide

SEQ ID NO: 542803 - DNA, 54 bp, Artificial; identical to SEQ ID NO: 316854
  Synthetic oligonucleotide

SEQ ID NO: 542804 - DNA, 57 bp, Artificial; identical to SEQ ID NO: 316856
  Synthetic oligonucleotide

SEQ ID NO: 542805 - DNA, 59 bp, Artificial; identical to SEQ ID NO: 316858
  Synthetic oligonucleotide

SEQ ID NO: 542806 - DNA, 54 bp, Artificial; identical to SEQ ID NO: 316859
  Synthetic oligonucleotide

SEQ ID NO: 542807 - DNA, 60 bp, Artificial; identical to SEQ ID NO: 8212
  Synthetic oligonucleotide

SEQ ID NO: 542808 - DNA, 57 bp, Artificial; identical to SEQ ID NO: 316862
  Synthetic oligonucleotide

SEQ ID NO: 542809 - DNA, 60 bp, Artificial; identical to SEQ ID NO: 316869
  Synthetic oligonucleotide

SEQ ID NO: 542810 - DNA, 59 bp, Artificial; identical to SEQ ID NO: 316870
  Synthetic oligonucleotide

SEQ ID NO: 542811 - DNA, 57 bp, Artificial; identical to SEQ ID NO: 316871
  Synthetic oligonucleotide

SEQ ID NO: 542812 - DNA, 59 bp, Artificial; identical to SEQ ID NO: 316876
  Synthetic oligonucleotide

SEQ ID NO: 542813 - DNA, 60 bp, Artificial; identical to SEQ ID NO: 316877
  Synthetic oligonucleotide

SEQ ID NO: 542814 - DNA, 60 bp, Artificial; identical to SEQ ID NO: 316878
  Synthetic oligonucleotide

SEQ ID NO: 542815 - DNA, 56 bp, Artificial; identical to SEQ ID NO: 316879
  Synthetic oligonucleotide

SEQ ID NO: 542816 - DNA, 53 bp, Artificial; identical to SEQ ID NO: 316880
  Synthetic oligonucleotide

SEQ ID NO: 542817 - DNA, 59 bp, Artificial; identical to SEQ ID NO: 316881
  Synthetic oligonucleotide

SEQ ID NO: 542818 - DNA, 50 bp, Artificial; identical to SEQ ID NO: 316884
  Synthetic oligonucleotide

SEQ ID NO: 542819 - DNA, 53 bp, Artificial; identical to SEQ ID NO: 316887
  Synthetic oligonucleotide

SEQ ID NO: 542820 - DNA, 55 bp, Artificial; identical to SEQ ID NO: 316889
  Synthetic oligonucleotide

SEQ ID NO: 542821 - DNA, 57 bp, Artificial; identical to SEQ ID NO: 316894
  Synthetic oligonucleotide

SEQ ID NO: 542822 - DNA, 55 bp, Artificial; identical to SEQ ID NO: 316895
  Synthetic oligonucleotide

SEQ ID NO: 542823 - DNA, 56 bp, Artificial; identical to SEQ ID NO: 316898
  Synthetic oligonucleotide

SEQ ID NO: 542824 - DNA, 59 bp, Artificial; identical to SEQ ID NO: 316900
  Synthetic oligonucleotide

SEQ ID NO: 542825 - DNA, 56 bp, Artificial; identical to SEQ ID NO: 316901
  Synthetic oligonucleotide

SEQ ID NO: 542826 - DNA, 54 bp, Artificial; identical to SEQ ID NO: 316909
  Synthetic oligonucleotide

SEQ ID NO: 542827 - DNA, 60 bp, Artificial; identical to SEQ ID NO: 316910
  Synthetic oligonucleotide

SEQ ID NO: 542828 - DNA, 60 bp, Artificial; identical to SEQ ID NO: 316912
  Synthetic oligonucleotide

SEQ ID NO: 542829 - DNA, 51 bp, Artificial; identical to SEQ ID NO: 316915
  Synthetic oligonucleotide

SEQ ID NO: 542830 - DNA, 55 bp, Artificial; identical to SEQ ID NO: 316916
  Synthetic oligonucleotide

SEQ ID NO: 542831 - DNA, 59 bp, Artificial; identical to SEQ ID NO: 316918
  Synthetic oligonucleotide

SEQ ID NO: 542832 - DNA, 58 bp, Artificial; identical to SEQ ID NO: 316922
  Synthetic oligonucleotide

SEQ ID NO: 542833 - DNA, 60 bp, Artificial; identical to SEQ ID NO: 21843
  Synthetic oligonucleotide

SEQ ID NO: 542834 - DNA, 60 bp, Artificial; identical to SEQ ID NO: 316923
  Synthetic oligonucleotide

SEQ ID NO: 542835 - DNA, 58 bp, Artificial; identical to SEQ ID NO: 316926
  Synthetic oligonucleotide

SEQ ID NO: 542836 - DNA, 60 bp, Artificial; identical to SEQ ID NO: 316928
  Synthetic oligonucleotide

SEQ ID NO: 542837 - DNA, 54 bp, Artificial; identical to SEQ ID NO: 316929
  Synthetic oligonucleotide

SEQ ID NO: 542838 - DNA, 60 bp, Artificial; identical to SEQ ID NO: 316931
  Synthetic oligonucleotide

SEQ ID NO: 542839 - DNA, 60 bp, Artificial; identical to SEQ ID NO: 316932
  Synthetic oligonucleotide

SEQ ID NO: 542840 - DNA, 55 bp, Artificial; identical to SEQ ID NO: 316934
  Synthetic oligonucleotide

SEQ ID NO: 542841 - DNA, 55 bp, Artificial; identical to SEQ ID NO: 316935
  Synthetic oligonucleotide

SEQ ID NO: 542842 - DNA, 55 bp, Artificial; identical to SEQ ID NO: 316939
  Synthetic oligonucleotide

SEQ ID NO: 542843 - DNA, 56 bp, Artificial; identical to SEQ ID NO: 316940
  Synthetic oligonucleotide

SEQ ID NO: 542844 - DNA, 60 bp, Artificial; identical to SEQ ID NO: 316942
  Synthetic oligonucleotide

SEQ ID NO: 542845 - DNA, 55 bp, Artificial; identical to SEQ ID NO: 316943
  Synthetic oligonucleotide

SEQ ID NO: 542846 - DNA, 56 bp, Artificial; identical to SEQ ID NO: 316944
  Synthetic oligonucleotide

SEQ ID NO: 542847 - DNA, 60 bp, Artificial; identical to SEQ ID NO: 316947
  Synthetic oligonucleotide

SEQ ID NO: 542848 - DNA, 59 bp, Artificial; identical to SEQ ID NO: 18636
  Synthetic oligonucleotide

SEQ ID NO: 542849 - DNA, 60 bp, Artificial; identical to SEQ ID NO: 316948
  Synthetic oligonucleotide

SEQ ID NO: 542850 - DNA, 56 bp, Artificial; identical to SEQ ID NO: 316949
  Synthetic oligonucleotide

SEQ ID NO: 542851 - DNA, 55 bp, Artificial; identical to SEQ ID NO: 316954
  Synthetic oligonucleotide

SEQ ID NO: 542852 - DNA, 58 bp, Artificial; identical to SEQ ID NO: 316956
  Synthetic oligonucleotide

SEQ ID NO: 542853 - DNA, 51 bp, Artificial; identical to SEQ ID NO: 316957
  Synthetic oligonucleotide

SEQ ID NO: 542854 - DNA, 53 bp, Artificial; identical to SEQ ID NO: 316958
  Synthetic oligonucleotide

SEQ ID NO: 542855 - DNA, 57 bp, Artificial; identical to SEQ ID NO: 316964
  Synthetic oligonucleotide

SEQ ID NO: 542856 - DNA, 55 bp, Artificial; identical to SEQ ID NO: 316965
  Synthetic oligonucleotide

SEQ ID NO: 542857 - DNA, 57 bp, Artificial; identical to SEQ ID NO: 316966
  Synthetic oligonucleotide

SEQ ID NO: 542858 - DNA, 54 bp, Artificial; identical to SEQ ID NO: 316967
  Synthetic oligonucleotide

SEQ ID NO: 542859 - DNA, 53 bp, Artificial; identical to SEQ ID NO: 316968
  Synthetic oligonucleotide

SEQ ID NO: 542860 - DNA, 56 bp, Artificial; identical to SEQ ID NO: 316970
  Synthetic oligonucleotide

SEQ ID NO: 542861 - DNA, 59 bp, Artificial; identical to SEQ ID NO: 316971
  Synthetic oligonucleotide

SEQ ID NO: 542862 - DNA, 60 bp, Artificial; identical to SEQ ID NO: 316974
  Synthetic oligonucleotide

SEQ ID NO: 542863 - DNA, 51 bp, Artificial; identical to SEQ ID NO: 316976
  Synthetic oligonucleotide

SEQ ID NO: 542864 - DNA, 60 bp, Artificial; identical to SEQ ID NO: 316978
  Synthetic oligonucleotide

SEQ ID NO: 542865 - DNA, 55 bp, Artificial; identical to SEQ ID NO: 316980
  Synthetic oligonucleotide

SEQ ID NO: 542866 - DNA, 53 bp, Artificial; identical to SEQ ID NO: 316984
  Synthetic oligonucleotide

SEQ ID NO: 542867 - DNA, 60 bp, Artificial; identical to SEQ ID NO: 316986
  Synthetic oligonucleotide

SEQ ID NO: 542868 - DNA, 55 bp, Artificial; identical to SEQ ID NO: 316987
  Synthetic oligonucleotide

SEQ ID NO: 542869 - DNA, 60 bp, Artificial; identical to SEQ ID NO: 316988
  Synthetic oligonucleotide

SEQ ID NO: 542870 - DNA, 60 bp, Artificial; identical to SEQ ID NO: 316989
  Synthetic oligonucleotide

SEQ ID NO: 542871 - DNA, 57 bp, Artificial; identical to SEQ ID NO: 316991
  Synthetic oligonucleotide

SEQ ID NO: 542872 - DNA, 50 bp, Artificial; identical to SEQ ID NO: 316993
  Synthetic oligonucleotide

SEQ ID NO: 542873 - DNA, 60 bp, Artificial; identical to SEQ ID NO: 8349
  Synthetic oligonucleotide

SEQ ID NO: 542874 - DNA, 60 bp, Artificial; identical to SEQ ID NO: 317001
  Synthetic oligonucleotide

SEQ ID NO: 542875 - DNA, 55 bp, Artificial; identical to SEQ ID NO: 317004
  Synthetic oligonucleotide

SEQ ID NO: 542876 - DNA, 58 bp, Artificial; identical to SEQ ID NO: 317005
  Synthetic oligonucleotide

SEQ ID NO: 542877 - DNA, 60 bp, Artificial; identical to SEQ ID NO: 317006
  Synthetic oligonucleotide

SEQ ID NO: 542878 - DNA, 60 bp, Artificial; identical to SEQ ID NO: 317009
  Synthetic oligonucleotide

SEQ ID NO: 542879 - DNA, 53 bp, Artificial; identical to SEQ ID NO: 317011
  Synthetic oligonucleotide

SEQ ID NO: 542880 - DNA, 55 bp, Artificial; identical to SEQ ID NO: 317012
  Synthetic oligonucleotide

SEQ ID NO: 542881 - DNA, 55 bp, Artificial; identical to SEQ ID NO: 317018
  Synthetic oligonucleotide

SEQ ID NO: 542882 - DNA, 55 bp, Artificial; identical to SEQ ID NO: 317019
  Synthetic oligonucleotide

SEQ ID NO: 542883 - DNA, 60 bp, Artificial; identical to SEQ ID NO: 317022
  Synthetic oligonucleotide

SEQ ID NO: 542884 - DNA, 59 bp, Artificial; identical to SEQ ID NO: 317024
  Synthetic oligonucleotide

SEQ ID NO: 542885 - DNA, 60 bp, Artificial; identical to SEQ ID NO: 317026
  Synthetic oligonucleotide

SEQ ID NO: 542886 - DNA, 60 bp, Artificial; identical to SEQ ID NO: 317033
  Synthetic oligonucleotide

SEQ ID NO: 542887 - DNA, 59 bp, Artificial; identical to SEQ ID NO: 317034
  Synthetic oligonucleotide

SEQ ID NO: 542888 - DNA, 52 bp, Artificial; identical to SEQ ID NO: 317036
  Synthetic oligonucleotide

SEQ ID NO: 542889 - DNA, 54 bp, Artificial; identical to SEQ ID NO: 317041
  Synthetic oligonucleotide

SEQ ID NO: 542890 - DNA, 57 bp, Artificial; identical to SEQ ID NO: 317043
  Synthetic oligonucleotide

SEQ ID NO: 542891 - DNA, 55 bp, Artificial; identical to SEQ ID NO: 317045
  Synthetic oligonucleotide

SEQ ID NO: 542892 - DNA, 60 bp, Artificial; identical to SEQ ID NO: 15836
  Synthetic oligonucleotide

SEQ ID NO: 542893 - DNA, 60 bp, Artificial; identical to SEQ ID NO: 317047
  Synthetic oligonucleotide

SEQ ID NO: 542894 - DNA, 53 bp, Artificial; identical to SEQ ID NO: 317055
  Synthetic oligonucleotide

SEQ ID NO: 542895 - DNA, 58 bp, Artificial; identical to SEQ ID NO: 317056
  Synthetic oligonucleotide

SEQ ID NO: 542896 - DNA, 60 bp, Artificial; identical to SEQ ID NO: 317063
  Synthetic oligonucleotide

SEQ ID NO: 542897 - DNA, 51 bp, Artificial; identical to SEQ ID NO: 317069
  Synthetic oligonucleotide

SEQ ID NO: 542898 - DNA, 57 bp, Artificial; identical to SEQ ID NO: 317076
  Synthetic oligonucleotide

SEQ ID NO: 542899 - DNA, 56 bp, Artificial; identical to SEQ ID NO: 317078
  Synthetic oligonucleotide

SEQ ID NO: 542900 - DNA, 52 bp, Artificial; identical to SEQ ID NO: 317081
  Synthetic oligonucleotide

SEQ ID NO: 542901 - DNA, 60 bp, Artificial; identical to SEQ ID NO: 317082
  Synthetic oligonucleotide

SEQ ID NO: 542902 - DNA, 58 bp, Artificial; identical to SEQ ID NO: 317083
  Synthetic oligonucleotide

SEQ ID NO: 542903 - DNA, 58 bp, Artificial; identical to SEQ ID NO: 317085
  Synthetic oligonucleotide

SEQ ID NO: 542904 - DNA, 58 bp, Artificial; identical to SEQ ID NO: 317088
  Synthetic oligonucleotide

SEQ ID NO: 542905 - DNA, 58 bp, Artificial; identical to SEQ ID NO: 317089
  Synthetic oligonucleotide

SEQ ID NO: 542906 - DNA, 57 bp, Artificial; identical to SEQ ID NO: 317090
  Synthetic oligonucleotide

SEQ ID NO: 542907 - DNA, 55 bp, Artificial; identical to SEQ ID NO: 317092
  Synthetic oligonucleotide

SEQ ID NO: 542908 - DNA, 60 bp, Artificial; identical to SEQ ID NO: 317095
  Synthetic oligonucleotide

SEQ ID NO: 542909 - DNA, 60 bp, Artificial; identical to SEQ ID NO: 317096
  Synthetic oligonucleotide

SEQ ID NO: 542910 - DNA, 54 bp, Artificial; identical to SEQ ID NO: 317097
  Synthetic oligonucleotide

SEQ ID NO: 542911 - DNA, 60 bp, Artificial; identical to SEQ ID NO: 317101
  Synthetic oligonucleotide

SEQ ID NO: 542912 - DNA, 51 bp, Artificial; identical to SEQ ID NO: 317103
  Synthetic oligonucleotide

SEQ ID NO: 542913 - DNA, 58 bp, Artificial; identical to SEQ ID NO: 317106
  Synthetic oligonucleotide

SEQ ID NO: 542914 - DNA, 57 bp, Artificial; identical to SEQ ID NO: 317109
  Synthetic oligonucleotide

SEQ ID NO: 542915 - DNA, 59 bp, Artificial; identical to SEQ ID NO: 317110
  Synthetic oligonucleotide

SEQ ID NO: 542916 - DNA, 56 bp, Artificial; identical to SEQ ID NO: 317112
  Synthetic oligonucleotide

SEQ ID NO: 542917 - DNA, 60 bp, Artificial; identical to SEQ ID NO: 317114
  Synthetic oligonucleotide

SEQ ID NO: 542918 - DNA, 50 bp, Artificial; identical to SEQ ID NO: 317117
  Synthetic oligonucleotide

SEQ ID NO: 542919 - DNA, 58 bp, Artificial; identical to SEQ ID NO: 7067
  Synthetic oligonucleotide

SEQ ID NO: 542920 - DNA, 60 bp, Artificial; identical to SEQ ID NO: 317120
  Synthetic oligonucleotide

SEQ ID NO: 542921 - DNA, 60 bp, Artificial; identical to SEQ ID NO: 317121
  Synthetic oligonucleotide

SEQ ID NO: 542922 - DNA, 59 bp, Artificial; identical to SEQ ID NO: 317126
  Synthetic oligonucleotide

SEQ ID NO: 542923 - DNA, 56 bp, Artificial; identical to SEQ ID NO: 317130
  Synthetic oligonucleotide

SEQ ID NO: 542924 - DNA, 54 bp, Artificial; identical to SEQ ID NO: 317134
  Synthetic oligonucleotide

SEQ ID NO: 542925 - DNA, 60 bp, Artificial; identical to SEQ ID NO: 317136
  Synthetic oligonucleotide

SEQ ID NO: 542926 - DNA, 60 bp, Artificial; identical to SEQ ID NO: 317138
  Synthetic oligonucleotide

SEQ ID NO: 542927 - DNA, 58 bp, Artificial; identical to SEQ ID NO: 317141
  Synthetic oligonucleotide

SEQ ID NO: 542928 - DNA, 60 bp, Artificial; identical to SEQ ID NO: 7081
  Synthetic oligonucleotide

SEQ ID NO: 542929 - DNA, 60 bp, Artificial; identical to SEQ ID NO: 317146
  Synthetic oligonucleotide

SEQ ID NO: 542930 - DNA, 60 bp, Artificial; identical to SEQ ID NO: 317147
  Synthetic oligonucleotide

SEQ ID NO: 542931 - DNA, 60 bp, Artificial; identical to SEQ ID NO: 317154
  Synthetic oligonucleotide

SEQ ID NO: 542932 - DNA, 60 bp, Artificial; identical to SEQ ID NO: 317155
  Synthetic oligonucleotide

SEQ ID NO: 542933 - DNA, 54 bp, Artificial; identical to SEQ ID NO: 317157
  Synthetic oligonucleotide

SEQ ID NO: 542934 - DNA, 52 bp, Artificial; identical to SEQ ID NO: 317160
  Synthetic oligonucleotide

SEQ ID NO: 542935 - DNA, 60 bp, Artificial; identical to SEQ ID NO: 317166
  Synthetic oligonucleotide

SEQ ID NO: 542936 - DNA, 60 bp, Artificial; identical to SEQ ID NO: 317173
  Synthetic oligonucleotide

SEQ ID NO: 542937 - DNA, 60 bp, Artificial; identical to SEQ ID NO: 317174
  Synthetic oligonucleotide

SEQ ID NO: 542938 - DNA, 55 bp, Artificial; identical to SEQ ID NO: 317178
  Synthetic oligonucleotide

SEQ ID NO: 542939 - DNA, 52 bp, Artificial; identical to SEQ ID NO: 317179
  Synthetic oligonucleotide

SEQ ID NO: 542940 - DNA, 53 bp, Artificial; identical to SEQ ID NO: 317182
  Synthetic oligonucleotide

SEQ ID NO: 542941 - DNA, 60 bp, Artificial; identical to SEQ ID NO: 317187
  Synthetic oligonucleotide

SEQ ID NO: 542942 - DNA, 53 bp, Artificial; identical to SEQ ID NO: 317189
  Synthetic oligonucleotide

SEQ ID NO: 542943 - DNA, 54 bp, Artificial; identical to SEQ ID NO: 317193
  Synthetic oligonucleotide

SEQ ID NO: 542944 - DNA, 60 bp, Artificial; identical to SEQ ID NO: 317194
  Synthetic oligonucleotide

SEQ ID NO: 542945 - DNA, 55 bp, Artificial; identical to SEQ ID NO: 317195
  Synthetic oligonucleotide

SEQ ID NO: 542946 - DNA, 54 bp, Artificial; identical to SEQ ID NO: 317197
  Synthetic oligonucleotide

SEQ ID NO: 542947 - DNA, 51 bp, Artificial; identical to SEQ ID NO: 317202
  Synthetic oligonucleotide

SEQ ID NO: 542948 - DNA, 59 bp, Artificial; identical to SEQ ID NO: 317205
  Synthetic oligonucleotide

SEQ ID NO: 542949 - DNA, 59 bp, Artificial; identical to SEQ ID NO: 19416
  Synthetic oligonucleotide

SEQ ID NO: 542950 - DNA, 60 bp, Artificial; identical to SEQ ID NO: 317208
  Synthetic oligonucleotide

SEQ ID NO: 542951 - DNA, 55 bp, Artificial; identical to SEQ ID NO: 317213
  Synthetic oligonucleotide

SEQ ID NO: 542952 - DNA, 59 bp, Artificial; identical to SEQ ID NO: 317214
  Synthetic oligonucleotide

SEQ ID NO: 542953 - DNA, 59 bp, Artificial; identical to SEQ ID NO: 317215
  Synthetic oligonucleotide

SEQ ID NO: 542954 - DNA, 60 bp, Artificial; identical to SEQ ID NO: 317216
  Synthetic oligonucleotide

SEQ ID NO: 542955 - DNA, 60 bp, Artificial; identical to SEQ ID NO: 317218
  Synthetic oligonucleotide

SEQ ID NO: 542956 - DNA, 54 bp, Artificial; identical to SEQ ID NO: 317220
  Synthetic oligonucleotide

SEQ ID NO: 542957 - DNA, 55 bp, Artificial; identical to SEQ ID NO: 317222
  Synthetic oligonucleotide

SEQ ID NO: 542958 - DNA, 60 bp, Artificial; identical to SEQ ID NO: 317224
  Synthetic oligonucleotide

SEQ ID NO: 542959 - DNA, 53 bp, Artificial; identical to SEQ ID NO: 317226
  Synthetic oligonucleotide

SEQ ID NO: 542960 - DNA, 60 bp, Artificial; identical to SEQ ID NO: 317227
  Synthetic oligonucleotide

SEQ ID NO: 542961 - DNA, 58 bp, Artificial; identical to SEQ ID NO: 317228
  Synthetic oligonucleotide

SEQ ID NO: 542962 - DNA, 60 bp, Artificial; identical to SEQ ID NO: 317229
  Synthetic oligonucleotide

SEQ ID NO: 542963 - DNA, 56 bp, Artificial; identical to SEQ ID NO: 19954
  Synthetic oligonucleotide

SEQ ID NO: 542964 - DNA, 56 bp, Artificial; identical to SEQ ID NO: 317231
  Synthetic oligonucleotide

SEQ ID NO: 542965 - DNA, 60 bp, Artificial; identical to SEQ ID NO: 317233
  Synthetic oligonucleotide

SEQ ID NO: 542966 - DNA, 59 bp, Artificial; identical to SEQ ID NO: 317234
  Synthetic oligonucleotide

SEQ ID NO: 542967 - DNA, 54 bp, Artificial; identical to SEQ ID NO: 317235
  Synthetic oligonucleotide

SEQ ID NO: 542968 - DNA, 59 bp, Artificial; identical to SEQ ID NO: 317240
  Synthetic oligonucleotide

SEQ ID NO: 542969 - DNA, 59 bp, Artificial; identical to SEQ ID NO: 317242
  Synthetic oligonucleotide

SEQ ID NO: 542970 - DNA, 60 bp, Artificial; identical to SEQ ID NO: 317243
  Synthetic oligonucleotide

SEQ ID NO: 542971 - DNA, 52 bp, Artificial; identical to SEQ ID NO: 317244
  Synthetic oligonucleotide

SEQ ID NO: 542972 - DNA, 55 bp, Artificial; identical to SEQ ID NO: 317245
  Synthetic oligonucleotide

SEQ ID NO: 542973 - DNA, 59 bp, Artificial; identical to SEQ ID NO: 317248
  Synthetic oligonucleotide

SEQ ID NO: 542974 - DNA, 55 bp, Artificial; identical to SEQ ID NO: 7736
  Synthetic oligonucleotide

SEQ ID NO: 542975 - DNA, 54 bp, Artificial; identical to SEQ ID NO: 317253
  Synthetic oligonucleotide

SEQ ID NO: 542976 - DNA, 60 bp, Artificial; identical to SEQ ID NO: 317255
  Synthetic oligonucleotide

SEQ ID NO: 542977 - DNA, 55 bp, Artificial; identical to SEQ ID NO: 317263
  Synthetic oligonucleotide

SEQ ID NO: 542978 - DNA, 59 bp, Artificial; identical to SEQ ID NO: 317265
  Synthetic oligonucleotide

SEQ ID NO: 542979 - DNA, 59 bp, Artificial; identical to SEQ ID NO: 317266
  Synthetic oligonucleotide

SEQ ID NO: 542980 - DNA, 58 bp, Artificial; identical to SEQ ID NO: 317271
  Synthetic oligonucleotide

SEQ ID NO: 542981 - DNA, 55 bp, Artificial; identical to SEQ ID NO: 317274
  Synthetic oligonucleotide

SEQ ID NO: 542982 - DNA, 56 bp, Artificial; identical to SEQ ID NO: 317275
  Synthetic oligonucleotide

SEQ ID NO: 542983 - DNA, 58 bp, Artificial; identical to SEQ ID NO: 317277
  Synthetic oligonucleotide

SEQ ID NO: 542984 - DNA, 57 bp, Artificial; identical to SEQ ID NO: 317278
  Synthetic oligonucleotide

SEQ ID NO: 542985 - DNA, 60 bp, Artificial; identical to SEQ ID NO: 317281
  Synthetic oligonucleotide

SEQ ID NO: 542986 - DNA, 60 bp, Artificial; identical to SEQ ID NO: 317284
  Synthetic oligonucleotide

SEQ ID NO: 542987 - DNA, 52 bp, Artificial; identical to SEQ ID NO: 317286
  Synthetic oligonucleotide

SEQ ID NO: 542988 - DNA, 55 bp, Artificial; identical to SEQ ID NO: 317287
  Synthetic oligonucleotide

SEQ ID NO: 542989 - DNA, 60 bp, Artificial; identical to SEQ ID NO: 317289
  Synthetic oligonucleotide

SEQ ID NO: 542990 - DNA, 53 bp, Artificial; identical to SEQ ID NO: 317290
  Synthetic oligonucleotide

SEQ ID NO: 542991 - DNA, 56 bp, Artificial; identical to SEQ ID NO: 317291
  Synthetic oligonucleotide

SEQ ID NO: 542992 - DNA, 60 bp, Artificial; identical to SEQ ID NO: 15549
  Synthetic oligonucleotide

SEQ ID NO: 542993 - DNA, 54 bp, Artificial; identical to SEQ ID NO: 317301
  Synthetic oligonucleotide

SEQ ID NO: 542994 - DNA, 59 bp, Artificial; identical to SEQ ID NO: 317302
  Synthetic oligonucleotide

SEQ ID NO: 542995 - DNA, 60 bp, Artificial; identical to SEQ ID NO: 317303
  Synthetic oligonucleotide

SEQ ID NO: 542996 - DNA, 57 bp, Artificial; identical to SEQ ID NO: 317306
  Synthetic oligonucleotide

SEQ ID NO: 542997 - DNA, 51 bp, Artificial; identical to SEQ ID NO: 317307
  Synthetic oligonucleotide

SEQ ID NO: 542998 - DNA, 60 bp, Artificial; identical to SEQ ID NO: 317309
  Synthetic oligonucleotide

SEQ ID NO: 542999 - DNA, 55 bp, Artificial; identical to SEQ ID NO: 317311
  Synthetic oligonucleotide

SEQ ID NO: 543000 - DNA, 55 bp, Artificial; identical to SEQ ID NO: 317314
  Synthetic oligonucleotide

SEQ ID NO: 543001 - DNA, 60 bp, Artificial; identical to SEQ ID NO: 317315
  Synthetic oligonucleotide

SEQ ID NO: 543002 - DNA, 56 bp, Artificial; identical to SEQ ID NO: 18557
  Synthetic oligonucleotide

SEQ ID NO: 543003 - DNA, 55 bp, Artificial; identical to SEQ ID NO: 317316
  Synthetic oligonucleotide

SEQ ID NO: 543004 - DNA, 55 bp, Artificial; identical to SEQ ID NO: 317318
  Synthetic oligonucleotide

SEQ ID NO: 543005 - DNA, 53 bp, Artificial; identical to SEQ ID NO: 317319
  Synthetic oligonucleotide

SEQ ID NO: 543006 - DNA, 59 bp, Artificial; identical to SEQ ID NO: 317320
  Synthetic oligonucleotide

SEQ ID NO: 543007 - DNA, 54 bp, Artificial; identical to SEQ ID NO: 317321
  Synthetic oligonucleotide

SEQ ID NO: 543008 - DNA, 56 bp, Artificial; identical to SEQ ID NO: 317322
  Synthetic oligonucleotide

SEQ ID NO: 543009 - DNA, 54 bp, Artificial; identical to SEQ ID NO: 317324
  Synthetic oligonucleotide

SEQ ID NO: 543010 - DNA, 55 bp, Artificial; identical to SEQ ID NO: 317326
  Synthetic oligonucleotide

SEQ ID NO: 543011 - DNA, 51 bp, Artificial; identical to SEQ ID NO: 317328
  Synthetic oligonucleotide

SEQ ID NO: 543012 - DNA, 60 bp, Artificial; identical to SEQ ID NO: 317329
  Synthetic oligonucleotide

SEQ ID NO: 543013 - DNA, 58 bp, Artificial; identical to SEQ ID NO: 19481
  Synthetic oligonucleotide

SEQ ID NO: 543014 - DNA, 57 bp, Artificial; identical to SEQ ID NO: 317332
  Synthetic oligonucleotide

SEQ ID NO: 543015 - DNA, 55 bp, Artificial; identical to SEQ ID NO: 317338
  Synthetic oligonucleotide

SEQ ID NO: 543016 - DNA, 57 bp, Artificial; identical to SEQ ID NO: 317341
  Synthetic oligonucleotide

SEQ ID NO: 543017 - DNA, 58 bp, Artificial; identical to SEQ ID NO: 317342
  Synthetic oligonucleotide

SEQ ID NO: 543018 - DNA, 51 bp, Artificial; identical to SEQ ID NO: 317344
  Synthetic oligonucleotide

SEQ ID NO: 543019 - DNA, 51 bp, Artificial; identical to SEQ ID NO: 317345
  Synthetic oligonucleotide

SEQ ID NO: 543020 - DNA, 56 bp, Artificial; identical to SEQ ID NO: 317347
  Synthetic oligonucleotide

SEQ ID NO: 543021 - DNA, 59 bp, Artificial; identical to SEQ ID NO: 317348
  Synthetic oligonucleotide

SEQ ID NO: 543022 - DNA, 53 bp, Artificial; identical to SEQ ID NO: 317349
  Synthetic oligonucleotide

SEQ ID NO: 543023 - DNA, 59 bp, Artificial; identical to SEQ ID NO: 317350
  Synthetic oligonucleotide

SEQ ID NO: 543024 - DNA, 55 bp, Artificial; identical to SEQ ID NO: 317352
  Synthetic oligonucleotide

SEQ ID NO: 543025 - DNA, 60 bp, Artificial; identical to SEQ ID NO: 317353
  Synthetic oligonucleotide

SEQ ID NO: 543026 - DNA, 55 bp, Artificial; identical to SEQ ID NO: 317354
  Synthetic oligonucleotide

SEQ ID NO: 543027 - DNA, 55 bp, Artificial; identical to SEQ ID NO: 317358
  Synthetic oligonucleotide

SEQ ID NO: 543028 - DNA, 60 bp, Artificial; identical to SEQ ID NO: 317359
  Synthetic oligonucleotide

SEQ ID NO: 543029 - DNA, 55 bp, Artificial; identical to SEQ ID NO: 317362
  Synthetic oligonucleotide

SEQ ID NO: 543030 - DNA, 60 bp, Artificial; identical to SEQ ID NO: 317364
  Synthetic oligonucleotide

SEQ ID NO: 543031 - DNA, 58 bp, Artificial; identical to SEQ ID NO: 317367
  Synthetic oligonucleotide

SEQ ID NO: 543032 - DNA, 54 bp, Artificial; identical to SEQ ID NO: 317368
  Synthetic oligonucleotide

SEQ ID NO: 543033 - DNA, 55 bp, Artificial; identical to SEQ ID NO: 317369
  Synthetic oligonucleotide

SEQ ID NO: 543034 - DNA, 56 bp, Artificial; identical to SEQ ID NO: 317372
  Synthetic oligonucleotide

SEQ ID NO: 543035 - DNA, 60 bp, Artificial; identical to SEQ ID NO: 317377
  Synthetic oligonucleotide

SEQ ID NO: 543036 - DNA, 55 bp, Artificial; identical to SEQ ID NO: 317380
  Synthetic oligonucleotide

SEQ ID NO: 543037 - DNA, 60 bp, Artificial; identical to SEQ ID NO: 317381
  Synthetic oligonucleotide

SEQ ID NO: 543038 - DNA, 54 bp, Artificial; identical to SEQ ID NO: 317382
  Synthetic oligonucleotide

SEQ ID NO: 543039 - DNA, 60 bp, Artificial; identical to SEQ ID NO: 317384
  Synthetic oligonucleotide

SEQ ID NO: 543040 - DNA, 60 bp, Artificial; identical to SEQ ID NO: 317385
  Synthetic oligonucleotide

SEQ ID NO: 543041 - DNA, 58 bp, Artificial; identical to SEQ ID NO: 317386
  Synthetic oligonucleotide

SEQ ID NO: 543042 - DNA, 55 bp, Artificial; identical to SEQ ID NO: 18134
  Synthetic oligonucleotide

SEQ ID NO: 543043 - DNA, 60 bp, Artificial; identical to SEQ ID NO: 317387
  Synthetic oligonucleotide

SEQ ID NO: 543044 - DNA, 60 bp, Artificial; identical to SEQ ID NO: 317390
  Synthetic oligonucleotide

SEQ ID NO: 543045 - DNA, 60 bp, Artificial; identical to SEQ ID NO: 317391
  Synthetic oligonucleotide

SEQ ID NO: 543046 - DNA, 55 bp, Artificial; identical to SEQ ID NO: 317392
  Synthetic oligonucleotide

SEQ ID NO: 543047 - DNA, 54 bp, Artificial; identical to SEQ ID NO: 317393
  Synthetic oligonucleotide

SEQ ID NO: 543048 - DNA, 58 bp, Artificial; identical to SEQ ID NO: 317396
  Synthetic oligonucleotide

SEQ ID NO: 543049 - DNA, 60 bp, Artificial; identical to SEQ ID NO: 317397
  Synthetic oligonucleotide

SEQ ID NO: 543050 - DNA, 57 bp, Artificial; identical to SEQ ID NO: 18566
  Synthetic oligonucleotide

SEQ ID NO: 543051 - DNA, 54 bp, Artificial; identical to SEQ ID NO: 317401
  Synthetic oligonucleotide

SEQ ID NO: 543052 - DNA, 58 bp, Artificial; identical to SEQ ID NO: 317404
  Synthetic oligonucleotide

SEQ ID NO: 543053 - DNA, 55 bp, Artificial; identical to SEQ ID NO: 317405
  Synthetic oligonucleotide

SEQ ID NO: 543054 - DNA, 60 bp, Artificial; identical to SEQ ID NO: 317406
  Synthetic oligonucleotide

SEQ ID NO: 543055 - DNA, 51 bp, Artificial; identical to SEQ ID NO: 317408
  Synthetic oligonucleotide

SEQ ID NO: 543056 - DNA, 54 bp, Artificial; identical to SEQ ID NO: 317409
  Synthetic oligonucleotide

SEQ ID NO: 543057 - DNA, 54 bp, Artificial; identical to SEQ ID NO: 317412
  Synthetic oligonucleotide

SEQ ID NO: 543058 - DNA, 60 bp, Artificial; identical to SEQ ID NO: 317415
  Synthetic oligonucleotide

SEQ ID NO: 543059 - DNA, 55 bp, Artificial; identical to SEQ ID NO: 317417
  Synthetic oligonucleotide

SEQ ID NO: 543060 - DNA, 51 bp, Artificial; identical to SEQ ID NO: 317419
  Synthetic oligonucleotide

SEQ ID NO: 543061 - DNA, 59 bp, Artificial; identical to SEQ ID NO: 317422
  Synthetic oligonucleotide

SEQ ID NO: 543062 - DNA, 58 bp, Artificial; identical to SEQ ID NO: 17191
  Synthetic oligonucleotide

SEQ ID NO: 543063 - DNA, 58 bp, Artificial; identical to SEQ ID NO: 317426
  Synthetic oligonucleotide

SEQ ID NO: 543064 - DNA, 58 bp, Artificial; identical to SEQ ID NO: 17814
  Synthetic oligonucleotide

SEQ ID NO: 543065 - DNA, 59 bp, Artificial; identical to SEQ ID NO: 317427
  Synthetic oligonucleotide

SEQ ID NO: 543066 - DNA, 60 bp, Artificial; identical to SEQ ID NO: 317429
  Synthetic oligonucleotide

SEQ ID NO: 543067 - DNA, 59 bp, Artificial; identical to SEQ ID NO: 317431
  Synthetic oligonucleotide

SEQ ID NO: 543068 - DNA, 57 bp, Artificial; identical to SEQ ID NO: 317438
  Synthetic oligonucleotide

SEQ ID NO: 543069 - DNA, 57 bp, Artificial; identical to SEQ ID NO: 317440
  Synthetic oligonucleotide

SEQ ID NO: 543070 - DNA, 52 bp, Artificial; identical to SEQ ID NO: 317441
  Synthetic oligonucleotide

SEQ ID NO: 543071 - DNA, 56 bp, Artificial; identical to SEQ ID NO: 317448
  Synthetic oligonucleotide

SEQ ID NO: 543072 - DNA, 55 bp, Artificial; identical to SEQ ID NO: 317449
  Synthetic oligonucleotide

SEQ ID NO: 543073 - DNA, 55 bp, Artificial; identical to SEQ ID NO: 317450
  Synthetic oligonucleotide

SEQ ID NO: 543074 - DNA, 54 bp, Artificial; identical to SEQ ID NO: 317453
  Synthetic oligonucleotide

SEQ ID NO: 543075 - DNA, 60 bp, Artificial; identical to SEQ ID NO: 317455
  Synthetic oligonucleotide

SEQ ID NO: 543076 - DNA, 55 bp, Artificial; identical to SEQ ID NO: 317461
  Synthetic oligonucleotide

SEQ ID NO: 543077 - DNA, 60 bp, Artificial; identical to SEQ ID NO: 317463
  Synthetic oligonucleotide

SEQ ID NO: 543078 - DNA, 57 bp, Artificial; identical to SEQ ID NO: 317467
  Synthetic oligonucleotide

SEQ ID NO: 543079 - DNA, 55 bp, Artificial; identical to SEQ ID NO: 317476
  Synthetic oligonucleotide

SEQ ID NO: 543080 - DNA, 58 bp, Artificial; identical to SEQ ID NO: 317477
  Synthetic oligonucleotide

SEQ ID NO: 543081 - DNA, 55 bp, Artificial; identical to SEQ ID NO: 317478
  Synthetic oligonucleotide

SEQ ID NO: 543082 - DNA, 60 bp, Artificial; identical to SEQ ID NO: 6898
  Synthetic oligonucleotide

SEQ ID NO: 543083 - DNA, 60 bp, Artificial; identical to SEQ ID NO: 317481
  Synthetic oligonucleotide

SEQ ID NO: 543084 - DNA, 54 bp, Artificial; identical to SEQ ID NO: 317482
  Synthetic oligonucleotide

SEQ ID NO: 543085 - DNA, 51 bp, Artificial; identical to SEQ ID NO: 317484
  Synthetic oligonucleotide

SEQ ID NO: 543086 - DNA, 52 bp, Artificial; identical to SEQ ID NO: 317487
  Synthetic oligonucleotide

SEQ ID NO: 543087 - DNA, 56 bp, Artificial; identical to SEQ ID NO: 317491
  Synthetic oligonucleotide

SEQ ID NO: 543088 - DNA, 60 bp, Artificial; identical to SEQ ID NO: 317498
  Synthetic oligonucleotide

SEQ ID NO: 543089 - DNA, 54 bp, Artificial; identical to SEQ ID NO: 317499
  Synthetic oligonucleotide

SEQ ID NO: 543090 - DNA, 51 bp, Artificial; identical to SEQ ID NO: 317500
  Synthetic oligonucleotide

SEQ ID NO: 543091 - DNA, 54 bp, Artificial; identical to SEQ ID NO: 317506
  Synthetic oligonucleotide

SEQ ID NO: 543092 - DNA, 60 bp, Artificial; identical to SEQ ID NO: 317507
  Synthetic oligonucleotide

SEQ ID NO: 543093 - DNA, 55 bp, Artificial; identical to SEQ ID NO: 317508
  Synthetic oligonucleotide

SEQ ID NO: 543094 - DNA, 55 bp, Artificial; identical to SEQ ID NO: 317510
  Synthetic oligonucleotide

SEQ ID NO: 543095 - DNA, 60 bp, Artificial; identical to SEQ ID NO: 317514
  Synthetic oligonucleotide

SEQ ID NO: 543096 - DNA, 53 bp, Artificial; identical to SEQ ID NO: 19385
  Synthetic oligonucleotide

SEQ ID NO: 543097 - DNA, 55 bp, Artificial; identical to SEQ ID NO: 317515
  Synthetic oligonucleotide

SEQ ID NO: 543098 - DNA, 55 bp, Artificial; identical to SEQ ID NO: 317519
  Synthetic oligonucleotide

SEQ ID NO: 543099 - DNA, 56 bp, Artificial; identical to SEQ ID NO: 317520
  Synthetic oligonucleotide

SEQ ID NO: 543100 - DNA, 60 bp, Artificial; identical to SEQ ID NO: 317525
  Synthetic oligonucleotide

SEQ ID NO: 543101 - DNA, 56 bp, Artificial; identical to SEQ ID NO: 317527
  Synthetic oligonucleotide

SEQ ID NO: 543102 - DNA, 60 bp, Artificial; identical to SEQ ID NO: 317528
  Synthetic oligonucleotide

SEQ ID NO: 543103 - DNA, 59 bp, Artificial; identical to SEQ ID NO: 317529
  Synthetic oligonucleotide

SEQ ID NO: 543104 - DNA, 54 bp, Artificial; identical to SEQ ID NO: 317533
  Synthetic oligonucleotide

SEQ ID NO: 543105 - DNA, 55 bp, Artificial; identical to SEQ ID NO: 317539
  Synthetic oligonucleotide

SEQ ID NO: 543106 - DNA, 59 bp, Artificial; identical to SEQ ID NO: 317540
  Synthetic oligonucleotide

SEQ ID NO: 543107 - DNA, 58 bp, Artificial; identical to SEQ ID NO: 317541
  Synthetic oligonucleotide

SEQ ID NO: 543108 - DNA, 60 bp, Artificial; identical to SEQ ID NO: 317543
  Synthetic oligonucleotide

SEQ ID NO: 543109 - DNA, 54 bp, Artificial; identical to SEQ ID NO: 317544
  Synthetic oligonucleotide

SEQ ID NO: 543110 - DNA, 60 bp, Artificial; identical to SEQ ID NO: 317546
  Synthetic oligonucleotide

SEQ ID NO: 543111 - DNA, 55 bp, Artificial; identical to SEQ ID NO: 317547
  Synthetic oligonucleotide

SEQ ID NO: 543112 - DNA, 55 bp, Artificial; identical to SEQ ID NO: 317548
  Synthetic oligonucleotide

SEQ ID NO: 543113 - DNA, 54 bp, Artificial; identical to SEQ ID NO: 317549
  Synthetic oligonucleotide

SEQ ID NO: 543114 - DNA, 59 bp, Artificial; identical to SEQ ID NO: 317550
  Synthetic oligonucleotide

SEQ ID NO: 543115 - DNA, 51 bp, Artificial; identical to SEQ ID NO: 317552
  Synthetic oligonucleotide

SEQ ID NO: 543116 - DNA, 52 bp, Artificial; identical to SEQ ID NO: 317555
  Synthetic oligonucleotide

SEQ ID NO: 543117 - DNA, 53 bp, Artificial; identical to SEQ ID NO: 317559
  Synthetic oligonucleotide

SEQ ID NO: 543118 - DNA, 60 bp, Artificial; identical to SEQ ID NO: 317560
  Synthetic oligonucleotide

SEQ ID NO: 543119 - DNA, 60 bp, Artificial; identical to SEQ ID NO: 317565
  Synthetic oligonucleotide

SEQ ID NO: 543120 - DNA, 60 bp, Artificial; identical to SEQ ID NO: 317576
  Synthetic oligonucleotide

SEQ ID NO: 543121 - DNA, 53 bp, Artificial; identical to SEQ ID NO: 317578
  Synthetic oligonucleotide

SEQ ID NO: 543122 - DNA, 57 bp, Artificial; identical to SEQ ID NO: 317582
  Synthetic oligonucleotide

SEQ ID NO: 543123 - DNA, 60 bp, Artificial; identical to SEQ ID NO: 317584
  Synthetic oligonucleotide

SEQ ID NO: 543124 - DNA, 55 bp, Artificial; identical to SEQ ID NO: 317585
  Synthetic oligonucleotide

SEQ ID NO: 543125 - DNA, 60 bp, Artificial; identical to SEQ ID NO: 317586
  Synthetic oligonucleotide

SEQ ID NO: 543126 - DNA, 55 bp, Artificial; identical to SEQ ID NO: 317587
  Synthetic oligonucleotide

SEQ ID NO: 543127 - DNA, 60 bp, Artificial; identical to SEQ ID NO: 317589
  Synthetic oligonucleotide

SEQ ID NO: 543128 - DNA, 59 bp, Artificial; identical to SEQ ID NO: 317591
  Synthetic oligonucleotide

SEQ ID NO: 543129 - DNA, 55 bp, Artificial; identical to SEQ ID NO: 317593
  Synthetic oligonucleotide

SEQ ID NO: 543130 - DNA, 60 bp, Artificial; identical to SEQ ID NO: 317594
  Synthetic oligonucleotide

SEQ ID NO: 543131 - DNA, 52 bp, Artificial; identical to SEQ ID NO: 317595
  Synthetic oligonucleotide

SEQ ID NO: 543132 - DNA, 57 bp, Artificial; identical to SEQ ID NO: 317597
  Synthetic oligonucleotide

SEQ ID NO: 543133 - DNA, 55 bp, Artificial; identical to SEQ ID NO: 317598
  Synthetic oligonucleotide

SEQ ID NO: 543134 - DNA, 60 bp, Artificial; identical to SEQ ID NO: 317600
  Synthetic oligonucleotide

SEQ ID NO: 543135 - DNA, 55 bp, Artificial; identical to SEQ ID NO: 317601
  Synthetic oligonucleotide

SEQ ID NO: 543136 - DNA, 53 bp, Artificial; identical to SEQ ID NO: 317602
  Synthetic oligonucleotide

SEQ ID NO: 543137 - DNA, 60 bp, Artificial; identical to SEQ ID NO: 317604
  Synthetic oligonucleotide

SEQ ID NO: 543138 - DNA, 60 bp, Artificial; identical to SEQ ID NO: 317607
  Synthetic oligonucleotide

SEQ ID NO: 543139 - DNA, 55 bp, Artificial; identical to SEQ ID NO: 317608
  Synthetic oligonucleotide

SEQ ID NO: 543140 - DNA, 55 bp, Artificial; identical to SEQ ID NO: 317609
  Synthetic oligonucleotide

SEQ ID NO: 543141 - DNA, 57 bp, Artificial; identical to SEQ ID NO: 317610
  Synthetic oligonucleotide

SEQ ID NO: 543142 - DNA, 53 bp, Artificial; identical to SEQ ID NO: 317615
  Synthetic oligonucleotide

SEQ ID NO: 543143 - DNA, 60 bp, Artificial; identical to SEQ ID NO: 317616
  Synthetic oligonucleotide

SEQ ID NO: 543144 - DNA, 54 bp, Artificial; identical to SEQ ID NO: 317618
  Synthetic oligonucleotide

SEQ ID NO: 543145 - DNA, 58 bp, Artificial; identical to SEQ ID NO: 317620
  Synthetic oligonucleotide

SEQ ID NO: 543146 - DNA, 55 bp, Artificial; identical to SEQ ID NO: 317624
  Synthetic oligonucleotide

SEQ ID NO: 543147 - DNA, 58 bp, Artificial; identical to SEQ ID NO: 317625
  Synthetic oligonucleotide

SEQ ID NO: 543148 - DNA, 55 bp, Artificial; identical to SEQ ID NO: 317627
  Synthetic oligonucleotide

SEQ ID NO: 543149 - DNA, 60 bp, Artificial; identical to SEQ ID NO: 317629
  Synthetic oligonucleotide

SEQ ID NO: 543150 - DNA, 53 bp, Artificial; identical to SEQ ID NO: 17958
  Synthetic oligonucleotide

SEQ ID NO: 543151 - DNA, 55 bp, Artificial; identical to SEQ ID NO: 317630
  Synthetic oligonucleotide

SEQ ID NO: 543152 - DNA, 55 bp, Artificial; identical to SEQ ID NO: 317631
  Synthetic oligonucleotide

SEQ ID NO: 543153 - DNA, 50 bp, Artificial; identical to SEQ ID NO: 317633
  Synthetic oligonucleotide

SEQ ID NO: 543154 - DNA, 56 bp, Artificial; identical to SEQ ID NO: 317634
  Synthetic oligonucleotide

SEQ ID NO: 543155 - DNA, 60 bp, Artificial; identical to SEQ ID NO: 317636
  Synthetic oligonucleotide

SEQ ID NO: 543156 - DNA, 60 bp, Artificial; identical to SEQ ID NO: 10693
  Synthetic oligonucleotide

SEQ ID NO: 543157 - DNA, 53 bp, Artificial; identical to SEQ ID NO: 317638
  Synthetic oligonucleotide

SEQ ID NO: 543158 - DNA, 58 bp, Artificial; identical to SEQ ID NO: 317640
  Synthetic oligonucleotide

SEQ ID NO: 543159 - DNA, 55 bp, Artificial; identical to SEQ ID NO: 317642
  Synthetic oligonucleotide

SEQ ID NO: 543160 - DNA, 58 bp, Artificial; identical to SEQ ID NO: 317643
  Synthetic oligonucleotide

SEQ ID NO: 543161 - DNA, 55 bp, Artificial; identical to SEQ ID NO: 317647
  Synthetic oligonucleotide

SEQ ID NO: 543162 - DNA, 51 bp, Artificial; identical to SEQ ID NO: 317648
  Synthetic oligonucleotide

SEQ ID NO: 543163 - DNA, 58 bp, Artificial; identical to SEQ ID NO: 317649
  Synthetic oligonucleotide

SEQ ID NO: 543164 - DNA, 60 bp, Artificial; identical to SEQ ID NO: 317655
  Synthetic oligonucleotide

SEQ ID NO: 543165 - DNA, 58 bp, Artificial; identical to SEQ ID NO: 317659
  Synthetic oligonucleotide

SEQ ID NO: 543166 - DNA, 60 bp, Artificial; identical to SEQ ID NO: 317668
  Synthetic oligonucleotide

SEQ ID NO: 543167 - DNA, 47 bp, Artificial; identical to SEQ ID NO: 317670
  Synthetic oligonucleotide

SEQ ID NO: 543168 - DNA, 60 bp, Artificial; identical to SEQ ID NO: 317672
  Synthetic oligonucleotide

SEQ ID NO: 543169 - DNA, 56 bp, Artificial; identical to SEQ ID NO: 317677
  Synthetic oligonucleotide

SEQ ID NO: 543170 - DNA, 56 bp, Artificial; identical to SEQ ID NO: 317678
  Synthetic oligonucleotide

SEQ ID NO: 543171 - DNA, 55 bp, Artificial; identical to SEQ ID NO: 317679
  Synthetic oligonucleotide

SEQ ID NO: 543172 - DNA, 55 bp, Artificial; identical to SEQ ID NO: 317681
  Synthetic oligonucleotide

SEQ ID NO: 543173 - DNA, 52 bp, Artificial; identical to SEQ ID NO: 317682
  Synthetic oligonucleotide

SEQ ID NO: 543174 - DNA, 55 bp, Artificial; identical to SEQ ID NO: 317688
  Synthetic oligonucleotide

SEQ ID NO: 543175 - DNA, 60 bp, Artificial; identical to SEQ ID NO: 11649
  Synthetic oligonucleotide

SEQ ID NO: 543176 - DNA, 60 bp, Artificial; identical to SEQ ID NO: 317692
  Synthetic oligonucleotide

SEQ ID NO: 543177 - DNA, 57 bp, Artificial; identical to SEQ ID NO: 317694
  Synthetic oligonucleotide

SEQ ID NO: 543178 - DNA, 60 bp, Artificial; identical to SEQ ID NO: 317696
  Synthetic oligonucleotide

SEQ ID NO: 543179 - DNA, 56 bp, Artificial; identical to SEQ ID NO: 317697
  Synthetic oligonucleotide

SEQ ID NO: 543180 - DNA, 59 bp, Artificial; identical to SEQ ID NO: 317699
  Synthetic oligonucleotide

SEQ ID NO: 543181 - DNA, 54 bp, Artificial; identical to SEQ ID NO: 317700
  Synthetic oligonucleotide

SEQ ID NO: 543182 - DNA, 55 bp, Artificial; identical to SEQ ID NO: 317702
  Synthetic oligonucleotide

SEQ ID NO: 543183 - DNA, 55 bp, Artificial; identical to SEQ ID NO: 317703
  Synthetic oligonucleotide

SEQ ID NO: 543184 - DNA, 59 bp, Artificial; identical to SEQ ID NO: 317704
  Synthetic oligonucleotide

SEQ ID NO: 543185 - DNA, 60 bp, Artificial; identical to SEQ ID NO: 317706
  Synthetic oligonucleotide

SEQ ID NO: 543186 - DNA, 58 bp, Artificial; identical to SEQ ID NO: 18374
  Synthetic oligonucleotide

SEQ ID NO: 543187 - DNA, 57 bp, Artificial; identical to SEQ ID NO: 317708
  Synthetic oligonucleotide

SEQ ID NO: 543188 - DNA, 52 bp, Artificial; identical to SEQ ID NO: 317709
  Synthetic oligonucleotide

SEQ ID NO: 543189 - DNA, 50 bp, Artificial; identical to SEQ ID NO: 317712
  Synthetic oligonucleotide

SEQ ID NO: 543190 - DNA, 50 bp, Artificial; identical to SEQ ID NO: 317713
  Synthetic oligonucleotide

SEQ ID NO: 543191 - DNA, 51 bp, Artificial; identical to SEQ ID NO: 317714
  Synthetic oligonucleotide

SEQ ID NO: 543192 - DNA, 58 bp, Artificial; identical to SEQ ID NO: 317716
  Synthetic oligonucleotide

SEQ ID NO: 543193 - DNA, 55 bp, Artificial; identical to SEQ ID NO: 317717
  Synthetic oligonucleotide

SEQ ID NO: 543194 - DNA, 58 bp, Artificial; identical to SEQ ID NO: 317719
  Synthetic oligonucleotide

SEQ ID NO: 543195 - DNA, 60 bp, Artificial; identical to SEQ ID NO: 317720
  Synthetic oligonucleotide

SEQ ID NO: 543196 - DNA, 58 bp, Artificial; identical to SEQ ID NO: 317721
  Synthetic oligonucleotide

SEQ ID NO: 543197 - DNA, 60 bp, Artificial; identical to SEQ ID NO: 317722
  Synthetic oligonucleotide

SEQ ID NO: 543198 - DNA, 59 bp, Artificial; identical to SEQ ID NO: 317724
  Synthetic oligonucleotide

SEQ ID NO: 543199 - DNA, 53 bp, Artificial; identical to SEQ ID NO: 18037
  Synthetic oligonucleotide

SEQ ID NO: 543200 - DNA, 60 bp, Artificial; identical to SEQ ID NO: 317726
  Synthetic oligonucleotide

SEQ ID NO: 543201 - DNA, 60 bp, Artificial; identical to SEQ ID NO: 317727
  Synthetic oligonucleotide

SEQ ID NO: 543202 - DNA, 60 bp, Artificial; identical to SEQ ID NO: 317729
  Synthetic oligonucleotide

SEQ ID NO: 543203 - DNA, 53 bp, Artificial; identical to SEQ ID NO: 6374
  Synthetic oligonucleotide

SEQ ID NO: 543204 - DNA, 60 bp, Artificial; identical to SEQ ID NO: 317734
  Synthetic oligonucleotide

SEQ ID NO: 543205 - DNA, 60 bp, Artificial; identical to SEQ ID NO: 317736
  Synthetic oligonucleotide

SEQ ID NO: 543206 - DNA, 51 bp, Artificial; identical to SEQ ID NO: 317737
  Synthetic oligonucleotide

SEQ ID NO: 543207 - DNA, 55 bp, Artificial; identical to SEQ ID NO: 317739
  Synthetic oligonucleotide

SEQ ID NO: 543208 - DNA, 60 bp, Artificial; identical to SEQ ID NO: 317740
  Synthetic oligonucleotide

SEQ ID NO: 543209 - DNA, 57 bp, Artificial; identical to SEQ ID NO: 317742
  Synthetic oligonucleotide

SEQ ID NO: 543210 - DNA, 60 bp, Artificial; identical to SEQ ID NO: 317743
  Synthetic oligonucleotide

SEQ ID NO: 543211 - DNA, 52 bp, Artificial; identical to SEQ ID NO: 317745
  Synthetic oligonucleotide

SEQ ID NO: 543212 - DNA, 55 bp, Artificial; identical to SEQ ID NO: 317746
  Synthetic oligonucleotide

SEQ ID NO: 543213 - DNA, 54 bp, Artificial; identical to SEQ ID NO: 317748
  Synthetic oligonucleotide

SEQ ID NO: 543214 - DNA, 55 bp, Artificial; identical to SEQ ID NO: 317752
  Synthetic oligonucleotide

SEQ ID NO: 543215 - DNA, 60 bp, Artificial; identical to SEQ ID NO: 317753
  Synthetic oligonucleotide

SEQ ID NO: 543216 - DNA, 57 bp, Artificial; identical to SEQ ID NO: 317754
  Synthetic oligonucleotide

SEQ ID NO: 543217 - DNA, 54 bp, Artificial; identical to SEQ ID NO: 317756
  Synthetic oligonucleotide

SEQ ID NO: 543218 - DNA, 59 bp, Artificial; identical to SEQ ID NO: 317759
  Synthetic oligonucleotide

SEQ ID NO: 543219 - DNA, 53 bp, Artificial; identical to SEQ ID NO: 317760
  Synthetic oligonucleotide

SEQ ID NO: 543220 - DNA, 59 bp, Artificial; identical to SEQ ID NO: 317761
  Synthetic oligonucleotide

SEQ ID NO: 543221 - DNA, 60 bp, Artificial; identical to SEQ ID NO: 317763
  Synthetic oligonucleotide

SEQ ID NO: 543222 - DNA, 54 bp, Artificial; identical to SEQ ID NO: 317764
  Synthetic oligonucleotide

SEQ ID NO: 543223 - DNA, 60 bp, Artificial; identical to SEQ ID NO: 317766
  Synthetic oligonucleotide

SEQ ID NO: 543224 - DNA, 50 bp, Artificial; identical to SEQ ID NO: 317767
  Synthetic oligonucleotide

SEQ ID NO: 543225 - DNA, 52 bp, Artificial; identical to SEQ ID NO: 317769
  Synthetic oligonucleotide

SEQ ID NO: 543226 - DNA, 60 bp, Artificial; identical to SEQ ID NO: 317771
  Synthetic oligonucleotide

SEQ ID NO: 543227 - DNA, 60 bp, Artificial; identical to SEQ ID NO: 317772
  Synthetic oligonucleotide

SEQ ID NO: 543228 - DNA, 59 bp, Artificial; identical to SEQ ID NO: 317773
  Synthetic oligonucleotide

SEQ ID NO: 543229 - DNA, 60 bp, Artificial; identical to SEQ ID NO: 15673
  Synthetic oligonucleotide

SEQ ID NO: 543230 - DNA, 59 bp, Artificial; identical to SEQ ID NO: 317775
  Synthetic oligonucleotide

SEQ ID NO: 543231 - DNA, 57 bp, Artificial; identical to SEQ ID NO: 317778
  Synthetic oligonucleotide

SEQ ID NO: 543232 - DNA, 60 bp, Artificial; identical to SEQ ID NO: 317779
  Synthetic oligonucleotide

SEQ ID NO: 543233 - DNA, 52 bp, Artificial; identical to SEQ ID NO: 9677
  Synthetic oligonucleotide

SEQ ID NO: 543234 - DNA, 58 bp, Artificial; identical to SEQ ID NO: 317783
  Synthetic oligonucleotide

SEQ ID NO: 543235 - DNA, 58 bp, Artificial; identical to SEQ ID NO: 317784
  Synthetic oligonucleotide

SEQ ID NO: 543236 - DNA, 58 bp, Artificial; identical to SEQ ID NO: 317785
  Synthetic oligonucleotide

SEQ ID NO: 543237 - DNA, 60 bp, Artificial; identical to SEQ ID NO: 317786
  Synthetic oligonucleotide

SEQ ID NO: 543238 - DNA, 60 bp, Artificial; identical to SEQ ID NO: 317788
  Synthetic oligonucleotide

SEQ ID NO: 543239 - DNA, 52 bp, Artificial; identical to SEQ ID NO: 317793
  Synthetic oligonucleotide

SEQ ID NO: 543240 - DNA, 59 bp, Artificial; identical to SEQ ID NO: 317804
  Synthetic oligonucleotide

SEQ ID NO: 543241 - DNA, 55 bp, Artificial; identical to SEQ ID NO: 317807
  Synthetic oligonucleotide

SEQ ID NO: 543242 - DNA, 56 bp, Artificial; identical to SEQ ID NO: 317809
  Synthetic oligonucleotide

SEQ ID NO: 543243 - DNA, 54 bp, Artificial; identical to SEQ ID NO: 317810
  Synthetic oligonucleotide

SEQ ID NO: 543244 - DNA, 51 bp, Artificial; identical to SEQ ID NO: 317812
  Synthetic oligonucleotide

SEQ ID NO: 543245 - DNA, 60 bp, Artificial; identical to SEQ ID NO: 317814
  Synthetic oligonucleotide

SEQ ID NO: 543246 - DNA, 60 bp, Artificial; identical to SEQ ID NO: 317815
  Synthetic oligonucleotide

SEQ ID NO: 543247 - DNA, 56 bp, Artificial; identical to SEQ ID NO: 317816
  Synthetic oligonucleotide

SEQ ID NO: 543248 - DNA, 59 bp, Artificial; identical to SEQ ID NO: 317818
  Synthetic oligonucleotide

SEQ ID NO: 543249 - DNA, 55 bp, Artificial; identical to SEQ ID NO: 317823
  Synthetic oligonucleotide

SEQ ID NO: 543250 - DNA, 60 bp, Artificial; identical to SEQ ID NO: 317824
  Synthetic oligonucleotide

SEQ ID NO: 543251 - DNA, 50 bp, Artificial; identical to SEQ ID NO: 317835
  Synthetic oligonucleotide

SEQ ID NO: 543252 - DNA, 60 bp, Artificial; identical to SEQ ID NO: 317838
  Synthetic oligonucleotide

SEQ ID NO: 543253 - DNA, 55 bp, Artificial; identical to SEQ ID NO: 317839
  Synthetic oligonucleotide

SEQ ID NO: 543254 - DNA, 52 bp, Artificial; identical to SEQ ID NO: 317841
  Synthetic oligonucleotide

SEQ ID NO: 543255 - DNA, 58 bp, Artificial; identical to SEQ ID NO: 317842
  Synthetic oligonucleotide

SEQ ID NO: 543256 - DNA, 60 bp, Artificial; identical to SEQ ID NO: 317843
  Synthetic oligonucleotide

SEQ ID NO: 543257 - DNA, 55 bp, Artificial; identical to SEQ ID NO: 317844
  Synthetic oligonucleotide

SEQ ID NO: 543258 - DNA, 56 bp, Artificial; identical to SEQ ID NO: 317846
  Synthetic oligonucleotide

SEQ ID NO: 543259 - DNA, 60 bp, Artificial; identical to SEQ ID NO: 317848
  Synthetic oligonucleotide

SEQ ID NO: 543260 - DNA, 59 bp, Artificial; identical to SEQ ID NO: 317849
  Synthetic oligonucleotide

SEQ ID NO: 543261 - DNA, 60 bp, Artificial; identical to SEQ ID NO: 317850
  Synthetic oligonucleotide

SEQ ID NO: 543262 - DNA, 57 bp, Artificial; identical to SEQ ID NO: 317851
  Synthetic oligonucleotide

SEQ ID NO: 543263 - DNA, 59 bp, Artificial; identical to SEQ ID NO: 317852
  Synthetic oligonucleotide

SEQ ID NO: 543264 - DNA, 58 bp, Artificial; identical to SEQ ID NO: 317854
  Synthetic oligonucleotide

SEQ ID NO: 543265 - DNA, 60 bp, Artificial; identical to SEQ ID NO: 317855
  Synthetic oligonucleotide

SEQ ID NO: 543266 - DNA, 59 bp, Artificial; identical to SEQ ID NO: 317859
  Synthetic oligonucleotide

SEQ ID NO: 543267 - DNA, 59 bp, Artificial; identical to SEQ ID NO: 317862
  Synthetic oligonucleotide

SEQ ID NO: 543268 - DNA, 55 bp, Artificial; identical to SEQ ID NO: 317863
  Synthetic oligonucleotide

SEQ ID NO: 543269 - DNA, 58 bp, Artificial; identical to SEQ ID NO: 16776
  Synthetic oligonucleotide

SEQ ID NO: 543270 - DNA, 56 bp, Artificial; identical to SEQ ID NO: 317864
  Synthetic oligonucleotide

SEQ ID NO: 543271 - DNA, 51 bp, Artificial; identical to SEQ ID NO: 317865
  Synthetic oligonucleotide

SEQ ID NO: 543272 - DNA, 55 bp, Artificial; identical to SEQ ID NO: 317866
  Synthetic oligonucleotide

SEQ ID NO: 543273 - DNA, 59 bp, Artificial; identical to SEQ ID NO: 317872
  Synthetic oligonucleotide

SEQ ID NO: 543274 - DNA, 55 bp, Artificial; identical to SEQ ID NO: 317873
  Synthetic oligonucleotide

SEQ ID NO: 543275 - DNA, 56 bp, Artificial; identical to SEQ ID NO: 317875
  Synthetic oligonucleotide

SEQ ID NO: 543276 - DNA, 55 bp, Artificial; identical to SEQ ID NO: 317877
  Synthetic oligonucleotide

SEQ ID NO: 543277 - DNA, 54 bp, Artificial; identical to SEQ ID NO: 317880
  Synthetic oligonucleotide

SEQ ID NO: 543278 - DNA, 58 bp, Artificial; identical to SEQ ID NO: 317882
  Synthetic oligonucleotide

SEQ ID NO: 543279 - DNA, 55 bp, Artificial; identical to SEQ ID NO: 317887
  Synthetic oligonucleotide

SEQ ID NO: 543280 - DNA, 54 bp, Artificial; identical to SEQ ID NO: 317891
  Synthetic oligonucleotide

SEQ ID NO: 543281 - DNA, 60 bp, Artificial; identical to SEQ ID NO: 317892
  Synthetic oligonucleotide

SEQ ID NO: 543282 - DNA, 53 bp, Artificial; identical to SEQ ID NO: 16232
  Synthetic oligonucleotide

SEQ ID NO: 543283 - DNA, 53 bp, Artificial; identical to SEQ ID NO: 317893
  Synthetic oligonucleotide

SEQ ID NO: 543284 - DNA, 60 bp, Artificial; identical to SEQ ID NO: 317896
  Synthetic oligonucleotide

SEQ ID NO: 543285 - DNA, 59 bp, Artificial; identical to SEQ ID NO: 317903
  Synthetic oligonucleotide

SEQ ID NO: 543286 - DNA, 59 bp, Artificial; identical to SEQ ID NO: 317905
  Synthetic oligonucleotide

SEQ ID NO: 543287 - DNA, 57 bp, Artificial; identical to SEQ ID NO: 317907
  Synthetic oligonucleotide

SEQ ID NO: 543288 - DNA, 60 bp, Artificial; identical to SEQ ID NO: 317909
  Synthetic oligonucleotide

SEQ ID NO: 543289 - DNA, 55 bp, Artificial; identical to SEQ ID NO: 317910
  Synthetic oligonucleotide

SEQ ID NO: 543290 - DNA, 57 bp, Artificial; identical to SEQ ID NO: 16620
  Synthetic oligonucleotide

SEQ ID NO: 543291 - DNA, 57 bp, Artificial; identical to SEQ ID NO: 317911
  Synthetic oligonucleotide

SEQ ID NO: 543292 - DNA, 55 bp, Artificial; identical to SEQ ID NO: 317913
  Synthetic oligonucleotide

SEQ ID NO: 543293 - DNA, 60 bp, Artificial; identical to SEQ ID NO: 317914
  Synthetic oligonucleotide

SEQ ID NO: 543294 - DNA, 58 bp, Artificial; identical to SEQ ID NO: 317916
  Synthetic oligonucleotide

SEQ ID NO: 543295 - DNA, 58 bp, Artificial; identical to SEQ ID NO: 317919
  Synthetic oligonucleotide

SEQ ID NO: 543296 - DNA, 56 bp, Artificial; identical to SEQ ID NO: 317921
  Synthetic oligonucleotide

SEQ ID NO: 543297 - DNA, 60 bp, Artificial; identical to SEQ ID NO: 317923
  Synthetic oligonucleotide

SEQ ID NO: 543298 - DNA, 55 bp, Artificial; identical to SEQ ID NO: 317927
  Synthetic oligonucleotide

SEQ ID NO: 543299 - DNA, 60 bp, Artificial; identical to SEQ ID NO: 317929
  Synthetic oligonucleotide

SEQ ID NO: 543300 - DNA, 54 bp, Artificial; identical to SEQ ID NO: 17344
  Synthetic oligonucleotide

SEQ ID NO: 543301 - DNA, 56 bp, Artificial; identical to SEQ ID NO: 317931
  Synthetic oligonucleotide

SEQ ID NO: 543302 - DNA, 59 bp, Artificial; identical to SEQ ID NO: 17652
  Synthetic oligonucleotide

SEQ ID NO: 543303 - DNA, 58 bp, Artificial; identical to SEQ ID NO: 317936
  Synthetic oligonucleotide

SEQ ID NO: 543304 - DNA, 60 bp, Artificial; identical to SEQ ID NO: 317938
  Synthetic oligonucleotide

SEQ ID NO: 543305 - DNA, 58 bp, Artificial; identical to SEQ ID NO: 317940
  Synthetic oligonucleotide

SEQ ID NO: 543306 - DNA, 60 bp, Artificial; identical to SEQ ID NO: 317941
  Synthetic oligonucleotide

SEQ ID NO: 543307 - DNA, 55 bp, Artificial; identical to SEQ ID NO: 16735
  Synthetic oligonucleotide

SEQ ID NO: 543308 - DNA, 60 bp, Artificial; identical to SEQ ID NO: 317947
  Synthetic oligonucleotide

SEQ ID NO: 543309 - DNA, 60 bp, Artificial; identical to SEQ ID NO: 317948
  Synthetic oligonucleotide

SEQ ID NO: 543310 - DNA, 53 bp, Artificial; identical to SEQ ID NO: 317952
  Synthetic oligonucleotide

SEQ ID NO: 543311 - DNA, 60 bp, Artificial; identical to SEQ ID NO: 317953
  Synthetic oligonucleotide

SEQ ID NO: 543312 - DNA, 59 bp, Artificial; identical to SEQ ID NO: 18237
  Synthetic oligonucleotide

SEQ ID NO: 543313 - DNA, 60 bp, Artificial; identical to SEQ ID NO: 317954
  Synthetic oligonucleotide

SEQ ID NO: 543314 - DNA, 58 bp, Artificial; identical to SEQ ID NO: 317958
  Synthetic oligonucleotide

SEQ ID NO: 543315 - DNA, 55 bp, Artificial; identical to SEQ ID NO: 317959
  Synthetic oligonucleotide

SEQ ID NO: 543316 - DNA, 60 bp, Artificial; identical to SEQ ID NO: 317960
  Synthetic oligonucleotide

SEQ ID NO: 543317 - DNA, 57 bp, Artificial; identical to SEQ ID NO: 317962
  Synthetic oligonucleotide

SEQ ID NO: 543318 - DNA, 60 bp, Artificial; identical to SEQ ID NO: 317963
  Synthetic oligonucleotide

SEQ ID NO: 543319 - DNA, 55 bp, Artificial; identical to SEQ ID NO: 317964
  Synthetic oligonucleotide

SEQ ID NO: 543320 - DNA, 56 bp, Artificial; identical to SEQ ID NO: 317970
  Synthetic oligonucleotide

SEQ ID NO: 543321 - DNA, 52 bp, Artificial; identical to SEQ ID NO: 317971
  Synthetic oligonucleotide

SEQ ID NO: 543322 - DNA, 55 bp, Artificial; identical to SEQ ID NO: 317972
  Synthetic oligonucleotide

SEQ ID NO: 543323 - DNA, 57 bp, Artificial; identical to SEQ ID NO: 317978
  Synthetic oligonucleotide

SEQ ID NO: 543324 - DNA, 58 bp, Artificial; identical to SEQ ID NO: 317984
  Synthetic oligonucleotide

SEQ ID NO: 543325 - DNA, 60 bp, Artificial; identical to SEQ ID NO: 317987
  Synthetic oligonucleotide

SEQ ID NO: 543326 - DNA, 54 bp, Artificial; identical to SEQ ID NO: 317989
  Synthetic oligonucleotide

SEQ ID NO: 543327 - DNA, 58 bp, Artificial; identical to SEQ ID NO: 317993
  Synthetic oligonucleotide

SEQ ID NO: 543328 - DNA, 59 bp, Artificial; identical to SEQ ID NO: 317995
  Synthetic oligonucleotide

SEQ ID NO: 543329 - DNA, 60 bp, Artificial; identical to SEQ ID NO: 317999
  Synthetic oligonucleotide

SEQ ID NO: 543330 - DNA, 58 bp, Artificial; identical to SEQ ID NO: 318001
  Synthetic oligonucleotide

SEQ ID NO: 543331 - DNA, 51 bp, Artificial; identical to SEQ ID NO: 318006
  Synthetic oligonucleotide

SEQ ID NO: 543332 - DNA, 60 bp, Artificial; identical to SEQ ID NO: 318008
  Synthetic oligonucleotide

SEQ ID NO: 543333 - DNA, 53 bp, Artificial; identical to SEQ ID NO: 318009
  Synthetic oligonucleotide

SEQ ID NO: 543334 - DNA, 55 bp, Artificial; identical to SEQ ID NO: 18730
  Synthetic oligonucleotide

SEQ ID NO: 543335 - DNA, 58 bp, Artificial; identical to SEQ ID NO: 8324
  Synthetic oligonucleotide

SEQ ID NO: 543336 - DNA, 60 bp, Artificial; identical to SEQ ID NO: 318014
  Synthetic oligonucleotide

SEQ ID NO: 543337 - DNA, 52 bp, Artificial; identical to SEQ ID NO: 318017
  Synthetic oligonucleotide

SEQ ID NO: 543338 - DNA, 60 bp, Artificial; identical to SEQ ID NO: 318018
  Synthetic oligonucleotide

SEQ ID NO: 543339 - DNA, 60 bp, Artificial; identical to SEQ ID NO: 318022
  Synthetic oligonucleotide

SEQ ID NO: 543340 - DNA, 58 bp, Artificial; identical to SEQ ID NO: 318023
  Synthetic oligonucleotide

SEQ ID NO: 543341 - DNA, 55 bp, Artificial; identical to SEQ ID NO: 318024
  Synthetic oligonucleotide

SEQ ID NO: 543342 - DNA, 60 bp, Artificial; identical to SEQ ID NO: 318025
  Synthetic oligonucleotide

SEQ ID NO: 543343 - DNA, 56 bp, Artificial; identical to SEQ ID NO: 318026
  Synthetic oligonucleotide

SEQ ID NO: 543344 - DNA, 57 bp, Artificial; identical to SEQ ID NO: 318027
  Synthetic oligonucleotide

SEQ ID NO: 543345 - DNA, 55 bp, Artificial; identical to SEQ ID NO: 11076
  Synthetic oligonucleotide

SEQ ID NO: 543346 - DNA, 55 bp, Artificial; identical to SEQ ID NO: 318032
  Synthetic oligonucleotide

SEQ ID NO: 543347 - DNA, 59 bp, Artificial; identical to SEQ ID NO: 318034
  Synthetic oligonucleotide

SEQ ID NO: 543348 - DNA, 50 bp, Artificial; identical to SEQ ID NO: 318036
  Synthetic oligonucleotide

SEQ ID NO: 543349 - DNA, 54 bp, Artificial; identical to SEQ ID NO: 318037
  Synthetic oligonucleotide

SEQ ID NO: 543350 - DNA, 53 bp, Artificial; identical to SEQ ID NO: 318038
  Synthetic oligonucleotide

SEQ ID NO: 543351 - DNA, 60 bp, Artificial; identical to SEQ ID NO: 318041
  Synthetic oligonucleotide

SEQ ID NO: 543352 - DNA, 57 bp, Artificial; identical to SEQ ID NO: 318045
  Synthetic oligonucleotide

SEQ ID NO: 543353 - DNA, 60 bp, Artificial; identical to SEQ ID NO: 318046
  Synthetic oligonucleotide

SEQ ID NO: 543354 - DNA, 60 bp, Artificial; identical to SEQ ID NO: 318048
  Synthetic oligonucleotide

SEQ ID NO: 543355 - DNA, 60 bp, Artificial; identical to SEQ ID NO: 318049
  Synthetic oligonucleotide

SEQ ID NO: 543356 - DNA, 56 bp, Artificial; identical to SEQ ID NO: 318050
  Synthetic oligonucleotide

SEQ ID NO: 543357 - DNA, 60 bp, Artificial; identical to SEQ ID NO: 38292
  Synthetic oligonucleotide

SEQ ID NO: 543358 - DNA, 55 bp, Artificial; identical to SEQ ID NO: 318053
  Synthetic oligonucleotide

SEQ ID NO: 543359 - DNA, 58 bp, Artificial; identical to SEQ ID NO: 318054
  Synthetic oligonucleotide

SEQ ID NO: 543360 - DNA, 53 bp, Artificial; identical to SEQ ID NO: 318057
  Synthetic oligonucleotide

SEQ ID NO: 543361 - DNA, 51 bp, Artificial; identical to SEQ ID NO: 318058
  Synthetic oligonucleotide

SEQ ID NO: 543362 - DNA, 58 bp, Artificial; identical to SEQ ID NO: 19860
  Synthetic oligonucleotide

SEQ ID NO: 543363 - DNA, 55 bp, Artificial; identical to SEQ ID NO: 318063
  Synthetic oligonucleotide

SEQ ID NO: 543364 - DNA, 58 bp, Artificial; identical to SEQ ID NO: 318065
  Synthetic oligonucleotide

SEQ ID NO: 543365 - DNA, 55 bp, Artificial; identical to SEQ ID NO: 318066
  Synthetic oligonucleotide

SEQ ID NO: 543366 - DNA, 53 bp, Artificial; identical to SEQ ID NO: 318067
  Synthetic oligonucleotide

SEQ ID NO: 543367 - DNA, 54 bp, Artificial; identical to SEQ ID NO: 318068
  Synthetic oligonucleotide

SEQ ID NO: 543368 - DNA, 53 bp, Artificial; identical to SEQ ID NO: 318073
  Synthetic oligonucleotide

SEQ ID NO: 543369 - DNA, 56 bp, Artificial; identical to SEQ ID NO: 318076
  Synthetic oligonucleotide

SEQ ID NO: 543370 - DNA, 57 bp, Artificial; identical to SEQ ID NO: 318079
  Synthetic oligonucleotide

SEQ ID NO: 543371 - DNA, 57 bp, Artificial; identical to SEQ ID NO: 318080
  Synthetic oligonucleotide

SEQ ID NO: 543372 - DNA, 60 bp, Artificial; identical to SEQ ID NO: 318081
  Synthetic oligonucleotide

SEQ ID NO: 543373 - DNA, 55 bp, Artificial; identical to SEQ ID NO: 318083
  Synthetic oligonucleotide

SEQ ID NO: 543374 - DNA, 55 bp, Artificial; identical to SEQ ID NO: 318085
  Synthetic oligonucleotide

SEQ ID NO: 543375 - DNA, 56 bp, Artificial; identical to SEQ ID NO: 318089
  Synthetic oligonucleotide

SEQ ID NO: 543376 - DNA, 60 bp, Artificial; identical to SEQ ID NO: 120465
  Synthetic oligonucleotide

SEQ ID NO: 543377 - DNA, 51 bp, Artificial; identical to SEQ ID NO: 318090
  Synthetic oligonucleotide

SEQ ID NO: 543378 - DNA, 58 bp, Artificial; identical to SEQ ID NO: 318091
  Synthetic oligonucleotide

SEQ ID NO: 543379 - DNA, 58 bp, Artificial; identical to SEQ ID NO: 318094
  Synthetic oligonucleotide

SEQ ID NO: 543380 - DNA, 59 bp, Artificial; identical to SEQ ID NO: 17338
  Synthetic oligonucleotide

SEQ ID NO: 543381 - DNA, 58 bp, Artificial; identical to SEQ ID NO: 318097
  Synthetic oligonucleotide

SEQ ID NO: 543382 - DNA, 58 bp, Artificial; identical to SEQ ID NO: 318100
  Synthetic oligonucleotide

SEQ ID NO: 543383 - DNA, 50 bp, Artificial; identical to SEQ ID NO: 318103
  Synthetic oligonucleotide

SEQ ID NO: 543384 - DNA, 53 bp, Artificial; identical to SEQ ID NO: 318106
  Synthetic oligonucleotide

SEQ ID NO: 543385 - DNA, 55 bp, Artificial; identical to SEQ ID NO: 19813
  Synthetic oligonucleotide

SEQ ID NO: 543386 - DNA, 56 bp, Artificial; identical to SEQ ID NO: 318107
  Synthetic oligonucleotide

SEQ ID NO: 543387 - DNA, 60 bp, Artificial; identical to SEQ ID NO: 318108
  Synthetic oligonucleotide

SEQ ID NO: 543388 - DNA, 55 bp, Artificial; identical to SEQ ID NO: 318110
  Synthetic oligonucleotide

SEQ ID NO: 543389 - DNA, 56 bp, Artificial; identical to SEQ ID NO: 318111
  Synthetic oligonucleotide

SEQ ID NO: 543390 - DNA, 55 bp, Artificial; identical to SEQ ID NO: 318112
  Synthetic oligonucleotide

SEQ ID NO: 543391 - DNA, 56 bp, Artificial; identical to SEQ ID NO: 318113
  Synthetic oligonucleotide

SEQ ID NO: 543392 - DNA, 60 bp, Artificial; identical to SEQ ID NO: 318116
  Synthetic oligonucleotide

SEQ ID NO: 543393 - DNA, 58 bp, Artificial; identical to SEQ ID NO: 15460
  Synthetic oligonucleotide

SEQ ID NO: 543394 - DNA, 51 bp, Artificial; identical to SEQ ID NO: 318121
  Synthetic oligonucleotide

SEQ ID NO: 543395 - DNA, 60 bp, Artificial; identical to SEQ ID NO: 318126
  Synthetic oligonucleotide

SEQ ID NO: 543396 - DNA, 55 bp, Artificial; identical to SEQ ID NO: 318128
  Synthetic oligonucleotide

SEQ ID NO: 543397 - DNA, 55 bp, Artificial; identical to SEQ ID NO: 318129
  Synthetic oligonucleotide

SEQ ID NO: 543398 - DNA, 52 bp, Artificial; identical to SEQ ID NO: 318130
  Synthetic oligonucleotide

SEQ ID NO: 543399 - DNA, 54 bp, Artificial; identical to SEQ ID NO: 318131
  Synthetic oligonucleotide

SEQ ID NO: 543400 - DNA, 55 bp, Artificial; identical to SEQ ID NO: 19460
  Synthetic oligonucleotide

SEQ ID NO: 543401 - DNA, 56 bp, Artificial; identical to SEQ ID NO: 318133
  Synthetic oligonucleotide

SEQ ID NO: 543402 - DNA, 51 bp, Artificial; identical to SEQ ID NO: 318140
  Synthetic oligonucleotide

SEQ ID NO: 543403 - DNA, 60 bp, Artificial; identical to SEQ ID NO: 318141
  Synthetic oligonucleotide

SEQ ID NO: 543404 - DNA, 60 bp, Artificial; identical to SEQ ID NO: 318144
  Synthetic oligonucleotide

SEQ ID NO: 543405 - DNA, 53 bp, Artificial; identical to SEQ ID NO: 318145
  Synthetic oligonucleotide

SEQ ID NO: 543406 - DNA, 55 bp, Artificial; identical to SEQ ID NO: 318149
  Synthetic oligonucleotide

SEQ ID NO: 543407 - DNA, 60 bp, Artificial; identical to SEQ ID NO: 318150
  Synthetic oligonucleotide

SEQ ID NO: 543408 - DNA, 60 bp, Artificial; identical to SEQ ID NO: 11064
  Synthetic oligonucleotide

SEQ ID NO: 543409 - DNA, 53 bp, Artificial; identical to SEQ ID NO: 318153
  Synthetic oligonucleotide

SEQ ID NO: 543410 - DNA, 59 bp, Artificial; identical to SEQ ID NO: 318167
  Synthetic oligonucleotide

SEQ ID NO: 543411 - DNA, 54 bp, Artificial; identical to SEQ ID NO: 318168
  Synthetic oligonucleotide

SEQ ID NO: 543412 - DNA, 55 bp, Artificial; identical to SEQ ID NO: 318169
  Synthetic oligonucleotide

SEQ ID NO: 543413 - DNA, 54 bp, Artificial; identical to SEQ ID NO: 318172
  Synthetic oligonucleotide

SEQ ID NO: 543414 - DNA, 59 bp, Artificial; identical to SEQ ID NO: 318176
  Synthetic oligonucleotide

SEQ ID NO: 543415 - DNA, 57 bp, Artificial; identical to SEQ ID NO: 318177
  Synthetic oligonucleotide

SEQ ID NO: 543416 - DNA, 60 bp, Artificial; identical to SEQ ID NO: 318180
  Synthetic oligonucleotide

SEQ ID NO: 543417 - DNA, 59 bp, Artificial; identical to SEQ ID NO: 318181
  Synthetic oligonucleotide

SEQ ID NO: 543418 - DNA, 56 bp, Artificial; identical to SEQ ID NO: 318182
  Synthetic oligonucleotide

SEQ ID NO: 543419 - DNA, 51 bp, Artificial; identical to SEQ ID NO: 318185
  Synthetic oligonucleotide

SEQ ID NO: 543420 - DNA, 56 bp, Artificial; identical to SEQ ID NO: 318186
  Synthetic oligonucleotide

SEQ ID NO: 543421 - DNA, 59 bp, Artificial; identical to SEQ ID NO: 318187
  Synthetic oligonucleotide

SEQ ID NO: 543422 - DNA, 52 bp, Artificial; identical to SEQ ID NO: 318189
  Synthetic oligonucleotide

SEQ ID NO: 543423 - DNA, 59 bp, Artificial; identical to SEQ ID NO: 318200
  Synthetic oligonucleotide

SEQ ID NO: 543424 - DNA, 54 bp, Artificial; identical to SEQ ID NO: 318202
  Synthetic oligonucleotide

SEQ ID NO: 543425 - DNA, 60 bp, Artificial; identical to SEQ ID NO: 318203
  Synthetic oligonucleotide

SEQ ID NO: 543426 - DNA, 60 bp, Artificial; identical to SEQ ID NO: 10953
  Synthetic oligonucleotide

SEQ ID NO: 543427 - DNA, 60 bp, Artificial; identical to SEQ ID NO: 318208
  Synthetic oligonucleotide

SEQ ID NO: 543428 - DNA, 53 bp, Artificial; identical to SEQ ID NO: 318209
  Synthetic oligonucleotide

SEQ ID NO: 543429 - DNA, 55 bp, Artificial; identical to SEQ ID NO: 318210
  Synthetic oligonucleotide

SEQ ID NO: 543430 - DNA, 55 bp, Artificial; identical to SEQ ID NO: 318212
  Synthetic oligonucleotide

SEQ ID NO: 543431 - DNA, 50 bp, Artificial; identical to SEQ ID NO: 318213
  Synthetic oligonucleotide

SEQ ID NO: 543432 - DNA, 58 bp, Artificial; identical to SEQ ID NO: 318217
  Synthetic oligonucleotide

SEQ ID NO: 543433 - DNA, 56 bp, Artificial; identical to SEQ ID NO: 318220
  Synthetic oligonucleotide

SEQ ID NO: 543434 - DNA, 57 bp, Artificial; identical to SEQ ID NO: 318222
  Synthetic oligonucleotide

SEQ ID NO: 543435 - DNA, 59 bp, Artificial; identical to SEQ ID NO: 318227
  Synthetic oligonucleotide

SEQ ID NO: 543436 - DNA, 54 bp, Artificial; identical to SEQ ID NO: 318228
  Synthetic oligonucleotide

SEQ ID NO: 543437 - DNA, 53 bp, Artificial; identical to SEQ ID NO: 318231
  Synthetic oligonucleotide

SEQ ID NO: 543438 - DNA, 55 bp, Artificial; identical to SEQ ID NO: 318236
  Synthetic oligonucleotide

SEQ ID NO: 543439 - DNA, 59 bp, Artificial; identical to SEQ ID NO: 318237
  Synthetic oligonucleotide

SEQ ID NO: 543440 - DNA, 54 bp, Artificial; identical to SEQ ID NO: 318241
  Synthetic oligonucleotide

SEQ ID NO: 543441 - DNA, 53 bp, Artificial; identical to SEQ ID NO: 318243
  Synthetic oligonucleotide

SEQ ID NO: 543442 - DNA, 51 bp, Artificial; identical to SEQ ID NO: 318246
  Synthetic oligonucleotide

SEQ ID NO: 543443 - DNA, 52 bp, Artificial; identical to SEQ ID NO: 318248
  Synthetic oligonucleotide

SEQ ID NO: 543444 - DNA, 54 bp, Artificial; identical to SEQ ID NO: 318249
  Synthetic oligonucleotide

SEQ ID NO: 543445 - DNA, 60 bp, Artificial; identical to SEQ ID NO: 318252
  Synthetic oligonucleotide

SEQ ID NO: 543446 - DNA, 57 bp, Artificial; identical to SEQ ID NO: 318253
  Synthetic oligonucleotide

SEQ ID NO: 543447 - DNA, 60 bp, Artificial; identical to SEQ ID NO: 318254
  Synthetic oligonucleotide

SEQ ID NO: 543448 - DNA, 55 bp, Artificial; identical to SEQ ID NO: 318257
  Synthetic oligonucleotide

SEQ ID NO: 543449 - DNA, 60 bp, Artificial; identical to SEQ ID NO: 318259
  Synthetic oligonucleotide

SEQ ID NO: 543450 - DNA, 57 bp, Artificial; identical to SEQ ID NO: 318260
  Synthetic oligonucleotide

SEQ ID NO: 543451 - DNA, 55 bp, Artificial; identical to SEQ ID NO: 318261
  Synthetic oligonucleotide

SEQ ID NO: 543452 - DNA, 58 bp, Artificial; identical to SEQ ID NO: 318262
  Synthetic oligonucleotide

SEQ ID NO: 543453 - DNA, 60 bp, Artificial; identical to SEQ ID NO: 318265
  Synthetic oligonucleotide

SEQ ID NO: 543454 - DNA, 58 bp, Artificial; identical to SEQ ID NO: 318267
  Synthetic oligonucleotide

SEQ ID NO: 543455 - DNA, 60 bp, Artificial; identical to SEQ ID NO: 318270
  Synthetic oligonucleotide

SEQ ID NO: 543456 - DNA, 60 bp, Artificial; identical to SEQ ID NO: 318272
  Synthetic oligonucleotide

SEQ ID NO: 543457 - DNA, 59 bp, Artificial; identical to SEQ ID NO: 318279
  Synthetic oligonucleotide

SEQ ID NO: 543458 - DNA, 53 bp, Artificial; identical to SEQ ID NO: 10229
  Synthetic oligonucleotide

SEQ ID NO: 543459 - DNA, 52 bp, Artificial; identical to SEQ ID NO: 318288
  Synthetic oligonucleotide

SEQ ID NO: 543460 - DNA, 52 bp, Artificial; identical to SEQ ID NO: 318289
  Synthetic oligonucleotide

SEQ ID NO: 543461 - DNA, 53 bp, Artificial; identical to SEQ ID NO: 318297
  Synthetic oligonucleotide

SEQ ID NO: 543462 - DNA, 58 bp, Artificial; identical to SEQ ID NO: 318298
  Synthetic oligonucleotide

SEQ ID NO: 543463 - DNA, 59 bp, Artificial; identical to SEQ ID NO: 318301
  Synthetic oligonucleotide

SEQ ID NO: 543464 - DNA, 55 bp, Artificial; identical to SEQ ID NO: 318304
  Synthetic oligonucleotide

SEQ ID NO: 543465 - DNA, 56 bp, Artificial; identical to SEQ ID NO: 318307
  Synthetic oligonucleotide

SEQ ID NO: 543466 - DNA, 60 bp, Artificial; identical to SEQ ID NO: 318308
  Synthetic oligonucleotide

SEQ ID NO: 543467 - DNA, 53 bp, Artificial; identical to SEQ ID NO: 318310
  Synthetic oligonucleotide

SEQ ID NO: 543468 - DNA, 57 bp, Artificial; identical to SEQ ID NO: 19838
  Synthetic oligonucleotide

SEQ ID NO: 543469 - DNA, 60 bp, Artificial; identical to SEQ ID NO: 318316
  Synthetic oligonucleotide

SEQ ID NO: 543470 - DNA, 59 bp, Artificial; identical to SEQ ID NO: 318318
  Synthetic oligonucleotide

SEQ ID NO: 543471 - DNA, 55 bp, Artificial; identical to SEQ ID NO: 318320
  Synthetic oligonucleotide

SEQ ID NO: 543472 - DNA, 52 bp, Artificial; identical to SEQ ID NO: 318321
  Synthetic oligonucleotide

SEQ ID NO: 543473 - DNA, 55 bp, Artificial; identical to SEQ ID NO: 318323
  Synthetic oligonucleotide

SEQ ID NO: 543474 - DNA, 58 bp, Artificial; identical to SEQ ID NO: 318324
  Synthetic oligonucleotide

SEQ ID NO: 543475 - DNA, 52 bp, Artificial; identical to SEQ ID NO: 318325
  Synthetic oligonucleotide

SEQ ID NO: 543476 - DNA, 58 bp, Artificial; identical to SEQ ID NO: 318326
  Synthetic oligonucleotide

SEQ ID NO: 543477 - DNA, 60 bp, Artificial; identical to SEQ ID NO: 318327
  Synthetic oligonucleotide

SEQ ID NO: 543478 - DNA, 59 bp, Artificial; identical to SEQ ID NO: 318332
  Synthetic oligonucleotide

SEQ ID NO: 543479 - DNA, 60 bp, Artificial; identical to SEQ ID NO: 318337
  Synthetic oligonucleotide

SEQ ID NO: 543480 - DNA, 57 bp, Artificial; identical to SEQ ID NO: 318338
  Synthetic oligonucleotide

SEQ ID NO: 543481 - DNA, 54 bp, Artificial; identical to SEQ ID NO: 318345
  Synthetic oligonucleotide

SEQ ID NO: 543482 - DNA, 60 bp, Artificial; identical to SEQ ID NO: 318348
  Synthetic oligonucleotide

SEQ ID NO: 543483 - DNA, 60 bp, Artificial; identical to SEQ ID NO: 318354
  Synthetic oligonucleotide

SEQ ID NO: 543484 - DNA, 60 bp, Artificial; identical to SEQ ID NO: 318355
  Synthetic oligonucleotide

SEQ ID NO: 543485 - DNA, 60 bp, Artificial; identical to SEQ ID NO: 318356
  Synthetic oligonucleotide

SEQ ID NO: 543486 - DNA, 55 bp, Artificial; identical to SEQ ID NO: 318358
  Synthetic oligonucleotide

SEQ ID NO: 543487 - DNA, 60 bp, Artificial; identical to SEQ ID NO: 318365
  Synthetic oligonucleotide

SEQ ID NO: 543488 - DNA, 56 bp, Artificial; identical to SEQ ID NO: 318366
  Synthetic oligonucleotide

SEQ ID NO: 543489 - DNA, 58 bp, Artificial; identical to SEQ ID NO: 318367
  Synthetic oligonucleotide

SEQ ID NO: 543490 - DNA, 55 bp, Artificial; identical to SEQ ID NO: 318368
  Synthetic oligonucleotide

SEQ ID NO: 543491 - DNA, 59 bp, Artificial; identical to SEQ ID NO: 318369
  Synthetic oligonucleotide

SEQ ID NO: 543492 - DNA, 55 bp, Artificial; identical to SEQ ID NO: 318371
  Synthetic oligonucleotide

SEQ ID NO: 543493 - DNA, 55 bp, Artificial; identical to SEQ ID NO: 318372
  Synthetic oligonucleotide

SEQ ID NO: 543494 - DNA, 60 bp, Artificial; identical to SEQ ID NO: 318375
  Synthetic oligonucleotide

SEQ ID NO: 543495 - DNA, 52 bp, Artificial; identical to SEQ ID NO: 318376
  Synthetic oligonucleotide

SEQ ID NO: 543496 - DNA, 60 bp, Artificial; identical to SEQ ID NO: 318379
  Synthetic oligonucleotide

SEQ ID NO: 543497 - DNA, 60 bp, Artificial; identical to SEQ ID NO: 318381
  Synthetic oligonucleotide

SEQ ID NO: 543498 - DNA, 52 bp, Artificial; identical to SEQ ID NO: 12791
  Synthetic oligonucleotide

SEQ ID NO: 543499 - DNA, 50 bp, Artificial; identical to SEQ ID NO: 318386
  Synthetic oligonucleotide

SEQ ID NO: 543500 - DNA, 60 bp, Artificial; identical to SEQ ID NO: 318389
  Synthetic oligonucleotide

SEQ ID NO: 543501 - DNA, 56 bp, Artificial; identical to SEQ ID NO: 318391
  Synthetic oligonucleotide

SEQ ID NO: 543502 - DNA, 50 bp, Artificial; identical to SEQ ID NO: 318393
  Synthetic oligonucleotide

SEQ ID NO: 543503 - DNA, 55 bp, Artificial; identical to SEQ ID NO: 318394
  Synthetic oligonucleotide

SEQ ID NO: 543504 - DNA, 56 bp, Artificial; identical to SEQ ID NO: 318396
  Synthetic oligonucleotide

SEQ ID NO: 543505 - DNA, 59 bp, Artificial; identical to SEQ ID NO: 318397
  Synthetic oligonucleotide

SEQ ID NO: 543506 - DNA, 57 bp, Artificial; identical to SEQ ID NO: 318399
  Synthetic oligonucleotide

SEQ ID NO: 543507 - DNA, 57 bp, Artificial; identical to SEQ ID NO: 318400
  Synthetic oligonucleotide

SEQ ID NO: 543508 - DNA, 54 bp, Artificial; identical to SEQ ID NO: 318401
  Synthetic oligonucleotide

SEQ ID NO: 543509 - DNA, 60 bp, Artificial; identical to SEQ ID NO: 318402
  Synthetic oligonucleotide

SEQ ID NO: 543510 - DNA, 54 bp, Artificial; identical to SEQ ID NO: 318406
  Synthetic oligonucleotide

SEQ ID NO: 543511 - DNA, 56 bp, Artificial; identical to SEQ ID NO: 318407
  Synthetic oligonucleotide

SEQ ID NO: 543512 - DNA, 54 bp, Artificial; identical to SEQ ID NO: 318410
  Synthetic oligonucleotide

SEQ ID NO: 543513 - DNA, 55 bp, Artificial; identical to SEQ ID NO: 318411
  Synthetic oligonucleotide

SEQ ID NO: 543514 - DNA, 56 bp, Artificial; identical to SEQ ID NO: 318413
  Synthetic oligonucleotide

SEQ ID NO: 543515 - DNA, 59 bp, Artificial; identical to SEQ ID NO: 318416
  Synthetic oligonucleotide

SEQ ID NO: 543516 - DNA, 57 bp, Artificial; identical to SEQ ID NO: 318418
  Synthetic oligonucleotide

SEQ ID NO: 543517 - DNA, 60 bp, Artificial; identical to SEQ ID NO: 318419
  Synthetic oligonucleotide

SEQ ID NO: 543518 - DNA, 54 bp, Artificial; identical to SEQ ID NO: 318422
  Synthetic oligonucleotide

SEQ ID NO: 543519 - DNA, 53 bp, Artificial; identical to SEQ ID NO: 318423
  Synthetic oligonucleotide

SEQ ID NO: 543520 - DNA, 58 bp, Artificial; identical to SEQ ID NO: 318424
  Synthetic oligonucleotide

SEQ ID NO: 543521 - DNA, 55 bp, Artificial; identical to SEQ ID NO: 318425
  Synthetic oligonucleotide

SEQ ID NO: 543522 - DNA, 60 bp, Artificial; identical to SEQ ID NO: 318426
  Synthetic oligonucleotide

SEQ ID NO: 543523 - DNA, 58 bp, Artificial; identical to SEQ ID NO: 318428
  Synthetic oligonucleotide

SEQ ID NO: 543524 - DNA, 50 bp, Artificial; identical to SEQ ID NO: 318431
  Synthetic oligonucleotide

SEQ ID NO: 543525 - DNA, 59 bp, Artificial; identical to SEQ ID NO: 318440
  Synthetic oligonucleotide

SEQ ID NO: 543526 - DNA, 50 bp, Artificial; identical to SEQ ID NO: 318445
  Synthetic oligonucleotide

SEQ ID NO: 543527 - DNA, 60 bp, Artificial; identical to SEQ ID NO: 12713
  Synthetic oligonucleotide

SEQ ID NO: 543528 - DNA, 60 bp, Artificial; identical to SEQ ID NO: 318446
  Synthetic oligonucleotide

SEQ ID NO: 543529 - DNA, 55 bp, Artificial; identical to SEQ ID NO: 318447
  Synthetic oligonucleotide

SEQ ID NO: 543530 - DNA, 60 bp, Artificial; identical to SEQ ID NO: 318449
  Synthetic oligonucleotide

SEQ ID NO: 543531 - DNA, 55 bp, Artificial; identical to SEQ ID NO: 318451
  Synthetic oligonucleotide

SEQ ID NO: 543532 - DNA, 54 bp, Artificial; identical to SEQ ID NO: 318452
  Synthetic oligonucleotide

SEQ ID NO: 543533 - DNA, 49 bp, Artificial; identical to SEQ ID NO: 318454
  Synthetic oligonucleotide

SEQ ID NO: 543534 - DNA, 55 bp, Artificial; identical to SEQ ID NO: 318455
  Synthetic oligonucleotide

SEQ ID NO: 543535 - DNA, 54 bp, Artificial; identical to SEQ ID NO: 318459
  Synthetic oligonucleotide

SEQ ID NO: 543536 - DNA, 55 bp, Artificial; identical to SEQ ID NO: 318463
  Synthetic oligonucleotide

SEQ ID NO: 543537 - DNA, 60 bp, Artificial; identical to SEQ ID NO: 318464
  Synthetic oligonucleotide

SEQ ID NO: 543538 - DNA, 60 bp, Artificial; identical to SEQ ID NO: 318466
  Synthetic oligonucleotide

SEQ ID NO: 543539 - DNA, 59 bp, Artificial; identical to SEQ ID NO: 318467
  Synthetic oligonucleotide

SEQ ID NO: 543540 - DNA, 55 bp, Artificial; identical to SEQ ID NO: 318468
  Synthetic oligonucleotide

SEQ ID NO: 543541 - DNA, 60 bp, Artificial; identical to SEQ ID NO: 318469
  Synthetic oligonucleotide

SEQ ID NO: 543542 - DNA, 55 bp, Artificial; identical to SEQ ID NO: 318470
  Synthetic oligonucleotide

SEQ ID NO: 543543 - DNA, 55 bp, Artificial; identical to SEQ ID NO: 318472
  Synthetic oligonucleotide

SEQ ID NO: 543544 - DNA, 55 bp, Artificial; identical to SEQ ID NO: 318474
  Synthetic oligonucleotide

SEQ ID NO: 543545 - DNA, 60 bp, Artificial; identical to SEQ ID NO: 318478
  Synthetic oligonucleotide

SEQ ID NO: 543546 - DNA, 60 bp, Artificial; identical to SEQ ID NO: 318479
  Synthetic oligonucleotide

SEQ ID NO: 543547 - DNA, 60 bp, Artificial; identical to SEQ ID NO: 9712
  Synthetic oligonucleotide

SEQ ID NO: 543548 - DNA, 59 bp, Artificial; identical to SEQ ID NO: 318484
  Synthetic oligonucleotide

SEQ ID NO: 543549 - DNA, 57 bp, Artificial; identical to SEQ ID NO: 318492
  Synthetic oligonucleotide

SEQ ID NO: 543550 - DNA, 59 bp, Artificial; identical to SEQ ID NO: 318493
  Synthetic oligonucleotide

SEQ ID NO: 543551 - DNA, 55 bp, Artificial; identical to SEQ ID NO: 318497
  Synthetic oligonucleotide

SEQ ID NO: 543552 - DNA, 54 bp, Artificial; identical to SEQ ID NO: 318504
  Synthetic oligonucleotide

SEQ ID NO: 543553 - DNA, 51 bp, Artificial; identical to SEQ ID NO: 318507
  Synthetic oligonucleotide

SEQ ID NO: 543554 - DNA, 60 bp, Artificial; identical to SEQ ID NO: 318508
  Synthetic oligonucleotide

SEQ ID NO: 543555 - DNA, 58 bp, Artificial; identical to SEQ ID NO: 318509
  Synthetic oligonucleotide

SEQ ID NO: 543556 - DNA, 57 bp, Artificial; identical to SEQ ID NO: 318514
  Synthetic oligonucleotide

SEQ ID NO: 543557 - DNA, 60 bp, Artificial; identical to SEQ ID NO: 318516
  Synthetic oligonucleotide

SEQ ID NO: 543558 - DNA, 60 bp, Artificial; identical to SEQ ID NO: 318519
  Synthetic oligonucleotide

SEQ ID NO: 543559 - DNA, 52 bp, Artificial; identical to SEQ ID NO: 318520
  Synthetic oligonucleotide

SEQ ID NO: 543560 - DNA, 59 bp, Artificial; identical to SEQ ID NO: 318524
  Synthetic oligonucleotide

SEQ ID NO: 543561 - DNA, 57 bp, Artificial; identical to SEQ ID NO: 318525
  Synthetic oligonucleotide

SEQ ID NO: 543562 - DNA, 57 bp, Artificial; identical to SEQ ID NO: 318529
  Synthetic oligonucleotide

SEQ ID NO: 543563 - DNA, 60 bp, Artificial; identical to SEQ ID NO: 318537
  Synthetic oligonucleotide

SEQ ID NO: 543564 - DNA, 59 bp, Artificial; identical to SEQ ID NO: 17804
  Synthetic oligonucleotide

SEQ ID NO: 543565 - DNA, 60 bp, Artificial; identical to SEQ ID NO: 318538
  Synthetic oligonucleotide

SEQ ID NO: 543566 - DNA, 56 bp, Artificial; identical to SEQ ID NO: 318542
  Synthetic oligonucleotide

SEQ ID NO: 543567 - DNA, 53 bp, Artificial; identical to SEQ ID NO: 19869
  Synthetic oligonucleotide

SEQ ID NO: 543568 - DNA, 53 bp, Artificial; identical to SEQ ID NO: 318543
  Synthetic oligonucleotide

SEQ ID NO: 543569 - DNA, 56 bp, Artificial; identical to SEQ ID NO: 318544
  Synthetic oligonucleotide

SEQ ID NO: 543570 - DNA, 55 bp, Artificial; identical to SEQ ID NO: 318548
  Synthetic oligonucleotide

SEQ ID NO: 543571 - DNA, 57 bp, Artificial; identical to SEQ ID NO: 318550
  Synthetic oligonucleotide

SEQ ID NO: 543572 - DNA, 60 bp, Artificial; identical to SEQ ID NO: 318557
  Synthetic oligonucleotide

SEQ ID NO: 543573 - DNA, 58 bp, Artificial; identical to SEQ ID NO: 318558
  Synthetic oligonucleotide

SEQ ID NO: 543574 - DNA, 59 bp, Artificial; identical to SEQ ID NO: 318561
  Synthetic oligonucleotide

SEQ ID NO: 543575 - DNA, 58 bp, Artificial; identical to SEQ ID NO: 318563
  Synthetic oligonucleotide

SEQ ID NO: 543576 - DNA, 52 bp, Artificial; identical to SEQ ID NO: 318564
  Synthetic oligonucleotide

SEQ ID NO: 543577 - DNA, 51 bp, Artificial; identical to SEQ ID NO: 318565
  Synthetic oligonucleotide

SEQ ID NO: 543578 - DNA, 60 bp, Artificial; identical to SEQ ID NO: 318570
  Synthetic oligonucleotide

SEQ ID NO: 543579 - DNA, 60 bp, Artificial; identical to SEQ ID NO: 318572
  Synthetic oligonucleotide

SEQ ID NO: 543580 - DNA, 60 bp, Artificial; identical to SEQ ID NO: 318574
  Synthetic oligonucleotide

SEQ ID NO: 543581 - DNA, 55 bp, Artificial; identical to SEQ ID NO: 318577
  Synthetic oligonucleotide

SEQ ID NO: 543582 - DNA, 60 bp, Artificial; identical to SEQ ID NO: 318578
  Synthetic oligonucleotide

SEQ ID NO: 543583 - DNA, 55 bp, Artificial; identical to SEQ ID NO: 318580
  Synthetic oligonucleotide

SEQ ID NO: 543584 - DNA, 56 bp, Artificial; identical to SEQ ID NO: 318582
  Synthetic oligonucleotide

SEQ ID NO: 543585 - DNA, 55 bp, Artificial; identical to SEQ ID NO: 318584
  Synthetic oligonucleotide

SEQ ID NO: 543586 - DNA, 60 bp, Artificial; identical to SEQ ID NO: 318587
  Synthetic oligonucleotide

SEQ ID NO: 543587 - DNA, 59 bp, Artificial; identical to SEQ ID NO: 318588
  Synthetic oligonucleotide

SEQ ID NO: 543588 - DNA, 55 bp, Artificial; identical to SEQ ID NO: 318590
  Synthetic oligonucleotide

SEQ ID NO: 543589 - DNA, 53 bp, Artificial; identical to SEQ ID NO: 318591
  Synthetic oligonucleotide

SEQ ID NO: 543590 - DNA, 55 bp, Artificial; identical to SEQ ID NO: 318592
  Synthetic oligonucleotide

SEQ ID NO: 543591 - DNA, 55 bp, Artificial; identical to SEQ ID NO: 318593
  Synthetic oligonucleotide

SEQ ID NO: 543592 - DNA, 55 bp, Artificial; identical to SEQ ID NO: 318597
  Synthetic oligonucleotide

SEQ ID NO: 543593 - DNA, 60 bp, Artificial; identical to SEQ ID NO: 318600
  Synthetic oligonucleotide

SEQ ID NO: 543594 - DNA, 60 bp, Artificial; identical to SEQ ID NO: 318602
  Synthetic oligonucleotide

SEQ ID NO: 543595 - DNA, 55 bp, Artificial; identical to SEQ ID NO: 318604
  Synthetic oligonucleotide

SEQ ID NO: 543596 - DNA, 59 bp, Artificial; identical to SEQ ID NO: 318605
  Synthetic oligonucleotide

SEQ ID NO: 543597 - DNA, 51 bp, Artificial; identical to SEQ ID NO: 7044
  Synthetic oligonucleotide

SEQ ID NO: 543598 - DNA, 60 bp, Artificial; identical to SEQ ID NO: 15343
  Synthetic oligonucleotide

SEQ ID NO: 543599 - DNA, 58 bp, Artificial; identical to SEQ ID NO: 318616
  Synthetic oligonucleotide

SEQ ID NO: 543600 - DNA, 50 bp, Artificial; identical to SEQ ID NO: 318617
  Synthetic oligonucleotide

SEQ ID NO: 543601 - DNA, 59 bp, Artificial; identical to SEQ ID NO: 318621
  Synthetic oligonucleotide

SEQ ID NO: 543602 - DNA, 58 bp, Artificial; identical to SEQ ID NO: 318622
  Synthetic oligonucleotide

SEQ ID NO: 543603 - DNA, 60 bp, Artificial; identical to SEQ ID NO: 318623
  Synthetic oligonucleotide

SEQ ID NO: 543604 - DNA, 60 bp, Artificial; identical to SEQ ID NO: 318624
  Synthetic oligonucleotide

SEQ ID NO: 543605 - DNA, 60 bp, Artificial; identical to SEQ ID NO: 318630
  Synthetic oligonucleotide

SEQ ID NO: 543606 - DNA, 55 bp, Artificial; identical to SEQ ID NO: 318633
  Synthetic oligonucleotide

SEQ ID NO: 543607 - DNA, 52 bp, Artificial; identical to SEQ ID NO: 318636
  Synthetic oligonucleotide

SEQ ID NO: 543608 - DNA, 60 bp, Artificial; identical to SEQ ID NO: 318638
  Synthetic oligonucleotide

SEQ ID NO: 543609 - DNA, 60 bp, Artificial; identical to SEQ ID NO: 318639
  Synthetic oligonucleotide

SEQ ID NO: 543610 - DNA, 60 bp, Artificial; identical to SEQ ID NO: 318642
  Synthetic oligonucleotide

SEQ ID NO: 543611 - DNA, 56 bp, Artificial; identical to SEQ ID NO: 318643
  Synthetic oligonucleotide

SEQ ID NO: 543612 - DNA, 59 bp, Artificial; identical to SEQ ID NO: 318645
  Synthetic oligonucleotide

SEQ ID NO: 543613 - DNA, 60 bp, Artificial; identical to SEQ ID NO: 318646
  Synthetic oligonucleotide

SEQ ID NO: 543614 - DNA, 51 bp, Artificial; identical to SEQ ID NO: 318648
  Synthetic oligonucleotide

SEQ ID NO: 543615 - DNA, 60 bp, Artificial; identical to SEQ ID NO: 318649
  Synthetic oligonucleotide

SEQ ID NO: 543616 - DNA, 52 bp, Artificial; identical to SEQ ID NO: 318650
  Synthetic oligonucleotide

SEQ ID NO: 543617 - DNA, 60 bp, Artificial; identical to SEQ ID NO: 318652
  Synthetic oligonucleotide

SEQ ID NO: 543618 - DNA, 55 bp, Artificial; identical to SEQ ID NO: 318653
  Synthetic oligonucleotide

SEQ ID NO: 543619 - DNA, 55 bp, Artificial; identical to SEQ ID NO: 318654
  Synthetic oligonucleotide

SEQ ID NO: 543620 - DNA, 58 bp, Artificial; identical to SEQ ID NO: 318655
  Synthetic oligonucleotide

SEQ ID NO: 543621 - DNA, 51 bp, Artificial; identical to SEQ ID NO: 318657
  Synthetic oligonucleotide

SEQ ID NO: 543622 - DNA, 58 bp, Artificial; identical to SEQ ID NO: 318658
  Synthetic oligonucleotide

SEQ ID NO: 543623 - DNA, 60 bp, Artificial; identical to SEQ ID NO: 318659
  Synthetic oligonucleotide

SEQ ID NO: 543624 - DNA, 60 bp, Artificial; identical to SEQ ID NO: 318660
  Synthetic oligonucleotide

SEQ ID NO: 543625 - DNA, 58 bp, Artificial; identical to SEQ ID NO: 318661
  Synthetic oligonucleotide

SEQ ID NO: 543626 - DNA, 52 bp, Artificial; identical to SEQ ID NO: 318668
  Synthetic oligonucleotide

SEQ ID NO: 543627 - DNA, 55 bp, Artificial; identical to SEQ ID NO: 318670
  Synthetic oligonucleotide

SEQ ID NO: 543628 - DNA, 60 bp, Artificial; identical to SEQ ID NO: 318671
  Synthetic oligonucleotide

SEQ ID NO: 543629 - DNA, 60 bp, Artificial; identical to SEQ ID NO: 318672
  Synthetic oligonucleotide

SEQ ID NO: 543630 - DNA, 60 bp, Artificial; identical to SEQ ID NO: 318675
  Synthetic oligonucleotide

SEQ ID NO: 543631 - DNA, 55 bp, Artificial; identical to SEQ ID NO: 318678
  Synthetic oligonucleotide

SEQ ID NO: 543632 - DNA, 55 bp, Artificial; identical to SEQ ID NO: 318679
  Synthetic oligonucleotide

SEQ ID NO: 543633 - DNA, 58 bp, Artificial; identical to SEQ ID NO: 318682
  Synthetic oligonucleotide

SEQ ID NO: 543634 - DNA, 58 bp, Artificial; identical to SEQ ID NO: 318684
  Synthetic oligonucleotide

SEQ ID NO: 543635 - DNA, 52 bp, Artificial; identical to SEQ ID NO: 8218
  Synthetic oligonucleotide

SEQ ID NO: 543636 - DNA, 56 bp, Artificial; identical to SEQ ID NO: 318688
  Synthetic oligonucleotide

SEQ ID NO: 543637 - DNA, 53 bp, Artificial; identical to SEQ ID NO: 318689
  Synthetic oligonucleotide

SEQ ID NO: 543638 - DNA, 54 bp, Artificial; identical to SEQ ID NO: 16980
  Synthetic oligonucleotide

SEQ ID NO: 543639 - DNA, 55 bp, Artificial; identical to SEQ ID NO: 318694
  Synthetic oligonucleotide

SEQ ID NO: 543640 - DNA, 53 bp, Artificial; identical to SEQ ID NO: 318697
  Synthetic oligonucleotide

SEQ ID NO: 543641 - DNA, 56 bp, Artificial; identical to SEQ ID NO: 318699
  Synthetic oligonucleotide

SEQ ID NO: 543642 - DNA, 57 bp, Artificial; identical to SEQ ID NO: 318702
  Synthetic oligonucleotide

SEQ ID NO: 543643 - DNA, 60 bp, Artificial; identical to SEQ ID NO: 318707
  Synthetic oligonucleotide

SEQ ID NO: 543644 - DNA, 60 bp, Artificial; identical to SEQ ID NO: 318709
  Synthetic oligonucleotide

SEQ ID NO: 543645 - DNA, 55 bp, Artificial; identical to SEQ ID NO: 318712
  Synthetic oligonucleotide

SEQ ID NO: 543646 - DNA, 51 bp, Artificial; identical to SEQ ID NO: 318713
  Synthetic oligonucleotide

SEQ ID NO: 543647 - DNA, 56 bp, Artificial; identical to SEQ ID NO: 17117
  Synthetic oligonucleotide

SEQ ID NO: 543648 - DNA, 60 bp, Artificial; identical to SEQ ID NO: 318721
  Synthetic oligonucleotide

SEQ ID NO: 543649 - DNA, 52 bp, Artificial; identical to SEQ ID NO: 318722
  Synthetic oligonucleotide

SEQ ID NO: 543650 - DNA, 56 bp, Artificial; identical to SEQ ID NO: 318725
  Synthetic oligonucleotide

SEQ ID NO: 543651 - DNA, 59 bp, Artificial; identical to SEQ ID NO: 318728
  Synthetic oligonucleotide

SEQ ID NO: 543652 - DNA, 53 bp, Artificial; identical to SEQ ID NO: 318731
  Synthetic oligonucleotide

SEQ ID NO: 543653 - DNA, 60 bp, Artificial; identical to SEQ ID NO: 318732
  Synthetic oligonucleotide

SEQ ID NO: 543654 - DNA, 50 bp, Artificial; identical to SEQ ID NO: 318734
  Synthetic oligonucleotide

SEQ ID NO: 543655 - DNA, 57 bp, Artificial; identical to SEQ ID NO: 318737
  Synthetic oligonucleotide

SEQ ID NO: 543656 - DNA, 55 bp, Artificial; identical to SEQ ID NO: 318738
  Synthetic oligonucleotide

SEQ ID NO: 543657 - DNA, 60 bp, Artificial; identical to SEQ ID NO: 318740
  Synthetic oligonucleotide

SEQ ID NO: 543658 - DNA, 57 bp, Artificial; identical to SEQ ID NO: 318745
  Synthetic oligonucleotide

SEQ ID NO: 543659 - DNA, 55 bp, Artificial; identical to SEQ ID NO: 318746
  Synthetic oligonucleotide

SEQ ID NO: 543660 - DNA, 57 bp, Artificial; identical to SEQ ID NO: 16951
  Synthetic oligonucleotide

SEQ ID NO: 543661 - DNA, 59 bp, Artificial; identical to SEQ ID NO: 318748
  Synthetic oligonucleotide

SEQ ID NO: 543662 - DNA, 60 bp, Artificial; identical to SEQ ID NO: 318756
  Synthetic oligonucleotide

SEQ ID NO: 543663 - DNA, 55 bp, Artificial; identical to SEQ ID NO: 318761
  Synthetic oligonucleotide

SEQ ID NO: 543664 - DNA, 55 bp, Artificial; identical to SEQ ID NO: 318767
  Synthetic oligonucleotide

SEQ ID NO: 543665 - DNA, 55 bp, Artificial; identical to SEQ ID NO: 318770
  Synthetic oligonucleotide

SEQ ID NO: 543666 - DNA, 55 bp, Artificial; identical to SEQ ID NO: 318772
  Synthetic oligonucleotide

SEQ ID NO: 543667 - DNA, 50 bp, Artificial; identical to SEQ ID NO: 318775
  Synthetic oligonucleotide

SEQ ID NO: 543668 - DNA, 54 bp, Artificial; identical to SEQ ID NO: 318783
  Synthetic oligonucleotide

SEQ ID NO: 543669 - DNA, 57 bp, Artificial; identical to SEQ ID NO: 318785
  Synthetic oligonucleotide

SEQ ID NO: 543670 - DNA, 53 bp, Artificial; identical to SEQ ID NO: 318787
  Synthetic oligonucleotide

SEQ ID NO: 543671 - DNA, 55 bp, Artificial; identical to SEQ ID NO: 318791
  Synthetic oligonucleotide

SEQ ID NO: 543672 - DNA, 56 bp, Artificial; identical to SEQ ID NO: 318794
  Synthetic oligonucleotide

SEQ ID NO: 543673 - DNA, 60 bp, Artificial; identical to SEQ ID NO: 318796
  Synthetic oligonucleotide

SEQ ID NO: 543674 - DNA, 55 bp, Artificial; identical to SEQ ID NO: 318797
  Synthetic oligonucleotide

SEQ ID NO: 543675 - DNA, 59 bp, Artificial; identical to SEQ ID NO: 318799
  Synthetic oligonucleotide

SEQ ID NO: 543676 - DNA, 56 bp, Artificial; identical to SEQ ID NO: 318802
  Synthetic oligonucleotide

SEQ ID NO: 543677 - DNA, 53 bp, Artificial; identical to SEQ ID NO: 318804
  Synthetic oligonucleotide

SEQ ID NO: 543678 - DNA, 59 bp, Artificial; identical to SEQ ID NO: 318805
  Synthetic oligonucleotide

SEQ ID NO: 543679 - DNA, 59 bp, Artificial; identical to SEQ ID NO: 318806
  Synthetic oligonucleotide

SEQ ID NO: 543680 - DNA, 56 bp, Artificial; identical to SEQ ID NO: 318811
  Synthetic oligonucleotide

SEQ ID NO: 543681 - DNA, 54 bp, Artificial; identical to SEQ ID NO: 318812
  Synthetic oligonucleotide

SEQ ID NO: 543682 - DNA, 60 bp, Artificial; identical to SEQ ID NO: 318813
  Synthetic oligonucleotide

SEQ ID NO: 543683 - DNA, 51 bp, Artificial; identical to SEQ ID NO: 318814
  Synthetic oligonucleotide

SEQ ID NO: 543684 - DNA, 55 bp, Artificial; identical to SEQ ID NO: 318815
  Synthetic oligonucleotide

SEQ ID NO: 543685 - DNA, 60 bp, Artificial; identical to SEQ ID NO: 318816
  Synthetic oligonucleotide

SEQ ID NO: 543686 - DNA, 60 bp, Artificial; identical to SEQ ID NO: 318819
  Synthetic oligonucleotide

SEQ ID NO: 543687 - DNA, 56 bp, Artificial; identical to SEQ ID NO: 318821
  Synthetic oligonucleotide

SEQ ID NO: 543688 - DNA, 60 bp, Artificial; identical to SEQ ID NO: 318823
  Synthetic oligonucleotide

SEQ ID NO: 543689 - DNA, 60 bp, Artificial; identical to SEQ ID NO: 318827
  Synthetic oligonucleotide

SEQ ID NO: 543690 - DNA, 60 bp, Artificial; identical to SEQ ID NO: 318828
  Synthetic oligonucleotide

SEQ ID NO: 543691 - DNA, 58 bp, Artificial; identical to SEQ ID NO: 318831
  Synthetic oligonucleotide

SEQ ID NO: 543692 - DNA, 60 bp, Artificial; identical to SEQ ID NO: 318834
  Synthetic oligonucleotide

SEQ ID NO: 543693 - DNA, 58 bp, Artificial; identical to SEQ ID NO: 318839
  Synthetic oligonucleotide

SEQ ID NO: 543694 - DNA, 55 bp, Artificial; identical to SEQ ID NO: 318840
  Synthetic oligonucleotide

SEQ ID NO: 543695 - DNA, 60 bp, Artificial; identical to SEQ ID NO: 318843
  Synthetic oligonucleotide

SEQ ID NO: 543696 - DNA, 58 bp, Artificial; identical to SEQ ID NO: 318844
  Synthetic oligonucleotide

SEQ ID NO: 543697 - DNA, 59 bp, Artificial; identical to SEQ ID NO: 318846
  Synthetic oligonucleotide

SEQ ID NO: 543698 - DNA, 55 bp, Artificial; identical to SEQ ID NO: 318847
  Synthetic oligonucleotide

SEQ ID NO: 543699 - DNA, 60 bp, Artificial; identical to SEQ ID NO: 318851
  Synthetic oligonucleotide

SEQ ID NO: 543700 - DNA, 58 bp, Artificial; identical to SEQ ID NO: 318853
  Synthetic oligonucleotide

SEQ ID NO: 543701 - DNA, 58 bp, Artificial; identical to SEQ ID NO: 318854
  Synthetic oligonucleotide

SEQ ID NO: 543702 - DNA, 60 bp, Artificial; identical to SEQ ID NO: 318858
  Synthetic oligonucleotide

SEQ ID NO: 543703 - DNA, 58 bp, Artificial; identical to SEQ ID NO: 318859
  Synthetic oligonucleotide

SEQ ID NO: 543704 - DNA, 59 bp, Artificial; identical to SEQ ID NO: 318860
  Synthetic oligonucleotide

SEQ ID NO: 543705 - DNA, 58 bp, Artificial; identical to SEQ ID NO: 318861
  Synthetic oligonucleotide

SEQ ID NO: 543706 - DNA, 60 bp, Artificial; identical to SEQ ID NO: 318862
  Synthetic oligonucleotide

SEQ ID NO: 543707 - DNA, 60 bp, Artificial; identical to SEQ ID NO: 318866
  Synthetic oligonucleotide

SEQ ID NO: 543708 - DNA, 60 bp, Artificial; identical to SEQ ID NO: 318867
  Synthetic oligonucleotide

SEQ ID NO: 543709 - DNA, 58 bp, Artificial; identical to SEQ ID NO: 318869
  Synthetic oligonucleotide

SEQ ID NO: 543710 - DNA, 57 bp, Artificial; identical to SEQ ID NO: 318870
  Synthetic oligonucleotide

SEQ ID NO: 543711 - DNA, 50 bp, Artificial; identical to SEQ ID NO: 318873
  Synthetic oligonucleotide

SEQ ID NO: 543712 - DNA, 51 bp, Artificial; identical to SEQ ID NO: 318874
  Synthetic oligonucleotide

SEQ ID NO: 543713 - DNA, 60 bp, Artificial; identical to SEQ ID NO: 318875
  Synthetic oligonucleotide

SEQ ID NO: 543714 - DNA, 58 bp, Artificial; identical to SEQ ID NO: 318876
  Synthetic oligonucleotide

SEQ ID NO: 543715 - DNA, 55 bp, Artificial; identical to SEQ ID NO: 318877
  Synthetic oligonucleotide

SEQ ID NO: 543716 - DNA, 60 bp, Artificial; identical to SEQ ID NO: 318880
  Synthetic oligonucleotide

SEQ ID NO: 543717 - DNA, 58 bp, Artificial; identical to SEQ ID NO: 318881
  Synthetic oligonucleotide

SEQ ID NO: 543718 - DNA, 55 bp, Artificial; identical to SEQ ID NO: 318883
  Synthetic oligonucleotide

SEQ ID NO: 543719 - DNA, 55 bp, Artificial; identical to SEQ ID NO: 318886
  Synthetic oligonucleotide

SEQ ID NO: 543720 - DNA, 60 bp, Artificial; identical to SEQ ID NO: 318888
  Synthetic oligonucleotide

SEQ ID NO: 543721 - DNA, 58 bp, Artificial; identical to SEQ ID NO: 318891
  Synthetic oligonucleotide

SEQ ID NO: 543722 - DNA, 60 bp, Artificial; identical to SEQ ID NO: 318892
  Synthetic oligonucleotide

SEQ ID NO: 543723 - DNA, 51 bp, Artificial; identical to SEQ ID NO: 318893
  Synthetic oligonucleotide

SEQ ID NO: 543724 - DNA, 51 bp, Artificial; identical to SEQ ID NO: 318895
  Synthetic oligonucleotide

SEQ ID NO: 543725 - DNA, 53 bp, Artificial; identical to SEQ ID NO: 318896
  Synthetic oligonucleotide

SEQ ID NO: 543726 - DNA, 60 bp, Artificial; identical to SEQ ID NO: 9437
  Synthetic oligonucleotide

SEQ ID NO: 543727 - DNA, 60 bp, Artificial; identical to SEQ ID NO: 318902
  Synthetic oligonucleotide

SEQ ID NO: 543728 - DNA, 60 bp, Artificial; identical to SEQ ID NO: 318905
  Synthetic oligonucleotide

SEQ ID NO: 543729 - DNA, 60 bp, Artificial; identical to SEQ ID NO: 318906
  Synthetic oligonucleotide

SEQ ID NO: 543730 - DNA, 58 bp, Artificial; identical to SEQ ID NO: 318909
  Synthetic oligonucleotide

SEQ ID NO: 543731 - DNA, 60 bp, Artificial; identical to SEQ ID NO: 318910
  Synthetic oligonucleotide

SEQ ID NO: 543732 - DNA, 60 bp, Artificial; identical to SEQ ID NO: 318912
  Synthetic oligonucleotide

SEQ ID NO: 543733 - DNA, 53 bp, Artificial; identical to SEQ ID NO: 318914
  Synthetic oligonucleotide

SEQ ID NO: 543734 - DNA, 60 bp, Artificial; identical to SEQ ID NO: 318920
  Synthetic oligonucleotide

SEQ ID NO: 543735 - DNA, 56 bp, Artificial; identical to SEQ ID NO: 11603
  Synthetic oligonucleotide

SEQ ID NO: 543736 - DNA, 56 bp, Artificial; identical to SEQ ID NO: 318926
  Synthetic oligonucleotide

SEQ ID NO: 543737 - DNA, 57 bp, Artificial; identical to SEQ ID NO: 318928
  Synthetic oligonucleotide

SEQ ID NO: 543738 - DNA, 58 bp, Artificial; identical to SEQ ID NO: 318929
  Synthetic oligonucleotide

SEQ ID NO: 543739 - DNA, 53 bp, Artificial; identical to SEQ ID NO: 318932
  Synthetic oligonucleotide

SEQ ID NO: 543740 - DNA, 59 bp, Artificial; identical to SEQ ID NO: 318933
  Synthetic oligonucleotide

SEQ ID NO: 543741 - DNA, 60 bp, Artificial; identical to SEQ ID NO: 318934
  Synthetic oligonucleotide

SEQ ID NO: 543742 - DNA, 57 bp, Artificial; identical to SEQ ID NO: 318938
  Synthetic oligonucleotide

SEQ ID NO: 543743 - DNA, 60 bp, Artificial; identical to SEQ ID NO: 318939
  Synthetic oligonucleotide

SEQ ID NO: 543744 - DNA, 60 bp, Artificial; identical to SEQ ID NO: 318941
  Synthetic oligonucleotide

SEQ ID NO: 543745 - DNA, 60 bp, Artificial; identical to SEQ ID NO: 318946
  Synthetic oligonucleotide

SEQ ID NO: 543746 - DNA, 60 bp, Artificial; identical to SEQ ID NO: 318948
  Synthetic oligonucleotide

SEQ ID NO: 543747 - DNA, 59 bp, Artificial; identical to SEQ ID NO: 318949
  Synthetic oligonucleotide

SEQ ID NO: 543748 - DNA, 51 bp, Artificial; identical to SEQ ID NO: 318953
  Synthetic oligonucleotide

SEQ ID NO: 543749 - DNA, 60 bp, Artificial; identical to SEQ ID NO: 318954
  Synthetic oligonucleotide

SEQ ID NO: 543750 - DNA, 60 bp, Artificial; identical to SEQ ID NO: 318956
  Synthetic oligonucleotide

SEQ ID NO: 543751 - DNA, 53 bp, Artificial; identical to SEQ ID NO: 18127
  Synthetic oligonucleotide

SEQ ID NO: 543752 - DNA, 54 bp, Artificial; identical to SEQ ID NO: 318958
  Synthetic oligonucleotide

SEQ ID NO: 543753 - DNA, 58 bp, Artificial; identical to SEQ ID NO: 318959
  Synthetic oligonucleotide

SEQ ID NO: 543754 - DNA, 60 bp, Artificial; identical to SEQ ID NO: 318960
  Synthetic oligonucleotide

SEQ ID NO: 543755 - DNA, 59 bp, Artificial; identical to SEQ ID NO: 318961
  Synthetic oligonucleotide

SEQ ID NO: 543756 - DNA, 53 bp, Artificial; identical to SEQ ID NO: 318964
  Synthetic oligonucleotide

SEQ ID NO: 543757 - DNA, 55 bp, Artificial; identical to SEQ ID NO: 318965
  Synthetic oligonucleotide

SEQ ID NO: 543758 - DNA, 53 bp, Artificial; identical to SEQ ID NO: 318969
  Synthetic oligonucleotide

SEQ ID NO: 543759 - DNA, 51 bp, Artificial; identical to SEQ ID NO: 318970
  Synthetic oligonucleotide

SEQ ID NO: 543760 - DNA, 55 bp, Artificial; identical to SEQ ID NO: 318973
  Synthetic oligonucleotide

SEQ ID NO: 543761 - DNA, 54 bp, Artificial; identical to SEQ ID NO: 318976
  Synthetic oligonucleotide

SEQ ID NO: 543762 - DNA, 53 bp, Artificial; identical to SEQ ID NO: 318977
  Synthetic oligonucleotide

SEQ ID NO: 543763 - DNA, 52 bp, Artificial; identical to SEQ ID NO: 318981
  Synthetic oligonucleotide

SEQ ID NO: 543764 - DNA, 60 bp, Artificial; identical to SEQ ID NO: 318982
  Synthetic oligonucleotide

SEQ ID NO: 543765 - DNA, 60 bp, Artificial; identical to SEQ ID NO: 318985
  Synthetic oligonucleotide

SEQ ID NO: 543766 - DNA, 56 bp, Artificial; identical to SEQ ID NO: 318990
  Synthetic oligonucleotide

SEQ ID NO: 543767 - DNA, 50 bp, Artificial; identical to SEQ ID NO: 318992
  Synthetic oligonucleotide

SEQ ID NO: 543768 - DNA, 53 bp, Artificial; identical to SEQ ID NO: 318996
  Synthetic oligonucleotide

SEQ ID NO: 543769 - DNA, 53 bp, Artificial; identical to SEQ ID NO: 318999
  Synthetic oligonucleotide

SEQ ID NO: 543770 - DNA, 55 bp, Artificial; identical to SEQ ID NO: 319002
  Synthetic oligonucleotide

SEQ ID NO: 543771 - DNA, 60 bp, Artificial; identical to SEQ ID NO: 116055
  Synthetic oligonucleotide

SEQ ID NO: 543772 - DNA, 60 bp, Artificial; identical to SEQ ID NO: 319005
  Synthetic oligonucleotide

SEQ ID NO: 543773 - DNA, 58 bp, Artificial; identical to SEQ ID NO: 319006
  Synthetic oligonucleotide

SEQ ID NO: 543774 - DNA, 56 bp, Artificial; identical to SEQ ID NO: 319007
  Synthetic oligonucleotide

SEQ ID NO: 543775 - DNA, 58 bp, Artificial; identical to SEQ ID NO: 319009
  Synthetic oligonucleotide

SEQ ID NO: 543776 - DNA, 53 bp, Artificial; identical to SEQ ID NO: 19211
  Synthetic oligonucleotide

SEQ ID NO: 543777 - DNA, 59 bp, Artificial; identical to SEQ ID NO: 319011
  Synthetic oligonucleotide

SEQ ID NO: 543778 - DNA, 57 bp, Artificial; identical to SEQ ID NO: 319014
  Synthetic oligonucleotide

SEQ ID NO: 543779 - DNA, 52 bp, Artificial; identical to SEQ ID NO: 319021
  Synthetic oligonucleotide

SEQ ID NO: 543780 - DNA, 55 bp, Artificial; identical to SEQ ID NO: 319022
  Synthetic oligonucleotide

SEQ ID NO: 543781 - DNA, 60 bp, Artificial; identical to SEQ ID NO: 319024
  Synthetic oligonucleotide

SEQ ID NO: 543782 - DNA, 55 bp, Artificial; identical to SEQ ID NO: 319029
  Synthetic oligonucleotide

SEQ ID NO: 543783 - DNA, 57 bp, Artificial; identical to SEQ ID NO: 319033
  Synthetic oligonucleotide

SEQ ID NO: 543784 - DNA, 59 bp, Artificial; identical to SEQ ID NO: 319035
  Synthetic oligonucleotide

SEQ ID NO: 543785 - DNA, 59 bp, Artificial; identical to SEQ ID NO: 319036
  Synthetic oligonucleotide

SEQ ID NO: 543786 - DNA, 58 bp, Artificial; identical to SEQ ID NO: 319040
  Synthetic oligonucleotide

SEQ ID NO: 543787 - DNA, 55 bp, Artificial; identical to SEQ ID NO: 319045
  Synthetic oligonucleotide

SEQ ID NO: 543788 - DNA, 55 bp, Artificial; identical to SEQ ID NO: 319046
  Synthetic oligonucleotide

SEQ ID NO: 543789 - DNA, 58 bp, Artificial; identical to SEQ ID NO: 319047
  Synthetic oligonucleotide

SEQ ID NO: 543790 - DNA, 50 bp, Artificial; identical to SEQ ID NO: 319048
  Synthetic oligonucleotide

SEQ ID NO: 543791 - DNA, 60 bp, Artificial; identical to SEQ ID NO: 319049
  Synthetic oligonucleotide

SEQ ID NO: 543792 - DNA, 59 bp, Artificial; identical to SEQ ID NO: 319050
  Synthetic oligonucleotide

SEQ ID NO: 543793 - DNA, 60 bp, Artificial; identical to SEQ ID NO: 319053
  Synthetic oligonucleotide

SEQ ID NO: 543794 - DNA, 57 bp, Artificial; identical to SEQ ID NO: 319057
  Synthetic oligonucleotide

SEQ ID NO: 543795 - DNA, 50 bp, Artificial; identical to SEQ ID NO: 319058
  Synthetic oligonucleotide

SEQ ID NO: 543796 - DNA, 52 bp, Artificial; identical to SEQ ID NO: 319059
  Synthetic oligonucleotide

SEQ ID NO: 543797 - DNA, 55 bp, Artificial; identical to SEQ ID NO: 319064
  Synthetic oligonucleotide

SEQ ID NO: 543798 - DNA, 60 bp, Artificial; identical to SEQ ID NO: 319068
  Synthetic oligonucleotide

SEQ ID NO: 543799 - DNA, 55 bp, Artificial; identical to SEQ ID NO: 319069
  Synthetic oligonucleotide

SEQ ID NO: 543800 - DNA, 60 bp, Artificial; identical to SEQ ID NO: 8164
  Synthetic oligonucleotide

SEQ ID NO: 543801 - DNA, 53 bp, Artificial; identical to SEQ ID NO: 319070
  Synthetic oligonucleotide

SEQ ID NO: 543802 - DNA, 55 bp, Artificial; identical to SEQ ID NO: 319071
  Synthetic oligonucleotide

SEQ ID NO: 543803 - DNA, 60 bp, Artificial; identical to SEQ ID NO: 319072
  Synthetic oligonucleotide

SEQ ID NO: 543804 - DNA, 57 bp, Artificial; identical to SEQ ID NO: 319073
  Synthetic oligonucleotide

SEQ ID NO: 543805 - DNA, 55 bp, Artificial; identical to SEQ ID NO: 319082
  Synthetic oligonucleotide

SEQ ID NO: 543806 - DNA, 56 bp, Artificial; identical to SEQ ID NO: 319084
  Synthetic oligonucleotide

SEQ ID NO: 543807 - DNA, 54 bp, Artificial; identical to SEQ ID NO: 319087
  Synthetic oligonucleotide

SEQ ID NO: 543808 - DNA, 60 bp, Artificial; identical to SEQ ID NO: 319088
  Synthetic oligonucleotide

SEQ ID NO: 543809 - DNA, 60 bp, Artificial; identical to SEQ ID NO: 319090
  Synthetic oligonucleotide

SEQ ID NO: 543810 - DNA, 55 bp, Artificial; identical to SEQ ID NO: 319091
  Synthetic oligonucleotide

SEQ ID NO: 543811 - DNA, 55 bp, Artificial; identical to SEQ ID NO: 319092
  Synthetic oligonucleotide

SEQ ID NO: 543812 - DNA, 54 bp, Artificial; identical to SEQ ID NO: 319096
  Synthetic oligonucleotide

SEQ ID NO: 543813 - DNA, 60 bp, Artificial; identical to SEQ ID NO: 319098
  Synthetic oligonucleotide

SEQ ID NO: 543814 - DNA, 60 bp, Artificial; identical to SEQ ID NO: 319100
  Synthetic oligonucleotide

SEQ ID NO: 543815 - DNA, 60 bp, Artificial; identical to SEQ ID NO: 319102
  Synthetic oligonucleotide

SEQ ID NO: 543816 - DNA, 56 bp, Artificial; identical to SEQ ID NO: 319104
  Synthetic oligonucleotide

SEQ ID NO: 543817 - DNA, 54 bp, Artificial; identical to SEQ ID NO: 9421
  Synthetic oligonucleotide

SEQ ID NO: 543818 - DNA, 60 bp, Artificial; identical to SEQ ID NO: 319109
  Synthetic oligonucleotide

SEQ ID NO: 543819 - DNA, 59 bp, Artificial; identical to SEQ ID NO: 319110
  Synthetic oligonucleotide

SEQ ID NO: 543820 - DNA, 60 bp, Artificial; identical to SEQ ID NO: 319112
  Synthetic oligonucleotide

SEQ ID NO: 543821 - DNA, 60 bp, Artificial; identical to SEQ ID NO: 319114
  Synthetic oligonucleotide

SEQ ID NO: 543822 - DNA, 60 bp, Artificial; identical to SEQ ID NO: 319115
  Synthetic oligonucleotide

SEQ ID NO: 543823 - DNA, 56 bp, Artificial; identical to SEQ ID NO: 319116
  Synthetic oligonucleotide

SEQ ID NO: 543824 - DNA, 60 bp, Artificial; identical to SEQ ID NO: 319122
  Synthetic oligonucleotide

SEQ ID NO: 543825 - DNA, 55 bp, Artificial; identical to SEQ ID NO: 319124
  Synthetic oligonucleotide

SEQ ID NO: 543826 - DNA, 55 bp, Artificial; identical to SEQ ID NO: 319128
  Synthetic oligonucleotide

SEQ ID NO: 543827 - DNA, 55 bp, Artificial; identical to SEQ ID NO: 19900
  Synthetic oligonucleotide

SEQ ID NO: 543828 - DNA, 55 bp, Artificial; identical to SEQ ID NO: 319134
  Synthetic oligonucleotide

SEQ ID NO: 543829 - DNA, 55 bp, Artificial; identical to SEQ ID NO: 20202
  Synthetic oligonucleotide

SEQ ID NO: 543830 - DNA, 50 bp, Artificial; identical to SEQ ID NO: 319137
  Synthetic oligonucleotide

SEQ ID NO: 543831 - DNA, 55 bp, Artificial; identical to SEQ ID NO: 11436
  Synthetic oligonucleotide

SEQ ID NO: 543832 - DNA, 53 bp, Artificial; identical to SEQ ID NO: 319138
  Synthetic oligonucleotide

SEQ ID NO: 543833 - DNA, 60 bp, Artificial; identical to SEQ ID NO: 12222
  Synthetic oligonucleotide

SEQ ID NO: 543834 - DNA, 56 bp, Artificial; identical to SEQ ID NO: 319144
  Synthetic oligonucleotide

SEQ ID NO: 543835 - DNA, 60 bp, Artificial; identical to SEQ ID NO: 319148
  Synthetic oligonucleotide

SEQ ID NO: 543836 - DNA, 56 bp, Artificial; identical to SEQ ID NO: 319150
  Synthetic oligonucleotide

SEQ ID NO: 543837 - DNA, 54 bp, Artificial; identical to SEQ ID NO: 319153
  Synthetic oligonucleotide

SEQ ID NO: 543838 - DNA, 58 bp, Artificial; identical to SEQ ID NO: 319154
  Synthetic oligonucleotide

SEQ ID NO: 543839 - DNA, 60 bp, Artificial; identical to SEQ ID NO: 319157
  Synthetic oligonucleotide

SEQ ID NO: 543840 - DNA, 60 bp, Artificial; identical to SEQ ID NO: 319163
  Synthetic oligonucleotide

SEQ ID NO: 543841 - DNA, 53 bp, Artificial; identical to SEQ ID NO: 319165
  Synthetic oligonucleotide

SEQ ID NO: 543842 - DNA, 57 bp, Artificial; identical to SEQ ID NO: 319166
  Synthetic oligonucleotide

SEQ ID NO: 543843 - DNA, 60 bp, Artificial; identical to SEQ ID NO: 319168
  Synthetic oligonucleotide

SEQ ID NO: 543844 - DNA, 56 bp, Artificial; identical to SEQ ID NO: 319171
  Synthetic oligonucleotide

SEQ ID NO: 543845 - DNA, 57 bp, Artificial; identical to SEQ ID NO: 319174
  Synthetic oligonucleotide

SEQ ID NO: 543846 - DNA, 55 bp, Artificial; identical to SEQ ID NO: 319177
  Synthetic oligonucleotide

SEQ ID NO: 543847 - DNA, 55 bp, Artificial; identical to SEQ ID NO: 319178
  Synthetic oligonucleotide

SEQ ID NO: 543848 - DNA, 55 bp, Artificial; identical to SEQ ID NO: 319181
  Synthetic oligonucleotide

SEQ ID NO: 543849 - DNA, 60 bp, Artificial; identical to SEQ ID NO: 319183
  Synthetic oligonucleotide

SEQ ID NO: 543850 - DNA, 60 bp, Artificial; identical to SEQ ID NO: 319185
  Synthetic oligonucleotide

SEQ ID NO: 543851 - DNA, 55 bp, Artificial; identical to SEQ ID NO: 319188
  Synthetic oligonucleotide

SEQ ID NO: 543852 - DNA, 55 bp, Artificial; identical to SEQ ID NO: 319191
  Synthetic oligonucleotide

SEQ ID NO: 543853 - DNA, 60 bp, Artificial; identical to SEQ ID NO: 319197
  Synthetic oligonucleotide

SEQ ID NO: 543854 - DNA, 59 bp, Artificial; identical to SEQ ID NO: 319198
  Synthetic oligonucleotide

SEQ ID NO: 543855 - DNA, 59 bp, Artificial; identical to SEQ ID NO: 319202
  Synthetic oligonucleotide

SEQ ID NO: 543856 - DNA, 58 bp, Artificial; identical to SEQ ID NO: 319204
  Synthetic oligonucleotide

SEQ ID NO: 543857 - DNA, 60 bp, Artificial; identical to SEQ ID NO: 319208
  Synthetic oligonucleotide

SEQ ID NO: 543858 - DNA, 60 bp, Artificial; identical to SEQ ID NO: 319209
  Synthetic oligonucleotide

SEQ ID NO: 543859 - DNA, 60 bp, Artificial; identical to SEQ ID NO: 319212
  Synthetic oligonucleotide

SEQ ID NO: 543860 - DNA, 60 bp, Artificial; identical to SEQ ID NO: 319213
  Synthetic oligonucleotide

SEQ ID NO: 543861 - DNA, 60 bp, Artificial; identical to SEQ ID NO: 319215
  Synthetic oligonucleotide

SEQ ID NO: 543862 - DNA, 54 bp, Artificial; identical to SEQ ID NO: 319216
  Synthetic oligonucleotide

SEQ ID NO: 543863 - DNA, 52 bp, Artificial; identical to SEQ ID NO: 319218
  Synthetic oligonucleotide

SEQ ID NO: 543864 - DNA, 59 bp, Artificial; identical to SEQ ID NO: 319220
  Synthetic oligonucleotide

SEQ ID NO: 543865 - DNA, 57 bp, Artificial; identical to SEQ ID NO: 319221
  Synthetic oligonucleotide

SEQ ID NO: 543866 - DNA, 59 bp, Artificial; identical to SEQ ID NO: 319223
  Synthetic oligonucleotide

SEQ ID NO: 543867 - DNA, 60 bp, Artificial; identical to SEQ ID NO: 319224
  Synthetic oligonucleotide

SEQ ID NO: 543868 - DNA, 52 bp, Artificial; identical to SEQ ID NO: 319225
  Synthetic oligonucleotide

SEQ ID NO: 543869 - DNA, 55 bp, Artificial; identical to SEQ ID NO: 319227
  Synthetic oligonucleotide

SEQ ID NO: 543870 - DNA, 50 bp, Artificial; identical to SEQ ID NO: 319230
  Synthetic oligonucleotide

SEQ ID NO: 543871 - DNA, 60 bp, Artificial; identical to SEQ ID NO: 319231
  Synthetic oligonucleotide

SEQ ID NO: 543872 - DNA, 55 bp, Artificial; identical to SEQ ID NO: 319233
  Synthetic oligonucleotide

SEQ ID NO: 543873 - DNA, 53 bp, Artificial; identical to SEQ ID NO: 319235
  Synthetic oligonucleotide

SEQ ID NO: 543874 - DNA, 51 bp, Artificial; identical to SEQ ID NO: 319238
  Synthetic oligonucleotide

SEQ ID NO: 543875 - DNA, 55 bp, Artificial; identical to SEQ ID NO: 319239
  Synthetic oligonucleotide

SEQ ID NO: 543876 - DNA, 52 bp, Artificial; identical to SEQ ID NO: 319240
  Synthetic oligonucleotide

SEQ ID NO: 543877 - DNA, 51 bp, Artificial; identical to SEQ ID NO: 319241
  Synthetic oligonucleotide

SEQ ID NO: 543878 - DNA, 52 bp, Artificial; identical to SEQ ID NO: 319244
  Synthetic oligonucleotide

SEQ ID NO: 543879 - DNA, 60 bp, Artificial; identical to SEQ ID NO: 319245
  Synthetic oligonucleotide

SEQ ID NO: 543880 - DNA, 59 bp, Artificial; identical to SEQ ID NO: 319249
  Synthetic oligonucleotide

SEQ ID NO: 543881 - DNA, 60 bp, Artificial; identical to SEQ ID NO: 319250
  Synthetic oligonucleotide

SEQ ID NO: 543882 - DNA, 60 bp, Artificial; identical to SEQ ID NO: 319252
  Synthetic oligonucleotide

SEQ ID NO: 543883 - DNA, 55 bp, Artificial; identical to SEQ ID NO: 319254
  Synthetic oligonucleotide

SEQ ID NO: 543884 - DNA, 55 bp, Artificial; identical to SEQ ID NO: 319255
  Synthetic oligonucleotide

SEQ ID NO: 543885 - DNA, 55 bp, Artificial; identical to SEQ ID NO: 319256
  Synthetic oligonucleotide

SEQ ID NO: 543886 - DNA, 60 bp, Artificial; identical to SEQ ID NO: 319258
  Synthetic oligonucleotide

SEQ ID NO: 543887 - DNA, 58 bp, Artificial; identical to SEQ ID NO: 319261
  Synthetic oligonucleotide

SEQ ID NO: 543888 - DNA, 57 bp, Artificial; identical to SEQ ID NO: 319263
  Synthetic oligonucleotide

SEQ ID NO: 543889 - DNA, 57 bp, Artificial; identical to SEQ ID NO: 319265
  Synthetic oligonucleotide

SEQ ID NO: 543890 - DNA, 60 bp, Artificial; identical to SEQ ID NO: 319267
  Synthetic oligonucleotide

SEQ ID NO: 543891 - DNA, 60 bp, Artificial; identical to SEQ ID NO: 9271
  Synthetic oligonucleotide

SEQ ID NO: 543892 - DNA, 57 bp, Artificial; identical to SEQ ID NO: 319270
  Synthetic oligonucleotide

SEQ ID NO: 543893 - DNA, 59 bp, Artificial; identical to SEQ ID NO: 319274
  Synthetic oligonucleotide

SEQ ID NO: 543894 - DNA, 60 bp, Artificial; identical to SEQ ID NO: 319275
  Synthetic oligonucleotide

SEQ ID NO: 543895 - DNA, 60 bp, Artificial; identical to SEQ ID NO: 319276
  Synthetic oligonucleotide

SEQ ID NO: 543896 - DNA, 60 bp, Artificial; identical to SEQ ID NO: 319280
  Synthetic oligonucleotide

SEQ ID NO: 543897 - DNA, 56 bp, Artificial; identical to SEQ ID NO: 319283
  Synthetic oligonucleotide

SEQ ID NO: 543898 - DNA, 56 bp, Artificial; identical to SEQ ID NO: 319284
  Synthetic oligonucleotide

SEQ ID NO: 543899 - DNA, 55 bp, Artificial; identical to SEQ ID NO: 319289
  Synthetic oligonucleotide

SEQ ID NO: 543900 - DNA, 53 bp, Artificial; identical to SEQ ID NO: 319290
  Synthetic oligonucleotide

SEQ ID NO: 543901 - DNA, 54 bp, Artificial; identical to SEQ ID NO: 319292
  Synthetic oligonucleotide

SEQ ID NO: 543902 - DNA, 57 bp, Artificial; identical to SEQ ID NO: 319294
  Synthetic oligonucleotide

SEQ ID NO: 543903 - DNA, 60 bp, Artificial; identical to SEQ ID NO: 319297
  Synthetic oligonucleotide

SEQ ID NO: 543904 - DNA, 55 bp, Artificial; identical to SEQ ID NO: 319300
  Synthetic oligonucleotide

SEQ ID NO: 543905 - DNA, 55 bp, Artificial; identical to SEQ ID NO: 319303
  Synthetic oligonucleotide

SEQ ID NO: 543906 - DNA, 50 bp, Artificial; identical to SEQ ID NO: 319304
  Synthetic oligonucleotide

SEQ ID NO: 543907 - DNA, 48 bp, Artificial; identical to SEQ ID NO: 319306
  Synthetic oligonucleotide

SEQ ID NO: 543908 - DNA, 60 bp, Artificial; identical to SEQ ID NO: 319308
  Synthetic oligonucleotide

SEQ ID NO: 543909 - DNA, 51 bp, Artificial; identical to SEQ ID NO: 319310
  Synthetic oligonucleotide

SEQ ID NO: 543910 - DNA, 55 bp, Artificial; identical to SEQ ID NO: 319314
  Synthetic oligonucleotide

SEQ ID NO: 543911 - DNA, 60 bp, Artificial; identical to SEQ ID NO: 319315
  Synthetic oligonucleotide

SEQ ID NO: 543912 - DNA, 59 bp, Artificial; identical to SEQ ID NO: 319316
  Synthetic oligonucleotide

SEQ ID NO: 543913 - DNA, 50 bp, Artificial; identical to SEQ ID NO: 319318
  Synthetic oligonucleotide

SEQ ID NO: 543914 - DNA, 55 bp, Artificial; identical to SEQ ID NO: 319319
  Synthetic oligonucleotide

SEQ ID NO: 543915 - DNA, 55 bp, Artificial; identical to SEQ ID NO: 319320
  Synthetic oligonucleotide

SEQ ID NO: 543916 - DNA, 58 bp, Artificial; identical to SEQ ID NO: 319323
  Synthetic oligonucleotide

SEQ ID NO: 543917 - DNA, 53 bp, Artificial; identical to SEQ ID NO: 319325
  Synthetic oligonucleotide

SEQ ID NO: 543918 - DNA, 55 bp, Artificial; identical to SEQ ID NO: 319326
  Synthetic oligonucleotide

SEQ ID NO: 543919 - DNA, 57 bp, Artificial; identical to SEQ ID NO: 319328
  Synthetic oligonucleotide

SEQ ID NO: 543920 - DNA, 54 bp, Artificial; identical to SEQ ID NO: 319329
  Synthetic oligonucleotide

SEQ ID NO: 543921 - DNA, 55 bp, Artificial; identical to SEQ ID NO: 319330
  Synthetic oligonucleotide

SEQ ID NO: 543922 - DNA, 57 bp, Artificial; identical to SEQ ID NO: 17951
  Synthetic oligonucleotide

SEQ ID NO: 543923 - DNA, 59 bp, Artificial; identical to SEQ ID NO: 319333
  Synthetic oligonucleotide

SEQ ID NO: 543924 - DNA, 58 bp, Artificial; identical to SEQ ID NO: 319334
  Synthetic oligonucleotide

SEQ ID NO: 543925 - DNA, 55 bp, Artificial; identical to SEQ ID NO: 319336
  Synthetic oligonucleotide

SEQ ID NO: 543926 - DNA, 58 bp, Artificial; identical to SEQ ID NO: 319338
  Synthetic oligonucleotide

SEQ ID NO: 543927 - DNA, 54 bp, Artificial; identical to SEQ ID NO: 319339
  Synthetic oligonucleotide

SEQ ID NO: 543928 - DNA, 51 bp, Artificial; identical to SEQ ID NO: 319349
  Synthetic oligonucleotide

SEQ ID NO: 543929 - DNA, 58 bp, Artificial; identical to SEQ ID NO: 319354
  Synthetic oligonucleotide

SEQ ID NO: 543930 - DNA, 50 bp, Artificial; identical to SEQ ID NO: 319355
  Synthetic oligonucleotide

SEQ ID NO: 543931 - DNA, 56 bp, Artificial; identical to SEQ ID NO: 319356
  Synthetic oligonucleotide

SEQ ID NO: 543932 - DNA, 51 bp, Artificial; identical to SEQ ID NO: 319357
  Synthetic oligonucleotide

SEQ ID NO: 543933 - DNA, 60 bp, Artificial; identical to SEQ ID NO: 319362
  Synthetic oligonucleotide

SEQ ID NO: 543934 - DNA, 57 bp, Artificial; identical to SEQ ID NO: 319363
  Synthetic oligonucleotide

SEQ ID NO: 543935 - DNA, 51 bp, Artificial; identical to SEQ ID NO: 319364
  Synthetic oligonucleotide

SEQ ID NO: 543936 - DNA, 55 bp, Artificial; identical to SEQ ID NO: 319365
  Synthetic oligonucleotide

SEQ ID NO: 543937 - DNA, 53 bp, Artificial; identical to SEQ ID NO: 319366
  Synthetic oligonucleotide

SEQ ID NO: 543938 - DNA, 58 bp, Artificial; identical to SEQ ID NO: 319369
  Synthetic oligonucleotide

SEQ ID NO: 543939 - DNA, 53 bp, Artificial; identical to SEQ ID NO: 319371
  Synthetic oligonucleotide

SEQ ID NO: 543940 - DNA, 59 bp, Artificial; identical to SEQ ID NO: 319373
  Synthetic oligonucleotide

SEQ ID NO: 543941 - DNA, 60 bp, Artificial; identical to SEQ ID NO: 10620
  Synthetic oligonucleotide

SEQ ID NO: 543942 - DNA, 56 bp, Artificial; identical to SEQ ID NO: 319376
  Synthetic oligonucleotide

SEQ ID NO: 543943 - DNA, 60 bp, Artificial; identical to SEQ ID NO: 319377
  Synthetic oligonucleotide

SEQ ID NO: 543944 - DNA, 53 bp, Artificial; identical to SEQ ID NO: 319378
  Synthetic oligonucleotide

SEQ ID NO: 543945 - DNA, 56 bp, Artificial; identical to SEQ ID NO: 319390
  Synthetic oligonucleotide

SEQ ID NO: 543946 - DNA, 55 bp, Artificial; identical to SEQ ID NO: 319391
  Synthetic oligonucleotide

SEQ ID NO: 543947 - DNA, 54 bp, Artificial; identical to SEQ ID NO: 319393
  Synthetic oligonucleotide

SEQ ID NO: 543948 - DNA, 60 bp, Artificial; identical to SEQ ID NO: 319394
  Synthetic oligonucleotide

SEQ ID NO: 543949 - DNA, 56 bp, Artificial; identical to SEQ ID NO: 319400
  Synthetic oligonucleotide

SEQ ID NO: 543950 - DNA, 56 bp, Artificial; identical to SEQ ID NO: 319402
  Synthetic oligonucleotide

SEQ ID NO: 543951 - DNA, 60 bp, Artificial; identical to SEQ ID NO: 319403
  Synthetic oligonucleotide

SEQ ID NO: 543952 - DNA, 55 bp, Artificial; identical to SEQ ID NO: 319406
  Synthetic oligonucleotide

SEQ ID NO: 543953 - DNA, 60 bp, Artificial; identical to SEQ ID NO: 319408
  Synthetic oligonucleotide

SEQ ID NO: 543954 - DNA, 56 bp, Artificial; identical to SEQ ID NO: 319413
  Synthetic oligonucleotide

SEQ ID NO: 543955 - DNA, 60 bp, Artificial; identical to SEQ ID NO: 319415
  Synthetic oligonucleotide

SEQ ID NO: 543956 - DNA, 53 bp, Artificial; identical to SEQ ID NO: 319420
  Synthetic oligonucleotide

SEQ ID NO: 543957 - DNA, 59 bp, Artificial; identical to SEQ ID NO: 319423
  Synthetic oligonucleotide

SEQ ID NO: 543958 - DNA, 50 bp, Artificial; identical to SEQ ID NO: 319425
  Synthetic oligonucleotide

SEQ ID NO: 543959 - DNA, 57 bp, Artificial; identical to SEQ ID NO: 319428
  Synthetic oligonucleotide

SEQ ID NO: 543960 - DNA, 50 bp, Artificial; identical to SEQ ID NO: 319431
  Synthetic oligonucleotide

SEQ ID NO: 543961 - DNA, 50 bp, Artificial; identical to SEQ ID NO: 319436
  Synthetic oligonucleotide

SEQ ID NO: 543962 - DNA, 57 bp, Artificial; identical to SEQ ID NO: 319437
  Synthetic oligonucleotide

SEQ ID NO: 543963 - DNA, 55 bp, Artificial; identical to SEQ ID NO: 319439
  Synthetic oligonucleotide

SEQ ID NO: 543964 - DNA, 55 bp, Artificial; identical to SEQ ID NO: 319440
  Synthetic oligonucleotide

SEQ ID NO: 543965 - DNA, 57 bp, Artificial; identical to SEQ ID NO: 319441
  Synthetic oligonucleotide

SEQ ID NO: 543966 - DNA, 60 bp, Artificial; identical to SEQ ID NO: 319444
  Synthetic oligonucleotide

SEQ ID NO: 543967 - DNA, 55 bp, Artificial; identical to SEQ ID NO: 319446
  Synthetic oligonucleotide

SEQ ID NO: 543968 - DNA, 52 bp, Artificial; identical to SEQ ID NO: 319450
  Synthetic oligonucleotide

SEQ ID NO: 543969 - DNA, 51 bp, Artificial; identical to SEQ ID NO: 319451
  Synthetic oligonucleotide

SEQ ID NO: 543970 - DNA, 53 bp, Artificial; identical to SEQ ID NO: 319453
  Synthetic oligonucleotide

SEQ ID NO: 543971 - DNA, 57 bp, Artificial; identical to SEQ ID NO: 319456
  Synthetic oligonucleotide

SEQ ID NO: 543972 - DNA, 60 bp, Artificial; identical to SEQ ID NO: 319457
  Synthetic oligonucleotide

SEQ ID NO: 543973 - DNA, 60 bp, Artificial; identical to SEQ ID NO: 319465
  Synthetic oligonucleotide

SEQ ID NO: 543974 - DNA, 60 bp, Artificial; identical to SEQ ID NO: 319470
  Synthetic oligonucleotide

SEQ ID NO: 543975 - DNA, 59 bp, Artificial; identical to SEQ ID NO: 319474
  Synthetic oligonucleotide

SEQ ID NO: 543976 - DNA, 60 bp, Artificial; identical to SEQ ID NO: 319475
  Synthetic oligonucleotide

SEQ ID NO: 543977 - DNA, 59 bp, Artificial; identical to SEQ ID NO: 319477
  Synthetic oligonucleotide

SEQ ID NO: 543978 - DNA, 60 bp, Artificial; identical to SEQ ID NO: 319478
  Synthetic oligonucleotide

SEQ ID NO: 543979 - DNA, 55 bp, Artificial; identical to SEQ ID NO: 319479
  Synthetic oligonucleotide

SEQ ID NO: 543980 - DNA, 60 bp, Artificial; identical to SEQ ID NO: 319480
  Synthetic oligonucleotide

SEQ ID NO: 543981 - DNA, 60 bp, Artificial; identical to SEQ ID NO: 319481
  Synthetic oligonucleotide

SEQ ID NO: 543982 - DNA, 55 bp, Artificial; identical to SEQ ID NO: 319487
  Synthetic oligonucleotide

SEQ ID NO: 543983 - DNA, 55 bp, Artificial; identical to SEQ ID NO: 319488
  Synthetic oligonucleotide

SEQ ID NO: 543984 - DNA, 55 bp, Artificial; identical to SEQ ID NO: 319491
  Synthetic oligonucleotide

SEQ ID NO: 543985 - DNA, 60 bp, Artificial; identical to SEQ ID NO: 319496
  Synthetic oligonucleotide

SEQ ID NO: 543986 - DNA, 53 bp, Artificial; identical to SEQ ID NO: 319499
  Synthetic oligonucleotide

SEQ ID NO: 543987 - DNA, 57 bp, Artificial; identical to SEQ ID NO: 319501
  Synthetic oligonucleotide

SEQ ID NO: 543988 - DNA, 55 bp, Artificial; identical to SEQ ID NO: 319505
  Synthetic oligonucleotide

SEQ ID NO: 543989 - DNA, 57 bp, Artificial; identical to SEQ ID NO: 319514
  Synthetic oligonucleotide

SEQ ID NO: 543990 - DNA, 51 bp, Artificial; identical to SEQ ID NO: 319516
  Synthetic oligonucleotide

SEQ ID NO: 543991 - DNA, 58 bp, Artificial; identical to SEQ ID NO: 319519
  Synthetic oligonucleotide

SEQ ID NO: 543992 - DNA, 60 bp, Artificial; identical to SEQ ID NO: 319523
  Synthetic oligonucleotide

SEQ ID NO: 543993 - DNA, 57 bp, Artificial; identical to SEQ ID NO: 319525
  Synthetic oligonucleotide

SEQ ID NO: 543994 - DNA, 58 bp, Artificial; identical to SEQ ID NO: 7852
  Synthetic oligonucleotide

SEQ ID NO: 543995 - DNA, 60 bp, Artificial; identical to SEQ ID NO: 14654
  Synthetic oligonucleotide

SEQ ID NO: 543996 - DNA, 56 bp, Artificial; identical to SEQ ID NO: 319526
  Synthetic oligonucleotide

SEQ ID NO: 543997 - DNA, 50 bp, Artificial; identical to SEQ ID NO: 319528
  Synthetic oligonucleotide

SEQ ID NO: 543998 - DNA, 52 bp, Artificial; identical to SEQ ID NO: 319531
  Synthetic oligonucleotide

SEQ ID NO: 543999 - DNA, 59 bp, Artificial; identical to SEQ ID NO: 319535
  Synthetic oligonucleotide

SEQ ID NO: 544000 - DNA, 60 bp, Artificial; identical to SEQ ID NO: 319536
  Synthetic oligonucleotide

SEQ ID NO: 544001 - DNA, 60 bp, Artificial; identical to SEQ ID NO: 319539
  Synthetic oligonucleotide

SEQ ID NO: 544002 - DNA, 53 bp, Artificial; identical to SEQ ID NO: 319541
  Synthetic oligonucleotide

SEQ ID NO: 544003 - DNA, 59 bp, Artificial; identical to SEQ ID NO: 16153
  Synthetic oligonucleotide

SEQ ID NO: 544004 - DNA, 59 bp, Artificial; identical to SEQ ID NO: 319543
  Synthetic oligonucleotide

SEQ ID NO: 544005 - DNA, 51 bp, Artificial; identical to SEQ ID NO: 319545
  Synthetic oligonucleotide

SEQ ID NO: 544006 - DNA, 51 bp, Artificial; identical to SEQ ID NO: 319546
  Synthetic oligonucleotide

SEQ ID NO: 544007 - DNA, 57 bp, Artificial; identical to SEQ ID NO: 319549
  Synthetic oligonucleotide

SEQ ID NO: 544008 - DNA, 52 bp, Artificial; identical to SEQ ID NO: 319550
  Synthetic oligonucleotide

SEQ ID NO: 544009 - DNA, 59 bp, Artificial; identical to SEQ ID NO: 319556
  Synthetic oligonucleotide

SEQ ID NO: 544010 - DNA, 58 bp, Artificial; identical to SEQ ID NO: 319557
  Synthetic oligonucleotide

SEQ ID NO: 544011 - DNA, 57 bp, Artificial; identical to SEQ ID NO: 13643
  Synthetic oligonucleotide

SEQ ID NO: 544012 - DNA, 52 bp, Artificial; identical to SEQ ID NO: 319558
  Synthetic oligonucleotide

SEQ ID NO: 544013 - DNA, 53 bp, Artificial; identical to SEQ ID NO: 319559
  Synthetic oligonucleotide

SEQ ID NO: 544014 - DNA, 60 bp, Artificial; identical to SEQ ID NO: 319560
  Synthetic oligonucleotide

SEQ ID NO: 544015 - DNA, 58 bp, Artificial; identical to SEQ ID NO: 18462
  Synthetic oligonucleotide

SEQ ID NO: 544016 - DNA, 60 bp, Artificial; identical to SEQ ID NO: 319563
  Synthetic oligonucleotide

SEQ ID NO: 544017 - DNA, 58 bp, Artificial; identical to SEQ ID NO: 319564
  Synthetic oligonucleotide

SEQ ID NO: 544018 - DNA, 58 bp, Artificial; identical to SEQ ID NO: 319565
  Synthetic oligonucleotide

SEQ ID NO: 544019 - DNA, 55 bp, Artificial; identical to SEQ ID NO: 319568
  Synthetic oligonucleotide

SEQ ID NO: 544020 - DNA, 54 bp, Artificial; identical to SEQ ID NO: 319570
  Synthetic oligonucleotide

SEQ ID NO: 544021 - DNA, 55 bp, Artificial; identical to SEQ ID NO: 319576
  Synthetic oligonucleotide

SEQ ID NO: 544022 - DNA, 57 bp, Artificial; identical to SEQ ID NO: 319577
  Synthetic oligonucleotide

SEQ ID NO: 544023 - DNA, 60 bp, Artificial; identical to SEQ ID NO: 319581
  Synthetic oligonucleotide

SEQ ID NO: 544024 - DNA, 54 bp, Artificial; identical to SEQ ID NO: 319585
  Synthetic oligonucleotide

SEQ ID NO: 544025 - DNA, 50 bp, Artificial; identical to SEQ ID NO: 319591
  Synthetic oligonucleotide

SEQ ID NO: 544026 - DNA, 60 bp, Artificial; identical to SEQ ID NO: 319592
  Synthetic oligonucleotide

SEQ ID NO: 544027 - DNA, 53 bp, Artificial; identical to SEQ ID NO: 319594
  Synthetic oligonucleotide

SEQ ID NO: 544028 - DNA, 53 bp, Artificial; identical to SEQ ID NO: 319598
  Synthetic oligonucleotide

SEQ ID NO: 544029 - DNA, 54 bp, Artificial; identical to SEQ ID NO: 319599
  Synthetic oligonucleotide

SEQ ID NO: 544030 - DNA, 53 bp, Artificial; identical to SEQ ID NO: 319601
  Synthetic oligonucleotide

SEQ ID NO: 544031 - DNA, 54 bp, Artificial; identical to SEQ ID NO: 319606
  Synthetic oligonucleotide

SEQ ID NO: 544032 - DNA, 58 bp, Artificial; identical to SEQ ID NO: 319613
  Synthetic oligonucleotide

SEQ ID NO: 544033 - DNA, 55 bp, Artificial; identical to SEQ ID NO: 319614
  Synthetic oligonucleotide

SEQ ID NO: 544034 - DNA, 58 bp, Artificial; identical to SEQ ID NO: 319616
  Synthetic oligonucleotide

SEQ ID NO: 544035 - DNA, 55 bp, Artificial; identical to SEQ ID NO: 319617
  Synthetic oligonucleotide

SEQ ID NO: 544036 - DNA, 51 bp, Artificial; identical to SEQ ID NO: 319619
  Synthetic oligonucleotide

SEQ ID NO: 544037 - DNA, 60 bp, Artificial; identical to SEQ ID NO: 8086
  Synthetic oligonucleotide

SEQ ID NO: 544038 - DNA, 55 bp, Artificial; identical to SEQ ID NO: 319622
  Synthetic oligonucleotide

SEQ ID NO: 544039 - DNA, 60 bp, Artificial; identical to SEQ ID NO: 319627
  Synthetic oligonucleotide

SEQ ID NO: 544040 - DNA, 55 bp, Artificial; identical to SEQ ID NO: 319629
  Synthetic oligonucleotide

SEQ ID NO: 544041 - DNA, 60 bp, Artificial; identical to SEQ ID NO: 319633
  Synthetic oligonucleotide

SEQ ID NO: 544042 - DNA, 57 bp, Artificial; identical to SEQ ID NO: 319634
  Synthetic oligonucleotide

SEQ ID NO: 544043 - DNA, 53 bp, Artificial; identical to SEQ ID NO: 319636
  Synthetic oligonucleotide

SEQ ID NO: 544044 - DNA, 57 bp, Artificial; identical to SEQ ID NO: 319638
  Synthetic oligonucleotide

SEQ ID NO: 544045 - DNA, 57 bp, Artificial; identical to SEQ ID NO: 319639
  Synthetic oligonucleotide

SEQ ID NO: 544046 - DNA, 58 bp, Artificial; identical to SEQ ID NO: 319641
  Synthetic oligonucleotide

SEQ ID NO: 544047 - DNA, 60 bp, Artificial; identical to SEQ ID NO: 319642
  Synthetic oligonucleotide

SEQ ID NO: 544048 - DNA, 55 bp, Artificial; identical to SEQ ID NO: 319646
  Synthetic oligonucleotide

SEQ ID NO: 544049 - DNA, 54 bp, Artificial; identical to SEQ ID NO: 319649
  Synthetic oligonucleotide

SEQ ID NO: 544050 - DNA, 54 bp, Artificial; identical to SEQ ID NO: 319653
  Synthetic oligonucleotide

SEQ ID NO: 544051 - DNA, 57 bp, Artificial; identical to SEQ ID NO: 319657
  Synthetic oligonucleotide

SEQ ID NO: 544052 - DNA, 55 bp, Artificial; identical to SEQ ID NO: 319658
  Synthetic oligonucleotide

SEQ ID NO: 544053 - DNA, 55 bp, Artificial; identical to SEQ ID NO: 319660
  Synthetic oligonucleotide

SEQ ID NO: 544054 - DNA, 60 bp, Artificial; identical to SEQ ID NO: 319662
  Synthetic oligonucleotide

SEQ ID NO: 544055 - DNA, 54 bp, Artificial; identical to SEQ ID NO: 319664
  Synthetic oligonucleotide

SEQ ID NO: 544056 - DNA, 53 bp, Artificial; identical to SEQ ID NO: 319668
  Synthetic oligonucleotide

SEQ ID NO: 544057 - DNA, 60 bp, Artificial; identical to SEQ ID NO: 319669
  Synthetic oligonucleotide

SEQ ID NO: 544058 - DNA, 54 bp, Artificial; identical to SEQ ID NO: 319670
  Synthetic oligonucleotide

SEQ ID NO: 544059 - DNA, 59 bp, Artificial; identical to SEQ ID NO: 319673
  Synthetic oligonucleotide

SEQ ID NO: 544060 - DNA, 55 bp, Artificial; identical to SEQ ID NO: 319675
  Synthetic oligonucleotide

SEQ ID NO: 544061 - DNA, 50 bp, Artificial; identical to SEQ ID NO: 319676
  Synthetic oligonucleotide

SEQ ID NO: 544062 - DNA, 60 bp, Artificial; identical to SEQ ID NO: 319677
  Synthetic oligonucleotide

SEQ ID NO: 544063 - DNA, 60 bp, Artificial; identical to SEQ ID NO: 319678
  Synthetic oligonucleotide

SEQ ID NO: 544064 - DNA, 55 bp, Artificial; identical to SEQ ID NO: 319682
  Synthetic oligonucleotide

SEQ ID NO: 544065 - DNA, 55 bp, Artificial; identical to SEQ ID NO: 319683
  Synthetic oligonucleotide

SEQ ID NO: 544066 - DNA, 59 bp, Artificial; identical to SEQ ID NO: 319685
  Synthetic oligonucleotide

SEQ ID NO: 544067 - DNA, 60 bp, Artificial; identical to SEQ ID NO: 319691
  Synthetic oligonucleotide

SEQ ID NO: 544068 - DNA, 58 bp, Artificial; identical to SEQ ID NO: 319696
  Synthetic oligonucleotide

SEQ ID NO: 544069 - DNA, 57 bp, Artificial; identical to SEQ ID NO: 319699
  Synthetic oligonucleotide

SEQ ID NO: 544070 - DNA, 50 bp, Artificial; identical to SEQ ID NO: 319701
  Synthetic oligonucleotide

SEQ ID NO: 544071 - DNA, 60 bp, Artificial; identical to SEQ ID NO: 319704
  Synthetic oligonucleotide

SEQ ID NO: 544072 - DNA, 59 bp, Artificial; identical to SEQ ID NO: 319705
  Synthetic oligonucleotide

SEQ ID NO: 544073 - DNA, 60 bp, Artificial; identical to SEQ ID NO: 319707
  Synthetic oligonucleotide

SEQ ID NO: 544074 - DNA, 59 bp, Artificial; identical to SEQ ID NO: 319712
  Synthetic oligonucleotide

SEQ ID NO: 544075 - DNA, 60 bp, Artificial; identical to SEQ ID NO: 319714
  Synthetic oligonucleotide

SEQ ID NO: 544076 - DNA, 57 bp, Artificial; identical to SEQ ID NO: 319715
  Synthetic oligonucleotide

SEQ ID NO: 544077 - DNA, 51 bp, Artificial; identical to SEQ ID NO: 319718
  Synthetic oligonucleotide

SEQ ID NO: 544078 - DNA, 57 bp, Artificial; identical to SEQ ID NO: 319720
  Synthetic oligonucleotide

SEQ ID NO: 544079 - DNA, 60 bp, Artificial; identical to SEQ ID NO: 319725
  Synthetic oligonucleotide

SEQ ID NO: 544080 - DNA, 60 bp, Artificial; identical to SEQ ID NO: 319726
  Synthetic oligonucleotide

SEQ ID NO: 544081 - DNA, 55 bp, Artificial; identical to SEQ ID NO: 319727
  Synthetic oligonucleotide

SEQ ID NO: 544082 - DNA, 60 bp, Artificial; identical to SEQ ID NO: 319729
  Synthetic oligonucleotide

SEQ ID NO: 544083 - DNA, 58 bp, Artificial; identical to SEQ ID NO: 319730
  Synthetic oligonucleotide

SEQ ID NO: 544084 - DNA, 58 bp, Artificial; identical to SEQ ID NO: 319731
  Synthetic oligonucleotide

SEQ ID NO: 544085 - DNA, 55 bp, Artificial; identical to SEQ ID NO: 319733
  Synthetic oligonucleotide

SEQ ID NO: 544086 - DNA, 54 bp, Artificial; identical to SEQ ID NO: 319734
  Synthetic oligonucleotide

SEQ ID NO: 544087 - DNA, 55 bp, Artificial; identical to SEQ ID NO: 319738
  Synthetic oligonucleotide

SEQ ID NO: 544088 - DNA, 60 bp, Artificial; identical to SEQ ID NO: 319747
  Synthetic oligonucleotide

SEQ ID NO: 544089 - DNA, 53 bp, Artificial; identical to SEQ ID NO: 319751
  Synthetic oligonucleotide

SEQ ID NO: 544090 - DNA, 60 bp, Artificial; identical to SEQ ID NO: 319752
  Synthetic oligonucleotide

SEQ ID NO: 544091 - DNA, 55 bp, Artificial; identical to SEQ ID NO: 319753
  Synthetic oligonucleotide

SEQ ID NO: 544092 - DNA, 56 bp, Artificial; identical to SEQ ID NO: 319754
  Synthetic oligonucleotide

SEQ ID NO: 544093 - DNA, 59 bp, Artificial; identical to SEQ ID NO: 319757
  Synthetic oligonucleotide

SEQ ID NO: 544094 - DNA, 55 bp, Artificial; identical to SEQ ID NO: 18222
  Synthetic oligonucleotide

SEQ ID NO: 544095 - DNA, 60 bp, Artificial; identical to SEQ ID NO: 319761
  Synthetic oligonucleotide

SEQ ID NO: 544096 - DNA, 58 bp, Artificial; identical to SEQ ID NO: 319769
  Synthetic oligonucleotide

SEQ ID NO: 544097 - DNA, 59 bp, Artificial; identical to SEQ ID NO: 319770
  Synthetic oligonucleotide

SEQ ID NO: 544098 - DNA, 55 bp, Artificial; identical to SEQ ID NO: 319774
  Synthetic oligonucleotide

SEQ ID NO: 544099 - DNA, 53 bp, Artificial; identical to SEQ ID NO: 319775
  Synthetic oligonucleotide

SEQ ID NO: 544100 - DNA, 56 bp, Artificial; identical to SEQ ID NO: 319777
  Synthetic oligonucleotide

SEQ ID NO: 544101 - DNA, 57 bp, Artificial; identical to SEQ ID NO: 319781
  Synthetic oligonucleotide

SEQ ID NO: 544102 - DNA, 58 bp, Artificial; identical to SEQ ID NO: 319782
  Synthetic oligonucleotide

SEQ ID NO: 544103 - DNA, 55 bp, Artificial; identical to SEQ ID NO: 319786
  Synthetic oligonucleotide

SEQ ID NO: 544104 - DNA, 60 bp, Artificial; identical to SEQ ID NO: 319787
  Synthetic oligonucleotide

SEQ ID NO: 544105 - DNA, 60 bp, Artificial; identical to SEQ ID NO: 319788
  Synthetic oligonucleotide

SEQ ID NO: 544106 - DNA, 60 bp, Artificial; identical to SEQ ID NO: 319789
  Synthetic oligonucleotide

SEQ ID NO: 544107 - DNA, 60 bp, Artificial; identical to SEQ ID NO: 319790
  Synthetic oligonucleotide

SEQ ID NO: 544108 - DNA, 60 bp, Artificial; identical to SEQ ID NO: 319791
  Synthetic oligonucleotide

SEQ ID NO: 544109 - DNA, 60 bp, Artificial; identical to SEQ ID NO: 319792
  Synthetic oligonucleotide

SEQ ID NO: 544110 - DNA, 60 bp, Artificial; identical to SEQ ID NO: 319795
  Synthetic oligonucleotide

SEQ ID NO: 544111 - DNA, 60 bp, Artificial; identical to SEQ ID NO: 319796
  Synthetic oligonucleotide

SEQ ID NO: 544112 - DNA, 58 bp, Artificial; identical to SEQ ID NO: 319797
  Synthetic oligonucleotide

SEQ ID NO: 544113 - DNA, 60 bp, Artificial; identical to SEQ ID NO: 13042
  Synthetic oligonucleotide

SEQ ID NO: 544114 - DNA, 60 bp, Artificial; identical to SEQ ID NO: 319799
  Synthetic oligonucleotide

SEQ ID NO: 544115 - DNA, 60 bp, Artificial; identical to SEQ ID NO: 14903
  Synthetic oligonucleotide

SEQ ID NO: 544116 - DNA, 60 bp, Artificial; identical to SEQ ID NO: 319800
  Synthetic oligonucleotide

SEQ ID NO: 544117 - DNA, 59 bp, Artificial; identical to SEQ ID NO: 319801
  Synthetic oligonucleotide

SEQ ID NO: 544118 - DNA, 60 bp, Artificial; identical to SEQ ID NO: 319802
  Synthetic oligonucleotide

SEQ ID NO: 544119 - DNA, 55 bp, Artificial; identical to SEQ ID NO: 319818
  Synthetic oligonucleotide

SEQ ID NO: 544120 - DNA, 59 bp, Artificial; identical to SEQ ID NO: 319819
  Synthetic oligonucleotide

SEQ ID NO: 544121 - DNA, 53 bp, Artificial; identical to SEQ ID NO: 319820
  Synthetic oligonucleotide

SEQ ID NO: 544122 - DNA, 60 bp, Artificial; identical to SEQ ID NO: 319821
  Synthetic oligonucleotide

SEQ ID NO: 544123 - DNA, 60 bp, Artificial; identical to SEQ ID NO: 319822
  Synthetic oligonucleotide

SEQ ID NO: 544124 - DNA, 60 bp, Artificial; identical to SEQ ID NO: 319823
  Synthetic oligonucleotide

SEQ ID NO: 544125 - DNA, 58 bp, Artificial; identical to SEQ ID NO: 319824
  Synthetic oligonucleotide

SEQ ID NO: 544126 - DNA, 51 bp, Artificial; identical to SEQ ID NO: 319826
  Synthetic oligonucleotide

SEQ ID NO: 544127 - DNA, 60 bp, Artificial; identical to SEQ ID NO: 319827
  Synthetic oligonucleotide

SEQ ID NO: 544128 - DNA, 57 bp, Artificial; identical to SEQ ID NO: 319828
  Synthetic oligonucleotide

SEQ ID NO: 544129 - DNA, 58 bp, Artificial; identical to SEQ ID NO: 319829
  Synthetic oligonucleotide

SEQ ID NO: 544130 - DNA, 60 bp, Artificial; identical to SEQ ID NO: 319830
  Synthetic oligonucleotide

SEQ ID NO: 544131 - DNA, 57 bp, Artificial; identical to SEQ ID NO: 319835
  Synthetic oligonucleotide

SEQ ID NO: 544132 - DNA, 60 bp, Artificial; identical to SEQ ID NO: 319836
  Synthetic oligonucleotide

SEQ ID NO: 544133 - DNA, 51 bp, Artificial; identical to SEQ ID NO: 319838
  Synthetic oligonucleotide

SEQ ID NO: 544134 - DNA, 57 bp, Artificial; identical to SEQ ID NO: 319840
  Synthetic oligonucleotide

SEQ ID NO: 544135 - DNA, 60 bp, Artificial; identical to SEQ ID NO: 319843
  Synthetic oligonucleotide

SEQ ID NO: 544136 - DNA, 57 bp, Artificial; identical to SEQ ID NO: 319848
  Synthetic oligonucleotide

SEQ ID NO: 544137 - DNA, 55 bp, Artificial; identical to SEQ ID NO: 319851
  Synthetic oligonucleotide

SEQ ID NO: 544138 - DNA, 55 bp, Artificial; identical to SEQ ID NO: 319858
  Synthetic oligonucleotide

SEQ ID NO: 544139 - DNA, 59 bp, Artificial; identical to SEQ ID NO: 319859
  Synthetic oligonucleotide

SEQ ID NO: 544140 - DNA, 60 bp, Artificial; identical to SEQ ID NO: 319863
  Synthetic oligonucleotide

SEQ ID NO: 544141 - DNA, 60 bp, Artificial; identical to SEQ ID NO: 10826
  Synthetic oligonucleotide

SEQ ID NO: 544142 - DNA, 60 bp, Artificial; identical to SEQ ID NO: 319864
  Synthetic oligonucleotide

SEQ ID NO: 544143 - DNA, 60 bp, Artificial; identical to SEQ ID NO: 319865
  Synthetic oligonucleotide

SEQ ID NO: 544144 - DNA, 59 bp, Artificial; identical to SEQ ID NO: 319866
  Synthetic oligonucleotide

SEQ ID NO: 544145 - DNA, 60 bp, Artificial; identical to SEQ ID NO: 319867
  Synthetic oligonucleotide

SEQ ID NO: 544146 - DNA, 60 bp, Artificial; identical to SEQ ID NO: 319868
  Synthetic oligonucleotide

SEQ ID NO: 544147 - DNA, 58 bp, Artificial; identical to SEQ ID NO: 319873
  Synthetic oligonucleotide

SEQ ID NO: 544148 - DNA, 55 bp, Artificial; identical to SEQ ID NO: 319874
  Synthetic oligonucleotide

SEQ ID NO: 544149 - DNA, 60 bp, Artificial; identical to SEQ ID NO: 319880
  Synthetic oligonucleotide

SEQ ID NO: 544150 - DNA, 60 bp, Artificial; identical to SEQ ID NO: 319881
  Synthetic oligonucleotide

SEQ ID NO: 544151 - DNA, 60 bp, Artificial; identical to SEQ ID NO: 319882
  Synthetic oligonucleotide

SEQ ID NO: 544152 - DNA, 55 bp, Artificial; identical to SEQ ID NO: 319889
  Synthetic oligonucleotide

SEQ ID NO: 544153 - DNA, 53 bp, Artificial; identical to SEQ ID NO: 319892
  Synthetic oligonucleotide

SEQ ID NO: 544154 - DNA, 56 bp, Artificial; identical to SEQ ID NO: 319893
  Synthetic oligonucleotide

SEQ ID NO: 544155 - DNA, 56 bp, Artificial; identical to SEQ ID NO: 319894
  Synthetic oligonucleotide

SEQ ID NO: 544156 - DNA, 57 bp, Artificial; identical to SEQ ID NO: 319896
  Synthetic oligonucleotide

SEQ ID NO: 544157 - DNA, 52 bp, Artificial; identical to SEQ ID NO: 319898
  Synthetic oligonucleotide

SEQ ID NO: 544158 - DNA, 59 bp, Artificial; identical to SEQ ID NO: 319902
  Synthetic oligonucleotide

SEQ ID NO: 544159 - DNA, 50 bp, Artificial; identical to SEQ ID NO: 319903
  Synthetic oligonucleotide

SEQ ID NO: 544160 - DNA, 59 bp, Artificial; identical to SEQ ID NO: 319904
  Synthetic oligonucleotide

SEQ ID NO: 544161 - DNA, 60 bp, Artificial; identical to SEQ ID NO: 319905
  Synthetic oligonucleotide

SEQ ID NO: 544162 - DNA, 57 bp, Artificial; identical to SEQ ID NO: 319906
  Synthetic oligonucleotide

SEQ ID NO: 544163 - DNA, 54 bp, Artificial; identical to SEQ ID NO: 319908
  Synthetic oligonucleotide

SEQ ID NO: 544164 - DNA, 60 bp, Artificial; identical to SEQ ID NO: 319913
  Synthetic oligonucleotide

SEQ ID NO: 544165 - DNA, 57 bp, Artificial; identical to SEQ ID NO: 319915
  Synthetic oligonucleotide

SEQ ID NO: 544166 - DNA, 57 bp, Artificial; identical to SEQ ID NO: 319924
  Synthetic oligonucleotide

SEQ ID NO: 544167 - DNA, 60 bp, Artificial; identical to SEQ ID NO: 319930
  Synthetic oligonucleotide

SEQ ID NO: 544168 - DNA, 58 bp, Artificial; identical to SEQ ID NO: 319931
  Synthetic oligonucleotide

SEQ ID NO: 544169 - DNA, 60 bp, Artificial; identical to SEQ ID NO: 319932
  Synthetic oligonucleotide

SEQ ID NO: 544170 - DNA, 58 bp, Artificial; identical to SEQ ID NO: 319933
  Synthetic oligonucleotide

SEQ ID NO: 544171 - DNA, 60 bp, Artificial; identical to SEQ ID NO: 319934
  Synthetic oligonucleotide

SEQ ID NO: 544172 - DNA, 60 bp, Artificial; identical to SEQ ID NO: 319936
  Synthetic oligonucleotide

SEQ ID NO: 544173 - DNA, 60 bp, Artificial; identical to SEQ ID NO: 319938
  Synthetic oligonucleotide

SEQ ID NO: 544174 - DNA, 55 bp, Artificial; identical to SEQ ID NO: 319939
  Synthetic oligonucleotide

SEQ ID NO: 544175 - DNA, 58 bp, Artificial; identical to SEQ ID NO: 17513
  Synthetic oligonucleotide

SEQ ID NO: 544176 - DNA, 60 bp, Artificial; identical to SEQ ID NO: 319940
  Synthetic oligonucleotide

SEQ ID NO: 544177 - DNA, 57 bp, Artificial; identical to SEQ ID NO: 319941
  Synthetic oligonucleotide

SEQ ID NO: 544178 - DNA, 58 bp, Artificial; identical to SEQ ID NO: 319943
  Synthetic oligonucleotide

SEQ ID NO: 544179 - DNA, 54 bp, Artificial; identical to SEQ ID NO: 319944
  Synthetic oligonucleotide

SEQ ID NO: 544180 - DNA, 60 bp, Artificial; identical to SEQ ID NO: 5866
  Synthetic oligonucleotide

SEQ ID NO: 544181 - DNA, 55 bp, Artificial; identical to SEQ ID NO: 319949
  Synthetic oligonucleotide

SEQ ID NO: 544182 - DNA, 60 bp, Artificial; identical to SEQ ID NO: 97370
  Synthetic oligonucleotide

SEQ ID NO: 544183 - DNA, 59 bp, Artificial; identical to SEQ ID NO: 319952
  Synthetic oligonucleotide

SEQ ID NO: 544184 - DNA, 60 bp, Artificial; identical to SEQ ID NO: 319953
  Synthetic oligonucleotide

SEQ ID NO: 544185 - DNA, 59 bp, Artificial; identical to SEQ ID NO: 319954
  Synthetic oligonucleotide

SEQ ID NO: 544186 - DNA, 55 bp, Artificial; identical to SEQ ID NO: 319955
  Synthetic oligonucleotide

SEQ ID NO: 544187 - DNA, 55 bp, Artificial; identical to SEQ ID NO: 319959
  Synthetic oligonucleotide

SEQ ID NO: 544188 - DNA, 60 bp, Artificial; identical to SEQ ID NO: 319960
  Synthetic oligonucleotide

SEQ ID NO: 544189 - DNA, 60 bp, Artificial; identical to SEQ ID NO: 319961
  Synthetic oligonucleotide

SEQ ID NO: 544190 - DNA, 53 bp, Artificial; identical to SEQ ID NO: 319963
  Synthetic oligonucleotide

SEQ ID NO: 544191 - DNA, 60 bp, Artificial; identical to SEQ ID NO: 319964
  Synthetic oligonucleotide

SEQ ID NO: 544192 - DNA, 53 bp, Artificial; identical to SEQ ID NO: 319965
  Synthetic oligonucleotide

SEQ ID NO: 544193 - DNA, 60 bp, Artificial; identical to SEQ ID NO: 319968
  Synthetic oligonucleotide

SEQ ID NO: 544194 - DNA, 59 bp, Artificial; identical to SEQ ID NO: 319970
  Synthetic oligonucleotide

SEQ ID NO: 544195 - DNA, 52 bp, Artificial; identical to SEQ ID NO: 319971
  Synthetic oligonucleotide

SEQ ID NO: 544196 - DNA, 60 bp, Artificial; identical to SEQ ID NO: 319974
  Synthetic oligonucleotide

SEQ ID NO: 544197 - DNA, 60 bp, Artificial; identical to SEQ ID NO: 9545
  Synthetic oligonucleotide

SEQ ID NO: 544198 - DNA, 52 bp, Artificial; identical to SEQ ID NO: 319975
  Synthetic oligonucleotide

SEQ ID NO: 544199 - DNA, 60 bp, Artificial; identical to SEQ ID NO: 319976
  Synthetic oligonucleotide

SEQ ID NO: 544200 - DNA, 60 bp, Artificial; identical to SEQ ID NO: 319978
  Synthetic oligonucleotide

SEQ ID NO: 544201 - DNA, 60 bp, Artificial; identical to SEQ ID NO: 319979
  Synthetic oligonucleotide

SEQ ID NO: 544202 - DNA, 60 bp, Artificial; identical to SEQ ID NO: 319980
  Synthetic oligonucleotide

SEQ ID NO: 544203 - DNA, 51 bp, Artificial; identical to SEQ ID NO: 319983
  Synthetic oligonucleotide

SEQ ID NO: 544204 - DNA, 56 bp, Artificial; identical to SEQ ID NO: 319989
  Synthetic oligonucleotide

SEQ ID NO: 544205 - DNA, 59 bp, Artificial; identical to SEQ ID NO: 319990
  Synthetic oligonucleotide

SEQ ID NO: 544206 - DNA, 54 bp, Artificial; identical to SEQ ID NO: 319991
  Synthetic oligonucleotide

SEQ ID NO: 544207 - DNA, 58 bp, Artificial; identical to SEQ ID NO: 319992
  Synthetic oligonucleotide

SEQ ID NO: 544208 - DNA, 55 bp, Artificial; identical to SEQ ID NO: 319996
  Synthetic oligonucleotide

SEQ ID NO: 544209 - DNA, 55 bp, Artificial; identical to SEQ ID NO: 319997
  Synthetic oligonucleotide

SEQ ID NO: 544210 - DNA, 57 bp, Artificial; identical to SEQ ID NO: 320000
  Synthetic oligonucleotide

SEQ ID NO: 544211 - DNA, 60 bp, Artificial; identical to SEQ ID NO: 320002
  Synthetic oligonucleotide

SEQ ID NO: 544212 - DNA, 51 bp, Artificial; identical to SEQ ID NO: 320007
  Synthetic oligonucleotide

SEQ ID NO: 544213 - DNA, 56 bp, Artificial; identical to SEQ ID NO: 320008
  Synthetic oligonucleotide

SEQ ID NO: 544214 - DNA, 59 bp, Artificial; identical to SEQ ID NO: 320009
  Synthetic oligonucleotide

SEQ ID NO: 544215 - DNA, 56 bp, Artificial; identical to SEQ ID NO: 320010
  Synthetic oligonucleotide

SEQ ID NO: 544216 - DNA, 60 bp, Artificial; identical to SEQ ID NO: 320011
  Synthetic oligonucleotide

SEQ ID NO: 544217 - DNA, 55 bp, Artificial; identical to SEQ ID NO: 320013
  Synthetic oligonucleotide

SEQ ID NO: 544218 - DNA, 53 bp, Artificial; identical to SEQ ID NO: 320014
  Synthetic oligonucleotide

SEQ ID NO: 544219 - DNA, 60 bp, Artificial; identical to SEQ ID NO: 320015
  Synthetic oligonucleotide

SEQ ID NO: 544220 - DNA, 57 bp, Artificial; identical to SEQ ID NO: 320016
  Synthetic oligonucleotide

SEQ ID NO: 544221 - DNA, 60 bp, Artificial; identical to SEQ ID NO: 320017
  Synthetic oligonucleotide

SEQ ID NO: 544222 - DNA, 60 bp, Artificial; identical to SEQ ID NO: 320021
  Synthetic oligonucleotide

SEQ ID NO: 544223 - DNA, 60 bp, Artificial; identical to SEQ ID NO: 320027
  Synthetic oligonucleotide

SEQ ID NO: 544224 - DNA, 60 bp, Artificial; identical to SEQ ID NO: 320031
  Synthetic oligonucleotide

SEQ ID NO: 544225 - DNA, 60 bp, Artificial; identical to SEQ ID NO: 320033
  Synthetic oligonucleotide

SEQ ID NO: 544226 - DNA, 50 bp, Artificial; identical to SEQ ID NO: 320042
  Synthetic oligonucleotide

SEQ ID NO: 544227 - DNA, 60 bp, Artificial; identical to SEQ ID NO: 320044
  Synthetic oligonucleotide

SEQ ID NO: 544228 - DNA, 60 bp, Artificial; identical to SEQ ID NO: 320045
  Synthetic oligonucleotide

SEQ ID NO: 544229 - DNA, 50 bp, Artificial; identical to SEQ ID NO: 320046
  Synthetic oligonucleotide

SEQ ID NO: 544230 - DNA, 56 bp, Artificial; identical to SEQ ID NO: 320047
  Synthetic oligonucleotide

SEQ ID NO: 544231 - DNA, 60 bp, Artificial; identical to SEQ ID NO: 320048
  Synthetic oligonucleotide

SEQ ID NO: 544232 - DNA, 55 bp, Artificial; identical to SEQ ID NO: 320049
  Synthetic oligonucleotide

SEQ ID NO: 544233 - DNA, 55 bp, Artificial; identical to SEQ ID NO: 320056
  Synthetic oligonucleotide

SEQ ID NO: 544234 - DNA, 60 bp, Artificial; identical to SEQ ID NO: 320057
  Synthetic oligonucleotide

SEQ ID NO: 544235 - DNA, 60 bp, Artificial; identical to SEQ ID NO: 320058
  Synthetic oligonucleotide

SEQ ID NO: 544236 - DNA, 60 bp, Artificial; identical to SEQ ID NO: 320060
  Synthetic oligonucleotide

SEQ ID NO: 544237 - DNA, 60 bp, Artificial; identical to SEQ ID NO: 320062
  Synthetic oligonucleotide

SEQ ID NO: 544238 - DNA, 60 bp, Artificial; identical to SEQ ID NO: 320063
  Synthetic oligonucleotide

SEQ ID NO: 544239 - DNA, 55 bp, Artificial; identical to SEQ ID NO: 320065
  Synthetic oligonucleotide

SEQ ID NO: 544240 - DNA, 60 bp, Artificial; identical to SEQ ID NO: 320069
  Synthetic oligonucleotide

SEQ ID NO: 544241 - DNA, 58 bp, Artificial; identical to SEQ ID NO: 320071
  Synthetic oligonucleotide

SEQ ID NO: 544242 - DNA, 59 bp, Artificial; identical to SEQ ID NO: 320073
  Synthetic oligonucleotide

SEQ ID NO: 544243 - DNA, 58 bp, Artificial; identical to SEQ ID NO: 320074
  Synthetic oligonucleotide

SEQ ID NO: 544244 - DNA, 60 bp, Artificial; identical to SEQ ID NO: 320075
  Synthetic oligonucleotide

SEQ ID NO: 544245 - DNA, 59 bp, Artificial; identical to SEQ ID NO: 320082
  Synthetic oligonucleotide

SEQ ID NO: 544246 - DNA, 50 bp, Artificial; identical to SEQ ID NO: 320087
  Synthetic oligonucleotide

SEQ ID NO: 544247 - DNA, 59 bp, Artificial; identical to SEQ ID NO: 320089
  Synthetic oligonucleotide

SEQ ID NO: 544248 - DNA, 55 bp, Artificial; identical to SEQ ID NO: 320090
  Synthetic oligonucleotide

SEQ ID NO: 544249 - DNA, 59 bp, Artificial; identical to SEQ ID NO: 320097
  Synthetic oligonucleotide

SEQ ID NO: 544250 - DNA, 60 bp, Artificial; identical to SEQ ID NO: 320111
  Synthetic oligonucleotide

SEQ ID NO: 544251 - DNA, 58 bp, Artificial; identical to SEQ ID NO: 320112
  Synthetic oligonucleotide

SEQ ID NO: 544252 - DNA, 60 bp, Artificial; identical to SEQ ID NO: 320113
  Synthetic oligonucleotide

SEQ ID NO: 544253 - DNA, 60 bp, Artificial; identical to SEQ ID NO: 320114
  Synthetic oligonucleotide

SEQ ID NO: 544254 - DNA, 58 bp, Artificial; identical to SEQ ID NO: 320115
  Synthetic oligonucleotide

SEQ ID NO: 544255 - DNA, 58 bp, Artificial; identical to SEQ ID NO: 18330
  Synthetic oligonucleotide

SEQ ID NO: 544256 - DNA, 55 bp, Artificial; identical to SEQ ID NO: 320120
  Synthetic oligonucleotide

SEQ ID NO: 544257 - DNA, 59 bp, Artificial; identical to SEQ ID NO: 320126
  Synthetic oligonucleotide

SEQ ID NO: 544258 - DNA, 57 bp, Artificial; identical to SEQ ID NO: 320127
  Synthetic oligonucleotide

SEQ ID NO: 544259 - DNA, 60 bp, Artificial; identical to SEQ ID NO: 320129
  Synthetic oligonucleotide

SEQ ID NO: 544260 - DNA, 57 bp, Artificial; identical to SEQ ID NO: 320131
  Synthetic oligonucleotide

SEQ ID NO: 544261 - DNA, 60 bp, Artificial; identical to SEQ ID NO: 320135
  Synthetic oligonucleotide

SEQ ID NO: 544262 - DNA, 60 bp, Artificial; identical to SEQ ID NO: 320141
  Synthetic oligonucleotide

SEQ ID NO: 544263 - DNA, 55 bp, Artificial; identical to SEQ ID NO: 320142
  Synthetic oligonucleotide

SEQ ID NO: 544264 - DNA, 55 bp, Artificial; identical to SEQ ID NO: 320143
  Synthetic oligonucleotide

SEQ ID NO: 544265 - DNA, 57 bp, Artificial; identical to SEQ ID NO: 320153
  Synthetic oligonucleotide

SEQ ID NO: 544266 - DNA, 55 bp, Artificial; identical to SEQ ID NO: 320155
  Synthetic oligonucleotide

SEQ ID NO: 544267 - DNA, 57 bp, Artificial; identical to SEQ ID NO: 10453
  Synthetic oligonucleotide

SEQ ID NO: 544268 - DNA, 57 bp, Artificial; identical to SEQ ID NO: 320159
  Synthetic oligonucleotide

SEQ ID NO: 544269 - DNA, 59 bp, Artificial; identical to SEQ ID NO: 320161
  Synthetic oligonucleotide

SEQ ID NO: 544270 - DNA, 60 bp, Artificial; identical to SEQ ID NO: 320165
  Synthetic oligonucleotide

SEQ ID NO: 544271 - DNA, 58 bp, Artificial; identical to SEQ ID NO: 320166
  Synthetic oligonucleotide

SEQ ID NO: 544272 - DNA, 55 bp, Artificial; identical to SEQ ID NO: 320168
  Synthetic oligonucleotide

SEQ ID NO: 544273 - DNA, 60 bp, Artificial; identical to SEQ ID NO: 320169
  Synthetic oligonucleotide

SEQ ID NO: 544274 - DNA, 51 bp, Artificial; identical to SEQ ID NO: 320170
  Synthetic oligonucleotide

SEQ ID NO: 544275 - DNA, 55 bp, Artificial; identical to SEQ ID NO: 320174
  Synthetic oligonucleotide

SEQ ID NO: 544276 - DNA, 58 bp, Artificial; identical to SEQ ID NO: 320175
  Synthetic oligonucleotide

SEQ ID NO: 544277 - DNA, 52 bp, Artificial; identical to SEQ ID NO: 320177
  Synthetic oligonucleotide

SEQ ID NO: 544278 - DNA, 52 bp, Artificial; identical to SEQ ID NO: 320178
  Synthetic oligonucleotide

SEQ ID NO: 544279 - DNA, 51 bp, Artificial; identical to SEQ ID NO: 320179
  Synthetic oligonucleotide

SEQ ID NO: 544280 - DNA, 58 bp, Artificial; identical to SEQ ID NO: 320181
  Synthetic oligonucleotide

SEQ ID NO: 544281 - DNA, 54 bp, Artificial; identical to SEQ ID NO: 320182
  Synthetic oligonucleotide

SEQ ID NO: 544282 - DNA, 59 bp, Artificial; identical to SEQ ID NO: 320183
  Synthetic oligonucleotide

SEQ ID NO: 544283 - DNA, 54 bp, Artificial; identical to SEQ ID NO: 320186
  Synthetic oligonucleotide

SEQ ID NO: 544284 - DNA, 60 bp, Artificial; identical to SEQ ID NO: 320187
  Synthetic oligonucleotide

SEQ ID NO: 544285 - DNA, 56 bp, Artificial; identical to SEQ ID NO: 320188
  Synthetic oligonucleotide

SEQ ID NO: 544286 - DNA, 60 bp, Artificial; identical to SEQ ID NO: 320189
  Synthetic oligonucleotide

SEQ ID NO: 544287 - DNA, 55 bp, Artificial; identical to SEQ ID NO: 320191
  Synthetic oligonucleotide

SEQ ID NO: 544288 - DNA, 57 bp, Artificial; identical to SEQ ID NO: 320193
  Synthetic oligonucleotide

SEQ ID NO: 544289 - DNA, 60 bp, Artificial; identical to SEQ ID NO: 320198
  Synthetic oligonucleotide

SEQ ID NO: 544290 - DNA, 53 bp, Artificial; identical to SEQ ID NO: 320203
  Synthetic oligonucleotide

SEQ ID NO: 544291 - DNA, 60 bp, Artificial; identical to SEQ ID NO: 320204
  Synthetic oligonucleotide

SEQ ID NO: 544292 - DNA, 55 bp, Artificial; identical to SEQ ID NO: 320205
  Synthetic oligonucleotide

SEQ ID NO: 544293 - DNA, 59 bp, Artificial; identical to SEQ ID NO: 320206
  Synthetic oligonucleotide

SEQ ID NO: 544294 - DNA, 60 bp, Artificial; identical to SEQ ID NO: 320207
  Synthetic oligonucleotide

SEQ ID NO: 544295 - DNA, 60 bp, Artificial; identical to SEQ ID NO: 320208
  Synthetic oligonucleotide

SEQ ID NO: 544296 - DNA, 60 bp, Artificial; identical to SEQ ID NO: 320209
  Synthetic oligonucleotide

SEQ ID NO: 544297 - DNA, 60 bp, Artificial; identical to SEQ ID NO: 320210
  Synthetic oligonucleotide

SEQ ID NO: 544298 - DNA, 55 bp, Artificial; identical to SEQ ID NO: 320211
  Synthetic oligonucleotide

SEQ ID NO: 544299 - DNA, 56 bp, Artificial; identical to SEQ ID NO: 320213
  Synthetic oligonucleotide

SEQ ID NO: 544300 - DNA, 55 bp, Artificial; identical to SEQ ID NO: 320215
  Synthetic oligonucleotide

SEQ ID NO: 544301 - DNA, 53 bp, Artificial; identical to SEQ ID NO: 320220
  Synthetic oligonucleotide

SEQ ID NO: 544302 - DNA, 56 bp, Artificial; identical to SEQ ID NO: 320223
  Synthetic oligonucleotide

SEQ ID NO: 544303 - DNA, 57 bp, Artificial; identical to SEQ ID NO: 320225
  Synthetic oligonucleotide

SEQ ID NO: 544304 - DNA, 55 bp, Artificial; identical to SEQ ID NO: 320231
  Synthetic oligonucleotide

SEQ ID NO: 544305 - DNA, 60 bp, Artificial; identical to SEQ ID NO: 320235
  Synthetic oligonucleotide

SEQ ID NO: 544306 - DNA, 58 bp, Artificial; identical to SEQ ID NO: 320236
  Synthetic oligonucleotide

SEQ ID NO: 544307 - DNA, 55 bp, Artificial; identical to SEQ ID NO: 320238
  Synthetic oligonucleotide

SEQ ID NO: 544308 - DNA, 60 bp, Artificial; identical to SEQ ID NO: 320239
  Synthetic oligonucleotide

SEQ ID NO: 544309 - DNA, 56 bp, Artificial; identical to SEQ ID NO: 320242
  Synthetic oligonucleotide

SEQ ID NO: 544310 - DNA, 60 bp, Artificial; identical to SEQ ID NO: 320243
  Synthetic oligonucleotide

SEQ ID NO: 544311 - DNA, 53 bp, Artificial; identical to SEQ ID NO: 320247
  Synthetic oligonucleotide

SEQ ID NO: 544312 - DNA, 56 bp, Artificial; identical to SEQ ID NO: 320252
  Synthetic oligonucleotide

SEQ ID NO: 544313 - DNA, 55 bp, Artificial; identical to SEQ ID NO: 320254
  Synthetic oligonucleotide

SEQ ID NO: 544314 - DNA, 55 bp, Artificial; identical to SEQ ID NO: 320259
  Synthetic oligonucleotide

SEQ ID NO: 544315 - DNA, 59 bp, Artificial; identical to SEQ ID NO: 320262
  Synthetic oligonucleotide

SEQ ID NO: 544316 - DNA, 60 bp, Artificial; identical to SEQ ID NO: 320267
  Synthetic oligonucleotide

SEQ ID NO: 544317 - DNA, 52 bp, Artificial; identical to SEQ ID NO: 320270
  Synthetic oligonucleotide

SEQ ID NO: 544318 - DNA, 53 bp, Artificial; identical to SEQ ID NO: 320272
  Synthetic oligonucleotide

SEQ ID NO: 544319 - DNA, 55 bp, Artificial; identical to SEQ ID NO: 320273
  Synthetic oligonucleotide

SEQ ID NO: 544320 - DNA, 56 bp, Artificial; identical to SEQ ID NO: 320274
  Synthetic oligonucleotide

SEQ ID NO: 544321 - DNA, 56 bp, Artificial; identical to SEQ ID NO: 320275
  Synthetic oligonucleotide

SEQ ID NO: 544322 - DNA, 58 bp, Artificial; identical to SEQ ID NO: 320277
  Synthetic oligonucleotide

SEQ ID NO: 544323 - DNA, 54 bp, Artificial; identical to SEQ ID NO: 320278
  Synthetic oligonucleotide

SEQ ID NO: 544324 - DNA, 55 bp, Artificial; identical to SEQ ID NO: 320279
  Synthetic oligonucleotide

SEQ ID NO: 544325 - DNA, 55 bp, Artificial; identical to SEQ ID NO: 320285
  Synthetic oligonucleotide

SEQ ID NO: 544326 - DNA, 60 bp, Artificial; identical to SEQ ID NO: 320292
  Synthetic oligonucleotide

SEQ ID NO: 544327 - DNA, 58 bp, Artificial; identical to SEQ ID NO: 320294
  Synthetic oligonucleotide

SEQ ID NO: 544328 - DNA, 60 bp, Artificial; identical to SEQ ID NO: 320297
  Synthetic oligonucleotide

SEQ ID NO: 544329 - DNA, 60 bp, Artificial; identical to SEQ ID NO: 320298
  Synthetic oligonucleotide

SEQ ID NO: 544330 - DNA, 60 bp, Artificial; identical to SEQ ID NO: 320302
  Synthetic oligonucleotide

SEQ ID NO: 544331 - DNA, 60 bp, Artificial; identical to SEQ ID NO: 14473
  Synthetic oligonucleotide

SEQ ID NO: 544332 - DNA, 56 bp, Artificial; identical to SEQ ID NO: 320307
  Synthetic oligonucleotide

SEQ ID NO: 544333 - DNA, 54 bp, Artificial; identical to SEQ ID NO: 320308
  Synthetic oligonucleotide

SEQ ID NO: 544334 - DNA, 58 bp, Artificial; identical to SEQ ID NO: 320309
  Synthetic oligonucleotide

SEQ ID NO: 544335 - DNA, 58 bp, Artificial; identical to SEQ ID NO: 320310
  Synthetic oligonucleotide

SEQ ID NO: 544336 - DNA, 60 bp, Artificial; identical to SEQ ID NO: 320312
  Synthetic oligonucleotide

SEQ ID NO: 544337 - DNA, 59 bp, Artificial; identical to SEQ ID NO: 320314
  Synthetic oligonucleotide

SEQ ID NO: 544338 - DNA, 59 bp, Artificial; identical to SEQ ID NO: 320315
  Synthetic oligonucleotide

SEQ ID NO: 544339 - DNA, 55 bp, Artificial; identical to SEQ ID NO: 320316
  Synthetic oligonucleotide

SEQ ID NO: 544340 - DNA, 59 bp, Artificial; identical to SEQ ID NO: 320319
  Synthetic oligonucleotide

SEQ ID NO: 544341 - DNA, 50 bp, Artificial; identical to SEQ ID NO: 320320
  Synthetic oligonucleotide

SEQ ID NO: 544342 - DNA, 60 bp, Artificial; identical to SEQ ID NO: 320322
  Synthetic oligonucleotide

SEQ ID NO: 544343 - DNA, 60 bp, Artificial; identical to SEQ ID NO: 320324
  Synthetic oligonucleotide

SEQ ID NO: 544344 - DNA, 51 bp, Artificial; identical to SEQ ID NO: 320325
  Synthetic oligonucleotide

SEQ ID NO: 544345 - DNA, 60 bp, Artificial; identical to SEQ ID NO: 320330
  Synthetic oligonucleotide

SEQ ID NO: 544346 - DNA, 59 bp, Artificial; identical to SEQ ID NO: 320338
  Synthetic oligonucleotide

SEQ ID NO: 544347 - DNA, 55 bp, Artificial; identical to SEQ ID NO: 320340
  Synthetic oligonucleotide

SEQ ID NO: 544348 - DNA, 53 bp, Artificial; identical to SEQ ID NO: 320342
  Synthetic oligonucleotide

SEQ ID NO: 544349 - DNA, 60 bp, Artificial; identical to SEQ ID NO: 320348
  Synthetic oligonucleotide

SEQ ID NO: 544350 - DNA, 57 bp, Artificial; identical to SEQ ID NO: 320358
  Synthetic oligonucleotide

SEQ ID NO: 544351 - DNA, 55 bp, Artificial; identical to SEQ ID NO: 320359
  Synthetic oligonucleotide

SEQ ID NO: 544352 - DNA, 54 bp, Artificial; identical to SEQ ID NO: 320362
  Synthetic oligonucleotide

SEQ ID NO: 544353 - DNA, 55 bp, Artificial; identical to SEQ ID NO: 18606
  Synthetic oligonucleotide

SEQ ID NO: 544354 - DNA, 60 bp, Artificial; identical to SEQ ID NO: 320366
  Synthetic oligonucleotide

SEQ ID NO: 544355 - DNA, 59 bp, Artificial; identical to SEQ ID NO: 320373
  Synthetic oligonucleotide

SEQ ID NO: 544356 - DNA, 55 bp, Artificial; identical to SEQ ID NO: 320375
  Synthetic oligonucleotide

SEQ ID NO: 544357 - DNA, 60 bp, Artificial; identical to SEQ ID NO: 320377
  Synthetic oligonucleotide

SEQ ID NO: 544358 - DNA, 60 bp, Artificial; identical to SEQ ID NO: 320382
  Synthetic oligonucleotide

SEQ ID NO: 544359 - DNA, 55 bp, Artificial; identical to SEQ ID NO: 17566
  Synthetic oligonucleotide

SEQ ID NO: 544360 - DNA, 55 bp, Artificial; identical to SEQ ID NO: 320384
  Synthetic oligonucleotide

SEQ ID NO: 544361 - DNA, 51 bp, Artificial; identical to SEQ ID NO: 320387
  Synthetic oligonucleotide

SEQ ID NO: 544362 - DNA, 55 bp, Artificial; identical to SEQ ID NO: 320391
  Synthetic oligonucleotide

SEQ ID NO: 544363 - DNA, 60 bp, Artificial; identical to SEQ ID NO: 320396
  Synthetic oligonucleotide

SEQ ID NO: 544364 - DNA, 57 bp, Artificial; identical to SEQ ID NO: 18373
  Synthetic oligonucleotide

SEQ ID NO: 544365 - DNA, 57 bp, Artificial; identical to SEQ ID NO: 320402
  Synthetic oligonucleotide

SEQ ID NO: 544366 - DNA, 56 bp, Artificial; identical to SEQ ID NO: 320403
  Synthetic oligonucleotide

SEQ ID NO: 544367 - DNA, 53 bp, Artificial; identical to SEQ ID NO: 320404
  Synthetic oligonucleotide

SEQ ID NO: 544368 - DNA, 57 bp, Artificial; identical to SEQ ID NO: 320408
  Synthetic oligonucleotide

SEQ ID NO: 544369 - DNA, 55 bp, Artificial; identical to SEQ ID NO: 320409
  Synthetic oligonucleotide

SEQ ID NO: 544370 - DNA, 54 bp, Artificial; identical to SEQ ID NO: 320415
  Synthetic oligonucleotide

SEQ ID NO: 544371 - DNA, 56 bp, Artificial; identical to SEQ ID NO: 320418
  Synthetic oligonucleotide

SEQ ID NO: 544372 - DNA, 58 bp, Artificial; identical to SEQ ID NO: 320420
  Synthetic oligonucleotide

SEQ ID NO: 544373 - DNA, 60 bp, Artificial; identical to SEQ ID NO: 320422
  Synthetic oligonucleotide

SEQ ID NO: 544374 - DNA, 55 bp, Artificial; identical to SEQ ID NO: 320423
  Synthetic oligonucleotide

SEQ ID NO: 544375 - DNA, 56 bp, Artificial; identical to SEQ ID NO: 320424
  Synthetic oligonucleotide

SEQ ID NO: 544376 - DNA, 60 bp, Artificial; identical to SEQ ID NO: 320425
  Synthetic oligonucleotide

SEQ ID NO: 544377 - DNA, 58 bp, Artificial; identical to SEQ ID NO: 18981
  Synthetic oligonucleotide

SEQ ID NO: 544378 - DNA, 54 bp, Artificial; identical to SEQ ID NO: 320429
  Synthetic oligonucleotide

SEQ ID NO: 544379 - DNA, 60 bp, Artificial; identical to SEQ ID NO: 320430
  Synthetic oligonucleotide

SEQ ID NO: 544380 - DNA, 56 bp, Artificial; identical to SEQ ID NO: 320432
  Synthetic oligonucleotide

SEQ ID NO: 544381 - DNA, 60 bp, Artificial; identical to SEQ ID NO: 320435
  Synthetic oligonucleotide

SEQ ID NO: 544382 - DNA, 56 bp, Artificial; identical to SEQ ID NO: 320436
  Synthetic oligonucleotide

SEQ ID NO: 544383 - DNA, 58 bp, Artificial; identical to SEQ ID NO: 320437
  Synthetic oligonucleotide

SEQ ID NO: 544384 - DNA, 51 bp, Artificial; identical to SEQ ID NO: 320438
  Synthetic oligonucleotide

SEQ ID NO: 544385 - DNA, 53 bp, Artificial; identical to SEQ ID NO: 320441
  Synthetic oligonucleotide

SEQ ID NO: 544386 - DNA, 60 bp, Artificial; identical to SEQ ID NO: 320442
  Synthetic oligonucleotide

SEQ ID NO: 544387 - DNA, 52 bp, Artificial; identical to SEQ ID NO: 320443
  Synthetic oligonucleotide

SEQ ID NO: 544388 - DNA, 53 bp, Artificial; identical to SEQ ID NO: 320445
  Synthetic oligonucleotide

SEQ ID NO: 544389 - DNA, 60 bp, Artificial; identical to SEQ ID NO: 320446
  Synthetic oligonucleotide

SEQ ID NO: 544390 - DNA, 55 bp, Artificial; identical to SEQ ID NO: 320449
  Synthetic oligonucleotide

SEQ ID NO: 544391 - DNA, 53 bp, Artificial; identical to SEQ ID NO: 320458
  Synthetic oligonucleotide

SEQ ID NO: 544392 - DNA, 55 bp, Artificial; identical to SEQ ID NO: 320460
  Synthetic oligonucleotide

SEQ ID NO: 544393 - DNA, 55 bp, Artificial; identical to SEQ ID NO: 320462
  Synthetic oligonucleotide

SEQ ID NO: 544394 - DNA, 52 bp, Artificial; identical to SEQ ID NO: 320464
  Synthetic oligonucleotide

SEQ ID NO: 544395 - DNA, 55 bp, Artificial; identical to SEQ ID NO: 320473
  Synthetic oligonucleotide

SEQ ID NO: 544396 - DNA, 51 bp, Artificial; identical to SEQ ID NO: 320474
  Synthetic oligonucleotide

SEQ ID NO: 544397 - DNA, 59 bp, Artificial; identical to SEQ ID NO: 320479
  Synthetic oligonucleotide

SEQ ID NO: 544398 - DNA, 57 bp, Artificial; identical to SEQ ID NO: 320481
  Synthetic oligonucleotide

SEQ ID NO: 544399 - DNA, 57 bp, Artificial; identical to SEQ ID NO: 320484
  Synthetic oligonucleotide

SEQ ID NO: 544400 - DNA, 57 bp, Artificial; identical to SEQ ID NO: 320486
  Synthetic oligonucleotide

SEQ ID NO: 544401 - DNA, 60 bp, Artificial; identical to SEQ ID NO: 320489
  Synthetic oligonucleotide

SEQ ID NO: 544402 - DNA, 60 bp, Artificial; identical to SEQ ID NO: 320493
  Synthetic oligonucleotide

SEQ ID NO: 544403 - DNA, 58 bp, Artificial; identical to SEQ ID NO: 320505
  Synthetic oligonucleotide

SEQ ID NO: 544404 - DNA, 58 bp, Artificial; identical to SEQ ID NO: 320506
  Synthetic oligonucleotide

SEQ ID NO: 544405 - DNA, 56 bp, Artificial; identical to SEQ ID NO: 320507
  Synthetic oligonucleotide

SEQ ID NO: 544406 - DNA, 60 bp, Artificial; identical to SEQ ID NO: 320508
  Synthetic oligonucleotide

SEQ ID NO: 544407 - DNA, 60 bp, Artificial; identical to SEQ ID NO: 320510
  Synthetic oligonucleotide

SEQ ID NO: 544408 - DNA, 51 bp, Artificial; identical to SEQ ID NO: 320513
  Synthetic oligonucleotide

SEQ ID NO: 544409 - DNA, 53 bp, Artificial; identical to SEQ ID NO: 320514
  Synthetic oligonucleotide

SEQ ID NO: 544410 - DNA, 57 bp, Artificial; identical to SEQ ID NO: 320517
  Synthetic oligonucleotide

SEQ ID NO: 544411 - DNA, 60 bp, Artificial; identical to SEQ ID NO: 320520
  Synthetic oligonucleotide

SEQ ID NO: 544412 - DNA, 59 bp, Artificial; identical to SEQ ID NO: 320521
  Synthetic oligonucleotide

SEQ ID NO: 544413 - DNA, 55 bp, Artificial; identical to SEQ ID NO: 320522
  Synthetic oligonucleotide

SEQ ID NO: 544414 - DNA, 56 bp, Artificial; identical to SEQ ID NO: 320523
  Synthetic oligonucleotide

SEQ ID NO: 544415 - DNA, 60 bp, Artificial; identical to SEQ ID NO: 320524
  Synthetic oligonucleotide

SEQ ID NO: 544416 - DNA, 56 bp, Artificial; identical to SEQ ID NO: 320530
  Synthetic oligonucleotide

SEQ ID NO: 544417 - DNA, 58 bp, Artificial; identical to SEQ ID NO: 320534
  Synthetic oligonucleotide

SEQ ID NO: 544418 - DNA, 59 bp, Artificial; identical to SEQ ID NO: 320535
  Synthetic oligonucleotide

SEQ ID NO: 544419 - DNA, 60 bp, Artificial; identical to SEQ ID NO: 320537
  Synthetic oligonucleotide

SEQ ID NO: 544420 - DNA, 53 bp, Artificial; identical to SEQ ID NO: 320538
  Synthetic oligonucleotide

SEQ ID NO: 544421 - DNA, 60 bp, Artificial; identical to SEQ ID NO: 320545
  Synthetic oligonucleotide

SEQ ID NO: 544422 - DNA, 55 bp, Artificial; identical to SEQ ID NO: 320550
  Synthetic oligonucleotide

SEQ ID NO: 544423 - DNA, 60 bp, Artificial; identical to SEQ ID NO: 320558
  Synthetic oligonucleotide

SEQ ID NO: 544424 - DNA, 56 bp, Artificial; identical to SEQ ID NO: 320562
  Synthetic oligonucleotide

SEQ ID NO: 544425 - DNA, 57 bp, Artificial; identical to SEQ ID NO: 320563
  Synthetic oligonucleotide

SEQ ID NO: 544426 - DNA, 58 bp, Artificial; identical to SEQ ID NO: 320564
  Synthetic oligonucleotide

SEQ ID NO: 544427 - DNA, 58 bp, Artificial; identical to SEQ ID NO: 320568
  Synthetic oligonucleotide

SEQ ID NO: 544428 - DNA, 58 bp, Artificial; identical to SEQ ID NO: 320573
  Synthetic oligonucleotide

SEQ ID NO: 544429 - DNA, 53 bp, Artificial; identical to SEQ ID NO: 320576
  Synthetic oligonucleotide

SEQ ID NO: 544430 - DNA, 59 bp, Artificial; identical to SEQ ID NO: 320577
  Synthetic oligonucleotide

SEQ ID NO: 544431 - DNA, 53 bp, Artificial; identical to SEQ ID NO: 320581
  Synthetic oligonucleotide

SEQ ID NO: 544432 - DNA, 58 bp, Artificial; identical to SEQ ID NO: 320582
  Synthetic oligonucleotide

SEQ ID NO: 544433 - DNA, 59 bp, Artificial; identical to SEQ ID NO: 320585
  Synthetic oligonucleotide

SEQ ID NO: 544434 - DNA, 60 bp, Artificial; identical to SEQ ID NO: 320587
  Synthetic oligonucleotide

SEQ ID NO: 544435 - DNA, 60 bp, Artificial; identical to SEQ ID NO: 320589
  Synthetic oligonucleotide

SEQ ID NO: 544436 - DNA, 60 bp, Artificial; identical to SEQ ID NO: 320590
  Synthetic oligonucleotide

SEQ ID NO: 544437 - DNA, 60 bp, Artificial; identical to SEQ ID NO: 320592
  Synthetic oligonucleotide

SEQ ID NO: 544438 - DNA, 56 bp, Artificial; identical to SEQ ID NO: 320595
  Synthetic oligonucleotide

SEQ ID NO: 544439 - DNA, 55 bp, Artificial; identical to SEQ ID NO: 320596
  Synthetic oligonucleotide

SEQ ID NO: 544440 - DNA, 55 bp, Artificial; identical to SEQ ID NO: 320597
  Synthetic oligonucleotide

SEQ ID NO: 544441 - DNA, 60 bp, Artificial; identical to SEQ ID NO: 320601
  Synthetic oligonucleotide

SEQ ID NO: 544442 - DNA, 60 bp, Artificial; identical to SEQ ID NO: 320603
  Synthetic oligonucleotide

SEQ ID NO: 544443 - DNA, 59 bp, Artificial; identical to SEQ ID NO: 320604
  Synthetic oligonucleotide

SEQ ID NO: 544444 - DNA, 60 bp, Artificial; identical to SEQ ID NO: 320605
  Synthetic oligonucleotide

SEQ ID NO: 544445 - DNA, 57 bp, Artificial; identical to SEQ ID NO: 320610
  Synthetic oligonucleotide

SEQ ID NO: 544446 - DNA, 60 bp, Artificial; identical to SEQ ID NO: 320619
  Synthetic oligonucleotide

SEQ ID NO: 544447 - DNA, 55 bp, Artificial; identical to SEQ ID NO: 320621
  Synthetic oligonucleotide

SEQ ID NO: 544448 - DNA, 54 bp, Artificial; identical to SEQ ID NO: 320626
  Synthetic oligonucleotide

SEQ ID NO: 544449 - DNA, 59 bp, Artificial; identical to SEQ ID NO: 320629
  Synthetic oligonucleotide

SEQ ID NO: 544450 - DNA, 57 bp, Artificial; identical to SEQ ID NO: 320632
  Synthetic oligonucleotide

SEQ ID NO: 544451 - DNA, 58 bp, Artificial; identical to SEQ ID NO: 320635
  Synthetic oligonucleotide

SEQ ID NO: 544452 - DNA, 55 bp, Artificial; identical to SEQ ID NO: 320637
  Synthetic oligonucleotide

SEQ ID NO: 544453 - DNA, 56 bp, Artificial; identical to SEQ ID NO: 17054
  Synthetic oligonucleotide

SEQ ID NO: 544454 - DNA, 51 bp, Artificial; identical to SEQ ID NO: 320638
  Synthetic oligonucleotide

SEQ ID NO: 544455 - DNA, 60 bp, Artificial; identical to SEQ ID NO: 320639
  Synthetic oligonucleotide

SEQ ID NO: 544456 - DNA, 55 bp, Artificial; identical to SEQ ID NO: 320641
  Synthetic oligonucleotide

SEQ ID NO: 544457 - DNA, 60 bp, Artificial; identical to SEQ ID NO: 320645
  Synthetic oligonucleotide

SEQ ID NO: 544458 - DNA, 57 bp, Artificial; identical to SEQ ID NO: 320646
  Synthetic oligonucleotide

SEQ ID NO: 544459 - DNA, 56 bp, Artificial; identical to SEQ ID NO: 320647
  Synthetic oligonucleotide

SEQ ID NO: 544460 - DNA, 60 bp, Artificial; identical to SEQ ID NO: 320649
  Synthetic oligonucleotide

SEQ ID NO: 544461 - DNA, 58 bp, Artificial; identical to SEQ ID NO: 320651
  Synthetic oligonucleotide

SEQ ID NO: 544462 - DNA, 60 bp, Artificial; identical to SEQ ID NO: 320652
  Synthetic oligonucleotide

SEQ ID NO: 544463 - DNA, 59 bp, Artificial; identical to SEQ ID NO: 320655
  Synthetic oligonucleotide

SEQ ID NO: 544464 - DNA, 55 bp, Artificial; identical to SEQ ID NO: 320658
  Synthetic oligonucleotide

SEQ ID NO: 544465 - DNA, 55 bp, Artificial; identical to SEQ ID NO: 320661
  Synthetic oligonucleotide

SEQ ID NO: 544466 - DNA, 60 bp, Artificial; identical to SEQ ID NO: 320662
  Synthetic oligonucleotide

SEQ ID NO: 544467 - DNA, 60 bp, Artificial; identical to SEQ ID NO: 320663
  Synthetic oligonucleotide

SEQ ID NO: 544468 - DNA, 60 bp, Artificial; identical to SEQ ID NO: 320670
  Synthetic oligonucleotide

SEQ ID NO: 544469 - DNA, 60 bp, Artificial; identical to SEQ ID NO: 320671
  Synthetic oligonucleotide

SEQ ID NO: 544470 - DNA, 60 bp, Artificial; identical to SEQ ID NO: 320672
  Synthetic oligonucleotide

SEQ ID NO: 544471 - DNA, 56 bp, Artificial; identical to SEQ ID NO: 320673
  Synthetic oligonucleotide

SEQ ID NO: 544472 - DNA, 55 bp, Artificial; identical to SEQ ID NO: 320674
  Synthetic oligonucleotide

SEQ ID NO: 544473 - DNA, 58 bp, Artificial; identical to SEQ ID NO: 320676
  Synthetic oligonucleotide

SEQ ID NO: 544474 - DNA, 60 bp, Artificial; identical to SEQ ID NO: 320680
  Synthetic oligonucleotide

SEQ ID NO: 544475 - DNA, 58 bp, Artificial; identical to SEQ ID NO: 9730
  Synthetic oligonucleotide

SEQ ID NO: 544476 - DNA, 57 bp, Artificial; identical to SEQ ID NO: 320682
  Synthetic oligonucleotide

SEQ ID NO: 544477 - DNA, 60 bp, Artificial; identical to SEQ ID NO: 320683
  Synthetic oligonucleotide

SEQ ID NO: 544478 - DNA, 60 bp, Artificial; identical to SEQ ID NO: 320684
  Synthetic oligonucleotide

SEQ ID NO: 544479 - DNA, 55 bp, Artificial; identical to SEQ ID NO: 320685
  Synthetic oligonucleotide

SEQ ID NO: 544480 - DNA, 59 bp, Artificial; identical to SEQ ID NO: 320687
  Synthetic oligonucleotide

SEQ ID NO: 544481 - DNA, 57 bp, Artificial; identical to SEQ ID NO: 320688
  Synthetic oligonucleotide

SEQ ID NO: 544482 - DNA, 59 bp, Artificial; identical to SEQ ID NO: 320692
  Synthetic oligonucleotide

SEQ ID NO: 544483 - DNA, 55 bp, Artificial; identical to SEQ ID NO: 320694
  Synthetic oligonucleotide

SEQ ID NO: 544484 - DNA, 60 bp, Artificial; identical to SEQ ID NO: 320695
  Synthetic oligonucleotide

SEQ ID NO: 544485 - DNA, 55 bp, Artificial; identical to SEQ ID NO: 320697
  Synthetic oligonucleotide

SEQ ID NO: 544486 - DNA, 55 bp, Artificial; identical to SEQ ID NO: 320699
  Synthetic oligonucleotide

SEQ ID NO: 544487 - DNA, 55 bp, Artificial; identical to SEQ ID NO: 320704
  Synthetic oligonucleotide

SEQ ID NO: 544488 - DNA, 60 bp, Artificial; identical to SEQ ID NO: 320707
  Synthetic oligonucleotide

SEQ ID NO: 544489 - DNA, 60 bp, Artificial; identical to SEQ ID NO: 320713
  Synthetic oligonucleotide

SEQ ID NO: 544490 - DNA, 52 bp, Artificial; identical to SEQ ID NO: 320714
  Synthetic oligonucleotide

SEQ ID NO: 544491 - DNA, 52 bp, Artificial; identical to SEQ ID NO: 320715
  Synthetic oligonucleotide

SEQ ID NO: 544492 - DNA, 60 bp, Artificial; identical to SEQ ID NO: 320716
  Synthetic oligonucleotide

SEQ ID NO: 544493 - DNA, 54 bp, Artificial; identical to SEQ ID NO: 320724
  Synthetic oligonucleotide

SEQ ID NO: 544494 - DNA, 60 bp, Artificial; identical to SEQ ID NO: 320726
  Synthetic oligonucleotide

SEQ ID NO: 544495 - DNA, 60 bp, Artificial; identical to SEQ ID NO: 320728
  Synthetic oligonucleotide

SEQ ID NO: 544496 - DNA, 59 bp, Artificial; identical to SEQ ID NO: 19040
  Synthetic oligonucleotide

SEQ ID NO: 544497 - DNA, 59 bp, Artificial; identical to SEQ ID NO: 320733
  Synthetic oligonucleotide

SEQ ID NO: 544498 - DNA, 60 bp, Artificial; identical to SEQ ID NO: 320734
  Synthetic oligonucleotide

SEQ ID NO: 544499 - DNA, 57 bp, Artificial; identical to SEQ ID NO: 320735
  Synthetic oligonucleotide

SEQ ID NO: 544500 - DNA, 50 bp, Artificial; identical to SEQ ID NO: 320742
  Synthetic oligonucleotide

SEQ ID NO: 544501 - DNA, 55 bp, Artificial; identical to SEQ ID NO: 320745
  Synthetic oligonucleotide

SEQ ID NO: 544502 - DNA, 53 bp, Artificial; identical to SEQ ID NO: 320750
  Synthetic oligonucleotide

SEQ ID NO: 544503 - DNA, 60 bp, Artificial; identical to SEQ ID NO: 320751
  Synthetic oligonucleotide

SEQ ID NO: 544504 - DNA, 55 bp, Artificial; identical to SEQ ID NO: 320756
  Synthetic oligonucleotide

SEQ ID NO: 544505 - DNA, 60 bp, Artificial; identical to SEQ ID NO: 320758
  Synthetic oligonucleotide

SEQ ID NO: 544506 - DNA, 53 bp, Artificial; identical to SEQ ID NO: 320760
  Synthetic oligonucleotide

SEQ ID NO: 544507 - DNA, 60 bp, Artificial; identical to SEQ ID NO: 320765
  Synthetic oligonucleotide

SEQ ID NO: 544508 - DNA, 60 bp, Artificial; identical to SEQ ID NO: 320770
  Synthetic oligonucleotide

SEQ ID NO: 544509 - DNA, 59 bp, Artificial; identical to SEQ ID NO: 20475
  Synthetic oligonucleotide

SEQ ID NO: 544510 - DNA, 60 bp, Artificial; identical to SEQ ID NO: 6973
  Synthetic oligonucleotide

SEQ ID NO: 544511 - DNA, 57 bp, Artificial; identical to SEQ ID NO: 320775
  Synthetic oligonucleotide

SEQ ID NO: 544512 - DNA, 60 bp, Artificial; identical to SEQ ID NO: 320782
  Synthetic oligonucleotide

SEQ ID NO: 544513 - DNA, 52 bp, Artificial; identical to SEQ ID NO: 320788
  Synthetic oligonucleotide

SEQ ID NO: 544514 - DNA, 53 bp, Artificial; identical to SEQ ID NO: 320789
  Synthetic oligonucleotide

SEQ ID NO: 544515 - DNA, 60 bp, Artificial; identical to SEQ ID NO: 320790
  Synthetic oligonucleotide

SEQ ID NO: 544516 - DNA, 57 bp, Artificial; identical to SEQ ID NO: 320791
  Synthetic oligonucleotide

SEQ ID NO: 544517 - DNA, 55 bp, Artificial; identical to SEQ ID NO: 320793
  Synthetic oligonucleotide

SEQ ID NO: 544518 - DNA, 60 bp, Artificial; identical to SEQ ID NO: 320794
  Synthetic oligonucleotide

SEQ ID NO: 544519 - DNA, 60 bp, Artificial; identical to SEQ ID NO: 320796
  Synthetic oligonucleotide

SEQ ID NO: 544520 - DNA, 55 bp, Artificial; identical to SEQ ID NO: 320799
  Synthetic oligonucleotide

SEQ ID NO: 544521 - DNA, 60 bp, Artificial; identical to SEQ ID NO: 320803
  Synthetic oligonucleotide

SEQ ID NO: 544522 - DNA, 60 bp, Artificial; identical to SEQ ID NO: 320804
  Synthetic oligonucleotide

SEQ ID NO: 544523 - DNA, 60 bp, Artificial; identical to SEQ ID NO: 9647
  Synthetic oligonucleotide

SEQ ID NO: 544524 - DNA, 60 bp, Artificial; identical to SEQ ID NO: 320810
  Synthetic oligonucleotide

SEQ ID NO: 544525 - DNA, 51 bp, Artificial; identical to SEQ ID NO: 320811
  Synthetic oligonucleotide

SEQ ID NO: 544526 - DNA, 55 bp, Artificial; identical to SEQ ID NO: 320814
  Synthetic oligonucleotide

SEQ ID NO: 544527 - DNA, 58 bp, Artificial; identical to SEQ ID NO: 320816
  Synthetic oligonucleotide

SEQ ID NO: 544528 - DNA, 60 bp, Artificial; identical to SEQ ID NO: 320818
  Synthetic oligonucleotide

SEQ ID NO: 544529 - DNA, 55 bp, Artificial; identical to SEQ ID NO: 320819
  Synthetic oligonucleotide

SEQ ID NO: 544530 - DNA, 56 bp, Artificial; identical to SEQ ID NO: 320821
  Synthetic oligonucleotide

SEQ ID NO: 544531 - DNA, 60 bp, Artificial; identical to SEQ ID NO: 320822
  Synthetic oligonucleotide

SEQ ID NO: 544532 - DNA, 60 bp, Artificial; identical to SEQ ID NO: 320823
  Synthetic oligonucleotide

SEQ ID NO: 544533 - DNA, 60 bp, Artificial; identical to SEQ ID NO: 320824
  Synthetic oligonucleotide

SEQ ID NO: 544534 - DNA, 54 bp, Artificial; identical to SEQ ID NO: 320826
  Synthetic oligonucleotide

SEQ ID NO: 544535 - DNA, 57 bp, Artificial; identical to SEQ ID NO: 320827
  Synthetic oligonucleotide

SEQ ID NO: 544536 - DNA, 51 bp, Artificial; identical to SEQ ID NO: 320829
  Synthetic oligonucleotide

SEQ ID NO: 544537 - DNA, 55 bp, Artificial; identical to SEQ ID NO: 320830
  Synthetic oligonucleotide

SEQ ID NO: 544538 - DNA, 60 bp, Artificial; identical to SEQ ID NO: 320833
  Synthetic oligonucleotide

SEQ ID NO: 544539 - DNA, 60 bp, Artificial; identical to SEQ ID NO: 320835
  Synthetic oligonucleotide

SEQ ID NO: 544540 - DNA, 60 bp, Artificial; identical to SEQ ID NO: 320836
  Synthetic oligonucleotide

SEQ ID NO: 544541 - DNA, 54 bp, Artificial; identical to SEQ ID NO: 320838
  Synthetic oligonucleotide

SEQ ID NO: 544542 - DNA, 60 bp, Artificial; identical to SEQ ID NO: 320839
  Synthetic oligonucleotide

SEQ ID NO: 544543 - DNA, 60 bp, Artificial; identical to SEQ ID NO: 320842
  Synthetic oligonucleotide

SEQ ID NO: 544544 - DNA, 60 bp, Artificial; identical to SEQ ID NO: 320849
  Synthetic oligonucleotide

SEQ ID NO: 544545 - DNA, 59 bp, Artificial; identical to SEQ ID NO: 320852
  Synthetic oligonucleotide

SEQ ID NO: 544546 - DNA, 60 bp, Artificial; identical to SEQ ID NO: 320854
  Synthetic oligonucleotide

SEQ ID NO: 544547 - DNA, 55 bp, Artificial; identical to SEQ ID NO: 320855
  Synthetic oligonucleotide

SEQ ID NO: 544548 - DNA, 50 bp, Artificial; identical to SEQ ID NO: 320858
  Synthetic oligonucleotide

SEQ ID NO: 544549 - DNA, 60 bp, Artificial; identical to SEQ ID NO: 320860
  Synthetic oligonucleotide

SEQ ID NO: 544550 - DNA, 60 bp, Artificial; identical to SEQ ID NO: 320861
  Synthetic oligonucleotide

SEQ ID NO: 544551 - DNA, 55 bp, Artificial; identical to SEQ ID NO: 320862
  Synthetic oligonucleotide

SEQ ID NO: 544552 - DNA, 60 bp, Artificial; identical to SEQ ID NO: 320864
  Synthetic oligonucleotide

SEQ ID NO: 544553 - DNA, 53 bp, Artificial; identical to SEQ ID NO: 320869
  Synthetic oligonucleotide

SEQ ID NO: 544554 - DNA, 60 bp, Artificial; identical to SEQ ID NO: 320872
  Synthetic oligonucleotide

SEQ ID NO: 544555 - DNA, 60 bp, Artificial; identical to SEQ ID NO: 320878
  Synthetic oligonucleotide

SEQ ID NO: 544556 - DNA, 60 bp, Artificial; identical to SEQ ID NO: 320883
  Synthetic oligonucleotide

SEQ ID NO: 544557 - DNA, 60 bp, Artificial; identical to SEQ ID NO: 320884
  Synthetic oligonucleotide

SEQ ID NO: 544558 - DNA, 60 bp, Artificial; identical to SEQ ID NO: 320887
  Synthetic oligonucleotide

SEQ ID NO: 544559 - DNA, 54 bp, Artificial; identical to SEQ ID NO: 320888
  Synthetic oligonucleotide

SEQ ID NO: 544560 - DNA, 54 bp, Artificial; identical to SEQ ID NO: 320889
  Synthetic oligonucleotide

SEQ ID NO: 544561 - DNA, 60 bp, Artificial; identical to SEQ ID NO: 110729
  Synthetic oligonucleotide

SEQ ID NO: 544562 - DNA, 60 bp, Artificial; identical to SEQ ID NO: 320894
  Synthetic oligonucleotide

SEQ ID NO: 544563 - DNA, 60 bp, Artificial; identical to SEQ ID NO: 320896
  Synthetic oligonucleotide

SEQ ID NO: 544564 - DNA, 55 bp, Artificial; identical to SEQ ID NO: 320897
  Synthetic oligonucleotide

SEQ ID NO: 544565 - DNA, 60 bp, Artificial; identical to SEQ ID NO: 320899
  Synthetic oligonucleotide

SEQ ID NO: 544566 - DNA, 52 bp, Artificial; identical to SEQ ID NO: 320900
  Synthetic oligonucleotide

SEQ ID NO: 544567 - DNA, 59 bp, Artificial; identical to SEQ ID NO: 320902
  Synthetic oligonucleotide

SEQ ID NO: 544568 - DNA, 54 bp, Artificial; identical to SEQ ID NO: 320908
  Synthetic oligonucleotide

SEQ ID NO: 544569 - DNA, 55 bp, Artificial; identical to SEQ ID NO: 320911
  Synthetic oligonucleotide

SEQ ID NO: 544570 - DNA, 55 bp, Artificial; identical to SEQ ID NO: 320912
  Synthetic oligonucleotide

SEQ ID NO: 544571 - DNA, 59 bp, Artificial; identical to SEQ ID NO: 320915
  Synthetic oligonucleotide

SEQ ID NO: 544572 - DNA, 51 bp, Artificial; identical to SEQ ID NO: 320921
  Synthetic oligonucleotide

SEQ ID NO: 544573 - DNA, 55 bp, Artificial; identical to SEQ ID NO: 320923
  Synthetic oligonucleotide

SEQ ID NO: 544574 - DNA, 58 bp, Artificial; identical to SEQ ID NO: 320927
  Synthetic oligonucleotide

SEQ ID NO: 544575 - DNA, 58 bp, Artificial; identical to SEQ ID NO: 17051
  Synthetic oligonucleotide

SEQ ID NO: 544576 - DNA, 54 bp, Artificial; identical to SEQ ID NO: 17284
  Synthetic oligonucleotide

SEQ ID NO: 544577 - DNA, 51 bp, Artificial; identical to SEQ ID NO: 320928
  Synthetic oligonucleotide

SEQ ID NO: 544578 - DNA, 60 bp, Artificial; identical to SEQ ID NO: 320930
  Synthetic oligonucleotide

SEQ ID NO: 544579 - DNA, 58 bp, Artificial; identical to SEQ ID NO: 320932
  Synthetic oligonucleotide

SEQ ID NO: 544580 - DNA, 56 bp, Artificial; identical to SEQ ID NO: 320934
  Synthetic oligonucleotide

SEQ ID NO: 544581 - DNA, 57 bp, Artificial; identical to SEQ ID NO: 320935
  Synthetic oligonucleotide

SEQ ID NO: 544582 - DNA, 59 bp, Artificial; identical to SEQ ID NO: 320936
  Synthetic oligonucleotide

SEQ ID NO: 544583 - DNA, 60 bp, Artificial; identical to SEQ ID NO: 10585
  Synthetic oligonucleotide

SEQ ID NO: 544584 - DNA, 58 bp, Artificial; identical to SEQ ID NO: 320939
  Synthetic oligonucleotide

SEQ ID NO: 544585 - DNA, 55 bp, Artificial; identical to SEQ ID NO: 320940
  Synthetic oligonucleotide

SEQ ID NO: 544586 - DNA, 57 bp, Artificial; identical to SEQ ID NO: 320945
  Synthetic oligonucleotide

SEQ ID NO: 544587 - DNA, 52 bp, Artificial; identical to SEQ ID NO: 320947
  Synthetic oligonucleotide

SEQ ID NO: 544588 - DNA, 60 bp, Artificial; identical to SEQ ID NO: 320948
  Synthetic oligonucleotide

SEQ ID NO: 544589 - DNA, 57 bp, Artificial; identical to SEQ ID NO: 320949
  Synthetic oligonucleotide

SEQ ID NO: 544590 - DNA, 59 bp, Artificial; identical to SEQ ID NO: 320950
  Synthetic oligonucleotide

SEQ ID NO: 544591 - DNA, 60 bp, Artificial; identical to SEQ ID NO: 320953
  Synthetic oligonucleotide

SEQ ID NO: 544592 - DNA, 57 bp, Artificial; identical to SEQ ID NO: 320954
  Synthetic oligonucleotide

SEQ ID NO: 544593 - DNA, 57 bp, Artificial; identical to SEQ ID NO: 320957
  Synthetic oligonucleotide

SEQ ID NO: 544594 - DNA, 50 bp, Artificial; identical to SEQ ID NO: 320958
  Synthetic oligonucleotide

SEQ ID NO: 544595 - DNA, 55 bp, Artificial; identical to SEQ ID NO: 320959
  Synthetic oligonucleotide

SEQ ID NO: 544596 - DNA, 56 bp, Artificial; identical to SEQ ID NO: 320964
  Synthetic oligonucleotide

SEQ ID NO: 544597 - DNA, 55 bp, Artificial; identical to SEQ ID NO: 6496
  Synthetic oligonucleotide

SEQ ID NO: 544598 - DNA, 60 bp, Artificial; identical to SEQ ID NO: 320966
  Synthetic oligonucleotide

SEQ ID NO: 544599 - DNA, 52 bp, Artificial; identical to SEQ ID NO: 320967
  Synthetic oligonucleotide

SEQ ID NO: 544600 - DNA, 60 bp, Artificial; identical to SEQ ID NO: 320968
  Synthetic oligonucleotide

SEQ ID NO: 544601 - DNA, 60 bp, Artificial; identical to SEQ ID NO: 320973
  Synthetic oligonucleotide

SEQ ID NO: 544602 - DNA, 60 bp, Artificial; identical to SEQ ID NO: 320974
  Synthetic oligonucleotide

SEQ ID NO: 544603 - DNA, 59 bp, Artificial; identical to SEQ ID NO: 320976
  Synthetic oligonucleotide

SEQ ID NO: 544604 - DNA, 60 bp, Artificial; identical to SEQ ID NO: 320981
  Synthetic oligonucleotide

SEQ ID NO: 544605 - DNA, 55 bp, Artificial; identical to SEQ ID NO: 320990
  Synthetic oligonucleotide

SEQ ID NO: 544606 - DNA, 60 bp, Artificial; identical to SEQ ID NO: 320999
  Synthetic oligonucleotide

SEQ ID NO: 544607 - DNA, 52 bp, Artificial; identical to SEQ ID NO: 321003
  Synthetic oligonucleotide

SEQ ID NO: 544608 - DNA, 54 bp, Artificial; identical to SEQ ID NO: 321005
  Synthetic oligonucleotide

SEQ ID NO: 544609 - DNA, 56 bp, Artificial; identical to SEQ ID NO: 321006
  Synthetic oligonucleotide

SEQ ID NO: 544610 - DNA, 60 bp, Artificial; identical to SEQ ID NO: 321007
  Synthetic oligonucleotide

SEQ ID NO: 544611 - DNA, 55 bp, Artificial; identical to SEQ ID NO: 321008
  Synthetic oligonucleotide

SEQ ID NO: 544612 - DNA, 60 bp, Artificial; identical to SEQ ID NO: 321009
  Synthetic oligonucleotide

SEQ ID NO: 544613 - DNA, 57 bp, Artificial; identical to SEQ ID NO: 321011
  Synthetic oligonucleotide

SEQ ID NO: 544614 - DNA, 60 bp, Artificial; identical to SEQ ID NO: 321014
  Synthetic oligonucleotide

SEQ ID NO: 544615 - DNA, 50 bp, Artificial; identical to SEQ ID NO: 321018
  Synthetic oligonucleotide

SEQ ID NO: 544616 - DNA, 58 bp, Artificial; identical to SEQ ID NO: 321019
  Synthetic oligonucleotide

SEQ ID NO: 544617 - DNA, 59 bp, Artificial; identical to SEQ ID NO: 321024
  Synthetic oligonucleotide

SEQ ID NO: 544618 - DNA, 53 bp, Artificial; identical to SEQ ID NO: 321025
  Synthetic oligonucleotide

SEQ ID NO: 544619 - DNA, 55 bp, Artificial; identical to SEQ ID NO: 321026
  Synthetic oligonucleotide

SEQ ID NO: 544620 - DNA, 56 bp, Artificial; identical to SEQ ID NO: 321029
  Synthetic oligonucleotide

SEQ ID NO: 544621 - DNA, 60 bp, Artificial; identical to SEQ ID NO: 321030
  Synthetic oligonucleotide

SEQ ID NO: 544622 - DNA, 59 bp, Artificial; identical to SEQ ID NO: 321032
  Synthetic oligonucleotide

SEQ ID NO: 544623 - DNA, 60 bp, Artificial; identical to SEQ ID NO: 321036
  Synthetic oligonucleotide

SEQ ID NO: 544624 - DNA, 60 bp, Artificial; identical to SEQ ID NO: 321042
  Synthetic oligonucleotide

SEQ ID NO: 544625 - DNA, 55 bp, Artificial; identical to SEQ ID NO: 321046
  Synthetic oligonucleotide

SEQ ID NO: 544626 - DNA, 53 bp, Artificial; identical to SEQ ID NO: 12425
  Synthetic oligonucleotide

SEQ ID NO: 544627 - DNA, 51 bp, Artificial; identical to SEQ ID NO: 321047
  Synthetic oligonucleotide

SEQ ID NO: 544628 - DNA, 54 bp, Artificial; identical to SEQ ID NO: 321048
  Synthetic oligonucleotide

SEQ ID NO: 544629 - DNA, 52 bp, Artificial; identical to SEQ ID NO: 15167
  Synthetic oligonucleotide

SEQ ID NO: 544630 - DNA, 58 bp, Artificial; identical to SEQ ID NO: 321055
  Synthetic oligonucleotide

SEQ ID NO: 544631 - DNA, 60 bp, Artificial; identical to SEQ ID NO: 321056
  Synthetic oligonucleotide

SEQ ID NO: 544632 - DNA, 52 bp, Artificial; identical to SEQ ID NO: 321059
  Synthetic oligonucleotide

SEQ ID NO: 544633 - DNA, 52 bp, Artificial; identical to SEQ ID NO: 321061
  Synthetic oligonucleotide

SEQ ID NO: 544634 - DNA, 55 bp, Artificial; identical to SEQ ID NO: 321064
  Synthetic oligonucleotide

SEQ ID NO: 544635 - DNA, 55 bp, Artificial; identical to SEQ ID NO: 321067
  Synthetic oligonucleotide

SEQ ID NO: 544636 - DNA, 60 bp, Artificial; identical to SEQ ID NO: 321070
  Synthetic oligonucleotide

SEQ ID NO: 544637 - DNA, 60 bp, Artificial; identical to SEQ ID NO: 321071
  Synthetic oligonucleotide

SEQ ID NO: 544638 - DNA, 60 bp, Artificial; identical to SEQ ID NO: 321072
  Synthetic oligonucleotide

SEQ ID NO: 544639 - DNA, 55 bp, Artificial; identical to SEQ ID NO: 321077
  Synthetic oligonucleotide

SEQ ID NO: 544640 - DNA, 60 bp, Artificial; identical to SEQ ID NO: 321078
  Synthetic oligonucleotide

SEQ ID NO: 544641 - DNA, 60 bp, Artificial; identical to SEQ ID NO: 6918
  Synthetic oligonucleotide

SEQ ID NO: 544642 - DNA, 53 bp, Artificial; identical to SEQ ID NO: 321084
  Synthetic oligonucleotide

SEQ ID NO: 544643 - DNA, 55 bp, Artificial; identical to SEQ ID NO: 321085
  Synthetic oligonucleotide

SEQ ID NO: 544644 - DNA, 55 bp, Artificial; identical to SEQ ID NO: 321089
  Synthetic oligonucleotide

SEQ ID NO: 544645 - DNA, 60 bp, Artificial; identical to SEQ ID NO: 321090
  Synthetic oligonucleotide

SEQ ID NO: 544646 - DNA, 60 bp, Artificial; identical to SEQ ID NO: 321094
  Synthetic oligonucleotide

SEQ ID NO: 544647 - DNA, 57 bp, Artificial; identical to SEQ ID NO: 321097
  Synthetic oligonucleotide

SEQ ID NO: 544648 - DNA, 58 bp, Artificial; identical to SEQ ID NO: 321098
  Synthetic oligonucleotide

SEQ ID NO: 544649 - DNA, 60 bp, Artificial; identical to SEQ ID NO: 321099
  Synthetic oligonucleotide

SEQ ID NO: 544650 - DNA, 55 bp, Artificial; identical to SEQ ID NO: 321100
  Synthetic oligonucleotide

SEQ ID NO: 544651 - DNA, 55 bp, Artificial; identical to SEQ ID NO: 321101
  Synthetic oligonucleotide

SEQ ID NO: 544652 - DNA, 60 bp, Artificial; identical to SEQ ID NO: 321103
  Synthetic oligonucleotide

SEQ ID NO: 544653 - DNA, 60 bp, Artificial; identical to SEQ ID NO: 321108
  Synthetic oligonucleotide

SEQ ID NO: 544654 - DNA, 55 bp, Artificial; identical to SEQ ID NO: 321109
  Synthetic oligonucleotide

SEQ ID NO: 544655 - DNA, 59 bp, Artificial; identical to SEQ ID NO: 321110
  Synthetic oligonucleotide

SEQ ID NO: 544656 - DNA, 55 bp, Artificial; identical to SEQ ID NO: 321113
  Synthetic oligonucleotide

SEQ ID NO: 544657 - DNA, 57 bp, Artificial; identical to SEQ ID NO: 321117
  Synthetic oligonucleotide

SEQ ID NO: 544658 - DNA, 55 bp, Artificial; identical to SEQ ID NO: 321118
  Synthetic oligonucleotide

SEQ ID NO: 544659 - DNA, 60 bp, Artificial; identical to SEQ ID NO: 321122
  Synthetic oligonucleotide

SEQ ID NO: 544660 - DNA, 54 bp, Artificial; identical to SEQ ID NO: 321123
  Synthetic oligonucleotide

SEQ ID NO: 544661 - DNA, 60 bp, Artificial; identical to SEQ ID NO: 321124
  Synthetic oligonucleotide

SEQ ID NO: 544662 - DNA, 59 bp, Artificial; identical to SEQ ID NO: 321125
  Synthetic oligonucleotide

SEQ ID NO: 544663 - DNA, 50 bp, Artificial; identical to SEQ ID NO: 321127
  Synthetic oligonucleotide

SEQ ID NO: 544664 - DNA, 60 bp, Artificial; identical to SEQ ID NO: 321130
  Synthetic oligonucleotide

SEQ ID NO: 544665 - DNA, 60 bp, Artificial; identical to SEQ ID NO: 321131
  Synthetic oligonucleotide

SEQ ID NO: 544666 - DNA, 54 bp, Artificial; identical to SEQ ID NO: 321133
  Synthetic oligonucleotide

SEQ ID NO: 544667 - DNA, 60 bp, Artificial; identical to SEQ ID NO: 321148
  Synthetic oligonucleotide

SEQ ID NO: 544668 - DNA, 59 bp, Artificial; identical to SEQ ID NO: 321151
  Synthetic oligonucleotide

SEQ ID NO: 544669 - DNA, 56 bp, Artificial; identical to SEQ ID NO: 321154
  Synthetic oligonucleotide

SEQ ID NO: 544670 - DNA, 55 bp, Artificial; identical to SEQ ID NO: 321158
  Synthetic oligonucleotide

SEQ ID NO: 544671 - DNA, 59 bp, Artificial; identical to SEQ ID NO: 321159
  Synthetic oligonucleotide

SEQ ID NO: 544672 - DNA, 55 bp, Artificial; identical to SEQ ID NO: 321160
  Synthetic oligonucleotide

SEQ ID NO: 544673 - DNA, 56 bp, Artificial; identical to SEQ ID NO: 321161
  Synthetic oligonucleotide

SEQ ID NO: 544674 - DNA, 53 bp, Artificial; identical to SEQ ID NO: 321162
  Synthetic oligonucleotide

SEQ ID NO: 544675 - DNA, 60 bp, Artificial; identical to SEQ ID NO: 321167
  Synthetic oligonucleotide

SEQ ID NO: 544676 - DNA, 60 bp, Artificial; identical to SEQ ID NO: 321170
  Synthetic oligonucleotide

SEQ ID NO: 544677 - DNA, 58 bp, Artificial; identical to SEQ ID NO: 321171
  Synthetic oligonucleotide

SEQ ID NO: 544678 - DNA, 51 bp, Artificial; identical to SEQ ID NO: 321173
  Synthetic oligonucleotide

SEQ ID NO: 544679 - DNA, 59 bp, Artificial; identical to SEQ ID NO: 321174
  Synthetic oligonucleotide

SEQ ID NO: 544680 - DNA, 58 bp, Artificial; identical to SEQ ID NO: 321175
  Synthetic oligonucleotide

SEQ ID NO: 544681 - DNA, 60 bp, Artificial; identical to SEQ ID NO: 321177
  Synthetic oligonucleotide

SEQ ID NO: 544682 - DNA, 57 bp, Artificial; identical to SEQ ID NO: 321179
  Synthetic oligonucleotide

SEQ ID NO: 544683 - DNA, 53 bp, Artificial; identical to SEQ ID NO: 321182
  Synthetic oligonucleotide

SEQ ID NO: 544684 - DNA, 55 bp, Artificial; identical to SEQ ID NO: 321184
  Synthetic oligonucleotide

SEQ ID NO: 544685 - DNA, 57 bp, Artificial; identical to SEQ ID NO: 321186
  Synthetic oligonucleotide

SEQ ID NO: 544686 - DNA, 57 bp, Artificial; identical to SEQ ID NO: 321190
  Synthetic oligonucleotide

SEQ ID NO: 544687 - DNA, 53 bp, Artificial; identical to SEQ ID NO: 321191
  Synthetic oligonucleotide

SEQ ID NO: 544688 - DNA, 52 bp, Artificial; identical to SEQ ID NO: 321193
  Synthetic oligonucleotide

SEQ ID NO: 544689 - DNA, 56 bp, Artificial; identical to SEQ ID NO: 321196
  Synthetic oligonucleotide

SEQ ID NO: 544690 - DNA, 60 bp, Artificial; identical to SEQ ID NO: 321197
  Synthetic oligonucleotide

SEQ ID NO: 544691 - DNA, 56 bp, Artificial; identical to SEQ ID NO: 321199
  Synthetic oligonucleotide

SEQ ID NO: 544692 - DNA, 56 bp, Artificial; identical to SEQ ID NO: 321200
  Synthetic oligonucleotide

SEQ ID NO: 544693 - DNA, 55 bp, Artificial; identical to SEQ ID NO: 321201
  Synthetic oligonucleotide

SEQ ID NO: 544694 - DNA, 58 bp, Artificial; identical to SEQ ID NO: 321202
  Synthetic oligonucleotide

SEQ ID NO: 544695 - DNA, 58 bp, Artificial; identical to SEQ ID NO: 321203
  Synthetic oligonucleotide

SEQ ID NO: 544696 - DNA, 60 bp, Artificial; identical to SEQ ID NO: 321204
  Synthetic oligonucleotide

SEQ ID NO: 544697 - DNA, 60 bp, Artificial; identical to SEQ ID NO: 321205
  Synthetic oligonucleotide

SEQ ID NO: 544698 - DNA, 60 bp, Artificial; identical to SEQ ID NO: 321207
  Synthetic oligonucleotide

SEQ ID NO: 544699 - DNA, 59 bp, Artificial; identical to SEQ ID NO: 321208
  Synthetic oligonucleotide

SEQ ID NO: 544700 - DNA, 60 bp, Artificial; identical to SEQ ID NO: 76617
  Synthetic oligonucleotide

SEQ ID NO: 544701 - DNA, 59 bp, Artificial; identical to SEQ ID NO: 321209
  Synthetic oligonucleotide

SEQ ID NO: 544702 - DNA, 60 bp, Artificial; identical to SEQ ID NO: 80935
  Synthetic oligonucleotide

SEQ ID NO: 544703 - DNA, 60 bp, Artificial; identical to SEQ ID NO: 321210
  Synthetic oligonucleotide

SEQ ID NO: 544704 - DNA, 59 bp, Artificial; identical to SEQ ID NO: 321211
  Synthetic oligonucleotide

SEQ ID NO: 544705 - DNA, 59 bp, Artificial; identical to SEQ ID NO: 321212
  Synthetic oligonucleotide

SEQ ID NO: 544706 - DNA, 58 bp, Artificial; identical to SEQ ID NO: 321213
  Synthetic oligonucleotide

SEQ ID NO: 544707 - DNA, 52 bp, Artificial; identical to SEQ ID NO: 321214
  Synthetic oligonucleotide

SEQ ID NO: 544708 - DNA, 56 bp, Artificial; identical to SEQ ID NO: 321215
  Synthetic oligonucleotide

SEQ ID NO: 544709 - DNA, 60 bp, Artificial; identical to SEQ ID NO: 321216
  Synthetic oligonucleotide

SEQ ID NO: 544710 - DNA, 60 bp, Artificial; identical to SEQ ID NO: 321217
  Synthetic oligonucleotide

SEQ ID NO: 544711 - DNA, 59 bp, Artificial; identical to SEQ ID NO: 321218
  Synthetic oligonucleotide

SEQ ID NO: 544712 - DNA, 60 bp, Artificial; identical to SEQ ID NO: 321219
  Synthetic oligonucleotide

SEQ ID NO: 544713 - DNA, 60 bp, Artificial; identical to SEQ ID NO: 66593
  Synthetic oligonucleotide

SEQ ID NO: 544714 - DNA, 60 bp, Artificial; identical to SEQ ID NO: 321221
  Synthetic oligonucleotide

SEQ ID NO: 544715 - DNA, 60 bp, Artificial; identical to SEQ ID NO: 321222
  Synthetic oligonucleotide

SEQ ID NO: 544716 - DNA, 60 bp, Artificial; identical to SEQ ID NO: 321224
  Synthetic oligonucleotide

SEQ ID NO: 544717 - DNA, 58 bp, Artificial; identical to SEQ ID NO: 321225
  Synthetic oligonucleotide

SEQ ID NO: 544718 - DNA, 56 bp, Artificial; identical to SEQ ID NO: 321227
  Synthetic oligonucleotide

SEQ ID NO: 544719 - DNA, 60 bp, Artificial; identical to SEQ ID NO: 321231
  Synthetic oligonucleotide

SEQ ID NO: 544720 - DNA, 56 bp, Artificial; identical to SEQ ID NO: 321232
  Synthetic oligonucleotide

SEQ ID NO: 544721 - DNA, 60 bp, Artificial; identical to SEQ ID NO: 321233
  Synthetic oligonucleotide

SEQ ID NO: 544722 - DNA, 55 bp, Artificial; identical to SEQ ID NO: 321234
  Synthetic oligonucleotide

SEQ ID NO: 544723 - DNA, 58 bp, Artificial; identical to SEQ ID NO: 321236
  Synthetic oligonucleotide

SEQ ID NO: 544724 - DNA, 59 bp, Artificial; identical to SEQ ID NO: 321242
  Synthetic oligonucleotide

SEQ ID NO: 544725 - DNA, 56 bp, Artificial; identical to SEQ ID NO: 321245
  Synthetic oligonucleotide

SEQ ID NO: 544726 - DNA, 54 bp, Artificial; identical to SEQ ID NO: 321252
  Synthetic oligonucleotide

SEQ ID NO: 544727 - DNA, 57 bp, Artificial; identical to SEQ ID NO: 321254
  Synthetic oligonucleotide

SEQ ID NO: 544728 - DNA, 55 bp, Artificial; identical to SEQ ID NO: 321255
  Synthetic oligonucleotide

SEQ ID NO: 544729 - DNA, 55 bp, Artificial; identical to SEQ ID NO: 321257
  Synthetic oligonucleotide

SEQ ID NO: 544730 - DNA, 52 bp, Artificial; identical to SEQ ID NO: 321262
  Synthetic oligonucleotide

SEQ ID NO: 544731 - DNA, 55 bp, Artificial; identical to SEQ ID NO: 321263
  Synthetic oligonucleotide

SEQ ID NO: 544732 - DNA, 59 bp, Artificial; identical to SEQ ID NO: 321266
  Synthetic oligonucleotide

SEQ ID NO: 544733 - DNA, 54 bp, Artificial; identical to SEQ ID NO: 321269
  Synthetic oligonucleotide

SEQ ID NO: 544734 - DNA, 60 bp, Artificial; identical to SEQ ID NO: 321270
  Synthetic oligonucleotide

SEQ ID NO: 544735 - DNA, 55 bp, Artificial; identical to SEQ ID NO: 321273
  Synthetic oligonucleotide

SEQ ID NO: 544736 - DNA, 57 bp, Artificial; identical to SEQ ID NO: 321274
  Synthetic oligonucleotide

SEQ ID NO: 544737 - DNA, 55 bp, Artificial; identical to SEQ ID NO: 321275
  Synthetic oligonucleotide

SEQ ID NO: 544738 - DNA, 50 bp, Artificial; identical to SEQ ID NO: 321276
  Synthetic oligonucleotide

SEQ ID NO: 544739 - DNA, 55 bp, Artificial; identical to SEQ ID NO: 321278
  Synthetic oligonucleotide

SEQ ID NO: 544740 - DNA, 60 bp, Artificial; identical to SEQ ID NO: 321282
  Synthetic oligonucleotide

SEQ ID NO: 544741 - DNA, 60 bp, Artificial; identical to SEQ ID NO: 321283
  Synthetic oligonucleotide

SEQ ID NO: 544742 - DNA, 60 bp, Artificial; identical to SEQ ID NO: 321284
  Synthetic oligonucleotide

SEQ ID NO: 544743 - DNA, 59 bp, Artificial; identical to SEQ ID NO: 321288
  Synthetic oligonucleotide

SEQ ID NO: 544744 - DNA, 51 bp, Artificial; identical to SEQ ID NO: 321290
  Synthetic oligonucleotide

SEQ ID NO: 544745 - DNA, 59 bp, Artificial; identical to SEQ ID NO: 321291
  Synthetic oligonucleotide

SEQ ID NO: 544746 - DNA, 60 bp, Artificial; identical to SEQ ID NO: 321292
  Synthetic oligonucleotide

SEQ ID NO: 544747 - DNA, 52 bp, Artificial; identical to SEQ ID NO: 321293
  Synthetic oligonucleotide

SEQ ID NO: 544748 - DNA, 54 bp, Artificial; identical to SEQ ID NO: 321294
  Synthetic oligonucleotide

SEQ ID NO: 544749 - DNA, 55 bp, Artificial; identical to SEQ ID NO: 321297
  Synthetic oligonucleotide

SEQ ID NO: 544750 - DNA, 58 bp, Artificial; identical to SEQ ID NO: 321299
  Synthetic oligonucleotide

SEQ ID NO: 544751 - DNA, 55 bp, Artificial; identical to SEQ ID NO: 321303
  Synthetic oligonucleotide

SEQ ID NO: 544752 - DNA, 60 bp, Artificial; identical to SEQ ID NO: 321304
  Synthetic oligonucleotide

SEQ ID NO: 544753 - DNA, 55 bp, Artificial; identical to SEQ ID NO: 321306
  Synthetic oligonucleotide

SEQ ID NO: 544754 - DNA, 55 bp, Artificial; identical to SEQ ID NO: 321309
  Synthetic oligonucleotide

SEQ ID NO: 544755 - DNA, 55 bp, Artificial; identical to SEQ ID NO: 321312
  Synthetic oligonucleotide

SEQ ID NO: 544756 - DNA, 50 bp, Artificial; identical to SEQ ID NO: 321313
  Synthetic oligonucleotide

SEQ ID NO: 544757 - DNA, 50 bp, Artificial; identical to SEQ ID NO: 321314
  Synthetic oligonucleotide

SEQ ID NO: 544758 - DNA, 60 bp, Artificial; identical to SEQ ID NO: 321316
  Synthetic oligonucleotide

SEQ ID NO: 544759 - DNA, 55 bp, Artificial; identical to SEQ ID NO: 321317
  Synthetic oligonucleotide

SEQ ID NO: 544760 - DNA, 53 bp, Artificial; identical to SEQ ID NO: 321321
  Synthetic oligonucleotide

SEQ ID NO: 544761 - DNA, 60 bp, Artificial; identical to SEQ ID NO: 321324
  Synthetic oligonucleotide

SEQ ID NO: 544762 - DNA, 55 bp, Artificial; identical to SEQ ID NO: 321326
  Synthetic oligonucleotide

SEQ ID NO: 544763 - DNA, 60 bp, Artificial; identical to SEQ ID NO: 321327
  Synthetic oligonucleotide

SEQ ID NO: 544764 - DNA, 60 bp, Artificial; identical to SEQ ID NO: 321328
  Synthetic oligonucleotide

SEQ ID NO: 544765 - DNA, 60 bp, Artificial; identical to SEQ ID NO: 10567
  Synthetic oligonucleotide

SEQ ID NO: 544766 - DNA, 60 bp, Artificial; identical to SEQ ID NO: 321329
  Synthetic oligonucleotide

SEQ ID NO: 544767 - DNA, 53 bp, Artificial; identical to SEQ ID NO: 321337
  Synthetic oligonucleotide

SEQ ID NO: 544768 - DNA, 58 bp, Artificial; identical to SEQ ID NO: 321340
  Synthetic oligonucleotide

SEQ ID NO: 544769 - DNA, 55 bp, Artificial; identical to SEQ ID NO: 321341
  Synthetic oligonucleotide

SEQ ID NO: 544770 - DNA, 58 bp, Artificial; identical to SEQ ID NO: 321344
  Synthetic oligonucleotide

SEQ ID NO: 544771 - DNA, 59 bp, Artificial; identical to SEQ ID NO: 16103
  Synthetic oligonucleotide

SEQ ID NO: 544772 - DNA, 55 bp, Artificial; identical to SEQ ID NO: 321345
  Synthetic oligonucleotide

SEQ ID NO: 544773 - DNA, 57 bp, Artificial; identical to SEQ ID NO: 321346
  Synthetic oligonucleotide

SEQ ID NO: 544774 - DNA, 59 bp, Artificial; identical to SEQ ID NO: 365
  Synthetic oligonucleotide

SEQ ID NO: 544775 - DNA, 60 bp, Artificial; identical to SEQ ID NO: 321358
  Synthetic oligonucleotide

SEQ ID NO: 544776 - DNA, 56 bp, Artificial; identical to SEQ ID NO: 321359
  Synthetic oligonucleotide

SEQ ID NO: 544777 - DNA, 59 bp, Artificial; identical to SEQ ID NO: 321360
  Synthetic oligonucleotide

SEQ ID NO: 544778 - DNA, 55 bp, Artificial; identical to SEQ ID NO: 321361
  Synthetic oligonucleotide

SEQ ID NO: 544779 - DNA, 56 bp, Artificial; identical to SEQ ID NO: 321362
  Synthetic oligonucleotide

SEQ ID NO: 544780 - DNA, 56 bp, Artificial; identical to SEQ ID NO: 321365
  Synthetic oligonucleotide

SEQ ID NO: 544781 - DNA, 57 bp, Artificial; identical to SEQ ID NO: 321369
  Synthetic oligonucleotide

SEQ ID NO: 544782 - DNA, 56 bp, Artificial; identical to SEQ ID NO: 321370
  Synthetic oligonucleotide

SEQ ID NO: 544783 - DNA, 60 bp, Artificial; identical to SEQ ID NO: 321373
  Synthetic oligonucleotide

SEQ ID NO: 544784 - DNA, 60 bp, Artificial; identical to SEQ ID NO: 321374
  Synthetic oligonucleotide

SEQ ID NO: 544785 - DNA, 55 bp, Artificial; identical to SEQ ID NO: 321375
  Synthetic oligonucleotide

SEQ ID NO: 544786 - DNA, 58 bp, Artificial; identical to SEQ ID NO: 321376
  Synthetic oligonucleotide

SEQ ID NO: 544787 - DNA, 57 bp, Artificial; identical to SEQ ID NO: 321377
  Synthetic oligonucleotide

SEQ ID NO: 544788 - DNA, 57 bp, Artificial; identical to SEQ ID NO: 321378
  Synthetic oligonucleotide

SEQ ID NO: 544789 - DNA, 60 bp, Artificial; identical to SEQ ID NO: 321380
  Synthetic oligonucleotide

SEQ ID NO: 544790 - DNA, 56 bp, Artificial; identical to SEQ ID NO: 321382
  Synthetic oligonucleotide

SEQ ID NO: 544791 - DNA, 60 bp, Artificial; identical to SEQ ID NO: 321385
  Synthetic oligonucleotide

SEQ ID NO: 544792 - DNA, 55 bp, Artificial; identical to SEQ ID NO: 321387
  Synthetic oligonucleotide

SEQ ID NO: 544793 - DNA, 57 bp, Artificial; identical to SEQ ID NO: 7305
  Synthetic oligonucleotide

SEQ ID NO: 544794 - DNA, 60 bp, Artificial; identical to SEQ ID NO: 321389
  Synthetic oligonucleotide

SEQ ID NO: 544795 - DNA, 56 bp, Artificial; identical to SEQ ID NO: 321390
  Synthetic oligonucleotide

SEQ ID NO: 544796 - DNA, 53 bp, Artificial; identical to SEQ ID NO: 321391
  Synthetic oligonucleotide

SEQ ID NO: 544797 - DNA, 59 bp, Artificial; identical to SEQ ID NO: 321396
  Synthetic oligonucleotide

SEQ ID NO: 544798 - DNA, 60 bp, Artificial; identical to SEQ ID NO: 321397
  Synthetic oligonucleotide

SEQ ID NO: 544799 - DNA, 60 bp, Artificial; identical to SEQ ID NO: 321399
  Synthetic oligonucleotide

SEQ ID NO: 544800 - DNA, 59 bp, Artificial; identical to SEQ ID NO: 321400
  Synthetic oligonucleotide

SEQ ID NO: 544801 - DNA, 60 bp, Artificial; identical to SEQ ID NO: 321401
  Synthetic oligonucleotide

SEQ ID NO: 544802 - DNA, 60 bp, Artificial; identical to SEQ ID NO: 321402
  Synthetic oligonucleotide

SEQ ID NO: 544803 - DNA, 60 bp, Artificial; identical to SEQ ID NO: 321403
  Synthetic oligonucleotide

SEQ ID NO: 544804 - DNA, 50 bp, Artificial; identical to SEQ ID NO: 321404
  Synthetic oligonucleotide

SEQ ID NO: 544805 - DNA, 53 bp, Artificial; identical to SEQ ID NO: 321408
  Synthetic oligonucleotide

SEQ ID NO: 544806 - DNA, 51 bp, Artificial; identical to SEQ ID NO: 321409
  Synthetic oligonucleotide

SEQ ID NO: 544807 - DNA, 55 bp, Artificial; identical to SEQ ID NO: 321411
  Synthetic oligonucleotide

SEQ ID NO: 544808 - DNA, 52 bp, Artificial; identical to SEQ ID NO: 321412
  Synthetic oligonucleotide

SEQ ID NO: 544809 - DNA, 54 bp, Artificial; identical to SEQ ID NO: 321413
  Synthetic oligonucleotide

SEQ ID NO: 544810 - DNA, 60 bp, Artificial; identical to SEQ ID NO: 321414
  Synthetic oligonucleotide

SEQ ID NO: 544811 - DNA, 56 bp, Artificial; identical to SEQ ID NO: 20456
  Synthetic oligonucleotide

SEQ ID NO: 544812 - DNA, 53 bp, Artificial; identical to SEQ ID NO: 321415
  Synthetic oligonucleotide

SEQ ID NO: 544813 - DNA, 51 bp, Artificial; identical to SEQ ID NO: 321417
  Synthetic oligonucleotide

SEQ ID NO: 544814 - DNA, 60 bp, Artificial; identical to SEQ ID NO: 321422
  Synthetic oligonucleotide

SEQ ID NO: 544815 - DNA, 60 bp, Artificial; identical to SEQ ID NO: 321425
  Synthetic oligonucleotide

SEQ ID NO: 544816 - DNA, 58 bp, Artificial; identical to SEQ ID NO: 321426
  Synthetic oligonucleotide

SEQ ID NO: 544817 - DNA, 58 bp, Artificial; identical to SEQ ID NO: 321429
  Synthetic oligonucleotide

SEQ ID NO: 544818 - DNA, 60 bp, Artificial; identical to SEQ ID NO: 321436
  Synthetic oligonucleotide

SEQ ID NO: 544819 - DNA, 60 bp, Artificial; identical to SEQ ID NO: 321439
  Synthetic oligonucleotide

SEQ ID NO: 544820 - DNA, 60 bp, Artificial; identical to SEQ ID NO: 321440
  Synthetic oligonucleotide

SEQ ID NO: 544821 - DNA, 60 bp, Artificial; identical to SEQ ID NO: 321443
  Synthetic oligonucleotide

SEQ ID NO: 544822 - DNA, 60 bp, Artificial; identical to SEQ ID NO: 321447
  Synthetic oligonucleotide

SEQ ID NO: 544823 - DNA, 53 bp, Artificial; identical to SEQ ID NO: 321449
  Synthetic oligonucleotide

SEQ ID NO: 544824 - DNA, 56 bp, Artificial; identical to SEQ ID NO: 321453
  Synthetic oligonucleotide

SEQ ID NO: 544825 - DNA, 60 bp, Artificial; identical to SEQ ID NO: 321456
  Synthetic oligonucleotide

SEQ ID NO: 544826 - DNA, 57 bp, Artificial; identical to SEQ ID NO: 321458
  Synthetic oligonucleotide

SEQ ID NO: 544827 - DNA, 50 bp, Artificial; identical to SEQ ID NO: 321460
  Synthetic oligonucleotide

SEQ ID NO: 544828 - DNA, 58 bp, Artificial; identical to SEQ ID NO: 321467
  Synthetic oligonucleotide

SEQ ID NO: 544829 - DNA, 56 bp, Artificial; identical to SEQ ID NO: 321474
  Synthetic oligonucleotide

SEQ ID NO: 544830 - DNA, 60 bp, Artificial; identical to SEQ ID NO: 321475
  Synthetic oligonucleotide

SEQ ID NO: 544831 - DNA, 55 bp, Artificial; identical to SEQ ID NO: 10723
  Synthetic oligonucleotide

SEQ ID NO: 544832 - DNA, 60 bp, Artificial; identical to SEQ ID NO: 321481
  Synthetic oligonucleotide

SEQ ID NO: 544833 - DNA, 55 bp, Artificial; identical to SEQ ID NO: 321482
  Synthetic oligonucleotide

SEQ ID NO: 544834 - DNA, 60 bp, Artificial; identical to SEQ ID NO: 321486
  Synthetic oligonucleotide

SEQ ID NO: 544835 - DNA, 60 bp, Artificial; identical to SEQ ID NO: 321487
  Synthetic oligonucleotide

SEQ ID NO: 544836 - DNA, 59 bp, Artificial; identical to SEQ ID NO: 321489
  Synthetic oligonucleotide

SEQ ID NO: 544837 - DNA, 54 bp, Artificial; identical to SEQ ID NO: 321491
  Synthetic oligonucleotide

SEQ ID NO: 544838 - DNA, 56 bp, Artificial; identical to SEQ ID NO: 321493
  Synthetic oligonucleotide

SEQ ID NO: 544839 - DNA, 58 bp, Artificial; identical to SEQ ID NO: 321494
  Synthetic oligonucleotide

SEQ ID NO: 544840 - DNA, 59 bp, Artificial; identical to SEQ ID NO: 321496
  Synthetic oligonucleotide

SEQ ID NO: 544841 - DNA, 60 bp, Artificial; identical to SEQ ID NO: 321502
  Synthetic oligonucleotide

SEQ ID NO: 544842 - DNA, 52 bp, Artificial; identical to SEQ ID NO: 321520
  Synthetic oligonucleotide

SEQ ID NO: 544843 - DNA, 58 bp, Artificial; identical to SEQ ID NO: 321521
  Synthetic oligonucleotide

SEQ ID NO: 544844 - DNA, 60 bp, Artificial; identical to SEQ ID NO: 321526
  Synthetic oligonucleotide

SEQ ID NO: 544845 - DNA, 57 bp, Artificial; identical to SEQ ID NO: 321532
  Synthetic oligonucleotide

SEQ ID NO: 544846 - DNA, 57 bp, Artificial; identical to SEQ ID NO: 18018
  Synthetic oligonucleotide

SEQ ID NO: 544847 - DNA, 55 bp, Artificial; identical to SEQ ID NO: 321535
  Synthetic oligonucleotide

SEQ ID NO: 544848 - DNA, 50 bp, Artificial; identical to SEQ ID NO: 321537
  Synthetic oligonucleotide

SEQ ID NO: 544849 - DNA, 51 bp, Artificial; identical to SEQ ID NO: 321538
  Synthetic oligonucleotide

SEQ ID NO: 544850 - DNA, 53 bp, Artificial; identical to SEQ ID NO: 10666
  Synthetic oligonucleotide

SEQ ID NO: 544851 - DNA, 55 bp, Artificial; identical to SEQ ID NO: 321541
  Synthetic oligonucleotide

SEQ ID NO: 544852 - DNA, 53 bp, Artificial; identical to SEQ ID NO: 321543
  Synthetic oligonucleotide

SEQ ID NO: 544853 - DNA, 55 bp, Artificial; identical to SEQ ID NO: 321548
  Synthetic oligonucleotide

SEQ ID NO: 544854 - DNA, 54 bp, Artificial; identical to SEQ ID NO: 321550
  Synthetic oligonucleotide

SEQ ID NO: 544855 - DNA, 52 bp, Artificial; identical to SEQ ID NO: 321552
  Synthetic oligonucleotide

SEQ ID NO: 544856 - DNA, 58 bp, Artificial; identical to SEQ ID NO: 321553
  Synthetic oligonucleotide

SEQ ID NO: 544857 - DNA, 53 bp, Artificial; identical to SEQ ID NO: 321554
  Synthetic oligonucleotide

SEQ ID NO: 544858 - DNA, 60 bp, Artificial; identical to SEQ ID NO: 321555
  Synthetic oligonucleotide

SEQ ID NO: 544859 - DNA, 54 bp, Artificial; identical to SEQ ID NO: 321558
  Synthetic oligonucleotide

SEQ ID NO: 544860 - DNA, 57 bp, Artificial; identical to SEQ ID NO: 321559
  Synthetic oligonucleotide

SEQ ID NO: 544861 - DNA, 55 bp, Artificial; identical to SEQ ID NO: 321560
  Synthetic oligonucleotide

SEQ ID NO: 544862 - DNA, 55 bp, Artificial; identical to SEQ ID NO: 321563
  Synthetic oligonucleotide

SEQ ID NO: 544863 - DNA, 60 bp, Artificial; identical to SEQ ID NO: 321564
  Synthetic oligonucleotide

SEQ ID NO: 544864 - DNA, 60 bp, Artificial; identical to SEQ ID NO: 321567
  Synthetic oligonucleotide

SEQ ID NO: 544865 - DNA, 57 bp, Artificial; identical to SEQ ID NO: 321568
  Synthetic oligonucleotide

SEQ ID NO: 544866 - DNA, 59 bp, Artificial; identical to SEQ ID NO: 321570
  Synthetic oligonucleotide

SEQ ID NO: 544867 - DNA, 56 bp, Artificial; identical to SEQ ID NO: 321572
  Synthetic oligonucleotide

SEQ ID NO: 544868 - DNA, 58 bp, Artificial; identical to SEQ ID NO: 321573
  Synthetic oligonucleotide

SEQ ID NO: 544869 - DNA, 60 bp, Artificial; identical to SEQ ID NO: 321575
  Synthetic oligonucleotide

SEQ ID NO: 544870 - DNA, 60 bp, Artificial; identical to SEQ ID NO: 321576
  Synthetic oligonucleotide

SEQ ID NO: 544871 - DNA, 58 bp, Artificial; identical to SEQ ID NO: 321578
  Synthetic oligonucleotide

SEQ ID NO: 544872 - DNA, 60 bp, Artificial; identical to SEQ ID NO: 321580
  Synthetic oligonucleotide

SEQ ID NO: 544873 - DNA, 60 bp, Artificial; identical to SEQ ID NO: 321581
  Synthetic oligonucleotide

SEQ ID NO: 544874 - DNA, 60 bp, Artificial; identical to SEQ ID NO: 321584
  Synthetic oligonucleotide

SEQ ID NO: 544875 - DNA, 52 bp, Artificial; identical to SEQ ID NO: 321586
  Synthetic oligonucleotide

SEQ ID NO: 544876 - DNA, 60 bp, Artificial; identical to SEQ ID NO: 321591
  Synthetic oligonucleotide

SEQ ID NO: 544877 - DNA, 60 bp, Artificial; identical to SEQ ID NO: 321593
  Synthetic oligonucleotide

SEQ ID NO: 544878 - DNA, 54 bp, Artificial; identical to SEQ ID NO: 321596
  Synthetic oligonucleotide

SEQ ID NO: 544879 - DNA, 60 bp, Artificial; identical to SEQ ID NO: 321597
  Synthetic oligonucleotide

SEQ ID NO: 544880 - DNA, 60 bp, Artificial; identical to SEQ ID NO: 321598
  Synthetic oligonucleotide

SEQ ID NO: 544881 - DNA, 55 bp, Artificial; identical to SEQ ID NO: 321600
  Synthetic oligonucleotide

SEQ ID NO: 544882 - DNA, 60 bp, Artificial; identical to SEQ ID NO: 321602
  Synthetic oligonucleotide

SEQ ID NO: 544883 - DNA, 59 bp, Artificial; identical to SEQ ID NO: 10659
  Synthetic oligonucleotide

SEQ ID NO: 544884 - DNA, 60 bp, Artificial; identical to SEQ ID NO: 321606
  Synthetic oligonucleotide

SEQ ID NO: 544885 - DNA, 60 bp, Artificial; identical to SEQ ID NO: 321608
  Synthetic oligonucleotide

SEQ ID NO: 544886 - DNA, 60 bp, Artificial; identical to SEQ ID NO: 10406
  Synthetic oligonucleotide

SEQ ID NO: 544887 - DNA, 60 bp, Artificial; identical to SEQ ID NO: 321610
  Synthetic oligonucleotide

SEQ ID NO: 544888 - DNA, 59 bp, Artificial; identical to SEQ ID NO: 321611
  Synthetic oligonucleotide

SEQ ID NO: 544889 - DNA, 55 bp, Artificial; identical to SEQ ID NO: 321613
  Synthetic oligonucleotide

SEQ ID NO: 544890 - DNA, 51 bp, Artificial; identical to SEQ ID NO: 321615
  Synthetic oligonucleotide

SEQ ID NO: 544891 - DNA, 56 bp, Artificial; identical to SEQ ID NO: 321622
  Synthetic oligonucleotide

SEQ ID NO: 544892 - DNA, 60 bp, Artificial; identical to SEQ ID NO: 321629
  Synthetic oligonucleotide

SEQ ID NO: 544893 - DNA, 60 bp, Artificial; identical to SEQ ID NO: 321631
  Synthetic oligonucleotide

SEQ ID NO: 544894 - DNA, 60 bp, Artificial; identical to SEQ ID NO: 321634
  Synthetic oligonucleotide

SEQ ID NO: 544895 - DNA, 60 bp, Artificial; identical to SEQ ID NO: 321637
  Synthetic oligonucleotide

SEQ ID NO: 544896 - DNA, 55 bp, Artificial; identical to SEQ ID NO: 321638
  Synthetic oligonucleotide

SEQ ID NO: 544897 - DNA, 60 bp, Artificial; identical to SEQ ID NO: 321639
  Synthetic oligonucleotide

SEQ ID NO: 544898 - DNA, 60 bp, Artificial; identical to SEQ ID NO: 13569
  Synthetic oligonucleotide

SEQ ID NO: 544899 - DNA, 60 bp, Artificial; identical to SEQ ID NO: 321644
  Synthetic oligonucleotide

SEQ ID NO: 544900 - DNA, 57 bp, Artificial; identical to SEQ ID NO: 321648
  Synthetic oligonucleotide

SEQ ID NO: 544901 - DNA, 58 bp, Artificial; identical to SEQ ID NO: 321649
  Synthetic oligonucleotide

SEQ ID NO: 544902 - DNA, 60 bp, Artificial; identical to SEQ ID NO: 321650
  Synthetic oligonucleotide

SEQ ID NO: 544903 - DNA, 60 bp, Artificial; identical to SEQ ID NO: 321651
  Synthetic oligonucleotide

SEQ ID NO: 544904 - DNA, 55 bp, Artificial; identical to SEQ ID NO: 321655
  Synthetic oligonucleotide

SEQ ID NO: 544905 - DNA, 60 bp, Artificial; identical to SEQ ID NO: 321658
  Synthetic oligonucleotide

SEQ ID NO: 544906 - DNA, 60 bp, Artificial; identical to SEQ ID NO: 321659
  Synthetic oligonucleotide

SEQ ID NO: 544907 - DNA, 58 bp, Artificial; identical to SEQ ID NO: 321660
  Synthetic oligonucleotide

SEQ ID NO: 544908 - DNA, 60 bp, Artificial; identical to SEQ ID NO: 321661
  Synthetic oligonucleotide

SEQ ID NO: 544909 - DNA, 60 bp, Artificial; identical to SEQ ID NO: 321662
  Synthetic oligonucleotide

SEQ ID NO: 544910 - DNA, 55 bp, Artificial; identical to SEQ ID NO: 321664
  Synthetic oligonucleotide

SEQ ID NO: 544911 - DNA, 59 bp, Artificial; identical to SEQ ID NO: 321667
  Synthetic oligonucleotide

SEQ ID NO: 544912 - DNA, 55 bp, Artificial; identical to SEQ ID NO: 321668
  Synthetic oligonucleotide

SEQ ID NO: 544913 - DNA, 59 bp, Artificial; identical to SEQ ID NO: 321670
  Synthetic oligonucleotide

SEQ ID NO: 544914 - DNA, 58 bp, Artificial; identical to SEQ ID NO: 321675
  Synthetic oligonucleotide

SEQ ID NO: 544915 - DNA, 55 bp, Artificial; identical to SEQ ID NO: 321677
  Synthetic oligonucleotide

SEQ ID NO: 544916 - DNA, 55 bp, Artificial; identical to SEQ ID NO: 321678
  Synthetic oligonucleotide

SEQ ID NO: 544917 - DNA, 60 bp, Artificial; identical to SEQ ID NO: 321681
  Synthetic oligonucleotide

SEQ ID NO: 544918 - DNA, 50 bp, Artificial; identical to SEQ ID NO: 321689
  Synthetic oligonucleotide

SEQ ID NO: 544919 - DNA, 53 bp, Artificial; identical to SEQ ID NO: 17956
  Synthetic oligonucleotide

SEQ ID NO: 544920 - DNA, 59 bp, Artificial; identical to SEQ ID NO: 321693
  Synthetic oligonucleotide

SEQ ID NO: 544921 - DNA, 56 bp, Artificial; identical to SEQ ID NO: 321695
  Synthetic oligonucleotide

SEQ ID NO: 544922 - DNA, 59 bp, Artificial; identical to SEQ ID NO: 321697
  Synthetic oligonucleotide

SEQ ID NO: 544923 - DNA, 54 bp, Artificial; identical to SEQ ID NO: 321700
  Synthetic oligonucleotide

SEQ ID NO: 544924 - DNA, 57 bp, Artificial; identical to SEQ ID NO: 321703
  Synthetic oligonucleotide

SEQ ID NO: 544925 - DNA, 59 bp, Artificial; identical to SEQ ID NO: 321705
  Synthetic oligonucleotide

SEQ ID NO: 544926 - DNA, 57 bp, Artificial; identical to SEQ ID NO: 321707
  Synthetic oligonucleotide

SEQ ID NO: 544927 - DNA, 51 bp, Artificial; identical to SEQ ID NO: 321708
  Synthetic oligonucleotide

SEQ ID NO: 544928 - DNA, 53 bp, Artificial; identical to SEQ ID NO: 321709
  Synthetic oligonucleotide

SEQ ID NO: 544929 - DNA, 52 bp, Artificial; identical to SEQ ID NO: 321711
  Synthetic oligonucleotide

SEQ ID NO: 544930 - DNA, 53 bp, Artificial; identical to SEQ ID NO: 321713
  Synthetic oligonucleotide

SEQ ID NO: 544931 - DNA, 58 bp, Artificial; identical to SEQ ID NO: 321715
  Synthetic oligonucleotide

SEQ ID NO: 544932 - DNA, 55 bp, Artificial; identical to SEQ ID NO: 321718
  Synthetic oligonucleotide

SEQ ID NO: 544933 - DNA, 51 bp, Artificial; identical to SEQ ID NO: 321719
  Synthetic oligonucleotide

SEQ ID NO: 544934 - DNA, 59 bp, Artificial; identical to SEQ ID NO: 321721
  Synthetic oligonucleotide

SEQ ID NO: 544935 - DNA, 60 bp, Artificial; identical to SEQ ID NO: 321723
  Synthetic oligonucleotide

SEQ ID NO: 544936 - DNA, 60 bp, Artificial; identical to SEQ ID NO: 321724
  Synthetic oligonucleotide

SEQ ID NO: 544937 - DNA, 60 bp, Artificial; identical to SEQ ID NO: 321725
  Synthetic oligonucleotide

SEQ ID NO: 544938 - DNA, 56 bp, Artificial; identical to SEQ ID NO: 321730
  Synthetic oligonucleotide

SEQ ID NO: 544939 - DNA, 60 bp, Artificial; identical to SEQ ID NO: 321731
  Synthetic oligonucleotide

SEQ ID NO: 544940 - DNA, 60 bp, Artificial; identical to SEQ ID NO: 321733
  Synthetic oligonucleotide

SEQ ID NO: 544941 - DNA, 60 bp, Artificial; identical to SEQ ID NO: 321734
  Synthetic oligonucleotide

SEQ ID NO: 544942 - DNA, 57 bp, Artificial; identical to SEQ ID NO: 321735
  Synthetic oligonucleotide

SEQ ID NO: 544943 - DNA, 57 bp, Artificial; identical to SEQ ID NO: 321736
  Synthetic oligonucleotide

SEQ ID NO: 544944 - DNA, 55 bp, Artificial; identical to SEQ ID NO: 321739
  Synthetic oligonucleotide

SEQ ID NO: 544945 - DNA, 60 bp, Artificial; identical to SEQ ID NO: 321740
  Synthetic oligonucleotide

SEQ ID NO: 544946 - DNA, 57 bp, Artificial; identical to SEQ ID NO: 321743
  Synthetic oligonucleotide

SEQ ID NO: 544947 - DNA, 55 bp, Artificial; identical to SEQ ID NO: 321746
  Synthetic oligonucleotide

SEQ ID NO: 544948 - DNA, 51 bp, Artificial; identical to SEQ ID NO: 321748
  Synthetic oligonucleotide

SEQ ID NO: 544949 - DNA, 52 bp, Artificial; identical to SEQ ID NO: 321752
  Synthetic oligonucleotide

SEQ ID NO: 544950 - DNA, 55 bp, Artificial; identical to SEQ ID NO: 321756
  Synthetic oligonucleotide

SEQ ID NO: 544951 - DNA, 60 bp, Artificial; identical to SEQ ID NO: 321757
  Synthetic oligonucleotide

SEQ ID NO: 544952 - DNA, 53 bp, Artificial; identical to SEQ ID NO: 321760
  Synthetic oligonucleotide

SEQ ID NO: 544953 - DNA, 60 bp, Artificial; identical to SEQ ID NO: 321761
  Synthetic oligonucleotide

SEQ ID NO: 544954 - DNA, 55 bp, Artificial; identical to SEQ ID NO: 321763
  Synthetic oligonucleotide

SEQ ID NO: 544955 - DNA, 60 bp, Artificial; identical to SEQ ID NO: 321765
  Synthetic oligonucleotide

SEQ ID NO: 544956 - DNA, 55 bp, Artificial; identical to SEQ ID NO: 321768
  Synthetic oligonucleotide

SEQ ID NO: 544957 - DNA, 54 bp, Artificial; identical to SEQ ID NO: 321769
  Synthetic oligonucleotide

SEQ ID NO: 544958 - DNA, 60 bp, Artificial; identical to SEQ ID NO: 321771
  Synthetic oligonucleotide

SEQ ID NO: 544959 - DNA, 55 bp, Artificial; identical to SEQ ID NO: 321772
  Synthetic oligonucleotide

SEQ ID NO: 544960 - DNA, 60 bp, Artificial; identical to SEQ ID NO: 321773
  Synthetic oligonucleotide

SEQ ID NO: 544961 - DNA, 60 bp, Artificial; identical to SEQ ID NO: 321777
  Synthetic oligonucleotide

SEQ ID NO: 544962 - DNA, 57 bp, Artificial; identical to SEQ ID NO: 321779
  Synthetic oligonucleotide

SEQ ID NO: 544963 - DNA, 60 bp, Artificial; identical to SEQ ID NO: 321781
  Synthetic oligonucleotide

SEQ ID NO: 544964 - DNA, 60 bp, Artificial; identical to SEQ ID NO: 321782
  Synthetic oligonucleotide

SEQ ID NO: 544965 - DNA, 53 bp, Artificial; identical to SEQ ID NO: 321785
  Synthetic oligonucleotide

SEQ ID NO: 544966 - DNA, 60 bp, Artificial; identical to SEQ ID NO: 321786
  Synthetic oligonucleotide

SEQ ID NO: 544967 - DNA, 60 bp, Artificial; identical to SEQ ID NO: 321787
  Synthetic oligonucleotide

SEQ ID NO: 544968 - DNA, 57 bp, Artificial; identical to SEQ ID NO: 321788
  Synthetic oligonucleotide

SEQ ID NO: 544969 - DNA, 57 bp, Artificial; identical to SEQ ID NO: 321791
  Synthetic oligonucleotide

SEQ ID NO: 544970 - DNA, 60 bp, Artificial; identical to SEQ ID NO: 321796
  Synthetic oligonucleotide

SEQ ID NO: 544971 - DNA, 60 bp, Artificial; identical to SEQ ID NO: 321798
  Synthetic oligonucleotide

SEQ ID NO: 544972 - DNA, 60 bp, Artificial; identical to SEQ ID NO: 321800
  Synthetic oligonucleotide

SEQ ID NO: 544973 - DNA, 60 bp, Artificial; identical to SEQ ID NO: 321801
  Synthetic oligonucleotide

SEQ ID NO: 544974 - DNA, 53 bp, Artificial; identical to SEQ ID NO: 321802
  Synthetic oligonucleotide

SEQ ID NO: 544975 - DNA, 59 bp, Artificial; identical to SEQ ID NO: 321804
  Synthetic oligonucleotide

SEQ ID NO: 544976 - DNA, 60 bp, Artificial; identical to SEQ ID NO: 321807
  Synthetic oligonucleotide

SEQ ID NO: 544977 - DNA, 58 bp, Artificial; identical to SEQ ID NO: 321809
  Synthetic oligonucleotide

SEQ ID NO: 544978 - DNA, 57 bp, Artificial; identical to SEQ ID NO: 321811
  Synthetic oligonucleotide

SEQ ID NO: 544979 - DNA, 60 bp, Artificial; identical to SEQ ID NO: 321812
  Synthetic oligonucleotide

SEQ ID NO: 544980 - DNA, 55 bp, Artificial; identical to SEQ ID NO: 321813
  Synthetic oligonucleotide

SEQ ID NO: 544981 - DNA, 60 bp, Artificial; identical to SEQ ID NO: 321818
  Synthetic oligonucleotide

SEQ ID NO: 544982 - DNA, 57 bp, Artificial; identical to SEQ ID NO: 321823
  Synthetic oligonucleotide

SEQ ID NO: 544983 - DNA, 59 bp, Artificial; identical to SEQ ID NO: 321824
  Synthetic oligonucleotide

SEQ ID NO: 544984 - DNA, 60 bp, Artificial; identical to SEQ ID NO: 7779
  Synthetic oligonucleotide

SEQ ID NO: 544985 - DNA, 52 bp, Artificial; identical to SEQ ID NO: 321827
  Synthetic oligonucleotide

SEQ ID NO: 544986 - DNA, 60 bp, Artificial; identical to SEQ ID NO: 321832
  Synthetic oligonucleotide

SEQ ID NO: 544987 - DNA, 59 bp, Artificial; identical to SEQ ID NO: 321834
  Synthetic oligonucleotide

SEQ ID NO: 544988 - DNA, 60 bp, Artificial; identical to SEQ ID NO: 14081
  Synthetic oligonucleotide

SEQ ID NO: 544989 - DNA, 60 bp, Artificial; identical to SEQ ID NO: 321840
  Synthetic oligonucleotide

SEQ ID NO: 544990 - DNA, 60 bp, Artificial; identical to SEQ ID NO: 321842
  Synthetic oligonucleotide

SEQ ID NO: 544991 - DNA, 56 bp, Artificial; identical to SEQ ID NO: 19910
  Synthetic oligonucleotide

SEQ ID NO: 544992 - DNA, 60 bp, Artificial; identical to SEQ ID NO: 321846
  Synthetic oligonucleotide

SEQ ID NO: 544993 - DNA, 53 bp, Artificial; identical to SEQ ID NO: 321851
  Synthetic oligonucleotide

SEQ ID NO: 544994 - DNA, 60 bp, Artificial; identical to SEQ ID NO: 321852
  Synthetic oligonucleotide

SEQ ID NO: 544995 - DNA, 60 bp, Artificial; identical to SEQ ID NO: 321854
  Synthetic oligonucleotide

SEQ ID NO: 544996 - DNA, 56 bp, Artificial; identical to SEQ ID NO: 321855
  Synthetic oligonucleotide

SEQ ID NO: 544997 - DNA, 54 bp, Artificial; identical to SEQ ID NO: 321858
  Synthetic oligonucleotide

SEQ ID NO: 544998 - DNA, 55 bp, Artificial; identical to SEQ ID NO: 321859
  Synthetic oligonucleotide

SEQ ID NO: 544999 - DNA, 60 bp, Artificial; identical to SEQ ID NO: 321861
  Synthetic oligonucleotide

SEQ ID NO: 545000 - DNA, 59 bp, Artificial; identical to SEQ ID NO: 321865
  Synthetic oligonucleotide

SEQ ID NO: 545001 - DNA, 57 bp, Artificial; identical to SEQ ID NO: 321866
  Synthetic oligonucleotide

SEQ ID NO: 545002 - DNA, 60 bp, Artificial; identical to SEQ ID NO: 321867
  Synthetic oligonucleotide

SEQ ID NO: 545003 - DNA, 60 bp, Artificial; identical to SEQ ID NO: 13160
  Synthetic oligonucleotide

SEQ ID NO: 545004 - DNA, 60 bp, Artificial; identical to SEQ ID NO: 321872
  Synthetic oligonucleotide

SEQ ID NO: 545005 - DNA, 57 bp, Artificial; identical to SEQ ID NO: 321873
  Synthetic oligonucleotide

SEQ ID NO: 545006 - DNA, 60 bp, Artificial; identical to SEQ ID NO: 321875
  Synthetic oligonucleotide

SEQ ID NO: 545007 - DNA, 57 bp, Artificial; identical to SEQ ID NO: 321876
  Synthetic oligonucleotide

SEQ ID NO: 545008 - DNA, 60 bp, Artificial; identical to SEQ ID NO: 321877
  Synthetic oligonucleotide

SEQ ID NO: 545009 - DNA, 59 bp, Artificial; identical to SEQ ID NO: 321878
  Synthetic oligonucleotide

SEQ ID NO: 545010 - DNA, 58 bp, Artificial; identical to SEQ ID NO: 321879
  Synthetic oligonucleotide

SEQ ID NO: 545011 - DNA, 60 bp, Artificial; identical to SEQ ID NO: 321882
  Synthetic oligonucleotide

SEQ ID NO: 545012 - DNA, 60 bp, Artificial; identical to SEQ ID NO: 321887
  Synthetic oligonucleotide

SEQ ID NO: 545013 - DNA, 55 bp, Artificial; identical to SEQ ID NO: 12431
  Synthetic oligonucleotide

SEQ ID NO: 545014 - DNA, 59 bp, Artificial; identical to SEQ ID NO: 321893
  Synthetic oligonucleotide

SEQ ID NO: 545015 - DNA, 55 bp, Artificial; identical to SEQ ID NO: 321894
  Synthetic oligonucleotide

SEQ ID NO: 545016 - DNA, 60 bp, Artificial; identical to SEQ ID NO: 321895
  Synthetic oligonucleotide

SEQ ID NO: 545017 - DNA, 59 bp, Artificial; identical to SEQ ID NO: 321896
  Synthetic oligonucleotide

SEQ ID NO: 545018 - DNA, 50 bp, Artificial; identical to SEQ ID NO: 321897
  Synthetic oligonucleotide

SEQ ID NO: 545019 - DNA, 55 bp, Artificial; identical to SEQ ID NO: 321898
  Synthetic oligonucleotide

SEQ ID NO: 545020 - DNA, 60 bp, Artificial; identical to SEQ ID NO: 321899
  Synthetic oligonucleotide

SEQ ID NO: 545021 - DNA, 60 bp, Artificial; identical to SEQ ID NO: 321903
  Synthetic oligonucleotide

SEQ ID NO: 545022 - DNA, 60 bp, Artificial; identical to SEQ ID NO: 321904
  Synthetic oligonucleotide

SEQ ID NO: 545023 - DNA, 60 bp, Artificial; identical to SEQ ID NO: 321905
  Synthetic oligonucleotide

SEQ ID NO: 545024 - DNA, 60 bp, Artificial; identical to SEQ ID NO: 321910
  Synthetic oligonucleotide

SEQ ID NO: 545025 - DNA, 56 bp, Artificial; identical to SEQ ID NO: 321911
  Synthetic oligonucleotide

SEQ ID NO: 545026 - DNA, 55 bp, Artificial; identical to SEQ ID NO: 321913
  Synthetic oligonucleotide

SEQ ID NO: 545027 - DNA, 60 bp, Artificial; identical to SEQ ID NO: 321915
  Synthetic oligonucleotide

SEQ ID NO: 545028 - DNA, 60 bp, Artificial; identical to SEQ ID NO: 321922
  Synthetic oligonucleotide

SEQ ID NO: 545029 - DNA, 57 bp, Artificial; identical to SEQ ID NO: 321927
  Synthetic oligonucleotide

SEQ ID NO: 545030 - DNA, 51 bp, Artificial; identical to SEQ ID NO: 321934
  Synthetic oligonucleotide

SEQ ID NO: 545031 - DNA, 56 bp, Artificial; identical to SEQ ID NO: 321939
  Synthetic oligonucleotide

SEQ ID NO: 545032 - DNA, 60 bp, Artificial; identical to SEQ ID NO: 7510
  Synthetic oligonucleotide

SEQ ID NO: 545033 - DNA, 57 bp, Artificial; identical to SEQ ID NO: 321944
  Synthetic oligonucleotide

SEQ ID NO: 545034 - DNA, 55 bp, Artificial; identical to SEQ ID NO: 321945
  Synthetic oligonucleotide

SEQ ID NO: 545035 - DNA, 55 bp, Artificial; identical to SEQ ID NO: 321947
  Synthetic oligonucleotide

SEQ ID NO: 545036 - DNA, 60 bp, Artificial; identical to SEQ ID NO: 321948
  Synthetic oligonucleotide

SEQ ID NO: 545037 - DNA, 54 bp, Artificial; identical to SEQ ID NO: 321953
  Synthetic oligonucleotide

SEQ ID NO: 545038 - DNA, 57 bp, Artificial; identical to SEQ ID NO: 321954
  Synthetic oligonucleotide

SEQ ID NO: 545039 - DNA, 60 bp, Artificial; identical to SEQ ID NO: 321957
  Synthetic oligonucleotide

SEQ ID NO: 545040 - DNA, 58 bp, Artificial; identical to SEQ ID NO: 321961
  Synthetic oligonucleotide

SEQ ID NO: 545041 - DNA, 52 bp, Artificial; identical to SEQ ID NO: 321962
  Synthetic oligonucleotide

SEQ ID NO: 545042 - DNA, 60 bp, Artificial; identical to SEQ ID NO: 321964
  Synthetic oligonucleotide

SEQ ID NO: 545043 - DNA, 55 bp, Artificial; identical to SEQ ID NO: 321965
  Synthetic oligonucleotide

SEQ ID NO: 545044 - DNA, 55 bp, Artificial; identical to SEQ ID NO: 321966
  Synthetic oligonucleotide

SEQ ID NO: 545045 - DNA, 55 bp, Artificial; identical to SEQ ID NO: 321969
  Synthetic oligonucleotide

SEQ ID NO: 545046 - DNA, 53 bp, Artificial; identical to SEQ ID NO: 321970
  Synthetic oligonucleotide

SEQ ID NO: 545047 - DNA, 50 bp, Artificial; identical to SEQ ID NO: 321971
  Synthetic oligonucleotide

SEQ ID NO: 545048 - DNA, 58 bp, Artificial; identical to SEQ ID NO: 321974
  Synthetic oligonucleotide

SEQ ID NO: 545049 - DNA, 57 bp, Artificial; identical to SEQ ID NO: 321975
  Synthetic oligonucleotide

SEQ ID NO: 545050 - DNA, 60 bp, Artificial; identical to SEQ ID NO: 321980
  Synthetic oligonucleotide

SEQ ID NO: 545051 - DNA, 57 bp, Artificial; identical to SEQ ID NO: 321982
  Synthetic oligonucleotide

SEQ ID NO: 545052 - DNA, 54 bp, Artificial; identical to SEQ ID NO: 321987
  Synthetic oligonucleotide

SEQ ID NO: 545053 - DNA, 54 bp, Artificial; identical to SEQ ID NO: 321988
  Synthetic oligonucleotide

SEQ ID NO: 545054 - DNA, 55 bp, Artificial; identical to SEQ ID NO: 321998
  Synthetic oligonucleotide

SEQ ID NO: 545055 - DNA, 60 bp, Artificial; identical to SEQ ID NO: 321999
  Synthetic oligonucleotide

SEQ ID NO: 545056 - DNA, 53 bp, Artificial; identical to SEQ ID NO: 322000
  Synthetic oligonucleotide

SEQ ID NO: 545057 - DNA, 56 bp, Artificial; identical to SEQ ID NO: 322001
  Synthetic oligonucleotide

SEQ ID NO: 545058 - DNA, 55 bp, Artificial; identical to SEQ ID NO: 322002
  Synthetic oligonucleotide

SEQ ID NO: 545059 - DNA, 60 bp, Artificial; identical to SEQ ID NO: 322003
  Synthetic oligonucleotide

SEQ ID NO: 545060 - DNA, 51 bp, Artificial; identical to SEQ ID NO: 322004
  Synthetic oligonucleotide

SEQ ID NO: 545061 - DNA, 54 bp, Artificial; identical to SEQ ID NO: 322005
  Synthetic oligonucleotide

SEQ ID NO: 545062 - DNA, 55 bp, Artificial; identical to SEQ ID NO: 322010
  Synthetic oligonucleotide

SEQ ID NO: 545063 - DNA, 60 bp, Artificial; identical to SEQ ID NO: 322011
  Synthetic oligonucleotide

SEQ ID NO: 545064 - DNA, 57 bp, Artificial; identical to SEQ ID NO: 322016
  Synthetic oligonucleotide

SEQ ID NO: 545065 - DNA, 53 bp, Artificial; identical to SEQ ID NO: 322018
  Synthetic oligonucleotide

SEQ ID NO: 545066 - DNA, 54 bp, Artificial; identical to SEQ ID NO: 322019
  Synthetic oligonucleotide

SEQ ID NO: 545067 - DNA, 55 bp, Artificial; identical to SEQ ID NO: 322021
  Synthetic oligonucleotide

SEQ ID NO: 545068 - DNA, 60 bp, Artificial; identical to SEQ ID NO: 322022
  Synthetic oligonucleotide

SEQ ID NO: 545069 - DNA, 59 bp, Artificial; identical to SEQ ID NO: 322023
  Synthetic oligonucleotide

SEQ ID NO: 545070 - DNA, 60 bp, Artificial; identical to SEQ ID NO: 322027
  Synthetic oligonucleotide

SEQ ID NO: 545071 - DNA, 55 bp, Artificial; identical to SEQ ID NO: 322028
  Synthetic oligonucleotide

SEQ ID NO: 545072 - DNA, 53 bp, Artificial; identical to SEQ ID NO: 322035
  Synthetic oligonucleotide

SEQ ID NO: 545073 - DNA, 56 bp, Artificial; identical to SEQ ID NO: 322040
  Synthetic oligonucleotide

SEQ ID NO: 545074 - DNA, 60 bp, Artificial; identical to SEQ ID NO: 322041
  Synthetic oligonucleotide

SEQ ID NO: 545075 - DNA, 56 bp, Artificial; identical to SEQ ID NO: 322043
  Synthetic oligonucleotide

SEQ ID NO: 545076 - DNA, 60 bp, Artificial; identical to SEQ ID NO: 322047
  Synthetic oligonucleotide

SEQ ID NO: 545077 - DNA, 55 bp, Artificial; identical to SEQ ID NO: 322053
  Synthetic oligonucleotide

SEQ ID NO: 545078 - DNA, 58 bp, Artificial; identical to SEQ ID NO: 16631
  Synthetic oligonucleotide

SEQ ID NO: 545079 - DNA, 55 bp, Artificial; identical to SEQ ID NO: 322057
  Synthetic oligonucleotide

SEQ ID NO: 545080 - DNA, 60 bp, Artificial; identical to SEQ ID NO: 322058
  Synthetic oligonucleotide

SEQ ID NO: 545081 - DNA, 56 bp, Artificial; identical to SEQ ID NO: 322061
  Synthetic oligonucleotide

SEQ ID NO: 545082 - DNA, 60 bp, Artificial; identical to SEQ ID NO: 322067
  Synthetic oligonucleotide

SEQ ID NO: 545083 - DNA, 60 bp, Artificial; identical to SEQ ID NO: 322068
  Synthetic oligonucleotide

SEQ ID NO: 545084 - DNA, 56 bp, Artificial; identical to SEQ ID NO: 322069
  Synthetic oligonucleotide

SEQ ID NO: 545085 - DNA, 58 bp, Artificial; identical to SEQ ID NO: 19590
  Synthetic oligonucleotide

SEQ ID NO: 545086 - DNA, 55 bp, Artificial; identical to SEQ ID NO: 322074
  Synthetic oligonucleotide

SEQ ID NO: 545087 - DNA, 55 bp, Artificial; identical to SEQ ID NO: 322076
  Synthetic oligonucleotide

SEQ ID NO: 545088 - DNA, 56 bp, Artificial; identical to SEQ ID NO: 322078
  Synthetic oligonucleotide

SEQ ID NO: 545089 - DNA, 59 bp, Artificial; identical to SEQ ID NO: 322082
  Synthetic oligonucleotide

SEQ ID NO: 545090 - DNA, 56 bp, Artificial; identical to SEQ ID NO: 322084
  Synthetic oligonucleotide

SEQ ID NO: 545091 - DNA, 56 bp, Artificial; identical to SEQ ID NO: 322086
  Synthetic oligonucleotide

SEQ ID NO: 545092 - DNA, 51 bp, Artificial; identical to SEQ ID NO: 322087
  Synthetic oligonucleotide

SEQ ID NO: 545093 - DNA, 52 bp, Artificial; identical to SEQ ID NO: 322089
  Synthetic oligonucleotide

SEQ ID NO: 545094 - DNA, 53 bp, Artificial; identical to SEQ ID NO: 322090
  Synthetic oligonucleotide

SEQ ID NO: 545095 - DNA, 50 bp, Artificial; identical to SEQ ID NO: 322091
  Synthetic oligonucleotide

SEQ ID NO: 545096 - DNA, 56 bp, Artificial; identical to SEQ ID NO: 322094
  Synthetic oligonucleotide

SEQ ID NO: 545097 - DNA, 60 bp, Artificial; identical to SEQ ID NO: 322103
  Synthetic oligonucleotide

SEQ ID NO: 545098 - DNA, 60 bp, Artificial; identical to SEQ ID NO: 322104
  Synthetic oligonucleotide

SEQ ID NO: 545099 - DNA, 51 bp, Artificial; identical to SEQ ID NO: 65
  Synthetic oligonucleotide

SEQ ID NO: 545100 - DNA, 53 bp, Artificial; identical to SEQ ID NO: 322106
  Synthetic oligonucleotide

SEQ ID NO: 545101 - DNA, 55 bp, Artificial; identical to SEQ ID NO: 322108
  Synthetic oligonucleotide

SEQ ID NO: 545102 - DNA, 55 bp, Artificial; identical to SEQ ID NO: 322109
  Synthetic oligonucleotide

SEQ ID NO: 545103 - DNA, 57 bp, Artificial; identical to SEQ ID NO: 322111
  Synthetic oligonucleotide

SEQ ID NO: 545104 - DNA, 59 bp, Artificial; identical to SEQ ID NO: 74
  Synthetic oligonucleotide

SEQ ID NO: 545105 - DNA, 55 bp, Artificial; identical to SEQ ID NO: 322115
  Synthetic oligonucleotide

SEQ ID NO: 545106 - DNA, 57 bp, Artificial; identical to SEQ ID NO: 322116
  Synthetic oligonucleotide

SEQ ID NO: 545107 - DNA, 53 bp, Artificial; identical to SEQ ID NO: 322117
  Synthetic oligonucleotide

SEQ ID NO: 545108 - DNA, 55 bp, Artificial; identical to SEQ ID NO: 322118
  Synthetic oligonucleotide

SEQ ID NO: 545109 - DNA, 55 bp, Artificial; identical to SEQ ID NO: 322119
  Synthetic oligonucleotide

SEQ ID NO: 545110 - DNA, 56 bp, Artificial; identical to SEQ ID NO: 322120
  Synthetic oligonucleotide

SEQ ID NO: 545111 - DNA, 55 bp, Artificial; identical to SEQ ID NO: 322121
  Synthetic oligonucleotide

SEQ ID NO: 545112 - DNA, 60 bp, Artificial; identical to SEQ ID NO: 322122
  Synthetic oligonucleotide

SEQ ID NO: 545113 - DNA, 57 bp, Artificial; identical to SEQ ID NO: 17696
  Synthetic oligonucleotide

SEQ ID NO: 545114 - DNA, 53 bp, Artificial; identical to SEQ ID NO: 322128
  Synthetic oligonucleotide

SEQ ID NO: 545115 - DNA, 56 bp, Artificial; identical to SEQ ID NO: 322129
  Synthetic oligonucleotide

SEQ ID NO: 545116 - DNA, 60 bp, Artificial; identical to SEQ ID NO: 322130
  Synthetic oligonucleotide

SEQ ID NO: 545117 - DNA, 58 bp, Artificial; identical to SEQ ID NO: 322131
  Synthetic oligonucleotide

SEQ ID NO: 545118 - DNA, 55 bp, Artificial; identical to SEQ ID NO: 322139
  Synthetic oligonucleotide

SEQ ID NO: 545119 - DNA, 52 bp, Artificial; identical to SEQ ID NO: 322145
  Synthetic oligonucleotide

SEQ ID NO: 545120 - DNA, 59 bp, Artificial; identical to SEQ ID NO: 322149
  Synthetic oligonucleotide

SEQ ID NO: 545121 - DNA, 53 bp, Artificial; identical to SEQ ID NO: 322151
  Synthetic oligonucleotide

SEQ ID NO: 545122 - DNA, 60 bp, Artificial; identical to SEQ ID NO: 322153
  Synthetic oligonucleotide

SEQ ID NO: 545123 - DNA, 60 bp, Artificial; identical to SEQ ID NO: 12395
  Synthetic oligonucleotide

SEQ ID NO: 545124 - DNA, 60 bp, Artificial; identical to SEQ ID NO: 322160
  Synthetic oligonucleotide

SEQ ID NO: 545125 - DNA, 60 bp, Artificial; identical to SEQ ID NO: 322168
  Synthetic oligonucleotide

SEQ ID NO: 545126 - DNA, 60 bp, Artificial; identical to SEQ ID NO: 322173
  Synthetic oligonucleotide

SEQ ID NO: 545127 - DNA, 55 bp, Artificial; identical to SEQ ID NO: 322174
  Synthetic oligonucleotide

SEQ ID NO: 545128 - DNA, 58 bp, Artificial; identical to SEQ ID NO: 20399
  Synthetic oligonucleotide

SEQ ID NO: 545129 - DNA, 52 bp, Artificial; identical to SEQ ID NO: 322178
  Synthetic oligonucleotide

SEQ ID NO: 545130 - DNA, 58 bp, Artificial; identical to SEQ ID NO: 322180
  Synthetic oligonucleotide

SEQ ID NO: 545131 - DNA, 59 bp, Artificial; identical to SEQ ID NO: 322181
  Synthetic oligonucleotide

SEQ ID NO: 545132 - DNA, 58 bp, Artificial; identical to SEQ ID NO: 322184
  Synthetic oligonucleotide

SEQ ID NO: 545133 - DNA, 60 bp, Artificial; identical to SEQ ID NO: 322191
  Synthetic oligonucleotide

SEQ ID NO: 545134 - DNA, 55 bp, Artificial; identical to SEQ ID NO: 322193
  Synthetic oligonucleotide

SEQ ID NO: 545135 - DNA, 59 bp, Artificial; identical to SEQ ID NO: 322194
  Synthetic oligonucleotide

SEQ ID NO: 545136 - DNA, 60 bp, Artificial; identical to SEQ ID NO: 322195
  Synthetic oligonucleotide

SEQ ID NO: 545137 - DNA, 58 bp, Artificial; identical to SEQ ID NO: 322197
  Synthetic oligonucleotide

SEQ ID NO: 545138 - DNA, 50 bp, Artificial; identical to SEQ ID NO: 322199
  Synthetic oligonucleotide

SEQ ID NO: 545139 - DNA, 55 bp, Artificial; identical to SEQ ID NO: 322202
  Synthetic oligonucleotide

SEQ ID NO: 545140 - DNA, 55 bp, Artificial; identical to SEQ ID NO: 322203
  Synthetic oligonucleotide

SEQ ID NO: 545141 - DNA, 58 bp, Artificial; identical to SEQ ID NO: 322204
  Synthetic oligonucleotide

SEQ ID NO: 545142 - DNA, 55 bp, Artificial; identical to SEQ ID NO: 322207
  Synthetic oligonucleotide

SEQ ID NO: 545143 - DNA, 60 bp, Artificial; identical to SEQ ID NO: 322208
  Synthetic oligonucleotide

SEQ ID NO: 545144 - DNA, 57 bp, Artificial; identical to SEQ ID NO: 322209
  Synthetic oligonucleotide

SEQ ID NO: 545145 - DNA, 59 bp, Artificial; identical to SEQ ID NO: 322210
  Synthetic oligonucleotide

SEQ ID NO: 545146 - DNA, 53 bp, Artificial; identical to SEQ ID NO: 322211
  Synthetic oligonucleotide

SEQ ID NO: 545147 - DNA, 60 bp, Artificial; identical to SEQ ID NO: 322224
  Synthetic oligonucleotide

SEQ ID NO: 545148 - DNA, 60 bp, Artificial; identical to SEQ ID NO: 322226
  Synthetic oligonucleotide

SEQ ID NO: 545149 - DNA, 60 bp, Artificial; identical to SEQ ID NO: 322228
  Synthetic oligonucleotide

SEQ ID NO: 545150 - DNA, 57 bp, Artificial; identical to SEQ ID NO: 322230
  Synthetic oligonucleotide

SEQ ID NO: 545151 - DNA, 55 bp, Artificial; identical to SEQ ID NO: 322232
  Synthetic oligonucleotide

SEQ ID NO: 545152 - DNA, 60 bp, Artificial; identical to SEQ ID NO: 322233
  Synthetic oligonucleotide

SEQ ID NO: 545153 - DNA, 52 bp, Artificial; identical to SEQ ID NO: 322235
  Synthetic oligonucleotide

SEQ ID NO: 545154 - DNA, 56 bp, Artificial; identical to SEQ ID NO: 322249
  Synthetic oligonucleotide

SEQ ID NO: 545155 - DNA, 51 bp, Artificial; identical to SEQ ID NO: 322250
  Synthetic oligonucleotide

SEQ ID NO: 545156 - DNA, 60 bp, Artificial; identical to SEQ ID NO: 322252
  Synthetic oligonucleotide

SEQ ID NO: 545157 - DNA, 54 bp, Artificial; identical to SEQ ID NO: 322254
  Synthetic oligonucleotide

SEQ ID NO: 545158 - DNA, 55 bp, Artificial; identical to SEQ ID NO: 322256
  Synthetic oligonucleotide

SEQ ID NO: 545159 - DNA, 58 bp, Artificial; identical to SEQ ID NO: 322257
  Synthetic oligonucleotide

SEQ ID NO: 545160 - DNA, 60 bp, Artificial; identical to SEQ ID NO: 322258
  Synthetic oligonucleotide

SEQ ID NO: 545161 - DNA, 59 bp, Artificial; identical to SEQ ID NO: 322259
  Synthetic oligonucleotide

SEQ ID NO: 545162 - DNA, 55 bp, Artificial; identical to SEQ ID NO: 322260
  Synthetic oligonucleotide

SEQ ID NO: 545163 - DNA, 56 bp, Artificial; identical to SEQ ID NO: 322264
  Synthetic oligonucleotide

SEQ ID NO: 545164 - DNA, 60 bp, Artificial; identical to SEQ ID NO: 322266
  Synthetic oligonucleotide

SEQ ID NO: 545165 - DNA, 57 bp, Artificial; identical to SEQ ID NO: 322267
  Synthetic oligonucleotide

SEQ ID NO: 545166 - DNA, 55 bp, Artificial; identical to SEQ ID NO: 11554
  Synthetic oligonucleotide

SEQ ID NO: 545167 - DNA, 60 bp, Artificial; identical to SEQ ID NO: 322272
  Synthetic oligonucleotide

SEQ ID NO: 545168 - DNA, 58 bp, Artificial; identical to SEQ ID NO: 322273
  Synthetic oligonucleotide

SEQ ID NO: 545169 - DNA, 60 bp, Artificial; identical to SEQ ID NO: 322274
  Synthetic oligonucleotide

SEQ ID NO: 545170 - DNA, 60 bp, Artificial; identical to SEQ ID NO: 322275
  Synthetic oligonucleotide

SEQ ID NO: 545171 - DNA, 50 bp, Artificial; identical to SEQ ID NO: 322276
  Synthetic oligonucleotide

SEQ ID NO: 545172 - DNA, 60 bp, Artificial; identical to SEQ ID NO: 322280
  Synthetic oligonucleotide

SEQ ID NO: 545173 - DNA, 55 bp, Artificial; identical to SEQ ID NO: 322283
  Synthetic oligonucleotide

SEQ ID NO: 545174 - DNA, 55 bp, Artificial; identical to SEQ ID NO: 322284
  Synthetic oligonucleotide

SEQ ID NO: 545175 - DNA, 52 bp, Artificial; identical to SEQ ID NO: 322285
  Synthetic oligonucleotide

SEQ ID NO: 545176 - DNA, 57 bp, Artificial; identical to SEQ ID NO: 322287
  Synthetic oligonucleotide

SEQ ID NO: 545177 - DNA, 60 bp, Artificial; identical to SEQ ID NO: 322292
  Synthetic oligonucleotide

SEQ ID NO: 545178 - DNA, 60 bp, Artificial; identical to SEQ ID NO: 322293
  Synthetic oligonucleotide

SEQ ID NO: 545179 - DNA, 58 bp, Artificial; identical to SEQ ID NO: 322299
  Synthetic oligonucleotide

SEQ ID NO: 545180 - DNA, 53 bp, Artificial; identical to SEQ ID NO: 322300
  Synthetic oligonucleotide

SEQ ID NO: 545181 - DNA, 55 bp, Artificial; identical to SEQ ID NO: 322301
  Synthetic oligonucleotide

SEQ ID NO: 545182 - DNA, 58 bp, Artificial; identical to SEQ ID NO: 17655
  Synthetic oligonucleotide

SEQ ID NO: 545183 - DNA, 60 bp, Artificial; identical to SEQ ID NO: 8475
  Synthetic oligonucleotide

SEQ ID NO: 545184 - DNA, 55 bp, Artificial; identical to SEQ ID NO: 322307
  Synthetic oligonucleotide

SEQ ID NO: 545185 - DNA, 58 bp, Artificial; identical to SEQ ID NO: 322311
  Synthetic oligonucleotide

SEQ ID NO: 545186 - DNA, 52 bp, Artificial; identical to SEQ ID NO: 322312
  Synthetic oligonucleotide

SEQ ID NO: 545187 - DNA, 55 bp, Artificial; identical to SEQ ID NO: 322315
  Synthetic oligonucleotide

SEQ ID NO: 545188 - DNA, 60 bp, Artificial; identical to SEQ ID NO: 322316
  Synthetic oligonucleotide

SEQ ID NO: 545189 - DNA, 57 bp, Artificial; identical to SEQ ID NO: 322317
  Synthetic oligonucleotide

SEQ ID NO: 545190 - DNA, 60 bp, Artificial; identical to SEQ ID NO: 322319
  Synthetic oligonucleotide

SEQ ID NO: 545191 - DNA, 60 bp, Artificial; identical to SEQ ID NO: 8460
  Synthetic oligonucleotide

SEQ ID NO: 545192 - DNA, 60 bp, Artificial; identical to SEQ ID NO: 322324
  Synthetic oligonucleotide

SEQ ID NO: 545193 - DNA, 59 bp, Artificial; identical to SEQ ID NO: 322327
  Synthetic oligonucleotide

SEQ ID NO: 545194 - DNA, 57 bp, Artificial; identical to SEQ ID NO: 322328
  Synthetic oligonucleotide

SEQ ID NO: 545195 - DNA, 60 bp, Artificial; identical to SEQ ID NO: 10576
  Synthetic oligonucleotide

SEQ ID NO: 545196 - DNA, 58 bp, Artificial; identical to SEQ ID NO: 322332
  Synthetic oligonucleotide

SEQ ID NO: 545197 - DNA, 55 bp, Artificial; identical to SEQ ID NO: 322334
  Synthetic oligonucleotide

SEQ ID NO: 545198 - DNA, 55 bp, Artificial; identical to SEQ ID NO: 322335
  Synthetic oligonucleotide

SEQ ID NO: 545199 - DNA, 56 bp, Artificial; identical to SEQ ID NO: 322336
  Synthetic oligonucleotide

SEQ ID NO: 545200 - DNA, 55 bp, Artificial; identical to SEQ ID NO: 322341
  Synthetic oligonucleotide

SEQ ID NO: 545201 - DNA, 60 bp, Artificial; identical to SEQ ID NO: 15477
  Synthetic oligonucleotide

SEQ ID NO: 545202 - DNA, 55 bp, Artificial; identical to SEQ ID NO: 322343
  Synthetic oligonucleotide

SEQ ID NO: 545203 - DNA, 59 bp, Artificial; identical to SEQ ID NO: 322345
  Synthetic oligonucleotide

SEQ ID NO: 545204 - DNA, 56 bp, Artificial; identical to SEQ ID NO: 322349
  Synthetic oligonucleotide

SEQ ID NO: 545205 - DNA, 52 bp, Artificial; identical to SEQ ID NO: 322356
  Synthetic oligonucleotide

SEQ ID NO: 545206 - DNA, 60 bp, Artificial; identical to SEQ ID NO: 322361
  Synthetic oligonucleotide

SEQ ID NO: 545207 - DNA, 60 bp, Artificial; identical to SEQ ID NO: 322362
  Synthetic oligonucleotide

SEQ ID NO: 545208 - DNA, 57 bp, Artificial; identical to SEQ ID NO: 322365
  Synthetic oligonucleotide

SEQ ID NO: 545209 - DNA, 60 bp, Artificial; identical to SEQ ID NO: 51531
  Synthetic oligonucleotide

SEQ ID NO: 545210 - DNA, 60 bp, Artificial; identical to SEQ ID NO: 322369
  Synthetic oligonucleotide

SEQ ID NO: 545211 - DNA, 59 bp, Artificial; identical to SEQ ID NO: 322370
  Synthetic oligonucleotide

SEQ ID NO: 545212 - DNA, 60 bp, Artificial; identical to SEQ ID NO: 322371
  Synthetic oligonucleotide

SEQ ID NO: 545213 - DNA, 60 bp, Artificial; identical to SEQ ID NO: 322372
  Synthetic oligonucleotide

SEQ ID NO: 545214 - DNA, 60 bp, Artificial; identical to SEQ ID NO: 322374
  Synthetic oligonucleotide

SEQ ID NO: 545215 - DNA, 60 bp, Artificial; identical to SEQ ID NO: 322379
  Synthetic oligonucleotide

SEQ ID NO: 545216 - DNA, 60 bp, Artificial; identical to SEQ ID NO: 322382
  Synthetic oligonucleotide

SEQ ID NO: 545217 - DNA, 51 bp, Artificial; identical to SEQ ID NO: 322383
  Synthetic oligonucleotide

SEQ ID NO: 545218 - DNA, 57 bp, Artificial; identical to SEQ ID NO: 322384
  Synthetic oligonucleotide

SEQ ID NO: 545219 - DNA, 60 bp, Artificial; identical to SEQ ID NO: 322385
  Synthetic oligonucleotide

SEQ ID NO: 545220 - DNA, 55 bp, Artificial; identical to SEQ ID NO: 322391
  Synthetic oligonucleotide

SEQ ID NO: 545221 - DNA, 57 bp, Artificial; identical to SEQ ID NO: 322394
  Synthetic oligonucleotide

SEQ ID NO: 545222 - DNA, 51 bp, Artificial; identical to SEQ ID NO: 322395
  Synthetic oligonucleotide

SEQ ID NO: 545223 - DNA, 58 bp, Artificial; identical to SEQ ID NO: 322396
  Synthetic oligonucleotide

SEQ ID NO: 545224 - DNA, 60 bp, Artificial; identical to SEQ ID NO: 322397
  Synthetic oligonucleotide

SEQ ID NO: 545225 - DNA, 55 bp, Artificial; identical to SEQ ID NO: 322398
  Synthetic oligonucleotide

SEQ ID NO: 545226 - DNA, 56 bp, Artificial; identical to SEQ ID NO: 322399
  Synthetic oligonucleotide

SEQ ID NO: 545227 - DNA, 58 bp, Artificial; identical to SEQ ID NO: 10549
  Synthetic oligonucleotide

SEQ ID NO: 545228 - DNA, 57 bp, Artificial; identical to SEQ ID NO: 322400
  Synthetic oligonucleotide

SEQ ID NO: 545229 - DNA, 60 bp, Artificial; identical to SEQ ID NO: 322401
  Synthetic oligonucleotide

SEQ ID NO: 545230 - DNA, 58 bp, Artificial; identical to SEQ ID NO: 322405
  Synthetic oligonucleotide

SEQ ID NO: 545231 - DNA, 60 bp, Artificial; identical to SEQ ID NO: 322407
  Synthetic oligonucleotide

SEQ ID NO: 545232 - DNA, 55 bp, Artificial; identical to SEQ ID NO: 322408
  Synthetic oligonucleotide

SEQ ID NO: 545233 - DNA, 58 bp, Artificial; identical to SEQ ID NO: 322411
  Synthetic oligonucleotide

SEQ ID NO: 545234 - DNA, 60 bp, Artificial; identical to SEQ ID NO: 322413
  Synthetic oligonucleotide

SEQ ID NO: 545235 - DNA, 60 bp, Artificial; identical to SEQ ID NO: 322414
  Synthetic oligonucleotide

SEQ ID NO: 545236 - DNA, 55 bp, Artificial; identical to SEQ ID NO: 322424
  Synthetic oligonucleotide

SEQ ID NO: 545237 - DNA, 55 bp, Artificial; identical to SEQ ID NO: 322430
  Synthetic oligonucleotide

SEQ ID NO: 545238 - DNA, 51 bp, Artificial; identical to SEQ ID NO: 322431
  Synthetic oligonucleotide

SEQ ID NO: 545239 - DNA, 58 bp, Artificial; identical to SEQ ID NO: 322434
  Synthetic oligonucleotide

SEQ ID NO: 545240 - DNA, 60 bp, Artificial; identical to SEQ ID NO: 322439
  Synthetic oligonucleotide

SEQ ID NO: 545241 - DNA, 60 bp, Artificial; identical to SEQ ID NO: 322443
  Synthetic oligonucleotide

SEQ ID NO: 545242 - DNA, 60 bp, Artificial; identical to SEQ ID NO: 322444
  Synthetic oligonucleotide

SEQ ID NO: 545243 - DNA, 60 bp, Artificial; identical to SEQ ID NO: 322445
  Synthetic oligonucleotide

SEQ ID NO: 545244 - DNA, 59 bp, Artificial; identical to SEQ ID NO: 322447
  Synthetic oligonucleotide

SEQ ID NO: 545245 - DNA, 60 bp, Artificial; identical to SEQ ID NO: 322448
  Synthetic oligonucleotide

SEQ ID NO: 545246 - DNA, 57 bp, Artificial; identical to SEQ ID NO: 322450
  Synthetic oligonucleotide

SEQ ID NO: 545247 - DNA, 58 bp, Artificial; identical to SEQ ID NO: 322451
  Synthetic oligonucleotide

SEQ ID NO: 545248 - DNA, 55 bp, Artificial; identical to SEQ ID NO: 322452
  Synthetic oligonucleotide

SEQ ID NO: 545249 - DNA, 52 bp, Artificial; identical to SEQ ID NO: 322456
  Synthetic oligonucleotide

SEQ ID NO: 545250 - DNA, 60 bp, Artificial; identical to SEQ ID NO: 322457
  Synthetic oligonucleotide

SEQ ID NO: 545251 - DNA, 60 bp, Artificial; identical to SEQ ID NO: 12124
  Synthetic oligonucleotide

SEQ ID NO: 545252 - DNA, 59 bp, Artificial; identical to SEQ ID NO: 322458
  Synthetic oligonucleotide

SEQ ID NO: 545253 - DNA, 58 bp, Artificial; identical to SEQ ID NO: 322459
  Synthetic oligonucleotide

SEQ ID NO: 545254 - DNA, 50 bp, Artificial; identical to SEQ ID NO: 322460
  Synthetic oligonucleotide

SEQ ID NO: 545255 - DNA, 58 bp, Artificial; identical to SEQ ID NO: 322463
  Synthetic oligonucleotide

SEQ ID NO: 545256 - DNA, 53 bp, Artificial; identical to SEQ ID NO: 322466
  Synthetic oligonucleotide

SEQ ID NO: 545257 - DNA, 57 bp, Artificial; identical to SEQ ID NO: 322469
  Synthetic oligonucleotide

SEQ ID NO: 545258 - DNA, 56 bp, Artificial; identical to SEQ ID NO: 322471
  Synthetic oligonucleotide

SEQ ID NO: 545259 - DNA, 56 bp, Artificial; identical to SEQ ID NO: 322472
  Synthetic oligonucleotide

SEQ ID NO: 545260 - DNA, 54 bp, Artificial; identical to SEQ ID NO: 322477
  Synthetic oligonucleotide

SEQ ID NO: 545261 - DNA, 56 bp, Artificial; identical to SEQ ID NO: 322479
  Synthetic oligonucleotide

SEQ ID NO: 545262 - DNA, 60 bp, Artificial; identical to SEQ ID NO: 322481
  Synthetic oligonucleotide

SEQ ID NO: 545263 - DNA, 60 bp, Artificial; identical to SEQ ID NO: 322483
  Synthetic oligonucleotide

SEQ ID NO: 545264 - DNA, 55 bp, Artificial; identical to SEQ ID NO: 322484
  Synthetic oligonucleotide

SEQ ID NO: 545265 - DNA, 52 bp, Artificial; identical to SEQ ID NO: 322489
  Synthetic oligonucleotide

SEQ ID NO: 545266 - DNA, 59 bp, Artificial; identical to SEQ ID NO: 322490
  Synthetic oligonucleotide

SEQ ID NO: 545267 - DNA, 60 bp, Artificial; identical to SEQ ID NO: 322493
  Synthetic oligonucleotide

SEQ ID NO: 545268 - DNA, 55 bp, Artificial; identical to SEQ ID NO: 322495
  Synthetic oligonucleotide

SEQ ID NO: 545269 - DNA, 55 bp, Artificial; identical to SEQ ID NO: 322500
  Synthetic oligonucleotide

SEQ ID NO: 545270 - DNA, 60 bp, Artificial; identical to SEQ ID NO: 322502
  Synthetic oligonucleotide

SEQ ID NO: 545271 - DNA, 60 bp, Artificial; identical to SEQ ID NO: 322508
  Synthetic oligonucleotide

SEQ ID NO: 545272 - DNA, 57 bp, Artificial; identical to SEQ ID NO: 322511
  Synthetic oligonucleotide

SEQ ID NO: 545273 - DNA, 56 bp, Artificial; identical to SEQ ID NO: 322512
  Synthetic oligonucleotide

SEQ ID NO: 545274 - DNA, 52 bp, Artificial; identical to SEQ ID NO: 322514
  Synthetic oligonucleotide

SEQ ID NO: 545275 - DNA, 60 bp, Artificial; identical to SEQ ID NO: 322519
  Synthetic oligonucleotide

SEQ ID NO: 545276 - DNA, 59 bp, Artificial; identical to SEQ ID NO: 322523
  Synthetic oligonucleotide

SEQ ID NO: 545277 - DNA, 57 bp, Artificial; identical to SEQ ID NO: 322525
  Synthetic oligonucleotide

SEQ ID NO: 545278 - DNA, 60 bp, Artificial; identical to SEQ ID NO: 322527
  Synthetic oligonucleotide

SEQ ID NO: 545279 - DNA, 55 bp, Artificial; identical to SEQ ID NO: 322529
  Synthetic oligonucleotide

SEQ ID NO: 545280 - DNA, 60 bp, Artificial; identical to SEQ ID NO: 12894
  Synthetic oligonucleotide

SEQ ID NO: 545281 - DNA, 57 bp, Artificial; identical to SEQ ID NO: 322539
  Synthetic oligonucleotide

SEQ ID NO: 545282 - DNA, 55 bp, Artificial; identical to SEQ ID NO: 322540
  Synthetic oligonucleotide

SEQ ID NO: 545283 - DNA, 55 bp, Artificial; identical to SEQ ID NO: 322542
  Synthetic oligonucleotide

SEQ ID NO: 545284 - DNA, 55 bp, Artificial; identical to SEQ ID NO: 322543
  Synthetic oligonucleotide

SEQ ID NO: 545285 - DNA, 55 bp, Artificial; identical to SEQ ID NO: 322544
  Synthetic oligonucleotide

SEQ ID NO: 545286 - DNA, 55 bp, Artificial; identical to SEQ ID NO: 322545
  Synthetic oligonucleotide

SEQ ID NO: 545287 - DNA, 57 bp, Artificial; identical to SEQ ID NO: 322546
  Synthetic oligonucleotide

SEQ ID NO: 545288 - DNA, 60 bp, Artificial; identical to SEQ ID NO: 322550
  Synthetic oligonucleotide

SEQ ID NO: 545289 - DNA, 55 bp, Artificial; identical to SEQ ID NO: 322551
  Synthetic oligonucleotide

SEQ ID NO: 545290 - DNA, 59 bp, Artificial; identical to SEQ ID NO: 322556
  Synthetic oligonucleotide

SEQ ID NO: 545291 - DNA, 51 bp, Artificial; identical to SEQ ID NO: 322559
  Synthetic oligonucleotide

SEQ ID NO: 545292 - DNA, 60 bp, Artificial; identical to SEQ ID NO: 322560
  Synthetic oligonucleotide

SEQ ID NO: 545293 - DNA, 59 bp, Artificial; identical to SEQ ID NO: 322561
  Synthetic oligonucleotide

SEQ ID NO: 545294 - DNA, 58 bp, Artificial; identical to SEQ ID NO: 322562
  Synthetic oligonucleotide

SEQ ID NO: 545295 - DNA, 60 bp, Artificial; identical to SEQ ID NO: 322570
  Synthetic oligonucleotide

SEQ ID NO: 545296 - DNA, 60 bp, Artificial; identical to SEQ ID NO: 322571
  Synthetic oligonucleotide

SEQ ID NO: 545297 - DNA, 60 bp, Artificial; identical to SEQ ID NO: 322574
  Synthetic oligonucleotide

SEQ ID NO: 545298 - DNA, 56 bp, Artificial; identical to SEQ ID NO: 322576
  Synthetic oligonucleotide

SEQ ID NO: 545299 - DNA, 55 bp, Artificial; identical to SEQ ID NO: 322578
  Synthetic oligonucleotide

SEQ ID NO: 545300 - DNA, 58 bp, Artificial; identical to SEQ ID NO: 322582
  Synthetic oligonucleotide

SEQ ID NO: 545301 - DNA, 59 bp, Artificial; identical to SEQ ID NO: 322584
  Synthetic oligonucleotide

SEQ ID NO: 545302 - DNA, 60 bp, Artificial; identical to SEQ ID NO: 322588
  Synthetic oligonucleotide

SEQ ID NO: 545303 - DNA, 60 bp, Artificial; identical to SEQ ID NO: 322590
  Synthetic oligonucleotide

SEQ ID NO: 545304 - DNA, 60 bp, Artificial; identical to SEQ ID NO: 322591
  Synthetic oligonucleotide

SEQ ID NO: 545305 - DNA, 55 bp, Artificial; identical to SEQ ID NO: 322592
  Synthetic oligonucleotide

SEQ ID NO: 545306 - DNA, 59 bp, Artificial; identical to SEQ ID NO: 322593
  Synthetic oligonucleotide

SEQ ID NO: 545307 - DNA, 54 bp, Artificial; identical to SEQ ID NO: 322596
  Synthetic oligonucleotide

SEQ ID NO: 545308 - DNA, 59 bp, Artificial; identical to SEQ ID NO: 322599
  Synthetic oligonucleotide

SEQ ID NO: 545309 - DNA, 55 bp, Artificial; identical to SEQ ID NO: 322600
  Synthetic oligonucleotide

SEQ ID NO: 545310 - DNA, 55 bp, Artificial; identical to SEQ ID NO: 322601
  Synthetic oligonucleotide

SEQ ID NO: 545311 - DNA, 59 bp, Artificial; identical to SEQ ID NO: 322602
  Synthetic oligonucleotide

SEQ ID NO: 545312 - DNA, 54 bp, Artificial; identical to SEQ ID NO: 322604
  Synthetic oligonucleotide

SEQ ID NO: 545313 - DNA, 60 bp, Artificial; identical to SEQ ID NO: 7269
  Synthetic oligonucleotide

SEQ ID NO: 545314 - DNA, 60 bp, Artificial; identical to SEQ ID NO: 322608
  Synthetic oligonucleotide

SEQ ID NO: 545315 - DNA, 60 bp, Artificial; identical to SEQ ID NO: 322610
  Synthetic oligonucleotide

SEQ ID NO: 545316 - DNA, 52 bp, Artificial; identical to SEQ ID NO: 322611
  Synthetic oligonucleotide

SEQ ID NO: 545317 - DNA, 54 bp, Artificial; identical to SEQ ID NO: 322613
  Synthetic oligonucleotide

SEQ ID NO: 545318 - DNA, 54 bp, Artificial; identical to SEQ ID NO: 322614
  Synthetic oligonucleotide

SEQ ID NO: 545319 - DNA, 51 bp, Artificial; identical to SEQ ID NO: 322615
  Synthetic oligonucleotide

SEQ ID NO: 545320 - DNA, 60 bp, Artificial; identical to SEQ ID NO: 322616
  Synthetic oligonucleotide

SEQ ID NO: 545321 - DNA, 60 bp, Artificial; identical to SEQ ID NO: 322620
  Synthetic oligonucleotide

SEQ ID NO: 545322 - DNA, 52 bp, Artificial; identical to SEQ ID NO: 322624
  Synthetic oligonucleotide

SEQ ID NO: 545323 - DNA, 54 bp, Artificial; identical to SEQ ID NO: 322625
  Synthetic oligonucleotide

SEQ ID NO: 545324 - DNA, 55 bp, Artificial; identical to SEQ ID NO: 6168
  Synthetic oligonucleotide

SEQ ID NO: 545325 - DNA, 52 bp, Artificial; identical to SEQ ID NO: 322626
  Synthetic oligonucleotide

SEQ ID NO: 545326 - DNA, 54 bp, Artificial; identical to SEQ ID NO: 322628
  Synthetic oligonucleotide

SEQ ID NO: 545327 - DNA, 60 bp, Artificial; identical to SEQ ID NO: 322630
  Synthetic oligonucleotide

SEQ ID NO: 545328 - DNA, 54 bp, Artificial; identical to SEQ ID NO: 18030
  Synthetic oligonucleotide

SEQ ID NO: 545329 - DNA, 50 bp, Artificial; identical to SEQ ID NO: 322632
  Synthetic oligonucleotide

SEQ ID NO: 545330 - DNA, 58 bp, Artificial; identical to SEQ ID NO: 322636
  Synthetic oligonucleotide

SEQ ID NO: 545331 - DNA, 59 bp, Artificial; identical to SEQ ID NO: 322639
  Synthetic oligonucleotide

SEQ ID NO: 545332 - DNA, 60 bp, Artificial; identical to SEQ ID NO: 322641
  Synthetic oligonucleotide

SEQ ID NO: 545333 - DNA, 54 bp, Artificial; identical to SEQ ID NO: 322642
  Synthetic oligonucleotide

SEQ ID NO: 545334 - DNA, 54 bp, Artificial; identical to SEQ ID NO: 322643
  Synthetic oligonucleotide

SEQ ID NO: 545335 - DNA, 54 bp, Artificial; identical to SEQ ID NO: 322644
  Synthetic oligonucleotide

SEQ ID NO: 545336 - DNA, 52 bp, Artificial; identical to SEQ ID NO: 322646
  Synthetic oligonucleotide

SEQ ID NO: 545337 - DNA, 54 bp, Artificial; identical to SEQ ID NO: 322651
  Synthetic oligonucleotide

SEQ ID NO: 545338 - DNA, 53 bp, Artificial; identical to SEQ ID NO: 322660
  Synthetic oligonucleotide

SEQ ID NO: 545339 - DNA, 53 bp, Artificial; identical to SEQ ID NO: 322661
  Synthetic oligonucleotide

SEQ ID NO: 545340 - DNA, 55 bp, Artificial; identical to SEQ ID NO: 322667
  Synthetic oligonucleotide

SEQ ID NO: 545341 - DNA, 55 bp, Artificial; identical to SEQ ID NO: 322668
  Synthetic oligonucleotide

SEQ ID NO: 545342 - DNA, 52 bp, Artificial; identical to SEQ ID NO: 322670
  Synthetic oligonucleotide

SEQ ID NO: 545343 - DNA, 57 bp, Artificial; identical to SEQ ID NO: 322671
  Synthetic oligonucleotide

SEQ ID NO: 545344 - DNA, 60 bp, Artificial; identical to SEQ ID NO: 322674
  Synthetic oligonucleotide

SEQ ID NO: 545345 - DNA, 53 bp, Artificial; identical to SEQ ID NO: 11986
  Synthetic oligonucleotide

SEQ ID NO: 545346 - DNA, 60 bp, Artificial; identical to SEQ ID NO: 322680
  Synthetic oligonucleotide

SEQ ID NO: 545347 - DNA, 55 bp, Artificial; identical to SEQ ID NO: 322681
  Synthetic oligonucleotide

SEQ ID NO: 545348 - DNA, 58 bp, Artificial; identical to SEQ ID NO: 322684
  Synthetic oligonucleotide

SEQ ID NO: 545349 - DNA, 60 bp, Artificial; identical to SEQ ID NO: 322686
  Synthetic oligonucleotide

SEQ ID NO: 545350 - DNA, 50 bp, Artificial; identical to SEQ ID NO: 322689
  Synthetic oligonucleotide

SEQ ID NO: 545351 - DNA, 57 bp, Artificial; identical to SEQ ID NO: 322692
  Synthetic oligonucleotide

SEQ ID NO: 545352 - DNA, 56 bp, Artificial; identical to SEQ ID NO: 322699
  Synthetic oligonucleotide

SEQ ID NO: 545353 - DNA, 56 bp, Artificial; identical to SEQ ID NO: 322701
  Synthetic oligonucleotide

SEQ ID NO: 545354 - DNA, 60 bp, Artificial; identical to SEQ ID NO: 322709
  Synthetic oligonucleotide

SEQ ID NO: 545355 - DNA, 59 bp, Artificial; identical to SEQ ID NO: 322710
  Synthetic oligonucleotide

SEQ ID NO: 545356 - DNA, 55 bp, Artificial; identical to SEQ ID NO: 322711
  Synthetic oligonucleotide

SEQ ID NO: 545357 - DNA, 56 bp, Artificial; identical to SEQ ID NO: 322714
  Synthetic oligonucleotide

SEQ ID NO: 545358 - DNA, 55 bp, Artificial; identical to SEQ ID NO: 322717
  Synthetic oligonucleotide

SEQ ID NO: 545359 - DNA, 55 bp, Artificial; identical to SEQ ID NO: 322719
  Synthetic oligonucleotide

SEQ ID NO: 545360 - DNA, 60 bp, Artificial; identical to SEQ ID NO: 322720
  Synthetic oligonucleotide

SEQ ID NO: 545361 - DNA, 60 bp, Artificial; identical to SEQ ID NO: 322726
  Synthetic oligonucleotide

SEQ ID NO: 545362 - DNA, 60 bp, Artificial; identical to SEQ ID NO: 322729
  Synthetic oligonucleotide

SEQ ID NO: 545363 - DNA, 53 bp, Artificial; identical to SEQ ID NO: 322730
  Synthetic oligonucleotide

SEQ ID NO: 545364 - DNA, 57 bp, Artificial; identical to SEQ ID NO: 322732
  Synthetic oligonucleotide

SEQ ID NO: 545365 - DNA, 56 bp, Artificial; identical to SEQ ID NO: 322733
  Synthetic oligonucleotide

SEQ ID NO: 545366 - DNA, 52 bp, Artificial; identical to SEQ ID NO: 15949
  Synthetic oligonucleotide

SEQ ID NO: 545367 - DNA, 57 bp, Artificial; identical to SEQ ID NO: 322739
  Synthetic oligonucleotide

SEQ ID NO: 545368 - DNA, 59 bp, Artificial; identical to SEQ ID NO: 322741
  Synthetic oligonucleotide

SEQ ID NO: 545369 - DNA, 55 bp, Artificial; identical to SEQ ID NO: 322742
  Synthetic oligonucleotide

SEQ ID NO: 545370 - DNA, 56 bp, Artificial; identical to SEQ ID NO: 322745
  Synthetic oligonucleotide

SEQ ID NO: 545371 - DNA, 60 bp, Artificial; identical to SEQ ID NO: 322748
  Synthetic oligonucleotide

SEQ ID NO: 545372 - DNA, 55 bp, Artificial; identical to SEQ ID NO: 322754
  Synthetic oligonucleotide

SEQ ID NO: 545373 - DNA, 57 bp, Artificial; identical to SEQ ID NO: 322758
  Synthetic oligonucleotide

SEQ ID NO: 545374 - DNA, 60 bp, Artificial; identical to SEQ ID NO: 322759
  Synthetic oligonucleotide

SEQ ID NO: 545375 - DNA, 55 bp, Artificial; identical to SEQ ID NO: 322761
  Synthetic oligonucleotide

SEQ ID NO: 545376 - DNA, 60 bp, Artificial; identical to SEQ ID NO: 322763
  Synthetic oligonucleotide

SEQ ID NO: 545377 - DNA, 55 bp, Artificial; identical to SEQ ID NO: 322764
  Synthetic oligonucleotide

SEQ ID NO: 545378 - DNA, 53 bp, Artificial; identical to SEQ ID NO: 322769
  Synthetic oligonucleotide

SEQ ID NO: 545379 - DNA, 57 bp, Artificial; identical to SEQ ID NO: 322771
  Synthetic oligonucleotide

SEQ ID NO: 545380 - DNA, 55 bp, Artificial; identical to SEQ ID NO: 322772
  Synthetic oligonucleotide

SEQ ID NO: 545381 - DNA, 55 bp, Artificial; identical to SEQ ID NO: 322774
  Synthetic oligonucleotide

SEQ ID NO: 545382 - DNA, 52 bp, Artificial; identical to SEQ ID NO: 322776
  Synthetic oligonucleotide

SEQ ID NO: 545383 - DNA, 56 bp, Artificial; identical to SEQ ID NO: 322779
  Synthetic oligonucleotide

SEQ ID NO: 545384 - DNA, 59 bp, Artificial; identical to SEQ ID NO: 322781
  Synthetic oligonucleotide

SEQ ID NO: 545385 - DNA, 55 bp, Artificial; identical to SEQ ID NO: 322782
  Synthetic oligonucleotide

SEQ ID NO: 545386 - DNA, 60 bp, Artificial; identical to SEQ ID NO: 322784
  Synthetic oligonucleotide

SEQ ID NO: 545387 - DNA, 60 bp, Artificial; identical to SEQ ID NO: 322785
  Synthetic oligonucleotide

SEQ ID NO: 545388 - DNA, 57 bp, Artificial; identical to SEQ ID NO: 322786
  Synthetic oligonucleotide

SEQ ID NO: 545389 - DNA, 60 bp, Artificial; identical to SEQ ID NO: 322791
  Synthetic oligonucleotide

SEQ ID NO: 545390 - DNA, 53 bp, Artificial; identical to SEQ ID NO: 322792
  Synthetic oligonucleotide

SEQ ID NO: 545391 - DNA, 59 bp, Artificial; identical to SEQ ID NO: 322793
  Synthetic oligonucleotide

SEQ ID NO: 545392 - DNA, 55 bp, Artificial; identical to SEQ ID NO: 322794
  Synthetic oligonucleotide

SEQ ID NO: 545393 - DNA, 59 bp, Artificial; identical to SEQ ID NO: 322795
  Synthetic oligonucleotide

SEQ ID NO: 545394 - DNA, 60 bp, Artificial; identical to SEQ ID NO: 13026
  Synthetic oligonucleotide

SEQ ID NO: 545395 - DNA, 60 bp, Artificial; identical to SEQ ID NO: 322796
  Synthetic oligonucleotide

SEQ ID NO: 545396 - DNA, 55 bp, Artificial; identical to SEQ ID NO: 322799
  Synthetic oligonucleotide

SEQ ID NO: 545397 - DNA, 50 bp, Artificial; identical to SEQ ID NO: 322800
  Synthetic oligonucleotide

SEQ ID NO: 545398 - DNA, 57 bp, Artificial; identical to SEQ ID NO: 322802
  Synthetic oligonucleotide

SEQ ID NO: 545399 - DNA, 51 bp, Artificial; identical to SEQ ID NO: 322803
  Synthetic oligonucleotide

SEQ ID NO: 545400 - DNA, 51 bp, Artificial; identical to SEQ ID NO: 322805
  Synthetic oligonucleotide

SEQ ID NO: 545401 - DNA, 58 bp, Artificial; identical to SEQ ID NO: 322806
  Synthetic oligonucleotide

SEQ ID NO: 545402 - DNA, 60 bp, Artificial; identical to SEQ ID NO: 322810
  Synthetic oligonucleotide

SEQ ID NO: 545403 - DNA, 54 bp, Artificial; identical to SEQ ID NO: 322811
  Synthetic oligonucleotide

SEQ ID NO: 545404 - DNA, 59 bp, Artificial; identical to SEQ ID NO: 322813
  Synthetic oligonucleotide

SEQ ID NO: 545405 - DNA, 56 bp, Artificial; identical to SEQ ID NO: 322814
  Synthetic oligonucleotide

SEQ ID NO: 545406 - DNA, 55 bp, Artificial; identical to SEQ ID NO: 322817
  Synthetic oligonucleotide

SEQ ID NO: 545407 - DNA, 59 bp, Artificial; identical to SEQ ID NO: 322819
  Synthetic oligonucleotide

SEQ ID NO: 545408 - DNA, 57 bp, Artificial; identical to SEQ ID NO: 322821
  Synthetic oligonucleotide

SEQ ID NO: 545409 - DNA, 55 bp, Artificial; identical to SEQ ID NO: 322822
  Synthetic oligonucleotide

SEQ ID NO: 545410 - DNA, 57 bp, Artificial; identical to SEQ ID NO: 322826
  Synthetic oligonucleotide

SEQ ID NO: 545411 - DNA, 59 bp, Artificial; identical to SEQ ID NO: 322827
  Synthetic oligonucleotide

SEQ ID NO: 545412 - DNA, 55 bp, Artificial; identical to SEQ ID NO: 322828
  Synthetic oligonucleotide

SEQ ID NO: 545413 - DNA, 60 bp, Artificial; identical to SEQ ID NO: 322829
  Synthetic oligonucleotide

SEQ ID NO: 545414 - DNA, 56 bp, Artificial; identical to SEQ ID NO: 322830
  Synthetic oligonucleotide

SEQ ID NO: 545415 - DNA, 60 bp, Artificial; identical to SEQ ID NO: 8625
  Synthetic oligonucleotide

SEQ ID NO: 545416 - DNA, 58 bp, Artificial; identical to SEQ ID NO: 322833
  Synthetic oligonucleotide

SEQ ID NO: 545417 - DNA, 54 bp, Artificial; identical to SEQ ID NO: 322838
  Synthetic oligonucleotide

SEQ ID NO: 545418 - DNA, 60 bp, Artificial; identical to SEQ ID NO: 322839
  Synthetic oligonucleotide

SEQ ID NO: 545419 - DNA, 55 bp, Artificial; identical to SEQ ID NO: 322841
  Synthetic oligonucleotide

SEQ ID NO: 545420 - DNA, 52 bp, Artificial; identical to SEQ ID NO: 322842
  Synthetic oligonucleotide

SEQ ID NO: 545421 - DNA, 60 bp, Artificial; identical to SEQ ID NO: 12828
  Synthetic oligonucleotide

SEQ ID NO: 545422 - DNA, 60 bp, Artificial; identical to SEQ ID NO: 322846
  Synthetic oligonucleotide

SEQ ID NO: 545423 - DNA, 60 bp, Artificial; identical to SEQ ID NO: 322847
  Synthetic oligonucleotide

SEQ ID NO: 545424 - DNA, 55 bp, Artificial; identical to SEQ ID NO: 322848
  Synthetic oligonucleotide

SEQ ID NO: 545425 - DNA, 58 bp, Artificial; identical to SEQ ID NO: 322850
  Synthetic oligonucleotide

SEQ ID NO: 545426 - DNA, 53 bp, Artificial; identical to SEQ ID NO: 322852
  Synthetic oligonucleotide

SEQ ID NO: 545427 - DNA, 60 bp, Artificial; identical to SEQ ID NO: 322853
  Synthetic oligonucleotide

SEQ ID NO: 545428 - DNA, 60 bp, Artificial; identical to SEQ ID NO: 322854
  Synthetic oligonucleotide

SEQ ID NO: 545429 - DNA, 57 bp, Artificial; identical to SEQ ID NO: 322855
  Synthetic oligonucleotide

SEQ ID NO: 545430 - DNA, 59 bp, Artificial; identical to SEQ ID NO: 322863
  Synthetic oligonucleotide

SEQ ID NO: 545431 - DNA, 60 bp, Artificial; identical to SEQ ID NO: 322864
  Synthetic oligonucleotide

SEQ ID NO: 545432 - DNA, 60 bp, Artificial; identical to SEQ ID NO: 322865
  Synthetic oligonucleotide

SEQ ID NO: 545433 - DNA, 58 bp, Artificial; identical to SEQ ID NO: 322866
  Synthetic oligonucleotide

SEQ ID NO: 545434 - DNA, 60 bp, Artificial; identical to SEQ ID NO: 322875
  Synthetic oligonucleotide

SEQ ID NO: 545435 - DNA, 57 bp, Artificial; identical to SEQ ID NO: 322877
  Synthetic oligonucleotide

SEQ ID NO: 545436 - DNA, 60 bp, Artificial; identical to SEQ ID NO: 322881
  Synthetic oligonucleotide

SEQ ID NO: 545437 - DNA, 60 bp, Artificial; identical to SEQ ID NO: 322884
  Synthetic oligonucleotide

SEQ ID NO: 545438 - DNA, 59 bp, Artificial; identical to SEQ ID NO: 322885
  Synthetic oligonucleotide

SEQ ID NO: 545439 - DNA, 57 bp, Artificial; identical to SEQ ID NO: 322887
  Synthetic oligonucleotide

SEQ ID NO: 545440 - DNA, 60 bp, Artificial; identical to SEQ ID NO: 322891
  Synthetic oligonucleotide

SEQ ID NO: 545441 - DNA, 57 bp, Artificial; identical to SEQ ID NO: 322892
  Synthetic oligonucleotide

SEQ ID NO: 545442 - DNA, 59 bp, Artificial; identical to SEQ ID NO: 322897
  Synthetic oligonucleotide

SEQ ID NO: 545443 - DNA, 60 bp, Artificial; identical to SEQ ID NO: 12896
  Synthetic oligonucleotide

SEQ ID NO: 545444 - DNA, 58 bp, Artificial; identical to SEQ ID NO: 322899
  Synthetic oligonucleotide

SEQ ID NO: 545445 - DNA, 50 bp, Artificial; identical to SEQ ID NO: 322901
  Synthetic oligonucleotide

SEQ ID NO: 545446 - DNA, 58 bp, Artificial; identical to SEQ ID NO: 322903
  Synthetic oligonucleotide

SEQ ID NO: 545447 - DNA, 60 bp, Artificial; identical to SEQ ID NO: 322904
  Synthetic oligonucleotide

SEQ ID NO: 545448 - DNA, 60 bp, Artificial; identical to SEQ ID NO: 322905
  Synthetic oligonucleotide

SEQ ID NO: 545449 - DNA, 60 bp, Artificial; identical to SEQ ID NO: 322906
  Synthetic oligonucleotide

SEQ ID NO: 545450 - DNA, 57 bp, Artificial; identical to SEQ ID NO: 322910
  Synthetic oligonucleotide

SEQ ID NO: 545451 - DNA, 60 bp, Artificial; identical to SEQ ID NO: 322912
  Synthetic oligonucleotide

SEQ ID NO: 545452 - DNA, 60 bp, Artificial; identical to SEQ ID NO: 322914
  Synthetic oligonucleotide

SEQ ID NO: 545453 - DNA, 50 bp, Artificial; identical to SEQ ID NO: 322916
  Synthetic oligonucleotide

SEQ ID NO: 545454 - DNA, 55 bp, Artificial; identical to SEQ ID NO: 322917
  Synthetic oligonucleotide

SEQ ID NO: 545455 - DNA, 51 bp, Artificial; identical to SEQ ID NO: 322918
  Synthetic oligonucleotide

SEQ ID NO: 545456 - DNA, 55 bp, Artificial; identical to SEQ ID NO: 322931
  Synthetic oligonucleotide

SEQ ID NO: 545457 - DNA, 55 bp, Artificial; identical to SEQ ID NO: 322933
  Synthetic oligonucleotide

SEQ ID NO: 545458 - DNA, 60 bp, Artificial; identical to SEQ ID NO: 322934
  Synthetic oligonucleotide

SEQ ID NO: 545459 - DNA, 56 bp, Artificial; identical to SEQ ID NO: 322936
  Synthetic oligonucleotide

SEQ ID NO: 545460 - DNA, 50 bp, Artificial; identical to SEQ ID NO: 322937
  Synthetic oligonucleotide

SEQ ID NO: 545461 - DNA, 59 bp, Artificial; identical to SEQ ID NO: 322938
  Synthetic oligonucleotide

SEQ ID NO: 545462 - DNA, 60 bp, Artificial; identical to SEQ ID NO: 322939
  Synthetic oligonucleotide

SEQ ID NO: 545463 - DNA, 53 bp, Artificial; identical to SEQ ID NO: 322941
  Synthetic oligonucleotide

SEQ ID NO: 545464 - DNA, 60 bp, Artificial; identical to SEQ ID NO: 322942
  Synthetic oligonucleotide

SEQ ID NO: 545465 - DNA, 60 bp, Artificial; identical to SEQ ID NO: 322944
  Synthetic oligonucleotide

SEQ ID NO: 545466 - DNA, 58 bp, Artificial; identical to SEQ ID NO: 322946
  Synthetic oligonucleotide

SEQ ID NO: 545467 - DNA, 59 bp, Artificial; identical to SEQ ID NO: 322948
  Synthetic oligonucleotide

SEQ ID NO: 545468 - DNA, 51 bp, Artificial; identical to SEQ ID NO: 322950
  Synthetic oligonucleotide

SEQ ID NO: 545469 - DNA, 56 bp, Artificial; identical to SEQ ID NO: 322953
  Synthetic oligonucleotide

SEQ ID NO: 545470 - DNA, 57 bp, Artificial; identical to SEQ ID NO: 322956
  Synthetic oligonucleotide

SEQ ID NO: 545471 - DNA, 60 bp, Artificial; identical to SEQ ID NO: 322963
  Synthetic oligonucleotide

SEQ ID NO: 545472 - DNA, 53 bp, Artificial; identical to SEQ ID NO: 322964
  Synthetic oligonucleotide

SEQ ID NO: 545473 - DNA, 58 bp, Artificial; identical to SEQ ID NO: 322966
  Synthetic oligonucleotide

SEQ ID NO: 545474 - DNA, 60 bp, Artificial; identical to SEQ ID NO: 322971
  Synthetic oligonucleotide

SEQ ID NO: 545475 - DNA, 60 bp, Artificial; identical to SEQ ID NO: 322974
  Synthetic oligonucleotide

SEQ ID NO: 545476 - DNA, 52 bp, Artificial; identical to SEQ ID NO: 322975
  Synthetic oligonucleotide

SEQ ID NO: 545477 - DNA, 60 bp, Artificial; identical to SEQ ID NO: 322976
  Synthetic oligonucleotide

SEQ ID NO: 545478 - DNA, 59 bp, Artificial; identical to SEQ ID NO: 322977
  Synthetic oligonucleotide

SEQ ID NO: 545479 - DNA, 54 bp, Artificial; identical to SEQ ID NO: 322983
  Synthetic oligonucleotide

SEQ ID NO: 545480 - DNA, 57 bp, Artificial; identical to SEQ ID NO: 322992
  Synthetic oligonucleotide

SEQ ID NO: 545481 - DNA, 60 bp, Artificial; identical to SEQ ID NO: 322993
  Synthetic oligonucleotide

SEQ ID NO: 545482 - DNA, 57 bp, Artificial; identical to SEQ ID NO: 323000
  Synthetic oligonucleotide

SEQ ID NO: 545483 - DNA, 53 bp, Artificial; identical to SEQ ID NO: 323005
  Synthetic oligonucleotide

SEQ ID NO: 545484 - DNA, 58 bp, Artificial; identical to SEQ ID NO: 323007
  Synthetic oligonucleotide

SEQ ID NO: 545485 - DNA, 56 bp, Artificial; identical to SEQ ID NO: 323010
  Synthetic oligonucleotide

SEQ ID NO: 545486 - DNA, 53 bp, Artificial; identical to SEQ ID NO: 323011
  Synthetic oligonucleotide

SEQ ID NO: 545487 - DNA, 60 bp, Artificial; identical to SEQ ID NO: 323012
  Synthetic oligonucleotide

SEQ ID NO: 545488 - DNA, 56 bp, Artificial; identical to SEQ ID NO: 323014
  Synthetic oligonucleotide

SEQ ID NO: 545489 - DNA, 58 bp, Artificial; identical to SEQ ID NO: 323017
  Synthetic oligonucleotide

SEQ ID NO: 545490 - DNA, 60 bp, Artificial; identical to SEQ ID NO: 323018
  Synthetic oligonucleotide

SEQ ID NO: 545491 - DNA, 59 bp, Artificial; identical to SEQ ID NO: 323022
  Synthetic oligonucleotide

SEQ ID NO: 545492 - DNA, 55 bp, Artificial; identical to SEQ ID NO: 323026
  Synthetic oligonucleotide

SEQ ID NO: 545493 - DNA, 58 bp, Artificial; identical to SEQ ID NO: 323028
  Synthetic oligonucleotide

SEQ ID NO: 545494 - DNA, 60 bp, Artificial; identical to SEQ ID NO: 323029
  Synthetic oligonucleotide

SEQ ID NO: 545495 - DNA, 60 bp, Artificial; identical to SEQ ID NO: 323030
  Synthetic oligonucleotide

SEQ ID NO: 545496 - DNA, 60 bp, Artificial; identical to SEQ ID NO: 323036
  Synthetic oligonucleotide

SEQ ID NO: 545497 - DNA, 60 bp, Artificial; identical to SEQ ID NO: 9778
  Synthetic oligonucleotide

SEQ ID NO: 545498 - DNA, 60 bp, Artificial; identical to SEQ ID NO: 323037
  Synthetic oligonucleotide

SEQ ID NO: 545499 - DNA, 52 bp, Artificial; identical to SEQ ID NO: 323038
  Synthetic oligonucleotide

SEQ ID NO: 545500 - DNA, 60 bp, Artificial; identical to SEQ ID NO: 323040
  Synthetic oligonucleotide

SEQ ID NO: 545501 - DNA, 60 bp, Artificial; identical to SEQ ID NO: 323045
  Synthetic oligonucleotide

SEQ ID NO: 545502 - DNA, 60 bp, Artificial; identical to SEQ ID NO: 323046
  Synthetic oligonucleotide

SEQ ID NO: 545503 - DNA, 55 bp, Artificial; identical to SEQ ID NO: 323050
  Synthetic oligonucleotide

SEQ ID NO: 545504 - DNA, 60 bp, Artificial; identical to SEQ ID NO: 323051
  Synthetic oligonucleotide

SEQ ID NO: 545505 - DNA, 60 bp, Artificial; identical to SEQ ID NO: 323055
  Synthetic oligonucleotide

SEQ ID NO: 545506 - DNA, 54 bp, Artificial; identical to SEQ ID NO: 323058
  Synthetic oligonucleotide

SEQ ID NO: 545507 - DNA, 60 bp, Artificial; identical to SEQ ID NO: 323059
  Synthetic oligonucleotide

SEQ ID NO: 545508 - DNA, 56 bp, Artificial; identical to SEQ ID NO: 7085
  Synthetic oligonucleotide

SEQ ID NO: 545509 - DNA, 60 bp, Artificial; identical to SEQ ID NO: 323065
  Synthetic oligonucleotide

SEQ ID NO: 545510 - DNA, 60 bp, Artificial; identical to SEQ ID NO: 323069
  Synthetic oligonucleotide

SEQ ID NO: 545511 - DNA, 60 bp, Artificial; identical to SEQ ID NO: 12285
  Synthetic oligonucleotide

SEQ ID NO: 545512 - DNA, 54 bp, Artificial; identical to SEQ ID NO: 323072
  Synthetic oligonucleotide

SEQ ID NO: 545513 - DNA, 60 bp, Artificial; identical to SEQ ID NO: 323073
  Synthetic oligonucleotide

SEQ ID NO: 545514 - DNA, 55 bp, Artificial; identical to SEQ ID NO: 323074
  Synthetic oligonucleotide

SEQ ID NO: 545515 - DNA, 55 bp, Artificial; identical to SEQ ID NO: 323075
  Synthetic oligonucleotide

SEQ ID NO: 545516 - DNA, 55 bp, Artificial; identical to SEQ ID NO: 323076
  Synthetic oligonucleotide

SEQ ID NO: 545517 - DNA, 50 bp, Artificial; identical to SEQ ID NO: 323083
  Synthetic oligonucleotide

SEQ ID NO: 545518 - DNA, 60 bp, Artificial; identical to SEQ ID NO: 323087
  Synthetic oligonucleotide

SEQ ID NO: 545519 - DNA, 53 bp, Artificial; identical to SEQ ID NO: 323089
  Synthetic oligonucleotide

SEQ ID NO: 545520 - DNA, 55 bp, Artificial; identical to SEQ ID NO: 323092
  Synthetic oligonucleotide

SEQ ID NO: 545521 - DNA, 59 bp, Artificial; identical to SEQ ID NO: 323098
  Synthetic oligonucleotide

SEQ ID NO: 545522 - DNA, 51 bp, Artificial; identical to SEQ ID NO: 323101
  Synthetic oligonucleotide

SEQ ID NO: 545523 - DNA, 60 bp, Artificial; identical to SEQ ID NO: 323102
  Synthetic oligonucleotide

SEQ ID NO: 545524 - DNA, 60 bp, Artificial; identical to SEQ ID NO: 323104
  Synthetic oligonucleotide

SEQ ID NO: 545525 - DNA, 55 bp, Artificial; identical to SEQ ID NO: 323105
  Synthetic oligonucleotide

SEQ ID NO: 545526 - DNA, 60 bp, Artificial; identical to SEQ ID NO: 323107
  Synthetic oligonucleotide

SEQ ID NO: 545527 - DNA, 52 bp, Artificial; identical to SEQ ID NO: 323117
  Synthetic oligonucleotide

SEQ ID NO: 545528 - DNA, 60 bp, Artificial; identical to SEQ ID NO: 323118
  Synthetic oligonucleotide

SEQ ID NO: 545529 - DNA, 52 bp, Artificial; identical to SEQ ID NO: 323119
  Synthetic oligonucleotide

SEQ ID NO: 545530 - DNA, 55 bp, Artificial; identical to SEQ ID NO: 323120
  Synthetic oligonucleotide

SEQ ID NO: 545531 - DNA, 56 bp, Artificial; identical to SEQ ID NO: 323123
  Synthetic oligonucleotide

SEQ ID NO: 545532 - DNA, 59 bp, Artificial; identical to SEQ ID NO: 323124
  Synthetic oligonucleotide

SEQ ID NO: 545533 - DNA, 59 bp, Artificial; identical to SEQ ID NO: 323127
  Synthetic oligonucleotide

SEQ ID NO: 545534 - DNA, 60 bp, Artificial; identical to SEQ ID NO: 323129
  Synthetic oligonucleotide

SEQ ID NO: 545535 - DNA, 50 bp, Artificial; identical to SEQ ID NO: 323131
  Synthetic oligonucleotide

SEQ ID NO: 545536 - DNA, 55 bp, Artificial; identical to SEQ ID NO: 323133
  Synthetic oligonucleotide

SEQ ID NO: 545537 - DNA, 59 bp, Artificial; identical to SEQ ID NO: 323134
  Synthetic oligonucleotide

SEQ ID NO: 545538 - DNA, 60 bp, Artificial; identical to SEQ ID NO: 323135
  Synthetic oligonucleotide

SEQ ID NO: 545539 - DNA, 58 bp, Artificial; identical to SEQ ID NO: 323136
  Synthetic oligonucleotide

SEQ ID NO: 545540 - DNA, 55 bp, Artificial; identical to SEQ ID NO: 323138
  Synthetic oligonucleotide

SEQ ID NO: 545541 - DNA, 60 bp, Artificial; identical to SEQ ID NO: 8019
  Synthetic oligonucleotide

SEQ ID NO: 545542 - DNA, 50 bp, Artificial; identical to SEQ ID NO: 323140
  Synthetic oligonucleotide

SEQ ID NO: 545543 - DNA, 57 bp, Artificial; identical to SEQ ID NO: 323141
  Synthetic oligonucleotide

SEQ ID NO: 545544 - DNA, 55 bp, Artificial; identical to SEQ ID NO: 323147
  Synthetic oligonucleotide

SEQ ID NO: 545545 - DNA, 57 bp, Artificial; identical to SEQ ID NO: 323152
  Synthetic oligonucleotide

SEQ ID NO: 545546 - DNA, 60 bp, Artificial; identical to SEQ ID NO: 323155
  Synthetic oligonucleotide

SEQ ID NO: 545547 - DNA, 57 bp, Artificial; identical to SEQ ID NO: 323157
  Synthetic oligonucleotide

SEQ ID NO: 545548 - DNA, 57 bp, Artificial; identical to SEQ ID NO: 323158
  Synthetic oligonucleotide

SEQ ID NO: 545549 - DNA, 59 bp, Artificial; identical to SEQ ID NO: 323159
  Synthetic oligonucleotide

SEQ ID NO: 545550 - DNA, 60 bp, Artificial; identical to SEQ ID NO: 323162
  Synthetic oligonucleotide

SEQ ID NO: 545551 - DNA, 60 bp, Artificial; identical to SEQ ID NO: 323165
  Synthetic oligonucleotide

SEQ ID NO: 545552 - DNA, 60 bp, Artificial; identical to SEQ ID NO: 323166
  Synthetic oligonucleotide

SEQ ID NO: 545553 - DNA, 60 bp, Artificial; identical to SEQ ID NO: 323171
  Synthetic oligonucleotide

SEQ ID NO: 545554 - DNA, 60 bp, Artificial; identical to SEQ ID NO: 323176
  Synthetic oligonucleotide

SEQ ID NO: 545555 - DNA, 55 bp, Artificial; identical to SEQ ID NO: 323180
  Synthetic oligonucleotide

SEQ ID NO: 545556 - DNA, 57 bp, Artificial; identical to SEQ ID NO: 323181
  Synthetic oligonucleotide

SEQ ID NO: 545557 - DNA, 60 bp, Artificial; identical to SEQ ID NO: 323183
  Synthetic oligonucleotide

SEQ ID NO: 545558 - DNA, 50 bp, Artificial; identical to SEQ ID NO: 323186
  Synthetic oligonucleotide

SEQ ID NO: 545559 - DNA, 60 bp, Artificial; identical to SEQ ID NO: 323188
  Synthetic oligonucleotide

SEQ ID NO: 545560 - DNA, 60 bp, Artificial; identical to SEQ ID NO: 323189
  Synthetic oligonucleotide

SEQ ID NO: 545561 - DNA, 55 bp, Artificial; identical to SEQ ID NO: 323190
  Synthetic oligonucleotide

SEQ ID NO: 545562 - DNA, 55 bp, Artificial; identical to SEQ ID NO: 323193
  Synthetic oligonucleotide

SEQ ID NO: 545563 - DNA, 56 bp, Artificial; identical to SEQ ID NO: 323195
  Synthetic oligonucleotide

SEQ ID NO: 545564 - DNA, 59 bp, Artificial; identical to SEQ ID NO: 323197
  Synthetic oligonucleotide

SEQ ID NO: 545565 - DNA, 55 bp, Artificial; identical to SEQ ID NO: 323199
  Synthetic oligonucleotide

SEQ ID NO: 545566 - DNA, 60 bp, Artificial; identical to SEQ ID NO: 323204
  Synthetic oligonucleotide

SEQ ID NO: 545567 - DNA, 60 bp, Artificial; identical to SEQ ID NO: 323205
  Synthetic oligonucleotide

SEQ ID NO: 545568 - DNA, 59 bp, Artificial; identical to SEQ ID NO: 323208
  Synthetic oligonucleotide

SEQ ID NO: 545569 - DNA, 55 bp, Artificial; identical to SEQ ID NO: 323209
  Synthetic oligonucleotide

SEQ ID NO: 545570 - DNA, 60 bp, Artificial; identical to SEQ ID NO: 323211
  Synthetic oligonucleotide

SEQ ID NO: 545571 - DNA, 52 bp, Artificial; identical to SEQ ID NO: 323212
  Synthetic oligonucleotide

SEQ ID NO: 545572 - DNA, 55 bp, Artificial; identical to SEQ ID NO: 323213
  Synthetic oligonucleotide

SEQ ID NO: 545573 - DNA, 52 bp, Artificial; identical to SEQ ID NO: 323220
  Synthetic oligonucleotide

SEQ ID NO: 545574 - DNA, 57 bp, Artificial; identical to SEQ ID NO: 323221
  Synthetic oligonucleotide

SEQ ID NO: 545575 - DNA, 58 bp, Artificial; identical to SEQ ID NO: 323223
  Synthetic oligonucleotide

SEQ ID NO: 545576 - DNA, 55 bp, Artificial; identical to SEQ ID NO: 323225
  Synthetic oligonucleotide

SEQ ID NO: 545577 - DNA, 51 bp, Artificial; identical to SEQ ID NO: 323228
  Synthetic oligonucleotide

SEQ ID NO: 545578 - DNA, 54 bp, Artificial; identical to SEQ ID NO: 323230
  Synthetic oligonucleotide

SEQ ID NO: 545579 - DNA, 59 bp, Artificial; identical to SEQ ID NO: 323231
  Synthetic oligonucleotide

SEQ ID NO: 545580 - DNA, 52 bp, Artificial; identical to SEQ ID NO: 17089
  Synthetic oligonucleotide

SEQ ID NO: 545581 - DNA, 58 bp, Artificial; identical to SEQ ID NO: 323232
  Synthetic oligonucleotide

SEQ ID NO: 545582 - DNA, 55 bp, Artificial; identical to SEQ ID NO: 323236
  Synthetic oligonucleotide

SEQ ID NO: 545583 - DNA, 55 bp, Artificial; identical to SEQ ID NO: 323240
  Synthetic oligonucleotide

SEQ ID NO: 545584 - DNA, 53 bp, Artificial; identical to SEQ ID NO: 323241
  Synthetic oligonucleotide

SEQ ID NO: 545585 - DNA, 60 bp, Artificial; identical to SEQ ID NO: 323242
  Synthetic oligonucleotide

SEQ ID NO: 545586 - DNA, 60 bp, Artificial; identical to SEQ ID NO: 10345
  Synthetic oligonucleotide

SEQ ID NO: 545587 - DNA, 58 bp, Artificial; identical to SEQ ID NO: 323244
  Synthetic oligonucleotide

SEQ ID NO: 545588 - DNA, 59 bp, Artificial; identical to SEQ ID NO: 323247
  Synthetic oligonucleotide

SEQ ID NO: 545589 - DNA, 60 bp, Artificial; identical to SEQ ID NO: 323248
  Synthetic oligonucleotide

SEQ ID NO: 545590 - DNA, 55 bp, Artificial; identical to SEQ ID NO: 323249
  Synthetic oligonucleotide

SEQ ID NO: 545591 - DNA, 60 bp, Artificial; identical to SEQ ID NO: 323251
  Synthetic oligonucleotide

SEQ ID NO: 545592 - DNA, 57 bp, Artificial; identical to SEQ ID NO: 323253
  Synthetic oligonucleotide

SEQ ID NO: 545593 - DNA, 59 bp, Artificial; identical to SEQ ID NO: 323254
  Synthetic oligonucleotide

SEQ ID NO: 545594 - DNA, 55 bp, Artificial; identical to SEQ ID NO: 323255
  Synthetic oligonucleotide

SEQ ID NO: 545595 - DNA, 55 bp, Artificial; identical to SEQ ID NO: 323256
  Synthetic oligonucleotide

SEQ ID NO: 545596 - DNA, 54 bp, Artificial; identical to SEQ ID NO: 323258
  Synthetic oligonucleotide

SEQ ID NO: 545597 - DNA, 60 bp, Artificial; identical to SEQ ID NO: 323259
  Synthetic oligonucleotide

SEQ ID NO: 545598 - DNA, 60 bp, Artificial; identical to SEQ ID NO: 323260
  Synthetic oligonucleotide

SEQ ID NO: 545599 - DNA, 58 bp, Artificial; identical to SEQ ID NO: 323261
  Synthetic oligonucleotide

SEQ ID NO: 545600 - DNA, 50 bp, Artificial; identical to SEQ ID NO: 323265
  Synthetic oligonucleotide

SEQ ID NO: 545601 - DNA, 59 bp, Artificial; identical to SEQ ID NO: 18586
  Synthetic oligonucleotide

SEQ ID NO: 545602 - DNA, 55 bp, Artificial; identical to SEQ ID NO: 323272
  Synthetic oligonucleotide

SEQ ID NO: 545603 - DNA, 60 bp, Artificial; identical to SEQ ID NO: 323273
  Synthetic oligonucleotide

SEQ ID NO: 545604 - DNA, 55 bp, Artificial; identical to SEQ ID NO: 323277
  Synthetic oligonucleotide

SEQ ID NO: 545605 - DNA, 60 bp, Artificial; identical to SEQ ID NO: 323281
  Synthetic oligonucleotide

SEQ ID NO: 545606 - DNA, 58 bp, Artificial; identical to SEQ ID NO: 323285
  Synthetic oligonucleotide

SEQ ID NO: 545607 - DNA, 54 bp, Artificial; identical to SEQ ID NO: 323288
  Synthetic oligonucleotide

SEQ ID NO: 545608 - DNA, 54 bp, Artificial; identical to SEQ ID NO: 323290
  Synthetic oligonucleotide

SEQ ID NO: 545609 - DNA, 59 bp, Artificial; identical to SEQ ID NO: 323291
  Synthetic oligonucleotide

SEQ ID NO: 545610 - DNA, 60 bp, Artificial; identical to SEQ ID NO: 323292
  Synthetic oligonucleotide

SEQ ID NO: 545611 - DNA, 60 bp, Artificial; identical to SEQ ID NO: 323294
  Synthetic oligonucleotide

SEQ ID NO: 545612 - DNA, 56 bp, Artificial; identical to SEQ ID NO: 323296
  Synthetic oligonucleotide

SEQ ID NO: 545613 - DNA, 53 bp, Artificial; identical to SEQ ID NO: 323303
  Synthetic oligonucleotide

SEQ ID NO: 545614 - DNA, 60 bp, Artificial; identical to SEQ ID NO: 323305
  Synthetic oligonucleotide

SEQ ID NO: 545615 - DNA, 59 bp, Artificial; identical to SEQ ID NO: 323306
  Synthetic oligonucleotide

SEQ ID NO: 545616 - DNA, 60 bp, Artificial; identical to SEQ ID NO: 323311
  Synthetic oligonucleotide

SEQ ID NO: 545617 - DNA, 60 bp, Artificial; identical to SEQ ID NO: 323314
  Synthetic oligonucleotide

SEQ ID NO: 545618 - DNA, 55 bp, Artificial; identical to SEQ ID NO: 323321
  Synthetic oligonucleotide

SEQ ID NO: 545619 - DNA, 60 bp, Artificial; identical to SEQ ID NO: 323322
  Synthetic oligonucleotide

SEQ ID NO: 545620 - DNA, 60 bp, Artificial; identical to SEQ ID NO: 323327
  Synthetic oligonucleotide

SEQ ID NO: 545621 - DNA, 55 bp, Artificial; identical to SEQ ID NO: 323329
  Synthetic oligonucleotide

SEQ ID NO: 545622 - DNA, 51 bp, Artificial; identical to SEQ ID NO: 323331
  Synthetic oligonucleotide

SEQ ID NO: 545623 - DNA, 57 bp, Artificial; identical to SEQ ID NO: 323333
  Synthetic oligonucleotide

SEQ ID NO: 545624 - DNA, 60 bp, Artificial; identical to SEQ ID NO: 323336
  Synthetic oligonucleotide

SEQ ID NO: 545625 - DNA, 57 bp, Artificial; identical to SEQ ID NO: 323342
  Synthetic oligonucleotide

SEQ ID NO: 545626 - DNA, 55 bp, Artificial; identical to SEQ ID NO: 323344
  Synthetic oligonucleotide

SEQ ID NO: 545627 - DNA, 53 bp, Artificial; identical to SEQ ID NO: 323347
  Synthetic oligonucleotide

SEQ ID NO: 545628 - DNA, 57 bp, Artificial; identical to SEQ ID NO: 323348
  Synthetic oligonucleotide

SEQ ID NO: 545629 - DNA, 54 bp, Artificial; identical to SEQ ID NO: 323351
  Synthetic oligonucleotide

SEQ ID NO: 545630 - DNA, 58 bp, Artificial; identical to SEQ ID NO: 323352
  Synthetic oligonucleotide

SEQ ID NO: 545631 - DNA, 60 bp, Artificial; identical to SEQ ID NO: 323355
  Synthetic oligonucleotide

SEQ ID NO: 545632 - DNA, 60 bp, Artificial; identical to SEQ ID NO: 323356
  Synthetic oligonucleotide

SEQ ID NO: 545633 - DNA, 60 bp, Artificial; identical to SEQ ID NO: 323361
  Synthetic oligonucleotide

SEQ ID NO: 545634 - DNA, 59 bp, Artificial; identical to SEQ ID NO: 323366
  Synthetic oligonucleotide

SEQ ID NO: 545635 - DNA, 54 bp, Artificial; identical to SEQ ID NO: 323367
  Synthetic oligonucleotide

SEQ ID NO: 545636 - DNA, 58 bp, Artificial; identical to SEQ ID NO: 323368
  Synthetic oligonucleotide

SEQ ID NO: 545637 - DNA, 55 bp, Artificial; identical to SEQ ID NO: 323370
  Synthetic oligonucleotide

SEQ ID NO: 545638 - DNA, 50 bp, Artificial; identical to SEQ ID NO: 323373
  Synthetic oligonucleotide

SEQ ID NO: 545639 - DNA, 60 bp, Artificial; identical to SEQ ID NO: 323377
  Synthetic oligonucleotide

SEQ ID NO: 545640 - DNA, 50 bp, Artificial; identical to SEQ ID NO: 323378
  Synthetic oligonucleotide

SEQ ID NO: 545641 - DNA, 60 bp, Artificial; identical to SEQ ID NO: 323383
  Synthetic oligonucleotide

SEQ ID NO: 545642 - DNA, 58 bp, Artificial; identical to SEQ ID NO: 323385
  Synthetic oligonucleotide

SEQ ID NO: 545643 - DNA, 58 bp, Artificial; identical to SEQ ID NO: 323387
  Synthetic oligonucleotide

SEQ ID NO: 545644 - DNA, 55 bp, Artificial; identical to SEQ ID NO: 323389
  Synthetic oligonucleotide

SEQ ID NO: 545645 - DNA, 60 bp, Artificial; identical to SEQ ID NO: 323390
  Synthetic oligonucleotide

SEQ ID NO: 545646 - DNA, 60 bp, Artificial; identical to SEQ ID NO: 323391
  Synthetic oligonucleotide

SEQ ID NO: 545647 - DNA, 60 bp, Artificial; identical to SEQ ID NO: 323393
  Synthetic oligonucleotide

SEQ ID NO: 545648 - DNA, 57 bp, Artificial; identical to SEQ ID NO: 323401
  Synthetic oligonucleotide

SEQ ID NO: 545649 - DNA, 55 bp, Artificial; identical to SEQ ID NO: 323402
  Synthetic oligonucleotide

SEQ ID NO: 545650 - DNA, 60 bp, Artificial; identical to SEQ ID NO: 323404
  Synthetic oligonucleotide

SEQ ID NO: 545651 - DNA, 57 bp, Artificial; identical to SEQ ID NO: 323405
  Synthetic oligonucleotide

SEQ ID NO: 545652 - DNA, 58 bp, Artificial; identical to SEQ ID NO: 323408
  Synthetic oligonucleotide

SEQ ID NO: 545653 - DNA, 59 bp, Artificial; identical to SEQ ID NO: 323409
  Synthetic oligonucleotide

SEQ ID NO: 545654 - DNA, 60 bp, Artificial; identical to SEQ ID NO: 323412
  Synthetic oligonucleotide

SEQ ID NO: 545655 - DNA, 51 bp, Artificial; identical to SEQ ID NO: 323414
  Synthetic oligonucleotide

SEQ ID NO: 545656 - DNA, 55 bp, Artificial; identical to SEQ ID NO: 323417
  Synthetic oligonucleotide

SEQ ID NO: 545657 - DNA, 59 bp, Artificial; identical to SEQ ID NO: 323420
  Synthetic oligonucleotide

SEQ ID NO: 545658 - DNA, 56 bp, Artificial; identical to SEQ ID NO: 323421
  Synthetic oligonucleotide

SEQ ID NO: 545659 - DNA, 60 bp, Artificial; identical to SEQ ID NO: 323426
  Synthetic oligonucleotide

SEQ ID NO: 545660 - DNA, 58 bp, Artificial; identical to SEQ ID NO: 323427
  Synthetic oligonucleotide

SEQ ID NO: 545661 - DNA, 60 bp, Artificial; identical to SEQ ID NO: 323428
  Synthetic oligonucleotide

SEQ ID NO: 545662 - DNA, 56 bp, Artificial; identical to SEQ ID NO: 323430
  Synthetic oligonucleotide

SEQ ID NO: 545663 - DNA, 52 bp, Artificial; identical to SEQ ID NO: 16238
  Synthetic oligonucleotide

SEQ ID NO: 545664 - DNA, 60 bp, Artificial; identical to SEQ ID NO: 323435
  Synthetic oligonucleotide

SEQ ID NO: 545665 - DNA, 59 bp, Artificial; identical to SEQ ID NO: 323438
  Synthetic oligonucleotide

SEQ ID NO: 545666 - DNA, 51 bp, Artificial; identical to SEQ ID NO: 323441
  Synthetic oligonucleotide

SEQ ID NO: 545667 - DNA, 51 bp, Artificial; identical to SEQ ID NO: 323444
  Synthetic oligonucleotide

SEQ ID NO: 545668 - DNA, 55 bp, Artificial; identical to SEQ ID NO: 323446
  Synthetic oligonucleotide

SEQ ID NO: 545669 - DNA, 56 bp, Artificial; identical to SEQ ID NO: 323447
  Synthetic oligonucleotide

SEQ ID NO: 545670 - DNA, 58 bp, Artificial; identical to SEQ ID NO: 323450
  Synthetic oligonucleotide

SEQ ID NO: 545671 - DNA, 60 bp, Artificial; identical to SEQ ID NO: 323453
  Synthetic oligonucleotide

SEQ ID NO: 545672 - DNA, 57 bp, Artificial; identical to SEQ ID NO: 323454
  Synthetic oligonucleotide

SEQ ID NO: 545673 - DNA, 58 bp, Artificial; identical to SEQ ID NO: 323455
  Synthetic oligonucleotide

SEQ ID NO: 545674 - DNA, 55 bp, Artificial; identical to SEQ ID NO: 323457
  Synthetic oligonucleotide

SEQ ID NO: 545675 - DNA, 55 bp, Artificial; identical to SEQ ID NO: 323458
  Synthetic oligonucleotide

SEQ ID NO: 545676 - DNA, 57 bp, Artificial; identical to SEQ ID NO: 323461
  Synthetic oligonucleotide

SEQ ID NO: 545677 - DNA, 56 bp, Artificial; identical to SEQ ID NO: 323462
  Synthetic oligonucleotide

SEQ ID NO: 545678 - DNA, 58 bp, Artificial; identical to SEQ ID NO: 323464
  Synthetic oligonucleotide

SEQ ID NO: 545679 - DNA, 60 bp, Artificial; identical to SEQ ID NO: 323465
  Synthetic oligonucleotide

SEQ ID NO: 545680 - DNA, 59 bp, Artificial; identical to SEQ ID NO: 323467
  Synthetic oligonucleotide

SEQ ID NO: 545681 - DNA, 60 bp, Artificial; identical to SEQ ID NO: 323470
  Synthetic oligonucleotide

SEQ ID NO: 545682 - DNA, 55 bp, Artificial; identical to SEQ ID NO: 323471
  Synthetic oligonucleotide

SEQ ID NO: 545683 - DNA, 58 bp, Artificial; identical to SEQ ID NO: 323472
  Synthetic oligonucleotide

SEQ ID NO: 545684 - DNA, 60 bp, Artificial; identical to SEQ ID NO: 323474
  Synthetic oligonucleotide

SEQ ID NO: 545685 - DNA, 58 bp, Artificial; identical to SEQ ID NO: 16886
  Synthetic oligonucleotide

SEQ ID NO: 545686 - DNA, 59 bp, Artificial; identical to SEQ ID NO: 323480
  Synthetic oligonucleotide

SEQ ID NO: 545687 - DNA, 60 bp, Artificial; identical to SEQ ID NO: 323485
  Synthetic oligonucleotide

SEQ ID NO: 545688 - DNA, 56 bp, Artificial; identical to SEQ ID NO: 323488
  Synthetic oligonucleotide

SEQ ID NO: 545689 - DNA, 58 bp, Artificial; identical to SEQ ID NO: 323494
  Synthetic oligonucleotide

SEQ ID NO: 545690 - DNA, 58 bp, Artificial; identical to SEQ ID NO: 323495
  Synthetic oligonucleotide

SEQ ID NO: 545691 - DNA, 51 bp, Artificial; identical to SEQ ID NO: 323497
  Synthetic oligonucleotide

SEQ ID NO: 545692 - DNA, 52 bp, Artificial; identical to SEQ ID NO: 323498
  Synthetic oligonucleotide

SEQ ID NO: 545693 - DNA, 55 bp, Artificial; identical to SEQ ID NO: 323499
  Synthetic oligonucleotide

SEQ ID NO: 545694 - DNA, 60 bp, Artificial; identical to SEQ ID NO: 323501
  Synthetic oligonucleotide

SEQ ID NO: 545695 - DNA, 60 bp, Artificial; identical to SEQ ID NO: 323502
  Synthetic oligonucleotide

SEQ ID NO: 545696 - DNA, 56 bp, Artificial; identical to SEQ ID NO: 323503
  Synthetic oligonucleotide

SEQ ID NO: 545697 - DNA, 55 bp, Artificial; identical to SEQ ID NO: 323510
  Synthetic oligonucleotide

SEQ ID NO: 545698 - DNA, 60 bp, Artificial; identical to SEQ ID NO: 323511
  Synthetic oligonucleotide

SEQ ID NO: 545699 - DNA, 52 bp, Artificial; identical to SEQ ID NO: 323525
  Synthetic oligonucleotide

SEQ ID NO: 545700 - DNA, 55 bp, Artificial; identical to SEQ ID NO: 323527
  Synthetic oligonucleotide

SEQ ID NO: 545701 - DNA, 57 bp, Artificial; identical to SEQ ID NO: 323528
  Synthetic oligonucleotide

SEQ ID NO: 545702 - DNA, 56 bp, Artificial; identical to SEQ ID NO: 323532
  Synthetic oligonucleotide

SEQ ID NO: 545703 - DNA, 58 bp, Artificial; identical to SEQ ID NO: 323535
  Synthetic oligonucleotide

SEQ ID NO: 545704 - DNA, 55 bp, Artificial; identical to SEQ ID NO: 323537
  Synthetic oligonucleotide

SEQ ID NO: 545705 - DNA, 53 bp, Artificial; identical to SEQ ID NO: 323538
  Synthetic oligonucleotide

SEQ ID NO: 545706 - DNA, 60 bp, Artificial; identical to SEQ ID NO: 323540
  Synthetic oligonucleotide

SEQ ID NO: 545707 - DNA, 55 bp, Artificial; identical to SEQ ID NO: 323542
  Synthetic oligonucleotide

SEQ ID NO: 545708 - DNA, 59 bp, Artificial; identical to SEQ ID NO: 323545
  Synthetic oligonucleotide

SEQ ID NO: 545709 - DNA, 58 bp, Artificial; identical to SEQ ID NO: 323546
  Synthetic oligonucleotide

SEQ ID NO: 545710 - DNA, 55 bp, Artificial; identical to SEQ ID NO: 323553
  Synthetic oligonucleotide

SEQ ID NO: 545711 - DNA, 55 bp, Artificial; identical to SEQ ID NO: 323555
  Synthetic oligonucleotide

SEQ ID NO: 545712 - DNA, 58 bp, Artificial; identical to SEQ ID NO: 323556
  Synthetic oligonucleotide

SEQ ID NO: 545713 - DNA, 56 bp, Artificial; identical to SEQ ID NO: 323562
  Synthetic oligonucleotide

SEQ ID NO: 545714 - DNA, 57 bp, Artificial; identical to SEQ ID NO: 323563
  Synthetic oligonucleotide

SEQ ID NO: 545715 - DNA, 52 bp, Artificial; identical to SEQ ID NO: 323567
  Synthetic oligonucleotide

SEQ ID NO: 545716 - DNA, 55 bp, Artificial; identical to SEQ ID NO: 323569
  Synthetic oligonucleotide

SEQ ID NO: 545717 - DNA, 57 bp, Artificial; identical to SEQ ID NO: 323570
  Synthetic oligonucleotide

SEQ ID NO: 545718 - DNA, 60 bp, Artificial; identical to SEQ ID NO: 323582
  Synthetic oligonucleotide

SEQ ID NO: 545719 - DNA, 55 bp, Artificial; identical to SEQ ID NO: 323586
  Synthetic oligonucleotide

SEQ ID NO: 545720 - DNA, 60 bp, Artificial; identical to SEQ ID NO: 323589
  Synthetic oligonucleotide

SEQ ID NO: 545721 - DNA, 54 bp, Artificial; identical to SEQ ID NO: 323590
  Synthetic oligonucleotide

SEQ ID NO: 545722 - DNA, 55 bp, Artificial; identical to SEQ ID NO: 323591
  Synthetic oligonucleotide

SEQ ID NO: 545723 - DNA, 57 bp, Artificial; identical to SEQ ID NO: 323592
  Synthetic oligonucleotide

SEQ ID NO: 545724 - DNA, 60 bp, Artificial; identical to SEQ ID NO: 323594
  Synthetic oligonucleotide

SEQ ID NO: 545725 - DNA, 56 bp, Artificial; identical to SEQ ID NO: 323596
  Synthetic oligonucleotide

SEQ ID NO: 545726 - DNA, 59 bp, Artificial; identical to SEQ ID NO: 323598
  Synthetic oligonucleotide

SEQ ID NO: 545727 - DNA, 51 bp, Artificial; identical to SEQ ID NO: 323599
  Synthetic oligonucleotide

SEQ ID NO: 545728 - DNA, 60 bp, Artificial; identical to SEQ ID NO: 323601
  Synthetic oligonucleotide

SEQ ID NO: 545729 - DNA, 57 bp, Artificial; identical to SEQ ID NO: 323602
  Synthetic oligonucleotide

SEQ ID NO: 545730 - DNA, 55 bp, Artificial; identical to SEQ ID NO: 323603
  Synthetic oligonucleotide

SEQ ID NO: 545731 - DNA, 60 bp, Artificial; identical to SEQ ID NO: 323604
  Synthetic oligonucleotide

SEQ ID NO: 545732 - DNA, 60 bp, Artificial; identical to SEQ ID NO: 323605
  Synthetic oligonucleotide

SEQ ID NO: 545733 - DNA, 60 bp, Artificial; identical to SEQ ID NO: 11642
  Synthetic oligonucleotide

SEQ ID NO: 545734 - DNA, 55 bp, Artificial; identical to SEQ ID NO: 323608
  Synthetic oligonucleotide

SEQ ID NO: 545735 - DNA, 58 bp, Artificial; identical to SEQ ID NO: 323612
  Synthetic oligonucleotide

SEQ ID NO: 545736 - DNA, 52 bp, Artificial; identical to SEQ ID NO: 323613
  Synthetic oligonucleotide

SEQ ID NO: 545737 - DNA, 55 bp, Artificial; identical to SEQ ID NO: 323614
  Synthetic oligonucleotide

SEQ ID NO: 545738 - DNA, 57 bp, Artificial; identical to SEQ ID NO: 323616
  Synthetic oligonucleotide

SEQ ID NO: 545739 - DNA, 58 bp, Artificial; identical to SEQ ID NO: 323617
  Synthetic oligonucleotide

SEQ ID NO: 545740 - DNA, 56 bp, Artificial; identical to SEQ ID NO: 323618
  Synthetic oligonucleotide

SEQ ID NO: 545741 - DNA, 60 bp, Artificial; identical to SEQ ID NO: 323619
  Synthetic oligonucleotide

SEQ ID NO: 545742 - DNA, 52 bp, Artificial; identical to SEQ ID NO: 323628
  Synthetic oligonucleotide

SEQ ID NO: 545743 - DNA, 59 bp, Artificial; identical to SEQ ID NO: 323634
  Synthetic oligonucleotide

SEQ ID NO: 545744 - DNA, 59 bp, Artificial; identical to SEQ ID NO: 323635
  Synthetic oligonucleotide

SEQ ID NO: 545745 - DNA, 58 bp, Artificial; identical to SEQ ID NO: 323636
  Synthetic oligonucleotide

SEQ ID NO: 545746 - DNA, 55 bp, Artificial; identical to SEQ ID NO: 323637
  Synthetic oligonucleotide

SEQ ID NO: 545747 - DNA, 58 bp, Artificial; identical to SEQ ID NO: 323638
  Synthetic oligonucleotide

SEQ ID NO: 545748 - DNA, 59 bp, Artificial; identical to SEQ ID NO: 323639
  Synthetic oligonucleotide

SEQ ID NO: 545749 - DNA, 49 bp, Artificial; identical to SEQ ID NO: 323643
  Synthetic oligonucleotide

SEQ ID NO: 545750 - DNA, 55 bp, Artificial; identical to SEQ ID NO: 12115
  Synthetic oligonucleotide

SEQ ID NO: 545751 - DNA, 59 bp, Artificial; identical to SEQ ID NO: 323646
  Synthetic oligonucleotide

SEQ ID NO: 545752 - DNA, 60 bp, Artificial; identical to SEQ ID NO: 323648
  Synthetic oligonucleotide

SEQ ID NO: 545753 - DNA, 60 bp, Artificial; identical to SEQ ID NO: 323649
  Synthetic oligonucleotide

SEQ ID NO: 545754 - DNA, 55 bp, Artificial; identical to SEQ ID NO: 323651
  Synthetic oligonucleotide

SEQ ID NO: 545755 - DNA, 60 bp, Artificial; identical to SEQ ID NO: 323656
  Synthetic oligonucleotide

SEQ ID NO: 545756 - DNA, 57 bp, Artificial; identical to SEQ ID NO: 323657
  Synthetic oligonucleotide

SEQ ID NO: 545757 - DNA, 60 bp, Artificial; identical to SEQ ID NO: 323659
  Synthetic oligonucleotide

SEQ ID NO: 545758 - DNA, 60 bp, Artificial; identical to SEQ ID NO: 323660
  Synthetic oligonucleotide

SEQ ID NO: 545759 - DNA, 60 bp, Artificial; identical to SEQ ID NO: 323661
  Synthetic oligonucleotide

SEQ ID NO: 545760 - DNA, 56 bp, Artificial; identical to SEQ ID NO: 323664
  Synthetic oligonucleotide

SEQ ID NO: 545761 - DNA, 59 bp, Artificial; identical to SEQ ID NO: 323665
  Synthetic oligonucleotide

SEQ ID NO: 545762 - DNA, 52 bp, Artificial; identical to SEQ ID NO: 323666
  Synthetic oligonucleotide

SEQ ID NO: 545763 - DNA, 60 bp, Artificial; identical to SEQ ID NO: 323667
  Synthetic oligonucleotide

SEQ ID NO: 545764 - DNA, 53 bp, Artificial; identical to SEQ ID NO: 323668
  Synthetic oligonucleotide

SEQ ID NO: 545765 - DNA, 59 bp, Artificial; identical to SEQ ID NO: 323669
  Synthetic oligonucleotide

SEQ ID NO: 545766 - DNA, 60 bp, Artificial; identical to SEQ ID NO: 323671
  Synthetic oligonucleotide

SEQ ID NO: 545767 - DNA, 60 bp, Artificial; identical to SEQ ID NO: 323672
  Synthetic oligonucleotide

SEQ ID NO: 545768 - DNA, 57 bp, Artificial; identical to SEQ ID NO: 323674
  Synthetic oligonucleotide

SEQ ID NO: 545769 - DNA, 58 bp, Artificial; identical to SEQ ID NO: 323675
  Synthetic oligonucleotide

SEQ ID NO: 545770 - DNA, 60 bp, Artificial; identical to SEQ ID NO: 323676
  Synthetic oligonucleotide

SEQ ID NO: 545771 - DNA, 60 bp, Artificial; identical to SEQ ID NO: 323677
  Synthetic oligonucleotide

SEQ ID NO: 545772 - DNA, 54 bp, Artificial; identical to SEQ ID NO: 323679
  Synthetic oligonucleotide

SEQ ID NO: 545773 - DNA, 60 bp, Artificial; identical to SEQ ID NO: 323681
  Synthetic oligonucleotide

SEQ ID NO: 545774 - DNA, 54 bp, Artificial; identical to SEQ ID NO: 323685
  Synthetic oligonucleotide

SEQ ID NO: 545775 - DNA, 59 bp, Artificial; identical to SEQ ID NO: 323686
  Synthetic oligonucleotide

SEQ ID NO: 545776 - DNA, 57 bp, Artificial; identical to SEQ ID NO: 323687
  Synthetic oligonucleotide

SEQ ID NO: 545777 - DNA, 60 bp, Artificial; identical to SEQ ID NO: 323689
  Synthetic oligonucleotide

SEQ ID NO: 545778 - DNA, 50 bp, Artificial; identical to SEQ ID NO: 323690
  Synthetic oligonucleotide

SEQ ID NO: 545779 - DNA, 57 bp, Artificial; identical to SEQ ID NO: 323695
  Synthetic oligonucleotide

SEQ ID NO: 545780 - DNA, 55 bp, Artificial; identical to SEQ ID NO: 323696
  Synthetic oligonucleotide

SEQ ID NO: 545781 - DNA, 51 bp, Artificial; identical to SEQ ID NO: 323704
  Synthetic oligonucleotide

SEQ ID NO: 545782 - DNA, 53 bp, Artificial; identical to SEQ ID NO: 323708
  Synthetic oligonucleotide

SEQ ID NO: 545783 - DNA, 57 bp, Artificial; identical to SEQ ID NO: 323712
  Synthetic oligonucleotide

SEQ ID NO: 545784 - DNA, 57 bp, Artificial; identical to SEQ ID NO: 323713
  Synthetic oligonucleotide

SEQ ID NO: 545785 - DNA, 55 bp, Artificial; identical to SEQ ID NO: 323715
  Synthetic oligonucleotide

SEQ ID NO: 545786 - DNA, 54 bp, Artificial; identical to SEQ ID NO: 323716
  Synthetic oligonucleotide

SEQ ID NO: 545787 - DNA, 52 bp, Artificial; identical to SEQ ID NO: 18386
  Synthetic oligonucleotide

SEQ ID NO: 545788 - DNA, 60 bp, Artificial; identical to SEQ ID NO: 323720
  Synthetic oligonucleotide

SEQ ID NO: 545789 - DNA, 55 bp, Artificial; identical to SEQ ID NO: 323723
  Synthetic oligonucleotide

SEQ ID NO: 545790 - DNA, 55 bp, Artificial; identical to SEQ ID NO: 323725
  Synthetic oligonucleotide

SEQ ID NO: 545791 - DNA, 60 bp, Artificial; identical to SEQ ID NO: 323726
  Synthetic oligonucleotide

SEQ ID NO: 545792 - DNA, 55 bp, Artificial; identical to SEQ ID NO: 323727
  Synthetic oligonucleotide

SEQ ID NO: 545793 - DNA, 56 bp, Artificial; identical to SEQ ID NO: 323728
  Synthetic oligonucleotide

SEQ ID NO: 545794 - DNA, 55 bp, Artificial; identical to SEQ ID NO: 323731
  Synthetic oligonucleotide

SEQ ID NO: 545795 - DNA, 55 bp, Artificial; identical to SEQ ID NO: 323732
  Synthetic oligonucleotide

SEQ ID NO: 545796 - DNA, 60 bp, Artificial; identical to SEQ ID NO: 323734
  Synthetic oligonucleotide

SEQ ID NO: 545797 - DNA, 50 bp, Artificial; identical to SEQ ID NO: 323735
  Synthetic oligonucleotide

SEQ ID NO: 545798 - DNA, 51 bp, Artificial; identical to SEQ ID NO: 323737
  Synthetic oligonucleotide

SEQ ID NO: 545799 - DNA, 60 bp, Artificial; identical to SEQ ID NO: 323747
  Synthetic oligonucleotide

SEQ ID NO: 545800 - DNA, 52 bp, Artificial; identical to SEQ ID NO: 323748
  Synthetic oligonucleotide

SEQ ID NO: 545801 - DNA, 60 bp, Artificial; identical to SEQ ID NO: 323749
  Synthetic oligonucleotide

SEQ ID NO: 545802 - DNA, 51 bp, Artificial; identical to SEQ ID NO: 323750
  Synthetic oligonucleotide

SEQ ID NO: 545803 - DNA, 54 bp, Artificial; identical to SEQ ID NO: 323751
  Synthetic oligonucleotide

SEQ ID NO: 545804 - DNA, 55 bp, Artificial; identical to SEQ ID NO: 323752
  Synthetic oligonucleotide

SEQ ID NO: 545805 - DNA, 60 bp, Artificial; identical to SEQ ID NO: 323758
  Synthetic oligonucleotide

SEQ ID NO: 545806 - DNA, 52 bp, Artificial; identical to SEQ ID NO: 323760
  Synthetic oligonucleotide

SEQ ID NO: 545807 - DNA, 60 bp, Artificial; identical to SEQ ID NO: 323761
  Synthetic oligonucleotide

SEQ ID NO: 545808 - DNA, 55 bp, Artificial; identical to SEQ ID NO: 323762
  Synthetic oligonucleotide

SEQ ID NO: 545809 - DNA, 58 bp, Artificial; identical to SEQ ID NO: 323763
  Synthetic oligonucleotide

SEQ ID NO: 545810 - DNA, 55 bp, Artificial; identical to SEQ ID NO: 323765
  Synthetic oligonucleotide

SEQ ID NO: 545811 - DNA, 56 bp, Artificial; identical to SEQ ID NO: 323766
  Synthetic oligonucleotide

SEQ ID NO: 545812 - DNA, 55 bp, Artificial; identical to SEQ ID NO: 323767
  Synthetic oligonucleotide

SEQ ID NO: 545813 - DNA, 52 bp, Artificial; identical to SEQ ID NO: 323770
  Synthetic oligonucleotide

SEQ ID NO: 545814 - DNA, 55 bp, Artificial; identical to SEQ ID NO: 323772
  Synthetic oligonucleotide

SEQ ID NO: 545815 - DNA, 58 bp, Artificial; identical to SEQ ID NO: 323777
  Synthetic oligonucleotide

SEQ ID NO: 545816 - DNA, 57 bp, Artificial; identical to SEQ ID NO: 323780
  Synthetic oligonucleotide

SEQ ID NO: 545817 - DNA, 60 bp, Artificial; identical to SEQ ID NO: 323781
  Synthetic oligonucleotide

SEQ ID NO: 545818 - DNA, 59 bp, Artificial; identical to SEQ ID NO: 323786
  Synthetic oligonucleotide

SEQ ID NO: 545819 - DNA, 54 bp, Artificial; identical to SEQ ID NO: 323788
  Synthetic oligonucleotide

SEQ ID NO: 545820 - DNA, 58 bp, Artificial; identical to SEQ ID NO: 8280
  Synthetic oligonucleotide

SEQ ID NO: 545821 - DNA, 60 bp, Artificial; identical to SEQ ID NO: 323792
  Synthetic oligonucleotide

SEQ ID NO: 545822 - DNA, 54 bp, Artificial; identical to SEQ ID NO: 323796
  Synthetic oligonucleotide

SEQ ID NO: 545823 - DNA, 57 bp, Artificial; identical to SEQ ID NO: 323797
  Synthetic oligonucleotide

SEQ ID NO: 545824 - DNA, 50 bp, Artificial; identical to SEQ ID NO: 323800
  Synthetic oligonucleotide

SEQ ID NO: 545825 - DNA, 55 bp, Artificial; identical to SEQ ID NO: 323802
  Synthetic oligonucleotide

SEQ ID NO: 545826 - DNA, 60 bp, Artificial; identical to SEQ ID NO: 323804
  Synthetic oligonucleotide

SEQ ID NO: 545827 - DNA, 60 bp, Artificial; identical to SEQ ID NO: 323805
  Synthetic oligonucleotide

SEQ ID NO: 545828 - DNA, 53 bp, Artificial; identical to SEQ ID NO: 323808
  Synthetic oligonucleotide

SEQ ID NO: 545829 - DNA, 59 bp, Artificial; identical to SEQ ID NO: 323815
  Synthetic oligonucleotide

SEQ ID NO: 545830 - DNA, 59 bp, Artificial; identical to SEQ ID NO: 323817
  Synthetic oligonucleotide

SEQ ID NO: 545831 - DNA, 60 bp, Artificial; identical to SEQ ID NO: 323818
  Synthetic oligonucleotide

SEQ ID NO: 545832 - DNA, 57 bp, Artificial; identical to SEQ ID NO: 323819
  Synthetic oligonucleotide

SEQ ID NO: 545833 - DNA, 55 bp, Artificial; identical to SEQ ID NO: 323820
  Synthetic oligonucleotide

SEQ ID NO: 545834 - DNA, 58 bp, Artificial; identical to SEQ ID NO: 323827
  Synthetic oligonucleotide

SEQ ID NO: 545835 - DNA, 58 bp, Artificial; identical to SEQ ID NO: 323830
  Synthetic oligonucleotide

SEQ ID NO: 545836 - DNA, 58 bp, Artificial; identical to SEQ ID NO: 323831
  Synthetic oligonucleotide

SEQ ID NO: 545837 - DNA, 55 bp, Artificial; identical to SEQ ID NO: 323834
  Synthetic oligonucleotide

SEQ ID NO: 545838 - DNA, 60 bp, Artificial; identical to SEQ ID NO: 323836
  Synthetic oligonucleotide

SEQ ID NO: 545839 - DNA, 60 bp, Artificial; identical to SEQ ID NO: 323837
  Synthetic oligonucleotide

SEQ ID NO: 545840 - DNA, 60 bp, Artificial; identical to SEQ ID NO: 323838
  Synthetic oligonucleotide

SEQ ID NO: 545841 - DNA, 60 bp, Artificial; identical to SEQ ID NO: 323839
  Synthetic oligonucleotide

SEQ ID NO: 545842 - DNA, 52 bp, Artificial; identical to SEQ ID NO: 323841
  Synthetic oligonucleotide

SEQ ID NO: 545843 - DNA, 57 bp, Artificial; identical to SEQ ID NO: 19873
  Synthetic oligonucleotide

SEQ ID NO: 545844 - DNA, 54 bp, Artificial; identical to SEQ ID NO: 323843
  Synthetic oligonucleotide

SEQ ID NO: 545845 - DNA, 55 bp, Artificial; identical to SEQ ID NO: 323846
  Synthetic oligonucleotide

SEQ ID NO: 545846 - DNA, 60 bp, Artificial; identical to SEQ ID NO: 323848
  Synthetic oligonucleotide

SEQ ID NO: 545847 - DNA, 60 bp, Artificial; identical to SEQ ID NO: 323850
  Synthetic oligonucleotide

SEQ ID NO: 545848 - DNA, 60 bp, Artificial; identical to SEQ ID NO: 323851
  Synthetic oligonucleotide

SEQ ID NO: 545849 - DNA, 60 bp, Artificial; identical to SEQ ID NO: 323852
  Synthetic oligonucleotide

SEQ ID NO: 545850 - DNA, 55 bp, Artificial; identical to SEQ ID NO: 323855
  Synthetic oligonucleotide

SEQ ID NO: 545851 - DNA, 60 bp, Artificial; identical to SEQ ID NO: 323856
  Synthetic oligonucleotide

SEQ ID NO: 545852 - DNA, 58 bp, Artificial; identical to SEQ ID NO: 323860
  Synthetic oligonucleotide

SEQ ID NO: 545853 - DNA, 60 bp, Artificial; identical to SEQ ID NO: 323861
  Synthetic oligonucleotide

SEQ ID NO: 545854 - DNA, 60 bp, Artificial; identical to SEQ ID NO: 323865
  Synthetic oligonucleotide

SEQ ID NO: 545855 - DNA, 58 bp, Artificial; identical to SEQ ID NO: 323870
  Synthetic oligonucleotide

SEQ ID NO: 545856 - DNA, 55 bp, Artificial; identical to SEQ ID NO: 323873
  Synthetic oligonucleotide

SEQ ID NO: 545857 - DNA, 60 bp, Artificial; identical to SEQ ID NO: 323875
  Synthetic oligonucleotide

SEQ ID NO: 545858 - DNA, 60 bp, Artificial; identical to SEQ ID NO: 323876
  Synthetic oligonucleotide

SEQ ID NO: 545859 - DNA, 60 bp, Artificial; identical to SEQ ID NO: 323877
  Synthetic oligonucleotide

SEQ ID NO: 545860 - DNA, 55 bp, Artificial; identical to SEQ ID NO: 323882
  Synthetic oligonucleotide

SEQ ID NO: 545861 - DNA, 60 bp, Artificial; identical to SEQ ID NO: 323887
  Synthetic oligonucleotide

SEQ ID NO: 545862 - DNA, 60 bp, Artificial; identical to SEQ ID NO: 323888
  Synthetic oligonucleotide

SEQ ID NO: 545863 - DNA, 55 bp, Artificial; identical to SEQ ID NO: 323892
  Synthetic oligonucleotide

SEQ ID NO: 545864 - DNA, 59 bp, Artificial; identical to SEQ ID NO: 323893
  Synthetic oligonucleotide

SEQ ID NO: 545865 - DNA, 57 bp, Artificial; identical to SEQ ID NO: 323894
  Synthetic oligonucleotide

SEQ ID NO: 545866 - DNA, 55 bp, Artificial; identical to SEQ ID NO: 323901
  Synthetic oligonucleotide

SEQ ID NO: 545867 - DNA, 53 bp, Artificial; identical to SEQ ID NO: 323902
  Synthetic oligonucleotide

SEQ ID NO: 545868 - DNA, 54 bp, Artificial; identical to SEQ ID NO: 323903
  Synthetic oligonucleotide

SEQ ID NO: 545869 - DNA, 57 bp, Artificial; identical to SEQ ID NO: 323909
  Synthetic oligonucleotide

SEQ ID NO: 545870 - DNA, 55 bp, Artificial; identical to SEQ ID NO: 323910
  Synthetic oligonucleotide

SEQ ID NO: 545871 - DNA, 59 bp, Artificial; identical to SEQ ID NO: 19012
  Synthetic oligonucleotide

SEQ ID NO: 545872 - DNA, 60 bp, Artificial; identical to SEQ ID NO: 323911
  Synthetic oligonucleotide

SEQ ID NO: 545873 - DNA, 51 bp, Artificial; identical to SEQ ID NO: 323913
  Synthetic oligonucleotide

SEQ ID NO: 545874 - DNA, 50 bp, Artificial; identical to SEQ ID NO: 323916
  Synthetic oligonucleotide

SEQ ID NO: 545875 - DNA, 52 bp, Artificial; identical to SEQ ID NO: 12244
  Synthetic oligonucleotide

SEQ ID NO: 545876 - DNA, 50 bp, Artificial; identical to SEQ ID NO: 323918
  Synthetic oligonucleotide

SEQ ID NO: 545877 - DNA, 59 bp, Artificial; identical to SEQ ID NO: 323919
  Synthetic oligonucleotide

SEQ ID NO: 545878 - DNA, 56 bp, Artificial; identical to SEQ ID NO: 323920
  Synthetic oligonucleotide

SEQ ID NO: 545879 - DNA, 57 bp, Artificial; identical to SEQ ID NO: 323923
  Synthetic oligonucleotide

SEQ ID NO: 545880 - DNA, 57 bp, Artificial; identical to SEQ ID NO: 323927
  Synthetic oligonucleotide

SEQ ID NO: 545881 - DNA, 56 bp, Artificial; identical to SEQ ID NO: 323929
  Synthetic oligonucleotide

SEQ ID NO: 545882 - DNA, 56 bp, Artificial; identical to SEQ ID NO: 323932
  Synthetic oligonucleotide

SEQ ID NO: 545883 - DNA, 56 bp, Artificial; identical to SEQ ID NO: 323933
  Synthetic oligonucleotide

SEQ ID NO: 545884 - DNA, 59 bp, Artificial; identical to SEQ ID NO: 323934
  Synthetic oligonucleotide

SEQ ID NO: 545885 - DNA, 55 bp, Artificial; identical to SEQ ID NO: 323936
  Synthetic oligonucleotide

SEQ ID NO: 545886 - DNA, 53 bp, Artificial; identical to SEQ ID NO: 323937
  Synthetic oligonucleotide

SEQ ID NO: 545887 - DNA, 56 bp, Artificial; identical to SEQ ID NO: 323938
  Synthetic oligonucleotide

SEQ ID NO: 545888 - DNA, 55 bp, Artificial; identical to SEQ ID NO: 323939
  Synthetic oligonucleotide

SEQ ID NO: 545889 - DNA, 55 bp, Artificial; identical to SEQ ID NO: 323940
  Synthetic oligonucleotide

SEQ ID NO: 545890 - DNA, 60 bp, Artificial; identical to SEQ ID NO: 323947
  Synthetic oligonucleotide

SEQ ID NO: 545891 - DNA, 55 bp, Artificial; identical to SEQ ID NO: 323949
  Synthetic oligonucleotide

SEQ ID NO: 545892 - DNA, 60 bp, Artificial; identical to SEQ ID NO: 323951
  Synthetic oligonucleotide

SEQ ID NO: 545893 - DNA, 60 bp, Artificial; identical to SEQ ID NO: 323953
  Synthetic oligonucleotide

SEQ ID NO: 545894 - DNA, 56 bp, Artificial; identical to SEQ ID NO: 323954
  Synthetic oligonucleotide

SEQ ID NO: 545895 - DNA, 53 bp, Artificial; identical to SEQ ID NO: 323955
  Synthetic oligonucleotide

SEQ ID NO: 545896 - DNA, 58 bp, Artificial; identical to SEQ ID NO: 16842
  Synthetic oligonucleotide

SEQ ID NO: 545897 - DNA, 55 bp, Artificial; identical to SEQ ID NO: 323961
  Synthetic oligonucleotide

SEQ ID NO: 545898 - DNA, 54 bp, Artificial; identical to SEQ ID NO: 323962
  Synthetic oligonucleotide

SEQ ID NO: 545899 - DNA, 57 bp, Artificial; identical to SEQ ID NO: 323963
  Synthetic oligonucleotide

SEQ ID NO: 545900 - DNA, 60 bp, Artificial; identical to SEQ ID NO: 323966
  Synthetic oligonucleotide

SEQ ID NO: 545901 - DNA, 53 bp, Artificial; identical to SEQ ID NO: 323969
  Synthetic oligonucleotide

SEQ ID NO: 545902 - DNA, 59 bp, Artificial; identical to SEQ ID NO: 323972
  Synthetic oligonucleotide

SEQ ID NO: 545903 - DNA, 57 bp, Artificial; identical to SEQ ID NO: 323973
  Synthetic oligonucleotide

SEQ ID NO: 545904 - DNA, 55 bp, Artificial; identical to SEQ ID NO: 323975
  Synthetic oligonucleotide

SEQ ID NO: 545905 - DNA, 55 bp, Artificial; identical to SEQ ID NO: 323976
  Synthetic oligonucleotide

SEQ ID NO: 545906 - DNA, 60 bp, Artificial; identical to SEQ ID NO: 323977
  Synthetic oligonucleotide

SEQ ID NO: 545907 - DNA, 53 bp, Artificial; identical to SEQ ID NO: 323979
  Synthetic oligonucleotide

SEQ ID NO: 545908 - DNA, 55 bp, Artificial; identical to SEQ ID NO: 323983
  Synthetic oligonucleotide

SEQ ID NO: 545909 - DNA, 55 bp, Artificial; identical to SEQ ID NO: 17648
  Synthetic oligonucleotide

SEQ ID NO: 545910 - DNA, 55 bp, Artificial; identical to SEQ ID NO: 323985
  Synthetic oligonucleotide

SEQ ID NO: 545911 - DNA, 60 bp, Artificial; identical to SEQ ID NO: 323986
  Synthetic oligonucleotide

SEQ ID NO: 545912 - DNA, 54 bp, Artificial; identical to SEQ ID NO: 323987
  Synthetic oligonucleotide

SEQ ID NO: 545913 - DNA, 57 bp, Artificial; identical to SEQ ID NO: 323988
  Synthetic oligonucleotide

SEQ ID NO: 545914 - DNA, 56 bp, Artificial; identical to SEQ ID NO: 323989
  Synthetic oligonucleotide

SEQ ID NO: 545915 - DNA, 60 bp, Artificial; identical to SEQ ID NO: 323991
  Synthetic oligonucleotide

SEQ ID NO: 545916 - DNA, 60 bp, Artificial; identical to SEQ ID NO: 323993
  Synthetic oligonucleotide

SEQ ID NO: 545917 - DNA, 53 bp, Artificial; identical to SEQ ID NO: 323996
  Synthetic oligonucleotide

SEQ ID NO: 545918 - DNA, 51 bp, Artificial; identical to SEQ ID NO: 323997
  Synthetic oligonucleotide

SEQ ID NO: 545919 - DNA, 60 bp, Artificial; identical to SEQ ID NO: 324002
  Synthetic oligonucleotide

SEQ ID NO: 545920 - DNA, 56 bp, Artificial; identical to SEQ ID NO: 324005
  Synthetic oligonucleotide

SEQ ID NO: 545921 - DNA, 55 bp, Artificial; identical to SEQ ID NO: 324008
  Synthetic oligonucleotide

SEQ ID NO: 545922 - DNA, 56 bp, Artificial; identical to SEQ ID NO: 324009
  Synthetic oligonucleotide

SEQ ID NO: 545923 - DNA, 60 bp, Artificial; identical to SEQ ID NO: 324010
  Synthetic oligonucleotide

SEQ ID NO: 545924 - DNA, 58 bp, Artificial; identical to SEQ ID NO: 324011
  Synthetic oligonucleotide

SEQ ID NO: 545925 - DNA, 54 bp, Artificial; identical to SEQ ID NO: 324013
  Synthetic oligonucleotide

SEQ ID NO: 545926 - DNA, 60 bp, Artificial; identical to SEQ ID NO: 324014
  Synthetic oligonucleotide

SEQ ID NO: 545927 - DNA, 60 bp, Artificial; identical to SEQ ID NO: 324015
  Synthetic oligonucleotide

SEQ ID NO: 545928 - DNA, 60 bp, Artificial; identical to SEQ ID NO: 324016
  Synthetic oligonucleotide

SEQ ID NO: 545929 - DNA, 55 bp, Artificial; identical to SEQ ID NO: 324017
  Synthetic oligonucleotide

SEQ ID NO: 545930 - DNA, 56 bp, Artificial; identical to SEQ ID NO: 324024
  Synthetic oligonucleotide

SEQ ID NO: 545931 - DNA, 56 bp, Artificial; identical to SEQ ID NO: 324026
  Synthetic oligonucleotide

SEQ ID NO: 545932 - DNA, 54 bp, Artificial; identical to SEQ ID NO: 324036
  Synthetic oligonucleotide

SEQ ID NO: 545933 - DNA, 53 bp, Artificial; identical to SEQ ID NO: 324037
  Synthetic oligonucleotide

SEQ ID NO: 545934 - DNA, 60 bp, Artificial; identical to SEQ ID NO: 324040
  Synthetic oligonucleotide

SEQ ID NO: 545935 - DNA, 57 bp, Artificial; identical to SEQ ID NO: 324041
  Synthetic oligonucleotide

SEQ ID NO: 545936 - DNA, 60 bp, Artificial; identical to SEQ ID NO: 324042
  Synthetic oligonucleotide

SEQ ID NO: 545937 - DNA, 60 bp, Artificial; identical to SEQ ID NO: 324043
  Synthetic oligonucleotide

SEQ ID NO: 545938 - DNA, 60 bp, Artificial; identical to SEQ ID NO: 324045
  Synthetic oligonucleotide

SEQ ID NO: 545939 - DNA, 52 bp, Artificial; identical to SEQ ID NO: 324048
  Synthetic oligonucleotide

SEQ ID NO: 545940 - DNA, 60 bp, Artificial; identical to SEQ ID NO: 324050
  Synthetic oligonucleotide

SEQ ID NO: 545941 - DNA, 60 bp, Artificial; identical to SEQ ID NO: 324054
  Synthetic oligonucleotide

SEQ ID NO: 545942 - DNA, 60 bp, Artificial; identical to SEQ ID NO: 324057
  Synthetic oligonucleotide

SEQ ID NO: 545943 - DNA, 55 bp, Artificial; identical to SEQ ID NO: 324062
  Synthetic oligonucleotide

SEQ ID NO: 545944 - DNA, 54 bp, Artificial; identical to SEQ ID NO: 19691
  Synthetic oligonucleotide

SEQ ID NO: 545945 - DNA, 52 bp, Artificial; identical to SEQ ID NO: 324064
  Synthetic oligonucleotide

SEQ ID NO: 545946 - DNA, 55 bp, Artificial; identical to SEQ ID NO: 324065
  Synthetic oligonucleotide

SEQ ID NO: 545947 - DNA, 58 bp, Artificial; identical to SEQ ID NO: 324066
  Synthetic oligonucleotide

SEQ ID NO: 545948 - DNA, 60 bp, Artificial; identical to SEQ ID NO: 324068
  Synthetic oligonucleotide

SEQ ID NO: 545949 - DNA, 50 bp, Artificial; identical to SEQ ID NO: 324069
  Synthetic oligonucleotide

SEQ ID NO: 545950 - DNA, 58 bp, Artificial; identical to SEQ ID NO: 324070
  Synthetic oligonucleotide

SEQ ID NO: 545951 - DNA, 59 bp, Artificial; identical to SEQ ID NO: 324075
  Synthetic oligonucleotide

SEQ ID NO: 545952 - DNA, 60 bp, Artificial; identical to SEQ ID NO: 116554
  Synthetic oligonucleotide

SEQ ID NO: 545953 - DNA, 58 bp, Artificial; identical to SEQ ID NO: 324078
  Synthetic oligonucleotide

SEQ ID NO: 545954 - DNA, 50 bp, Artificial; identical to SEQ ID NO: 324079
  Synthetic oligonucleotide

SEQ ID NO: 545955 - DNA, 54 bp, Artificial; identical to SEQ ID NO: 324083
  Synthetic oligonucleotide

SEQ ID NO: 545956 - DNA, 60 bp, Artificial; identical to SEQ ID NO: 324084
  Synthetic oligonucleotide

SEQ ID NO: 545957 - DNA, 60 bp, Artificial; identical to SEQ ID NO: 324085
  Synthetic oligonucleotide

SEQ ID NO: 545958 - DNA, 52 bp, Artificial; identical to SEQ ID NO: 324087
  Synthetic oligonucleotide

SEQ ID NO: 545959 - DNA, 60 bp, Artificial; identical to SEQ ID NO: 324088
  Synthetic oligonucleotide

SEQ ID NO: 545960 - DNA, 55 bp, Artificial; identical to SEQ ID NO: 324090
  Synthetic oligonucleotide

SEQ ID NO: 545961 - DNA, 60 bp, Artificial; identical to SEQ ID NO: 324091
  Synthetic oligonucleotide

SEQ ID NO: 545962 - DNA, 55 bp, Artificial; identical to SEQ ID NO: 324093
  Synthetic oligonucleotide

SEQ ID NO: 545963 - DNA, 55 bp, Artificial; identical to SEQ ID NO: 324097
  Synthetic oligonucleotide

SEQ ID NO: 545964 - DNA, 60 bp, Artificial; identical to SEQ ID NO: 324106
  Synthetic oligonucleotide

SEQ ID NO: 545965 - DNA, 57 bp, Artificial; identical to SEQ ID NO: 324107
  Synthetic oligonucleotide

SEQ ID NO: 545966 - DNA, 59 bp, Artificial; identical to SEQ ID NO: 324108
  Synthetic oligonucleotide

SEQ ID NO: 545967 - DNA, 60 bp, Artificial; identical to SEQ ID NO: 324109
  Synthetic oligonucleotide

SEQ ID NO: 545968 - DNA, 60 bp, Artificial; identical to SEQ ID NO: 324114
  Synthetic oligonucleotide

SEQ ID NO: 545969 - DNA, 60 bp, Artificial; identical to SEQ ID NO: 324119
  Synthetic oligonucleotide

SEQ ID NO: 545970 - DNA, 57 bp, Artificial; identical to SEQ ID NO: 324120
  Synthetic oligonucleotide

SEQ ID NO: 545971 - DNA, 60 bp, Artificial; identical to SEQ ID NO: 324122
  Synthetic oligonucleotide

SEQ ID NO: 545972 - DNA, 52 bp, Artificial; identical to SEQ ID NO: 324124
  Synthetic oligonucleotide

SEQ ID NO: 545973 - DNA, 59 bp, Artificial; identical to SEQ ID NO: 324125
  Synthetic oligonucleotide

SEQ ID NO: 545974 - DNA, 60 bp, Artificial; identical to SEQ ID NO: 324128
  Synthetic oligonucleotide

SEQ ID NO: 545975 - DNA, 60 bp, Artificial; identical to SEQ ID NO: 324129
  Synthetic oligonucleotide

SEQ ID NO: 545976 - DNA, 56 bp, Artificial; identical to SEQ ID NO: 324132
  Synthetic oligonucleotide

SEQ ID NO: 545977 - DNA, 53 bp, Artificial; identical to SEQ ID NO: 324134
  Synthetic oligonucleotide

SEQ ID NO: 545978 - DNA, 57 bp, Artificial; identical to SEQ ID NO: 324137
  Synthetic oligonucleotide

SEQ ID NO: 545979 - DNA, 55 bp, Artificial; identical to SEQ ID NO: 324140
  Synthetic oligonucleotide

SEQ ID NO: 545980 - DNA, 60 bp, Artificial; identical to SEQ ID NO: 324141
  Synthetic oligonucleotide

SEQ ID NO: 545981 - DNA, 60 bp, Artificial; identical to SEQ ID NO: 324143
  Synthetic oligonucleotide

SEQ ID NO: 545982 - DNA, 59 bp, Artificial; identical to SEQ ID NO: 324145
  Synthetic oligonucleotide

SEQ ID NO: 545983 - DNA, 59 bp, Artificial; identical to SEQ ID NO: 324147
  Synthetic oligonucleotide

SEQ ID NO: 545984 - DNA, 55 bp, Artificial; identical to SEQ ID NO: 324148
  Synthetic oligonucleotide

SEQ ID NO: 545985 - DNA, 55 bp, Artificial; identical to SEQ ID NO: 324149
  Synthetic oligonucleotide

SEQ ID NO: 545986 - DNA, 54 bp, Artificial; identical to SEQ ID NO: 324150
  Synthetic oligonucleotide

SEQ ID NO: 545987 - DNA, 60 bp, Artificial; identical to SEQ ID NO: 324152
  Synthetic oligonucleotide

SEQ ID NO: 545988 - DNA, 50 bp, Artificial; identical to SEQ ID NO: 324158
  Synthetic oligonucleotide

SEQ ID NO: 545989 - DNA, 58 bp, Artificial; identical to SEQ ID NO: 324161
  Synthetic oligonucleotide

SEQ ID NO: 545990 - DNA, 60 bp, Artificial; identical to SEQ ID NO: 324163
  Synthetic oligonucleotide

SEQ ID NO: 545991 - DNA, 54 bp, Artificial; identical to SEQ ID NO: 324164
  Synthetic oligonucleotide

SEQ ID NO: 545992 - DNA, 51 bp, Artificial; identical to SEQ ID NO: 324165
  Synthetic oligonucleotide

SEQ ID NO: 545993 - DNA, 60 bp, Artificial; identical to SEQ ID NO: 324166
  Synthetic oligonucleotide

SEQ ID NO: 545994 - DNA, 54 bp, Artificial; identical to SEQ ID NO: 324168
  Synthetic oligonucleotide

SEQ ID NO: 545995 - DNA, 52 bp, Artificial; identical to SEQ ID NO: 324172
  Synthetic oligonucleotide

SEQ ID NO: 545996 - DNA, 50 bp, Artificial; identical to SEQ ID NO: 324173
  Synthetic oligonucleotide

SEQ ID NO: 545997 - DNA, 59 bp, Artificial; identical to SEQ ID NO: 324181
  Synthetic oligonucleotide

SEQ ID NO: 545998 - DNA, 58 bp, Artificial; identical to SEQ ID NO: 324184
  Synthetic oligonucleotide

SEQ ID NO: 545999 - DNA, 51 bp, Artificial; identical to SEQ ID NO: 324188
  Synthetic oligonucleotide

SEQ ID NO: 546000 - DNA, 54 bp, Artificial; identical to SEQ ID NO: 324189
  Synthetic oligonucleotide

SEQ ID NO: 546001 - DNA, 58 bp, Artificial; identical to SEQ ID NO: 324190
  Synthetic oligonucleotide

SEQ ID NO: 546002 - DNA, 54 bp, Artificial; identical to SEQ ID NO: 324191
  Synthetic oligonucleotide

SEQ ID NO: 546003 - DNA, 55 bp, Artificial; identical to SEQ ID NO: 324193
  Synthetic oligonucleotide

SEQ ID NO: 546004 - DNA, 59 bp, Artificial; identical to SEQ ID NO: 324196
  Synthetic oligonucleotide

SEQ ID NO: 546005 - DNA, 53 bp, Artificial; identical to SEQ ID NO: 324198
  Synthetic oligonucleotide

SEQ ID NO: 546006 - DNA, 60 bp, Artificial; identical to SEQ ID NO: 324199
  Synthetic oligonucleotide

SEQ ID NO: 546007 - DNA, 55 bp, Artificial; identical to SEQ ID NO: 324200
  Synthetic oligonucleotide

SEQ ID NO: 546008 - DNA, 53 bp, Artificial; identical to SEQ ID NO: 17149
  Synthetic oligonucleotide

SEQ ID NO: 546009 - DNA, 57 bp, Artificial; identical to SEQ ID NO: 19935
  Synthetic oligonucleotide

SEQ ID NO: 546010 - DNA, 55 bp, Artificial; identical to SEQ ID NO: 324202
  Synthetic oligonucleotide

SEQ ID NO: 546011 - DNA, 55 bp, Artificial; identical to SEQ ID NO: 17483
  Synthetic oligonucleotide

SEQ ID NO: 546012 - DNA, 57 bp, Artificial; identical to SEQ ID NO: 18624
  Synthetic oligonucleotide

SEQ ID NO: 546013 - DNA, 55 bp, Artificial; identical to SEQ ID NO: 324205
  Synthetic oligonucleotide

SEQ ID NO: 546014 - DNA, 58 bp, Artificial; identical to SEQ ID NO: 324211
  Synthetic oligonucleotide

SEQ ID NO: 546015 - DNA, 55 bp, Artificial; identical to SEQ ID NO: 324212
  Synthetic oligonucleotide

SEQ ID NO: 546016 - DNA, 56 bp, Artificial; identical to SEQ ID NO: 324213
  Synthetic oligonucleotide

SEQ ID NO: 546017 - DNA, 60 bp, Artificial; identical to SEQ ID NO: 6296
  Synthetic oligonucleotide

SEQ ID NO: 546018 - DNA, 58 bp, Artificial; identical to SEQ ID NO: 324214
  Synthetic oligonucleotide

SEQ ID NO: 546019 - DNA, 60 bp, Artificial; identical to SEQ ID NO: 324215
  Synthetic oligonucleotide

SEQ ID NO: 546020 - DNA, 55 bp, Artificial; identical to SEQ ID NO: 18948
  Synthetic oligonucleotide

SEQ ID NO: 546021 - DNA, 50 bp, Artificial; identical to SEQ ID NO: 324222
  Synthetic oligonucleotide

SEQ ID NO: 546022 - DNA, 57 bp, Artificial; identical to SEQ ID NO: 324224
  Synthetic oligonucleotide

SEQ ID NO: 546023 - DNA, 55 bp, Artificial; identical to SEQ ID NO: 14900
  Synthetic oligonucleotide

SEQ ID NO: 546024 - DNA, 59 bp, Artificial; identical to SEQ ID NO: 7565
  Synthetic oligonucleotide

SEQ ID NO: 546025 - DNA, 58 bp, Artificial; identical to SEQ ID NO: 324228
  Synthetic oligonucleotide

SEQ ID NO: 546026 - DNA, 59 bp, Artificial; identical to SEQ ID NO: 324232
  Synthetic oligonucleotide

SEQ ID NO: 546027 - DNA, 55 bp, Artificial; identical to SEQ ID NO: 324235
  Synthetic oligonucleotide

SEQ ID NO: 546028 - DNA, 56 bp, Artificial; identical to SEQ ID NO: 324244
  Synthetic oligonucleotide

SEQ ID NO: 546029 - DNA, 59 bp, Artificial; identical to SEQ ID NO: 324248
  Synthetic oligonucleotide

SEQ ID NO: 546030 - DNA, 57 bp, Artificial; identical to SEQ ID NO: 324252
  Synthetic oligonucleotide

SEQ ID NO: 546031 - DNA, 52 bp, Artificial; identical to SEQ ID NO: 324254
  Synthetic oligonucleotide

SEQ ID NO: 546032 - DNA, 60 bp, Artificial; identical to SEQ ID NO: 324255
  Synthetic oligonucleotide

SEQ ID NO: 546033 - DNA, 59 bp, Artificial; identical to SEQ ID NO: 324257
  Synthetic oligonucleotide

SEQ ID NO: 546034 - DNA, 51 bp, Artificial; identical to SEQ ID NO: 324259
  Synthetic oligonucleotide

SEQ ID NO: 546035 - DNA, 55 bp, Artificial; identical to SEQ ID NO: 324260
  Synthetic oligonucleotide

SEQ ID NO: 546036 - DNA, 60 bp, Artificial; identical to SEQ ID NO: 324262
  Synthetic oligonucleotide

SEQ ID NO: 546037 - DNA, 51 bp, Artificial; identical to SEQ ID NO: 324263
  Synthetic oligonucleotide

SEQ ID NO: 546038 - DNA, 60 bp, Artificial; identical to SEQ ID NO: 324265
  Synthetic oligonucleotide

SEQ ID NO: 546039 - DNA, 60 bp, Artificial; identical to SEQ ID NO: 324267
  Synthetic oligonucleotide

SEQ ID NO: 546040 - DNA, 57 bp, Artificial; identical to SEQ ID NO: 324268
  Synthetic oligonucleotide

SEQ ID NO: 546041 - DNA, 60 bp, Artificial; identical to SEQ ID NO: 324269
  Synthetic oligonucleotide

SEQ ID NO: 546042 - DNA, 60 bp, Artificial; identical to SEQ ID NO: 324271
  Synthetic oligonucleotide

SEQ ID NO: 546043 - DNA, 59 bp, Artificial; identical to SEQ ID NO: 324277
  Synthetic oligonucleotide

SEQ ID NO: 546044 - DNA, 58 bp, Artificial; identical to SEQ ID NO: 324278
  Synthetic oligonucleotide

SEQ ID NO: 546045 - DNA, 55 bp, Artificial; identical to SEQ ID NO: 324281
  Synthetic oligonucleotide

SEQ ID NO: 546046 - DNA, 60 bp, Artificial; identical to SEQ ID NO: 324282
  Synthetic oligonucleotide

SEQ ID NO: 546047 - DNA, 60 bp, Artificial; identical to SEQ ID NO: 324286
  Synthetic oligonucleotide

SEQ ID NO: 546048 - DNA, 60 bp, Artificial; identical to SEQ ID NO: 324287
  Synthetic oligonucleotide

SEQ ID NO: 546049 - DNA, 55 bp, Artificial; identical to SEQ ID NO: 14677
  Synthetic oligonucleotide

SEQ ID NO: 546050 - DNA, 59 bp, Artificial; identical to SEQ ID NO: 324293
  Synthetic oligonucleotide

SEQ ID NO: 546051 - DNA, 53 bp, Artificial; identical to SEQ ID NO: 324294
  Synthetic oligonucleotide

SEQ ID NO: 546052 - DNA, 56 bp, Artificial; identical to SEQ ID NO: 324297
  Synthetic oligonucleotide

SEQ ID NO: 546053 - DNA, 57 bp, Artificial; identical to SEQ ID NO: 324299
  Synthetic oligonucleotide

SEQ ID NO: 546054 - DNA, 53 bp, Artificial; identical to SEQ ID NO: 324300
  Synthetic oligonucleotide

SEQ ID NO: 546055 - DNA, 60 bp, Artificial; identical to SEQ ID NO: 324301
  Synthetic oligonucleotide

SEQ ID NO: 546056 - DNA, 60 bp, Artificial; identical to SEQ ID NO: 324303
  Synthetic oligonucleotide

SEQ ID NO: 546057 - DNA, 60 bp, Artificial; identical to SEQ ID NO: 324304
  Synthetic oligonucleotide

SEQ ID NO: 546058 - DNA, 59 bp, Artificial; identical to SEQ ID NO: 324305
  Synthetic oligonucleotide

SEQ ID NO: 546059 - DNA, 60 bp, Artificial; identical to SEQ ID NO: 324309
  Synthetic oligonucleotide

SEQ ID NO: 546060 - DNA, 60 bp, Artificial; identical to SEQ ID NO: 324311
  Synthetic oligonucleotide

SEQ ID NO: 546061 - DNA, 54 bp, Artificial; identical to SEQ ID NO: 324312
  Synthetic oligonucleotide

SEQ ID NO: 546062 - DNA, 55 bp, Artificial; identical to SEQ ID NO: 6057
  Synthetic oligonucleotide

SEQ ID NO: 546063 - DNA, 54 bp, Artificial; identical to SEQ ID NO: 324315
  Synthetic oligonucleotide

SEQ ID NO: 546064 - DNA, 55 bp, Artificial; identical to SEQ ID NO: 324316
  Synthetic oligonucleotide

SEQ ID NO: 546065 - DNA, 51 bp, Artificial; identical to SEQ ID NO: 324317
  Synthetic oligonucleotide

SEQ ID NO: 546066 - DNA, 60 bp, Artificial; identical to SEQ ID NO: 324322
  Synthetic oligonucleotide

SEQ ID NO: 546067 - DNA, 60 bp, Artificial; identical to SEQ ID NO: 324328
  Synthetic oligonucleotide

SEQ ID NO: 546068 - DNA, 60 bp, Artificial; identical to SEQ ID NO: 324332
  Synthetic oligonucleotide

SEQ ID NO: 546069 - DNA, 54 bp, Artificial; identical to SEQ ID NO: 324333
  Synthetic oligonucleotide

SEQ ID NO: 546070 - DNA, 55 bp, Artificial; identical to SEQ ID NO: 324334
  Synthetic oligonucleotide

SEQ ID NO: 546071 - DNA, 55 bp, Artificial; identical to SEQ ID NO: 324336
  Synthetic oligonucleotide

SEQ ID NO: 546072 - DNA, 55 bp, Artificial; identical to SEQ ID NO: 324337
  Synthetic oligonucleotide

SEQ ID NO: 546073 - DNA, 60 bp, Artificial; identical to SEQ ID NO: 324341
  Synthetic oligonucleotide

SEQ ID NO: 546074 - DNA, 55 bp, Artificial; identical to SEQ ID NO: 324344
  Synthetic oligonucleotide

SEQ ID NO: 546075 - DNA, 56 bp, Artificial; identical to SEQ ID NO: 324347
  Synthetic oligonucleotide

SEQ ID NO: 546076 - DNA, 55 bp, Artificial; identical to SEQ ID NO: 324349
  Synthetic oligonucleotide

SEQ ID NO: 546077 - DNA, 55 bp, Artificial; identical to SEQ ID NO: 324350
  Synthetic oligonucleotide

SEQ ID NO: 546078 - DNA, 56 bp, Artificial; identical to SEQ ID NO: 225
  Synthetic oligonucleotide

SEQ ID NO: 546079 - DNA, 59 bp, Artificial; identical to SEQ ID NO: 324354
  Synthetic oligonucleotide

SEQ ID NO: 546080 - DNA, 56 bp, Artificial; identical to SEQ ID NO: 324357
  Synthetic oligonucleotide

SEQ ID NO: 546081 - DNA, 60 bp, Artificial; identical to SEQ ID NO: 324366
  Synthetic oligonucleotide

SEQ ID NO: 546082 - DNA, 51 bp, Artificial; identical to SEQ ID NO: 324367
  Synthetic oligonucleotide

SEQ ID NO: 546083 - DNA, 60 bp, Artificial; identical to SEQ ID NO: 324371
  Synthetic oligonucleotide

SEQ ID NO: 546084 - DNA, 55 bp, Artificial; identical to SEQ ID NO: 324377
  Synthetic oligonucleotide

SEQ ID NO: 546085 - DNA, 54 bp, Artificial; identical to SEQ ID NO: 324378
  Synthetic oligonucleotide

SEQ ID NO: 546086 - DNA, 60 bp, Artificial; identical to SEQ ID NO: 324379
  Synthetic oligonucleotide

SEQ ID NO: 546087 - DNA, 60 bp, Artificial; identical to SEQ ID NO: 324380
  Synthetic oligonucleotide

SEQ ID NO: 546088 - DNA, 51 bp, Artificial; identical to SEQ ID NO: 324381
  Synthetic oligonucleotide

SEQ ID NO: 546089 - DNA, 55 bp, Artificial; identical to SEQ ID NO: 324383
  Synthetic oligonucleotide

SEQ ID NO: 546090 - DNA, 56 bp, Artificial; identical to SEQ ID NO: 324386
  Synthetic oligonucleotide

SEQ ID NO: 546091 - DNA, 54 bp, Artificial; identical to SEQ ID NO: 324387
  Synthetic oligonucleotide

SEQ ID NO: 546092 - DNA, 55 bp, Artificial; identical to SEQ ID NO: 324388
  Synthetic oligonucleotide

SEQ ID NO: 546093 - DNA, 55 bp, Artificial; identical to SEQ ID NO: 324400
  Synthetic oligonucleotide

SEQ ID NO: 546094 - DNA, 51 bp, Artificial; identical to SEQ ID NO: 324402
  Synthetic oligonucleotide

SEQ ID NO: 546095 - DNA, 50 bp, Artificial; identical to SEQ ID NO: 324403
  Synthetic oligonucleotide

SEQ ID NO: 546096 - DNA, 50 bp, Artificial; identical to SEQ ID NO: 324405
  Synthetic oligonucleotide

SEQ ID NO: 546097 - DNA, 57 bp, Artificial; identical to SEQ ID NO: 324409
  Synthetic oligonucleotide

SEQ ID NO: 546098 - DNA, 54 bp, Artificial; identical to SEQ ID NO: 324413
  Synthetic oligonucleotide

SEQ ID NO: 546099 - DNA, 57 bp, Artificial; identical to SEQ ID NO: 324414
  Synthetic oligonucleotide

SEQ ID NO: 546100 - DNA, 55 bp, Artificial; identical to SEQ ID NO: 324418
  Synthetic oligonucleotide

SEQ ID NO: 546101 - DNA, 60 bp, Artificial; identical to SEQ ID NO: 324419
  Synthetic oligonucleotide

SEQ ID NO: 546102 - DNA, 56 bp, Artificial; identical to SEQ ID NO: 324421
  Synthetic oligonucleotide

SEQ ID NO: 546103 - DNA, 53 bp, Artificial; identical to SEQ ID NO: 324423
  Synthetic oligonucleotide

SEQ ID NO: 546104 - DNA, 52 bp, Artificial; identical to SEQ ID NO: 324430
  Synthetic oligonucleotide

SEQ ID NO: 546105 - DNA, 52 bp, Artificial; identical to SEQ ID NO: 324432
  Synthetic oligonucleotide

SEQ ID NO: 546106 - DNA, 52 bp, Artificial; identical to SEQ ID NO: 324434
  Synthetic oligonucleotide

SEQ ID NO: 546107 - DNA, 56 bp, Artificial; identical to SEQ ID NO: 324440
  Synthetic oligonucleotide

SEQ ID NO: 546108 - DNA, 57 bp, Artificial; identical to SEQ ID NO: 324446
  Synthetic oligonucleotide

SEQ ID NO: 546109 - DNA, 55 bp, Artificial; identical to SEQ ID NO: 324447
  Synthetic oligonucleotide

SEQ ID NO: 546110 - DNA, 51 bp, Artificial; identical to SEQ ID NO: 324449
  Synthetic oligonucleotide

SEQ ID NO: 546111 - DNA, 60 bp, Artificial; identical to SEQ ID NO: 324451
  Synthetic oligonucleotide

SEQ ID NO: 546112 - DNA, 55 bp, Artificial; identical to SEQ ID NO: 324453
  Synthetic oligonucleotide

SEQ ID NO: 546113 - DNA, 53 bp, Artificial; identical to SEQ ID NO: 324454
  Synthetic oligonucleotide

SEQ ID NO: 546114 - DNA, 50 bp, Artificial; identical to SEQ ID NO: 324455
  Synthetic oligonucleotide

SEQ ID NO: 546115 - DNA, 56 bp, Artificial; identical to SEQ ID NO: 324457
  Synthetic oligonucleotide

SEQ ID NO: 546116 - DNA, 56 bp, Artificial; identical to SEQ ID NO: 324460
  Synthetic oligonucleotide

SEQ ID NO: 546117 - DNA, 56 bp, Artificial; identical to SEQ ID NO: 324461
  Synthetic oligonucleotide

SEQ ID NO: 546118 - DNA, 58 bp, Artificial; identical to SEQ ID NO: 324465
  Synthetic oligonucleotide

SEQ ID NO: 546119 - DNA, 53 bp, Artificial; identical to SEQ ID NO: 324466
  Synthetic oligonucleotide

SEQ ID NO: 546120 - DNA, 59 bp, Artificial; identical to SEQ ID NO: 324467
  Synthetic oligonucleotide

SEQ ID NO: 546121 - DNA, 55 bp, Artificial; identical to SEQ ID NO: 16057
  Synthetic oligonucleotide

SEQ ID NO: 546122 - DNA, 55 bp, Artificial; identical to SEQ ID NO: 324469
  Synthetic oligonucleotide

SEQ ID NO: 546123 - DNA, 60 bp, Artificial; identical to SEQ ID NO: 324470
  Synthetic oligonucleotide

SEQ ID NO: 546124 - DNA, 55 bp, Artificial; identical to SEQ ID NO: 324475
  Synthetic oligonucleotide

SEQ ID NO: 546125 - DNA, 53 bp, Artificial; identical to SEQ ID NO: 324476
  Synthetic oligonucleotide

SEQ ID NO: 546126 - DNA, 58 bp, Artificial; identical to SEQ ID NO: 324481
  Synthetic oligonucleotide

SEQ ID NO: 546127 - DNA, 60 bp, Artificial; identical to SEQ ID NO: 324484
  Synthetic oligonucleotide

SEQ ID NO: 546128 - DNA, 60 bp, Artificial; identical to SEQ ID NO: 324485
  Synthetic oligonucleotide

SEQ ID NO: 546129 - DNA, 60 bp, Artificial; identical to SEQ ID NO: 324486
  Synthetic oligonucleotide

SEQ ID NO: 546130 - DNA, 56 bp, Artificial; identical to SEQ ID NO: 324487
  Synthetic oligonucleotide

SEQ ID NO: 546131 - DNA, 60 bp, Artificial; identical to SEQ ID NO: 324492
  Synthetic oligonucleotide

SEQ ID NO: 546132 - DNA, 59 bp, Artificial; identical to SEQ ID NO: 324493
  Synthetic oligonucleotide

SEQ ID NO: 546133 - DNA, 58 bp, Artificial; identical to SEQ ID NO: 324494
  Synthetic oligonucleotide

SEQ ID NO: 546134 - DNA, 55 bp, Artificial; identical to SEQ ID NO: 324495
  Synthetic oligonucleotide

SEQ ID NO: 546135 - DNA, 58 bp, Artificial; identical to SEQ ID NO: 324496
  Synthetic oligonucleotide

SEQ ID NO: 546136 - DNA, 60 bp, Artificial; identical to SEQ ID NO: 324497
  Synthetic oligonucleotide

SEQ ID NO: 546137 - DNA, 60 bp, Artificial; identical to SEQ ID NO: 324498
  Synthetic oligonucleotide

SEQ ID NO: 546138 - DNA, 54 bp, Artificial; identical to SEQ ID NO: 324499
  Synthetic oligonucleotide

SEQ ID NO: 546139 - DNA, 60 bp, Artificial; identical to SEQ ID NO: 324502
  Synthetic oligonucleotide

SEQ ID NO: 546140 - DNA, 54 bp, Artificial; identical to SEQ ID NO: 324503
  Synthetic oligonucleotide

SEQ ID NO: 546141 - DNA, 60 bp, Artificial; identical to SEQ ID NO: 324505
  Synthetic oligonucleotide

SEQ ID NO: 546142 - DNA, 55 bp, Artificial; identical to SEQ ID NO: 324509
  Synthetic oligonucleotide

SEQ ID NO: 546143 - DNA, 55 bp, Artificial; identical to SEQ ID NO: 324514
  Synthetic oligonucleotide

SEQ ID NO: 546144 - DNA, 53 bp, Artificial; identical to SEQ ID NO: 324517
  Synthetic oligonucleotide

SEQ ID NO: 546145 - DNA, 52 bp, Artificial; identical to SEQ ID NO: 324518
  Synthetic oligonucleotide

SEQ ID NO: 546146 - DNA, 57 bp, Artificial; identical to SEQ ID NO: 324520
  Synthetic oligonucleotide

SEQ ID NO: 546147 - DNA, 60 bp, Artificial; identical to SEQ ID NO: 324526
  Synthetic oligonucleotide

SEQ ID NO: 546148 - DNA, 59 bp, Artificial; identical to SEQ ID NO: 324527
  Synthetic oligonucleotide

SEQ ID NO: 546149 - DNA, 60 bp, Artificial; identical to SEQ ID NO: 14630
  Synthetic oligonucleotide

SEQ ID NO: 546150 - DNA, 55 bp, Artificial; identical to SEQ ID NO: 324531
  Synthetic oligonucleotide

SEQ ID NO: 546151 - DNA, 59 bp, Artificial; identical to SEQ ID NO: 324534
  Synthetic oligonucleotide

SEQ ID NO: 546152 - DNA, 58 bp, Artificial; identical to SEQ ID NO: 324536
  Synthetic oligonucleotide

SEQ ID NO: 546153 - DNA, 60 bp, Artificial; identical to SEQ ID NO: 324540
  Synthetic oligonucleotide

SEQ ID NO: 546154 - DNA, 53 bp, Artificial; identical to SEQ ID NO: 324542
  Synthetic oligonucleotide

SEQ ID NO: 546155 - DNA, 60 bp, Artificial; identical to SEQ ID NO: 324546
  Synthetic oligonucleotide

SEQ ID NO: 546156 - DNA, 52 bp, Artificial; identical to SEQ ID NO: 324549
  Synthetic oligonucleotide

SEQ ID NO: 546157 - DNA, 59 bp, Artificial; identical to SEQ ID NO: 324551
  Synthetic oligonucleotide

SEQ ID NO: 546158 - DNA, 56 bp, Artificial; identical to SEQ ID NO: 324555
  Synthetic oligonucleotide

SEQ ID NO: 546159 - DNA, 55 bp, Artificial; identical to SEQ ID NO: 324559
  Synthetic oligonucleotide

SEQ ID NO: 546160 - DNA, 57 bp, Artificial; identical to SEQ ID NO: 324561
  Synthetic oligonucleotide

SEQ ID NO: 546161 - DNA, 60 bp, Artificial; identical to SEQ ID NO: 324563
  Synthetic oligonucleotide

SEQ ID NO: 546162 - DNA, 60 bp, Artificial; identical to SEQ ID NO: 324570
  Synthetic oligonucleotide

SEQ ID NO: 546163 - DNA, 55 bp, Artificial; identical to SEQ ID NO: 324573
  Synthetic oligonucleotide

SEQ ID NO: 546164 - DNA, 54 bp, Artificial; identical to SEQ ID NO: 324578
  Synthetic oligonucleotide

SEQ ID NO: 546165 - DNA, 60 bp, Artificial; identical to SEQ ID NO: 324582
  Synthetic oligonucleotide

SEQ ID NO: 546166 - DNA, 54 bp, Artificial; identical to SEQ ID NO: 324583
  Synthetic oligonucleotide

SEQ ID NO: 546167 - DNA, 60 bp, Artificial; identical to SEQ ID NO: 324586
  Synthetic oligonucleotide

SEQ ID NO: 546168 - DNA, 60 bp, Artificial; identical to SEQ ID NO: 324587
  Synthetic oligonucleotide

SEQ ID NO: 546169 - DNA, 60 bp, Artificial; identical to SEQ ID NO: 324588
  Synthetic oligonucleotide

SEQ ID NO: 546170 - DNA, 57 bp, Artificial; identical to SEQ ID NO: 324589
  Synthetic oligonucleotide

SEQ ID NO: 546171 - DNA, 60 bp, Artificial; identical to SEQ ID NO: 8364
  Synthetic oligonucleotide

SEQ ID NO: 546172 - DNA, 60 bp, Artificial; identical to SEQ ID NO: 324591
  Synthetic oligonucleotide

SEQ ID NO: 546173 - DNA, 60 bp, Artificial; identical to SEQ ID NO: 324593
  Synthetic oligonucleotide

SEQ ID NO: 546174 - DNA, 53 bp, Artificial; identical to SEQ ID NO: 324595
  Synthetic oligonucleotide

SEQ ID NO: 546175 - DNA, 56 bp, Artificial; identical to SEQ ID NO: 324597
  Synthetic oligonucleotide

SEQ ID NO: 546176 - DNA, 50 bp, Artificial; identical to SEQ ID NO: 324598
  Synthetic oligonucleotide

SEQ ID NO: 546177 - DNA, 59 bp, Artificial; identical to SEQ ID NO: 324600
  Synthetic oligonucleotide

SEQ ID NO: 546178 - DNA, 55 bp, Artificial; identical to SEQ ID NO: 324602
  Synthetic oligonucleotide

SEQ ID NO: 546179 - DNA, 58 bp, Artificial; identical to SEQ ID NO: 324603
  Synthetic oligonucleotide

SEQ ID NO: 546180 - DNA, 54 bp, Artificial; identical to SEQ ID NO: 324604
  Synthetic oligonucleotide

SEQ ID NO: 546181 - DNA, 55 bp, Artificial; identical to SEQ ID NO: 324610
  Synthetic oligonucleotide

SEQ ID NO: 546182 - DNA, 55 bp, Artificial; identical to SEQ ID NO: 324611
  Synthetic oligonucleotide

SEQ ID NO: 546183 - DNA, 55 bp, Artificial; identical to SEQ ID NO: 324613
  Synthetic oligonucleotide

SEQ ID NO: 546184 - DNA, 51 bp, Artificial; identical to SEQ ID NO: 324615
  Synthetic oligonucleotide

SEQ ID NO: 546185 - DNA, 60 bp, Artificial; identical to SEQ ID NO: 324616
  Synthetic oligonucleotide

SEQ ID NO: 546186 - DNA, 60 bp, Artificial; identical to SEQ ID NO: 324617
  Synthetic oligonucleotide

SEQ ID NO: 546187 - DNA, 55 bp, Artificial; identical to SEQ ID NO: 324619
  Synthetic oligonucleotide

SEQ ID NO: 546188 - DNA, 55 bp, Artificial; identical to SEQ ID NO: 324622
  Synthetic oligonucleotide

SEQ ID NO: 546189 - DNA, 60 bp, Artificial; identical to SEQ ID NO: 324625
  Synthetic oligonucleotide

SEQ ID NO: 546190 - DNA, 54 bp, Artificial; identical to SEQ ID NO: 324630
  Synthetic oligonucleotide

SEQ ID NO: 546191 - DNA, 54 bp, Artificial; identical to SEQ ID NO: 324633
  Synthetic oligonucleotide

SEQ ID NO: 546192 - DNA, 60 bp, Artificial; identical to SEQ ID NO: 324636
  Synthetic oligonucleotide

SEQ ID NO: 546193 - DNA, 55 bp, Artificial; identical to SEQ ID NO: 324638
  Synthetic oligonucleotide

SEQ ID NO: 546194 - DNA, 59 bp, Artificial; identical to SEQ ID NO: 324644
  Synthetic oligonucleotide

SEQ ID NO: 546195 - DNA, 55 bp, Artificial; identical to SEQ ID NO: 324646
  Synthetic oligonucleotide

SEQ ID NO: 546196 - DNA, 52 bp, Artificial; identical to SEQ ID NO: 324647
  Synthetic oligonucleotide

SEQ ID NO: 546197 - DNA, 56 bp, Artificial; identical to SEQ ID NO: 19076
  Synthetic oligonucleotide

SEQ ID NO: 546198 - DNA, 56 bp, Artificial; identical to SEQ ID NO: 324649
  Synthetic oligonucleotide

SEQ ID NO: 546199 - DNA, 60 bp, Artificial; identical to SEQ ID NO: 324651
  Synthetic oligonucleotide

SEQ ID NO: 546200 - DNA, 60 bp, Artificial; identical to SEQ ID NO: 324653
  Synthetic oligonucleotide

SEQ ID NO: 546201 - DNA, 60 bp, Artificial; identical to SEQ ID NO: 324658
  Synthetic oligonucleotide

SEQ ID NO: 546202 - DNA, 50 bp, Artificial; identical to SEQ ID NO: 324661
  Synthetic oligonucleotide

SEQ ID NO: 546203 - DNA, 57 bp, Artificial; identical to SEQ ID NO: 324662
  Synthetic oligonucleotide

SEQ ID NO: 546204 - DNA, 51 bp, Artificial; identical to SEQ ID NO: 324663
  Synthetic oligonucleotide

SEQ ID NO: 546205 - DNA, 50 bp, Artificial; identical to SEQ ID NO: 324669
  Synthetic oligonucleotide

SEQ ID NO: 546206 - DNA, 55 bp, Artificial; identical to SEQ ID NO: 324671
  Synthetic oligonucleotide

SEQ ID NO: 546207 - DNA, 60 bp, Artificial; identical to SEQ ID NO: 324672
  Synthetic oligonucleotide

SEQ ID NO: 546208 - DNA, 57 bp, Artificial; identical to SEQ ID NO: 324674
  Synthetic oligonucleotide

SEQ ID NO: 546209 - DNA, 60 bp, Artificial; identical to SEQ ID NO: 324675
  Synthetic oligonucleotide

SEQ ID NO: 546210 - DNA, 56 bp, Artificial; identical to SEQ ID NO: 324679
  Synthetic oligonucleotide

SEQ ID NO: 546211 - DNA, 52 bp, Artificial; identical to SEQ ID NO: 324680
  Synthetic oligonucleotide

SEQ ID NO: 546212 - DNA, 52 bp, Artificial; identical to SEQ ID NO: 324683
  Synthetic oligonucleotide

SEQ ID NO: 546213 - DNA, 60 bp, Artificial; identical to SEQ ID NO: 324684
  Synthetic oligonucleotide

SEQ ID NO: 546214 - DNA, 60 bp, Artificial; identical to SEQ ID NO: 324685
  Synthetic oligonucleotide

SEQ ID NO: 546215 - DNA, 55 bp, Artificial; identical to SEQ ID NO: 324687
  Synthetic oligonucleotide

SEQ ID NO: 546216 - DNA, 58 bp, Artificial; identical to SEQ ID NO: 324692
  Synthetic oligonucleotide

SEQ ID NO: 546217 - DNA, 57 bp, Artificial; identical to SEQ ID NO: 324693
  Synthetic oligonucleotide

SEQ ID NO: 546218 - DNA, 55 bp, Artificial; identical to SEQ ID NO: 324697
  Synthetic oligonucleotide

SEQ ID NO: 546219 - DNA, 55 bp, Artificial; identical to SEQ ID NO: 324700
  Synthetic oligonucleotide

SEQ ID NO: 546220 - DNA, 51 bp, Artificial; identical to SEQ ID NO: 324704
  Synthetic oligonucleotide

SEQ ID NO: 546221 - DNA, 56 bp, Artificial; identical to SEQ ID NO: 324705
  Synthetic oligonucleotide

SEQ ID NO: 546222 - DNA, 56 bp, Artificial; identical to SEQ ID NO: 324709
  Synthetic oligonucleotide

SEQ ID NO: 546223 - DNA, 58 bp, Artificial; identical to SEQ ID NO: 324712
  Synthetic oligonucleotide

SEQ ID NO: 546224 - DNA, 55 bp, Artificial; identical to SEQ ID NO: 324713
  Synthetic oligonucleotide

SEQ ID NO: 546225 - DNA, 58 bp, Artificial; identical to SEQ ID NO: 324719
  Synthetic oligonucleotide

SEQ ID NO: 546226 - DNA, 54 bp, Artificial; identical to SEQ ID NO: 324720
  Synthetic oligonucleotide

SEQ ID NO: 546227 - DNA, 60 bp, Artificial; identical to SEQ ID NO: 324723
  Synthetic oligonucleotide

SEQ ID NO: 546228 - DNA, 60 bp, Artificial; identical to SEQ ID NO: 324725
  Synthetic oligonucleotide

SEQ ID NO: 546229 - DNA, 53 bp, Artificial; identical to SEQ ID NO: 324729
  Synthetic oligonucleotide

SEQ ID NO: 546230 - DNA, 59 bp, Artificial; identical to SEQ ID NO: 324730
  Synthetic oligonucleotide

SEQ ID NO: 546231 - DNA, 57 bp, Artificial; identical to SEQ ID NO: 324734
  Synthetic oligonucleotide

SEQ ID NO: 546232 - DNA, 58 bp, Artificial; identical to SEQ ID NO: 324735
  Synthetic oligonucleotide

SEQ ID NO: 546233 - DNA, 60 bp, Artificial; identical to SEQ ID NO: 324737
  Synthetic oligonucleotide

SEQ ID NO: 546234 - DNA, 55 bp, Artificial; identical to SEQ ID NO: 324740
  Synthetic oligonucleotide

SEQ ID NO: 546235 - DNA, 54 bp, Artificial; identical to SEQ ID NO: 324743
  Synthetic oligonucleotide

SEQ ID NO: 546236 - DNA, 56 bp, Artificial; identical to SEQ ID NO: 324747
  Synthetic oligonucleotide

SEQ ID NO: 546237 - DNA, 60 bp, Artificial; identical to SEQ ID NO: 324749
  Synthetic oligonucleotide

SEQ ID NO: 546238 - DNA, 51 bp, Artificial; identical to SEQ ID NO: 324750
  Synthetic oligonucleotide

SEQ ID NO: 546239 - DNA, 55 bp, Artificial; identical to SEQ ID NO: 324756
  Synthetic oligonucleotide

SEQ ID NO: 546240 - DNA, 60 bp, Artificial; identical to SEQ ID NO: 324758
  Synthetic oligonucleotide

SEQ ID NO: 546241 - DNA, 60 bp, Artificial; identical to SEQ ID NO: 324760
  Synthetic oligonucleotide

SEQ ID NO: 546242 - DNA, 52 bp, Artificial; identical to SEQ ID NO: 324761
  Synthetic oligonucleotide

SEQ ID NO: 546243 - DNA, 60 bp, Artificial; identical to SEQ ID NO: 324766
  Synthetic oligonucleotide

SEQ ID NO: 546244 - DNA, 54 bp, Artificial; identical to SEQ ID NO: 324768
  Synthetic oligonucleotide

SEQ ID NO: 546245 - DNA, 60 bp, Artificial; identical to SEQ ID NO: 6062
  Synthetic oligonucleotide

SEQ ID NO: 546246 - DNA, 54 bp, Artificial; identical to SEQ ID NO: 324772
  Synthetic oligonucleotide

SEQ ID NO: 546247 - DNA, 53 bp, Artificial; identical to SEQ ID NO: 324774
  Synthetic oligonucleotide

SEQ ID NO: 546248 - DNA, 58 bp, Artificial; identical to SEQ ID NO: 324777
  Synthetic oligonucleotide

SEQ ID NO: 546249 - DNA, 59 bp, Artificial; identical to SEQ ID NO: 324780
  Synthetic oligonucleotide

SEQ ID NO: 546250 - DNA, 56 bp, Artificial; identical to SEQ ID NO: 324781
  Synthetic oligonucleotide

SEQ ID NO: 546251 - DNA, 58 bp, Artificial; identical to SEQ ID NO: 18129
  Synthetic oligonucleotide

SEQ ID NO: 546252 - DNA, 60 bp, Artificial; identical to SEQ ID NO: 324783
  Synthetic oligonucleotide

SEQ ID NO: 546253 - DNA, 60 bp, Artificial; identical to SEQ ID NO: 324785
  Synthetic oligonucleotide

SEQ ID NO: 546254 - DNA, 56 bp, Artificial; identical to SEQ ID NO: 324787
  Synthetic oligonucleotide

SEQ ID NO: 546255 - DNA, 58 bp, Artificial; identical to SEQ ID NO: 16595
  Synthetic oligonucleotide

SEQ ID NO: 546256 - DNA, 60 bp, Artificial; identical to SEQ ID NO: 324793
  Synthetic oligonucleotide

SEQ ID NO: 546257 - DNA, 55 bp, Artificial; identical to SEQ ID NO: 324795
  Synthetic oligonucleotide

SEQ ID NO: 546258 - DNA, 54 bp, Artificial; identical to SEQ ID NO: 324796
  Synthetic oligonucleotide

SEQ ID NO: 546259 - DNA, 55 bp, Artificial; identical to SEQ ID NO: 324798
  Synthetic oligonucleotide

SEQ ID NO: 546260 - DNA, 57 bp, Artificial; identical to SEQ ID NO: 324800
  Synthetic oligonucleotide

SEQ ID NO: 546261 - DNA, 60 bp, Artificial; identical to SEQ ID NO: 324802
  Synthetic oligonucleotide

SEQ ID NO: 546262 - DNA, 55 bp, Artificial; identical to SEQ ID NO: 324805
  Synthetic oligonucleotide

SEQ ID NO: 546263 - DNA, 56 bp, Artificial; identical to SEQ ID NO: 324809
  Synthetic oligonucleotide

SEQ ID NO: 546264 - DNA, 60 bp, Artificial; identical to SEQ ID NO: 324812
  Synthetic oligonucleotide

SEQ ID NO: 546265 - DNA, 48 bp, Artificial; identical to SEQ ID NO: 324813
  Synthetic oligonucleotide

SEQ ID NO: 546266 - DNA, 55 bp, Artificial; identical to SEQ ID NO: 324814
  Synthetic oligonucleotide

SEQ ID NO: 546267 - DNA, 52 bp, Artificial; identical to SEQ ID NO: 324815
  Synthetic oligonucleotide

SEQ ID NO: 546268 - DNA, 53 bp, Artificial; identical to SEQ ID NO: 324816
  Synthetic oligonucleotide

SEQ ID NO: 546269 - DNA, 52 bp, Artificial; identical to SEQ ID NO: 324817
  Synthetic oligonucleotide

SEQ ID NO: 546270 - DNA, 52 bp, Artificial; identical to SEQ ID NO: 324819
  Synthetic oligonucleotide

SEQ ID NO: 546271 - DNA, 53 bp, Artificial; identical to SEQ ID NO: 324820
  Synthetic oligonucleotide

SEQ ID NO: 546272 - DNA, 56 bp, Artificial; identical to SEQ ID NO: 324821
  Synthetic oligonucleotide

SEQ ID NO: 546273 - DNA, 58 bp, Artificial; identical to SEQ ID NO: 10760
  Synthetic oligonucleotide

SEQ ID NO: 546274 - DNA, 55 bp, Artificial; identical to SEQ ID NO: 324825
  Synthetic oligonucleotide

SEQ ID NO: 546275 - DNA, 55 bp, Artificial; identical to SEQ ID NO: 324826
  Synthetic oligonucleotide

SEQ ID NO: 546276 - DNA, 51 bp, Artificial; identical to SEQ ID NO: 324827
  Synthetic oligonucleotide

SEQ ID NO: 546277 - DNA, 58 bp, Artificial; identical to SEQ ID NO: 324830
  Synthetic oligonucleotide

SEQ ID NO: 546278 - DNA, 56 bp, Artificial; identical to SEQ ID NO: 324832
  Synthetic oligonucleotide

SEQ ID NO: 546279 - DNA, 55 bp, Artificial; identical to SEQ ID NO: 324833
  Synthetic oligonucleotide

SEQ ID NO: 546280 - DNA, 55 bp, Artificial; identical to SEQ ID NO: 324834
  Synthetic oligonucleotide

SEQ ID NO: 546281 - DNA, 58 bp, Artificial; identical to SEQ ID NO: 324835
  Synthetic oligonucleotide

SEQ ID NO: 546282 - DNA, 57 bp, Artificial; identical to SEQ ID NO: 324836
  Synthetic oligonucleotide

SEQ ID NO: 546283 - DNA, 54 bp, Artificial; identical to SEQ ID NO: 324837
  Synthetic oligonucleotide

SEQ ID NO: 546284 - DNA, 53 bp, Artificial; identical to SEQ ID NO: 324842
  Synthetic oligonucleotide

SEQ ID NO: 546285 - DNA, 60 bp, Artificial; identical to SEQ ID NO: 324845
  Synthetic oligonucleotide

SEQ ID NO: 546286 - DNA, 59 bp, Artificial; identical to SEQ ID NO: 324846
  Synthetic oligonucleotide

SEQ ID NO: 546287 - DNA, 55 bp, Artificial; identical to SEQ ID NO: 324847
  Synthetic oligonucleotide

SEQ ID NO: 546288 - DNA, 55 bp, Artificial; identical to SEQ ID NO: 324848
  Synthetic oligonucleotide

SEQ ID NO: 546289 - DNA, 52 bp, Artificial; identical to SEQ ID NO: 324849
  Synthetic oligonucleotide

SEQ ID NO: 546290 - DNA, 57 bp, Artificial; identical to SEQ ID NO: 324850
  Synthetic oligonucleotide

SEQ ID NO: 546291 - DNA, 55 bp, Artificial; identical to SEQ ID NO: 324854
  Synthetic oligonucleotide

SEQ ID NO: 546292 - DNA, 55 bp, Artificial; identical to SEQ ID NO: 324855
  Synthetic oligonucleotide

SEQ ID NO: 546293 - DNA, 60 bp, Artificial; identical to SEQ ID NO: 324858
  Synthetic oligonucleotide

SEQ ID NO: 546294 - DNA, 57 bp, Artificial; identical to SEQ ID NO: 324859
  Synthetic oligonucleotide

SEQ ID NO: 546295 - DNA, 57 bp, Artificial; identical to SEQ ID NO: 324861
  Synthetic oligonucleotide

SEQ ID NO: 546296 - DNA, 57 bp, Artificial; identical to SEQ ID NO: 324862
  Synthetic oligonucleotide

SEQ ID NO: 546297 - DNA, 60 bp, Artificial; identical to SEQ ID NO: 324865
  Synthetic oligonucleotide

SEQ ID NO: 546298 - DNA, 58 bp, Artificial; identical to SEQ ID NO: 324866
  Synthetic oligonucleotide

SEQ ID NO: 546299 - DNA, 60 bp, Artificial; identical to SEQ ID NO: 324869
  Synthetic oligonucleotide

SEQ ID NO: 546300 - DNA, 55 bp, Artificial; identical to SEQ ID NO: 8150
  Synthetic oligonucleotide

SEQ ID NO: 546301 - DNA, 57 bp, Artificial; identical to SEQ ID NO: 324873
  Synthetic oligonucleotide

SEQ ID NO: 546302 - DNA, 60 bp, Artificial; identical to SEQ ID NO: 324874
  Synthetic oligonucleotide

SEQ ID NO: 546303 - DNA, 55 bp, Artificial; identical to SEQ ID NO: 324875
  Synthetic oligonucleotide

SEQ ID NO: 546304 - DNA, 59 bp, Artificial; identical to SEQ ID NO: 324877
  Synthetic oligonucleotide

SEQ ID NO: 546305 - DNA, 60 bp, Artificial; identical to SEQ ID NO: 324878
  Synthetic oligonucleotide

SEQ ID NO: 546306 - DNA, 60 bp, Artificial; identical to SEQ ID NO: 324879
  Synthetic oligonucleotide

SEQ ID NO: 546307 - DNA, 60 bp, Artificial; identical to SEQ ID NO: 324883
  Synthetic oligonucleotide

SEQ ID NO: 546308 - DNA, 59 bp, Artificial; identical to SEQ ID NO: 324884
  Synthetic oligonucleotide

SEQ ID NO: 546309 - DNA, 55 bp, Artificial; identical to SEQ ID NO: 324886
  Synthetic oligonucleotide

SEQ ID NO: 546310 - DNA, 60 bp, Artificial; identical to SEQ ID NO: 324887
  Synthetic oligonucleotide

SEQ ID NO: 546311 - DNA, 55 bp, Artificial; identical to SEQ ID NO: 324889
  Synthetic oligonucleotide

SEQ ID NO: 546312 - DNA, 52 bp, Artificial; identical to SEQ ID NO: 324890
  Synthetic oligonucleotide

SEQ ID NO: 546313 - DNA, 60 bp, Artificial; identical to SEQ ID NO: 324891
  Synthetic oligonucleotide

SEQ ID NO: 546314 - DNA, 55 bp, Artificial; identical to SEQ ID NO: 324895
  Synthetic oligonucleotide

SEQ ID NO: 546315 - DNA, 59 bp, Artificial; identical to SEQ ID NO: 324896
  Synthetic oligonucleotide

SEQ ID NO: 546316 - DNA, 60 bp, Artificial; identical to SEQ ID NO: 324897
  Synthetic oligonucleotide

SEQ ID NO: 546317 - DNA, 60 bp, Artificial; identical to SEQ ID NO: 324899
  Synthetic oligonucleotide

SEQ ID NO: 546318 - DNA, 60 bp, Artificial; identical to SEQ ID NO: 324900
  Synthetic oligonucleotide

SEQ ID NO: 546319 - DNA, 60 bp, Artificial; identical to SEQ ID NO: 324905
  Synthetic oligonucleotide

SEQ ID NO: 546320 - DNA, 56 bp, Artificial; identical to SEQ ID NO: 324911
  Synthetic oligonucleotide

SEQ ID NO: 546321 - DNA, 60 bp, Artificial; identical to SEQ ID NO: 324912
  Synthetic oligonucleotide

SEQ ID NO: 546322 - DNA, 58 bp, Artificial; identical to SEQ ID NO: 324915
  Synthetic oligonucleotide

SEQ ID NO: 546323 - DNA, 60 bp, Artificial; identical to SEQ ID NO: 324916
  Synthetic oligonucleotide

SEQ ID NO: 546324 - DNA, 56 bp, Artificial; identical to SEQ ID NO: 10978
  Synthetic oligonucleotide

SEQ ID NO: 546325 - DNA, 53 bp, Artificial; identical to SEQ ID NO: 324917
  Synthetic oligonucleotide

SEQ ID NO: 546326 - DNA, 58 bp, Artificial; identical to SEQ ID NO: 324918
  Synthetic oligonucleotide

SEQ ID NO: 546327 - DNA, 50 bp, Artificial; identical to SEQ ID NO: 324919
  Synthetic oligonucleotide

SEQ ID NO: 546328 - DNA, 52 bp, Artificial; identical to SEQ ID NO: 324920
  Synthetic oligonucleotide

SEQ ID NO: 546329 - DNA, 59 bp, Artificial; identical to SEQ ID NO: 324923
  Synthetic oligonucleotide

SEQ ID NO: 546330 - DNA, 58 bp, Artificial; identical to SEQ ID NO: 324924
  Synthetic oligonucleotide

SEQ ID NO: 546331 - DNA, 59 bp, Artificial; identical to SEQ ID NO: 324926
  Synthetic oligonucleotide

SEQ ID NO: 546332 - DNA, 60 bp, Artificial; identical to SEQ ID NO: 324931
  Synthetic oligonucleotide

SEQ ID NO: 546333 - DNA, 60 bp, Artificial; identical to SEQ ID NO: 324932
  Synthetic oligonucleotide

SEQ ID NO: 546334 - DNA, 58 bp, Artificial; identical to SEQ ID NO: 324933
  Synthetic oligonucleotide

SEQ ID NO: 546335 - DNA, 51 bp, Artificial; identical to SEQ ID NO: 12099
  Synthetic oligonucleotide

SEQ ID NO: 546336 - DNA, 56 bp, Artificial; identical to SEQ ID NO: 324934
  Synthetic oligonucleotide

SEQ ID NO: 546337 - DNA, 59 bp, Artificial; identical to SEQ ID NO: 324935
  Synthetic oligonucleotide

SEQ ID NO: 546338 - DNA, 57 bp, Artificial; identical to SEQ ID NO: 324938
  Synthetic oligonucleotide

SEQ ID NO: 546339 - DNA, 50 bp, Artificial; identical to SEQ ID NO: 324944
  Synthetic oligonucleotide

SEQ ID NO: 546340 - DNA, 60 bp, Artificial; identical to SEQ ID NO: 324946
  Synthetic oligonucleotide

SEQ ID NO: 546341 - DNA, 58 bp, Artificial; identical to SEQ ID NO: 324949
  Synthetic oligonucleotide

SEQ ID NO: 546342 - DNA, 56 bp, Artificial; identical to SEQ ID NO: 324951
  Synthetic oligonucleotide

SEQ ID NO: 546343 - DNA, 57 bp, Artificial; identical to SEQ ID NO: 324952
  Synthetic oligonucleotide

SEQ ID NO: 546344 - DNA, 60 bp, Artificial; identical to SEQ ID NO: 324954
  Synthetic oligonucleotide

SEQ ID NO: 546345 - DNA, 50 bp, Artificial; identical to SEQ ID NO: 324957
  Synthetic oligonucleotide

SEQ ID NO: 546346 - DNA, 53 bp, Artificial; identical to SEQ ID NO: 324958
  Synthetic oligonucleotide

SEQ ID NO: 546347 - DNA, 57 bp, Artificial; identical to SEQ ID NO: 324960
  Synthetic oligonucleotide

SEQ ID NO: 546348 - DNA, 56 bp, Artificial; identical to SEQ ID NO: 324962
  Synthetic oligonucleotide

SEQ ID NO: 546349 - DNA, 57 bp, Artificial; identical to SEQ ID NO: 324964
  Synthetic oligonucleotide

SEQ ID NO: 546350 - DNA, 59 bp, Artificial; identical to SEQ ID NO: 324965
  Synthetic oligonucleotide

SEQ ID NO: 546351 - DNA, 60 bp, Artificial; identical to SEQ ID NO: 7370
  Synthetic oligonucleotide

SEQ ID NO: 546352 - DNA, 53 bp, Artificial; identical to SEQ ID NO: 324969
  Synthetic oligonucleotide

SEQ ID NO: 546353 - DNA, 51 bp, Artificial; identical to SEQ ID NO: 324970
  Synthetic oligonucleotide

SEQ ID NO: 546354 - DNA, 57 bp, Artificial; identical to SEQ ID NO: 324973
  Synthetic oligonucleotide

SEQ ID NO: 546355 - DNA, 60 bp, Artificial; identical to SEQ ID NO: 324975
  Synthetic oligonucleotide

SEQ ID NO: 546356 - DNA, 60 bp, Artificial; identical to SEQ ID NO: 324981
  Synthetic oligonucleotide

SEQ ID NO: 546357 - DNA, 53 bp, Artificial; identical to SEQ ID NO: 324982
  Synthetic oligonucleotide

SEQ ID NO: 546358 - DNA, 60 bp, Artificial; identical to SEQ ID NO: 324983
  Synthetic oligonucleotide

SEQ ID NO: 546359 - DNA, 60 bp, Artificial; identical to SEQ ID NO: 324987
  Synthetic oligonucleotide

SEQ ID NO: 546360 - DNA, 56 bp, Artificial; identical to SEQ ID NO: 324988
  Synthetic oligonucleotide

SEQ ID NO: 546361 - DNA, 51 bp, Artificial; identical to SEQ ID NO: 324990
  Synthetic oligonucleotide

SEQ ID NO: 546362 - DNA, 53 bp, Artificial; identical to SEQ ID NO: 324994
  Synthetic oligonucleotide

SEQ ID NO: 546363 - DNA, 60 bp, Artificial; identical to SEQ ID NO: 324995
  Synthetic oligonucleotide

SEQ ID NO: 546364 - DNA, 60 bp, Artificial; identical to SEQ ID NO: 324998
  Synthetic oligonucleotide

SEQ ID NO: 546365 - DNA, 55 bp, Artificial; identical to SEQ ID NO: 325002
  Synthetic oligonucleotide

SEQ ID NO: 546366 - DNA, 56 bp, Artificial; identical to SEQ ID NO: 325003
  Synthetic oligonucleotide

SEQ ID NO: 546367 - DNA, 60 bp, Artificial; identical to SEQ ID NO: 325004
  Synthetic oligonucleotide

SEQ ID NO: 546368 - DNA, 60 bp, Artificial; identical to SEQ ID NO: 325007
  Synthetic oligonucleotide

SEQ ID NO: 546369 - DNA, 58 bp, Artificial; identical to SEQ ID NO: 325008
  Synthetic oligonucleotide

SEQ ID NO: 546370 - DNA, 57 bp, Artificial; identical to SEQ ID NO: 325009
  Synthetic oligonucleotide

SEQ ID NO: 546371 - DNA, 54 bp, Artificial; identical to SEQ ID NO: 325011
  Synthetic oligonucleotide

SEQ ID NO: 546372 - DNA, 60 bp, Artificial; identical to SEQ ID NO: 325012
  Synthetic oligonucleotide

SEQ ID NO: 546373 - DNA, 59 bp, Artificial; identical to SEQ ID NO: 325013
  Synthetic oligonucleotide

SEQ ID NO: 546374 - DNA, 60 bp, Artificial; identical to SEQ ID NO: 325015
  Synthetic oligonucleotide

SEQ ID NO: 546375 - DNA, 55 bp, Artificial; identical to SEQ ID NO: 11578
  Synthetic oligonucleotide

SEQ ID NO: 546376 - DNA, 59 bp, Artificial; identical to SEQ ID NO: 325017
  Synthetic oligonucleotide

SEQ ID NO: 546377 - DNA, 55 bp, Artificial; identical to SEQ ID NO: 325019
  Synthetic oligonucleotide

SEQ ID NO: 546378 - DNA, 60 bp, Artificial; identical to SEQ ID NO: 325021
  Synthetic oligonucleotide

SEQ ID NO: 546379 - DNA, 55 bp, Artificial; identical to SEQ ID NO: 325028
  Synthetic oligonucleotide

SEQ ID NO: 546380 - DNA, 54 bp, Artificial; identical to SEQ ID NO: 325031
  Synthetic oligonucleotide

SEQ ID NO: 546381 - DNA, 53 bp, Artificial; identical to SEQ ID NO: 325032
  Synthetic oligonucleotide

SEQ ID NO: 546382 - DNA, 52 bp, Artificial; identical to SEQ ID NO: 325034
  Synthetic oligonucleotide

SEQ ID NO: 546383 - DNA, 55 bp, Artificial; identical to SEQ ID NO: 325038
  Synthetic oligonucleotide

SEQ ID NO: 546384 - DNA, 59 bp, Artificial; identical to SEQ ID NO: 325040
  Synthetic oligonucleotide

SEQ ID NO: 546385 - DNA, 52 bp, Artificial; identical to SEQ ID NO: 325041
  Synthetic oligonucleotide

SEQ ID NO: 546386 - DNA, 56 bp, Artificial; identical to SEQ ID NO: 325042
  Synthetic oligonucleotide

SEQ ID NO: 546387 - DNA, 54 bp, Artificial; identical to SEQ ID NO: 325047
  Synthetic oligonucleotide

SEQ ID NO: 546388 - DNA, 58 bp, Artificial; identical to SEQ ID NO: 325048
  Synthetic oligonucleotide

SEQ ID NO: 546389 - DNA, 60 bp, Artificial; identical to SEQ ID NO: 325049
  Synthetic oligonucleotide

SEQ ID NO: 546390 - DNA, 57 bp, Artificial; identical to SEQ ID NO: 325050
  Synthetic oligonucleotide

SEQ ID NO: 546391 - DNA, 59 bp, Artificial; identical to SEQ ID NO: 325055
  Synthetic oligonucleotide

SEQ ID NO: 546392 - DNA, 48 bp, Artificial; identical to SEQ ID NO: 325056
  Synthetic oligonucleotide

SEQ ID NO: 546393 - DNA, 55 bp, Artificial; identical to SEQ ID NO: 325058
  Synthetic oligonucleotide

SEQ ID NO: 546394 - DNA, 54 bp, Artificial; identical to SEQ ID NO: 325060
  Synthetic oligonucleotide

SEQ ID NO: 546395 - DNA, 56 bp, Artificial; identical to SEQ ID NO: 325062
  Synthetic oligonucleotide

SEQ ID NO: 546396 - DNA, 53 bp, Artificial; identical to SEQ ID NO: 325063
  Synthetic oligonucleotide

SEQ ID NO: 546397 - DNA, 55 bp, Artificial; identical to SEQ ID NO: 325064
  Synthetic oligonucleotide

SEQ ID NO: 546398 - DNA, 58 bp, Artificial; identical to SEQ ID NO: 19314
  Synthetic oligonucleotide

SEQ ID NO: 546399 - DNA, 55 bp, Artificial; identical to SEQ ID NO: 325065
  Synthetic oligonucleotide

SEQ ID NO: 546400 - DNA, 54 bp, Artificial; identical to SEQ ID NO: 325067
  Synthetic oligonucleotide

SEQ ID NO: 546401 - DNA, 54 bp, Artificial; identical to SEQ ID NO: 325068
  Synthetic oligonucleotide

SEQ ID NO: 546402 - DNA, 54 bp, Artificial; identical to SEQ ID NO: 325072
  Synthetic oligonucleotide

SEQ ID NO: 546403 - DNA, 51 bp, Artificial; identical to SEQ ID NO: 325075
  Synthetic oligonucleotide

SEQ ID NO: 546404 - DNA, 60 bp, Artificial; identical to SEQ ID NO: 325077
  Synthetic oligonucleotide

SEQ ID NO: 546405 - DNA, 55 bp, Artificial; identical to SEQ ID NO: 325078
  Synthetic oligonucleotide

SEQ ID NO: 546406 - DNA, 55 bp, Artificial; identical to SEQ ID NO: 325079
  Synthetic oligonucleotide

SEQ ID NO: 546407 - DNA, 54 bp, Artificial; identical to SEQ ID NO: 325080
  Synthetic oligonucleotide

SEQ ID NO: 546408 - DNA, 55 bp, Artificial; identical to SEQ ID NO: 325081
  Synthetic oligonucleotide

SEQ ID NO: 546409 - DNA, 59 bp, Artificial; identical to SEQ ID NO: 325084
  Synthetic oligonucleotide

SEQ ID NO: 546410 - DNA, 55 bp, Artificial; identical to SEQ ID NO: 325086
  Synthetic oligonucleotide

SEQ ID NO: 546411 - DNA, 54 bp, Artificial; identical to SEQ ID NO: 325087
  Synthetic oligonucleotide

SEQ ID NO: 546412 - DNA, 55 bp, Artificial; identical to SEQ ID NO: 325088
  Synthetic oligonucleotide

SEQ ID NO: 546413 - DNA, 56 bp, Artificial; identical to SEQ ID NO: 325089
  Synthetic oligonucleotide

SEQ ID NO: 546414 - DNA, 57 bp, Artificial; identical to SEQ ID NO: 325092
  Synthetic oligonucleotide

SEQ ID NO: 546415 - DNA, 52 bp, Artificial; identical to SEQ ID NO: 325101
  Synthetic oligonucleotide

SEQ ID NO: 546416 - DNA, 51 bp, Artificial; identical to SEQ ID NO: 325104
  Synthetic oligonucleotide

SEQ ID NO: 546417 - DNA, 56 bp, Artificial; identical to SEQ ID NO: 325107
  Synthetic oligonucleotide

SEQ ID NO: 546418 - DNA, 50 bp, Artificial; identical to SEQ ID NO: 325108
  Synthetic oligonucleotide

SEQ ID NO: 546419 - DNA, 55 bp, Artificial; identical to SEQ ID NO: 325109
  Synthetic oligonucleotide

SEQ ID NO: 546420 - DNA, 56 bp, Artificial; identical to SEQ ID NO: 325110
  Synthetic oligonucleotide

SEQ ID NO: 546421 - DNA, 56 bp, Artificial; identical to SEQ ID NO: 18287
  Synthetic oligonucleotide

SEQ ID NO: 546422 - DNA, 50 bp, Artificial; identical to SEQ ID NO: 325120
  Synthetic oligonucleotide

SEQ ID NO: 546423 - DNA, 55 bp, Artificial; identical to SEQ ID NO: 325121
  Synthetic oligonucleotide

SEQ ID NO: 546424 - DNA, 55 bp, Artificial; identical to SEQ ID NO: 325122
  Synthetic oligonucleotide

SEQ ID NO: 546425 - DNA, 52 bp, Artificial; identical to SEQ ID NO: 325123
  Synthetic oligonucleotide

SEQ ID NO: 546426 - DNA, 52 bp, Artificial; identical to SEQ ID NO: 325127
  Synthetic oligonucleotide

SEQ ID NO: 546427 - DNA, 58 bp, Artificial; identical to SEQ ID NO: 325129
  Synthetic oligonucleotide

SEQ ID NO: 546428 - DNA, 53 bp, Artificial; identical to SEQ ID NO: 325133
  Synthetic oligonucleotide

SEQ ID NO: 546429 - DNA, 60 bp, Artificial; identical to SEQ ID NO: 325134
  Synthetic oligonucleotide

SEQ ID NO: 546430 - DNA, 53 bp, Artificial; identical to SEQ ID NO: 325135
  Synthetic oligonucleotide

SEQ ID NO: 546431 - DNA, 55 bp, Artificial; identical to SEQ ID NO: 325137
  Synthetic oligonucleotide

SEQ ID NO: 546432 - DNA, 57 bp, Artificial; identical to SEQ ID NO: 325138
  Synthetic oligonucleotide

SEQ ID NO: 546433 - DNA, 60 bp, Artificial; identical to SEQ ID NO: 325139
  Synthetic oligonucleotide

SEQ ID NO: 546434 - DNA, 53 bp, Artificial; identical to SEQ ID NO: 325142
  Synthetic oligonucleotide

SEQ ID NO: 546435 - DNA, 58 bp, Artificial; identical to SEQ ID NO: 325143
  Synthetic oligonucleotide

SEQ ID NO: 546436 - DNA, 52 bp, Artificial; identical to SEQ ID NO: 325144
  Synthetic oligonucleotide

SEQ ID NO: 546437 - DNA, 56 bp, Artificial; identical to SEQ ID NO: 325147
  Synthetic oligonucleotide

SEQ ID NO: 546438 - DNA, 57 bp, Artificial; identical to SEQ ID NO: 325150
  Synthetic oligonucleotide

SEQ ID NO: 546439 - DNA, 55 bp, Artificial; identical to SEQ ID NO: 16018
  Synthetic oligonucleotide

SEQ ID NO: 546440 - DNA, 59 bp, Artificial; identical to SEQ ID NO: 325152
  Synthetic oligonucleotide

SEQ ID NO: 546441 - DNA, 51 bp, Artificial; identical to SEQ ID NO: 325153
  Synthetic oligonucleotide

SEQ ID NO: 546442 - DNA, 58 bp, Artificial; identical to SEQ ID NO: 20344
  Synthetic oligonucleotide

SEQ ID NO: 546443 - DNA, 55 bp, Artificial; identical to SEQ ID NO: 325154
  Synthetic oligonucleotide

SEQ ID NO: 546444 - DNA, 54 bp, Artificial; identical to SEQ ID NO: 325156
  Synthetic oligonucleotide

SEQ ID NO: 546445 - DNA, 57 bp, Artificial; identical to SEQ ID NO: 325159
  Synthetic oligonucleotide

SEQ ID NO: 546446 - DNA, 60 bp, Artificial; identical to SEQ ID NO: 325160
  Synthetic oligonucleotide

SEQ ID NO: 546447 - DNA, 55 bp, Artificial; identical to SEQ ID NO: 325162
  Synthetic oligonucleotide

SEQ ID NO: 546448 - DNA, 58 bp, Artificial; identical to SEQ ID NO: 325166
  Synthetic oligonucleotide

SEQ ID NO: 546449 - DNA, 49 bp, Artificial; identical to SEQ ID NO: 325168
  Synthetic oligonucleotide

SEQ ID NO: 546450 - DNA, 55 bp, Artificial; identical to SEQ ID NO: 325169
  Synthetic oligonucleotide

SEQ ID NO: 546451 - DNA, 54 bp, Artificial; identical to SEQ ID NO: 325170
  Synthetic oligonucleotide

SEQ ID NO: 546452 - DNA, 60 bp, Artificial; identical to SEQ ID NO: 325177
  Synthetic oligonucleotide

SEQ ID NO: 546453 - DNA, 60 bp, Artificial; identical to SEQ ID NO: 325179
  Synthetic oligonucleotide

SEQ ID NO: 546454 - DNA, 58 bp, Artificial; identical to SEQ ID NO: 325183
  Synthetic oligonucleotide

SEQ ID NO: 546455 - DNA, 59 bp, Artificial; identical to SEQ ID NO: 325187
  Synthetic oligonucleotide

SEQ ID NO: 546456 - DNA, 51 bp, Artificial; identical to SEQ ID NO: 325189
  Synthetic oligonucleotide

SEQ ID NO: 546457 - DNA, 55 bp, Artificial; identical to SEQ ID NO: 325190
  Synthetic oligonucleotide

SEQ ID NO: 546458 - DNA, 51 bp, Artificial; identical to SEQ ID NO: 325193
  Synthetic oligonucleotide

SEQ ID NO: 546459 - DNA, 52 bp, Artificial; identical to SEQ ID NO: 325194
  Synthetic oligonucleotide

SEQ ID NO: 546460 - DNA, 52 bp, Artificial; identical to SEQ ID NO: 325195
  Synthetic oligonucleotide

SEQ ID NO: 546461 - DNA, 55 bp, Artificial; identical to SEQ ID NO: 18033
  Synthetic oligonucleotide

SEQ ID NO: 546462 - DNA, 54 bp, Artificial; identical to SEQ ID NO: 325196
  Synthetic oligonucleotide

SEQ ID NO: 546463 - DNA, 57 bp, Artificial; identical to SEQ ID NO: 325197
  Synthetic oligonucleotide

SEQ ID NO: 546464 - DNA, 58 bp, Artificial; identical to SEQ ID NO: 325198
  Synthetic oligonucleotide

SEQ ID NO: 546465 - DNA, 59 bp, Artificial; identical to SEQ ID NO: 10809
  Synthetic oligonucleotide

SEQ ID NO: 546466 - DNA, 56 bp, Artificial; identical to SEQ ID NO: 325202
  Synthetic oligonucleotide

SEQ ID NO: 546467 - DNA, 59 bp, Artificial; identical to SEQ ID NO: 325205
  Synthetic oligonucleotide

SEQ ID NO: 546468 - DNA, 55 bp, Artificial; identical to SEQ ID NO: 8005
  Synthetic oligonucleotide

SEQ ID NO: 546469 - DNA, 52 bp, Artificial; identical to SEQ ID NO: 325208
  Synthetic oligonucleotide

SEQ ID NO: 546470 - DNA, 55 bp, Artificial; identical to SEQ ID NO: 325209
  Synthetic oligonucleotide

SEQ ID NO: 546471 - DNA, 51 bp, Artificial; identical to SEQ ID NO: 325212
  Synthetic oligonucleotide

SEQ ID NO: 546472 - DNA, 60 bp, Artificial; identical to SEQ ID NO: 325216
  Synthetic oligonucleotide

SEQ ID NO: 546473 - DNA, 51 bp, Artificial; identical to SEQ ID NO: 325217
  Synthetic oligonucleotide

SEQ ID NO: 546474 - DNA, 57 bp, Artificial; identical to SEQ ID NO: 325218
  Synthetic oligonucleotide

SEQ ID NO: 546475 - DNA, 49 bp, Artificial; identical to SEQ ID NO: 325220
  Synthetic oligonucleotide

SEQ ID NO: 546476 - DNA, 55 bp, Artificial; identical to SEQ ID NO: 325223
  Synthetic oligonucleotide

SEQ ID NO: 546477 - DNA, 52 bp, Artificial; identical to SEQ ID NO: 325224
  Synthetic oligonucleotide

SEQ ID NO: 546478 - DNA, 59 bp, Artificial; identical to SEQ ID NO: 325226
  Synthetic oligonucleotide

SEQ ID NO: 546479 - DNA, 57 bp, Artificial; identical to SEQ ID NO: 325228
  Synthetic oligonucleotide

SEQ ID NO: 546480 - DNA, 59 bp, Artificial; identical to SEQ ID NO: 325230
  Synthetic oligonucleotide

SEQ ID NO: 546481 - DNA, 60 bp, Artificial; identical to SEQ ID NO: 325233
  Synthetic oligonucleotide

SEQ ID NO: 546482 - DNA, 56 bp, Artificial; identical to SEQ ID NO: 325234
  Synthetic oligonucleotide

SEQ ID NO: 546483 - DNA, 60 bp, Artificial; identical to SEQ ID NO: 325235
  Synthetic oligonucleotide

SEQ ID NO: 546484 - DNA, 57 bp, Artificial; identical to SEQ ID NO: 325236
  Synthetic oligonucleotide

SEQ ID NO: 546485 - DNA, 58 bp, Artificial; identical to SEQ ID NO: 325237
  Synthetic oligonucleotide

SEQ ID NO: 546486 - DNA, 57 bp, Artificial; identical to SEQ ID NO: 16520
  Synthetic oligonucleotide

SEQ ID NO: 546487 - DNA, 53 bp, Artificial; identical to SEQ ID NO: 325240
  Synthetic oligonucleotide

SEQ ID NO: 546488 - DNA, 54 bp, Artificial; identical to SEQ ID NO: 325244
  Synthetic oligonucleotide

SEQ ID NO: 546489 - DNA, 60 bp, Artificial; identical to SEQ ID NO: 325247
  Synthetic oligonucleotide

SEQ ID NO: 546490 - DNA, 54 bp, Artificial; identical to SEQ ID NO: 325251
  Synthetic oligonucleotide

SEQ ID NO: 546491 - DNA, 58 bp, Artificial; identical to SEQ ID NO: 325254
  Synthetic oligonucleotide

SEQ ID NO: 546492 - DNA, 60 bp, Artificial; identical to SEQ ID NO: 325255
  Synthetic oligonucleotide

SEQ ID NO: 546493 - DNA, 59 bp, Artificial; identical to SEQ ID NO: 16148
  Synthetic oligonucleotide

SEQ ID NO: 546494 - DNA, 58 bp, Artificial; identical to SEQ ID NO: 325262
  Synthetic oligonucleotide

SEQ ID NO: 546495 - DNA, 54 bp, Artificial; identical to SEQ ID NO: 325263
  Synthetic oligonucleotide

SEQ ID NO: 546496 - DNA, 60 bp, Artificial; identical to SEQ ID NO: 325264
  Synthetic oligonucleotide

SEQ ID NO: 546497 - DNA, 60 bp, Artificial; identical to SEQ ID NO: 325266
  Synthetic oligonucleotide

SEQ ID NO: 546498 - DNA, 60 bp, Artificial; identical to SEQ ID NO: 325267
  Synthetic oligonucleotide

SEQ ID NO: 546499 - DNA, 53 bp, Artificial; identical to SEQ ID NO: 325269
  Synthetic oligonucleotide

SEQ ID NO: 546500 - DNA, 55 bp, Artificial; identical to SEQ ID NO: 325271
  Synthetic oligonucleotide

SEQ ID NO: 546501 - DNA, 60 bp, Artificial; identical to SEQ ID NO: 325272
  Synthetic oligonucleotide

SEQ ID NO: 546502 - DNA, 53 bp, Artificial; identical to SEQ ID NO: 325273
  Synthetic oligonucleotide

SEQ ID NO: 546503 - DNA, 52 bp, Artificial; identical to SEQ ID NO: 325277
  Synthetic oligonucleotide

SEQ ID NO: 546504 - DNA, 58 bp, Artificial; identical to SEQ ID NO: 325279
  Synthetic oligonucleotide

SEQ ID NO: 546505 - DNA, 55 bp, Artificial; identical to SEQ ID NO: 6405
  Synthetic oligonucleotide

SEQ ID NO: 546506 - DNA, 57 bp, Artificial; identical to SEQ ID NO: 325280
  Synthetic oligonucleotide

SEQ ID NO: 546507 - DNA, 51 bp, Artificial; identical to SEQ ID NO: 325282
  Synthetic oligonucleotide

SEQ ID NO: 546508 - DNA, 51 bp, Artificial; identical to SEQ ID NO: 325283
  Synthetic oligonucleotide

SEQ ID NO: 546509 - DNA, 55 bp, Artificial; identical to SEQ ID NO: 325286
  Synthetic oligonucleotide

SEQ ID NO: 546510 - DNA, 59 bp, Artificial; identical to SEQ ID NO: 325287
  Synthetic oligonucleotide

SEQ ID NO: 546511 - DNA, 55 bp, Artificial; identical to SEQ ID NO: 325291
  Synthetic oligonucleotide

SEQ ID NO: 546512 - DNA, 50 bp, Artificial; identical to SEQ ID NO: 325294
  Synthetic oligonucleotide

SEQ ID NO: 546513 - DNA, 52 bp, Artificial; identical to SEQ ID NO: 325298
  Synthetic oligonucleotide

SEQ ID NO: 546514 - DNA, 50 bp, Artificial; identical to SEQ ID NO: 325299
  Synthetic oligonucleotide

SEQ ID NO: 546515 - DNA, 60 bp, Artificial; identical to SEQ ID NO: 325303
  Synthetic oligonucleotide

SEQ ID NO: 546516 - DNA, 56 bp, Artificial; identical to SEQ ID NO: 325304
  Synthetic oligonucleotide

SEQ ID NO: 546517 - DNA, 54 bp, Artificial; identical to SEQ ID NO: 325309
  Synthetic oligonucleotide

SEQ ID NO: 546518 - DNA, 60 bp, Artificial; identical to SEQ ID NO: 325311
  Synthetic oligonucleotide

SEQ ID NO: 546519 - DNA, 56 bp, Artificial; identical to SEQ ID NO: 325314
  Synthetic oligonucleotide

SEQ ID NO: 546520 - DNA, 55 bp, Artificial; identical to SEQ ID NO: 325317
  Synthetic oligonucleotide

SEQ ID NO: 546521 - DNA, 59 bp, Artificial; identical to SEQ ID NO: 325318
  Synthetic oligonucleotide

SEQ ID NO: 546522 - DNA, 52 bp, Artificial; identical to SEQ ID NO: 325320
  Synthetic oligonucleotide

SEQ ID NO: 546523 - DNA, 51 bp, Artificial; identical to SEQ ID NO: 325321
  Synthetic oligonucleotide

SEQ ID NO: 546524 - DNA, 53 bp, Artificial; identical to SEQ ID NO: 325329
  Synthetic oligonucleotide

SEQ ID NO: 546525 - DNA, 54 bp, Artificial; identical to SEQ ID NO: 325334
  Synthetic oligonucleotide

SEQ ID NO: 546526 - DNA, 54 bp, Artificial; identical to SEQ ID NO: 325339
  Synthetic oligonucleotide

SEQ ID NO: 546527 - DNA, 55 bp, Artificial; identical to SEQ ID NO: 325341
  Synthetic oligonucleotide

SEQ ID NO: 546528 - DNA, 55 bp, Artificial; identical to SEQ ID NO: 325343
  Synthetic oligonucleotide

SEQ ID NO: 546529 - DNA, 53 bp, Artificial; identical to SEQ ID NO: 325349
  Synthetic oligonucleotide

SEQ ID NO: 546530 - DNA, 50 bp, Artificial; identical to SEQ ID NO: 325350
  Synthetic oligonucleotide

SEQ ID NO: 546531 - DNA, 55 bp, Artificial; identical to SEQ ID NO: 325351
  Synthetic oligonucleotide

SEQ ID NO: 546532 - DNA, 59 bp, Artificial; identical to SEQ ID NO: 325353
  Synthetic oligonucleotide

SEQ ID NO: 546533 - DNA, 58 bp, Artificial; identical to SEQ ID NO: 325355
  Synthetic oligonucleotide

SEQ ID NO: 546534 - DNA, 56 bp, Artificial; identical to SEQ ID NO: 325357
  Synthetic oligonucleotide

SEQ ID NO: 546535 - DNA, 60 bp, Artificial; identical to SEQ ID NO: 325360
  Synthetic oligonucleotide

SEQ ID NO: 546536 - DNA, 55 bp, Artificial; identical to SEQ ID NO: 325362
  Synthetic oligonucleotide

SEQ ID NO: 546537 - DNA, 54 bp, Artificial; identical to SEQ ID NO: 325367
  Synthetic oligonucleotide

SEQ ID NO: 546538 - DNA, 55 bp, Artificial; identical to SEQ ID NO: 325368
  Synthetic oligonucleotide

SEQ ID NO: 546539 - DNA, 58 bp, Artificial; identical to SEQ ID NO: 325369
  Synthetic oligonucleotide

SEQ ID NO: 546540 - DNA, 60 bp, Artificial; identical to SEQ ID NO: 325370
  Synthetic oligonucleotide

SEQ ID NO: 546541 - DNA, 58 bp, Artificial; identical to SEQ ID NO: 18904
  Synthetic oligonucleotide

SEQ ID NO: 546542 - DNA, 59 bp, Artificial; identical to SEQ ID NO: 18993
  Synthetic oligonucleotide

SEQ ID NO: 546543 - DNA, 60 bp, Artificial; identical to SEQ ID NO: 325381
  Synthetic oligonucleotide

SEQ ID NO: 546544 - DNA, 55 bp, Artificial; identical to SEQ ID NO: 325384
  Synthetic oligonucleotide

SEQ ID NO: 546545 - DNA, 55 bp, Artificial; identical to SEQ ID NO: 325385
  Synthetic oligonucleotide

SEQ ID NO: 546546 - DNA, 60 bp, Artificial; identical to SEQ ID NO: 325387
  Synthetic oligonucleotide

SEQ ID NO: 546547 - DNA, 60 bp, Artificial; identical to SEQ ID NO: 325388
  Synthetic oligonucleotide

SEQ ID NO: 546548 - DNA, 55 bp, Artificial; identical to SEQ ID NO: 325390
  Synthetic oligonucleotide

SEQ ID NO: 546549 - DNA, 53 bp, Artificial; identical to SEQ ID NO: 325394
  Synthetic oligonucleotide

SEQ ID NO: 546550 - DNA, 60 bp, Artificial; identical to SEQ ID NO: 14825
  Synthetic oligonucleotide

SEQ ID NO: 546551 - DNA, 57 bp, Artificial; identical to SEQ ID NO: 325396
  Synthetic oligonucleotide

SEQ ID NO: 546552 - DNA, 54 bp, Artificial; identical to SEQ ID NO: 325397
  Synthetic oligonucleotide

SEQ ID NO: 546553 - DNA, 52 bp, Artificial; identical to SEQ ID NO: 325398
  Synthetic oligonucleotide

SEQ ID NO: 546554 - DNA, 50 bp, Artificial; identical to SEQ ID NO: 16960
  Synthetic oligonucleotide

SEQ ID NO: 546555 - DNA, 59 bp, Artificial; identical to SEQ ID NO: 325399
  Synthetic oligonucleotide

SEQ ID NO: 546556 - DNA, 59 bp, Artificial; identical to SEQ ID NO: 325401
  Synthetic oligonucleotide

SEQ ID NO: 546557 - DNA, 52 bp, Artificial; identical to SEQ ID NO: 325403
  Synthetic oligonucleotide

SEQ ID NO: 546558 - DNA, 55 bp, Artificial; identical to SEQ ID NO: 325405
  Synthetic oligonucleotide

SEQ ID NO: 546559 - DNA, 52 bp, Artificial; identical to SEQ ID NO: 325410
  Synthetic oligonucleotide

SEQ ID NO: 546560 - DNA, 51 bp, Artificial; identical to SEQ ID NO: 325416
  Synthetic oligonucleotide

SEQ ID NO: 546561 - DNA, 52 bp, Artificial; identical to SEQ ID NO: 325417
  Synthetic oligonucleotide

SEQ ID NO: 546562 - DNA, 55 bp, Artificial; identical to SEQ ID NO: 325418
  Synthetic oligonucleotide

SEQ ID NO: 546563 - DNA, 54 bp, Artificial; identical to SEQ ID NO: 325421
  Synthetic oligonucleotide

SEQ ID NO: 546564 - DNA, 58 bp, Artificial; identical to SEQ ID NO: 325422
  Synthetic oligonucleotide

SEQ ID NO: 546565 - DNA, 54 bp, Artificial; identical to SEQ ID NO: 325425
  Synthetic oligonucleotide

SEQ ID NO: 546566 - DNA, 53 bp, Artificial; identical to SEQ ID NO: 325426
  Synthetic oligonucleotide

SEQ ID NO: 546567 - DNA, 55 bp, Artificial; identical to SEQ ID NO: 325427
  Synthetic oligonucleotide

SEQ ID NO: 546568 - DNA, 57 bp, Artificial; identical to SEQ ID NO: 325430
  Synthetic oligonucleotide

SEQ ID NO: 546569 - DNA, 55 bp, Artificial; identical to SEQ ID NO: 325433
  Synthetic oligonucleotide

SEQ ID NO: 546570 - DNA, 60 bp, Artificial; identical to SEQ ID NO: 325435
  Synthetic oligonucleotide

SEQ ID NO: 546571 - DNA, 54 bp, Artificial; identical to SEQ ID NO: 325446
  Synthetic oligonucleotide

SEQ ID NO: 546572 - DNA, 60 bp, Artificial; identical to SEQ ID NO: 11129
  Synthetic oligonucleotide

SEQ ID NO: 546573 - DNA, 50 bp, Artificial; identical to SEQ ID NO: 325448
  Synthetic oligonucleotide

SEQ ID NO: 546574 - DNA, 60 bp, Artificial; identical to SEQ ID NO: 325450
  Synthetic oligonucleotide

SEQ ID NO: 546575 - DNA, 60 bp, Artificial; identical to SEQ ID NO: 325451
  Synthetic oligonucleotide

SEQ ID NO: 546576 - DNA, 52 bp, Artificial; identical to SEQ ID NO: 325452
  Synthetic oligonucleotide

SEQ ID NO: 546577 - DNA, 60 bp, Artificial; identical to SEQ ID NO: 325456
  Synthetic oligonucleotide

SEQ ID NO: 546578 - DNA, 56 bp, Artificial; identical to SEQ ID NO: 325457
  Synthetic oligonucleotide

SEQ ID NO: 546579 - DNA, 60 bp, Artificial; identical to SEQ ID NO: 325459
  Synthetic oligonucleotide

SEQ ID NO: 546580 - DNA, 54 bp, Artificial; identical to SEQ ID NO: 12250
  Synthetic oligonucleotide

SEQ ID NO: 546581 - DNA, 55 bp, Artificial; identical to SEQ ID NO: 16437
  Synthetic oligonucleotide

SEQ ID NO: 546582 - DNA, 60 bp, Artificial; identical to SEQ ID NO: 325463
  Synthetic oligonucleotide

SEQ ID NO: 546583 - DNA, 58 bp, Artificial; identical to SEQ ID NO: 325464
  Synthetic oligonucleotide

SEQ ID NO: 546584 - DNA, 60 bp, Artificial; identical to SEQ ID NO: 325467
  Synthetic oligonucleotide

SEQ ID NO: 546585 - DNA, 56 bp, Artificial; identical to SEQ ID NO: 18052
  Synthetic oligonucleotide

SEQ ID NO: 546586 - DNA, 55 bp, Artificial; identical to SEQ ID NO: 325470
  Synthetic oligonucleotide

SEQ ID NO: 546587 - DNA, 51 bp, Artificial; identical to SEQ ID NO: 325471
  Synthetic oligonucleotide

SEQ ID NO: 546588 - DNA, 55 bp, Artificial; identical to SEQ ID NO: 325474
  Synthetic oligonucleotide

SEQ ID NO: 546589 - DNA, 60 bp, Artificial; identical to SEQ ID NO: 325477
  Synthetic oligonucleotide

SEQ ID NO: 546590 - DNA, 58 bp, Artificial; identical to SEQ ID NO: 325478
  Synthetic oligonucleotide

SEQ ID NO: 546591 - DNA, 60 bp, Artificial; identical to SEQ ID NO: 325479
  Synthetic oligonucleotide

SEQ ID NO: 546592 - DNA, 60 bp, Artificial; identical to SEQ ID NO: 325481
  Synthetic oligonucleotide

SEQ ID NO: 546593 - DNA, 59 bp, Artificial; identical to SEQ ID NO: 20533
  Synthetic oligonucleotide

SEQ ID NO: 546594 - DNA, 60 bp, Artificial; identical to SEQ ID NO: 325485
  Synthetic oligonucleotide

SEQ ID NO: 546595 - DNA, 58 bp, Artificial; identical to SEQ ID NO: 325487
  Synthetic oligonucleotide

SEQ ID NO: 546596 - DNA, 58 bp, Artificial; identical to SEQ ID NO: 325488
  Synthetic oligonucleotide

SEQ ID NO: 546597 - DNA, 56 bp, Artificial; identical to SEQ ID NO: 325489
  Synthetic oligonucleotide

SEQ ID NO: 546598 - DNA, 60 bp, Artificial; identical to SEQ ID NO: 325491
  Synthetic oligonucleotide

SEQ ID NO: 546599 - DNA, 57 bp, Artificial; identical to SEQ ID NO: 325495
  Synthetic oligonucleotide

SEQ ID NO: 546600 - DNA, 58 bp, Artificial; identical to SEQ ID NO: 325496
  Synthetic oligonucleotide

SEQ ID NO: 546601 - DNA, 57 bp, Artificial; identical to SEQ ID NO: 325498
  Synthetic oligonucleotide

SEQ ID NO: 546602 - DNA, 55 bp, Artificial; identical to SEQ ID NO: 325499
  Synthetic oligonucleotide

SEQ ID NO: 546603 - DNA, 57 bp, Artificial; identical to SEQ ID NO: 325500
  Synthetic oligonucleotide

SEQ ID NO: 546604 - DNA, 55 bp, Artificial; identical to SEQ ID NO: 325501
  Synthetic oligonucleotide

SEQ ID NO: 546605 - DNA, 55 bp, Artificial; identical to SEQ ID NO: 325505
  Synthetic oligonucleotide

SEQ ID NO: 546606 - DNA, 55 bp, Artificial; identical to SEQ ID NO: 9159
  Synthetic oligonucleotide

SEQ ID NO: 546607 - DNA, 59 bp, Artificial; identical to SEQ ID NO: 325513
  Synthetic oligonucleotide

SEQ ID NO: 546608 - DNA, 60 bp, Artificial; identical to SEQ ID NO: 325514
  Synthetic oligonucleotide

SEQ ID NO: 546609 - DNA, 55 bp, Artificial; identical to SEQ ID NO: 325518
  Synthetic oligonucleotide

SEQ ID NO: 546610 - DNA, 50 bp, Artificial; identical to SEQ ID NO: 325522
  Synthetic oligonucleotide

SEQ ID NO: 546611 - DNA, 51 bp, Artificial; identical to SEQ ID NO: 325523
  Synthetic oligonucleotide

SEQ ID NO: 546612 - DNA, 60 bp, Artificial; identical to SEQ ID NO: 6954
  Synthetic oligonucleotide

SEQ ID NO: 546613 - DNA, 58 bp, Artificial; identical to SEQ ID NO: 325525
  Synthetic oligonucleotide

SEQ ID NO: 546614 - DNA, 54 bp, Artificial; identical to SEQ ID NO: 325527
  Synthetic oligonucleotide

SEQ ID NO: 546615 - DNA, 60 bp, Artificial; identical to SEQ ID NO: 325528
  Synthetic oligonucleotide

SEQ ID NO: 546616 - DNA, 55 bp, Artificial; identical to SEQ ID NO: 325529
  Synthetic oligonucleotide

SEQ ID NO: 546617 - DNA, 55 bp, Artificial; identical to SEQ ID NO: 325530
  Synthetic oligonucleotide

SEQ ID NO: 546618 - DNA, 51 bp, Artificial; identical to SEQ ID NO: 325532
  Synthetic oligonucleotide

SEQ ID NO: 546619 - DNA, 53 bp, Artificial; identical to SEQ ID NO: 325536
  Synthetic oligonucleotide

SEQ ID NO: 546620 - DNA, 60 bp, Artificial; identical to SEQ ID NO: 325538
  Synthetic oligonucleotide

SEQ ID NO: 546621 - DNA, 60 bp, Artificial; identical to SEQ ID NO: 325539
  Synthetic oligonucleotide

SEQ ID NO: 546622 - DNA, 58 bp, Artificial; identical to SEQ ID NO: 325542
  Synthetic oligonucleotide

SEQ ID NO: 546623 - DNA, 52 bp, Artificial; identical to SEQ ID NO: 325545
  Synthetic oligonucleotide

SEQ ID NO: 546624 - DNA, 60 bp, Artificial; identical to SEQ ID NO: 325547
  Synthetic oligonucleotide

SEQ ID NO: 546625 - DNA, 58 bp, Artificial; identical to SEQ ID NO: 325548
  Synthetic oligonucleotide

SEQ ID NO: 546626 - DNA, 54 bp, Artificial; identical to SEQ ID NO: 325550
  Synthetic oligonucleotide

SEQ ID NO: 546627 - DNA, 60 bp, Artificial; identical to SEQ ID NO: 325554
  Synthetic oligonucleotide

SEQ ID NO: 546628 - DNA, 50 bp, Artificial; identical to SEQ ID NO: 325557
  Synthetic oligonucleotide

SEQ ID NO: 546629 - DNA, 60 bp, Artificial; identical to SEQ ID NO: 325558
  Synthetic oligonucleotide

SEQ ID NO: 546630 - DNA, 56 bp, Artificial; identical to SEQ ID NO: 325559
  Synthetic oligonucleotide

SEQ ID NO: 546631 - DNA, 60 bp, Artificial; identical to SEQ ID NO: 325560
  Synthetic oligonucleotide

SEQ ID NO: 546632 - DNA, 51 bp, Artificial; identical to SEQ ID NO: 325561
  Synthetic oligonucleotide

SEQ ID NO: 546633 - DNA, 57 bp, Artificial; identical to SEQ ID NO: 325565
  Synthetic oligonucleotide

SEQ ID NO: 546634 - DNA, 50 bp, Artificial; identical to SEQ ID NO: 325567
  Synthetic oligonucleotide

SEQ ID NO: 546635 - DNA, 49 bp, Artificial; identical to SEQ ID NO: 325574
  Synthetic oligonucleotide

SEQ ID NO: 546636 - DNA, 55 bp, Artificial; identical to SEQ ID NO: 13899
  Synthetic oligonucleotide

SEQ ID NO: 546637 - DNA, 52 bp, Artificial; identical to SEQ ID NO: 325576
  Synthetic oligonucleotide

SEQ ID NO: 546638 - DNA, 50 bp, Artificial; identical to SEQ ID NO: 325578
  Synthetic oligonucleotide

SEQ ID NO: 546639 - DNA, 60 bp, Artificial; identical to SEQ ID NO: 325585
  Synthetic oligonucleotide

SEQ ID NO: 546640 - DNA, 57 bp, Artificial; identical to SEQ ID NO: 325586
  Synthetic oligonucleotide

SEQ ID NO: 546641 - DNA, 60 bp, Artificial; identical to SEQ ID NO: 325589
  Synthetic oligonucleotide

SEQ ID NO: 546642 - DNA, 55 bp, Artificial; identical to SEQ ID NO: 325590
  Synthetic oligonucleotide

SEQ ID NO: 546643 - DNA, 52 bp, Artificial; identical to SEQ ID NO: 8069
  Synthetic oligonucleotide

SEQ ID NO: 546644 - DNA, 60 bp, Artificial; identical to SEQ ID NO: 325593
  Synthetic oligonucleotide

SEQ ID NO: 546645 - DNA, 51 bp, Artificial; identical to SEQ ID NO: 325596
  Synthetic oligonucleotide

SEQ ID NO: 546646 - DNA, 57 bp, Artificial; identical to SEQ ID NO: 325597
  Synthetic oligonucleotide

SEQ ID NO: 546647 - DNA, 56 bp, Artificial; identical to SEQ ID NO: 325598
  Synthetic oligonucleotide

SEQ ID NO: 546648 - DNA, 54 bp, Artificial; identical to SEQ ID NO: 325599
  Synthetic oligonucleotide

SEQ ID NO: 546649 - DNA, 60 bp, Artificial; identical to SEQ ID NO: 325601
  Synthetic oligonucleotide

SEQ ID NO: 546650 - DNA, 60 bp, Artificial; identical to SEQ ID NO: 325602
  Synthetic oligonucleotide

SEQ ID NO: 546651 - DNA, 60 bp, Artificial; identical to SEQ ID NO: 325603
  Synthetic oligonucleotide

SEQ ID NO: 546652 - DNA, 55 bp, Artificial; identical to SEQ ID NO: 325604
  Synthetic oligonucleotide

SEQ ID NO: 546653 - DNA, 55 bp, Artificial; identical to SEQ ID NO: 325606
  Synthetic oligonucleotide

SEQ ID NO: 546654 - DNA, 56 bp, Artificial; identical to SEQ ID NO: 325610
  Synthetic oligonucleotide

SEQ ID NO: 546655 - DNA, 60 bp, Artificial; identical to SEQ ID NO: 325619
  Synthetic oligonucleotide

SEQ ID NO: 546656 - DNA, 60 bp, Artificial; identical to SEQ ID NO: 325620
  Synthetic oligonucleotide

SEQ ID NO: 546657 - DNA, 60 bp, Artificial; identical to SEQ ID NO: 325623
  Synthetic oligonucleotide

SEQ ID NO: 546658 - DNA, 55 bp, Artificial; identical to SEQ ID NO: 325624
  Synthetic oligonucleotide

SEQ ID NO: 546659 - DNA, 60 bp, Artificial; identical to SEQ ID NO: 9824
  Synthetic oligonucleotide

SEQ ID NO: 546660 - DNA, 60 bp, Artificial; identical to SEQ ID NO: 325625
  Synthetic oligonucleotide

SEQ ID NO: 546661 - DNA, 54 bp, Artificial; identical to SEQ ID NO: 19605
  Synthetic oligonucleotide

SEQ ID NO: 546662 - DNA, 55 bp, Artificial; identical to SEQ ID NO: 325628
  Synthetic oligonucleotide

SEQ ID NO: 546663 - DNA, 56 bp, Artificial; identical to SEQ ID NO: 325632
  Synthetic oligonucleotide

SEQ ID NO: 546664 - DNA, 57 bp, Artificial; identical to SEQ ID NO: 325633
  Synthetic oligonucleotide

SEQ ID NO: 546665 - DNA, 60 bp, Artificial; identical to SEQ ID NO: 325634
  Synthetic oligonucleotide

SEQ ID NO: 546666 - DNA, 55 bp, Artificial; identical to SEQ ID NO: 325639
  Synthetic oligonucleotide

SEQ ID NO: 546667 - DNA, 51 bp, Artificial; identical to SEQ ID NO: 325640
  Synthetic oligonucleotide

SEQ ID NO: 546668 - DNA, 52 bp, Artificial; identical to SEQ ID NO: 325642
  Synthetic oligonucleotide

SEQ ID NO: 546669 - DNA, 60 bp, Artificial; identical to SEQ ID NO: 325643
  Synthetic oligonucleotide

SEQ ID NO: 546670 - DNA, 56 bp, Artificial; identical to SEQ ID NO: 18422
  Synthetic oligonucleotide

SEQ ID NO: 546671 - DNA, 60 bp, Artificial; identical to SEQ ID NO: 325644
  Synthetic oligonucleotide

SEQ ID NO: 546672 - DNA, 54 bp, Artificial; identical to SEQ ID NO: 325646
  Synthetic oligonucleotide

SEQ ID NO: 546673 - DNA, 60 bp, Artificial; identical to SEQ ID NO: 325650
  Synthetic oligonucleotide

SEQ ID NO: 546674 - DNA, 59 bp, Artificial; identical to SEQ ID NO: 325651
  Synthetic oligonucleotide

SEQ ID NO: 546675 - DNA, 60 bp, Artificial; identical to SEQ ID NO: 325652
  Synthetic oligonucleotide

SEQ ID NO: 546676 - DNA, 59 bp, Artificial; identical to SEQ ID NO: 325653
  Synthetic oligonucleotide

SEQ ID NO: 546677 - DNA, 52 bp, Artificial; identical to SEQ ID NO: 325655
  Synthetic oligonucleotide

SEQ ID NO: 546678 - DNA, 60 bp, Artificial; identical to SEQ ID NO: 325656
  Synthetic oligonucleotide

SEQ ID NO: 546679 - DNA, 60 bp, Artificial; identical to SEQ ID NO: 325659
  Synthetic oligonucleotide

SEQ ID NO: 546680 - DNA, 55 bp, Artificial; identical to SEQ ID NO: 325662
  Synthetic oligonucleotide

SEQ ID NO: 546681 - DNA, 55 bp, Artificial; identical to SEQ ID NO: 325663
  Synthetic oligonucleotide

SEQ ID NO: 546682 - DNA, 53 bp, Artificial; identical to SEQ ID NO: 325664
  Synthetic oligonucleotide

SEQ ID NO: 546683 - DNA, 60 bp, Artificial; identical to SEQ ID NO: 325670
  Synthetic oligonucleotide

SEQ ID NO: 546684 - DNA, 54 bp, Artificial; identical to SEQ ID NO: 325676
  Synthetic oligonucleotide

SEQ ID NO: 546685 - DNA, 49 bp, Artificial; identical to SEQ ID NO: 325677
  Synthetic oligonucleotide

SEQ ID NO: 546686 - DNA, 60 bp, Artificial; identical to SEQ ID NO: 325680
  Synthetic oligonucleotide

SEQ ID NO: 546687 - DNA, 55 bp, Artificial; identical to SEQ ID NO: 325683
  Synthetic oligonucleotide

SEQ ID NO: 546688 - DNA, 56 bp, Artificial; identical to SEQ ID NO: 325686
  Synthetic oligonucleotide

SEQ ID NO: 546689 - DNA, 56 bp, Artificial; identical to SEQ ID NO: 325687
  Synthetic oligonucleotide

SEQ ID NO: 546690 - DNA, 55 bp, Artificial; identical to SEQ ID NO: 325688
  Synthetic oligonucleotide

SEQ ID NO: 546691 - DNA, 60 bp, Artificial; identical to SEQ ID NO: 325692
  Synthetic oligonucleotide

SEQ ID NO: 546692 - DNA, 52 bp, Artificial; identical to SEQ ID NO: 325693
  Synthetic oligonucleotide

SEQ ID NO: 546693 - DNA, 60 bp, Artificial; identical to SEQ ID NO: 325694
  Synthetic oligonucleotide

SEQ ID NO: 546694 - DNA, 57 bp, Artificial; identical to SEQ ID NO: 16026
  Synthetic oligonucleotide

SEQ ID NO: 546695 - DNA, 60 bp, Artificial; identical to SEQ ID NO: 325702
  Synthetic oligonucleotide

SEQ ID NO: 546696 - DNA, 58 bp, Artificial; identical to SEQ ID NO: 19123
  Synthetic oligonucleotide

SEQ ID NO: 546697 - DNA, 52 bp, Artificial; identical to SEQ ID NO: 325704
  Synthetic oligonucleotide

SEQ ID NO: 546698 - DNA, 55 bp, Artificial; identical to SEQ ID NO: 325705
  Synthetic oligonucleotide

SEQ ID NO: 546699 - DNA, 54 bp, Artificial; identical to SEQ ID NO: 17207
  Synthetic oligonucleotide

SEQ ID NO: 546700 - DNA, 60 bp, Artificial; identical to SEQ ID NO: 325710
  Synthetic oligonucleotide

SEQ ID NO: 546701 - DNA, 52 bp, Artificial; identical to SEQ ID NO: 325711
  Synthetic oligonucleotide

SEQ ID NO: 546702 - DNA, 59 bp, Artificial; identical to SEQ ID NO: 325713
  Synthetic oligonucleotide

SEQ ID NO: 546703 - DNA, 60 bp, Artificial; identical to SEQ ID NO: 325714
  Synthetic oligonucleotide

SEQ ID NO: 546704 - DNA, 55 bp, Artificial; identical to SEQ ID NO: 325715
  Synthetic oligonucleotide

SEQ ID NO: 546705 - DNA, 50 bp, Artificial; identical to SEQ ID NO: 325718
  Synthetic oligonucleotide

SEQ ID NO: 546706 - DNA, 51 bp, Artificial; identical to SEQ ID NO: 325719
  Synthetic oligonucleotide

SEQ ID NO: 546707 - DNA, 53 bp, Artificial; identical to SEQ ID NO: 325721
  Synthetic oligonucleotide

SEQ ID NO: 546708 - DNA, 53 bp, Artificial; identical to SEQ ID NO: 325722
  Synthetic oligonucleotide

SEQ ID NO: 546709 - DNA, 60 bp, Artificial; identical to SEQ ID NO: 325727
  Synthetic oligonucleotide

SEQ ID NO: 546710 - DNA, 60 bp, Artificial; identical to SEQ ID NO: 325728
  Synthetic oligonucleotide

SEQ ID NO: 546711 - DNA, 57 bp, Artificial; identical to SEQ ID NO: 325731
  Synthetic oligonucleotide

SEQ ID NO: 546712 - DNA, 53 bp, Artificial; identical to SEQ ID NO: 325732
  Synthetic oligonucleotide

SEQ ID NO: 546713 - DNA, 54 bp, Artificial; identical to SEQ ID NO: 325733
  Synthetic oligonucleotide

SEQ ID NO: 546714 - DNA, 56 bp, Artificial; identical to SEQ ID NO: 325734
  Synthetic oligonucleotide

SEQ ID NO: 546715 - DNA, 60 bp, Artificial; identical to SEQ ID NO: 325736
  Synthetic oligonucleotide

SEQ ID NO: 546716 - DNA, 53 bp, Artificial; identical to SEQ ID NO: 325746
  Synthetic oligonucleotide

SEQ ID NO: 546717 - DNA, 53 bp, Artificial; identical to SEQ ID NO: 325748
  Synthetic oligonucleotide

SEQ ID NO: 546718 - DNA, 59 bp, Artificial; identical to SEQ ID NO: 325753
  Synthetic oligonucleotide

SEQ ID NO: 546719 - DNA, 50 bp, Artificial; identical to SEQ ID NO: 325755
  Synthetic oligonucleotide

SEQ ID NO: 546720 - DNA, 60 bp, Artificial; identical to SEQ ID NO: 325757
  Synthetic oligonucleotide

SEQ ID NO: 546721 - DNA, 59 bp, Artificial; identical to SEQ ID NO: 325759
  Synthetic oligonucleotide

SEQ ID NO: 546722 - DNA, 57 bp, Artificial; identical to SEQ ID NO: 325763
  Synthetic oligonucleotide

SEQ ID NO: 546723 - DNA, 54 bp, Artificial; identical to SEQ ID NO: 325765
  Synthetic oligonucleotide

SEQ ID NO: 546724 - DNA, 53 bp, Artificial; identical to SEQ ID NO: 325767
  Synthetic oligonucleotide

SEQ ID NO: 546725 - DNA, 55 bp, Artificial; identical to SEQ ID NO: 325769
  Synthetic oligonucleotide

SEQ ID NO: 546726 - DNA, 55 bp, Artificial; identical to SEQ ID NO: 325771
  Synthetic oligonucleotide

SEQ ID NO: 546727 - DNA, 58 bp, Artificial; identical to SEQ ID NO: 325774
  Synthetic oligonucleotide

SEQ ID NO: 546728 - DNA, 60 bp, Artificial; identical to SEQ ID NO: 325775
  Synthetic oligonucleotide

SEQ ID NO: 546729 - DNA, 58 bp, Artificial; identical to SEQ ID NO: 325776
  Synthetic oligonucleotide

SEQ ID NO: 546730 - DNA, 55 bp, Artificial; identical to SEQ ID NO: 325779
  Synthetic oligonucleotide

SEQ ID NO: 546731 - DNA, 60 bp, Artificial; identical to SEQ ID NO: 325781
  Synthetic oligonucleotide

SEQ ID NO: 546732 - DNA, 59 bp, Artificial; identical to SEQ ID NO: 11453
  Synthetic oligonucleotide

SEQ ID NO: 546733 - DNA, 57 bp, Artificial; identical to SEQ ID NO: 325784
  Synthetic oligonucleotide

SEQ ID NO: 546734 - DNA, 60 bp, Artificial; identical to SEQ ID NO: 325785
  Synthetic oligonucleotide

SEQ ID NO: 546735 - DNA, 52 bp, Artificial; identical to SEQ ID NO: 13298
  Synthetic oligonucleotide

SEQ ID NO: 546736 - DNA, 57 bp, Artificial; identical to SEQ ID NO: 325786
  Synthetic oligonucleotide

SEQ ID NO: 546737 - DNA, 60 bp, Artificial; identical to SEQ ID NO: 325788
  Synthetic oligonucleotide

SEQ ID NO: 546738 - DNA, 52 bp, Artificial; identical to SEQ ID NO: 325789
  Synthetic oligonucleotide

SEQ ID NO: 546739 - DNA, 60 bp, Artificial; identical to SEQ ID NO: 325790
  Synthetic oligonucleotide

SEQ ID NO: 546740 - DNA, 55 bp, Artificial; identical to SEQ ID NO: 325792
  Synthetic oligonucleotide

SEQ ID NO: 546741 - DNA, 50 bp, Artificial; identical to SEQ ID NO: 325793
  Synthetic oligonucleotide

SEQ ID NO: 546742 - DNA, 52 bp, Artificial; identical to SEQ ID NO: 17980
  Synthetic oligonucleotide

SEQ ID NO: 546743 - DNA, 55 bp, Artificial; identical to SEQ ID NO: 325794
  Synthetic oligonucleotide

SEQ ID NO: 546744 - DNA, 55 bp, Artificial; identical to SEQ ID NO: 325796
  Synthetic oligonucleotide

SEQ ID NO: 546745 - DNA, 55 bp, Artificial; identical to SEQ ID NO: 325798
  Synthetic oligonucleotide

SEQ ID NO: 546746 - DNA, 50 bp, Artificial; identical to SEQ ID NO: 325800
  Synthetic oligonucleotide

SEQ ID NO: 546747 - DNA, 56 bp, Artificial; identical to SEQ ID NO: 325808
  Synthetic oligonucleotide

SEQ ID NO: 546748 - DNA, 58 bp, Artificial; identical to SEQ ID NO: 325817
  Synthetic oligonucleotide

SEQ ID NO: 546749 - DNA, 60 bp, Artificial; identical to SEQ ID NO: 325819
  Synthetic oligonucleotide

SEQ ID NO: 546750 - DNA, 55 bp, Artificial; identical to SEQ ID NO: 325823
  Synthetic oligonucleotide

SEQ ID NO: 546751 - DNA, 60 bp, Artificial; identical to SEQ ID NO: 325826
  Synthetic oligonucleotide

SEQ ID NO: 546752 - DNA, 58 bp, Artificial; identical to SEQ ID NO: 325827
  Synthetic oligonucleotide

SEQ ID NO: 546753 - DNA, 60 bp, Artificial; identical to SEQ ID NO: 325833
  Synthetic oligonucleotide

SEQ ID NO: 546754 - DNA, 57 bp, Artificial; identical to SEQ ID NO: 325836
  Synthetic oligonucleotide

SEQ ID NO: 546755 - DNA, 60 bp, Artificial; identical to SEQ ID NO: 325837
  Synthetic oligonucleotide

SEQ ID NO: 546756 - DNA, 51 bp, Artificial; identical to SEQ ID NO: 325838
  Synthetic oligonucleotide

SEQ ID NO: 546757 - DNA, 54 bp, Artificial; identical to SEQ ID NO: 325841
  Synthetic oligonucleotide

SEQ ID NO: 546758 - DNA, 55 bp, Artificial; identical to SEQ ID NO: 325844
  Synthetic oligonucleotide

SEQ ID NO: 546759 - DNA, 54 bp, Artificial; identical to SEQ ID NO: 325845
  Synthetic oligonucleotide

SEQ ID NO: 546760 - DNA, 60 bp, Artificial; identical to SEQ ID NO: 6274
  Synthetic oligonucleotide

SEQ ID NO: 546761 - DNA, 54 bp, Artificial; identical to SEQ ID NO: 325846
  Synthetic oligonucleotide

SEQ ID NO: 546762 - DNA, 55 bp, Artificial; identical to SEQ ID NO: 325848
  Synthetic oligonucleotide

SEQ ID NO: 546763 - DNA, 56 bp, Artificial; identical to SEQ ID NO: 18286
  Synthetic oligonucleotide

SEQ ID NO: 546764 - DNA, 60 bp, Artificial; identical to SEQ ID NO: 325856
  Synthetic oligonucleotide

SEQ ID NO: 546765 - DNA, 59 bp, Artificial; identical to SEQ ID NO: 325857
  Synthetic oligonucleotide

SEQ ID NO: 546766 - DNA, 57 bp, Artificial; identical to SEQ ID NO: 16440
  Synthetic oligonucleotide

SEQ ID NO: 546767 - DNA, 55 bp, Artificial; identical to SEQ ID NO: 325861
  Synthetic oligonucleotide

SEQ ID NO: 546768 - DNA, 52 bp, Artificial; identical to SEQ ID NO: 325864
  Synthetic oligonucleotide

SEQ ID NO: 546769 - DNA, 59 bp, Artificial; identical to SEQ ID NO: 20575
  Synthetic oligonucleotide

SEQ ID NO: 546770 - DNA, 60 bp, Artificial; identical to SEQ ID NO: 325868
  Synthetic oligonucleotide

SEQ ID NO: 546771 - DNA, 60 bp, Artificial; identical to SEQ ID NO: 325874
  Synthetic oligonucleotide

SEQ ID NO: 546772 - DNA, 51 bp, Artificial; identical to SEQ ID NO: 325875
  Synthetic oligonucleotide

SEQ ID NO: 546773 - DNA, 55 bp, Artificial; identical to SEQ ID NO: 325880
  Synthetic oligonucleotide

SEQ ID NO: 546774 - DNA, 54 bp, Artificial; identical to SEQ ID NO: 325881
  Synthetic oligonucleotide

SEQ ID NO: 546775 - DNA, 59 bp, Artificial; identical to SEQ ID NO: 325884
  Synthetic oligonucleotide

SEQ ID NO: 546776 - DNA, 54 bp, Artificial; identical to SEQ ID NO: 325888
  Synthetic oligonucleotide

SEQ ID NO: 546777 - DNA, 59 bp, Artificial; identical to SEQ ID NO: 325892
  Synthetic oligonucleotide

SEQ ID NO: 546778 - DNA, 53 bp, Artificial; identical to SEQ ID NO: 325893
  Synthetic oligonucleotide

SEQ ID NO: 546779 - DNA, 56 bp, Artificial; identical to SEQ ID NO: 325895
  Synthetic oligonucleotide

SEQ ID NO: 546780 - DNA, 50 bp, Artificial; identical to SEQ ID NO: 325896
  Synthetic oligonucleotide

SEQ ID NO: 546781 - DNA, 58 bp, Artificial; identical to SEQ ID NO: 325898
  Synthetic oligonucleotide

SEQ ID NO: 546782 - DNA, 58 bp, Artificial; identical to SEQ ID NO: 325900
  Synthetic oligonucleotide

SEQ ID NO: 546783 - DNA, 55 bp, Artificial; identical to SEQ ID NO: 325901
  Synthetic oligonucleotide

SEQ ID NO: 546784 - DNA, 57 bp, Artificial; identical to SEQ ID NO: 16176
  Synthetic oligonucleotide

SEQ ID NO: 546785 - DNA, 50 bp, Artificial; identical to SEQ ID NO: 325902
  Synthetic oligonucleotide

SEQ ID NO: 546786 - DNA, 60 bp, Artificial; identical to SEQ ID NO: 11995
  Synthetic oligonucleotide

SEQ ID NO: 546787 - DNA, 60 bp, Artificial; identical to SEQ ID NO: 325904
  Synthetic oligonucleotide

SEQ ID NO: 546788 - DNA, 58 bp, Artificial; identical to SEQ ID NO: 325906
  Synthetic oligonucleotide

SEQ ID NO: 546789 - DNA, 52 bp, Artificial; identical to SEQ ID NO: 325907
  Synthetic oligonucleotide

SEQ ID NO: 546790 - DNA, 59 bp, Artificial; identical to SEQ ID NO: 325911
  Synthetic oligonucleotide

SEQ ID NO: 546791 - DNA, 59 bp, Artificial; identical to SEQ ID NO: 325912
  Synthetic oligonucleotide

SEQ ID NO: 546792 - DNA, 58 bp, Artificial; identical to SEQ ID NO: 325913
  Synthetic oligonucleotide

SEQ ID NO: 546793 - DNA, 54 bp, Artificial; identical to SEQ ID NO: 325915
  Synthetic oligonucleotide

SEQ ID NO: 546794 - DNA, 52 bp, Artificial; identical to SEQ ID NO: 325918
  Synthetic oligonucleotide

SEQ ID NO: 546795 - DNA, 55 bp, Artificial; identical to SEQ ID NO: 325920
  Synthetic oligonucleotide

SEQ ID NO: 546796 - DNA, 60 bp, Artificial; identical to SEQ ID NO: 325921
  Synthetic oligonucleotide

SEQ ID NO: 546797 - DNA, 56 bp, Artificial; identical to SEQ ID NO: 325924
  Synthetic oligonucleotide

SEQ ID NO: 546798 - DNA, 60 bp, Artificial; identical to SEQ ID NO: 325929
  Synthetic oligonucleotide

SEQ ID NO: 546799 - DNA, 54 bp, Artificial; identical to SEQ ID NO: 325932
  Synthetic oligonucleotide

SEQ ID NO: 546800 - DNA, 55 bp, Artificial; identical to SEQ ID NO: 325934
  Synthetic oligonucleotide

SEQ ID NO: 546801 - DNA, 52 bp, Artificial; identical to SEQ ID NO: 325935
  Synthetic oligonucleotide

SEQ ID NO: 546802 - DNA, 56 bp, Artificial; identical to SEQ ID NO: 325936
  Synthetic oligonucleotide

SEQ ID NO: 546803 - DNA, 54 bp, Artificial; identical to SEQ ID NO: 325938
  Synthetic oligonucleotide

SEQ ID NO: 546804 - DNA, 57 bp, Artificial; identical to SEQ ID NO: 325939
  Synthetic oligonucleotide

SEQ ID NO: 546805 - DNA, 57 bp, Artificial; identical to SEQ ID NO: 16406
  Synthetic oligonucleotide

SEQ ID NO: 546806 - DNA, 60 bp, Artificial; identical to SEQ ID NO: 325947
  Synthetic oligonucleotide

SEQ ID NO: 546807 - DNA, 51 bp, Artificial; identical to SEQ ID NO: 325948
  Synthetic oligonucleotide

SEQ ID NO: 546808 - DNA, 57 bp, Artificial; identical to SEQ ID NO: 325950
  Synthetic oligonucleotide

SEQ ID NO: 546809 - DNA, 60 bp, Artificial; identical to SEQ ID NO: 325951
  Synthetic oligonucleotide

SEQ ID NO: 546810 - DNA, 58 bp, Artificial; identical to SEQ ID NO: 325952
  Synthetic oligonucleotide

SEQ ID NO: 546811 - DNA, 52 bp, Artificial; identical to SEQ ID NO: 325953
  Synthetic oligonucleotide

SEQ ID NO: 546812 - DNA, 60 bp, Artificial; identical to SEQ ID NO: 325955
  Synthetic oligonucleotide

SEQ ID NO: 546813 - DNA, 55 bp, Artificial; identical to SEQ ID NO: 325956
  Synthetic oligonucleotide

SEQ ID NO: 546814 - DNA, 56 bp, Artificial; identical to SEQ ID NO: 325958
  Synthetic oligonucleotide

SEQ ID NO: 546815 - DNA, 55 bp, Artificial; identical to SEQ ID NO: 325959
  Synthetic oligonucleotide

SEQ ID NO: 546816 - DNA, 53 bp, Artificial; identical to SEQ ID NO: 325960
  Synthetic oligonucleotide

SEQ ID NO: 546817 - DNA, 60 bp, Artificial; identical to SEQ ID NO: 6161
  Synthetic oligonucleotide

SEQ ID NO: 546818 - DNA, 59 bp, Artificial; identical to SEQ ID NO: 325962
  Synthetic oligonucleotide

SEQ ID NO: 546819 - DNA, 60 bp, Artificial; identical to SEQ ID NO: 325967
  Synthetic oligonucleotide

SEQ ID NO: 546820 - DNA, 48 bp, Artificial; identical to SEQ ID NO: 325975
  Synthetic oligonucleotide

SEQ ID NO: 546821 - DNA, 57 bp, Artificial; identical to SEQ ID NO: 325976
  Synthetic oligonucleotide

SEQ ID NO: 546822 - DNA, 54 bp, Artificial; identical to SEQ ID NO: 325979
  Synthetic oligonucleotide

SEQ ID NO: 546823 - DNA, 55 bp, Artificial; identical to SEQ ID NO: 325982
  Synthetic oligonucleotide

SEQ ID NO: 546824 - DNA, 53 bp, Artificial; identical to SEQ ID NO: 325983
  Synthetic oligonucleotide

SEQ ID NO: 546825 - DNA, 59 bp, Artificial; identical to SEQ ID NO: 325984
  Synthetic oligonucleotide

SEQ ID NO: 546826 - DNA, 60 bp, Artificial; identical to SEQ ID NO: 325986
  Synthetic oligonucleotide

SEQ ID NO: 546827 - DNA, 54 bp, Artificial; identical to SEQ ID NO: 325987
  Synthetic oligonucleotide

SEQ ID NO: 546828 - DNA, 54 bp, Artificial; identical to SEQ ID NO: 325988
  Synthetic oligonucleotide

SEQ ID NO: 546829 - DNA, 59 bp, Artificial; identical to SEQ ID NO: 325990
  Synthetic oligonucleotide

SEQ ID NO: 546830 - DNA, 60 bp, Artificial; identical to SEQ ID NO: 325991
  Synthetic oligonucleotide

SEQ ID NO: 546831 - DNA, 58 bp, Artificial; identical to SEQ ID NO: 19090
  Synthetic oligonucleotide

SEQ ID NO: 546832 - DNA, 50 bp, Artificial; identical to SEQ ID NO: 325993
  Synthetic oligonucleotide

SEQ ID NO: 546833 - DNA, 58 bp, Artificial; identical to SEQ ID NO: 325996
  Synthetic oligonucleotide

SEQ ID NO: 546834 - DNA, 56 bp, Artificial; identical to SEQ ID NO: 326000
  Synthetic oligonucleotide

SEQ ID NO: 546835 - DNA, 53 bp, Artificial; identical to SEQ ID NO: 326001
  Synthetic oligonucleotide

SEQ ID NO: 546836 - DNA, 60 bp, Artificial; identical to SEQ ID NO: 326002
  Synthetic oligonucleotide

SEQ ID NO: 546837 - DNA, 59 bp, Artificial; identical to SEQ ID NO: 326003
  Synthetic oligonucleotide

SEQ ID NO: 546838 - DNA, 58 bp, Artificial; identical to SEQ ID NO: 326007
  Synthetic oligonucleotide

SEQ ID NO: 546839 - DNA, 59 bp, Artificial; identical to SEQ ID NO: 326008
  Synthetic oligonucleotide

SEQ ID NO: 546840 - DNA, 56 bp, Artificial; identical to SEQ ID NO: 326009
  Synthetic oligonucleotide

SEQ ID NO: 546841 - DNA, 57 bp, Artificial; identical to SEQ ID NO: 326010
  Synthetic oligonucleotide

SEQ ID NO: 546842 - DNA, 55 bp, Artificial; identical to SEQ ID NO: 326011
  Synthetic oligonucleotide

SEQ ID NO: 546843 - DNA, 51 bp, Artificial; identical to SEQ ID NO: 326016
  Synthetic oligonucleotide

SEQ ID NO: 546844 - DNA, 50 bp, Artificial; identical to SEQ ID NO: 326017
  Synthetic oligonucleotide

SEQ ID NO: 546845 - DNA, 54 bp, Artificial; identical to SEQ ID NO: 326019
  Synthetic oligonucleotide

SEQ ID NO: 546846 - DNA, 58 bp, Artificial; identical to SEQ ID NO: 326022
  Synthetic oligonucleotide

SEQ ID NO: 546847 - DNA, 60 bp, Artificial; identical to SEQ ID NO: 326023
  Synthetic oligonucleotide

SEQ ID NO: 546848 - DNA, 55 bp, Artificial; identical to SEQ ID NO: 326025
  Synthetic oligonucleotide

SEQ ID NO: 546849 - DNA, 60 bp, Artificial; identical to SEQ ID NO: 326026
  Synthetic oligonucleotide

SEQ ID NO: 546850 - DNA, 50 bp, Artificial; identical to SEQ ID NO: 326027
  Synthetic oligonucleotide

SEQ ID NO: 546851 - DNA, 54 bp, Artificial; identical to SEQ ID NO: 6718
  Synthetic oligonucleotide

SEQ ID NO: 546852 - DNA, 59 bp, Artificial; identical to SEQ ID NO: 17749
  Synthetic oligonucleotide

SEQ ID NO: 546853 - DNA, 55 bp, Artificial; identical to SEQ ID NO: 326031
  Synthetic oligonucleotide

SEQ ID NO: 546854 - DNA, 53 bp, Artificial; identical to SEQ ID NO: 326032
  Synthetic oligonucleotide

SEQ ID NO: 546855 - DNA, 55 bp, Artificial; identical to SEQ ID NO: 326036
  Synthetic oligonucleotide

SEQ ID NO: 546856 - DNA, 60 bp, Artificial; identical to SEQ ID NO: 326037
  Synthetic oligonucleotide

SEQ ID NO: 546857 - DNA, 60 bp, Artificial; identical to SEQ ID NO: 326039
  Synthetic oligonucleotide

SEQ ID NO: 546858 - DNA, 55 bp, Artificial; identical to SEQ ID NO: 326040
  Synthetic oligonucleotide

SEQ ID NO: 546859 - DNA, 59 bp, Artificial; identical to SEQ ID NO: 326044
  Synthetic oligonucleotide

SEQ ID NO: 546860 - DNA, 59 bp, Artificial; identical to SEQ ID NO: 326047
  Synthetic oligonucleotide

SEQ ID NO: 546861 - DNA, 60 bp, Artificial; identical to SEQ ID NO: 326049
  Synthetic oligonucleotide

SEQ ID NO: 546862 - DNA, 55 bp, Artificial; identical to SEQ ID NO: 326051
  Synthetic oligonucleotide

SEQ ID NO: 546863 - DNA, 55 bp, Artificial; identical to SEQ ID NO: 326052
  Synthetic oligonucleotide

SEQ ID NO: 546864 - DNA, 59 bp, Artificial; identical to SEQ ID NO: 326053
  Synthetic oligonucleotide

SEQ ID NO: 546865 - DNA, 60 bp, Artificial; identical to SEQ ID NO: 13871
  Synthetic oligonucleotide

SEQ ID NO: 546866 - DNA, 60 bp, Artificial; identical to SEQ ID NO: 326055
  Synthetic oligonucleotide

SEQ ID NO: 546867 - DNA, 57 bp, Artificial; identical to SEQ ID NO: 326056
  Synthetic oligonucleotide

SEQ ID NO: 546868 - DNA, 56 bp, Artificial; identical to SEQ ID NO: 326063
  Synthetic oligonucleotide

SEQ ID NO: 546869 - DNA, 51 bp, Artificial; identical to SEQ ID NO: 326064
  Synthetic oligonucleotide

SEQ ID NO: 546870 - DNA, 53 bp, Artificial; identical to SEQ ID NO: 326066
  Synthetic oligonucleotide

SEQ ID NO: 546871 - DNA, 58 bp, Artificial; identical to SEQ ID NO: 12835
  Synthetic oligonucleotide

SEQ ID NO: 546872 - DNA, 55 bp, Artificial; identical to SEQ ID NO: 326072
  Synthetic oligonucleotide

SEQ ID NO: 546873 - DNA, 60 bp, Artificial; identical to SEQ ID NO: 326077
  Synthetic oligonucleotide

SEQ ID NO: 546874 - DNA, 55 bp, Artificial; identical to SEQ ID NO: 326082
  Synthetic oligonucleotide

SEQ ID NO: 546875 - DNA, 57 bp, Artificial; identical to SEQ ID NO: 326087
  Synthetic oligonucleotide

SEQ ID NO: 546876 - DNA, 51 bp, Artificial; identical to SEQ ID NO: 326090
  Synthetic oligonucleotide

SEQ ID NO: 546877 - DNA, 55 bp, Artificial; identical to SEQ ID NO: 326093
  Synthetic oligonucleotide

SEQ ID NO: 546878 - DNA, 55 bp, Artificial; identical to SEQ ID NO: 326096
  Synthetic oligonucleotide

SEQ ID NO: 546879 - DNA, 53 bp, Artificial; identical to SEQ ID NO: 326097
  Synthetic oligonucleotide

SEQ ID NO: 546880 - DNA, 60 bp, Artificial; identical to SEQ ID NO: 326098
  Synthetic oligonucleotide

SEQ ID NO: 546881 - DNA, 58 bp, Artificial; identical to SEQ ID NO: 326099
  Synthetic oligonucleotide

SEQ ID NO: 546882 - DNA, 55 bp, Artificial; identical to SEQ ID NO: 326101
  Synthetic oligonucleotide

SEQ ID NO: 546883 - DNA, 58 bp, Artificial; identical to SEQ ID NO: 326102
  Synthetic oligonucleotide

SEQ ID NO: 546884 - DNA, 55 bp, Artificial; identical to SEQ ID NO: 326104
  Synthetic oligonucleotide

SEQ ID NO: 546885 - DNA, 57 bp, Artificial; identical to SEQ ID NO: 326109
  Synthetic oligonucleotide

SEQ ID NO: 546886 - DNA, 55 bp, Artificial; identical to SEQ ID NO: 326112
  Synthetic oligonucleotide

SEQ ID NO: 546887 - DNA, 59 bp, Artificial; identical to SEQ ID NO: 326114
  Synthetic oligonucleotide

SEQ ID NO: 546888 - DNA, 58 bp, Artificial; identical to SEQ ID NO: 326116
  Synthetic oligonucleotide

SEQ ID NO: 546889 - DNA, 60 bp, Artificial; identical to SEQ ID NO: 107550
  Synthetic oligonucleotide

SEQ ID NO: 546890 - DNA, 57 bp, Artificial; identical to SEQ ID NO: 326117
  Synthetic oligonucleotide

SEQ ID NO: 546891 - DNA, 56 bp, Artificial; identical to SEQ ID NO: 326118
  Synthetic oligonucleotide

SEQ ID NO: 546892 - DNA, 59 bp, Artificial; identical to SEQ ID NO: 326119
  Synthetic oligonucleotide

SEQ ID NO: 546893 - DNA, 57 bp, Artificial; identical to SEQ ID NO: 326120
  Synthetic oligonucleotide

SEQ ID NO: 546894 - DNA, 57 bp, Artificial; identical to SEQ ID NO: 326122
  Synthetic oligonucleotide

SEQ ID NO: 546895 - DNA, 60 bp, Artificial; identical to SEQ ID NO: 326125
  Synthetic oligonucleotide

SEQ ID NO: 546896 - DNA, 59 bp, Artificial; identical to SEQ ID NO: 326132
  Synthetic oligonucleotide

SEQ ID NO: 546897 - DNA, 58 bp, Artificial; identical to SEQ ID NO: 326137
  Synthetic oligonucleotide

SEQ ID NO: 546898 - DNA, 60 bp, Artificial; identical to SEQ ID NO: 326138
  Synthetic oligonucleotide

SEQ ID NO: 546899 - DNA, 59 bp, Artificial; identical to SEQ ID NO: 326139
  Synthetic oligonucleotide

SEQ ID NO: 546900 - DNA, 56 bp, Artificial; identical to SEQ ID NO: 326143
  Synthetic oligonucleotide

SEQ ID NO: 546901 - DNA, 56 bp, Artificial; identical to SEQ ID NO: 326147
  Synthetic oligonucleotide

SEQ ID NO: 546902 - DNA, 55 bp, Artificial; identical to SEQ ID NO: 326148
  Synthetic oligonucleotide

SEQ ID NO: 546903 - DNA, 60 bp, Artificial; identical to SEQ ID NO: 326149
  Synthetic oligonucleotide

SEQ ID NO: 546904 - DNA, 56 bp, Artificial; identical to SEQ ID NO: 326150
  Synthetic oligonucleotide

SEQ ID NO: 546905 - DNA, 60 bp, Artificial; identical to SEQ ID NO: 326153
  Synthetic oligonucleotide

SEQ ID NO: 546906 - DNA, 58 bp, Artificial; identical to SEQ ID NO: 326155
  Synthetic oligonucleotide

SEQ ID NO: 546907 - DNA, 60 bp, Artificial; identical to SEQ ID NO: 326156
  Synthetic oligonucleotide

SEQ ID NO: 546908 - DNA, 60 bp, Artificial; identical to SEQ ID NO: 326157
  Synthetic oligonucleotide

SEQ ID NO: 546909 - DNA, 60 bp, Artificial; identical to SEQ ID NO: 326158
  Synthetic oligonucleotide

SEQ ID NO: 546910 - DNA, 54 bp, Artificial; identical to SEQ ID NO: 326160
  Synthetic oligonucleotide

SEQ ID NO: 546911 - DNA, 58 bp, Artificial; identical to SEQ ID NO: 326163
  Synthetic oligonucleotide

SEQ ID NO: 546912 - DNA, 54 bp, Artificial; identical to SEQ ID NO: 326165
  Synthetic oligonucleotide

SEQ ID NO: 546913 - DNA, 55 bp, Artificial; identical to SEQ ID NO: 326167
  Synthetic oligonucleotide

SEQ ID NO: 546914 - DNA, 56 bp, Artificial; identical to SEQ ID NO: 326168
  Synthetic oligonucleotide

SEQ ID NO: 546915 - DNA, 51 bp, Artificial; identical to SEQ ID NO: 326169
  Synthetic oligonucleotide

SEQ ID NO: 546916 - DNA, 59 bp, Artificial; identical to SEQ ID NO: 326170
  Synthetic oligonucleotide

SEQ ID NO: 546917 - DNA, 55 bp, Artificial; identical to SEQ ID NO: 326172
  Synthetic oligonucleotide

SEQ ID NO: 546918 - DNA, 59 bp, Artificial; identical to SEQ ID NO: 326173
  Synthetic oligonucleotide

SEQ ID NO: 546919 - DNA, 58 bp, Artificial; identical to SEQ ID NO: 326174
  Synthetic oligonucleotide

SEQ ID NO: 546920 - DNA, 55 bp, Artificial; identical to SEQ ID NO: 326177
  Synthetic oligonucleotide

SEQ ID NO: 546921 - DNA, 55 bp, Artificial; identical to SEQ ID NO: 326178
  Synthetic oligonucleotide

SEQ ID NO: 546922 - DNA, 58 bp, Artificial; identical to SEQ ID NO: 326180
  Synthetic oligonucleotide

SEQ ID NO: 546923 - DNA, 55 bp, Artificial; identical to SEQ ID NO: 326181
  Synthetic oligonucleotide

SEQ ID NO: 546924 - DNA, 56 bp, Artificial; identical to SEQ ID NO: 326182
  Synthetic oligonucleotide

SEQ ID NO: 546925 - DNA, 53 bp, Artificial; identical to SEQ ID NO: 326185
  Synthetic oligonucleotide

SEQ ID NO: 546926 - DNA, 53 bp, Artificial; identical to SEQ ID NO: 326186
  Synthetic oligonucleotide

SEQ ID NO: 546927 - DNA, 50 bp, Artificial; identical to SEQ ID NO: 326187
  Synthetic oligonucleotide

SEQ ID NO: 546928 - DNA, 57 bp, Artificial; identical to SEQ ID NO: 326189
  Synthetic oligonucleotide

SEQ ID NO: 546929 - DNA, 51 bp, Artificial; identical to SEQ ID NO: 326190
  Synthetic oligonucleotide

SEQ ID NO: 546930 - DNA, 54 bp, Artificial; identical to SEQ ID NO: 326191
  Synthetic oligonucleotide

SEQ ID NO: 546931 - DNA, 59 bp, Artificial; identical to SEQ ID NO: 326200
  Synthetic oligonucleotide

SEQ ID NO: 546932 - DNA, 55 bp, Artificial; identical to SEQ ID NO: 15429
  Synthetic oligonucleotide

SEQ ID NO: 546933 - DNA, 56 bp, Artificial; identical to SEQ ID NO: 326208
  Synthetic oligonucleotide

SEQ ID NO: 546934 - DNA, 59 bp, Artificial; identical to SEQ ID NO: 326210
  Synthetic oligonucleotide

SEQ ID NO: 546935 - DNA, 53 bp, Artificial; identical to SEQ ID NO: 326215
  Synthetic oligonucleotide

SEQ ID NO: 546936 - DNA, 51 bp, Artificial; identical to SEQ ID NO: 326217
  Synthetic oligonucleotide

SEQ ID NO: 546937 - DNA, 60 bp, Artificial; identical to SEQ ID NO: 326221
  Synthetic oligonucleotide

SEQ ID NO: 546938 - DNA, 60 bp, Artificial; identical to SEQ ID NO: 326224
  Synthetic oligonucleotide

SEQ ID NO: 546939 - DNA, 60 bp, Artificial; identical to SEQ ID NO: 326226
  Synthetic oligonucleotide

SEQ ID NO: 546940 - DNA, 60 bp, Artificial; identical to SEQ ID NO: 326228
  Synthetic oligonucleotide

SEQ ID NO: 546941 - DNA, 55 bp, Artificial; identical to SEQ ID NO: 20282
  Synthetic oligonucleotide

SEQ ID NO: 546942 - DNA, 60 bp, Artificial; identical to SEQ ID NO: 326229
  Synthetic oligonucleotide

SEQ ID NO: 546943 - DNA, 60 bp, Artificial; identical to SEQ ID NO: 326236
  Synthetic oligonucleotide

SEQ ID NO: 546944 - DNA, 54 bp, Artificial; identical to SEQ ID NO: 326237
  Synthetic oligonucleotide

SEQ ID NO: 546945 - DNA, 57 bp, Artificial; identical to SEQ ID NO: 326239
  Synthetic oligonucleotide

SEQ ID NO: 546946 - DNA, 60 bp, Artificial; identical to SEQ ID NO: 326240
  Synthetic oligonucleotide

SEQ ID NO: 546947 - DNA, 55 bp, Artificial; identical to SEQ ID NO: 326243
  Synthetic oligonucleotide

SEQ ID NO: 546948 - DNA, 51 bp, Artificial; identical to SEQ ID NO: 326245
  Synthetic oligonucleotide

SEQ ID NO: 546949 - DNA, 54 bp, Artificial; identical to SEQ ID NO: 326246
  Synthetic oligonucleotide

SEQ ID NO: 546950 - DNA, 55 bp, Artificial; identical to SEQ ID NO: 326247
  Synthetic oligonucleotide

SEQ ID NO: 546951 - DNA, 55 bp, Artificial; identical to SEQ ID NO: 326248
  Synthetic oligonucleotide

SEQ ID NO: 546952 - DNA, 60 bp, Artificial; identical to SEQ ID NO: 326251
  Synthetic oligonucleotide

SEQ ID NO: 546953 - DNA, 59 bp, Artificial; identical to SEQ ID NO: 326255
  Synthetic oligonucleotide

SEQ ID NO: 546954 - DNA, 60 bp, Artificial; identical to SEQ ID NO: 326256
  Synthetic oligonucleotide

SEQ ID NO: 546955 - DNA, 55 bp, Artificial; identical to SEQ ID NO: 326257
  Synthetic oligonucleotide

SEQ ID NO: 546956 - DNA, 58 bp, Artificial; identical to SEQ ID NO: 326260
  Synthetic oligonucleotide

SEQ ID NO: 546957 - DNA, 57 bp, Artificial; identical to SEQ ID NO: 326261
  Synthetic oligonucleotide

SEQ ID NO: 546958 - DNA, 55 bp, Artificial; identical to SEQ ID NO: 326262
  Synthetic oligonucleotide

SEQ ID NO: 546959 - DNA, 55 bp, Artificial; identical to SEQ ID NO: 148
  Synthetic oligonucleotide

SEQ ID NO: 546960 - DNA, 60 bp, Artificial; identical to SEQ ID NO: 326264
  Synthetic oligonucleotide

SEQ ID NO: 546961 - DNA, 59 bp, Artificial; identical to SEQ ID NO: 326265
  Synthetic oligonucleotide

SEQ ID NO: 546962 - DNA, 52 bp, Artificial; identical to SEQ ID NO: 326267
  Synthetic oligonucleotide

SEQ ID NO: 546963 - DNA, 57 bp, Artificial; identical to SEQ ID NO: 326268
  Synthetic oligonucleotide

SEQ ID NO: 546964 - DNA, 60 bp, Artificial; identical to SEQ ID NO: 326269
  Synthetic oligonucleotide

SEQ ID NO: 546965 - DNA, 60 bp, Artificial; identical to SEQ ID NO: 326270
  Synthetic oligonucleotide

SEQ ID NO: 546966 - DNA, 55 bp, Artificial; identical to SEQ ID NO: 326274
  Synthetic oligonucleotide

SEQ ID NO: 546967 - DNA, 60 bp, Artificial; identical to SEQ ID NO: 326276
  Synthetic oligonucleotide

SEQ ID NO: 546968 - DNA, 55 bp, Artificial; identical to SEQ ID NO: 326280
  Synthetic oligonucleotide

SEQ ID NO: 546969 - DNA, 55 bp, Artificial; identical to SEQ ID NO: 326281
  Synthetic oligonucleotide

SEQ ID NO: 546970 - DNA, 58 bp, Artificial; identical to SEQ ID NO: 326282
  Synthetic oligonucleotide

SEQ ID NO: 546971 - DNA, 60 bp, Artificial; identical to SEQ ID NO: 326283
  Synthetic oligonucleotide

SEQ ID NO: 546972 - DNA, 60 bp, Artificial; identical to SEQ ID NO: 326289
  Synthetic oligonucleotide

SEQ ID NO: 546973 - DNA, 54 bp, Artificial; identical to SEQ ID NO: 326291
  Synthetic oligonucleotide

SEQ ID NO: 546974 - DNA, 60 bp, Artificial; identical to SEQ ID NO: 326292
  Synthetic oligonucleotide

SEQ ID NO: 546975 - DNA, 56 bp, Artificial; identical to SEQ ID NO: 326293
  Synthetic oligonucleotide

SEQ ID NO: 546976 - DNA, 54 bp, Artificial; identical to SEQ ID NO: 326294
  Synthetic oligonucleotide

SEQ ID NO: 546977 - DNA, 57 bp, Artificial; identical to SEQ ID NO: 326297
  Synthetic oligonucleotide

SEQ ID NO: 546978 - DNA, 60 bp, Artificial; identical to SEQ ID NO: 326301
  Synthetic oligonucleotide

SEQ ID NO: 546979 - DNA, 54 bp, Artificial; identical to SEQ ID NO: 326302
  Synthetic oligonucleotide

SEQ ID NO: 546980 - DNA, 60 bp, Artificial; identical to SEQ ID NO: 326304
  Synthetic oligonucleotide

SEQ ID NO: 546981 - DNA, 59 bp, Artificial; identical to SEQ ID NO: 326306
  Synthetic oligonucleotide

SEQ ID NO: 546982 - DNA, 54 bp, Artificial; identical to SEQ ID NO: 326308
  Synthetic oligonucleotide

SEQ ID NO: 546983 - DNA, 55 bp, Artificial; identical to SEQ ID NO: 326311
  Synthetic oligonucleotide

SEQ ID NO: 546984 - DNA, 55 bp, Artificial; identical to SEQ ID NO: 326314
  Synthetic oligonucleotide

SEQ ID NO: 546985 - DNA, 55 bp, Artificial; identical to SEQ ID NO: 326318
  Synthetic oligonucleotide

SEQ ID NO: 546986 - DNA, 55 bp, Artificial; identical to SEQ ID NO: 326321
  Synthetic oligonucleotide

SEQ ID NO: 546987 - DNA, 60 bp, Artificial; identical to SEQ ID NO: 326322
  Synthetic oligonucleotide

SEQ ID NO: 546988 - DNA, 53 bp, Artificial; identical to SEQ ID NO: 326323
  Synthetic oligonucleotide

SEQ ID NO: 546989 - DNA, 60 bp, Artificial; identical to SEQ ID NO: 326326
  Synthetic oligonucleotide

SEQ ID NO: 546990 - DNA, 60 bp, Artificial; identical to SEQ ID NO: 326327
  Synthetic oligonucleotide

SEQ ID NO: 546991 - DNA, 60 bp, Artificial; identical to SEQ ID NO: 326328
  Synthetic oligonucleotide

SEQ ID NO: 546992 - DNA, 55 bp, Artificial; identical to SEQ ID NO: 326329
  Synthetic oligonucleotide

SEQ ID NO: 546993 - DNA, 54 bp, Artificial; identical to SEQ ID NO: 326330
  Synthetic oligonucleotide

SEQ ID NO: 546994 - DNA, 55 bp, Artificial; identical to SEQ ID NO: 326336
  Synthetic oligonucleotide

SEQ ID NO: 546995 - DNA, 60 bp, Artificial; identical to SEQ ID NO: 326337
  Synthetic oligonucleotide

SEQ ID NO: 546996 - DNA, 60 bp, Artificial; identical to SEQ ID NO: 326338
  Synthetic oligonucleotide

SEQ ID NO: 546997 - DNA, 55 bp, Artificial; identical to SEQ ID NO: 326340
  Synthetic oligonucleotide

SEQ ID NO: 546998 - DNA, 55 bp, Artificial; identical to SEQ ID NO: 326341
  Synthetic oligonucleotide

SEQ ID NO: 546999 - DNA, 53 bp, Artificial; identical to SEQ ID NO: 326342
  Synthetic oligonucleotide

SEQ ID NO: 547000 - DNA, 55 bp, Artificial; identical to SEQ ID NO: 326344
  Synthetic oligonucleotide

SEQ ID NO: 547001 - DNA, 57 bp, Artificial; identical to SEQ ID NO: 326346
  Synthetic oligonucleotide

SEQ ID NO: 547002 - DNA, 60 bp, Artificial; identical to SEQ ID NO: 326347
  Synthetic oligonucleotide

SEQ ID NO: 547003 - DNA, 57 bp, Artificial; identical to SEQ ID NO: 326350
  Synthetic oligonucleotide

SEQ ID NO: 547004 - DNA, 59 bp, Artificial; identical to SEQ ID NO: 326353
  Synthetic oligonucleotide

SEQ ID NO: 547005 - DNA, 50 bp, Artificial; identical to SEQ ID NO: 326354
  Synthetic oligonucleotide

SEQ ID NO: 547006 - DNA, 55 bp, Artificial; identical to SEQ ID NO: 326357
  Synthetic oligonucleotide

SEQ ID NO: 547007 - DNA, 52 bp, Artificial; identical to SEQ ID NO: 326362
  Synthetic oligonucleotide

SEQ ID NO: 547008 - DNA, 60 bp, Artificial; identical to SEQ ID NO: 326367
  Synthetic oligonucleotide

SEQ ID NO: 547009 - DNA, 55 bp, Artificial; identical to SEQ ID NO: 326368
  Synthetic oligonucleotide

SEQ ID NO: 547010 - DNA, 60 bp, Artificial; identical to SEQ ID NO: 326374
  Synthetic oligonucleotide

SEQ ID NO: 547011 - DNA, 58 bp, Artificial; identical to SEQ ID NO: 326375
  Synthetic oligonucleotide

SEQ ID NO: 547012 - DNA, 51 bp, Artificial; identical to SEQ ID NO: 326380
  Synthetic oligonucleotide

SEQ ID NO: 547013 - DNA, 60 bp, Artificial; identical to SEQ ID NO: 326382
  Synthetic oligonucleotide

SEQ ID NO: 547014 - DNA, 58 bp, Artificial; identical to SEQ ID NO: 326388
  Synthetic oligonucleotide

SEQ ID NO: 547015 - DNA, 51 bp, Artificial; identical to SEQ ID NO: 326389
  Synthetic oligonucleotide

SEQ ID NO: 547016 - DNA, 53 bp, Artificial; identical to SEQ ID NO: 326390
  Synthetic oligonucleotide

SEQ ID NO: 547017 - DNA, 55 bp, Artificial; identical to SEQ ID NO: 326393
  Synthetic oligonucleotide

SEQ ID NO: 547018 - DNA, 51 bp, Artificial; identical to SEQ ID NO: 326394
  Synthetic oligonucleotide

SEQ ID NO: 547019 - DNA, 58 bp, Artificial; identical to SEQ ID NO: 326395
  Synthetic oligonucleotide

SEQ ID NO: 547020 - DNA, 60 bp, Artificial; identical to SEQ ID NO: 326396
  Synthetic oligonucleotide

SEQ ID NO: 547021 - DNA, 57 bp, Artificial; identical to SEQ ID NO: 326398
  Synthetic oligonucleotide

SEQ ID NO: 547022 - DNA, 60 bp, Artificial; identical to SEQ ID NO: 326399
  Synthetic oligonucleotide

SEQ ID NO: 547023 - DNA, 60 bp, Artificial; identical to SEQ ID NO: 326401
  Synthetic oligonucleotide

SEQ ID NO: 547024 - DNA, 60 bp, Artificial; identical to SEQ ID NO: 15402
  Synthetic oligonucleotide

SEQ ID NO: 547025 - DNA, 59 bp, Artificial; identical to SEQ ID NO: 326402
  Synthetic oligonucleotide

SEQ ID NO: 547026 - DNA, 58 bp, Artificial; identical to SEQ ID NO: 326404
  Synthetic oligonucleotide

SEQ ID NO: 547027 - DNA, 55 bp, Artificial; identical to SEQ ID NO: 326407
  Synthetic oligonucleotide

SEQ ID NO: 547028 - DNA, 55 bp, Artificial; identical to SEQ ID NO: 326408
  Synthetic oligonucleotide

SEQ ID NO: 547029 - DNA, 58 bp, Artificial; identical to SEQ ID NO: 326409
  Synthetic oligonucleotide

SEQ ID NO: 547030 - DNA, 54 bp, Artificial; identical to SEQ ID NO: 326410
  Synthetic oligonucleotide

SEQ ID NO: 547031 - DNA, 60 bp, Artificial; identical to SEQ ID NO: 326411
  Synthetic oligonucleotide

SEQ ID NO: 547032 - DNA, 56 bp, Artificial; identical to SEQ ID NO: 326412
  Synthetic oligonucleotide

SEQ ID NO: 547033 - DNA, 60 bp, Artificial; identical to SEQ ID NO: 9787
  Synthetic oligonucleotide

SEQ ID NO: 547034 - DNA, 60 bp, Artificial; identical to SEQ ID NO: 326414
  Synthetic oligonucleotide

SEQ ID NO: 547035 - DNA, 60 bp, Artificial; identical to SEQ ID NO: 326416
  Synthetic oligonucleotide

SEQ ID NO: 547036 - DNA, 55 bp, Artificial; identical to SEQ ID NO: 326417
  Synthetic oligonucleotide

SEQ ID NO: 547037 - DNA, 55 bp, Artificial; identical to SEQ ID NO: 326418
  Synthetic oligonucleotide

SEQ ID NO: 547038 - DNA, 57 bp, Artificial; identical to SEQ ID NO: 326419
  Synthetic oligonucleotide

SEQ ID NO: 547039 - DNA, 60 bp, Artificial; identical to SEQ ID NO: 326420
  Synthetic oligonucleotide

SEQ ID NO: 547040 - DNA, 58 bp, Artificial; identical to SEQ ID NO: 326423
  Synthetic oligonucleotide

SEQ ID NO: 547041 - DNA, 56 bp, Artificial; identical to SEQ ID NO: 16648
  Synthetic oligonucleotide

SEQ ID NO: 547042 - DNA, 60 bp, Artificial; identical to SEQ ID NO: 326428
  Synthetic oligonucleotide

SEQ ID NO: 547043 - DNA, 60 bp, Artificial; identical to SEQ ID NO: 326430
  Synthetic oligonucleotide

SEQ ID NO: 547044 - DNA, 58 bp, Artificial; identical to SEQ ID NO: 326431
  Synthetic oligonucleotide

SEQ ID NO: 547045 - DNA, 55 bp, Artificial; identical to SEQ ID NO: 326435
  Synthetic oligonucleotide

SEQ ID NO: 547046 - DNA, 50 bp, Artificial; identical to SEQ ID NO: 326439
  Synthetic oligonucleotide

SEQ ID NO: 547047 - DNA, 57 bp, Artificial; identical to SEQ ID NO: 326440
  Synthetic oligonucleotide

SEQ ID NO: 547048 - DNA, 60 bp, Artificial; identical to SEQ ID NO: 326441
  Synthetic oligonucleotide

SEQ ID NO: 547049 - DNA, 53 bp, Artificial; identical to SEQ ID NO: 326443
  Synthetic oligonucleotide

SEQ ID NO: 547050 - DNA, 59 bp, Artificial; identical to SEQ ID NO: 326444
  Synthetic oligonucleotide

SEQ ID NO: 547051 - DNA, 57 bp, Artificial; identical to SEQ ID NO: 326446
  Synthetic oligonucleotide

SEQ ID NO: 547052 - DNA, 60 bp, Artificial; identical to SEQ ID NO: 326447
  Synthetic oligonucleotide

SEQ ID NO: 547053 - DNA, 60 bp, Artificial; identical to SEQ ID NO: 326449
  Synthetic oligonucleotide

SEQ ID NO: 547054 - DNA, 50 bp, Artificial; identical to SEQ ID NO: 326450
  Synthetic oligonucleotide

SEQ ID NO: 547055 - DNA, 59 bp, Artificial; identical to SEQ ID NO: 326453
  Synthetic oligonucleotide

SEQ ID NO: 547056 - DNA, 60 bp, Artificial; identical to SEQ ID NO: 326455
  Synthetic oligonucleotide

SEQ ID NO: 547057 - DNA, 57 bp, Artificial; identical to SEQ ID NO: 326457
  Synthetic oligonucleotide

SEQ ID NO: 547058 - DNA, 55 bp, Artificial; identical to SEQ ID NO: 326459
  Synthetic oligonucleotide

SEQ ID NO: 547059 - DNA, 55 bp, Artificial; identical to SEQ ID NO: 326463
  Synthetic oligonucleotide

SEQ ID NO: 547060 - DNA, 56 bp, Artificial; identical to SEQ ID NO: 326464
  Synthetic oligonucleotide

SEQ ID NO: 547061 - DNA, 55 bp, Artificial; identical to SEQ ID NO: 326466
  Synthetic oligonucleotide

SEQ ID NO: 547062 - DNA, 54 bp, Artificial; identical to SEQ ID NO: 326468
  Synthetic oligonucleotide

SEQ ID NO: 547063 - DNA, 50 bp, Artificial; identical to SEQ ID NO: 326469
  Synthetic oligonucleotide

SEQ ID NO: 547064 - DNA, 60 bp, Artificial; identical to SEQ ID NO: 326471
  Synthetic oligonucleotide

SEQ ID NO: 547065 - DNA, 53 bp, Artificial; identical to SEQ ID NO: 326472
  Synthetic oligonucleotide

SEQ ID NO: 547066 - DNA, 55 bp, Artificial; identical to SEQ ID NO: 326473
  Synthetic oligonucleotide

SEQ ID NO: 547067 - DNA, 58 bp, Artificial; identical to SEQ ID NO: 11535
  Synthetic oligonucleotide

SEQ ID NO: 547068 - DNA, 58 bp, Artificial; identical to SEQ ID NO: 13104
  Synthetic oligonucleotide

SEQ ID NO: 547069 - DNA, 58 bp, Artificial; identical to SEQ ID NO: 326476
  Synthetic oligonucleotide

SEQ ID NO: 547070 - DNA, 60 bp, Artificial; identical to SEQ ID NO: 326478
  Synthetic oligonucleotide

SEQ ID NO: 547071 - DNA, 51 bp, Artificial; identical to SEQ ID NO: 326482
  Synthetic oligonucleotide

SEQ ID NO: 547072 - DNA, 60 bp, Artificial; identical to SEQ ID NO: 326483
  Synthetic oligonucleotide

SEQ ID NO: 547073 - DNA, 57 bp, Artificial; identical to SEQ ID NO: 326484
  Synthetic oligonucleotide

SEQ ID NO: 547074 - DNA, 54 bp, Artificial; identical to SEQ ID NO: 326492
  Synthetic oligonucleotide

SEQ ID NO: 547075 - DNA, 55 bp, Artificial; identical to SEQ ID NO: 326495
  Synthetic oligonucleotide

SEQ ID NO: 547076 - DNA, 60 bp, Artificial; identical to SEQ ID NO: 326498
  Synthetic oligonucleotide

SEQ ID NO: 547077 - DNA, 60 bp, Artificial; identical to SEQ ID NO: 326499
  Synthetic oligonucleotide

SEQ ID NO: 547078 - DNA, 58 bp, Artificial; identical to SEQ ID NO: 326500
  Synthetic oligonucleotide

SEQ ID NO: 547079 - DNA, 55 bp, Artificial; identical to SEQ ID NO: 326503
  Synthetic oligonucleotide

SEQ ID NO: 547080 - DNA, 60 bp, Artificial; identical to SEQ ID NO: 326504
  Synthetic oligonucleotide

SEQ ID NO: 547081 - DNA, 57 bp, Artificial; identical to SEQ ID NO: 326505
  Synthetic oligonucleotide

SEQ ID NO: 547082 - DNA, 59 bp, Artificial; identical to SEQ ID NO: 326506
  Synthetic oligonucleotide

SEQ ID NO: 547083 - DNA, 60 bp, Artificial; identical to SEQ ID NO: 9642
  Synthetic oligonucleotide

SEQ ID NO: 547084 - DNA, 60 bp, Artificial; identical to SEQ ID NO: 326507
  Synthetic oligonucleotide

SEQ ID NO: 547085 - DNA, 51 bp, Artificial; identical to SEQ ID NO: 326512
  Synthetic oligonucleotide

SEQ ID NO: 547086 - DNA, 58 bp, Artificial; identical to SEQ ID NO: 326513
  Synthetic oligonucleotide

SEQ ID NO: 547087 - DNA, 53 bp, Artificial; identical to SEQ ID NO: 326514
  Synthetic oligonucleotide

SEQ ID NO: 547088 - DNA, 60 bp, Artificial; identical to SEQ ID NO: 326515
  Synthetic oligonucleotide

SEQ ID NO: 547089 - DNA, 56 bp, Artificial; identical to SEQ ID NO: 326516
  Synthetic oligonucleotide

SEQ ID NO: 547090 - DNA, 53 bp, Artificial; identical to SEQ ID NO: 326517
  Synthetic oligonucleotide

SEQ ID NO: 547091 - DNA, 60 bp, Artificial; identical to SEQ ID NO: 326519
  Synthetic oligonucleotide

SEQ ID NO: 547092 - DNA, 55 bp, Artificial; identical to SEQ ID NO: 326522
  Synthetic oligonucleotide

SEQ ID NO: 547093 - DNA, 60 bp, Artificial; identical to SEQ ID NO: 326523
  Synthetic oligonucleotide

SEQ ID NO: 547094 - DNA, 52 bp, Artificial; identical to SEQ ID NO: 326528
  Synthetic oligonucleotide

SEQ ID NO: 547095 - DNA, 60 bp, Artificial; identical to SEQ ID NO: 326529
  Synthetic oligonucleotide

SEQ ID NO: 547096 - DNA, 57 bp, Artificial; identical to SEQ ID NO: 17779
  Synthetic oligonucleotide

SEQ ID NO: 547097 - DNA, 55 bp, Artificial; identical to SEQ ID NO: 326531
  Synthetic oligonucleotide

SEQ ID NO: 547098 - DNA, 59 bp, Artificial; identical to SEQ ID NO: 326532
  Synthetic oligonucleotide

SEQ ID NO: 547099 - DNA, 60 bp, Artificial; identical to SEQ ID NO: 6261
  Synthetic oligonucleotide

SEQ ID NO: 547100 - DNA, 60 bp, Artificial; identical to SEQ ID NO: 326534
  Synthetic oligonucleotide

SEQ ID NO: 547101 - DNA, 59 bp, Artificial; identical to SEQ ID NO: 326536
  Synthetic oligonucleotide

SEQ ID NO: 547102 - DNA, 60 bp, Artificial; identical to SEQ ID NO: 326537
  Synthetic oligonucleotide

SEQ ID NO: 547103 - DNA, 60 bp, Artificial; identical to SEQ ID NO: 326542
  Synthetic oligonucleotide

SEQ ID NO: 547104 - DNA, 52 bp, Artificial; identical to SEQ ID NO: 326543
  Synthetic oligonucleotide

SEQ ID NO: 547105 - DNA, 60 bp, Artificial; identical to SEQ ID NO: 326544
  Synthetic oligonucleotide

SEQ ID NO: 547106 - DNA, 60 bp, Artificial; identical to SEQ ID NO: 326546
  Synthetic oligonucleotide

SEQ ID NO: 547107 - DNA, 51 bp, Artificial; identical to SEQ ID NO: 326549
  Synthetic oligonucleotide

SEQ ID NO: 547108 - DNA, 55 bp, Artificial; identical to SEQ ID NO: 326555
  Synthetic oligonucleotide

SEQ ID NO: 547109 - DNA, 60 bp, Artificial; identical to SEQ ID NO: 326559
  Synthetic oligonucleotide

SEQ ID NO: 547110 - DNA, 60 bp, Artificial; identical to SEQ ID NO: 326560
  Synthetic oligonucleotide

SEQ ID NO: 547111 - DNA, 58 bp, Artificial; identical to SEQ ID NO: 326561
  Synthetic oligonucleotide

SEQ ID NO: 547112 - DNA, 57 bp, Artificial; identical to SEQ ID NO: 326563
  Synthetic oligonucleotide

SEQ ID NO: 547113 - DNA, 55 bp, Artificial; identical to SEQ ID NO: 326564
  Synthetic oligonucleotide

SEQ ID NO: 547114 - DNA, 59 bp, Artificial; identical to SEQ ID NO: 326565
  Synthetic oligonucleotide

SEQ ID NO: 547115 - DNA, 58 bp, Artificial; identical to SEQ ID NO: 326566
  Synthetic oligonucleotide

SEQ ID NO: 547116 - DNA, 59 bp, Artificial; identical to SEQ ID NO: 326567
  Synthetic oligonucleotide

SEQ ID NO: 547117 - DNA, 57 bp, Artificial; identical to SEQ ID NO: 326570
  Synthetic oligonucleotide

SEQ ID NO: 547118 - DNA, 55 bp, Artificial; identical to SEQ ID NO: 326571
  Synthetic oligonucleotide

SEQ ID NO: 547119 - DNA, 56 bp, Artificial; identical to SEQ ID NO: 326577
  Synthetic oligonucleotide

SEQ ID NO: 547120 - DNA, 54 bp, Artificial; identical to SEQ ID NO: 326578
  Synthetic oligonucleotide

SEQ ID NO: 547121 - DNA, 54 bp, Artificial; identical to SEQ ID NO: 326579
  Synthetic oligonucleotide

SEQ ID NO: 547122 - DNA, 59 bp, Artificial; identical to SEQ ID NO: 326580
  Synthetic oligonucleotide

SEQ ID NO: 547123 - DNA, 59 bp, Artificial; identical to SEQ ID NO: 326581
  Synthetic oligonucleotide

SEQ ID NO: 547124 - DNA, 60 bp, Artificial; identical to SEQ ID NO: 326584
  Synthetic oligonucleotide

SEQ ID NO: 547125 - DNA, 54 bp, Artificial; identical to SEQ ID NO: 326586
  Synthetic oligonucleotide

SEQ ID NO: 547126 - DNA, 58 bp, Artificial; identical to SEQ ID NO: 326588
  Synthetic oligonucleotide

SEQ ID NO: 547127 - DNA, 53 bp, Artificial; identical to SEQ ID NO: 326590
  Synthetic oligonucleotide

SEQ ID NO: 547128 - DNA, 56 bp, Artificial; identical to SEQ ID NO: 326594
  Synthetic oligonucleotide

SEQ ID NO: 547129 - DNA, 56 bp, Artificial; identical to SEQ ID NO: 326596
  Synthetic oligonucleotide

SEQ ID NO: 547130 - DNA, 56 bp, Artificial; identical to SEQ ID NO: 326597
  Synthetic oligonucleotide

SEQ ID NO: 547131 - DNA, 60 bp, Artificial; identical to SEQ ID NO: 326598
  Synthetic oligonucleotide

SEQ ID NO: 547132 - DNA, 56 bp, Artificial; identical to SEQ ID NO: 326599
  Synthetic oligonucleotide

SEQ ID NO: 547133 - DNA, 55 bp, Artificial; identical to SEQ ID NO: 326602
  Synthetic oligonucleotide

SEQ ID NO: 547134 - DNA, 57 bp, Artificial; identical to SEQ ID NO: 326604
  Synthetic oligonucleotide

SEQ ID NO: 547135 - DNA, 57 bp, Artificial; identical to SEQ ID NO: 326605
  Synthetic oligonucleotide

SEQ ID NO: 547136 - DNA, 51 bp, Artificial; identical to SEQ ID NO: 326606
  Synthetic oligonucleotide

SEQ ID NO: 547137 - DNA, 60 bp, Artificial; identical to SEQ ID NO: 326607
  Synthetic oligonucleotide

SEQ ID NO: 547138 - DNA, 58 bp, Artificial; identical to SEQ ID NO: 326609
  Synthetic oligonucleotide

SEQ ID NO: 547139 - DNA, 58 bp, Artificial; identical to SEQ ID NO: 15465
  Synthetic oligonucleotide

SEQ ID NO: 547140 - DNA, 57 bp, Artificial; identical to SEQ ID NO: 326613
  Synthetic oligonucleotide

SEQ ID NO: 547141 - DNA, 56 bp, Artificial; identical to SEQ ID NO: 19599
  Synthetic oligonucleotide

SEQ ID NO: 547142 - DNA, 55 bp, Artificial; identical to SEQ ID NO: 326619
  Synthetic oligonucleotide

SEQ ID NO: 547143 - DNA, 59 bp, Artificial; identical to SEQ ID NO: 326620
  Synthetic oligonucleotide

SEQ ID NO: 547144 - DNA, 60 bp, Artificial; identical to SEQ ID NO: 326623
  Synthetic oligonucleotide

SEQ ID NO: 547145 - DNA, 56 bp, Artificial; identical to SEQ ID NO: 18357
  Synthetic oligonucleotide

SEQ ID NO: 547146 - DNA, 60 bp, Artificial; identical to SEQ ID NO: 326624
  Synthetic oligonucleotide

SEQ ID NO: 547147 - DNA, 59 bp, Artificial; identical to SEQ ID NO: 326625
  Synthetic oligonucleotide

SEQ ID NO: 547148 - DNA, 51 bp, Artificial; identical to SEQ ID NO: 326629
  Synthetic oligonucleotide

SEQ ID NO: 547149 - DNA, 55 bp, Artificial; identical to SEQ ID NO: 326632
  Synthetic oligonucleotide

SEQ ID NO: 547150 - DNA, 60 bp, Artificial; identical to SEQ ID NO: 326635
  Synthetic oligonucleotide

SEQ ID NO: 547151 - DNA, 60 bp, Artificial; identical to SEQ ID NO: 326636
  Synthetic oligonucleotide

SEQ ID NO: 547152 - DNA, 60 bp, Artificial; identical to SEQ ID NO: 326637
  Synthetic oligonucleotide

SEQ ID NO: 547153 - DNA, 54 bp, Artificial; identical to SEQ ID NO: 326639
  Synthetic oligonucleotide

SEQ ID NO: 547154 - DNA, 54 bp, Artificial; identical to SEQ ID NO: 326640
  Synthetic oligonucleotide

SEQ ID NO: 547155 - DNA, 60 bp, Artificial; identical to SEQ ID NO: 326642
  Synthetic oligonucleotide

SEQ ID NO: 547156 - DNA, 55 bp, Artificial; identical to SEQ ID NO: 326643
  Synthetic oligonucleotide

SEQ ID NO: 547157 - DNA, 54 bp, Artificial; identical to SEQ ID NO: 326645
  Synthetic oligonucleotide

SEQ ID NO: 547158 - DNA, 60 bp, Artificial; identical to SEQ ID NO: 326648
  Synthetic oligonucleotide

SEQ ID NO: 547159 - DNA, 57 bp, Artificial; identical to SEQ ID NO: 326649
  Synthetic oligonucleotide

SEQ ID NO: 547160 - DNA, 56 bp, Artificial; identical to SEQ ID NO: 326654
  Synthetic oligonucleotide

SEQ ID NO: 547161 - DNA, 60 bp, Artificial; identical to SEQ ID NO: 326655
  Synthetic oligonucleotide

SEQ ID NO: 547162 - DNA, 60 bp, Artificial; identical to SEQ ID NO: 6336
  Synthetic oligonucleotide

SEQ ID NO: 547163 - DNA, 60 bp, Artificial; identical to SEQ ID NO: 326657
  Synthetic oligonucleotide

SEQ ID NO: 547164 - DNA, 60 bp, Artificial; identical to SEQ ID NO: 326659
  Synthetic oligonucleotide

SEQ ID NO: 547165 - DNA, 60 bp, Artificial; identical to SEQ ID NO: 326662
  Synthetic oligonucleotide

SEQ ID NO: 547166 - DNA, 55 bp, Artificial; identical to SEQ ID NO: 326665
  Synthetic oligonucleotide

SEQ ID NO: 547167 - DNA, 59 bp, Artificial; identical to SEQ ID NO: 326666
  Synthetic oligonucleotide

SEQ ID NO: 547168 - DNA, 55 bp, Artificial; identical to SEQ ID NO: 326667
  Synthetic oligonucleotide

SEQ ID NO: 547169 - DNA, 51 bp, Artificial; identical to SEQ ID NO: 326670
  Synthetic oligonucleotide

SEQ ID NO: 547170 - DNA, 60 bp, Artificial; identical to SEQ ID NO: 326671
  Synthetic oligonucleotide

SEQ ID NO: 547171 - DNA, 52 bp, Artificial; identical to SEQ ID NO: 326672
  Synthetic oligonucleotide

SEQ ID NO: 547172 - DNA, 60 bp, Artificial; identical to SEQ ID NO: 326677
  Synthetic oligonucleotide

SEQ ID NO: 547173 - DNA, 59 bp, Artificial; identical to SEQ ID NO: 326680
  Synthetic oligonucleotide

SEQ ID NO: 547174 - DNA, 52 bp, Artificial; identical to SEQ ID NO: 326683
  Synthetic oligonucleotide

SEQ ID NO: 547175 - DNA, 60 bp, Artificial; identical to SEQ ID NO: 326685
  Synthetic oligonucleotide

SEQ ID NO: 547176 - DNA, 53 bp, Artificial; identical to SEQ ID NO: 326687
  Synthetic oligonucleotide

SEQ ID NO: 547177 - DNA, 60 bp, Artificial; identical to SEQ ID NO: 326688
  Synthetic oligonucleotide

SEQ ID NO: 547178 - DNA, 60 bp, Artificial; identical to SEQ ID NO: 326689
  Synthetic oligonucleotide

SEQ ID NO: 547179 - DNA, 55 bp, Artificial; identical to SEQ ID NO: 326690
  Synthetic oligonucleotide

SEQ ID NO: 547180 - DNA, 60 bp, Artificial; identical to SEQ ID NO: 326691
  Synthetic oligonucleotide

SEQ ID NO: 547181 - DNA, 60 bp, Artificial; identical to SEQ ID NO: 326693
  Synthetic oligonucleotide

SEQ ID NO: 547182 - DNA, 58 bp, Artificial; identical to SEQ ID NO: 326695
  Synthetic oligonucleotide

SEQ ID NO: 547183 - DNA, 57 bp, Artificial; identical to SEQ ID NO: 326698
  Synthetic oligonucleotide

SEQ ID NO: 547184 - DNA, 55 bp, Artificial; identical to SEQ ID NO: 7489
  Synthetic oligonucleotide

SEQ ID NO: 547185 - DNA, 51 bp, Artificial; identical to SEQ ID NO: 326700
  Synthetic oligonucleotide

SEQ ID NO: 547186 - DNA, 60 bp, Artificial; identical to SEQ ID NO: 326701
  Synthetic oligonucleotide

SEQ ID NO: 547187 - DNA, 60 bp, Artificial; identical to SEQ ID NO: 326707
  Synthetic oligonucleotide

SEQ ID NO: 547188 - DNA, 60 bp, Artificial; identical to SEQ ID NO: 326709
  Synthetic oligonucleotide

SEQ ID NO: 547189 - DNA, 60 bp, Artificial; identical to SEQ ID NO: 326710
  Synthetic oligonucleotide

SEQ ID NO: 547190 - DNA, 50 bp, Artificial; identical to SEQ ID NO: 326713
  Synthetic oligonucleotide

SEQ ID NO: 547191 - DNA, 60 bp, Artificial; identical to SEQ ID NO: 326714
  Synthetic oligonucleotide

SEQ ID NO: 547192 - DNA, 60 bp, Artificial; identical to SEQ ID NO: 326717
  Synthetic oligonucleotide

SEQ ID NO: 547193 - DNA, 60 bp, Artificial; identical to SEQ ID NO: 326718
  Synthetic oligonucleotide

SEQ ID NO: 547194 - DNA, 60 bp, Artificial; identical to SEQ ID NO: 326719
  Synthetic oligonucleotide

SEQ ID NO: 547195 - DNA, 58 bp, Artificial; identical to SEQ ID NO: 326720
  Synthetic oligonucleotide

SEQ ID NO: 547196 - DNA, 55 bp, Artificial; identical to SEQ ID NO: 326721
  Synthetic oligonucleotide

SEQ ID NO: 547197 - DNA, 52 bp, Artificial; identical to SEQ ID NO: 13145
  Synthetic oligonucleotide

SEQ ID NO: 547198 - DNA, 60 bp, Artificial; identical to SEQ ID NO: 326726
  Synthetic oligonucleotide

SEQ ID NO: 547199 - DNA, 60 bp, Artificial; identical to SEQ ID NO: 326727
  Synthetic oligonucleotide

SEQ ID NO: 547200 - DNA, 60 bp, Artificial; identical to SEQ ID NO: 326728
  Synthetic oligonucleotide

SEQ ID NO: 547201 - DNA, 60 bp, Artificial; identical to SEQ ID NO: 326729
  Synthetic oligonucleotide

SEQ ID NO: 547202 - DNA, 53 bp, Artificial; identical to SEQ ID NO: 6173
  Synthetic oligonucleotide

SEQ ID NO: 547203 - DNA, 55 bp, Artificial; identical to SEQ ID NO: 326733
  Synthetic oligonucleotide

SEQ ID NO: 547204 - DNA, 60 bp, Artificial; identical to SEQ ID NO: 326736
  Synthetic oligonucleotide

SEQ ID NO: 547205 - DNA, 53 bp, Artificial; identical to SEQ ID NO: 326737
  Synthetic oligonucleotide

SEQ ID NO: 547206 - DNA, 60 bp, Artificial; identical to SEQ ID NO: 326739
  Synthetic oligonucleotide

SEQ ID NO: 547207 - DNA, 57 bp, Artificial; identical to SEQ ID NO: 326742
  Synthetic oligonucleotide

SEQ ID NO: 547208 - DNA, 55 bp, Artificial; identical to SEQ ID NO: 326745
  Synthetic oligonucleotide

SEQ ID NO: 547209 - DNA, 59 bp, Artificial; identical to SEQ ID NO: 326751
  Synthetic oligonucleotide

SEQ ID NO: 547210 - DNA, 60 bp, Artificial; identical to SEQ ID NO: 326755
  Synthetic oligonucleotide

SEQ ID NO: 547211 - DNA, 50 bp, Artificial; identical to SEQ ID NO: 326757
  Synthetic oligonucleotide

SEQ ID NO: 547212 - DNA, 58 bp, Artificial; identical to SEQ ID NO: 326759
  Synthetic oligonucleotide

SEQ ID NO: 547213 - DNA, 55 bp, Artificial; identical to SEQ ID NO: 326763
  Synthetic oligonucleotide

SEQ ID NO: 547214 - DNA, 57 bp, Artificial; identical to SEQ ID NO: 326768
  Synthetic oligonucleotide

SEQ ID NO: 547215 - DNA, 51 bp, Artificial; identical to SEQ ID NO: 326769
  Synthetic oligonucleotide

SEQ ID NO: 547216 - DNA, 60 bp, Artificial; identical to SEQ ID NO: 326775
  Synthetic oligonucleotide

SEQ ID NO: 547217 - DNA, 60 bp, Artificial; identical to SEQ ID NO: 326776
  Synthetic oligonucleotide

SEQ ID NO: 547218 - DNA, 60 bp, Artificial; identical to SEQ ID NO: 326777
  Synthetic oligonucleotide

SEQ ID NO: 547219 - DNA, 57 bp, Artificial; identical to SEQ ID NO: 326779
  Synthetic oligonucleotide

SEQ ID NO: 547220 - DNA, 55 bp, Artificial; identical to SEQ ID NO: 326785
  Synthetic oligonucleotide

SEQ ID NO: 547221 - DNA, 59 bp, Artificial; identical to SEQ ID NO: 19236
  Synthetic oligonucleotide

SEQ ID NO: 547222 - DNA, 54 bp, Artificial; identical to SEQ ID NO: 326787
  Synthetic oligonucleotide

SEQ ID NO: 547223 - DNA, 55 bp, Artificial; identical to SEQ ID NO: 326788
  Synthetic oligonucleotide

SEQ ID NO: 547224 - DNA, 54 bp, Artificial; identical to SEQ ID NO: 326789
  Synthetic oligonucleotide

SEQ ID NO: 547225 - DNA, 60 bp, Artificial; identical to SEQ ID NO: 326790
  Synthetic oligonucleotide

SEQ ID NO: 547226 - DNA, 60 bp, Artificial; identical to SEQ ID NO: 326793
  Synthetic oligonucleotide

SEQ ID NO: 547227 - DNA, 60 bp, Artificial; identical to SEQ ID NO: 326794
  Synthetic oligonucleotide

SEQ ID NO: 547228 - DNA, 60 bp, Artificial; identical to SEQ ID NO: 326796
  Synthetic oligonucleotide

SEQ ID NO: 547229 - DNA, 59 bp, Artificial; identical to SEQ ID NO: 326798
  Synthetic oligonucleotide

SEQ ID NO: 547230 - DNA, 53 bp, Artificial; identical to SEQ ID NO: 326800
  Synthetic oligonucleotide

SEQ ID NO: 547231 - DNA, 56 bp, Artificial; identical to SEQ ID NO: 326801
  Synthetic oligonucleotide

SEQ ID NO: 547232 - DNA, 60 bp, Artificial; identical to SEQ ID NO: 326807
  Synthetic oligonucleotide

SEQ ID NO: 547233 - DNA, 59 bp, Artificial; identical to SEQ ID NO: 326808
  Synthetic oligonucleotide

SEQ ID NO: 547234 - DNA, 53 bp, Artificial; identical to SEQ ID NO: 326809
  Synthetic oligonucleotide

SEQ ID NO: 547235 - DNA, 52 bp, Artificial; identical to SEQ ID NO: 326811
  Synthetic oligonucleotide

SEQ ID NO: 547236 - DNA, 56 bp, Artificial; identical to SEQ ID NO: 19045
  Synthetic oligonucleotide

SEQ ID NO: 547237 - DNA, 60 bp, Artificial; identical to SEQ ID NO: 326814
  Synthetic oligonucleotide

SEQ ID NO: 547238 - DNA, 60 bp, Artificial; identical to SEQ ID NO: 326815
  Synthetic oligonucleotide

SEQ ID NO: 547239 - DNA, 50 bp, Artificial; identical to SEQ ID NO: 326816
  Synthetic oligonucleotide

SEQ ID NO: 547240 - DNA, 51 bp, Artificial; identical to SEQ ID NO: 326817
  Synthetic oligonucleotide

SEQ ID NO: 547241 - DNA, 58 bp, Artificial; identical to SEQ ID NO: 12332
  Synthetic oligonucleotide

SEQ ID NO: 547242 - DNA, 52 bp, Artificial; identical to SEQ ID NO: 326820
  Synthetic oligonucleotide

SEQ ID NO: 547243 - DNA, 59 bp, Artificial; identical to SEQ ID NO: 326824
  Synthetic oligonucleotide

SEQ ID NO: 547244 - DNA, 57 bp, Artificial; identical to SEQ ID NO: 326825
  Synthetic oligonucleotide

SEQ ID NO: 547245 - DNA, 54 bp, Artificial; identical to SEQ ID NO: 326828
  Synthetic oligonucleotide

SEQ ID NO: 547246 - DNA, 52 bp, Artificial; identical to SEQ ID NO: 326829
  Synthetic oligonucleotide

SEQ ID NO: 547247 - DNA, 60 bp, Artificial; identical to SEQ ID NO: 326830
  Synthetic oligonucleotide

SEQ ID NO: 547248 - DNA, 58 bp, Artificial; identical to SEQ ID NO: 326833
  Synthetic oligonucleotide

SEQ ID NO: 547249 - DNA, 54 bp, Artificial; identical to SEQ ID NO: 326838
  Synthetic oligonucleotide

SEQ ID NO: 547250 - DNA, 60 bp, Artificial; identical to SEQ ID NO: 326842
  Synthetic oligonucleotide

SEQ ID NO: 547251 - DNA, 55 bp, Artificial; identical to SEQ ID NO: 8139
  Synthetic oligonucleotide

SEQ ID NO: 547252 - DNA, 53 bp, Artificial; identical to SEQ ID NO: 326845
  Synthetic oligonucleotide

SEQ ID NO: 547253 - DNA, 59 bp, Artificial; identical to SEQ ID NO: 326848
  Synthetic oligonucleotide

SEQ ID NO: 547254 - DNA, 58 bp, Artificial; identical to SEQ ID NO: 326850
  Synthetic oligonucleotide

SEQ ID NO: 547255 - DNA, 55 bp, Artificial; identical to SEQ ID NO: 326852
  Synthetic oligonucleotide

SEQ ID NO: 547256 - DNA, 54 bp, Artificial; identical to SEQ ID NO: 326853
  Synthetic oligonucleotide

SEQ ID NO: 547257 - DNA, 59 bp, Artificial; identical to SEQ ID NO: 326854
  Synthetic oligonucleotide

SEQ ID NO: 547258 - DNA, 51 bp, Artificial; identical to SEQ ID NO: 326855
  Synthetic oligonucleotide

SEQ ID NO: 547259 - DNA, 58 bp, Artificial; identical to SEQ ID NO: 326857
  Synthetic oligonucleotide

SEQ ID NO: 547260 - DNA, 54 bp, Artificial; identical to SEQ ID NO: 326860
  Synthetic oligonucleotide

SEQ ID NO: 547261 - DNA, 51 bp, Artificial; identical to SEQ ID NO: 326861
  Synthetic oligonucleotide

SEQ ID NO: 547262 - DNA, 51 bp, Artificial; identical to SEQ ID NO: 326863
  Synthetic oligonucleotide

SEQ ID NO: 547263 - DNA, 58 bp, Artificial; identical to SEQ ID NO: 326866
  Synthetic oligonucleotide

SEQ ID NO: 547264 - DNA, 55 bp, Artificial; identical to SEQ ID NO: 326868
  Synthetic oligonucleotide

SEQ ID NO: 547265 - DNA, 58 bp, Artificial; identical to SEQ ID NO: 326873
  Synthetic oligonucleotide

SEQ ID NO: 547266 - DNA, 60 bp, Artificial; identical to SEQ ID NO: 13884
  Synthetic oligonucleotide

SEQ ID NO: 547267 - DNA, 57 bp, Artificial; identical to SEQ ID NO: 326876
  Synthetic oligonucleotide

SEQ ID NO: 547268 - DNA, 57 bp, Artificial; identical to SEQ ID NO: 326877
  Synthetic oligonucleotide

SEQ ID NO: 547269 - DNA, 55 bp, Artificial; identical to SEQ ID NO: 326882
  Synthetic oligonucleotide

SEQ ID NO: 547270 - DNA, 51 bp, Artificial; identical to SEQ ID NO: 326887
  Synthetic oligonucleotide

SEQ ID NO: 547271 - DNA, 59 bp, Artificial; identical to SEQ ID NO: 326888
  Synthetic oligonucleotide

SEQ ID NO: 547272 - DNA, 55 bp, Artificial; identical to SEQ ID NO: 326895
  Synthetic oligonucleotide

SEQ ID NO: 547273 - DNA, 60 bp, Artificial; identical to SEQ ID NO: 11089
  Synthetic oligonucleotide

SEQ ID NO: 547274 - DNA, 60 bp, Artificial; identical to SEQ ID NO: 326909
  Synthetic oligonucleotide

SEQ ID NO: 547275 - DNA, 59 bp, Artificial; identical to SEQ ID NO: 326912
  Synthetic oligonucleotide

SEQ ID NO: 547276 - DNA, 55 bp, Artificial; identical to SEQ ID NO: 326913
  Synthetic oligonucleotide

SEQ ID NO: 547277 - DNA, 60 bp, Artificial; identical to SEQ ID NO: 326914
  Synthetic oligonucleotide

SEQ ID NO: 547278 - DNA, 51 bp, Artificial; identical to SEQ ID NO: 326917
  Synthetic oligonucleotide

SEQ ID NO: 547279 - DNA, 51 bp, Artificial; identical to SEQ ID NO: 326922
  Synthetic oligonucleotide

SEQ ID NO: 547280 - DNA, 53 bp, Artificial; identical to SEQ ID NO: 326923
  Synthetic oligonucleotide

SEQ ID NO: 547281 - DNA, 55 bp, Artificial; identical to SEQ ID NO: 326925
  Synthetic oligonucleotide

SEQ ID NO: 547282 - DNA, 51 bp, Artificial; identical to SEQ ID NO: 326926
  Synthetic oligonucleotide

SEQ ID NO: 547283 - DNA, 55 bp, Artificial; identical to SEQ ID NO: 326934
  Synthetic oligonucleotide

SEQ ID NO: 547284 - DNA, 60 bp, Artificial; identical to SEQ ID NO: 326939
  Synthetic oligonucleotide

SEQ ID NO: 547285 - DNA, 57 bp, Artificial; identical to SEQ ID NO: 326940
  Synthetic oligonucleotide

SEQ ID NO: 547286 - DNA, 57 bp, Artificial; identical to SEQ ID NO: 326945
  Synthetic oligonucleotide

SEQ ID NO: 547287 - DNA, 60 bp, Artificial; identical to SEQ ID NO: 326946
  Synthetic oligonucleotide

SEQ ID NO: 547288 - DNA, 60 bp, Artificial; identical to SEQ ID NO: 326948
  Synthetic oligonucleotide

SEQ ID NO: 547289 - DNA, 55 bp, Artificial; identical to SEQ ID NO: 326950
  Synthetic oligonucleotide

SEQ ID NO: 547290 - DNA, 54 bp, Artificial; identical to SEQ ID NO: 326952
  Synthetic oligonucleotide

SEQ ID NO: 547291 - DNA, 55 bp, Artificial; identical to SEQ ID NO: 326953
  Synthetic oligonucleotide

SEQ ID NO: 547292 - DNA, 57 bp, Artificial; identical to SEQ ID NO: 326960
  Synthetic oligonucleotide

SEQ ID NO: 547293 - DNA, 55 bp, Artificial; identical to SEQ ID NO: 326961
  Synthetic oligonucleotide

SEQ ID NO: 547294 - DNA, 58 bp, Artificial; identical to SEQ ID NO: 326963
  Synthetic oligonucleotide

SEQ ID NO: 547295 - DNA, 53 bp, Artificial; identical to SEQ ID NO: 326966
  Synthetic oligonucleotide

SEQ ID NO: 547296 - DNA, 54 bp, Artificial; identical to SEQ ID NO: 326967
  Synthetic oligonucleotide

SEQ ID NO: 547297 - DNA, 60 bp, Artificial; identical to SEQ ID NO: 326968
  Synthetic oligonucleotide

SEQ ID NO: 547298 - DNA, 60 bp, Artificial; identical to SEQ ID NO: 326970
  Synthetic oligonucleotide

SEQ ID NO: 547299 - DNA, 59 bp, Artificial; identical to SEQ ID NO: 326974
  Synthetic oligonucleotide

SEQ ID NO: 547300 - DNA, 60 bp, Artificial; identical to SEQ ID NO: 326982
  Synthetic oligonucleotide

SEQ ID NO: 547301 - DNA, 59 bp, Artificial; identical to SEQ ID NO: 326986
  Synthetic oligonucleotide

SEQ ID NO: 547302 - DNA, 55 bp, Artificial; identical to SEQ ID NO: 326987
  Synthetic oligonucleotide

SEQ ID NO: 547303 - DNA, 54 bp, Artificial; identical to SEQ ID NO: 326991
  Synthetic oligonucleotide

SEQ ID NO: 547304 - DNA, 55 bp, Artificial; identical to SEQ ID NO: 326992
  Synthetic oligonucleotide

SEQ ID NO: 547305 - DNA, 53 bp, Artificial; identical to SEQ ID NO: 326993
  Synthetic oligonucleotide

SEQ ID NO: 547306 - DNA, 55 bp, Artificial; identical to SEQ ID NO: 326994
  Synthetic oligonucleotide

SEQ ID NO: 547307 - DNA, 60 bp, Artificial; identical to SEQ ID NO: 326995
  Synthetic oligonucleotide

SEQ ID NO: 547308 - DNA, 60 bp, Artificial; identical to SEQ ID NO: 326998
  Synthetic oligonucleotide

SEQ ID NO: 547309 - DNA, 55 bp, Artificial; identical to SEQ ID NO: 10911
  Synthetic oligonucleotide

SEQ ID NO: 547310 - DNA, 60 bp, Artificial; identical to SEQ ID NO: 6383
  Synthetic oligonucleotide

SEQ ID NO: 547311 - DNA, 59 bp, Artificial; identical to SEQ ID NO: 327007
  Synthetic oligonucleotide

SEQ ID NO: 547312 - DNA, 58 bp, Artificial; identical to SEQ ID NO: 327008
  Synthetic oligonucleotide

SEQ ID NO: 547313 - DNA, 54 bp, Artificial; identical to SEQ ID NO: 6620
  Synthetic oligonucleotide

SEQ ID NO: 547314 - DNA, 60 bp, Artificial; identical to SEQ ID NO: 327010
  Synthetic oligonucleotide

SEQ ID NO: 547315 - DNA, 54 bp, Artificial; identical to SEQ ID NO: 327011
  Synthetic oligonucleotide

SEQ ID NO: 547316 - DNA, 53 bp, Artificial; identical to SEQ ID NO: 327012
  Synthetic oligonucleotide

SEQ ID NO: 547317 - DNA, 60 bp, Artificial; identical to SEQ ID NO: 327014
  Synthetic oligonucleotide

SEQ ID NO: 547318 - DNA, 59 bp, Artificial; identical to SEQ ID NO: 327016
  Synthetic oligonucleotide

SEQ ID NO: 547319 - DNA, 55 bp, Artificial; identical to SEQ ID NO: 327017
  Synthetic oligonucleotide

SEQ ID NO: 547320 - DNA, 52 bp, Artificial; identical to SEQ ID NO: 327018
  Synthetic oligonucleotide

SEQ ID NO: 547321 - DNA, 60 bp, Artificial; identical to SEQ ID NO: 327019
  Synthetic oligonucleotide

SEQ ID NO: 547322 - DNA, 55 bp, Artificial; identical to SEQ ID NO: 327020
  Synthetic oligonucleotide

SEQ ID NO: 547323 - DNA, 59 bp, Artificial; identical to SEQ ID NO: 327023
  Synthetic oligonucleotide

SEQ ID NO: 547324 - DNA, 56 bp, Artificial; identical to SEQ ID NO: 18705
  Synthetic oligonucleotide

SEQ ID NO: 547325 - DNA, 54 bp, Artificial; identical to SEQ ID NO: 327025
  Synthetic oligonucleotide

SEQ ID NO: 547326 - DNA, 60 bp, Artificial; identical to SEQ ID NO: 327031
  Synthetic oligonucleotide

SEQ ID NO: 547327 - DNA, 59 bp, Artificial; identical to SEQ ID NO: 327036
  Synthetic oligonucleotide

SEQ ID NO: 547328 - DNA, 55 bp, Artificial; identical to SEQ ID NO: 327038
  Synthetic oligonucleotide

SEQ ID NO: 547329 - DNA, 58 bp, Artificial; identical to SEQ ID NO: 327042
  Synthetic oligonucleotide

SEQ ID NO: 547330 - DNA, 60 bp, Artificial; identical to SEQ ID NO: 327044
  Synthetic oligonucleotide

SEQ ID NO: 547331 - DNA, 60 bp, Artificial; identical to SEQ ID NO: 327052
  Synthetic oligonucleotide

SEQ ID NO: 547332 - DNA, 58 bp, Artificial; identical to SEQ ID NO: 327055
  Synthetic oligonucleotide

SEQ ID NO: 547333 - DNA, 60 bp, Artificial; identical to SEQ ID NO: 327057
  Synthetic oligonucleotide

SEQ ID NO: 547334 - DNA, 55 bp, Artificial; identical to SEQ ID NO: 327058
  Synthetic oligonucleotide

SEQ ID NO: 547335 - DNA, 60 bp, Artificial; identical to SEQ ID NO: 327059
  Synthetic oligonucleotide

SEQ ID NO: 547336 - DNA, 60 bp, Artificial; identical to SEQ ID NO: 327060
  Synthetic oligonucleotide

SEQ ID NO: 547337 - DNA, 60 bp, Artificial; identical to SEQ ID NO: 327061
  Synthetic oligonucleotide

SEQ ID NO: 547338 - DNA, 55 bp, Artificial; identical to SEQ ID NO: 327062
  Synthetic oligonucleotide

SEQ ID NO: 547339 - DNA, 59 bp, Artificial; identical to SEQ ID NO: 327065
  Synthetic oligonucleotide

SEQ ID NO: 547340 - DNA, 60 bp, Artificial; identical to SEQ ID NO: 327067
  Synthetic oligonucleotide

SEQ ID NO: 547341 - DNA, 50 bp, Artificial; identical to SEQ ID NO: 327069
  Synthetic oligonucleotide

SEQ ID NO: 547342 - DNA, 51 bp, Artificial; identical to SEQ ID NO: 327071
  Synthetic oligonucleotide

SEQ ID NO: 547343 - DNA, 60 bp, Artificial; identical to SEQ ID NO: 327072
  Synthetic oligonucleotide

SEQ ID NO: 547344 - DNA, 60 bp, Artificial; identical to SEQ ID NO: 327074
  Synthetic oligonucleotide

SEQ ID NO: 547345 - DNA, 55 bp, Artificial; identical to SEQ ID NO: 327075
  Synthetic oligonucleotide

SEQ ID NO: 547346 - DNA, 60 bp, Artificial; identical to SEQ ID NO: 327076
  Synthetic oligonucleotide

SEQ ID NO: 547347 - DNA, 55 bp, Artificial; identical to SEQ ID NO: 327078
  Synthetic oligonucleotide

SEQ ID NO: 547348 - DNA, 56 bp, Artificial; identical to SEQ ID NO: 327080
  Synthetic oligonucleotide

SEQ ID NO: 547349 - DNA, 50 bp, Artificial; identical to SEQ ID NO: 327082
  Synthetic oligonucleotide

SEQ ID NO: 547350 - DNA, 60 bp, Artificial; identical to SEQ ID NO: 327083
  Synthetic oligonucleotide

SEQ ID NO: 547351 - DNA, 58 bp, Artificial; identical to SEQ ID NO: 327085
  Synthetic oligonucleotide

SEQ ID NO: 547352 - DNA, 57 bp, Artificial; identical to SEQ ID NO: 327086
  Synthetic oligonucleotide

SEQ ID NO: 547353 - DNA, 51 bp, Artificial; identical to SEQ ID NO: 327087
  Synthetic oligonucleotide

SEQ ID NO: 547354 - DNA, 59 bp, Artificial; identical to SEQ ID NO: 327090
  Synthetic oligonucleotide

SEQ ID NO: 547355 - DNA, 60 bp, Artificial; identical to SEQ ID NO: 327099
  Synthetic oligonucleotide

SEQ ID NO: 547356 - DNA, 59 bp, Artificial; identical to SEQ ID NO: 327101
  Synthetic oligonucleotide

SEQ ID NO: 547357 - DNA, 59 bp, Artificial; identical to SEQ ID NO: 327102
  Synthetic oligonucleotide

SEQ ID NO: 547358 - DNA, 55 bp, Artificial; identical to SEQ ID NO: 327104
  Synthetic oligonucleotide

SEQ ID NO: 547359 - DNA, 50 bp, Artificial; identical to SEQ ID NO: 327108
  Synthetic oligonucleotide

SEQ ID NO: 547360 - DNA, 55 bp, Artificial; identical to SEQ ID NO: 327110
  Synthetic oligonucleotide

SEQ ID NO: 547361 - DNA, 56 bp, Artificial; identical to SEQ ID NO: 327111
  Synthetic oligonucleotide

SEQ ID NO: 547362 - DNA, 60 bp, Artificial; identical to SEQ ID NO: 10773
  Synthetic oligonucleotide

SEQ ID NO: 547363 - DNA, 60 bp, Artificial; identical to SEQ ID NO: 327117
  Synthetic oligonucleotide

SEQ ID NO: 547364 - DNA, 52 bp, Artificial; identical to SEQ ID NO: 327119
  Synthetic oligonucleotide

SEQ ID NO: 547365 - DNA, 57 bp, Artificial; identical to SEQ ID NO: 327120
  Synthetic oligonucleotide

SEQ ID NO: 547366 - DNA, 54 bp, Artificial; identical to SEQ ID NO: 327121
  Synthetic oligonucleotide

SEQ ID NO: 547367 - DNA, 60 bp, Artificial; identical to SEQ ID NO: 327122
  Synthetic oligonucleotide

SEQ ID NO: 547368 - DNA, 56 bp, Artificial; identical to SEQ ID NO: 13621
  Synthetic oligonucleotide

SEQ ID NO: 547369 - DNA, 59 bp, Artificial; identical to SEQ ID NO: 327124
  Synthetic oligonucleotide

SEQ ID NO: 547370 - DNA, 60 bp, Artificial; identical to SEQ ID NO: 327125
  Synthetic oligonucleotide

SEQ ID NO: 547371 - DNA, 60 bp, Artificial; identical to SEQ ID NO: 327127
  Synthetic oligonucleotide

SEQ ID NO: 547372 - DNA, 55 bp, Artificial; identical to SEQ ID NO: 327128
  Synthetic oligonucleotide

SEQ ID NO: 547373 - DNA, 51 bp, Artificial; identical to SEQ ID NO: 327130
  Synthetic oligonucleotide

SEQ ID NO: 547374 - DNA, 59 bp, Artificial; identical to SEQ ID NO: 327131
  Synthetic oligonucleotide

SEQ ID NO: 547375 - DNA, 56 bp, Artificial; identical to SEQ ID NO: 327132
  Synthetic oligonucleotide

SEQ ID NO: 547376 - DNA, 50 bp, Artificial; identical to SEQ ID NO: 327133
  Synthetic oligonucleotide

SEQ ID NO: 547377 - DNA, 60 bp, Artificial; identical to SEQ ID NO: 327134
  Synthetic oligonucleotide

SEQ ID NO: 547378 - DNA, 60 bp, Artificial; identical to SEQ ID NO: 10635
  Synthetic oligonucleotide

SEQ ID NO: 547379 - DNA, 54 bp, Artificial; identical to SEQ ID NO: 327136
  Synthetic oligonucleotide

SEQ ID NO: 547380 - DNA, 60 bp, Artificial; identical to SEQ ID NO: 327137
  Synthetic oligonucleotide

SEQ ID NO: 547381 - DNA, 55 bp, Artificial; identical to SEQ ID NO: 327138
  Synthetic oligonucleotide

SEQ ID NO: 547382 - DNA, 55 bp, Artificial; identical to SEQ ID NO: 327139
  Synthetic oligonucleotide

SEQ ID NO: 547383 - DNA, 60 bp, Artificial; identical to SEQ ID NO: 327140
  Synthetic oligonucleotide

SEQ ID NO: 547384 - DNA, 56 bp, Artificial; identical to SEQ ID NO: 327142
  Synthetic oligonucleotide

SEQ ID NO: 547385 - DNA, 59 bp, Artificial; identical to SEQ ID NO: 327144
  Synthetic oligonucleotide

SEQ ID NO: 547386 - DNA, 60 bp, Artificial; identical to SEQ ID NO: 327146
  Synthetic oligonucleotide

SEQ ID NO: 547387 - DNA, 60 bp, Artificial; identical to SEQ ID NO: 327147
  Synthetic oligonucleotide

SEQ ID NO: 547388 - DNA, 60 bp, Artificial; identical to SEQ ID NO: 327150
  Synthetic oligonucleotide

SEQ ID NO: 547389 - DNA, 53 bp, Artificial; identical to SEQ ID NO: 327155
  Synthetic oligonucleotide

SEQ ID NO: 547390 - DNA, 60 bp, Artificial; identical to SEQ ID NO: 327156
  Synthetic oligonucleotide

SEQ ID NO: 547391 - DNA, 55 bp, Artificial; identical to SEQ ID NO: 327160
  Synthetic oligonucleotide

SEQ ID NO: 547392 - DNA, 60 bp, Artificial; identical to SEQ ID NO: 327163
  Synthetic oligonucleotide

SEQ ID NO: 547393 - DNA, 59 bp, Artificial; identical to SEQ ID NO: 327164
  Synthetic oligonucleotide

SEQ ID NO: 547394 - DNA, 58 bp, Artificial; identical to SEQ ID NO: 327171
  Synthetic oligonucleotide

SEQ ID NO: 547395 - DNA, 58 bp, Artificial; identical to SEQ ID NO: 327172
  Synthetic oligonucleotide

SEQ ID NO: 547396 - DNA, 60 bp, Artificial; identical to SEQ ID NO: 327174
  Synthetic oligonucleotide

SEQ ID NO: 547397 - DNA, 60 bp, Artificial; identical to SEQ ID NO: 327176
  Synthetic oligonucleotide

SEQ ID NO: 547398 - DNA, 60 bp, Artificial; identical to SEQ ID NO: 327179
  Synthetic oligonucleotide

SEQ ID NO: 547399 - DNA, 52 bp, Artificial; identical to SEQ ID NO: 327181
  Synthetic oligonucleotide

SEQ ID NO: 547400 - DNA, 59 bp, Artificial; identical to SEQ ID NO: 327184
  Synthetic oligonucleotide

SEQ ID NO: 547401 - DNA, 60 bp, Artificial; identical to SEQ ID NO: 327185
  Synthetic oligonucleotide

SEQ ID NO: 547402 - DNA, 57 bp, Artificial; identical to SEQ ID NO: 327186
  Synthetic oligonucleotide

SEQ ID NO: 547403 - DNA, 59 bp, Artificial; identical to SEQ ID NO: 327188
  Synthetic oligonucleotide

SEQ ID NO: 547404 - DNA, 59 bp, Artificial; identical to SEQ ID NO: 327192
  Synthetic oligonucleotide

SEQ ID NO: 547405 - DNA, 58 bp, Artificial; identical to SEQ ID NO: 327193
  Synthetic oligonucleotide

SEQ ID NO: 547406 - DNA, 59 bp, Artificial; identical to SEQ ID NO: 327195
  Synthetic oligonucleotide

SEQ ID NO: 547407 - DNA, 56 bp, Artificial; identical to SEQ ID NO: 7474
  Synthetic oligonucleotide

SEQ ID NO: 547408 - DNA, 57 bp, Artificial; identical to SEQ ID NO: 327198
  Synthetic oligonucleotide

SEQ ID NO: 547409 - DNA, 60 bp, Artificial; identical to SEQ ID NO: 327202
  Synthetic oligonucleotide

SEQ ID NO: 547410 - DNA, 60 bp, Artificial; identical to SEQ ID NO: 327203
  Synthetic oligonucleotide

SEQ ID NO: 547411 - DNA, 58 bp, Artificial; identical to SEQ ID NO: 327206
  Synthetic oligonucleotide

SEQ ID NO: 547412 - DNA, 59 bp, Artificial; identical to SEQ ID NO: 16325
  Synthetic oligonucleotide

SEQ ID NO: 547413 - DNA, 53 bp, Artificial; identical to SEQ ID NO: 327208
  Synthetic oligonucleotide

SEQ ID NO: 547414 - DNA, 60 bp, Artificial; identical to SEQ ID NO: 327210
  Synthetic oligonucleotide

SEQ ID NO: 547415 - DNA, 60 bp, Artificial; identical to SEQ ID NO: 327212
  Synthetic oligonucleotide

SEQ ID NO: 547416 - DNA, 60 bp, Artificial; identical to SEQ ID NO: 327213
  Synthetic oligonucleotide

SEQ ID NO: 547417 - DNA, 55 bp, Artificial; identical to SEQ ID NO: 327214
  Synthetic oligonucleotide

SEQ ID NO: 547418 - DNA, 59 bp, Artificial; identical to SEQ ID NO: 19670
  Synthetic oligonucleotide

SEQ ID NO: 547419 - DNA, 55 bp, Artificial; identical to SEQ ID NO: 327224
  Synthetic oligonucleotide

SEQ ID NO: 547420 - DNA, 60 bp, Artificial; identical to SEQ ID NO: 327225
  Synthetic oligonucleotide

SEQ ID NO: 547421 - DNA, 59 bp, Artificial; identical to SEQ ID NO: 327232
  Synthetic oligonucleotide

SEQ ID NO: 547422 - DNA, 57 bp, Artificial; identical to SEQ ID NO: 327233
  Synthetic oligonucleotide

SEQ ID NO: 547423 - DNA, 60 bp, Artificial; identical to SEQ ID NO: 327238
  Synthetic oligonucleotide

SEQ ID NO: 547424 - DNA, 60 bp, Artificial; identical to SEQ ID NO: 327239
  Synthetic oligonucleotide

SEQ ID NO: 547425 - DNA, 55 bp, Artificial; identical to SEQ ID NO: 327243
  Synthetic oligonucleotide

SEQ ID NO: 547426 - DNA, 59 bp, Artificial; identical to SEQ ID NO: 15154
  Synthetic oligonucleotide

SEQ ID NO: 547427 - DNA, 60 bp, Artificial; identical to SEQ ID NO: 327248
  Synthetic oligonucleotide

SEQ ID NO: 547428 - DNA, 54 bp, Artificial; identical to SEQ ID NO: 327250
  Synthetic oligonucleotide

SEQ ID NO: 547429 - DNA, 60 bp, Artificial; identical to SEQ ID NO: 327251
  Synthetic oligonucleotide

SEQ ID NO: 547430 - DNA, 60 bp, Artificial; identical to SEQ ID NO: 327256
  Synthetic oligonucleotide

SEQ ID NO: 547431 - DNA, 52 bp, Artificial; identical to SEQ ID NO: 327260
  Synthetic oligonucleotide

SEQ ID NO: 547432 - DNA, 59 bp, Artificial; identical to SEQ ID NO: 327261
  Synthetic oligonucleotide

SEQ ID NO: 547433 - DNA, 55 bp, Artificial; identical to SEQ ID NO: 327262
  Synthetic oligonucleotide

SEQ ID NO: 547434 - DNA, 60 bp, Artificial; identical to SEQ ID NO: 327265
  Synthetic oligonucleotide

SEQ ID NO: 547435 - DNA, 57 bp, Artificial; identical to SEQ ID NO: 327269
  Synthetic oligonucleotide

SEQ ID NO: 547436 - DNA, 51 bp, Artificial; identical to SEQ ID NO: 327270
  Synthetic oligonucleotide

SEQ ID NO: 547437 - DNA, 58 bp, Artificial; identical to SEQ ID NO: 327273
  Synthetic oligonucleotide

SEQ ID NO: 547438 - DNA, 57 bp, Artificial; identical to SEQ ID NO: 327276
  Synthetic oligonucleotide

SEQ ID NO: 547439 - DNA, 60 bp, Artificial; identical to SEQ ID NO: 327277
  Synthetic oligonucleotide

SEQ ID NO: 547440 - DNA, 55 bp, Artificial; identical to SEQ ID NO: 327278
  Synthetic oligonucleotide

SEQ ID NO: 547441 - DNA, 51 bp, Artificial; identical to SEQ ID NO: 327287
  Synthetic oligonucleotide

SEQ ID NO: 547442 - DNA, 52 bp, Artificial; identical to SEQ ID NO: 327289
  Synthetic oligonucleotide

SEQ ID NO: 547443 - DNA, 60 bp, Artificial; identical to SEQ ID NO: 327291
  Synthetic oligonucleotide

SEQ ID NO: 547444 - DNA, 55 bp, Artificial; identical to SEQ ID NO: 327293
  Synthetic oligonucleotide

SEQ ID NO: 547445 - DNA, 54 bp, Artificial; identical to SEQ ID NO: 327294
  Synthetic oligonucleotide

SEQ ID NO: 547446 - DNA, 60 bp, Artificial; identical to SEQ ID NO: 14891
  Synthetic oligonucleotide

SEQ ID NO: 547447 - DNA, 60 bp, Artificial; identical to SEQ ID NO: 327295
  Synthetic oligonucleotide

SEQ ID NO: 547448 - DNA, 50 bp, Artificial; identical to SEQ ID NO: 327296
  Synthetic oligonucleotide

SEQ ID NO: 547449 - DNA, 59 bp, Artificial; identical to SEQ ID NO: 327302
  Synthetic oligonucleotide

SEQ ID NO: 547450 - DNA, 55 bp, Artificial; identical to SEQ ID NO: 327304
  Synthetic oligonucleotide

SEQ ID NO: 547451 - DNA, 60 bp, Artificial; identical to SEQ ID NO: 327305
  Synthetic oligonucleotide

SEQ ID NO: 547452 - DNA, 50 bp, Artificial; identical to SEQ ID NO: 327308
  Synthetic oligonucleotide

SEQ ID NO: 547453 - DNA, 52 bp, Artificial; identical to SEQ ID NO: 327311
  Synthetic oligonucleotide

SEQ ID NO: 547454 - DNA, 52 bp, Artificial; identical to SEQ ID NO: 327313
  Synthetic oligonucleotide

SEQ ID NO: 547455 - DNA, 55 bp, Artificial; identical to SEQ ID NO: 327317
  Synthetic oligonucleotide

SEQ ID NO: 547456 - DNA, 51 bp, Artificial; identical to SEQ ID NO: 327318
  Synthetic oligonucleotide

SEQ ID NO: 547457 - DNA, 55 bp, Artificial; identical to SEQ ID NO: 327324
  Synthetic oligonucleotide

SEQ ID NO: 547458 - DNA, 60 bp, Artificial; identical to SEQ ID NO: 327325
  Synthetic oligonucleotide

SEQ ID NO: 547459 - DNA, 55 bp, Artificial; identical to SEQ ID NO: 327326
  Synthetic oligonucleotide

SEQ ID NO: 547460 - DNA, 55 bp, Artificial; identical to SEQ ID NO: 327327
  Synthetic oligonucleotide

SEQ ID NO: 547461 - DNA, 60 bp, Artificial; identical to SEQ ID NO: 327330
  Synthetic oligonucleotide

SEQ ID NO: 547462 - DNA, 52 bp, Artificial; identical to SEQ ID NO: 327331
  Synthetic oligonucleotide

SEQ ID NO: 547463 - DNA, 59 bp, Artificial; identical to SEQ ID NO: 327332
  Synthetic oligonucleotide

SEQ ID NO: 547464 - DNA, 58 bp, Artificial; identical to SEQ ID NO: 327337
  Synthetic oligonucleotide

SEQ ID NO: 547465 - DNA, 60 bp, Artificial; identical to SEQ ID NO: 327340
  Synthetic oligonucleotide

SEQ ID NO: 547466 - DNA, 60 bp, Artificial; identical to SEQ ID NO: 15817
  Synthetic oligonucleotide

SEQ ID NO: 547467 - DNA, 52 bp, Artificial; identical to SEQ ID NO: 327343
  Synthetic oligonucleotide

SEQ ID NO: 547468 - DNA, 60 bp, Artificial; identical to SEQ ID NO: 327350
  Synthetic oligonucleotide

SEQ ID NO: 547469 - DNA, 53 bp, Artificial; identical to SEQ ID NO: 327352
  Synthetic oligonucleotide

SEQ ID NO: 547470 - DNA, 60 bp, Artificial; identical to SEQ ID NO: 327353
  Synthetic oligonucleotide

SEQ ID NO: 547471 - DNA, 60 bp, Artificial; identical to SEQ ID NO: 327356
  Synthetic oligonucleotide

SEQ ID NO: 547472 - DNA, 59 bp, Artificial; identical to SEQ ID NO: 327358
  Synthetic oligonucleotide

SEQ ID NO: 547473 - DNA, 58 bp, Artificial; identical to SEQ ID NO: 327362
  Synthetic oligonucleotide

SEQ ID NO: 547474 - DNA, 60 bp, Artificial; identical to SEQ ID NO: 327363
  Synthetic oligonucleotide

SEQ ID NO: 547475 - DNA, 50 bp, Artificial; identical to SEQ ID NO: 327369
  Synthetic oligonucleotide

SEQ ID NO: 547476 - DNA, 54 bp, Artificial; identical to SEQ ID NO: 327370
  Synthetic oligonucleotide

SEQ ID NO: 547477 - DNA, 55 bp, Artificial; identical to SEQ ID NO: 327372
  Synthetic oligonucleotide

SEQ ID NO: 547478 - DNA, 54 bp, Artificial; identical to SEQ ID NO: 327376
  Synthetic oligonucleotide

SEQ ID NO: 547479 - DNA, 56 bp, Artificial; identical to SEQ ID NO: 327378
  Synthetic oligonucleotide

SEQ ID NO: 547480 - DNA, 55 bp, Artificial; identical to SEQ ID NO: 327380
  Synthetic oligonucleotide

SEQ ID NO: 547481 - DNA, 55 bp, Artificial; identical to SEQ ID NO: 327381
  Synthetic oligonucleotide

SEQ ID NO: 547482 - DNA, 59 bp, Artificial; identical to SEQ ID NO: 327382
  Synthetic oligonucleotide

SEQ ID NO: 547483 - DNA, 53 bp, Artificial; identical to SEQ ID NO: 327383
  Synthetic oligonucleotide

SEQ ID NO: 547484 - DNA, 56 bp, Artificial; identical to SEQ ID NO: 327387
  Synthetic oligonucleotide

SEQ ID NO: 547485 - DNA, 60 bp, Artificial; identical to SEQ ID NO: 327392
  Synthetic oligonucleotide

SEQ ID NO: 547486 - DNA, 60 bp, Artificial; identical to SEQ ID NO: 327393
  Synthetic oligonucleotide

SEQ ID NO: 547487 - DNA, 52 bp, Artificial; identical to SEQ ID NO: 327397
  Synthetic oligonucleotide

SEQ ID NO: 547488 - DNA, 55 bp, Artificial; identical to SEQ ID NO: 327400
  Synthetic oligonucleotide

SEQ ID NO: 547489 - DNA, 55 bp, Artificial; identical to SEQ ID NO: 327404
  Synthetic oligonucleotide

SEQ ID NO: 547490 - DNA, 54 bp, Artificial; identical to SEQ ID NO: 327406
  Synthetic oligonucleotide

SEQ ID NO: 547491 - DNA, 51 bp, Artificial; identical to SEQ ID NO: 327409
  Synthetic oligonucleotide

SEQ ID NO: 547492 - DNA, 55 bp, Artificial; identical to SEQ ID NO: 327410
  Synthetic oligonucleotide

SEQ ID NO: 547493 - DNA, 60 bp, Artificial; identical to SEQ ID NO: 327412
  Synthetic oligonucleotide

SEQ ID NO: 547494 - DNA, 60 bp, Artificial; identical to SEQ ID NO: 327413
  Synthetic oligonucleotide

SEQ ID NO: 547495 - DNA, 60 bp, Artificial; identical to SEQ ID NO: 327415
  Synthetic oligonucleotide

SEQ ID NO: 547496 - DNA, 59 bp, Artificial; identical to SEQ ID NO: 327416
  Synthetic oligonucleotide

SEQ ID NO: 547497 - DNA, 53 bp, Artificial; identical to SEQ ID NO: 327419
  Synthetic oligonucleotide

SEQ ID NO: 547498 - DNA, 57 bp, Artificial; identical to SEQ ID NO: 327420
  Synthetic oligonucleotide

SEQ ID NO: 547499 - DNA, 58 bp, Artificial; identical to SEQ ID NO: 16212
  Synthetic oligonucleotide

SEQ ID NO: 547500 - DNA, 60 bp, Artificial; identical to SEQ ID NO: 14113
  Synthetic oligonucleotide

SEQ ID NO: 547501 - DNA, 58 bp, Artificial; identical to SEQ ID NO: 327421
  Synthetic oligonucleotide

SEQ ID NO: 547502 - DNA, 60 bp, Artificial; identical to SEQ ID NO: 327422
  Synthetic oligonucleotide

SEQ ID NO: 547503 - DNA, 58 bp, Artificial; identical to SEQ ID NO: 327424
  Synthetic oligonucleotide

SEQ ID NO: 547504 - DNA, 55 bp, Artificial; identical to SEQ ID NO: 327425
  Synthetic oligonucleotide

SEQ ID NO: 547505 - DNA, 58 bp, Artificial; identical to SEQ ID NO: 327426
  Synthetic oligonucleotide

SEQ ID NO: 547506 - DNA, 60 bp, Artificial; identical to SEQ ID NO: 82916
  Synthetic oligonucleotide

SEQ ID NO: 547507 - DNA, 57 bp, Artificial; identical to SEQ ID NO: 327434
  Synthetic oligonucleotide

SEQ ID NO: 547508 - DNA, 52 bp, Artificial; identical to SEQ ID NO: 327435
  Synthetic oligonucleotide

SEQ ID NO: 547509 - DNA, 60 bp, Artificial; identical to SEQ ID NO: 327437
  Synthetic oligonucleotide

SEQ ID NO: 547510 - DNA, 51 bp, Artificial; identical to SEQ ID NO: 327439
  Synthetic oligonucleotide

SEQ ID NO: 547511 - DNA, 50 bp, Artificial; identical to SEQ ID NO: 327441
  Synthetic oligonucleotide

SEQ ID NO: 547512 - DNA, 54 bp, Artificial; identical to SEQ ID NO: 327445
  Synthetic oligonucleotide

SEQ ID NO: 547513 - DNA, 56 bp, Artificial; identical to SEQ ID NO: 327446
  Synthetic oligonucleotide

SEQ ID NO: 547514 - DNA, 55 bp, Artificial; identical to SEQ ID NO: 327448
  Synthetic oligonucleotide

SEQ ID NO: 547515 - DNA, 55 bp, Artificial; identical to SEQ ID NO: 327451
  Synthetic oligonucleotide

SEQ ID NO: 547516 - DNA, 60 bp, Artificial; identical to SEQ ID NO: 327452
  Synthetic oligonucleotide

SEQ ID NO: 547517 - DNA, 56 bp, Artificial; identical to SEQ ID NO: 327453
  Synthetic oligonucleotide

SEQ ID NO: 547518 - DNA, 56 bp, Artificial; identical to SEQ ID NO: 327454
  Synthetic oligonucleotide

SEQ ID NO: 547519 - DNA, 58 bp, Artificial; identical to SEQ ID NO: 14457
  Synthetic oligonucleotide

SEQ ID NO: 547520 - DNA, 51 bp, Artificial; identical to SEQ ID NO: 327456
  Synthetic oligonucleotide

SEQ ID NO: 547521 - DNA, 60 bp, Artificial; identical to SEQ ID NO: 327462
  Synthetic oligonucleotide

SEQ ID NO: 547522 - DNA, 54 bp, Artificial; identical to SEQ ID NO: 327464
  Synthetic oligonucleotide

SEQ ID NO: 547523 - DNA, 60 bp, Artificial; identical to SEQ ID NO: 327467
  Synthetic oligonucleotide

SEQ ID NO: 547524 - DNA, 55 bp, Artificial; identical to SEQ ID NO: 327470
  Synthetic oligonucleotide

SEQ ID NO: 547525 - DNA, 50 bp, Artificial; identical to SEQ ID NO: 327472
  Synthetic oligonucleotide

SEQ ID NO: 547526 - DNA, 57 bp, Artificial; identical to SEQ ID NO: 18706
  Synthetic oligonucleotide

SEQ ID NO: 547527 - DNA, 60 bp, Artificial; identical to SEQ ID NO: 327475
  Synthetic oligonucleotide

SEQ ID NO: 547528 - DNA, 60 bp, Artificial; identical to SEQ ID NO: 327478
  Synthetic oligonucleotide

SEQ ID NO: 547529 - DNA, 60 bp, Artificial; identical to SEQ ID NO: 327479
  Synthetic oligonucleotide

SEQ ID NO: 547530 - DNA, 60 bp, Artificial; identical to SEQ ID NO: 327481
  Synthetic oligonucleotide

SEQ ID NO: 547531 - DNA, 60 bp, Artificial; identical to SEQ ID NO: 15532
  Synthetic oligonucleotide

SEQ ID NO: 547532 - DNA, 52 bp, Artificial; identical to SEQ ID NO: 327482
  Synthetic oligonucleotide

SEQ ID NO: 547533 - DNA, 60 bp, Artificial; identical to SEQ ID NO: 327483
  Synthetic oligonucleotide

SEQ ID NO: 547534 - DNA, 60 bp, Artificial; identical to SEQ ID NO: 327484
  Synthetic oligonucleotide

SEQ ID NO: 547535 - DNA, 59 bp, Artificial; identical to SEQ ID NO: 327486
  Synthetic oligonucleotide

SEQ ID NO: 547536 - DNA, 58 bp, Artificial; identical to SEQ ID NO: 327491
  Synthetic oligonucleotide

SEQ ID NO: 547537 - DNA, 60 bp, Artificial; identical to SEQ ID NO: 327492
  Synthetic oligonucleotide

SEQ ID NO: 547538 - DNA, 60 bp, Artificial; identical to SEQ ID NO: 327494
  Synthetic oligonucleotide

SEQ ID NO: 547539 - DNA, 60 bp, Artificial; identical to SEQ ID NO: 6709
  Synthetic oligonucleotide

SEQ ID NO: 547540 - DNA, 60 bp, Artificial; identical to SEQ ID NO: 327496
  Synthetic oligonucleotide

SEQ ID NO: 547541 - DNA, 55 bp, Artificial; identical to SEQ ID NO: 327497
  Synthetic oligonucleotide

SEQ ID NO: 547542 - DNA, 60 bp, Artificial; identical to SEQ ID NO: 11328
  Synthetic oligonucleotide

SEQ ID NO: 547543 - DNA, 52 bp, Artificial; identical to SEQ ID NO: 327500
  Synthetic oligonucleotide

SEQ ID NO: 547544 - DNA, 60 bp, Artificial; identical to SEQ ID NO: 327501
  Synthetic oligonucleotide

SEQ ID NO: 547545 - DNA, 60 bp, Artificial; identical to SEQ ID NO: 327504
  Synthetic oligonucleotide

SEQ ID NO: 547546 - DNA, 57 bp, Artificial; identical to SEQ ID NO: 18693
  Synthetic oligonucleotide

SEQ ID NO: 547547 - DNA, 60 bp, Artificial; identical to SEQ ID NO: 13870
  Synthetic oligonucleotide

SEQ ID NO: 547548 - DNA, 56 bp, Artificial; identical to SEQ ID NO: 327506
  Synthetic oligonucleotide

SEQ ID NO: 547549 - DNA, 60 bp, Artificial; identical to SEQ ID NO: 327507
  Synthetic oligonucleotide

SEQ ID NO: 547550 - DNA, 53 bp, Artificial; identical to SEQ ID NO: 327512
  Synthetic oligonucleotide

SEQ ID NO: 547551 - DNA, 57 bp, Artificial; identical to SEQ ID NO: 327515
  Synthetic oligonucleotide

SEQ ID NO: 547552 - DNA, 58 bp, Artificial; identical to SEQ ID NO: 327516
  Synthetic oligonucleotide

SEQ ID NO: 547553 - DNA, 58 bp, Artificial; identical to SEQ ID NO: 19730
  Synthetic oligonucleotide

SEQ ID NO: 547554 - DNA, 54 bp, Artificial; identical to SEQ ID NO: 327518
  Synthetic oligonucleotide

SEQ ID NO: 547555 - DNA, 60 bp, Artificial; identical to SEQ ID NO: 327523
  Synthetic oligonucleotide

SEQ ID NO: 547556 - DNA, 53 bp, Artificial; identical to SEQ ID NO: 327524
  Synthetic oligonucleotide

SEQ ID NO: 547557 - DNA, 60 bp, Artificial; identical to SEQ ID NO: 327530
  Synthetic oligonucleotide

SEQ ID NO: 547558 - DNA, 59 bp, Artificial; identical to SEQ ID NO: 327531
  Synthetic oligonucleotide

SEQ ID NO: 547559 - DNA, 54 bp, Artificial; identical to SEQ ID NO: 327533
  Synthetic oligonucleotide

SEQ ID NO: 547560 - DNA, 59 bp, Artificial; identical to SEQ ID NO: 327534
  Synthetic oligonucleotide

SEQ ID NO: 547561 - DNA, 59 bp, Artificial; identical to SEQ ID NO: 327537
  Synthetic oligonucleotide

SEQ ID NO: 547562 - DNA, 58 bp, Artificial; identical to SEQ ID NO: 327540
  Synthetic oligonucleotide

SEQ ID NO: 547563 - DNA, 60 bp, Artificial; identical to SEQ ID NO: 327541
  Synthetic oligonucleotide

SEQ ID NO: 547564 - DNA, 56 bp, Artificial; identical to SEQ ID NO: 327542
  Synthetic oligonucleotide

SEQ ID NO: 547565 - DNA, 59 bp, Artificial; identical to SEQ ID NO: 327544
  Synthetic oligonucleotide

SEQ ID NO: 547566 - DNA, 54 bp, Artificial; identical to SEQ ID NO: 327545
  Synthetic oligonucleotide

SEQ ID NO: 547567 - DNA, 55 bp, Artificial; identical to SEQ ID NO: 327548
  Synthetic oligonucleotide

SEQ ID NO: 547568 - DNA, 56 bp, Artificial; identical to SEQ ID NO: 327549
  Synthetic oligonucleotide

SEQ ID NO: 547569 - DNA, 54 bp, Artificial; identical to SEQ ID NO: 327550
  Synthetic oligonucleotide

SEQ ID NO: 547570 - DNA, 55 bp, Artificial; identical to SEQ ID NO: 327555
  Synthetic oligonucleotide

SEQ ID NO: 547571 - DNA, 60 bp, Artificial; identical to SEQ ID NO: 327556
  Synthetic oligonucleotide

SEQ ID NO: 547572 - DNA, 51 bp, Artificial; identical to SEQ ID NO: 327557
  Synthetic oligonucleotide

SEQ ID NO: 547573 - DNA, 52 bp, Artificial; identical to SEQ ID NO: 20093
  Synthetic oligonucleotide

SEQ ID NO: 547574 - DNA, 57 bp, Artificial; identical to SEQ ID NO: 327559
  Synthetic oligonucleotide

SEQ ID NO: 547575 - DNA, 60 bp, Artificial; identical to SEQ ID NO: 327563
  Synthetic oligonucleotide

SEQ ID NO: 547576 - DNA, 50 bp, Artificial; identical to SEQ ID NO: 18070
  Synthetic oligonucleotide

SEQ ID NO: 547577 - DNA, 53 bp, Artificial; identical to SEQ ID NO: 327565
  Synthetic oligonucleotide

SEQ ID NO: 547578 - DNA, 60 bp, Artificial; identical to SEQ ID NO: 327573
  Synthetic oligonucleotide

SEQ ID NO: 547579 - DNA, 55 bp, Artificial; identical to SEQ ID NO: 327574
  Synthetic oligonucleotide

SEQ ID NO: 547580 - DNA, 60 bp, Artificial; identical to SEQ ID NO: 327577
  Synthetic oligonucleotide

SEQ ID NO: 547581 - DNA, 58 bp, Artificial; identical to SEQ ID NO: 327578
  Synthetic oligonucleotide

SEQ ID NO: 547582 - DNA, 58 bp, Artificial; identical to SEQ ID NO: 327580
  Synthetic oligonucleotide

SEQ ID NO: 547583 - DNA, 53 bp, Artificial; identical to SEQ ID NO: 327584
  Synthetic oligonucleotide

SEQ ID NO: 547584 - DNA, 54 bp, Artificial; identical to SEQ ID NO: 327585
  Synthetic oligonucleotide

SEQ ID NO: 547585 - DNA, 56 bp, Artificial; identical to SEQ ID NO: 327586
  Synthetic oligonucleotide

SEQ ID NO: 547586 - DNA, 55 bp, Artificial; identical to SEQ ID NO: 19874
  Synthetic oligonucleotide

SEQ ID NO: 547587 - DNA, 55 bp, Artificial; identical to SEQ ID NO: 327593
  Synthetic oligonucleotide

SEQ ID NO: 547588 - DNA, 55 bp, Artificial; identical to SEQ ID NO: 327595
  Synthetic oligonucleotide

SEQ ID NO: 547589 - DNA, 58 bp, Artificial; identical to SEQ ID NO: 327602
  Synthetic oligonucleotide

SEQ ID NO: 547590 - DNA, 54 bp, Artificial; identical to SEQ ID NO: 327607
  Synthetic oligonucleotide

SEQ ID NO: 547591 - DNA, 55 bp, Artificial; identical to SEQ ID NO: 327611
  Synthetic oligonucleotide

SEQ ID NO: 547592 - DNA, 60 bp, Artificial; identical to SEQ ID NO: 15008
  Synthetic oligonucleotide

SEQ ID NO: 547593 - DNA, 58 bp, Artificial; identical to SEQ ID NO: 327624
  Synthetic oligonucleotide

SEQ ID NO: 547594 - DNA, 55 bp, Artificial; identical to SEQ ID NO: 327628
  Synthetic oligonucleotide

SEQ ID NO: 547595 - DNA, 55 bp, Artificial; identical to SEQ ID NO: 327629
  Synthetic oligonucleotide

SEQ ID NO: 547596 - DNA, 59 bp, Artificial; identical to SEQ ID NO: 327630
  Synthetic oligonucleotide

SEQ ID NO: 547597 - DNA, 60 bp, Artificial; identical to SEQ ID NO: 327631
  Synthetic oligonucleotide

SEQ ID NO: 547598 - DNA, 60 bp, Artificial; identical to SEQ ID NO: 327632
  Synthetic oligonucleotide

SEQ ID NO: 547599 - DNA, 57 bp, Artificial; identical to SEQ ID NO: 327635
  Synthetic oligonucleotide

SEQ ID NO: 547600 - DNA, 54 bp, Artificial; identical to SEQ ID NO: 327636
  Synthetic oligonucleotide

SEQ ID NO: 547601 - DNA, 53 bp, Artificial; identical to SEQ ID NO: 327644
  Synthetic oligonucleotide

SEQ ID NO: 547602 - DNA, 60 bp, Artificial; identical to SEQ ID NO: 327645
  Synthetic oligonucleotide

SEQ ID NO: 547603 - DNA, 50 bp, Artificial; identical to SEQ ID NO: 327649
  Synthetic oligonucleotide

SEQ ID NO: 547604 - DNA, 53 bp, Artificial; identical to SEQ ID NO: 327653
  Synthetic oligonucleotide

SEQ ID NO: 547605 - DNA, 58 bp, Artificial; identical to SEQ ID NO: 327654
  Synthetic oligonucleotide

SEQ ID NO: 547606 - DNA, 58 bp, Artificial; identical to SEQ ID NO: 327655
  Synthetic oligonucleotide

SEQ ID NO: 547607 - DNA, 52 bp, Artificial; identical to SEQ ID NO: 327659
  Synthetic oligonucleotide

SEQ ID NO: 547608 - DNA, 55 bp, Artificial; identical to SEQ ID NO: 327661
  Synthetic oligonucleotide

SEQ ID NO: 547609 - DNA, 60 bp, Artificial; identical to SEQ ID NO: 327663
  Synthetic oligonucleotide

SEQ ID NO: 547610 - DNA, 60 bp, Artificial; identical to SEQ ID NO: 327664
  Synthetic oligonucleotide

SEQ ID NO: 547611 - DNA, 60 bp, Artificial; identical to SEQ ID NO: 327665
  Synthetic oligonucleotide

SEQ ID NO: 547612 - DNA, 56 bp, Artificial; identical to SEQ ID NO: 327667
  Synthetic oligonucleotide

SEQ ID NO: 547613 - DNA, 60 bp, Artificial; identical to SEQ ID NO: 11034
  Synthetic oligonucleotide

SEQ ID NO: 547614 - DNA, 60 bp, Artificial; identical to SEQ ID NO: 327669
  Synthetic oligonucleotide

SEQ ID NO: 547615 - DNA, 60 bp, Artificial; identical to SEQ ID NO: 327671
  Synthetic oligonucleotide

SEQ ID NO: 547616 - DNA, 60 bp, Artificial; identical to SEQ ID NO: 10554
  Synthetic oligonucleotide

SEQ ID NO: 547617 - DNA, 60 bp, Artificial; identical to SEQ ID NO: 327673
  Synthetic oligonucleotide

SEQ ID NO: 547618 - DNA, 57 bp, Artificial; identical to SEQ ID NO: 327676
  Synthetic oligonucleotide

SEQ ID NO: 547619 - DNA, 55 bp, Artificial; identical to SEQ ID NO: 327678
  Synthetic oligonucleotide

SEQ ID NO: 547620 - DNA, 60 bp, Artificial; identical to SEQ ID NO: 327680
  Synthetic oligonucleotide

SEQ ID NO: 547621 - DNA, 57 bp, Artificial; identical to SEQ ID NO: 327682
  Synthetic oligonucleotide

SEQ ID NO: 547622 - DNA, 50 bp, Artificial; identical to SEQ ID NO: 327683
  Synthetic oligonucleotide

SEQ ID NO: 547623 - DNA, 60 bp, Artificial; identical to SEQ ID NO: 327684
  Synthetic oligonucleotide

SEQ ID NO: 547624 - DNA, 57 bp, Artificial; identical to SEQ ID NO: 327685
  Synthetic oligonucleotide

SEQ ID NO: 547625 - DNA, 60 bp, Artificial; identical to SEQ ID NO: 327686
  Synthetic oligonucleotide

SEQ ID NO: 547626 - DNA, 55 bp, Artificial; identical to SEQ ID NO: 327688
  Synthetic oligonucleotide

SEQ ID NO: 547627 - DNA, 58 bp, Artificial; identical to SEQ ID NO: 13078
  Synthetic oligonucleotide

SEQ ID NO: 547628 - DNA, 55 bp, Artificial; identical to SEQ ID NO: 327690
  Synthetic oligonucleotide

SEQ ID NO: 547629 - DNA, 60 bp, Artificial; identical to SEQ ID NO: 327691
  Synthetic oligonucleotide

SEQ ID NO: 547630 - DNA, 59 bp, Artificial; identical to SEQ ID NO: 327692
  Synthetic oligonucleotide

SEQ ID NO: 547631 - DNA, 59 bp, Artificial; identical to SEQ ID NO: 327693
  Synthetic oligonucleotide

SEQ ID NO: 547632 - DNA, 58 bp, Artificial; identical to SEQ ID NO: 327695
  Synthetic oligonucleotide

SEQ ID NO: 547633 - DNA, 60 bp, Artificial; identical to SEQ ID NO: 327697
  Synthetic oligonucleotide

SEQ ID NO: 547634 - DNA, 52 bp, Artificial; identical to SEQ ID NO: 327698
  Synthetic oligonucleotide

SEQ ID NO: 547635 - DNA, 51 bp, Artificial; identical to SEQ ID NO: 327700
  Synthetic oligonucleotide

SEQ ID NO: 547636 - DNA, 52 bp, Artificial; identical to SEQ ID NO: 327701
  Synthetic oligonucleotide

SEQ ID NO: 547637 - DNA, 60 bp, Artificial; identical to SEQ ID NO: 327704
  Synthetic oligonucleotide

SEQ ID NO: 547638 - DNA, 55 bp, Artificial; identical to SEQ ID NO: 327705
  Synthetic oligonucleotide

SEQ ID NO: 547639 - DNA, 60 bp, Artificial; identical to SEQ ID NO: 112555
  Synthetic oligonucleotide

SEQ ID NO: 547640 - DNA, 59 bp, Artificial; identical to SEQ ID NO: 327706
  Synthetic oligonucleotide

SEQ ID NO: 547641 - DNA, 54 bp, Artificial; identical to SEQ ID NO: 327707
  Synthetic oligonucleotide

SEQ ID NO: 547642 - DNA, 55 bp, Artificial; identical to SEQ ID NO: 16190
  Synthetic oligonucleotide

SEQ ID NO: 547643 - DNA, 60 bp, Artificial; identical to SEQ ID NO: 327715
  Synthetic oligonucleotide

SEQ ID NO: 547644 - DNA, 56 bp, Artificial; identical to SEQ ID NO: 17183
  Synthetic oligonucleotide

SEQ ID NO: 547645 - DNA, 60 bp, Artificial; identical to SEQ ID NO: 327717
  Synthetic oligonucleotide

SEQ ID NO: 547646 - DNA, 54 bp, Artificial; identical to SEQ ID NO: 327720
  Synthetic oligonucleotide

SEQ ID NO: 547647 - DNA, 58 bp, Artificial; identical to SEQ ID NO: 327722
  Synthetic oligonucleotide

SEQ ID NO: 547648 - DNA, 60 bp, Artificial; identical to SEQ ID NO: 7123
  Synthetic oligonucleotide

SEQ ID NO: 547649 - DNA, 50 bp, Artificial; identical to SEQ ID NO: 327724
  Synthetic oligonucleotide

SEQ ID NO: 547650 - DNA, 60 bp, Artificial; identical to SEQ ID NO: 327725
  Synthetic oligonucleotide

SEQ ID NO: 547651 - DNA, 58 bp, Artificial; identical to SEQ ID NO: 327726
  Synthetic oligonucleotide

SEQ ID NO: 547652 - DNA, 58 bp, Artificial; identical to SEQ ID NO: 18507
  Synthetic oligonucleotide

SEQ ID NO: 547653 - DNA, 59 bp, Artificial; identical to SEQ ID NO: 18717
  Synthetic oligonucleotide

SEQ ID NO: 547654 - DNA, 59 bp, Artificial; identical to SEQ ID NO: 327727
  Synthetic oligonucleotide

SEQ ID NO: 547655 - DNA, 50 bp, Artificial; identical to SEQ ID NO: 327731
  Synthetic oligonucleotide

SEQ ID NO: 547656 - DNA, 60 bp, Artificial; identical to SEQ ID NO: 327744
  Synthetic oligonucleotide

SEQ ID NO: 547657 - DNA, 52 bp, Artificial; identical to SEQ ID NO: 327745
  Synthetic oligonucleotide

SEQ ID NO: 547658 - DNA, 59 bp, Artificial; identical to SEQ ID NO: 327747
  Synthetic oligonucleotide

SEQ ID NO: 547659 - DNA, 55 bp, Artificial; identical to SEQ ID NO: 327750
  Synthetic oligonucleotide

SEQ ID NO: 547660 - DNA, 60 bp, Artificial; identical to SEQ ID NO: 327752
  Synthetic oligonucleotide

SEQ ID NO: 547661 - DNA, 55 bp, Artificial; identical to SEQ ID NO: 327753
  Synthetic oligonucleotide

SEQ ID NO: 547662 - DNA, 55 bp, Artificial; identical to SEQ ID NO: 327754
  Synthetic oligonucleotide

SEQ ID NO: 547663 - DNA, 57 bp, Artificial; identical to SEQ ID NO: 327756
  Synthetic oligonucleotide

SEQ ID NO: 547664 - DNA, 58 bp, Artificial; identical to SEQ ID NO: 327758
  Synthetic oligonucleotide

SEQ ID NO: 547665 - DNA, 53 bp, Artificial; identical to SEQ ID NO: 327761
  Synthetic oligonucleotide

SEQ ID NO: 547666 - DNA, 57 bp, Artificial; identical to SEQ ID NO: 327762
  Synthetic oligonucleotide

SEQ ID NO: 547667 - DNA, 59 bp, Artificial; identical to SEQ ID NO: 327764
  Synthetic oligonucleotide

SEQ ID NO: 547668 - DNA, 60 bp, Artificial; identical to SEQ ID NO: 327765
  Synthetic oligonucleotide

SEQ ID NO: 547669 - DNA, 60 bp, Artificial; identical to SEQ ID NO: 327769
  Synthetic oligonucleotide

SEQ ID NO: 547670 - DNA, 58 bp, Artificial; identical to SEQ ID NO: 327773
  Synthetic oligonucleotide

SEQ ID NO: 547671 - DNA, 60 bp, Artificial; identical to SEQ ID NO: 327774
  Synthetic oligonucleotide

SEQ ID NO: 547672 - DNA, 60 bp, Artificial; identical to SEQ ID NO: 327780
  Synthetic oligonucleotide

SEQ ID NO: 547673 - DNA, 60 bp, Artificial; identical to SEQ ID NO: 12184
  Synthetic oligonucleotide

SEQ ID NO: 547674 - DNA, 58 bp, Artificial; identical to SEQ ID NO: 327783
  Synthetic oligonucleotide

SEQ ID NO: 547675 - DNA, 53 bp, Artificial; identical to SEQ ID NO: 327784
  Synthetic oligonucleotide

SEQ ID NO: 547676 - DNA, 59 bp, Artificial; identical to SEQ ID NO: 327786
  Synthetic oligonucleotide

SEQ ID NO: 547677 - DNA, 58 bp, Artificial; identical to SEQ ID NO: 327787
  Synthetic oligonucleotide

SEQ ID NO: 547678 - DNA, 50 bp, Artificial; identical to SEQ ID NO: 327791
  Synthetic oligonucleotide

SEQ ID NO: 547679 - DNA, 60 bp, Artificial; identical to SEQ ID NO: 327795
  Synthetic oligonucleotide

SEQ ID NO: 547680 - DNA, 52 bp, Artificial; identical to SEQ ID NO: 327801
  Synthetic oligonucleotide

SEQ ID NO: 547681 - DNA, 54 bp, Artificial; identical to SEQ ID NO: 327804
  Synthetic oligonucleotide

SEQ ID NO: 547682 - DNA, 60 bp, Artificial; identical to SEQ ID NO: 327808
  Synthetic oligonucleotide

SEQ ID NO: 547683 - DNA, 59 bp, Artificial; identical to SEQ ID NO: 327810
  Synthetic oligonucleotide

SEQ ID NO: 547684 - DNA, 57 bp, Artificial; identical to SEQ ID NO: 327811
  Synthetic oligonucleotide

SEQ ID NO: 547685 - DNA, 60 bp, Artificial; identical to SEQ ID NO: 327812
  Synthetic oligonucleotide

SEQ ID NO: 547686 - DNA, 60 bp, Artificial; identical to SEQ ID NO: 327814
  Synthetic oligonucleotide

SEQ ID NO: 547687 - DNA, 54 bp, Artificial; identical to SEQ ID NO: 327815
  Synthetic oligonucleotide

SEQ ID NO: 547688 - DNA, 53 bp, Artificial; identical to SEQ ID NO: 327816
  Synthetic oligonucleotide

SEQ ID NO: 547689 - DNA, 51 bp, Artificial; identical to SEQ ID NO: 327817
  Synthetic oligonucleotide

SEQ ID NO: 547690 - DNA, 57 bp, Artificial; identical to SEQ ID NO: 327818
  Synthetic oligonucleotide

SEQ ID NO: 547691 - DNA, 57 bp, Artificial; identical to SEQ ID NO: 327823
  Synthetic oligonucleotide

SEQ ID NO: 547692 - DNA, 54 bp, Artificial; identical to SEQ ID NO: 327826
  Synthetic oligonucleotide

SEQ ID NO: 547693 - DNA, 52 bp, Artificial; identical to SEQ ID NO: 20295
  Synthetic oligonucleotide

SEQ ID NO: 547694 - DNA, 52 bp, Artificial; identical to SEQ ID NO: 327827
  Synthetic oligonucleotide

SEQ ID NO: 547695 - DNA, 55 bp, Artificial; identical to SEQ ID NO: 327828
  Synthetic oligonucleotide

SEQ ID NO: 547696 - DNA, 56 bp, Artificial; identical to SEQ ID NO: 327832
  Synthetic oligonucleotide

SEQ ID NO: 547697 - DNA, 58 bp, Artificial; identical to SEQ ID NO: 12074
  Synthetic oligonucleotide

SEQ ID NO: 547698 - DNA, 54 bp, Artificial; identical to SEQ ID NO: 17742
  Synthetic oligonucleotide

SEQ ID NO: 547699 - DNA, 57 bp, Artificial; identical to SEQ ID NO: 327833
  Synthetic oligonucleotide

SEQ ID NO: 547700 - DNA, 57 bp, Artificial; identical to SEQ ID NO: 327834
  Synthetic oligonucleotide

SEQ ID NO: 547701 - DNA, 53 bp, Artificial; identical to SEQ ID NO: 327837
  Synthetic oligonucleotide

SEQ ID NO: 547702 - DNA, 57 bp, Artificial; identical to SEQ ID NO: 327838
  Synthetic oligonucleotide

SEQ ID NO: 547703 - DNA, 60 bp, Artificial; identical to SEQ ID NO: 327849
  Synthetic oligonucleotide

SEQ ID NO: 547704 - DNA, 52 bp, Artificial; identical to SEQ ID NO: 327854
  Synthetic oligonucleotide

SEQ ID NO: 547705 - DNA, 54 bp, Artificial; identical to SEQ ID NO: 327855
  Synthetic oligonucleotide

SEQ ID NO: 547706 - DNA, 55 bp, Artificial; identical to SEQ ID NO: 327859
  Synthetic oligonucleotide

SEQ ID NO: 547707 - DNA, 60 bp, Artificial; identical to SEQ ID NO: 6118
  Synthetic oligonucleotide

SEQ ID NO: 547708 - DNA, 54 bp, Artificial; identical to SEQ ID NO: 327861
  Synthetic oligonucleotide

SEQ ID NO: 547709 - DNA, 53 bp, Artificial; identical to SEQ ID NO: 327863
  Synthetic oligonucleotide

SEQ ID NO: 547710 - DNA, 57 bp, Artificial; identical to SEQ ID NO: 327865
  Synthetic oligonucleotide

SEQ ID NO: 547711 - DNA, 60 bp, Artificial; identical to SEQ ID NO: 327873
  Synthetic oligonucleotide

SEQ ID NO: 547712 - DNA, 54 bp, Artificial; identical to SEQ ID NO: 327874
  Synthetic oligonucleotide

SEQ ID NO: 547713 - DNA, 59 bp, Artificial; identical to SEQ ID NO: 20248
  Synthetic oligonucleotide

SEQ ID NO: 547714 - DNA, 55 bp, Artificial; identical to SEQ ID NO: 327875
  Synthetic oligonucleotide

SEQ ID NO: 547715 - DNA, 58 bp, Artificial; identical to SEQ ID NO: 327877
  Synthetic oligonucleotide

SEQ ID NO: 547716 - DNA, 58 bp, Artificial; identical to SEQ ID NO: 327878
  Synthetic oligonucleotide

SEQ ID NO: 547717 - DNA, 53 bp, Artificial; identical to SEQ ID NO: 327879
  Synthetic oligonucleotide

SEQ ID NO: 547718 - DNA, 56 bp, Artificial; identical to SEQ ID NO: 327885
  Synthetic oligonucleotide

SEQ ID NO: 547719 - DNA, 57 bp, Artificial; identical to SEQ ID NO: 327887
  Synthetic oligonucleotide

SEQ ID NO: 547720 - DNA, 52 bp, Artificial; identical to SEQ ID NO: 327893
  Synthetic oligonucleotide

SEQ ID NO: 547721 - DNA, 53 bp, Artificial; identical to SEQ ID NO: 15948
  Synthetic oligonucleotide

SEQ ID NO: 547722 - DNA, 56 bp, Artificial; identical to SEQ ID NO: 327898
  Synthetic oligonucleotide

SEQ ID NO: 547723 - DNA, 55 bp, Artificial; identical to SEQ ID NO: 327900
  Synthetic oligonucleotide

SEQ ID NO: 547724 - DNA, 54 bp, Artificial; identical to SEQ ID NO: 327904
  Synthetic oligonucleotide

SEQ ID NO: 547725 - DNA, 59 bp, Artificial; identical to SEQ ID NO: 327906
  Synthetic oligonucleotide

SEQ ID NO: 547726 - DNA, 56 bp, Artificial; identical to SEQ ID NO: 327914
  Synthetic oligonucleotide

SEQ ID NO: 547727 - DNA, 52 bp, Artificial; identical to SEQ ID NO: 327915
  Synthetic oligonucleotide

SEQ ID NO: 547728 - DNA, 55 bp, Artificial; identical to SEQ ID NO: 327917
  Synthetic oligonucleotide

SEQ ID NO: 547729 - DNA, 54 bp, Artificial; identical to SEQ ID NO: 327918
  Synthetic oligonucleotide

SEQ ID NO: 547730 - DNA, 58 bp, Artificial; identical to SEQ ID NO: 327923
  Synthetic oligonucleotide

SEQ ID NO: 547731 - DNA, 50 bp, Artificial; identical to SEQ ID NO: 327926
  Synthetic oligonucleotide

SEQ ID NO: 547732 - DNA, 60 bp, Artificial; identical to SEQ ID NO: 327932
  Synthetic oligonucleotide

SEQ ID NO: 547733 - DNA, 52 bp, Artificial; identical to SEQ ID NO: 327933
  Synthetic oligonucleotide

SEQ ID NO: 547734 - DNA, 58 bp, Artificial; identical to SEQ ID NO: 327936
  Synthetic oligonucleotide

SEQ ID NO: 547735 - DNA, 60 bp, Artificial; identical to SEQ ID NO: 327940
  Synthetic oligonucleotide

SEQ ID NO: 547736 - DNA, 57 bp, Artificial; identical to SEQ ID NO: 327943
  Synthetic oligonucleotide

SEQ ID NO: 547737 - DNA, 53 bp, Artificial; identical to SEQ ID NO: 327944
  Synthetic oligonucleotide

SEQ ID NO: 547738 - DNA, 60 bp, Artificial; identical to SEQ ID NO: 327948
  Synthetic oligonucleotide

SEQ ID NO: 547739 - DNA, 60 bp, Artificial; identical to SEQ ID NO: 327949
  Synthetic oligonucleotide

SEQ ID NO: 547740 - DNA, 57 bp, Artificial; identical to SEQ ID NO: 327950
  Synthetic oligonucleotide

SEQ ID NO: 547741 - DNA, 52 bp, Artificial; identical to SEQ ID NO: 327951
  Synthetic oligonucleotide

SEQ ID NO: 547742 - DNA, 54 bp, Artificial; identical to SEQ ID NO: 327953
  Synthetic oligonucleotide

SEQ ID NO: 547743 - DNA, 60 bp, Artificial; identical to SEQ ID NO: 327955
  Synthetic oligonucleotide

SEQ ID NO: 547744 - DNA, 55 bp, Artificial; identical to SEQ ID NO: 327959
  Synthetic oligonucleotide

SEQ ID NO: 547745 - DNA, 51 bp, Artificial; identical to SEQ ID NO: 327965
  Synthetic oligonucleotide

SEQ ID NO: 547746 - DNA, 60 bp, Artificial; identical to SEQ ID NO: 327969
  Synthetic oligonucleotide

SEQ ID NO: 547747 - DNA, 60 bp, Artificial; identical to SEQ ID NO: 327974
  Synthetic oligonucleotide

SEQ ID NO: 547748 - DNA, 59 bp, Artificial; identical to SEQ ID NO: 327977
  Synthetic oligonucleotide

SEQ ID NO: 547749 - DNA, 56 bp, Artificial; identical to SEQ ID NO: 327979
  Synthetic oligonucleotide

SEQ ID NO: 547750 - DNA, 55 bp, Artificial; identical to SEQ ID NO: 327980
  Synthetic oligonucleotide

SEQ ID NO: 547751 - DNA, 54 bp, Artificial; identical to SEQ ID NO: 327985
  Synthetic oligonucleotide

SEQ ID NO: 547752 - DNA, 55 bp, Artificial; identical to SEQ ID NO: 327987
  Synthetic oligonucleotide

SEQ ID NO: 547753 - DNA, 60 bp, Artificial; identical to SEQ ID NO: 327989
  Synthetic oligonucleotide

SEQ ID NO: 547754 - DNA, 60 bp, Artificial; identical to SEQ ID NO: 327991
  Synthetic oligonucleotide

SEQ ID NO: 547755 - DNA, 55 bp, Artificial; identical to SEQ ID NO: 327996
  Synthetic oligonucleotide

SEQ ID NO: 547756 - DNA, 52 bp, Artificial; identical to SEQ ID NO: 327997
  Synthetic oligonucleotide

SEQ ID NO: 547757 - DNA, 60 bp, Artificial; identical to SEQ ID NO: 327998
  Synthetic oligonucleotide

SEQ ID NO: 547758 - DNA, 57 bp, Artificial; identical to SEQ ID NO: 328001
  Synthetic oligonucleotide

SEQ ID NO: 547759 - DNA, 55 bp, Artificial; identical to SEQ ID NO: 328006
  Synthetic oligonucleotide

SEQ ID NO: 547760 - DNA, 58 bp, Artificial; identical to SEQ ID NO: 328008
  Synthetic oligonucleotide

SEQ ID NO: 547761 - DNA, 57 bp, Artificial; identical to SEQ ID NO: 328010
  Synthetic oligonucleotide

SEQ ID NO: 547762 - DNA, 60 bp, Artificial; identical to SEQ ID NO: 328011
  Synthetic oligonucleotide

SEQ ID NO: 547763 - DNA, 58 bp, Artificial; identical to SEQ ID NO: 328016
  Synthetic oligonucleotide

SEQ ID NO: 547764 - DNA, 52 bp, Artificial; identical to SEQ ID NO: 10472
  Synthetic oligonucleotide

SEQ ID NO: 547765 - DNA, 55 bp, Artificial; identical to SEQ ID NO: 328017
  Synthetic oligonucleotide

SEQ ID NO: 547766 - DNA, 60 bp, Artificial; identical to SEQ ID NO: 328018
  Synthetic oligonucleotide

SEQ ID NO: 547767 - DNA, 55 bp, Artificial; identical to SEQ ID NO: 328020
  Synthetic oligonucleotide

SEQ ID NO: 547768 - DNA, 60 bp, Artificial; identical to SEQ ID NO: 328021
  Synthetic oligonucleotide

SEQ ID NO: 547769 - DNA, 54 bp, Artificial; identical to SEQ ID NO: 328024
  Synthetic oligonucleotide

SEQ ID NO: 547770 - DNA, 58 bp, Artificial; identical to SEQ ID NO: 328025
  Synthetic oligonucleotide

SEQ ID NO: 547771 - DNA, 60 bp, Artificial; identical to SEQ ID NO: 328027
  Synthetic oligonucleotide

SEQ ID NO: 547772 - DNA, 55 bp, Artificial; identical to SEQ ID NO: 328028
  Synthetic oligonucleotide

SEQ ID NO: 547773 - DNA, 51 bp, Artificial; identical to SEQ ID NO: 328029
  Synthetic oligonucleotide

SEQ ID NO: 547774 - DNA, 57 bp, Artificial; identical to SEQ ID NO: 328031
  Synthetic oligonucleotide

SEQ ID NO: 547775 - DNA, 60 bp, Artificial; identical to SEQ ID NO: 328032
  Synthetic oligonucleotide

SEQ ID NO: 547776 - DNA, 58 bp, Artificial; identical to SEQ ID NO: 328035
  Synthetic oligonucleotide

SEQ ID NO: 547777 - DNA, 55 bp, Artificial; identical to SEQ ID NO: 328037
  Synthetic oligonucleotide

SEQ ID NO: 547778 - DNA, 54 bp, Artificial; identical to SEQ ID NO: 328043
  Synthetic oligonucleotide

SEQ ID NO: 547779 - DNA, 57 bp, Artificial; identical to SEQ ID NO: 328046
  Synthetic oligonucleotide

SEQ ID NO: 547780 - DNA, 59 bp, Artificial; identical to SEQ ID NO: 328053
  Synthetic oligonucleotide

SEQ ID NO: 547781 - DNA, 53 bp, Artificial; identical to SEQ ID NO: 328054
  Synthetic oligonucleotide

SEQ ID NO: 547782 - DNA, 55 bp, Artificial; identical to SEQ ID NO: 328056
  Synthetic oligonucleotide

SEQ ID NO: 547783 - DNA, 54 bp, Artificial; identical to SEQ ID NO: 328060
  Synthetic oligonucleotide

SEQ ID NO: 547784 - DNA, 60 bp, Artificial; identical to SEQ ID NO: 328061
  Synthetic oligonucleotide

SEQ ID NO: 547785 - DNA, 60 bp, Artificial; identical to SEQ ID NO: 328063
  Synthetic oligonucleotide

SEQ ID NO: 547786 - DNA, 58 bp, Artificial; identical to SEQ ID NO: 328065
  Synthetic oligonucleotide

SEQ ID NO: 547787 - DNA, 51 bp, Artificial; identical to SEQ ID NO: 328066
  Synthetic oligonucleotide

SEQ ID NO: 547788 - DNA, 60 bp, Artificial; identical to SEQ ID NO: 328070
  Synthetic oligonucleotide

SEQ ID NO: 547789 - DNA, 51 bp, Artificial; identical to SEQ ID NO: 328071
  Synthetic oligonucleotide

SEQ ID NO: 547790 - DNA, 54 bp, Artificial; identical to SEQ ID NO: 328073
  Synthetic oligonucleotide

SEQ ID NO: 547791 - DNA, 52 bp, Artificial; identical to SEQ ID NO: 328083
  Synthetic oligonucleotide

SEQ ID NO: 547792 - DNA, 55 bp, Artificial; identical to SEQ ID NO: 328086
  Synthetic oligonucleotide

SEQ ID NO: 547793 - DNA, 56 bp, Artificial; identical to SEQ ID NO: 328092
  Synthetic oligonucleotide

SEQ ID NO: 547794 - DNA, 57 bp, Artificial; identical to SEQ ID NO: 328095
  Synthetic oligonucleotide

SEQ ID NO: 547795 - DNA, 53 bp, Artificial; identical to SEQ ID NO: 328097
  Synthetic oligonucleotide

SEQ ID NO: 547796 - DNA, 60 bp, Artificial; identical to SEQ ID NO: 328110
  Synthetic oligonucleotide

SEQ ID NO: 547797 - DNA, 59 bp, Artificial; identical to SEQ ID NO: 328112
  Synthetic oligonucleotide

SEQ ID NO: 547798 - DNA, 58 bp, Artificial; identical to SEQ ID NO: 328114
  Synthetic oligonucleotide

SEQ ID NO: 547799 - DNA, 60 bp, Artificial; identical to SEQ ID NO: 328117
  Synthetic oligonucleotide

SEQ ID NO: 547800 - DNA, 60 bp, Artificial; identical to SEQ ID NO: 328118
  Synthetic oligonucleotide

SEQ ID NO: 547801 - DNA, 51 bp, Artificial; identical to SEQ ID NO: 328124
  Synthetic oligonucleotide

SEQ ID NO: 547802 - DNA, 59 bp, Artificial; identical to SEQ ID NO: 19208
  Synthetic oligonucleotide

SEQ ID NO: 547803 - DNA, 59 bp, Artificial; identical to SEQ ID NO: 328125
  Synthetic oligonucleotide

SEQ ID NO: 547804 - DNA, 50 bp, Artificial; identical to SEQ ID NO: 15851
  Synthetic oligonucleotide

SEQ ID NO: 547805 - DNA, 60 bp, Artificial; identical to SEQ ID NO: 328131
  Synthetic oligonucleotide

SEQ ID NO: 547806 - DNA, 56 bp, Artificial; identical to SEQ ID NO: 328132
  Synthetic oligonucleotide

SEQ ID NO: 547807 - DNA, 53 bp, Artificial; identical to SEQ ID NO: 328135
  Synthetic oligonucleotide

SEQ ID NO: 547808 - DNA, 55 bp, Artificial; identical to SEQ ID NO: 328136
  Synthetic oligonucleotide

SEQ ID NO: 547809 - DNA, 57 bp, Artificial; identical to SEQ ID NO: 328139
  Synthetic oligonucleotide

SEQ ID NO: 547810 - DNA, 59 bp, Artificial; identical to SEQ ID NO: 328141
  Synthetic oligonucleotide

SEQ ID NO: 547811 - DNA, 60 bp, Artificial; identical to SEQ ID NO: 328142
  Synthetic oligonucleotide

SEQ ID NO: 547812 - DNA, 60 bp, Artificial; identical to SEQ ID NO: 328145
  Synthetic oligonucleotide

SEQ ID NO: 547813 - DNA, 55 bp, Artificial; identical to SEQ ID NO: 328146
  Synthetic oligonucleotide

SEQ ID NO: 547814 - DNA, 51 bp, Artificial; identical to SEQ ID NO: 328147
  Synthetic oligonucleotide

SEQ ID NO: 547815 - DNA, 60 bp, Artificial; identical to SEQ ID NO: 7813
  Synthetic oligonucleotide

SEQ ID NO: 547816 - DNA, 59 bp, Artificial; identical to SEQ ID NO: 328152
  Synthetic oligonucleotide

SEQ ID NO: 547817 - DNA, 55 bp, Artificial; identical to SEQ ID NO: 328153
  Synthetic oligonucleotide

SEQ ID NO: 547818 - DNA, 60 bp, Artificial; identical to SEQ ID NO: 328155
  Synthetic oligonucleotide

SEQ ID NO: 547819 - DNA, 58 bp, Artificial; identical to SEQ ID NO: 328157
  Synthetic oligonucleotide

SEQ ID NO: 547820 - DNA, 55 bp, Artificial; identical to SEQ ID NO: 328158
  Synthetic oligonucleotide

SEQ ID NO: 547821 - DNA, 55 bp, Artificial; identical to SEQ ID NO: 328159
  Synthetic oligonucleotide

SEQ ID NO: 547822 - DNA, 59 bp, Artificial; identical to SEQ ID NO: 328163
  Synthetic oligonucleotide

SEQ ID NO: 547823 - DNA, 60 bp, Artificial; identical to SEQ ID NO: 328166
  Synthetic oligonucleotide

SEQ ID NO: 547824 - DNA, 57 bp, Artificial; identical to SEQ ID NO: 328167
  Synthetic oligonucleotide

SEQ ID NO: 547825 - DNA, 56 bp, Artificial; identical to SEQ ID NO: 328168
  Synthetic oligonucleotide

SEQ ID NO: 547826 - DNA, 50 bp, Artificial; identical to SEQ ID NO: 328170
  Synthetic oligonucleotide

SEQ ID NO: 547827 - DNA, 60 bp, Artificial; identical to SEQ ID NO: 328180
  Synthetic oligonucleotide

SEQ ID NO: 547828 - DNA, 55 bp, Artificial; identical to SEQ ID NO: 328182
  Synthetic oligonucleotide

SEQ ID NO: 547829 - DNA, 60 bp, Artificial; identical to SEQ ID NO: 328183
  Synthetic oligonucleotide

SEQ ID NO: 547830 - DNA, 60 bp, Artificial; identical to SEQ ID NO: 328185
  Synthetic oligonucleotide

SEQ ID NO: 547831 - DNA, 59 bp, Artificial; identical to SEQ ID NO: 328187
  Synthetic oligonucleotide

SEQ ID NO: 547832 - DNA, 60 bp, Artificial; identical to SEQ ID NO: 328190
  Synthetic oligonucleotide

SEQ ID NO: 547833 - DNA, 60 bp, Artificial; identical to SEQ ID NO: 328194
  Synthetic oligonucleotide

SEQ ID NO: 547834 - DNA, 58 bp, Artificial; identical to SEQ ID NO: 328199
  Synthetic oligonucleotide

SEQ ID NO: 547835 - DNA, 55 bp, Artificial; identical to SEQ ID NO: 328201
  Synthetic oligonucleotide

SEQ ID NO: 547836 - DNA, 60 bp, Artificial; identical to SEQ ID NO: 328205
  Synthetic oligonucleotide

SEQ ID NO: 547837 - DNA, 60 bp, Artificial; identical to SEQ ID NO: 328206
  Synthetic oligonucleotide

SEQ ID NO: 547838 - DNA, 60 bp, Artificial; identical to SEQ ID NO: 328211
  Synthetic oligonucleotide

SEQ ID NO: 547839 - DNA, 60 bp, Artificial; identical to SEQ ID NO: 328213
  Synthetic oligonucleotide

SEQ ID NO: 547840 - DNA, 60 bp, Artificial; identical to SEQ ID NO: 328214
  Synthetic oligonucleotide

SEQ ID NO: 547841 - DNA, 60 bp, Artificial; identical to SEQ ID NO: 328215
  Synthetic oligonucleotide

SEQ ID NO: 547842 - DNA, 59 bp, Artificial; identical to SEQ ID NO: 328217
  Synthetic oligonucleotide

SEQ ID NO: 547843 - DNA, 53 bp, Artificial; identical to SEQ ID NO: 9624
  Synthetic oligonucleotide

SEQ ID NO: 547844 - DNA, 58 bp, Artificial; identical to SEQ ID NO: 328222
  Synthetic oligonucleotide

SEQ ID NO: 547845 - DNA, 52 bp, Artificial; identical to SEQ ID NO: 328224
  Synthetic oligonucleotide

SEQ ID NO: 547846 - DNA, 55 bp, Artificial; identical to SEQ ID NO: 328225
  Synthetic oligonucleotide

SEQ ID NO: 547847 - DNA, 55 bp, Artificial; identical to SEQ ID NO: 328227
  Synthetic oligonucleotide

SEQ ID NO: 547848 - DNA, 60 bp, Artificial; identical to SEQ ID NO: 328228
  Synthetic oligonucleotide

SEQ ID NO: 547849 - DNA, 55 bp, Artificial; identical to SEQ ID NO: 328230
  Synthetic oligonucleotide

SEQ ID NO: 547850 - DNA, 59 bp, Artificial; identical to SEQ ID NO: 328232
  Synthetic oligonucleotide

SEQ ID NO: 547851 - DNA, 60 bp, Artificial; identical to SEQ ID NO: 328233
  Synthetic oligonucleotide

SEQ ID NO: 547852 - DNA, 53 bp, Artificial; identical to SEQ ID NO: 328234
  Synthetic oligonucleotide

SEQ ID NO: 547853 - DNA, 60 bp, Artificial; identical to SEQ ID NO: 11156
  Synthetic oligonucleotide

SEQ ID NO: 547854 - DNA, 59 bp, Artificial; identical to SEQ ID NO: 328237
  Synthetic oligonucleotide

SEQ ID NO: 547855 - DNA, 60 bp, Artificial; identical to SEQ ID NO: 328243
  Synthetic oligonucleotide

SEQ ID NO: 547856 - DNA, 50 bp, Artificial; identical to SEQ ID NO: 328249
  Synthetic oligonucleotide

SEQ ID NO: 547857 - DNA, 52 bp, Artificial; identical to SEQ ID NO: 328251
  Synthetic oligonucleotide

SEQ ID NO: 547858 - DNA, 58 bp, Artificial; identical to SEQ ID NO: 328267
  Synthetic oligonucleotide

SEQ ID NO: 547859 - DNA, 59 bp, Artificial; identical to SEQ ID NO: 328268
  Synthetic oligonucleotide

SEQ ID NO: 547860 - DNA, 55 bp, Artificial; identical to SEQ ID NO: 328271
  Synthetic oligonucleotide

SEQ ID NO: 547861 - DNA, 54 bp, Artificial; identical to SEQ ID NO: 328275
  Synthetic oligonucleotide

SEQ ID NO: 547862 - DNA, 53 bp, Artificial; identical to SEQ ID NO: 328285
  Synthetic oligonucleotide

SEQ ID NO: 547863 - DNA, 56 bp, Artificial; identical to SEQ ID NO: 328287
  Synthetic oligonucleotide

SEQ ID NO: 547864 - DNA, 50 bp, Artificial; identical to SEQ ID NO: 328288
  Synthetic oligonucleotide

SEQ ID NO: 547865 - DNA, 53 bp, Artificial; identical to SEQ ID NO: 328289
  Synthetic oligonucleotide

SEQ ID NO: 547866 - DNA, 56 bp, Artificial; identical to SEQ ID NO: 328290
  Synthetic oligonucleotide

SEQ ID NO: 547867 - DNA, 50 bp, Artificial; identical to SEQ ID NO: 328296
  Synthetic oligonucleotide

SEQ ID NO: 547868 - DNA, 58 bp, Artificial; identical to SEQ ID NO: 328302
  Synthetic oligonucleotide

SEQ ID NO: 547869 - DNA, 60 bp, Artificial; identical to SEQ ID NO: 328304
  Synthetic oligonucleotide

SEQ ID NO: 547870 - DNA, 57 bp, Artificial; identical to SEQ ID NO: 328305
  Synthetic oligonucleotide

SEQ ID NO: 547871 - DNA, 60 bp, Artificial; identical to SEQ ID NO: 328306
  Synthetic oligonucleotide

SEQ ID NO: 547872 - DNA, 56 bp, Artificial; identical to SEQ ID NO: 328307
  Synthetic oligonucleotide

SEQ ID NO: 547873 - DNA, 54 bp, Artificial; identical to SEQ ID NO: 328309
  Synthetic oligonucleotide

SEQ ID NO: 547874 - DNA, 60 bp, Artificial; identical to SEQ ID NO: 328310
  Synthetic oligonucleotide

SEQ ID NO: 547875 - DNA, 55 bp, Artificial; identical to SEQ ID NO: 328311
  Synthetic oligonucleotide

SEQ ID NO: 547876 - DNA, 58 bp, Artificial; identical to SEQ ID NO: 328315
  Synthetic oligonucleotide

SEQ ID NO: 547877 - DNA, 60 bp, Artificial; identical to SEQ ID NO: 328316
  Synthetic oligonucleotide

SEQ ID NO: 547878 - DNA, 53 bp, Artificial; identical to SEQ ID NO: 328317
  Synthetic oligonucleotide

SEQ ID NO: 547879 - DNA, 50 bp, Artificial; identical to SEQ ID NO: 328318
  Synthetic oligonucleotide

SEQ ID NO: 547880 - DNA, 56 bp, Artificial; identical to SEQ ID NO: 328319
  Synthetic oligonucleotide

SEQ ID NO: 547881 - DNA, 59 bp, Artificial; identical to SEQ ID NO: 328325
  Synthetic oligonucleotide

SEQ ID NO: 547882 - DNA, 55 bp, Artificial; identical to SEQ ID NO: 328327
  Synthetic oligonucleotide

SEQ ID NO: 547883 - DNA, 57 bp, Artificial; identical to SEQ ID NO: 328333
  Synthetic oligonucleotide

SEQ ID NO: 547884 - DNA, 47 bp, Artificial; identical to SEQ ID NO: 328335
  Synthetic oligonucleotide

SEQ ID NO: 547885 - DNA, 55 bp, Artificial; identical to SEQ ID NO: 328340
  Synthetic oligonucleotide

SEQ ID NO: 547886 - DNA, 52 bp, Artificial; identical to SEQ ID NO: 328341
  Synthetic oligonucleotide

SEQ ID NO: 547887 - DNA, 60 bp, Artificial; identical to SEQ ID NO: 328342
  Synthetic oligonucleotide

SEQ ID NO: 547888 - DNA, 57 bp, Artificial; identical to SEQ ID NO: 19493
  Synthetic oligonucleotide

SEQ ID NO: 547889 - DNA, 60 bp, Artificial; identical to SEQ ID NO: 328344
  Synthetic oligonucleotide

SEQ ID NO: 547890 - DNA, 57 bp, Artificial; identical to SEQ ID NO: 328345
  Synthetic oligonucleotide

SEQ ID NO: 547891 - DNA, 55 bp, Artificial; identical to SEQ ID NO: 328347
  Synthetic oligonucleotide

SEQ ID NO: 547892 - DNA, 60 bp, Artificial; identical to SEQ ID NO: 328353
  Synthetic oligonucleotide

SEQ ID NO: 547893 - DNA, 55 bp, Artificial; identical to SEQ ID NO: 328356
  Synthetic oligonucleotide

SEQ ID NO: 547894 - DNA, 58 bp, Artificial; identical to SEQ ID NO: 328360
  Synthetic oligonucleotide

SEQ ID NO: 547895 - DNA, 57 bp, Artificial; identical to SEQ ID NO: 19085
  Synthetic oligonucleotide

SEQ ID NO: 547896 - DNA, 54 bp, Artificial; identical to SEQ ID NO: 328362
  Synthetic oligonucleotide

SEQ ID NO: 547897 - DNA, 51 bp, Artificial; identical to SEQ ID NO: 328363
  Synthetic oligonucleotide

SEQ ID NO: 547898 - DNA, 56 bp, Artificial; identical to SEQ ID NO: 328364
  Synthetic oligonucleotide

SEQ ID NO: 547899 - DNA, 53 bp, Artificial; identical to SEQ ID NO: 328365
  Synthetic oligonucleotide

SEQ ID NO: 547900 - DNA, 59 bp, Artificial; identical to SEQ ID NO: 17927
  Synthetic oligonucleotide

SEQ ID NO: 547901 - DNA, 54 bp, Artificial; identical to SEQ ID NO: 328369
  Synthetic oligonucleotide

SEQ ID NO: 547902 - DNA, 54 bp, Artificial; identical to SEQ ID NO: 328370
  Synthetic oligonucleotide

SEQ ID NO: 547903 - DNA, 59 bp, Artificial; identical to SEQ ID NO: 328374
  Synthetic oligonucleotide

SEQ ID NO: 547904 - DNA, 60 bp, Artificial; identical to SEQ ID NO: 328376
  Synthetic oligonucleotide

SEQ ID NO: 547905 - DNA, 58 bp, Artificial; identical to SEQ ID NO: 328378
  Synthetic oligonucleotide

SEQ ID NO: 547906 - DNA, 55 bp, Artificial; identical to SEQ ID NO: 328380
  Synthetic oligonucleotide

SEQ ID NO: 547907 - DNA, 60 bp, Artificial; identical to SEQ ID NO: 328381
  Synthetic oligonucleotide

SEQ ID NO: 547908 - DNA, 57 bp, Artificial; identical to SEQ ID NO: 328383
  Synthetic oligonucleotide

SEQ ID NO: 547909 - DNA, 57 bp, Artificial; identical to SEQ ID NO: 328384
  Synthetic oligonucleotide

SEQ ID NO: 547910 - DNA, 57 bp, Artificial; identical to SEQ ID NO: 328385
  Synthetic oligonucleotide

SEQ ID NO: 547911 - DNA, 60 bp, Artificial; identical to SEQ ID NO: 328386
  Synthetic oligonucleotide

SEQ ID NO: 547912 - DNA, 60 bp, Artificial; identical to SEQ ID NO: 328394
  Synthetic oligonucleotide

SEQ ID NO: 547913 - DNA, 54 bp, Artificial; identical to SEQ ID NO: 328398
  Synthetic oligonucleotide

SEQ ID NO: 547914 - DNA, 58 bp, Artificial; identical to SEQ ID NO: 328400
  Synthetic oligonucleotide

SEQ ID NO: 547915 - DNA, 53 bp, Artificial; identical to SEQ ID NO: 328403
  Synthetic oligonucleotide

SEQ ID NO: 547916 - DNA, 58 bp, Artificial; identical to SEQ ID NO: 328404
  Synthetic oligonucleotide

SEQ ID NO: 547917 - DNA, 54 bp, Artificial; identical to SEQ ID NO: 328408
  Synthetic oligonucleotide

SEQ ID NO: 547918 - DNA, 57 bp, Artificial; identical to SEQ ID NO: 328410
  Synthetic oligonucleotide

SEQ ID NO: 547919 - DNA, 58 bp, Artificial; identical to SEQ ID NO: 328412
  Synthetic oligonucleotide

SEQ ID NO: 547920 - DNA, 56 bp, Artificial; identical to SEQ ID NO: 328415
  Synthetic oligonucleotide

SEQ ID NO: 547921 - DNA, 53 bp, Artificial; identical to SEQ ID NO: 328418
  Synthetic oligonucleotide

SEQ ID NO: 547922 - DNA, 55 bp, Artificial; identical to SEQ ID NO: 328419
  Synthetic oligonucleotide

SEQ ID NO: 547923 - DNA, 55 bp, Artificial; identical to SEQ ID NO: 328423
  Synthetic oligonucleotide

SEQ ID NO: 547924 - DNA, 57 bp, Artificial; identical to SEQ ID NO: 328425
  Synthetic oligonucleotide

SEQ ID NO: 547925 - DNA, 56 bp, Artificial; identical to SEQ ID NO: 328427
  Synthetic oligonucleotide

SEQ ID NO: 547926 - DNA, 52 bp, Artificial; identical to SEQ ID NO: 328428
  Synthetic oligonucleotide

SEQ ID NO: 547927 - DNA, 60 bp, Artificial; identical to SEQ ID NO: 328431
  Synthetic oligonucleotide

SEQ ID NO: 547928 - DNA, 59 bp, Artificial; identical to SEQ ID NO: 328436
  Synthetic oligonucleotide

SEQ ID NO: 547929 - DNA, 56 bp, Artificial; identical to SEQ ID NO: 328445
  Synthetic oligonucleotide

SEQ ID NO: 547930 - DNA, 58 bp, Artificial; identical to SEQ ID NO: 16141
  Synthetic oligonucleotide

SEQ ID NO: 547931 - DNA, 60 bp, Artificial; identical to SEQ ID NO: 328446
  Synthetic oligonucleotide

SEQ ID NO: 547932 - DNA, 59 bp, Artificial; identical to SEQ ID NO: 328450
  Synthetic oligonucleotide

SEQ ID NO: 547933 - DNA, 57 bp, Artificial; identical to SEQ ID NO: 328454
  Synthetic oligonucleotide

SEQ ID NO: 547934 - DNA, 58 bp, Artificial; identical to SEQ ID NO: 328456
  Synthetic oligonucleotide

SEQ ID NO: 547935 - DNA, 56 bp, Artificial; identical to SEQ ID NO: 328459
  Synthetic oligonucleotide

SEQ ID NO: 547936 - DNA, 52 bp, Artificial; identical to SEQ ID NO: 328462
  Synthetic oligonucleotide

SEQ ID NO: 547937 - DNA, 60 bp, Artificial; identical to SEQ ID NO: 328464
  Synthetic oligonucleotide

SEQ ID NO: 547938 - DNA, 52 bp, Artificial; identical to SEQ ID NO: 328466
  Synthetic oligonucleotide

SEQ ID NO: 547939 - DNA, 59 bp, Artificial; identical to SEQ ID NO: 328473
  Synthetic oligonucleotide

SEQ ID NO: 547940 - DNA, 60 bp, Artificial; identical to SEQ ID NO: 328474
  Synthetic oligonucleotide

SEQ ID NO: 547941 - DNA, 60 bp, Artificial; identical to SEQ ID NO: 328476
  Synthetic oligonucleotide

SEQ ID NO: 547942 - DNA, 59 bp, Artificial; identical to SEQ ID NO: 328477
  Synthetic oligonucleotide

SEQ ID NO: 547943 - DNA, 60 bp, Artificial; identical to SEQ ID NO: 6893
  Synthetic oligonucleotide

SEQ ID NO: 547944 - DNA, 59 bp, Artificial; identical to SEQ ID NO: 328478
  Synthetic oligonucleotide

SEQ ID NO: 547945 - DNA, 57 bp, Artificial; identical to SEQ ID NO: 328479
  Synthetic oligonucleotide

SEQ ID NO: 547946 - DNA, 55 bp, Artificial; identical to SEQ ID NO: 328480
  Synthetic oligonucleotide

SEQ ID NO: 547947 - DNA, 53 bp, Artificial; identical to SEQ ID NO: 328481
  Synthetic oligonucleotide

SEQ ID NO: 547948 - DNA, 60 bp, Artificial; identical to SEQ ID NO: 328483
  Synthetic oligonucleotide

SEQ ID NO: 547949 - DNA, 59 bp, Artificial; identical to SEQ ID NO: 10543
  Synthetic oligonucleotide

SEQ ID NO: 547950 - DNA, 58 bp, Artificial; identical to SEQ ID NO: 328492
  Synthetic oligonucleotide

SEQ ID NO: 547951 - DNA, 53 bp, Artificial; identical to SEQ ID NO: 328498
  Synthetic oligonucleotide

SEQ ID NO: 547952 - DNA, 53 bp, Artificial; identical to SEQ ID NO: 328500
  Synthetic oligonucleotide

SEQ ID NO: 547953 - DNA, 60 bp, Artificial; identical to SEQ ID NO: 328501
  Synthetic oligonucleotide

SEQ ID NO: 547954 - DNA, 60 bp, Artificial; identical to SEQ ID NO: 328502
  Synthetic oligonucleotide

SEQ ID NO: 547955 - DNA, 57 bp, Artificial; identical to SEQ ID NO: 328503
  Synthetic oligonucleotide

SEQ ID NO: 547956 - DNA, 60 bp, Artificial; identical to SEQ ID NO: 328504
  Synthetic oligonucleotide

SEQ ID NO: 547957 - DNA, 53 bp, Artificial; identical to SEQ ID NO: 328508
  Synthetic oligonucleotide

SEQ ID NO: 547958 - DNA, 60 bp, Artificial; identical to SEQ ID NO: 14266
  Synthetic oligonucleotide

SEQ ID NO: 547959 - DNA, 53 bp, Artificial; identical to SEQ ID NO: 328509
  Synthetic oligonucleotide

SEQ ID NO: 547960 - DNA, 51 bp, Artificial; identical to SEQ ID NO: 328510
  Synthetic oligonucleotide

SEQ ID NO: 547961 - DNA, 55 bp, Artificial; identical to SEQ ID NO: 328512
  Synthetic oligonucleotide

SEQ ID NO: 547962 - DNA, 55 bp, Artificial; identical to SEQ ID NO: 328513
  Synthetic oligonucleotide

SEQ ID NO: 547963 - DNA, 57 bp, Artificial; identical to SEQ ID NO: 328515
  Synthetic oligonucleotide

SEQ ID NO: 547964 - DNA, 53 bp, Artificial; identical to SEQ ID NO: 328517
  Synthetic oligonucleotide

SEQ ID NO: 547965 - DNA, 54 bp, Artificial; identical to SEQ ID NO: 14659
  Synthetic oligonucleotide

SEQ ID NO: 547966 - DNA, 52 bp, Artificial; identical to SEQ ID NO: 328522
  Synthetic oligonucleotide

SEQ ID NO: 547967 - DNA, 57 bp, Artificial; identical to SEQ ID NO: 328523
  Synthetic oligonucleotide

SEQ ID NO: 547968 - DNA, 55 bp, Artificial; identical to SEQ ID NO: 15980
  Synthetic oligonucleotide

SEQ ID NO: 547969 - DNA, 60 bp, Artificial; identical to SEQ ID NO: 328526
  Synthetic oligonucleotide

SEQ ID NO: 547970 - DNA, 55 bp, Artificial; identical to SEQ ID NO: 328527
  Synthetic oligonucleotide

SEQ ID NO: 547971 - DNA, 60 bp, Artificial; identical to SEQ ID NO: 328531
  Synthetic oligonucleotide

SEQ ID NO: 547972 - DNA, 53 bp, Artificial; identical to SEQ ID NO: 328536
  Synthetic oligonucleotide

SEQ ID NO: 547973 - DNA, 59 bp, Artificial; identical to SEQ ID NO: 328544
  Synthetic oligonucleotide

SEQ ID NO: 547974 - DNA, 57 bp, Artificial; identical to SEQ ID NO: 328547
  Synthetic oligonucleotide

SEQ ID NO: 547975 - DNA, 57 bp, Artificial; identical to SEQ ID NO: 328548
  Synthetic oligonucleotide

SEQ ID NO: 547976 - DNA, 57 bp, Artificial; identical to SEQ ID NO: 328551
  Synthetic oligonucleotide

SEQ ID NO: 547977 - DNA, 53 bp, Artificial; identical to SEQ ID NO: 328552
  Synthetic oligonucleotide

SEQ ID NO: 547978 - DNA, 55 bp, Artificial; identical to SEQ ID NO: 328556
  Synthetic oligonucleotide

SEQ ID NO: 547979 - DNA, 56 bp, Artificial; identical to SEQ ID NO: 328557
  Synthetic oligonucleotide

SEQ ID NO: 547980 - DNA, 53 bp, Artificial; identical to SEQ ID NO: 328564
  Synthetic oligonucleotide

SEQ ID NO: 547981 - DNA, 60 bp, Artificial; identical to SEQ ID NO: 328565
  Synthetic oligonucleotide

SEQ ID NO: 547982 - DNA, 60 bp, Artificial; identical to SEQ ID NO: 328566
  Synthetic oligonucleotide

SEQ ID NO: 547983 - DNA, 60 bp, Artificial; identical to SEQ ID NO: 328570
  Synthetic oligonucleotide

SEQ ID NO: 547984 - DNA, 60 bp, Artificial; identical to SEQ ID NO: 328572
  Synthetic oligonucleotide

SEQ ID NO: 547985 - DNA, 60 bp, Artificial; identical to SEQ ID NO: 328573
  Synthetic oligonucleotide

SEQ ID NO: 547986 - DNA, 60 bp, Artificial; identical to SEQ ID NO: 328576
  Synthetic oligonucleotide

SEQ ID NO: 547987 - DNA, 55 bp, Artificial; identical to SEQ ID NO: 328581
  Synthetic oligonucleotide

SEQ ID NO: 547988 - DNA, 59 bp, Artificial; identical to SEQ ID NO: 328584
  Synthetic oligonucleotide

SEQ ID NO: 547989 - DNA, 59 bp, Artificial; identical to SEQ ID NO: 328585
  Synthetic oligonucleotide

SEQ ID NO: 547990 - DNA, 55 bp, Artificial; identical to SEQ ID NO: 328586
  Synthetic oligonucleotide

SEQ ID NO: 547991 - DNA, 58 bp, Artificial; identical to SEQ ID NO: 328588
  Synthetic oligonucleotide

SEQ ID NO: 547992 - DNA, 60 bp, Artificial; identical to SEQ ID NO: 328589
  Synthetic oligonucleotide

SEQ ID NO: 547993 - DNA, 53 bp, Artificial; identical to SEQ ID NO: 328593
  Synthetic oligonucleotide

SEQ ID NO: 547994 - DNA, 58 bp, Artificial; identical to SEQ ID NO: 328594
  Synthetic oligonucleotide

SEQ ID NO: 547995 - DNA, 55 bp, Artificial; identical to SEQ ID NO: 328596
  Synthetic oligonucleotide

SEQ ID NO: 547996 - DNA, 57 bp, Artificial; identical to SEQ ID NO: 328598
  Synthetic oligonucleotide

SEQ ID NO: 547997 - DNA, 59 bp, Artificial; identical to SEQ ID NO: 328600
  Synthetic oligonucleotide

SEQ ID NO: 547998 - DNA, 55 bp, Artificial; identical to SEQ ID NO: 328605
  Synthetic oligonucleotide

SEQ ID NO: 547999 - DNA, 60 bp, Artificial; identical to SEQ ID NO: 328608
  Synthetic oligonucleotide

SEQ ID NO: 548000 - DNA, 52 bp, Artificial; identical to SEQ ID NO: 328612
  Synthetic oligonucleotide

SEQ ID NO: 548001 - DNA, 55 bp, Artificial; identical to SEQ ID NO: 328613
  Synthetic oligonucleotide

SEQ ID NO: 548002 - DNA, 50 bp, Artificial; identical to SEQ ID NO: 328615
  Synthetic oligonucleotide

SEQ ID NO: 548003 - DNA, 60 bp, Artificial; identical to SEQ ID NO: 5759
  Synthetic oligonucleotide

SEQ ID NO: 548004 - DNA, 55 bp, Artificial; identical to SEQ ID NO: 328617
  Synthetic oligonucleotide

SEQ ID NO: 548005 - DNA, 60 bp, Artificial; identical to SEQ ID NO: 328621
  Synthetic oligonucleotide

SEQ ID NO: 548006 - DNA, 56 bp, Artificial; identical to SEQ ID NO: 328624
  Synthetic oligonucleotide

SEQ ID NO: 548007 - DNA, 60 bp, Artificial; identical to SEQ ID NO: 328625
  Synthetic oligonucleotide

SEQ ID NO: 548008 - DNA, 57 bp, Artificial; identical to SEQ ID NO: 328627
  Synthetic oligonucleotide

SEQ ID NO: 548009 - DNA, 58 bp, Artificial; identical to SEQ ID NO: 328632
  Synthetic oligonucleotide

SEQ ID NO: 548010 - DNA, 60 bp, Artificial; identical to SEQ ID NO: 328635
  Synthetic oligonucleotide

SEQ ID NO: 548011 - DNA, 60 bp, Artificial; identical to SEQ ID NO: 328636
  Synthetic oligonucleotide

SEQ ID NO: 548012 - DNA, 56 bp, Artificial; identical to SEQ ID NO: 328641
  Synthetic oligonucleotide

SEQ ID NO: 548013 - DNA, 60 bp, Artificial; identical to SEQ ID NO: 328643
  Synthetic oligonucleotide

SEQ ID NO: 548014 - DNA, 59 bp, Artificial; identical to SEQ ID NO: 328644
  Synthetic oligonucleotide

SEQ ID NO: 548015 - DNA, 55 bp, Artificial; identical to SEQ ID NO: 328647
  Synthetic oligonucleotide

SEQ ID NO: 548016 - DNA, 60 bp, Artificial; identical to SEQ ID NO: 328649
  Synthetic oligonucleotide

SEQ ID NO: 548017 - DNA, 58 bp, Artificial; identical to SEQ ID NO: 328650
  Synthetic oligonucleotide

SEQ ID NO: 548018 - DNA, 59 bp, Artificial; identical to SEQ ID NO: 328654
  Synthetic oligonucleotide

SEQ ID NO: 548019 - DNA, 60 bp, Artificial; identical to SEQ ID NO: 328655
  Synthetic oligonucleotide

SEQ ID NO: 548020 - DNA, 55 bp, Artificial; identical to SEQ ID NO: 328658
  Synthetic oligonucleotide

SEQ ID NO: 548021 - DNA, 55 bp, Artificial; identical to SEQ ID NO: 328660
  Synthetic oligonucleotide

SEQ ID NO: 548022 - DNA, 55 bp, Artificial; identical to SEQ ID NO: 328661
  Synthetic oligonucleotide

SEQ ID NO: 548023 - DNA, 55 bp, Artificial; identical to SEQ ID NO: 328663
  Synthetic oligonucleotide

SEQ ID NO: 548024 - DNA, 56 bp, Artificial; identical to SEQ ID NO: 328666
  Synthetic oligonucleotide

SEQ ID NO: 548025 - DNA, 59 bp, Artificial; identical to SEQ ID NO: 328668
  Synthetic oligonucleotide

SEQ ID NO: 548026 - DNA, 55 bp, Artificial; identical to SEQ ID NO: 328675
  Synthetic oligonucleotide

SEQ ID NO: 548027 - DNA, 58 bp, Artificial; identical to SEQ ID NO: 328678
  Synthetic oligonucleotide

SEQ ID NO: 548028 - DNA, 54 bp, Artificial; identical to SEQ ID NO: 328679
  Synthetic oligonucleotide

SEQ ID NO: 548029 - DNA, 57 bp, Artificial; identical to SEQ ID NO: 328682
  Synthetic oligonucleotide

SEQ ID NO: 548030 - DNA, 58 bp, Artificial; identical to SEQ ID NO: 328683
  Synthetic oligonucleotide

SEQ ID NO: 548031 - DNA, 60 bp, Artificial; identical to SEQ ID NO: 328686
  Synthetic oligonucleotide

SEQ ID NO: 548032 - DNA, 54 bp, Artificial; identical to SEQ ID NO: 328687
  Synthetic oligonucleotide

SEQ ID NO: 548033 - DNA, 56 bp, Artificial; identical to SEQ ID NO: 328688
  Synthetic oligonucleotide

SEQ ID NO: 548034 - DNA, 57 bp, Artificial; identical to SEQ ID NO: 328693
  Synthetic oligonucleotide

SEQ ID NO: 548035 - DNA, 59 bp, Artificial; identical to SEQ ID NO: 328694
  Synthetic oligonucleotide

SEQ ID NO: 548036 - DNA, 60 bp, Artificial; identical to SEQ ID NO: 328696
  Synthetic oligonucleotide

SEQ ID NO: 548037 - DNA, 57 bp, Artificial; identical to SEQ ID NO: 328699
  Synthetic oligonucleotide

SEQ ID NO: 548038 - DNA, 56 bp, Artificial; identical to SEQ ID NO: 13844
  Synthetic oligonucleotide

SEQ ID NO: 548039 - DNA, 55 bp, Artificial; identical to SEQ ID NO: 328700
  Synthetic oligonucleotide

SEQ ID NO: 548040 - DNA, 54 bp, Artificial; identical to SEQ ID NO: 328701
  Synthetic oligonucleotide

SEQ ID NO: 548041 - DNA, 58 bp, Artificial; identical to SEQ ID NO: 17766
  Synthetic oligonucleotide

SEQ ID NO: 548042 - DNA, 54 bp, Artificial; identical to SEQ ID NO: 17218
  Synthetic oligonucleotide

SEQ ID NO: 548043 - DNA, 60 bp, Artificial; identical to SEQ ID NO: 328702
  Synthetic oligonucleotide

SEQ ID NO: 548044 - DNA, 55 bp, Artificial; identical to SEQ ID NO: 328705
  Synthetic oligonucleotide

SEQ ID NO: 548045 - DNA, 58 bp, Artificial; identical to SEQ ID NO: 328707
  Synthetic oligonucleotide

SEQ ID NO: 548046 - DNA, 60 bp, Artificial; identical to SEQ ID NO: 328710
  Synthetic oligonucleotide

SEQ ID NO: 548047 - DNA, 53 bp, Artificial; identical to SEQ ID NO: 328715
  Synthetic oligonucleotide

SEQ ID NO: 548048 - DNA, 58 bp, Artificial; identical to SEQ ID NO: 328716
  Synthetic oligonucleotide

SEQ ID NO: 548049 - DNA, 56 bp, Artificial; identical to SEQ ID NO: 328720
  Synthetic oligonucleotide

SEQ ID NO: 548050 - DNA, 60 bp, Artificial; identical to SEQ ID NO: 328722
  Synthetic oligonucleotide

SEQ ID NO: 548051 - DNA, 59 bp, Artificial; identical to SEQ ID NO: 328723
  Synthetic oligonucleotide

SEQ ID NO: 548052 - DNA, 58 bp, Artificial; identical to SEQ ID NO: 328746
  Synthetic oligonucleotide

SEQ ID NO: 548053 - DNA, 57 bp, Artificial; identical to SEQ ID NO: 328747
  Synthetic oligonucleotide

SEQ ID NO: 548054 - DNA, 55 bp, Artificial; identical to SEQ ID NO: 328750
  Synthetic oligonucleotide

SEQ ID NO: 548055 - DNA, 57 bp, Artificial; identical to SEQ ID NO: 328751
  Synthetic oligonucleotide

SEQ ID NO: 548056 - DNA, 58 bp, Artificial; identical to SEQ ID NO: 328753
  Synthetic oligonucleotide

SEQ ID NO: 548057 - DNA, 59 bp, Artificial; identical to SEQ ID NO: 328758
  Synthetic oligonucleotide

SEQ ID NO: 548058 - DNA, 57 bp, Artificial; identical to SEQ ID NO: 328759
  Synthetic oligonucleotide

SEQ ID NO: 548059 - DNA, 51 bp, Artificial; identical to SEQ ID NO: 328760
  Synthetic oligonucleotide

SEQ ID NO: 548060 - DNA, 60 bp, Artificial; identical to SEQ ID NO: 328761
  Synthetic oligonucleotide

SEQ ID NO: 548061 - DNA, 55 bp, Artificial; identical to SEQ ID NO: 328763
  Synthetic oligonucleotide

SEQ ID NO: 548062 - DNA, 56 bp, Artificial; identical to SEQ ID NO: 328764
  Synthetic oligonucleotide

SEQ ID NO: 548063 - DNA, 51 bp, Artificial; identical to SEQ ID NO: 328765
  Synthetic oligonucleotide

SEQ ID NO: 548064 - DNA, 58 bp, Artificial; identical to SEQ ID NO: 328766
  Synthetic oligonucleotide

SEQ ID NO: 548065 - DNA, 59 bp, Artificial; identical to SEQ ID NO: 328770
  Synthetic oligonucleotide

SEQ ID NO: 548066 - DNA, 53 bp, Artificial; identical to SEQ ID NO: 328772
  Synthetic oligonucleotide

SEQ ID NO: 548067 - DNA, 52 bp, Artificial; identical to SEQ ID NO: 328774
  Synthetic oligonucleotide

SEQ ID NO: 548068 - DNA, 55 bp, Artificial; identical to SEQ ID NO: 328776
  Synthetic oligonucleotide

SEQ ID NO: 548069 - DNA, 58 bp, Artificial; identical to SEQ ID NO: 328778
  Synthetic oligonucleotide

SEQ ID NO: 548070 - DNA, 60 bp, Artificial; identical to SEQ ID NO: 328780
  Synthetic oligonucleotide

SEQ ID NO: 548071 - DNA, 55 bp, Artificial; identical to SEQ ID NO: 328781
  Synthetic oligonucleotide

SEQ ID NO: 548072 - DNA, 55 bp, Artificial; identical to SEQ ID NO: 328783
  Synthetic oligonucleotide

SEQ ID NO: 548073 - DNA, 53 bp, Artificial; identical to SEQ ID NO: 328789
  Synthetic oligonucleotide

SEQ ID NO: 548074 - DNA, 60 bp, Artificial; identical to SEQ ID NO: 328791
  Synthetic oligonucleotide

SEQ ID NO: 548075 - DNA, 59 bp, Artificial; identical to SEQ ID NO: 328800
  Synthetic oligonucleotide

SEQ ID NO: 548076 - DNA, 52 bp, Artificial; identical to SEQ ID NO: 328802
  Synthetic oligonucleotide

SEQ ID NO: 548077 - DNA, 60 bp, Artificial; identical to SEQ ID NO: 328808
  Synthetic oligonucleotide

SEQ ID NO: 548078 - DNA, 57 bp, Artificial; identical to SEQ ID NO: 328810
  Synthetic oligonucleotide

SEQ ID NO: 548079 - DNA, 53 bp, Artificial; identical to SEQ ID NO: 328813
  Synthetic oligonucleotide

SEQ ID NO: 548080 - DNA, 54 bp, Artificial; identical to SEQ ID NO: 328814
  Synthetic oligonucleotide

SEQ ID NO: 548081 - DNA, 55 bp, Artificial; identical to SEQ ID NO: 328818
  Synthetic oligonucleotide

SEQ ID NO: 548082 - DNA, 60 bp, Artificial; identical to SEQ ID NO: 328821
  Synthetic oligonucleotide

SEQ ID NO: 548083 - DNA, 53 bp, Artificial; identical to SEQ ID NO: 328822
  Synthetic oligonucleotide

SEQ ID NO: 548084 - DNA, 55 bp, Artificial; identical to SEQ ID NO: 328823
  Synthetic oligonucleotide

SEQ ID NO: 548085 - DNA, 56 bp, Artificial; identical to SEQ ID NO: 328826
  Synthetic oligonucleotide

SEQ ID NO: 548086 - DNA, 60 bp, Artificial; identical to SEQ ID NO: 328828
  Synthetic oligonucleotide

SEQ ID NO: 548087 - DNA, 55 bp, Artificial; identical to SEQ ID NO: 328829
  Synthetic oligonucleotide

SEQ ID NO: 548088 - DNA, 52 bp, Artificial; identical to SEQ ID NO: 328830
  Synthetic oligonucleotide

SEQ ID NO: 548089 - DNA, 55 bp, Artificial; identical to SEQ ID NO: 328831
  Synthetic oligonucleotide

SEQ ID NO: 548090 - DNA, 60 bp, Artificial; identical to SEQ ID NO: 328832
  Synthetic oligonucleotide

SEQ ID NO: 548091 - DNA, 60 bp, Artificial; identical to SEQ ID NO: 328833
  Synthetic oligonucleotide

SEQ ID NO: 548092 - DNA, 53 bp, Artificial; identical to SEQ ID NO: 328835
  Synthetic oligonucleotide

SEQ ID NO: 548093 - DNA, 54 bp, Artificial; identical to SEQ ID NO: 328837
  Synthetic oligonucleotide

SEQ ID NO: 548094 - DNA, 56 bp, Artificial; identical to SEQ ID NO: 328845
  Synthetic oligonucleotide

SEQ ID NO: 548095 - DNA, 53 bp, Artificial; identical to SEQ ID NO: 328847
  Synthetic oligonucleotide

SEQ ID NO: 548096 - DNA, 56 bp, Artificial; identical to SEQ ID NO: 328857
  Synthetic oligonucleotide

SEQ ID NO: 548097 - DNA, 52 bp, Artificial; identical to SEQ ID NO: 328858
  Synthetic oligonucleotide

SEQ ID NO: 548098 - DNA, 59 bp, Artificial; identical to SEQ ID NO: 328859
  Synthetic oligonucleotide

SEQ ID NO: 548099 - DNA, 57 bp, Artificial; identical to SEQ ID NO: 328860
  Synthetic oligonucleotide

SEQ ID NO: 548100 - DNA, 60 bp, Artificial; identical to SEQ ID NO: 328865
  Synthetic oligonucleotide

SEQ ID NO: 548101 - DNA, 60 bp, Artificial; identical to SEQ ID NO: 328867
  Synthetic oligonucleotide

SEQ ID NO: 548102 - DNA, 51 bp, Artificial; identical to SEQ ID NO: 328868
  Synthetic oligonucleotide

SEQ ID NO: 548103 - DNA, 55 bp, Artificial; identical to SEQ ID NO: 328870
  Synthetic oligonucleotide

SEQ ID NO: 548104 - DNA, 60 bp, Artificial; identical to SEQ ID NO: 328871
  Synthetic oligonucleotide

SEQ ID NO: 548105 - DNA, 58 bp, Artificial; identical to SEQ ID NO: 328873
  Synthetic oligonucleotide

SEQ ID NO: 548106 - DNA, 56 bp, Artificial; identical to SEQ ID NO: 328874
  Synthetic oligonucleotide

SEQ ID NO: 548107 - DNA, 51 bp, Artificial; identical to SEQ ID NO: 328876
  Synthetic oligonucleotide

SEQ ID NO: 548108 - DNA, 60 bp, Artificial; identical to SEQ ID NO: 328877
  Synthetic oligonucleotide

SEQ ID NO: 548109 - DNA, 56 bp, Artificial; identical to SEQ ID NO: 328880
  Synthetic oligonucleotide

SEQ ID NO: 548110 - DNA, 50 bp, Artificial; identical to SEQ ID NO: 328882
  Synthetic oligonucleotide

SEQ ID NO: 548111 - DNA, 55 bp, Artificial; identical to SEQ ID NO: 328884
  Synthetic oligonucleotide

SEQ ID NO: 548112 - DNA, 58 bp, Artificial; identical to SEQ ID NO: 18815
  Synthetic oligonucleotide

SEQ ID NO: 548113 - DNA, 55 bp, Artificial; identical to SEQ ID NO: 328886
  Synthetic oligonucleotide

SEQ ID NO: 548114 - DNA, 60 bp, Artificial; identical to SEQ ID NO: 328889
  Synthetic oligonucleotide

SEQ ID NO: 548115 - DNA, 52 bp, Artificial; identical to SEQ ID NO: 328890
  Synthetic oligonucleotide

SEQ ID NO: 548116 - DNA, 60 bp, Artificial; identical to SEQ ID NO: 328891
  Synthetic oligonucleotide

SEQ ID NO: 548117 - DNA, 60 bp, Artificial; identical to SEQ ID NO: 328895
  Synthetic oligonucleotide

SEQ ID NO: 548118 - DNA, 58 bp, Artificial; identical to SEQ ID NO: 328898
  Synthetic oligonucleotide

SEQ ID NO: 548119 - DNA, 60 bp, Artificial; identical to SEQ ID NO: 328901
  Synthetic oligonucleotide

SEQ ID NO: 548120 - DNA, 53 bp, Artificial; identical to SEQ ID NO: 328904
  Synthetic oligonucleotide

SEQ ID NO: 548121 - DNA, 60 bp, Artificial; identical to SEQ ID NO: 328907
  Synthetic oligonucleotide

SEQ ID NO: 548122 - DNA, 60 bp, Artificial; identical to SEQ ID NO: 328908
  Synthetic oligonucleotide

SEQ ID NO: 548123 - DNA, 60 bp, Artificial; identical to SEQ ID NO: 328912
  Synthetic oligonucleotide

SEQ ID NO: 548124 - DNA, 60 bp, Artificial; identical to SEQ ID NO: 328916
  Synthetic oligonucleotide

SEQ ID NO: 548125 - DNA, 59 bp, Artificial; identical to SEQ ID NO: 328918
  Synthetic oligonucleotide

SEQ ID NO: 548126 - DNA, 51 bp, Artificial; identical to SEQ ID NO: 328919
  Synthetic oligonucleotide

SEQ ID NO: 548127 - DNA, 60 bp, Artificial; identical to SEQ ID NO: 328920
  Synthetic oligonucleotide

SEQ ID NO: 548128 - DNA, 60 bp, Artificial; identical to SEQ ID NO: 328921
  Synthetic oligonucleotide

SEQ ID NO: 548129 - DNA, 54 bp, Artificial; identical to SEQ ID NO: 328922
  Synthetic oligonucleotide

SEQ ID NO: 548130 - DNA, 55 bp, Artificial; identical to SEQ ID NO: 328927
  Synthetic oligonucleotide

SEQ ID NO: 548131 - DNA, 53 bp, Artificial; identical to SEQ ID NO: 328930
  Synthetic oligonucleotide

SEQ ID NO: 548132 - DNA, 55 bp, Artificial; identical to SEQ ID NO: 328931
  Synthetic oligonucleotide

SEQ ID NO: 548133 - DNA, 58 bp, Artificial; identical to SEQ ID NO: 328933
  Synthetic oligonucleotide

SEQ ID NO: 548134 - DNA, 60 bp, Artificial; identical to SEQ ID NO: 328937
  Synthetic oligonucleotide

SEQ ID NO: 548135 - DNA, 59 bp, Artificial; identical to SEQ ID NO: 12712
  Synthetic oligonucleotide

SEQ ID NO: 548136 - DNA, 57 bp, Artificial; identical to SEQ ID NO: 328941
  Synthetic oligonucleotide

SEQ ID NO: 548137 - DNA, 60 bp, Artificial; identical to SEQ ID NO: 328943
  Synthetic oligonucleotide

SEQ ID NO: 548138 - DNA, 60 bp, Artificial; identical to SEQ ID NO: 328947
  Synthetic oligonucleotide

SEQ ID NO: 548139 - DNA, 60 bp, Artificial; identical to SEQ ID NO: 328949
  Synthetic oligonucleotide

SEQ ID NO: 548140 - DNA, 60 bp, Artificial; identical to SEQ ID NO: 328950
  Synthetic oligonucleotide

SEQ ID NO: 548141 - DNA, 60 bp, Artificial; identical to SEQ ID NO: 328954
  Synthetic oligonucleotide

SEQ ID NO: 548142 - DNA, 55 bp, Artificial; identical to SEQ ID NO: 328959
  Synthetic oligonucleotide

SEQ ID NO: 548143 - DNA, 59 bp, Artificial; identical to SEQ ID NO: 328961
  Synthetic oligonucleotide

SEQ ID NO: 548144 - DNA, 59 bp, Artificial; identical to SEQ ID NO: 328963
  Synthetic oligonucleotide

SEQ ID NO: 548145 - DNA, 55 bp, Artificial; identical to SEQ ID NO: 328964
  Synthetic oligonucleotide

SEQ ID NO: 548146 - DNA, 54 bp, Artificial; identical to SEQ ID NO: 7754
  Synthetic oligonucleotide

SEQ ID NO: 548147 - DNA, 59 bp, Artificial; identical to SEQ ID NO: 328967
  Synthetic oligonucleotide

SEQ ID NO: 548148 - DNA, 55 bp, Artificial; identical to SEQ ID NO: 328968
  Synthetic oligonucleotide

SEQ ID NO: 548149 - DNA, 60 bp, Artificial; identical to SEQ ID NO: 328969
  Synthetic oligonucleotide

SEQ ID NO: 548150 - DNA, 53 bp, Artificial; identical to SEQ ID NO: 328975
  Synthetic oligonucleotide

SEQ ID NO: 548151 - DNA, 60 bp, Artificial; identical to SEQ ID NO: 328976
  Synthetic oligonucleotide

SEQ ID NO: 548152 - DNA, 55 bp, Artificial; identical to SEQ ID NO: 328977
  Synthetic oligonucleotide

SEQ ID NO: 548153 - DNA, 53 bp, Artificial; identical to SEQ ID NO: 328980
  Synthetic oligonucleotide

SEQ ID NO: 548154 - DNA, 56 bp, Artificial; identical to SEQ ID NO: 328986
  Synthetic oligonucleotide

SEQ ID NO: 548155 - DNA, 58 bp, Artificial; identical to SEQ ID NO: 328990
  Synthetic oligonucleotide

SEQ ID NO: 548156 - DNA, 52 bp, Artificial; identical to SEQ ID NO: 328995
  Synthetic oligonucleotide

SEQ ID NO: 548157 - DNA, 51 bp, Artificial; identical to SEQ ID NO: 328996
  Synthetic oligonucleotide

SEQ ID NO: 548158 - DNA, 58 bp, Artificial; identical to SEQ ID NO: 328997
  Synthetic oligonucleotide

SEQ ID NO: 548159 - DNA, 60 bp, Artificial; identical to SEQ ID NO: 328998
  Synthetic oligonucleotide

SEQ ID NO: 548160 - DNA, 55 bp, Artificial; identical to SEQ ID NO: 14178
  Synthetic oligonucleotide

SEQ ID NO: 548161 - DNA, 55 bp, Artificial; identical to SEQ ID NO: 329006
  Synthetic oligonucleotide

SEQ ID NO: 548162 - DNA, 60 bp, Artificial; identical to SEQ ID NO: 329007
  Synthetic oligonucleotide

SEQ ID NO: 548163 - DNA, 60 bp, Artificial; identical to SEQ ID NO: 329012
  Synthetic oligonucleotide

SEQ ID NO: 548164 - DNA, 60 bp, Artificial; identical to SEQ ID NO: 329013
  Synthetic oligonucleotide

SEQ ID NO: 548165 - DNA, 59 bp, Artificial; identical to SEQ ID NO: 329015
  Synthetic oligonucleotide

SEQ ID NO: 548166 - DNA, 60 bp, Artificial; identical to SEQ ID NO: 7222
  Synthetic oligonucleotide

SEQ ID NO: 548167 - DNA, 60 bp, Artificial; identical to SEQ ID NO: 329026
  Synthetic oligonucleotide

SEQ ID NO: 548168 - DNA, 60 bp, Artificial; identical to SEQ ID NO: 329030
  Synthetic oligonucleotide

SEQ ID NO: 548169 - DNA, 60 bp, Artificial; identical to SEQ ID NO: 14262
  Synthetic oligonucleotide

SEQ ID NO: 548170 - DNA, 55 bp, Artificial; identical to SEQ ID NO: 329031
  Synthetic oligonucleotide

SEQ ID NO: 548171 - DNA, 60 bp, Artificial; identical to SEQ ID NO: 329034
  Synthetic oligonucleotide

SEQ ID NO: 548172 - DNA, 60 bp, Artificial; identical to SEQ ID NO: 329035
  Synthetic oligonucleotide

SEQ ID NO: 548173 - DNA, 57 bp, Artificial; identical to SEQ ID NO: 329037
  Synthetic oligonucleotide

SEQ ID NO: 548174 - DNA, 59 bp, Artificial; identical to SEQ ID NO: 329038
  Synthetic oligonucleotide

SEQ ID NO: 548175 - DNA, 55 bp, Artificial; identical to SEQ ID NO: 329040
  Synthetic oligonucleotide

SEQ ID NO: 548176 - DNA, 60 bp, Artificial; identical to SEQ ID NO: 7533
  Synthetic oligonucleotide

SEQ ID NO: 548177 - DNA, 60 bp, Artificial; identical to SEQ ID NO: 329041
  Synthetic oligonucleotide

SEQ ID NO: 548178 - DNA, 60 bp, Artificial; identical to SEQ ID NO: 329042
  Synthetic oligonucleotide

SEQ ID NO: 548179 - DNA, 55 bp, Artificial; identical to SEQ ID NO: 329046
  Synthetic oligonucleotide

SEQ ID NO: 548180 - DNA, 60 bp, Artificial; identical to SEQ ID NO: 329048
  Synthetic oligonucleotide

SEQ ID NO: 548181 - DNA, 58 bp, Artificial; identical to SEQ ID NO: 329051
  Synthetic oligonucleotide

SEQ ID NO: 548182 - DNA, 60 bp, Artificial; identical to SEQ ID NO: 329052
  Synthetic oligonucleotide

SEQ ID NO: 548183 - DNA, 60 bp, Artificial; identical to SEQ ID NO: 329053
  Synthetic oligonucleotide

SEQ ID NO: 548184 - DNA, 60 bp, Artificial; identical to SEQ ID NO: 329055
  Synthetic oligonucleotide

SEQ ID NO: 548185 - DNA, 57 bp, Artificial; identical to SEQ ID NO: 329057
  Synthetic oligonucleotide

SEQ ID NO: 548186 - DNA, 55 bp, Artificial; identical to SEQ ID NO: 329058
  Synthetic oligonucleotide

SEQ ID NO: 548187 - DNA, 60 bp, Artificial; identical to SEQ ID NO: 329059
  Synthetic oligonucleotide

SEQ ID NO: 548188 - DNA, 58 bp, Artificial; identical to SEQ ID NO: 329060
  Synthetic oligonucleotide

SEQ ID NO: 548189 - DNA, 57 bp, Artificial; identical to SEQ ID NO: 329061
  Synthetic oligonucleotide

SEQ ID NO: 548190 - DNA, 60 bp, Artificial; identical to SEQ ID NO: 329064
  Synthetic oligonucleotide

SEQ ID NO: 548191 - DNA, 60 bp, Artificial; identical to SEQ ID NO: 329066
  Synthetic oligonucleotide

SEQ ID NO: 548192 - DNA, 58 bp, Artificial; identical to SEQ ID NO: 329067
  Synthetic oligonucleotide

SEQ ID NO: 548193 - DNA, 60 bp, Artificial; identical to SEQ ID NO: 329068
  Synthetic oligonucleotide

SEQ ID NO: 548194 - DNA, 52 bp, Artificial; identical to SEQ ID NO: 329069
  Synthetic oligonucleotide

SEQ ID NO: 548195 - DNA, 51 bp, Artificial; identical to SEQ ID NO: 329070
  Synthetic oligonucleotide

SEQ ID NO: 548196 - DNA, 55 bp, Artificial; identical to SEQ ID NO: 329072
  Synthetic oligonucleotide

SEQ ID NO: 548197 - DNA, 57 bp, Artificial; identical to SEQ ID NO: 329073
  Synthetic oligonucleotide

SEQ ID NO: 548198 - DNA, 55 bp, Artificial; identical to SEQ ID NO: 329074
  Synthetic oligonucleotide

SEQ ID NO: 548199 - DNA, 60 bp, Artificial; identical to SEQ ID NO: 329076
  Synthetic oligonucleotide

SEQ ID NO: 548200 - DNA, 56 bp, Artificial; identical to SEQ ID NO: 329077
  Synthetic oligonucleotide

SEQ ID NO: 548201 - DNA, 60 bp, Artificial; identical to SEQ ID NO: 7448
  Synthetic oligonucleotide

SEQ ID NO: 548202 - DNA, 60 bp, Artificial; identical to SEQ ID NO: 329086
  Synthetic oligonucleotide

SEQ ID NO: 548203 - DNA, 57 bp, Artificial; identical to SEQ ID NO: 329089
  Synthetic oligonucleotide

SEQ ID NO: 548204 - DNA, 55 bp, Artificial; identical to SEQ ID NO: 329090
  Synthetic oligonucleotide

SEQ ID NO: 548205 - DNA, 60 bp, Artificial; identical to SEQ ID NO: 329095
  Synthetic oligonucleotide

SEQ ID NO: 548206 - DNA, 56 bp, Artificial; identical to SEQ ID NO: 329103
  Synthetic oligonucleotide

SEQ ID NO: 548207 - DNA, 60 bp, Artificial; identical to SEQ ID NO: 329104
  Synthetic oligonucleotide

SEQ ID NO: 548208 - DNA, 60 bp, Artificial; identical to SEQ ID NO: 329105
  Synthetic oligonucleotide

SEQ ID NO: 548209 - DNA, 56 bp, Artificial; identical to SEQ ID NO: 329107
  Synthetic oligonucleotide

SEQ ID NO: 548210 - DNA, 59 bp, Artificial; identical to SEQ ID NO: 19119
  Synthetic oligonucleotide

SEQ ID NO: 548211 - DNA, 59 bp, Artificial; identical to SEQ ID NO: 329109
  Synthetic oligonucleotide

SEQ ID NO: 548212 - DNA, 54 bp, Artificial; identical to SEQ ID NO: 329110
  Synthetic oligonucleotide

SEQ ID NO: 548213 - DNA, 60 bp, Artificial; identical to SEQ ID NO: 329113
  Synthetic oligonucleotide

SEQ ID NO: 548214 - DNA, 60 bp, Artificial; identical to SEQ ID NO: 37493
  Synthetic oligonucleotide

SEQ ID NO: 548215 - DNA, 54 bp, Artificial; identical to SEQ ID NO: 329118
  Synthetic oligonucleotide

SEQ ID NO: 548216 - DNA, 50 bp, Artificial; identical to SEQ ID NO: 329119
  Synthetic oligonucleotide

SEQ ID NO: 548217 - DNA, 57 bp, Artificial; identical to SEQ ID NO: 329124
  Synthetic oligonucleotide

SEQ ID NO: 548218 - DNA, 58 bp, Artificial; identical to SEQ ID NO: 329125
  Synthetic oligonucleotide

SEQ ID NO: 548219 - DNA, 59 bp, Artificial; identical to SEQ ID NO: 329128
  Synthetic oligonucleotide

SEQ ID NO: 548220 - DNA, 58 bp, Artificial; identical to SEQ ID NO: 16900
  Synthetic oligonucleotide

SEQ ID NO: 548221 - DNA, 60 bp, Artificial; identical to SEQ ID NO: 329130
  Synthetic oligonucleotide

SEQ ID NO: 548222 - DNA, 57 bp, Artificial; identical to SEQ ID NO: 329133
  Synthetic oligonucleotide

SEQ ID NO: 548223 - DNA, 55 bp, Artificial; identical to SEQ ID NO: 329134
  Synthetic oligonucleotide

SEQ ID NO: 548224 - DNA, 55 bp, Artificial; identical to SEQ ID NO: 329141
  Synthetic oligonucleotide

SEQ ID NO: 548225 - DNA, 60 bp, Artificial; identical to SEQ ID NO: 329142
  Synthetic oligonucleotide

SEQ ID NO: 548226 - DNA, 51 bp, Artificial; identical to SEQ ID NO: 329143
  Synthetic oligonucleotide

SEQ ID NO: 548227 - DNA, 55 bp, Artificial; identical to SEQ ID NO: 329147
  Synthetic oligonucleotide

SEQ ID NO: 548228 - DNA, 60 bp, Artificial; identical to SEQ ID NO: 329151
  Synthetic oligonucleotide

SEQ ID NO: 548229 - DNA, 60 bp, Artificial; identical to SEQ ID NO: 329153
  Synthetic oligonucleotide

SEQ ID NO: 548230 - DNA, 54 bp, Artificial; identical to SEQ ID NO: 7471
  Synthetic oligonucleotide

SEQ ID NO: 548231 - DNA, 60 bp, Artificial; identical to SEQ ID NO: 329155
  Synthetic oligonucleotide

SEQ ID NO: 548232 - DNA, 55 bp, Artificial; identical to SEQ ID NO: 329157
  Synthetic oligonucleotide

SEQ ID NO: 548233 - DNA, 50 bp, Artificial; identical to SEQ ID NO: 329158
  Synthetic oligonucleotide

SEQ ID NO: 548234 - DNA, 60 bp, Artificial; identical to SEQ ID NO: 329159
  Synthetic oligonucleotide

SEQ ID NO: 548235 - DNA, 55 bp, Artificial; identical to SEQ ID NO: 329161
  Synthetic oligonucleotide

SEQ ID NO: 548236 - DNA, 60 bp, Artificial; identical to SEQ ID NO: 329168
  Synthetic oligonucleotide

SEQ ID NO: 548237 - DNA, 59 bp, Artificial; identical to SEQ ID NO: 329170
  Synthetic oligonucleotide

SEQ ID NO: 548238 - DNA, 58 bp, Artificial; identical to SEQ ID NO: 329173
  Synthetic oligonucleotide

SEQ ID NO: 548239 - DNA, 57 bp, Artificial; identical to SEQ ID NO: 329179
  Synthetic oligonucleotide

SEQ ID NO: 548240 - DNA, 55 bp, Artificial; identical to SEQ ID NO: 329180
  Synthetic oligonucleotide

SEQ ID NO: 548241 - DNA, 55 bp, Artificial; identical to SEQ ID NO: 329181
  Synthetic oligonucleotide

SEQ ID NO: 548242 - DNA, 55 bp, Artificial; identical to SEQ ID NO: 329184
  Synthetic oligonucleotide

SEQ ID NO: 548243 - DNA, 53 bp, Artificial; identical to SEQ ID NO: 329185
  Synthetic oligonucleotide

SEQ ID NO: 548244 - DNA, 60 bp, Artificial; identical to SEQ ID NO: 329186
  Synthetic oligonucleotide

SEQ ID NO: 548245 - DNA, 55 bp, Artificial; identical to SEQ ID NO: 329189
  Synthetic oligonucleotide

SEQ ID NO: 548246 - DNA, 55 bp, Artificial; identical to SEQ ID NO: 17481
  Synthetic oligonucleotide

SEQ ID NO: 548247 - DNA, 59 bp, Artificial; identical to SEQ ID NO: 329191
  Synthetic oligonucleotide

SEQ ID NO: 548248 - DNA, 60 bp, Artificial; identical to SEQ ID NO: 329193
  Synthetic oligonucleotide

SEQ ID NO: 548249 - DNA, 60 bp, Artificial; identical to SEQ ID NO: 329194
  Synthetic oligonucleotide

SEQ ID NO: 548250 - DNA, 60 bp, Artificial; identical to SEQ ID NO: 329197
  Synthetic oligonucleotide

SEQ ID NO: 548251 - DNA, 60 bp, Artificial; identical to SEQ ID NO: 329199
  Synthetic oligonucleotide

SEQ ID NO: 548252 - DNA, 58 bp, Artificial; identical to SEQ ID NO: 16405
  Synthetic oligonucleotide

SEQ ID NO: 548253 - DNA, 60 bp, Artificial; identical to SEQ ID NO: 329203
  Synthetic oligonucleotide

SEQ ID NO: 548254 - DNA, 57 bp, Artificial; identical to SEQ ID NO: 329204
  Synthetic oligonucleotide

SEQ ID NO: 548255 - DNA, 55 bp, Artificial; identical to SEQ ID NO: 329213
  Synthetic oligonucleotide

SEQ ID NO: 548256 - DNA, 60 bp, Artificial; identical to SEQ ID NO: 329218
  Synthetic oligonucleotide

SEQ ID NO: 548257 - DNA, 55 bp, Artificial; identical to SEQ ID NO: 329222
  Synthetic oligonucleotide

SEQ ID NO: 548258 - DNA, 55 bp, Artificial; identical to SEQ ID NO: 329223
  Synthetic oligonucleotide

SEQ ID NO: 548259 - DNA, 53 bp, Artificial; identical to SEQ ID NO: 329224
  Synthetic oligonucleotide

SEQ ID NO: 548260 - DNA, 60 bp, Artificial; identical to SEQ ID NO: 329226
  Synthetic oligonucleotide

SEQ ID NO: 548261 - DNA, 60 bp, Artificial; identical to SEQ ID NO: 329227
  Synthetic oligonucleotide

SEQ ID NO: 548262 - DNA, 59 bp, Artificial; identical to SEQ ID NO: 329229
  Synthetic oligonucleotide

SEQ ID NO: 548263 - DNA, 60 bp, Artificial; identical to SEQ ID NO: 329233
  Synthetic oligonucleotide

SEQ ID NO: 548264 - DNA, 60 bp, Artificial; identical to SEQ ID NO: 329234
  Synthetic oligonucleotide

SEQ ID NO: 548265 - DNA, 59 bp, Artificial; identical to SEQ ID NO: 329236
  Synthetic oligonucleotide

SEQ ID NO: 548266 - DNA, 60 bp, Artificial; identical to SEQ ID NO: 329237
  Synthetic oligonucleotide

SEQ ID NO: 548267 - DNA, 57 bp, Artificial; identical to SEQ ID NO: 329242
  Synthetic oligonucleotide

SEQ ID NO: 548268 - DNA, 60 bp, Artificial; identical to SEQ ID NO: 329243
  Synthetic oligonucleotide

SEQ ID NO: 548269 - DNA, 55 bp, Artificial; identical to SEQ ID NO: 329244
  Synthetic oligonucleotide

SEQ ID NO: 548270 - DNA, 58 bp, Artificial; identical to SEQ ID NO: 329245
  Synthetic oligonucleotide

SEQ ID NO: 548271 - DNA, 60 bp, Artificial; identical to SEQ ID NO: 329246
  Synthetic oligonucleotide

SEQ ID NO: 548272 - DNA, 55 bp, Artificial; identical to SEQ ID NO: 329251
  Synthetic oligonucleotide

SEQ ID NO: 548273 - DNA, 50 bp, Artificial; identical to SEQ ID NO: 329256
  Synthetic oligonucleotide

SEQ ID NO: 548274 - DNA, 58 bp, Artificial; identical to SEQ ID NO: 329259
  Synthetic oligonucleotide

SEQ ID NO: 548275 - DNA, 57 bp, Artificial; identical to SEQ ID NO: 329260
  Synthetic oligonucleotide

SEQ ID NO: 548276 - DNA, 60 bp, Artificial; identical to SEQ ID NO: 329261
  Synthetic oligonucleotide

SEQ ID NO: 548277 - DNA, 56 bp, Artificial; identical to SEQ ID NO: 329263
  Synthetic oligonucleotide

SEQ ID NO: 548278 - DNA, 58 bp, Artificial; identical to SEQ ID NO: 329265
  Synthetic oligonucleotide

SEQ ID NO: 548279 - DNA, 53 bp, Artificial; identical to SEQ ID NO: 329266
  Synthetic oligonucleotide

SEQ ID NO: 548280 - DNA, 53 bp, Artificial; identical to SEQ ID NO: 329267
  Synthetic oligonucleotide

SEQ ID NO: 548281 - DNA, 60 bp, Artificial; identical to SEQ ID NO: 329272
  Synthetic oligonucleotide

SEQ ID NO: 548282 - DNA, 59 bp, Artificial; identical to SEQ ID NO: 329274
  Synthetic oligonucleotide

SEQ ID NO: 548283 - DNA, 53 bp, Artificial; identical to SEQ ID NO: 329275
  Synthetic oligonucleotide

SEQ ID NO: 548284 - DNA, 53 bp, Artificial; identical to SEQ ID NO: 329276
  Synthetic oligonucleotide

SEQ ID NO: 548285 - DNA, 59 bp, Artificial; identical to SEQ ID NO: 329277
  Synthetic oligonucleotide

SEQ ID NO: 548286 - DNA, 55 bp, Artificial; identical to SEQ ID NO: 329278
  Synthetic oligonucleotide

SEQ ID NO: 548287 - DNA, 57 bp, Artificial; identical to SEQ ID NO: 18855
  Synthetic oligonucleotide

SEQ ID NO: 548288 - DNA, 60 bp, Artificial; identical to SEQ ID NO: 329281
  Synthetic oligonucleotide

SEQ ID NO: 548289 - DNA, 56 bp, Artificial; identical to SEQ ID NO: 329282
  Synthetic oligonucleotide

SEQ ID NO: 548290 - DNA, 60 bp, Artificial; identical to SEQ ID NO: 329283
  Synthetic oligonucleotide

SEQ ID NO: 548291 - DNA, 58 bp, Artificial; identical to SEQ ID NO: 329284
  Synthetic oligonucleotide

SEQ ID NO: 548292 - DNA, 51 bp, Artificial; identical to SEQ ID NO: 329288
  Synthetic oligonucleotide

SEQ ID NO: 548293 - DNA, 55 bp, Artificial; identical to SEQ ID NO: 329290
  Synthetic oligonucleotide

SEQ ID NO: 548294 - DNA, 55 bp, Artificial; identical to SEQ ID NO: 329291
  Synthetic oligonucleotide

SEQ ID NO: 548295 - DNA, 58 bp, Artificial; identical to SEQ ID NO: 329292
  Synthetic oligonucleotide

SEQ ID NO: 548296 - DNA, 59 bp, Artificial; identical to SEQ ID NO: 329293
  Synthetic oligonucleotide

SEQ ID NO: 548297 - DNA, 57 bp, Artificial; identical to SEQ ID NO: 329294
  Synthetic oligonucleotide

SEQ ID NO: 548298 - DNA, 53 bp, Artificial; identical to SEQ ID NO: 329296
  Synthetic oligonucleotide

SEQ ID NO: 548299 - DNA, 57 bp, Artificial; identical to SEQ ID NO: 329299
  Synthetic oligonucleotide

SEQ ID NO: 548300 - DNA, 58 bp, Artificial; identical to SEQ ID NO: 329300
  Synthetic oligonucleotide

SEQ ID NO: 548301 - DNA, 52 bp, Artificial; identical to SEQ ID NO: 329304
  Synthetic oligonucleotide

SEQ ID NO: 548302 - DNA, 53 bp, Artificial; identical to SEQ ID NO: 329306
  Synthetic oligonucleotide

SEQ ID NO: 548303 - DNA, 60 bp, Artificial; identical to SEQ ID NO: 329307
  Synthetic oligonucleotide

SEQ ID NO: 548304 - DNA, 60 bp, Artificial; identical to SEQ ID NO: 329310
  Synthetic oligonucleotide

SEQ ID NO: 548305 - DNA, 60 bp, Artificial; identical to SEQ ID NO: 329313
  Synthetic oligonucleotide

SEQ ID NO: 548306 - DNA, 57 bp, Artificial; identical to SEQ ID NO: 329314
  Synthetic oligonucleotide

SEQ ID NO: 548307 - DNA, 57 bp, Artificial; identical to SEQ ID NO: 16674
  Synthetic oligonucleotide

SEQ ID NO: 548308 - DNA, 60 bp, Artificial; identical to SEQ ID NO: 43987
  Synthetic oligonucleotide

SEQ ID NO: 548309 - DNA, 59 bp, Artificial; identical to SEQ ID NO: 329317
  Synthetic oligonucleotide

SEQ ID NO: 548310 - DNA, 52 bp, Artificial; identical to SEQ ID NO: 329319
  Synthetic oligonucleotide

SEQ ID NO: 548311 - DNA, 59 bp, Artificial; identical to SEQ ID NO: 329320
  Synthetic oligonucleotide

SEQ ID NO: 548312 - DNA, 57 bp, Artificial; identical to SEQ ID NO: 329321
  Synthetic oligonucleotide

SEQ ID NO: 548313 - DNA, 55 bp, Artificial; identical to SEQ ID NO: 16003
  Synthetic oligonucleotide

SEQ ID NO: 548314 - DNA, 57 bp, Artificial; identical to SEQ ID NO: 18410
  Synthetic oligonucleotide

SEQ ID NO: 548315 - DNA, 50 bp, Artificial; identical to SEQ ID NO: 329323
  Synthetic oligonucleotide

SEQ ID NO: 548316 - DNA, 60 bp, Artificial; identical to SEQ ID NO: 329324
  Synthetic oligonucleotide

SEQ ID NO: 548317 - DNA, 60 bp, Artificial; identical to SEQ ID NO: 329325
  Synthetic oligonucleotide

SEQ ID NO: 548318 - DNA, 51 bp, Artificial; identical to SEQ ID NO: 329327
  Synthetic oligonucleotide

SEQ ID NO: 548319 - DNA, 60 bp, Artificial; identical to SEQ ID NO: 329328
  Synthetic oligonucleotide

SEQ ID NO: 548320 - DNA, 51 bp, Artificial; identical to SEQ ID NO: 329330
  Synthetic oligonucleotide

SEQ ID NO: 548321 - DNA, 57 bp, Artificial; identical to SEQ ID NO: 329331
  Synthetic oligonucleotide

SEQ ID NO: 548322 - DNA, 60 bp, Artificial; identical to SEQ ID NO: 329332
  Synthetic oligonucleotide

SEQ ID NO: 548323 - DNA, 50 bp, Artificial; identical to SEQ ID NO: 329333
  Synthetic oligonucleotide

SEQ ID NO: 548324 - DNA, 60 bp, Artificial; identical to SEQ ID NO: 329335
  Synthetic oligonucleotide

SEQ ID NO: 548325 - DNA, 56 bp, Artificial; identical to SEQ ID NO: 329336
  Synthetic oligonucleotide

SEQ ID NO: 548326 - DNA, 59 bp, Artificial; identical to SEQ ID NO: 329337
  Synthetic oligonucleotide

SEQ ID NO: 548327 - DNA, 58 bp, Artificial; identical to SEQ ID NO: 329340
  Synthetic oligonucleotide

SEQ ID NO: 548328 - DNA, 58 bp, Artificial; identical to SEQ ID NO: 329345
  Synthetic oligonucleotide

SEQ ID NO: 548329 - DNA, 55 bp, Artificial; identical to SEQ ID NO: 329346
  Synthetic oligonucleotide

SEQ ID NO: 548330 - DNA, 60 bp, Artificial; identical to SEQ ID NO: 329347
  Synthetic oligonucleotide

SEQ ID NO: 548331 - DNA, 59 bp, Artificial; identical to SEQ ID NO: 329351
  Synthetic oligonucleotide

SEQ ID NO: 548332 - DNA, 60 bp, Artificial; identical to SEQ ID NO: 329354
  Synthetic oligonucleotide

SEQ ID NO: 548333 - DNA, 55 bp, Artificial; identical to SEQ ID NO: 329355
  Synthetic oligonucleotide

SEQ ID NO: 548334 - DNA, 53 bp, Artificial; identical to SEQ ID NO: 329358
  Synthetic oligonucleotide

SEQ ID NO: 548335 - DNA, 51 bp, Artificial; identical to SEQ ID NO: 329359
  Synthetic oligonucleotide

SEQ ID NO: 548336 - DNA, 57 bp, Artificial; identical to SEQ ID NO: 329360
  Synthetic oligonucleotide

SEQ ID NO: 548337 - DNA, 56 bp, Artificial; identical to SEQ ID NO: 329362
  Synthetic oligonucleotide

SEQ ID NO: 548338 - DNA, 56 bp, Artificial; identical to SEQ ID NO: 329363
  Synthetic oligonucleotide

SEQ ID NO: 548339 - DNA, 55 bp, Artificial; identical to SEQ ID NO: 329364
  Synthetic oligonucleotide

SEQ ID NO: 548340 - DNA, 58 bp, Artificial; identical to SEQ ID NO: 329369
  Synthetic oligonucleotide

SEQ ID NO: 548341 - DNA, 58 bp, Artificial; identical to SEQ ID NO: 329370
  Synthetic oligonucleotide

SEQ ID NO: 548342 - DNA, 53 bp, Artificial; identical to SEQ ID NO: 329371
  Synthetic oligonucleotide

SEQ ID NO: 548343 - DNA, 56 bp, Artificial; identical to SEQ ID NO: 329372
  Synthetic oligonucleotide

SEQ ID NO: 548344 - DNA, 55 bp, Artificial; identical to SEQ ID NO: 329375
  Synthetic oligonucleotide

SEQ ID NO: 548345 - DNA, 55 bp, Artificial; identical to SEQ ID NO: 329378
  Synthetic oligonucleotide

SEQ ID NO: 548346 - DNA, 60 bp, Artificial; identical to SEQ ID NO: 329380
  Synthetic oligonucleotide

SEQ ID NO: 548347 - DNA, 60 bp, Artificial; identical to SEQ ID NO: 329383
  Synthetic oligonucleotide

SEQ ID NO: 548348 - DNA, 53 bp, Artificial; identical to SEQ ID NO: 329384
  Synthetic oligonucleotide

SEQ ID NO: 548349 - DNA, 58 bp, Artificial; identical to SEQ ID NO: 329386
  Synthetic oligonucleotide

SEQ ID NO: 548350 - DNA, 50 bp, Artificial; identical to SEQ ID NO: 329387
  Synthetic oligonucleotide

SEQ ID NO: 548351 - DNA, 57 bp, Artificial; identical to SEQ ID NO: 329388
  Synthetic oligonucleotide

SEQ ID NO: 548352 - DNA, 56 bp, Artificial; identical to SEQ ID NO: 329391
  Synthetic oligonucleotide

SEQ ID NO: 548353 - DNA, 56 bp, Artificial; identical to SEQ ID NO: 329392
  Synthetic oligonucleotide

SEQ ID NO: 548354 - DNA, 55 bp, Artificial; identical to SEQ ID NO: 329394
  Synthetic oligonucleotide

SEQ ID NO: 548355 - DNA, 58 bp, Artificial; identical to SEQ ID NO: 329395
  Synthetic oligonucleotide

SEQ ID NO: 548356 - DNA, 60 bp, Artificial; identical to SEQ ID NO: 329397
  Synthetic oligonucleotide

SEQ ID NO: 548357 - DNA, 60 bp, Artificial; identical to SEQ ID NO: 329398
  Synthetic oligonucleotide

SEQ ID NO: 548358 - DNA, 55 bp, Artificial; identical to SEQ ID NO: 329403
  Synthetic oligonucleotide

SEQ ID NO: 548359 - DNA, 60 bp, Artificial; identical to SEQ ID NO: 329404
  Synthetic oligonucleotide

SEQ ID NO: 548360 - DNA, 60 bp, Artificial; identical to SEQ ID NO: 329407
  Synthetic oligonucleotide

SEQ ID NO: 548361 - DNA, 60 bp, Artificial; identical to SEQ ID NO: 329408
  Synthetic oligonucleotide

SEQ ID NO: 548362 - DNA, 53 bp, Artificial; identical to SEQ ID NO: 329409
  Synthetic oligonucleotide

SEQ ID NO: 548363 - DNA, 60 bp, Artificial; identical to SEQ ID NO: 329413
  Synthetic oligonucleotide

SEQ ID NO: 548364 - DNA, 60 bp, Artificial; identical to SEQ ID NO: 329415
  Synthetic oligonucleotide

SEQ ID NO: 548365 - DNA, 59 bp, Artificial; identical to SEQ ID NO: 329419
  Synthetic oligonucleotide

SEQ ID NO: 548366 - DNA, 55 bp, Artificial; identical to SEQ ID NO: 329424
  Synthetic oligonucleotide

SEQ ID NO: 548367 - DNA, 55 bp, Artificial; identical to SEQ ID NO: 329425
  Synthetic oligonucleotide

SEQ ID NO: 548368 - DNA, 57 bp, Artificial; identical to SEQ ID NO: 329426
  Synthetic oligonucleotide

SEQ ID NO: 548369 - DNA, 53 bp, Artificial; identical to SEQ ID NO: 329433
  Synthetic oligonucleotide

SEQ ID NO: 548370 - DNA, 55 bp, Artificial; identical to SEQ ID NO: 329434
  Synthetic oligonucleotide

SEQ ID NO: 548371 - DNA, 56 bp, Artificial; identical to SEQ ID NO: 329436
  Synthetic oligonucleotide

SEQ ID NO: 548372 - DNA, 57 bp, Artificial; identical to SEQ ID NO: 329437
  Synthetic oligonucleotide

SEQ ID NO: 548373 - DNA, 56 bp, Artificial; identical to SEQ ID NO: 10849
  Synthetic oligonucleotide

SEQ ID NO: 548374 - DNA, 60 bp, Artificial; identical to SEQ ID NO: 329439
  Synthetic oligonucleotide

SEQ ID NO: 548375 - DNA, 50 bp, Artificial; identical to SEQ ID NO: 329443
  Synthetic oligonucleotide

SEQ ID NO: 548376 - DNA, 58 bp, Artificial; identical to SEQ ID NO: 329447
  Synthetic oligonucleotide

SEQ ID NO: 548377 - DNA, 53 bp, Artificial; identical to SEQ ID NO: 329451
  Synthetic oligonucleotide

SEQ ID NO: 548378 - DNA, 56 bp, Artificial; identical to SEQ ID NO: 329452
  Synthetic oligonucleotide

SEQ ID NO: 548379 - DNA, 56 bp, Artificial; identical to SEQ ID NO: 329454
  Synthetic oligonucleotide

SEQ ID NO: 548380 - DNA, 54 bp, Artificial; identical to SEQ ID NO: 329456
  Synthetic oligonucleotide

SEQ ID NO: 548381 - DNA, 58 bp, Artificial; identical to SEQ ID NO: 329458
  Synthetic oligonucleotide

SEQ ID NO: 548382 - DNA, 55 bp, Artificial; identical to SEQ ID NO: 329459
  Synthetic oligonucleotide

SEQ ID NO: 548383 - DNA, 55 bp, Artificial; identical to SEQ ID NO: 329460
  Synthetic oligonucleotide

SEQ ID NO: 548384 - DNA, 54 bp, Artificial; identical to SEQ ID NO: 329466
  Synthetic oligonucleotide

SEQ ID NO: 548385 - DNA, 60 bp, Artificial; identical to SEQ ID NO: 15651
  Synthetic oligonucleotide

SEQ ID NO: 548386 - DNA, 57 bp, Artificial; identical to SEQ ID NO: 329469
  Synthetic oligonucleotide

SEQ ID NO: 548387 - DNA, 57 bp, Artificial; identical to SEQ ID NO: 329471
  Synthetic oligonucleotide

SEQ ID NO: 548388 - DNA, 59 bp, Artificial; identical to SEQ ID NO: 329473
  Synthetic oligonucleotide

SEQ ID NO: 548389 - DNA, 50 bp, Artificial; identical to SEQ ID NO: 329475
  Synthetic oligonucleotide

SEQ ID NO: 548390 - DNA, 55 bp, Artificial; identical to SEQ ID NO: 329476
  Synthetic oligonucleotide

SEQ ID NO: 548391 - DNA, 59 bp, Artificial; identical to SEQ ID NO: 329480
  Synthetic oligonucleotide

SEQ ID NO: 548392 - DNA, 51 bp, Artificial; identical to SEQ ID NO: 329490
  Synthetic oligonucleotide

SEQ ID NO: 548393 - DNA, 57 bp, Artificial; identical to SEQ ID NO: 329491
  Synthetic oligonucleotide

SEQ ID NO: 548394 - DNA, 60 bp, Artificial; identical to SEQ ID NO: 329493
  Synthetic oligonucleotide

SEQ ID NO: 548395 - DNA, 59 bp, Artificial; identical to SEQ ID NO: 329494
  Synthetic oligonucleotide

SEQ ID NO: 548396 - DNA, 60 bp, Artificial; identical to SEQ ID NO: 12362
  Synthetic oligonucleotide

SEQ ID NO: 548397 - DNA, 56 bp, Artificial; identical to SEQ ID NO: 329496
  Synthetic oligonucleotide

SEQ ID NO: 548398 - DNA, 54 bp, Artificial; identical to SEQ ID NO: 329497
  Synthetic oligonucleotide

SEQ ID NO: 548399 - DNA, 56 bp, Artificial; identical to SEQ ID NO: 329500
  Synthetic oligonucleotide

SEQ ID NO: 548400 - DNA, 55 bp, Artificial; identical to SEQ ID NO: 329501
  Synthetic oligonucleotide

SEQ ID NO: 548401 - DNA, 60 bp, Artificial; identical to SEQ ID NO: 329503
  Synthetic oligonucleotide

SEQ ID NO: 548402 - DNA, 58 bp, Artificial; identical to SEQ ID NO: 329505
  Synthetic oligonucleotide

SEQ ID NO: 548403 - DNA, 59 bp, Artificial; identical to SEQ ID NO: 329508
  Synthetic oligonucleotide

SEQ ID NO: 548404 - DNA, 57 bp, Artificial; identical to SEQ ID NO: 329509
  Synthetic oligonucleotide

SEQ ID NO: 548405 - DNA, 59 bp, Artificial; identical to SEQ ID NO: 329511
  Synthetic oligonucleotide

SEQ ID NO: 548406 - DNA, 59 bp, Artificial; identical to SEQ ID NO: 329515
  Synthetic oligonucleotide

SEQ ID NO: 548407 - DNA, 59 bp, Artificial; identical to SEQ ID NO: 329517
  Synthetic oligonucleotide

SEQ ID NO: 548408 - DNA, 60 bp, Artificial; identical to SEQ ID NO: 329518
  Synthetic oligonucleotide

SEQ ID NO: 548409 - DNA, 55 bp, Artificial; identical to SEQ ID NO: 329519
  Synthetic oligonucleotide

SEQ ID NO: 548410 - DNA, 60 bp, Artificial; identical to SEQ ID NO: 329520
  Synthetic oligonucleotide

SEQ ID NO: 548411 - DNA, 60 bp, Artificial; identical to SEQ ID NO: 329522
  Synthetic oligonucleotide

SEQ ID NO: 548412 - DNA, 54 bp, Artificial; identical to SEQ ID NO: 329527
  Synthetic oligonucleotide

SEQ ID NO: 548413 - DNA, 60 bp, Artificial; identical to SEQ ID NO: 10976
  Synthetic oligonucleotide

SEQ ID NO: 548414 - DNA, 59 bp, Artificial; identical to SEQ ID NO: 329528
  Synthetic oligonucleotide

SEQ ID NO: 548415 - DNA, 60 bp, Artificial; identical to SEQ ID NO: 329529
  Synthetic oligonucleotide

SEQ ID NO: 548416 - DNA, 60 bp, Artificial; identical to SEQ ID NO: 329532
  Synthetic oligonucleotide

SEQ ID NO: 548417 - DNA, 54 bp, Artificial; identical to SEQ ID NO: 329533
  Synthetic oligonucleotide

SEQ ID NO: 548418 - DNA, 52 bp, Artificial; identical to SEQ ID NO: 329534
  Synthetic oligonucleotide

SEQ ID NO: 548419 - DNA, 60 bp, Artificial; identical to SEQ ID NO: 329535
  Synthetic oligonucleotide

SEQ ID NO: 548420 - DNA, 60 bp, Artificial; identical to SEQ ID NO: 329536
  Synthetic oligonucleotide

SEQ ID NO: 548421 - DNA, 58 bp, Artificial; identical to SEQ ID NO: 329537
  Synthetic oligonucleotide

SEQ ID NO: 548422 - DNA, 55 bp, Artificial; identical to SEQ ID NO: 329538
  Synthetic oligonucleotide

SEQ ID NO: 548423 - DNA, 55 bp, Artificial; identical to SEQ ID NO: 329541
  Synthetic oligonucleotide

SEQ ID NO: 548424 - DNA, 55 bp, Artificial; identical to SEQ ID NO: 329542
  Synthetic oligonucleotide

SEQ ID NO: 548425 - DNA, 58 bp, Artificial; identical to SEQ ID NO: 329544
  Synthetic oligonucleotide

SEQ ID NO: 548426 - DNA, 60 bp, Artificial; identical to SEQ ID NO: 329546
  Synthetic oligonucleotide

SEQ ID NO: 548427 - DNA, 60 bp, Artificial; identical to SEQ ID NO: 329547
  Synthetic oligonucleotide

SEQ ID NO: 548428 - DNA, 59 bp, Artificial; identical to SEQ ID NO: 329548
  Synthetic oligonucleotide

SEQ ID NO: 548429 - DNA, 60 bp, Artificial; identical to SEQ ID NO: 329553
  Synthetic oligonucleotide

SEQ ID NO: 548430 - DNA, 52 bp, Artificial; identical to SEQ ID NO: 329561
  Synthetic oligonucleotide

SEQ ID NO: 548431 - DNA, 60 bp, Artificial; identical to SEQ ID NO: 329568
  Synthetic oligonucleotide

SEQ ID NO: 548432 - DNA, 60 bp, Artificial; identical to SEQ ID NO: 329571
  Synthetic oligonucleotide

SEQ ID NO: 548433 - DNA, 52 bp, Artificial; identical to SEQ ID NO: 329572
  Synthetic oligonucleotide

SEQ ID NO: 548434 - DNA, 60 bp, Artificial; identical to SEQ ID NO: 329574
  Synthetic oligonucleotide

SEQ ID NO: 548435 - DNA, 58 bp, Artificial; identical to SEQ ID NO: 329576
  Synthetic oligonucleotide

SEQ ID NO: 548436 - DNA, 55 bp, Artificial; identical to SEQ ID NO: 329577
  Synthetic oligonucleotide

SEQ ID NO: 548437 - DNA, 60 bp, Artificial; identical to SEQ ID NO: 8695
  Synthetic oligonucleotide

SEQ ID NO: 548438 - DNA, 57 bp, Artificial; identical to SEQ ID NO: 329578
  Synthetic oligonucleotide

SEQ ID NO: 548439 - DNA, 50 bp, Artificial; identical to SEQ ID NO: 329582
  Synthetic oligonucleotide

SEQ ID NO: 548440 - DNA, 60 bp, Artificial; identical to SEQ ID NO: 329583
  Synthetic oligonucleotide

SEQ ID NO: 548441 - DNA, 55 bp, Artificial; identical to SEQ ID NO: 329585
  Synthetic oligonucleotide

SEQ ID NO: 548442 - DNA, 53 bp, Artificial; identical to SEQ ID NO: 329587
  Synthetic oligonucleotide

SEQ ID NO: 548443 - DNA, 51 bp, Artificial; identical to SEQ ID NO: 329593
  Synthetic oligonucleotide

SEQ ID NO: 548444 - DNA, 38 bp, Artificial; identical to SEQ ID NO: 329594
  Synthetic oligonucleotide

SEQ ID NO: 548445 - DNA, 60 bp, Artificial; identical to SEQ ID NO: 329599
  Synthetic oligonucleotide

SEQ ID NO: 548446 - DNA, 55 bp, Artificial; identical to SEQ ID NO: 329600
  Synthetic oligonucleotide

SEQ ID NO: 548447 - DNA, 55 bp, Artificial; identical to SEQ ID NO: 329601
  Synthetic oligonucleotide

SEQ ID NO: 548448 - DNA, 60 bp, Artificial; identical to SEQ ID NO: 329603
  Synthetic oligonucleotide

SEQ ID NO: 548449 - DNA, 56 bp, Artificial; identical to SEQ ID NO: 329604
  Synthetic oligonucleotide

SEQ ID NO: 548450 - DNA, 58 bp, Artificial; identical to SEQ ID NO: 329606
  Synthetic oligonucleotide

SEQ ID NO: 548451 - DNA, 55 bp, Artificial; identical to SEQ ID NO: 329609
  Synthetic oligonucleotide

SEQ ID NO: 548452 - DNA, 59 bp, Artificial; identical to SEQ ID NO: 329610
  Synthetic oligonucleotide

SEQ ID NO: 548453 - DNA, 52 bp, Artificial; identical to SEQ ID NO: 329617
  Synthetic oligonucleotide

SEQ ID NO: 548454 - DNA, 60 bp, Artificial; identical to SEQ ID NO: 329619
  Synthetic oligonucleotide

SEQ ID NO: 548455 - DNA, 53 bp, Artificial; identical to SEQ ID NO: 329621
  Synthetic oligonucleotide

SEQ ID NO: 548456 - DNA, 60 bp, Artificial; identical to SEQ ID NO: 329622
  Synthetic oligonucleotide

SEQ ID NO: 548457 - DNA, 60 bp, Artificial; identical to SEQ ID NO: 329623
  Synthetic oligonucleotide

SEQ ID NO: 548458 - DNA, 57 bp, Artificial; identical to SEQ ID NO: 329626
  Synthetic oligonucleotide

SEQ ID NO: 548459 - DNA, 55 bp, Artificial; identical to SEQ ID NO: 329631
  Synthetic oligonucleotide

SEQ ID NO: 548460 - DNA, 55 bp, Artificial; identical to SEQ ID NO: 329634
  Synthetic oligonucleotide

SEQ ID NO: 548461 - DNA, 60 bp, Artificial; identical to SEQ ID NO: 329637
  Synthetic oligonucleotide

SEQ ID NO: 548462 - DNA, 60 bp, Artificial; identical to SEQ ID NO: 329638
  Synthetic oligonucleotide

SEQ ID NO: 548463 - DNA, 58 bp, Artificial; identical to SEQ ID NO: 329639
  Synthetic oligonucleotide

SEQ ID NO: 548464 - DNA, 57 bp, Artificial; identical to SEQ ID NO: 329640
  Synthetic oligonucleotide

SEQ ID NO: 548465 - DNA, 55 bp, Artificial; identical to SEQ ID NO: 329641
  Synthetic oligonucleotide

SEQ ID NO: 548466 - DNA, 60 bp, Artificial; identical to SEQ ID NO: 329645
  Synthetic oligonucleotide

SEQ ID NO: 548467 - DNA, 57 bp, Artificial; identical to SEQ ID NO: 329650
  Synthetic oligonucleotide

SEQ ID NO: 548468 - DNA, 57 bp, Artificial; identical to SEQ ID NO: 329652
  Synthetic oligonucleotide

SEQ ID NO: 548469 - DNA, 60 bp, Artificial; identical to SEQ ID NO: 329654
  Synthetic oligonucleotide

SEQ ID NO: 548470 - DNA, 59 bp, Artificial; identical to SEQ ID NO: 329655
  Synthetic oligonucleotide

SEQ ID NO: 548471 - DNA, 55 bp, Artificial; identical to SEQ ID NO: 329659
  Synthetic oligonucleotide

SEQ ID NO: 548472 - DNA, 55 bp, Artificial; identical to SEQ ID NO: 329660
  Synthetic oligonucleotide

SEQ ID NO: 548473 - DNA, 60 bp, Artificial; identical to SEQ ID NO: 329662
  Synthetic oligonucleotide

SEQ ID NO: 548474 - DNA, 55 bp, Artificial; identical to SEQ ID NO: 329663
  Synthetic oligonucleotide

SEQ ID NO: 548475 - DNA, 60 bp, Artificial; identical to SEQ ID NO: 329667
  Synthetic oligonucleotide

SEQ ID NO: 548476 - DNA, 54 bp, Artificial; identical to SEQ ID NO: 329668
  Synthetic oligonucleotide

SEQ ID NO: 548477 - DNA, 60 bp, Artificial; identical to SEQ ID NO: 329669
  Synthetic oligonucleotide

SEQ ID NO: 548478 - DNA, 60 bp, Artificial; identical to SEQ ID NO: 329670
  Synthetic oligonucleotide

SEQ ID NO: 548479 - DNA, 60 bp, Artificial; identical to SEQ ID NO: 329675
  Synthetic oligonucleotide

SEQ ID NO: 548480 - DNA, 60 bp, Artificial; identical to SEQ ID NO: 329676
  Synthetic oligonucleotide

SEQ ID NO: 548481 - DNA, 60 bp, Artificial; identical to SEQ ID NO: 329678
  Synthetic oligonucleotide

SEQ ID NO: 548482 - DNA, 53 bp, Artificial; identical to SEQ ID NO: 329679
  Synthetic oligonucleotide

SEQ ID NO: 548483 - DNA, 56 bp, Artificial; identical to SEQ ID NO: 329682
  Synthetic oligonucleotide

SEQ ID NO: 548484 - DNA, 55 bp, Artificial; identical to SEQ ID NO: 329683
  Synthetic oligonucleotide

SEQ ID NO: 548485 - DNA, 56 bp, Artificial; identical to SEQ ID NO: 329686
  Synthetic oligonucleotide

SEQ ID NO: 548486 - DNA, 60 bp, Artificial; identical to SEQ ID NO: 329687
  Synthetic oligonucleotide

SEQ ID NO: 548487 - DNA, 60 bp, Artificial; identical to SEQ ID NO: 329688
  Synthetic oligonucleotide

SEQ ID NO: 548488 - DNA, 50 bp, Artificial; identical to SEQ ID NO: 329691
  Synthetic oligonucleotide

SEQ ID NO: 548489 - DNA, 54 bp, Artificial; identical to SEQ ID NO: 329692
  Synthetic oligonucleotide

SEQ ID NO: 548490 - DNA, 59 bp, Artificial; identical to SEQ ID NO: 329695
  Synthetic oligonucleotide

SEQ ID NO: 548491 - DNA, 56 bp, Artificial; identical to SEQ ID NO: 329696
  Synthetic oligonucleotide

SEQ ID NO: 548492 - DNA, 60 bp, Artificial; identical to SEQ ID NO: 329697
  Synthetic oligonucleotide

SEQ ID NO: 548493 - DNA, 52 bp, Artificial; identical to SEQ ID NO: 329698
  Synthetic oligonucleotide

SEQ ID NO: 548494 - DNA, 58 bp, Artificial; identical to SEQ ID NO: 329699
  Synthetic oligonucleotide

SEQ ID NO: 548495 - DNA, 58 bp, Artificial; identical to SEQ ID NO: 329700
  Synthetic oligonucleotide

SEQ ID NO: 548496 - DNA, 60 bp, Artificial; identical to SEQ ID NO: 329701
  Synthetic oligonucleotide

SEQ ID NO: 548497 - DNA, 56 bp, Artificial; identical to SEQ ID NO: 329703
  Synthetic oligonucleotide

SEQ ID NO: 548498 - DNA, 60 bp, Artificial; identical to SEQ ID NO: 329705
  Synthetic oligonucleotide

SEQ ID NO: 548499 - DNA, 59 bp, Artificial; identical to SEQ ID NO: 14268
  Synthetic oligonucleotide

SEQ ID NO: 548500 - DNA, 59 bp, Artificial; identical to SEQ ID NO: 329706
  Synthetic oligonucleotide

SEQ ID NO: 548501 - DNA, 60 bp, Artificial; identical to SEQ ID NO: 329710
  Synthetic oligonucleotide

SEQ ID NO: 548502 - DNA, 59 bp, Artificial; identical to SEQ ID NO: 329711
  Synthetic oligonucleotide

SEQ ID NO: 548503 - DNA, 58 bp, Artificial; identical to SEQ ID NO: 329712
  Synthetic oligonucleotide

SEQ ID NO: 548504 - DNA, 51 bp, Artificial; identical to SEQ ID NO: 329713
  Synthetic oligonucleotide

SEQ ID NO: 548505 - DNA, 56 bp, Artificial; identical to SEQ ID NO: 329714
  Synthetic oligonucleotide

SEQ ID NO: 548506 - DNA, 60 bp, Artificial; identical to SEQ ID NO: 329717
  Synthetic oligonucleotide

SEQ ID NO: 548507 - DNA, 59 bp, Artificial; identical to SEQ ID NO: 329720
  Synthetic oligonucleotide

SEQ ID NO: 548508 - DNA, 60 bp, Artificial; identical to SEQ ID NO: 329723
  Synthetic oligonucleotide

SEQ ID NO: 548509 - DNA, 59 bp, Artificial; identical to SEQ ID NO: 329724
  Synthetic oligonucleotide

SEQ ID NO: 548510 - DNA, 57 bp, Artificial; identical to SEQ ID NO: 329726
  Synthetic oligonucleotide

SEQ ID NO: 548511 - DNA, 56 bp, Artificial; identical to SEQ ID NO: 329728
  Synthetic oligonucleotide

SEQ ID NO: 548512 - DNA, 54 bp, Artificial; identical to SEQ ID NO: 8128
  Synthetic oligonucleotide

SEQ ID NO: 548513 - DNA, 60 bp, Artificial; identical to SEQ ID NO: 329730
  Synthetic oligonucleotide

SEQ ID NO: 548514 - DNA, 60 bp, Artificial; identical to SEQ ID NO: 329731
  Synthetic oligonucleotide

SEQ ID NO: 548515 - DNA, 60 bp, Artificial; identical to SEQ ID NO: 329732
  Synthetic oligonucleotide

SEQ ID NO: 548516 - DNA, 55 bp, Artificial; identical to SEQ ID NO: 329736
  Synthetic oligonucleotide

SEQ ID NO: 548517 - DNA, 60 bp, Artificial; identical to SEQ ID NO: 6389
  Synthetic oligonucleotide

SEQ ID NO: 548518 - DNA, 55 bp, Artificial; identical to SEQ ID NO: 329739
  Synthetic oligonucleotide

SEQ ID NO: 548519 - DNA, 60 bp, Artificial; identical to SEQ ID NO: 329741
  Synthetic oligonucleotide

SEQ ID NO: 548520 - DNA, 54 bp, Artificial; identical to SEQ ID NO: 329742
  Synthetic oligonucleotide

SEQ ID NO: 548521 - DNA, 57 bp, Artificial; identical to SEQ ID NO: 329745
  Synthetic oligonucleotide

SEQ ID NO: 548522 - DNA, 53 bp, Artificial; identical to SEQ ID NO: 329746
  Synthetic oligonucleotide

SEQ ID NO: 548523 - DNA, 56 bp, Artificial; identical to SEQ ID NO: 329751
  Synthetic oligonucleotide

SEQ ID NO: 548524 - DNA, 55 bp, Artificial; identical to SEQ ID NO: 329753
  Synthetic oligonucleotide

SEQ ID NO: 548525 - DNA, 52 bp, Artificial; identical to SEQ ID NO: 329754
  Synthetic oligonucleotide

SEQ ID NO: 548526 - DNA, 51 bp, Artificial; identical to SEQ ID NO: 329755
  Synthetic oligonucleotide

SEQ ID NO: 548527 - DNA, 60 bp, Artificial; identical to SEQ ID NO: 329757
  Synthetic oligonucleotide

SEQ ID NO: 548528 - DNA, 60 bp, Artificial; identical to SEQ ID NO: 329759
  Synthetic oligonucleotide

SEQ ID NO: 548529 - DNA, 54 bp, Artificial; identical to SEQ ID NO: 329762
  Synthetic oligonucleotide

SEQ ID NO: 548530 - DNA, 57 bp, Artificial; identical to SEQ ID NO: 329764
  Synthetic oligonucleotide

SEQ ID NO: 548531 - DNA, 55 bp, Artificial; identical to SEQ ID NO: 329765
  Synthetic oligonucleotide

SEQ ID NO: 548532 - DNA, 60 bp, Artificial; identical to SEQ ID NO: 329769
  Synthetic oligonucleotide

SEQ ID NO: 548533 - DNA, 60 bp, Artificial; identical to SEQ ID NO: 329778
  Synthetic oligonucleotide

SEQ ID NO: 548534 - DNA, 60 bp, Artificial; identical to SEQ ID NO: 329781
  Synthetic oligonucleotide

SEQ ID NO: 548535 - DNA, 55 bp, Artificial; identical to SEQ ID NO: 329782
  Synthetic oligonucleotide

SEQ ID NO: 548536 - DNA, 51 bp, Artificial; identical to SEQ ID NO: 329784
  Synthetic oligonucleotide

SEQ ID NO: 548537 - DNA, 60 bp, Artificial; identical to SEQ ID NO: 329785
  Synthetic oligonucleotide

SEQ ID NO: 548538 - DNA, 60 bp, Artificial; identical to SEQ ID NO: 329786
  Synthetic oligonucleotide

SEQ ID NO: 548539 - DNA, 57 bp, Artificial; identical to SEQ ID NO: 329788
  Synthetic oligonucleotide

SEQ ID NO: 548540 - DNA, 58 bp, Artificial; identical to SEQ ID NO: 329792
  Synthetic oligonucleotide

SEQ ID NO: 548541 - DNA, 60 bp, Artificial; identical to SEQ ID NO: 329793
  Synthetic oligonucleotide

SEQ ID NO: 548542 - DNA, 53 bp, Artificial; identical to SEQ ID NO: 329796
  Synthetic oligonucleotide

SEQ ID NO: 548543 - DNA, 55 bp, Artificial; identical to SEQ ID NO: 329798
  Synthetic oligonucleotide

SEQ ID NO: 548544 - DNA, 59 bp, Artificial; identical to SEQ ID NO: 329800
  Synthetic oligonucleotide

SEQ ID NO: 548545 - DNA, 55 bp, Artificial; identical to SEQ ID NO: 329802
  Synthetic oligonucleotide

SEQ ID NO: 548546 - DNA, 60 bp, Artificial; identical to SEQ ID NO: 14198
  Synthetic oligonucleotide

SEQ ID NO: 548547 - DNA, 60 bp, Artificial; identical to SEQ ID NO: 329805
  Synthetic oligonucleotide

SEQ ID NO: 548548 - DNA, 60 bp, Artificial; identical to SEQ ID NO: 329809
  Synthetic oligonucleotide

SEQ ID NO: 548549 - DNA, 50 bp, Artificial; identical to SEQ ID NO: 329810
  Synthetic oligonucleotide

SEQ ID NO: 548550 - DNA, 53 bp, Artificial; identical to SEQ ID NO: 329811
  Synthetic oligonucleotide

SEQ ID NO: 548551 - DNA, 51 bp, Artificial; identical to SEQ ID NO: 329812
  Synthetic oligonucleotide

SEQ ID NO: 548552 - DNA, 55 bp, Artificial; identical to SEQ ID NO: 329814
  Synthetic oligonucleotide

SEQ ID NO: 548553 - DNA, 60 bp, Artificial; identical to SEQ ID NO: 329817
  Synthetic oligonucleotide

SEQ ID NO: 548554 - DNA, 53 bp, Artificial; identical to SEQ ID NO: 329819
  Synthetic oligonucleotide

SEQ ID NO: 548555 - DNA, 50 bp, Artificial; identical to SEQ ID NO: 329820
  Synthetic oligonucleotide

SEQ ID NO: 548556 - DNA, 60 bp, Artificial; identical to SEQ ID NO: 329822
  Synthetic oligonucleotide

SEQ ID NO: 548557 - DNA, 60 bp, Artificial; identical to SEQ ID NO: 329823
  Synthetic oligonucleotide

SEQ ID NO: 548558 - DNA, 60 bp, Artificial; identical to SEQ ID NO: 329825
  Synthetic oligonucleotide

SEQ ID NO: 548559 - DNA, 52 bp, Artificial; identical to SEQ ID NO: 329834
  Synthetic oligonucleotide

SEQ ID NO: 548560 - DNA, 60 bp, Artificial; identical to SEQ ID NO: 329835
  Synthetic oligonucleotide

SEQ ID NO: 548561 - DNA, 60 bp, Artificial; identical to SEQ ID NO: 329836
  Synthetic oligonucleotide

SEQ ID NO: 548562 - DNA, 55 bp, Artificial; identical to SEQ ID NO: 329838
  Synthetic oligonucleotide

SEQ ID NO: 548563 - DNA, 60 bp, Artificial; identical to SEQ ID NO: 329840
  Synthetic oligonucleotide

SEQ ID NO: 548564 - DNA, 58 bp, Artificial; identical to SEQ ID NO: 329844
  Synthetic oligonucleotide

SEQ ID NO: 548565 - DNA, 60 bp, Artificial; identical to SEQ ID NO: 14248
  Synthetic oligonucleotide

SEQ ID NO: 548566 - DNA, 60 bp, Artificial; identical to SEQ ID NO: 329846
  Synthetic oligonucleotide

SEQ ID NO: 548567 - DNA, 55 bp, Artificial; identical to SEQ ID NO: 329850
  Synthetic oligonucleotide

SEQ ID NO: 548568 - DNA, 58 bp, Artificial; identical to SEQ ID NO: 329851
  Synthetic oligonucleotide

SEQ ID NO: 548569 - DNA, 53 bp, Artificial; identical to SEQ ID NO: 329852
  Synthetic oligonucleotide

SEQ ID NO: 548570 - DNA, 56 bp, Artificial; identical to SEQ ID NO: 329853
  Synthetic oligonucleotide

SEQ ID NO: 548571 - DNA, 55 bp, Artificial; identical to SEQ ID NO: 329860
  Synthetic oligonucleotide

SEQ ID NO: 548572 - DNA, 55 bp, Artificial; identical to SEQ ID NO: 329862
  Synthetic oligonucleotide

SEQ ID NO: 548573 - DNA, 60 bp, Artificial; identical to SEQ ID NO: 329863
  Synthetic oligonucleotide

SEQ ID NO: 548574 - DNA, 58 bp, Artificial; identical to SEQ ID NO: 329864
  Synthetic oligonucleotide

SEQ ID NO: 548575 - DNA, 60 bp, Artificial; identical to SEQ ID NO: 329865
  Synthetic oligonucleotide

SEQ ID NO: 548576 - DNA, 55 bp, Artificial; identical to SEQ ID NO: 329866
  Synthetic oligonucleotide

SEQ ID NO: 548577 - DNA, 60 bp, Artificial; identical to SEQ ID NO: 329867
  Synthetic oligonucleotide

SEQ ID NO: 548578 - DNA, 60 bp, Artificial; identical to SEQ ID NO: 329870
  Synthetic oligonucleotide

SEQ ID NO: 548579 - DNA, 56 bp, Artificial; identical to SEQ ID NO: 329871
  Synthetic oligonucleotide

SEQ ID NO: 548580 - DNA, 55 bp, Artificial; identical to SEQ ID NO: 329872
  Synthetic oligonucleotide

SEQ ID NO: 548581 - DNA, 60 bp, Artificial; identical to SEQ ID NO: 329873
  Synthetic oligonucleotide

SEQ ID NO: 548582 - DNA, 59 bp, Artificial; identical to SEQ ID NO: 329874
  Synthetic oligonucleotide

SEQ ID NO: 548583 - DNA, 55 bp, Artificial; identical to SEQ ID NO: 329877
  Synthetic oligonucleotide

SEQ ID NO: 548584 - DNA, 55 bp, Artificial; identical to SEQ ID NO: 329879
  Synthetic oligonucleotide

SEQ ID NO: 548585 - DNA, 60 bp, Artificial; identical to SEQ ID NO: 329881
  Synthetic oligonucleotide

SEQ ID NO: 548586 - DNA, 58 bp, Artificial; identical to SEQ ID NO: 329887
  Synthetic oligonucleotide

SEQ ID NO: 548587 - DNA, 50 bp, Artificial; identical to SEQ ID NO: 329895
  Synthetic oligonucleotide

SEQ ID NO: 548588 - DNA, 60 bp, Artificial; identical to SEQ ID NO: 329897
  Synthetic oligonucleotide

SEQ ID NO: 548589 - DNA, 55 bp, Artificial; identical to SEQ ID NO: 329900
  Synthetic oligonucleotide

SEQ ID NO: 548590 - DNA, 54 bp, Artificial; identical to SEQ ID NO: 329901
  Synthetic oligonucleotide

SEQ ID NO: 548591 - DNA, 60 bp, Artificial; identical to SEQ ID NO: 329902
  Synthetic oligonucleotide

SEQ ID NO: 548592 - DNA, 52 bp, Artificial; identical to SEQ ID NO: 329903
  Synthetic oligonucleotide

SEQ ID NO: 548593 - DNA, 58 bp, Artificial; identical to SEQ ID NO: 329908
  Synthetic oligonucleotide

SEQ ID NO: 548594 - DNA, 54 bp, Artificial; identical to SEQ ID NO: 5956
  Synthetic oligonucleotide

SEQ ID NO: 548595 - DNA, 60 bp, Artificial; identical to SEQ ID NO: 329909
  Synthetic oligonucleotide

SEQ ID NO: 548596 - DNA, 55 bp, Artificial; identical to SEQ ID NO: 329911
  Synthetic oligonucleotide

SEQ ID NO: 548597 - DNA, 60 bp, Artificial; identical to SEQ ID NO: 329912
  Synthetic oligonucleotide

SEQ ID NO: 548598 - DNA, 54 bp, Artificial; identical to SEQ ID NO: 329922
  Synthetic oligonucleotide

SEQ ID NO: 548599 - DNA, 60 bp, Artificial; identical to SEQ ID NO: 329924
  Synthetic oligonucleotide

SEQ ID NO: 548600 - DNA, 58 bp, Artificial; identical to SEQ ID NO: 329925
  Synthetic oligonucleotide

SEQ ID NO: 548601 - DNA, 56 bp, Artificial; identical to SEQ ID NO: 329928
  Synthetic oligonucleotide

SEQ ID NO: 548602 - DNA, 60 bp, Artificial; identical to SEQ ID NO: 329929
  Synthetic oligonucleotide

SEQ ID NO: 548603 - DNA, 60 bp, Artificial; identical to SEQ ID NO: 11005
  Synthetic oligonucleotide

SEQ ID NO: 548604 - DNA, 57 bp, Artificial; identical to SEQ ID NO: 329931
  Synthetic oligonucleotide

SEQ ID NO: 548605 - DNA, 60 bp, Artificial; identical to SEQ ID NO: 329935
  Synthetic oligonucleotide

SEQ ID NO: 548606 - DNA, 60 bp, Artificial; identical to SEQ ID NO: 329937
  Synthetic oligonucleotide

SEQ ID NO: 548607 - DNA, 55 bp, Artificial; identical to SEQ ID NO: 329939
  Synthetic oligonucleotide

SEQ ID NO: 548608 - DNA, 60 bp, Artificial; identical to SEQ ID NO: 329941
  Synthetic oligonucleotide

SEQ ID NO: 548609 - DNA, 57 bp, Artificial; identical to SEQ ID NO: 329944
  Synthetic oligonucleotide

SEQ ID NO: 548610 - DNA, 60 bp, Artificial; identical to SEQ ID NO: 329946
  Synthetic oligonucleotide

SEQ ID NO: 548611 - DNA, 58 bp, Artificial; identical to SEQ ID NO: 329948
  Synthetic oligonucleotide

SEQ ID NO: 548612 - DNA, 60 bp, Artificial; identical to SEQ ID NO: 329951
  Synthetic oligonucleotide

SEQ ID NO: 548613 - DNA, 54 bp, Artificial; identical to SEQ ID NO: 329954
  Synthetic oligonucleotide

SEQ ID NO: 548614 - DNA, 55 bp, Artificial; identical to SEQ ID NO: 329956
  Synthetic oligonucleotide

SEQ ID NO: 548615 - DNA, 54 bp, Artificial; identical to SEQ ID NO: 329958
  Synthetic oligonucleotide

SEQ ID NO: 548616 - DNA, 55 bp, Artificial; identical to SEQ ID NO: 329960
  Synthetic oligonucleotide

SEQ ID NO: 548617 - DNA, 57 bp, Artificial; identical to SEQ ID NO: 329962
  Synthetic oligonucleotide

SEQ ID NO: 548618 - DNA, 55 bp, Artificial; identical to SEQ ID NO: 329963
  Synthetic oligonucleotide

SEQ ID NO: 548619 - DNA, 58 bp, Artificial; identical to SEQ ID NO: 329968
  Synthetic oligonucleotide

SEQ ID NO: 548620 - DNA, 55 bp, Artificial; identical to SEQ ID NO: 329969
  Synthetic oligonucleotide

SEQ ID NO: 548621 - DNA, 55 bp, Artificial; identical to SEQ ID NO: 329970
  Synthetic oligonucleotide

SEQ ID NO: 548622 - DNA, 55 bp, Artificial; identical to SEQ ID NO: 16268
  Synthetic oligonucleotide

SEQ ID NO: 548623 - DNA, 59 bp, Artificial; identical to SEQ ID NO: 329973
  Synthetic oligonucleotide

SEQ ID NO: 548624 - DNA, 59 bp, Artificial; identical to SEQ ID NO: 329974
  Synthetic oligonucleotide

SEQ ID NO: 548625 - DNA, 56 bp, Artificial; identical to SEQ ID NO: 329975
  Synthetic oligonucleotide

SEQ ID NO: 548626 - DNA, 55 bp, Artificial; identical to SEQ ID NO: 329981
  Synthetic oligonucleotide

SEQ ID NO: 548627 - DNA, 50 bp, Artificial; identical to SEQ ID NO: 329983
  Synthetic oligonucleotide

SEQ ID NO: 548628 - DNA, 56 bp, Artificial; identical to SEQ ID NO: 329988
  Synthetic oligonucleotide

SEQ ID NO: 548629 - DNA, 60 bp, Artificial; identical to SEQ ID NO: 329991
  Synthetic oligonucleotide

SEQ ID NO: 548630 - DNA, 60 bp, Artificial; identical to SEQ ID NO: 329993
  Synthetic oligonucleotide

SEQ ID NO: 548631 - DNA, 58 bp, Artificial; identical to SEQ ID NO: 329994
  Synthetic oligonucleotide

SEQ ID NO: 548632 - DNA, 59 bp, Artificial; identical to SEQ ID NO: 16746
  Synthetic oligonucleotide

SEQ ID NO: 548633 - DNA, 55 bp, Artificial; identical to SEQ ID NO: 329999
  Synthetic oligonucleotide

SEQ ID NO: 548634 - DNA, 60 bp, Artificial; identical to SEQ ID NO: 7695
  Synthetic oligonucleotide

SEQ ID NO: 548635 - DNA, 54 bp, Artificial; identical to SEQ ID NO: 330003
  Synthetic oligonucleotide

SEQ ID NO: 548636 - DNA, 51 bp, Artificial; identical to SEQ ID NO: 330008
  Synthetic oligonucleotide

SEQ ID NO: 548637 - DNA, 58 bp, Artificial; identical to SEQ ID NO: 330009
  Synthetic oligonucleotide

SEQ ID NO: 548638 - DNA, 60 bp, Artificial; identical to SEQ ID NO: 330010
  Synthetic oligonucleotide

SEQ ID NO: 548639 - DNA, 55 bp, Artificial; identical to SEQ ID NO: 330011
  Synthetic oligonucleotide

SEQ ID NO: 548640 - DNA, 57 bp, Artificial; identical to SEQ ID NO: 330013
  Synthetic oligonucleotide

SEQ ID NO: 548641 - DNA, 54 bp, Artificial; identical to SEQ ID NO: 330016
  Synthetic oligonucleotide

SEQ ID NO: 548642 - DNA, 55 bp, Artificial; identical to SEQ ID NO: 330020
  Synthetic oligonucleotide

SEQ ID NO: 548643 - DNA, 60 bp, Artificial; identical to SEQ ID NO: 330021
  Synthetic oligonucleotide

SEQ ID NO: 548644 - DNA, 53 bp, Artificial; identical to SEQ ID NO: 330022
  Synthetic oligonucleotide

SEQ ID NO: 548645 - DNA, 53 bp, Artificial; identical to SEQ ID NO: 330025
  Synthetic oligonucleotide

SEQ ID NO: 548646 - DNA, 57 bp, Artificial; identical to SEQ ID NO: 330026
  Synthetic oligonucleotide

SEQ ID NO: 548647 - DNA, 60 bp, Artificial; identical to SEQ ID NO: 330028
  Synthetic oligonucleotide

SEQ ID NO: 548648 - DNA, 54 bp, Artificial; identical to SEQ ID NO: 330030
  Synthetic oligonucleotide

SEQ ID NO: 548649 - DNA, 60 bp, Artificial; identical to SEQ ID NO: 330032
  Synthetic oligonucleotide

SEQ ID NO: 548650 - DNA, 56 bp, Artificial; identical to SEQ ID NO: 330037
  Synthetic oligonucleotide

SEQ ID NO: 548651 - DNA, 55 bp, Artificial; identical to SEQ ID NO: 330040
  Synthetic oligonucleotide

SEQ ID NO: 548652 - DNA, 56 bp, Artificial; identical to SEQ ID NO: 330041
  Synthetic oligonucleotide

SEQ ID NO: 548653 - DNA, 58 bp, Artificial; identical to SEQ ID NO: 330042
  Synthetic oligonucleotide

SEQ ID NO: 548654 - DNA, 54 bp, Artificial; identical to SEQ ID NO: 7860
  Synthetic oligonucleotide

SEQ ID NO: 548655 - DNA, 60 bp, Artificial; identical to SEQ ID NO: 330050
  Synthetic oligonucleotide

SEQ ID NO: 548656 - DNA, 58 bp, Artificial; identical to SEQ ID NO: 330052
  Synthetic oligonucleotide

SEQ ID NO: 548657 - DNA, 57 bp, Artificial; identical to SEQ ID NO: 330054
  Synthetic oligonucleotide

SEQ ID NO: 548658 - DNA, 55 bp, Artificial; identical to SEQ ID NO: 330055
  Synthetic oligonucleotide

SEQ ID NO: 548659 - DNA, 55 bp, Artificial; identical to SEQ ID NO: 330056
  Synthetic oligonucleotide

SEQ ID NO: 548660 - DNA, 55 bp, Artificial; identical to SEQ ID NO: 330063
  Synthetic oligonucleotide

SEQ ID NO: 548661 - DNA, 58 bp, Artificial; identical to SEQ ID NO: 330064
  Synthetic oligonucleotide

SEQ ID NO: 548662 - DNA, 60 bp, Artificial; identical to SEQ ID NO: 330066
  Synthetic oligonucleotide

SEQ ID NO: 548663 - DNA, 52 bp, Artificial; identical to SEQ ID NO: 330067
  Synthetic oligonucleotide

SEQ ID NO: 548664 - DNA, 60 bp, Artificial; identical to SEQ ID NO: 330069
  Synthetic oligonucleotide

SEQ ID NO: 548665 - DNA, 55 bp, Artificial; identical to SEQ ID NO: 330071
  Synthetic oligonucleotide

SEQ ID NO: 548666 - DNA, 60 bp, Artificial; identical to SEQ ID NO: 330075
  Synthetic oligonucleotide

SEQ ID NO: 548667 - DNA, 60 bp, Artificial; identical to SEQ ID NO: 38632
  Synthetic oligonucleotide

SEQ ID NO: 548668 - DNA, 60 bp, Artificial; identical to SEQ ID NO: 330077
  Synthetic oligonucleotide

SEQ ID NO: 548669 - DNA, 57 bp, Artificial; identical to SEQ ID NO: 330079
  Synthetic oligonucleotide

SEQ ID NO: 548670 - DNA, 55 bp, Artificial; identical to SEQ ID NO: 20328
  Synthetic oligonucleotide

SEQ ID NO: 548671 - DNA, 56 bp, Artificial; identical to SEQ ID NO: 330087
  Synthetic oligonucleotide

SEQ ID NO: 548672 - DNA, 53 bp, Artificial; identical to SEQ ID NO: 330088
  Synthetic oligonucleotide

SEQ ID NO: 548673 - DNA, 57 bp, Artificial; identical to SEQ ID NO: 330089
  Synthetic oligonucleotide

SEQ ID NO: 548674 - DNA, 60 bp, Artificial; identical to SEQ ID NO: 330094
  Synthetic oligonucleotide

SEQ ID NO: 548675 - DNA, 60 bp, Artificial; identical to SEQ ID NO: 330097
  Synthetic oligonucleotide

SEQ ID NO: 548676 - DNA, 50 bp, Artificial; identical to SEQ ID NO: 330098
  Synthetic oligonucleotide

SEQ ID NO: 548677 - DNA, 50 bp, Artificial; identical to SEQ ID NO: 330103
  Synthetic oligonucleotide

SEQ ID NO: 548678 - DNA, 60 bp, Artificial; identical to SEQ ID NO: 330105
  Synthetic oligonucleotide

SEQ ID NO: 548679 - DNA, 55 bp, Artificial; identical to SEQ ID NO: 330119
  Synthetic oligonucleotide

SEQ ID NO: 548680 - DNA, 55 bp, Artificial; identical to SEQ ID NO: 15261
  Synthetic oligonucleotide

SEQ ID NO: 548681 - DNA, 51 bp, Artificial; identical to SEQ ID NO: 330122
  Synthetic oligonucleotide

SEQ ID NO: 548682 - DNA, 58 bp, Artificial; identical to SEQ ID NO: 330124
  Synthetic oligonucleotide

SEQ ID NO: 548683 - DNA, 55 bp, Artificial; identical to SEQ ID NO: 330127
  Synthetic oligonucleotide

SEQ ID NO: 548684 - DNA, 55 bp, Artificial; identical to SEQ ID NO: 330128
  Synthetic oligonucleotide

SEQ ID NO: 548685 - DNA, 55 bp, Artificial; identical to SEQ ID NO: 330131
  Synthetic oligonucleotide

SEQ ID NO: 548686 - DNA, 60 bp, Artificial; identical to SEQ ID NO: 330133
  Synthetic oligonucleotide

SEQ ID NO: 548687 - DNA, 60 bp, Artificial; identical to SEQ ID NO: 330135
  Synthetic oligonucleotide

SEQ ID NO: 548688 - DNA, 52 bp, Artificial; identical to SEQ ID NO: 330140
  Synthetic oligonucleotide

SEQ ID NO: 548689 - DNA, 59 bp, Artificial; identical to SEQ ID NO: 330143
  Synthetic oligonucleotide

SEQ ID NO: 548690 - DNA, 60 bp, Artificial; identical to SEQ ID NO: 330149
  Synthetic oligonucleotide

SEQ ID NO: 548691 - DNA, 56 bp, Artificial; identical to SEQ ID NO: 330154
  Synthetic oligonucleotide

SEQ ID NO: 548692 - DNA, 55 bp, Artificial; identical to SEQ ID NO: 330155
  Synthetic oligonucleotide

SEQ ID NO: 548693 - DNA, 60 bp, Artificial; identical to SEQ ID NO: 330156
  Synthetic oligonucleotide

SEQ ID NO: 548694 - DNA, 52 bp, Artificial; identical to SEQ ID NO: 330158
  Synthetic oligonucleotide

SEQ ID NO: 548695 - DNA, 60 bp, Artificial; identical to SEQ ID NO: 330159
  Synthetic oligonucleotide

SEQ ID NO: 548696 - DNA, 58 bp, Artificial; identical to SEQ ID NO: 330160
  Synthetic oligonucleotide

SEQ ID NO: 548697 - DNA, 60 bp, Artificial; identical to SEQ ID NO: 330162
  Synthetic oligonucleotide

SEQ ID NO: 548698 - DNA, 60 bp, Artificial; identical to SEQ ID NO: 330165
  Synthetic oligonucleotide

SEQ ID NO: 548699 - DNA, 60 bp, Artificial; identical to SEQ ID NO: 330167
  Synthetic oligonucleotide

SEQ ID NO: 548700 - DNA, 60 bp, Artificial; identical to SEQ ID NO: 330169
  Synthetic oligonucleotide

SEQ ID NO: 548701 - DNA, 58 bp, Artificial; identical to SEQ ID NO: 330179
  Synthetic oligonucleotide

SEQ ID NO: 548702 - DNA, 57 bp, Artificial; identical to SEQ ID NO: 330181
  Synthetic oligonucleotide

SEQ ID NO: 548703 - DNA, 54 bp, Artificial; identical to SEQ ID NO: 330182
  Synthetic oligonucleotide

SEQ ID NO: 548704 - DNA, 52 bp, Artificial; identical to SEQ ID NO: 330186
  Synthetic oligonucleotide

SEQ ID NO: 548705 - DNA, 51 bp, Artificial; identical to SEQ ID NO: 330187
  Synthetic oligonucleotide

SEQ ID NO: 548706 - DNA, 57 bp, Artificial; identical to SEQ ID NO: 330188
  Synthetic oligonucleotide

SEQ ID NO: 548707 - DNA, 55 bp, Artificial; identical to SEQ ID NO: 330189
  Synthetic oligonucleotide

SEQ ID NO: 548708 - DNA, 59 bp, Artificial; identical to SEQ ID NO: 330191
  Synthetic oligonucleotide

SEQ ID NO: 548709 - DNA, 60 bp, Artificial; identical to SEQ ID NO: 330192
  Synthetic oligonucleotide

SEQ ID NO: 548710 - DNA, 60 bp, Artificial; identical to SEQ ID NO: 330197
  Synthetic oligonucleotide

SEQ ID NO: 548711 - DNA, 52 bp, Artificial; identical to SEQ ID NO: 330200
  Synthetic oligonucleotide

SEQ ID NO: 548712 - DNA, 58 bp, Artificial; identical to SEQ ID NO: 330202
  Synthetic oligonucleotide

SEQ ID NO: 548713 - DNA, 60 bp, Artificial; identical to SEQ ID NO: 330205
  Synthetic oligonucleotide

SEQ ID NO: 548714 - DNA, 58 bp, Artificial; identical to SEQ ID NO: 330206
  Synthetic oligonucleotide

SEQ ID NO: 548715 - DNA, 56 bp, Artificial; identical to SEQ ID NO: 330208
  Synthetic oligonucleotide

SEQ ID NO: 548716 - DNA, 60 bp, Artificial; identical to SEQ ID NO: 330209
  Synthetic oligonucleotide

SEQ ID NO: 548717 - DNA, 58 bp, Artificial; identical to SEQ ID NO: 330217
  Synthetic oligonucleotide

SEQ ID NO: 548718 - DNA, 57 bp, Artificial; identical to SEQ ID NO: 330219
  Synthetic oligonucleotide

SEQ ID NO: 548719 - DNA, 54 bp, Artificial; identical to SEQ ID NO: 330220
  Synthetic oligonucleotide

SEQ ID NO: 548720 - DNA, 51 bp, Artificial; identical to SEQ ID NO: 330223
  Synthetic oligonucleotide

SEQ ID NO: 548721 - DNA, 60 bp, Artificial; identical to SEQ ID NO: 330225
  Synthetic oligonucleotide

SEQ ID NO: 548722 - DNA, 53 bp, Artificial; identical to SEQ ID NO: 330227
  Synthetic oligonucleotide

SEQ ID NO: 548723 - DNA, 54 bp, Artificial; identical to SEQ ID NO: 330229
  Synthetic oligonucleotide

SEQ ID NO: 548724 - DNA, 56 bp, Artificial; identical to SEQ ID NO: 330231
  Synthetic oligonucleotide

SEQ ID NO: 548725 - DNA, 59 bp, Artificial; identical to SEQ ID NO: 330232
  Synthetic oligonucleotide

SEQ ID NO: 548726 - DNA, 55 bp, Artificial; identical to SEQ ID NO: 330233
  Synthetic oligonucleotide

SEQ ID NO: 548727 - DNA, 60 bp, Artificial; identical to SEQ ID NO: 330235
  Synthetic oligonucleotide

SEQ ID NO: 548728 - DNA, 58 bp, Artificial; identical to SEQ ID NO: 330237
  Synthetic oligonucleotide

SEQ ID NO: 548729 - DNA, 57 bp, Artificial; identical to SEQ ID NO: 330238
  Synthetic oligonucleotide

SEQ ID NO: 548730 - DNA, 56 bp, Artificial; identical to SEQ ID NO: 330241
  Synthetic oligonucleotide

SEQ ID NO: 548731 - DNA, 59 bp, Artificial; identical to SEQ ID NO: 17578
  Synthetic oligonucleotide

SEQ ID NO: 548732 - DNA, 52 bp, Artificial; identical to SEQ ID NO: 330244
  Synthetic oligonucleotide

SEQ ID NO: 548733 - DNA, 60 bp, Artificial; identical to SEQ ID NO: 330247
  Synthetic oligonucleotide

SEQ ID NO: 548734 - DNA, 59 bp, Artificial; identical to SEQ ID NO: 330249
  Synthetic oligonucleotide

SEQ ID NO: 548735 - DNA, 50 bp, Artificial; identical to SEQ ID NO: 330255
  Synthetic oligonucleotide

SEQ ID NO: 548736 - DNA, 60 bp, Artificial; identical to SEQ ID NO: 330256
  Synthetic oligonucleotide

SEQ ID NO: 548737 - DNA, 56 bp, Artificial; identical to SEQ ID NO: 18430
  Synthetic oligonucleotide

SEQ ID NO: 548738 - DNA, 58 bp, Artificial; identical to SEQ ID NO: 330257
  Synthetic oligonucleotide

SEQ ID NO: 548739 - DNA, 59 bp, Artificial; identical to SEQ ID NO: 330258
  Synthetic oligonucleotide

SEQ ID NO: 548740 - DNA, 60 bp, Artificial; identical to SEQ ID NO: 330262
  Synthetic oligonucleotide

SEQ ID NO: 548741 - DNA, 55 bp, Artificial; identical to SEQ ID NO: 330264
  Synthetic oligonucleotide

SEQ ID NO: 548742 - DNA, 56 bp, Artificial; identical to SEQ ID NO: 330265
  Synthetic oligonucleotide

SEQ ID NO: 548743 - DNA, 60 bp, Artificial; identical to SEQ ID NO: 330269
  Synthetic oligonucleotide

SEQ ID NO: 548744 - DNA, 60 bp, Artificial; identical to SEQ ID NO: 330272
  Synthetic oligonucleotide

SEQ ID NO: 548745 - DNA, 56 bp, Artificial; identical to SEQ ID NO: 330275
  Synthetic oligonucleotide

SEQ ID NO: 548746 - DNA, 53 bp, Artificial; identical to SEQ ID NO: 330278
  Synthetic oligonucleotide

SEQ ID NO: 548747 - DNA, 59 bp, Artificial; identical to SEQ ID NO: 330279
  Synthetic oligonucleotide

SEQ ID NO: 548748 - DNA, 58 bp, Artificial; identical to SEQ ID NO: 330280
  Synthetic oligonucleotide

SEQ ID NO: 548749 - DNA, 60 bp, Artificial; identical to SEQ ID NO: 330281
  Synthetic oligonucleotide

SEQ ID NO: 548750 - DNA, 57 bp, Artificial; identical to SEQ ID NO: 330282
  Synthetic oligonucleotide

SEQ ID NO: 548751 - DNA, 54 bp, Artificial; identical to SEQ ID NO: 330285
  Synthetic oligonucleotide

SEQ ID NO: 548752 - DNA, 60 bp, Artificial; identical to SEQ ID NO: 330288
  Synthetic oligonucleotide

SEQ ID NO: 548753 - DNA, 56 bp, Artificial; identical to SEQ ID NO: 330294
  Synthetic oligonucleotide

SEQ ID NO: 548754 - DNA, 52 bp, Artificial; identical to SEQ ID NO: 330300
  Synthetic oligonucleotide

SEQ ID NO: 548755 - DNA, 59 bp, Artificial; identical to SEQ ID NO: 330301
  Synthetic oligonucleotide

SEQ ID NO: 548756 - DNA, 60 bp, Artificial; identical to SEQ ID NO: 330303
  Synthetic oligonucleotide

SEQ ID NO: 548757 - DNA, 56 bp, Artificial; identical to SEQ ID NO: 330307
  Synthetic oligonucleotide

SEQ ID NO: 548758 - DNA, 55 bp, Artificial; identical to SEQ ID NO: 330308
  Synthetic oligonucleotide

SEQ ID NO: 548759 - DNA, 60 bp, Artificial; identical to SEQ ID NO: 330316
  Synthetic oligonucleotide

SEQ ID NO: 548760 - DNA, 55 bp, Artificial; identical to SEQ ID NO: 330317
  Synthetic oligonucleotide

SEQ ID NO: 548761 - DNA, 58 bp, Artificial; identical to SEQ ID NO: 16840
  Synthetic oligonucleotide

SEQ ID NO: 548762 - DNA, 60 bp, Artificial; identical to SEQ ID NO: 330318
  Synthetic oligonucleotide

SEQ ID NO: 548763 - DNA, 60 bp, Artificial; identical to SEQ ID NO: 330321
  Synthetic oligonucleotide

SEQ ID NO: 548764 - DNA, 60 bp, Artificial; identical to SEQ ID NO: 330322
  Synthetic oligonucleotide

SEQ ID NO: 548765 - DNA, 55 bp, Artificial; identical to SEQ ID NO: 330323
  Synthetic oligonucleotide

SEQ ID NO: 548766 - DNA, 60 bp, Artificial; identical to SEQ ID NO: 330326
  Synthetic oligonucleotide

SEQ ID NO: 548767 - DNA, 60 bp, Artificial; identical to SEQ ID NO: 330327
  Synthetic oligonucleotide

SEQ ID NO: 548768 - DNA, 56 bp, Artificial; identical to SEQ ID NO: 330329
  Synthetic oligonucleotide

SEQ ID NO: 548769 - DNA, 58 bp, Artificial; identical to SEQ ID NO: 330331
  Synthetic oligonucleotide

SEQ ID NO: 548770 - DNA, 57 bp, Artificial; identical to SEQ ID NO: 330333
  Synthetic oligonucleotide

SEQ ID NO: 548771 - DNA, 56 bp, Artificial; identical to SEQ ID NO: 10962
  Synthetic oligonucleotide

SEQ ID NO: 548772 - DNA, 60 bp, Artificial; identical to SEQ ID NO: 330338
  Synthetic oligonucleotide

SEQ ID NO: 548773 - DNA, 60 bp, Artificial; identical to SEQ ID NO: 330342
  Synthetic oligonucleotide

SEQ ID NO: 548774 - DNA, 60 bp, Artificial; identical to SEQ ID NO: 330343
  Synthetic oligonucleotide

SEQ ID NO: 548775 - DNA, 55 bp, Artificial; identical to SEQ ID NO: 330344
  Synthetic oligonucleotide

SEQ ID NO: 548776 - DNA, 60 bp, Artificial; identical to SEQ ID NO: 330348
  Synthetic oligonucleotide

SEQ ID NO: 548777 - DNA, 56 bp, Artificial; identical to SEQ ID NO: 330350
  Synthetic oligonucleotide

SEQ ID NO: 548778 - DNA, 60 bp, Artificial; identical to SEQ ID NO: 330352
  Synthetic oligonucleotide

SEQ ID NO: 548779 - DNA, 60 bp, Artificial; identical to SEQ ID NO: 330354
  Synthetic oligonucleotide

SEQ ID NO: 548780 - DNA, 55 bp, Artificial; identical to SEQ ID NO: 330355
  Synthetic oligonucleotide

SEQ ID NO: 548781 - DNA, 58 bp, Artificial; identical to SEQ ID NO: 330360
  Synthetic oligonucleotide

SEQ ID NO: 548782 - DNA, 55 bp, Artificial; identical to SEQ ID NO: 330364
  Synthetic oligonucleotide

SEQ ID NO: 548783 - DNA, 52 bp, Artificial; identical to SEQ ID NO: 330366
  Synthetic oligonucleotide

SEQ ID NO: 548784 - DNA, 59 bp, Artificial; identical to SEQ ID NO: 330370
  Synthetic oligonucleotide

SEQ ID NO: 548785 - DNA, 60 bp, Artificial; identical to SEQ ID NO: 11380
  Synthetic oligonucleotide

SEQ ID NO: 548786 - DNA, 49 bp, Artificial; identical to SEQ ID NO: 330374
  Synthetic oligonucleotide

SEQ ID NO: 548787 - DNA, 60 bp, Artificial; identical to SEQ ID NO: 330379
  Synthetic oligonucleotide

SEQ ID NO: 548788 - DNA, 60 bp, Artificial; identical to SEQ ID NO: 330385
  Synthetic oligonucleotide

SEQ ID NO: 548789 - DNA, 52 bp, Artificial; identical to SEQ ID NO: 330391
  Synthetic oligonucleotide

SEQ ID NO: 548790 - DNA, 60 bp, Artificial; identical to SEQ ID NO: 330395
  Synthetic oligonucleotide

SEQ ID NO: 548791 - DNA, 51 bp, Artificial; identical to SEQ ID NO: 330400
  Synthetic oligonucleotide

SEQ ID NO: 548792 - DNA, 57 bp, Artificial; identical to SEQ ID NO: 330401
  Synthetic oligonucleotide

SEQ ID NO: 548793 - DNA, 54 bp, Artificial; identical to SEQ ID NO: 330403
  Synthetic oligonucleotide

SEQ ID NO: 548794 - DNA, 52 bp, Artificial; identical to SEQ ID NO: 330404
  Synthetic oligonucleotide

SEQ ID NO: 548795 - DNA, 60 bp, Artificial; identical to SEQ ID NO: 330405
  Synthetic oligonucleotide

SEQ ID NO: 548796 - DNA, 60 bp, Artificial; identical to SEQ ID NO: 330410
  Synthetic oligonucleotide

SEQ ID NO: 548797 - DNA, 59 bp, Artificial; identical to SEQ ID NO: 330412
  Synthetic oligonucleotide

SEQ ID NO: 548798 - DNA, 50 bp, Artificial; identical to SEQ ID NO: 330420
  Synthetic oligonucleotide

SEQ ID NO: 548799 - DNA, 55 bp, Artificial; identical to SEQ ID NO: 330421
  Synthetic oligonucleotide

SEQ ID NO: 548800 - DNA, 60 bp, Artificial; identical to SEQ ID NO: 14499
  Synthetic oligonucleotide

SEQ ID NO: 548801 - DNA, 60 bp, Artificial; identical to SEQ ID NO: 330424
  Synthetic oligonucleotide

SEQ ID NO: 548802 - DNA, 60 bp, Artificial; identical to SEQ ID NO: 330426
  Synthetic oligonucleotide

SEQ ID NO: 548803 - DNA, 60 bp, Artificial; identical to SEQ ID NO: 330427
  Synthetic oligonucleotide

SEQ ID NO: 548804 - DNA, 59 bp, Artificial; identical to SEQ ID NO: 330428
  Synthetic oligonucleotide

SEQ ID NO: 548805 - DNA, 60 bp, Artificial; identical to SEQ ID NO: 330430
  Synthetic oligonucleotide

SEQ ID NO: 548806 - DNA, 60 bp, Artificial; identical to SEQ ID NO: 330442
  Synthetic oligonucleotide

SEQ ID NO: 548807 - DNA, 52 bp, Artificial; identical to SEQ ID NO: 330443
  Synthetic oligonucleotide

SEQ ID NO: 548808 - DNA, 50 bp, Artificial; identical to SEQ ID NO: 330445
  Synthetic oligonucleotide

SEQ ID NO: 548809 - DNA, 57 bp, Artificial; identical to SEQ ID NO: 330447
  Synthetic oligonucleotide

SEQ ID NO: 548810 - DNA, 60 bp, Artificial; identical to SEQ ID NO: 330453
  Synthetic oligonucleotide

SEQ ID NO: 548811 - DNA, 55 bp, Artificial; identical to SEQ ID NO: 330454
  Synthetic oligonucleotide

SEQ ID NO: 548812 - DNA, 60 bp, Artificial; identical to SEQ ID NO: 330455
  Synthetic oligonucleotide

SEQ ID NO: 548813 - DNA, 52 bp, Artificial; identical to SEQ ID NO: 330456
  Synthetic oligonucleotide

SEQ ID NO: 548814 - DNA, 54 bp, Artificial; identical to SEQ ID NO: 330457
  Synthetic oligonucleotide

SEQ ID NO: 548815 - DNA, 55 bp, Artificial; identical to SEQ ID NO: 330460
  Synthetic oligonucleotide

SEQ ID NO: 548816 - DNA, 60 bp, Artificial; identical to SEQ ID NO: 330468
  Synthetic oligonucleotide

SEQ ID NO: 548817 - DNA, 60 bp, Artificial; identical to SEQ ID NO: 330469
  Synthetic oligonucleotide

SEQ ID NO: 548818 - DNA, 60 bp, Artificial; identical to SEQ ID NO: 330470
  Synthetic oligonucleotide

SEQ ID NO: 548819 - DNA, 56 bp, Artificial; identical to SEQ ID NO: 330471
  Synthetic oligonucleotide

SEQ ID NO: 548820 - DNA, 59 bp, Artificial; identical to SEQ ID NO: 330472
  Synthetic oligonucleotide

SEQ ID NO: 548821 - DNA, 55 bp, Artificial; identical to SEQ ID NO: 330474
  Synthetic oligonucleotide

SEQ ID NO: 548822 - DNA, 55 bp, Artificial; identical to SEQ ID NO: 330475
  Synthetic oligonucleotide

SEQ ID NO: 548823 - DNA, 60 bp, Artificial; identical to SEQ ID NO: 330477
  Synthetic oligonucleotide

SEQ ID NO: 548824 - DNA, 60 bp, Artificial; identical to SEQ ID NO: 330479
  Synthetic oligonucleotide

SEQ ID NO: 548825 - DNA, 55 bp, Artificial; identical to SEQ ID NO: 330482
  Synthetic oligonucleotide

SEQ ID NO: 548826 - DNA, 51 bp, Artificial; identical to SEQ ID NO: 330488
  Synthetic oligonucleotide

SEQ ID NO: 548827 - DNA, 57 bp, Artificial; identical to SEQ ID NO: 330489
  Synthetic oligonucleotide

SEQ ID NO: 548828 - DNA, 59 bp, Artificial; identical to SEQ ID NO: 330492
  Synthetic oligonucleotide

SEQ ID NO: 548829 - DNA, 60 bp, Artificial; identical to SEQ ID NO: 330496
  Synthetic oligonucleotide

SEQ ID NO: 548830 - DNA, 60 bp, Artificial; identical to SEQ ID NO: 330497
  Synthetic oligonucleotide

SEQ ID NO: 548831 - DNA, 60 bp, Artificial; identical to SEQ ID NO: 330500
  Synthetic oligonucleotide

SEQ ID NO: 548832 - DNA, 57 bp, Artificial; identical to SEQ ID NO: 330502
  Synthetic oligonucleotide

SEQ ID NO: 548833 - DNA, 60 bp, Artificial; identical to SEQ ID NO: 330506
  Synthetic oligonucleotide

SEQ ID NO: 548834 - DNA, 60 bp, Artificial; identical to SEQ ID NO: 330508
  Synthetic oligonucleotide

SEQ ID NO: 548835 - DNA, 55 bp, Artificial; identical to SEQ ID NO: 330514
  Synthetic oligonucleotide

SEQ ID NO: 548836 - DNA, 60 bp, Artificial; identical to SEQ ID NO: 330515
  Synthetic oligonucleotide

SEQ ID NO: 548837 - DNA, 52 bp, Artificial; identical to SEQ ID NO: 330517
  Synthetic oligonucleotide

SEQ ID NO: 548838 - DNA, 60 bp, Artificial; identical to SEQ ID NO: 330520
  Synthetic oligonucleotide

SEQ ID NO: 548839 - DNA, 55 bp, Artificial; identical to SEQ ID NO: 330522
  Synthetic oligonucleotide

SEQ ID NO: 548840 - DNA, 58 bp, Artificial; identical to SEQ ID NO: 16239
  Synthetic oligonucleotide

SEQ ID NO: 548841 - DNA, 60 bp, Artificial; identical to SEQ ID NO: 330527
  Synthetic oligonucleotide

SEQ ID NO: 548842 - DNA, 52 bp, Artificial; identical to SEQ ID NO: 330530
  Synthetic oligonucleotide

SEQ ID NO: 548843 - DNA, 60 bp, Artificial; identical to SEQ ID NO: 330534
  Synthetic oligonucleotide

SEQ ID NO: 548844 - DNA, 55 bp, Artificial; identical to SEQ ID NO: 330538
  Synthetic oligonucleotide

SEQ ID NO: 548845 - DNA, 60 bp, Artificial; identical to SEQ ID NO: 330541
  Synthetic oligonucleotide

SEQ ID NO: 548846 - DNA, 60 bp, Artificial; identical to SEQ ID NO: 330543
  Synthetic oligonucleotide

SEQ ID NO: 548847 - DNA, 58 bp, Artificial; identical to SEQ ID NO: 330547
  Synthetic oligonucleotide

SEQ ID NO: 548848 - DNA, 60 bp, Artificial; identical to SEQ ID NO: 330548
  Synthetic oligonucleotide

SEQ ID NO: 548849 - DNA, 60 bp, Artificial; identical to SEQ ID NO: 330549
  Synthetic oligonucleotide

SEQ ID NO: 548850 - DNA, 59 bp, Artificial; identical to SEQ ID NO: 330550
  Synthetic oligonucleotide

SEQ ID NO: 548851 - DNA, 60 bp, Artificial; identical to SEQ ID NO: 330555
  Synthetic oligonucleotide

SEQ ID NO: 548852 - DNA, 57 bp, Artificial; identical to SEQ ID NO: 330556
  Synthetic oligonucleotide

SEQ ID NO: 548853 - DNA, 57 bp, Artificial; identical to SEQ ID NO: 330558
  Synthetic oligonucleotide

SEQ ID NO: 548854 - DNA, 60 bp, Artificial; identical to SEQ ID NO: 330559
  Synthetic oligonucleotide

SEQ ID NO: 548855 - DNA, 60 bp, Artificial; identical to SEQ ID NO: 330560
  Synthetic oligonucleotide

SEQ ID NO: 548856 - DNA, 60 bp, Artificial; identical to SEQ ID NO: 330562
  Synthetic oligonucleotide

SEQ ID NO: 548857 - DNA, 55 bp, Artificial; identical to SEQ ID NO: 330563
  Synthetic oligonucleotide

SEQ ID NO: 548858 - DNA, 59 bp, Artificial; identical to SEQ ID NO: 330564
  Synthetic oligonucleotide

SEQ ID NO: 548859 - DNA, 58 bp, Artificial; identical to SEQ ID NO: 330566
  Synthetic oligonucleotide

SEQ ID NO: 548860 - DNA, 50 bp, Artificial; identical to SEQ ID NO: 330570
  Synthetic oligonucleotide

SEQ ID NO: 548861 - DNA, 56 bp, Artificial; identical to SEQ ID NO: 330572
  Synthetic oligonucleotide

SEQ ID NO: 548862 - DNA, 56 bp, Artificial; identical to SEQ ID NO: 330578
  Synthetic oligonucleotide

SEQ ID NO: 548863 - DNA, 52 bp, Artificial; identical to SEQ ID NO: 330582
  Synthetic oligonucleotide

SEQ ID NO: 548864 - DNA, 57 bp, Artificial; identical to SEQ ID NO: 330583
  Synthetic oligonucleotide

SEQ ID NO: 548865 - DNA, 60 bp, Artificial; identical to SEQ ID NO: 330586
  Synthetic oligonucleotide

SEQ ID NO: 548866 - DNA, 55 bp, Artificial; identical to SEQ ID NO: 330587
  Synthetic oligonucleotide

SEQ ID NO: 548867 - DNA, 60 bp, Artificial; identical to SEQ ID NO: 330589
  Synthetic oligonucleotide

SEQ ID NO: 548868 - DNA, 52 bp, Artificial; identical to SEQ ID NO: 330592
  Synthetic oligonucleotide

SEQ ID NO: 548869 - DNA, 55 bp, Artificial; identical to SEQ ID NO: 330596
  Synthetic oligonucleotide

SEQ ID NO: 548870 - DNA, 60 bp, Artificial; identical to SEQ ID NO: 330603
  Synthetic oligonucleotide

SEQ ID NO: 548871 - DNA, 60 bp, Artificial; identical to SEQ ID NO: 11763
  Synthetic oligonucleotide

SEQ ID NO: 548872 - DNA, 60 bp, Artificial; identical to SEQ ID NO: 330605
  Synthetic oligonucleotide

SEQ ID NO: 548873 - DNA, 55 bp, Artificial; identical to SEQ ID NO: 13226
  Synthetic oligonucleotide

SEQ ID NO: 548874 - DNA, 60 bp, Artificial; identical to SEQ ID NO: 6606
  Synthetic oligonucleotide

SEQ ID NO: 548875 - DNA, 54 bp, Artificial; identical to SEQ ID NO: 330616
  Synthetic oligonucleotide

SEQ ID NO: 548876 - DNA, 52 bp, Artificial; identical to SEQ ID NO: 330617
  Synthetic oligonucleotide

SEQ ID NO: 548877 - DNA, 60 bp, Artificial; identical to SEQ ID NO: 330618
  Synthetic oligonucleotide

SEQ ID NO: 548878 - DNA, 53 bp, Artificial; identical to SEQ ID NO: 330623
  Synthetic oligonucleotide

SEQ ID NO: 548879 - DNA, 60 bp, Artificial; identical to SEQ ID NO: 7229
  Synthetic oligonucleotide

SEQ ID NO: 548880 - DNA, 56 bp, Artificial; identical to SEQ ID NO: 330626
  Synthetic oligonucleotide

SEQ ID NO: 548881 - DNA, 60 bp, Artificial; identical to SEQ ID NO: 330627
  Synthetic oligonucleotide

SEQ ID NO: 548882 - DNA, 59 bp, Artificial; identical to SEQ ID NO: 330628
  Synthetic oligonucleotide

SEQ ID NO: 548883 - DNA, 60 bp, Artificial; identical to SEQ ID NO: 330629
  Synthetic oligonucleotide

SEQ ID NO: 548884 - DNA, 57 bp, Artificial; identical to SEQ ID NO: 330630
  Synthetic oligonucleotide

SEQ ID NO: 548885 - DNA, 60 bp, Artificial; identical to SEQ ID NO: 330634
  Synthetic oligonucleotide

SEQ ID NO: 548886 - DNA, 60 bp, Artificial; identical to SEQ ID NO: 330636
  Synthetic oligonucleotide

SEQ ID NO: 548887 - DNA, 56 bp, Artificial; identical to SEQ ID NO: 330639
  Synthetic oligonucleotide

SEQ ID NO: 548888 - DNA, 54 bp, Artificial; identical to SEQ ID NO: 330645
  Synthetic oligonucleotide

SEQ ID NO: 548889 - DNA, 60 bp, Artificial; identical to SEQ ID NO: 330647
  Synthetic oligonucleotide

SEQ ID NO: 548890 - DNA, 60 bp, Artificial; identical to SEQ ID NO: 330651
  Synthetic oligonucleotide

SEQ ID NO: 548891 - DNA, 57 bp, Artificial; identical to SEQ ID NO: 330656
  Synthetic oligonucleotide

SEQ ID NO: 548892 - DNA, 52 bp, Artificial; identical to SEQ ID NO: 330657
  Synthetic oligonucleotide

SEQ ID NO: 548893 - DNA, 58 bp, Artificial; identical to SEQ ID NO: 330660
  Synthetic oligonucleotide

SEQ ID NO: 548894 - DNA, 55 bp, Artificial; identical to SEQ ID NO: 330665
  Synthetic oligonucleotide

SEQ ID NO: 548895 - DNA, 60 bp, Artificial; identical to SEQ ID NO: 330668
  Synthetic oligonucleotide

SEQ ID NO: 548896 - DNA, 58 bp, Artificial; identical to SEQ ID NO: 330669
  Synthetic oligonucleotide

SEQ ID NO: 548897 - DNA, 54 bp, Artificial; identical to SEQ ID NO: 330673
  Synthetic oligonucleotide

SEQ ID NO: 548898 - DNA, 59 bp, Artificial; identical to SEQ ID NO: 330674
  Synthetic oligonucleotide

SEQ ID NO: 548899 - DNA, 57 bp, Artificial; identical to SEQ ID NO: 330678
  Synthetic oligonucleotide

SEQ ID NO: 548900 - DNA, 59 bp, Artificial; identical to SEQ ID NO: 330682
  Synthetic oligonucleotide

SEQ ID NO: 548901 - DNA, 60 bp, Artificial; identical to SEQ ID NO: 330683
  Synthetic oligonucleotide

SEQ ID NO: 548902 - DNA, 55 bp, Artificial; identical to SEQ ID NO: 330685
  Synthetic oligonucleotide

SEQ ID NO: 548903 - DNA, 50 bp, Artificial; identical to SEQ ID NO: 330687
  Synthetic oligonucleotide

SEQ ID NO: 548904 - DNA, 60 bp, Artificial; identical to SEQ ID NO: 330696
  Synthetic oligonucleotide

SEQ ID NO: 548905 - DNA, 58 bp, Artificial; identical to SEQ ID NO: 330698
  Synthetic oligonucleotide

SEQ ID NO: 548906 - DNA, 50 bp, Artificial; identical to SEQ ID NO: 330705
  Synthetic oligonucleotide

SEQ ID NO: 548907 - DNA, 56 bp, Artificial; identical to SEQ ID NO: 330706
  Synthetic oligonucleotide

SEQ ID NO: 548908 - DNA, 54 bp, Artificial; identical to SEQ ID NO: 330707
  Synthetic oligonucleotide

SEQ ID NO: 548909 - DNA, 59 bp, Artificial; identical to SEQ ID NO: 330710
  Synthetic oligonucleotide

SEQ ID NO: 548910 - DNA, 50 bp, Artificial; identical to SEQ ID NO: 330714
  Synthetic oligonucleotide

SEQ ID NO: 548911 - DNA, 53 bp, Artificial; identical to SEQ ID NO: 330720
  Synthetic oligonucleotide

SEQ ID NO: 548912 - DNA, 59 bp, Artificial; identical to SEQ ID NO: 330721
  Synthetic oligonucleotide

SEQ ID NO: 548913 - DNA, 59 bp, Artificial; identical to SEQ ID NO: 330722
  Synthetic oligonucleotide

SEQ ID NO: 548914 - DNA, 54 bp, Artificial; identical to SEQ ID NO: 330723
  Synthetic oligonucleotide

SEQ ID NO: 548915 - DNA, 57 bp, Artificial; identical to SEQ ID NO: 330724
  Synthetic oligonucleotide

SEQ ID NO: 548916 - DNA, 60 bp, Artificial; identical to SEQ ID NO: 330725
  Synthetic oligonucleotide

SEQ ID NO: 548917 - DNA, 60 bp, Artificial; identical to SEQ ID NO: 330728
  Synthetic oligonucleotide

SEQ ID NO: 548918 - DNA, 55 bp, Artificial; identical to SEQ ID NO: 330735
  Synthetic oligonucleotide

SEQ ID NO: 548919 - DNA, 56 bp, Artificial; identical to SEQ ID NO: 330739
  Synthetic oligonucleotide

SEQ ID NO: 548920 - DNA, 55 bp, Artificial; identical to SEQ ID NO: 330740
  Synthetic oligonucleotide

SEQ ID NO: 548921 - DNA, 58 bp, Artificial; identical to SEQ ID NO: 330741
  Synthetic oligonucleotide

SEQ ID NO: 548922 - DNA, 60 bp, Artificial; identical to SEQ ID NO: 330743
  Synthetic oligonucleotide

SEQ ID NO: 548923 - DNA, 54 bp, Artificial; identical to SEQ ID NO: 330745
  Synthetic oligonucleotide

SEQ ID NO: 548924 - DNA, 60 bp, Artificial; identical to SEQ ID NO: 330748
  Synthetic oligonucleotide

SEQ ID NO: 548925 - DNA, 60 bp, Artificial; identical to SEQ ID NO: 330749
  Synthetic oligonucleotide

SEQ ID NO: 548926 - DNA, 57 bp, Artificial; identical to SEQ ID NO: 330750
  Synthetic oligonucleotide

SEQ ID NO: 548927 - DNA, 60 bp, Artificial; identical to SEQ ID NO: 330751
  Synthetic oligonucleotide

SEQ ID NO: 548928 - DNA, 57 bp, Artificial; identical to SEQ ID NO: 330752
  Synthetic oligonucleotide

SEQ ID NO: 548929 - DNA, 52 bp, Artificial; identical to SEQ ID NO: 330754
  Synthetic oligonucleotide

SEQ ID NO: 548930 - DNA, 57 bp, Artificial; identical to SEQ ID NO: 10925
  Synthetic oligonucleotide

SEQ ID NO: 548931 - DNA, 52 bp, Artificial; identical to SEQ ID NO: 330756
  Synthetic oligonucleotide

SEQ ID NO: 548932 - DNA, 55 bp, Artificial; identical to SEQ ID NO: 330757
  Synthetic oligonucleotide

SEQ ID NO: 548933 - DNA, 59 bp, Artificial; identical to SEQ ID NO: 14653
  Synthetic oligonucleotide

SEQ ID NO: 548934 - DNA, 58 bp, Artificial; identical to SEQ ID NO: 330761
  Synthetic oligonucleotide

SEQ ID NO: 548935 - DNA, 59 bp, Artificial; identical to SEQ ID NO: 330762
  Synthetic oligonucleotide

SEQ ID NO: 548936 - DNA, 57 bp, Artificial; identical to SEQ ID NO: 330764
  Synthetic oligonucleotide

SEQ ID NO: 548937 - DNA, 54 bp, Artificial; identical to SEQ ID NO: 330766
  Synthetic oligonucleotide

SEQ ID NO: 548938 - DNA, 56 bp, Artificial; identical to SEQ ID NO: 330769
  Synthetic oligonucleotide

SEQ ID NO: 548939 - DNA, 57 bp, Artificial; identical to SEQ ID NO: 330771
  Synthetic oligonucleotide

SEQ ID NO: 548940 - DNA, 58 bp, Artificial; identical to SEQ ID NO: 330773
  Synthetic oligonucleotide

SEQ ID NO: 548941 - DNA, 50 bp, Artificial; identical to SEQ ID NO: 330775
  Synthetic oligonucleotide

SEQ ID NO: 548942 - DNA, 60 bp, Artificial; identical to SEQ ID NO: 330777
  Synthetic oligonucleotide

SEQ ID NO: 548943 - DNA, 60 bp, Artificial; identical to SEQ ID NO: 330778
  Synthetic oligonucleotide

SEQ ID NO: 548944 - DNA, 51 bp, Artificial; identical to SEQ ID NO: 330779
  Synthetic oligonucleotide

SEQ ID NO: 548945 - DNA, 55 bp, Artificial; identical to SEQ ID NO: 330780
  Synthetic oligonucleotide

SEQ ID NO: 548946 - DNA, 55 bp, Artificial; identical to SEQ ID NO: 330788
  Synthetic oligonucleotide

SEQ ID NO: 548947 - DNA, 59 bp, Artificial; identical to SEQ ID NO: 330790
  Synthetic oligonucleotide

SEQ ID NO: 548948 - DNA, 59 bp, Artificial; identical to SEQ ID NO: 330793
  Synthetic oligonucleotide

SEQ ID NO: 548949 - DNA, 55 bp, Artificial; identical to SEQ ID NO: 330794
  Synthetic oligonucleotide

SEQ ID NO: 548950 - DNA, 60 bp, Artificial; identical to SEQ ID NO: 14545
  Synthetic oligonucleotide

SEQ ID NO: 548951 - DNA, 60 bp, Artificial; identical to SEQ ID NO: 330795
  Synthetic oligonucleotide

SEQ ID NO: 548952 - DNA, 54 bp, Artificial; identical to SEQ ID NO: 330800
  Synthetic oligonucleotide

SEQ ID NO: 548953 - DNA, 59 bp, Artificial; identical to SEQ ID NO: 330801
  Synthetic oligonucleotide

SEQ ID NO: 548954 - DNA, 56 bp, Artificial; identical to SEQ ID NO: 330807
  Synthetic oligonucleotide

SEQ ID NO: 548955 - DNA, 60 bp, Artificial; identical to SEQ ID NO: 330811
  Synthetic oligonucleotide

SEQ ID NO: 548956 - DNA, 60 bp, Artificial; identical to SEQ ID NO: 330815
  Synthetic oligonucleotide

SEQ ID NO: 548957 - DNA, 57 bp, Artificial; identical to SEQ ID NO: 330817
  Synthetic oligonucleotide

SEQ ID NO: 548958 - DNA, 60 bp, Artificial; identical to SEQ ID NO: 330818
  Synthetic oligonucleotide

SEQ ID NO: 548959 - DNA, 57 bp, Artificial; identical to SEQ ID NO: 330819
  Synthetic oligonucleotide

SEQ ID NO: 548960 - DNA, 56 bp, Artificial; identical to SEQ ID NO: 330823
  Synthetic oligonucleotide

SEQ ID NO: 548961 - DNA, 60 bp, Artificial; identical to SEQ ID NO: 330828
  Synthetic oligonucleotide

SEQ ID NO: 548962 - DNA, 53 bp, Artificial; identical to SEQ ID NO: 330829
  Synthetic oligonucleotide

SEQ ID NO: 548963 - DNA, 60 bp, Artificial; identical to SEQ ID NO: 330831
  Synthetic oligonucleotide

SEQ ID NO: 548964 - DNA, 54 bp, Artificial; identical to SEQ ID NO: 330832
  Synthetic oligonucleotide

SEQ ID NO: 548965 - DNA, 55 bp, Artificial; identical to SEQ ID NO: 330833
  Synthetic oligonucleotide

SEQ ID NO: 548966 - DNA, 55 bp, Artificial; identical to SEQ ID NO: 330834
  Synthetic oligonucleotide

SEQ ID NO: 548967 - DNA, 55 bp, Artificial; identical to SEQ ID NO: 330835
  Synthetic oligonucleotide

SEQ ID NO: 548968 - DNA, 58 bp, Artificial; identical to SEQ ID NO: 330838
  Synthetic oligonucleotide

SEQ ID NO: 548969 - DNA, 57 bp, Artificial; identical to SEQ ID NO: 330842
  Synthetic oligonucleotide

SEQ ID NO: 548970 - DNA, 51 bp, Artificial; identical to SEQ ID NO: 330843
  Synthetic oligonucleotide

SEQ ID NO: 548971 - DNA, 59 bp, Artificial; identical to SEQ ID NO: 330844
  Synthetic oligonucleotide

SEQ ID NO: 548972 - DNA, 52 bp, Artificial; identical to SEQ ID NO: 330848
  Synthetic oligonucleotide

SEQ ID NO: 548973 - DNA, 59 bp, Artificial; identical to SEQ ID NO: 330850
  Synthetic oligonucleotide

SEQ ID NO: 548974 - DNA, 55 bp, Artificial; identical to SEQ ID NO: 330851
  Synthetic oligonucleotide

SEQ ID NO: 548975 - DNA, 59 bp, Artificial; identical to SEQ ID NO: 10874
  Synthetic oligonucleotide

SEQ ID NO: 548976 - DNA, 57 bp, Artificial; identical to SEQ ID NO: 330856
  Synthetic oligonucleotide

SEQ ID NO: 548977 - DNA, 51 bp, Artificial; identical to SEQ ID NO: 330858
  Synthetic oligonucleotide

SEQ ID NO: 548978 - DNA, 55 bp, Artificial; identical to SEQ ID NO: 330861
  Synthetic oligonucleotide

SEQ ID NO: 548979 - DNA, 52 bp, Artificial; identical to SEQ ID NO: 9033
  Synthetic oligonucleotide

SEQ ID NO: 548980 - DNA, 57 bp, Artificial; identical to SEQ ID NO: 330863
  Synthetic oligonucleotide

SEQ ID NO: 548981 - DNA, 56 bp, Artificial; identical to SEQ ID NO: 330864
  Synthetic oligonucleotide

SEQ ID NO: 548982 - DNA, 51 bp, Artificial; identical to SEQ ID NO: 330867
  Synthetic oligonucleotide

SEQ ID NO: 548983 - DNA, 59 bp, Artificial; identical to SEQ ID NO: 330869
  Synthetic oligonucleotide

SEQ ID NO: 548984 - DNA, 51 bp, Artificial; identical to SEQ ID NO: 6533
  Synthetic oligonucleotide

SEQ ID NO: 548985 - DNA, 58 bp, Artificial; identical to SEQ ID NO: 330874
  Synthetic oligonucleotide

SEQ ID NO: 548986 - DNA, 58 bp, Artificial; identical to SEQ ID NO: 330876
  Synthetic oligonucleotide

SEQ ID NO: 548987 - DNA, 57 bp, Artificial; identical to SEQ ID NO: 330879
  Synthetic oligonucleotide

SEQ ID NO: 548988 - DNA, 58 bp, Artificial; identical to SEQ ID NO: 330880
  Synthetic oligonucleotide

SEQ ID NO: 548989 - DNA, 59 bp, Artificial; identical to SEQ ID NO: 330885
  Synthetic oligonucleotide

SEQ ID NO: 548990 - DNA, 60 bp, Artificial; identical to SEQ ID NO: 12511
  Synthetic oligonucleotide

SEQ ID NO: 548991 - DNA, 60 bp, Artificial; identical to SEQ ID NO: 330891
  Synthetic oligonucleotide

SEQ ID NO: 548992 - DNA, 60 bp, Artificial; identical to SEQ ID NO: 330892
  Synthetic oligonucleotide

SEQ ID NO: 548993 - DNA, 54 bp, Artificial; identical to SEQ ID NO: 330893
  Synthetic oligonucleotide

SEQ ID NO: 548994 - DNA, 51 bp, Artificial; identical to SEQ ID NO: 330894
  Synthetic oligonucleotide

SEQ ID NO: 548995 - DNA, 60 bp, Artificial; identical to SEQ ID NO: 330895
  Synthetic oligonucleotide

SEQ ID NO: 548996 - DNA, 60 bp, Artificial; identical to SEQ ID NO: 330896
  Synthetic oligonucleotide

SEQ ID NO: 548997 - DNA, 60 bp, Artificial; identical to SEQ ID NO: 330898
  Synthetic oligonucleotide

SEQ ID NO: 548998 - DNA, 60 bp, Artificial; identical to SEQ ID NO: 330899
  Synthetic oligonucleotide

SEQ ID NO: 548999 - DNA, 58 bp, Artificial; identical to SEQ ID NO: 330901
  Synthetic oligonucleotide

SEQ ID NO: 549000 - DNA, 50 bp, Artificial; identical to SEQ ID NO: 330902
  Synthetic oligonucleotide

SEQ ID NO: 549001 - DNA, 60 bp, Artificial; identical to SEQ ID NO: 330905
  Synthetic oligonucleotide

SEQ ID NO: 549002 - DNA, 60 bp, Artificial; identical to SEQ ID NO: 330906
  Synthetic oligonucleotide

SEQ ID NO: 549003 - DNA, 60 bp, Artificial; identical to SEQ ID NO: 10791
  Synthetic oligonucleotide

SEQ ID NO: 549004 - DNA, 55 bp, Artificial; identical to SEQ ID NO: 330912
  Synthetic oligonucleotide

SEQ ID NO: 549005 - DNA, 60 bp, Artificial; identical to SEQ ID NO: 330914
  Synthetic oligonucleotide

SEQ ID NO: 549006 - DNA, 60 bp, Artificial; identical to SEQ ID NO: 330915
  Synthetic oligonucleotide

SEQ ID NO: 549007 - DNA, 60 bp, Artificial; identical to SEQ ID NO: 330917
  Synthetic oligonucleotide

SEQ ID NO: 549008 - DNA, 60 bp, Artificial; identical to SEQ ID NO: 330919
  Synthetic oligonucleotide

SEQ ID NO: 549009 - DNA, 58 bp, Artificial; identical to SEQ ID NO: 10477
  Synthetic oligonucleotide

SEQ ID NO: 549010 - DNA, 60 bp, Artificial; identical to SEQ ID NO: 330928
  Synthetic oligonucleotide

SEQ ID NO: 549011 - DNA, 55 bp, Artificial; identical to SEQ ID NO: 330930
  Synthetic oligonucleotide

SEQ ID NO: 549012 - DNA, 60 bp, Artificial; identical to SEQ ID NO: 330932
  Synthetic oligonucleotide

SEQ ID NO: 549013 - DNA, 52 bp, Artificial; identical to SEQ ID NO: 330933
  Synthetic oligonucleotide

SEQ ID NO: 549014 - DNA, 58 bp, Artificial; identical to SEQ ID NO: 330934
  Synthetic oligonucleotide

SEQ ID NO: 549015 - DNA, 52 bp, Artificial; identical to SEQ ID NO: 330939
  Synthetic oligonucleotide

SEQ ID NO: 549016 - DNA, 53 bp, Artificial; identical to SEQ ID NO: 330940
  Synthetic oligonucleotide

SEQ ID NO: 549017 - DNA, 59 bp, Artificial; identical to SEQ ID NO: 330941
  Synthetic oligonucleotide

SEQ ID NO: 549018 - DNA, 60 bp, Artificial; identical to SEQ ID NO: 330946
  Synthetic oligonucleotide

SEQ ID NO: 549019 - DNA, 54 bp, Artificial; identical to SEQ ID NO: 330955
  Synthetic oligonucleotide

SEQ ID NO: 549020 - DNA, 60 bp, Artificial; identical to SEQ ID NO: 330956
  Synthetic oligonucleotide

SEQ ID NO: 549021 - DNA, 57 bp, Artificial; identical to SEQ ID NO: 330957
  Synthetic oligonucleotide

SEQ ID NO: 549022 - DNA, 53 bp, Artificial; identical to SEQ ID NO: 330959
  Synthetic oligonucleotide

SEQ ID NO: 549023 - DNA, 55 bp, Artificial; identical to SEQ ID NO: 330960
  Synthetic oligonucleotide

SEQ ID NO: 549024 - DNA, 60 bp, Artificial; identical to SEQ ID NO: 330962
  Synthetic oligonucleotide

SEQ ID NO: 549025 - DNA, 60 bp, Artificial; identical to SEQ ID NO: 330964
  Synthetic oligonucleotide

SEQ ID NO: 549026 - DNA, 60 bp, Artificial; identical to SEQ ID NO: 330968
  Synthetic oligonucleotide

SEQ ID NO: 549027 - DNA, 50 bp, Artificial; identical to SEQ ID NO: 330972
  Synthetic oligonucleotide

SEQ ID NO: 549028 - DNA, 58 bp, Artificial; identical to SEQ ID NO: 330977
  Synthetic oligonucleotide

SEQ ID NO: 549029 - DNA, 55 bp, Artificial; identical to SEQ ID NO: 330978
  Synthetic oligonucleotide

SEQ ID NO: 549030 - DNA, 57 bp, Artificial; identical to SEQ ID NO: 330982
  Synthetic oligonucleotide

SEQ ID NO: 549031 - DNA, 58 bp, Artificial; identical to SEQ ID NO: 330983
  Synthetic oligonucleotide

SEQ ID NO: 549032 - DNA, 58 bp, Artificial; identical to SEQ ID NO: 330988
  Synthetic oligonucleotide

SEQ ID NO: 549033 - DNA, 53 bp, Artificial; identical to SEQ ID NO: 330990
  Synthetic oligonucleotide

SEQ ID NO: 549034 - DNA, 60 bp, Artificial; identical to SEQ ID NO: 330992
  Synthetic oligonucleotide

SEQ ID NO: 549035 - DNA, 60 bp, Artificial; identical to SEQ ID NO: 330993
  Synthetic oligonucleotide

SEQ ID NO: 549036 - DNA, 60 bp, Artificial; identical to SEQ ID NO: 330994
  Synthetic oligonucleotide

SEQ ID NO: 549037 - DNA, 60 bp, Artificial; identical to SEQ ID NO: 330995
  Synthetic oligonucleotide

SEQ ID NO: 549038 - DNA, 50 bp, Artificial; identical to SEQ ID NO: 330996
  Synthetic oligonucleotide

SEQ ID NO: 549039 - DNA, 59 bp, Artificial; identical to SEQ ID NO: 330997
  Synthetic oligonucleotide

SEQ ID NO: 549040 - DNA, 60 bp, Artificial; identical to SEQ ID NO: 331000
  Synthetic oligonucleotide

SEQ ID NO: 549041 - DNA, 60 bp, Artificial; identical to SEQ ID NO: 331005
  Synthetic oligonucleotide

SEQ ID NO: 549042 - DNA, 53 bp, Artificial; identical to SEQ ID NO: 331007
  Synthetic oligonucleotide

SEQ ID NO: 549043 - DNA, 56 bp, Artificial; identical to SEQ ID NO: 331009
  Synthetic oligonucleotide

SEQ ID NO: 549044 - DNA, 57 bp, Artificial; identical to SEQ ID NO: 331010
  Synthetic oligonucleotide

SEQ ID NO: 549045 - DNA, 58 bp, Artificial; identical to SEQ ID NO: 331012
  Synthetic oligonucleotide

SEQ ID NO: 549046 - DNA, 55 bp, Artificial; identical to SEQ ID NO: 331013
  Synthetic oligonucleotide

SEQ ID NO: 549047 - DNA, 57 bp, Artificial; identical to SEQ ID NO: 331015
  Synthetic oligonucleotide

SEQ ID NO: 549048 - DNA, 51 bp, Artificial; identical to SEQ ID NO: 331017
  Synthetic oligonucleotide

SEQ ID NO: 549049 - DNA, 60 bp, Artificial; identical to SEQ ID NO: 331020
  Synthetic oligonucleotide

SEQ ID NO: 549050 - DNA, 60 bp, Artificial; identical to SEQ ID NO: 331026
  Synthetic oligonucleotide

SEQ ID NO: 549051 - DNA, 60 bp, Artificial; identical to SEQ ID NO: 331028
  Synthetic oligonucleotide

SEQ ID NO: 549052 - DNA, 60 bp, Artificial; identical to SEQ ID NO: 7145
  Synthetic oligonucleotide

SEQ ID NO: 549053 - DNA, 56 bp, Artificial; identical to SEQ ID NO: 331032
  Synthetic oligonucleotide

SEQ ID NO: 549054 - DNA, 55 bp, Artificial; identical to SEQ ID NO: 331034
  Synthetic oligonucleotide

SEQ ID NO: 549055 - DNA, 60 bp, Artificial; identical to SEQ ID NO: 331035
  Synthetic oligonucleotide

SEQ ID NO: 549056 - DNA, 60 bp, Artificial; identical to SEQ ID NO: 331038
  Synthetic oligonucleotide

SEQ ID NO: 549057 - DNA, 59 bp, Artificial; identical to SEQ ID NO: 15661
  Synthetic oligonucleotide

SEQ ID NO: 549058 - DNA, 60 bp, Artificial; identical to SEQ ID NO: 331040
  Synthetic oligonucleotide

SEQ ID NO: 549059 - DNA, 60 bp, Artificial; identical to SEQ ID NO: 331041
  Synthetic oligonucleotide

SEQ ID NO: 549060 - DNA, 58 bp, Artificial; identical to SEQ ID NO: 331042
  Synthetic oligonucleotide

SEQ ID NO: 549061 - DNA, 60 bp, Artificial; identical to SEQ ID NO: 13749
  Synthetic oligonucleotide

SEQ ID NO: 549062 - DNA, 57 bp, Artificial; identical to SEQ ID NO: 16989
  Synthetic oligonucleotide

SEQ ID NO: 549063 - DNA, 55 bp, Artificial; identical to SEQ ID NO: 331045
  Synthetic oligonucleotide

SEQ ID NO: 549064 - DNA, 55 bp, Artificial; identical to SEQ ID NO: 331046
  Synthetic oligonucleotide

SEQ ID NO: 549065 - DNA, 55 bp, Artificial; identical to SEQ ID NO: 331049
  Synthetic oligonucleotide

SEQ ID NO: 549066 - DNA, 60 bp, Artificial; identical to SEQ ID NO: 331050
  Synthetic oligonucleotide

SEQ ID NO: 549067 - DNA, 59 bp, Artificial; identical to SEQ ID NO: 331051
  Synthetic oligonucleotide

SEQ ID NO: 549068 - DNA, 59 bp, Artificial; identical to SEQ ID NO: 327
  Synthetic oligonucleotide

SEQ ID NO: 549069 - DNA, 60 bp, Artificial; identical to SEQ ID NO: 331054
  Synthetic oligonucleotide

SEQ ID NO: 549070 - DNA, 60 bp, Artificial; identical to SEQ ID NO: 331063
  Synthetic oligonucleotide

SEQ ID NO: 549071 - DNA, 60 bp, Artificial; identical to SEQ ID NO: 331064
  Synthetic oligonucleotide

SEQ ID NO: 549072 - DNA, 54 bp, Artificial; identical to SEQ ID NO: 331065
  Synthetic oligonucleotide

SEQ ID NO: 549073 - DNA, 55 bp, Artificial; identical to SEQ ID NO: 331069
  Synthetic oligonucleotide

SEQ ID NO: 549074 - DNA, 59 bp, Artificial; identical to SEQ ID NO: 19039
  Synthetic oligonucleotide

SEQ ID NO: 549075 - DNA, 60 bp, Artificial; identical to SEQ ID NO: 331073
  Synthetic oligonucleotide

SEQ ID NO: 549076 - DNA, 60 bp, Artificial; identical to SEQ ID NO: 331079
  Synthetic oligonucleotide

SEQ ID NO: 549077 - DNA, 60 bp, Artificial; identical to SEQ ID NO: 331080
  Synthetic oligonucleotide

SEQ ID NO: 549078 - DNA, 60 bp, Artificial; identical to SEQ ID NO: 12245
  Synthetic oligonucleotide

SEQ ID NO: 549079 - DNA, 60 bp, Artificial; identical to SEQ ID NO: 331090
  Synthetic oligonucleotide

SEQ ID NO: 549080 - DNA, 60 bp, Artificial; identical to SEQ ID NO: 331091
  Synthetic oligonucleotide

SEQ ID NO: 549081 - DNA, 56 bp, Artificial; identical to SEQ ID NO: 331093
  Synthetic oligonucleotide

SEQ ID NO: 549082 - DNA, 60 bp, Artificial; identical to SEQ ID NO: 146
  Synthetic oligonucleotide

SEQ ID NO: 549083 - DNA, 51 bp, Artificial; identical to SEQ ID NO: 331096
  Synthetic oligonucleotide

SEQ ID NO: 549084 - DNA, 57 bp, Artificial; identical to SEQ ID NO: 331097
  Synthetic oligonucleotide

SEQ ID NO: 549085 - DNA, 60 bp, Artificial; identical to SEQ ID NO: 331101
  Synthetic oligonucleotide

SEQ ID NO: 549086 - DNA, 56 bp, Artificial; identical to SEQ ID NO: 331103
  Synthetic oligonucleotide

SEQ ID NO: 549087 - DNA, 60 bp, Artificial; identical to SEQ ID NO: 331104
  Synthetic oligonucleotide

SEQ ID NO: 549088 - DNA, 55 bp, Artificial; identical to SEQ ID NO: 331107
  Synthetic oligonucleotide

SEQ ID NO: 549089 - DNA, 56 bp, Artificial; identical to SEQ ID NO: 331110
  Synthetic oligonucleotide

SEQ ID NO: 549090 - DNA, 56 bp, Artificial; identical to SEQ ID NO: 331111
  Synthetic oligonucleotide

SEQ ID NO: 549091 - DNA, 51 bp, Artificial; identical to SEQ ID NO: 331112
  Synthetic oligonucleotide

SEQ ID NO: 549092 - DNA, 58 bp, Artificial; identical to SEQ ID NO: 331113
  Synthetic oligonucleotide

SEQ ID NO: 549093 - DNA, 60 bp, Artificial; identical to SEQ ID NO: 331114
  Synthetic oligonucleotide

SEQ ID NO: 549094 - DNA, 55 bp, Artificial; identical to SEQ ID NO: 331115
  Synthetic oligonucleotide

SEQ ID NO: 549095 - DNA, 55 bp, Artificial; identical to SEQ ID NO: 331116
  Synthetic oligonucleotide

SEQ ID NO: 549096 - DNA, 54 bp, Artificial; identical to SEQ ID NO: 331117
  Synthetic oligonucleotide

SEQ ID NO: 549097 - DNA, 60 bp, Artificial; identical to SEQ ID NO: 331118
  Synthetic oligonucleotide

SEQ ID NO: 549098 - DNA, 60 bp, Artificial; identical to SEQ ID NO: 331119
  Synthetic oligonucleotide

SEQ ID NO: 549099 - DNA, 52 bp, Artificial; identical to SEQ ID NO: 331121
  Synthetic oligonucleotide

SEQ ID NO: 549100 - DNA, 59 bp, Artificial; identical to SEQ ID NO: 331124
  Synthetic oligonucleotide

SEQ ID NO: 549101 - DNA, 60 bp, Artificial; identical to SEQ ID NO: 331125
  Synthetic oligonucleotide

SEQ ID NO: 549102 - DNA, 59 bp, Artificial; identical to SEQ ID NO: 331129
  Synthetic oligonucleotide

SEQ ID NO: 549103 - DNA, 59 bp, Artificial; identical to SEQ ID NO: 331131
  Synthetic oligonucleotide

SEQ ID NO: 549104 - DNA, 60 bp, Artificial; identical to SEQ ID NO: 331132
  Synthetic oligonucleotide

SEQ ID NO: 549105 - DNA, 55 bp, Artificial; identical to SEQ ID NO: 331133
  Synthetic oligonucleotide

SEQ ID NO: 549106 - DNA, 51 bp, Artificial; identical to SEQ ID NO: 331134
  Synthetic oligonucleotide

SEQ ID NO: 549107 - DNA, 60 bp, Artificial; identical to SEQ ID NO: 331136
  Synthetic oligonucleotide

SEQ ID NO: 549108 - DNA, 59 bp, Artificial; identical to SEQ ID NO: 16202
  Synthetic oligonucleotide

SEQ ID NO: 549109 - DNA, 55 bp, Artificial; identical to SEQ ID NO: 331141
  Synthetic oligonucleotide

SEQ ID NO: 549110 - DNA, 52 bp, Artificial; identical to SEQ ID NO: 331142
  Synthetic oligonucleotide

SEQ ID NO: 549111 - DNA, 53 bp, Artificial; identical to SEQ ID NO: 14687
  Synthetic oligonucleotide

SEQ ID NO: 549112 - DNA, 60 bp, Artificial; identical to SEQ ID NO: 331148
  Synthetic oligonucleotide

SEQ ID NO: 549113 - DNA, 53 bp, Artificial; identical to SEQ ID NO: 331149
  Synthetic oligonucleotide

SEQ ID NO: 549114 - DNA, 56 bp, Artificial; identical to SEQ ID NO: 331151
  Synthetic oligonucleotide

SEQ ID NO: 549115 - DNA, 57 bp, Artificial; identical to SEQ ID NO: 331152
  Synthetic oligonucleotide

SEQ ID NO: 549116 - DNA, 56 bp, Artificial; identical to SEQ ID NO: 331154
  Synthetic oligonucleotide

SEQ ID NO: 549117 - DNA, 59 bp, Artificial; identical to SEQ ID NO: 331163
  Synthetic oligonucleotide

SEQ ID NO: 549118 - DNA, 60 bp, Artificial; identical to SEQ ID NO: 331164
  Synthetic oligonucleotide

SEQ ID NO: 549119 - DNA, 56 bp, Artificial; identical to SEQ ID NO: 331165
  Synthetic oligonucleotide

SEQ ID NO: 549120 - DNA, 59 bp, Artificial; identical to SEQ ID NO: 331168
  Synthetic oligonucleotide

SEQ ID NO: 549121 - DNA, 55 bp, Artificial; identical to SEQ ID NO: 331171
  Synthetic oligonucleotide

SEQ ID NO: 549122 - DNA, 60 bp, Artificial; identical to SEQ ID NO: 331172
  Synthetic oligonucleotide

SEQ ID NO: 549123 - DNA, 60 bp, Artificial; identical to SEQ ID NO: 331175
  Synthetic oligonucleotide

SEQ ID NO: 549124 - DNA, 58 bp, Artificial; identical to SEQ ID NO: 331176
  Synthetic oligonucleotide

SEQ ID NO: 549125 - DNA, 60 bp, Artificial; identical to SEQ ID NO: 331184
  Synthetic oligonucleotide

SEQ ID NO: 549126 - DNA, 56 bp, Artificial; identical to SEQ ID NO: 331186
  Synthetic oligonucleotide

SEQ ID NO: 549127 - DNA, 60 bp, Artificial; identical to SEQ ID NO: 331188
  Synthetic oligonucleotide

SEQ ID NO: 549128 - DNA, 60 bp, Artificial; identical to SEQ ID NO: 331191
  Synthetic oligonucleotide

SEQ ID NO: 549129 - DNA, 60 bp, Artificial; identical to SEQ ID NO: 331194
  Synthetic oligonucleotide

SEQ ID NO: 549130 - DNA, 60 bp, Artificial; identical to SEQ ID NO: 331195
  Synthetic oligonucleotide

SEQ ID NO: 549131 - DNA, 59 bp, Artificial; identical to SEQ ID NO: 331196
  Synthetic oligonucleotide

SEQ ID NO: 549132 - DNA, 60 bp, Artificial; identical to SEQ ID NO: 331198
  Synthetic oligonucleotide

SEQ ID NO: 549133 - DNA, 60 bp, Artificial; identical to SEQ ID NO: 331201
  Synthetic oligonucleotide

SEQ ID NO: 549134 - DNA, 53 bp, Artificial; identical to SEQ ID NO: 331205
  Synthetic oligonucleotide

SEQ ID NO: 549135 - DNA, 55 bp, Artificial; identical to SEQ ID NO: 331206
  Synthetic oligonucleotide

SEQ ID NO: 549136 - DNA, 60 bp, Artificial; identical to SEQ ID NO: 331208
  Synthetic oligonucleotide

SEQ ID NO: 549137 - DNA, 60 bp, Artificial; identical to SEQ ID NO: 14028
  Synthetic oligonucleotide

SEQ ID NO: 549138 - DNA, 58 bp, Artificial; identical to SEQ ID NO: 331210
  Synthetic oligonucleotide

SEQ ID NO: 549139 - DNA, 55 bp, Artificial; identical to SEQ ID NO: 331213
  Synthetic oligonucleotide

SEQ ID NO: 549140 - DNA, 53 bp, Artificial; identical to SEQ ID NO: 331217
  Synthetic oligonucleotide

SEQ ID NO: 549141 - DNA, 57 bp, Artificial; identical to SEQ ID NO: 331218
  Synthetic oligonucleotide

SEQ ID NO: 549142 - DNA, 60 bp, Artificial; identical to SEQ ID NO: 331219
  Synthetic oligonucleotide

SEQ ID NO: 549143 - DNA, 60 bp, Artificial; identical to SEQ ID NO: 331221
  Synthetic oligonucleotide

SEQ ID NO: 549144 - DNA, 54 bp, Artificial; identical to SEQ ID NO: 331222
  Synthetic oligonucleotide

SEQ ID NO: 549145 - DNA, 60 bp, Artificial; identical to SEQ ID NO: 331225
  Synthetic oligonucleotide

SEQ ID NO: 549146 - DNA, 60 bp, Artificial; identical to SEQ ID NO: 331228
  Synthetic oligonucleotide

SEQ ID NO: 549147 - DNA, 52 bp, Artificial; identical to SEQ ID NO: 331229
  Synthetic oligonucleotide

SEQ ID NO: 549148 - DNA, 60 bp, Artificial; identical to SEQ ID NO: 331234
  Synthetic oligonucleotide

SEQ ID NO: 549149 - DNA, 60 bp, Artificial; identical to SEQ ID NO: 331235
  Synthetic oligonucleotide

SEQ ID NO: 549150 - DNA, 60 bp, Artificial; identical to SEQ ID NO: 331238
  Synthetic oligonucleotide

SEQ ID NO: 549151 - DNA, 55 bp, Artificial; identical to SEQ ID NO: 331240
  Synthetic oligonucleotide

SEQ ID NO: 549152 - DNA, 60 bp, Artificial; identical to SEQ ID NO: 331241
  Synthetic oligonucleotide

SEQ ID NO: 549153 - DNA, 60 bp, Artificial; identical to SEQ ID NO: 331244
  Synthetic oligonucleotide

SEQ ID NO: 549154 - DNA, 60 bp, Artificial; identical to SEQ ID NO: 9100
  Synthetic oligonucleotide

SEQ ID NO: 549155 - DNA, 60 bp, Artificial; identical to SEQ ID NO: 331249
  Synthetic oligonucleotide

SEQ ID NO: 549156 - DNA, 60 bp, Artificial; identical to SEQ ID NO: 331250
  Synthetic oligonucleotide

SEQ ID NO: 549157 - DNA, 60 bp, Artificial; identical to SEQ ID NO: 331251
  Synthetic oligonucleotide

SEQ ID NO: 549158 - DNA, 58 bp, Artificial; identical to SEQ ID NO: 331253
  Synthetic oligonucleotide

SEQ ID NO: 549159 - DNA, 60 bp, Artificial; identical to SEQ ID NO: 331256
  Synthetic oligonucleotide

SEQ ID NO: 549160 - DNA, 55 bp, Artificial; identical to SEQ ID NO: 331257
  Synthetic oligonucleotide

SEQ ID NO: 549161 - DNA, 55 bp, Artificial; identical to SEQ ID NO: 331260
  Synthetic oligonucleotide

SEQ ID NO: 549162 - DNA, 60 bp, Artificial; identical to SEQ ID NO: 331262
  Synthetic oligonucleotide

SEQ ID NO: 549163 - DNA, 60 bp, Artificial; identical to SEQ ID NO: 331267
  Synthetic oligonucleotide

SEQ ID NO: 549164 - DNA, 59 bp, Artificial; identical to SEQ ID NO: 331268
  Synthetic oligonucleotide

SEQ ID NO: 549165 - DNA, 60 bp, Artificial; identical to SEQ ID NO: 331270
  Synthetic oligonucleotide

SEQ ID NO: 549166 - DNA, 60 bp, Artificial; identical to SEQ ID NO: 331271
  Synthetic oligonucleotide

SEQ ID NO: 549167 - DNA, 55 bp, Artificial; identical to SEQ ID NO: 331273
  Synthetic oligonucleotide

SEQ ID NO: 549168 - DNA, 55 bp, Artificial; identical to SEQ ID NO: 331275
  Synthetic oligonucleotide

SEQ ID NO: 549169 - DNA, 57 bp, Artificial; identical to SEQ ID NO: 331276
  Synthetic oligonucleotide

SEQ ID NO: 549170 - DNA, 55 bp, Artificial; identical to SEQ ID NO: 331277
  Synthetic oligonucleotide

SEQ ID NO: 549171 - DNA, 60 bp, Artificial; identical to SEQ ID NO: 5940
  Synthetic oligonucleotide

SEQ ID NO: 549172 - DNA, 58 bp, Artificial; identical to SEQ ID NO: 331286
  Synthetic oligonucleotide

SEQ ID NO: 549173 - DNA, 52 bp, Artificial; identical to SEQ ID NO: 331287
  Synthetic oligonucleotide

SEQ ID NO: 549174 - DNA, 56 bp, Artificial; identical to SEQ ID NO: 331288
  Synthetic oligonucleotide

SEQ ID NO: 549175 - DNA, 55 bp, Artificial; identical to SEQ ID NO: 331290
  Synthetic oligonucleotide

SEQ ID NO: 549176 - DNA, 54 bp, Artificial; identical to SEQ ID NO: 331291
  Synthetic oligonucleotide

SEQ ID NO: 549177 - DNA, 55 bp, Artificial; identical to SEQ ID NO: 331293
  Synthetic oligonucleotide

SEQ ID NO: 549178 - DNA, 55 bp, Artificial; identical to SEQ ID NO: 331294
  Synthetic oligonucleotide

SEQ ID NO: 549179 - DNA, 60 bp, Artificial; identical to SEQ ID NO: 331295
  Synthetic oligonucleotide

SEQ ID NO: 549180 - DNA, 55 bp, Artificial; identical to SEQ ID NO: 331299
  Synthetic oligonucleotide

SEQ ID NO: 549181 - DNA, 53 bp, Artificial; identical to SEQ ID NO: 331303
  Synthetic oligonucleotide

SEQ ID NO: 549182 - DNA, 60 bp, Artificial; identical to SEQ ID NO: 331305
  Synthetic oligonucleotide

SEQ ID NO: 549183 - DNA, 53 bp, Artificial; identical to SEQ ID NO: 331306
  Synthetic oligonucleotide

SEQ ID NO: 549184 - DNA, 51 bp, Artificial; identical to SEQ ID NO: 331309
  Synthetic oligonucleotide

SEQ ID NO: 549185 - DNA, 60 bp, Artificial; identical to SEQ ID NO: 331310
  Synthetic oligonucleotide

SEQ ID NO: 549186 - DNA, 58 bp, Artificial; identical to SEQ ID NO: 331311
  Synthetic oligonucleotide

SEQ ID NO: 549187 - DNA, 60 bp, Artificial; identical to SEQ ID NO: 331315
  Synthetic oligonucleotide

SEQ ID NO: 549188 - DNA, 60 bp, Artificial; identical to SEQ ID NO: 331316
  Synthetic oligonucleotide

SEQ ID NO: 549189 - DNA, 60 bp, Artificial; identical to SEQ ID NO: 331317
  Synthetic oligonucleotide

SEQ ID NO: 549190 - DNA, 54 bp, Artificial; identical to SEQ ID NO: 331319
  Synthetic oligonucleotide

SEQ ID NO: 549191 - DNA, 60 bp, Artificial; identical to SEQ ID NO: 331322
  Synthetic oligonucleotide

SEQ ID NO: 549192 - DNA, 58 bp, Artificial; identical to SEQ ID NO: 331323
  Synthetic oligonucleotide

SEQ ID NO: 549193 - DNA, 58 bp, Artificial; identical to SEQ ID NO: 331330
  Synthetic oligonucleotide

SEQ ID NO: 549194 - DNA, 60 bp, Artificial; identical to SEQ ID NO: 331332
  Synthetic oligonucleotide

SEQ ID NO: 549195 - DNA, 60 bp, Artificial; identical to SEQ ID NO: 331333
  Synthetic oligonucleotide

SEQ ID NO: 549196 - DNA, 55 bp, Artificial; identical to SEQ ID NO: 331338
  Synthetic oligonucleotide

SEQ ID NO: 549197 - DNA, 55 bp, Artificial; identical to SEQ ID NO: 331339
  Synthetic oligonucleotide

SEQ ID NO: 549198 - DNA, 60 bp, Artificial; identical to SEQ ID NO: 331343
  Synthetic oligonucleotide

SEQ ID NO: 549199 - DNA, 55 bp, Artificial; identical to SEQ ID NO: 331344
  Synthetic oligonucleotide

SEQ ID NO: 549200 - DNA, 60 bp, Artificial; identical to SEQ ID NO: 331357
  Synthetic oligonucleotide

SEQ ID NO: 549201 - DNA, 51 bp, Artificial; identical to SEQ ID NO: 331360
  Synthetic oligonucleotide

SEQ ID NO: 549202 - DNA, 60 bp, Artificial; identical to SEQ ID NO: 331364
  Synthetic oligonucleotide

SEQ ID NO: 549203 - DNA, 58 bp, Artificial; identical to SEQ ID NO: 331365
  Synthetic oligonucleotide

SEQ ID NO: 549204 - DNA, 60 bp, Artificial; identical to SEQ ID NO: 331368
  Synthetic oligonucleotide

SEQ ID NO: 549205 - DNA, 60 bp, Artificial; identical to SEQ ID NO: 331370
  Synthetic oligonucleotide

SEQ ID NO: 549206 - DNA, 57 bp, Artificial; identical to SEQ ID NO: 331373
  Synthetic oligonucleotide

SEQ ID NO: 549207 - DNA, 57 bp, Artificial; identical to SEQ ID NO: 331376
  Synthetic oligonucleotide

SEQ ID NO: 549208 - DNA, 52 bp, Artificial; identical to SEQ ID NO: 331377
  Synthetic oligonucleotide

SEQ ID NO: 549209 - DNA, 60 bp, Artificial; identical to SEQ ID NO: 331379
  Synthetic oligonucleotide

SEQ ID NO: 549210 - DNA, 51 bp, Artificial; identical to SEQ ID NO: 331381
  Synthetic oligonucleotide

SEQ ID NO: 549211 - DNA, 57 bp, Artificial; identical to SEQ ID NO: 331384
  Synthetic oligonucleotide

SEQ ID NO: 549212 - DNA, 59 bp, Artificial; identical to SEQ ID NO: 331385
  Synthetic oligonucleotide

SEQ ID NO: 549213 - DNA, 59 bp, Artificial; identical to SEQ ID NO: 331386
  Synthetic oligonucleotide

SEQ ID NO: 549214 - DNA, 55 bp, Artificial; identical to SEQ ID NO: 331387
  Synthetic oligonucleotide

SEQ ID NO: 549215 - DNA, 60 bp, Artificial; identical to SEQ ID NO: 331388
  Synthetic oligonucleotide

SEQ ID NO: 549216 - DNA, 60 bp, Artificial; identical to SEQ ID NO: 331390
  Synthetic oligonucleotide

SEQ ID NO: 549217 - DNA, 60 bp, Artificial; identical to SEQ ID NO: 331392
  Synthetic oligonucleotide

SEQ ID NO: 549218 - DNA, 55 bp, Artificial; identical to SEQ ID NO: 331393
  Synthetic oligonucleotide

SEQ ID NO: 549219 - DNA, 55 bp, Artificial; identical to SEQ ID NO: 331395
  Synthetic oligonucleotide

SEQ ID NO: 549220 - DNA, 52 bp, Artificial; identical to SEQ ID NO: 331396
  Synthetic oligonucleotide

SEQ ID NO: 549221 - DNA, 55 bp, Artificial; identical to SEQ ID NO: 331402
  Synthetic oligonucleotide

SEQ ID NO: 549222 - DNA, 60 bp, Artificial; identical to SEQ ID NO: 331405
  Synthetic oligonucleotide

SEQ ID NO: 549223 - DNA, 60 bp, Artificial; identical to SEQ ID NO: 331409
  Synthetic oligonucleotide

SEQ ID NO: 549224 - DNA, 59 bp, Artificial; identical to SEQ ID NO: 331412
  Synthetic oligonucleotide

SEQ ID NO: 549225 - DNA, 59 bp, Artificial; identical to SEQ ID NO: 331416
  Synthetic oligonucleotide

SEQ ID NO: 549226 - DNA, 60 bp, Artificial; identical to SEQ ID NO: 331417
  Synthetic oligonucleotide

SEQ ID NO: 549227 - DNA, 51 bp, Artificial; identical to SEQ ID NO: 331419
  Synthetic oligonucleotide

SEQ ID NO: 549228 - DNA, 60 bp, Artificial; identical to SEQ ID NO: 7359
  Synthetic oligonucleotide

SEQ ID NO: 549229 - DNA, 50 bp, Artificial; identical to SEQ ID NO: 331420
  Synthetic oligonucleotide

SEQ ID NO: 549230 - DNA, 58 bp, Artificial; identical to SEQ ID NO: 331425
  Synthetic oligonucleotide

SEQ ID NO: 549231 - DNA, 60 bp, Artificial; identical to SEQ ID NO: 331426
  Synthetic oligonucleotide

SEQ ID NO: 549232 - DNA, 60 bp, Artificial; identical to SEQ ID NO: 331428
  Synthetic oligonucleotide

SEQ ID NO: 549233 - DNA, 59 bp, Artificial; identical to SEQ ID NO: 17590
  Synthetic oligonucleotide

SEQ ID NO: 549234 - DNA, 56 bp, Artificial; identical to SEQ ID NO: 331429
  Synthetic oligonucleotide

SEQ ID NO: 549235 - DNA, 56 bp, Artificial; identical to SEQ ID NO: 331431
  Synthetic oligonucleotide

SEQ ID NO: 549236 - DNA, 60 bp, Artificial; identical to SEQ ID NO: 331432
  Synthetic oligonucleotide

SEQ ID NO: 549237 - DNA, 51 bp, Artificial; identical to SEQ ID NO: 331437
  Synthetic oligonucleotide

SEQ ID NO: 549238 - DNA, 55 bp, Artificial; identical to SEQ ID NO: 331439
  Synthetic oligonucleotide

SEQ ID NO: 549239 - DNA, 60 bp, Artificial; identical to SEQ ID NO: 331440
  Synthetic oligonucleotide

SEQ ID NO: 549240 - DNA, 60 bp, Artificial; identical to SEQ ID NO: 331442
  Synthetic oligonucleotide

SEQ ID NO: 549241 - DNA, 56 bp, Artificial; identical to SEQ ID NO: 331448
  Synthetic oligonucleotide

SEQ ID NO: 549242 - DNA, 56 bp, Artificial; identical to SEQ ID NO: 331452
  Synthetic oligonucleotide

SEQ ID NO: 549243 - DNA, 60 bp, Artificial; identical to SEQ ID NO: 331454
  Synthetic oligonucleotide

SEQ ID NO: 549244 - DNA, 54 bp, Artificial; identical to SEQ ID NO: 331455
  Synthetic oligonucleotide

SEQ ID NO: 549245 - DNA, 56 bp, Artificial; identical to SEQ ID NO: 331464
  Synthetic oligonucleotide

SEQ ID NO: 549246 - DNA, 53 bp, Artificial; identical to SEQ ID NO: 331466
  Synthetic oligonucleotide

SEQ ID NO: 549247 - DNA, 60 bp, Artificial; identical to SEQ ID NO: 331467
  Synthetic oligonucleotide

SEQ ID NO: 549248 - DNA, 56 bp, Artificial; identical to SEQ ID NO: 331470
  Synthetic oligonucleotide

SEQ ID NO: 549249 - DNA, 60 bp, Artificial; identical to SEQ ID NO: 331473
  Synthetic oligonucleotide

SEQ ID NO: 549250 - DNA, 55 bp, Artificial; identical to SEQ ID NO: 331474
  Synthetic oligonucleotide

SEQ ID NO: 549251 - DNA, 55 bp, Artificial; identical to SEQ ID NO: 331476
  Synthetic oligonucleotide

SEQ ID NO: 549252 - DNA, 57 bp, Artificial; identical to SEQ ID NO: 331479
  Synthetic oligonucleotide

SEQ ID NO: 549253 - DNA, 59 bp, Artificial; identical to SEQ ID NO: 331482
  Synthetic oligonucleotide

SEQ ID NO: 549254 - DNA, 52 bp, Artificial; identical to SEQ ID NO: 331483
  Synthetic oligonucleotide

SEQ ID NO: 549255 - DNA, 55 bp, Artificial; identical to SEQ ID NO: 331487
  Synthetic oligonucleotide

SEQ ID NO: 549256 - DNA, 60 bp, Artificial; identical to SEQ ID NO: 331492
  Synthetic oligonucleotide

SEQ ID NO: 549257 - DNA, 60 bp, Artificial; identical to SEQ ID NO: 331493
  Synthetic oligonucleotide

SEQ ID NO: 549258 - DNA, 57 bp, Artificial; identical to SEQ ID NO: 331497
  Synthetic oligonucleotide

SEQ ID NO: 549259 - DNA, 50 bp, Artificial; identical to SEQ ID NO: 331498
  Synthetic oligonucleotide

SEQ ID NO: 549260 - DNA, 53 bp, Artificial; identical to SEQ ID NO: 331499
  Synthetic oligonucleotide

SEQ ID NO: 549261 - DNA, 60 bp, Artificial; identical to SEQ ID NO: 12688
  Synthetic oligonucleotide

SEQ ID NO: 549262 - DNA, 55 bp, Artificial; identical to SEQ ID NO: 331501
  Synthetic oligonucleotide

SEQ ID NO: 549263 - DNA, 53 bp, Artificial; identical to SEQ ID NO: 11176
  Synthetic oligonucleotide

SEQ ID NO: 549264 - DNA, 60 bp, Artificial; identical to SEQ ID NO: 331502
  Synthetic oligonucleotide

SEQ ID NO: 549265 - DNA, 58 bp, Artificial; identical to SEQ ID NO: 331503
  Synthetic oligonucleotide

SEQ ID NO: 549266 - DNA, 51 bp, Artificial; identical to SEQ ID NO: 331504
  Synthetic oligonucleotide

SEQ ID NO: 549267 - DNA, 50 bp, Artificial; identical to SEQ ID NO: 12268
  Synthetic oligonucleotide

SEQ ID NO: 549268 - DNA, 51 bp, Artificial; identical to SEQ ID NO: 331508
  Synthetic oligonucleotide

SEQ ID NO: 549269 - DNA, 56 bp, Artificial; identical to SEQ ID NO: 331512
  Synthetic oligonucleotide

SEQ ID NO: 549270 - DNA, 55 bp, Artificial; identical to SEQ ID NO: 331515
  Synthetic oligonucleotide

SEQ ID NO: 549271 - DNA, 57 bp, Artificial; identical to SEQ ID NO: 331518
  Synthetic oligonucleotide

SEQ ID NO: 549272 - DNA, 60 bp, Artificial; identical to SEQ ID NO: 331519
  Synthetic oligonucleotide

SEQ ID NO: 549273 - DNA, 60 bp, Artificial; identical to SEQ ID NO: 331523
  Synthetic oligonucleotide

SEQ ID NO: 549274 - DNA, 51 bp, Artificial; identical to SEQ ID NO: 331532
  Synthetic oligonucleotide

SEQ ID NO: 549275 - DNA, 60 bp, Artificial; identical to SEQ ID NO: 331533
  Synthetic oligonucleotide

SEQ ID NO: 549276 - DNA, 53 bp, Artificial; identical to SEQ ID NO: 331534
  Synthetic oligonucleotide

SEQ ID NO: 549277 - DNA, 56 bp, Artificial; identical to SEQ ID NO: 331537
  Synthetic oligonucleotide

SEQ ID NO: 549278 - DNA, 58 bp, Artificial; identical to SEQ ID NO: 331538
  Synthetic oligonucleotide

SEQ ID NO: 549279 - DNA, 57 bp, Artificial; identical to SEQ ID NO: 331543
  Synthetic oligonucleotide

SEQ ID NO: 549280 - DNA, 55 bp, Artificial; identical to SEQ ID NO: 331544
  Synthetic oligonucleotide

SEQ ID NO: 549281 - DNA, 60 bp, Artificial; identical to SEQ ID NO: 11637
  Synthetic oligonucleotide

SEQ ID NO: 549282 - DNA, 60 bp, Artificial; identical to SEQ ID NO: 331545
  Synthetic oligonucleotide

SEQ ID NO: 549283 - DNA, 50 bp, Artificial; identical to SEQ ID NO: 331546
  Synthetic oligonucleotide

SEQ ID NO: 549284 - DNA, 58 bp, Artificial; identical to SEQ ID NO: 16497
  Synthetic oligonucleotide

SEQ ID NO: 549285 - DNA, 59 bp, Artificial; identical to SEQ ID NO: 331552
  Synthetic oligonucleotide

SEQ ID NO: 549286 - DNA, 53 bp, Artificial; identical to SEQ ID NO: 331554
  Synthetic oligonucleotide

SEQ ID NO: 549287 - DNA, 56 bp, Artificial; identical to SEQ ID NO: 331556
  Synthetic oligonucleotide

SEQ ID NO: 549288 - DNA, 57 bp, Artificial; identical to SEQ ID NO: 331560
  Synthetic oligonucleotide

SEQ ID NO: 549289 - DNA, 54 bp, Artificial; identical to SEQ ID NO: 331561
  Synthetic oligonucleotide

SEQ ID NO: 549290 - DNA, 58 bp, Artificial; identical to SEQ ID NO: 331564
  Synthetic oligonucleotide

SEQ ID NO: 549291 - DNA, 55 bp, Artificial; identical to SEQ ID NO: 331565
  Synthetic oligonucleotide

SEQ ID NO: 549292 - DNA, 58 bp, Artificial; identical to SEQ ID NO: 20357
  Synthetic oligonucleotide

SEQ ID NO: 549293 - DNA, 60 bp, Artificial; identical to SEQ ID NO: 331572
  Synthetic oligonucleotide

SEQ ID NO: 549294 - DNA, 59 bp, Artificial; identical to SEQ ID NO: 331573
  Synthetic oligonucleotide

SEQ ID NO: 549295 - DNA, 55 bp, Artificial; identical to SEQ ID NO: 331574
  Synthetic oligonucleotide

SEQ ID NO: 549296 - DNA, 59 bp, Artificial; identical to SEQ ID NO: 331575
  Synthetic oligonucleotide

SEQ ID NO: 549297 - DNA, 55 bp, Artificial; identical to SEQ ID NO: 331576
  Synthetic oligonucleotide

SEQ ID NO: 549298 - DNA, 55 bp, Artificial; identical to SEQ ID NO: 331577
  Synthetic oligonucleotide

SEQ ID NO: 549299 - DNA, 60 bp, Artificial; identical to SEQ ID NO: 331578
  Synthetic oligonucleotide

SEQ ID NO: 549300 - DNA, 60 bp, Artificial; identical to SEQ ID NO: 331581
  Synthetic oligonucleotide

SEQ ID NO: 549301 - DNA, 60 bp, Artificial; identical to SEQ ID NO: 331584
  Synthetic oligonucleotide

SEQ ID NO: 549302 - DNA, 52 bp, Artificial; identical to SEQ ID NO: 11213
  Synthetic oligonucleotide

SEQ ID NO: 549303 - DNA, 52 bp, Artificial; identical to SEQ ID NO: 331586
  Synthetic oligonucleotide

SEQ ID NO: 549304 - DNA, 59 bp, Artificial; identical to SEQ ID NO: 331588
  Synthetic oligonucleotide

SEQ ID NO: 549305 - DNA, 52 bp, Artificial; identical to SEQ ID NO: 331589
  Synthetic oligonucleotide

SEQ ID NO: 549306 - DNA, 60 bp, Artificial; identical to SEQ ID NO: 331591
  Synthetic oligonucleotide

SEQ ID NO: 549307 - DNA, 50 bp, Artificial; identical to SEQ ID NO: 331593
  Synthetic oligonucleotide

SEQ ID NO: 549308 - DNA, 57 bp, Artificial; identical to SEQ ID NO: 331594
  Synthetic oligonucleotide

SEQ ID NO: 549309 - DNA, 57 bp, Artificial; identical to SEQ ID NO: 331595
  Synthetic oligonucleotide

SEQ ID NO: 549310 - DNA, 53 bp, Artificial; identical to SEQ ID NO: 331596
  Synthetic oligonucleotide

SEQ ID NO: 549311 - DNA, 57 bp, Artificial; identical to SEQ ID NO: 331601
  Synthetic oligonucleotide

SEQ ID NO: 549312 - DNA, 53 bp, Artificial; identical to SEQ ID NO: 331602
  Synthetic oligonucleotide

SEQ ID NO: 549313 - DNA, 55 bp, Artificial; identical to SEQ ID NO: 331606
  Synthetic oligonucleotide

SEQ ID NO: 549314 - DNA, 55 bp, Artificial; identical to SEQ ID NO: 331608
  Synthetic oligonucleotide

SEQ ID NO: 549315 - DNA, 60 bp, Artificial; identical to SEQ ID NO: 331609
  Synthetic oligonucleotide

SEQ ID NO: 549316 - DNA, 60 bp, Artificial; identical to SEQ ID NO: 331613
  Synthetic oligonucleotide

SEQ ID NO: 549317 - DNA, 60 bp, Artificial; identical to SEQ ID NO: 331616
  Synthetic oligonucleotide

SEQ ID NO: 549318 - DNA, 60 bp, Artificial; identical to SEQ ID NO: 331618
  Synthetic oligonucleotide

SEQ ID NO: 549319 - DNA, 60 bp, Artificial; identical to SEQ ID NO: 331619
  Synthetic oligonucleotide

SEQ ID NO: 549320 - DNA, 60 bp, Artificial; identical to SEQ ID NO: 331620
  Synthetic oligonucleotide

SEQ ID NO: 549321 - DNA, 60 bp, Artificial; identical to SEQ ID NO: 331621
  Synthetic oligonucleotide

SEQ ID NO: 549322 - DNA, 58 bp, Artificial; identical to SEQ ID NO: 331622
  Synthetic oligonucleotide

SEQ ID NO: 549323 - DNA, 60 bp, Artificial; identical to SEQ ID NO: 331623
  Synthetic oligonucleotide

SEQ ID NO: 549324 - DNA, 50 bp, Artificial; identical to SEQ ID NO: 331626
  Synthetic oligonucleotide

SEQ ID NO: 549325 - DNA, 57 bp, Artificial; identical to SEQ ID NO: 331634
  Synthetic oligonucleotide

SEQ ID NO: 549326 - DNA, 60 bp, Artificial; identical to SEQ ID NO: 331641
  Synthetic oligonucleotide

SEQ ID NO: 549327 - DNA, 55 bp, Artificial; identical to SEQ ID NO: 331644
  Synthetic oligonucleotide

SEQ ID NO: 549328 - DNA, 55 bp, Artificial; identical to SEQ ID NO: 331645
  Synthetic oligonucleotide

SEQ ID NO: 549329 - DNA, 51 bp, Artificial; identical to SEQ ID NO: 331647
  Synthetic oligonucleotide

SEQ ID NO: 549330 - DNA, 54 bp, Artificial; identical to SEQ ID NO: 331655
  Synthetic oligonucleotide

SEQ ID NO: 549331 - DNA, 55 bp, Artificial; identical to SEQ ID NO: 331657
  Synthetic oligonucleotide

SEQ ID NO: 549332 - DNA, 57 bp, Artificial; identical to SEQ ID NO: 331658
  Synthetic oligonucleotide

SEQ ID NO: 549333 - DNA, 58 bp, Artificial; identical to SEQ ID NO: 18273
  Synthetic oligonucleotide

SEQ ID NO: 549334 - DNA, 60 bp, Artificial; identical to SEQ ID NO: 331664
  Synthetic oligonucleotide

SEQ ID NO: 549335 - DNA, 57 bp, Artificial; identical to SEQ ID NO: 331665
  Synthetic oligonucleotide

SEQ ID NO: 549336 - DNA, 60 bp, Artificial; identical to SEQ ID NO: 331666
  Synthetic oligonucleotide

SEQ ID NO: 549337 - DNA, 58 bp, Artificial; identical to SEQ ID NO: 331669
  Synthetic oligonucleotide

SEQ ID NO: 549338 - DNA, 52 bp, Artificial; identical to SEQ ID NO: 331670
  Synthetic oligonucleotide

SEQ ID NO: 549339 - DNA, 58 bp, Artificial; identical to SEQ ID NO: 331672
  Synthetic oligonucleotide

SEQ ID NO: 549340 - DNA, 55 bp, Artificial; identical to SEQ ID NO: 331673
  Synthetic oligonucleotide

SEQ ID NO: 549341 - DNA, 53 bp, Artificial; identical to SEQ ID NO: 331674
  Synthetic oligonucleotide

SEQ ID NO: 549342 - DNA, 55 bp, Artificial; identical to SEQ ID NO: 331675
  Synthetic oligonucleotide

SEQ ID NO: 549343 - DNA, 60 bp, Artificial; identical to SEQ ID NO: 6091
  Synthetic oligonucleotide

SEQ ID NO: 549344 - DNA, 60 bp, Artificial; identical to SEQ ID NO: 11966
  Synthetic oligonucleotide

SEQ ID NO: 549345 - DNA, 60 bp, Artificial; identical to SEQ ID NO: 331677
  Synthetic oligonucleotide

SEQ ID NO: 549346 - DNA, 55 bp, Artificial; identical to SEQ ID NO: 331678
  Synthetic oligonucleotide

SEQ ID NO: 549347 - DNA, 50 bp, Artificial; identical to SEQ ID NO: 331679
  Synthetic oligonucleotide

SEQ ID NO: 549348 - DNA, 56 bp, Artificial; identical to SEQ ID NO: 331680
  Synthetic oligonucleotide

SEQ ID NO: 549349 - DNA, 55 bp, Artificial; identical to SEQ ID NO: 331681
  Synthetic oligonucleotide

SEQ ID NO: 549350 - DNA, 55 bp, Artificial; identical to SEQ ID NO: 331686
  Synthetic oligonucleotide

SEQ ID NO: 549351 - DNA, 53 bp, Artificial; identical to SEQ ID NO: 331687
  Synthetic oligonucleotide

SEQ ID NO: 549352 - DNA, 54 bp, Artificial; identical to SEQ ID NO: 331688
  Synthetic oligonucleotide

SEQ ID NO: 549353 - DNA, 55 bp, Artificial; identical to SEQ ID NO: 331693
  Synthetic oligonucleotide

SEQ ID NO: 549354 - DNA, 52 bp, Artificial; identical to SEQ ID NO: 331694
  Synthetic oligonucleotide

SEQ ID NO: 549355 - DNA, 54 bp, Artificial; identical to SEQ ID NO: 331697
  Synthetic oligonucleotide

SEQ ID NO: 549356 - DNA, 57 bp, Artificial; identical to SEQ ID NO: 331699
  Synthetic oligonucleotide

SEQ ID NO: 549357 - DNA, 55 bp, Artificial; identical to SEQ ID NO: 331701
  Synthetic oligonucleotide

SEQ ID NO: 549358 - DNA, 50 bp, Artificial; identical to SEQ ID NO: 331705
  Synthetic oligonucleotide

SEQ ID NO: 549359 - DNA, 60 bp, Artificial; identical to SEQ ID NO: 331708
  Synthetic oligonucleotide

SEQ ID NO: 549360 - DNA, 55 bp, Artificial; identical to SEQ ID NO: 331710
  Synthetic oligonucleotide

SEQ ID NO: 549361 - DNA, 51 bp, Artificial; identical to SEQ ID NO: 331711
  Synthetic oligonucleotide

SEQ ID NO: 549362 - DNA, 49 bp, Artificial; identical to SEQ ID NO: 331714
  Synthetic oligonucleotide

SEQ ID NO: 549363 - DNA, 60 bp, Artificial; identical to SEQ ID NO: 331716
  Synthetic oligonucleotide

SEQ ID NO: 549364 - DNA, 54 bp, Artificial; identical to SEQ ID NO: 331718
  Synthetic oligonucleotide

SEQ ID NO: 549365 - DNA, 51 bp, Artificial; identical to SEQ ID NO: 331721
  Synthetic oligonucleotide

SEQ ID NO: 549366 - DNA, 54 bp, Artificial; identical to SEQ ID NO: 331722
  Synthetic oligonucleotide

SEQ ID NO: 549367 - DNA, 59 bp, Artificial; identical to SEQ ID NO: 331726
  Synthetic oligonucleotide

SEQ ID NO: 549368 - DNA, 55 bp, Artificial; identical to SEQ ID NO: 331727
  Synthetic oligonucleotide

SEQ ID NO: 549369 - DNA, 58 bp, Artificial; identical to SEQ ID NO: 331728
  Synthetic oligonucleotide

SEQ ID NO: 549370 - DNA, 51 bp, Artificial; identical to SEQ ID NO: 331732
  Synthetic oligonucleotide

SEQ ID NO: 549371 - DNA, 55 bp, Artificial; identical to SEQ ID NO: 331734
  Synthetic oligonucleotide

SEQ ID NO: 549372 - DNA, 51 bp, Artificial; identical to SEQ ID NO: 331735
  Synthetic oligonucleotide

SEQ ID NO: 549373 - DNA, 58 bp, Artificial; identical to SEQ ID NO: 331737
  Synthetic oligonucleotide

SEQ ID NO: 549374 - DNA, 55 bp, Artificial; identical to SEQ ID NO: 331738
  Synthetic oligonucleotide

SEQ ID NO: 549375 - DNA, 59 bp, Artificial; identical to SEQ ID NO: 331743
  Synthetic oligonucleotide

SEQ ID NO: 549376 - DNA, 55 bp, Artificial; identical to SEQ ID NO: 331746
  Synthetic oligonucleotide

SEQ ID NO: 549377 - DNA, 56 bp, Artificial; identical to SEQ ID NO: 331748
  Synthetic oligonucleotide

SEQ ID NO: 549378 - DNA, 53 bp, Artificial; identical to SEQ ID NO: 331753
  Synthetic oligonucleotide

SEQ ID NO: 549379 - DNA, 50 bp, Artificial; identical to SEQ ID NO: 331757
  Synthetic oligonucleotide

SEQ ID NO: 549380 - DNA, 60 bp, Artificial; identical to SEQ ID NO: 6088
  Synthetic oligonucleotide

SEQ ID NO: 549381 - DNA, 55 bp, Artificial; identical to SEQ ID NO: 331760
  Synthetic oligonucleotide

SEQ ID NO: 549382 - DNA, 55 bp, Artificial; identical to SEQ ID NO: 331761
  Synthetic oligonucleotide

SEQ ID NO: 549383 - DNA, 60 bp, Artificial; identical to SEQ ID NO: 331762
  Synthetic oligonucleotide

SEQ ID NO: 549384 - DNA, 59 bp, Artificial; identical to SEQ ID NO: 331764
  Synthetic oligonucleotide

SEQ ID NO: 549385 - DNA, 52 bp, Artificial; identical to SEQ ID NO: 331769
  Synthetic oligonucleotide

SEQ ID NO: 549386 - DNA, 56 bp, Artificial; identical to SEQ ID NO: 331771
  Synthetic oligonucleotide

SEQ ID NO: 549387 - DNA, 54 bp, Artificial; identical to SEQ ID NO: 331772
  Synthetic oligonucleotide

SEQ ID NO: 549388 - DNA, 57 bp, Artificial; identical to SEQ ID NO: 331773
  Synthetic oligonucleotide

SEQ ID NO: 549389 - DNA, 56 bp, Artificial; identical to SEQ ID NO: 331774
  Synthetic oligonucleotide

SEQ ID NO: 549390 - DNA, 60 bp, Artificial; identical to SEQ ID NO: 331776
  Synthetic oligonucleotide

SEQ ID NO: 549391 - DNA, 60 bp, Artificial; identical to SEQ ID NO: 331778
  Synthetic oligonucleotide

SEQ ID NO: 549392 - DNA, 55 bp, Artificial; identical to SEQ ID NO: 331779
  Synthetic oligonucleotide

SEQ ID NO: 549393 - DNA, 60 bp, Artificial; identical to SEQ ID NO: 331782
  Synthetic oligonucleotide

SEQ ID NO: 549394 - DNA, 60 bp, Artificial; identical to SEQ ID NO: 331784
  Synthetic oligonucleotide

SEQ ID NO: 549395 - DNA, 54 bp, Artificial; identical to SEQ ID NO: 331785
  Synthetic oligonucleotide

SEQ ID NO: 549396 - DNA, 59 bp, Artificial; identical to SEQ ID NO: 331788
  Synthetic oligonucleotide

SEQ ID NO: 549397 - DNA, 60 bp, Artificial; identical to SEQ ID NO: 331790
  Synthetic oligonucleotide

SEQ ID NO: 549398 - DNA, 59 bp, Artificial; identical to SEQ ID NO: 331791
  Synthetic oligonucleotide

SEQ ID NO: 549399 - DNA, 55 bp, Artificial; identical to SEQ ID NO: 331794
  Synthetic oligonucleotide

SEQ ID NO: 549400 - DNA, 55 bp, Artificial; identical to SEQ ID NO: 331797
  Synthetic oligonucleotide

SEQ ID NO: 549401 - DNA, 60 bp, Artificial; identical to SEQ ID NO: 11622
  Synthetic oligonucleotide

SEQ ID NO: 549402 - DNA, 58 bp, Artificial; identical to SEQ ID NO: 331800
  Synthetic oligonucleotide

SEQ ID NO: 549403 - DNA, 55 bp, Artificial; identical to SEQ ID NO: 331802
  Synthetic oligonucleotide

SEQ ID NO: 549404 - DNA, 55 bp, Artificial; identical to SEQ ID NO: 331804
  Synthetic oligonucleotide

SEQ ID NO: 549405 - DNA, 55 bp, Artificial; identical to SEQ ID NO: 331806
  Synthetic oligonucleotide

SEQ ID NO: 549406 - DNA, 55 bp, Artificial; identical to SEQ ID NO: 331810
  Synthetic oligonucleotide

SEQ ID NO: 549407 - DNA, 55 bp, Artificial; identical to SEQ ID NO: 331812
  Synthetic oligonucleotide

SEQ ID NO: 549408 - DNA, 55 bp, Artificial; identical to SEQ ID NO: 331819
  Synthetic oligonucleotide

SEQ ID NO: 549409 - DNA, 55 bp, Artificial; identical to SEQ ID NO: 331821
  Synthetic oligonucleotide

SEQ ID NO: 549410 - DNA, 50 bp, Artificial; identical to SEQ ID NO: 331824
  Synthetic oligonucleotide

SEQ ID NO: 549411 - DNA, 60 bp, Artificial; identical to SEQ ID NO: 331825
  Synthetic oligonucleotide

SEQ ID NO: 549412 - DNA, 60 bp, Artificial; identical to SEQ ID NO: 331827
  Synthetic oligonucleotide

SEQ ID NO: 549413 - DNA, 55 bp, Artificial; identical to SEQ ID NO: 331828
  Synthetic oligonucleotide

SEQ ID NO: 549414 - DNA, 51 bp, Artificial; identical to SEQ ID NO: 331831
  Synthetic oligonucleotide

SEQ ID NO: 549415 - DNA, 52 bp, Artificial; identical to SEQ ID NO: 331832
  Synthetic oligonucleotide

SEQ ID NO: 549416 - DNA, 57 bp, Artificial; identical to SEQ ID NO: 331838
  Synthetic oligonucleotide

SEQ ID NO: 549417 - DNA, 58 bp, Artificial; identical to SEQ ID NO: 331839
  Synthetic oligonucleotide

SEQ ID NO: 549418 - DNA, 60 bp, Artificial; identical to SEQ ID NO: 331841
  Synthetic oligonucleotide

SEQ ID NO: 549419 - DNA, 51 bp, Artificial; identical to SEQ ID NO: 331844
  Synthetic oligonucleotide

SEQ ID NO: 549420 - DNA, 55 bp, Artificial; identical to SEQ ID NO: 331845
  Synthetic oligonucleotide

SEQ ID NO: 549421 - DNA, 59 bp, Artificial; identical to SEQ ID NO: 331849
  Synthetic oligonucleotide

SEQ ID NO: 549422 - DNA, 57 bp, Artificial; identical to SEQ ID NO: 331850
  Synthetic oligonucleotide

SEQ ID NO: 549423 - DNA, 57 bp, Artificial; identical to SEQ ID NO: 331851
  Synthetic oligonucleotide

SEQ ID NO: 549424 - DNA, 60 bp, Artificial; identical to SEQ ID NO: 331853
  Synthetic oligonucleotide

SEQ ID NO: 549425 - DNA, 58 bp, Artificial; identical to SEQ ID NO: 331854
  Synthetic oligonucleotide

SEQ ID NO: 549426 - DNA, 57 bp, Artificial; identical to SEQ ID NO: 331855
  Synthetic oligonucleotide

SEQ ID NO: 549427 - DNA, 55 bp, Artificial; identical to SEQ ID NO: 331856
  Synthetic oligonucleotide

SEQ ID NO: 549428 - DNA, 55 bp, Artificial; identical to SEQ ID NO: 331857
  Synthetic oligonucleotide

SEQ ID NO: 549429 - DNA, 60 bp, Artificial; identical to SEQ ID NO: 331858
  Synthetic oligonucleotide

SEQ ID NO: 549430 - DNA, 55 bp, Artificial; identical to SEQ ID NO: 331859
  Synthetic oligonucleotide

SEQ ID NO: 549431 - DNA, 51 bp, Artificial; identical to SEQ ID NO: 331860
  Synthetic oligonucleotide

SEQ ID NO: 549432 - DNA, 55 bp, Artificial; identical to SEQ ID NO: 331866
  Synthetic oligonucleotide

SEQ ID NO: 549433 - DNA, 60 bp, Artificial; identical to SEQ ID NO: 331869
  Synthetic oligonucleotide

SEQ ID NO: 549434 - DNA, 56 bp, Artificial; identical to SEQ ID NO: 331880
  Synthetic oligonucleotide

SEQ ID NO: 549435 - DNA, 58 bp, Artificial; identical to SEQ ID NO: 331881
  Synthetic oligonucleotide

SEQ ID NO: 549436 - DNA, 57 bp, Artificial; identical to SEQ ID NO: 331882
  Synthetic oligonucleotide

SEQ ID NO: 549437 - DNA, 50 bp, Artificial; identical to SEQ ID NO: 331884
  Synthetic oligonucleotide

SEQ ID NO: 549438 - DNA, 57 bp, Artificial; identical to SEQ ID NO: 331886
  Synthetic oligonucleotide

SEQ ID NO: 549439 - DNA, 56 bp, Artificial; identical to SEQ ID NO: 331887
  Synthetic oligonucleotide

SEQ ID NO: 549440 - DNA, 55 bp, Artificial; identical to SEQ ID NO: 331890
  Synthetic oligonucleotide

SEQ ID NO: 549441 - DNA, 60 bp, Artificial; identical to SEQ ID NO: 331893
  Synthetic oligonucleotide

SEQ ID NO: 549442 - DNA, 57 bp, Artificial; identical to SEQ ID NO: 331894
  Synthetic oligonucleotide

SEQ ID NO: 549443 - DNA, 56 bp, Artificial; identical to SEQ ID NO: 331895
  Synthetic oligonucleotide

SEQ ID NO: 549444 - DNA, 58 bp, Artificial; identical to SEQ ID NO: 331898
  Synthetic oligonucleotide

SEQ ID NO: 549445 - DNA, 60 bp, Artificial; identical to SEQ ID NO: 331899
  Synthetic oligonucleotide

SEQ ID NO: 549446 - DNA, 60 bp, Artificial; identical to SEQ ID NO: 331904
  Synthetic oligonucleotide

SEQ ID NO: 549447 - DNA, 59 bp, Artificial; identical to SEQ ID NO: 331905
  Synthetic oligonucleotide

SEQ ID NO: 549448 - DNA, 59 bp, Artificial; identical to SEQ ID NO: 331906
  Synthetic oligonucleotide

SEQ ID NO: 549449 - DNA, 53 bp, Artificial; identical to SEQ ID NO: 331909
  Synthetic oligonucleotide

SEQ ID NO: 549450 - DNA, 55 bp, Artificial; identical to SEQ ID NO: 331915
  Synthetic oligonucleotide

SEQ ID NO: 549451 - DNA, 60 bp, Artificial; identical to SEQ ID NO: 331917
  Synthetic oligonucleotide

SEQ ID NO: 549452 - DNA, 60 bp, Artificial; identical to SEQ ID NO: 331918
  Synthetic oligonucleotide

SEQ ID NO: 549453 - DNA, 55 bp, Artificial; identical to SEQ ID NO: 331920
  Synthetic oligonucleotide

SEQ ID NO: 549454 - DNA, 58 bp, Artificial; identical to SEQ ID NO: 331921
  Synthetic oligonucleotide

SEQ ID NO: 549455 - DNA, 59 bp, Artificial; identical to SEQ ID NO: 331922
  Synthetic oligonucleotide

SEQ ID NO: 549456 - DNA, 55 bp, Artificial; identical to SEQ ID NO: 331923
  Synthetic oligonucleotide

SEQ ID NO: 549457 - DNA, 51 bp, Artificial; identical to SEQ ID NO: 331925
  Synthetic oligonucleotide

SEQ ID NO: 549458 - DNA, 60 bp, Artificial; identical to SEQ ID NO: 331926
  Synthetic oligonucleotide

SEQ ID NO: 549459 - DNA, 60 bp, Artificial; identical to SEQ ID NO: 331927
  Synthetic oligonucleotide

SEQ ID NO: 549460 - DNA, 58 bp, Artificial; identical to SEQ ID NO: 331928
  Synthetic oligonucleotide

SEQ ID NO: 549461 - DNA, 60 bp, Artificial; identical to SEQ ID NO: 331931
  Synthetic oligonucleotide

SEQ ID NO: 549462 - DNA, 55 bp, Artificial; identical to SEQ ID NO: 331933
  Synthetic oligonucleotide

SEQ ID NO: 549463 - DNA, 57 bp, Artificial; identical to SEQ ID NO: 331939
  Synthetic oligonucleotide

SEQ ID NO: 549464 - DNA, 53 bp, Artificial; identical to SEQ ID NO: 331940
  Synthetic oligonucleotide

SEQ ID NO: 549465 - DNA, 56 bp, Artificial; identical to SEQ ID NO: 331943
  Synthetic oligonucleotide

SEQ ID NO: 549466 - DNA, 55 bp, Artificial; identical to SEQ ID NO: 331944
  Synthetic oligonucleotide

SEQ ID NO: 549467 - DNA, 50 bp, Artificial; identical to SEQ ID NO: 331945
  Synthetic oligonucleotide

SEQ ID NO: 549468 - DNA, 60 bp, Artificial; identical to SEQ ID NO: 331946
  Synthetic oligonucleotide

SEQ ID NO: 549469 - DNA, 60 bp, Artificial; identical to SEQ ID NO: 15367
  Synthetic oligonucleotide

SEQ ID NO: 549470 - DNA, 60 bp, Artificial; identical to SEQ ID NO: 331947
  Synthetic oligonucleotide

SEQ ID NO: 549471 - DNA, 55 bp, Artificial; identical to SEQ ID NO: 331948
  Synthetic oligonucleotide

SEQ ID NO: 549472 - DNA, 60 bp, Artificial; identical to SEQ ID NO: 331949
  Synthetic oligonucleotide

SEQ ID NO: 549473 - DNA, 59 bp, Artificial; identical to SEQ ID NO: 331950
  Synthetic oligonucleotide

SEQ ID NO: 549474 - DNA, 53 bp, Artificial; identical to SEQ ID NO: 331951
  Synthetic oligonucleotide

SEQ ID NO: 549475 - DNA, 58 bp, Artificial; identical to SEQ ID NO: 331952
  Synthetic oligonucleotide

SEQ ID NO: 549476 - DNA, 60 bp, Artificial; identical to SEQ ID NO: 331956
  Synthetic oligonucleotide

SEQ ID NO: 549477 - DNA, 55 bp, Artificial; identical to SEQ ID NO: 331957
  Synthetic oligonucleotide

SEQ ID NO: 549478 - DNA, 55 bp, Artificial; identical to SEQ ID NO: 331958
  Synthetic oligonucleotide

SEQ ID NO: 549479 - DNA, 57 bp, Artificial; identical to SEQ ID NO: 331960
  Synthetic oligonucleotide

SEQ ID NO: 549480 - DNA, 55 bp, Artificial; identical to SEQ ID NO: 331962
  Synthetic oligonucleotide

SEQ ID NO: 549481 - DNA, 50 bp, Artificial; identical to SEQ ID NO: 331964
  Synthetic oligonucleotide

SEQ ID NO: 549482 - DNA, 60 bp, Artificial; identical to SEQ ID NO: 331965
  Synthetic oligonucleotide

SEQ ID NO: 549483 - DNA, 60 bp, Artificial; identical to SEQ ID NO: 331969
  Synthetic oligonucleotide

SEQ ID NO: 549484 - DNA, 60 bp, Artificial; identical to SEQ ID NO: 331971
  Synthetic oligonucleotide

SEQ ID NO: 549485 - DNA, 51 bp, Artificial; identical to SEQ ID NO: 331972
  Synthetic oligonucleotide

SEQ ID NO: 549486 - DNA, 60 bp, Artificial; identical to SEQ ID NO: 331975
  Synthetic oligonucleotide

SEQ ID NO: 549487 - DNA, 51 bp, Artificial; identical to SEQ ID NO: 331976
  Synthetic oligonucleotide

SEQ ID NO: 549488 - DNA, 59 bp, Artificial; identical to SEQ ID NO: 331977
  Synthetic oligonucleotide

SEQ ID NO: 549489 - DNA, 52 bp, Artificial; identical to SEQ ID NO: 331978
  Synthetic oligonucleotide

SEQ ID NO: 549490 - DNA, 53 bp, Artificial; identical to SEQ ID NO: 331983
  Synthetic oligonucleotide

SEQ ID NO: 549491 - DNA, 54 bp, Artificial; identical to SEQ ID NO: 331990
  Synthetic oligonucleotide

SEQ ID NO: 549492 - DNA, 52 bp, Artificial; identical to SEQ ID NO: 331992
  Synthetic oligonucleotide

SEQ ID NO: 549493 - DNA, 60 bp, Artificial; identical to SEQ ID NO: 331993
  Synthetic oligonucleotide

SEQ ID NO: 549494 - DNA, 50 bp, Artificial; identical to SEQ ID NO: 331995
  Synthetic oligonucleotide

SEQ ID NO: 549495 - DNA, 50 bp, Artificial; identical to SEQ ID NO: 331996
  Synthetic oligonucleotide

SEQ ID NO: 549496 - DNA, 60 bp, Artificial; identical to SEQ ID NO: 331999
  Synthetic oligonucleotide

SEQ ID NO: 549497 - DNA, 60 bp, Artificial; identical to SEQ ID NO: 332005
  Synthetic oligonucleotide

SEQ ID NO: 549498 - DNA, 57 bp, Artificial; identical to SEQ ID NO: 332013
  Synthetic oligonucleotide

SEQ ID NO: 549499 - DNA, 55 bp, Artificial; identical to SEQ ID NO: 332015
  Synthetic oligonucleotide

SEQ ID NO: 549500 - DNA, 56 bp, Artificial; identical to SEQ ID NO: 332016
  Synthetic oligonucleotide

SEQ ID NO: 549501 - DNA, 55 bp, Artificial; identical to SEQ ID NO: 332019
  Synthetic oligonucleotide

SEQ ID NO: 549502 - DNA, 60 bp, Artificial; identical to SEQ ID NO: 332021
  Synthetic oligonucleotide

SEQ ID NO: 549503 - DNA, 55 bp, Artificial; identical to SEQ ID NO: 332024
  Synthetic oligonucleotide

SEQ ID NO: 549504 - DNA, 57 bp, Artificial; identical to SEQ ID NO: 332026
  Synthetic oligonucleotide

SEQ ID NO: 549505 - DNA, 59 bp, Artificial; identical to SEQ ID NO: 332027
  Synthetic oligonucleotide

SEQ ID NO: 549506 - DNA, 60 bp, Artificial; identical to SEQ ID NO: 332029
  Synthetic oligonucleotide

SEQ ID NO: 549507 - DNA, 52 bp, Artificial; identical to SEQ ID NO: 332031
  Synthetic oligonucleotide

SEQ ID NO: 549508 - DNA, 59 bp, Artificial; identical to SEQ ID NO: 332032
  Synthetic oligonucleotide

SEQ ID NO: 549509 - DNA, 60 bp, Artificial; identical to SEQ ID NO: 332033
  Synthetic oligonucleotide

SEQ ID NO: 549510 - DNA, 59 bp, Artificial; identical to SEQ ID NO: 332034
  Synthetic oligonucleotide

SEQ ID NO: 549511 - DNA, 58 bp, Artificial; identical to SEQ ID NO: 332036
  Synthetic oligonucleotide

SEQ ID NO: 549512 - DNA, 59 bp, Artificial; identical to SEQ ID NO: 332038
  Synthetic oligonucleotide

SEQ ID NO: 549513 - DNA, 56 bp, Artificial; identical to SEQ ID NO: 332048
  Synthetic oligonucleotide

SEQ ID NO: 549514 - DNA, 56 bp, Artificial; identical to SEQ ID NO: 332052
  Synthetic oligonucleotide

SEQ ID NO: 549515 - DNA, 56 bp, Artificial; identical to SEQ ID NO: 332053
  Synthetic oligonucleotide

SEQ ID NO: 549516 - DNA, 59 bp, Artificial; identical to SEQ ID NO: 332054
  Synthetic oligonucleotide

SEQ ID NO: 549517 - DNA, 55 bp, Artificial; identical to SEQ ID NO: 332060
  Synthetic oligonucleotide

SEQ ID NO: 549518 - DNA, 55 bp, Artificial; identical to SEQ ID NO: 332062
  Synthetic oligonucleotide

SEQ ID NO: 549519 - DNA, 55 bp, Artificial; identical to SEQ ID NO: 332063
  Synthetic oligonucleotide

SEQ ID NO: 549520 - DNA, 55 bp, Artificial; identical to SEQ ID NO: 332064
  Synthetic oligonucleotide

SEQ ID NO: 549521 - DNA, 60 bp, Artificial; identical to SEQ ID NO: 332065
  Synthetic oligonucleotide

SEQ ID NO: 549522 - DNA, 60 bp, Artificial; identical to SEQ ID NO: 332066
  Synthetic oligonucleotide

SEQ ID NO: 549523 - DNA, 55 bp, Artificial; identical to SEQ ID NO: 332073
  Synthetic oligonucleotide

SEQ ID NO: 549524 - DNA, 57 bp, Artificial; identical to SEQ ID NO: 332075
  Synthetic oligonucleotide

SEQ ID NO: 549525 - DNA, 60 bp, Artificial; identical to SEQ ID NO: 7029
  Synthetic oligonucleotide

SEQ ID NO: 549526 - DNA, 53 bp, Artificial; identical to SEQ ID NO: 332076
  Synthetic oligonucleotide

SEQ ID NO: 549527 - DNA, 55 bp, Artificial; identical to SEQ ID NO: 332077
  Synthetic oligonucleotide

SEQ ID NO: 549528 - DNA, 60 bp, Artificial; identical to SEQ ID NO: 14664
  Synthetic oligonucleotide

SEQ ID NO: 549529 - DNA, 55 bp, Artificial; identical to SEQ ID NO: 332079
  Synthetic oligonucleotide

SEQ ID NO: 549530 - DNA, 51 bp, Artificial; identical to SEQ ID NO: 332082
  Synthetic oligonucleotide

SEQ ID NO: 549531 - DNA, 51 bp, Artificial; identical to SEQ ID NO: 332086
  Synthetic oligonucleotide

SEQ ID NO: 549532 - DNA, 60 bp, Artificial; identical to SEQ ID NO: 332087
  Synthetic oligonucleotide

SEQ ID NO: 549533 - DNA, 58 bp, Artificial; identical to SEQ ID NO: 332090
  Synthetic oligonucleotide

SEQ ID NO: 549534 - DNA, 54 bp, Artificial; identical to SEQ ID NO: 332091
  Synthetic oligonucleotide

SEQ ID NO: 549535 - DNA, 60 bp, Artificial; identical to SEQ ID NO: 332092
  Synthetic oligonucleotide

SEQ ID NO: 549536 - DNA, 60 bp, Artificial; identical to SEQ ID NO: 332093
  Synthetic oligonucleotide

SEQ ID NO: 549537 - DNA, 54 bp, Artificial; identical to SEQ ID NO: 332094
  Synthetic oligonucleotide

SEQ ID NO: 549538 - DNA, 60 bp, Artificial; identical to SEQ ID NO: 332095
  Synthetic oligonucleotide

SEQ ID NO: 549539 - DNA, 57 bp, Artificial; identical to SEQ ID NO: 332096
  Synthetic oligonucleotide

SEQ ID NO: 549540 - DNA, 60 bp, Artificial; identical to SEQ ID NO: 332098
  Synthetic oligonucleotide

SEQ ID NO: 549541 - DNA, 57 bp, Artificial; identical to SEQ ID NO: 332099
  Synthetic oligonucleotide

SEQ ID NO: 549542 - DNA, 51 bp, Artificial; identical to SEQ ID NO: 332105
  Synthetic oligonucleotide

SEQ ID NO: 549543 - DNA, 59 bp, Artificial; identical to SEQ ID NO: 332111
  Synthetic oligonucleotide

SEQ ID NO: 549544 - DNA, 50 bp, Artificial; identical to SEQ ID NO: 332112
  Synthetic oligonucleotide

SEQ ID NO: 549545 - DNA, 60 bp, Artificial; identical to SEQ ID NO: 332115
  Synthetic oligonucleotide

SEQ ID NO: 549546 - DNA, 50 bp, Artificial; identical to SEQ ID NO: 332117
  Synthetic oligonucleotide

SEQ ID NO: 549547 - DNA, 60 bp, Artificial; identical to SEQ ID NO: 332119
  Synthetic oligonucleotide

SEQ ID NO: 549548 - DNA, 60 bp, Artificial; identical to SEQ ID NO: 332120
  Synthetic oligonucleotide

SEQ ID NO: 549549 - DNA, 60 bp, Artificial; identical to SEQ ID NO: 332129
  Synthetic oligonucleotide

SEQ ID NO: 549550 - DNA, 60 bp, Artificial; identical to SEQ ID NO: 332131
  Synthetic oligonucleotide

SEQ ID NO: 549551 - DNA, 59 bp, Artificial; identical to SEQ ID NO: 332135
  Synthetic oligonucleotide

SEQ ID NO: 549552 - DNA, 60 bp, Artificial; identical to SEQ ID NO: 332139
  Synthetic oligonucleotide

SEQ ID NO: 549553 - DNA, 60 bp, Artificial; identical to SEQ ID NO: 332140
  Synthetic oligonucleotide

SEQ ID NO: 549554 - DNA, 60 bp, Artificial; identical to SEQ ID NO: 332143
  Synthetic oligonucleotide

SEQ ID NO: 549555 - DNA, 60 bp, Artificial; identical to SEQ ID NO: 332145
  Synthetic oligonucleotide

SEQ ID NO: 549556 - DNA, 60 bp, Artificial; identical to SEQ ID NO: 332151
  Synthetic oligonucleotide

SEQ ID NO: 549557 - DNA, 55 bp, Artificial; identical to SEQ ID NO: 332152
  Synthetic oligonucleotide

SEQ ID NO: 549558 - DNA, 58 bp, Artificial; identical to SEQ ID NO: 332153
  Synthetic oligonucleotide

SEQ ID NO: 549559 - DNA, 55 bp, Artificial; identical to SEQ ID NO: 332154
  Synthetic oligonucleotide

SEQ ID NO: 549560 - DNA, 54 bp, Artificial; identical to SEQ ID NO: 332156
  Synthetic oligonucleotide

SEQ ID NO: 549561 - DNA, 55 bp, Artificial; identical to SEQ ID NO: 332157
  Synthetic oligonucleotide

SEQ ID NO: 549562 - DNA, 55 bp, Artificial; identical to SEQ ID NO: 332159
  Synthetic oligonucleotide

SEQ ID NO: 549563 - DNA, 60 bp, Artificial; identical to SEQ ID NO: 332161
  Synthetic oligonucleotide

SEQ ID NO: 549564 - DNA, 58 bp, Artificial; identical to SEQ ID NO: 332166
  Synthetic oligonucleotide

SEQ ID NO: 549565 - DNA, 50 bp, Artificial; identical to SEQ ID NO: 332167
  Synthetic oligonucleotide

SEQ ID NO: 549566 - DNA, 60 bp, Artificial; identical to SEQ ID NO: 332168
  Synthetic oligonucleotide

SEQ ID NO: 549567 - DNA, 60 bp, Artificial; identical to SEQ ID NO: 332169
  Synthetic oligonucleotide

SEQ ID NO: 549568 - DNA, 59 bp, Artificial; identical to SEQ ID NO: 332170
  Synthetic oligonucleotide

SEQ ID NO: 549569 - DNA, 55 bp, Artificial; identical to SEQ ID NO: 332172
  Synthetic oligonucleotide

SEQ ID NO: 549570 - DNA, 60 bp, Artificial; identical to SEQ ID NO: 332173
  Synthetic oligonucleotide

SEQ ID NO: 549571 - DNA, 53 bp, Artificial; identical to SEQ ID NO: 6436
  Synthetic oligonucleotide

SEQ ID NO: 549572 - DNA, 60 bp, Artificial; identical to SEQ ID NO: 14283
  Synthetic oligonucleotide

SEQ ID NO: 549573 - DNA, 57 bp, Artificial; identical to SEQ ID NO: 332184
  Synthetic oligonucleotide

SEQ ID NO: 549574 - DNA, 60 bp, Artificial; identical to SEQ ID NO: 332185
  Synthetic oligonucleotide

SEQ ID NO: 549575 - DNA, 59 bp, Artificial; identical to SEQ ID NO: 332186
  Synthetic oligonucleotide

SEQ ID NO: 549576 - DNA, 52 bp, Artificial; identical to SEQ ID NO: 332187
  Synthetic oligonucleotide

SEQ ID NO: 549577 - DNA, 53 bp, Artificial; identical to SEQ ID NO: 332191
  Synthetic oligonucleotide

SEQ ID NO: 549578 - DNA, 58 bp, Artificial; identical to SEQ ID NO: 332193
  Synthetic oligonucleotide

SEQ ID NO: 549579 - DNA, 56 bp, Artificial; identical to SEQ ID NO: 332195
  Synthetic oligonucleotide

SEQ ID NO: 549580 - DNA, 50 bp, Artificial; identical to SEQ ID NO: 332196
  Synthetic oligonucleotide

SEQ ID NO: 549581 - DNA, 60 bp, Artificial; identical to SEQ ID NO: 332197
  Synthetic oligonucleotide

SEQ ID NO: 549582 - DNA, 52 bp, Artificial; identical to SEQ ID NO: 332202
  Synthetic oligonucleotide

SEQ ID NO: 549583 - DNA, 55 bp, Artificial; identical to SEQ ID NO: 332203
  Synthetic oligonucleotide

SEQ ID NO: 549584 - DNA, 58 bp, Artificial; identical to SEQ ID NO: 332206
  Synthetic oligonucleotide

SEQ ID NO: 549585 - DNA, 60 bp, Artificial; identical to SEQ ID NO: 332208
  Synthetic oligonucleotide

SEQ ID NO: 549586 - DNA, 50 bp, Artificial; identical to SEQ ID NO: 332212
  Synthetic oligonucleotide

SEQ ID NO: 549587 - DNA, 54 bp, Artificial; identical to SEQ ID NO: 332215
  Synthetic oligonucleotide

SEQ ID NO: 549588 - DNA, 55 bp, Artificial; identical to SEQ ID NO: 332216
  Synthetic oligonucleotide

SEQ ID NO: 549589 - DNA, 60 bp, Artificial; identical to SEQ ID NO: 332217
  Synthetic oligonucleotide

SEQ ID NO: 549590 - DNA, 57 bp, Artificial; identical to SEQ ID NO: 332218
  Synthetic oligonucleotide

SEQ ID NO: 549591 - DNA, 51 bp, Artificial; identical to SEQ ID NO: 332220
  Synthetic oligonucleotide

SEQ ID NO: 549592 - DNA, 52 bp, Artificial; identical to SEQ ID NO: 332223
  Synthetic oligonucleotide

SEQ ID NO: 549593 - DNA, 60 bp, Artificial; identical to SEQ ID NO: 332227
  Synthetic oligonucleotide

SEQ ID NO: 549594 - DNA, 56 bp, Artificial; identical to SEQ ID NO: 332228
  Synthetic oligonucleotide

SEQ ID NO: 549595 - DNA, 59 bp, Artificial; identical to SEQ ID NO: 332229
  Synthetic oligonucleotide

SEQ ID NO: 549596 - DNA, 54 bp, Artificial; identical to SEQ ID NO: 332235
  Synthetic oligonucleotide

SEQ ID NO: 549597 - DNA, 55 bp, Artificial; identical to SEQ ID NO: 332236
  Synthetic oligonucleotide

SEQ ID NO: 549598 - DNA, 55 bp, Artificial; identical to SEQ ID NO: 332237
  Synthetic oligonucleotide

SEQ ID NO: 549599 - DNA, 60 bp, Artificial; identical to SEQ ID NO: 7855
  Synthetic oligonucleotide

SEQ ID NO: 549600 - DNA, 60 bp, Artificial; identical to SEQ ID NO: 332243
  Synthetic oligonucleotide

SEQ ID NO: 549601 - DNA, 60 bp, Artificial; identical to SEQ ID NO: 332244
  Synthetic oligonucleotide

SEQ ID NO: 549602 - DNA, 55 bp, Artificial; identical to SEQ ID NO: 332245
  Synthetic oligonucleotide

SEQ ID NO: 549603 - DNA, 58 bp, Artificial; identical to SEQ ID NO: 332251
  Synthetic oligonucleotide

SEQ ID NO: 549604 - DNA, 60 bp, Artificial; identical to SEQ ID NO: 332252
  Synthetic oligonucleotide

SEQ ID NO: 549605 - DNA, 60 bp, Artificial; identical to SEQ ID NO: 332253
  Synthetic oligonucleotide

SEQ ID NO: 549606 - DNA, 55 bp, Artificial; identical to SEQ ID NO: 332255
  Synthetic oligonucleotide

SEQ ID NO: 549607 - DNA, 56 bp, Artificial; identical to SEQ ID NO: 332259
  Synthetic oligonucleotide

SEQ ID NO: 549608 - DNA, 56 bp, Artificial; identical to SEQ ID NO: 332262
  Synthetic oligonucleotide

SEQ ID NO: 549609 - DNA, 58 bp, Artificial; identical to SEQ ID NO: 332265
  Synthetic oligonucleotide

SEQ ID NO: 549610 - DNA, 60 bp, Artificial; identical to SEQ ID NO: 332266
  Synthetic oligonucleotide

SEQ ID NO: 549611 - DNA, 55 bp, Artificial; identical to SEQ ID NO: 332267
  Synthetic oligonucleotide

SEQ ID NO: 549612 - DNA, 60 bp, Artificial; identical to SEQ ID NO: 332268
  Synthetic oligonucleotide

SEQ ID NO: 549613 - DNA, 55 bp, Artificial; identical to SEQ ID NO: 332270
  Synthetic oligonucleotide

SEQ ID NO: 549614 - DNA, 60 bp, Artificial; identical to SEQ ID NO: 332274
  Synthetic oligonucleotide

SEQ ID NO: 549615 - DNA, 60 bp, Artificial; identical to SEQ ID NO: 332276
  Synthetic oligonucleotide

SEQ ID NO: 549616 - DNA, 60 bp, Artificial; identical to SEQ ID NO: 332277
  Synthetic oligonucleotide

SEQ ID NO: 549617 - DNA, 60 bp, Artificial; identical to SEQ ID NO: 332278
  Synthetic oligonucleotide

SEQ ID NO: 549618 - DNA, 59 bp, Artificial; identical to SEQ ID NO: 332282
  Synthetic oligonucleotide

SEQ ID NO: 549619 - DNA, 58 bp, Artificial; identical to SEQ ID NO: 332285
  Synthetic oligonucleotide

SEQ ID NO: 549620 - DNA, 60 bp, Artificial; identical to SEQ ID NO: 332292
  Synthetic oligonucleotide

SEQ ID NO: 549621 - DNA, 54 bp, Artificial; identical to SEQ ID NO: 332294
  Synthetic oligonucleotide

SEQ ID NO: 549622 - DNA, 54 bp, Artificial; identical to SEQ ID NO: 332295
  Synthetic oligonucleotide

SEQ ID NO: 549623 - DNA, 52 bp, Artificial; identical to SEQ ID NO: 332296
  Synthetic oligonucleotide

SEQ ID NO: 549624 - DNA, 60 bp, Artificial; identical to SEQ ID NO: 332298
  Synthetic oligonucleotide

SEQ ID NO: 549625 - DNA, 53 bp, Artificial; identical to SEQ ID NO: 332301
  Synthetic oligonucleotide

SEQ ID NO: 549626 - DNA, 60 bp, Artificial; identical to SEQ ID NO: 332302
  Synthetic oligonucleotide

SEQ ID NO: 549627 - DNA, 60 bp, Artificial; identical to SEQ ID NO: 332303
  Synthetic oligonucleotide

SEQ ID NO: 549628 - DNA, 60 bp, Artificial; identical to SEQ ID NO: 332304
  Synthetic oligonucleotide

SEQ ID NO: 549629 - DNA, 60 bp, Artificial; identical to SEQ ID NO: 332305
  Synthetic oligonucleotide

SEQ ID NO: 549630 - DNA, 60 bp, Artificial; identical to SEQ ID NO: 332306
  Synthetic oligonucleotide

SEQ ID NO: 549631 - DNA, 54 bp, Artificial; identical to SEQ ID NO: 332309
  Synthetic oligonucleotide

SEQ ID NO: 549632 - DNA, 54 bp, Artificial; identical to SEQ ID NO: 332320
  Synthetic oligonucleotide

SEQ ID NO: 549633 - DNA, 51 bp, Artificial; identical to SEQ ID NO: 332322
  Synthetic oligonucleotide

SEQ ID NO: 549634 - DNA, 60 bp, Artificial; identical to SEQ ID NO: 332323
  Synthetic oligonucleotide

SEQ ID NO: 549635 - DNA, 54 bp, Artificial; identical to SEQ ID NO: 332325
  Synthetic oligonucleotide

SEQ ID NO: 549636 - DNA, 60 bp, Artificial; identical to SEQ ID NO: 332326
  Synthetic oligonucleotide

SEQ ID NO: 549637 - DNA, 53 bp, Artificial; identical to SEQ ID NO: 332328
  Synthetic oligonucleotide

SEQ ID NO: 549638 - DNA, 59 bp, Artificial; identical to SEQ ID NO: 332329
  Synthetic oligonucleotide

SEQ ID NO: 549639 - DNA, 56 bp, Artificial; identical to SEQ ID NO: 20551
  Synthetic oligonucleotide

SEQ ID NO: 549640 - DNA, 52 bp, Artificial; identical to SEQ ID NO: 332332
  Synthetic oligonucleotide

SEQ ID NO: 549641 - DNA, 57 bp, Artificial; identical to SEQ ID NO: 332334
  Synthetic oligonucleotide

SEQ ID NO: 549642 - DNA, 56 bp, Artificial; identical to SEQ ID NO: 332336
  Synthetic oligonucleotide

SEQ ID NO: 549643 - DNA, 55 bp, Artificial; identical to SEQ ID NO: 332340
  Synthetic oligonucleotide

SEQ ID NO: 549644 - DNA, 60 bp, Artificial; identical to SEQ ID NO: 332342
  Synthetic oligonucleotide

SEQ ID NO: 549645 - DNA, 55 bp, Artificial; identical to SEQ ID NO: 332343
  Synthetic oligonucleotide

SEQ ID NO: 549646 - DNA, 60 bp, Artificial; identical to SEQ ID NO: 332345
  Synthetic oligonucleotide

SEQ ID NO: 549647 - DNA, 50 bp, Artificial; identical to SEQ ID NO: 332347
  Synthetic oligonucleotide

SEQ ID NO: 549648 - DNA, 60 bp, Artificial; identical to SEQ ID NO: 332349
  Synthetic oligonucleotide

SEQ ID NO: 549649 - DNA, 52 bp, Artificial; identical to SEQ ID NO: 332359
  Synthetic oligonucleotide

SEQ ID NO: 549650 - DNA, 52 bp, Artificial; identical to SEQ ID NO: 332360
  Synthetic oligonucleotide

SEQ ID NO: 549651 - DNA, 54 bp, Artificial; identical to SEQ ID NO: 332363
  Synthetic oligonucleotide

SEQ ID NO: 549652 - DNA, 60 bp, Artificial; identical to SEQ ID NO: 332367
  Synthetic oligonucleotide

SEQ ID NO: 549653 - DNA, 59 bp, Artificial; identical to SEQ ID NO: 332373
  Synthetic oligonucleotide

SEQ ID NO: 549654 - DNA, 53 bp, Artificial; identical to SEQ ID NO: 332375
  Synthetic oligonucleotide

SEQ ID NO: 549655 - DNA, 60 bp, Artificial; identical to SEQ ID NO: 332377
  Synthetic oligonucleotide

SEQ ID NO: 549656 - DNA, 57 bp, Artificial; identical to SEQ ID NO: 15923
  Synthetic oligonucleotide

SEQ ID NO: 549657 - DNA, 55 bp, Artificial; identical to SEQ ID NO: 332382
  Synthetic oligonucleotide

SEQ ID NO: 549658 - DNA, 54 bp, Artificial; identical to SEQ ID NO: 332383
  Synthetic oligonucleotide

SEQ ID NO: 549659 - DNA, 60 bp, Artificial; identical to SEQ ID NO: 332384
  Synthetic oligonucleotide

SEQ ID NO: 549660 - DNA, 60 bp, Artificial; identical to SEQ ID NO: 13153
  Synthetic oligonucleotide

SEQ ID NO: 549661 - DNA, 56 bp, Artificial; identical to SEQ ID NO: 332390
  Synthetic oligonucleotide

SEQ ID NO: 549662 - DNA, 51 bp, Artificial; identical to SEQ ID NO: 332392
  Synthetic oligonucleotide

SEQ ID NO: 549663 - DNA, 60 bp, Artificial; identical to SEQ ID NO: 332393
  Synthetic oligonucleotide

SEQ ID NO: 549664 - DNA, 57 bp, Artificial; identical to SEQ ID NO: 332395
  Synthetic oligonucleotide

SEQ ID NO: 549665 - DNA, 55 bp, Artificial; identical to SEQ ID NO: 332397
  Synthetic oligonucleotide

SEQ ID NO: 549666 - DNA, 55 bp, Artificial; identical to SEQ ID NO: 332398
  Synthetic oligonucleotide

SEQ ID NO: 549667 - DNA, 60 bp, Artificial; identical to SEQ ID NO: 332399
  Synthetic oligonucleotide

SEQ ID NO: 549668 - DNA, 55 bp, Artificial; identical to SEQ ID NO: 332400
  Synthetic oligonucleotide

SEQ ID NO: 549669 - DNA, 60 bp, Artificial; identical to SEQ ID NO: 332403
  Synthetic oligonucleotide

SEQ ID NO: 549670 - DNA, 55 bp, Artificial; identical to SEQ ID NO: 332411
  Synthetic oligonucleotide

SEQ ID NO: 549671 - DNA, 57 bp, Artificial; identical to SEQ ID NO: 332417
  Synthetic oligonucleotide

SEQ ID NO: 549672 - DNA, 57 bp, Artificial; identical to SEQ ID NO: 332422
  Synthetic oligonucleotide

SEQ ID NO: 549673 - DNA, 60 bp, Artificial; identical to SEQ ID NO: 332428
  Synthetic oligonucleotide

SEQ ID NO: 549674 - DNA, 60 bp, Artificial; identical to SEQ ID NO: 332431
  Synthetic oligonucleotide

SEQ ID NO: 549675 - DNA, 59 bp, Artificial; identical to SEQ ID NO: 332439
  Synthetic oligonucleotide

SEQ ID NO: 549676 - DNA, 60 bp, Artificial; identical to SEQ ID NO: 332442
  Synthetic oligonucleotide

SEQ ID NO: 549677 - DNA, 60 bp, Artificial; identical to SEQ ID NO: 332444
  Synthetic oligonucleotide

SEQ ID NO: 549678 - DNA, 60 bp, Artificial; identical to SEQ ID NO: 332445
  Synthetic oligonucleotide

SEQ ID NO: 549679 - DNA, 59 bp, Artificial; identical to SEQ ID NO: 332446
  Synthetic oligonucleotide

SEQ ID NO: 549680 - DNA, 59 bp, Artificial; identical to SEQ ID NO: 332448
  Synthetic oligonucleotide

SEQ ID NO: 549681 - DNA, 58 bp, Artificial; identical to SEQ ID NO: 332449
  Synthetic oligonucleotide

SEQ ID NO: 549682 - DNA, 60 bp, Artificial; identical to SEQ ID NO: 332450
  Synthetic oligonucleotide

SEQ ID NO: 549683 - DNA, 60 bp, Artificial; identical to SEQ ID NO: 332452
  Synthetic oligonucleotide

SEQ ID NO: 549684 - DNA, 60 bp, Artificial; identical to SEQ ID NO: 332455
  Synthetic oligonucleotide

SEQ ID NO: 549685 - DNA, 51 bp, Artificial; identical to SEQ ID NO: 332456
  Synthetic oligonucleotide

SEQ ID NO: 549686 - DNA, 60 bp, Artificial; identical to SEQ ID NO: 332458
  Synthetic oligonucleotide

SEQ ID NO: 549687 - DNA, 55 bp, Artificial; identical to SEQ ID NO: 332459
  Synthetic oligonucleotide

SEQ ID NO: 549688 - DNA, 60 bp, Artificial; identical to SEQ ID NO: 332460
  Synthetic oligonucleotide

SEQ ID NO: 549689 - DNA, 60 bp, Artificial; identical to SEQ ID NO: 332461
  Synthetic oligonucleotide

SEQ ID NO: 549690 - DNA, 60 bp, Artificial; identical to SEQ ID NO: 332463
  Synthetic oligonucleotide

SEQ ID NO: 549691 - DNA, 55 bp, Artificial; identical to SEQ ID NO: 332465
  Synthetic oligonucleotide

SEQ ID NO: 549692 - DNA, 58 bp, Artificial; identical to SEQ ID NO: 332466
  Synthetic oligonucleotide

SEQ ID NO: 549693 - DNA, 60 bp, Artificial; identical to SEQ ID NO: 332468
  Synthetic oligonucleotide

SEQ ID NO: 549694 - DNA, 58 bp, Artificial; identical to SEQ ID NO: 14297
  Synthetic oligonucleotide

SEQ ID NO: 549695 - DNA, 60 bp, Artificial; identical to SEQ ID NO: 332471
  Synthetic oligonucleotide

SEQ ID NO: 549696 - DNA, 60 bp, Artificial; identical to SEQ ID NO: 332473
  Synthetic oligonucleotide

SEQ ID NO: 549697 - DNA, 58 bp, Artificial; identical to SEQ ID NO: 332474
  Synthetic oligonucleotide

SEQ ID NO: 549698 - DNA, 59 bp, Artificial; identical to SEQ ID NO: 332481
  Synthetic oligonucleotide

SEQ ID NO: 549699 - DNA, 58 bp, Artificial; identical to SEQ ID NO: 19633
  Synthetic oligonucleotide

SEQ ID NO: 549700 - DNA, 60 bp, Artificial; identical to SEQ ID NO: 332482
  Synthetic oligonucleotide

SEQ ID NO: 549701 - DNA, 51 bp, Artificial; identical to SEQ ID NO: 332483
  Synthetic oligonucleotide

SEQ ID NO: 549702 - DNA, 57 bp, Artificial; identical to SEQ ID NO: 332484
  Synthetic oligonucleotide

SEQ ID NO: 549703 - DNA, 52 bp, Artificial; identical to SEQ ID NO: 332487
  Synthetic oligonucleotide

SEQ ID NO: 549704 - DNA, 57 bp, Artificial; identical to SEQ ID NO: 332489
  Synthetic oligonucleotide

SEQ ID NO: 549705 - DNA, 60 bp, Artificial; identical to SEQ ID NO: 332491
  Synthetic oligonucleotide

SEQ ID NO: 549706 - DNA, 60 bp, Artificial; identical to SEQ ID NO: 332493
  Synthetic oligonucleotide

SEQ ID NO: 549707 - DNA, 52 bp, Artificial; identical to SEQ ID NO: 332495
  Synthetic oligonucleotide

SEQ ID NO: 549708 - DNA, 55 bp, Artificial; identical to SEQ ID NO: 332501
  Synthetic oligonucleotide

SEQ ID NO: 549709 - DNA, 60 bp, Artificial; identical to SEQ ID NO: 332506
  Synthetic oligonucleotide

SEQ ID NO: 549710 - DNA, 50 bp, Artificial; identical to SEQ ID NO: 332508
  Synthetic oligonucleotide

SEQ ID NO: 549711 - DNA, 60 bp, Artificial; identical to SEQ ID NO: 332510
  Synthetic oligonucleotide

SEQ ID NO: 549712 - DNA, 58 bp, Artificial; identical to SEQ ID NO: 332511
  Synthetic oligonucleotide

SEQ ID NO: 549713 - DNA, 52 bp, Artificial; identical to SEQ ID NO: 332512
  Synthetic oligonucleotide

SEQ ID NO: 549714 - DNA, 60 bp, Artificial; identical to SEQ ID NO: 332514
  Synthetic oligonucleotide

SEQ ID NO: 549715 - DNA, 54 bp, Artificial; identical to SEQ ID NO: 332518
  Synthetic oligonucleotide

SEQ ID NO: 549716 - DNA, 52 bp, Artificial; identical to SEQ ID NO: 332521
  Synthetic oligonucleotide

SEQ ID NO: 549717 - DNA, 60 bp, Artificial; identical to SEQ ID NO: 332522
  Synthetic oligonucleotide

SEQ ID NO: 549718 - DNA, 59 bp, Artificial; identical to SEQ ID NO: 332523
  Synthetic oligonucleotide

SEQ ID NO: 549719 - DNA, 51 bp, Artificial; identical to SEQ ID NO: 332525
  Synthetic oligonucleotide

SEQ ID NO: 549720 - DNA, 60 bp, Artificial; identical to SEQ ID NO: 332527
  Synthetic oligonucleotide

SEQ ID NO: 549721 - DNA, 60 bp, Artificial; identical to SEQ ID NO: 332528
  Synthetic oligonucleotide

SEQ ID NO: 549722 - DNA, 60 bp, Artificial; identical to SEQ ID NO: 332529
  Synthetic oligonucleotide

SEQ ID NO: 549723 - DNA, 58 bp, Artificial; identical to SEQ ID NO: 332530
  Synthetic oligonucleotide

SEQ ID NO: 549724 - DNA, 55 bp, Artificial; identical to SEQ ID NO: 332536
  Synthetic oligonucleotide

SEQ ID NO: 549725 - DNA, 60 bp, Artificial; identical to SEQ ID NO: 332537
  Synthetic oligonucleotide

SEQ ID NO: 549726 - DNA, 56 bp, Artificial; identical to SEQ ID NO: 332541
  Synthetic oligonucleotide

SEQ ID NO: 549727 - DNA, 59 bp, Artificial; identical to SEQ ID NO: 332544
  Synthetic oligonucleotide

SEQ ID NO: 549728 - DNA, 59 bp, Artificial; identical to SEQ ID NO: 332547
  Synthetic oligonucleotide

SEQ ID NO: 549729 - DNA, 57 bp, Artificial; identical to SEQ ID NO: 332548
  Synthetic oligonucleotide

SEQ ID NO: 549730 - DNA, 60 bp, Artificial; identical to SEQ ID NO: 332549
  Synthetic oligonucleotide

SEQ ID NO: 549731 - DNA, 55 bp, Artificial; identical to SEQ ID NO: 332555
  Synthetic oligonucleotide

SEQ ID NO: 549732 - DNA, 60 bp, Artificial; identical to SEQ ID NO: 332556
  Synthetic oligonucleotide

SEQ ID NO: 549733 - DNA, 51 bp, Artificial; identical to SEQ ID NO: 332557
  Synthetic oligonucleotide

SEQ ID NO: 549734 - DNA, 58 bp, Artificial; identical to SEQ ID NO: 332559
  Synthetic oligonucleotide

SEQ ID NO: 549735 - DNA, 58 bp, Artificial; identical to SEQ ID NO: 332561
  Synthetic oligonucleotide

SEQ ID NO: 549736 - DNA, 52 bp, Artificial; identical to SEQ ID NO: 332563
  Synthetic oligonucleotide

SEQ ID NO: 549737 - DNA, 60 bp, Artificial; identical to SEQ ID NO: 332565
  Synthetic oligonucleotide

SEQ ID NO: 549738 - DNA, 52 bp, Artificial; identical to SEQ ID NO: 332566
  Synthetic oligonucleotide

SEQ ID NO: 549739 - DNA, 56 bp, Artificial; identical to SEQ ID NO: 332571
  Synthetic oligonucleotide

SEQ ID NO: 549740 - DNA, 60 bp, Artificial; identical to SEQ ID NO: 332573
  Synthetic oligonucleotide

SEQ ID NO: 549741 - DNA, 55 bp, Artificial; identical to SEQ ID NO: 332575
  Synthetic oligonucleotide

SEQ ID NO: 549742 - DNA, 55 bp, Artificial; identical to SEQ ID NO: 332578
  Synthetic oligonucleotide

SEQ ID NO: 549743 - DNA, 55 bp, Artificial; identical to SEQ ID NO: 332579
  Synthetic oligonucleotide

SEQ ID NO: 549744 - DNA, 60 bp, Artificial; identical to SEQ ID NO: 332581
  Synthetic oligonucleotide

SEQ ID NO: 549745 - DNA, 54 bp, Artificial; identical to SEQ ID NO: 332584
  Synthetic oligonucleotide

SEQ ID NO: 549746 - DNA, 60 bp, Artificial; identical to SEQ ID NO: 15646
  Synthetic oligonucleotide

SEQ ID NO: 549747 - DNA, 56 bp, Artificial; identical to SEQ ID NO: 332592
  Synthetic oligonucleotide

SEQ ID NO: 549748 - DNA, 51 bp, Artificial; identical to SEQ ID NO: 332596
  Synthetic oligonucleotide

SEQ ID NO: 549749 - DNA, 59 bp, Artificial; identical to SEQ ID NO: 332598
  Synthetic oligonucleotide

SEQ ID NO: 549750 - DNA, 60 bp, Artificial; identical to SEQ ID NO: 332600
  Synthetic oligonucleotide

SEQ ID NO: 549751 - DNA, 58 bp, Artificial; identical to SEQ ID NO: 332602
  Synthetic oligonucleotide

SEQ ID NO: 549752 - DNA, 54 bp, Artificial; identical to SEQ ID NO: 332603
  Synthetic oligonucleotide

SEQ ID NO: 549753 - DNA, 59 bp, Artificial; identical to SEQ ID NO: 332604
  Synthetic oligonucleotide

SEQ ID NO: 549754 - DNA, 58 bp, Artificial; identical to SEQ ID NO: 332605
  Synthetic oligonucleotide

SEQ ID NO: 549755 - DNA, 60 bp, Artificial; identical to SEQ ID NO: 332609
  Synthetic oligonucleotide

SEQ ID NO: 549756 - DNA, 55 bp, Artificial; identical to SEQ ID NO: 332611
  Synthetic oligonucleotide

SEQ ID NO: 549757 - DNA, 60 bp, Artificial; identical to SEQ ID NO: 332613
  Synthetic oligonucleotide

SEQ ID NO: 549758 - DNA, 50 bp, Artificial; identical to SEQ ID NO: 332615
  Synthetic oligonucleotide

SEQ ID NO: 549759 - DNA, 60 bp, Artificial; identical to SEQ ID NO: 332618
  Synthetic oligonucleotide

SEQ ID NO: 549760 - DNA, 60 bp, Artificial; identical to SEQ ID NO: 332620
  Synthetic oligonucleotide

SEQ ID NO: 549761 - DNA, 55 bp, Artificial; identical to SEQ ID NO: 332623
  Synthetic oligonucleotide

SEQ ID NO: 549762 - DNA, 55 bp, Artificial; identical to SEQ ID NO: 332634
  Synthetic oligonucleotide

SEQ ID NO: 549763 - DNA, 58 bp, Artificial; identical to SEQ ID NO: 332639
  Synthetic oligonucleotide

SEQ ID NO: 549764 - DNA, 55 bp, Artificial; identical to SEQ ID NO: 332640
  Synthetic oligonucleotide

SEQ ID NO: 549765 - DNA, 60 bp, Artificial; identical to SEQ ID NO: 332644
  Synthetic oligonucleotide

SEQ ID NO: 549766 - DNA, 57 bp, Artificial; identical to SEQ ID NO: 332646
  Synthetic oligonucleotide

SEQ ID NO: 549767 - DNA, 53 bp, Artificial; identical to SEQ ID NO: 332648
  Synthetic oligonucleotide

SEQ ID NO: 549768 - DNA, 50 bp, Artificial; identical to SEQ ID NO: 11787
  Synthetic oligonucleotide

SEQ ID NO: 549769 - DNA, 53 bp, Artificial; identical to SEQ ID NO: 332654
  Synthetic oligonucleotide

SEQ ID NO: 549770 - DNA, 60 bp, Artificial; identical to SEQ ID NO: 332655
  Synthetic oligonucleotide

SEQ ID NO: 549771 - DNA, 55 bp, Artificial; identical to SEQ ID NO: 332658
  Synthetic oligonucleotide

SEQ ID NO: 549772 - DNA, 50 bp, Artificial; identical to SEQ ID NO: 332663
  Synthetic oligonucleotide

SEQ ID NO: 549773 - DNA, 56 bp, Artificial; identical to SEQ ID NO: 332664
  Synthetic oligonucleotide

SEQ ID NO: 549774 - DNA, 58 bp, Artificial; identical to SEQ ID NO: 332669
  Synthetic oligonucleotide

SEQ ID NO: 549775 - DNA, 58 bp, Artificial; identical to SEQ ID NO: 332670
  Synthetic oligonucleotide

SEQ ID NO: 549776 - DNA, 50 bp, Artificial; identical to SEQ ID NO: 332674
  Synthetic oligonucleotide

SEQ ID NO: 549777 - DNA, 60 bp, Artificial; identical to SEQ ID NO: 332677
  Synthetic oligonucleotide

SEQ ID NO: 549778 - DNA, 60 bp, Artificial; identical to SEQ ID NO: 332684
  Synthetic oligonucleotide

SEQ ID NO: 549779 - DNA, 57 bp, Artificial; identical to SEQ ID NO: 332689
  Synthetic oligonucleotide

SEQ ID NO: 549780 - DNA, 60 bp, Artificial; identical to SEQ ID NO: 332690
  Synthetic oligonucleotide

SEQ ID NO: 549781 - DNA, 53 bp, Artificial; identical to SEQ ID NO: 332691
  Synthetic oligonucleotide

SEQ ID NO: 549782 - DNA, 55 bp, Artificial; identical to SEQ ID NO: 332694
  Synthetic oligonucleotide

SEQ ID NO: 549783 - DNA, 60 bp, Artificial; identical to SEQ ID NO: 332697
  Synthetic oligonucleotide

SEQ ID NO: 549784 - DNA, 53 bp, Artificial; identical to SEQ ID NO: 332698
  Synthetic oligonucleotide

SEQ ID NO: 549785 - DNA, 55 bp, Artificial; identical to SEQ ID NO: 332700
  Synthetic oligonucleotide

SEQ ID NO: 549786 - DNA, 60 bp, Artificial; identical to SEQ ID NO: 332701
  Synthetic oligonucleotide

SEQ ID NO: 549787 - DNA, 54 bp, Artificial; identical to SEQ ID NO: 332702
  Synthetic oligonucleotide

SEQ ID NO: 549788 - DNA, 60 bp, Artificial; identical to SEQ ID NO: 332704
  Synthetic oligonucleotide

SEQ ID NO: 549789 - DNA, 53 bp, Artificial; identical to SEQ ID NO: 332708
  Synthetic oligonucleotide

SEQ ID NO: 549790 - DNA, 60 bp, Artificial; identical to SEQ ID NO: 332710
  Synthetic oligonucleotide

SEQ ID NO: 549791 - DNA, 60 bp, Artificial; identical to SEQ ID NO: 9349
  Synthetic oligonucleotide

SEQ ID NO: 549792 - DNA, 60 bp, Artificial; identical to SEQ ID NO: 332713
  Synthetic oligonucleotide

SEQ ID NO: 549793 - DNA, 51 bp, Artificial; identical to SEQ ID NO: 332714
  Synthetic oligonucleotide

SEQ ID NO: 549794 - DNA, 59 bp, Artificial; identical to SEQ ID NO: 332716
  Synthetic oligonucleotide

SEQ ID NO: 549795 - DNA, 60 bp, Artificial; identical to SEQ ID NO: 332724
  Synthetic oligonucleotide

SEQ ID NO: 549796 - DNA, 60 bp, Artificial; identical to SEQ ID NO: 332725
  Synthetic oligonucleotide

SEQ ID NO: 549797 - DNA, 52 bp, Artificial; identical to SEQ ID NO: 332728
  Synthetic oligonucleotide

SEQ ID NO: 549798 - DNA, 60 bp, Artificial; identical to SEQ ID NO: 332731
  Synthetic oligonucleotide

SEQ ID NO: 549799 - DNA, 57 bp, Artificial; identical to SEQ ID NO: 332736
  Synthetic oligonucleotide

SEQ ID NO: 549800 - DNA, 60 bp, Artificial; identical to SEQ ID NO: 13358
  Synthetic oligonucleotide

SEQ ID NO: 549801 - DNA, 55 bp, Artificial; identical to SEQ ID NO: 18835
  Synthetic oligonucleotide

SEQ ID NO: 549802 - DNA, 60 bp, Artificial; identical to SEQ ID NO: 332737
  Synthetic oligonucleotide

SEQ ID NO: 549803 - DNA, 56 bp, Artificial; identical to SEQ ID NO: 332738
  Synthetic oligonucleotide

SEQ ID NO: 549804 - DNA, 51 bp, Artificial; identical to SEQ ID NO: 332739
  Synthetic oligonucleotide

SEQ ID NO: 549805 - DNA, 55 bp, Artificial; identical to SEQ ID NO: 18117
  Synthetic oligonucleotide

SEQ ID NO: 549806 - DNA, 60 bp, Artificial; identical to SEQ ID NO: 332743
  Synthetic oligonucleotide

SEQ ID NO: 549807 - DNA, 60 bp, Artificial; identical to SEQ ID NO: 332745
  Synthetic oligonucleotide

SEQ ID NO: 549808 - DNA, 60 bp, Artificial; identical to SEQ ID NO: 332751
  Synthetic oligonucleotide

SEQ ID NO: 549809 - DNA, 60 bp, Artificial; identical to SEQ ID NO: 332752
  Synthetic oligonucleotide

SEQ ID NO: 549810 - DNA, 60 bp, Artificial; identical to SEQ ID NO: 332754
  Synthetic oligonucleotide

SEQ ID NO: 549811 - DNA, 58 bp, Artificial; identical to SEQ ID NO: 332756
  Synthetic oligonucleotide

SEQ ID NO: 549812 - DNA, 58 bp, Artificial; identical to SEQ ID NO: 332757
  Synthetic oligonucleotide

SEQ ID NO: 549813 - DNA, 59 bp, Artificial; identical to SEQ ID NO: 332761
  Synthetic oligonucleotide

SEQ ID NO: 549814 - DNA, 60 bp, Artificial; identical to SEQ ID NO: 332765
  Synthetic oligonucleotide

SEQ ID NO: 549815 - DNA, 60 bp, Artificial; identical to SEQ ID NO: 332771
  Synthetic oligonucleotide

SEQ ID NO: 549816 - DNA, 60 bp, Artificial; identical to SEQ ID NO: 332772
  Synthetic oligonucleotide

SEQ ID NO: 549817 - DNA, 54 bp, Artificial; identical to SEQ ID NO: 332774
  Synthetic oligonucleotide

SEQ ID NO: 549818 - DNA, 59 bp, Artificial; identical to SEQ ID NO: 332775
  Synthetic oligonucleotide

SEQ ID NO: 549819 - DNA, 60 bp, Artificial; identical to SEQ ID NO: 332777
  Synthetic oligonucleotide

SEQ ID NO: 549820 - DNA, 60 bp, Artificial; identical to SEQ ID NO: 332780
  Synthetic oligonucleotide

SEQ ID NO: 549821 - DNA, 54 bp, Artificial; identical to SEQ ID NO: 10712
  Synthetic oligonucleotide

SEQ ID NO: 549822 - DNA, 50 bp, Artificial; identical to SEQ ID NO: 332785
  Synthetic oligonucleotide

SEQ ID NO: 549823 - DNA, 55 bp, Artificial; identical to SEQ ID NO: 332790
  Synthetic oligonucleotide

SEQ ID NO: 549824 - DNA, 60 bp, Artificial; identical to SEQ ID NO: 332791
  Synthetic oligonucleotide

SEQ ID NO: 549825 - DNA, 55 bp, Artificial; identical to SEQ ID NO: 332795
  Synthetic oligonucleotide

SEQ ID NO: 549826 - DNA, 60 bp, Artificial; identical to SEQ ID NO: 332799
  Synthetic oligonucleotide

SEQ ID NO: 549827 - DNA, 53 bp, Artificial; identical to SEQ ID NO: 332801
  Synthetic oligonucleotide

SEQ ID NO: 549828 - DNA, 54 bp, Artificial; identical to SEQ ID NO: 332805
  Synthetic oligonucleotide

SEQ ID NO: 549829 - DNA, 54 bp, Artificial; identical to SEQ ID NO: 332807
  Synthetic oligonucleotide

SEQ ID NO: 549830 - DNA, 55 bp, Artificial; identical to SEQ ID NO: 332809
  Synthetic oligonucleotide

SEQ ID NO: 549831 - DNA, 55 bp, Artificial; identical to SEQ ID NO: 332810
  Synthetic oligonucleotide

SEQ ID NO: 549832 - DNA, 55 bp, Artificial; identical to SEQ ID NO: 332811
  Synthetic oligonucleotide

SEQ ID NO: 549833 - DNA, 60 bp, Artificial; identical to SEQ ID NO: 332813
  Synthetic oligonucleotide

SEQ ID NO: 549834 - DNA, 52 bp, Artificial; identical to SEQ ID NO: 332815
  Synthetic oligonucleotide

SEQ ID NO: 549835 - DNA, 53 bp, Artificial; identical to SEQ ID NO: 332817
  Synthetic oligonucleotide

SEQ ID NO: 549836 - DNA, 56 bp, Artificial; identical to SEQ ID NO: 332819
  Synthetic oligonucleotide

SEQ ID NO: 549837 - DNA, 52 bp, Artificial; identical to SEQ ID NO: 332820
  Synthetic oligonucleotide

SEQ ID NO: 549838 - DNA, 60 bp, Artificial; identical to SEQ ID NO: 332821
  Synthetic oligonucleotide

SEQ ID NO: 549839 - DNA, 56 bp, Artificial; identical to SEQ ID NO: 332825
  Synthetic oligonucleotide

SEQ ID NO: 549840 - DNA, 60 bp, Artificial; identical to SEQ ID NO: 332827
  Synthetic oligonucleotide

SEQ ID NO: 549841 - DNA, 59 bp, Artificial; identical to SEQ ID NO: 332835
  Synthetic oligonucleotide

SEQ ID NO: 549842 - DNA, 60 bp, Artificial; identical to SEQ ID NO: 332836
  Synthetic oligonucleotide

SEQ ID NO: 549843 - DNA, 60 bp, Artificial; identical to SEQ ID NO: 332838
  Synthetic oligonucleotide

SEQ ID NO: 549844 - DNA, 58 bp, Artificial; identical to SEQ ID NO: 332840
  Synthetic oligonucleotide

SEQ ID NO: 549845 - DNA, 60 bp, Artificial; identical to SEQ ID NO: 332841
  Synthetic oligonucleotide

SEQ ID NO: 549846 - DNA, 60 bp, Artificial; identical to SEQ ID NO: 332842
  Synthetic oligonucleotide

SEQ ID NO: 549847 - DNA, 55 bp, Artificial; identical to SEQ ID NO: 332843
  Synthetic oligonucleotide

SEQ ID NO: 549848 - DNA, 55 bp, Artificial; identical to SEQ ID NO: 332844
  Synthetic oligonucleotide

SEQ ID NO: 549849 - DNA, 55 bp, Artificial; identical to SEQ ID NO: 332847
  Synthetic oligonucleotide

SEQ ID NO: 549850 - DNA, 55 bp, Artificial; identical to SEQ ID NO: 332849
  Synthetic oligonucleotide

SEQ ID NO: 549851 - DNA, 57 bp, Artificial; identical to SEQ ID NO: 332851
  Synthetic oligonucleotide

SEQ ID NO: 549852 - DNA, 58 bp, Artificial; identical to SEQ ID NO: 332853
  Synthetic oligonucleotide

SEQ ID NO: 549853 - DNA, 52 bp, Artificial; identical to SEQ ID NO: 332854
  Synthetic oligonucleotide

SEQ ID NO: 549854 - DNA, 50 bp, Artificial; identical to SEQ ID NO: 332855
  Synthetic oligonucleotide

SEQ ID NO: 549855 - DNA, 54 bp, Artificial; identical to SEQ ID NO: 332857
  Synthetic oligonucleotide

SEQ ID NO: 549856 - DNA, 60 bp, Artificial; identical to SEQ ID NO: 332858
  Synthetic oligonucleotide

SEQ ID NO: 549857 - DNA, 58 bp, Artificial; identical to SEQ ID NO: 332862
  Synthetic oligonucleotide

SEQ ID NO: 549858 - DNA, 54 bp, Artificial; identical to SEQ ID NO: 332864
  Synthetic oligonucleotide

SEQ ID NO: 549859 - DNA, 55 bp, Artificial; identical to SEQ ID NO: 332866
  Synthetic oligonucleotide

SEQ ID NO: 549860 - DNA, 60 bp, Artificial; identical to SEQ ID NO: 332867
  Synthetic oligonucleotide

SEQ ID NO: 549861 - DNA, 55 bp, Artificial; identical to SEQ ID NO: 332870
  Synthetic oligonucleotide

SEQ ID NO: 549862 - DNA, 56 bp, Artificial; identical to SEQ ID NO: 332872
  Synthetic oligonucleotide

SEQ ID NO: 549863 - DNA, 55 bp, Artificial; identical to SEQ ID NO: 12878
  Synthetic oligonucleotide

SEQ ID NO: 549864 - DNA, 54 bp, Artificial; identical to SEQ ID NO: 332875
  Synthetic oligonucleotide

SEQ ID NO: 549865 - DNA, 51 bp, Artificial; identical to SEQ ID NO: 332877
  Synthetic oligonucleotide

SEQ ID NO: 549866 - DNA, 56 bp, Artificial; identical to SEQ ID NO: 332878
  Synthetic oligonucleotide

SEQ ID NO: 549867 - DNA, 60 bp, Artificial; identical to SEQ ID NO: 332879
  Synthetic oligonucleotide

SEQ ID NO: 549868 - DNA, 50 bp, Artificial; identical to SEQ ID NO: 332880
  Synthetic oligonucleotide

SEQ ID NO: 549869 - DNA, 56 bp, Artificial; identical to SEQ ID NO: 332881
  Synthetic oligonucleotide

SEQ ID NO: 549870 - DNA, 59 bp, Artificial; identical to SEQ ID NO: 332887
  Synthetic oligonucleotide

SEQ ID NO: 549871 - DNA, 49 bp, Artificial; identical to SEQ ID NO: 332888
  Synthetic oligonucleotide

SEQ ID NO: 549872 - DNA, 60 bp, Artificial; identical to SEQ ID NO: 332890
  Synthetic oligonucleotide

SEQ ID NO: 549873 - DNA, 55 bp, Artificial; identical to SEQ ID NO: 332891
  Synthetic oligonucleotide

SEQ ID NO: 549874 - DNA, 55 bp, Artificial; identical to SEQ ID NO: 332893
  Synthetic oligonucleotide

SEQ ID NO: 549875 - DNA, 58 bp, Artificial; identical to SEQ ID NO: 332895
  Synthetic oligonucleotide

SEQ ID NO: 549876 - DNA, 58 bp, Artificial; identical to SEQ ID NO: 332900
  Synthetic oligonucleotide

SEQ ID NO: 549877 - DNA, 57 bp, Artificial; identical to SEQ ID NO: 332911
  Synthetic oligonucleotide

SEQ ID NO: 549878 - DNA, 60 bp, Artificial; identical to SEQ ID NO: 332912
  Synthetic oligonucleotide

SEQ ID NO: 549879 - DNA, 51 bp, Artificial; identical to SEQ ID NO: 332913
  Synthetic oligonucleotide

SEQ ID NO: 549880 - DNA, 60 bp, Artificial; identical to SEQ ID NO: 332914
  Synthetic oligonucleotide

SEQ ID NO: 549881 - DNA, 57 bp, Artificial; identical to SEQ ID NO: 332916
  Synthetic oligonucleotide

SEQ ID NO: 549882 - DNA, 53 bp, Artificial; identical to SEQ ID NO: 332918
  Synthetic oligonucleotide

SEQ ID NO: 549883 - DNA, 60 bp, Artificial; identical to SEQ ID NO: 332919
  Synthetic oligonucleotide

SEQ ID NO: 549884 - DNA, 60 bp, Artificial; identical to SEQ ID NO: 332920
  Synthetic oligonucleotide

SEQ ID NO: 549885 - DNA, 60 bp, Artificial; identical to SEQ ID NO: 332923
  Synthetic oligonucleotide

SEQ ID NO: 549886 - DNA, 59 bp, Artificial; identical to SEQ ID NO: 10866
  Synthetic oligonucleotide

SEQ ID NO: 549887 - DNA, 60 bp, Artificial; identical to SEQ ID NO: 332924
  Synthetic oligonucleotide

SEQ ID NO: 549888 - DNA, 60 bp, Artificial; identical to SEQ ID NO: 332926
  Synthetic oligonucleotide

SEQ ID NO: 549889 - DNA, 60 bp, Artificial; identical to SEQ ID NO: 332927
  Synthetic oligonucleotide

SEQ ID NO: 549890 - DNA, 55 bp, Artificial; identical to SEQ ID NO: 332929
  Synthetic oligonucleotide

SEQ ID NO: 549891 - DNA, 55 bp, Artificial; identical to SEQ ID NO: 332932
  Synthetic oligonucleotide

SEQ ID NO: 549892 - DNA, 54 bp, Artificial; identical to SEQ ID NO: 332935
  Synthetic oligonucleotide

SEQ ID NO: 549893 - DNA, 55 bp, Artificial; identical to SEQ ID NO: 332936
  Synthetic oligonucleotide

SEQ ID NO: 549894 - DNA, 52 bp, Artificial; identical to SEQ ID NO: 332943
  Synthetic oligonucleotide

SEQ ID NO: 549895 - DNA, 57 bp, Artificial; identical to SEQ ID NO: 332947
  Synthetic oligonucleotide

SEQ ID NO: 549896 - DNA, 55 bp, Artificial; identical to SEQ ID NO: 332948
  Synthetic oligonucleotide

SEQ ID NO: 549897 - DNA, 55 bp, Artificial; identical to SEQ ID NO: 332954
  Synthetic oligonucleotide

SEQ ID NO: 549898 - DNA, 55 bp, Artificial; identical to SEQ ID NO: 19483
  Synthetic oligonucleotide

SEQ ID NO: 549899 - DNA, 57 bp, Artificial; identical to SEQ ID NO: 16555
  Synthetic oligonucleotide

SEQ ID NO: 549900 - DNA, 60 bp, Artificial; identical to SEQ ID NO: 332957
  Synthetic oligonucleotide

SEQ ID NO: 549901 - DNA, 59 bp, Artificial; identical to SEQ ID NO: 332962
  Synthetic oligonucleotide

SEQ ID NO: 549902 - DNA, 55 bp, Artificial; identical to SEQ ID NO: 332963
  Synthetic oligonucleotide

SEQ ID NO: 549903 - DNA, 60 bp, Artificial; identical to SEQ ID NO: 332964
  Synthetic oligonucleotide

SEQ ID NO: 549904 - DNA, 55 bp, Artificial; identical to SEQ ID NO: 332965
  Synthetic oligonucleotide

SEQ ID NO: 549905 - DNA, 52 bp, Artificial; identical to SEQ ID NO: 332967
  Synthetic oligonucleotide

SEQ ID NO: 549906 - DNA, 57 bp, Artificial; identical to SEQ ID NO: 332970
  Synthetic oligonucleotide

SEQ ID NO: 549907 - DNA, 52 bp, Artificial; identical to SEQ ID NO: 332973
  Synthetic oligonucleotide

SEQ ID NO: 549908 - DNA, 55 bp, Artificial; identical to SEQ ID NO: 332979
  Synthetic oligonucleotide

SEQ ID NO: 549909 - DNA, 52 bp, Artificial; identical to SEQ ID NO: 332980
  Synthetic oligonucleotide

SEQ ID NO: 549910 - DNA, 56 bp, Artificial; identical to SEQ ID NO: 332981
  Synthetic oligonucleotide

SEQ ID NO: 549911 - DNA, 59 bp, Artificial; identical to SEQ ID NO: 332982
  Synthetic oligonucleotide

SEQ ID NO: 549912 - DNA, 51 bp, Artificial; identical to SEQ ID NO: 332983
  Synthetic oligonucleotide

SEQ ID NO: 549913 - DNA, 51 bp, Artificial; identical to SEQ ID NO: 332988
  Synthetic oligonucleotide

SEQ ID NO: 549914 - DNA, 60 bp, Artificial; identical to SEQ ID NO: 332999
  Synthetic oligonucleotide

SEQ ID NO: 549915 - DNA, 59 bp, Artificial; identical to SEQ ID NO: 333000
  Synthetic oligonucleotide

SEQ ID NO: 549916 - DNA, 60 bp, Artificial; identical to SEQ ID NO: 333001
  Synthetic oligonucleotide

SEQ ID NO: 549917 - DNA, 55 bp, Artificial; identical to SEQ ID NO: 333002
  Synthetic oligonucleotide

SEQ ID NO: 549918 - DNA, 50 bp, Artificial; identical to SEQ ID NO: 333003
  Synthetic oligonucleotide

SEQ ID NO: 549919 - DNA, 55 bp, Artificial; identical to SEQ ID NO: 333005
  Synthetic oligonucleotide

SEQ ID NO: 549920 - DNA, 54 bp, Artificial; identical to SEQ ID NO: 333007
  Synthetic oligonucleotide

SEQ ID NO: 549921 - DNA, 60 bp, Artificial; identical to SEQ ID NO: 333009
  Synthetic oligonucleotide

SEQ ID NO: 549922 - DNA, 60 bp, Artificial; identical to SEQ ID NO: 333010
  Synthetic oligonucleotide

SEQ ID NO: 549923 - DNA, 54 bp, Artificial; identical to SEQ ID NO: 333011
  Synthetic oligonucleotide

SEQ ID NO: 549924 - DNA, 54 bp, Artificial; identical to SEQ ID NO: 333015
  Synthetic oligonucleotide

SEQ ID NO: 549925 - DNA, 60 bp, Artificial; identical to SEQ ID NO: 333017
  Synthetic oligonucleotide

SEQ ID NO: 549926 - DNA, 57 bp, Artificial; identical to SEQ ID NO: 333019
  Synthetic oligonucleotide

SEQ ID NO: 549927 - DNA, 57 bp, Artificial; identical to SEQ ID NO: 19705
  Synthetic oligonucleotide

SEQ ID NO: 549928 - DNA, 57 bp, Artificial; identical to SEQ ID NO: 333021
  Synthetic oligonucleotide

SEQ ID NO: 549929 - DNA, 56 bp, Artificial; identical to SEQ ID NO: 333023
  Synthetic oligonucleotide

SEQ ID NO: 549930 - DNA, 60 bp, Artificial; identical to SEQ ID NO: 333025
  Synthetic oligonucleotide

SEQ ID NO: 549931 - DNA, 52 bp, Artificial; identical to SEQ ID NO: 333026
  Synthetic oligonucleotide

SEQ ID NO: 549932 - DNA, 55 bp, Artificial; identical to SEQ ID NO: 333027
  Synthetic oligonucleotide

SEQ ID NO: 549933 - DNA, 53 bp, Artificial; identical to SEQ ID NO: 333029
  Synthetic oligonucleotide

SEQ ID NO: 549934 - DNA, 55 bp, Artificial; identical to SEQ ID NO: 333032
  Synthetic oligonucleotide

SEQ ID NO: 549935 - DNA, 53 bp, Artificial; identical to SEQ ID NO: 16343
  Synthetic oligonucleotide

SEQ ID NO: 549936 - DNA, 60 bp, Artificial; identical to SEQ ID NO: 333034
  Synthetic oligonucleotide

SEQ ID NO: 549937 - DNA, 60 bp, Artificial; identical to SEQ ID NO: 333035
  Synthetic oligonucleotide

SEQ ID NO: 549938 - DNA, 51 bp, Artificial; identical to SEQ ID NO: 333036
  Synthetic oligonucleotide

SEQ ID NO: 549939 - DNA, 60 bp, Artificial; identical to SEQ ID NO: 333037
  Synthetic oligonucleotide

SEQ ID NO: 549940 - DNA, 60 bp, Artificial; identical to SEQ ID NO: 333038
  Synthetic oligonucleotide

SEQ ID NO: 549941 - DNA, 60 bp, Artificial; identical to SEQ ID NO: 333041
  Synthetic oligonucleotide

SEQ ID NO: 549942 - DNA, 60 bp, Artificial; identical to SEQ ID NO: 333042
  Synthetic oligonucleotide

SEQ ID NO: 549943 - DNA, 60 bp, Artificial; identical to SEQ ID NO: 333046
  Synthetic oligonucleotide

SEQ ID NO: 549944 - DNA, 60 bp, Artificial; identical to SEQ ID NO: 333051
  Synthetic oligonucleotide

SEQ ID NO: 549945 - DNA, 59 bp, Artificial; identical to SEQ ID NO: 333052
  Synthetic oligonucleotide

SEQ ID NO: 549946 - DNA, 60 bp, Artificial; identical to SEQ ID NO: 333053
  Synthetic oligonucleotide

SEQ ID NO: 549947 - DNA, 56 bp, Artificial; identical to SEQ ID NO: 333054
  Synthetic oligonucleotide

SEQ ID NO: 549948 - DNA, 60 bp, Artificial; identical to SEQ ID NO: 333055
  Synthetic oligonucleotide

SEQ ID NO: 549949 - DNA, 60 bp, Artificial; identical to SEQ ID NO: 333058
  Synthetic oligonucleotide

SEQ ID NO: 549950 - DNA, 56 bp, Artificial; identical to SEQ ID NO: 333063
  Synthetic oligonucleotide

SEQ ID NO: 549951 - DNA, 58 bp, Artificial; identical to SEQ ID NO: 333064
  Synthetic oligonucleotide

SEQ ID NO: 549952 - DNA, 58 bp, Artificial; identical to SEQ ID NO: 333065
  Synthetic oligonucleotide

SEQ ID NO: 549953 - DNA, 55 bp, Artificial; identical to SEQ ID NO: 333069
  Synthetic oligonucleotide

SEQ ID NO: 549954 - DNA, 60 bp, Artificial; identical to SEQ ID NO: 333070
  Synthetic oligonucleotide

SEQ ID NO: 549955 - DNA, 54 bp, Artificial; identical to SEQ ID NO: 333071
  Synthetic oligonucleotide

SEQ ID NO: 549956 - DNA, 56 bp, Artificial; identical to SEQ ID NO: 333072
  Synthetic oligonucleotide

SEQ ID NO: 549957 - DNA, 54 bp, Artificial; identical to SEQ ID NO: 333073
  Synthetic oligonucleotide

SEQ ID NO: 549958 - DNA, 60 bp, Artificial; identical to SEQ ID NO: 333078
  Synthetic oligonucleotide

SEQ ID NO: 549959 - DNA, 60 bp, Artificial; identical to SEQ ID NO: 333082
  Synthetic oligonucleotide

SEQ ID NO: 549960 - DNA, 53 bp, Artificial; identical to SEQ ID NO: 333084
  Synthetic oligonucleotide

SEQ ID NO: 549961 - DNA, 56 bp, Artificial; identical to SEQ ID NO: 333087
  Synthetic oligonucleotide

SEQ ID NO: 549962 - DNA, 57 bp, Artificial; identical to SEQ ID NO: 333089
  Synthetic oligonucleotide

SEQ ID NO: 549963 - DNA, 55 bp, Artificial; identical to SEQ ID NO: 333090
  Synthetic oligonucleotide

SEQ ID NO: 549964 - DNA, 58 bp, Artificial; identical to SEQ ID NO: 333092
  Synthetic oligonucleotide

SEQ ID NO: 549965 - DNA, 60 bp, Artificial; identical to SEQ ID NO: 333094
  Synthetic oligonucleotide

SEQ ID NO: 549966 - DNA, 60 bp, Artificial; identical to SEQ ID NO: 333097
  Synthetic oligonucleotide

SEQ ID NO: 549967 - DNA, 60 bp, Artificial; identical to SEQ ID NO: 333098
  Synthetic oligonucleotide

SEQ ID NO: 549968 - DNA, 54 bp, Artificial; identical to SEQ ID NO: 333104
  Synthetic oligonucleotide

SEQ ID NO: 549969 - DNA, 54 bp, Artificial; identical to SEQ ID NO: 333105
  Synthetic oligonucleotide

SEQ ID NO: 549970 - DNA, 56 bp, Artificial; identical to SEQ ID NO: 333106
  Synthetic oligonucleotide

SEQ ID NO: 549971 - DNA, 57 bp, Artificial; identical to SEQ ID NO: 333107
  Synthetic oligonucleotide

SEQ ID NO: 549972 - DNA, 60 bp, Artificial; identical to SEQ ID NO: 333108
  Synthetic oligonucleotide

SEQ ID NO: 549973 - DNA, 60 bp, Artificial; identical to SEQ ID NO: 333113
  Synthetic oligonucleotide

SEQ ID NO: 549974 - DNA, 51 bp, Artificial; identical to SEQ ID NO: 333117
  Synthetic oligonucleotide

SEQ ID NO: 549975 - DNA, 60 bp, Artificial; identical to SEQ ID NO: 333120
  Synthetic oligonucleotide

SEQ ID NO: 549976 - DNA, 57 bp, Artificial; identical to SEQ ID NO: 333123
  Synthetic oligonucleotide

SEQ ID NO: 549977 - DNA, 52 bp, Artificial; identical to SEQ ID NO: 333126
  Synthetic oligonucleotide

SEQ ID NO: 549978 - DNA, 60 bp, Artificial; identical to SEQ ID NO: 333128
  Synthetic oligonucleotide

SEQ ID NO: 549979 - DNA, 60 bp, Artificial; identical to SEQ ID NO: 11197
  Synthetic oligonucleotide

SEQ ID NO: 549980 - DNA, 56 bp, Artificial; identical to SEQ ID NO: 333133
  Synthetic oligonucleotide

SEQ ID NO: 549981 - DNA, 56 bp, Artificial; identical to SEQ ID NO: 333136
  Synthetic oligonucleotide

SEQ ID NO: 549982 - DNA, 60 bp, Artificial; identical to SEQ ID NO: 333137
  Synthetic oligonucleotide

SEQ ID NO: 549983 - DNA, 50 bp, Artificial; identical to SEQ ID NO: 333141
  Synthetic oligonucleotide

SEQ ID NO: 549984 - DNA, 51 bp, Artificial; identical to SEQ ID NO: 333142
  Synthetic oligonucleotide

SEQ ID NO: 549985 - DNA, 60 bp, Artificial; identical to SEQ ID NO: 333144
  Synthetic oligonucleotide

SEQ ID NO: 549986 - DNA, 55 bp, Artificial; identical to SEQ ID NO: 333145
  Synthetic oligonucleotide

SEQ ID NO: 549987 - DNA, 60 bp, Artificial; identical to SEQ ID NO: 333146
  Synthetic oligonucleotide

SEQ ID NO: 549988 - DNA, 54 bp, Artificial; identical to SEQ ID NO: 333147
  Synthetic oligonucleotide

SEQ ID NO: 549989 - DNA, 51 bp, Artificial; identical to SEQ ID NO: 333151
  Synthetic oligonucleotide

SEQ ID NO: 549990 - DNA, 58 bp, Artificial; identical to SEQ ID NO: 333152
  Synthetic oligonucleotide

SEQ ID NO: 549991 - DNA, 55 bp, Artificial; identical to SEQ ID NO: 333153
  Synthetic oligonucleotide

SEQ ID NO: 549992 - DNA, 58 bp, Artificial; identical to SEQ ID NO: 333155
  Synthetic oligonucleotide

SEQ ID NO: 549993 - DNA, 59 bp, Artificial; identical to SEQ ID NO: 333156
  Synthetic oligonucleotide

SEQ ID NO: 549994 - DNA, 55 bp, Artificial; identical to SEQ ID NO: 333160
  Synthetic oligonucleotide

SEQ ID NO: 549995 - DNA, 60 bp, Artificial; identical to SEQ ID NO: 333161
  Synthetic oligonucleotide

SEQ ID NO: 549996 - DNA, 60 bp, Artificial; identical to SEQ ID NO: 333164
  Synthetic oligonucleotide

SEQ ID NO: 549997 - DNA, 60 bp, Artificial; identical to SEQ ID NO: 333166
  Synthetic oligonucleotide

SEQ ID NO: 549998 - DNA, 60 bp, Artificial; identical to SEQ ID NO: 333167
  Synthetic oligonucleotide

SEQ ID NO: 549999 - DNA, 60 bp, Artificial; identical to SEQ ID NO: 333168
  Synthetic oligonucleotide

SEQ ID NO: 550000 - DNA, 60 bp, Artificial; identical to SEQ ID NO: 78774
  Synthetic oligonucleotide

SEQ ID NO: 550001 - DNA, 60 bp, Artificial; identical to SEQ ID NO: 333169
  Synthetic oligonucleotide

SEQ ID NO: 550002 - DNA, 60 bp, Artificial; identical to SEQ ID NO: 333170
  Synthetic oligonucleotide

SEQ ID NO: 550003 - DNA, 60 bp, Artificial; identical to SEQ ID NO: 333171
  Synthetic oligonucleotide

SEQ ID NO: 550004 - DNA, 57 bp, Artificial; identical to SEQ ID NO: 333172
  Synthetic oligonucleotide

SEQ ID NO: 550005 - DNA, 60 bp, Artificial; identical to SEQ ID NO: 333174
  Synthetic oligonucleotide

SEQ ID NO: 550006 - DNA, 60 bp, Artificial; identical to SEQ ID NO: 333176
  Synthetic oligonucleotide

SEQ ID NO: 550007 - DNA, 55 bp, Artificial; identical to SEQ ID NO: 333179
  Synthetic oligonucleotide

SEQ ID NO: 550008 - DNA, 60 bp, Artificial; identical to SEQ ID NO: 333180
  Synthetic oligonucleotide

SEQ ID NO: 550009 - DNA, 55 bp, Artificial; identical to SEQ ID NO: 333181
  Synthetic oligonucleotide

SEQ ID NO: 550010 - DNA, 60 bp, Artificial; identical to SEQ ID NO: 333185
  Synthetic oligonucleotide

SEQ ID NO: 550011 - DNA, 58 bp, Artificial; identical to SEQ ID NO: 333187
  Synthetic oligonucleotide

SEQ ID NO: 550012 - DNA, 57 bp, Artificial; identical to SEQ ID NO: 333190
  Synthetic oligonucleotide

SEQ ID NO: 550013 - DNA, 60 bp, Artificial; identical to SEQ ID NO: 333191
  Synthetic oligonucleotide

SEQ ID NO: 550014 - DNA, 52 bp, Artificial; identical to SEQ ID NO: 333193
  Synthetic oligonucleotide

SEQ ID NO: 550015 - DNA, 60 bp, Artificial; identical to SEQ ID NO: 333195
  Synthetic oligonucleotide

SEQ ID NO: 550016 - DNA, 54 bp, Artificial; identical to SEQ ID NO: 333196
  Synthetic oligonucleotide

SEQ ID NO: 550017 - DNA, 60 bp, Artificial; identical to SEQ ID NO: 333197
  Synthetic oligonucleotide

SEQ ID NO: 550018 - DNA, 60 bp, Artificial; identical to SEQ ID NO: 333200
  Synthetic oligonucleotide

SEQ ID NO: 550019 - DNA, 54 bp, Artificial; identical to SEQ ID NO: 333201
  Synthetic oligonucleotide

SEQ ID NO: 550020 - DNA, 50 bp, Artificial; identical to SEQ ID NO: 333203
  Synthetic oligonucleotide

SEQ ID NO: 550021 - DNA, 50 bp, Artificial; identical to SEQ ID NO: 333204
  Synthetic oligonucleotide

SEQ ID NO: 550022 - DNA, 60 bp, Artificial; identical to SEQ ID NO: 333208
  Synthetic oligonucleotide

SEQ ID NO: 550023 - DNA, 57 bp, Artificial; identical to SEQ ID NO: 333209
  Synthetic oligonucleotide

SEQ ID NO: 550024 - DNA, 60 bp, Artificial; identical to SEQ ID NO: 333211
  Synthetic oligonucleotide

SEQ ID NO: 550025 - DNA, 59 bp, Artificial; identical to SEQ ID NO: 333212
  Synthetic oligonucleotide

SEQ ID NO: 550026 - DNA, 58 bp, Artificial; identical to SEQ ID NO: 333215
  Synthetic oligonucleotide

SEQ ID NO: 550027 - DNA, 51 bp, Artificial; identical to SEQ ID NO: 333218
  Synthetic oligonucleotide

SEQ ID NO: 550028 - DNA, 53 bp, Artificial; identical to SEQ ID NO: 333219
  Synthetic oligonucleotide

SEQ ID NO: 550029 - DNA, 55 bp, Artificial; identical to SEQ ID NO: 333225
  Synthetic oligonucleotide

SEQ ID NO: 550030 - DNA, 60 bp, Artificial; identical to SEQ ID NO: 333227
  Synthetic oligonucleotide

SEQ ID NO: 550031 - DNA, 60 bp, Artificial; identical to SEQ ID NO: 333233
  Synthetic oligonucleotide

SEQ ID NO: 550032 - DNA, 55 bp, Artificial; identical to SEQ ID NO: 333237
  Synthetic oligonucleotide

SEQ ID NO: 550033 - DNA, 60 bp, Artificial; identical to SEQ ID NO: 333239
  Synthetic oligonucleotide

SEQ ID NO: 550034 - DNA, 54 bp, Artificial; identical to SEQ ID NO: 333240
  Synthetic oligonucleotide

SEQ ID NO: 550035 - DNA, 59 bp, Artificial; identical to SEQ ID NO: 333242
  Synthetic oligonucleotide

SEQ ID NO: 550036 - DNA, 55 bp, Artificial; identical to SEQ ID NO: 333248
  Synthetic oligonucleotide

SEQ ID NO: 550037 - DNA, 60 bp, Artificial; identical to SEQ ID NO: 333250
  Synthetic oligonucleotide

SEQ ID NO: 550038 - DNA, 57 bp, Artificial; identical to SEQ ID NO: 333252
  Synthetic oligonucleotide

SEQ ID NO: 550039 - DNA, 50 bp, Artificial; identical to SEQ ID NO: 333254
  Synthetic oligonucleotide

SEQ ID NO: 550040 - DNA, 55 bp, Artificial; identical to SEQ ID NO: 333259
  Synthetic oligonucleotide

SEQ ID NO: 550041 - DNA, 60 bp, Artificial; identical to SEQ ID NO: 333261
  Synthetic oligonucleotide

SEQ ID NO: 550042 - DNA, 55 bp, Artificial; identical to SEQ ID NO: 333262
  Synthetic oligonucleotide

SEQ ID NO: 550043 - DNA, 60 bp, Artificial; identical to SEQ ID NO: 333267
  Synthetic oligonucleotide

SEQ ID NO: 550044 - DNA, 55 bp, Artificial; identical to SEQ ID NO: 333272
  Synthetic oligonucleotide

SEQ ID NO: 550045 - DNA, 53 bp, Artificial; identical to SEQ ID NO: 333273
  Synthetic oligonucleotide

SEQ ID NO: 550046 - DNA, 54 bp, Artificial; identical to SEQ ID NO: 333274
  Synthetic oligonucleotide

SEQ ID NO: 550047 - DNA, 60 bp, Artificial; identical to SEQ ID NO: 333275
  Synthetic oligonucleotide

SEQ ID NO: 550048 - DNA, 60 bp, Artificial; identical to SEQ ID NO: 333277
  Synthetic oligonucleotide

SEQ ID NO: 550049 - DNA, 57 bp, Artificial; identical to SEQ ID NO: 333279
  Synthetic oligonucleotide

SEQ ID NO: 550050 - DNA, 52 bp, Artificial; identical to SEQ ID NO: 333281
  Synthetic oligonucleotide

SEQ ID NO: 550051 - DNA, 60 bp, Artificial; identical to SEQ ID NO: 333282
  Synthetic oligonucleotide

SEQ ID NO: 550052 - DNA, 59 bp, Artificial; identical to SEQ ID NO: 333294
  Synthetic oligonucleotide

SEQ ID NO: 550053 - DNA, 55 bp, Artificial; identical to SEQ ID NO: 333296
  Synthetic oligonucleotide

SEQ ID NO: 550054 - DNA, 60 bp, Artificial; identical to SEQ ID NO: 333298
  Synthetic oligonucleotide

SEQ ID NO: 550055 - DNA, 55 bp, Artificial; identical to SEQ ID NO: 333299
  Synthetic oligonucleotide

SEQ ID NO: 550056 - DNA, 55 bp, Artificial; identical to SEQ ID NO: 333300
  Synthetic oligonucleotide

SEQ ID NO: 550057 - DNA, 53 bp, Artificial; identical to SEQ ID NO: 333302
  Synthetic oligonucleotide

SEQ ID NO: 550058 - DNA, 60 bp, Artificial; identical to SEQ ID NO: 333304
  Synthetic oligonucleotide

SEQ ID NO: 550059 - DNA, 60 bp, Artificial; identical to SEQ ID NO: 333306
  Synthetic oligonucleotide

SEQ ID NO: 550060 - DNA, 60 bp, Artificial; identical to SEQ ID NO: 333307
  Synthetic oligonucleotide

SEQ ID NO: 550061 - DNA, 60 bp, Artificial; identical to SEQ ID NO: 333309
  Synthetic oligonucleotide

SEQ ID NO: 550062 - DNA, 60 bp, Artificial; identical to SEQ ID NO: 333313
  Synthetic oligonucleotide

SEQ ID NO: 550063 - DNA, 52 bp, Artificial; identical to SEQ ID NO: 333318
  Synthetic oligonucleotide

SEQ ID NO: 550064 - DNA, 60 bp, Artificial; identical to SEQ ID NO: 333319
  Synthetic oligonucleotide

SEQ ID NO: 550065 - DNA, 60 bp, Artificial; identical to SEQ ID NO: 333322
  Synthetic oligonucleotide

SEQ ID NO: 550066 - DNA, 52 bp, Artificial; identical to SEQ ID NO: 333323
  Synthetic oligonucleotide

SEQ ID NO: 550067 - DNA, 60 bp, Artificial; identical to SEQ ID NO: 333324
  Synthetic oligonucleotide

SEQ ID NO: 550068 - DNA, 59 bp, Artificial; identical to SEQ ID NO: 17033
  Synthetic oligonucleotide

SEQ ID NO: 550069 - DNA, 53 bp, Artificial; identical to SEQ ID NO: 333331
  Synthetic oligonucleotide

SEQ ID NO: 550070 - DNA, 58 bp, Artificial; identical to SEQ ID NO: 333332
  Synthetic oligonucleotide

SEQ ID NO: 550071 - DNA, 53 bp, Artificial; identical to SEQ ID NO: 333333
  Synthetic oligonucleotide

SEQ ID NO: 550072 - DNA, 52 bp, Artificial; identical to SEQ ID NO: 333336
  Synthetic oligonucleotide

SEQ ID NO: 550073 - DNA, 60 bp, Artificial; identical to SEQ ID NO: 333338
  Synthetic oligonucleotide

SEQ ID NO: 550074 - DNA, 60 bp, Artificial; identical to SEQ ID NO: 333339
  Synthetic oligonucleotide

SEQ ID NO: 550075 - DNA, 60 bp, Artificial; identical to SEQ ID NO: 333344
  Synthetic oligonucleotide

SEQ ID NO: 550076 - DNA, 59 bp, Artificial; identical to SEQ ID NO: 333350
  Synthetic oligonucleotide

SEQ ID NO: 550077 - DNA, 56 bp, Artificial; identical to SEQ ID NO: 333351
  Synthetic oligonucleotide

SEQ ID NO: 550078 - DNA, 55 bp, Artificial; identical to SEQ ID NO: 333352
  Synthetic oligonucleotide

SEQ ID NO: 550079 - DNA, 55 bp, Artificial; identical to SEQ ID NO: 333354
  Synthetic oligonucleotide

SEQ ID NO: 550080 - DNA, 55 bp, Artificial; identical to SEQ ID NO: 333355
  Synthetic oligonucleotide

SEQ ID NO: 550081 - DNA, 52 bp, Artificial; identical to SEQ ID NO: 333357
  Synthetic oligonucleotide

SEQ ID NO: 550082 - DNA, 56 bp, Artificial; identical to SEQ ID NO: 333359
  Synthetic oligonucleotide

SEQ ID NO: 550083 - DNA, 55 bp, Artificial; identical to SEQ ID NO: 333361
  Synthetic oligonucleotide

SEQ ID NO: 550084 - DNA, 60 bp, Artificial; identical to SEQ ID NO: 333362
  Synthetic oligonucleotide

SEQ ID NO: 550085 - DNA, 59 bp, Artificial; identical to SEQ ID NO: 333370
  Synthetic oligonucleotide

SEQ ID NO: 550086 - DNA, 59 bp, Artificial; identical to SEQ ID NO: 333371
  Synthetic oligonucleotide

SEQ ID NO: 550087 - DNA, 57 bp, Artificial; identical to SEQ ID NO: 333373
  Synthetic oligonucleotide

SEQ ID NO: 550088 - DNA, 60 bp, Artificial; identical to SEQ ID NO: 333374
  Synthetic oligonucleotide

SEQ ID NO: 550089 - DNA, 60 bp, Artificial; identical to SEQ ID NO: 333375
  Synthetic oligonucleotide

SEQ ID NO: 550090 - DNA, 51 bp, Artificial; identical to SEQ ID NO: 333378
  Synthetic oligonucleotide

SEQ ID NO: 550091 - DNA, 60 bp, Artificial; identical to SEQ ID NO: 333379
  Synthetic oligonucleotide

SEQ ID NO: 550092 - DNA, 56 bp, Artificial; identical to SEQ ID NO: 333380
  Synthetic oligonucleotide

SEQ ID NO: 550093 - DNA, 60 bp, Artificial; identical to SEQ ID NO: 333384
  Synthetic oligonucleotide

SEQ ID NO: 550094 - DNA, 50 bp, Artificial; identical to SEQ ID NO: 333386
  Synthetic oligonucleotide

SEQ ID NO: 550095 - DNA, 60 bp, Artificial; identical to SEQ ID NO: 333387
  Synthetic oligonucleotide

SEQ ID NO: 550096 - DNA, 59 bp, Artificial; identical to SEQ ID NO: 333388
  Synthetic oligonucleotide

SEQ ID NO: 550097 - DNA, 56 bp, Artificial; identical to SEQ ID NO: 333389
  Synthetic oligonucleotide

SEQ ID NO: 550098 - DNA, 59 bp, Artificial; identical to SEQ ID NO: 333391
  Synthetic oligonucleotide

SEQ ID NO: 550099 - DNA, 58 bp, Artificial; identical to SEQ ID NO: 333392
  Synthetic oligonucleotide

SEQ ID NO: 550100 - DNA, 55 bp, Artificial; identical to SEQ ID NO: 333393
  Synthetic oligonucleotide

SEQ ID NO: 550101 - DNA, 55 bp, Artificial; identical to SEQ ID NO: 333394
  Synthetic oligonucleotide

SEQ ID NO: 550102 - DNA, 56 bp, Artificial; identical to SEQ ID NO: 333400
  Synthetic oligonucleotide

SEQ ID NO: 550103 - DNA, 57 bp, Artificial; identical to SEQ ID NO: 333401
  Synthetic oligonucleotide

SEQ ID NO: 550104 - DNA, 60 bp, Artificial; identical to SEQ ID NO: 333402
  Synthetic oligonucleotide

SEQ ID NO: 550105 - DNA, 56 bp, Artificial; identical to SEQ ID NO: 333404
  Synthetic oligonucleotide

SEQ ID NO: 550106 - DNA, 60 bp, Artificial; identical to SEQ ID NO: 333410
  Synthetic oligonucleotide

SEQ ID NO: 550107 - DNA, 54 bp, Artificial; identical to SEQ ID NO: 333412
  Synthetic oligonucleotide

SEQ ID NO: 550108 - DNA, 60 bp, Artificial; identical to SEQ ID NO: 333415
  Synthetic oligonucleotide

SEQ ID NO: 550109 - DNA, 55 bp, Artificial; identical to SEQ ID NO: 333416
  Synthetic oligonucleotide

SEQ ID NO: 550110 - DNA, 57 bp, Artificial; identical to SEQ ID NO: 333418
  Synthetic oligonucleotide

SEQ ID NO: 550111 - DNA, 60 bp, Artificial; identical to SEQ ID NO: 333420
  Synthetic oligonucleotide

SEQ ID NO: 550112 - DNA, 60 bp, Artificial; identical to SEQ ID NO: 333422
  Synthetic oligonucleotide

SEQ ID NO: 550113 - DNA, 55 bp, Artificial; identical to SEQ ID NO: 333424
  Synthetic oligonucleotide

SEQ ID NO: 550114 - DNA, 60 bp, Artificial; identical to SEQ ID NO: 333426
  Synthetic oligonucleotide

SEQ ID NO: 550115 - DNA, 52 bp, Artificial; identical to SEQ ID NO: 333433
  Synthetic oligonucleotide

SEQ ID NO: 550116 - DNA, 60 bp, Artificial; identical to SEQ ID NO: 333434
  Synthetic oligonucleotide

SEQ ID NO: 550117 - DNA, 50 bp, Artificial; identical to SEQ ID NO: 333440
  Synthetic oligonucleotide

SEQ ID NO: 550118 - DNA, 60 bp, Artificial; identical to SEQ ID NO: 333441
  Synthetic oligonucleotide

SEQ ID NO: 550119 - DNA, 57 bp, Artificial; identical to SEQ ID NO: 333442
  Synthetic oligonucleotide

SEQ ID NO: 550120 - DNA, 60 bp, Artificial; identical to SEQ ID NO: 333446
  Synthetic oligonucleotide

SEQ ID NO: 550121 - DNA, 60 bp, Artificial; identical to SEQ ID NO: 333448
  Synthetic oligonucleotide

SEQ ID NO: 550122 - DNA, 60 bp, Artificial; identical to SEQ ID NO: 333450
  Synthetic oligonucleotide

SEQ ID NO: 550123 - DNA, 60 bp, Artificial; identical to SEQ ID NO: 333451
  Synthetic oligonucleotide

SEQ ID NO: 550124 - DNA, 57 bp, Artificial; identical to SEQ ID NO: 333457
  Synthetic oligonucleotide

SEQ ID NO: 550125 - DNA, 60 bp, Artificial; identical to SEQ ID NO: 333461
  Synthetic oligonucleotide

SEQ ID NO: 550126 - DNA, 51 bp, Artificial; identical to SEQ ID NO: 333462
  Synthetic oligonucleotide

SEQ ID NO: 550127 - DNA, 55 bp, Artificial; identical to SEQ ID NO: 333463
  Synthetic oligonucleotide

SEQ ID NO: 550128 - DNA, 55 bp, Artificial; identical to SEQ ID NO: 333465
  Synthetic oligonucleotide

SEQ ID NO: 550129 - DNA, 56 bp, Artificial; identical to SEQ ID NO: 333469
  Synthetic oligonucleotide

SEQ ID NO: 550130 - DNA, 56 bp, Artificial; identical to SEQ ID NO: 333470
  Synthetic oligonucleotide

SEQ ID NO: 550131 - DNA, 57 bp, Artificial; identical to SEQ ID NO: 333473
  Synthetic oligonucleotide

SEQ ID NO: 550132 - DNA, 58 bp, Artificial; identical to SEQ ID NO: 333477
  Synthetic oligonucleotide

SEQ ID NO: 550133 - DNA, 60 bp, Artificial; identical to SEQ ID NO: 28046
  Synthetic oligonucleotide

SEQ ID NO: 550134 - DNA, 60 bp, Artificial; identical to SEQ ID NO: 333480
  Synthetic oligonucleotide

SEQ ID NO: 550135 - DNA, 60 bp, Artificial; identical to SEQ ID NO: 333483
  Synthetic oligonucleotide

SEQ ID NO: 550136 - DNA, 51 bp, Artificial; identical to SEQ ID NO: 333488
  Synthetic oligonucleotide

SEQ ID NO: 550137 - DNA, 60 bp, Artificial; identical to SEQ ID NO: 333489
  Synthetic oligonucleotide

SEQ ID NO: 550138 - DNA, 60 bp, Artificial; identical to SEQ ID NO: 333490
  Synthetic oligonucleotide

SEQ ID NO: 550139 - DNA, 55 bp, Artificial; identical to SEQ ID NO: 333491
  Synthetic oligonucleotide

SEQ ID NO: 550140 - DNA, 57 bp, Artificial; identical to SEQ ID NO: 333492
  Synthetic oligonucleotide

SEQ ID NO: 550141 - DNA, 57 bp, Artificial; identical to SEQ ID NO: 333493
  Synthetic oligonucleotide

SEQ ID NO: 550142 - DNA, 54 bp, Artificial; identical to SEQ ID NO: 333494
  Synthetic oligonucleotide

SEQ ID NO: 550143 - DNA, 60 bp, Artificial; identical to SEQ ID NO: 333495
  Synthetic oligonucleotide

SEQ ID NO: 550144 - DNA, 53 bp, Artificial; identical to SEQ ID NO: 333496
  Synthetic oligonucleotide

SEQ ID NO: 550145 - DNA, 54 bp, Artificial; identical to SEQ ID NO: 333497
  Synthetic oligonucleotide

SEQ ID NO: 550146 - DNA, 54 bp, Artificial; identical to SEQ ID NO: 333498
  Synthetic oligonucleotide

SEQ ID NO: 550147 - DNA, 54 bp, Artificial; identical to SEQ ID NO: 333501
  Synthetic oligonucleotide

SEQ ID NO: 550148 - DNA, 57 bp, Artificial; identical to SEQ ID NO: 333504
  Synthetic oligonucleotide

SEQ ID NO: 550149 - DNA, 60 bp, Artificial; identical to SEQ ID NO: 333506
  Synthetic oligonucleotide

SEQ ID NO: 550150 - DNA, 60 bp, Artificial; identical to SEQ ID NO: 333507
  Synthetic oligonucleotide

SEQ ID NO: 550151 - DNA, 56 bp, Artificial; identical to SEQ ID NO: 16521
  Synthetic oligonucleotide

SEQ ID NO: 550152 - DNA, 60 bp, Artificial; identical to SEQ ID NO: 6565
  Synthetic oligonucleotide

SEQ ID NO: 550153 - DNA, 59 bp, Artificial; identical to SEQ ID NO: 333508
  Synthetic oligonucleotide

SEQ ID NO: 550154 - DNA, 55 bp, Artificial; identical to SEQ ID NO: 333510
  Synthetic oligonucleotide

SEQ ID NO: 550155 - DNA, 55 bp, Artificial; identical to SEQ ID NO: 333512
  Synthetic oligonucleotide

SEQ ID NO: 550156 - DNA, 60 bp, Artificial; identical to SEQ ID NO: 333517
  Synthetic oligonucleotide

SEQ ID NO: 550157 - DNA, 60 bp, Artificial; identical to SEQ ID NO: 333519
  Synthetic oligonucleotide

SEQ ID NO: 550158 - DNA, 60 bp, Artificial; identical to SEQ ID NO: 333520
  Synthetic oligonucleotide

SEQ ID NO: 550159 - DNA, 60 bp, Artificial; identical to SEQ ID NO: 333521
  Synthetic oligonucleotide

SEQ ID NO: 550160 - DNA, 60 bp, Artificial; identical to SEQ ID NO: 333522
  Synthetic oligonucleotide

SEQ ID NO: 550161 - DNA, 60 bp, Artificial; identical to SEQ ID NO: 333523
  Synthetic oligonucleotide

SEQ ID NO: 550162 - DNA, 60 bp, Artificial; identical to SEQ ID NO: 333524
  Synthetic oligonucleotide

SEQ ID NO: 550163 - DNA, 60 bp, Artificial; identical to SEQ ID NO: 333528
  Synthetic oligonucleotide

SEQ ID NO: 550164 - DNA, 60 bp, Artificial; identical to SEQ ID NO: 333532
  Synthetic oligonucleotide

SEQ ID NO: 550165 - DNA, 53 bp, Artificial; identical to SEQ ID NO: 333533
  Synthetic oligonucleotide

SEQ ID NO: 550166 - DNA, 58 bp, Artificial; identical to SEQ ID NO: 333534
  Synthetic oligonucleotide

SEQ ID NO: 550167 - DNA, 58 bp, Artificial; identical to SEQ ID NO: 333537
  Synthetic oligonucleotide

SEQ ID NO: 550168 - DNA, 53 bp, Artificial; identical to SEQ ID NO: 333541
  Synthetic oligonucleotide

SEQ ID NO: 550169 - DNA, 55 bp, Artificial; identical to SEQ ID NO: 333542
  Synthetic oligonucleotide

SEQ ID NO: 550170 - DNA, 59 bp, Artificial; identical to SEQ ID NO: 333543
  Synthetic oligonucleotide

SEQ ID NO: 550171 - DNA, 59 bp, Artificial; identical to SEQ ID NO: 333547
  Synthetic oligonucleotide

SEQ ID NO: 550172 - DNA, 60 bp, Artificial; identical to SEQ ID NO: 333552
  Synthetic oligonucleotide

SEQ ID NO: 550173 - DNA, 55 bp, Artificial; identical to SEQ ID NO: 333555
  Synthetic oligonucleotide

SEQ ID NO: 550174 - DNA, 55 bp, Artificial; identical to SEQ ID NO: 333561
  Synthetic oligonucleotide

SEQ ID NO: 550175 - DNA, 60 bp, Artificial; identical to SEQ ID NO: 333562
  Synthetic oligonucleotide

SEQ ID NO: 550176 - DNA, 60 bp, Artificial; identical to SEQ ID NO: 333563
  Synthetic oligonucleotide

SEQ ID NO: 550177 - DNA, 51 bp, Artificial; identical to SEQ ID NO: 333565
  Synthetic oligonucleotide

SEQ ID NO: 550178 - DNA, 60 bp, Artificial; identical to SEQ ID NO: 333568
  Synthetic oligonucleotide

SEQ ID NO: 550179 - DNA, 54 bp, Artificial; identical to SEQ ID NO: 333569
  Synthetic oligonucleotide

SEQ ID NO: 550180 - DNA, 60 bp, Artificial; identical to SEQ ID NO: 333574
  Synthetic oligonucleotide

SEQ ID NO: 550181 - DNA, 60 bp, Artificial; identical to SEQ ID NO: 333577
  Synthetic oligonucleotide

SEQ ID NO: 550182 - DNA, 60 bp, Artificial; identical to SEQ ID NO: 333579
  Synthetic oligonucleotide

SEQ ID NO: 550183 - DNA, 60 bp, Artificial; identical to SEQ ID NO: 333580
  Synthetic oligonucleotide

SEQ ID NO: 550184 - DNA, 57 bp, Artificial; identical to SEQ ID NO: 333581
  Synthetic oligonucleotide

SEQ ID NO: 550185 - DNA, 60 bp, Artificial; identical to SEQ ID NO: 10897
  Synthetic oligonucleotide

SEQ ID NO: 550186 - DNA, 51 bp, Artificial; identical to SEQ ID NO: 333582
  Synthetic oligonucleotide

SEQ ID NO: 550187 - DNA, 55 bp, Artificial; identical to SEQ ID NO: 333584
  Synthetic oligonucleotide

SEQ ID NO: 550188 - DNA, 60 bp, Artificial; identical to SEQ ID NO: 333585
  Synthetic oligonucleotide

SEQ ID NO: 550189 - DNA, 54 bp, Artificial; identical to SEQ ID NO: 333591
  Synthetic oligonucleotide

SEQ ID NO: 550190 - DNA, 54 bp, Artificial; identical to SEQ ID NO: 333592
  Synthetic oligonucleotide

SEQ ID NO: 550191 - DNA, 60 bp, Artificial; identical to SEQ ID NO: 333593
  Synthetic oligonucleotide

SEQ ID NO: 550192 - DNA, 60 bp, Artificial; identical to SEQ ID NO: 333595
  Synthetic oligonucleotide

SEQ ID NO: 550193 - DNA, 60 bp, Artificial; identical to SEQ ID NO: 333596
  Synthetic oligonucleotide

SEQ ID NO: 550194 - DNA, 57 bp, Artificial; identical to SEQ ID NO: 333598
  Synthetic oligonucleotide

SEQ ID NO: 550195 - DNA, 60 bp, Artificial; identical to SEQ ID NO: 333601
  Synthetic oligonucleotide

SEQ ID NO: 550196 - DNA, 58 bp, Artificial; identical to SEQ ID NO: 333602
  Synthetic oligonucleotide

SEQ ID NO: 550197 - DNA, 60 bp, Artificial; identical to SEQ ID NO: 10631
  Synthetic oligonucleotide

SEQ ID NO: 550198 - DNA, 60 bp, Artificial; identical to SEQ ID NO: 22248
  Synthetic oligonucleotide

SEQ ID NO: 550199 - DNA, 60 bp, Artificial; identical to SEQ ID NO: 333605
  Synthetic oligonucleotide

SEQ ID NO: 550200 - DNA, 58 bp, Artificial; identical to SEQ ID NO: 333606
  Synthetic oligonucleotide

SEQ ID NO: 550201 - DNA, 60 bp, Artificial; identical to SEQ ID NO: 333608
  Synthetic oligonucleotide

SEQ ID NO: 550202 - DNA, 57 bp, Artificial; identical to SEQ ID NO: 333609
  Synthetic oligonucleotide

SEQ ID NO: 550203 - DNA, 60 bp, Artificial; identical to SEQ ID NO: 333610
  Synthetic oligonucleotide

SEQ ID NO: 550204 - DNA, 60 bp, Artificial; identical to SEQ ID NO: 333615
  Synthetic oligonucleotide

SEQ ID NO: 550205 - DNA, 56 bp, Artificial; identical to SEQ ID NO: 333618
  Synthetic oligonucleotide

SEQ ID NO: 550206 - DNA, 53 bp, Artificial; identical to SEQ ID NO: 18429
  Synthetic oligonucleotide

SEQ ID NO: 550207 - DNA, 56 bp, Artificial; identical to SEQ ID NO: 333622
  Synthetic oligonucleotide

SEQ ID NO: 550208 - DNA, 57 bp, Artificial; identical to SEQ ID NO: 333628
  Synthetic oligonucleotide

SEQ ID NO: 550209 - DNA, 50 bp, Artificial; identical to SEQ ID NO: 333629
  Synthetic oligonucleotide

SEQ ID NO: 550210 - DNA, 60 bp, Artificial; identical to SEQ ID NO: 333630
  Synthetic oligonucleotide

SEQ ID NO: 550211 - DNA, 57 bp, Artificial; identical to SEQ ID NO: 333632
  Synthetic oligonucleotide

SEQ ID NO: 550212 - DNA, 53 bp, Artificial; identical to SEQ ID NO: 333633
  Synthetic oligonucleotide

SEQ ID NO: 550213 - DNA, 55 bp, Artificial; identical to SEQ ID NO: 333634
  Synthetic oligonucleotide

SEQ ID NO: 550214 - DNA, 55 bp, Artificial; identical to SEQ ID NO: 333638
  Synthetic oligonucleotide

SEQ ID NO: 550215 - DNA, 60 bp, Artificial; identical to SEQ ID NO: 10213
  Synthetic oligonucleotide

SEQ ID NO: 550216 - DNA, 55 bp, Artificial; identical to SEQ ID NO: 333643
  Synthetic oligonucleotide

SEQ ID NO: 550217 - DNA, 55 bp, Artificial; identical to SEQ ID NO: 333644
  Synthetic oligonucleotide

SEQ ID NO: 550218 - DNA, 57 bp, Artificial; identical to SEQ ID NO: 333645
  Synthetic oligonucleotide

SEQ ID NO: 550219 - DNA, 56 bp, Artificial; identical to SEQ ID NO: 333646
  Synthetic oligonucleotide

SEQ ID NO: 550220 - DNA, 50 bp, Artificial; identical to SEQ ID NO: 333649
  Synthetic oligonucleotide

SEQ ID NO: 550221 - DNA, 60 bp, Artificial; identical to SEQ ID NO: 9402
  Synthetic oligonucleotide

SEQ ID NO: 550222 - DNA, 60 bp, Artificial; identical to SEQ ID NO: 333651
  Synthetic oligonucleotide

SEQ ID NO: 550223 - DNA, 60 bp, Artificial; identical to SEQ ID NO: 333654
  Synthetic oligonucleotide

SEQ ID NO: 550224 - DNA, 60 bp, Artificial; identical to SEQ ID NO: 333656
  Synthetic oligonucleotide

SEQ ID NO: 550225 - DNA, 60 bp, Artificial; identical to SEQ ID NO: 333659
  Synthetic oligonucleotide

SEQ ID NO: 550226 - DNA, 56 bp, Artificial; identical to SEQ ID NO: 333660
  Synthetic oligonucleotide

SEQ ID NO: 550227 - DNA, 60 bp, Artificial; identical to SEQ ID NO: 333662
  Synthetic oligonucleotide

SEQ ID NO: 550228 - DNA, 60 bp, Artificial; identical to SEQ ID NO: 333664
  Synthetic oligonucleotide

SEQ ID NO: 550229 - DNA, 60 bp, Artificial; identical to SEQ ID NO: 333671
  Synthetic oligonucleotide

SEQ ID NO: 550230 - DNA, 60 bp, Artificial; identical to SEQ ID NO: 333675
  Synthetic oligonucleotide

SEQ ID NO: 550231 - DNA, 60 bp, Artificial; identical to SEQ ID NO: 333676
  Synthetic oligonucleotide

SEQ ID NO: 550232 - DNA, 60 bp, Artificial; identical to SEQ ID NO: 333677
  Synthetic oligonucleotide

SEQ ID NO: 550233 - DNA, 55 bp, Artificial; identical to SEQ ID NO: 333678
  Synthetic oligonucleotide

SEQ ID NO: 550234 - DNA, 60 bp, Artificial; identical to SEQ ID NO: 333679
  Synthetic oligonucleotide

SEQ ID NO: 550235 - DNA, 55 bp, Artificial; identical to SEQ ID NO: 333681
  Synthetic oligonucleotide

SEQ ID NO: 550236 - DNA, 55 bp, Artificial; identical to SEQ ID NO: 333682
  Synthetic oligonucleotide

SEQ ID NO: 550237 - DNA, 60 bp, Artificial; identical to SEQ ID NO: 333683
  Synthetic oligonucleotide

SEQ ID NO: 550238 - DNA, 53 bp, Artificial; identical to SEQ ID NO: 333685
  Synthetic oligonucleotide

SEQ ID NO: 550239 - DNA, 51 bp, Artificial; identical to SEQ ID NO: 333686
  Synthetic oligonucleotide

SEQ ID NO: 550240 - DNA, 60 bp, Artificial; identical to SEQ ID NO: 333689
  Synthetic oligonucleotide

SEQ ID NO: 550241 - DNA, 55 bp, Artificial; identical to SEQ ID NO: 333691
  Synthetic oligonucleotide

SEQ ID NO: 550242 - DNA, 50 bp, Artificial; identical to SEQ ID NO: 333692
  Synthetic oligonucleotide

SEQ ID NO: 550243 - DNA, 55 bp, Artificial; identical to SEQ ID NO: 333697
  Synthetic oligonucleotide

SEQ ID NO: 550244 - DNA, 55 bp, Artificial; identical to SEQ ID NO: 333700
  Synthetic oligonucleotide

SEQ ID NO: 550245 - DNA, 60 bp, Artificial; identical to SEQ ID NO: 333703
  Synthetic oligonucleotide

SEQ ID NO: 550246 - DNA, 53 bp, Artificial; identical to SEQ ID NO: 333704
  Synthetic oligonucleotide

SEQ ID NO: 550247 - DNA, 60 bp, Artificial; identical to SEQ ID NO: 333710
  Synthetic oligonucleotide

SEQ ID NO: 550248 - DNA, 58 bp, Artificial; identical to SEQ ID NO: 333714
  Synthetic oligonucleotide

SEQ ID NO: 550249 - DNA, 55 bp, Artificial; identical to SEQ ID NO: 333716
  Synthetic oligonucleotide

SEQ ID NO: 550250 - DNA, 60 bp, Artificial; identical to SEQ ID NO: 333720
  Synthetic oligonucleotide

SEQ ID NO: 550251 - DNA, 60 bp, Artificial; identical to SEQ ID NO: 333721
  Synthetic oligonucleotide

SEQ ID NO: 550252 - DNA, 60 bp, Artificial; identical to SEQ ID NO: 333722
  Synthetic oligonucleotide

SEQ ID NO: 550253 - DNA, 60 bp, Artificial; identical to SEQ ID NO: 333725
  Synthetic oligonucleotide

SEQ ID NO: 550254 - DNA, 60 bp, Artificial; identical to SEQ ID NO: 333728
  Synthetic oligonucleotide

SEQ ID NO: 550255 - DNA, 60 bp, Artificial; identical to SEQ ID NO: 333729
  Synthetic oligonucleotide

SEQ ID NO: 550256 - DNA, 60 bp, Artificial; identical to SEQ ID NO: 333730
  Synthetic oligonucleotide

SEQ ID NO: 550257 - DNA, 52 bp, Artificial; identical to SEQ ID NO: 333731
  Synthetic oligonucleotide

SEQ ID NO: 550258 - DNA, 57 bp, Artificial; identical to SEQ ID NO: 333732
  Synthetic oligonucleotide

SEQ ID NO: 550259 - DNA, 60 bp, Artificial; identical to SEQ ID NO: 333733
  Synthetic oligonucleotide

SEQ ID NO: 550260 - DNA, 54 bp, Artificial; identical to SEQ ID NO: 333735
  Synthetic oligonucleotide

SEQ ID NO: 550261 - DNA, 60 bp, Artificial; identical to SEQ ID NO: 333739
  Synthetic oligonucleotide

SEQ ID NO: 550262 - DNA, 59 bp, Artificial; identical to SEQ ID NO: 333740
  Synthetic oligonucleotide

SEQ ID NO: 550263 - DNA, 56 bp, Artificial; identical to SEQ ID NO: 333741
  Synthetic oligonucleotide

SEQ ID NO: 550264 - DNA, 60 bp, Artificial; identical to SEQ ID NO: 333742
  Synthetic oligonucleotide

SEQ ID NO: 550265 - DNA, 60 bp, Artificial; identical to SEQ ID NO: 333743
  Synthetic oligonucleotide

SEQ ID NO: 550266 - DNA, 60 bp, Artificial; identical to SEQ ID NO: 333745
  Synthetic oligonucleotide

SEQ ID NO: 550267 - DNA, 55 bp, Artificial; identical to SEQ ID NO: 333746
  Synthetic oligonucleotide

SEQ ID NO: 550268 - DNA, 60 bp, Artificial; identical to SEQ ID NO: 333747
  Synthetic oligonucleotide

SEQ ID NO: 550269 - DNA, 55 bp, Artificial; identical to SEQ ID NO: 333749
  Synthetic oligonucleotide

SEQ ID NO: 550270 - DNA, 50 bp, Artificial; identical to SEQ ID NO: 333751
  Synthetic oligonucleotide

SEQ ID NO: 550271 - DNA, 60 bp, Artificial; identical to SEQ ID NO: 333752
  Synthetic oligonucleotide

SEQ ID NO: 550272 - DNA, 59 bp, Artificial; identical to SEQ ID NO: 333753
  Synthetic oligonucleotide

SEQ ID NO: 550273 - DNA, 55 bp, Artificial; identical to SEQ ID NO: 333754
  Synthetic oligonucleotide

SEQ ID NO: 550274 - DNA, 60 bp, Artificial; identical to SEQ ID NO: 12809
  Synthetic oligonucleotide

SEQ ID NO: 550275 - DNA, 54 bp, Artificial; identical to SEQ ID NO: 333758
  Synthetic oligonucleotide

SEQ ID NO: 550276 - DNA, 60 bp, Artificial; identical to SEQ ID NO: 333759
  Synthetic oligonucleotide

SEQ ID NO: 550277 - DNA, 55 bp, Artificial; identical to SEQ ID NO: 333763
  Synthetic oligonucleotide

SEQ ID NO: 550278 - DNA, 60 bp, Artificial; identical to SEQ ID NO: 333764
  Synthetic oligonucleotide

SEQ ID NO: 550279 - DNA, 55 bp, Artificial; identical to SEQ ID NO: 333767
  Synthetic oligonucleotide

SEQ ID NO: 550280 - DNA, 51 bp, Artificial; identical to SEQ ID NO: 333768
  Synthetic oligonucleotide

SEQ ID NO: 550281 - DNA, 60 bp, Artificial; identical to SEQ ID NO: 333770
  Synthetic oligonucleotide

SEQ ID NO: 550282 - DNA, 55 bp, Artificial; identical to SEQ ID NO: 333771
  Synthetic oligonucleotide

SEQ ID NO: 550283 - DNA, 59 bp, Artificial; identical to SEQ ID NO: 333775
  Synthetic oligonucleotide

SEQ ID NO: 550284 - DNA, 51 bp, Artificial; identical to SEQ ID NO: 333776
  Synthetic oligonucleotide

SEQ ID NO: 550285 - DNA, 60 bp, Artificial; identical to SEQ ID NO: 333778
  Synthetic oligonucleotide

SEQ ID NO: 550286 - DNA, 60 bp, Artificial; identical to SEQ ID NO: 12264
  Synthetic oligonucleotide

SEQ ID NO: 550287 - DNA, 57 bp, Artificial; identical to SEQ ID NO: 333779
  Synthetic oligonucleotide

SEQ ID NO: 550288 - DNA, 60 bp, Artificial; identical to SEQ ID NO: 333780
  Synthetic oligonucleotide

SEQ ID NO: 550289 - DNA, 55 bp, Artificial; identical to SEQ ID NO: 333784
  Synthetic oligonucleotide

SEQ ID NO: 550290 - DNA, 60 bp, Artificial; identical to SEQ ID NO: 333785
  Synthetic oligonucleotide

SEQ ID NO: 550291 - DNA, 55 bp, Artificial; identical to SEQ ID NO: 333790
  Synthetic oligonucleotide

SEQ ID NO: 550292 - DNA, 60 bp, Artificial; identical to SEQ ID NO: 333792
  Synthetic oligonucleotide

SEQ ID NO: 550293 - DNA, 59 bp, Artificial; identical to SEQ ID NO: 333794
  Synthetic oligonucleotide

SEQ ID NO: 550294 - DNA, 60 bp, Artificial; identical to SEQ ID NO: 333795
  Synthetic oligonucleotide

SEQ ID NO: 550295 - DNA, 60 bp, Artificial; identical to SEQ ID NO: 333797
  Synthetic oligonucleotide

SEQ ID NO: 550296 - DNA, 60 bp, Artificial; identical to SEQ ID NO: 333800
  Synthetic oligonucleotide

SEQ ID NO: 550297 - DNA, 60 bp, Artificial; identical to SEQ ID NO: 333803
  Synthetic oligonucleotide

SEQ ID NO: 550298 - DNA, 60 bp, Artificial; identical to SEQ ID NO: 333804
  Synthetic oligonucleotide

SEQ ID NO: 550299 - DNA, 60 bp, Artificial; identical to SEQ ID NO: 333805
  Synthetic oligonucleotide

SEQ ID NO: 550300 - DNA, 51 bp, Artificial; identical to SEQ ID NO: 333813
  Synthetic oligonucleotide

SEQ ID NO: 550301 - DNA, 60 bp, Artificial; identical to SEQ ID NO: 333814
  Synthetic oligonucleotide

SEQ ID NO: 550302 - DNA, 55 bp, Artificial; identical to SEQ ID NO: 333817
  Synthetic oligonucleotide

SEQ ID NO: 550303 - DNA, 55 bp, Artificial; identical to SEQ ID NO: 333818
  Synthetic oligonucleotide

SEQ ID NO: 550304 - DNA, 60 bp, Artificial; identical to SEQ ID NO: 333821
  Synthetic oligonucleotide

SEQ ID NO: 550305 - DNA, 53 bp, Artificial; identical to SEQ ID NO: 333823
  Synthetic oligonucleotide

SEQ ID NO: 550306 - DNA, 56 bp, Artificial; identical to SEQ ID NO: 18391
  Synthetic oligonucleotide

SEQ ID NO: 550307 - DNA, 56 bp, Artificial; identical to SEQ ID NO: 333825
  Synthetic oligonucleotide

SEQ ID NO: 550308 - DNA, 60 bp, Artificial; identical to SEQ ID NO: 333826
  Synthetic oligonucleotide

SEQ ID NO: 550309 - DNA, 60 bp, Artificial; identical to SEQ ID NO: 333827
  Synthetic oligonucleotide

SEQ ID NO: 550310 - DNA, 60 bp, Artificial; identical to SEQ ID NO: 333829
  Synthetic oligonucleotide

SEQ ID NO: 550311 - DNA, 60 bp, Artificial; identical to SEQ ID NO: 333830
  Synthetic oligonucleotide

SEQ ID NO: 550312 - DNA, 60 bp, Artificial; identical to SEQ ID NO: 333831
  Synthetic oligonucleotide

SEQ ID NO: 550313 - DNA, 55 bp, Artificial; identical to SEQ ID NO: 333833
  Synthetic oligonucleotide

SEQ ID NO: 550314 - DNA, 60 bp, Artificial; identical to SEQ ID NO: 333834
  Synthetic oligonucleotide

SEQ ID NO: 550315 - DNA, 58 bp, Artificial; identical to SEQ ID NO: 333836
  Synthetic oligonucleotide

SEQ ID NO: 550316 - DNA, 58 bp, Artificial; identical to SEQ ID NO: 333838
  Synthetic oligonucleotide

SEQ ID NO: 550317 - DNA, 55 bp, Artificial; identical to SEQ ID NO: 333840
  Synthetic oligonucleotide

SEQ ID NO: 550318 - DNA, 60 bp, Artificial; identical to SEQ ID NO: 333841
  Synthetic oligonucleotide

SEQ ID NO: 550319 - DNA, 57 bp, Artificial; identical to SEQ ID NO: 333845
  Synthetic oligonucleotide

SEQ ID NO: 550320 - DNA, 60 bp, Artificial; identical to SEQ ID NO: 333846
  Synthetic oligonucleotide

SEQ ID NO: 550321 - DNA, 51 bp, Artificial; identical to SEQ ID NO: 333849
  Synthetic oligonucleotide

SEQ ID NO: 550322 - DNA, 55 bp, Artificial; identical to SEQ ID NO: 333850
  Synthetic oligonucleotide

SEQ ID NO: 550323 - DNA, 60 bp, Artificial; identical to SEQ ID NO: 333855
  Synthetic oligonucleotide

SEQ ID NO: 550324 - DNA, 60 bp, Artificial; identical to SEQ ID NO: 333860
  Synthetic oligonucleotide

SEQ ID NO: 550325 - DNA, 60 bp, Artificial; identical to SEQ ID NO: 13427
  Synthetic oligonucleotide

SEQ ID NO: 550326 - DNA, 58 bp, Artificial; identical to SEQ ID NO: 333864
  Synthetic oligonucleotide

SEQ ID NO: 550327 - DNA, 57 bp, Artificial; identical to SEQ ID NO: 333869
  Synthetic oligonucleotide

SEQ ID NO: 550328 - DNA, 57 bp, Artificial; identical to SEQ ID NO: 333871
  Synthetic oligonucleotide

SEQ ID NO: 550329 - DNA, 60 bp, Artificial; identical to SEQ ID NO: 333872
  Synthetic oligonucleotide

SEQ ID NO: 550330 - DNA, 50 bp, Artificial; identical to SEQ ID NO: 333875
  Synthetic oligonucleotide

SEQ ID NO: 550331 - DNA, 60 bp, Artificial; identical to SEQ ID NO: 333878
  Synthetic oligonucleotide

SEQ ID NO: 550332 - DNA, 60 bp, Artificial; identical to SEQ ID NO: 333881
  Synthetic oligonucleotide

SEQ ID NO: 550333 - DNA, 54 bp, Artificial; identical to SEQ ID NO: 333883
  Synthetic oligonucleotide

SEQ ID NO: 550334 - DNA, 60 bp, Artificial; identical to SEQ ID NO: 333885
  Synthetic oligonucleotide

SEQ ID NO: 550335 - DNA, 60 bp, Artificial; identical to SEQ ID NO: 333890
  Synthetic oligonucleotide

SEQ ID NO: 550336 - DNA, 59 bp, Artificial; identical to SEQ ID NO: 333891
  Synthetic oligonucleotide

SEQ ID NO: 550337 - DNA, 60 bp, Artificial; identical to SEQ ID NO: 333892
  Synthetic oligonucleotide

SEQ ID NO: 550338 - DNA, 55 bp, Artificial; identical to SEQ ID NO: 333893
  Synthetic oligonucleotide

SEQ ID NO: 550339 - DNA, 50 bp, Artificial; identical to SEQ ID NO: 333896
  Synthetic oligonucleotide

SEQ ID NO: 550340 - DNA, 60 bp, Artificial; identical to SEQ ID NO: 333897
  Synthetic oligonucleotide

SEQ ID NO: 550341 - DNA, 60 bp, Artificial; identical to SEQ ID NO: 333898
  Synthetic oligonucleotide

SEQ ID NO: 550342 - DNA, 57 bp, Artificial; identical to SEQ ID NO: 333899
  Synthetic oligonucleotide

SEQ ID NO: 550343 - DNA, 59 bp, Artificial; identical to SEQ ID NO: 333900
  Synthetic oligonucleotide

SEQ ID NO: 550344 - DNA, 52 bp, Artificial; identical to SEQ ID NO: 333901
  Synthetic oligonucleotide

SEQ ID NO: 550345 - DNA, 56 bp, Artificial; identical to SEQ ID NO: 333903
  Synthetic oligonucleotide

SEQ ID NO: 550346 - DNA, 60 bp, Artificial; identical to SEQ ID NO: 333904
  Synthetic oligonucleotide

SEQ ID NO: 550347 - DNA, 60 bp, Artificial; identical to SEQ ID NO: 333905
  Synthetic oligonucleotide

SEQ ID NO: 550348 - DNA, 55 bp, Artificial; identical to SEQ ID NO: 333906
  Synthetic oligonucleotide

SEQ ID NO: 550349 - DNA, 60 bp, Artificial; identical to SEQ ID NO: 333907
  Synthetic oligonucleotide

SEQ ID NO: 550350 - DNA, 52 bp, Artificial; identical to SEQ ID NO: 333908
  Synthetic oligonucleotide

SEQ ID NO: 550351 - DNA, 60 bp, Artificial; identical to SEQ ID NO: 333909
  Synthetic oligonucleotide

SEQ ID NO: 550352 - DNA, 60 bp, Artificial; identical to SEQ ID NO: 333910
  Synthetic oligonucleotide

SEQ ID NO: 550353 - DNA, 60 bp, Artificial; identical to SEQ ID NO: 333911
  Synthetic oligonucleotide

SEQ ID NO: 550354 - DNA, 59 bp, Artificial; identical to SEQ ID NO: 333912
  Synthetic oligonucleotide

SEQ ID NO: 550355 - DNA, 59 bp, Artificial; identical to SEQ ID NO: 333913
  Synthetic oligonucleotide

SEQ ID NO: 550356 - DNA, 60 bp, Artificial; identical to SEQ ID NO: 333914
  Synthetic oligonucleotide

SEQ ID NO: 550357 - DNA, 56 bp, Artificial; identical to SEQ ID NO: 12286
  Synthetic oligonucleotide

SEQ ID NO: 550358 - DNA, 60 bp, Artificial; identical to SEQ ID NO: 333915
  Synthetic oligonucleotide

SEQ ID NO: 550359 - DNA, 55 bp, Artificial; identical to SEQ ID NO: 333917
  Synthetic oligonucleotide

SEQ ID NO: 550360 - DNA, 60 bp, Artificial; identical to SEQ ID NO: 333918
  Synthetic oligonucleotide

SEQ ID NO: 550361 - DNA, 60 bp, Artificial; identical to SEQ ID NO: 333919
  Synthetic oligonucleotide

SEQ ID NO: 550362 - DNA, 55 bp, Artificial; identical to SEQ ID NO: 333924
  Synthetic oligonucleotide

SEQ ID NO: 550363 - DNA, 60 bp, Artificial; identical to SEQ ID NO: 333927
  Synthetic oligonucleotide

SEQ ID NO: 550364 - DNA, 60 bp, Artificial; identical to SEQ ID NO: 333932
  Synthetic oligonucleotide

SEQ ID NO: 550365 - DNA, 60 bp, Artificial; identical to SEQ ID NO: 333935
  Synthetic oligonucleotide

SEQ ID NO: 550366 - DNA, 60 bp, Artificial; identical to SEQ ID NO: 333937
  Synthetic oligonucleotide

SEQ ID NO: 550367 - DNA, 60 bp, Artificial; identical to SEQ ID NO: 333943
  Synthetic oligonucleotide

SEQ ID NO: 550368 - DNA, 60 bp, Artificial; identical to SEQ ID NO: 333948
  Synthetic oligonucleotide

SEQ ID NO: 550369 - DNA, 57 bp, Artificial; identical to SEQ ID NO: 333949
  Synthetic oligonucleotide

SEQ ID NO: 550370 - DNA, 60 bp, Artificial; identical to SEQ ID NO: 333953
  Synthetic oligonucleotide

SEQ ID NO: 550371 - DNA, 52 bp, Artificial; identical to SEQ ID NO: 333954
  Synthetic oligonucleotide

SEQ ID NO: 550372 - DNA, 60 bp, Artificial; identical to SEQ ID NO: 333958
  Synthetic oligonucleotide

SEQ ID NO: 550373 - DNA, 56 bp, Artificial; identical to SEQ ID NO: 333963
  Synthetic oligonucleotide

SEQ ID NO: 550374 - DNA, 60 bp, Artificial; identical to SEQ ID NO: 333964
  Synthetic oligonucleotide

SEQ ID NO: 550375 - DNA, 60 bp, Artificial; identical to SEQ ID NO: 333965
  Synthetic oligonucleotide

SEQ ID NO: 550376 - DNA, 58 bp, Artificial; identical to SEQ ID NO: 333966
  Synthetic oligonucleotide

SEQ ID NO: 550377 - DNA, 51 bp, Artificial; identical to SEQ ID NO: 333967
  Synthetic oligonucleotide

SEQ ID NO: 550378 - DNA, 60 bp, Artificial; identical to SEQ ID NO: 333968
  Synthetic oligonucleotide

SEQ ID NO: 550379 - DNA, 55 bp, Artificial; identical to SEQ ID NO: 333976
  Synthetic oligonucleotide

SEQ ID NO: 550380 - DNA, 57 bp, Artificial; identical to SEQ ID NO: 333978
  Synthetic oligonucleotide

SEQ ID NO: 550381 - DNA, 60 bp, Artificial; identical to SEQ ID NO: 333979
  Synthetic oligonucleotide

SEQ ID NO: 550382 - DNA, 55 bp, Artificial; identical to SEQ ID NO: 333980
  Synthetic oligonucleotide

SEQ ID NO: 550383 - DNA, 59 bp, Artificial; identical to SEQ ID NO: 333988
  Synthetic oligonucleotide

SEQ ID NO: 550384 - DNA, 51 bp, Artificial; identical to SEQ ID NO: 333989
  Synthetic oligonucleotide

SEQ ID NO: 550385 - DNA, 51 bp, Artificial; identical to SEQ ID NO: 333991
  Synthetic oligonucleotide

SEQ ID NO: 550386 - DNA, 60 bp, Artificial; identical to SEQ ID NO: 333992
  Synthetic oligonucleotide

SEQ ID NO: 550387 - DNA, 57 bp, Artificial; identical to SEQ ID NO: 333995
  Synthetic oligonucleotide

SEQ ID NO: 550388 - DNA, 60 bp, Artificial; identical to SEQ ID NO: 333996
  Synthetic oligonucleotide

SEQ ID NO: 550389 - DNA, 60 bp, Artificial; identical to SEQ ID NO: 333997
  Synthetic oligonucleotide

SEQ ID NO: 550390 - DNA, 60 bp, Artificial; identical to SEQ ID NO: 333998
  Synthetic oligonucleotide

SEQ ID NO: 550391 - DNA, 54 bp, Artificial; identical to SEQ ID NO: 334001
  Synthetic oligonucleotide

SEQ ID NO: 550392 - DNA, 58 bp, Artificial; identical to SEQ ID NO: 334002
  Synthetic oligonucleotide

SEQ ID NO: 550393 - DNA, 58 bp, Artificial; identical to SEQ ID NO: 334005
  Synthetic oligonucleotide

SEQ ID NO: 550394 - DNA, 60 bp, Artificial; identical to SEQ ID NO: 334006
  Synthetic oligonucleotide

SEQ ID NO: 550395 - DNA, 60 bp, Artificial; identical to SEQ ID NO: 334011
  Synthetic oligonucleotide

SEQ ID NO: 550396 - DNA, 60 bp, Artificial; identical to SEQ ID NO: 334013
  Synthetic oligonucleotide

SEQ ID NO: 550397 - DNA, 52 bp, Artificial; identical to SEQ ID NO: 334014
  Synthetic oligonucleotide

SEQ ID NO: 550398 - DNA, 58 bp, Artificial; identical to SEQ ID NO: 334015
  Synthetic oligonucleotide

SEQ ID NO: 550399 - DNA, 51 bp, Artificial; identical to SEQ ID NO: 334016
  Synthetic oligonucleotide

SEQ ID NO: 550400 - DNA, 52 bp, Artificial; identical to SEQ ID NO: 334017
  Synthetic oligonucleotide

SEQ ID NO: 550401 - DNA, 56 bp, Artificial; identical to SEQ ID NO: 334023
  Synthetic oligonucleotide

SEQ ID NO: 550402 - DNA, 55 bp, Artificial; identical to SEQ ID NO: 334029
  Synthetic oligonucleotide

SEQ ID NO: 550403 - DNA, 59 bp, Artificial; identical to SEQ ID NO: 334032
  Synthetic oligonucleotide

SEQ ID NO: 550404 - DNA, 60 bp, Artificial; identical to SEQ ID NO: 334033
  Synthetic oligonucleotide

SEQ ID NO: 550405 - DNA, 55 bp, Artificial; identical to SEQ ID NO: 334037
  Synthetic oligonucleotide

SEQ ID NO: 550406 - DNA, 57 bp, Artificial; identical to SEQ ID NO: 334038
  Synthetic oligonucleotide

SEQ ID NO: 550407 - DNA, 60 bp, Artificial; identical to SEQ ID NO: 334040
  Synthetic oligonucleotide

SEQ ID NO: 550408 - DNA, 60 bp, Artificial; identical to SEQ ID NO: 334041
  Synthetic oligonucleotide

SEQ ID NO: 550409 - DNA, 54 bp, Artificial; identical to SEQ ID NO: 334047
  Synthetic oligonucleotide

SEQ ID NO: 550410 - DNA, 59 bp, Artificial; identical to SEQ ID NO: 334048
  Synthetic oligonucleotide

SEQ ID NO: 550411 - DNA, 56 bp, Artificial; identical to SEQ ID NO: 334050
  Synthetic oligonucleotide

SEQ ID NO: 550412 - DNA, 60 bp, Artificial; identical to SEQ ID NO: 334052
  Synthetic oligonucleotide

SEQ ID NO: 550413 - DNA, 60 bp, Artificial; identical to SEQ ID NO: 334054
  Synthetic oligonucleotide

SEQ ID NO: 550414 - DNA, 60 bp, Artificial; identical to SEQ ID NO: 334056
  Synthetic oligonucleotide

SEQ ID NO: 550415 - DNA, 60 bp, Artificial; identical to SEQ ID NO: 334059
  Synthetic oligonucleotide

SEQ ID NO: 550416 - DNA, 60 bp, Artificial; identical to SEQ ID NO: 334060
  Synthetic oligonucleotide

SEQ ID NO: 550417 - DNA, 50 bp, Artificial; identical to SEQ ID NO: 6698
  Synthetic oligonucleotide

SEQ ID NO: 550418 - DNA, 60 bp, Artificial; identical to SEQ ID NO: 334065
  Synthetic oligonucleotide

SEQ ID NO: 550419 - DNA, 55 bp, Artificial; identical to SEQ ID NO: 334069
  Synthetic oligonucleotide

SEQ ID NO: 550420 - DNA, 55 bp, Artificial; identical to SEQ ID NO: 334071
  Synthetic oligonucleotide

SEQ ID NO: 550421 - DNA, 58 bp, Artificial; identical to SEQ ID NO: 334073
  Synthetic oligonucleotide

SEQ ID NO: 550422 - DNA, 59 bp, Artificial; identical to SEQ ID NO: 334074
  Synthetic oligonucleotide

SEQ ID NO: 550423 - DNA, 58 bp, Artificial; identical to SEQ ID NO: 334078
  Synthetic oligonucleotide

SEQ ID NO: 550424 - DNA, 54 bp, Artificial; identical to SEQ ID NO: 334080
  Synthetic oligonucleotide

SEQ ID NO: 550425 - DNA, 60 bp, Artificial; identical to SEQ ID NO: 334082
  Synthetic oligonucleotide

SEQ ID NO: 550426 - DNA, 58 bp, Artificial; identical to SEQ ID NO: 334083
  Synthetic oligonucleotide

SEQ ID NO: 550427 - DNA, 58 bp, Artificial; identical to SEQ ID NO: 334084
  Synthetic oligonucleotide

SEQ ID NO: 550428 - DNA, 58 bp, Artificial; identical to SEQ ID NO: 334085
  Synthetic oligonucleotide

SEQ ID NO: 550429 - DNA, 57 bp, Artificial; identical to SEQ ID NO: 334089
  Synthetic oligonucleotide

SEQ ID NO: 550430 - DNA, 55 bp, Artificial; identical to SEQ ID NO: 334090
  Synthetic oligonucleotide

SEQ ID NO: 550431 - DNA, 57 bp, Artificial; identical to SEQ ID NO: 334094
  Synthetic oligonucleotide

SEQ ID NO: 550432 - DNA, 60 bp, Artificial; identical to SEQ ID NO: 334098
  Synthetic oligonucleotide

SEQ ID NO: 550433 - DNA, 50 bp, Artificial; identical to SEQ ID NO: 334100
  Synthetic oligonucleotide

SEQ ID NO: 550434 - DNA, 55 bp, Artificial; identical to SEQ ID NO: 334103
  Synthetic oligonucleotide

SEQ ID NO: 550435 - DNA, 51 bp, Artificial; identical to SEQ ID NO: 334113
  Synthetic oligonucleotide

SEQ ID NO: 550436 - DNA, 60 bp, Artificial; identical to SEQ ID NO: 334115
  Synthetic oligonucleotide

SEQ ID NO: 550437 - DNA, 60 bp, Artificial; identical to SEQ ID NO: 334118
  Synthetic oligonucleotide

SEQ ID NO: 550438 - DNA, 60 bp, Artificial; identical to SEQ ID NO: 334121
  Synthetic oligonucleotide

SEQ ID NO: 550439 - DNA, 53 bp, Artificial; identical to SEQ ID NO: 334124
  Synthetic oligonucleotide

SEQ ID NO: 550440 - DNA, 60 bp, Artificial; identical to SEQ ID NO: 334125
  Synthetic oligonucleotide

SEQ ID NO: 550441 - DNA, 51 bp, Artificial; identical to SEQ ID NO: 334126
  Synthetic oligonucleotide

SEQ ID NO: 550442 - DNA, 59 bp, Artificial; identical to SEQ ID NO: 334128
  Synthetic oligonucleotide

SEQ ID NO: 550443 - DNA, 60 bp, Artificial; identical to SEQ ID NO: 334130
  Synthetic oligonucleotide

SEQ ID NO: 550444 - DNA, 60 bp, Artificial; identical to SEQ ID NO: 334131
  Synthetic oligonucleotide

SEQ ID NO: 550445 - DNA, 58 bp, Artificial; identical to SEQ ID NO: 334132
  Synthetic oligonucleotide

SEQ ID NO: 550446 - DNA, 55 bp, Artificial; identical to SEQ ID NO: 334133
  Synthetic oligonucleotide

SEQ ID NO: 550447 - DNA, 56 bp, Artificial; identical to SEQ ID NO: 334140
  Synthetic oligonucleotide

SEQ ID NO: 550448 - DNA, 60 bp, Artificial; identical to SEQ ID NO: 334145
  Synthetic oligonucleotide

SEQ ID NO: 550449 - DNA, 56 bp, Artificial; identical to SEQ ID NO: 334148
  Synthetic oligonucleotide

SEQ ID NO: 550450 - DNA, 60 bp, Artificial; identical to SEQ ID NO: 334152
  Synthetic oligonucleotide

SEQ ID NO: 550451 - DNA, 54 bp, Artificial; identical to SEQ ID NO: 20151
  Synthetic oligonucleotide

SEQ ID NO: 550452 - DNA, 51 bp, Artificial; identical to SEQ ID NO: 334157
  Synthetic oligonucleotide

SEQ ID NO: 550453 - DNA, 60 bp, Artificial; identical to SEQ ID NO: 334160
  Synthetic oligonucleotide

SEQ ID NO: 550454 - DNA, 56 bp, Artificial; identical to SEQ ID NO: 334162
  Synthetic oligonucleotide

SEQ ID NO: 550455 - DNA, 56 bp, Artificial; identical to SEQ ID NO: 334165
  Synthetic oligonucleotide

SEQ ID NO: 550456 - DNA, 60 bp, Artificial; identical to SEQ ID NO: 334166
  Synthetic oligonucleotide

SEQ ID NO: 550457 - DNA, 56 bp, Artificial; identical to SEQ ID NO: 334168
  Synthetic oligonucleotide

SEQ ID NO: 550458 - DNA, 55 bp, Artificial; identical to SEQ ID NO: 334169
  Synthetic oligonucleotide

SEQ ID NO: 550459 - DNA, 60 bp, Artificial; identical to SEQ ID NO: 10966
  Synthetic oligonucleotide

SEQ ID NO: 550460 - DNA, 60 bp, Artificial; identical to SEQ ID NO: 334171
  Synthetic oligonucleotide

SEQ ID NO: 550461 - DNA, 59 bp, Artificial; identical to SEQ ID NO: 334174
  Synthetic oligonucleotide

SEQ ID NO: 550462 - DNA, 57 bp, Artificial; identical to SEQ ID NO: 334178
  Synthetic oligonucleotide

SEQ ID NO: 550463 - DNA, 50 bp, Artificial; identical to SEQ ID NO: 334179
  Synthetic oligonucleotide

SEQ ID NO: 550464 - DNA, 53 bp, Artificial; identical to SEQ ID NO: 334183
  Synthetic oligonucleotide

SEQ ID NO: 550465 - DNA, 57 bp, Artificial; identical to SEQ ID NO: 334185
  Synthetic oligonucleotide

SEQ ID NO: 550466 - DNA, 59 bp, Artificial; identical to SEQ ID NO: 334186
  Synthetic oligonucleotide

SEQ ID NO: 550467 - DNA, 51 bp, Artificial; identical to SEQ ID NO: 334188
  Synthetic oligonucleotide

SEQ ID NO: 550468 - DNA, 57 bp, Artificial; identical to SEQ ID NO: 334190
  Synthetic oligonucleotide

SEQ ID NO: 550469 - DNA, 60 bp, Artificial; identical to SEQ ID NO: 334191
  Synthetic oligonucleotide

SEQ ID NO: 550470 - DNA, 60 bp, Artificial; identical to SEQ ID NO: 334192
  Synthetic oligonucleotide

SEQ ID NO: 550471 - DNA, 60 bp, Artificial; identical to SEQ ID NO: 334194
  Synthetic oligonucleotide

SEQ ID NO: 550472 - DNA, 60 bp, Artificial; identical to SEQ ID NO: 334197
  Synthetic oligonucleotide

SEQ ID NO: 550473 - DNA, 55 bp, Artificial; identical to SEQ ID NO: 334200
  Synthetic oligonucleotide

SEQ ID NO: 550474 - DNA, 60 bp, Artificial; identical to SEQ ID NO: 334201
  Synthetic oligonucleotide

SEQ ID NO: 550475 - DNA, 55 bp, Artificial; identical to SEQ ID NO: 334202
  Synthetic oligonucleotide

SEQ ID NO: 550476 - DNA, 58 bp, Artificial; identical to SEQ ID NO: 334203
  Synthetic oligonucleotide

SEQ ID NO: 550477 - DNA, 55 bp, Artificial; identical to SEQ ID NO: 334204
  Synthetic oligonucleotide

SEQ ID NO: 550478 - DNA, 60 bp, Artificial; identical to SEQ ID NO: 334206
  Synthetic oligonucleotide

SEQ ID NO: 550479 - DNA, 51 bp, Artificial; identical to SEQ ID NO: 7329
  Synthetic oligonucleotide

SEQ ID NO: 550480 - DNA, 60 bp, Artificial; identical to SEQ ID NO: 334207
  Synthetic oligonucleotide

SEQ ID NO: 550481 - DNA, 60 bp, Artificial; identical to SEQ ID NO: 334208
  Synthetic oligonucleotide

SEQ ID NO: 550482 - DNA, 60 bp, Artificial; identical to SEQ ID NO: 334209
  Synthetic oligonucleotide

SEQ ID NO: 550483 - DNA, 60 bp, Artificial; identical to SEQ ID NO: 334210
  Synthetic oligonucleotide

SEQ ID NO: 550484 - DNA, 60 bp, Artificial; identical to SEQ ID NO: 334214
  Synthetic oligonucleotide

SEQ ID NO: 550485 - DNA, 60 bp, Artificial; identical to SEQ ID NO: 334217
  Synthetic oligonucleotide

SEQ ID NO: 550486 - DNA, 60 bp, Artificial; identical to SEQ ID NO: 334218
  Synthetic oligonucleotide

SEQ ID NO: 550487 - DNA, 52 bp, Artificial; identical to SEQ ID NO: 334219
  Synthetic oligonucleotide

SEQ ID NO: 550488 - DNA, 60 bp, Artificial; identical to SEQ ID NO: 334221
  Synthetic oligonucleotide

SEQ ID NO: 550489 - DNA, 55 bp, Artificial; identical to SEQ ID NO: 334225
  Synthetic oligonucleotide

SEQ ID NO: 550490 - DNA, 60 bp, Artificial; identical to SEQ ID NO: 334226
  Synthetic oligonucleotide

SEQ ID NO: 550491 - DNA, 55 bp, Artificial; identical to SEQ ID NO: 334229
  Synthetic oligonucleotide

SEQ ID NO: 550492 - DNA, 60 bp, Artificial; identical to SEQ ID NO: 334230
  Synthetic oligonucleotide

SEQ ID NO: 550493 - DNA, 55 bp, Artificial; identical to SEQ ID NO: 334233
  Synthetic oligonucleotide

SEQ ID NO: 550494 - DNA, 60 bp, Artificial; identical to SEQ ID NO: 334234
  Synthetic oligonucleotide

SEQ ID NO: 550495 - DNA, 60 bp, Artificial; identical to SEQ ID NO: 334239
  Synthetic oligonucleotide

SEQ ID NO: 550496 - DNA, 57 bp, Artificial; identical to SEQ ID NO: 334244
  Synthetic oligonucleotide

SEQ ID NO: 550497 - DNA, 50 bp, Artificial; identical to SEQ ID NO: 334245
  Synthetic oligonucleotide

SEQ ID NO: 550498 - DNA, 56 bp, Artificial; identical to SEQ ID NO: 334248
  Synthetic oligonucleotide

SEQ ID NO: 550499 - DNA, 54 bp, Artificial; identical to SEQ ID NO: 334252
  Synthetic oligonucleotide

SEQ ID NO: 550500 - DNA, 55 bp, Artificial; identical to SEQ ID NO: 334253
  Synthetic oligonucleotide

SEQ ID NO: 550501 - DNA, 55 bp, Artificial; identical to SEQ ID NO: 334256
  Synthetic oligonucleotide

SEQ ID NO: 550502 - DNA, 53 bp, Artificial; identical to SEQ ID NO: 334260
  Synthetic oligonucleotide

SEQ ID NO: 550503 - DNA, 60 bp, Artificial; identical to SEQ ID NO: 334264
  Synthetic oligonucleotide

SEQ ID NO: 550504 - DNA, 60 bp, Artificial; identical to SEQ ID NO: 334265
  Synthetic oligonucleotide

SEQ ID NO: 550505 - DNA, 60 bp, Artificial; identical to SEQ ID NO: 334266
  Synthetic oligonucleotide

SEQ ID NO: 550506 - DNA, 60 bp, Artificial; identical to SEQ ID NO: 12938
  Synthetic oligonucleotide

SEQ ID NO: 550507 - DNA, 53 bp, Artificial; identical to SEQ ID NO: 334272
  Synthetic oligonucleotide

SEQ ID NO: 550508 - DNA, 56 bp, Artificial; identical to SEQ ID NO: 334273
  Synthetic oligonucleotide

SEQ ID NO: 550509 - DNA, 60 bp, Artificial; identical to SEQ ID NO: 334275
  Synthetic oligonucleotide

SEQ ID NO: 550510 - DNA, 60 bp, Artificial; identical to SEQ ID NO: 334276
  Synthetic oligonucleotide

SEQ ID NO: 550511 - DNA, 55 bp, Artificial; identical to SEQ ID NO: 334278
  Synthetic oligonucleotide

SEQ ID NO: 550512 - DNA, 60 bp, Artificial; identical to SEQ ID NO: 15768
  Synthetic oligonucleotide

SEQ ID NO: 550513 - DNA, 60 bp, Artificial; identical to SEQ ID NO: 334280
  Synthetic oligonucleotide

SEQ ID NO: 550514 - DNA, 51 bp, Artificial; identical to SEQ ID NO: 334285
  Synthetic oligonucleotide

SEQ ID NO: 550515 - DNA, 60 bp, Artificial; identical to SEQ ID NO: 334288
  Synthetic oligonucleotide

SEQ ID NO: 550516 - DNA, 50 bp, Artificial; identical to SEQ ID NO: 334290
  Synthetic oligonucleotide

SEQ ID NO: 550517 - DNA, 60 bp, Artificial; identical to SEQ ID NO: 334293
  Synthetic oligonucleotide

SEQ ID NO: 550518 - DNA, 60 bp, Artificial; identical to SEQ ID NO: 334299
  Synthetic oligonucleotide

SEQ ID NO: 550519 - DNA, 60 bp, Artificial; identical to SEQ ID NO: 334300
  Synthetic oligonucleotide

SEQ ID NO: 550520 - DNA, 60 bp, Artificial; identical to SEQ ID NO: 334302
  Synthetic oligonucleotide

SEQ ID NO: 550521 - DNA, 60 bp, Artificial; identical to SEQ ID NO: 334303
  Synthetic oligonucleotide

SEQ ID NO: 550522 - DNA, 60 bp, Artificial; identical to SEQ ID NO: 13005
  Synthetic oligonucleotide

SEQ ID NO: 550523 - DNA, 53 bp, Artificial; identical to SEQ ID NO: 334311
  Synthetic oligonucleotide

SEQ ID NO: 550524 - DNA, 60 bp, Artificial; identical to SEQ ID NO: 334312
  Synthetic oligonucleotide

SEQ ID NO: 550525 - DNA, 60 bp, Artificial; identical to SEQ ID NO: 334313
  Synthetic oligonucleotide

SEQ ID NO: 550526 - DNA, 54 bp, Artificial; identical to SEQ ID NO: 334314
  Synthetic oligonucleotide

SEQ ID NO: 550527 - DNA, 51 bp, Artificial; identical to SEQ ID NO: 334317
  Synthetic oligonucleotide

SEQ ID NO: 550528 - DNA, 52 bp, Artificial; identical to SEQ ID NO: 334319
  Synthetic oligonucleotide

SEQ ID NO: 550529 - DNA, 60 bp, Artificial; identical to SEQ ID NO: 334320
  Synthetic oligonucleotide

SEQ ID NO: 550530 - DNA, 57 bp, Artificial; identical to SEQ ID NO: 334321
  Synthetic oligonucleotide

SEQ ID NO: 550531 - DNA, 60 bp, Artificial; identical to SEQ ID NO: 334324
  Synthetic oligonucleotide

SEQ ID NO: 550532 - DNA, 59 bp, Artificial; identical to SEQ ID NO: 334325
  Synthetic oligonucleotide

SEQ ID NO: 550533 - DNA, 55 bp, Artificial; identical to SEQ ID NO: 334326
  Synthetic oligonucleotide

SEQ ID NO: 550534 - DNA, 60 bp, Artificial; identical to SEQ ID NO: 334329
  Synthetic oligonucleotide

SEQ ID NO: 550535 - DNA, 57 bp, Artificial; identical to SEQ ID NO: 334330
  Synthetic oligonucleotide

SEQ ID NO: 550536 - DNA, 52 bp, Artificial; identical to SEQ ID NO: 334331
  Synthetic oligonucleotide

SEQ ID NO: 550537 - DNA, 54 bp, Artificial; identical to SEQ ID NO: 334332
  Synthetic oligonucleotide

SEQ ID NO: 550538 - DNA, 60 bp, Artificial; identical to SEQ ID NO: 334333
  Synthetic oligonucleotide

SEQ ID NO: 550539 - DNA, 60 bp, Artificial; identical to SEQ ID NO: 6703
  Synthetic oligonucleotide

SEQ ID NO: 550540 - DNA, 50 bp, Artificial; identical to SEQ ID NO: 334335
  Synthetic oligonucleotide

SEQ ID NO: 550541 - DNA, 60 bp, Artificial; identical to SEQ ID NO: 334336
  Synthetic oligonucleotide

SEQ ID NO: 550542 - DNA, 56 bp, Artificial; identical to SEQ ID NO: 334337
  Synthetic oligonucleotide

SEQ ID NO: 550543 - DNA, 57 bp, Artificial; identical to SEQ ID NO: 334339
  Synthetic oligonucleotide

SEQ ID NO: 550544 - DNA, 60 bp, Artificial; identical to SEQ ID NO: 334340
  Synthetic oligonucleotide

SEQ ID NO: 550545 - DNA, 59 bp, Artificial; identical to SEQ ID NO: 334344
  Synthetic oligonucleotide

SEQ ID NO: 550546 - DNA, 60 bp, Artificial; identical to SEQ ID NO: 334346
  Synthetic oligonucleotide

SEQ ID NO: 550547 - DNA, 60 bp, Artificial; identical to SEQ ID NO: 334349
  Synthetic oligonucleotide

SEQ ID NO: 550548 - DNA, 60 bp, Artificial; identical to SEQ ID NO: 334354
  Synthetic oligonucleotide

SEQ ID NO: 550549 - DNA, 53 bp, Artificial; identical to SEQ ID NO: 334356
  Synthetic oligonucleotide

SEQ ID NO: 550550 - DNA, 55 bp, Artificial; identical to SEQ ID NO: 334357
  Synthetic oligonucleotide

SEQ ID NO: 550551 - DNA, 59 bp, Artificial; identical to SEQ ID NO: 334361
  Synthetic oligonucleotide

SEQ ID NO: 550552 - DNA, 56 bp, Artificial; identical to SEQ ID NO: 334362
  Synthetic oligonucleotide

SEQ ID NO: 550553 - DNA, 60 bp, Artificial; identical to SEQ ID NO: 334364
  Synthetic oligonucleotide

SEQ ID NO: 550554 - DNA, 60 bp, Artificial; identical to SEQ ID NO: 10959
  Synthetic oligonucleotide

SEQ ID NO: 550555 - DNA, 55 bp, Artificial; identical to SEQ ID NO: 334366
  Synthetic oligonucleotide

SEQ ID NO: 550556 - DNA, 52 bp, Artificial; identical to SEQ ID NO: 334367
  Synthetic oligonucleotide

SEQ ID NO: 550557 - DNA, 56 bp, Artificial; identical to SEQ ID NO: 334372
  Synthetic oligonucleotide

SEQ ID NO: 550558 - DNA, 60 bp, Artificial; identical to SEQ ID NO: 334373
  Synthetic oligonucleotide

SEQ ID NO: 550559 - DNA, 51 bp, Artificial; identical to SEQ ID NO: 334374
  Synthetic oligonucleotide

SEQ ID NO: 550560 - DNA, 56 bp, Artificial; identical to SEQ ID NO: 334376
  Synthetic oligonucleotide

SEQ ID NO: 550561 - DNA, 60 bp, Artificial; identical to SEQ ID NO: 334381
  Synthetic oligonucleotide

SEQ ID NO: 550562 - DNA, 58 bp, Artificial; identical to SEQ ID NO: 334382
  Synthetic oligonucleotide

SEQ ID NO: 550563 - DNA, 60 bp, Artificial; identical to SEQ ID NO: 334383
  Synthetic oligonucleotide

SEQ ID NO: 550564 - DNA, 50 bp, Artificial; identical to SEQ ID NO: 334384
  Synthetic oligonucleotide

SEQ ID NO: 550565 - DNA, 56 bp, Artificial; identical to SEQ ID NO: 334385
  Synthetic oligonucleotide

SEQ ID NO: 550566 - DNA, 60 bp, Artificial; identical to SEQ ID NO: 334387
  Synthetic oligonucleotide

SEQ ID NO: 550567 - DNA, 55 bp, Artificial; identical to SEQ ID NO: 334388
  Synthetic oligonucleotide

SEQ ID NO: 550568 - DNA, 58 bp, Artificial; identical to SEQ ID NO: 334390
  Synthetic oligonucleotide

SEQ ID NO: 550569 - DNA, 55 bp, Artificial; identical to SEQ ID NO: 334392
  Synthetic oligonucleotide

SEQ ID NO: 550570 - DNA, 60 bp, Artificial; identical to SEQ ID NO: 334393
  Synthetic oligonucleotide

SEQ ID NO: 550571 - DNA, 55 bp, Artificial; identical to SEQ ID NO: 334394
  Synthetic oligonucleotide

SEQ ID NO: 550572 - DNA, 60 bp, Artificial; identical to SEQ ID NO: 334395
  Synthetic oligonucleotide

SEQ ID NO: 550573 - DNA, 58 bp, Artificial; identical to SEQ ID NO: 334399
  Synthetic oligonucleotide

SEQ ID NO: 550574 - DNA, 60 bp, Artificial; identical to SEQ ID NO: 334404
  Synthetic oligonucleotide

SEQ ID NO: 550575 - DNA, 55 bp, Artificial; identical to SEQ ID NO: 334407
  Synthetic oligonucleotide

SEQ ID NO: 550576 - DNA, 60 bp, Artificial; identical to SEQ ID NO: 334408
  Synthetic oligonucleotide

SEQ ID NO: 550577 - DNA, 60 bp, Artificial; identical to SEQ ID NO: 334410
  Synthetic oligonucleotide

SEQ ID NO: 550578 - DNA, 50 bp, Artificial; identical to SEQ ID NO: 334412
  Synthetic oligonucleotide

SEQ ID NO: 550579 - DNA, 52 bp, Artificial; identical to SEQ ID NO: 334413
  Synthetic oligonucleotide

SEQ ID NO: 550580 - DNA, 58 bp, Artificial; identical to SEQ ID NO: 334414
  Synthetic oligonucleotide

SEQ ID NO: 550581 - DNA, 60 bp, Artificial; identical to SEQ ID NO: 334417
  Synthetic oligonucleotide

SEQ ID NO: 550582 - DNA, 60 bp, Artificial; identical to SEQ ID NO: 11851
  Synthetic oligonucleotide

SEQ ID NO: 550583 - DNA, 55 bp, Artificial; identical to SEQ ID NO: 334419
  Synthetic oligonucleotide

SEQ ID NO: 550584 - DNA, 60 bp, Artificial; identical to SEQ ID NO: 334422
  Synthetic oligonucleotide

SEQ ID NO: 550585 - DNA, 60 bp, Artificial; identical to SEQ ID NO: 334424
  Synthetic oligonucleotide

SEQ ID NO: 550586 - DNA, 55 bp, Artificial; identical to SEQ ID NO: 334425
  Synthetic oligonucleotide

SEQ ID NO: 550587 - DNA, 50 bp, Artificial; identical to SEQ ID NO: 334426
  Synthetic oligonucleotide

SEQ ID NO: 550588 - DNA, 60 bp, Artificial; identical to SEQ ID NO: 334428
  Synthetic oligonucleotide

SEQ ID NO: 550589 - DNA, 51 bp, Artificial; identical to SEQ ID NO: 334431
  Synthetic oligonucleotide

SEQ ID NO: 550590 - DNA, 57 bp, Artificial; identical to SEQ ID NO: 334434
  Synthetic oligonucleotide

SEQ ID NO: 550591 - DNA, 51 bp, Artificial; identical to SEQ ID NO: 14102
  Synthetic oligonucleotide

SEQ ID NO: 550592 - DNA, 60 bp, Artificial; identical to SEQ ID NO: 334438
  Synthetic oligonucleotide

SEQ ID NO: 550593 - DNA, 60 bp, Artificial; identical to SEQ ID NO: 334439
  Synthetic oligonucleotide

SEQ ID NO: 550594 - DNA, 54 bp, Artificial; identical to SEQ ID NO: 334442
  Synthetic oligonucleotide

SEQ ID NO: 550595 - DNA, 60 bp, Artificial; identical to SEQ ID NO: 334443
  Synthetic oligonucleotide

SEQ ID NO: 550596 - DNA, 52 bp, Artificial; identical to SEQ ID NO: 334446
  Synthetic oligonucleotide

SEQ ID NO: 550597 - DNA, 52 bp, Artificial; identical to SEQ ID NO: 334447
  Synthetic oligonucleotide

SEQ ID NO: 550598 - DNA, 59 bp, Artificial; identical to SEQ ID NO: 334450
  Synthetic oligonucleotide

SEQ ID NO: 550599 - DNA, 60 bp, Artificial; identical to SEQ ID NO: 334451
  Synthetic oligonucleotide

SEQ ID NO: 550600 - DNA, 55 bp, Artificial; identical to SEQ ID NO: 334456
  Synthetic oligonucleotide

SEQ ID NO: 550601 - DNA, 60 bp, Artificial; identical to SEQ ID NO: 334458
  Synthetic oligonucleotide

SEQ ID NO: 550602 - DNA, 60 bp, Artificial; identical to SEQ ID NO: 334460
  Synthetic oligonucleotide

SEQ ID NO: 550603 - DNA, 58 bp, Artificial; identical to SEQ ID NO: 334462
  Synthetic oligonucleotide

SEQ ID NO: 550604 - DNA, 60 bp, Artificial; identical to SEQ ID NO: 334463
  Synthetic oligonucleotide

SEQ ID NO: 550605 - DNA, 57 bp, Artificial; identical to SEQ ID NO: 334464
  Synthetic oligonucleotide

SEQ ID NO: 550606 - DNA, 56 bp, Artificial; identical to SEQ ID NO: 334465
  Synthetic oligonucleotide

SEQ ID NO: 550607 - DNA, 51 bp, Artificial; identical to SEQ ID NO: 334467
  Synthetic oligonucleotide

SEQ ID NO: 550608 - DNA, 54 bp, Artificial; identical to SEQ ID NO: 334468
  Synthetic oligonucleotide

SEQ ID NO: 550609 - DNA, 56 bp, Artificial; identical to SEQ ID NO: 334469
  Synthetic oligonucleotide

SEQ ID NO: 550610 - DNA, 60 bp, Artificial; identical to SEQ ID NO: 123351
  Synthetic oligonucleotide

SEQ ID NO: 550611 - DNA, 59 bp, Artificial; identical to SEQ ID NO: 334470
  Synthetic oligonucleotide

SEQ ID NO: 550612 - DNA, 55 bp, Artificial; identical to SEQ ID NO: 334471
  Synthetic oligonucleotide

SEQ ID NO: 550613 - DNA, 56 bp, Artificial; identical to SEQ ID NO: 334473
  Synthetic oligonucleotide

SEQ ID NO: 550614 - DNA, 55 bp, Artificial; identical to SEQ ID NO: 334474
  Synthetic oligonucleotide

SEQ ID NO: 550615 - DNA, 57 bp, Artificial; identical to SEQ ID NO: 334476
  Synthetic oligonucleotide

SEQ ID NO: 550616 - DNA, 55 bp, Artificial; identical to SEQ ID NO: 334479
  Synthetic oligonucleotide

SEQ ID NO: 550617 - DNA, 54 bp, Artificial; identical to SEQ ID NO: 334480
  Synthetic oligonucleotide

SEQ ID NO: 550618 - DNA, 55 bp, Artificial; identical to SEQ ID NO: 334481
  Synthetic oligonucleotide

SEQ ID NO: 550619 - DNA, 60 bp, Artificial; identical to SEQ ID NO: 334483
  Synthetic oligonucleotide

SEQ ID NO: 550620 - DNA, 60 bp, Artificial; identical to SEQ ID NO: 334484
  Synthetic oligonucleotide

SEQ ID NO: 550621 - DNA, 60 bp, Artificial; identical to SEQ ID NO: 334485
  Synthetic oligonucleotide

SEQ ID NO: 550622 - DNA, 60 bp, Artificial; identical to SEQ ID NO: 334486
  Synthetic oligonucleotide

SEQ ID NO: 550623 - DNA, 60 bp, Artificial; identical to SEQ ID NO: 334487
  Synthetic oligonucleotide

SEQ ID NO: 550624 - DNA, 54 bp, Artificial; identical to SEQ ID NO: 334488
  Synthetic oligonucleotide

SEQ ID NO: 550625 - DNA, 52 bp, Artificial; identical to SEQ ID NO: 334489
  Synthetic oligonucleotide

SEQ ID NO: 550626 - DNA, 55 bp, Artificial; identical to SEQ ID NO: 334491
  Synthetic oligonucleotide

SEQ ID NO: 550627 - DNA, 53 bp, Artificial; identical to SEQ ID NO: 334492
  Synthetic oligonucleotide

SEQ ID NO: 550628 - DNA, 57 bp, Artificial; identical to SEQ ID NO: 334496
  Synthetic oligonucleotide

SEQ ID NO: 550629 - DNA, 60 bp, Artificial; identical to SEQ ID NO: 334502
  Synthetic oligonucleotide

SEQ ID NO: 550630 - DNA, 60 bp, Artificial; identical to SEQ ID NO: 334503
  Synthetic oligonucleotide

SEQ ID NO: 550631 - DNA, 60 bp, Artificial; identical to SEQ ID NO: 334504
  Synthetic oligonucleotide

SEQ ID NO: 550632 - DNA, 58 bp, Artificial; identical to SEQ ID NO: 334508
  Synthetic oligonucleotide

SEQ ID NO: 550633 - DNA, 58 bp, Artificial; identical to SEQ ID NO: 334511
  Synthetic oligonucleotide

SEQ ID NO: 550634 - DNA, 54 bp, Artificial; identical to SEQ ID NO: 334515
  Synthetic oligonucleotide

SEQ ID NO: 550635 - DNA, 59 bp, Artificial; identical to SEQ ID NO: 334518
  Synthetic oligonucleotide

SEQ ID NO: 550636 - DNA, 54 bp, Artificial; identical to SEQ ID NO: 334519
  Synthetic oligonucleotide

SEQ ID NO: 550637 - DNA, 60 bp, Artificial; identical to SEQ ID NO: 334520
  Synthetic oligonucleotide

SEQ ID NO: 550638 - DNA, 60 bp, Artificial; identical to SEQ ID NO: 334521
  Synthetic oligonucleotide

SEQ ID NO: 550639 - DNA, 54 bp, Artificial; identical to SEQ ID NO: 334522
  Synthetic oligonucleotide

SEQ ID NO: 550640 - DNA, 52 bp, Artificial; identical to SEQ ID NO: 334523
  Synthetic oligonucleotide

SEQ ID NO: 550641 - DNA, 56 bp, Artificial; identical to SEQ ID NO: 334524
  Synthetic oligonucleotide

SEQ ID NO: 550642 - DNA, 56 bp, Artificial; identical to SEQ ID NO: 334525
  Synthetic oligonucleotide

SEQ ID NO: 550643 - DNA, 60 bp, Artificial; identical to SEQ ID NO: 334528
  Synthetic oligonucleotide

SEQ ID NO: 550644 - DNA, 58 bp, Artificial; identical to SEQ ID NO: 334532
  Synthetic oligonucleotide

SEQ ID NO: 550645 - DNA, 56 bp, Artificial; identical to SEQ ID NO: 334533
  Synthetic oligonucleotide

SEQ ID NO: 550646 - DNA, 52 bp, Artificial; identical to SEQ ID NO: 334538
  Synthetic oligonucleotide

SEQ ID NO: 550647 - DNA, 55 bp, Artificial; identical to SEQ ID NO: 334541
  Synthetic oligonucleotide

SEQ ID NO: 550648 - DNA, 60 bp, Artificial; identical to SEQ ID NO: 334546
  Synthetic oligonucleotide

SEQ ID NO: 550649 - DNA, 55 bp, Artificial; identical to SEQ ID NO: 334547
  Synthetic oligonucleotide

SEQ ID NO: 550650 - DNA, 58 bp, Artificial; identical to SEQ ID NO: 334553
  Synthetic oligonucleotide

SEQ ID NO: 550651 - DNA, 55 bp, Artificial; identical to SEQ ID NO: 334554
  Synthetic oligonucleotide

SEQ ID NO: 550652 - DNA, 60 bp, Artificial; identical to SEQ ID NO: 334558
  Synthetic oligonucleotide

SEQ ID NO: 550653 - DNA, 56 bp, Artificial; identical to SEQ ID NO: 17651
  Synthetic oligonucleotide

SEQ ID NO: 550654 - DNA, 57 bp, Artificial; identical to SEQ ID NO: 334560
  Synthetic oligonucleotide

SEQ ID NO: 550655 - DNA, 55 bp, Artificial; identical to SEQ ID NO: 334563
  Synthetic oligonucleotide

SEQ ID NO: 550656 - DNA, 57 bp, Artificial; identical to SEQ ID NO: 334564
  Synthetic oligonucleotide

SEQ ID NO: 550657 - DNA, 60 bp, Artificial; identical to SEQ ID NO: 334565
  Synthetic oligonucleotide

SEQ ID NO: 550658 - DNA, 60 bp, Artificial; identical to SEQ ID NO: 334566
  Synthetic oligonucleotide

SEQ ID NO: 550659 - DNA, 60 bp, Artificial; identical to SEQ ID NO: 334567
  Synthetic oligonucleotide

SEQ ID NO: 550660 - DNA, 60 bp, Artificial; identical to SEQ ID NO: 14169
  Synthetic oligonucleotide

SEQ ID NO: 550661 - DNA, 55 bp, Artificial; identical to SEQ ID NO: 334569
  Synthetic oligonucleotide

SEQ ID NO: 550662 - DNA, 60 bp, Artificial; identical to SEQ ID NO: 334571
  Synthetic oligonucleotide

SEQ ID NO: 550663 - DNA, 59 bp, Artificial; identical to SEQ ID NO: 334572
  Synthetic oligonucleotide

SEQ ID NO: 550664 - DNA, 60 bp, Artificial; identical to SEQ ID NO: 334574
  Synthetic oligonucleotide

SEQ ID NO: 550665 - DNA, 60 bp, Artificial; identical to SEQ ID NO: 334575
  Synthetic oligonucleotide

SEQ ID NO: 550666 - DNA, 52 bp, Artificial; identical to SEQ ID NO: 334576
  Synthetic oligonucleotide

SEQ ID NO: 550667 - DNA, 59 bp, Artificial; identical to SEQ ID NO: 334578
  Synthetic oligonucleotide

SEQ ID NO: 550668 - DNA, 60 bp, Artificial; identical to SEQ ID NO: 334586
  Synthetic oligonucleotide

SEQ ID NO: 550669 - DNA, 58 bp, Artificial; identical to SEQ ID NO: 334587
  Synthetic oligonucleotide

SEQ ID NO: 550670 - DNA, 60 bp, Artificial; identical to SEQ ID NO: 15746
  Synthetic oligonucleotide

SEQ ID NO: 550671 - DNA, 56 bp, Artificial; identical to SEQ ID NO: 334591
  Synthetic oligonucleotide

SEQ ID NO: 550672 - DNA, 58 bp, Artificial; identical to SEQ ID NO: 334593
  Synthetic oligonucleotide

SEQ ID NO: 550673 - DNA, 60 bp, Artificial; identical to SEQ ID NO: 334600
  Synthetic oligonucleotide

SEQ ID NO: 550674 - DNA, 54 bp, Artificial; identical to SEQ ID NO: 8748
  Synthetic oligonucleotide

SEQ ID NO: 550675 - DNA, 57 bp, Artificial; identical to SEQ ID NO: 19485
  Synthetic oligonucleotide

SEQ ID NO: 550676 - DNA, 60 bp, Artificial; identical to SEQ ID NO: 334602
  Synthetic oligonucleotide

SEQ ID NO: 550677 - DNA, 60 bp, Artificial; identical to SEQ ID NO: 334605
  Synthetic oligonucleotide

SEQ ID NO: 550678 - DNA, 55 bp, Artificial; identical to SEQ ID NO: 334607
  Synthetic oligonucleotide

SEQ ID NO: 550679 - DNA, 55 bp, Artificial; identical to SEQ ID NO: 334609
  Synthetic oligonucleotide

SEQ ID NO: 550680 - DNA, 52 bp, Artificial; identical to SEQ ID NO: 334612
  Synthetic oligonucleotide

SEQ ID NO: 550681 - DNA, 60 bp, Artificial; identical to SEQ ID NO: 334613
  Synthetic oligonucleotide

SEQ ID NO: 550682 - DNA, 58 bp, Artificial; identical to SEQ ID NO: 334617
  Synthetic oligonucleotide

SEQ ID NO: 550683 - DNA, 57 bp, Artificial; identical to SEQ ID NO: 334618
  Synthetic oligonucleotide

SEQ ID NO: 550684 - DNA, 56 bp, Artificial; identical to SEQ ID NO: 334619
  Synthetic oligonucleotide

SEQ ID NO: 550685 - DNA, 60 bp, Artificial; identical to SEQ ID NO: 334620
  Synthetic oligonucleotide

SEQ ID NO: 550686 - DNA, 59 bp, Artificial; identical to SEQ ID NO: 334621
  Synthetic oligonucleotide

SEQ ID NO: 550687 - DNA, 60 bp, Artificial; identical to SEQ ID NO: 334626
  Synthetic oligonucleotide

SEQ ID NO: 550688 - DNA, 58 bp, Artificial; identical to SEQ ID NO: 334627
  Synthetic oligonucleotide

SEQ ID NO: 550689 - DNA, 59 bp, Artificial; identical to SEQ ID NO: 18107
  Synthetic oligonucleotide

SEQ ID NO: 550690 - DNA, 58 bp, Artificial; identical to SEQ ID NO: 334629
  Synthetic oligonucleotide

SEQ ID NO: 550691 - DNA, 60 bp, Artificial; identical to SEQ ID NO: 334631
  Synthetic oligonucleotide

SEQ ID NO: 550692 - DNA, 60 bp, Artificial; identical to SEQ ID NO: 334633
  Synthetic oligonucleotide

SEQ ID NO: 550693 - DNA, 60 bp, Artificial; identical to SEQ ID NO: 334634
  Synthetic oligonucleotide

SEQ ID NO: 550694 - DNA, 60 bp, Artificial; identical to SEQ ID NO: 334635
  Synthetic oligonucleotide

SEQ ID NO: 550695 - DNA, 54 bp, Artificial; identical to SEQ ID NO: 334636
  Synthetic oligonucleotide

SEQ ID NO: 550696 - DNA, 59 bp, Artificial; identical to SEQ ID NO: 334637
  Synthetic oligonucleotide

SEQ ID NO: 550697 - DNA, 60 bp, Artificial; identical to SEQ ID NO: 334639
  Synthetic oligonucleotide

SEQ ID NO: 550698 - DNA, 60 bp, Artificial; identical to SEQ ID NO: 334641
  Synthetic oligonucleotide

SEQ ID NO: 550699 - DNA, 50 bp, Artificial; identical to SEQ ID NO: 13243
  Synthetic oligonucleotide

SEQ ID NO: 550700 - DNA, 55 bp, Artificial; identical to SEQ ID NO: 334643
  Synthetic oligonucleotide

SEQ ID NO: 550701 - DNA, 60 bp, Artificial; identical to SEQ ID NO: 334648
  Synthetic oligonucleotide

SEQ ID NO: 550702 - DNA, 60 bp, Artificial; identical to SEQ ID NO: 334649
  Synthetic oligonucleotide

SEQ ID NO: 550703 - DNA, 55 bp, Artificial; identical to SEQ ID NO: 334651
  Synthetic oligonucleotide

SEQ ID NO: 550704 - DNA, 59 bp, Artificial; identical to SEQ ID NO: 334652
  Synthetic oligonucleotide

SEQ ID NO: 550705 - DNA, 60 bp, Artificial; identical to SEQ ID NO: 334653
  Synthetic oligonucleotide

SEQ ID NO: 550706 - DNA, 60 bp, Artificial; identical to SEQ ID NO: 334654
  Synthetic oligonucleotide

SEQ ID NO: 550707 - DNA, 54 bp, Artificial; identical to SEQ ID NO: 334658
  Synthetic oligonucleotide

SEQ ID NO: 550708 - DNA, 56 bp, Artificial; identical to SEQ ID NO: 334660
  Synthetic oligonucleotide

SEQ ID NO: 550709 - DNA, 55 bp, Artificial; identical to SEQ ID NO: 334663
  Synthetic oligonucleotide

SEQ ID NO: 550710 - DNA, 56 bp, Artificial; identical to SEQ ID NO: 334664
  Synthetic oligonucleotide

SEQ ID NO: 550711 - DNA, 60 bp, Artificial; identical to SEQ ID NO: 334666
  Synthetic oligonucleotide

SEQ ID NO: 550712 - DNA, 59 bp, Artificial; identical to SEQ ID NO: 334669
  Synthetic oligonucleotide

SEQ ID NO: 550713 - DNA, 58 bp, Artificial; identical to SEQ ID NO: 334672
  Synthetic oligonucleotide

SEQ ID NO: 550714 - DNA, 60 bp, Artificial; identical to SEQ ID NO: 334675
  Synthetic oligonucleotide

SEQ ID NO: 550715 - DNA, 51 bp, Artificial; identical to SEQ ID NO: 334677
  Synthetic oligonucleotide

SEQ ID NO: 550716 - DNA, 60 bp, Artificial; identical to SEQ ID NO: 334678
  Synthetic oligonucleotide

SEQ ID NO: 550717 - DNA, 57 bp, Artificial; identical to SEQ ID NO: 334680
  Synthetic oligonucleotide

SEQ ID NO: 550718 - DNA, 57 bp, Artificial; identical to SEQ ID NO: 334681
  Synthetic oligonucleotide

SEQ ID NO: 550719 - DNA, 60 bp, Artificial; identical to SEQ ID NO: 334682
  Synthetic oligonucleotide

SEQ ID NO: 550720 - DNA, 53 bp, Artificial; identical to SEQ ID NO: 334683
  Synthetic oligonucleotide

SEQ ID NO: 550721 - DNA, 59 bp, Artificial; identical to SEQ ID NO: 334685
  Synthetic oligonucleotide

SEQ ID NO: 550722 - DNA, 55 bp, Artificial; identical to SEQ ID NO: 334686
  Synthetic oligonucleotide

SEQ ID NO: 550723 - DNA, 60 bp, Artificial; identical to SEQ ID NO: 334688
  Synthetic oligonucleotide

SEQ ID NO: 550724 - DNA, 60 bp, Artificial; identical to SEQ ID NO: 334691
  Synthetic oligonucleotide

SEQ ID NO: 550725 - DNA, 60 bp, Artificial; identical to SEQ ID NO: 334692
  Synthetic oligonucleotide

SEQ ID NO: 550726 - DNA, 60 bp, Artificial; identical to SEQ ID NO: 334694
  Synthetic oligonucleotide

SEQ ID NO: 550727 - DNA, 60 bp, Artificial; identical to SEQ ID NO: 334696
  Synthetic oligonucleotide

SEQ ID NO: 550728 - DNA, 60 bp, Artificial; identical to SEQ ID NO: 334697
  Synthetic oligonucleotide

SEQ ID NO: 550729 - DNA, 52 bp, Artificial; identical to SEQ ID NO: 334698
  Synthetic oligonucleotide

SEQ ID NO: 550730 - DNA, 55 bp, Artificial; identical to SEQ ID NO: 334699
  Synthetic oligonucleotide

SEQ ID NO: 550731 - DNA, 57 bp, Artificial; identical to SEQ ID NO: 19944
  Synthetic oligonucleotide

SEQ ID NO: 550732 - DNA, 58 bp, Artificial; identical to SEQ ID NO: 334700
  Synthetic oligonucleotide

SEQ ID NO: 550733 - DNA, 57 bp, Artificial; identical to SEQ ID NO: 334701
  Synthetic oligonucleotide

SEQ ID NO: 550734 - DNA, 60 bp, Artificial; identical to SEQ ID NO: 334702
  Synthetic oligonucleotide

SEQ ID NO: 550735 - DNA, 59 bp, Artificial; identical to SEQ ID NO: 334704
  Synthetic oligonucleotide

SEQ ID NO: 550736 - DNA, 60 bp, Artificial; identical to SEQ ID NO: 334708
  Synthetic oligonucleotide

SEQ ID NO: 550737 - DNA, 58 bp, Artificial; identical to SEQ ID NO: 334709
  Synthetic oligonucleotide

SEQ ID NO: 550738 - DNA, 58 bp, Artificial; identical to SEQ ID NO: 334710
  Synthetic oligonucleotide

SEQ ID NO: 550739 - DNA, 55 bp, Artificial; identical to SEQ ID NO: 334712
  Synthetic oligonucleotide

SEQ ID NO: 550740 - DNA, 55 bp, Artificial; identical to SEQ ID NO: 334714
  Synthetic oligonucleotide

SEQ ID NO: 550741 - DNA, 60 bp, Artificial; identical to SEQ ID NO: 334715
  Synthetic oligonucleotide

SEQ ID NO: 550742 - DNA, 60 bp, Artificial; identical to SEQ ID NO: 334716
  Synthetic oligonucleotide

SEQ ID NO: 550743 - DNA, 59 bp, Artificial; identical to SEQ ID NO: 334719
  Synthetic oligonucleotide

SEQ ID NO: 550744 - DNA, 51 bp, Artificial; identical to SEQ ID NO: 334720
  Synthetic oligonucleotide

SEQ ID NO: 550745 - DNA, 60 bp, Artificial; identical to SEQ ID NO: 334721
  Synthetic oligonucleotide

SEQ ID NO: 550746 - DNA, 60 bp, Artificial; identical to SEQ ID NO: 334723
  Synthetic oligonucleotide

SEQ ID NO: 550747 - DNA, 55 bp, Artificial; identical to SEQ ID NO: 11969
  Synthetic oligonucleotide

SEQ ID NO: 550748 - DNA, 55 bp, Artificial; identical to SEQ ID NO: 334728
  Synthetic oligonucleotide

SEQ ID NO: 550749 - DNA, 50 bp, Artificial; identical to SEQ ID NO: 334730
  Synthetic oligonucleotide

SEQ ID NO: 550750 - DNA, 55 bp, Artificial; identical to SEQ ID NO: 334731
  Synthetic oligonucleotide

SEQ ID NO: 550751 - DNA, 53 bp, Artificial; identical to SEQ ID NO: 334732
  Synthetic oligonucleotide

SEQ ID NO: 550752 - DNA, 60 bp, Artificial; identical to SEQ ID NO: 12632
  Synthetic oligonucleotide

SEQ ID NO: 550753 - DNA, 58 bp, Artificial; identical to SEQ ID NO: 334736
  Synthetic oligonucleotide

SEQ ID NO: 550754 - DNA, 55 bp, Artificial; identical to SEQ ID NO: 334741
  Synthetic oligonucleotide

SEQ ID NO: 550755 - DNA, 60 bp, Artificial; identical to SEQ ID NO: 334742
  Synthetic oligonucleotide

SEQ ID NO: 550756 - DNA, 58 bp, Artificial; identical to SEQ ID NO: 334743
  Synthetic oligonucleotide

SEQ ID NO: 550757 - DNA, 54 bp, Artificial; identical to SEQ ID NO: 334745
  Synthetic oligonucleotide

SEQ ID NO: 550758 - DNA, 59 bp, Artificial; identical to SEQ ID NO: 334749
  Synthetic oligonucleotide

SEQ ID NO: 550759 - DNA, 60 bp, Artificial; identical to SEQ ID NO: 334750
  Synthetic oligonucleotide

SEQ ID NO: 550760 - DNA, 60 bp, Artificial; identical to SEQ ID NO: 334752
  Synthetic oligonucleotide

SEQ ID NO: 550761 - DNA, 56 bp, Artificial; identical to SEQ ID NO: 334755
  Synthetic oligonucleotide

SEQ ID NO: 550762 - DNA, 60 bp, Artificial; identical to SEQ ID NO: 334756
  Synthetic oligonucleotide

SEQ ID NO: 550763 - DNA, 60 bp, Artificial; identical to SEQ ID NO: 334760
  Synthetic oligonucleotide

SEQ ID NO: 550764 - DNA, 55 bp, Artificial; identical to SEQ ID NO: 334761
  Synthetic oligonucleotide

SEQ ID NO: 550765 - DNA, 50 bp, Artificial; identical to SEQ ID NO: 334764
  Synthetic oligonucleotide

SEQ ID NO: 550766 - DNA, 55 bp, Artificial; identical to SEQ ID NO: 334771
  Synthetic oligonucleotide

SEQ ID NO: 550767 - DNA, 55 bp, Artificial; identical to SEQ ID NO: 334772
  Synthetic oligonucleotide

SEQ ID NO: 550768 - DNA, 55 bp, Artificial; identical to SEQ ID NO: 334773
  Synthetic oligonucleotide

SEQ ID NO: 550769 - DNA, 59 bp, Artificial; identical to SEQ ID NO: 334774
  Synthetic oligonucleotide

SEQ ID NO: 550770 - DNA, 54 bp, Artificial; identical to SEQ ID NO: 334776
  Synthetic oligonucleotide

SEQ ID NO: 550771 - DNA, 55 bp, Artificial; identical to SEQ ID NO: 334777
  Synthetic oligonucleotide

SEQ ID NO: 550772 - DNA, 60 bp, Artificial; identical to SEQ ID NO: 334779
  Synthetic oligonucleotide

SEQ ID NO: 550773 - DNA, 55 bp, Artificial; identical to SEQ ID NO: 334780
  Synthetic oligonucleotide

SEQ ID NO: 550774 - DNA, 60 bp, Artificial; identical to SEQ ID NO: 334781
  Synthetic oligonucleotide

SEQ ID NO: 550775 - DNA, 55 bp, Artificial; identical to SEQ ID NO: 334783
  Synthetic oligonucleotide

SEQ ID NO: 550776 - DNA, 60 bp, Artificial; identical to SEQ ID NO: 24420
  Synthetic oligonucleotide

SEQ ID NO: 550777 - DNA, 60 bp, Artificial; identical to SEQ ID NO: 334788
  Synthetic oligonucleotide

SEQ ID NO: 550778 - DNA, 58 bp, Artificial; identical to SEQ ID NO: 334789
  Synthetic oligonucleotide

SEQ ID NO: 550779 - DNA, 57 bp, Artificial; identical to SEQ ID NO: 334792
  Synthetic oligonucleotide

SEQ ID NO: 550780 - DNA, 60 bp, Artificial; identical to SEQ ID NO: 334795
  Synthetic oligonucleotide

SEQ ID NO: 550781 - DNA, 60 bp, Artificial; identical to SEQ ID NO: 334796
  Synthetic oligonucleotide

SEQ ID NO: 550782 - DNA, 60 bp, Artificial; identical to SEQ ID NO: 334797
  Synthetic oligonucleotide

SEQ ID NO: 550783 - DNA, 54 bp, Artificial; identical to SEQ ID NO: 334798
  Synthetic oligonucleotide

SEQ ID NO: 550784 - DNA, 60 bp, Artificial; identical to SEQ ID NO: 334799
  Synthetic oligonucleotide

SEQ ID NO: 550785 - DNA, 58 bp, Artificial; identical to SEQ ID NO: 334805
  Synthetic oligonucleotide

SEQ ID NO: 550786 - DNA, 55 bp, Artificial; identical to SEQ ID NO: 334807
  Synthetic oligonucleotide

SEQ ID NO: 550787 - DNA, 60 bp, Artificial; identical to SEQ ID NO: 334808
  Synthetic oligonucleotide

SEQ ID NO: 550788 - DNA, 60 bp, Artificial; identical to SEQ ID NO: 7838
  Synthetic oligonucleotide

SEQ ID NO: 550789 - DNA, 51 bp, Artificial; identical to SEQ ID NO: 334809
  Synthetic oligonucleotide

SEQ ID NO: 550790 - DNA, 55 bp, Artificial; identical to SEQ ID NO: 334813
  Synthetic oligonucleotide

SEQ ID NO: 550791 - DNA, 54 bp, Artificial; identical to SEQ ID NO: 334815
  Synthetic oligonucleotide

SEQ ID NO: 550792 - DNA, 60 bp, Artificial; identical to SEQ ID NO: 334816
  Synthetic oligonucleotide

SEQ ID NO: 550793 - DNA, 58 bp, Artificial; identical to SEQ ID NO: 334819
  Synthetic oligonucleotide

SEQ ID NO: 550794 - DNA, 51 bp, Artificial; identical to SEQ ID NO: 334820
  Synthetic oligonucleotide

SEQ ID NO: 550795 - DNA, 57 bp, Artificial; identical to SEQ ID NO: 334821
  Synthetic oligonucleotide

SEQ ID NO: 550796 - DNA, 59 bp, Artificial; identical to SEQ ID NO: 334822
  Synthetic oligonucleotide

SEQ ID NO: 550797 - DNA, 60 bp, Artificial; identical to SEQ ID NO: 334823
  Synthetic oligonucleotide

SEQ ID NO: 550798 - DNA, 53 bp, Artificial; identical to SEQ ID NO: 334829
  Synthetic oligonucleotide

SEQ ID NO: 550799 - DNA, 60 bp, Artificial; identical to SEQ ID NO: 334830
  Synthetic oligonucleotide

SEQ ID NO: 550800 - DNA, 53 bp, Artificial; identical to SEQ ID NO: 334836
  Synthetic oligonucleotide

SEQ ID NO: 550801 - DNA, 60 bp, Artificial; identical to SEQ ID NO: 334840
  Synthetic oligonucleotide

SEQ ID NO: 550802 - DNA, 59 bp, Artificial; identical to SEQ ID NO: 334844
  Synthetic oligonucleotide

SEQ ID NO: 550803 - DNA, 58 bp, Artificial; identical to SEQ ID NO: 334848
  Synthetic oligonucleotide

SEQ ID NO: 550804 - DNA, 60 bp, Artificial; identical to SEQ ID NO: 334851
  Synthetic oligonucleotide

SEQ ID NO: 550805 - DNA, 57 bp, Artificial; identical to SEQ ID NO: 334855
  Synthetic oligonucleotide

SEQ ID NO: 550806 - DNA, 60 bp, Artificial; identical to SEQ ID NO: 334861
  Synthetic oligonucleotide

SEQ ID NO: 550807 - DNA, 56 bp, Artificial; identical to SEQ ID NO: 334863
  Synthetic oligonucleotide

SEQ ID NO: 550808 - DNA, 56 bp, Artificial; identical to SEQ ID NO: 334864
  Synthetic oligonucleotide

SEQ ID NO: 550809 - DNA, 60 bp, Artificial; identical to SEQ ID NO: 334866
  Synthetic oligonucleotide

SEQ ID NO: 550810 - DNA, 60 bp, Artificial; identical to SEQ ID NO: 334867
  Synthetic oligonucleotide

SEQ ID NO: 550811 - DNA, 57 bp, Artificial; identical to SEQ ID NO: 334868
  Synthetic oligonucleotide

SEQ ID NO: 550812 - DNA, 58 bp, Artificial; identical to SEQ ID NO: 334869
  Synthetic oligonucleotide

SEQ ID NO: 550813 - DNA, 59 bp, Artificial; identical to SEQ ID NO: 334872
  Synthetic oligonucleotide

SEQ ID NO: 550814 - DNA, 56 bp, Artificial; identical to SEQ ID NO: 334875
  Synthetic oligonucleotide

SEQ ID NO: 550815 - DNA, 60 bp, Artificial; identical to SEQ ID NO: 334879
  Synthetic oligonucleotide

SEQ ID NO: 550816 - DNA, 60 bp, Artificial; identical to SEQ ID NO: 334881
  Synthetic oligonucleotide

SEQ ID NO: 550817 - DNA, 56 bp, Artificial; identical to SEQ ID NO: 334882
  Synthetic oligonucleotide

SEQ ID NO: 550818 - DNA, 60 bp, Artificial; identical to SEQ ID NO: 334886
  Synthetic oligonucleotide

SEQ ID NO: 550819 - DNA, 60 bp, Artificial; identical to SEQ ID NO: 334887
  Synthetic oligonucleotide

SEQ ID NO: 550820 - DNA, 56 bp, Artificial; identical to SEQ ID NO: 334890
  Synthetic oligonucleotide

SEQ ID NO: 550821 - DNA, 55 bp, Artificial; identical to SEQ ID NO: 334891
  Synthetic oligonucleotide

SEQ ID NO: 550822 - DNA, 54 bp, Artificial; identical to SEQ ID NO: 334892
  Synthetic oligonucleotide

SEQ ID NO: 550823 - DNA, 59 bp, Artificial; identical to SEQ ID NO: 334894
  Synthetic oligonucleotide

SEQ ID NO: 550824 - DNA, 60 bp, Artificial; identical to SEQ ID NO: 334895
  Synthetic oligonucleotide

SEQ ID NO: 550825 - DNA, 60 bp, Artificial; identical to SEQ ID NO: 334896
  Synthetic oligonucleotide

SEQ ID NO: 550826 - DNA, 60 bp, Artificial; identical to SEQ ID NO: 334897
  Synthetic oligonucleotide

SEQ ID NO: 550827 - DNA, 54 bp, Artificial; identical to SEQ ID NO: 334903
  Synthetic oligonucleotide

SEQ ID NO: 550828 - DNA, 57 bp, Artificial; identical to SEQ ID NO: 334905
  Synthetic oligonucleotide

SEQ ID NO: 550829 - DNA, 60 bp, Artificial; identical to SEQ ID NO: 334907
  Synthetic oligonucleotide

SEQ ID NO: 550830 - DNA, 55 bp, Artificial; identical to SEQ ID NO: 334912
  Synthetic oligonucleotide

SEQ ID NO: 550831 - DNA, 57 bp, Artificial; identical to SEQ ID NO: 334913
  Synthetic oligonucleotide

SEQ ID NO: 550832 - DNA, 60 bp, Artificial; identical to SEQ ID NO: 334916
  Synthetic oligonucleotide

SEQ ID NO: 550833 - DNA, 55 bp, Artificial; identical to SEQ ID NO: 334918
  Synthetic oligonucleotide

SEQ ID NO: 550834 - DNA, 54 bp, Artificial; identical to SEQ ID NO: 334920
  Synthetic oligonucleotide

SEQ ID NO: 550835 - DNA, 60 bp, Artificial; identical to SEQ ID NO: 334921
  Synthetic oligonucleotide

SEQ ID NO: 550836 - DNA, 60 bp, Artificial; identical to SEQ ID NO: 334922
  Synthetic oligonucleotide

SEQ ID NO: 550837 - DNA, 60 bp, Artificial; identical to SEQ ID NO: 334923
  Synthetic oligonucleotide

SEQ ID NO: 550838 - DNA, 55 bp, Artificial; identical to SEQ ID NO: 334928
  Synthetic oligonucleotide

SEQ ID NO: 550839 - DNA, 60 bp, Artificial; identical to SEQ ID NO: 334931
  Synthetic oligonucleotide

SEQ ID NO: 550840 - DNA, 59 bp, Artificial; identical to SEQ ID NO: 334932
  Synthetic oligonucleotide

SEQ ID NO: 550841 - DNA, 60 bp, Artificial; identical to SEQ ID NO: 334933
  Synthetic oligonucleotide

SEQ ID NO: 550842 - DNA, 50 bp, Artificial; identical to SEQ ID NO: 334934
  Synthetic oligonucleotide

SEQ ID NO: 550843 - DNA, 60 bp, Artificial; identical to SEQ ID NO: 334936
  Synthetic oligonucleotide

SEQ ID NO: 550844 - DNA, 58 bp, Artificial; identical to SEQ ID NO: 334937
  Synthetic oligonucleotide

SEQ ID NO: 550845 - DNA, 60 bp, Artificial; identical to SEQ ID NO: 334945
  Synthetic oligonucleotide

SEQ ID NO: 550846 - DNA, 60 bp, Artificial; identical to SEQ ID NO: 334948
  Synthetic oligonucleotide

SEQ ID NO: 550847 - DNA, 60 bp, Artificial; identical to SEQ ID NO: 334949
  Synthetic oligonucleotide

SEQ ID NO: 550848 - DNA, 60 bp, Artificial; identical to SEQ ID NO: 334951
  Synthetic oligonucleotide

SEQ ID NO: 550849 - DNA, 58 bp, Artificial; identical to SEQ ID NO: 334952
  Synthetic oligonucleotide

SEQ ID NO: 550850 - DNA, 56 bp, Artificial; identical to SEQ ID NO: 10998
  Synthetic oligonucleotide

SEQ ID NO: 550851 - DNA, 55 bp, Artificial; identical to SEQ ID NO: 334953
  Synthetic oligonucleotide

SEQ ID NO: 550852 - DNA, 53 bp, Artificial; identical to SEQ ID NO: 334954
  Synthetic oligonucleotide

SEQ ID NO: 550853 - DNA, 54 bp, Artificial; identical to SEQ ID NO: 334957
  Synthetic oligonucleotide

SEQ ID NO: 550854 - DNA, 54 bp, Artificial; identical to SEQ ID NO: 334960
  Synthetic oligonucleotide

SEQ ID NO: 550855 - DNA, 55 bp, Artificial; identical to SEQ ID NO: 136
  Synthetic oligonucleotide

SEQ ID NO: 550856 - DNA, 60 bp, Artificial; identical to SEQ ID NO: 334961
  Synthetic oligonucleotide

SEQ ID NO: 550857 - DNA, 60 bp, Artificial; identical to SEQ ID NO: 334962
  Synthetic oligonucleotide

SEQ ID NO: 550858 - DNA, 55 bp, Artificial; identical to SEQ ID NO: 334963
  Synthetic oligonucleotide

SEQ ID NO: 550859 - DNA, 51 bp, Artificial; identical to SEQ ID NO: 334964
  Synthetic oligonucleotide

SEQ ID NO: 550860 - DNA, 50 bp, Artificial; identical to SEQ ID NO: 334965
  Synthetic oligonucleotide

SEQ ID NO: 550861 - DNA, 50 bp, Artificial; identical to SEQ ID NO: 334967
  Synthetic oligonucleotide

SEQ ID NO: 550862 - DNA, 59 bp, Artificial; identical to SEQ ID NO: 334969
  Synthetic oligonucleotide

SEQ ID NO: 550863 - DNA, 55 bp, Artificial; identical to SEQ ID NO: 334973
  Synthetic oligonucleotide

SEQ ID NO: 550864 - DNA, 57 bp, Artificial; identical to SEQ ID NO: 334974
  Synthetic oligonucleotide

SEQ ID NO: 550865 - DNA, 58 bp, Artificial; identical to SEQ ID NO: 334975
  Synthetic oligonucleotide

SEQ ID NO: 550866 - DNA, 60 bp, Artificial; identical to SEQ ID NO: 334977
  Synthetic oligonucleotide

SEQ ID NO: 550867 - DNA, 57 bp, Artificial; identical to SEQ ID NO: 334978
  Synthetic oligonucleotide

SEQ ID NO: 550868 - DNA, 59 bp, Artificial; identical to SEQ ID NO: 334980
  Synthetic oligonucleotide

SEQ ID NO: 550869 - DNA, 60 bp, Artificial; identical to SEQ ID NO: 334981
  Synthetic oligonucleotide

SEQ ID NO: 550870 - DNA, 60 bp, Artificial; identical to SEQ ID NO: 334983
  Synthetic oligonucleotide

SEQ ID NO: 550871 - DNA, 54 bp, Artificial; identical to SEQ ID NO: 334984
  Synthetic oligonucleotide

SEQ ID NO: 550872 - DNA, 55 bp, Artificial; identical to SEQ ID NO: 334986
  Synthetic oligonucleotide

SEQ ID NO: 550873 - DNA, 52 bp, Artificial; identical to SEQ ID NO: 334987
  Synthetic oligonucleotide

SEQ ID NO: 550874 - DNA, 55 bp, Artificial; identical to SEQ ID NO: 334989
  Synthetic oligonucleotide

SEQ ID NO: 550875 - DNA, 60 bp, Artificial; identical to SEQ ID NO: 334990
  Synthetic oligonucleotide

SEQ ID NO: 550876 - DNA, 60 bp, Artificial; identical to SEQ ID NO: 334992
  Synthetic oligonucleotide

SEQ ID NO: 550877 - DNA, 60 bp, Artificial; identical to SEQ ID NO: 334993
  Synthetic oligonucleotide

SEQ ID NO: 550878 - DNA, 60 bp, Artificial; identical to SEQ ID NO: 334994
  Synthetic oligonucleotide

SEQ ID NO: 550879 - DNA, 55 bp, Artificial; identical to SEQ ID NO: 334996
  Synthetic oligonucleotide

SEQ ID NO: 550880 - DNA, 53 bp, Artificial; identical to SEQ ID NO: 20179
  Synthetic oligonucleotide

SEQ ID NO: 550881 - DNA, 55 bp, Artificial; identical to SEQ ID NO: 335001
  Synthetic oligonucleotide

SEQ ID NO: 550882 - DNA, 60 bp, Artificial; identical to SEQ ID NO: 335007
  Synthetic oligonucleotide

SEQ ID NO: 550883 - DNA, 55 bp, Artificial; identical to SEQ ID NO: 335008
  Synthetic oligonucleotide

SEQ ID NO: 550884 - DNA, 59 bp, Artificial; identical to SEQ ID NO: 335009
  Synthetic oligonucleotide

SEQ ID NO: 550885 - DNA, 50 bp, Artificial; identical to SEQ ID NO: 335010
  Synthetic oligonucleotide

SEQ ID NO: 550886 - DNA, 55 bp, Artificial; identical to SEQ ID NO: 335011
  Synthetic oligonucleotide

SEQ ID NO: 550887 - DNA, 60 bp, Artificial; identical to SEQ ID NO: 335012
  Synthetic oligonucleotide

SEQ ID NO: 550888 - DNA, 58 bp, Artificial; identical to SEQ ID NO: 335013
  Synthetic oligonucleotide

SEQ ID NO: 550889 - DNA, 57 bp, Artificial; identical to SEQ ID NO: 335019
  Synthetic oligonucleotide

SEQ ID NO: 550890 - DNA, 55 bp, Artificial; identical to SEQ ID NO: 335020
  Synthetic oligonucleotide

SEQ ID NO: 550891 - DNA, 54 bp, Artificial; identical to SEQ ID NO: 17288
  Synthetic oligonucleotide

SEQ ID NO: 550892 - DNA, 58 bp, Artificial; identical to SEQ ID NO: 335026
  Synthetic oligonucleotide

SEQ ID NO: 550893 - DNA, 58 bp, Artificial; identical to SEQ ID NO: 335027
  Synthetic oligonucleotide

SEQ ID NO: 550894 - DNA, 55 bp, Artificial; identical to SEQ ID NO: 335028
  Synthetic oligonucleotide

SEQ ID NO: 550895 - DNA, 60 bp, Artificial; identical to SEQ ID NO: 335029
  Synthetic oligonucleotide

SEQ ID NO: 550896 - DNA, 60 bp, Artificial; identical to SEQ ID NO: 12478
  Synthetic oligonucleotide

SEQ ID NO: 550897 - DNA, 55 bp, Artificial; identical to SEQ ID NO: 335031
  Synthetic oligonucleotide

SEQ ID NO: 550898 - DNA, 55 bp, Artificial; identical to SEQ ID NO: 335033
  Synthetic oligonucleotide

SEQ ID NO: 550899 - DNA, 56 bp, Artificial; identical to SEQ ID NO: 335034
  Synthetic oligonucleotide

SEQ ID NO: 550900 - DNA, 59 bp, Artificial; identical to SEQ ID NO: 335035
  Synthetic oligonucleotide

SEQ ID NO: 550901 - DNA, 60 bp, Artificial; identical to SEQ ID NO: 335042
  Synthetic oligonucleotide

SEQ ID NO: 550902 - DNA, 56 bp, Artificial; identical to SEQ ID NO: 19925
  Synthetic oligonucleotide

SEQ ID NO: 550903 - DNA, 60 bp, Artificial; identical to SEQ ID NO: 335045
  Synthetic oligonucleotide

SEQ ID NO: 550904 - DNA, 58 bp, Artificial; identical to SEQ ID NO: 335051
  Synthetic oligonucleotide

SEQ ID NO: 550905 - DNA, 53 bp, Artificial; identical to SEQ ID NO: 335056
  Synthetic oligonucleotide

SEQ ID NO: 550906 - DNA, 54 bp, Artificial; identical to SEQ ID NO: 335057
  Synthetic oligonucleotide

SEQ ID NO: 550907 - DNA, 56 bp, Artificial; identical to SEQ ID NO: 335058
  Synthetic oligonucleotide

SEQ ID NO: 550908 - DNA, 54 bp, Artificial; identical to SEQ ID NO: 335059
  Synthetic oligonucleotide

SEQ ID NO: 550909 - DNA, 55 bp, Artificial; identical to SEQ ID NO: 335060
  Synthetic oligonucleotide

SEQ ID NO: 550910 - DNA, 59 bp, Artificial; identical to SEQ ID NO: 17370
  Synthetic oligonucleotide

SEQ ID NO: 550911 - DNA, 56 bp, Artificial; identical to SEQ ID NO: 335062
  Synthetic oligonucleotide

SEQ ID NO: 550912 - DNA, 55 bp, Artificial; identical to SEQ ID NO: 335068
  Synthetic oligonucleotide

SEQ ID NO: 550913 - DNA, 58 bp, Artificial; identical to SEQ ID NO: 335069
  Synthetic oligonucleotide

SEQ ID NO: 550914 - DNA, 59 bp, Artificial; identical to SEQ ID NO: 335070
  Synthetic oligonucleotide

SEQ ID NO: 550915 - DNA, 56 bp, Artificial; identical to SEQ ID NO: 335071
  Synthetic oligonucleotide

SEQ ID NO: 550916 - DNA, 53 bp, Artificial; identical to SEQ ID NO: 335072
  Synthetic oligonucleotide

SEQ ID NO: 550917 - DNA, 60 bp, Artificial; identical to SEQ ID NO: 335074
  Synthetic oligonucleotide

SEQ ID NO: 550918 - DNA, 55 bp, Artificial; identical to SEQ ID NO: 335075
  Synthetic oligonucleotide

SEQ ID NO: 550919 - DNA, 54 bp, Artificial; identical to SEQ ID NO: 335076
  Synthetic oligonucleotide

SEQ ID NO: 550920 - DNA, 60 bp, Artificial; identical to SEQ ID NO: 335078
  Synthetic oligonucleotide

SEQ ID NO: 550921 - DNA, 60 bp, Artificial; identical to SEQ ID NO: 335079
  Synthetic oligonucleotide

SEQ ID NO: 550922 - DNA, 58 bp, Artificial; identical to SEQ ID NO: 335080
  Synthetic oligonucleotide

SEQ ID NO: 550923 - DNA, 57 bp, Artificial; identical to SEQ ID NO: 335081
  Synthetic oligonucleotide

SEQ ID NO: 550924 - DNA, 59 bp, Artificial; identical to SEQ ID NO: 19188
  Synthetic oligonucleotide

SEQ ID NO: 550925 - DNA, 57 bp, Artificial; identical to SEQ ID NO: 335084
  Synthetic oligonucleotide

SEQ ID NO: 550926 - DNA, 50 bp, Artificial; identical to SEQ ID NO: 335086
  Synthetic oligonucleotide

SEQ ID NO: 550927 - DNA, 57 bp, Artificial; identical to SEQ ID NO: 335090
  Synthetic oligonucleotide

SEQ ID NO: 550928 - DNA, 60 bp, Artificial; identical to SEQ ID NO: 335094
  Synthetic oligonucleotide

SEQ ID NO: 550929 - DNA, 59 bp, Artificial; identical to SEQ ID NO: 335095
  Synthetic oligonucleotide

SEQ ID NO: 550930 - DNA, 59 bp, Artificial; identical to SEQ ID NO: 335097
  Synthetic oligonucleotide

SEQ ID NO: 550931 - DNA, 59 bp, Artificial; identical to SEQ ID NO: 335098
  Synthetic oligonucleotide

SEQ ID NO: 550932 - DNA, 55 bp, Artificial; identical to SEQ ID NO: 335101
  Synthetic oligonucleotide

SEQ ID NO: 550933 - DNA, 60 bp, Artificial; identical to SEQ ID NO: 335102
  Synthetic oligonucleotide

SEQ ID NO: 550934 - DNA, 57 bp, Artificial; identical to SEQ ID NO: 335103
  Synthetic oligonucleotide

SEQ ID NO: 550935 - DNA, 56 bp, Artificial; identical to SEQ ID NO: 335104
  Synthetic oligonucleotide

SEQ ID NO: 550936 - DNA, 51 bp, Artificial; identical to SEQ ID NO: 335106
  Synthetic oligonucleotide

SEQ ID NO: 550937 - DNA, 58 bp, Artificial; identical to SEQ ID NO: 335108
  Synthetic oligonucleotide

SEQ ID NO: 550938 - DNA, 55 bp, Artificial; identical to SEQ ID NO: 335109
  Synthetic oligonucleotide

SEQ ID NO: 550939 - DNA, 55 bp, Artificial; identical to SEQ ID NO: 335111
  Synthetic oligonucleotide

SEQ ID NO: 550940 - DNA, 54 bp, Artificial; identical to SEQ ID NO: 335112
  Synthetic oligonucleotide

SEQ ID NO: 550941 - DNA, 55 bp, Artificial; identical to SEQ ID NO: 335114
  Synthetic oligonucleotide

SEQ ID NO: 550942 - DNA, 55 bp, Artificial; identical to SEQ ID NO: 335115
  Synthetic oligonucleotide

SEQ ID NO: 550943 - DNA, 58 bp, Artificial; identical to SEQ ID NO: 335116
  Synthetic oligonucleotide

SEQ ID NO: 550944 - DNA, 58 bp, Artificial; identical to SEQ ID NO: 335118
  Synthetic oligonucleotide

SEQ ID NO: 550945 - DNA, 55 bp, Artificial; identical to SEQ ID NO: 335123
  Synthetic oligonucleotide

SEQ ID NO: 550946 - DNA, 54 bp, Artificial; identical to SEQ ID NO: 335128
  Synthetic oligonucleotide

SEQ ID NO: 550947 - DNA, 57 bp, Artificial; identical to SEQ ID NO: 335129
  Synthetic oligonucleotide

SEQ ID NO: 550948 - DNA, 57 bp, Artificial; identical to SEQ ID NO: 335130
  Synthetic oligonucleotide

SEQ ID NO: 550949 - DNA, 53 bp, Artificial; identical to SEQ ID NO: 335131
  Synthetic oligonucleotide

SEQ ID NO: 550950 - DNA, 58 bp, Artificial; identical to SEQ ID NO: 335133
  Synthetic oligonucleotide

SEQ ID NO: 550951 - DNA, 60 bp, Artificial; identical to SEQ ID NO: 335135
  Synthetic oligonucleotide

SEQ ID NO: 550952 - DNA, 53 bp, Artificial; identical to SEQ ID NO: 335136
  Synthetic oligonucleotide

SEQ ID NO: 550953 - DNA, 57 bp, Artificial; identical to SEQ ID NO: 335137
  Synthetic oligonucleotide

SEQ ID NO: 550954 - DNA, 59 bp, Artificial; identical to SEQ ID NO: 335138
  Synthetic oligonucleotide

SEQ ID NO: 550955 - DNA, 60 bp, Artificial; identical to SEQ ID NO: 335139
  Synthetic oligonucleotide

SEQ ID NO: 550956 - DNA, 56 bp, Artificial; identical to SEQ ID NO: 335140
  Synthetic oligonucleotide

SEQ ID NO: 550957 - DNA, 54 bp, Artificial; identical to SEQ ID NO: 335141
  Synthetic oligonucleotide

SEQ ID NO: 550958 - DNA, 51 bp, Artificial; identical to SEQ ID NO: 335142
  Synthetic oligonucleotide

SEQ ID NO: 550959 - DNA, 53 bp, Artificial; identical to SEQ ID NO: 335143
  Synthetic oligonucleotide

SEQ ID NO: 550960 - DNA, 58 bp, Artificial; identical to SEQ ID NO: 335144
  Synthetic oligonucleotide

SEQ ID NO: 550961 - DNA, 59 bp, Artificial; identical to SEQ ID NO: 335146
  Synthetic oligonucleotide

SEQ ID NO: 550962 - DNA, 55 bp, Artificial; identical to SEQ ID NO: 335147
  Synthetic oligonucleotide

SEQ ID NO: 550963 - DNA, 55 bp, Artificial; identical to SEQ ID NO: 335148
  Synthetic oligonucleotide

SEQ ID NO: 550964 - DNA, 60 bp, Artificial; identical to SEQ ID NO: 335150
  Synthetic oligonucleotide

SEQ ID NO: 550965 - DNA, 58 bp, Artificial; identical to SEQ ID NO: 335151
  Synthetic oligonucleotide

SEQ ID NO: 550966 - DNA, 50 bp, Artificial; identical to SEQ ID NO: 335152
  Synthetic oligonucleotide

SEQ ID NO: 550967 - DNA, 53 bp, Artificial; identical to SEQ ID NO: 335154
  Synthetic oligonucleotide

SEQ ID NO: 550968 - DNA, 58 bp, Artificial; identical to SEQ ID NO: 335160
  Synthetic oligonucleotide

SEQ ID NO: 550969 - DNA, 54 bp, Artificial; identical to SEQ ID NO: 335165
  Synthetic oligonucleotide

SEQ ID NO: 550970 - DNA, 60 bp, Artificial; identical to SEQ ID NO: 335166
  Synthetic oligonucleotide

SEQ ID NO: 550971 - DNA, 60 bp, Artificial; identical to SEQ ID NO: 335167
  Synthetic oligonucleotide

SEQ ID NO: 550972 - DNA, 59 bp, Artificial; identical to SEQ ID NO: 335168
  Synthetic oligonucleotide

SEQ ID NO: 550973 - DNA, 55 bp, Artificial; identical to SEQ ID NO: 335169
  Synthetic oligonucleotide

SEQ ID NO: 550974 - DNA, 56 bp, Artificial; identical to SEQ ID NO: 335170
  Synthetic oligonucleotide

SEQ ID NO: 550975 - DNA, 60 bp, Artificial; identical to SEQ ID NO: 335173
  Synthetic oligonucleotide

SEQ ID NO: 550976 - DNA, 55 bp, Artificial; identical to SEQ ID NO: 335174
  Synthetic oligonucleotide

SEQ ID NO: 550977 - DNA, 57 bp, Artificial; identical to SEQ ID NO: 335176
  Synthetic oligonucleotide

SEQ ID NO: 550978 - DNA, 55 bp, Artificial; identical to SEQ ID NO: 335177
  Synthetic oligonucleotide

SEQ ID NO: 550979 - DNA, 57 bp, Artificial; identical to SEQ ID NO: 335178
  Synthetic oligonucleotide

SEQ ID NO: 550980 - DNA, 60 bp, Artificial; identical to SEQ ID NO: 335182
  Synthetic oligonucleotide

SEQ ID NO: 550981 - DNA, 60 bp, Artificial; identical to SEQ ID NO: 335183
  Synthetic oligonucleotide

SEQ ID NO: 550982 - DNA, 55 bp, Artificial; identical to SEQ ID NO: 335185
  Synthetic oligonucleotide

SEQ ID NO: 550983 - DNA, 59 bp, Artificial; identical to SEQ ID NO: 335188
  Synthetic oligonucleotide

SEQ ID NO: 550984 - DNA, 60 bp, Artificial; identical to SEQ ID NO: 335191
  Synthetic oligonucleotide

SEQ ID NO: 550985 - DNA, 60 bp, Artificial; identical to SEQ ID NO: 335196
  Synthetic oligonucleotide

SEQ ID NO: 550986 - DNA, 59 bp, Artificial; identical to SEQ ID NO: 335203
  Synthetic oligonucleotide

SEQ ID NO: 550987 - DNA, 50 bp, Artificial; identical to SEQ ID NO: 335205
  Synthetic oligonucleotide

SEQ ID NO: 550988 - DNA, 56 bp, Artificial; identical to SEQ ID NO: 335206
  Synthetic oligonucleotide

SEQ ID NO: 550989 - DNA, 54 bp, Artificial; identical to SEQ ID NO: 335209
  Synthetic oligonucleotide

SEQ ID NO: 550990 - DNA, 56 bp, Artificial; identical to SEQ ID NO: 335210
  Synthetic oligonucleotide

SEQ ID NO: 550991 - DNA, 57 bp, Artificial; identical to SEQ ID NO: 335211
  Synthetic oligonucleotide

SEQ ID NO: 550992 - DNA, 59 bp, Artificial; identical to SEQ ID NO: 335214
  Synthetic oligonucleotide

SEQ ID NO: 550993 - DNA, 50 bp, Artificial; identical to SEQ ID NO: 9565
  Synthetic oligonucleotide

SEQ ID NO: 550994 - DNA, 51 bp, Artificial; identical to SEQ ID NO: 335216
  Synthetic oligonucleotide

SEQ ID NO: 550995 - DNA, 60 bp, Artificial; identical to SEQ ID NO: 335218
  Synthetic oligonucleotide

SEQ ID NO: 550996 - DNA, 55 bp, Artificial; identical to SEQ ID NO: 335221
  Synthetic oligonucleotide

SEQ ID NO: 550997 - DNA, 58 bp, Artificial; identical to SEQ ID NO: 335224
  Synthetic oligonucleotide

SEQ ID NO: 550998 - DNA, 59 bp, Artificial; identical to SEQ ID NO: 335225
  Synthetic oligonucleotide

SEQ ID NO: 550999 - DNA, 58 bp, Artificial; identical to SEQ ID NO: 335226
  Synthetic oligonucleotide

SEQ ID NO: 551000 - DNA, 58 bp, Artificial; identical to SEQ ID NO: 335227
  Synthetic oligonucleotide

SEQ ID NO: 551001 - DNA, 56 bp, Artificial; identical to SEQ ID NO: 335229
  Synthetic oligonucleotide

SEQ ID NO: 551002 - DNA, 60 bp, Artificial; identical to SEQ ID NO: 335231
  Synthetic oligonucleotide

SEQ ID NO: 551003 - DNA, 51 bp, Artificial; identical to SEQ ID NO: 335235
  Synthetic oligonucleotide

SEQ ID NO: 551004 - DNA, 58 bp, Artificial; identical to SEQ ID NO: 335236
  Synthetic oligonucleotide

SEQ ID NO: 551005 - DNA, 55 bp, Artificial; identical to SEQ ID NO: 335237
  Synthetic oligonucleotide

SEQ ID NO: 551006 - DNA, 60 bp, Artificial; identical to SEQ ID NO: 335238
  Synthetic oligonucleotide

SEQ ID NO: 551007 - DNA, 55 bp, Artificial; identical to SEQ ID NO: 335239
  Synthetic oligonucleotide

SEQ ID NO: 551008 - DNA, 57 bp, Artificial; identical to SEQ ID NO: 335240
  Synthetic oligonucleotide

SEQ ID NO: 551009 - DNA, 55 bp, Artificial; identical to SEQ ID NO: 335242
  Synthetic oligonucleotide

SEQ ID NO: 551010 - DNA, 60 bp, Artificial; identical to SEQ ID NO: 7542
  Synthetic oligonucleotide

SEQ ID NO: 551011 - DNA, 56 bp, Artificial; identical to SEQ ID NO: 335247
  Synthetic oligonucleotide

SEQ ID NO: 551012 - DNA, 58 bp, Artificial; identical to SEQ ID NO: 335248
  Synthetic oligonucleotide

SEQ ID NO: 551013 - DNA, 55 bp, Artificial; identical to SEQ ID NO: 335250
  Synthetic oligonucleotide

SEQ ID NO: 551014 - DNA, 58 bp, Artificial; identical to SEQ ID NO: 335251
  Synthetic oligonucleotide

SEQ ID NO: 551015 - DNA, 50 bp, Artificial; identical to SEQ ID NO: 335252
  Synthetic oligonucleotide

SEQ ID NO: 551016 - DNA, 59 bp, Artificial; identical to SEQ ID NO: 335255
  Synthetic oligonucleotide

SEQ ID NO: 551017 - DNA, 60 bp, Artificial; identical to SEQ ID NO: 335257
  Synthetic oligonucleotide

SEQ ID NO: 551018 - DNA, 60 bp, Artificial; identical to SEQ ID NO: 6734
  Synthetic oligonucleotide

SEQ ID NO: 551019 - DNA, 56 bp, Artificial; identical to SEQ ID NO: 335259
  Synthetic oligonucleotide

SEQ ID NO: 551020 - DNA, 60 bp, Artificial; identical to SEQ ID NO: 335260
  Synthetic oligonucleotide

SEQ ID NO: 551021 - DNA, 57 bp, Artificial; identical to SEQ ID NO: 335261
  Synthetic oligonucleotide

SEQ ID NO: 551022 - DNA, 54 bp, Artificial; identical to SEQ ID NO: 335264
  Synthetic oligonucleotide

SEQ ID NO: 551023 - DNA, 57 bp, Artificial; identical to SEQ ID NO: 335266
  Synthetic oligonucleotide

SEQ ID NO: 551024 - DNA, 56 bp, Artificial; identical to SEQ ID NO: 335267
  Synthetic oligonucleotide

SEQ ID NO: 551025 - DNA, 59 bp, Artificial; identical to SEQ ID NO: 335271
  Synthetic oligonucleotide

SEQ ID NO: 551026 - DNA, 55 bp, Artificial; identical to SEQ ID NO: 335277
  Synthetic oligonucleotide

SEQ ID NO: 551027 - DNA, 55 bp, Artificial; identical to SEQ ID NO: 335279
  Synthetic oligonucleotide

SEQ ID NO: 551028 - DNA, 59 bp, Artificial; identical to SEQ ID NO: 335280
  Synthetic oligonucleotide

SEQ ID NO: 551029 - DNA, 55 bp, Artificial; identical to SEQ ID NO: 335282
  Synthetic oligonucleotide

SEQ ID NO: 551030 - DNA, 55 bp, Artificial; identical to SEQ ID NO: 335287
  Synthetic oligonucleotide

SEQ ID NO: 551031 - DNA, 53 bp, Artificial; identical to SEQ ID NO: 335288
  Synthetic oligonucleotide

SEQ ID NO: 551032 - DNA, 60 bp, Artificial; identical to SEQ ID NO: 335292
  Synthetic oligonucleotide

SEQ ID NO: 551033 - DNA, 53 bp, Artificial; identical to SEQ ID NO: 335293
  Synthetic oligonucleotide

SEQ ID NO: 551034 - DNA, 60 bp, Artificial; identical to SEQ ID NO: 335296
  Synthetic oligonucleotide

SEQ ID NO: 551035 - DNA, 60 bp, Artificial; identical to SEQ ID NO: 335297
  Synthetic oligonucleotide

SEQ ID NO: 551036 - DNA, 60 bp, Artificial; identical to SEQ ID NO: 11856
  Synthetic oligonucleotide

SEQ ID NO: 551037 - DNA, 60 bp, Artificial; identical to SEQ ID NO: 335301
  Synthetic oligonucleotide

SEQ ID NO: 551038 - DNA, 55 bp, Artificial; identical to SEQ ID NO: 335302
  Synthetic oligonucleotide

SEQ ID NO: 551039 - DNA, 55 bp, Artificial; identical to SEQ ID NO: 335306
  Synthetic oligonucleotide

SEQ ID NO: 551040 - DNA, 60 bp, Artificial; identical to SEQ ID NO: 335308
  Synthetic oligonucleotide

SEQ ID NO: 551041 - DNA, 58 bp, Artificial; identical to SEQ ID NO: 335311
  Synthetic oligonucleotide

SEQ ID NO: 551042 - DNA, 60 bp, Artificial; identical to SEQ ID NO: 335313
  Synthetic oligonucleotide

SEQ ID NO: 551043 - DNA, 60 bp, Artificial; identical to SEQ ID NO: 335316
  Synthetic oligonucleotide

SEQ ID NO: 551044 - DNA, 60 bp, Artificial; identical to SEQ ID NO: 335318
  Synthetic oligonucleotide

SEQ ID NO: 551045 - DNA, 53 bp, Artificial; identical to SEQ ID NO: 335319
  Synthetic oligonucleotide

SEQ ID NO: 551046 - DNA, 56 bp, Artificial; identical to SEQ ID NO: 335320
  Synthetic oligonucleotide

SEQ ID NO: 551047 - DNA, 60 bp, Artificial; identical to SEQ ID NO: 335323
  Synthetic oligonucleotide

SEQ ID NO: 551048 - DNA, 60 bp, Artificial; identical to SEQ ID NO: 335328
  Synthetic oligonucleotide

SEQ ID NO: 551049 - DNA, 57 bp, Artificial; identical to SEQ ID NO: 335331
  Synthetic oligonucleotide

SEQ ID NO: 551050 - DNA, 60 bp, Artificial; identical to SEQ ID NO: 335333
  Synthetic oligonucleotide

SEQ ID NO: 551051 - DNA, 58 bp, Artificial; identical to SEQ ID NO: 335335
  Synthetic oligonucleotide

SEQ ID NO: 551052 - DNA, 60 bp, Artificial; identical to SEQ ID NO: 335336
  Synthetic oligonucleotide

SEQ ID NO: 551053 - DNA, 51 bp, Artificial; identical to SEQ ID NO: 335337
  Synthetic oligonucleotide

SEQ ID NO: 551054 - DNA, 60 bp, Artificial; identical to SEQ ID NO: 335338
  Synthetic oligonucleotide

SEQ ID NO: 551055 - DNA, 60 bp, Artificial; identical to SEQ ID NO: 335342
  Synthetic oligonucleotide

SEQ ID NO: 551056 - DNA, 60 bp, Artificial; identical to SEQ ID NO: 335347
  Synthetic oligonucleotide

SEQ ID NO: 551057 - DNA, 60 bp, Artificial; identical to SEQ ID NO: 335348
  Synthetic oligonucleotide

SEQ ID NO: 551058 - DNA, 55 bp, Artificial; identical to SEQ ID NO: 335349
  Synthetic oligonucleotide

SEQ ID NO: 551059 - DNA, 55 bp, Artificial; identical to SEQ ID NO: 335355
  Synthetic oligonucleotide

SEQ ID NO: 551060 - DNA, 60 bp, Artificial; identical to SEQ ID NO: 7394
  Synthetic oligonucleotide

SEQ ID NO: 551061 - DNA, 58 bp, Artificial; identical to SEQ ID NO: 335359
  Synthetic oligonucleotide

SEQ ID NO: 551062 - DNA, 59 bp, Artificial; identical to SEQ ID NO: 335361
  Synthetic oligonucleotide

SEQ ID NO: 551063 - DNA, 55 bp, Artificial; identical to SEQ ID NO: 335363
  Synthetic oligonucleotide

SEQ ID NO: 551064 - DNA, 50 bp, Artificial; identical to SEQ ID NO: 335365
  Synthetic oligonucleotide

SEQ ID NO: 551065 - DNA, 60 bp, Artificial; identical to SEQ ID NO: 335366
  Synthetic oligonucleotide

SEQ ID NO: 551066 - DNA, 57 bp, Artificial; identical to SEQ ID NO: 335368
  Synthetic oligonucleotide

SEQ ID NO: 551067 - DNA, 59 bp, Artificial; identical to SEQ ID NO: 335369
  Synthetic oligonucleotide

SEQ ID NO: 551068 - DNA, 60 bp, Artificial; identical to SEQ ID NO: 335373
  Synthetic oligonucleotide

SEQ ID NO: 551069 - DNA, 60 bp, Artificial; identical to SEQ ID NO: 335379
  Synthetic oligonucleotide

SEQ ID NO: 551070 - DNA, 56 bp, Artificial; identical to SEQ ID NO: 335380
  Synthetic oligonucleotide

SEQ ID NO: 551071 - DNA, 52 bp, Artificial; identical to SEQ ID NO: 335381
  Synthetic oligonucleotide

SEQ ID NO: 551072 - DNA, 55 bp, Artificial; identical to SEQ ID NO: 335385
  Synthetic oligonucleotide

SEQ ID NO: 551073 - DNA, 55 bp, Artificial; identical to SEQ ID NO: 335392
  Synthetic oligonucleotide

SEQ ID NO: 551074 - DNA, 60 bp, Artificial; identical to SEQ ID NO: 6300
  Synthetic oligonucleotide

SEQ ID NO: 551075 - DNA, 56 bp, Artificial; identical to SEQ ID NO: 335403
  Synthetic oligonucleotide

SEQ ID NO: 551076 - DNA, 55 bp, Artificial; identical to SEQ ID NO: 335405
  Synthetic oligonucleotide

SEQ ID NO: 551077 - DNA, 60 bp, Artificial; identical to SEQ ID NO: 335406
  Synthetic oligonucleotide

SEQ ID NO: 551078 - DNA, 59 bp, Artificial; identical to SEQ ID NO: 335407
  Synthetic oligonucleotide

SEQ ID NO: 551079 - DNA, 56 bp, Artificial; identical to SEQ ID NO: 335410
  Synthetic oligonucleotide

SEQ ID NO: 551080 - DNA, 54 bp, Artificial; identical to SEQ ID NO: 335411
  Synthetic oligonucleotide

SEQ ID NO: 551081 - DNA, 57 bp, Artificial; identical to SEQ ID NO: 335412
  Synthetic oligonucleotide

SEQ ID NO: 551082 - DNA, 51 bp, Artificial; identical to SEQ ID NO: 335415
  Synthetic oligonucleotide

SEQ ID NO: 551083 - DNA, 56 bp, Artificial; identical to SEQ ID NO: 335416
  Synthetic oligonucleotide

SEQ ID NO: 551084 - DNA, 54 bp, Artificial; identical to SEQ ID NO: 335420
  Synthetic oligonucleotide

SEQ ID NO: 551085 - DNA, 55 bp, Artificial; identical to SEQ ID NO: 335421
  Synthetic oligonucleotide

SEQ ID NO: 551086 - DNA, 58 bp, Artificial; identical to SEQ ID NO: 335422
  Synthetic oligonucleotide

SEQ ID NO: 551087 - DNA, 57 bp, Artificial; identical to SEQ ID NO: 335423
  Synthetic oligonucleotide

SEQ ID NO: 551088 - DNA, 59 bp, Artificial; identical to SEQ ID NO: 335429
  Synthetic oligonucleotide

SEQ ID NO: 551089 - DNA, 59 bp, Artificial; identical to SEQ ID NO: 335430
  Synthetic oligonucleotide

SEQ ID NO: 551090 - DNA, 54 bp, Artificial; identical to SEQ ID NO: 335434
  Synthetic oligonucleotide

SEQ ID NO: 551091 - DNA, 59 bp, Artificial; identical to SEQ ID NO: 19015
  Synthetic oligonucleotide

SEQ ID NO: 551092 - DNA, 53 bp, Artificial; identical to SEQ ID NO: 335442
  Synthetic oligonucleotide

SEQ ID NO: 551093 - DNA, 60 bp, Artificial; identical to SEQ ID NO: 335448
  Synthetic oligonucleotide

SEQ ID NO: 551094 - DNA, 57 bp, Artificial; identical to SEQ ID NO: 335451
  Synthetic oligonucleotide

SEQ ID NO: 551095 - DNA, 60 bp, Artificial; identical to SEQ ID NO: 335456
  Synthetic oligonucleotide

SEQ ID NO: 551096 - DNA, 56 bp, Artificial; identical to SEQ ID NO: 335458
  Synthetic oligonucleotide

SEQ ID NO: 551097 - DNA, 53 bp, Artificial; identical to SEQ ID NO: 335459
  Synthetic oligonucleotide

SEQ ID NO: 551098 - DNA, 60 bp, Artificial; identical to SEQ ID NO: 7094
  Synthetic oligonucleotide

SEQ ID NO: 551099 - DNA, 58 bp, Artificial; identical to SEQ ID NO: 335462
  Synthetic oligonucleotide

SEQ ID NO: 551100 - DNA, 60 bp, Artificial; identical to SEQ ID NO: 335467
  Synthetic oligonucleotide

SEQ ID NO: 551101 - DNA, 60 bp, Artificial; identical to SEQ ID NO: 335471
  Synthetic oligonucleotide

SEQ ID NO: 551102 - DNA, 60 bp, Artificial; identical to SEQ ID NO: 335476
  Synthetic oligonucleotide

SEQ ID NO: 551103 - DNA, 57 bp, Artificial; identical to SEQ ID NO: 335477
  Synthetic oligonucleotide

SEQ ID NO: 551104 - DNA, 58 bp, Artificial; identical to SEQ ID NO: 335481
  Synthetic oligonucleotide

SEQ ID NO: 551105 - DNA, 60 bp, Artificial; identical to SEQ ID NO: 335488
  Synthetic oligonucleotide

SEQ ID NO: 551106 - DNA, 52 bp, Artificial; identical to SEQ ID NO: 335490
  Synthetic oligonucleotide

SEQ ID NO: 551107 - DNA, 60 bp, Artificial; identical to SEQ ID NO: 335499
  Synthetic oligonucleotide

SEQ ID NO: 551108 - DNA, 51 bp, Artificial; identical to SEQ ID NO: 335502
  Synthetic oligonucleotide

SEQ ID NO: 551109 - DNA, 60 bp, Artificial; identical to SEQ ID NO: 335503
  Synthetic oligonucleotide

SEQ ID NO: 551110 - DNA, 60 bp, Artificial; identical to SEQ ID NO: 335505
  Synthetic oligonucleotide

SEQ ID NO: 551111 - DNA, 55 bp, Artificial; identical to SEQ ID NO: 335506
  Synthetic oligonucleotide

SEQ ID NO: 551112 - DNA, 55 bp, Artificial; identical to SEQ ID NO: 335509
  Synthetic oligonucleotide

SEQ ID NO: 551113 - DNA, 50 bp, Artificial; identical to SEQ ID NO: 335510
  Synthetic oligonucleotide

SEQ ID NO: 551114 - DNA, 60 bp, Artificial; identical to SEQ ID NO: 335511
  Synthetic oligonucleotide

SEQ ID NO: 551115 - DNA, 51 bp, Artificial; identical to SEQ ID NO: 335513
  Synthetic oligonucleotide

SEQ ID NO: 551116 - DNA, 55 bp, Artificial; identical to SEQ ID NO: 335517
  Synthetic oligonucleotide

SEQ ID NO: 551117 - DNA, 55 bp, Artificial; identical to SEQ ID NO: 335518
  Synthetic oligonucleotide

SEQ ID NO: 551118 - DNA, 55 bp, Artificial; identical to SEQ ID NO: 335524
  Synthetic oligonucleotide

SEQ ID NO: 551119 - DNA, 53 bp, Artificial; identical to SEQ ID NO: 335525
  Synthetic oligonucleotide

SEQ ID NO: 551120 - DNA, 53 bp, Artificial; identical to SEQ ID NO: 335527
  Synthetic oligonucleotide

SEQ ID NO: 551121 - DNA, 55 bp, Artificial; identical to SEQ ID NO: 335529
  Synthetic oligonucleotide

SEQ ID NO: 551122 - DNA, 60 bp, Artificial; identical to SEQ ID NO: 335533
  Synthetic oligonucleotide

SEQ ID NO: 551123 - DNA, 60 bp, Artificial; identical to SEQ ID NO: 335535
  Synthetic oligonucleotide

SEQ ID NO: 551124 - DNA, 60 bp, Artificial; identical to SEQ ID NO: 335536
  Synthetic oligonucleotide

SEQ ID NO: 551125 - DNA, 52 bp, Artificial; identical to SEQ ID NO: 335539
  Synthetic oligonucleotide

SEQ ID NO: 551126 - DNA, 55 bp, Artificial; identical to SEQ ID NO: 335540
  Synthetic oligonucleotide

SEQ ID NO: 551127 - DNA, 59 bp, Artificial; identical to SEQ ID NO: 335541
  Synthetic oligonucleotide

SEQ ID NO: 551128 - DNA, 60 bp, Artificial; identical to SEQ ID NO: 335542
  Synthetic oligonucleotide

SEQ ID NO: 551129 - DNA, 60 bp, Artificial; identical to SEQ ID NO: 335547
  Synthetic oligonucleotide

SEQ ID NO: 551130 - DNA, 52 bp, Artificial; identical to SEQ ID NO: 335550
  Synthetic oligonucleotide

SEQ ID NO: 551131 - DNA, 57 bp, Artificial; identical to SEQ ID NO: 335551
  Synthetic oligonucleotide

SEQ ID NO: 551132 - DNA, 60 bp, Artificial; identical to SEQ ID NO: 335552
  Synthetic oligonucleotide

SEQ ID NO: 551133 - DNA, 60 bp, Artificial; identical to SEQ ID NO: 335553
  Synthetic oligonucleotide

SEQ ID NO: 551134 - DNA, 59 bp, Artificial; identical to SEQ ID NO: 335555
  Synthetic oligonucleotide

SEQ ID NO: 551135 - DNA, 50 bp, Artificial; identical to SEQ ID NO: 335556
  Synthetic oligonucleotide

SEQ ID NO: 551136 - DNA, 60 bp, Artificial; identical to SEQ ID NO: 335561
  Synthetic oligonucleotide

SEQ ID NO: 551137 - DNA, 60 bp, Artificial; identical to SEQ ID NO: 335563
  Synthetic oligonucleotide

SEQ ID NO: 551138 - DNA, 58 bp, Artificial; identical to SEQ ID NO: 335567
  Synthetic oligonucleotide

SEQ ID NO: 551139 - DNA, 60 bp, Artificial; identical to SEQ ID NO: 335568
  Synthetic oligonucleotide

SEQ ID NO: 551140 - DNA, 55 bp, Artificial; identical to SEQ ID NO: 335569
  Synthetic oligonucleotide

SEQ ID NO: 551141 - DNA, 56 bp, Artificial; identical to SEQ ID NO: 335572
  Synthetic oligonucleotide

SEQ ID NO: 551142 - DNA, 56 bp, Artificial; identical to SEQ ID NO: 335573
  Synthetic oligonucleotide

SEQ ID NO: 551143 - DNA, 58 bp, Artificial; identical to SEQ ID NO: 335577
  Synthetic oligonucleotide

SEQ ID NO: 551144 - DNA, 60 bp, Artificial; identical to SEQ ID NO: 335579
  Synthetic oligonucleotide

SEQ ID NO: 551145 - DNA, 60 bp, Artificial; identical to SEQ ID NO: 7138
  Synthetic oligonucleotide

SEQ ID NO: 551146 - DNA, 60 bp, Artificial; identical to SEQ ID NO: 335584
  Synthetic oligonucleotide

SEQ ID NO: 551147 - DNA, 60 bp, Artificial; identical to SEQ ID NO: 335587
  Synthetic oligonucleotide

SEQ ID NO: 551148 - DNA, 59 bp, Artificial; identical to SEQ ID NO: 335589
  Synthetic oligonucleotide

SEQ ID NO: 551149 - DNA, 55 bp, Artificial; identical to SEQ ID NO: 335590
  Synthetic oligonucleotide

SEQ ID NO: 551150 - DNA, 55 bp, Artificial; identical to SEQ ID NO: 335591
  Synthetic oligonucleotide

SEQ ID NO: 551151 - DNA, 55 bp, Artificial; identical to SEQ ID NO: 335595
  Synthetic oligonucleotide

SEQ ID NO: 551152 - DNA, 60 bp, Artificial; identical to SEQ ID NO: 335596
  Synthetic oligonucleotide

SEQ ID NO: 551153 - DNA, 55 bp, Artificial; identical to SEQ ID NO: 335597
  Synthetic oligonucleotide

SEQ ID NO: 551154 - DNA, 60 bp, Artificial; identical to SEQ ID NO: 335599
  Synthetic oligonucleotide

SEQ ID NO: 551155 - DNA, 60 bp, Artificial; identical to SEQ ID NO: 335602
  Synthetic oligonucleotide

SEQ ID NO: 551156 - DNA, 59 bp, Artificial; identical to SEQ ID NO: 335606
  Synthetic oligonucleotide

SEQ ID NO: 551157 - DNA, 60 bp, Artificial; identical to SEQ ID NO: 335609
  Synthetic oligonucleotide

SEQ ID NO: 551158 - DNA, 60 bp, Artificial; identical to SEQ ID NO: 335610
  Synthetic oligonucleotide

SEQ ID NO: 551159 - DNA, 58 bp, Artificial; identical to SEQ ID NO: 335613
  Synthetic oligonucleotide

SEQ ID NO: 551160 - DNA, 60 bp, Artificial; identical to SEQ ID NO: 335616
  Synthetic oligonucleotide

SEQ ID NO: 551161 - DNA, 50 bp, Artificial; identical to SEQ ID NO: 335619
  Synthetic oligonucleotide

SEQ ID NO: 551162 - DNA, 57 bp, Artificial; identical to SEQ ID NO: 6769
  Synthetic oligonucleotide

SEQ ID NO: 551163 - DNA, 50 bp, Artificial; identical to SEQ ID NO: 335621
  Synthetic oligonucleotide

SEQ ID NO: 551164 - DNA, 56 bp, Artificial; identical to SEQ ID NO: 335622
  Synthetic oligonucleotide

SEQ ID NO: 551165 - DNA, 54 bp, Artificial; identical to SEQ ID NO: 335623
  Synthetic oligonucleotide

SEQ ID NO: 551166 - DNA, 60 bp, Artificial; identical to SEQ ID NO: 335624
  Synthetic oligonucleotide

SEQ ID NO: 551167 - DNA, 60 bp, Artificial; identical to SEQ ID NO: 335625
  Synthetic oligonucleotide

SEQ ID NO: 551168 - DNA, 56 bp, Artificial; identical to SEQ ID NO: 335628
  Synthetic oligonucleotide

SEQ ID NO: 551169 - DNA, 57 bp, Artificial; identical to SEQ ID NO: 335629
  Synthetic oligonucleotide

SEQ ID NO: 551170 - DNA, 60 bp, Artificial; identical to SEQ ID NO: 10457
  Synthetic oligonucleotide

SEQ ID NO: 551171 - DNA, 57 bp, Artificial; identical to SEQ ID NO: 335638
  Synthetic oligonucleotide

SEQ ID NO: 551172 - DNA, 58 bp, Artificial; identical to SEQ ID NO: 335639
  Synthetic oligonucleotide

SEQ ID NO: 551173 - DNA, 56 bp, Artificial; identical to SEQ ID NO: 335640
  Synthetic oligonucleotide

SEQ ID NO: 551174 - DNA, 58 bp, Artificial; identical to SEQ ID NO: 335641
  Synthetic oligonucleotide

SEQ ID NO: 551175 - DNA, 55 bp, Artificial; identical to SEQ ID NO: 335643
  Synthetic oligonucleotide

SEQ ID NO: 551176 - DNA, 60 bp, Artificial; identical to SEQ ID NO: 335649
  Synthetic oligonucleotide

SEQ ID NO: 551177 - DNA, 59 bp, Artificial; identical to SEQ ID NO: 335650
  Synthetic oligonucleotide

SEQ ID NO: 551178 - DNA, 60 bp, Artificial; identical to SEQ ID NO: 335651
  Synthetic oligonucleotide

SEQ ID NO: 551179 - DNA, 60 bp, Artificial; identical to SEQ ID NO: 15381
  Synthetic oligonucleotide

SEQ ID NO: 551180 - DNA, 59 bp, Artificial; identical to SEQ ID NO: 335652
  Synthetic oligonucleotide

SEQ ID NO: 551181 - DNA, 60 bp, Artificial; identical to SEQ ID NO: 335654
  Synthetic oligonucleotide

SEQ ID NO: 551182 - DNA, 51 bp, Artificial; identical to SEQ ID NO: 335662
  Synthetic oligonucleotide

SEQ ID NO: 551183 - DNA, 58 bp, Artificial; identical to SEQ ID NO: 335663
  Synthetic oligonucleotide

SEQ ID NO: 551184 - DNA, 60 bp, Artificial; identical to SEQ ID NO: 335666
  Synthetic oligonucleotide

SEQ ID NO: 551185 - DNA, 50 bp, Artificial; identical to SEQ ID NO: 335667
  Synthetic oligonucleotide

SEQ ID NO: 551186 - DNA, 55 bp, Artificial; identical to SEQ ID NO: 335668
  Synthetic oligonucleotide

SEQ ID NO: 551187 - DNA, 60 bp, Artificial; identical to SEQ ID NO: 335672
  Synthetic oligonucleotide

SEQ ID NO: 551188 - DNA, 52 bp, Artificial; identical to SEQ ID NO: 335673
  Synthetic oligonucleotide

SEQ ID NO: 551189 - DNA, 60 bp, Artificial; identical to SEQ ID NO: 13136
  Synthetic oligonucleotide

SEQ ID NO: 551190 - DNA, 60 bp, Artificial; identical to SEQ ID NO: 335676
  Synthetic oligonucleotide

SEQ ID NO: 551191 - DNA, 60 bp, Artificial; identical to SEQ ID NO: 335677
  Synthetic oligonucleotide

SEQ ID NO: 551192 - DNA, 57 bp, Artificial; identical to SEQ ID NO: 335678
  Synthetic oligonucleotide

SEQ ID NO: 551193 - DNA, 55 bp, Artificial; identical to SEQ ID NO: 335681
  Synthetic oligonucleotide

SEQ ID NO: 551194 - DNA, 60 bp, Artificial; identical to SEQ ID NO: 335682
  Synthetic oligonucleotide

SEQ ID NO: 551195 - DNA, 56 bp, Artificial; identical to SEQ ID NO: 335684
  Synthetic oligonucleotide

SEQ ID NO: 551196 - DNA, 57 bp, Artificial; identical to SEQ ID NO: 335687
  Synthetic oligonucleotide

SEQ ID NO: 551197 - DNA, 56 bp, Artificial; identical to SEQ ID NO: 335692
  Synthetic oligonucleotide

SEQ ID NO: 551198 - DNA, 57 bp, Artificial; identical to SEQ ID NO: 335694
  Synthetic oligonucleotide

SEQ ID NO: 551199 - DNA, 51 bp, Artificial; identical to SEQ ID NO: 335695
  Synthetic oligonucleotide

SEQ ID NO: 551200 - DNA, 60 bp, Artificial; identical to SEQ ID NO: 7185
  Synthetic oligonucleotide

SEQ ID NO: 551201 - DNA, 60 bp, Artificial; identical to SEQ ID NO: 335698
  Synthetic oligonucleotide

SEQ ID NO: 551202 - DNA, 54 bp, Artificial; identical to SEQ ID NO: 335700
  Synthetic oligonucleotide

SEQ ID NO: 551203 - DNA, 56 bp, Artificial; identical to SEQ ID NO: 335701
  Synthetic oligonucleotide

SEQ ID NO: 551204 - DNA, 55 bp, Artificial; identical to SEQ ID NO: 335702
  Synthetic oligonucleotide

SEQ ID NO: 551205 - DNA, 59 bp, Artificial; identical to SEQ ID NO: 335703
  Synthetic oligonucleotide

SEQ ID NO: 551206 - DNA, 60 bp, Artificial; identical to SEQ ID NO: 13122
  Synthetic oligonucleotide

SEQ ID NO: 551207 - DNA, 60 bp, Artificial; identical to SEQ ID NO: 335704
  Synthetic oligonucleotide

SEQ ID NO: 551208 - DNA, 54 bp, Artificial; identical to SEQ ID NO: 335706
  Synthetic oligonucleotide

SEQ ID NO: 551209 - DNA, 58 bp, Artificial; identical to SEQ ID NO: 335707
  Synthetic oligonucleotide

SEQ ID NO: 551210 - DNA, 52 bp, Artificial; identical to SEQ ID NO: 335710
  Synthetic oligonucleotide

SEQ ID NO: 551211 - DNA, 54 bp, Artificial; identical to SEQ ID NO: 335712
  Synthetic oligonucleotide

SEQ ID NO: 551212 - DNA, 60 bp, Artificial; identical to SEQ ID NO: 335713
  Synthetic oligonucleotide

SEQ ID NO: 551213 - DNA, 60 bp, Artificial; identical to SEQ ID NO: 335715
  Synthetic oligonucleotide

SEQ ID NO: 551214 - DNA, 60 bp, Artificial; identical to SEQ ID NO: 335717
  Synthetic oligonucleotide

SEQ ID NO: 551215 - DNA, 56 bp, Artificial; identical to SEQ ID NO: 335725
  Synthetic oligonucleotide

SEQ ID NO: 551216 - DNA, 60 bp, Artificial; identical to SEQ ID NO: 335726
  Synthetic oligonucleotide

SEQ ID NO: 551217 - DNA, 60 bp, Artificial; identical to SEQ ID NO: 335728
  Synthetic oligonucleotide

SEQ ID NO: 551218 - DNA, 55 bp, Artificial; identical to SEQ ID NO: 16167
  Synthetic oligonucleotide

SEQ ID NO: 551219 - DNA, 60 bp, Artificial; identical to SEQ ID NO: 335737
  Synthetic oligonucleotide

SEQ ID NO: 551220 - DNA, 57 bp, Artificial; identical to SEQ ID NO: 335738
  Synthetic oligonucleotide

SEQ ID NO: 551221 - DNA, 52 bp, Artificial; identical to SEQ ID NO: 335740
  Synthetic oligonucleotide

SEQ ID NO: 551222 - DNA, 58 bp, Artificial; identical to SEQ ID NO: 19163
  Synthetic oligonucleotide

SEQ ID NO: 551223 - DNA, 59 bp, Artificial; identical to SEQ ID NO: 335742
  Synthetic oligonucleotide

SEQ ID NO: 551224 - DNA, 53 bp, Artificial; identical to SEQ ID NO: 335744
  Synthetic oligonucleotide

SEQ ID NO: 551225 - DNA, 60 bp, Artificial; identical to SEQ ID NO: 335745
  Synthetic oligonucleotide

SEQ ID NO: 551226 - DNA, 60 bp, Artificial; identical to SEQ ID NO: 335746
  Synthetic oligonucleotide

SEQ ID NO: 551227 - DNA, 54 bp, Artificial; identical to SEQ ID NO: 335747
  Synthetic oligonucleotide

SEQ ID NO: 551228 - DNA, 56 bp, Artificial; identical to SEQ ID NO: 335749
  Synthetic oligonucleotide

SEQ ID NO: 551229 - DNA, 60 bp, Artificial; identical to SEQ ID NO: 335753
  Synthetic oligonucleotide

SEQ ID NO: 551230 - DNA, 60 bp, Artificial; identical to SEQ ID NO: 335754
  Synthetic oligonucleotide

SEQ ID NO: 551231 - DNA, 60 bp, Artificial; identical to SEQ ID NO: 335755
  Synthetic oligonucleotide

SEQ ID NO: 551232 - DNA, 57 bp, Artificial; identical to SEQ ID NO: 335756
  Synthetic oligonucleotide

SEQ ID NO: 551233 - DNA, 57 bp, Artificial; identical to SEQ ID NO: 335757
  Synthetic oligonucleotide

SEQ ID NO: 551234 - DNA, 59 bp, Artificial; identical to SEQ ID NO: 335758
  Synthetic oligonucleotide

SEQ ID NO: 551235 - DNA, 57 bp, Artificial; identical to SEQ ID NO: 335759
  Synthetic oligonucleotide

SEQ ID NO: 551236 - DNA, 55 bp, Artificial; identical to SEQ ID NO: 335762
  Synthetic oligonucleotide

SEQ ID NO: 551237 - DNA, 60 bp, Artificial; identical to SEQ ID NO: 335763
  Synthetic oligonucleotide

SEQ ID NO: 551238 - DNA, 57 bp, Artificial; identical to SEQ ID NO: 335765
  Synthetic oligonucleotide

SEQ ID NO: 551239 - DNA, 60 bp, Artificial; identical to SEQ ID NO: 335767
  Synthetic oligonucleotide

SEQ ID NO: 551240 - DNA, 60 bp, Artificial; identical to SEQ ID NO: 335769
  Synthetic oligonucleotide

SEQ ID NO: 551241 - DNA, 60 bp, Artificial; identical to SEQ ID NO: 15618
  Synthetic oligonucleotide

SEQ ID NO: 551242 - DNA, 57 bp, Artificial; identical to SEQ ID NO: 11220
  Synthetic oligonucleotide

SEQ ID NO: 551243 - DNA, 60 bp, Artificial; identical to SEQ ID NO: 335771
  Synthetic oligonucleotide

SEQ ID NO: 551244 - DNA, 55 bp, Artificial; identical to SEQ ID NO: 335773
  Synthetic oligonucleotide

SEQ ID NO: 551245 - DNA, 55 bp, Artificial; identical to SEQ ID NO: 335776
  Synthetic oligonucleotide

SEQ ID NO: 551246 - DNA, 60 bp, Artificial; identical to SEQ ID NO: 335777
  Synthetic oligonucleotide

SEQ ID NO: 551247 - DNA, 60 bp, Artificial; identical to SEQ ID NO: 335780
  Synthetic oligonucleotide

SEQ ID NO: 551248 - DNA, 60 bp, Artificial; identical to SEQ ID NO: 335783
  Synthetic oligonucleotide

SEQ ID NO: 551249 - DNA, 51 bp, Artificial; identical to SEQ ID NO: 335786
  Synthetic oligonucleotide

SEQ ID NO: 551250 - DNA, 60 bp, Artificial; identical to SEQ ID NO: 335789
  Synthetic oligonucleotide

SEQ ID NO: 551251 - DNA, 56 bp, Artificial; identical to SEQ ID NO: 335792
  Synthetic oligonucleotide

SEQ ID NO: 551252 - DNA, 60 bp, Artificial; identical to SEQ ID NO: 335793
  Synthetic oligonucleotide

SEQ ID NO: 551253 - DNA, 59 bp, Artificial; identical to SEQ ID NO: 335795
  Synthetic oligonucleotide

SEQ ID NO: 551254 - DNA, 56 bp, Artificial; identical to SEQ ID NO: 335799
  Synthetic oligonucleotide

SEQ ID NO: 551255 - DNA, 53 bp, Artificial; identical to SEQ ID NO: 335800
  Synthetic oligonucleotide

SEQ ID NO: 551256 - DNA, 60 bp, Artificial; identical to SEQ ID NO: 335801
  Synthetic oligonucleotide

SEQ ID NO: 551257 - DNA, 51 bp, Artificial; identical to SEQ ID NO: 335803
  Synthetic oligonucleotide

SEQ ID NO: 551258 - DNA, 60 bp, Artificial; identical to SEQ ID NO: 335807
  Synthetic oligonucleotide

SEQ ID NO: 551259 - DNA, 58 bp, Artificial; identical to SEQ ID NO: 335808
  Synthetic oligonucleotide

SEQ ID NO: 551260 - DNA, 59 bp, Artificial; identical to SEQ ID NO: 335818
  Synthetic oligonucleotide

SEQ ID NO: 551261 - DNA, 60 bp, Artificial; identical to SEQ ID NO: 8033
  Synthetic oligonucleotide

SEQ ID NO: 551262 - DNA, 53 bp, Artificial; identical to SEQ ID NO: 335820
  Synthetic oligonucleotide

SEQ ID NO: 551263 - DNA, 58 bp, Artificial; identical to SEQ ID NO: 335821
  Synthetic oligonucleotide

SEQ ID NO: 551264 - DNA, 60 bp, Artificial; identical to SEQ ID NO: 335822
  Synthetic oligonucleotide

SEQ ID NO: 551265 - DNA, 60 bp, Artificial; identical to SEQ ID NO: 335823
  Synthetic oligonucleotide

SEQ ID NO: 551266 - DNA, 60 bp, Artificial; identical to SEQ ID NO: 335824
  Synthetic oligonucleotide

SEQ ID NO: 551267 - DNA, 51 bp, Artificial; identical to SEQ ID NO: 335825
  Synthetic oligonucleotide

SEQ ID NO: 551268 - DNA, 60 bp, Artificial; identical to SEQ ID NO: 335826
  Synthetic oligonucleotide

SEQ ID NO: 551269 - DNA, 58 bp, Artificial; identical to SEQ ID NO: 335827
  Synthetic oligonucleotide

SEQ ID NO: 551270 - DNA, 55 bp, Artificial; identical to SEQ ID NO: 335828
  Synthetic oligonucleotide

SEQ ID NO: 551271 - DNA, 51 bp, Artificial; identical to SEQ ID NO: 335829
  Synthetic oligonucleotide

SEQ ID NO: 551272 - DNA, 60 bp, Artificial; identical to SEQ ID NO: 335831
  Synthetic oligonucleotide

SEQ ID NO: 551273 - DNA, 60 bp, Artificial; identical to SEQ ID NO: 335832
  Synthetic oligonucleotide

SEQ ID NO: 551274 - DNA, 52 bp, Artificial; identical to SEQ ID NO: 335834
  Synthetic oligonucleotide

SEQ ID NO: 551275 - DNA, 54 bp, Artificial; identical to SEQ ID NO: 335835
  Synthetic oligonucleotide

SEQ ID NO: 551276 - DNA, 60 bp, Artificial; identical to SEQ ID NO: 335836
  Synthetic oligonucleotide

SEQ ID NO: 551277 - DNA, 60 bp, Artificial; identical to SEQ ID NO: 91580
  Synthetic oligonucleotide

SEQ ID NO: 551278 - DNA, 56 bp, Artificial; identical to SEQ ID NO: 335839
  Synthetic oligonucleotide

SEQ ID NO: 551279 - DNA, 60 bp, Artificial; identical to SEQ ID NO: 6806
  Synthetic oligonucleotide

SEQ ID NO: 551280 - DNA, 55 bp, Artificial; identical to SEQ ID NO: 335844
  Synthetic oligonucleotide

SEQ ID NO: 551281 - DNA, 60 bp, Artificial; identical to SEQ ID NO: 335845
  Synthetic oligonucleotide

SEQ ID NO: 551282 - DNA, 60 bp, Artificial; identical to SEQ ID NO: 335846
  Synthetic oligonucleotide

SEQ ID NO: 551283 - DNA, 55 bp, Artificial; identical to SEQ ID NO: 335847
  Synthetic oligonucleotide

SEQ ID NO: 551284 - DNA, 60 bp, Artificial; identical to SEQ ID NO: 335848
  Synthetic oligonucleotide

SEQ ID NO: 551285 - DNA, 55 bp, Artificial; identical to SEQ ID NO: 335851
  Synthetic oligonucleotide

SEQ ID NO: 551286 - DNA, 57 bp, Artificial; identical to SEQ ID NO: 335852
  Synthetic oligonucleotide

SEQ ID NO: 551287 - DNA, 60 bp, Artificial; identical to SEQ ID NO: 335853
  Synthetic oligonucleotide

SEQ ID NO: 551288 - DNA, 51 bp, Artificial; identical to SEQ ID NO: 12338
  Synthetic oligonucleotide

SEQ ID NO: 551289 - DNA, 60 bp, Artificial; identical to SEQ ID NO: 335854
  Synthetic oligonucleotide

SEQ ID NO: 551290 - DNA, 60 bp, Artificial; identical to SEQ ID NO: 335855
  Synthetic oligonucleotide

SEQ ID NO: 551291 - DNA, 59 bp, Artificial; identical to SEQ ID NO: 335856
  Synthetic oligonucleotide

SEQ ID NO: 551292 - DNA, 60 bp, Artificial; identical to SEQ ID NO: 335857
  Synthetic oligonucleotide

SEQ ID NO: 551293 - DNA, 57 bp, Artificial; identical to SEQ ID NO: 18417
  Synthetic oligonucleotide

SEQ ID NO: 551294 - DNA, 60 bp, Artificial; identical to SEQ ID NO: 335858
  Synthetic oligonucleotide

SEQ ID NO: 551295 - DNA, 59 bp, Artificial; identical to SEQ ID NO: 335859
  Synthetic oligonucleotide

SEQ ID NO: 551296 - DNA, 51 bp, Artificial; identical to SEQ ID NO: 335861
  Synthetic oligonucleotide

SEQ ID NO: 551297 - DNA, 60 bp, Artificial; identical to SEQ ID NO: 335862
  Synthetic oligonucleotide

SEQ ID NO: 551298 - DNA, 52 bp, Artificial; identical to SEQ ID NO: 335863
  Synthetic oligonucleotide

SEQ ID NO: 551299 - DNA, 60 bp, Artificial; identical to SEQ ID NO: 335866
  Synthetic oligonucleotide

SEQ ID NO: 551300 - DNA, 57 bp, Artificial; identical to SEQ ID NO: 335869
  Synthetic oligonucleotide

SEQ ID NO: 551301 - DNA, 60 bp, Artificial; identical to SEQ ID NO: 335872
  Synthetic oligonucleotide

SEQ ID NO: 551302 - DNA, 60 bp, Artificial; identical to SEQ ID NO: 14828
  Synthetic oligonucleotide

SEQ ID NO: 551303 - DNA, 59 bp, Artificial; identical to SEQ ID NO: 335878
  Synthetic oligonucleotide

SEQ ID NO: 551304 - DNA, 50 bp, Artificial; identical to SEQ ID NO: 335880
  Synthetic oligonucleotide

SEQ ID NO: 551305 - DNA, 59 bp, Artificial; identical to SEQ ID NO: 335883
  Synthetic oligonucleotide

SEQ ID NO: 551306 - DNA, 57 bp, Artificial; identical to SEQ ID NO: 335892
  Synthetic oligonucleotide

SEQ ID NO: 551307 - DNA, 60 bp, Artificial; identical to SEQ ID NO: 335893
  Synthetic oligonucleotide

SEQ ID NO: 551308 - DNA, 57 bp, Artificial; identical to SEQ ID NO: 335896
  Synthetic oligonucleotide

SEQ ID NO: 551309 - DNA, 58 bp, Artificial; identical to SEQ ID NO: 335898
  Synthetic oligonucleotide

SEQ ID NO: 551310 - DNA, 60 bp, Artificial; identical to SEQ ID NO: 15574
  Synthetic oligonucleotide

SEQ ID NO: 551311 - DNA, 60 bp, Artificial; identical to SEQ ID NO: 55057
  Synthetic oligonucleotide

SEQ ID NO: 551312 - DNA, 58 bp, Artificial; identical to SEQ ID NO: 335901
  Synthetic oligonucleotide

SEQ ID NO: 551313 - DNA, 51 bp, Artificial; identical to SEQ ID NO: 335902
  Synthetic oligonucleotide

SEQ ID NO: 551314 - DNA, 51 bp, Artificial; identical to SEQ ID NO: 335903
  Synthetic oligonucleotide

SEQ ID NO: 551315 - DNA, 60 bp, Artificial; identical to SEQ ID NO: 335904
  Synthetic oligonucleotide

SEQ ID NO: 551316 - DNA, 60 bp, Artificial; identical to SEQ ID NO: 335910
  Synthetic oligonucleotide

SEQ ID NO: 551317 - DNA, 58 bp, Artificial; identical to SEQ ID NO: 335915
  Synthetic oligonucleotide

SEQ ID NO: 551318 - DNA, 58 bp, Artificial; identical to SEQ ID NO: 335916
  Synthetic oligonucleotide

SEQ ID NO: 551319 - DNA, 60 bp, Artificial; identical to SEQ ID NO: 335919
  Synthetic oligonucleotide

SEQ ID NO: 551320 - DNA, 60 bp, Artificial; identical to SEQ ID NO: 335920
  Synthetic oligonucleotide

SEQ ID NO: 551321 - DNA, 55 bp, Artificial; identical to SEQ ID NO: 335923
  Synthetic oligonucleotide

SEQ ID NO: 551322 - DNA, 60 bp, Artificial; identical to SEQ ID NO: 335924
  Synthetic oligonucleotide

SEQ ID NO: 551323 - DNA, 60 bp, Artificial; identical to SEQ ID NO: 335925
  Synthetic oligonucleotide

SEQ ID NO: 551324 - DNA, 60 bp, Artificial; identical to SEQ ID NO: 335926
  Synthetic oligonucleotide

SEQ ID NO: 551325 - DNA, 60 bp, Artificial; identical to SEQ ID NO: 335930
  Synthetic oligonucleotide

SEQ ID NO: 551326 - DNA, 60 bp, Artificial; identical to SEQ ID NO: 335935
  Synthetic oligonucleotide

SEQ ID NO: 551327 - DNA, 57 bp, Artificial; identical to SEQ ID NO: 335937
  Synthetic oligonucleotide

SEQ ID NO: 551328 - DNA, 60 bp, Artificial; identical to SEQ ID NO: 335943
  Synthetic oligonucleotide

SEQ ID NO: 551329 - DNA, 50 bp, Artificial; identical to SEQ ID NO: 335944
  Synthetic oligonucleotide

SEQ ID NO: 551330 - DNA, 57 bp, Artificial; identical to SEQ ID NO: 335945
  Synthetic oligonucleotide

SEQ ID NO: 551331 - DNA, 55 bp, Artificial; identical to SEQ ID NO: 335946
  Synthetic oligonucleotide

SEQ ID NO: 551332 - DNA, 55 bp, Artificial; identical to SEQ ID NO: 335948
  Synthetic oligonucleotide

SEQ ID NO: 551333 - DNA, 60 bp, Artificial; identical to SEQ ID NO: 335949
  Synthetic oligonucleotide

SEQ ID NO: 551334 - DNA, 54 bp, Artificial; identical to SEQ ID NO: 335951
  Synthetic oligonucleotide

SEQ ID NO: 551335 - DNA, 58 bp, Artificial; identical to SEQ ID NO: 335952
  Synthetic oligonucleotide

SEQ ID NO: 551336 - DNA, 57 bp, Artificial; identical to SEQ ID NO: 335955
  Synthetic oligonucleotide

SEQ ID NO: 551337 - DNA, 53 bp, Artificial; identical to SEQ ID NO: 335956
  Synthetic oligonucleotide

SEQ ID NO: 551338 - DNA, 53 bp, Artificial; identical to SEQ ID NO: 335958
  Synthetic oligonucleotide

SEQ ID NO: 551339 - DNA, 54 bp, Artificial; identical to SEQ ID NO: 335959
  Synthetic oligonucleotide

SEQ ID NO: 551340 - DNA, 50 bp, Artificial; identical to SEQ ID NO: 335961
  Synthetic oligonucleotide

SEQ ID NO: 551341 - DNA, 60 bp, Artificial; identical to SEQ ID NO: 335964
  Synthetic oligonucleotide

SEQ ID NO: 551342 - DNA, 53 bp, Artificial; identical to SEQ ID NO: 11334
  Synthetic oligonucleotide

SEQ ID NO: 551343 - DNA, 58 bp, Artificial; identical to SEQ ID NO: 335968
  Synthetic oligonucleotide

SEQ ID NO: 551344 - DNA, 59 bp, Artificial; identical to SEQ ID NO: 335977
  Synthetic oligonucleotide

SEQ ID NO: 551345 - DNA, 57 bp, Artificial; identical to SEQ ID NO: 335978
  Synthetic oligonucleotide

SEQ ID NO: 551346 - DNA, 59 bp, Artificial; identical to SEQ ID NO: 335979
  Synthetic oligonucleotide

SEQ ID NO: 551347 - DNA, 59 bp, Artificial; identical to SEQ ID NO: 19449
  Synthetic oligonucleotide

SEQ ID NO: 551348 - DNA, 60 bp, Artificial; identical to SEQ ID NO: 335983
  Synthetic oligonucleotide

SEQ ID NO: 551349 - DNA, 55 bp, Artificial; identical to SEQ ID NO: 335985
  Synthetic oligonucleotide

SEQ ID NO: 551350 - DNA, 52 bp, Artificial; identical to SEQ ID NO: 335988
  Synthetic oligonucleotide

SEQ ID NO: 551351 - DNA, 58 bp, Artificial; identical to SEQ ID NO: 335990
  Synthetic oligonucleotide

SEQ ID NO: 551352 - DNA, 55 bp, Artificial; identical to SEQ ID NO: 335991
  Synthetic oligonucleotide

SEQ ID NO: 551353 - DNA, 54 bp, Artificial; identical to SEQ ID NO: 335996
  Synthetic oligonucleotide

SEQ ID NO: 551354 - DNA, 60 bp, Artificial; identical to SEQ ID NO: 335999
  Synthetic oligonucleotide

SEQ ID NO: 551355 - DNA, 60 bp, Artificial; identical to SEQ ID NO: 336000
  Synthetic oligonucleotide

SEQ ID NO: 551356 - DNA, 54 bp, Artificial; identical to SEQ ID NO: 336002
  Synthetic oligonucleotide

SEQ ID NO: 551357 - DNA, 58 bp, Artificial; identical to SEQ ID NO: 6316
  Synthetic oligonucleotide

SEQ ID NO: 551358 - DNA, 57 bp, Artificial; identical to SEQ ID NO: 336005
  Synthetic oligonucleotide

SEQ ID NO: 551359 - DNA, 57 bp, Artificial; identical to SEQ ID NO: 18227
  Synthetic oligonucleotide

SEQ ID NO: 551360 - DNA, 52 bp, Artificial; identical to SEQ ID NO: 336011
  Synthetic oligonucleotide

SEQ ID NO: 551361 - DNA, 60 bp, Artificial; identical to SEQ ID NO: 336012
  Synthetic oligonucleotide

SEQ ID NO: 551362 - DNA, 56 bp, Artificial; identical to SEQ ID NO: 336013
  Synthetic oligonucleotide

SEQ ID NO: 551363 - DNA, 56 bp, Artificial; identical to SEQ ID NO: 336015
  Synthetic oligonucleotide

SEQ ID NO: 551364 - DNA, 52 bp, Artificial; identical to SEQ ID NO: 336016
  Synthetic oligonucleotide

SEQ ID NO: 551365 - DNA, 60 bp, Artificial; identical to SEQ ID NO: 336020
  Synthetic oligonucleotide

SEQ ID NO: 551366 - DNA, 59 bp, Artificial; identical to SEQ ID NO: 336023
  Synthetic oligonucleotide

SEQ ID NO: 551367 - DNA, 50 bp, Artificial; identical to SEQ ID NO: 14286
  Synthetic oligonucleotide

SEQ ID NO: 551368 - DNA, 57 bp, Artificial; identical to SEQ ID NO: 336026
  Synthetic oligonucleotide

SEQ ID NO: 551369 - DNA, 60 bp, Artificial; identical to SEQ ID NO: 336027
  Synthetic oligonucleotide

SEQ ID NO: 551370 - DNA, 54 bp, Artificial; identical to SEQ ID NO: 336028
  Synthetic oligonucleotide

SEQ ID NO: 551371 - DNA, 59 bp, Artificial; identical to SEQ ID NO: 336029
  Synthetic oligonucleotide

SEQ ID NO: 551372 - DNA, 60 bp, Artificial; identical to SEQ ID NO: 336031
  Synthetic oligonucleotide

SEQ ID NO: 551373 - DNA, 55 bp, Artificial; identical to SEQ ID NO: 336033
  Synthetic oligonucleotide

SEQ ID NO: 551374 - DNA, 60 bp, Artificial; identical to SEQ ID NO: 336034
  Synthetic oligonucleotide

SEQ ID NO: 551375 - DNA, 58 bp, Artificial; identical to SEQ ID NO: 336035
  Synthetic oligonucleotide

SEQ ID NO: 551376 - DNA, 59 bp, Artificial; identical to SEQ ID NO: 336036
  Synthetic oligonucleotide

SEQ ID NO: 551377 - DNA, 55 bp, Artificial; identical to SEQ ID NO: 336038
  Synthetic oligonucleotide

SEQ ID NO: 551378 - DNA, 53 bp, Artificial; identical to SEQ ID NO: 336041
  Synthetic oligonucleotide

SEQ ID NO: 551379 - DNA, 60 bp, Artificial; identical to SEQ ID NO: 336046
  Synthetic oligonucleotide

SEQ ID NO: 551380 - DNA, 58 bp, Artificial; identical to SEQ ID NO: 336048
  Synthetic oligonucleotide

SEQ ID NO: 551381 - DNA, 59 bp, Artificial; identical to SEQ ID NO: 336051
  Synthetic oligonucleotide

SEQ ID NO: 551382 - DNA, 50 bp, Artificial; identical to SEQ ID NO: 336053
  Synthetic oligonucleotide

SEQ ID NO: 551383 - DNA, 57 bp, Artificial; identical to SEQ ID NO: 336054
  Synthetic oligonucleotide

SEQ ID NO: 551384 - DNA, 55 bp, Artificial; identical to SEQ ID NO: 336055
  Synthetic oligonucleotide

SEQ ID NO: 551385 - DNA, 54 bp, Artificial; identical to SEQ ID NO: 336060
  Synthetic oligonucleotide

SEQ ID NO: 551386 - DNA, 60 bp, Artificial; identical to SEQ ID NO: 336061
  Synthetic oligonucleotide

SEQ ID NO: 551387 - DNA, 60 bp, Artificial; identical to SEQ ID NO: 336062
  Synthetic oligonucleotide

SEQ ID NO: 551388 - DNA, 56 bp, Artificial; identical to SEQ ID NO: 336063
  Synthetic oligonucleotide

SEQ ID NO: 551389 - DNA, 57 bp, Artificial; identical to SEQ ID NO: 336068
  Synthetic oligonucleotide

SEQ ID NO: 551390 - DNA, 59 bp, Artificial; identical to SEQ ID NO: 336070
  Synthetic oligonucleotide

SEQ ID NO: 551391 - DNA, 60 bp, Artificial; identical to SEQ ID NO: 336071
  Synthetic oligonucleotide

SEQ ID NO: 551392 - DNA, 55 bp, Artificial; identical to SEQ ID NO: 336080
  Synthetic oligonucleotide

SEQ ID NO: 551393 - DNA, 55 bp, Artificial; identical to SEQ ID NO: 336083
  Synthetic oligonucleotide

SEQ ID NO: 551394 - DNA, 60 bp, Artificial; identical to SEQ ID NO: 336084
  Synthetic oligonucleotide

SEQ ID NO: 551395 - DNA, 56 bp, Artificial; identical to SEQ ID NO: 336085
  Synthetic oligonucleotide

SEQ ID NO: 551396 - DNA, 60 bp, Artificial; identical to SEQ ID NO: 336087
  Synthetic oligonucleotide

SEQ ID NO: 551397 - DNA, 55 bp, Artificial; identical to SEQ ID NO: 336093
  Synthetic oligonucleotide

SEQ ID NO: 551398 - DNA, 60 bp, Artificial; identical to SEQ ID NO: 336096
  Synthetic oligonucleotide

SEQ ID NO: 551399 - DNA, 60 bp, Artificial; identical to SEQ ID NO: 336097
  Synthetic oligonucleotide

SEQ ID NO: 551400 - DNA, 60 bp, Artificial; identical to SEQ ID NO: 336100
  Synthetic oligonucleotide

SEQ ID NO: 551401 - DNA, 60 bp, Artificial; identical to SEQ ID NO: 336102
  Synthetic oligonucleotide

SEQ ID NO: 551402 - DNA, 55 bp, Artificial; identical to SEQ ID NO: 336105
  Synthetic oligonucleotide

SEQ ID NO: 551403 - DNA, 55 bp, Artificial; identical to SEQ ID NO: 336107
  Synthetic oligonucleotide

SEQ ID NO: 551404 - DNA, 51 bp, Artificial; identical to SEQ ID NO: 336108
  Synthetic oligonucleotide

SEQ ID NO: 551405 - DNA, 58 bp, Artificial; identical to SEQ ID NO: 336109
  Synthetic oligonucleotide

SEQ ID NO: 551406 - DNA, 55 bp, Artificial; identical to SEQ ID NO: 336112
  Synthetic oligonucleotide

SEQ ID NO: 551407 - DNA, 55 bp, Artificial; identical to SEQ ID NO: 336113
  Synthetic oligonucleotide

SEQ ID NO: 551408 - DNA, 51 bp, Artificial; identical to SEQ ID NO: 336115
  Synthetic oligonucleotide

SEQ ID NO: 551409 - DNA, 57 bp, Artificial; identical to SEQ ID NO: 336117
  Synthetic oligonucleotide

SEQ ID NO: 551410 - DNA, 60 bp, Artificial; identical to SEQ ID NO: 336122
  Synthetic oligonucleotide

SEQ ID NO: 551411 - DNA, 55 bp, Artificial; identical to SEQ ID NO: 10138
  Synthetic oligonucleotide

SEQ ID NO: 551412 - DNA, 58 bp, Artificial; identical to SEQ ID NO: 336125
  Synthetic oligonucleotide

SEQ ID NO: 551413 - DNA, 56 bp, Artificial; identical to SEQ ID NO: 336126
  Synthetic oligonucleotide

SEQ ID NO: 551414 - DNA, 53 bp, Artificial; identical to SEQ ID NO: 336127
  Synthetic oligonucleotide

SEQ ID NO: 551415 - DNA, 60 bp, Artificial; identical to SEQ ID NO: 336130
  Synthetic oligonucleotide

SEQ ID NO: 551416 - DNA, 54 bp, Artificial; identical to SEQ ID NO: 336141
  Synthetic oligonucleotide

SEQ ID NO: 551417 - DNA, 60 bp, Artificial; identical to SEQ ID NO: 336143
  Synthetic oligonucleotide

SEQ ID NO: 551418 - DNA, 57 bp, Artificial; identical to SEQ ID NO: 336160
  Synthetic oligonucleotide

SEQ ID NO: 551419 - DNA, 51 bp, Artificial; identical to SEQ ID NO: 336163
  Synthetic oligonucleotide

SEQ ID NO: 551420 - DNA, 55 bp, Artificial; identical to SEQ ID NO: 336165
  Synthetic oligonucleotide

SEQ ID NO: 551421 - DNA, 54 bp, Artificial; identical to SEQ ID NO: 336166
  Synthetic oligonucleotide

SEQ ID NO: 551422 - DNA, 55 bp, Artificial; identical to SEQ ID NO: 336170
  Synthetic oligonucleotide

SEQ ID NO: 551423 - DNA, 60 bp, Artificial; identical to SEQ ID NO: 336173
  Synthetic oligonucleotide

SEQ ID NO: 551424 - DNA, 53 bp, Artificial; identical to SEQ ID NO: 336174
  Synthetic oligonucleotide

SEQ ID NO: 551425 - DNA, 59 bp, Artificial; identical to SEQ ID NO: 336177
  Synthetic oligonucleotide

SEQ ID NO: 551426 - DNA, 60 bp, Artificial; identical to SEQ ID NO: 336179
  Synthetic oligonucleotide

SEQ ID NO: 551427 - DNA, 50 bp, Artificial; identical to SEQ ID NO: 336187
  Synthetic oligonucleotide

SEQ ID NO: 551428 - DNA, 60 bp, Artificial; identical to SEQ ID NO: 336188
  Synthetic oligonucleotide

SEQ ID NO: 551429 - DNA, 54 bp, Artificial; identical to SEQ ID NO: 336196
  Synthetic oligonucleotide

SEQ ID NO: 551430 - DNA, 55 bp, Artificial; identical to SEQ ID NO: 336197
  Synthetic oligonucleotide

SEQ ID NO: 551431 - DNA, 55 bp, Artificial; identical to SEQ ID NO: 336198
  Synthetic oligonucleotide

SEQ ID NO: 551432 - DNA, 60 bp, Artificial; identical to SEQ ID NO: 336200
  Synthetic oligonucleotide

SEQ ID NO: 551433 - DNA, 55 bp, Artificial; identical to SEQ ID NO: 336205
  Synthetic oligonucleotide

SEQ ID NO: 551434 - DNA, 59 bp, Artificial; identical to SEQ ID NO: 336206
  Synthetic oligonucleotide

SEQ ID NO: 551435 - DNA, 53 bp, Artificial; identical to SEQ ID NO: 336207
  Synthetic oligonucleotide

SEQ ID NO: 551436 - DNA, 56 bp, Artificial; identical to SEQ ID NO: 336208
  Synthetic oligonucleotide

SEQ ID NO: 551437 - DNA, 57 bp, Artificial; identical to SEQ ID NO: 336209
  Synthetic oligonucleotide

SEQ ID NO: 551438 - DNA, 54 bp, Artificial; identical to SEQ ID NO: 336210
  Synthetic oligonucleotide

SEQ ID NO: 551439 - DNA, 51 bp, Artificial; identical to SEQ ID NO: 336214
  Synthetic oligonucleotide

SEQ ID NO: 551440 - DNA, 54 bp, Artificial; identical to SEQ ID NO: 336215
  Synthetic oligonucleotide

SEQ ID NO: 551441 - DNA, 53 bp, Artificial; identical to SEQ ID NO: 336222
  Synthetic oligonucleotide

SEQ ID NO: 551442 - DNA, 55 bp, Artificial; identical to SEQ ID NO: 336228
  Synthetic oligonucleotide

SEQ ID NO: 551443 - DNA, 60 bp, Artificial; identical to SEQ ID NO: 336229
  Synthetic oligonucleotide

SEQ ID NO: 551444 - DNA, 55 bp, Artificial; identical to SEQ ID NO: 336233
  Synthetic oligonucleotide

SEQ ID NO: 551445 - DNA, 55 bp, Artificial; identical to SEQ ID NO: 336234
  Synthetic oligonucleotide

SEQ ID NO: 551446 - DNA, 51 bp, Artificial; identical to SEQ ID NO: 336235
  Synthetic oligonucleotide

SEQ ID NO: 551447 - DNA, 57 bp, Artificial; identical to SEQ ID NO: 17274
  Synthetic oligonucleotide

SEQ ID NO: 551448 - DNA, 55 bp, Artificial; identical to SEQ ID NO: 336240
  Synthetic oligonucleotide

SEQ ID NO: 551449 - DNA, 60 bp, Artificial; identical to SEQ ID NO: 336243
  Synthetic oligonucleotide

SEQ ID NO: 551450 - DNA, 57 bp, Artificial; identical to SEQ ID NO: 336247
  Synthetic oligonucleotide

SEQ ID NO: 551451 - DNA, 56 bp, Artificial; identical to SEQ ID NO: 336254
  Synthetic oligonucleotide

SEQ ID NO: 551452 - DNA, 52 bp, Artificial; identical to SEQ ID NO: 336255
  Synthetic oligonucleotide

SEQ ID NO: 551453 - DNA, 55 bp, Artificial; identical to SEQ ID NO: 336256
  Synthetic oligonucleotide

SEQ ID NO: 551454 - DNA, 60 bp, Artificial; identical to SEQ ID NO: 336257
  Synthetic oligonucleotide

SEQ ID NO: 551455 - DNA, 60 bp, Artificial; identical to SEQ ID NO: 336258
  Synthetic oligonucleotide

SEQ ID NO: 551456 - DNA, 54 bp, Artificial; identical to SEQ ID NO: 336259
  Synthetic oligonucleotide

SEQ ID NO: 551457 - DNA, 60 bp, Artificial; identical to SEQ ID NO: 35230
  Synthetic oligonucleotide

SEQ ID NO: 551458 - DNA, 60 bp, Artificial; identical to SEQ ID NO: 336261
  Synthetic oligonucleotide

SEQ ID NO: 551459 - DNA, 60 bp, Artificial; identical to SEQ ID NO: 336263
  Synthetic oligonucleotide

SEQ ID NO: 551460 - DNA, 57 bp, Artificial; identical to SEQ ID NO: 336266
  Synthetic oligonucleotide

SEQ ID NO: 551461 - DNA, 55 bp, Artificial; identical to SEQ ID NO: 336268
  Synthetic oligonucleotide

SEQ ID NO: 551462 - DNA, 59 bp, Artificial; identical to SEQ ID NO: 336277
  Synthetic oligonucleotide

SEQ ID NO: 551463 - DNA, 51 bp, Artificial; identical to SEQ ID NO: 336278
  Synthetic oligonucleotide

SEQ ID NO: 551464 - DNA, 60 bp, Artificial; identical to SEQ ID NO: 336280
  Synthetic oligonucleotide

SEQ ID NO: 551465 - DNA, 60 bp, Artificial; identical to SEQ ID NO: 336281
  Synthetic oligonucleotide

SEQ ID NO: 551466 - DNA, 58 bp, Artificial; identical to SEQ ID NO: 336284
  Synthetic oligonucleotide

SEQ ID NO: 551467 - DNA, 60 bp, Artificial; identical to SEQ ID NO: 336286
  Synthetic oligonucleotide

SEQ ID NO: 551468 - DNA, 60 bp, Artificial; identical to SEQ ID NO: 336287
  Synthetic oligonucleotide

SEQ ID NO: 551469 - DNA, 59 bp, Artificial; identical to SEQ ID NO: 18358
  Synthetic oligonucleotide

SEQ ID NO: 551470 - DNA, 55 bp, Artificial; identical to SEQ ID NO: 336290
  Synthetic oligonucleotide

SEQ ID NO: 551471 - DNA, 60 bp, Artificial; identical to SEQ ID NO: 336291
  Synthetic oligonucleotide

SEQ ID NO: 551472 - DNA, 58 bp, Artificial; identical to SEQ ID NO: 336293
  Synthetic oligonucleotide

SEQ ID NO: 551473 - DNA, 59 bp, Artificial; identical to SEQ ID NO: 336295
  Synthetic oligonucleotide

SEQ ID NO: 551474 - DNA, 60 bp, Artificial; identical to SEQ ID NO: 336297
  Synthetic oligonucleotide

SEQ ID NO: 551475 - DNA, 60 bp, Artificial; identical to SEQ ID NO: 336298
  Synthetic oligonucleotide

SEQ ID NO: 551476 - DNA, 52 bp, Artificial; identical to SEQ ID NO: 336299
  Synthetic oligonucleotide

SEQ ID NO: 551477 - DNA, 54 bp, Artificial; identical to SEQ ID NO: 336301
  Synthetic oligonucleotide

SEQ ID NO: 551478 - DNA, 60 bp, Artificial; identical to SEQ ID NO: 336309
  Synthetic oligonucleotide

SEQ ID NO: 551479 - DNA, 60 bp, Artificial; identical to SEQ ID NO: 336310
  Synthetic oligonucleotide

SEQ ID NO: 551480 - DNA, 60 bp, Artificial; identical to SEQ ID NO: 336313
  Synthetic oligonucleotide

SEQ ID NO: 551481 - DNA, 59 bp, Artificial; identical to SEQ ID NO: 336317
  Synthetic oligonucleotide

SEQ ID NO: 551482 - DNA, 60 bp, Artificial; identical to SEQ ID NO: 336318
  Synthetic oligonucleotide

SEQ ID NO: 551483 - DNA, 52 bp, Artificial; identical to SEQ ID NO: 336320
  Synthetic oligonucleotide

SEQ ID NO: 551484 - DNA, 55 bp, Artificial; identical to SEQ ID NO: 336321
  Synthetic oligonucleotide

SEQ ID NO: 551485 - DNA, 58 bp, Artificial; identical to SEQ ID NO: 336322
  Synthetic oligonucleotide

SEQ ID NO: 551486 - DNA, 57 bp, Artificial; identical to SEQ ID NO: 336323
  Synthetic oligonucleotide

SEQ ID NO: 551487 - DNA, 59 bp, Artificial; identical to SEQ ID NO: 336327
  Synthetic oligonucleotide

SEQ ID NO: 551488 - DNA, 56 bp, Artificial; identical to SEQ ID NO: 336328
  Synthetic oligonucleotide

SEQ ID NO: 551489 - DNA, 60 bp, Artificial; identical to SEQ ID NO: 336334
  Synthetic oligonucleotide

SEQ ID NO: 551490 - DNA, 60 bp, Artificial; identical to SEQ ID NO: 336335
  Synthetic oligonucleotide

SEQ ID NO: 551491 - DNA, 50 bp, Artificial; identical to SEQ ID NO: 336336
  Synthetic oligonucleotide

SEQ ID NO: 551492 - DNA, 60 bp, Artificial; identical to SEQ ID NO: 336337
  Synthetic oligonucleotide

SEQ ID NO: 551493 - DNA, 60 bp, Artificial; identical to SEQ ID NO: 9154
  Synthetic oligonucleotide

SEQ ID NO: 551494 - DNA, 60 bp, Artificial; identical to SEQ ID NO: 336339
  Synthetic oligonucleotide

SEQ ID NO: 551495 - DNA, 55 bp, Artificial; identical to SEQ ID NO: 336341
  Synthetic oligonucleotide

SEQ ID NO: 551496 - DNA, 58 bp, Artificial; identical to SEQ ID NO: 336342
  Synthetic oligonucleotide

SEQ ID NO: 551497 - DNA, 55 bp, Artificial; identical to SEQ ID NO: 336344
  Synthetic oligonucleotide

SEQ ID NO: 551498 - DNA, 55 bp, Artificial; identical to SEQ ID NO: 336347
  Synthetic oligonucleotide

SEQ ID NO: 551499 - DNA, 55 bp, Artificial; identical to SEQ ID NO: 336349
  Synthetic oligonucleotide

SEQ ID NO: 551500 - DNA, 52 bp, Artificial; identical to SEQ ID NO: 336353
  Synthetic oligonucleotide

SEQ ID NO: 551501 - DNA, 52 bp, Artificial; identical to SEQ ID NO: 336354
  Synthetic oligonucleotide

SEQ ID NO: 551502 - DNA, 56 bp, Artificial; identical to SEQ ID NO: 336355
  Synthetic oligonucleotide

SEQ ID NO: 551503 - DNA, 52 bp, Artificial; identical to SEQ ID NO: 336360
  Synthetic oligonucleotide

SEQ ID NO: 551504 - DNA, 60 bp, Artificial; identical to SEQ ID NO: 336361
  Synthetic oligonucleotide

SEQ ID NO: 551505 - DNA, 60 bp, Artificial; identical to SEQ ID NO: 336364
  Synthetic oligonucleotide

SEQ ID NO: 551506 - DNA, 60 bp, Artificial; identical to SEQ ID NO: 336365
  Synthetic oligonucleotide

SEQ ID NO: 551507 - DNA, 58 bp, Artificial; identical to SEQ ID NO: 336367
  Synthetic oligonucleotide

SEQ ID NO: 551508 - DNA, 57 bp, Artificial; identical to SEQ ID NO: 336370
  Synthetic oligonucleotide

SEQ ID NO: 551509 - DNA, 60 bp, Artificial; identical to SEQ ID NO: 336371
  Synthetic oligonucleotide

SEQ ID NO: 551510 - DNA, 58 bp, Artificial; identical to SEQ ID NO: 336374
  Synthetic oligonucleotide

SEQ ID NO: 551511 - DNA, 52 bp, Artificial; identical to SEQ ID NO: 336377
  Synthetic oligonucleotide

SEQ ID NO: 551512 - DNA, 56 bp, Artificial; identical to SEQ ID NO: 336380
  Synthetic oligonucleotide

SEQ ID NO: 551513 - DNA, 52 bp, Artificial; identical to SEQ ID NO: 336382
  Synthetic oligonucleotide

SEQ ID NO: 551514 - DNA, 53 bp, Artificial; identical to SEQ ID NO: 336387
  Synthetic oligonucleotide

SEQ ID NO: 551515 - DNA, 51 bp, Artificial; identical to SEQ ID NO: 336388
  Synthetic oligonucleotide

SEQ ID NO: 551516 - DNA, 55 bp, Artificial; identical to SEQ ID NO: 336391
  Synthetic oligonucleotide

SEQ ID NO: 551517 - DNA, 58 bp, Artificial; identical to SEQ ID NO: 336396
  Synthetic oligonucleotide

SEQ ID NO: 551518 - DNA, 59 bp, Artificial; identical to SEQ ID NO: 336398
  Synthetic oligonucleotide

SEQ ID NO: 551519 - DNA, 60 bp, Artificial; identical to SEQ ID NO: 336402
  Synthetic oligonucleotide

SEQ ID NO: 551520 - DNA, 52 bp, Artificial; identical to SEQ ID NO: 336403
  Synthetic oligonucleotide

SEQ ID NO: 551521 - DNA, 56 bp, Artificial; identical to SEQ ID NO: 336404
  Synthetic oligonucleotide

SEQ ID NO: 551522 - DNA, 59 bp, Artificial; identical to SEQ ID NO: 336406
  Synthetic oligonucleotide

SEQ ID NO: 551523 - DNA, 54 bp, Artificial; identical to SEQ ID NO: 336407
  Synthetic oligonucleotide

SEQ ID NO: 551524 - DNA, 58 bp, Artificial; identical to SEQ ID NO: 336408
  Synthetic oligonucleotide

SEQ ID NO: 551525 - DNA, 56 bp, Artificial; identical to SEQ ID NO: 336410
  Synthetic oligonucleotide

SEQ ID NO: 551526 - DNA, 50 bp, Artificial; identical to SEQ ID NO: 336414
  Synthetic oligonucleotide

SEQ ID NO: 551527 - DNA, 55 bp, Artificial; identical to SEQ ID NO: 336416
  Synthetic oligonucleotide

SEQ ID NO: 551528 - DNA, 50 bp, Artificial; identical to SEQ ID NO: 336417
  Synthetic oligonucleotide

SEQ ID NO: 551529 - DNA, 55 bp, Artificial; identical to SEQ ID NO: 336420
  Synthetic oligonucleotide

SEQ ID NO: 551530 - DNA, 54 bp, Artificial; identical to SEQ ID NO: 336421
  Synthetic oligonucleotide

SEQ ID NO: 551531 - DNA, 52 bp, Artificial; identical to SEQ ID NO: 336424
  Synthetic oligonucleotide

SEQ ID NO: 551532 - DNA, 60 bp, Artificial; identical to SEQ ID NO: 15620
  Synthetic oligonucleotide

SEQ ID NO: 551533 - DNA, 60 bp, Artificial; identical to SEQ ID NO: 336425
  Synthetic oligonucleotide

SEQ ID NO: 551534 - DNA, 55 bp, Artificial; identical to SEQ ID NO: 336427
  Synthetic oligonucleotide

SEQ ID NO: 551535 - DNA, 55 bp, Artificial; identical to SEQ ID NO: 336428
  Synthetic oligonucleotide

SEQ ID NO: 551536 - DNA, 55 bp, Artificial; identical to SEQ ID NO: 336429
  Synthetic oligonucleotide

SEQ ID NO: 551537 - DNA, 58 bp, Artificial; identical to SEQ ID NO: 336433
  Synthetic oligonucleotide

SEQ ID NO: 551538 - DNA, 50 bp, Artificial; identical to SEQ ID NO: 336434
  Synthetic oligonucleotide

SEQ ID NO: 551539 - DNA, 60 bp, Artificial; identical to SEQ ID NO: 336438
  Synthetic oligonucleotide

SEQ ID NO: 551540 - DNA, 60 bp, Artificial; identical to SEQ ID NO: 336439
  Synthetic oligonucleotide

SEQ ID NO: 551541 - DNA, 57 bp, Artificial; identical to SEQ ID NO: 336442
  Synthetic oligonucleotide

SEQ ID NO: 551542 - DNA, 53 bp, Artificial; identical to SEQ ID NO: 13925
  Synthetic oligonucleotide

SEQ ID NO: 551543 - DNA, 55 bp, Artificial; identical to SEQ ID NO: 336443
  Synthetic oligonucleotide

SEQ ID NO: 551544 - DNA, 55 bp, Artificial; identical to SEQ ID NO: 336444
  Synthetic oligonucleotide

SEQ ID NO: 551545 - DNA, 60 bp, Artificial; identical to SEQ ID NO: 336445
  Synthetic oligonucleotide

SEQ ID NO: 551546 - DNA, 60 bp, Artificial; identical to SEQ ID NO: 336447
  Synthetic oligonucleotide

SEQ ID NO: 551547 - DNA, 52 bp, Artificial; identical to SEQ ID NO: 336448
  Synthetic oligonucleotide

SEQ ID NO: 551548 - DNA, 55 bp, Artificial; identical to SEQ ID NO: 336449
  Synthetic oligonucleotide

SEQ ID NO: 551549 - DNA, 56 bp, Artificial; identical to SEQ ID NO: 336450
  Synthetic oligonucleotide

SEQ ID NO: 551550 - DNA, 58 bp, Artificial; identical to SEQ ID NO: 336451
  Synthetic oligonucleotide

SEQ ID NO: 551551 - DNA, 52 bp, Artificial; identical to SEQ ID NO: 336452
  Synthetic oligonucleotide

SEQ ID NO: 551552 - DNA, 52 bp, Artificial; identical to SEQ ID NO: 336454
  Synthetic oligonucleotide

SEQ ID NO: 551553 - DNA, 57 bp, Artificial; identical to SEQ ID NO: 336457
  Synthetic oligonucleotide

SEQ ID NO: 551554 - DNA, 57 bp, Artificial; identical to SEQ ID NO: 336463
  Synthetic oligonucleotide

SEQ ID NO: 551555 - DNA, 56 bp, Artificial; identical to SEQ ID NO: 336464
  Synthetic oligonucleotide

SEQ ID NO: 551556 - DNA, 60 bp, Artificial; identical to SEQ ID NO: 336468
  Synthetic oligonucleotide

SEQ ID NO: 551557 - DNA, 55 bp, Artificial; identical to SEQ ID NO: 336472
  Synthetic oligonucleotide

SEQ ID NO: 551558 - DNA, 54 bp, Artificial; identical to SEQ ID NO: 20559
  Synthetic oligonucleotide

SEQ ID NO: 551559 - DNA, 52 bp, Artificial; identical to SEQ ID NO: 336473
  Synthetic oligonucleotide

SEQ ID NO: 551560 - DNA, 55 bp, Artificial; identical to SEQ ID NO: 336474
  Synthetic oligonucleotide

SEQ ID NO: 551561 - DNA, 55 bp, Artificial; identical to SEQ ID NO: 13642
  Synthetic oligonucleotide

SEQ ID NO: 551562 - DNA, 50 bp, Artificial; identical to SEQ ID NO: 336477
  Synthetic oligonucleotide

SEQ ID NO: 551563 - DNA, 60 bp, Artificial; identical to SEQ ID NO: 336479
  Synthetic oligonucleotide

SEQ ID NO: 551564 - DNA, 58 bp, Artificial; identical to SEQ ID NO: 336482
  Synthetic oligonucleotide

SEQ ID NO: 551565 - DNA, 60 bp, Artificial; identical to SEQ ID NO: 336485
  Synthetic oligonucleotide

SEQ ID NO: 551566 - DNA, 60 bp, Artificial; identical to SEQ ID NO: 12204
  Synthetic oligonucleotide

SEQ ID NO: 551567 - DNA, 55 bp, Artificial; identical to SEQ ID NO: 336486
  Synthetic oligonucleotide

SEQ ID NO: 551568 - DNA, 57 bp, Artificial; identical to SEQ ID NO: 336487
  Synthetic oligonucleotide

SEQ ID NO: 551569 - DNA, 50 bp, Artificial; identical to SEQ ID NO: 336488
  Synthetic oligonucleotide

SEQ ID NO: 551570 - DNA, 58 bp, Artificial; identical to SEQ ID NO: 336489
  Synthetic oligonucleotide

SEQ ID NO: 551571 - DNA, 59 bp, Artificial; identical to SEQ ID NO: 336490
  Synthetic oligonucleotide

SEQ ID NO: 551572 - DNA, 60 bp, Artificial; identical to SEQ ID NO: 336496
  Synthetic oligonucleotide

SEQ ID NO: 551573 - DNA, 60 bp, Artificial; identical to SEQ ID NO: 336498
  Synthetic oligonucleotide

SEQ ID NO: 551574 - DNA, 60 bp, Artificial; identical to SEQ ID NO: 336499
  Synthetic oligonucleotide

SEQ ID NO: 551575 - DNA, 60 bp, Artificial; identical to SEQ ID NO: 11882
  Synthetic oligonucleotide

SEQ ID NO: 551576 - DNA, 60 bp, Artificial; identical to SEQ ID NO: 336506
  Synthetic oligonucleotide

SEQ ID NO: 551577 - DNA, 56 bp, Artificial; identical to SEQ ID NO: 336507
  Synthetic oligonucleotide

SEQ ID NO: 551578 - DNA, 56 bp, Artificial; identical to SEQ ID NO: 336512
  Synthetic oligonucleotide

SEQ ID NO: 551579 - DNA, 51 bp, Artificial; identical to SEQ ID NO: 336514
  Synthetic oligonucleotide

SEQ ID NO: 551580 - DNA, 55 bp, Artificial; identical to SEQ ID NO: 336517
  Synthetic oligonucleotide

SEQ ID NO: 551581 - DNA, 55 bp, Artificial; identical to SEQ ID NO: 336518
  Synthetic oligonucleotide

SEQ ID NO: 551582 - DNA, 58 bp, Artificial; identical to SEQ ID NO: 336519
  Synthetic oligonucleotide

SEQ ID NO: 551583 - DNA, 60 bp, Artificial; identical to SEQ ID NO: 336520
  Synthetic oligonucleotide

SEQ ID NO: 551584 - DNA, 60 bp, Artificial; identical to SEQ ID NO: 336521
  Synthetic oligonucleotide

SEQ ID NO: 551585 - DNA, 60 bp, Artificial; identical to SEQ ID NO: 336522
  Synthetic oligonucleotide

SEQ ID NO: 551586 - DNA, 60 bp, Artificial; identical to SEQ ID NO: 336523
  Synthetic oligonucleotide

SEQ ID NO: 551587 - DNA, 60 bp, Artificial; identical to SEQ ID NO: 336524
  Synthetic oligonucleotide

SEQ ID NO: 551588 - DNA, 60 bp, Artificial; identical to SEQ ID NO: 336525
  Synthetic oligonucleotide

SEQ ID NO: 551589 - DNA, 57 bp, Artificial; identical to SEQ ID NO: 336526
  Synthetic oligonucleotide

SEQ ID NO: 551590 - DNA, 60 bp, Artificial; identical to SEQ ID NO: 336529
  Synthetic oligonucleotide

SEQ ID NO: 551591 - DNA, 60 bp, Artificial; identical to SEQ ID NO: 336530
  Synthetic oligonucleotide

SEQ ID NO: 551592 - DNA, 55 bp, Artificial; identical to SEQ ID NO: 336534
  Synthetic oligonucleotide

SEQ ID NO: 551593 - DNA, 56 bp, Artificial; identical to SEQ ID NO: 336535
  Synthetic oligonucleotide

SEQ ID NO: 551594 - DNA, 60 bp, Artificial; identical to SEQ ID NO: 336540
  Synthetic oligonucleotide

SEQ ID NO: 551595 - DNA, 60 bp, Artificial; identical to SEQ ID NO: 336541
  Synthetic oligonucleotide

SEQ ID NO: 551596 - DNA, 60 bp, Artificial; identical to SEQ ID NO: 336543
  Synthetic oligonucleotide

SEQ ID NO: 551597 - DNA, 59 bp, Artificial; identical to SEQ ID NO: 336544
  Synthetic oligonucleotide

SEQ ID NO: 551598 - DNA, 50 bp, Artificial; identical to SEQ ID NO: 336546
  Synthetic oligonucleotide

SEQ ID NO: 551599 - DNA, 52 bp, Artificial; identical to SEQ ID NO: 336547
  Synthetic oligonucleotide

SEQ ID NO: 551600 - DNA, 55 bp, Artificial; identical to SEQ ID NO: 336548
  Synthetic oligonucleotide

SEQ ID NO: 551601 - DNA, 55 bp, Artificial; identical to SEQ ID NO: 336549
  Synthetic oligonucleotide

SEQ ID NO: 551602 - DNA, 57 bp, Artificial; identical to SEQ ID NO: 336551
  Synthetic oligonucleotide

SEQ ID NO: 551603 - DNA, 58 bp, Artificial; identical to SEQ ID NO: 336554
  Synthetic oligonucleotide

SEQ ID NO: 551604 - DNA, 60 bp, Artificial; identical to SEQ ID NO: 336556
  Synthetic oligonucleotide

SEQ ID NO: 551605 - DNA, 57 bp, Artificial; identical to SEQ ID NO: 336559
  Synthetic oligonucleotide

SEQ ID NO: 551606 - DNA, 52 bp, Artificial; identical to SEQ ID NO: 336564
  Synthetic oligonucleotide

SEQ ID NO: 551607 - DNA, 54 bp, Artificial; identical to SEQ ID NO: 336565
  Synthetic oligonucleotide

SEQ ID NO: 551608 - DNA, 55 bp, Artificial; identical to SEQ ID NO: 336567
  Synthetic oligonucleotide

SEQ ID NO: 551609 - DNA, 60 bp, Artificial; identical to SEQ ID NO: 336568
  Synthetic oligonucleotide

SEQ ID NO: 551610 - DNA, 60 bp, Artificial; identical to SEQ ID NO: 336569
  Synthetic oligonucleotide

SEQ ID NO: 551611 - DNA, 60 bp, Artificial; identical to SEQ ID NO: 336570
  Synthetic oligonucleotide

SEQ ID NO: 551612 - DNA, 60 bp, Artificial; identical to SEQ ID NO: 336572
  Synthetic oligonucleotide

SEQ ID NO: 551613 - DNA, 52 bp, Artificial; identical to SEQ ID NO: 336575
  Synthetic oligonucleotide

SEQ ID NO: 551614 - DNA, 55 bp, Artificial; identical to SEQ ID NO: 336576
  Synthetic oligonucleotide

SEQ ID NO: 551615 - DNA, 52 bp, Artificial; identical to SEQ ID NO: 336578
  Synthetic oligonucleotide

SEQ ID NO: 551616 - DNA, 60 bp, Artificial; identical to SEQ ID NO: 336579
  Synthetic oligonucleotide

SEQ ID NO: 551617 - DNA, 58 bp, Artificial; identical to SEQ ID NO: 18722
  Synthetic oligonucleotide

SEQ ID NO: 551618 - DNA, 60 bp, Artificial; identical to SEQ ID NO: 336581
  Synthetic oligonucleotide

SEQ ID NO: 551619 - DNA, 60 bp, Artificial; identical to SEQ ID NO: 336582
  Synthetic oligonucleotide

SEQ ID NO: 551620 - DNA, 55 bp, Artificial; identical to SEQ ID NO: 336589
  Synthetic oligonucleotide

SEQ ID NO: 551621 - DNA, 54 bp, Artificial; identical to SEQ ID NO: 336590
  Synthetic oligonucleotide

SEQ ID NO: 551622 - DNA, 53 bp, Artificial; identical to SEQ ID NO: 336591
  Synthetic oligonucleotide

SEQ ID NO: 551623 - DNA, 54 bp, Artificial; identical to SEQ ID NO: 10565
  Synthetic oligonucleotide

SEQ ID NO: 551624 - DNA, 60 bp, Artificial; identical to SEQ ID NO: 336593
  Synthetic oligonucleotide

SEQ ID NO: 551625 - DNA, 55 bp, Artificial; identical to SEQ ID NO: 336594
  Synthetic oligonucleotide

SEQ ID NO: 551626 - DNA, 60 bp, Artificial; identical to SEQ ID NO: 336595
  Synthetic oligonucleotide

SEQ ID NO: 551627 - DNA, 53 bp, Artificial; identical to SEQ ID NO: 336597
  Synthetic oligonucleotide

SEQ ID NO: 551628 - DNA, 57 bp, Artificial; identical to SEQ ID NO: 336598
  Synthetic oligonucleotide

SEQ ID NO: 551629 - DNA, 60 bp, Artificial; identical to SEQ ID NO: 336600
  Synthetic oligonucleotide

SEQ ID NO: 551630 - DNA, 60 bp, Artificial; identical to SEQ ID NO: 336605
  Synthetic oligonucleotide

SEQ ID NO: 551631 - DNA, 60 bp, Artificial; identical to SEQ ID NO: 336606
  Synthetic oligonucleotide

SEQ ID NO: 551632 - DNA, 60 bp, Artificial; identical to SEQ ID NO: 336607
  Synthetic oligonucleotide

SEQ ID NO: 551633 - DNA, 51 bp, Artificial; identical to SEQ ID NO: 336608
  Synthetic oligonucleotide

SEQ ID NO: 551634 - DNA, 60 bp, Artificial; identical to SEQ ID NO: 336609
  Synthetic oligonucleotide

SEQ ID NO: 551635 - DNA, 60 bp, Artificial; identical to SEQ ID NO: 336617
  Synthetic oligonucleotide

SEQ ID NO: 551636 - DNA, 60 bp, Artificial; identical to SEQ ID NO: 336618
  Synthetic oligonucleotide

SEQ ID NO: 551637 - DNA, 56 bp, Artificial; identical to SEQ ID NO: 336619
  Synthetic oligonucleotide

SEQ ID NO: 551638 - DNA, 60 bp, Artificial; identical to SEQ ID NO: 336620
  Synthetic oligonucleotide

SEQ ID NO: 551639 - DNA, 51 bp, Artificial; identical to SEQ ID NO: 336624
  Synthetic oligonucleotide

SEQ ID NO: 551640 - DNA, 55 bp, Artificial; identical to SEQ ID NO: 336625
  Synthetic oligonucleotide

SEQ ID NO: 551641 - DNA, 57 bp, Artificial; identical to SEQ ID NO: 336626
  Synthetic oligonucleotide

SEQ ID NO: 551642 - DNA, 58 bp, Artificial; identical to SEQ ID NO: 336630
  Synthetic oligonucleotide

SEQ ID NO: 551643 - DNA, 53 bp, Artificial; identical to SEQ ID NO: 336636
  Synthetic oligonucleotide

SEQ ID NO: 551644 - DNA, 55 bp, Artificial; identical to SEQ ID NO: 14058
  Synthetic oligonucleotide

SEQ ID NO: 551645 - DNA, 60 bp, Artificial; identical to SEQ ID NO: 336642
  Synthetic oligonucleotide

SEQ ID NO: 551646 - DNA, 60 bp, Artificial; identical to SEQ ID NO: 336643
  Synthetic oligonucleotide

SEQ ID NO: 551647 - DNA, 60 bp, Artificial; identical to SEQ ID NO: 336649
  Synthetic oligonucleotide

SEQ ID NO: 551648 - DNA, 60 bp, Artificial; identical to SEQ ID NO: 336651
  Synthetic oligonucleotide

SEQ ID NO: 551649 - DNA, 60 bp, Artificial; identical to SEQ ID NO: 9280
  Synthetic oligonucleotide

SEQ ID NO: 551650 - DNA, 60 bp, Artificial; identical to SEQ ID NO: 336654
  Synthetic oligonucleotide

SEQ ID NO: 551651 - DNA, 57 bp, Artificial; identical to SEQ ID NO: 336656
  Synthetic oligonucleotide

SEQ ID NO: 551652 - DNA, 60 bp, Artificial; identical to SEQ ID NO: 336658
  Synthetic oligonucleotide

SEQ ID NO: 551653 - DNA, 55 bp, Artificial; identical to SEQ ID NO: 336659
  Synthetic oligonucleotide

SEQ ID NO: 551654 - DNA, 55 bp, Artificial; identical to SEQ ID NO: 336660
  Synthetic oligonucleotide

SEQ ID NO: 551655 - DNA, 55 bp, Artificial; identical to SEQ ID NO: 336661
  Synthetic oligonucleotide

SEQ ID NO: 551656 - DNA, 58 bp, Artificial; identical to SEQ ID NO: 336662
  Synthetic oligonucleotide

SEQ ID NO: 551657 - DNA, 55 bp, Artificial; identical to SEQ ID NO: 336663
  Synthetic oligonucleotide

SEQ ID NO: 551658 - DNA, 60 bp, Artificial; identical to SEQ ID NO: 336664
  Synthetic oligonucleotide

SEQ ID NO: 551659 - DNA, 57 bp, Artificial; identical to SEQ ID NO: 336667
  Synthetic oligonucleotide

SEQ ID NO: 551660 - DNA, 58 bp, Artificial; identical to SEQ ID NO: 336670
  Synthetic oligonucleotide

SEQ ID NO: 551661 - DNA, 57 bp, Artificial; identical to SEQ ID NO: 336673
  Synthetic oligonucleotide

SEQ ID NO: 551662 - DNA, 55 bp, Artificial; identical to SEQ ID NO: 336674
  Synthetic oligonucleotide

SEQ ID NO: 551663 - DNA, 56 bp, Artificial; identical to SEQ ID NO: 10814
  Synthetic oligonucleotide

SEQ ID NO: 551664 - DNA, 59 bp, Artificial; identical to SEQ ID NO: 336677
  Synthetic oligonucleotide

SEQ ID NO: 551665 - DNA, 58 bp, Artificial; identical to SEQ ID NO: 19057
  Synthetic oligonucleotide

SEQ ID NO: 551666 - DNA, 60 bp, Artificial; identical to SEQ ID NO: 336682
  Synthetic oligonucleotide

SEQ ID NO: 551667 - DNA, 55 bp, Artificial; identical to SEQ ID NO: 336683
  Synthetic oligonucleotide

SEQ ID NO: 551668 - DNA, 60 bp, Artificial; identical to SEQ ID NO: 336685
  Synthetic oligonucleotide

SEQ ID NO: 551669 - DNA, 52 bp, Artificial; identical to SEQ ID NO: 336687
  Synthetic oligonucleotide

SEQ ID NO: 551670 - DNA, 52 bp, Artificial; identical to SEQ ID NO: 336690
  Synthetic oligonucleotide

SEQ ID NO: 551671 - DNA, 58 bp, Artificial; identical to SEQ ID NO: 336691
  Synthetic oligonucleotide

SEQ ID NO: 551672 - DNA, 60 bp, Artificial; identical to SEQ ID NO: 336698
  Synthetic oligonucleotide

SEQ ID NO: 551673 - DNA, 55 bp, Artificial; identical to SEQ ID NO: 336701
  Synthetic oligonucleotide

SEQ ID NO: 551674 - DNA, 59 bp, Artificial; identical to SEQ ID NO: 336702
  Synthetic oligonucleotide

SEQ ID NO: 551675 - DNA, 51 bp, Artificial; identical to SEQ ID NO: 336705
  Synthetic oligonucleotide

SEQ ID NO: 551676 - DNA, 60 bp, Artificial; identical to SEQ ID NO: 336706
  Synthetic oligonucleotide

SEQ ID NO: 551677 - DNA, 50 bp, Artificial; identical to SEQ ID NO: 336707
  Synthetic oligonucleotide

SEQ ID NO: 551678 - DNA, 58 bp, Artificial; identical to SEQ ID NO: 336708
  Synthetic oligonucleotide

SEQ ID NO: 551679 - DNA, 60 bp, Artificial; identical to SEQ ID NO: 8716
  Synthetic oligonucleotide

SEQ ID NO: 551680 - DNA, 50 bp, Artificial; identical to SEQ ID NO: 336710
  Synthetic oligonucleotide

SEQ ID NO: 551681 - DNA, 51 bp, Artificial; identical to SEQ ID NO: 336711
  Synthetic oligonucleotide

SEQ ID NO: 551682 - DNA, 60 bp, Artificial; identical to SEQ ID NO: 336713
  Synthetic oligonucleotide

SEQ ID NO: 551683 - DNA, 57 bp, Artificial; identical to SEQ ID NO: 336714
  Synthetic oligonucleotide

SEQ ID NO: 551684 - DNA, 55 bp, Artificial; identical to SEQ ID NO: 336717
  Synthetic oligonucleotide

SEQ ID NO: 551685 - DNA, 55 bp, Artificial; identical to SEQ ID NO: 336720
  Synthetic oligonucleotide

SEQ ID NO: 551686 - DNA, 60 bp, Artificial; identical to SEQ ID NO: 336721
  Synthetic oligonucleotide

SEQ ID NO: 551687 - DNA, 56 bp, Artificial; identical to SEQ ID NO: 336722
  Synthetic oligonucleotide

SEQ ID NO: 551688 - DNA, 53 bp, Artificial; identical to SEQ ID NO: 336724
  Synthetic oligonucleotide

SEQ ID NO: 551689 - DNA, 59 bp, Artificial; identical to SEQ ID NO: 336729
  Synthetic oligonucleotide

SEQ ID NO: 551690 - DNA, 56 bp, Artificial; identical to SEQ ID NO: 336730
  Synthetic oligonucleotide

SEQ ID NO: 551691 - DNA, 60 bp, Artificial; identical to SEQ ID NO: 336731
  Synthetic oligonucleotide

SEQ ID NO: 551692 - DNA, 57 bp, Artificial; identical to SEQ ID NO: 336732
  Synthetic oligonucleotide

SEQ ID NO: 551693 - DNA, 55 bp, Artificial; identical to SEQ ID NO: 336738
  Synthetic oligonucleotide

SEQ ID NO: 551694 - DNA, 56 bp, Artificial; identical to SEQ ID NO: 336739
  Synthetic oligonucleotide

SEQ ID NO: 551695 - DNA, 59 bp, Artificial; identical to SEQ ID NO: 336741
  Synthetic oligonucleotide

SEQ ID NO: 551696 - DNA, 59 bp, Artificial; identical to SEQ ID NO: 336742
  Synthetic oligonucleotide

SEQ ID NO: 551697 - DNA, 50 bp, Artificial; identical to SEQ ID NO: 336746
  Synthetic oligonucleotide

SEQ ID NO: 551698 - DNA, 54 bp, Artificial; identical to SEQ ID NO: 347
  Synthetic oligonucleotide

SEQ ID NO: 551699 - DNA, 57 bp, Artificial; identical to SEQ ID NO: 20195
  Synthetic oligonucleotide

SEQ ID NO: 551700 - DNA, 57 bp, Artificial; identical to SEQ ID NO: 336760
  Synthetic oligonucleotide

SEQ ID NO: 551701 - DNA, 50 bp, Artificial; identical to SEQ ID NO: 336762
  Synthetic oligonucleotide

SEQ ID NO: 551702 - DNA, 57 bp, Artificial; identical to SEQ ID NO: 336763
  Synthetic oligonucleotide

SEQ ID NO: 551703 - DNA, 59 bp, Artificial; identical to SEQ ID NO: 336764
  Synthetic oligonucleotide

SEQ ID NO: 551704 - DNA, 60 bp, Artificial; identical to SEQ ID NO: 336767
  Synthetic oligonucleotide

SEQ ID NO: 551705 - DNA, 55 bp, Artificial; identical to SEQ ID NO: 336769
  Synthetic oligonucleotide

SEQ ID NO: 551706 - DNA, 60 bp, Artificial; identical to SEQ ID NO: 336770
  Synthetic oligonucleotide

SEQ ID NO: 551707 - DNA, 60 bp, Artificial; identical to SEQ ID NO: 336776
  Synthetic oligonucleotide

SEQ ID NO: 551708 - DNA, 50 bp, Artificial; identical to SEQ ID NO: 336777
  Synthetic oligonucleotide

SEQ ID NO: 551709 - DNA, 55 bp, Artificial; identical to SEQ ID NO: 336778
  Synthetic oligonucleotide

SEQ ID NO: 551710 - DNA, 56 bp, Artificial; identical to SEQ ID NO: 336779
  Synthetic oligonucleotide

SEQ ID NO: 551711 - DNA, 56 bp, Artificial; identical to SEQ ID NO: 336780
  Synthetic oligonucleotide

SEQ ID NO: 551712 - DNA, 60 bp, Artificial; identical to SEQ ID NO: 336781
  Synthetic oligonucleotide

SEQ ID NO: 551713 - DNA, 56 bp, Artificial; identical to SEQ ID NO: 336782
  Synthetic oligonucleotide

SEQ ID NO: 551714 - DNA, 58 bp, Artificial; identical to SEQ ID NO: 336785
  Synthetic oligonucleotide

SEQ ID NO: 551715 - DNA, 57 bp, Artificial; identical to SEQ ID NO: 336787
  Synthetic oligonucleotide

SEQ ID NO: 551716 - DNA, 55 bp, Artificial; identical to SEQ ID NO: 336788
  Synthetic oligonucleotide

SEQ ID NO: 551717 - DNA, 52 bp, Artificial; identical to SEQ ID NO: 336789
  Synthetic oligonucleotide

SEQ ID NO: 551718 - DNA, 58 bp, Artificial; identical to SEQ ID NO: 336790
  Synthetic oligonucleotide

SEQ ID NO: 551719 - DNA, 60 bp, Artificial; identical to SEQ ID NO: 336792
  Synthetic oligonucleotide

SEQ ID NO: 551720 - DNA, 53 bp, Artificial; identical to SEQ ID NO: 336796
  Synthetic oligonucleotide

SEQ ID NO: 551721 - DNA, 55 bp, Artificial; identical to SEQ ID NO: 336797
  Synthetic oligonucleotide

SEQ ID NO: 551722 - DNA, 60 bp, Artificial; identical to SEQ ID NO: 336798
  Synthetic oligonucleotide

SEQ ID NO: 551723 - DNA, 59 bp, Artificial; identical to SEQ ID NO: 19034
  Synthetic oligonucleotide

SEQ ID NO: 551724 - DNA, 50 bp, Artificial; identical to SEQ ID NO: 336801
  Synthetic oligonucleotide

SEQ ID NO: 551725 - DNA, 55 bp, Artificial; identical to SEQ ID NO: 19143
  Synthetic oligonucleotide

SEQ ID NO: 551726 - DNA, 57 bp, Artificial; identical to SEQ ID NO: 336806
  Synthetic oligonucleotide

SEQ ID NO: 551727 - DNA, 55 bp, Artificial; identical to SEQ ID NO: 336810
  Synthetic oligonucleotide

SEQ ID NO: 551728 - DNA, 60 bp, Artificial; identical to SEQ ID NO: 336812
  Synthetic oligonucleotide

SEQ ID NO: 551729 - DNA, 60 bp, Artificial; identical to SEQ ID NO: 336813
  Synthetic oligonucleotide

SEQ ID NO: 551730 - DNA, 60 bp, Artificial; identical to SEQ ID NO: 336814
  Synthetic oligonucleotide

SEQ ID NO: 551731 - DNA, 55 bp, Artificial; identical to SEQ ID NO: 336816
  Synthetic oligonucleotide

SEQ ID NO: 551732 - DNA, 57 bp, Artificial; identical to SEQ ID NO: 336820
  Synthetic oligonucleotide

SEQ ID NO: 551733 - DNA, 60 bp, Artificial; identical to SEQ ID NO: 336821
  Synthetic oligonucleotide

SEQ ID NO: 551734 - DNA, 57 bp, Artificial; identical to SEQ ID NO: 336827
  Synthetic oligonucleotide

SEQ ID NO: 551735 - DNA, 60 bp, Artificial; identical to SEQ ID NO: 336829
  Synthetic oligonucleotide

SEQ ID NO: 551736 - DNA, 60 bp, Artificial; identical to SEQ ID NO: 336830
  Synthetic oligonucleotide

SEQ ID NO: 551737 - DNA, 57 bp, Artificial; identical to SEQ ID NO: 336832
  Synthetic oligonucleotide

SEQ ID NO: 551738 - DNA, 55 bp, Artificial; identical to SEQ ID NO: 336833
  Synthetic oligonucleotide

SEQ ID NO: 551739 - DNA, 55 bp, Artificial; identical to SEQ ID NO: 336834
  Synthetic oligonucleotide

SEQ ID NO: 551740 - DNA, 56 bp, Artificial; identical to SEQ ID NO: 336835
  Synthetic oligonucleotide

SEQ ID NO: 551741 - DNA, 58 bp, Artificial; identical to SEQ ID NO: 336836
  Synthetic oligonucleotide

SEQ ID NO: 551742 - DNA, 54 bp, Artificial; identical to SEQ ID NO: 336837
  Synthetic oligonucleotide

SEQ ID NO: 551743 - DNA, 50 bp, Artificial; identical to SEQ ID NO: 336838
  Synthetic oligonucleotide

SEQ ID NO: 551744 - DNA, 58 bp, Artificial; identical to SEQ ID NO: 336839
  Synthetic oligonucleotide

SEQ ID NO: 551745 - DNA, 60 bp, Artificial; identical to SEQ ID NO: 336840
  Synthetic oligonucleotide

SEQ ID NO: 551746 - DNA, 55 bp, Artificial; identical to SEQ ID NO: 336841
  Synthetic oligonucleotide

SEQ ID NO: 551747 - DNA, 60 bp, Artificial; identical to SEQ ID NO: 336842
  Synthetic oligonucleotide

SEQ ID NO: 551748 - DNA, 52 bp, Artificial; identical to SEQ ID NO: 336843
  Synthetic oligonucleotide

SEQ ID NO: 551749 - DNA, 57 bp, Artificial; identical to SEQ ID NO: 336844
  Synthetic oligonucleotide

SEQ ID NO: 551750 - DNA, 56 bp, Artificial; identical to SEQ ID NO: 336845
  Synthetic oligonucleotide

SEQ ID NO: 551751 - DNA, 60 bp, Artificial; identical to SEQ ID NO: 336846
  Synthetic oligonucleotide

SEQ ID NO: 551752 - DNA, 59 bp, Artificial; identical to SEQ ID NO: 336847
  Synthetic oligonucleotide

SEQ ID NO: 551753 - DNA, 58 bp, Artificial; identical to SEQ ID NO: 336848
  Synthetic oligonucleotide

SEQ ID NO: 551754 - DNA, 56 bp, Artificial; identical to SEQ ID NO: 336850
  Synthetic oligonucleotide

SEQ ID NO: 551755 - DNA, 56 bp, Artificial; identical to SEQ ID NO: 336851
  Synthetic oligonucleotide

SEQ ID NO: 551756 - DNA, 51 bp, Artificial; identical to SEQ ID NO: 336853
  Synthetic oligonucleotide

SEQ ID NO: 551757 - DNA, 58 bp, Artificial; identical to SEQ ID NO: 336855
  Synthetic oligonucleotide

SEQ ID NO: 551758 - DNA, 57 bp, Artificial; identical to SEQ ID NO: 336858
  Synthetic oligonucleotide

SEQ ID NO: 551759 - DNA, 55 bp, Artificial; identical to SEQ ID NO: 336859
  Synthetic oligonucleotide

SEQ ID NO: 551760 - DNA, 60 bp, Artificial; identical to SEQ ID NO: 336861
  Synthetic oligonucleotide

SEQ ID NO: 551761 - DNA, 59 bp, Artificial; identical to SEQ ID NO: 18537
  Synthetic oligonucleotide

SEQ ID NO: 551762 - DNA, 60 bp, Artificial; identical to SEQ ID NO: 15822
  Synthetic oligonucleotide

SEQ ID NO: 551763 - DNA, 55 bp, Artificial; identical to SEQ ID NO: 336863
  Synthetic oligonucleotide

SEQ ID NO: 551764 - DNA, 54 bp, Artificial; identical to SEQ ID NO: 336865
  Synthetic oligonucleotide

SEQ ID NO: 551765 - DNA, 60 bp, Artificial; identical to SEQ ID NO: 336867
  Synthetic oligonucleotide

SEQ ID NO: 551766 - DNA, 53 bp, Artificial; identical to SEQ ID NO: 336868
  Synthetic oligonucleotide

SEQ ID NO: 551767 - DNA, 60 bp, Artificial; identical to SEQ ID NO: 336872
  Synthetic oligonucleotide

SEQ ID NO: 551768 - DNA, 60 bp, Artificial; identical to SEQ ID NO: 336873
  Synthetic oligonucleotide

SEQ ID NO: 551769 - DNA, 56 bp, Artificial; identical to SEQ ID NO: 336874
  Synthetic oligonucleotide

SEQ ID NO: 551770 - DNA, 54 bp, Artificial; identical to SEQ ID NO: 336877
  Synthetic oligonucleotide

SEQ ID NO: 551771 - DNA, 56 bp, Artificial; identical to SEQ ID NO: 19853
  Synthetic oligonucleotide

SEQ ID NO: 551772 - DNA, 60 bp, Artificial; identical to SEQ ID NO: 336878
  Synthetic oligonucleotide

SEQ ID NO: 551773 - DNA, 60 bp, Artificial; identical to SEQ ID NO: 336882
  Synthetic oligonucleotide

SEQ ID NO: 551774 - DNA, 56 bp, Artificial; identical to SEQ ID NO: 336883
  Synthetic oligonucleotide

SEQ ID NO: 551775 - DNA, 60 bp, Artificial; identical to SEQ ID NO: 336887
  Synthetic oligonucleotide

SEQ ID NO: 551776 - DNA, 59 bp, Artificial; identical to SEQ ID NO: 336896
  Synthetic oligonucleotide

SEQ ID NO: 551777 - DNA, 59 bp, Artificial; identical to SEQ ID NO: 336898
  Synthetic oligonucleotide

SEQ ID NO: 551778 - DNA, 57 bp, Artificial; identical to SEQ ID NO: 336901
  Synthetic oligonucleotide

SEQ ID NO: 551779 - DNA, 55 bp, Artificial; identical to SEQ ID NO: 336908
  Synthetic oligonucleotide

SEQ ID NO: 551780 - DNA, 60 bp, Artificial; identical to SEQ ID NO: 336910
  Synthetic oligonucleotide

SEQ ID NO: 551781 - DNA, 58 bp, Artificial; identical to SEQ ID NO: 336912
  Synthetic oligonucleotide

SEQ ID NO: 551782 - DNA, 59 bp, Artificial; identical to SEQ ID NO: 336913
  Synthetic oligonucleotide

SEQ ID NO: 551783 - DNA, 60 bp, Artificial; identical to SEQ ID NO: 336915
  Synthetic oligonucleotide

SEQ ID NO: 551784 - DNA, 60 bp, Artificial; identical to SEQ ID NO: 336917
  Synthetic oligonucleotide

SEQ ID NO: 551785 - DNA, 60 bp, Artificial; identical to SEQ ID NO: 336918
  Synthetic oligonucleotide

SEQ ID NO: 551786 - DNA, 60 bp, Artificial; identical to SEQ ID NO: 336919
  Synthetic oligonucleotide

SEQ ID NO: 551787 - DNA, 55 bp, Artificial; identical to SEQ ID NO: 336921
  Synthetic oligonucleotide

SEQ ID NO: 551788 - DNA, 60 bp, Artificial; identical to SEQ ID NO: 336924
  Synthetic oligonucleotide

SEQ ID NO: 551789 - DNA, 60 bp, Artificial; identical to SEQ ID NO: 336927
  Synthetic oligonucleotide

SEQ ID NO: 551790 - DNA, 56 bp, Artificial; identical to SEQ ID NO: 336928
  Synthetic oligonucleotide

SEQ ID NO: 551791 - DNA, 59 bp, Artificial; identical to SEQ ID NO: 336929
  Synthetic oligonucleotide

SEQ ID NO: 551792 - DNA, 59 bp, Artificial; identical to SEQ ID NO: 336936
  Synthetic oligonucleotide

SEQ ID NO: 551793 - DNA, 60 bp, Artificial; identical to SEQ ID NO: 336937
  Synthetic oligonucleotide

SEQ ID NO: 551794 - DNA, 54 bp, Artificial; identical to SEQ ID NO: 336940
  Synthetic oligonucleotide

SEQ ID NO: 551795 - DNA, 60 bp, Artificial; identical to SEQ ID NO: 336941
  Synthetic oligonucleotide

SEQ ID NO: 551796 - DNA, 55 bp, Artificial; identical to SEQ ID NO: 336943
  Synthetic oligonucleotide

SEQ ID NO: 551797 - DNA, 58 bp, Artificial; identical to SEQ ID NO: 336944
  Synthetic oligonucleotide

SEQ ID NO: 551798 - DNA, 55 bp, Artificial; identical to SEQ ID NO: 336947
  Synthetic oligonucleotide

SEQ ID NO: 551799 - DNA, 59 bp, Artificial; identical to SEQ ID NO: 336948
  Synthetic oligonucleotide

SEQ ID NO: 551800 - DNA, 59 bp, Artificial; identical to SEQ ID NO: 336953
  Synthetic oligonucleotide

SEQ ID NO: 551801 - DNA, 55 bp, Artificial; identical to SEQ ID NO: 336955
  Synthetic oligonucleotide

SEQ ID NO: 551802 - DNA, 54 bp, Artificial; identical to SEQ ID NO: 336956
  Synthetic oligonucleotide

SEQ ID NO: 551803 - DNA, 53 bp, Artificial; identical to SEQ ID NO: 336957
  Synthetic oligonucleotide

SEQ ID NO: 551804 - DNA, 56 bp, Artificial; identical to SEQ ID NO: 336959
  Synthetic oligonucleotide

SEQ ID NO: 551805 - DNA, 55 bp, Artificial; identical to SEQ ID NO: 336964
  Synthetic oligonucleotide

SEQ ID NO: 551806 - DNA, 58 bp, Artificial; identical to SEQ ID NO: 336967
  Synthetic oligonucleotide

SEQ ID NO: 551807 - DNA, 55 bp, Artificial; identical to SEQ ID NO: 336972
  Synthetic oligonucleotide

SEQ ID NO: 551808 - DNA, 50 bp, Artificial; identical to SEQ ID NO: 336973
  Synthetic oligonucleotide

SEQ ID NO: 551809 - DNA, 55 bp, Artificial; identical to SEQ ID NO: 336974
  Synthetic oligonucleotide

SEQ ID NO: 551810 - DNA, 55 bp, Artificial; identical to SEQ ID NO: 336976
  Synthetic oligonucleotide

SEQ ID NO: 551811 - DNA, 60 bp, Artificial; identical to SEQ ID NO: 336978
  Synthetic oligonucleotide

SEQ ID NO: 551812 - DNA, 51 bp, Artificial; identical to SEQ ID NO: 336979
  Synthetic oligonucleotide

SEQ ID NO: 551813 - DNA, 60 bp, Artificial; identical to SEQ ID NO: 336982
  Synthetic oligonucleotide

SEQ ID NO: 551814 - DNA, 60 bp, Artificial; identical to SEQ ID NO: 336985
  Synthetic oligonucleotide

SEQ ID NO: 551815 - DNA, 60 bp, Artificial; identical to SEQ ID NO: 336986
  Synthetic oligonucleotide

SEQ ID NO: 551816 - DNA, 56 bp, Artificial; identical to SEQ ID NO: 336990
  Synthetic oligonucleotide

SEQ ID NO: 551817 - DNA, 58 bp, Artificial; identical to SEQ ID NO: 336991
  Synthetic oligonucleotide

SEQ ID NO: 551818 - DNA, 55 bp, Artificial; identical to SEQ ID NO: 336992
  Synthetic oligonucleotide

SEQ ID NO: 551819 - DNA, 55 bp, Artificial; identical to SEQ ID NO: 337005
  Synthetic oligonucleotide

SEQ ID NO: 551820 - DNA, 58 bp, Artificial; identical to SEQ ID NO: 337006
  Synthetic oligonucleotide

SEQ ID NO: 551821 - DNA, 60 bp, Artificial; identical to SEQ ID NO: 337007
  Synthetic oligonucleotide

SEQ ID NO: 551822 - DNA, 53 bp, Artificial; identical to SEQ ID NO: 337011
  Synthetic oligonucleotide

SEQ ID NO: 551823 - DNA, 54 bp, Artificial; identical to SEQ ID NO: 337014
  Synthetic oligonucleotide

SEQ ID NO: 551824 - DNA, 56 bp, Artificial; identical to SEQ ID NO: 337018
  Synthetic oligonucleotide

SEQ ID NO: 551825 - DNA, 49 bp, Artificial; identical to SEQ ID NO: 337020
  Synthetic oligonucleotide

SEQ ID NO: 551826 - DNA, 56 bp, Artificial; identical to SEQ ID NO: 337025
  Synthetic oligonucleotide

SEQ ID NO: 551827 - DNA, 60 bp, Artificial; identical to SEQ ID NO: 337026
  Synthetic oligonucleotide

SEQ ID NO: 551828 - DNA, 51 bp, Artificial; identical to SEQ ID NO: 337027
  Synthetic oligonucleotide

SEQ ID NO: 551829 - DNA, 57 bp, Artificial; identical to SEQ ID NO: 11272
  Synthetic oligonucleotide

SEQ ID NO: 551830 - DNA, 56 bp, Artificial; identical to SEQ ID NO: 337030
  Synthetic oligonucleotide

SEQ ID NO: 551831 - DNA, 57 bp, Artificial; identical to SEQ ID NO: 337033
  Synthetic oligonucleotide

SEQ ID NO: 551832 - DNA, 60 bp, Artificial; identical to SEQ ID NO: 337041
  Synthetic oligonucleotide

SEQ ID NO: 551833 - DNA, 53 bp, Artificial; identical to SEQ ID NO: 337048
  Synthetic oligonucleotide

SEQ ID NO: 551834 - DNA, 56 bp, Artificial; identical to SEQ ID NO: 337049
  Synthetic oligonucleotide

SEQ ID NO: 551835 - DNA, 52 bp, Artificial; identical to SEQ ID NO: 337050
  Synthetic oligonucleotide

SEQ ID NO: 551836 - DNA, 55 bp, Artificial; identical to SEQ ID NO: 337051
  Synthetic oligonucleotide

SEQ ID NO: 551837 - DNA, 58 bp, Artificial; identical to SEQ ID NO: 337053
  Synthetic oligonucleotide

SEQ ID NO: 551838 - DNA, 57 bp, Artificial; identical to SEQ ID NO: 337055
  Synthetic oligonucleotide

SEQ ID NO: 551839 - DNA, 55 bp, Artificial; identical to SEQ ID NO: 337056
  Synthetic oligonucleotide

SEQ ID NO: 551840 - DNA, 60 bp, Artificial; identical to SEQ ID NO: 337064
  Synthetic oligonucleotide

SEQ ID NO: 551841 - DNA, 57 bp, Artificial; identical to SEQ ID NO: 337065
  Synthetic oligonucleotide

SEQ ID NO: 551842 - DNA, 55 bp, Artificial; identical to SEQ ID NO: 337066
  Synthetic oligonucleotide

SEQ ID NO: 551843 - DNA, 50 bp, Artificial; identical to SEQ ID NO: 337070
  Synthetic oligonucleotide

SEQ ID NO: 551844 - DNA, 55 bp, Artificial; identical to SEQ ID NO: 337077
  Synthetic oligonucleotide

SEQ ID NO: 551845 - DNA, 53 bp, Artificial; identical to SEQ ID NO: 337078
  Synthetic oligonucleotide

SEQ ID NO: 551846 - DNA, 57 bp, Artificial; identical to SEQ ID NO: 337080
  Synthetic oligonucleotide

SEQ ID NO: 551847 - DNA, 58 bp, Artificial; identical to SEQ ID NO: 337083
  Synthetic oligonucleotide

SEQ ID NO: 551848 - DNA, 55 bp, Artificial; identical to SEQ ID NO: 337085
  Synthetic oligonucleotide

SEQ ID NO: 551849 - DNA, 56 bp, Artificial; identical to SEQ ID NO: 337087
  Synthetic oligonucleotide

SEQ ID NO: 551850 - DNA, 55 bp, Artificial; identical to SEQ ID NO: 337088
  Synthetic oligonucleotide

SEQ ID NO: 551851 - DNA, 59 bp, Artificial; identical to SEQ ID NO: 337089
  Synthetic oligonucleotide

SEQ ID NO: 551852 - DNA, 60 bp, Artificial; identical to SEQ ID NO: 337093
  Synthetic oligonucleotide

SEQ ID NO: 551853 - DNA, 55 bp, Artificial; identical to SEQ ID NO: 337094
  Synthetic oligonucleotide

SEQ ID NO: 551854 - DNA, 60 bp, Artificial; identical to SEQ ID NO: 337097
  Synthetic oligonucleotide

SEQ ID NO: 551855 - DNA, 54 bp, Artificial; identical to SEQ ID NO: 337099
  Synthetic oligonucleotide

SEQ ID NO: 551856 - DNA, 60 bp, Artificial; identical to SEQ ID NO: 337101
  Synthetic oligonucleotide

SEQ ID NO: 551857 - DNA, 55 bp, Artificial; identical to SEQ ID NO: 337102
  Synthetic oligonucleotide

SEQ ID NO: 551858 - DNA, 60 bp, Artificial; identical to SEQ ID NO: 337106
  Synthetic oligonucleotide

SEQ ID NO: 551859 - DNA, 56 bp, Artificial; identical to SEQ ID NO: 15369
  Synthetic oligonucleotide

SEQ ID NO: 551860 - DNA, 60 bp, Artificial; identical to SEQ ID NO: 337110
  Synthetic oligonucleotide

SEQ ID NO: 551861 - DNA, 52 bp, Artificial; identical to SEQ ID NO: 337112
  Synthetic oligonucleotide

SEQ ID NO: 551862 - DNA, 58 bp, Artificial; identical to SEQ ID NO: 337113
  Synthetic oligonucleotide

SEQ ID NO: 551863 - DNA, 52 bp, Artificial; identical to SEQ ID NO: 337116
  Synthetic oligonucleotide

SEQ ID NO: 551864 - DNA, 59 bp, Artificial; identical to SEQ ID NO: 337119
  Synthetic oligonucleotide

SEQ ID NO: 551865 - DNA, 53 bp, Artificial; identical to SEQ ID NO: 337121
  Synthetic oligonucleotide

SEQ ID NO: 551866 - DNA, 60 bp, Artificial; identical to SEQ ID NO: 337124
  Synthetic oligonucleotide

SEQ ID NO: 551867 - DNA, 55 bp, Artificial; identical to SEQ ID NO: 337127
  Synthetic oligonucleotide

SEQ ID NO: 551868 - DNA, 60 bp, Artificial; identical to SEQ ID NO: 337128
  Synthetic oligonucleotide

SEQ ID NO: 551869 - DNA, 55 bp, Artificial; identical to SEQ ID NO: 337129
  Synthetic oligonucleotide

SEQ ID NO: 551870 - DNA, 59 bp, Artificial; identical to SEQ ID NO: 337130
  Synthetic oligonucleotide

SEQ ID NO: 551871 - DNA, 56 bp, Artificial; identical to SEQ ID NO: 337131
  Synthetic oligonucleotide

SEQ ID NO: 551872 - DNA, 60 bp, Artificial; identical to SEQ ID NO: 337132
  Synthetic oligonucleotide

SEQ ID NO: 551873 - DNA, 54 bp, Artificial; identical to SEQ ID NO: 337134
  Synthetic oligonucleotide

SEQ ID NO: 551874 - DNA, 56 bp, Artificial; identical to SEQ ID NO: 337136
  Synthetic oligonucleotide

SEQ ID NO: 551875 - DNA, 60 bp, Artificial; identical to SEQ ID NO: 337137
  Synthetic oligonucleotide

SEQ ID NO: 551876 - DNA, 60 bp, Artificial; identical to SEQ ID NO: 337138
  Synthetic oligonucleotide

SEQ ID NO: 551877 - DNA, 52 bp, Artificial; identical to SEQ ID NO: 337140
  Synthetic oligonucleotide

SEQ ID NO: 551878 - DNA, 60 bp, Artificial; identical to SEQ ID NO: 337142
  Synthetic oligonucleotide

SEQ ID NO: 551879 - DNA, 60 bp, Artificial; identical to SEQ ID NO: 337145
  Synthetic oligonucleotide

SEQ ID NO: 551880 - DNA, 60 bp, Artificial; identical to SEQ ID NO: 337147
  Synthetic oligonucleotide

SEQ ID NO: 551881 - DNA, 59 bp, Artificial; identical to SEQ ID NO: 337148
  Synthetic oligonucleotide

SEQ ID NO: 551882 - DNA, 58 bp, Artificial; identical to SEQ ID NO: 337149
  Synthetic oligonucleotide

SEQ ID NO: 551883 - DNA, 60 bp, Artificial; identical to SEQ ID NO: 337150
  Synthetic oligonucleotide

SEQ ID NO: 551884 - DNA, 57 bp, Artificial; identical to SEQ ID NO: 337152
  Synthetic oligonucleotide

SEQ ID NO: 551885 - DNA, 53 bp, Artificial; identical to SEQ ID NO: 337155
  Synthetic oligonucleotide

SEQ ID NO: 551886 - DNA, 54 bp, Artificial; identical to SEQ ID NO: 337156
  Synthetic oligonucleotide

SEQ ID NO: 551887 - DNA, 59 bp, Artificial; identical to SEQ ID NO: 337158
  Synthetic oligonucleotide

SEQ ID NO: 551888 - DNA, 57 bp, Artificial; identical to SEQ ID NO: 337159
  Synthetic oligonucleotide

SEQ ID NO: 551889 - DNA, 56 bp, Artificial; identical to SEQ ID NO: 337162
  Synthetic oligonucleotide

SEQ ID NO: 551890 - DNA, 60 bp, Artificial; identical to SEQ ID NO: 337165
  Synthetic oligonucleotide

SEQ ID NO: 551891 - DNA, 55 bp, Artificial; identical to SEQ ID NO: 337169
  Synthetic oligonucleotide

SEQ ID NO: 551892 - DNA, 59 bp, Artificial; identical to SEQ ID NO: 337175
  Synthetic oligonucleotide

SEQ ID NO: 551893 - DNA, 55 bp, Artificial; identical to SEQ ID NO: 337187
  Synthetic oligonucleotide

SEQ ID NO: 551894 - DNA, 53 bp, Artificial; identical to SEQ ID NO: 337191
  Synthetic oligonucleotide

SEQ ID NO: 551895 - DNA, 60 bp, Artificial; identical to SEQ ID NO: 337194
  Synthetic oligonucleotide

SEQ ID NO: 551896 - DNA, 53 bp, Artificial; identical to SEQ ID NO: 337195
  Synthetic oligonucleotide

SEQ ID NO: 551897 - DNA, 58 bp, Artificial; identical to SEQ ID NO: 337196
  Synthetic oligonucleotide

SEQ ID NO: 551898 - DNA, 58 bp, Artificial; identical to SEQ ID NO: 337200
  Synthetic oligonucleotide

SEQ ID NO: 551899 - DNA, 56 bp, Artificial; identical to SEQ ID NO: 19855
  Synthetic oligonucleotide

SEQ ID NO: 551900 - DNA, 58 bp, Artificial; identical to SEQ ID NO: 337201
  Synthetic oligonucleotide

SEQ ID NO: 551901 - DNA, 60 bp, Artificial; identical to SEQ ID NO: 337202
  Synthetic oligonucleotide

SEQ ID NO: 551902 - DNA, 60 bp, Artificial; identical to SEQ ID NO: 337203
  Synthetic oligonucleotide

SEQ ID NO: 551903 - DNA, 58 bp, Artificial; identical to SEQ ID NO: 337204
  Synthetic oligonucleotide

SEQ ID NO: 551904 - DNA, 59 bp, Artificial; identical to SEQ ID NO: 337205
  Synthetic oligonucleotide

SEQ ID NO: 551905 - DNA, 59 bp, Artificial; identical to SEQ ID NO: 337206
  Synthetic oligonucleotide

SEQ ID NO: 551906 - DNA, 57 bp, Artificial; identical to SEQ ID NO: 337209
  Synthetic oligonucleotide

SEQ ID NO: 551907 - DNA, 53 bp, Artificial; identical to SEQ ID NO: 337210
  Synthetic oligonucleotide

SEQ ID NO: 551908 - DNA, 56 bp, Artificial; identical to SEQ ID NO: 337211
  Synthetic oligonucleotide

SEQ ID NO: 551909 - DNA, 55 bp, Artificial; identical to SEQ ID NO: 337212
  Synthetic oligonucleotide

SEQ ID NO: 551910 - DNA, 58 bp, Artificial; identical to SEQ ID NO: 337214
  Synthetic oligonucleotide

SEQ ID NO: 551911 - DNA, 60 bp, Artificial; identical to SEQ ID NO: 337215
  Synthetic oligonucleotide

SEQ ID NO: 551912 - DNA, 60 bp, Artificial; identical to SEQ ID NO: 337216
  Synthetic oligonucleotide

SEQ ID NO: 551913 - DNA, 54 bp, Artificial; identical to SEQ ID NO: 337222
  Synthetic oligonucleotide

SEQ ID NO: 551914 - DNA, 58 bp, Artificial; identical to SEQ ID NO: 337224
  Synthetic oligonucleotide

SEQ ID NO: 551915 - DNA, 60 bp, Artificial; identical to SEQ ID NO: 337225
  Synthetic oligonucleotide

SEQ ID NO: 551916 - DNA, 52 bp, Artificial; identical to SEQ ID NO: 337227
  Synthetic oligonucleotide

SEQ ID NO: 551917 - DNA, 52 bp, Artificial; identical to SEQ ID NO: 337228
  Synthetic oligonucleotide

SEQ ID NO: 551918 - DNA, 58 bp, Artificial; identical to SEQ ID NO: 337229
  Synthetic oligonucleotide

SEQ ID NO: 551919 - DNA, 52 bp, Artificial; identical to SEQ ID NO: 337230
  Synthetic oligonucleotide

SEQ ID NO: 551920 - DNA, 60 bp, Artificial; identical to SEQ ID NO: 337238
  Synthetic oligonucleotide

SEQ ID NO: 551921 - DNA, 60 bp, Artificial; identical to SEQ ID NO: 337245
  Synthetic oligonucleotide

SEQ ID NO: 551922 - DNA, 51 bp, Artificial; identical to SEQ ID NO: 337246
  Synthetic oligonucleotide

SEQ ID NO: 551923 - DNA, 51 bp, Artificial; identical to SEQ ID NO: 337247
  Synthetic oligonucleotide

SEQ ID NO: 551924 - DNA, 52 bp, Artificial; identical to SEQ ID NO: 9113
  Synthetic oligonucleotide

SEQ ID NO: 551925 - DNA, 55 bp, Artificial; identical to SEQ ID NO: 337248
  Synthetic oligonucleotide

SEQ ID NO: 551926 - DNA, 57 bp, Artificial; identical to SEQ ID NO: 337251
  Synthetic oligonucleotide

SEQ ID NO: 551927 - DNA, 60 bp, Artificial; identical to SEQ ID NO: 337254
  Synthetic oligonucleotide

SEQ ID NO: 551928 - DNA, 56 bp, Artificial; identical to SEQ ID NO: 337259
  Synthetic oligonucleotide

SEQ ID NO: 551929 - DNA, 55 bp, Artificial; identical to SEQ ID NO: 337262
  Synthetic oligonucleotide

SEQ ID NO: 551930 - DNA, 51 bp, Artificial; identical to SEQ ID NO: 337269
  Synthetic oligonucleotide

SEQ ID NO: 551931 - DNA, 56 bp, Artificial; identical to SEQ ID NO: 337271
  Synthetic oligonucleotide

SEQ ID NO: 551932 - DNA, 60 bp, Artificial; identical to SEQ ID NO: 337273
  Synthetic oligonucleotide

SEQ ID NO: 551933 - DNA, 60 bp, Artificial; identical to SEQ ID NO: 337274
  Synthetic oligonucleotide

SEQ ID NO: 551934 - DNA, 56 bp, Artificial; identical to SEQ ID NO: 337275
  Synthetic oligonucleotide

SEQ ID NO: 551935 - DNA, 58 bp, Artificial; identical to SEQ ID NO: 337276
  Synthetic oligonucleotide

SEQ ID NO: 551936 - DNA, 60 bp, Artificial; identical to SEQ ID NO: 337277
  Synthetic oligonucleotide

SEQ ID NO: 551937 - DNA, 54 bp, Artificial; identical to SEQ ID NO: 337279
  Synthetic oligonucleotide

SEQ ID NO: 551938 - DNA, 60 bp, Artificial; identical to SEQ ID NO: 11985
  Synthetic oligonucleotide

SEQ ID NO: 551939 - DNA, 52 bp, Artificial; identical to SEQ ID NO: 337283
  Synthetic oligonucleotide

SEQ ID NO: 551940 - DNA, 55 bp, Artificial; identical to SEQ ID NO: 337286
  Synthetic oligonucleotide

SEQ ID NO: 551941 - DNA, 55 bp, Artificial; identical to SEQ ID NO: 337291
  Synthetic oligonucleotide

SEQ ID NO: 551942 - DNA, 60 bp, Artificial; identical to SEQ ID NO: 337295
  Synthetic oligonucleotide

SEQ ID NO: 551943 - DNA, 60 bp, Artificial; identical to SEQ ID NO: 10434
  Synthetic oligonucleotide

SEQ ID NO: 551944 - DNA, 55 bp, Artificial; identical to SEQ ID NO: 337300
  Synthetic oligonucleotide

SEQ ID NO: 551945 - DNA, 56 bp, Artificial; identical to SEQ ID NO: 337302
  Synthetic oligonucleotide

SEQ ID NO: 551946 - DNA, 58 bp, Artificial; identical to SEQ ID NO: 18861
  Synthetic oligonucleotide

SEQ ID NO: 551947 - DNA, 52 bp, Artificial; identical to SEQ ID NO: 337303
  Synthetic oligonucleotide

SEQ ID NO: 551948 - DNA, 55 bp, Artificial; identical to SEQ ID NO: 337307
  Synthetic oligonucleotide

SEQ ID NO: 551949 - DNA, 57 bp, Artificial; identical to SEQ ID NO: 337310
  Synthetic oligonucleotide

SEQ ID NO: 551950 - DNA, 59 bp, Artificial; identical to SEQ ID NO: 337313
  Synthetic oligonucleotide

SEQ ID NO: 551951 - DNA, 59 bp, Artificial; identical to SEQ ID NO: 337319
  Synthetic oligonucleotide

SEQ ID NO: 551952 - DNA, 55 bp, Artificial; identical to SEQ ID NO: 337320
  Synthetic oligonucleotide

SEQ ID NO: 551953 - DNA, 54 bp, Artificial; identical to SEQ ID NO: 337321
  Synthetic oligonucleotide

SEQ ID NO: 551954 - DNA, 59 bp, Artificial; identical to SEQ ID NO: 337324
  Synthetic oligonucleotide

SEQ ID NO: 551955 - DNA, 58 bp, Artificial; identical to SEQ ID NO: 337327
  Synthetic oligonucleotide

SEQ ID NO: 551956 - DNA, 58 bp, Artificial; identical to SEQ ID NO: 337331
  Synthetic oligonucleotide

SEQ ID NO: 551957 - DNA, 56 bp, Artificial; identical to SEQ ID NO: 337334
  Synthetic oligonucleotide

SEQ ID NO: 551958 - DNA, 52 bp, Artificial; identical to SEQ ID NO: 337335
  Synthetic oligonucleotide

SEQ ID NO: 551959 - DNA, 51 bp, Artificial; identical to SEQ ID NO: 337337
  Synthetic oligonucleotide

SEQ ID NO: 551960 - DNA, 56 bp, Artificial; identical to SEQ ID NO: 337340
  Synthetic oligonucleotide

SEQ ID NO: 551961 - DNA, 58 bp, Artificial; identical to SEQ ID NO: 17136
  Synthetic oligonucleotide

SEQ ID NO: 551962 - DNA, 60 bp, Artificial; identical to SEQ ID NO: 337341
  Synthetic oligonucleotide

SEQ ID NO: 551963 - DNA, 51 bp, Artificial; identical to SEQ ID NO: 337344
  Synthetic oligonucleotide

SEQ ID NO: 551964 - DNA, 55 bp, Artificial; identical to SEQ ID NO: 337348
  Synthetic oligonucleotide

SEQ ID NO: 551965 - DNA, 60 bp, Artificial; identical to SEQ ID NO: 337349
  Synthetic oligonucleotide

SEQ ID NO: 551966 - DNA, 60 bp, Artificial; identical to SEQ ID NO: 337351
  Synthetic oligonucleotide

SEQ ID NO: 551967 - DNA, 52 bp, Artificial; identical to SEQ ID NO: 337352
  Synthetic oligonucleotide

SEQ ID NO: 551968 - DNA, 53 bp, Artificial; identical to SEQ ID NO: 337358
  Synthetic oligonucleotide

SEQ ID NO: 551969 - DNA, 59 bp, Artificial; identical to SEQ ID NO: 19095
  Synthetic oligonucleotide

SEQ ID NO: 551970 - DNA, 57 bp, Artificial; identical to SEQ ID NO: 337360
  Synthetic oligonucleotide

SEQ ID NO: 551971 - DNA, 60 bp, Artificial; identical to SEQ ID NO: 337363
  Synthetic oligonucleotide

SEQ ID NO: 551972 - DNA, 58 bp, Artificial; identical to SEQ ID NO: 337365
  Synthetic oligonucleotide

SEQ ID NO: 551973 - DNA, 57 bp, Artificial; identical to SEQ ID NO: 337367
  Synthetic oligonucleotide

SEQ ID NO: 551974 - DNA, 60 bp, Artificial; identical to SEQ ID NO: 337368
  Synthetic oligonucleotide

SEQ ID NO: 551975 - DNA, 60 bp, Artificial; identical to SEQ ID NO: 337371
  Synthetic oligonucleotide

SEQ ID NO: 551976 - DNA, 60 bp, Artificial; identical to SEQ ID NO: 337372
  Synthetic oligonucleotide

SEQ ID NO: 551977 - DNA, 60 bp, Artificial; identical to SEQ ID NO: 337373
  Synthetic oligonucleotide

SEQ ID NO: 551978 - DNA, 50 bp, Artificial; identical to SEQ ID NO: 337374
  Synthetic oligonucleotide

SEQ ID NO: 551979 - DNA, 60 bp, Artificial; identical to SEQ ID NO: 337375
  Synthetic oligonucleotide

SEQ ID NO: 551980 - DNA, 60 bp, Artificial; identical to SEQ ID NO: 337377
  Synthetic oligonucleotide

SEQ ID NO: 551981 - DNA, 55 bp, Artificial; identical to SEQ ID NO: 337381
  Synthetic oligonucleotide

SEQ ID NO: 551982 - DNA, 55 bp, Artificial; identical to SEQ ID NO: 337383
  Synthetic oligonucleotide

SEQ ID NO: 551983 - DNA, 55 bp, Artificial; identical to SEQ ID NO: 337384
  Synthetic oligonucleotide

SEQ ID NO: 551984 - DNA, 60 bp, Artificial; identical to SEQ ID NO: 337386
  Synthetic oligonucleotide

SEQ ID NO: 551985 - DNA, 56 bp, Artificial; identical to SEQ ID NO: 337387
  Synthetic oligonucleotide

SEQ ID NO: 551986 - DNA, 60 bp, Artificial; identical to SEQ ID NO: 337389
  Synthetic oligonucleotide

SEQ ID NO: 551987 - DNA, 58 bp, Artificial; identical to SEQ ID NO: 337390
  Synthetic oligonucleotide

SEQ ID NO: 551988 - DNA, 60 bp, Artificial; identical to SEQ ID NO: 337394
  Synthetic oligonucleotide

SEQ ID NO: 551989 - DNA, 54 bp, Artificial; identical to SEQ ID NO: 337397
  Synthetic oligonucleotide

SEQ ID NO: 551990 - DNA, 55 bp, Artificial; identical to SEQ ID NO: 337398
  Synthetic oligonucleotide

SEQ ID NO: 551991 - DNA, 55 bp, Artificial; identical to SEQ ID NO: 337401
  Synthetic oligonucleotide

SEQ ID NO: 551992 - DNA, 55 bp, Artificial; identical to SEQ ID NO: 337403
  Synthetic oligonucleotide

SEQ ID NO: 551993 - DNA, 55 bp, Artificial; identical to SEQ ID NO: 337405
  Synthetic oligonucleotide

SEQ ID NO: 551994 - DNA, 53 bp, Artificial; identical to SEQ ID NO: 337408
  Synthetic oligonucleotide

SEQ ID NO: 551995 - DNA, 55 bp, Artificial; identical to SEQ ID NO: 337409
  Synthetic oligonucleotide

SEQ ID NO: 551996 - DNA, 58 bp, Artificial; identical to SEQ ID NO: 337411
  Synthetic oligonucleotide

SEQ ID NO: 551997 - DNA, 55 bp, Artificial; identical to SEQ ID NO: 337414
  Synthetic oligonucleotide

SEQ ID NO: 551998 - DNA, 59 bp, Artificial; identical to SEQ ID NO: 337415
  Synthetic oligonucleotide

SEQ ID NO: 551999 - DNA, 59 bp, Artificial; identical to SEQ ID NO: 337416
  Synthetic oligonucleotide

SEQ ID NO: 552000 - DNA, 58 bp, Artificial; identical to SEQ ID NO: 337417
  Synthetic oligonucleotide

SEQ ID NO: 552001 - DNA, 60 bp, Artificial; identical to SEQ ID NO: 337420
  Synthetic oligonucleotide

SEQ ID NO: 552002 - DNA, 52 bp, Artificial; identical to SEQ ID NO: 337426
  Synthetic oligonucleotide

SEQ ID NO: 552003 - DNA, 57 bp, Artificial; identical to SEQ ID NO: 337430
  Synthetic oligonucleotide

SEQ ID NO: 552004 - DNA, 60 bp, Artificial; identical to SEQ ID NO: 337432
  Synthetic oligonucleotide

SEQ ID NO: 552005 - DNA, 55 bp, Artificial; identical to SEQ ID NO: 337434
  Synthetic oligonucleotide

SEQ ID NO: 552006 - DNA, 60 bp, Artificial; identical to SEQ ID NO: 337435
  Synthetic oligonucleotide

SEQ ID NO: 552007 - DNA, 55 bp, Artificial; identical to SEQ ID NO: 337437
  Synthetic oligonucleotide

SEQ ID NO: 552008 - DNA, 55 bp, Artificial; identical to SEQ ID NO: 337440
  Synthetic oligonucleotide

SEQ ID NO: 552009 - DNA, 55 bp, Artificial; identical to SEQ ID NO: 337447
  Synthetic oligonucleotide

SEQ ID NO: 552010 - DNA, 55 bp, Artificial; identical to SEQ ID NO: 337452
  Synthetic oligonucleotide

SEQ ID NO: 552011 - DNA, 53 bp, Artificial; identical to SEQ ID NO: 337454
  Synthetic oligonucleotide

SEQ ID NO: 552012 - DNA, 60 bp, Artificial; identical to SEQ ID NO: 337455
  Synthetic oligonucleotide

SEQ ID NO: 552013 - DNA, 58 bp, Artificial; identical to SEQ ID NO: 9213
  Synthetic oligonucleotide

SEQ ID NO: 552014 - DNA, 60 bp, Artificial; identical to SEQ ID NO: 337458
  Synthetic oligonucleotide

SEQ ID NO: 552015 - DNA, 60 bp, Artificial; identical to SEQ ID NO: 337459
  Synthetic oligonucleotide

SEQ ID NO: 552016 - DNA, 55 bp, Artificial; identical to SEQ ID NO: 337461
  Synthetic oligonucleotide

SEQ ID NO: 552017 - DNA, 59 bp, Artificial; identical to SEQ ID NO: 337462
  Synthetic oligonucleotide

SEQ ID NO: 552018 - DNA, 55 bp, Artificial; identical to SEQ ID NO: 337466
  Synthetic oligonucleotide

SEQ ID NO: 552019 - DNA, 60 bp, Artificial; identical to SEQ ID NO: 337467
  Synthetic oligonucleotide

SEQ ID NO: 552020 - DNA, 55 bp, Artificial; identical to SEQ ID NO: 337468
  Synthetic oligonucleotide

SEQ ID NO: 552021 - DNA, 60 bp, Artificial; identical to SEQ ID NO: 337471
  Synthetic oligonucleotide

SEQ ID NO: 552022 - DNA, 55 bp, Artificial; identical to SEQ ID NO: 337472
  Synthetic oligonucleotide

SEQ ID NO: 552023 - DNA, 60 bp, Artificial; identical to SEQ ID NO: 337475
  Synthetic oligonucleotide

SEQ ID NO: 552024 - DNA, 60 bp, Artificial; identical to SEQ ID NO: 337478
  Synthetic oligonucleotide

SEQ ID NO: 552025 - DNA, 59 bp, Artificial; identical to SEQ ID NO: 337481
  Synthetic oligonucleotide

SEQ ID NO: 552026 - DNA, 55 bp, Artificial; identical to SEQ ID NO: 337482
  Synthetic oligonucleotide

SEQ ID NO: 552027 - DNA, 55 bp, Artificial; identical to SEQ ID NO: 337483
  Synthetic oligonucleotide

SEQ ID NO: 552028 - DNA, 58 bp, Artificial; identical to SEQ ID NO: 337484
  Synthetic oligonucleotide

SEQ ID NO: 552029 - DNA, 60 bp, Artificial; identical to SEQ ID NO: 337486
  Synthetic oligonucleotide

SEQ ID NO: 552030 - DNA, 60 bp, Artificial; identical to SEQ ID NO: 337490
  Synthetic oligonucleotide

SEQ ID NO: 552031 - DNA, 59 bp, Artificial; identical to SEQ ID NO: 337491
  Synthetic oligonucleotide

SEQ ID NO: 552032 - DNA, 57 bp, Artificial; identical to SEQ ID NO: 337493
  Synthetic oligonucleotide

SEQ ID NO: 552033 - DNA, 54 bp, Artificial; identical to SEQ ID NO: 337504
  Synthetic oligonucleotide

SEQ ID NO: 552034 - DNA, 59 bp, Artificial; identical to SEQ ID NO: 337509
  Synthetic oligonucleotide

SEQ ID NO: 552035 - DNA, 59 bp, Artificial; identical to SEQ ID NO: 337510
  Synthetic oligonucleotide

SEQ ID NO: 552036 - DNA, 55 bp, Artificial; identical to SEQ ID NO: 337512
  Synthetic oligonucleotide

SEQ ID NO: 552037 - DNA, 59 bp, Artificial; identical to SEQ ID NO: 337514
  Synthetic oligonucleotide

SEQ ID NO: 552038 - DNA, 58 bp, Artificial; identical to SEQ ID NO: 337516
  Synthetic oligonucleotide

SEQ ID NO: 552039 - DNA, 60 bp, Artificial; identical to SEQ ID NO: 106920
  Synthetic oligonucleotide

SEQ ID NO: 552040 - DNA, 59 bp, Artificial; identical to SEQ ID NO: 337520
  Synthetic oligonucleotide

SEQ ID NO: 552041 - DNA, 57 bp, Artificial; identical to SEQ ID NO: 337522
  Synthetic oligonucleotide

SEQ ID NO: 552042 - DNA, 60 bp, Artificial; identical to SEQ ID NO: 337524
  Synthetic oligonucleotide

SEQ ID NO: 552043 - DNA, 57 bp, Artificial; identical to SEQ ID NO: 337525
  Synthetic oligonucleotide

SEQ ID NO: 552044 - DNA, 55 bp, Artificial; identical to SEQ ID NO: 337527
  Synthetic oligonucleotide

SEQ ID NO: 552045 - DNA, 58 bp, Artificial; identical to SEQ ID NO: 337528
  Synthetic oligonucleotide

SEQ ID NO: 552046 - DNA, 55 bp, Artificial; identical to SEQ ID NO: 337531
  Synthetic oligonucleotide

SEQ ID NO: 552047 - DNA, 60 bp, Artificial; identical to SEQ ID NO: 337532
  Synthetic oligonucleotide

SEQ ID NO: 552048 - DNA, 60 bp, Artificial; identical to SEQ ID NO: 13927
  Synthetic oligonucleotide

SEQ ID NO: 552049 - DNA, 60 bp, Artificial; identical to SEQ ID NO: 337533
  Synthetic oligonucleotide

SEQ ID NO: 552050 - DNA, 53 bp, Artificial; identical to SEQ ID NO: 337537
  Synthetic oligonucleotide

SEQ ID NO: 552051 - DNA, 60 bp, Artificial; identical to SEQ ID NO: 337538
  Synthetic oligonucleotide

SEQ ID NO: 552052 - DNA, 54 bp, Artificial; identical to SEQ ID NO: 337540
  Synthetic oligonucleotide

SEQ ID NO: 552053 - DNA, 60 bp, Artificial; identical to SEQ ID NO: 9419
  Synthetic oligonucleotide

SEQ ID NO: 552054 - DNA, 60 bp, Artificial; identical to SEQ ID NO: 337544
  Synthetic oligonucleotide

SEQ ID NO: 552055 - DNA, 56 bp, Artificial; identical to SEQ ID NO: 337545
  Synthetic oligonucleotide

SEQ ID NO: 552056 - DNA, 56 bp, Artificial; identical to SEQ ID NO: 337548
  Synthetic oligonucleotide

SEQ ID NO: 552057 - DNA, 60 bp, Artificial; identical to SEQ ID NO: 337550
  Synthetic oligonucleotide

SEQ ID NO: 552058 - DNA, 59 bp, Artificial; identical to SEQ ID NO: 337551
  Synthetic oligonucleotide

SEQ ID NO: 552059 - DNA, 60 bp, Artificial; identical to SEQ ID NO: 337552
  Synthetic oligonucleotide

SEQ ID NO: 552060 - DNA, 60 bp, Artificial; identical to SEQ ID NO: 337554
  Synthetic oligonucleotide

SEQ ID NO: 552061 - DNA, 56 bp, Artificial; identical to SEQ ID NO: 337555
  Synthetic oligonucleotide

SEQ ID NO: 552062 - DNA, 60 bp, Artificial; identical to SEQ ID NO: 337557
  Synthetic oligonucleotide

SEQ ID NO: 552063 - DNA, 57 bp, Artificial; identical to SEQ ID NO: 337560
  Synthetic oligonucleotide

SEQ ID NO: 552064 - DNA, 55 bp, Artificial; identical to SEQ ID NO: 337565
  Synthetic oligonucleotide

SEQ ID NO: 552065 - DNA, 50 bp, Artificial; identical to SEQ ID NO: 337567
  Synthetic oligonucleotide

SEQ ID NO: 552066 - DNA, 57 bp, Artificial; identical to SEQ ID NO: 337569
  Synthetic oligonucleotide

SEQ ID NO: 552067 - DNA, 60 bp, Artificial; identical to SEQ ID NO: 337571
  Synthetic oligonucleotide

SEQ ID NO: 552068 - DNA, 57 bp, Artificial; identical to SEQ ID NO: 20441
  Synthetic oligonucleotide

SEQ ID NO: 552069 - DNA, 59 bp, Artificial; identical to SEQ ID NO: 337575
  Synthetic oligonucleotide

SEQ ID NO: 552070 - DNA, 60 bp, Artificial; identical to SEQ ID NO: 337577
  Synthetic oligonucleotide

SEQ ID NO: 552071 - DNA, 55 bp, Artificial; identical to SEQ ID NO: 337581
  Synthetic oligonucleotide

SEQ ID NO: 552072 - DNA, 55 bp, Artificial; identical to SEQ ID NO: 337585
  Synthetic oligonucleotide

SEQ ID NO: 552073 - DNA, 60 bp, Artificial; identical to SEQ ID NO: 337586
  Synthetic oligonucleotide

SEQ ID NO: 552074 - DNA, 55 bp, Artificial; identical to SEQ ID NO: 337590
  Synthetic oligonucleotide

SEQ ID NO: 552075 - DNA, 60 bp, Artificial; identical to SEQ ID NO: 337593
  Synthetic oligonucleotide

SEQ ID NO: 552076 - DNA, 60 bp, Artificial; identical to SEQ ID NO: 337595
  Synthetic oligonucleotide

SEQ ID NO: 552077 - DNA, 58 bp, Artificial; identical to SEQ ID NO: 337596
  Synthetic oligonucleotide

SEQ ID NO: 552078 - DNA, 57 bp, Artificial; identical to SEQ ID NO: 337598
  Synthetic oligonucleotide

SEQ ID NO: 552079 - DNA, 54 bp, Artificial; identical to SEQ ID NO: 337599
  Synthetic oligonucleotide

SEQ ID NO: 552080 - DNA, 60 bp, Artificial; identical to SEQ ID NO: 337600
  Synthetic oligonucleotide

SEQ ID NO: 552081 - DNA, 57 bp, Artificial; identical to SEQ ID NO: 337603
  Synthetic oligonucleotide

SEQ ID NO: 552082 - DNA, 55 bp, Artificial; identical to SEQ ID NO: 337604
  Synthetic oligonucleotide

SEQ ID NO: 552083 - DNA, 55 bp, Artificial; identical to SEQ ID NO: 337612
  Synthetic oligonucleotide

SEQ ID NO: 552084 - DNA, 55 bp, Artificial; identical to SEQ ID NO: 337613
  Synthetic oligonucleotide

SEQ ID NO: 552085 - DNA, 55 bp, Artificial; identical to SEQ ID NO: 337616
  Synthetic oligonucleotide

SEQ ID NO: 552086 - DNA, 59 bp, Artificial; identical to SEQ ID NO: 337624
  Synthetic oligonucleotide

SEQ ID NO: 552087 - DNA, 56 bp, Artificial; identical to SEQ ID NO: 337627
  Synthetic oligonucleotide

SEQ ID NO: 552088 - DNA, 59 bp, Artificial; identical to SEQ ID NO: 337628
  Synthetic oligonucleotide

SEQ ID NO: 552089 - DNA, 53 bp, Artificial; identical to SEQ ID NO: 337630
  Synthetic oligonucleotide

SEQ ID NO: 552090 - DNA, 56 bp, Artificial; identical to SEQ ID NO: 337636
  Synthetic oligonucleotide

SEQ ID NO: 552091 - DNA, 55 bp, Artificial; identical to SEQ ID NO: 337644
  Synthetic oligonucleotide

SEQ ID NO: 552092 - DNA, 60 bp, Artificial; identical to SEQ ID NO: 337647
  Synthetic oligonucleotide

SEQ ID NO: 552093 - DNA, 60 bp, Artificial; identical to SEQ ID NO: 337649
  Synthetic oligonucleotide

SEQ ID NO: 552094 - DNA, 56 bp, Artificial; identical to SEQ ID NO: 337650
  Synthetic oligonucleotide

SEQ ID NO: 552095 - DNA, 55 bp, Artificial; identical to SEQ ID NO: 337655
  Synthetic oligonucleotide

SEQ ID NO: 552096 - DNA, 54 bp, Artificial; identical to SEQ ID NO: 337659
  Synthetic oligonucleotide

SEQ ID NO: 552097 - DNA, 57 bp, Artificial; identical to SEQ ID NO: 337660
  Synthetic oligonucleotide

SEQ ID NO: 552098 - DNA, 58 bp, Artificial; identical to SEQ ID NO: 337665
  Synthetic oligonucleotide

SEQ ID NO: 552099 - DNA, 52 bp, Artificial; identical to SEQ ID NO: 337669
  Synthetic oligonucleotide

SEQ ID NO: 552100 - DNA, 60 bp, Artificial; identical to SEQ ID NO: 337671
  Synthetic oligonucleotide

SEQ ID NO: 552101 - DNA, 59 bp, Artificial; identical to SEQ ID NO: 337673
  Synthetic oligonucleotide

SEQ ID NO: 552102 - DNA, 57 bp, Artificial; identical to SEQ ID NO: 337674
  Synthetic oligonucleotide

SEQ ID NO: 552103 - DNA, 51 bp, Artificial; identical to SEQ ID NO: 337675
  Synthetic oligonucleotide

SEQ ID NO: 552104 - DNA, 60 bp, Artificial; identical to SEQ ID NO: 337682
  Synthetic oligonucleotide

SEQ ID NO: 552105 - DNA, 60 bp, Artificial; identical to SEQ ID NO: 337684
  Synthetic oligonucleotide

SEQ ID NO: 552106 - DNA, 56 bp, Artificial; identical to SEQ ID NO: 337686
  Synthetic oligonucleotide

SEQ ID NO: 552107 - DNA, 60 bp, Artificial; identical to SEQ ID NO: 337687
  Synthetic oligonucleotide

SEQ ID NO: 552108 - DNA, 60 bp, Artificial; identical to SEQ ID NO: 9489
  Synthetic oligonucleotide

SEQ ID NO: 552109 - DNA, 60 bp, Artificial; identical to SEQ ID NO: 337689
  Synthetic oligonucleotide

SEQ ID NO: 552110 - DNA, 58 bp, Artificial; identical to SEQ ID NO: 16098
  Synthetic oligonucleotide

SEQ ID NO: 552111 - DNA, 55 bp, Artificial; identical to SEQ ID NO: 337692
  Synthetic oligonucleotide

SEQ ID NO: 552112 - DNA, 60 bp, Artificial; identical to SEQ ID NO: 337693
  Synthetic oligonucleotide

SEQ ID NO: 552113 - DNA, 56 bp, Artificial; identical to SEQ ID NO: 337696
  Synthetic oligonucleotide

SEQ ID NO: 552114 - DNA, 60 bp, Artificial; identical to SEQ ID NO: 337697
  Synthetic oligonucleotide

SEQ ID NO: 552115 - DNA, 60 bp, Artificial; identical to SEQ ID NO: 337698
  Synthetic oligonucleotide

SEQ ID NO: 552116 - DNA, 55 bp, Artificial; identical to SEQ ID NO: 337699
  Synthetic oligonucleotide

SEQ ID NO: 552117 - DNA, 58 bp, Artificial; identical to SEQ ID NO: 337700
  Synthetic oligonucleotide

SEQ ID NO: 552118 - DNA, 60 bp, Artificial; identical to SEQ ID NO: 337704
  Synthetic oligonucleotide

SEQ ID NO: 552119 - DNA, 51 bp, Artificial; identical to SEQ ID NO: 337706
  Synthetic oligonucleotide

SEQ ID NO: 552120 - DNA, 60 bp, Artificial; identical to SEQ ID NO: 337708
  Synthetic oligonucleotide

SEQ ID NO: 552121 - DNA, 55 bp, Artificial; identical to SEQ ID NO: 337710
  Synthetic oligonucleotide

SEQ ID NO: 552122 - DNA, 58 bp, Artificial; identical to SEQ ID NO: 337712
  Synthetic oligonucleotide

SEQ ID NO: 552123 - DNA, 60 bp, Artificial; identical to SEQ ID NO: 337714
  Synthetic oligonucleotide

SEQ ID NO: 552124 - DNA, 58 bp, Artificial; identical to SEQ ID NO: 16154
  Synthetic oligonucleotide

SEQ ID NO: 552125 - DNA, 60 bp, Artificial; identical to SEQ ID NO: 337724
  Synthetic oligonucleotide

SEQ ID NO: 552126 - DNA, 54 bp, Artificial; identical to SEQ ID NO: 337727
  Synthetic oligonucleotide

SEQ ID NO: 552127 - DNA, 60 bp, Artificial; identical to SEQ ID NO: 337728
  Synthetic oligonucleotide

SEQ ID NO: 552128 - DNA, 56 bp, Artificial; identical to SEQ ID NO: 337730
  Synthetic oligonucleotide

SEQ ID NO: 552129 - DNA, 52 bp, Artificial; identical to SEQ ID NO: 337731
  Synthetic oligonucleotide

SEQ ID NO: 552130 - DNA, 60 bp, Artificial; identical to SEQ ID NO: 337737
  Synthetic oligonucleotide

SEQ ID NO: 552131 - DNA, 60 bp, Artificial; identical to SEQ ID NO: 337738
  Synthetic oligonucleotide

SEQ ID NO: 552132 - DNA, 51 bp, Artificial; identical to SEQ ID NO: 337740
  Synthetic oligonucleotide

SEQ ID NO: 552133 - DNA, 51 bp, Artificial; identical to SEQ ID NO: 12199
  Synthetic oligonucleotide

SEQ ID NO: 552134 - DNA, 53 bp, Artificial; identical to SEQ ID NO: 337745
  Synthetic oligonucleotide

SEQ ID NO: 552135 - DNA, 50 bp, Artificial; identical to SEQ ID NO: 337746
  Synthetic oligonucleotide

SEQ ID NO: 552136 - DNA, 55 bp, Artificial; identical to SEQ ID NO: 337750
  Synthetic oligonucleotide

SEQ ID NO: 552137 - DNA, 57 bp, Artificial; identical to SEQ ID NO: 337751
  Synthetic oligonucleotide

SEQ ID NO: 552138 - DNA, 52 bp, Artificial; identical to SEQ ID NO: 337754
  Synthetic oligonucleotide

SEQ ID NO: 552139 - DNA, 53 bp, Artificial; identical to SEQ ID NO: 337755
  Synthetic oligonucleotide

SEQ ID NO: 552140 - DNA, 58 bp, Artificial; identical to SEQ ID NO: 337758
  Synthetic oligonucleotide

SEQ ID NO: 552141 - DNA, 59 bp, Artificial; identical to SEQ ID NO: 337759
  Synthetic oligonucleotide

SEQ ID NO: 552142 - DNA, 55 bp, Artificial; identical to SEQ ID NO: 337761
  Synthetic oligonucleotide

SEQ ID NO: 552143 - DNA, 58 bp, Artificial; identical to SEQ ID NO: 16146
  Synthetic oligonucleotide

SEQ ID NO: 552144 - DNA, 54 bp, Artificial; identical to SEQ ID NO: 337766
  Synthetic oligonucleotide

SEQ ID NO: 552145 - DNA, 58 bp, Artificial; identical to SEQ ID NO: 337767
  Synthetic oligonucleotide

SEQ ID NO: 552146 - DNA, 60 bp, Artificial; identical to SEQ ID NO: 337768
  Synthetic oligonucleotide

SEQ ID NO: 552147 - DNA, 60 bp, Artificial; identical to SEQ ID NO: 337771
  Synthetic oligonucleotide

SEQ ID NO: 552148 - DNA, 60 bp, Artificial; identical to SEQ ID NO: 337772
  Synthetic oligonucleotide

SEQ ID NO: 552149 - DNA, 59 bp, Artificial; identical to SEQ ID NO: 337775
  Synthetic oligonucleotide

SEQ ID NO: 552150 - DNA, 55 bp, Artificial; identical to SEQ ID NO: 337776
  Synthetic oligonucleotide

SEQ ID NO: 552151 - DNA, 60 bp, Artificial; identical to SEQ ID NO: 337779
  Synthetic oligonucleotide

SEQ ID NO: 552152 - DNA, 57 bp, Artificial; identical to SEQ ID NO: 337780
  Synthetic oligonucleotide

SEQ ID NO: 552153 - DNA, 59 bp, Artificial; identical to SEQ ID NO: 337781
  Synthetic oligonucleotide

SEQ ID NO: 552154 - DNA, 56 bp, Artificial; identical to SEQ ID NO: 337784
  Synthetic oligonucleotide

SEQ ID NO: 552155 - DNA, 54 bp, Artificial; identical to SEQ ID NO: 337785
  Synthetic oligonucleotide

SEQ ID NO: 552156 - DNA, 60 bp, Artificial; identical to SEQ ID NO: 337786
  Synthetic oligonucleotide

SEQ ID NO: 552157 - DNA, 55 bp, Artificial; identical to SEQ ID NO: 337787
  Synthetic oligonucleotide

SEQ ID NO: 552158 - DNA, 56 bp, Artificial; identical to SEQ ID NO: 337789
  Synthetic oligonucleotide

SEQ ID NO: 552159 - DNA, 60 bp, Artificial; identical to SEQ ID NO: 337790
  Synthetic oligonucleotide

SEQ ID NO: 552160 - DNA, 55 bp, Artificial; identical to SEQ ID NO: 337793
  Synthetic oligonucleotide

SEQ ID NO: 552161 - DNA, 60 bp, Artificial; identical to SEQ ID NO: 337794
  Synthetic oligonucleotide

SEQ ID NO: 552162 - DNA, 55 bp, Artificial; identical to SEQ ID NO: 337795
  Synthetic oligonucleotide

SEQ ID NO: 552163 - DNA, 51 bp, Artificial; identical to SEQ ID NO: 337796
  Synthetic oligonucleotide

SEQ ID NO: 552164 - DNA, 60 bp, Artificial; identical to SEQ ID NO: 337799
  Synthetic oligonucleotide

SEQ ID NO: 552165 - DNA, 55 bp, Artificial; identical to SEQ ID NO: 337800
  Synthetic oligonucleotide

SEQ ID NO: 552166 - DNA, 56 bp, Artificial; identical to SEQ ID NO: 337801
  Synthetic oligonucleotide

SEQ ID NO: 552167 - DNA, 60 bp, Artificial; identical to SEQ ID NO: 337803
  Synthetic oligonucleotide

SEQ ID NO: 552168 - DNA, 55 bp, Artificial; identical to SEQ ID NO: 337807
  Synthetic oligonucleotide

SEQ ID NO: 552169 - DNA, 56 bp, Artificial; identical to SEQ ID NO: 337808
  Synthetic oligonucleotide

SEQ ID NO: 552170 - DNA, 59 bp, Artificial; identical to SEQ ID NO: 337810
  Synthetic oligonucleotide

SEQ ID NO: 552171 - DNA, 59 bp, Artificial; identical to SEQ ID NO: 337811
  Synthetic oligonucleotide

SEQ ID NO: 552172 - DNA, 58 bp, Artificial; identical to SEQ ID NO: 337817
  Synthetic oligonucleotide

SEQ ID NO: 552173 - DNA, 60 bp, Artificial; identical to SEQ ID NO: 337818
  Synthetic oligonucleotide

SEQ ID NO: 552174 - DNA, 60 bp, Artificial; identical to SEQ ID NO: 337819
  Synthetic oligonucleotide

SEQ ID NO: 552175 - DNA, 60 bp, Artificial; identical to SEQ ID NO: 337820
  Synthetic oligonucleotide

SEQ ID NO: 552176 - DNA, 55 bp, Artificial; identical to SEQ ID NO: 337822
  Synthetic oligonucleotide

SEQ ID NO: 552177 - DNA, 55 bp, Artificial; identical to SEQ ID NO: 337826
  Synthetic oligonucleotide

SEQ ID NO: 552178 - DNA, 60 bp, Artificial; identical to SEQ ID NO: 337829
  Synthetic oligonucleotide

SEQ ID NO: 552179 - DNA, 60 bp, Artificial; identical to SEQ ID NO: 337830
  Synthetic oligonucleotide

SEQ ID NO: 552180 - DNA, 53 bp, Artificial; identical to SEQ ID NO: 337832
  Synthetic oligonucleotide

SEQ ID NO: 552181 - DNA, 54 bp, Artificial; identical to SEQ ID NO: 337833
  Synthetic oligonucleotide

SEQ ID NO: 552182 - DNA, 55 bp, Artificial; identical to SEQ ID NO: 337834
  Synthetic oligonucleotide

SEQ ID NO: 552183 - DNA, 57 bp, Artificial; identical to SEQ ID NO: 337839
  Synthetic oligonucleotide

SEQ ID NO: 552184 - DNA, 57 bp, Artificial; identical to SEQ ID NO: 337841
  Synthetic oligonucleotide

SEQ ID NO: 552185 - DNA, 57 bp, Artificial; identical to SEQ ID NO: 337843
  Synthetic oligonucleotide

SEQ ID NO: 552186 - DNA, 60 bp, Artificial; identical to SEQ ID NO: 10451
  Synthetic oligonucleotide

SEQ ID NO: 552187 - DNA, 55 bp, Artificial; identical to SEQ ID NO: 337844
  Synthetic oligonucleotide

SEQ ID NO: 552188 - DNA, 55 bp, Artificial; identical to SEQ ID NO: 337847
  Synthetic oligonucleotide

SEQ ID NO: 552189 - DNA, 59 bp, Artificial; identical to SEQ ID NO: 15231
  Synthetic oligonucleotide

SEQ ID NO: 552190 - DNA, 54 bp, Artificial; identical to SEQ ID NO: 19819
  Synthetic oligonucleotide

SEQ ID NO: 552191 - DNA, 58 bp, Artificial; identical to SEQ ID NO: 337854
  Synthetic oligonucleotide

SEQ ID NO: 552192 - DNA, 55 bp, Artificial; identical to SEQ ID NO: 337858
  Synthetic oligonucleotide

SEQ ID NO: 552193 - DNA, 60 bp, Artificial; identical to SEQ ID NO: 337859
  Synthetic oligonucleotide

SEQ ID NO: 552194 - DNA, 55 bp, Artificial; identical to SEQ ID NO: 337860
  Synthetic oligonucleotide

SEQ ID NO: 552195 - DNA, 59 bp, Artificial; identical to SEQ ID NO: 17852
  Synthetic oligonucleotide

SEQ ID NO: 552196 - DNA, 59 bp, Artificial; identical to SEQ ID NO: 337862
  Synthetic oligonucleotide

SEQ ID NO: 552197 - DNA, 60 bp, Artificial; identical to SEQ ID NO: 337863
  Synthetic oligonucleotide

SEQ ID NO: 552198 - DNA, 55 bp, Artificial; identical to SEQ ID NO: 337864
  Synthetic oligonucleotide

SEQ ID NO: 552199 - DNA, 60 bp, Artificial; identical to SEQ ID NO: 7556
  Synthetic oligonucleotide

SEQ ID NO: 552200 - DNA, 54 bp, Artificial; identical to SEQ ID NO: 337865
  Synthetic oligonucleotide

SEQ ID NO: 552201 - DNA, 58 bp, Artificial; identical to SEQ ID NO: 337866
  Synthetic oligonucleotide

SEQ ID NO: 552202 - DNA, 52 bp, Artificial; identical to SEQ ID NO: 337867
  Synthetic oligonucleotide

SEQ ID NO: 552203 - DNA, 60 bp, Artificial; identical to SEQ ID NO: 10992
  Synthetic oligonucleotide

SEQ ID NO: 552204 - DNA, 58 bp, Artificial; identical to SEQ ID NO: 337869
  Synthetic oligonucleotide

SEQ ID NO: 552205 - DNA, 56 bp, Artificial; identical to SEQ ID NO: 337870
  Synthetic oligonucleotide

SEQ ID NO: 552206 - DNA, 60 bp, Artificial; identical to SEQ ID NO: 337872
  Synthetic oligonucleotide

SEQ ID NO: 552207 - DNA, 60 bp, Artificial; identical to SEQ ID NO: 7419
  Synthetic oligonucleotide

SEQ ID NO: 552208 - DNA, 55 bp, Artificial; identical to SEQ ID NO: 337874
  Synthetic oligonucleotide

SEQ ID NO: 552209 - DNA, 56 bp, Artificial; identical to SEQ ID NO: 337875
  Synthetic oligonucleotide

SEQ ID NO: 552210 - DNA, 56 bp, Artificial; identical to SEQ ID NO: 337876
  Synthetic oligonucleotide

SEQ ID NO: 552211 - DNA, 55 bp, Artificial; identical to SEQ ID NO: 337877
  Synthetic oligonucleotide

SEQ ID NO: 552212 - DNA, 55 bp, Artificial; identical to SEQ ID NO: 337878
  Synthetic oligonucleotide

SEQ ID NO: 552213 - DNA, 60 bp, Artificial; identical to SEQ ID NO: 337883
  Synthetic oligonucleotide

SEQ ID NO: 552214 - DNA, 58 bp, Artificial; identical to SEQ ID NO: 337885
  Synthetic oligonucleotide

SEQ ID NO: 552215 - DNA, 58 bp, Artificial; identical to SEQ ID NO: 337886
  Synthetic oligonucleotide

SEQ ID NO: 552216 - DNA, 60 bp, Artificial; identical to SEQ ID NO: 337888
  Synthetic oligonucleotide

SEQ ID NO: 552217 - DNA, 55 bp, Artificial; identical to SEQ ID NO: 337889
  Synthetic oligonucleotide

SEQ ID NO: 552218 - DNA, 56 bp, Artificial; identical to SEQ ID NO: 337892
  Synthetic oligonucleotide

SEQ ID NO: 552219 - DNA, 53 bp, Artificial; identical to SEQ ID NO: 337894
  Synthetic oligonucleotide

SEQ ID NO: 552220 - DNA, 60 bp, Artificial; identical to SEQ ID NO: 337895
  Synthetic oligonucleotide

SEQ ID NO: 552221 - DNA, 60 bp, Artificial; identical to SEQ ID NO: 337896
  Synthetic oligonucleotide

SEQ ID NO: 552222 - DNA, 54 bp, Artificial; identical to SEQ ID NO: 337897
  Synthetic oligonucleotide

SEQ ID NO: 552223 - DNA, 55 bp, Artificial; identical to SEQ ID NO: 337904
  Synthetic oligonucleotide

SEQ ID NO: 552224 - DNA, 57 bp, Artificial; identical to SEQ ID NO: 337906
  Synthetic oligonucleotide

SEQ ID NO: 552225 - DNA, 55 bp, Artificial; identical to SEQ ID NO: 337907
  Synthetic oligonucleotide

SEQ ID NO: 552226 - DNA, 55 bp, Artificial; identical to SEQ ID NO: 337911
  Synthetic oligonucleotide

SEQ ID NO: 552227 - DNA, 60 bp, Artificial; identical to SEQ ID NO: 60952
  Synthetic oligonucleotide

SEQ ID NO: 552228 - DNA, 60 bp, Artificial; identical to SEQ ID NO: 337914
  Synthetic oligonucleotide

SEQ ID NO: 552229 - DNA, 55 bp, Artificial; identical to SEQ ID NO: 337915
  Synthetic oligonucleotide

SEQ ID NO: 552230 - DNA, 58 bp, Artificial; identical to SEQ ID NO: 337924
  Synthetic oligonucleotide

SEQ ID NO: 552231 - DNA, 57 bp, Artificial; identical to SEQ ID NO: 337929
  Synthetic oligonucleotide

SEQ ID NO: 552232 - DNA, 60 bp, Artificial; identical to SEQ ID NO: 337930
  Synthetic oligonucleotide

SEQ ID NO: 552233 - DNA, 58 bp, Artificial; identical to SEQ ID NO: 337932
  Synthetic oligonucleotide

SEQ ID NO: 552234 - DNA, 55 bp, Artificial; identical to SEQ ID NO: 337933
  Synthetic oligonucleotide

SEQ ID NO: 552235 - DNA, 58 bp, Artificial; identical to SEQ ID NO: 337934
  Synthetic oligonucleotide

SEQ ID NO: 552236 - DNA, 57 bp, Artificial; identical to SEQ ID NO: 337936
  Synthetic oligonucleotide

SEQ ID NO: 552237 - DNA, 56 bp, Artificial; identical to SEQ ID NO: 337937
  Synthetic oligonucleotide

SEQ ID NO: 552238 - DNA, 59 bp, Artificial; identical to SEQ ID NO: 337941
  Synthetic oligonucleotide

SEQ ID NO: 552239 - DNA, 58 bp, Artificial; identical to SEQ ID NO: 337945
  Synthetic oligonucleotide

SEQ ID NO: 552240 - DNA, 54 bp, Artificial; identical to SEQ ID NO: 337946
  Synthetic oligonucleotide

SEQ ID NO: 552241 - DNA, 56 bp, Artificial; identical to SEQ ID NO: 337949
  Synthetic oligonucleotide

SEQ ID NO: 552242 - DNA, 56 bp, Artificial; identical to SEQ ID NO: 337951
  Synthetic oligonucleotide

SEQ ID NO: 552243 - DNA, 59 bp, Artificial; identical to SEQ ID NO: 337955
  Synthetic oligonucleotide

SEQ ID NO: 552244 - DNA, 60 bp, Artificial; identical to SEQ ID NO: 337956
  Synthetic oligonucleotide

SEQ ID NO: 552245 - DNA, 60 bp, Artificial; identical to SEQ ID NO: 337962
  Synthetic oligonucleotide

SEQ ID NO: 552246 - DNA, 60 bp, Artificial; identical to SEQ ID NO: 337963
  Synthetic oligonucleotide

SEQ ID NO: 552247 - DNA, 58 bp, Artificial; identical to SEQ ID NO: 337967
  Synthetic oligonucleotide

SEQ ID NO: 552248 - DNA, 56 bp, Artificial; identical to SEQ ID NO: 18097
  Synthetic oligonucleotide

SEQ ID NO: 552249 - DNA, 60 bp, Artificial; identical to SEQ ID NO: 337968
  Synthetic oligonucleotide

SEQ ID NO: 552250 - DNA, 59 bp, Artificial; identical to SEQ ID NO: 337969
  Synthetic oligonucleotide

SEQ ID NO: 552251 - DNA, 58 bp, Artificial; identical to SEQ ID NO: 337970
  Synthetic oligonucleotide

SEQ ID NO: 552252 - DNA, 59 bp, Artificial; identical to SEQ ID NO: 19827
  Synthetic oligonucleotide

SEQ ID NO: 552253 - DNA, 56 bp, Artificial; identical to SEQ ID NO: 337971
  Synthetic oligonucleotide

SEQ ID NO: 552254 - DNA, 60 bp, Artificial; identical to SEQ ID NO: 7769
  Synthetic oligonucleotide

SEQ ID NO: 552255 - DNA, 60 bp, Artificial; identical to SEQ ID NO: 6288
  Synthetic oligonucleotide

SEQ ID NO: 552256 - DNA, 60 bp, Artificial; identical to SEQ ID NO: 337977
  Synthetic oligonucleotide

SEQ ID NO: 552257 - DNA, 56 bp, Artificial; identical to SEQ ID NO: 337978
  Synthetic oligonucleotide

SEQ ID NO: 552258 - DNA, 51 bp, Artificial; identical to SEQ ID NO: 337980
  Synthetic oligonucleotide

SEQ ID NO: 552259 - DNA, 60 bp, Artificial; identical to SEQ ID NO: 337983
  Synthetic oligonucleotide

SEQ ID NO: 552260 - DNA, 59 bp, Artificial; identical to SEQ ID NO: 337985
  Synthetic oligonucleotide

SEQ ID NO: 552261 - DNA, 54 bp, Artificial; identical to SEQ ID NO: 337991
  Synthetic oligonucleotide

SEQ ID NO: 552262 - DNA, 54 bp, Artificial; identical to SEQ ID NO: 337994
  Synthetic oligonucleotide

SEQ ID NO: 552263 - DNA, 60 bp, Artificial; identical to SEQ ID NO: 337997
  Synthetic oligonucleotide

SEQ ID NO: 552264 - DNA, 60 bp, Artificial; identical to SEQ ID NO: 337998
  Synthetic oligonucleotide

SEQ ID NO: 552265 - DNA, 60 bp, Artificial; identical to SEQ ID NO: 338001
  Synthetic oligonucleotide

SEQ ID NO: 552266 - DNA, 55 bp, Artificial; identical to SEQ ID NO: 338003
  Synthetic oligonucleotide

SEQ ID NO: 552267 - DNA, 60 bp, Artificial; identical to SEQ ID NO: 14389
  Synthetic oligonucleotide

SEQ ID NO: 552268 - DNA, 59 bp, Artificial; identical to SEQ ID NO: 338009
  Synthetic oligonucleotide

SEQ ID NO: 552269 - DNA, 54 bp, Artificial; identical to SEQ ID NO: 338010
  Synthetic oligonucleotide

SEQ ID NO: 552270 - DNA, 58 bp, Artificial; identical to SEQ ID NO: 338014
  Synthetic oligonucleotide

SEQ ID NO: 552271 - DNA, 58 bp, Artificial; identical to SEQ ID NO: 338016
  Synthetic oligonucleotide

SEQ ID NO: 552272 - DNA, 57 bp, Artificial; identical to SEQ ID NO: 338017
  Synthetic oligonucleotide

SEQ ID NO: 552273 - DNA, 53 bp, Artificial; identical to SEQ ID NO: 338019
  Synthetic oligonucleotide

SEQ ID NO: 552274 - DNA, 53 bp, Artificial; identical to SEQ ID NO: 7216
  Synthetic oligonucleotide

SEQ ID NO: 552275 - DNA, 56 bp, Artificial; identical to SEQ ID NO: 16314
  Synthetic oligonucleotide

SEQ ID NO: 552276 - DNA, 52 bp, Artificial; identical to SEQ ID NO: 338022
  Synthetic oligonucleotide

SEQ ID NO: 552277 - DNA, 55 bp, Artificial; identical to SEQ ID NO: 338025
  Synthetic oligonucleotide

SEQ ID NO: 552278 - DNA, 53 bp, Artificial; identical to SEQ ID NO: 338026
  Synthetic oligonucleotide

SEQ ID NO: 552279 - DNA, 60 bp, Artificial; identical to SEQ ID NO: 6543
  Synthetic oligonucleotide

SEQ ID NO: 552280 - DNA, 52 bp, Artificial; identical to SEQ ID NO: 338032
  Synthetic oligonucleotide

SEQ ID NO: 552281 - DNA, 55 bp, Artificial; identical to SEQ ID NO: 338034
  Synthetic oligonucleotide

SEQ ID NO: 552282 - DNA, 55 bp, Artificial; identical to SEQ ID NO: 338035
  Synthetic oligonucleotide

SEQ ID NO: 552283 - DNA, 60 bp, Artificial; identical to SEQ ID NO: 338037
  Synthetic oligonucleotide

SEQ ID NO: 552284 - DNA, 60 bp, Artificial; identical to SEQ ID NO: 338041
  Synthetic oligonucleotide

SEQ ID NO: 552285 - DNA, 60 bp, Artificial; identical to SEQ ID NO: 338042
  Synthetic oligonucleotide

SEQ ID NO: 552286 - DNA, 60 bp, Artificial; identical to SEQ ID NO: 338044
  Synthetic oligonucleotide

SEQ ID NO: 552287 - DNA, 55 bp, Artificial; identical to SEQ ID NO: 338045
  Synthetic oligonucleotide

SEQ ID NO: 552288 - DNA, 56 bp, Artificial; identical to SEQ ID NO: 338046
  Synthetic oligonucleotide

SEQ ID NO: 552289 - DNA, 60 bp, Artificial; identical to SEQ ID NO: 338051
  Synthetic oligonucleotide

SEQ ID NO: 552290 - DNA, 60 bp, Artificial; identical to SEQ ID NO: 338054
  Synthetic oligonucleotide

SEQ ID NO: 552291 - DNA, 60 bp, Artificial; identical to SEQ ID NO: 338059
  Synthetic oligonucleotide

SEQ ID NO: 552292 - DNA, 58 bp, Artificial; identical to SEQ ID NO: 338067
  Synthetic oligonucleotide

SEQ ID NO: 552293 - DNA, 56 bp, Artificial; identical to SEQ ID NO: 338068
  Synthetic oligonucleotide

SEQ ID NO: 552294 - DNA, 60 bp, Artificial; identical to SEQ ID NO: 338069
  Synthetic oligonucleotide

SEQ ID NO: 552295 - DNA, 60 bp, Artificial; identical to SEQ ID NO: 338071
  Synthetic oligonucleotide

SEQ ID NO: 552296 - DNA, 56 bp, Artificial; identical to SEQ ID NO: 338072
  Synthetic oligonucleotide

SEQ ID NO: 552297 - DNA, 60 bp, Artificial; identical to SEQ ID NO: 338075
  Synthetic oligonucleotide

SEQ ID NO: 552298 - DNA, 59 bp, Artificial; identical to SEQ ID NO: 338076
  Synthetic oligonucleotide

SEQ ID NO: 552299 - DNA, 60 bp, Artificial; identical to SEQ ID NO: 338081
  Synthetic oligonucleotide

SEQ ID NO: 552300 - DNA, 60 bp, Artificial; identical to SEQ ID NO: 338082
  Synthetic oligonucleotide

SEQ ID NO: 552301 - DNA, 60 bp, Artificial; identical to SEQ ID NO: 6598
  Synthetic oligonucleotide

SEQ ID NO: 552302 - DNA, 60 bp, Artificial; identical to SEQ ID NO: 338089
  Synthetic oligonucleotide

SEQ ID NO: 552303 - DNA, 55 bp, Artificial; identical to SEQ ID NO: 338091
  Synthetic oligonucleotide

SEQ ID NO: 552304 - DNA, 55 bp, Artificial; identical to SEQ ID NO: 338093
  Synthetic oligonucleotide

SEQ ID NO: 552305 - DNA, 59 bp, Artificial; identical to SEQ ID NO: 16425
  Synthetic oligonucleotide

SEQ ID NO: 552306 - DNA, 52 bp, Artificial; identical to SEQ ID NO: 338103
  Synthetic oligonucleotide

SEQ ID NO: 552307 - DNA, 55 bp, Artificial; identical to SEQ ID NO: 338106
  Synthetic oligonucleotide

SEQ ID NO: 552308 - DNA, 52 bp, Artificial; identical to SEQ ID NO: 338108
  Synthetic oligonucleotide

SEQ ID NO: 552309 - DNA, 57 bp, Artificial; identical to SEQ ID NO: 338110
  Synthetic oligonucleotide

SEQ ID NO: 552310 - DNA, 53 bp, Artificial; identical to SEQ ID NO: 338111
  Synthetic oligonucleotide

SEQ ID NO: 552311 - DNA, 51 bp, Artificial; identical to SEQ ID NO: 338112
  Synthetic oligonucleotide

SEQ ID NO: 552312 - DNA, 57 bp, Artificial; identical to SEQ ID NO: 338117
  Synthetic oligonucleotide

SEQ ID NO: 552313 - DNA, 58 bp, Artificial; identical to SEQ ID NO: 338118
  Synthetic oligonucleotide

SEQ ID NO: 552314 - DNA, 60 bp, Artificial; identical to SEQ ID NO: 338119
  Synthetic oligonucleotide

SEQ ID NO: 552315 - DNA, 53 bp, Artificial; identical to SEQ ID NO: 338120
  Synthetic oligonucleotide

SEQ ID NO: 552316 - DNA, 59 bp, Artificial; identical to SEQ ID NO: 338123
  Synthetic oligonucleotide

SEQ ID NO: 552317 - DNA, 55 bp, Artificial; identical to SEQ ID NO: 338125
  Synthetic oligonucleotide

SEQ ID NO: 552318 - DNA, 60 bp, Artificial; identical to SEQ ID NO: 338126
  Synthetic oligonucleotide

SEQ ID NO: 552319 - DNA, 57 bp, Artificial; identical to SEQ ID NO: 338127
  Synthetic oligonucleotide

SEQ ID NO: 552320 - DNA, 60 bp, Artificial; identical to SEQ ID NO: 10577
  Synthetic oligonucleotide

SEQ ID NO: 552321 - DNA, 54 bp, Artificial; identical to SEQ ID NO: 338130
  Synthetic oligonucleotide

SEQ ID NO: 552322 - DNA, 53 bp, Artificial; identical to SEQ ID NO: 18001
  Synthetic oligonucleotide

SEQ ID NO: 552323 - DNA, 60 bp, Artificial; identical to SEQ ID NO: 338138
  Synthetic oligonucleotide

SEQ ID NO: 552324 - DNA, 55 bp, Artificial; identical to SEQ ID NO: 338141
  Synthetic oligonucleotide

SEQ ID NO: 552325 - DNA, 55 bp, Artificial; identical to SEQ ID NO: 13154
  Synthetic oligonucleotide

SEQ ID NO: 552326 - DNA, 60 bp, Artificial; identical to SEQ ID NO: 338142
  Synthetic oligonucleotide

SEQ ID NO: 552327 - DNA, 60 bp, Artificial; identical to SEQ ID NO: 338143
  Synthetic oligonucleotide

SEQ ID NO: 552328 - DNA, 60 bp, Artificial; identical to SEQ ID NO: 338144
  Synthetic oligonucleotide

SEQ ID NO: 552329 - DNA, 60 bp, Artificial; identical to SEQ ID NO: 338145
  Synthetic oligonucleotide

SEQ ID NO: 552330 - DNA, 57 bp, Artificial; identical to SEQ ID NO: 338146
  Synthetic oligonucleotide

SEQ ID NO: 552331 - DNA, 58 bp, Artificial; identical to SEQ ID NO: 338147
  Synthetic oligonucleotide

SEQ ID NO: 552332 - DNA, 57 bp, Artificial; identical to SEQ ID NO: 338149
  Synthetic oligonucleotide

SEQ ID NO: 552333 - DNA, 59 bp, Artificial; identical to SEQ ID NO: 338150
  Synthetic oligonucleotide

SEQ ID NO: 552334 - DNA, 55 bp, Artificial; identical to SEQ ID NO: 338151
  Synthetic oligonucleotide

SEQ ID NO: 552335 - DNA, 50 bp, Artificial; identical to SEQ ID NO: 338154
  Synthetic oligonucleotide

SEQ ID NO: 552336 - DNA, 55 bp, Artificial; identical to SEQ ID NO: 338155
  Synthetic oligonucleotide

SEQ ID NO: 552337 - DNA, 51 bp, Artificial; identical to SEQ ID NO: 338156
  Synthetic oligonucleotide

SEQ ID NO: 552338 - DNA, 55 bp, Artificial; identical to SEQ ID NO: 338158
  Synthetic oligonucleotide

SEQ ID NO: 552339 - DNA, 57 bp, Artificial; identical to SEQ ID NO: 338160
  Synthetic oligonucleotide

SEQ ID NO: 552340 - DNA, 50 bp, Artificial; identical to SEQ ID NO: 338165
  Synthetic oligonucleotide

SEQ ID NO: 552341 - DNA, 60 bp, Artificial; identical to SEQ ID NO: 338168
  Synthetic oligonucleotide

SEQ ID NO: 552342 - DNA, 59 bp, Artificial; identical to SEQ ID NO: 338172
  Synthetic oligonucleotide

SEQ ID NO: 552343 - DNA, 56 bp, Artificial; identical to SEQ ID NO: 338174
  Synthetic oligonucleotide

SEQ ID NO: 552344 - DNA, 54 bp, Artificial; identical to SEQ ID NO: 338175
  Synthetic oligonucleotide

SEQ ID NO: 552345 - DNA, 57 bp, Artificial; identical to SEQ ID NO: 338180
  Synthetic oligonucleotide

SEQ ID NO: 552346 - DNA, 56 bp, Artificial; identical to SEQ ID NO: 338185
  Synthetic oligonucleotide

SEQ ID NO: 552347 - DNA, 60 bp, Artificial; identical to SEQ ID NO: 119
  Synthetic oligonucleotide

SEQ ID NO: 552348 - DNA, 57 bp, Artificial; identical to SEQ ID NO: 338188
  Synthetic oligonucleotide

SEQ ID NO: 552349 - DNA, 55 bp, Artificial; identical to SEQ ID NO: 338189
  Synthetic oligonucleotide

SEQ ID NO: 552350 - DNA, 50 bp, Artificial; identical to SEQ ID NO: 16460
  Synthetic oligonucleotide

SEQ ID NO: 552351 - DNA, 59 bp, Artificial; identical to SEQ ID NO: 338194
  Synthetic oligonucleotide

SEQ ID NO: 552352 - DNA, 60 bp, Artificial; identical to SEQ ID NO: 338197
  Synthetic oligonucleotide

SEQ ID NO: 552353 - DNA, 59 bp, Artificial; identical to SEQ ID NO: 338204
  Synthetic oligonucleotide

SEQ ID NO: 552354 - DNA, 51 bp, Artificial; identical to SEQ ID NO: 338206
  Synthetic oligonucleotide

SEQ ID NO: 552355 - DNA, 56 bp, Artificial; identical to SEQ ID NO: 338207
  Synthetic oligonucleotide

SEQ ID NO: 552356 - DNA, 52 bp, Artificial; identical to SEQ ID NO: 338218
  Synthetic oligonucleotide

SEQ ID NO: 552357 - DNA, 50 bp, Artificial; identical to SEQ ID NO: 338223
  Synthetic oligonucleotide

SEQ ID NO: 552358 - DNA, 59 bp, Artificial; identical to SEQ ID NO: 338224
  Synthetic oligonucleotide

SEQ ID NO: 552359 - DNA, 56 bp, Artificial; identical to SEQ ID NO: 338229
  Synthetic oligonucleotide

SEQ ID NO: 552360 - DNA, 55 bp, Artificial; identical to SEQ ID NO: 338232
  Synthetic oligonucleotide

SEQ ID NO: 552361 - DNA, 57 bp, Artificial; identical to SEQ ID NO: 338235
  Synthetic oligonucleotide

SEQ ID NO: 552362 - DNA, 53 bp, Artificial; identical to SEQ ID NO: 18073
  Synthetic oligonucleotide

SEQ ID NO: 552363 - DNA, 57 bp, Artificial; identical to SEQ ID NO: 338241
  Synthetic oligonucleotide

SEQ ID NO: 552364 - DNA, 58 bp, Artificial; identical to SEQ ID NO: 338245
  Synthetic oligonucleotide

SEQ ID NO: 552365 - DNA, 56 bp, Artificial; identical to SEQ ID NO: 338246
  Synthetic oligonucleotide

SEQ ID NO: 552366 - DNA, 57 bp, Artificial; identical to SEQ ID NO: 338249
  Synthetic oligonucleotide

SEQ ID NO: 552367 - DNA, 52 bp, Artificial; identical to SEQ ID NO: 338257
  Synthetic oligonucleotide

SEQ ID NO: 552368 - DNA, 60 bp, Artificial; identical to SEQ ID NO: 338258
  Synthetic oligonucleotide

SEQ ID NO: 552369 - DNA, 60 bp, Artificial; identical to SEQ ID NO: 338259
  Synthetic oligonucleotide

SEQ ID NO: 552370 - DNA, 55 bp, Artificial; identical to SEQ ID NO: 338263
  Synthetic oligonucleotide

SEQ ID NO: 552371 - DNA, 60 bp, Artificial; identical to SEQ ID NO: 338264
  Synthetic oligonucleotide

SEQ ID NO: 552372 - DNA, 60 bp, Artificial; identical to SEQ ID NO: 11644
  Synthetic oligonucleotide

SEQ ID NO: 552373 - DNA, 50 bp, Artificial; identical to SEQ ID NO: 338269
  Synthetic oligonucleotide

SEQ ID NO: 552374 - DNA, 58 bp, Artificial; identical to SEQ ID NO: 338271
  Synthetic oligonucleotide

SEQ ID NO: 552375 - DNA, 52 bp, Artificial; identical to SEQ ID NO: 338274
  Synthetic oligonucleotide

SEQ ID NO: 552376 - DNA, 55 bp, Artificial; identical to SEQ ID NO: 338278
  Synthetic oligonucleotide

SEQ ID NO: 552377 - DNA, 57 bp, Artificial; identical to SEQ ID NO: 338279
  Synthetic oligonucleotide

SEQ ID NO: 552378 - DNA, 60 bp, Artificial; identical to SEQ ID NO: 338280
  Synthetic oligonucleotide

SEQ ID NO: 552379 - DNA, 55 bp, Artificial; identical to SEQ ID NO: 338282
  Synthetic oligonucleotide

SEQ ID NO: 552380 - DNA, 58 bp, Artificial; identical to SEQ ID NO: 338286
  Synthetic oligonucleotide

SEQ ID NO: 552381 - DNA, 51 bp, Artificial; identical to SEQ ID NO: 338291
  Synthetic oligonucleotide

SEQ ID NO: 552382 - DNA, 55 bp, Artificial; identical to SEQ ID NO: 338292
  Synthetic oligonucleotide

SEQ ID NO: 552383 - DNA, 55 bp, Artificial; identical to SEQ ID NO: 338294
  Synthetic oligonucleotide

SEQ ID NO: 552384 - DNA, 53 bp, Artificial; identical to SEQ ID NO: 338295
  Synthetic oligonucleotide

SEQ ID NO: 552385 - DNA, 56 bp, Artificial; identical to SEQ ID NO: 338297
  Synthetic oligonucleotide

SEQ ID NO: 552386 - DNA, 56 bp, Artificial; identical to SEQ ID NO: 338302
  Synthetic oligonucleotide

SEQ ID NO: 552387 - DNA, 56 bp, Artificial; identical to SEQ ID NO: 338306
  Synthetic oligonucleotide

SEQ ID NO: 552388 - DNA, 54 bp, Artificial; identical to SEQ ID NO: 338309
  Synthetic oligonucleotide

SEQ ID NO: 552389 - DNA, 55 bp, Artificial; identical to SEQ ID NO: 338310
  Synthetic oligonucleotide

SEQ ID NO: 552390 - DNA, 54 bp, Artificial; identical to SEQ ID NO: 338311
  Synthetic oligonucleotide

SEQ ID NO: 552391 - DNA, 51 bp, Artificial; identical to SEQ ID NO: 18099
  Synthetic oligonucleotide

SEQ ID NO: 552392 - DNA, 60 bp, Artificial; identical to SEQ ID NO: 338314
  Synthetic oligonucleotide

SEQ ID NO: 552393 - DNA, 55 bp, Artificial; identical to SEQ ID NO: 338318
  Synthetic oligonucleotide

SEQ ID NO: 552394 - DNA, 52 bp, Artificial; identical to SEQ ID NO: 338319
  Synthetic oligonucleotide

SEQ ID NO: 552395 - DNA, 56 bp, Artificial; identical to SEQ ID NO: 338320
  Synthetic oligonucleotide

SEQ ID NO: 552396 - DNA, 60 bp, Artificial; identical to SEQ ID NO: 338321
  Synthetic oligonucleotide

SEQ ID NO: 552397 - DNA, 56 bp, Artificial; identical to SEQ ID NO: 338322
  Synthetic oligonucleotide

SEQ ID NO: 552398 - DNA, 55 bp, Artificial; identical to SEQ ID NO: 338323
  Synthetic oligonucleotide

SEQ ID NO: 552399 - DNA, 55 bp, Artificial; identical to SEQ ID NO: 338326
  Synthetic oligonucleotide

SEQ ID NO: 552400 - DNA, 55 bp, Artificial; identical to SEQ ID NO: 338327
  Synthetic oligonucleotide

SEQ ID NO: 552401 - DNA, 58 bp, Artificial; identical to SEQ ID NO: 338330
  Synthetic oligonucleotide

SEQ ID NO: 552402 - DNA, 56 bp, Artificial; identical to SEQ ID NO: 338331
  Synthetic oligonucleotide

SEQ ID NO: 552403 - DNA, 60 bp, Artificial; identical to SEQ ID NO: 338332
  Synthetic oligonucleotide

SEQ ID NO: 552404 - DNA, 55 bp, Artificial; identical to SEQ ID NO: 338333
  Synthetic oligonucleotide

SEQ ID NO: 552405 - DNA, 58 bp, Artificial; identical to SEQ ID NO: 338336
  Synthetic oligonucleotide

SEQ ID NO: 552406 - DNA, 52 bp, Artificial; identical to SEQ ID NO: 338337
  Synthetic oligonucleotide

SEQ ID NO: 552407 - DNA, 53 bp, Artificial; identical to SEQ ID NO: 338339
  Synthetic oligonucleotide

SEQ ID NO: 552408 - DNA, 56 bp, Artificial; identical to SEQ ID NO: 338340
  Synthetic oligonucleotide

SEQ ID NO: 552409 - DNA, 60 bp, Artificial; identical to SEQ ID NO: 338342
  Synthetic oligonucleotide

SEQ ID NO: 552410 - DNA, 55 bp, Artificial; identical to SEQ ID NO: 338345
  Synthetic oligonucleotide

SEQ ID NO: 552411 - DNA, 57 bp, Artificial; identical to SEQ ID NO: 338347
  Synthetic oligonucleotide

SEQ ID NO: 552412 - DNA, 55 bp, Artificial; identical to SEQ ID NO: 338348
  Synthetic oligonucleotide

SEQ ID NO: 552413 - DNA, 59 bp, Artificial; identical to SEQ ID NO: 338350
  Synthetic oligonucleotide

SEQ ID NO: 552414 - DNA, 55 bp, Artificial; identical to SEQ ID NO: 338352
  Synthetic oligonucleotide

SEQ ID NO: 552415 - DNA, 60 bp, Artificial; identical to SEQ ID NO: 338356
  Synthetic oligonucleotide

SEQ ID NO: 552416 - DNA, 50 bp, Artificial; identical to SEQ ID NO: 338362
  Synthetic oligonucleotide

SEQ ID NO: 552417 - DNA, 57 bp, Artificial; identical to SEQ ID NO: 338363
  Synthetic oligonucleotide

SEQ ID NO: 552418 - DNA, 51 bp, Artificial; identical to SEQ ID NO: 338367
  Synthetic oligonucleotide

SEQ ID NO: 552419 - DNA, 60 bp, Artificial; identical to SEQ ID NO: 338368
  Synthetic oligonucleotide

SEQ ID NO: 552420 - DNA, 60 bp, Artificial; identical to SEQ ID NO: 338371
  Synthetic oligonucleotide

SEQ ID NO: 552421 - DNA, 57 bp, Artificial; identical to SEQ ID NO: 338372
  Synthetic oligonucleotide

SEQ ID NO: 552422 - DNA, 60 bp, Artificial; identical to SEQ ID NO: 338376
  Synthetic oligonucleotide

SEQ ID NO: 552423 - DNA, 60 bp, Artificial; identical to SEQ ID NO: 338377
  Synthetic oligonucleotide

SEQ ID NO: 552424 - DNA, 60 bp, Artificial; identical to SEQ ID NO: 338380
  Synthetic oligonucleotide

SEQ ID NO: 552425 - DNA, 55 bp, Artificial; identical to SEQ ID NO: 338381
  Synthetic oligonucleotide

SEQ ID NO: 552426 - DNA, 60 bp, Artificial; identical to SEQ ID NO: 338382
  Synthetic oligonucleotide

SEQ ID NO: 552427 - DNA, 57 bp, Artificial; identical to SEQ ID NO: 338387
  Synthetic oligonucleotide

SEQ ID NO: 552428 - DNA, 60 bp, Artificial; identical to SEQ ID NO: 338389
  Synthetic oligonucleotide

SEQ ID NO: 552429 - DNA, 57 bp, Artificial; identical to SEQ ID NO: 338392
  Synthetic oligonucleotide

SEQ ID NO: 552430 - DNA, 55 bp, Artificial; identical to SEQ ID NO: 338396
  Synthetic oligonucleotide

SEQ ID NO: 552431 - DNA, 57 bp, Artificial; identical to SEQ ID NO: 338397
  Synthetic oligonucleotide

SEQ ID NO: 552432 - DNA, 57 bp, Artificial; identical to SEQ ID NO: 338398
  Synthetic oligonucleotide

SEQ ID NO: 552433 - DNA, 57 bp, Artificial; identical to SEQ ID NO: 338399
  Synthetic oligonucleotide

SEQ ID NO: 552434 - DNA, 60 bp, Artificial; identical to SEQ ID NO: 338403
  Synthetic oligonucleotide

SEQ ID NO: 552435 - DNA, 57 bp, Artificial; identical to SEQ ID NO: 338404
  Synthetic oligonucleotide

SEQ ID NO: 552436 - DNA, 57 bp, Artificial; identical to SEQ ID NO: 338408
  Synthetic oligonucleotide

SEQ ID NO: 552437 - DNA, 51 bp, Artificial; identical to SEQ ID NO: 338412
  Synthetic oligonucleotide

SEQ ID NO: 552438 - DNA, 60 bp, Artificial; identical to SEQ ID NO: 338414
  Synthetic oligonucleotide

SEQ ID NO: 552439 - DNA, 60 bp, Artificial; identical to SEQ ID NO: 338416
  Synthetic oligonucleotide

SEQ ID NO: 552440 - DNA, 50 bp, Artificial; identical to SEQ ID NO: 338417
  Synthetic oligonucleotide

SEQ ID NO: 552441 - DNA, 58 bp, Artificial; identical to SEQ ID NO: 338418
  Synthetic oligonucleotide

SEQ ID NO: 552442 - DNA, 54 bp, Artificial; identical to SEQ ID NO: 338419
  Synthetic oligonucleotide

SEQ ID NO: 552443 - DNA, 54 bp, Artificial; identical to SEQ ID NO: 338422
  Synthetic oligonucleotide

SEQ ID NO: 552444 - DNA, 57 bp, Artificial; identical to SEQ ID NO: 338423
  Synthetic oligonucleotide

SEQ ID NO: 552445 - DNA, 55 bp, Artificial; identical to SEQ ID NO: 338430
  Synthetic oligonucleotide

SEQ ID NO: 552446 - DNA, 59 bp, Artificial; identical to SEQ ID NO: 338433
  Synthetic oligonucleotide

SEQ ID NO: 552447 - DNA, 56 bp, Artificial; identical to SEQ ID NO: 338434
  Synthetic oligonucleotide

SEQ ID NO: 552448 - DNA, 55 bp, Artificial; identical to SEQ ID NO: 338435
  Synthetic oligonucleotide

SEQ ID NO: 552449 - DNA, 57 bp, Artificial; identical to SEQ ID NO: 338438
  Synthetic oligonucleotide

SEQ ID NO: 552450 - DNA, 60 bp, Artificial; identical to SEQ ID NO: 338439
  Synthetic oligonucleotide

SEQ ID NO: 552451 - DNA, 60 bp, Artificial; identical to SEQ ID NO: 338440
  Synthetic oligonucleotide

SEQ ID NO: 552452 - DNA, 60 bp, Artificial; identical to SEQ ID NO: 338442
  Synthetic oligonucleotide

SEQ ID NO: 552453 - DNA, 55 bp, Artificial; identical to SEQ ID NO: 338447
  Synthetic oligonucleotide

SEQ ID NO: 552454 - DNA, 57 bp, Artificial; identical to SEQ ID NO: 338448
  Synthetic oligonucleotide

SEQ ID NO: 552455 - DNA, 60 bp, Artificial; identical to SEQ ID NO: 105741
  Synthetic oligonucleotide

SEQ ID NO: 552456 - DNA, 57 bp, Artificial; identical to SEQ ID NO: 338449
  Synthetic oligonucleotide

SEQ ID NO: 552457 - DNA, 55 bp, Artificial; identical to SEQ ID NO: 338455
  Synthetic oligonucleotide

SEQ ID NO: 552458 - DNA, 60 bp, Artificial; identical to SEQ ID NO: 338457
  Synthetic oligonucleotide

SEQ ID NO: 552459 - DNA, 55 bp, Artificial; identical to SEQ ID NO: 338459
  Synthetic oligonucleotide

SEQ ID NO: 552460 - DNA, 60 bp, Artificial; identical to SEQ ID NO: 113068
  Synthetic oligonucleotide

SEQ ID NO: 552461 - DNA, 55 bp, Artificial; identical to SEQ ID NO: 338461
  Synthetic oligonucleotide

SEQ ID NO: 552462 - DNA, 58 bp, Artificial; identical to SEQ ID NO: 338463
  Synthetic oligonucleotide

SEQ ID NO: 552463 - DNA, 55 bp, Artificial; identical to SEQ ID NO: 338468
  Synthetic oligonucleotide

SEQ ID NO: 552464 - DNA, 55 bp, Artificial; identical to SEQ ID NO: 338469
  Synthetic oligonucleotide

SEQ ID NO: 552465 - DNA, 60 bp, Artificial; identical to SEQ ID NO: 338472
  Synthetic oligonucleotide

SEQ ID NO: 552466 - DNA, 59 bp, Artificial; identical to SEQ ID NO: 338474
  Synthetic oligonucleotide

SEQ ID NO: 552467 - DNA, 57 bp, Artificial; identical to SEQ ID NO: 338475
  Synthetic oligonucleotide

SEQ ID NO: 552468 - DNA, 55 bp, Artificial; identical to SEQ ID NO: 338478
  Synthetic oligonucleotide

SEQ ID NO: 552469 - DNA, 56 bp, Artificial; identical to SEQ ID NO: 338483
  Synthetic oligonucleotide

SEQ ID NO: 552470 - DNA, 50 bp, Artificial; identical to SEQ ID NO: 338484
  Synthetic oligonucleotide

SEQ ID NO: 552471 - DNA, 55 bp, Artificial; identical to SEQ ID NO: 338486
  Synthetic oligonucleotide

SEQ ID NO: 552472 - DNA, 59 bp, Artificial; identical to SEQ ID NO: 338487
  Synthetic oligonucleotide

SEQ ID NO: 552473 - DNA, 54 bp, Artificial; identical to SEQ ID NO: 338489
  Synthetic oligonucleotide

SEQ ID NO: 552474 - DNA, 55 bp, Artificial; identical to SEQ ID NO: 338493
  Synthetic oligonucleotide

SEQ ID NO: 552475 - DNA, 60 bp, Artificial; identical to SEQ ID NO: 338496
  Synthetic oligonucleotide

SEQ ID NO: 552476 - DNA, 52 bp, Artificial; identical to SEQ ID NO: 338499
  Synthetic oligonucleotide

SEQ ID NO: 552477 - DNA, 54 bp, Artificial; identical to SEQ ID NO: 338504
  Synthetic oligonucleotide

SEQ ID NO: 552478 - DNA, 60 bp, Artificial; identical to SEQ ID NO: 338508
  Synthetic oligonucleotide

SEQ ID NO: 552479 - DNA, 59 bp, Artificial; identical to SEQ ID NO: 338511
  Synthetic oligonucleotide

SEQ ID NO: 552480 - DNA, 53 bp, Artificial; identical to SEQ ID NO: 338512
  Synthetic oligonucleotide

SEQ ID NO: 552481 - DNA, 53 bp, Artificial; identical to SEQ ID NO: 338515
  Synthetic oligonucleotide

SEQ ID NO: 552482 - DNA, 52 bp, Artificial; identical to SEQ ID NO: 338516
  Synthetic oligonucleotide

SEQ ID NO: 552483 - DNA, 55 bp, Artificial; identical to SEQ ID NO: 338517
  Synthetic oligonucleotide

SEQ ID NO: 552484 - DNA, 60 bp, Artificial; identical to SEQ ID NO: 64961
  Synthetic oligonucleotide

SEQ ID NO: 552485 - DNA, 55 bp, Artificial; identical to SEQ ID NO: 338525
  Synthetic oligonucleotide

SEQ ID NO: 552486 - DNA, 53 bp, Artificial; identical to SEQ ID NO: 338526
  Synthetic oligonucleotide

SEQ ID NO: 552487 - DNA, 60 bp, Artificial; identical to SEQ ID NO: 338527
  Synthetic oligonucleotide

SEQ ID NO: 552488 - DNA, 55 bp, Artificial; identical to SEQ ID NO: 338528
  Synthetic oligonucleotide

SEQ ID NO: 552489 - DNA, 60 bp, Artificial; identical to SEQ ID NO: 338529
  Synthetic oligonucleotide

SEQ ID NO: 552490 - DNA, 55 bp, Artificial; identical to SEQ ID NO: 338531
  Synthetic oligonucleotide

SEQ ID NO: 552491 - DNA, 54 bp, Artificial; identical to SEQ ID NO: 338536
  Synthetic oligonucleotide

SEQ ID NO: 552492 - DNA, 53 bp, Artificial; identical to SEQ ID NO: 338538
  Synthetic oligonucleotide

SEQ ID NO: 552493 - DNA, 59 bp, Artificial; identical to SEQ ID NO: 338539
  Synthetic oligonucleotide

SEQ ID NO: 552494 - DNA, 55 bp, Artificial; identical to SEQ ID NO: 338540
  Synthetic oligonucleotide

SEQ ID NO: 552495 - DNA, 56 bp, Artificial; identical to SEQ ID NO: 338542
  Synthetic oligonucleotide

SEQ ID NO: 552496 - DNA, 60 bp, Artificial; identical to SEQ ID NO: 338549
  Synthetic oligonucleotide

SEQ ID NO: 552497 - DNA, 53 bp, Artificial; identical to SEQ ID NO: 338550
  Synthetic oligonucleotide

SEQ ID NO: 552498 - DNA, 59 bp, Artificial; identical to SEQ ID NO: 338552
  Synthetic oligonucleotide

SEQ ID NO: 552499 - DNA, 60 bp, Artificial; identical to SEQ ID NO: 11962
  Synthetic oligonucleotide

SEQ ID NO: 552500 - DNA, 57 bp, Artificial; identical to SEQ ID NO: 338554
  Synthetic oligonucleotide

SEQ ID NO: 552501 - DNA, 55 bp, Artificial; identical to SEQ ID NO: 338556
  Synthetic oligonucleotide

SEQ ID NO: 552502 - DNA, 60 bp, Artificial; identical to SEQ ID NO: 338558
  Synthetic oligonucleotide

SEQ ID NO: 552503 - DNA, 57 bp, Artificial; identical to SEQ ID NO: 338561
  Synthetic oligonucleotide

SEQ ID NO: 552504 - DNA, 57 bp, Artificial; identical to SEQ ID NO: 338562
  Synthetic oligonucleotide

SEQ ID NO: 552505 - DNA, 51 bp, Artificial; identical to SEQ ID NO: 338563
  Synthetic oligonucleotide

SEQ ID NO: 552506 - DNA, 55 bp, Artificial; identical to SEQ ID NO: 338568
  Synthetic oligonucleotide

SEQ ID NO: 552507 - DNA, 56 bp, Artificial; identical to SEQ ID NO: 338576
  Synthetic oligonucleotide

SEQ ID NO: 552508 - DNA, 56 bp, Artificial; identical to SEQ ID NO: 338577
  Synthetic oligonucleotide

SEQ ID NO: 552509 - DNA, 60 bp, Artificial; identical to SEQ ID NO: 338583
  Synthetic oligonucleotide

SEQ ID NO: 552510 - DNA, 52 bp, Artificial; identical to SEQ ID NO: 338592
  Synthetic oligonucleotide

SEQ ID NO: 552511 - DNA, 54 bp, Artificial; identical to SEQ ID NO: 338594
  Synthetic oligonucleotide

SEQ ID NO: 552512 - DNA, 52 bp, Artificial; identical to SEQ ID NO: 338595
  Synthetic oligonucleotide

SEQ ID NO: 552513 - DNA, 57 bp, Artificial; identical to SEQ ID NO: 338596
  Synthetic oligonucleotide

SEQ ID NO: 552514 - DNA, 55 bp, Artificial; identical to SEQ ID NO: 338597
  Synthetic oligonucleotide

SEQ ID NO: 552515 - DNA, 59 bp, Artificial; identical to SEQ ID NO: 338598
  Synthetic oligonucleotide

SEQ ID NO: 552516 - DNA, 58 bp, Artificial; identical to SEQ ID NO: 338600
  Synthetic oligonucleotide

SEQ ID NO: 552517 - DNA, 60 bp, Artificial; identical to SEQ ID NO: 338603
  Synthetic oligonucleotide

SEQ ID NO: 552518 - DNA, 54 bp, Artificial; identical to SEQ ID NO: 338605
  Synthetic oligonucleotide

SEQ ID NO: 552519 - DNA, 60 bp, Artificial; identical to SEQ ID NO: 338608
  Synthetic oligonucleotide

SEQ ID NO: 552520 - DNA, 55 bp, Artificial; identical to SEQ ID NO: 338610
  Synthetic oligonucleotide

SEQ ID NO: 552521 - DNA, 55 bp, Artificial; identical to SEQ ID NO: 338611
  Synthetic oligonucleotide

SEQ ID NO: 552522 - DNA, 50 bp, Artificial; identical to SEQ ID NO: 338613
  Synthetic oligonucleotide

SEQ ID NO: 552523 - DNA, 55 bp, Artificial; identical to SEQ ID NO: 338616
  Synthetic oligonucleotide

SEQ ID NO: 552524 - DNA, 60 bp, Artificial; identical to SEQ ID NO: 338620
  Synthetic oligonucleotide

SEQ ID NO: 552525 - DNA, 52 bp, Artificial; identical to SEQ ID NO: 338621
  Synthetic oligonucleotide

SEQ ID NO: 552526 - DNA, 60 bp, Artificial; identical to SEQ ID NO: 338622
  Synthetic oligonucleotide

SEQ ID NO: 552527 - DNA, 55 bp, Artificial; identical to SEQ ID NO: 338623
  Synthetic oligonucleotide

SEQ ID NO: 552528 - DNA, 53 bp, Artificial; identical to SEQ ID NO: 338627
  Synthetic oligonucleotide

SEQ ID NO: 552529 - DNA, 60 bp, Artificial; identical to SEQ ID NO: 338628
  Synthetic oligonucleotide

SEQ ID NO: 552530 - DNA, 56 bp, Artificial; identical to SEQ ID NO: 338630
  Synthetic oligonucleotide

SEQ ID NO: 552531 - DNA, 52 bp, Artificial; identical to SEQ ID NO: 338631
  Synthetic oligonucleotide

SEQ ID NO: 552532 - DNA, 53 bp, Artificial; identical to SEQ ID NO: 338633
  Synthetic oligonucleotide

SEQ ID NO: 552533 - DNA, 60 bp, Artificial; identical to SEQ ID NO: 338634
  Synthetic oligonucleotide

SEQ ID NO: 552534 - DNA, 55 bp, Artificial; identical to SEQ ID NO: 338637
  Synthetic oligonucleotide

SEQ ID NO: 552535 - DNA, 58 bp, Artificial; identical to SEQ ID NO: 338640
  Synthetic oligonucleotide

SEQ ID NO: 552536 - DNA, 60 bp, Artificial; identical to SEQ ID NO: 14827
  Synthetic oligonucleotide

SEQ ID NO: 552537 - DNA, 57 bp, Artificial; identical to SEQ ID NO: 338642
  Synthetic oligonucleotide

SEQ ID NO: 552538 - DNA, 57 bp, Artificial; identical to SEQ ID NO: 338645
  Synthetic oligonucleotide

SEQ ID NO: 552539 - DNA, 60 bp, Artificial; identical to SEQ ID NO: 338646
  Synthetic oligonucleotide

SEQ ID NO: 552540 - DNA, 52 bp, Artificial; identical to SEQ ID NO: 338648
  Synthetic oligonucleotide

SEQ ID NO: 552541 - DNA, 55 bp, Artificial; identical to SEQ ID NO: 338649
  Synthetic oligonucleotide

SEQ ID NO: 552542 - DNA, 51 bp, Artificial; identical to SEQ ID NO: 338653
  Synthetic oligonucleotide

SEQ ID NO: 552543 - DNA, 54 bp, Artificial; identical to SEQ ID NO: 338654
  Synthetic oligonucleotide

SEQ ID NO: 552544 - DNA, 54 bp, Artificial; identical to SEQ ID NO: 338655
  Synthetic oligonucleotide

SEQ ID NO: 552545 - DNA, 60 bp, Artificial; identical to SEQ ID NO: 338657
  Synthetic oligonucleotide

SEQ ID NO: 552546 - DNA, 60 bp, Artificial; identical to SEQ ID NO: 338658
  Synthetic oligonucleotide

SEQ ID NO: 552547 - DNA, 52 bp, Artificial; identical to SEQ ID NO: 338661
  Synthetic oligonucleotide

SEQ ID NO: 552548 - DNA, 53 bp, Artificial; identical to SEQ ID NO: 11055
  Synthetic oligonucleotide

SEQ ID NO: 552549 - DNA, 53 bp, Artificial; identical to SEQ ID NO: 338673
  Synthetic oligonucleotide

SEQ ID NO: 552550 - DNA, 60 bp, Artificial; identical to SEQ ID NO: 338674
  Synthetic oligonucleotide

SEQ ID NO: 552551 - DNA, 51 bp, Artificial; identical to SEQ ID NO: 338678
  Synthetic oligonucleotide

SEQ ID NO: 552552 - DNA, 56 bp, Artificial; identical to SEQ ID NO: 338679
  Synthetic oligonucleotide

SEQ ID NO: 552553 - DNA, 56 bp, Artificial; identical to SEQ ID NO: 338680
  Synthetic oligonucleotide

SEQ ID NO: 552554 - DNA, 59 bp, Artificial; identical to SEQ ID NO: 338682
  Synthetic oligonucleotide

SEQ ID NO: 552555 - DNA, 52 bp, Artificial; identical to SEQ ID NO: 338683
  Synthetic oligonucleotide

SEQ ID NO: 552556 - DNA, 60 bp, Artificial; identical to SEQ ID NO: 338684
  Synthetic oligonucleotide

SEQ ID NO: 552557 - DNA, 50 bp, Artificial; identical to SEQ ID NO: 338686
  Synthetic oligonucleotide

SEQ ID NO: 552558 - DNA, 55 bp, Artificial; identical to SEQ ID NO: 338688
  Synthetic oligonucleotide

SEQ ID NO: 552559 - DNA, 51 bp, Artificial; identical to SEQ ID NO: 338693
  Synthetic oligonucleotide

SEQ ID NO: 552560 - DNA, 57 bp, Artificial; identical to SEQ ID NO: 11183
  Synthetic oligonucleotide

SEQ ID NO: 552561 - DNA, 56 bp, Artificial; identical to SEQ ID NO: 338702
  Synthetic oligonucleotide

SEQ ID NO: 552562 - DNA, 58 bp, Artificial; identical to SEQ ID NO: 338703
  Synthetic oligonucleotide

SEQ ID NO: 552563 - DNA, 59 bp, Artificial; identical to SEQ ID NO: 338708
  Synthetic oligonucleotide

SEQ ID NO: 552564 - DNA, 56 bp, Artificial; identical to SEQ ID NO: 338709
  Synthetic oligonucleotide

SEQ ID NO: 552565 - DNA, 59 bp, Artificial; identical to SEQ ID NO: 338710
  Synthetic oligonucleotide

SEQ ID NO: 552566 - DNA, 54 bp, Artificial; identical to SEQ ID NO: 338711
  Synthetic oligonucleotide

SEQ ID NO: 552567 - DNA, 55 bp, Artificial; identical to SEQ ID NO: 338713
  Synthetic oligonucleotide

SEQ ID NO: 552568 - DNA, 57 bp, Artificial; identical to SEQ ID NO: 338714
  Synthetic oligonucleotide

SEQ ID NO: 552569 - DNA, 59 bp, Artificial; identical to SEQ ID NO: 338715
  Synthetic oligonucleotide

SEQ ID NO: 552570 - DNA, 57 bp, Artificial; identical to SEQ ID NO: 338721
  Synthetic oligonucleotide

SEQ ID NO: 552571 - DNA, 54 bp, Artificial; identical to SEQ ID NO: 338725
  Synthetic oligonucleotide

SEQ ID NO: 552572 - DNA, 50 bp, Artificial; identical to SEQ ID NO: 338727
  Synthetic oligonucleotide

SEQ ID NO: 552573 - DNA, 58 bp, Artificial; identical to SEQ ID NO: 338728
  Synthetic oligonucleotide

SEQ ID NO: 552574 - DNA, 59 bp, Artificial; identical to SEQ ID NO: 16094
  Synthetic oligonucleotide

SEQ ID NO: 552575 - DNA, 58 bp, Artificial; identical to SEQ ID NO: 338730
  Synthetic oligonucleotide

SEQ ID NO: 552576 - DNA, 52 bp, Artificial; identical to SEQ ID NO: 338731
  Synthetic oligonucleotide

SEQ ID NO: 552577 - DNA, 57 bp, Artificial; identical to SEQ ID NO: 338733
  Synthetic oligonucleotide

SEQ ID NO: 552578 - DNA, 60 bp, Artificial; identical to SEQ ID NO: 338735
  Synthetic oligonucleotide

SEQ ID NO: 552579 - DNA, 52 bp, Artificial; identical to SEQ ID NO: 338738
  Synthetic oligonucleotide

SEQ ID NO: 552580 - DNA, 56 bp, Artificial; identical to SEQ ID NO: 338739
  Synthetic oligonucleotide

SEQ ID NO: 552581 - DNA, 60 bp, Artificial; identical to SEQ ID NO: 338741
  Synthetic oligonucleotide

SEQ ID NO: 552582 - DNA, 56 bp, Artificial; identical to SEQ ID NO: 338743
  Synthetic oligonucleotide

SEQ ID NO: 552583 - DNA, 54 bp, Artificial; identical to SEQ ID NO: 338744
  Synthetic oligonucleotide

SEQ ID NO: 552584 - DNA, 60 bp, Artificial; identical to SEQ ID NO: 338745
  Synthetic oligonucleotide

SEQ ID NO: 552585 - DNA, 57 bp, Artificial; identical to SEQ ID NO: 338748
  Synthetic oligonucleotide

SEQ ID NO: 552586 - DNA, 51 bp, Artificial; identical to SEQ ID NO: 338749
  Synthetic oligonucleotide

SEQ ID NO: 552587 - DNA, 53 bp, Artificial; identical to SEQ ID NO: 338751
  Synthetic oligonucleotide

SEQ ID NO: 552588 - DNA, 58 bp, Artificial; identical to SEQ ID NO: 338757
  Synthetic oligonucleotide

SEQ ID NO: 552589 - DNA, 57 bp, Artificial; identical to SEQ ID NO: 338758
  Synthetic oligonucleotide

SEQ ID NO: 552590 - DNA, 55 bp, Artificial; identical to SEQ ID NO: 338760
  Synthetic oligonucleotide

SEQ ID NO: 552591 - DNA, 54 bp, Artificial; identical to SEQ ID NO: 338761
  Synthetic oligonucleotide

SEQ ID NO: 552592 - DNA, 60 bp, Artificial; identical to SEQ ID NO: 338762
  Synthetic oligonucleotide

SEQ ID NO: 552593 - DNA, 54 bp, Artificial; identical to SEQ ID NO: 338763
  Synthetic oligonucleotide

SEQ ID NO: 552594 - DNA, 58 bp, Artificial; identical to SEQ ID NO: 338767
  Synthetic oligonucleotide

SEQ ID NO: 552595 - DNA, 57 bp, Artificial; identical to SEQ ID NO: 338768
  Synthetic oligonucleotide

SEQ ID NO: 552596 - DNA, 54 bp, Artificial; identical to SEQ ID NO: 338772
  Synthetic oligonucleotide

SEQ ID NO: 552597 - DNA, 55 bp, Artificial; identical to SEQ ID NO: 338773
  Synthetic oligonucleotide

SEQ ID NO: 552598 - DNA, 55 bp, Artificial; identical to SEQ ID NO: 338776
  Synthetic oligonucleotide

SEQ ID NO: 552599 - DNA, 57 bp, Artificial; identical to SEQ ID NO: 338779
  Synthetic oligonucleotide

SEQ ID NO: 552600 - DNA, 60 bp, Artificial; identical to SEQ ID NO: 338781
  Synthetic oligonucleotide

SEQ ID NO: 552601 - DNA, 53 bp, Artificial; identical to SEQ ID NO: 338782
  Synthetic oligonucleotide

SEQ ID NO: 552602 - DNA, 55 bp, Artificial; identical to SEQ ID NO: 338783
  Synthetic oligonucleotide

SEQ ID NO: 552603 - DNA, 59 bp, Artificial; identical to SEQ ID NO: 338789
  Synthetic oligonucleotide

SEQ ID NO: 552604 - DNA, 54 bp, Artificial; identical to SEQ ID NO: 338790
  Synthetic oligonucleotide

SEQ ID NO: 552605 - DNA, 55 bp, Artificial; identical to SEQ ID NO: 338791
  Synthetic oligonucleotide

SEQ ID NO: 552606 - DNA, 56 bp, Artificial; identical to SEQ ID NO: 338792
  Synthetic oligonucleotide

SEQ ID NO: 552607 - DNA, 60 bp, Artificial; identical to SEQ ID NO: 338793
  Synthetic oligonucleotide

SEQ ID NO: 552608 - DNA, 53 bp, Artificial; identical to SEQ ID NO: 338795
  Synthetic oligonucleotide

SEQ ID NO: 552609 - DNA, 56 bp, Artificial; identical to SEQ ID NO: 338797
  Synthetic oligonucleotide

SEQ ID NO: 552610 - DNA, 60 bp, Artificial; identical to SEQ ID NO: 338799
  Synthetic oligonucleotide

SEQ ID NO: 552611 - DNA, 60 bp, Artificial; identical to SEQ ID NO: 338800
  Synthetic oligonucleotide

SEQ ID NO: 552612 - DNA, 55 bp, Artificial; identical to SEQ ID NO: 338801
  Synthetic oligonucleotide

SEQ ID NO: 552613 - DNA, 55 bp, Artificial; identical to SEQ ID NO: 338804
  Synthetic oligonucleotide

SEQ ID NO: 552614 - DNA, 55 bp, Artificial; identical to SEQ ID NO: 338808
  Synthetic oligonucleotide

SEQ ID NO: 552615 - DNA, 55 bp, Artificial; identical to SEQ ID NO: 338810
  Synthetic oligonucleotide

SEQ ID NO: 552616 - DNA, 55 bp, Artificial; identical to SEQ ID NO: 338813
  Synthetic oligonucleotide

SEQ ID NO: 552617 - DNA, 54 bp, Artificial; identical to SEQ ID NO: 338814
  Synthetic oligonucleotide

SEQ ID NO: 552618 - DNA, 55 bp, Artificial; identical to SEQ ID NO: 338817
  Synthetic oligonucleotide

SEQ ID NO: 552619 - DNA, 51 bp, Artificial; identical to SEQ ID NO: 338818
  Synthetic oligonucleotide

SEQ ID NO: 552620 - DNA, 60 bp, Artificial; identical to SEQ ID NO: 338819
  Synthetic oligonucleotide

SEQ ID NO: 552621 - DNA, 55 bp, Artificial; identical to SEQ ID NO: 338822
  Synthetic oligonucleotide

SEQ ID NO: 552622 - DNA, 52 bp, Artificial; identical to SEQ ID NO: 338823
  Synthetic oligonucleotide

SEQ ID NO: 552623 - DNA, 58 bp, Artificial; identical to SEQ ID NO: 338824
  Synthetic oligonucleotide

SEQ ID NO: 552624 - DNA, 56 bp, Artificial; identical to SEQ ID NO: 338825
  Synthetic oligonucleotide

SEQ ID NO: 552625 - DNA, 58 bp, Artificial; identical to SEQ ID NO: 338830
  Synthetic oligonucleotide

SEQ ID NO: 552626 - DNA, 59 bp, Artificial; identical to SEQ ID NO: 338831
  Synthetic oligonucleotide

SEQ ID NO: 552627 - DNA, 60 bp, Artificial; identical to SEQ ID NO: 338836
  Synthetic oligonucleotide

SEQ ID NO: 552628 - DNA, 55 bp, Artificial; identical to SEQ ID NO: 338837
  Synthetic oligonucleotide

SEQ ID NO: 552629 - DNA, 60 bp, Artificial; identical to SEQ ID NO: 338838
  Synthetic oligonucleotide

SEQ ID NO: 552630 - DNA, 55 bp, Artificial; identical to SEQ ID NO: 338839
  Synthetic oligonucleotide

SEQ ID NO: 552631 - DNA, 60 bp, Artificial; identical to SEQ ID NO: 338841
  Synthetic oligonucleotide

SEQ ID NO: 552632 - DNA, 54 bp, Artificial; identical to SEQ ID NO: 338843
  Synthetic oligonucleotide

SEQ ID NO: 552633 - DNA, 52 bp, Artificial; identical to SEQ ID NO: 338848
  Synthetic oligonucleotide

SEQ ID NO: 552634 - DNA, 60 bp, Artificial; identical to SEQ ID NO: 338850
  Synthetic oligonucleotide

SEQ ID NO: 552635 - DNA, 60 bp, Artificial; identical to SEQ ID NO: 338852
  Synthetic oligonucleotide

SEQ ID NO: 552636 - DNA, 60 bp, Artificial; identical to SEQ ID NO: 338853
  Synthetic oligonucleotide

SEQ ID NO: 552637 - DNA, 56 bp, Artificial; identical to SEQ ID NO: 338855
  Synthetic oligonucleotide

SEQ ID NO: 552638 - DNA, 55 bp, Artificial; identical to SEQ ID NO: 338857
  Synthetic oligonucleotide

SEQ ID NO: 552639 - DNA, 55 bp, Artificial; identical to SEQ ID NO: 338858
  Synthetic oligonucleotide

SEQ ID NO: 552640 - DNA, 60 bp, Artificial; identical to SEQ ID NO: 338859
  Synthetic oligonucleotide

SEQ ID NO: 552641 - DNA, 56 bp, Artificial; identical to SEQ ID NO: 19573
  Synthetic oligonucleotide

SEQ ID NO: 552642 - DNA, 59 bp, Artificial; identical to SEQ ID NO: 338864
  Synthetic oligonucleotide

SEQ ID NO: 552643 - DNA, 60 bp, Artificial; identical to SEQ ID NO: 6713
  Synthetic oligonucleotide

SEQ ID NO: 552644 - DNA, 55 bp, Artificial; identical to SEQ ID NO: 338870
  Synthetic oligonucleotide

SEQ ID NO: 552645 - DNA, 60 bp, Artificial; identical to SEQ ID NO: 338873
  Synthetic oligonucleotide

SEQ ID NO: 552646 - DNA, 54 bp, Artificial; identical to SEQ ID NO: 338876
  Synthetic oligonucleotide

SEQ ID NO: 552647 - DNA, 60 bp, Artificial; identical to SEQ ID NO: 338877
  Synthetic oligonucleotide

SEQ ID NO: 552648 - DNA, 60 bp, Artificial; identical to SEQ ID NO: 338878
  Synthetic oligonucleotide

SEQ ID NO: 552649 - DNA, 54 bp, Artificial; identical to SEQ ID NO: 338879
  Synthetic oligonucleotide

SEQ ID NO: 552650 - DNA, 60 bp, Artificial; identical to SEQ ID NO: 338881
  Synthetic oligonucleotide

SEQ ID NO: 552651 - DNA, 55 bp, Artificial; identical to SEQ ID NO: 338885
  Synthetic oligonucleotide

SEQ ID NO: 552652 - DNA, 59 bp, Artificial; identical to SEQ ID NO: 338889
  Synthetic oligonucleotide

SEQ ID NO: 552653 - DNA, 56 bp, Artificial; identical to SEQ ID NO: 338890
  Synthetic oligonucleotide

SEQ ID NO: 552654 - DNA, 59 bp, Artificial; identical to SEQ ID NO: 338891
  Synthetic oligonucleotide

SEQ ID NO: 552655 - DNA, 56 bp, Artificial; identical to SEQ ID NO: 338893
  Synthetic oligonucleotide

SEQ ID NO: 552656 - DNA, 55 bp, Artificial; identical to SEQ ID NO: 338894
  Synthetic oligonucleotide

SEQ ID NO: 552657 - DNA, 58 bp, Artificial; identical to SEQ ID NO: 338898
  Synthetic oligonucleotide

SEQ ID NO: 552658 - DNA, 50 bp, Artificial; identical to SEQ ID NO: 338904
  Synthetic oligonucleotide

SEQ ID NO: 552659 - DNA, 60 bp, Artificial; identical to SEQ ID NO: 338905
  Synthetic oligonucleotide

SEQ ID NO: 552660 - DNA, 60 bp, Artificial; identical to SEQ ID NO: 338906
  Synthetic oligonucleotide

SEQ ID NO: 552661 - DNA, 59 bp, Artificial; identical to SEQ ID NO: 18495
  Synthetic oligonucleotide

SEQ ID NO: 552662 - DNA, 51 bp, Artificial; identical to SEQ ID NO: 338911
  Synthetic oligonucleotide

SEQ ID NO: 552663 - DNA, 56 bp, Artificial; identical to SEQ ID NO: 338912
  Synthetic oligonucleotide

SEQ ID NO: 552664 - DNA, 60 bp, Artificial; identical to SEQ ID NO: 338913
  Synthetic oligonucleotide

SEQ ID NO: 552665 - DNA, 60 bp, Artificial; identical to SEQ ID NO: 5797
  Synthetic oligonucleotide

SEQ ID NO: 552666 - DNA, 56 bp, Artificial; identical to SEQ ID NO: 338916
  Synthetic oligonucleotide

SEQ ID NO: 552667 - DNA, 60 bp, Artificial; identical to SEQ ID NO: 338918
  Synthetic oligonucleotide

SEQ ID NO: 552668 - DNA, 60 bp, Artificial; identical to SEQ ID NO: 6764
  Synthetic oligonucleotide

SEQ ID NO: 552669 - DNA, 56 bp, Artificial; identical to SEQ ID NO: 338923
  Synthetic oligonucleotide

SEQ ID NO: 552670 - DNA, 60 bp, Artificial; identical to SEQ ID NO: 338925
  Synthetic oligonucleotide

SEQ ID NO: 552671 - DNA, 57 bp, Artificial; identical to SEQ ID NO: 338928
  Synthetic oligonucleotide

SEQ ID NO: 552672 - DNA, 57 bp, Artificial; identical to SEQ ID NO: 338929
  Synthetic oligonucleotide

SEQ ID NO: 552673 - DNA, 50 bp, Artificial; identical to SEQ ID NO: 338931
  Synthetic oligonucleotide

SEQ ID NO: 552674 - DNA, 51 bp, Artificial; identical to SEQ ID NO: 338934
  Synthetic oligonucleotide

SEQ ID NO: 552675 - DNA, 55 bp, Artificial; identical to SEQ ID NO: 338935
  Synthetic oligonucleotide

SEQ ID NO: 552676 - DNA, 60 bp, Artificial; identical to SEQ ID NO: 12234
  Synthetic oligonucleotide

SEQ ID NO: 552677 - DNA, 54 bp, Artificial; identical to SEQ ID NO: 338940
  Synthetic oligonucleotide

SEQ ID NO: 552678 - DNA, 55 bp, Artificial; identical to SEQ ID NO: 338942
  Synthetic oligonucleotide

SEQ ID NO: 552679 - DNA, 53 bp, Artificial; identical to SEQ ID NO: 338946
  Synthetic oligonucleotide

SEQ ID NO: 552680 - DNA, 58 bp, Artificial; identical to SEQ ID NO: 338947
  Synthetic oligonucleotide

SEQ ID NO: 552681 - DNA, 52 bp, Artificial; identical to SEQ ID NO: 338948
  Synthetic oligonucleotide

SEQ ID NO: 552682 - DNA, 54 bp, Artificial; identical to SEQ ID NO: 19248
  Synthetic oligonucleotide

SEQ ID NO: 552683 - DNA, 51 bp, Artificial; identical to SEQ ID NO: 338951
  Synthetic oligonucleotide

SEQ ID NO: 552684 - DNA, 55 bp, Artificial; identical to SEQ ID NO: 338953
  Synthetic oligonucleotide

SEQ ID NO: 552685 - DNA, 59 bp, Artificial; identical to SEQ ID NO: 338956
  Synthetic oligonucleotide

SEQ ID NO: 552686 - DNA, 57 bp, Artificial; identical to SEQ ID NO: 338961
  Synthetic oligonucleotide

SEQ ID NO: 552687 - DNA, 53 bp, Artificial; identical to SEQ ID NO: 338962
  Synthetic oligonucleotide

SEQ ID NO: 552688 - DNA, 55 bp, Artificial; identical to SEQ ID NO: 338964
  Synthetic oligonucleotide

SEQ ID NO: 552689 - DNA, 59 bp, Artificial; identical to SEQ ID NO: 338965
  Synthetic oligonucleotide

SEQ ID NO: 552690 - DNA, 60 bp, Artificial; identical to SEQ ID NO: 338967
  Synthetic oligonucleotide

SEQ ID NO: 552691 - DNA, 58 bp, Artificial; identical to SEQ ID NO: 338971
  Synthetic oligonucleotide

SEQ ID NO: 552692 - DNA, 57 bp, Artificial; identical to SEQ ID NO: 338972
  Synthetic oligonucleotide

SEQ ID NO: 552693 - DNA, 54 bp, Artificial; identical to SEQ ID NO: 338973
  Synthetic oligonucleotide

SEQ ID NO: 552694 - DNA, 56 bp, Artificial; identical to SEQ ID NO: 338974
  Synthetic oligonucleotide

SEQ ID NO: 552695 - DNA, 56 bp, Artificial; identical to SEQ ID NO: 338975
  Synthetic oligonucleotide

SEQ ID NO: 552696 - DNA, 56 bp, Artificial; identical to SEQ ID NO: 338976
  Synthetic oligonucleotide

SEQ ID NO: 552697 - DNA, 55 bp, Artificial; identical to SEQ ID NO: 338977
  Synthetic oligonucleotide

SEQ ID NO: 552698 - DNA, 60 bp, Artificial; identical to SEQ ID NO: 338978
  Synthetic oligonucleotide

SEQ ID NO: 552699 - DNA, 60 bp, Artificial; identical to SEQ ID NO: 338979
  Synthetic oligonucleotide

SEQ ID NO: 552700 - DNA, 60 bp, Artificial; identical to SEQ ID NO: 338980
  Synthetic oligonucleotide

SEQ ID NO: 552701 - DNA, 55 bp, Artificial; identical to SEQ ID NO: 338982
  Synthetic oligonucleotide

SEQ ID NO: 552702 - DNA, 56 bp, Artificial; identical to SEQ ID NO: 338983
  Synthetic oligonucleotide

SEQ ID NO: 552703 - DNA, 55 bp, Artificial; identical to SEQ ID NO: 338984
  Synthetic oligonucleotide

SEQ ID NO: 552704 - DNA, 55 bp, Artificial; identical to SEQ ID NO: 338985
  Synthetic oligonucleotide

SEQ ID NO: 552705 - DNA, 60 bp, Artificial; identical to SEQ ID NO: 338992
  Synthetic oligonucleotide

SEQ ID NO: 552706 - DNA, 57 bp, Artificial; identical to SEQ ID NO: 338994
  Synthetic oligonucleotide

SEQ ID NO: 552707 - DNA, 60 bp, Artificial; identical to SEQ ID NO: 338995
  Synthetic oligonucleotide

SEQ ID NO: 552708 - DNA, 60 bp, Artificial; identical to SEQ ID NO: 338997
  Synthetic oligonucleotide

SEQ ID NO: 552709 - DNA, 55 bp, Artificial; identical to SEQ ID NO: 338998
  Synthetic oligonucleotide

SEQ ID NO: 552710 - DNA, 55 bp, Artificial; identical to SEQ ID NO: 338999
  Synthetic oligonucleotide

SEQ ID NO: 552711 - DNA, 55 bp, Artificial; identical to SEQ ID NO: 339000
  Synthetic oligonucleotide

SEQ ID NO: 552712 - DNA, 55 bp, Artificial; identical to SEQ ID NO: 339006
  Synthetic oligonucleotide

SEQ ID NO: 552713 - DNA, 51 bp, Artificial; identical to SEQ ID NO: 339011
  Synthetic oligonucleotide

SEQ ID NO: 552714 - DNA, 56 bp, Artificial; identical to SEQ ID NO: 339012
  Synthetic oligonucleotide

SEQ ID NO: 552715 - DNA, 55 bp, Artificial; identical to SEQ ID NO: 339014
  Synthetic oligonucleotide

SEQ ID NO: 552716 - DNA, 60 bp, Artificial; identical to SEQ ID NO: 339016
  Synthetic oligonucleotide

SEQ ID NO: 552717 - DNA, 55 bp, Artificial; identical to SEQ ID NO: 339017
  Synthetic oligonucleotide

SEQ ID NO: 552718 - DNA, 60 bp, Artificial; identical to SEQ ID NO: 339018
  Synthetic oligonucleotide

SEQ ID NO: 552719 - DNA, 56 bp, Artificial; identical to SEQ ID NO: 339021
  Synthetic oligonucleotide

SEQ ID NO: 552720 - DNA, 55 bp, Artificial; identical to SEQ ID NO: 339022
  Synthetic oligonucleotide

SEQ ID NO: 552721 - DNA, 58 bp, Artificial; identical to SEQ ID NO: 339024
  Synthetic oligonucleotide

SEQ ID NO: 552722 - DNA, 60 bp, Artificial; identical to SEQ ID NO: 339029
  Synthetic oligonucleotide

SEQ ID NO: 552723 - DNA, 58 bp, Artificial; identical to SEQ ID NO: 339031
  Synthetic oligonucleotide

SEQ ID NO: 552724 - DNA, 55 bp, Artificial; identical to SEQ ID NO: 339034
  Synthetic oligonucleotide

SEQ ID NO: 552725 - DNA, 55 bp, Artificial; identical to SEQ ID NO: 339036
  Synthetic oligonucleotide

SEQ ID NO: 552726 - DNA, 56 bp, Artificial; identical to SEQ ID NO: 339041
  Synthetic oligonucleotide

SEQ ID NO: 552727 - DNA, 55 bp, Artificial; identical to SEQ ID NO: 339045
  Synthetic oligonucleotide

SEQ ID NO: 552728 - DNA, 55 bp, Artificial; identical to SEQ ID NO: 339050
  Synthetic oligonucleotide

SEQ ID NO: 552729 - DNA, 53 bp, Artificial; identical to SEQ ID NO: 339051
  Synthetic oligonucleotide

SEQ ID NO: 552730 - DNA, 54 bp, Artificial; identical to SEQ ID NO: 339057
  Synthetic oligonucleotide

SEQ ID NO: 552731 - DNA, 58 bp, Artificial; identical to SEQ ID NO: 339061
  Synthetic oligonucleotide

SEQ ID NO: 552732 - DNA, 50 bp, Artificial; identical to SEQ ID NO: 339062
  Synthetic oligonucleotide

SEQ ID NO: 552733 - DNA, 59 bp, Artificial; identical to SEQ ID NO: 339064
  Synthetic oligonucleotide

SEQ ID NO: 552734 - DNA, 55 bp, Artificial; identical to SEQ ID NO: 339065
  Synthetic oligonucleotide

SEQ ID NO: 552735 - DNA, 53 bp, Artificial; identical to SEQ ID NO: 339066
  Synthetic oligonucleotide

SEQ ID NO: 552736 - DNA, 50 bp, Artificial; identical to SEQ ID NO: 339067
  Synthetic oligonucleotide

SEQ ID NO: 552737 - DNA, 59 bp, Artificial; identical to SEQ ID NO: 339068
  Synthetic oligonucleotide

SEQ ID NO: 552738 - DNA, 58 bp, Artificial; identical to SEQ ID NO: 339069
  Synthetic oligonucleotide

SEQ ID NO: 552739 - DNA, 57 bp, Artificial; identical to SEQ ID NO: 16151
  Synthetic oligonucleotide

SEQ ID NO: 552740 - DNA, 55 bp, Artificial; identical to SEQ ID NO: 339077
  Synthetic oligonucleotide

SEQ ID NO: 552741 - DNA, 58 bp, Artificial; identical to SEQ ID NO: 339078
  Synthetic oligonucleotide

SEQ ID NO: 552742 - DNA, 60 bp, Artificial; identical to SEQ ID NO: 339082
  Synthetic oligonucleotide

SEQ ID NO: 552743 - DNA, 55 bp, Artificial; identical to SEQ ID NO: 339092
  Synthetic oligonucleotide

SEQ ID NO: 552744 - DNA, 57 bp, Artificial; identical to SEQ ID NO: 339093
  Synthetic oligonucleotide

SEQ ID NO: 552745 - DNA, 52 bp, Artificial; identical to SEQ ID NO: 339094
  Synthetic oligonucleotide

SEQ ID NO: 552746 - DNA, 60 bp, Artificial; identical to SEQ ID NO: 339095
  Synthetic oligonucleotide

SEQ ID NO: 552747 - DNA, 59 bp, Artificial; identical to SEQ ID NO: 339101
  Synthetic oligonucleotide

SEQ ID NO: 552748 - DNA, 59 bp, Artificial; identical to SEQ ID NO: 339102
  Synthetic oligonucleotide

SEQ ID NO: 552749 - DNA, 57 bp, Artificial; identical to SEQ ID NO: 339104
  Synthetic oligonucleotide

SEQ ID NO: 552750 - DNA, 50 bp, Artificial; identical to SEQ ID NO: 339107
  Synthetic oligonucleotide

SEQ ID NO: 552751 - DNA, 50 bp, Artificial; identical to SEQ ID NO: 339108
  Synthetic oligonucleotide

SEQ ID NO: 552752 - DNA, 52 bp, Artificial; identical to SEQ ID NO: 339109
  Synthetic oligonucleotide

SEQ ID NO: 552753 - DNA, 57 bp, Artificial; identical to SEQ ID NO: 339114
  Synthetic oligonucleotide

SEQ ID NO: 552754 - DNA, 60 bp, Artificial; identical to SEQ ID NO: 339118
  Synthetic oligonucleotide

SEQ ID NO: 552755 - DNA, 50 bp, Artificial; identical to SEQ ID NO: 339120
  Synthetic oligonucleotide

SEQ ID NO: 552756 - DNA, 59 bp, Artificial; identical to SEQ ID NO: 19542
  Synthetic oligonucleotide

SEQ ID NO: 552757 - DNA, 55 bp, Artificial; identical to SEQ ID NO: 339126
  Synthetic oligonucleotide

SEQ ID NO: 552758 - DNA, 55 bp, Artificial; identical to SEQ ID NO: 339130
  Synthetic oligonucleotide

SEQ ID NO: 552759 - DNA, 55 bp, Artificial; identical to SEQ ID NO: 339133
  Synthetic oligonucleotide

SEQ ID NO: 552760 - DNA, 55 bp, Artificial; identical to SEQ ID NO: 339136
  Synthetic oligonucleotide

SEQ ID NO: 552761 - DNA, 54 bp, Artificial; identical to SEQ ID NO: 339137
  Synthetic oligonucleotide

SEQ ID NO: 552762 - DNA, 55 bp, Artificial; identical to SEQ ID NO: 339139
  Synthetic oligonucleotide

SEQ ID NO: 552763 - DNA, 60 bp, Artificial; identical to SEQ ID NO: 339140
  Synthetic oligonucleotide

SEQ ID NO: 552764 - DNA, 54 bp, Artificial; identical to SEQ ID NO: 339144
  Synthetic oligonucleotide

SEQ ID NO: 552765 - DNA, 56 bp, Artificial; identical to SEQ ID NO: 339149
  Synthetic oligonucleotide

SEQ ID NO: 552766 - DNA, 55 bp, Artificial; identical to SEQ ID NO: 339150
  Synthetic oligonucleotide

SEQ ID NO: 552767 - DNA, 55 bp, Artificial; identical to SEQ ID NO: 339152
  Synthetic oligonucleotide

SEQ ID NO: 552768 - DNA, 50 bp, Artificial; identical to SEQ ID NO: 339153
  Synthetic oligonucleotide

SEQ ID NO: 552769 - DNA, 52 bp, Artificial; identical to SEQ ID NO: 339156
  Synthetic oligonucleotide

SEQ ID NO: 552770 - DNA, 55 bp, Artificial; identical to SEQ ID NO: 339157
  Synthetic oligonucleotide

SEQ ID NO: 552771 - DNA, 60 bp, Artificial; identical to SEQ ID NO: 339158
  Synthetic oligonucleotide

SEQ ID NO: 552772 - DNA, 55 bp, Artificial; identical to SEQ ID NO: 339160
  Synthetic oligonucleotide

SEQ ID NO: 552773 - DNA, 55 bp, Artificial; identical to SEQ ID NO: 339163
  Synthetic oligonucleotide

SEQ ID NO: 552774 - DNA, 56 bp, Artificial; identical to SEQ ID NO: 339167
  Synthetic oligonucleotide

SEQ ID NO: 552775 - DNA, 60 bp, Artificial; identical to SEQ ID NO: 339169
  Synthetic oligonucleotide

SEQ ID NO: 552776 - DNA, 57 bp, Artificial; identical to SEQ ID NO: 339170
  Synthetic oligonucleotide

SEQ ID NO: 552777 - DNA, 55 bp, Artificial; identical to SEQ ID NO: 339171
  Synthetic oligonucleotide

SEQ ID NO: 552778 - DNA, 60 bp, Artificial; identical to SEQ ID NO: 339175
  Synthetic oligonucleotide

SEQ ID NO: 552779 - DNA, 60 bp, Artificial; identical to SEQ ID NO: 339176
  Synthetic oligonucleotide

SEQ ID NO: 552780 - DNA, 58 bp, Artificial; identical to SEQ ID NO: 339177
  Synthetic oligonucleotide

SEQ ID NO: 552781 - DNA, 56 bp, Artificial; identical to SEQ ID NO: 339178
  Synthetic oligonucleotide

SEQ ID NO: 552782 - DNA, 59 bp, Artificial; identical to SEQ ID NO: 17881
  Synthetic oligonucleotide

SEQ ID NO: 552783 - DNA, 60 bp, Artificial; identical to SEQ ID NO: 339183
  Synthetic oligonucleotide

SEQ ID NO: 552784 - DNA, 55 bp, Artificial; identical to SEQ ID NO: 339185
  Synthetic oligonucleotide

SEQ ID NO: 552785 - DNA, 55 bp, Artificial; identical to SEQ ID NO: 339189
  Synthetic oligonucleotide

SEQ ID NO: 552786 - DNA, 57 bp, Artificial; identical to SEQ ID NO: 339193
  Synthetic oligonucleotide

SEQ ID NO: 552787 - DNA, 54 bp, Artificial; identical to SEQ ID NO: 339197
  Synthetic oligonucleotide

SEQ ID NO: 552788 - DNA, 53 bp, Artificial; identical to SEQ ID NO: 339198
  Synthetic oligonucleotide

SEQ ID NO: 552789 - DNA, 53 bp, Artificial; identical to SEQ ID NO: 339200
  Synthetic oligonucleotide

SEQ ID NO: 552790 - DNA, 53 bp, Artificial; identical to SEQ ID NO: 339201
  Synthetic oligonucleotide

SEQ ID NO: 552791 - DNA, 55 bp, Artificial; identical to SEQ ID NO: 339204
  Synthetic oligonucleotide

SEQ ID NO: 552792 - DNA, 53 bp, Artificial; identical to SEQ ID NO: 339209
  Synthetic oligonucleotide

SEQ ID NO: 552793 - DNA, 55 bp, Artificial; identical to SEQ ID NO: 339212
  Synthetic oligonucleotide

SEQ ID NO: 552794 - DNA, 60 bp, Artificial; identical to SEQ ID NO: 339213
  Synthetic oligonucleotide

SEQ ID NO: 552795 - DNA, 57 bp, Artificial; identical to SEQ ID NO: 339214
  Synthetic oligonucleotide

SEQ ID NO: 552796 - DNA, 57 bp, Artificial; identical to SEQ ID NO: 339215
  Synthetic oligonucleotide

SEQ ID NO: 552797 - DNA, 58 bp, Artificial; identical to SEQ ID NO: 339217
  Synthetic oligonucleotide

SEQ ID NO: 552798 - DNA, 54 bp, Artificial; identical to SEQ ID NO: 339218
  Synthetic oligonucleotide

SEQ ID NO: 552799 - DNA, 58 bp, Artificial; identical to SEQ ID NO: 339220
  Synthetic oligonucleotide

SEQ ID NO: 552800 - DNA, 55 bp, Artificial; identical to SEQ ID NO: 339221
  Synthetic oligonucleotide

SEQ ID NO: 552801 - DNA, 59 bp, Artificial; identical to SEQ ID NO: 339223
  Synthetic oligonucleotide

SEQ ID NO: 552802 - DNA, 60 bp, Artificial; identical to SEQ ID NO: 339228
  Synthetic oligonucleotide

SEQ ID NO: 552803 - DNA, 60 bp, Artificial; identical to SEQ ID NO: 339230
  Synthetic oligonucleotide

SEQ ID NO: 552804 - DNA, 58 bp, Artificial; identical to SEQ ID NO: 339231
  Synthetic oligonucleotide

SEQ ID NO: 552805 - DNA, 53 bp, Artificial; identical to SEQ ID NO: 339233
  Synthetic oligonucleotide

SEQ ID NO: 552806 - DNA, 54 bp, Artificial; identical to SEQ ID NO: 339234
  Synthetic oligonucleotide

SEQ ID NO: 552807 - DNA, 56 bp, Artificial; identical to SEQ ID NO: 339237
  Synthetic oligonucleotide

SEQ ID NO: 552808 - DNA, 53 bp, Artificial; identical to SEQ ID NO: 339238
  Synthetic oligonucleotide

SEQ ID NO: 552809 - DNA, 59 bp, Artificial; identical to SEQ ID NO: 339239
  Synthetic oligonucleotide

SEQ ID NO: 552810 - DNA, 59 bp, Artificial; identical to SEQ ID NO: 339241
  Synthetic oligonucleotide

SEQ ID NO: 552811 - DNA, 60 bp, Artificial; identical to SEQ ID NO: 339246
  Synthetic oligonucleotide

SEQ ID NO: 552812 - DNA, 60 bp, Artificial; identical to SEQ ID NO: 339249
  Synthetic oligonucleotide

SEQ ID NO: 552813 - DNA, 55 bp, Artificial; identical to SEQ ID NO: 339254
  Synthetic oligonucleotide

SEQ ID NO: 552814 - DNA, 53 bp, Artificial; identical to SEQ ID NO: 339261
  Synthetic oligonucleotide

SEQ ID NO: 552815 - DNA, 60 bp, Artificial; identical to SEQ ID NO: 339263
  Synthetic oligonucleotide

SEQ ID NO: 552816 - DNA, 60 bp, Artificial; identical to SEQ ID NO: 339265
  Synthetic oligonucleotide

SEQ ID NO: 552817 - DNA, 60 bp, Artificial; identical to SEQ ID NO: 339266
  Synthetic oligonucleotide

SEQ ID NO: 552818 - DNA, 60 bp, Artificial; identical to SEQ ID NO: 339267
  Synthetic oligonucleotide

SEQ ID NO: 552819 - DNA, 60 bp, Artificial; identical to SEQ ID NO: 339268
  Synthetic oligonucleotide

SEQ ID NO: 552820 - DNA, 60 bp, Artificial; identical to SEQ ID NO: 339269
  Synthetic oligonucleotide

SEQ ID NO: 552821 - DNA, 60 bp, Artificial; identical to SEQ ID NO: 339270
  Synthetic oligonucleotide

SEQ ID NO: 552822 - DNA, 55 bp, Artificial; identical to SEQ ID NO: 339275
  Synthetic oligonucleotide

SEQ ID NO: 552823 - DNA, 60 bp, Artificial; identical to SEQ ID NO: 339276
  Synthetic oligonucleotide

SEQ ID NO: 552824 - DNA, 55 bp, Artificial; identical to SEQ ID NO: 339278
  Synthetic oligonucleotide

SEQ ID NO: 552825 - DNA, 60 bp, Artificial; identical to SEQ ID NO: 339280
  Synthetic oligonucleotide

SEQ ID NO: 552826 - DNA, 56 bp, Artificial; identical to SEQ ID NO: 17037
  Synthetic oligonucleotide

SEQ ID NO: 552827 - DNA, 60 bp, Artificial; identical to SEQ ID NO: 339285
  Synthetic oligonucleotide

SEQ ID NO: 552828 - DNA, 60 bp, Artificial; identical to SEQ ID NO: 339286
  Synthetic oligonucleotide

SEQ ID NO: 552829 - DNA, 54 bp, Artificial; identical to SEQ ID NO: 15930
  Synthetic oligonucleotide

SEQ ID NO: 552830 - DNA, 55 bp, Artificial; identical to SEQ ID NO: 339289
  Synthetic oligonucleotide

SEQ ID NO: 552831 - DNA, 55 bp, Artificial; identical to SEQ ID NO: 339290
  Synthetic oligonucleotide

SEQ ID NO: 552832 - DNA, 60 bp, Artificial; identical to SEQ ID NO: 339293
  Synthetic oligonucleotide

SEQ ID NO: 552833 - DNA, 51 bp, Artificial; identical to SEQ ID NO: 339295
  Synthetic oligonucleotide

SEQ ID NO: 552834 - DNA, 54 bp, Artificial; identical to SEQ ID NO: 339296
  Synthetic oligonucleotide

SEQ ID NO: 552835 - DNA, 55 bp, Artificial; identical to SEQ ID NO: 339301
  Synthetic oligonucleotide

SEQ ID NO: 552836 - DNA, 60 bp, Artificial; identical to SEQ ID NO: 339303
  Synthetic oligonucleotide

SEQ ID NO: 552837 - DNA, 54 bp, Artificial; identical to SEQ ID NO: 339305
  Synthetic oligonucleotide

SEQ ID NO: 552838 - DNA, 55 bp, Artificial; identical to SEQ ID NO: 339306
  Synthetic oligonucleotide

SEQ ID NO: 552839 - DNA, 57 bp, Artificial; identical to SEQ ID NO: 339308
  Synthetic oligonucleotide

SEQ ID NO: 552840 - DNA, 59 bp, Artificial; identical to SEQ ID NO: 339310
  Synthetic oligonucleotide

SEQ ID NO: 552841 - DNA, 55 bp, Artificial; identical to SEQ ID NO: 339313
  Synthetic oligonucleotide

SEQ ID NO: 552842 - DNA, 54 bp, Artificial; identical to SEQ ID NO: 339320
  Synthetic oligonucleotide

SEQ ID NO: 552843 - DNA, 60 bp, Artificial; identical to SEQ ID NO: 339321
  Synthetic oligonucleotide

SEQ ID NO: 552844 - DNA, 55 bp, Artificial; identical to SEQ ID NO: 339330
  Synthetic oligonucleotide

SEQ ID NO: 552845 - DNA, 58 bp, Artificial; identical to SEQ ID NO: 339332
  Synthetic oligonucleotide

SEQ ID NO: 552846 - DNA, 55 bp, Artificial; identical to SEQ ID NO: 339339
  Synthetic oligonucleotide

SEQ ID NO: 552847 - DNA, 56 bp, Artificial; identical to SEQ ID NO: 339341
  Synthetic oligonucleotide

SEQ ID NO: 552848 - DNA, 58 bp, Artificial; identical to SEQ ID NO: 339344
  Synthetic oligonucleotide

SEQ ID NO: 552849 - DNA, 55 bp, Artificial; identical to SEQ ID NO: 339347
  Synthetic oligonucleotide

SEQ ID NO: 552850 - DNA, 60 bp, Artificial; identical to SEQ ID NO: 339350
  Synthetic oligonucleotide

SEQ ID NO: 552851 - DNA, 58 bp, Artificial; identical to SEQ ID NO: 339351
  Synthetic oligonucleotide

SEQ ID NO: 552852 - DNA, 58 bp, Artificial; identical to SEQ ID NO: 339353
  Synthetic oligonucleotide

SEQ ID NO: 552853 - DNA, 59 bp, Artificial; identical to SEQ ID NO: 339354
  Synthetic oligonucleotide

SEQ ID NO: 552854 - DNA, 60 bp, Artificial; identical to SEQ ID NO: 339355
  Synthetic oligonucleotide

SEQ ID NO: 552855 - DNA, 54 bp, Artificial; identical to SEQ ID NO: 339358
  Synthetic oligonucleotide

SEQ ID NO: 552856 - DNA, 57 bp, Artificial; identical to SEQ ID NO: 339359
  Synthetic oligonucleotide

SEQ ID NO: 552857 - DNA, 55 bp, Artificial; identical to SEQ ID NO: 339367
  Synthetic oligonucleotide

SEQ ID NO: 552858 - DNA, 54 bp, Artificial; identical to SEQ ID NO: 10165
  Synthetic oligonucleotide

SEQ ID NO: 552859 - DNA, 51 bp, Artificial; identical to SEQ ID NO: 339368
  Synthetic oligonucleotide

SEQ ID NO: 552860 - DNA, 55 bp, Artificial; identical to SEQ ID NO: 339372
  Synthetic oligonucleotide

SEQ ID NO: 552861 - DNA, 55 bp, Artificial; identical to SEQ ID NO: 339374
  Synthetic oligonucleotide

SEQ ID NO: 552862 - DNA, 57 bp, Artificial; identical to SEQ ID NO: 339376
  Synthetic oligonucleotide

SEQ ID NO: 552863 - DNA, 58 bp, Artificial; identical to SEQ ID NO: 339377
  Synthetic oligonucleotide

SEQ ID NO: 552864 - DNA, 56 bp, Artificial; identical to SEQ ID NO: 339380
  Synthetic oligonucleotide

SEQ ID NO: 552865 - DNA, 60 bp, Artificial; identical to SEQ ID NO: 339383
  Synthetic oligonucleotide

SEQ ID NO: 552866 - DNA, 55 bp, Artificial; identical to SEQ ID NO: 339384
  Synthetic oligonucleotide

SEQ ID NO: 552867 - DNA, 55 bp, Artificial; identical to SEQ ID NO: 339385
  Synthetic oligonucleotide

SEQ ID NO: 552868 - DNA, 58 bp, Artificial; identical to SEQ ID NO: 339386
  Synthetic oligonucleotide

SEQ ID NO: 552869 - DNA, 52 bp, Artificial; identical to SEQ ID NO: 339387
  Synthetic oligonucleotide

SEQ ID NO: 552870 - DNA, 60 bp, Artificial; identical to SEQ ID NO: 339390
  Synthetic oligonucleotide

SEQ ID NO: 552871 - DNA, 60 bp, Artificial; identical to SEQ ID NO: 339391
  Synthetic oligonucleotide

SEQ ID NO: 552872 - DNA, 55 bp, Artificial; identical to SEQ ID NO: 339397
  Synthetic oligonucleotide

SEQ ID NO: 552873 - DNA, 60 bp, Artificial; identical to SEQ ID NO: 339398
  Synthetic oligonucleotide

SEQ ID NO: 552874 - DNA, 55 bp, Artificial; identical to SEQ ID NO: 339399
  Synthetic oligonucleotide

SEQ ID NO: 552875 - DNA, 54 bp, Artificial; identical to SEQ ID NO: 339400
  Synthetic oligonucleotide

SEQ ID NO: 552876 - DNA, 59 bp, Artificial; identical to SEQ ID NO: 339402
  Synthetic oligonucleotide

SEQ ID NO: 552877 - DNA, 52 bp, Artificial; identical to SEQ ID NO: 339404
  Synthetic oligonucleotide

SEQ ID NO: 552878 - DNA, 60 bp, Artificial; identical to SEQ ID NO: 339407
  Synthetic oligonucleotide

SEQ ID NO: 552879 - DNA, 55 bp, Artificial; identical to SEQ ID NO: 339410
  Synthetic oligonucleotide

SEQ ID NO: 552880 - DNA, 55 bp, Artificial; identical to SEQ ID NO: 339414
  Synthetic oligonucleotide

SEQ ID NO: 552881 - DNA, 54 bp, Artificial; identical to SEQ ID NO: 339415
  Synthetic oligonucleotide

SEQ ID NO: 552882 - DNA, 53 bp, Artificial; identical to SEQ ID NO: 339418
  Synthetic oligonucleotide

SEQ ID NO: 552883 - DNA, 54 bp, Artificial; identical to SEQ ID NO: 339420
  Synthetic oligonucleotide

SEQ ID NO: 552884 - DNA, 55 bp, Artificial; identical to SEQ ID NO: 339424
  Synthetic oligonucleotide

SEQ ID NO: 552885 - DNA, 54 bp, Artificial; identical to SEQ ID NO: 17496
  Synthetic oligonucleotide

SEQ ID NO: 552886 - DNA, 60 bp, Artificial; identical to SEQ ID NO: 339428
  Synthetic oligonucleotide

SEQ ID NO: 552887 - DNA, 53 bp, Artificial; identical to SEQ ID NO: 339432
  Synthetic oligonucleotide

SEQ ID NO: 552888 - DNA, 51 bp, Artificial; identical to SEQ ID NO: 339433
  Synthetic oligonucleotide

SEQ ID NO: 552889 - DNA, 60 bp, Artificial; identical to SEQ ID NO: 339438
  Synthetic oligonucleotide

SEQ ID NO: 552890 - DNA, 55 bp, Artificial; identical to SEQ ID NO: 339440
  Synthetic oligonucleotide

SEQ ID NO: 552891 - DNA, 54 bp, Artificial; identical to SEQ ID NO: 339441
  Synthetic oligonucleotide

SEQ ID NO: 552892 - DNA, 54 bp, Artificial; identical to SEQ ID NO: 339443
  Synthetic oligonucleotide

SEQ ID NO: 552893 - DNA, 55 bp, Artificial; identical to SEQ ID NO: 339444
  Synthetic oligonucleotide

SEQ ID NO: 552894 - DNA, 60 bp, Artificial; identical to SEQ ID NO: 339445
  Synthetic oligonucleotide

SEQ ID NO: 552895 - DNA, 60 bp, Artificial; identical to SEQ ID NO: 339446
  Synthetic oligonucleotide

SEQ ID NO: 552896 - DNA, 55 bp, Artificial; identical to SEQ ID NO: 339447
  Synthetic oligonucleotide

SEQ ID NO: 552897 - DNA, 60 bp, Artificial; identical to SEQ ID NO: 339449
  Synthetic oligonucleotide

SEQ ID NO: 552898 - DNA, 60 bp, Artificial; identical to SEQ ID NO: 339452
  Synthetic oligonucleotide

SEQ ID NO: 552899 - DNA, 50 bp, Artificial; identical to SEQ ID NO: 339454
  Synthetic oligonucleotide

SEQ ID NO: 552900 - DNA, 55 bp, Artificial; identical to SEQ ID NO: 339457
  Synthetic oligonucleotide

SEQ ID NO: 552901 - DNA, 56 bp, Artificial; identical to SEQ ID NO: 339461
  Synthetic oligonucleotide

SEQ ID NO: 552902 - DNA, 58 bp, Artificial; identical to SEQ ID NO: 339463
  Synthetic oligonucleotide

SEQ ID NO: 552903 - DNA, 55 bp, Artificial; identical to SEQ ID NO: 339464
  Synthetic oligonucleotide

SEQ ID NO: 552904 - DNA, 60 bp, Artificial; identical to SEQ ID NO: 339465
  Synthetic oligonucleotide

SEQ ID NO: 552905 - DNA, 55 bp, Artificial; identical to SEQ ID NO: 339468
  Synthetic oligonucleotide

SEQ ID NO: 552906 - DNA, 57 bp, Artificial; identical to SEQ ID NO: 339472
  Synthetic oligonucleotide

SEQ ID NO: 552907 - DNA, 54 bp, Artificial; identical to SEQ ID NO: 339479
  Synthetic oligonucleotide

SEQ ID NO: 552908 - DNA, 55 bp, Artificial; identical to SEQ ID NO: 339482
  Synthetic oligonucleotide

SEQ ID NO: 552909 - DNA, 54 bp, Artificial; identical to SEQ ID NO: 339483
  Synthetic oligonucleotide

SEQ ID NO: 552910 - DNA, 52 bp, Artificial; identical to SEQ ID NO: 339484
  Synthetic oligonucleotide

SEQ ID NO: 552911 - DNA, 54 bp, Artificial; identical to SEQ ID NO: 339490
  Synthetic oligonucleotide

SEQ ID NO: 552912 - DNA, 55 bp, Artificial; identical to SEQ ID NO: 339491
  Synthetic oligonucleotide

SEQ ID NO: 552913 - DNA, 56 bp, Artificial; identical to SEQ ID NO: 339493
  Synthetic oligonucleotide

SEQ ID NO: 552914 - DNA, 55 bp, Artificial; identical to SEQ ID NO: 339498
  Synthetic oligonucleotide

SEQ ID NO: 552915 - DNA, 54 bp, Artificial; identical to SEQ ID NO: 339500
  Synthetic oligonucleotide

SEQ ID NO: 552916 - DNA, 60 bp, Artificial; identical to SEQ ID NO: 11345
  Synthetic oligonucleotide

SEQ ID NO: 552917 - DNA, 56 bp, Artificial; identical to SEQ ID NO: 14992
  Synthetic oligonucleotide

SEQ ID NO: 552918 - DNA, 55 bp, Artificial; identical to SEQ ID NO: 339501
  Synthetic oligonucleotide

SEQ ID NO: 552919 - DNA, 53 bp, Artificial; identical to SEQ ID NO: 339503
  Synthetic oligonucleotide

SEQ ID NO: 552920 - DNA, 54 bp, Artificial; identical to SEQ ID NO: 339507
  Synthetic oligonucleotide

SEQ ID NO: 552921 - DNA, 60 bp, Artificial; identical to SEQ ID NO: 339512
  Synthetic oligonucleotide

SEQ ID NO: 552922 - DNA, 58 bp, Artificial; identical to SEQ ID NO: 339513
  Synthetic oligonucleotide

SEQ ID NO: 552923 - DNA, 51 bp, Artificial; identical to SEQ ID NO: 339514
  Synthetic oligonucleotide

SEQ ID NO: 552924 - DNA, 59 bp, Artificial; identical to SEQ ID NO: 339515
  Synthetic oligonucleotide

SEQ ID NO: 552925 - DNA, 54 bp, Artificial; identical to SEQ ID NO: 16231
  Synthetic oligonucleotide

SEQ ID NO: 552926 - DNA, 51 bp, Artificial; identical to SEQ ID NO: 339517
  Synthetic oligonucleotide

SEQ ID NO: 552927 - DNA, 55 bp, Artificial; identical to SEQ ID NO: 339518
  Synthetic oligonucleotide

SEQ ID NO: 552928 - DNA, 57 bp, Artificial; identical to SEQ ID NO: 339522
  Synthetic oligonucleotide

SEQ ID NO: 552929 - DNA, 60 bp, Artificial; identical to SEQ ID NO: 339523
  Synthetic oligonucleotide

SEQ ID NO: 552930 - DNA, 59 bp, Artificial; identical to SEQ ID NO: 20589
  Synthetic oligonucleotide

SEQ ID NO: 552931 - DNA, 59 bp, Artificial; identical to SEQ ID NO: 339529
  Synthetic oligonucleotide

SEQ ID NO: 552932 - DNA, 55 bp, Artificial; identical to SEQ ID NO: 339532
  Synthetic oligonucleotide

SEQ ID NO: 552933 - DNA, 59 bp, Artificial; identical to SEQ ID NO: 339533
  Synthetic oligonucleotide

SEQ ID NO: 552934 - DNA, 54 bp, Artificial; identical to SEQ ID NO: 339534
  Synthetic oligonucleotide

SEQ ID NO: 552935 - DNA, 60 bp, Artificial; identical to SEQ ID NO: 339535
  Synthetic oligonucleotide

SEQ ID NO: 552936 - DNA, 54 bp, Artificial; identical to SEQ ID NO: 339536
  Synthetic oligonucleotide

SEQ ID NO: 552937 - DNA, 55 bp, Artificial; identical to SEQ ID NO: 339537
  Synthetic oligonucleotide

SEQ ID NO: 552938 - DNA, 60 bp, Artificial; identical to SEQ ID NO: 339539
  Synthetic oligonucleotide

SEQ ID NO: 552939 - DNA, 57 bp, Artificial; identical to SEQ ID NO: 339540
  Synthetic oligonucleotide

SEQ ID NO: 552940 - DNA, 55 bp, Artificial; identical to SEQ ID NO: 339542
  Synthetic oligonucleotide

SEQ ID NO: 552941 - DNA, 58 bp, Artificial; identical to SEQ ID NO: 339544
  Synthetic oligonucleotide

SEQ ID NO: 552942 - DNA, 60 bp, Artificial; identical to SEQ ID NO: 339547
  Synthetic oligonucleotide

SEQ ID NO: 552943 - DNA, 57 bp, Artificial; identical to SEQ ID NO: 339548
  Synthetic oligonucleotide

SEQ ID NO: 552944 - DNA, 55 bp, Artificial; identical to SEQ ID NO: 339549
  Synthetic oligonucleotide

SEQ ID NO: 552945 - DNA, 60 bp, Artificial; identical to SEQ ID NO: 339551
  Synthetic oligonucleotide

SEQ ID NO: 552946 - DNA, 60 bp, Artificial; identical to SEQ ID NO: 339553
  Synthetic oligonucleotide

SEQ ID NO: 552947 - DNA, 58 bp, Artificial; identical to SEQ ID NO: 339554
  Synthetic oligonucleotide

SEQ ID NO: 552948 - DNA, 56 bp, Artificial; identical to SEQ ID NO: 339558
  Synthetic oligonucleotide

SEQ ID NO: 552949 - DNA, 60 bp, Artificial; identical to SEQ ID NO: 339560
  Synthetic oligonucleotide

SEQ ID NO: 552950 - DNA, 55 bp, Artificial; identical to SEQ ID NO: 339563
  Synthetic oligonucleotide

SEQ ID NO: 552951 - DNA, 60 bp, Artificial; identical to SEQ ID NO: 339571
  Synthetic oligonucleotide

SEQ ID NO: 552952 - DNA, 57 bp, Artificial; identical to SEQ ID NO: 339573
  Synthetic oligonucleotide

SEQ ID NO: 552953 - DNA, 52 bp, Artificial; identical to SEQ ID NO: 10160
  Synthetic oligonucleotide

SEQ ID NO: 552954 - DNA, 59 bp, Artificial; identical to SEQ ID NO: 339576
  Synthetic oligonucleotide

SEQ ID NO: 552955 - DNA, 55 bp, Artificial; identical to SEQ ID NO: 339578
  Synthetic oligonucleotide

SEQ ID NO: 552956 - DNA, 55 bp, Artificial; identical to SEQ ID NO: 339580
  Synthetic oligonucleotide

SEQ ID NO: 552957 - DNA, 60 bp, Artificial; identical to SEQ ID NO: 339581
  Synthetic oligonucleotide

SEQ ID NO: 552958 - DNA, 58 bp, Artificial; identical to SEQ ID NO: 339584
  Synthetic oligonucleotide

SEQ ID NO: 552959 - DNA, 52 bp, Artificial; identical to SEQ ID NO: 339585
  Synthetic oligonucleotide

SEQ ID NO: 552960 - DNA, 59 bp, Artificial; identical to SEQ ID NO: 339587
  Synthetic oligonucleotide

SEQ ID NO: 552961 - DNA, 54 bp, Artificial; identical to SEQ ID NO: 339588
  Synthetic oligonucleotide

SEQ ID NO: 552962 - DNA, 57 bp, Artificial; identical to SEQ ID NO: 339589
  Synthetic oligonucleotide

SEQ ID NO: 552963 - DNA, 60 bp, Artificial; identical to SEQ ID NO: 339592
  Synthetic oligonucleotide

SEQ ID NO: 552964 - DNA, 60 bp, Artificial; identical to SEQ ID NO: 339596
  Synthetic oligonucleotide

SEQ ID NO: 552965 - DNA, 57 bp, Artificial; identical to SEQ ID NO: 339598
  Synthetic oligonucleotide

SEQ ID NO: 552966 - DNA, 60 bp, Artificial; identical to SEQ ID NO: 339599
  Synthetic oligonucleotide

SEQ ID NO: 552967 - DNA, 60 bp, Artificial; identical to SEQ ID NO: 339601
  Synthetic oligonucleotide

SEQ ID NO: 552968 - DNA, 52 bp, Artificial; identical to SEQ ID NO: 339603
  Synthetic oligonucleotide

SEQ ID NO: 552969 - DNA, 57 bp, Artificial; identical to SEQ ID NO: 339605
  Synthetic oligonucleotide

SEQ ID NO: 552970 - DNA, 55 bp, Artificial; identical to SEQ ID NO: 339614
  Synthetic oligonucleotide

SEQ ID NO: 552971 - DNA, 55 bp, Artificial; identical to SEQ ID NO: 339616
  Synthetic oligonucleotide

SEQ ID NO: 552972 - DNA, 57 bp, Artificial; identical to SEQ ID NO: 339617
  Synthetic oligonucleotide

SEQ ID NO: 552973 - DNA, 60 bp, Artificial; identical to SEQ ID NO: 339618
  Synthetic oligonucleotide

SEQ ID NO: 552974 - DNA, 58 bp, Artificial; identical to SEQ ID NO: 339620
  Synthetic oligonucleotide

SEQ ID NO: 552975 - DNA, 60 bp, Artificial; identical to SEQ ID NO: 339623
  Synthetic oligonucleotide

SEQ ID NO: 552976 - DNA, 55 bp, Artificial; identical to SEQ ID NO: 339625
  Synthetic oligonucleotide

SEQ ID NO: 552977 - DNA, 59 bp, Artificial; identical to SEQ ID NO: 339626
  Synthetic oligonucleotide

SEQ ID NO: 552978 - DNA, 55 bp, Artificial; identical to SEQ ID NO: 339627
  Synthetic oligonucleotide

SEQ ID NO: 552979 - DNA, 60 bp, Artificial; identical to SEQ ID NO: 339628
  Synthetic oligonucleotide

SEQ ID NO: 552980 - DNA, 55 bp, Artificial; identical to SEQ ID NO: 339630
  Synthetic oligonucleotide

SEQ ID NO: 552981 - DNA, 60 bp, Artificial; identical to SEQ ID NO: 339633
  Synthetic oligonucleotide

SEQ ID NO: 552982 - DNA, 54 bp, Artificial; identical to SEQ ID NO: 339635
  Synthetic oligonucleotide

SEQ ID NO: 552983 - DNA, 60 bp, Artificial; identical to SEQ ID NO: 339638
  Synthetic oligonucleotide

SEQ ID NO: 552984 - DNA, 54 bp, Artificial; identical to SEQ ID NO: 339639
  Synthetic oligonucleotide

SEQ ID NO: 552985 - DNA, 60 bp, Artificial; identical to SEQ ID NO: 5852
  Synthetic oligonucleotide

SEQ ID NO: 552986 - DNA, 59 bp, Artificial; identical to SEQ ID NO: 339640
  Synthetic oligonucleotide

SEQ ID NO: 552987 - DNA, 57 bp, Artificial; identical to SEQ ID NO: 339643
  Synthetic oligonucleotide

SEQ ID NO: 552988 - DNA, 56 bp, Artificial; identical to SEQ ID NO: 339645
  Synthetic oligonucleotide

SEQ ID NO: 552989 - DNA, 52 bp, Artificial; identical to SEQ ID NO: 339646
  Synthetic oligonucleotide

SEQ ID NO: 552990 - DNA, 56 bp, Artificial; identical to SEQ ID NO: 339650
  Synthetic oligonucleotide

SEQ ID NO: 552991 - DNA, 54 bp, Artificial; identical to SEQ ID NO: 339651
  Synthetic oligonucleotide

SEQ ID NO: 552992 - DNA, 59 bp, Artificial; identical to SEQ ID NO: 339655
  Synthetic oligonucleotide

SEQ ID NO: 552993 - DNA, 55 bp, Artificial; identical to SEQ ID NO: 339661
  Synthetic oligonucleotide

SEQ ID NO: 552994 - DNA, 55 bp, Artificial; identical to SEQ ID NO: 339662
  Synthetic oligonucleotide

SEQ ID NO: 552995 - DNA, 55 bp, Artificial; identical to SEQ ID NO: 339666
  Synthetic oligonucleotide

SEQ ID NO: 552996 - DNA, 58 bp, Artificial; identical to SEQ ID NO: 339667
  Synthetic oligonucleotide

SEQ ID NO: 552997 - DNA, 60 bp, Artificial; identical to SEQ ID NO: 339670
  Synthetic oligonucleotide

SEQ ID NO: 552998 - DNA, 60 bp, Artificial; identical to SEQ ID NO: 339671
  Synthetic oligonucleotide

SEQ ID NO: 552999 - DNA, 55 bp, Artificial; identical to SEQ ID NO: 339672
  Synthetic oligonucleotide

SEQ ID NO: 553000 - DNA, 56 bp, Artificial; identical to SEQ ID NO: 19226
  Synthetic oligonucleotide

SEQ ID NO: 553001 - DNA, 60 bp, Artificial; identical to SEQ ID NO: 339676
  Synthetic oligonucleotide

SEQ ID NO: 553002 - DNA, 60 bp, Artificial; identical to SEQ ID NO: 339682
  Synthetic oligonucleotide

SEQ ID NO: 553003 - DNA, 60 bp, Artificial; identical to SEQ ID NO: 339684
  Synthetic oligonucleotide

SEQ ID NO: 553004 - DNA, 60 bp, Artificial; identical to SEQ ID NO: 339687
  Synthetic oligonucleotide

SEQ ID NO: 553005 - DNA, 53 bp, Artificial; identical to SEQ ID NO: 339691
  Synthetic oligonucleotide

SEQ ID NO: 553006 - DNA, 50 bp, Artificial; identical to SEQ ID NO: 339692
  Synthetic oligonucleotide

SEQ ID NO: 553007 - DNA, 54 bp, Artificial; identical to SEQ ID NO: 339694
  Synthetic oligonucleotide

SEQ ID NO: 553008 - DNA, 58 bp, Artificial; identical to SEQ ID NO: 339695
  Synthetic oligonucleotide

SEQ ID NO: 553009 - DNA, 60 bp, Artificial; identical to SEQ ID NO: 339696
  Synthetic oligonucleotide

SEQ ID NO: 553010 - DNA, 54 bp, Artificial; identical to SEQ ID NO: 339697
  Synthetic oligonucleotide

SEQ ID NO: 553011 - DNA, 55 bp, Artificial; identical to SEQ ID NO: 339698
  Synthetic oligonucleotide

SEQ ID NO: 553012 - DNA, 60 bp, Artificial; identical to SEQ ID NO: 339699
  Synthetic oligonucleotide

SEQ ID NO: 553013 - DNA, 55 bp, Artificial; identical to SEQ ID NO: 339700
  Synthetic oligonucleotide

SEQ ID NO: 553014 - DNA, 55 bp, Artificial; identical to SEQ ID NO: 339702
  Synthetic oligonucleotide

SEQ ID NO: 553015 - DNA, 60 bp, Artificial; identical to SEQ ID NO: 339704
  Synthetic oligonucleotide

SEQ ID NO: 553016 - DNA, 55 bp, Artificial; identical to SEQ ID NO: 339705
  Synthetic oligonucleotide

SEQ ID NO: 553017 - DNA, 58 bp, Artificial; identical to SEQ ID NO: 339710
  Synthetic oligonucleotide

SEQ ID NO: 553018 - DNA, 56 bp, Artificial; identical to SEQ ID NO: 339711
  Synthetic oligonucleotide

SEQ ID NO: 553019 - DNA, 60 bp, Artificial; identical to SEQ ID NO: 339712
  Synthetic oligonucleotide

SEQ ID NO: 553020 - DNA, 60 bp, Artificial; identical to SEQ ID NO: 339717
  Synthetic oligonucleotide

SEQ ID NO: 553021 - DNA, 59 bp, Artificial; identical to SEQ ID NO: 339719
  Synthetic oligonucleotide

SEQ ID NO: 553022 - DNA, 59 bp, Artificial; identical to SEQ ID NO: 339720
  Synthetic oligonucleotide

SEQ ID NO: 553023 - DNA, 56 bp, Artificial; identical to SEQ ID NO: 339723
  Synthetic oligonucleotide

SEQ ID NO: 553024 - DNA, 60 bp, Artificial; identical to SEQ ID NO: 339727
  Synthetic oligonucleotide

SEQ ID NO: 553025 - DNA, 60 bp, Artificial; identical to SEQ ID NO: 339728
  Synthetic oligonucleotide

SEQ ID NO: 553026 - DNA, 55 bp, Artificial; identical to SEQ ID NO: 339732
  Synthetic oligonucleotide

SEQ ID NO: 553027 - DNA, 58 bp, Artificial; identical to SEQ ID NO: 339734
  Synthetic oligonucleotide

SEQ ID NO: 553028 - DNA, 52 bp, Artificial; identical to SEQ ID NO: 339737
  Synthetic oligonucleotide

SEQ ID NO: 553029 - DNA, 60 bp, Artificial; identical to SEQ ID NO: 339740
  Synthetic oligonucleotide

SEQ ID NO: 553030 - DNA, 60 bp, Artificial; identical to SEQ ID NO: 339741
  Synthetic oligonucleotide

SEQ ID NO: 553031 - DNA, 55 bp, Artificial; identical to SEQ ID NO: 339742
  Synthetic oligonucleotide

SEQ ID NO: 553032 - DNA, 60 bp, Artificial; identical to SEQ ID NO: 339748
  Synthetic oligonucleotide

SEQ ID NO: 553033 - DNA, 51 bp, Artificial; identical to SEQ ID NO: 339749
  Synthetic oligonucleotide

SEQ ID NO: 553034 - DNA, 52 bp, Artificial; identical to SEQ ID NO: 339752
  Synthetic oligonucleotide

SEQ ID NO: 553035 - DNA, 55 bp, Artificial; identical to SEQ ID NO: 339760
  Synthetic oligonucleotide

SEQ ID NO: 553036 - DNA, 56 bp, Artificial; identical to SEQ ID NO: 339761
  Synthetic oligonucleotide

SEQ ID NO: 553037 - DNA, 57 bp, Artificial; identical to SEQ ID NO: 339762
  Synthetic oligonucleotide

SEQ ID NO: 553038 - DNA, 54 bp, Artificial; identical to SEQ ID NO: 203
  Synthetic oligonucleotide

SEQ ID NO: 553039 - DNA, 60 bp, Artificial; identical to SEQ ID NO: 339771
  Synthetic oligonucleotide

SEQ ID NO: 553040 - DNA, 60 bp, Artificial; identical to SEQ ID NO: 339773
  Synthetic oligonucleotide

SEQ ID NO: 553041 - DNA, 59 bp, Artificial; identical to SEQ ID NO: 339776
  Synthetic oligonucleotide

SEQ ID NO: 553042 - DNA, 51 bp, Artificial; identical to SEQ ID NO: 339778
  Synthetic oligonucleotide

SEQ ID NO: 553043 - DNA, 60 bp, Artificial; identical to SEQ ID NO: 339782
  Synthetic oligonucleotide

SEQ ID NO: 553044 - DNA, 60 bp, Artificial; identical to SEQ ID NO: 339784
  Synthetic oligonucleotide

SEQ ID NO: 553045 - DNA, 51 bp, Artificial; identical to SEQ ID NO: 339785
  Synthetic oligonucleotide

SEQ ID NO: 553046 - DNA, 57 bp, Artificial; identical to SEQ ID NO: 339787
  Synthetic oligonucleotide

SEQ ID NO: 553047 - DNA, 54 bp, Artificial; identical to SEQ ID NO: 339788
  Synthetic oligonucleotide

SEQ ID NO: 553048 - DNA, 57 bp, Artificial; identical to SEQ ID NO: 339791
  Synthetic oligonucleotide

SEQ ID NO: 553049 - DNA, 55 bp, Artificial; identical to SEQ ID NO: 339792
  Synthetic oligonucleotide

SEQ ID NO: 553050 - DNA, 58 bp, Artificial; identical to SEQ ID NO: 339796
  Synthetic oligonucleotide

SEQ ID NO: 553051 - DNA, 51 bp, Artificial; identical to SEQ ID NO: 339799
  Synthetic oligonucleotide

SEQ ID NO: 553052 - DNA, 60 bp, Artificial; identical to SEQ ID NO: 339803
  Synthetic oligonucleotide

SEQ ID NO: 553053 - DNA, 55 bp, Artificial; identical to SEQ ID NO: 339804
  Synthetic oligonucleotide

SEQ ID NO: 553054 - DNA, 55 bp, Artificial; identical to SEQ ID NO: 339805
  Synthetic oligonucleotide

SEQ ID NO: 553055 - DNA, 60 bp, Artificial; identical to SEQ ID NO: 339807
  Synthetic oligonucleotide

SEQ ID NO: 553056 - DNA, 57 bp, Artificial; identical to SEQ ID NO: 339808
  Synthetic oligonucleotide

SEQ ID NO: 553057 - DNA, 57 bp, Artificial; identical to SEQ ID NO: 339811
  Synthetic oligonucleotide

SEQ ID NO: 553058 - DNA, 60 bp, Artificial; identical to SEQ ID NO: 339812
  Synthetic oligonucleotide

SEQ ID NO: 553059 - DNA, 55 bp, Artificial; identical to SEQ ID NO: 339814
  Synthetic oligonucleotide

SEQ ID NO: 553060 - DNA, 60 bp, Artificial; identical to SEQ ID NO: 339818
  Synthetic oligonucleotide

SEQ ID NO: 553061 - DNA, 57 bp, Artificial; identical to SEQ ID NO: 339820
  Synthetic oligonucleotide

SEQ ID NO: 553062 - DNA, 55 bp, Artificial; identical to SEQ ID NO: 339825
  Synthetic oligonucleotide

SEQ ID NO: 553063 - DNA, 57 bp, Artificial; identical to SEQ ID NO: 5792
  Synthetic oligonucleotide

SEQ ID NO: 553064 - DNA, 55 bp, Artificial; identical to SEQ ID NO: 339837
  Synthetic oligonucleotide

SEQ ID NO: 553065 - DNA, 59 bp, Artificial; identical to SEQ ID NO: 339838
  Synthetic oligonucleotide

SEQ ID NO: 553066 - DNA, 55 bp, Artificial; identical to SEQ ID NO: 339839
  Synthetic oligonucleotide

SEQ ID NO: 553067 - DNA, 59 bp, Artificial; identical to SEQ ID NO: 339840
  Synthetic oligonucleotide

SEQ ID NO: 553068 - DNA, 55 bp, Artificial; identical to SEQ ID NO: 339844
  Synthetic oligonucleotide

SEQ ID NO: 553069 - DNA, 58 bp, Artificial; identical to SEQ ID NO: 339847
  Synthetic oligonucleotide

SEQ ID NO: 553070 - DNA, 59 bp, Artificial; identical to SEQ ID NO: 339848
  Synthetic oligonucleotide

SEQ ID NO: 553071 - DNA, 58 bp, Artificial; identical to SEQ ID NO: 339854
  Synthetic oligonucleotide

SEQ ID NO: 553072 - DNA, 58 bp, Artificial; identical to SEQ ID NO: 339857
  Synthetic oligonucleotide

SEQ ID NO: 553073 - DNA, 50 bp, Artificial; identical to SEQ ID NO: 12670
  Synthetic oligonucleotide

SEQ ID NO: 553074 - DNA, 51 bp, Artificial; identical to SEQ ID NO: 339859
  Synthetic oligonucleotide

SEQ ID NO: 553075 - DNA, 55 bp, Artificial; identical to SEQ ID NO: 339861
  Synthetic oligonucleotide

SEQ ID NO: 553076 - DNA, 51 bp, Artificial; identical to SEQ ID NO: 339865
  Synthetic oligonucleotide

SEQ ID NO: 553077 - DNA, 55 bp, Artificial; identical to SEQ ID NO: 339868
  Synthetic oligonucleotide

SEQ ID NO: 553078 - DNA, 50 bp, Artificial; identical to SEQ ID NO: 339869
  Synthetic oligonucleotide

SEQ ID NO: 553079 - DNA, 56 bp, Artificial; identical to SEQ ID NO: 339870
  Synthetic oligonucleotide

SEQ ID NO: 553080 - DNA, 60 bp, Artificial; identical to SEQ ID NO: 339871
  Synthetic oligonucleotide

SEQ ID NO: 553081 - DNA, 52 bp, Artificial; identical to SEQ ID NO: 339874
  Synthetic oligonucleotide

SEQ ID NO: 553082 - DNA, 60 bp, Artificial; identical to SEQ ID NO: 339876
  Synthetic oligonucleotide

SEQ ID NO: 553083 - DNA, 55 bp, Artificial; identical to SEQ ID NO: 339877
  Synthetic oligonucleotide

SEQ ID NO: 553084 - DNA, 60 bp, Artificial; identical to SEQ ID NO: 339878
  Synthetic oligonucleotide

SEQ ID NO: 553085 - DNA, 55 bp, Artificial; identical to SEQ ID NO: 339880
  Synthetic oligonucleotide

SEQ ID NO: 553086 - DNA, 56 bp, Artificial; identical to SEQ ID NO: 339883
  Synthetic oligonucleotide

SEQ ID NO: 553087 - DNA, 55 bp, Artificial; identical to SEQ ID NO: 339885
  Synthetic oligonucleotide

SEQ ID NO: 553088 - DNA, 55 bp, Artificial; identical to SEQ ID NO: 339886
  Synthetic oligonucleotide

SEQ ID NO: 553089 - DNA, 59 bp, Artificial; identical to SEQ ID NO: 339890
  Synthetic oligonucleotide

SEQ ID NO: 553090 - DNA, 57 bp, Artificial; identical to SEQ ID NO: 339891
  Synthetic oligonucleotide

SEQ ID NO: 553091 - DNA, 55 bp, Artificial; identical to SEQ ID NO: 339892
  Synthetic oligonucleotide

SEQ ID NO: 553092 - DNA, 55 bp, Artificial; identical to SEQ ID NO: 339894
  Synthetic oligonucleotide

SEQ ID NO: 553093 - DNA, 55 bp, Artificial; identical to SEQ ID NO: 339895
  Synthetic oligonucleotide

SEQ ID NO: 553094 - DNA, 55 bp, Artificial; identical to SEQ ID NO: 339896
  Synthetic oligonucleotide

SEQ ID NO: 553095 - DNA, 52 bp, Artificial; identical to SEQ ID NO: 339897
  Synthetic oligonucleotide

SEQ ID NO: 553096 - DNA, 58 bp, Artificial; identical to SEQ ID NO: 339898
  Synthetic oligonucleotide

SEQ ID NO: 553097 - DNA, 56 bp, Artificial; identical to SEQ ID NO: 339901
  Synthetic oligonucleotide

SEQ ID NO: 553098 - DNA, 55 bp, Artificial; identical to SEQ ID NO: 339906
  Synthetic oligonucleotide

SEQ ID NO: 553099 - DNA, 60 bp, Artificial; identical to SEQ ID NO: 339907
  Synthetic oligonucleotide

SEQ ID NO: 553100 - DNA, 60 bp, Artificial; identical to SEQ ID NO: 339910
  Synthetic oligonucleotide

SEQ ID NO: 553101 - DNA, 51 bp, Artificial; identical to SEQ ID NO: 16694
  Synthetic oligonucleotide

SEQ ID NO: 553102 - DNA, 59 bp, Artificial; identical to SEQ ID NO: 339913
  Synthetic oligonucleotide

SEQ ID NO: 553103 - DNA, 56 bp, Artificial; identical to SEQ ID NO: 339916
  Synthetic oligonucleotide

SEQ ID NO: 553104 - DNA, 50 bp, Artificial; identical to SEQ ID NO: 339918
  Synthetic oligonucleotide

SEQ ID NO: 553105 - DNA, 60 bp, Artificial; identical to SEQ ID NO: 339920
  Synthetic oligonucleotide

SEQ ID NO: 553106 - DNA, 55 bp, Artificial; identical to SEQ ID NO: 339921
  Synthetic oligonucleotide

SEQ ID NO: 553107 - DNA, 55 bp, Artificial; identical to SEQ ID NO: 339922
  Synthetic oligonucleotide

SEQ ID NO: 553108 - DNA, 56 bp, Artificial; identical to SEQ ID NO: 339928
  Synthetic oligonucleotide

SEQ ID NO: 553109 - DNA, 59 bp, Artificial; identical to SEQ ID NO: 339929
  Synthetic oligonucleotide

SEQ ID NO: 553110 - DNA, 55 bp, Artificial; identical to SEQ ID NO: 339930
  Synthetic oligonucleotide

SEQ ID NO: 553111 - DNA, 60 bp, Artificial; identical to SEQ ID NO: 339932
  Synthetic oligonucleotide

SEQ ID NO: 553112 - DNA, 60 bp, Artificial; identical to SEQ ID NO: 339933
  Synthetic oligonucleotide

SEQ ID NO: 553113 - DNA, 60 bp, Artificial; identical to SEQ ID NO: 339934
  Synthetic oligonucleotide

SEQ ID NO: 553114 - DNA, 60 bp, Artificial; identical to SEQ ID NO: 339935
  Synthetic oligonucleotide

SEQ ID NO: 553115 - DNA, 55 bp, Artificial; identical to SEQ ID NO: 339937
  Synthetic oligonucleotide

SEQ ID NO: 553116 - DNA, 60 bp, Artificial; identical to SEQ ID NO: 339940
  Synthetic oligonucleotide

SEQ ID NO: 553117 - DNA, 57 bp, Artificial; identical to SEQ ID NO: 339943
  Synthetic oligonucleotide

SEQ ID NO: 553118 - DNA, 54 bp, Artificial; identical to SEQ ID NO: 339945
  Synthetic oligonucleotide

SEQ ID NO: 553119 - DNA, 55 bp, Artificial; identical to SEQ ID NO: 339949
  Synthetic oligonucleotide

SEQ ID NO: 553120 - DNA, 55 bp, Artificial; identical to SEQ ID NO: 339950
  Synthetic oligonucleotide

SEQ ID NO: 553121 - DNA, 57 bp, Artificial; identical to SEQ ID NO: 339951
  Synthetic oligonucleotide

SEQ ID NO: 553122 - DNA, 54 bp, Artificial; identical to SEQ ID NO: 339952
  Synthetic oligonucleotide

SEQ ID NO: 553123 - DNA, 60 bp, Artificial; identical to SEQ ID NO: 339955
  Synthetic oligonucleotide

SEQ ID NO: 553124 - DNA, 58 bp, Artificial; identical to SEQ ID NO: 339960
  Synthetic oligonucleotide

SEQ ID NO: 553125 - DNA, 59 bp, Artificial; identical to SEQ ID NO: 339961
  Synthetic oligonucleotide

SEQ ID NO: 553126 - DNA, 60 bp, Artificial; identical to SEQ ID NO: 339965
  Synthetic oligonucleotide

SEQ ID NO: 553127 - DNA, 60 bp, Artificial; identical to SEQ ID NO: 339967
  Synthetic oligonucleotide

SEQ ID NO: 553128 - DNA, 60 bp, Artificial; identical to SEQ ID NO: 339968
  Synthetic oligonucleotide

SEQ ID NO: 553129 - DNA, 55 bp, Artificial; identical to SEQ ID NO: 339970
  Synthetic oligonucleotide

SEQ ID NO: 553130 - DNA, 59 bp, Artificial; identical to SEQ ID NO: 6433
  Synthetic oligonucleotide

SEQ ID NO: 553131 - DNA, 55 bp, Artificial; identical to SEQ ID NO: 339973
  Synthetic oligonucleotide

SEQ ID NO: 553132 - DNA, 53 bp, Artificial; identical to SEQ ID NO: 339975
  Synthetic oligonucleotide

SEQ ID NO: 553133 - DNA, 53 bp, Artificial; identical to SEQ ID NO: 339976
  Synthetic oligonucleotide

SEQ ID NO: 553134 - DNA, 55 bp, Artificial; identical to SEQ ID NO: 339978
  Synthetic oligonucleotide

SEQ ID NO: 553135 - DNA, 50 bp, Artificial; identical to SEQ ID NO: 339981
  Synthetic oligonucleotide

SEQ ID NO: 553136 - DNA, 58 bp, Artificial; identical to SEQ ID NO: 339986
  Synthetic oligonucleotide

SEQ ID NO: 553137 - DNA, 60 bp, Artificial; identical to SEQ ID NO: 339987
  Synthetic oligonucleotide

SEQ ID NO: 553138 - DNA, 57 bp, Artificial; identical to SEQ ID NO: 339988
  Synthetic oligonucleotide

SEQ ID NO: 553139 - DNA, 60 bp, Artificial; identical to SEQ ID NO: 339989
  Synthetic oligonucleotide

SEQ ID NO: 553140 - DNA, 60 bp, Artificial; identical to SEQ ID NO: 339990
  Synthetic oligonucleotide

SEQ ID NO: 553141 - DNA, 57 bp, Artificial; identical to SEQ ID NO: 339991
  Synthetic oligonucleotide

SEQ ID NO: 553142 - DNA, 55 bp, Artificial; identical to SEQ ID NO: 339992
  Synthetic oligonucleotide

SEQ ID NO: 553143 - DNA, 53 bp, Artificial; identical to SEQ ID NO: 339995
  Synthetic oligonucleotide

SEQ ID NO: 553144 - DNA, 55 bp, Artificial; identical to SEQ ID NO: 339998
  Synthetic oligonucleotide

SEQ ID NO: 553145 - DNA, 51 bp, Artificial; identical to SEQ ID NO: 340000
  Synthetic oligonucleotide

SEQ ID NO: 553146 - DNA, 60 bp, Artificial; identical to SEQ ID NO: 340009
  Synthetic oligonucleotide

SEQ ID NO: 553147 - DNA, 59 bp, Artificial; identical to SEQ ID NO: 340011
  Synthetic oligonucleotide

SEQ ID NO: 553148 - DNA, 57 bp, Artificial; identical to SEQ ID NO: 340013
  Synthetic oligonucleotide

SEQ ID NO: 553149 - DNA, 50 bp, Artificial; identical to SEQ ID NO: 340014
  Synthetic oligonucleotide

SEQ ID NO: 553150 - DNA, 60 bp, Artificial; identical to SEQ ID NO: 340019
  Synthetic oligonucleotide

SEQ ID NO: 553151 - DNA, 58 bp, Artificial; identical to SEQ ID NO: 340026
  Synthetic oligonucleotide

SEQ ID NO: 553152 - DNA, 55 bp, Artificial; identical to SEQ ID NO: 340029
  Synthetic oligonucleotide

SEQ ID NO: 553153 - DNA, 51 bp, Artificial; identical to SEQ ID NO: 340030
  Synthetic oligonucleotide

SEQ ID NO: 553154 - DNA, 55 bp, Artificial; identical to SEQ ID NO: 340031
  Synthetic oligonucleotide

SEQ ID NO: 553155 - DNA, 59 bp, Artificial; identical to SEQ ID NO: 340032
  Synthetic oligonucleotide

SEQ ID NO: 553156 - DNA, 57 bp, Artificial; identical to SEQ ID NO: 340035
  Synthetic oligonucleotide

SEQ ID NO: 553157 - DNA, 58 bp, Artificial; identical to SEQ ID NO: 340036
  Synthetic oligonucleotide

SEQ ID NO: 553158 - DNA, 51 bp, Artificial; identical to SEQ ID NO: 340039
  Synthetic oligonucleotide

SEQ ID NO: 553159 - DNA, 54 bp, Artificial; identical to SEQ ID NO: 340043
  Synthetic oligonucleotide

SEQ ID NO: 553160 - DNA, 55 bp, Artificial; identical to SEQ ID NO: 340048
  Synthetic oligonucleotide

SEQ ID NO: 553161 - DNA, 54 bp, Artificial; identical to SEQ ID NO: 340053
  Synthetic oligonucleotide

SEQ ID NO: 553162 - DNA, 54 bp, Artificial; identical to SEQ ID NO: 340054
  Synthetic oligonucleotide

SEQ ID NO: 553163 - DNA, 55 bp, Artificial; identical to SEQ ID NO: 340064
  Synthetic oligonucleotide

SEQ ID NO: 553164 - DNA, 57 bp, Artificial; identical to SEQ ID NO: 340065
  Synthetic oligonucleotide

SEQ ID NO: 553165 - DNA, 58 bp, Artificial; identical to SEQ ID NO: 340066
  Synthetic oligonucleotide

SEQ ID NO: 553166 - DNA, 57 bp, Artificial; identical to SEQ ID NO: 340067
  Synthetic oligonucleotide

SEQ ID NO: 553167 - DNA, 56 bp, Artificial; identical to SEQ ID NO: 340069
  Synthetic oligonucleotide

SEQ ID NO: 553168 - DNA, 55 bp, Artificial; identical to SEQ ID NO: 340071
  Synthetic oligonucleotide

SEQ ID NO: 553169 - DNA, 60 bp, Artificial; identical to SEQ ID NO: 340075
  Synthetic oligonucleotide

SEQ ID NO: 553170 - DNA, 60 bp, Artificial; identical to SEQ ID NO: 340083
  Synthetic oligonucleotide

SEQ ID NO: 553171 - DNA, 56 bp, Artificial; identical to SEQ ID NO: 340087
  Synthetic oligonucleotide

SEQ ID NO: 553172 - DNA, 55 bp, Artificial; identical to SEQ ID NO: 340090
  Synthetic oligonucleotide

SEQ ID NO: 553173 - DNA, 56 bp, Artificial; identical to SEQ ID NO: 340093
  Synthetic oligonucleotide

SEQ ID NO: 553174 - DNA, 60 bp, Artificial; identical to SEQ ID NO: 340094
  Synthetic oligonucleotide

SEQ ID NO: 553175 - DNA, 60 bp, Artificial; identical to SEQ ID NO: 11465
  Synthetic oligonucleotide

SEQ ID NO: 553176 - DNA, 60 bp, Artificial; identical to SEQ ID NO: 340098
  Synthetic oligonucleotide

SEQ ID NO: 553177 - DNA, 59 bp, Artificial; identical to SEQ ID NO: 340104
  Synthetic oligonucleotide

SEQ ID NO: 553178 - DNA, 60 bp, Artificial; identical to SEQ ID NO: 340105
  Synthetic oligonucleotide

SEQ ID NO: 553179 - DNA, 56 bp, Artificial; identical to SEQ ID NO: 340106
  Synthetic oligonucleotide

SEQ ID NO: 553180 - DNA, 56 bp, Artificial; identical to SEQ ID NO: 340107
  Synthetic oligonucleotide

SEQ ID NO: 553181 - DNA, 60 bp, Artificial; identical to SEQ ID NO: 340109
  Synthetic oligonucleotide

SEQ ID NO: 553182 - DNA, 51 bp, Artificial; identical to SEQ ID NO: 340110
  Synthetic oligonucleotide

SEQ ID NO: 553183 - DNA, 54 bp, Artificial; identical to SEQ ID NO: 340112
  Synthetic oligonucleotide

SEQ ID NO: 553184 - DNA, 55 bp, Artificial; identical to SEQ ID NO: 340113
  Synthetic oligonucleotide

SEQ ID NO: 553185 - DNA, 56 bp, Artificial; identical to SEQ ID NO: 340114
  Synthetic oligonucleotide

SEQ ID NO: 553186 - DNA, 59 bp, Artificial; identical to SEQ ID NO: 340116
  Synthetic oligonucleotide

SEQ ID NO: 553187 - DNA, 56 bp, Artificial; identical to SEQ ID NO: 340118
  Synthetic oligonucleotide

SEQ ID NO: 553188 - DNA, 49 bp, Artificial; identical to SEQ ID NO: 340121
  Synthetic oligonucleotide

SEQ ID NO: 553189 - DNA, 55 bp, Artificial; identical to SEQ ID NO: 340122
  Synthetic oligonucleotide

SEQ ID NO: 553190 - DNA, 60 bp, Artificial; identical to SEQ ID NO: 340125
  Synthetic oligonucleotide

SEQ ID NO: 553191 - DNA, 56 bp, Artificial; identical to SEQ ID NO: 340128
  Synthetic oligonucleotide

SEQ ID NO: 553192 - DNA, 51 bp, Artificial; identical to SEQ ID NO: 340131
  Synthetic oligonucleotide

SEQ ID NO: 553193 - DNA, 58 bp, Artificial; identical to SEQ ID NO: 340133
  Synthetic oligonucleotide

SEQ ID NO: 553194 - DNA, 54 bp, Artificial; identical to SEQ ID NO: 340134
  Synthetic oligonucleotide

SEQ ID NO: 553195 - DNA, 57 bp, Artificial; identical to SEQ ID NO: 340135
  Synthetic oligonucleotide

SEQ ID NO: 553196 - DNA, 60 bp, Artificial; identical to SEQ ID NO: 340136
  Synthetic oligonucleotide

SEQ ID NO: 553197 - DNA, 56 bp, Artificial; identical to SEQ ID NO: 340139
  Synthetic oligonucleotide

SEQ ID NO: 553198 - DNA, 55 bp, Artificial; identical to SEQ ID NO: 340140
  Synthetic oligonucleotide

SEQ ID NO: 553199 - DNA, 52 bp, Artificial; identical to SEQ ID NO: 340141
  Synthetic oligonucleotide

SEQ ID NO: 553200 - DNA, 55 bp, Artificial; identical to SEQ ID NO: 340144
  Synthetic oligonucleotide

SEQ ID NO: 553201 - DNA, 52 bp, Artificial; identical to SEQ ID NO: 340145
  Synthetic oligonucleotide

SEQ ID NO: 553202 - DNA, 59 bp, Artificial; identical to SEQ ID NO: 340146
  Synthetic oligonucleotide

SEQ ID NO: 553203 - DNA, 60 bp, Artificial; identical to SEQ ID NO: 15242
  Synthetic oligonucleotide

SEQ ID NO: 553204 - DNA, 55 bp, Artificial; identical to SEQ ID NO: 340148
  Synthetic oligonucleotide

SEQ ID NO: 553205 - DNA, 55 bp, Artificial; identical to SEQ ID NO: 340149
  Synthetic oligonucleotide

SEQ ID NO: 553206 - DNA, 55 bp, Artificial; identical to SEQ ID NO: 340158
  Synthetic oligonucleotide

SEQ ID NO: 553207 - DNA, 56 bp, Artificial; identical to SEQ ID NO: 340161
  Synthetic oligonucleotide

SEQ ID NO: 553208 - DNA, 59 bp, Artificial; identical to SEQ ID NO: 340164
  Synthetic oligonucleotide

SEQ ID NO: 553209 - DNA, 55 bp, Artificial; identical to SEQ ID NO: 340166
  Synthetic oligonucleotide

SEQ ID NO: 553210 - DNA, 57 bp, Artificial; identical to SEQ ID NO: 340168
  Synthetic oligonucleotide

SEQ ID NO: 553211 - DNA, 59 bp, Artificial; identical to SEQ ID NO: 340170
  Synthetic oligonucleotide

SEQ ID NO: 553212 - DNA, 55 bp, Artificial; identical to SEQ ID NO: 340172
  Synthetic oligonucleotide

SEQ ID NO: 553213 - DNA, 58 bp, Artificial; identical to SEQ ID NO: 340177
  Synthetic oligonucleotide

SEQ ID NO: 553214 - DNA, 60 bp, Artificial; identical to SEQ ID NO: 340179
  Synthetic oligonucleotide

SEQ ID NO: 553215 - DNA, 57 bp, Artificial; identical to SEQ ID NO: 340181
  Synthetic oligonucleotide

SEQ ID NO: 553216 - DNA, 55 bp, Artificial; identical to SEQ ID NO: 340182
  Synthetic oligonucleotide

SEQ ID NO: 553217 - DNA, 60 bp, Artificial; identical to SEQ ID NO: 340183
  Synthetic oligonucleotide

SEQ ID NO: 553218 - DNA, 50 bp, Artificial; identical to SEQ ID NO: 340188
  Synthetic oligonucleotide

SEQ ID NO: 553219 - DNA, 55 bp, Artificial; identical to SEQ ID NO: 340189
  Synthetic oligonucleotide

SEQ ID NO: 553220 - DNA, 52 bp, Artificial; identical to SEQ ID NO: 340190
  Synthetic oligonucleotide

SEQ ID NO: 553221 - DNA, 60 bp, Artificial; identical to SEQ ID NO: 340191
  Synthetic oligonucleotide

SEQ ID NO: 553222 - DNA, 52 bp, Artificial; identical to SEQ ID NO: 340192
  Synthetic oligonucleotide

SEQ ID NO: 553223 - DNA, 59 bp, Artificial; identical to SEQ ID NO: 340193
  Synthetic oligonucleotide

SEQ ID NO: 553224 - DNA, 60 bp, Artificial; identical to SEQ ID NO: 340196
  Synthetic oligonucleotide

SEQ ID NO: 553225 - DNA, 52 bp, Artificial; identical to SEQ ID NO: 340202
  Synthetic oligonucleotide

SEQ ID NO: 553226 - DNA, 59 bp, Artificial; identical to SEQ ID NO: 340206
  Synthetic oligonucleotide

SEQ ID NO: 553227 - DNA, 53 bp, Artificial; identical to SEQ ID NO: 340207
  Synthetic oligonucleotide

SEQ ID NO: 553228 - DNA, 60 bp, Artificial; identical to SEQ ID NO: 340208
  Synthetic oligonucleotide

SEQ ID NO: 553229 - DNA, 60 bp, Artificial; identical to SEQ ID NO: 340209
  Synthetic oligonucleotide

SEQ ID NO: 553230 - DNA, 51 bp, Artificial; identical to SEQ ID NO: 340210
  Synthetic oligonucleotide

SEQ ID NO: 553231 - DNA, 60 bp, Artificial; identical to SEQ ID NO: 340211
  Synthetic oligonucleotide

SEQ ID NO: 553232 - DNA, 60 bp, Artificial; identical to SEQ ID NO: 340212
  Synthetic oligonucleotide

SEQ ID NO: 553233 - DNA, 55 bp, Artificial; identical to SEQ ID NO: 340213
  Synthetic oligonucleotide

SEQ ID NO: 553234 - DNA, 60 bp, Artificial; identical to SEQ ID NO: 340214
  Synthetic oligonucleotide

SEQ ID NO: 553235 - DNA, 57 bp, Artificial; identical to SEQ ID NO: 340215
  Synthetic oligonucleotide

SEQ ID NO: 553236 - DNA, 55 bp, Artificial; identical to SEQ ID NO: 340217
  Synthetic oligonucleotide

SEQ ID NO: 553237 - DNA, 60 bp, Artificial; identical to SEQ ID NO: 340220
  Synthetic oligonucleotide

SEQ ID NO: 553238 - DNA, 52 bp, Artificial; identical to SEQ ID NO: 340222
  Synthetic oligonucleotide

SEQ ID NO: 553239 - DNA, 50 bp, Artificial; identical to SEQ ID NO: 340223
  Synthetic oligonucleotide

SEQ ID NO: 553240 - DNA, 60 bp, Artificial; identical to SEQ ID NO: 340224
  Synthetic oligonucleotide

SEQ ID NO: 553241 - DNA, 58 bp, Artificial; identical to SEQ ID NO: 340227
  Synthetic oligonucleotide

SEQ ID NO: 553242 - DNA, 59 bp, Artificial; identical to SEQ ID NO: 340229
  Synthetic oligonucleotide

SEQ ID NO: 553243 - DNA, 55 bp, Artificial; identical to SEQ ID NO: 340232
  Synthetic oligonucleotide

SEQ ID NO: 553244 - DNA, 58 bp, Artificial; identical to SEQ ID NO: 340233
  Synthetic oligonucleotide

SEQ ID NO: 553245 - DNA, 60 bp, Artificial; identical to SEQ ID NO: 340234
  Synthetic oligonucleotide

SEQ ID NO: 553246 - DNA, 60 bp, Artificial; identical to SEQ ID NO: 340240
  Synthetic oligonucleotide

SEQ ID NO: 553247 - DNA, 59 bp, Artificial; identical to SEQ ID NO: 340242
  Synthetic oligonucleotide

SEQ ID NO: 553248 - DNA, 54 bp, Artificial; identical to SEQ ID NO: 340243
  Synthetic oligonucleotide

SEQ ID NO: 553249 - DNA, 56 bp, Artificial; identical to SEQ ID NO: 340245
  Synthetic oligonucleotide

SEQ ID NO: 553250 - DNA, 60 bp, Artificial; identical to SEQ ID NO: 340246
  Synthetic oligonucleotide

SEQ ID NO: 553251 - DNA, 54 bp, Artificial; identical to SEQ ID NO: 340247
  Synthetic oligonucleotide

SEQ ID NO: 553252 - DNA, 60 bp, Artificial; identical to SEQ ID NO: 340248
  Synthetic oligonucleotide

SEQ ID NO: 553253 - DNA, 55 bp, Artificial; identical to SEQ ID NO: 16658
  Synthetic oligonucleotide

SEQ ID NO: 553254 - DNA, 54 bp, Artificial; identical to SEQ ID NO: 340255
  Synthetic oligonucleotide

SEQ ID NO: 553255 - DNA, 55 bp, Artificial; identical to SEQ ID NO: 340256
  Synthetic oligonucleotide

SEQ ID NO: 553256 - DNA, 55 bp, Artificial; identical to SEQ ID NO: 340257
  Synthetic oligonucleotide

SEQ ID NO: 553257 - DNA, 56 bp, Artificial; identical to SEQ ID NO: 340259
  Synthetic oligonucleotide

SEQ ID NO: 553258 - DNA, 55 bp, Artificial; identical to SEQ ID NO: 340262
  Synthetic oligonucleotide

SEQ ID NO: 553259 - DNA, 55 bp, Artificial; identical to SEQ ID NO: 340264
  Synthetic oligonucleotide

SEQ ID NO: 553260 - DNA, 55 bp, Artificial; identical to SEQ ID NO: 340266
  Synthetic oligonucleotide

SEQ ID NO: 553261 - DNA, 55 bp, Artificial; identical to SEQ ID NO: 340267
  Synthetic oligonucleotide

SEQ ID NO: 553262 - DNA, 59 bp, Artificial; identical to SEQ ID NO: 340271
  Synthetic oligonucleotide

SEQ ID NO: 553263 - DNA, 54 bp, Artificial; identical to SEQ ID NO: 340274
  Synthetic oligonucleotide

SEQ ID NO: 553264 - DNA, 55 bp, Artificial; identical to SEQ ID NO: 340275
  Synthetic oligonucleotide

SEQ ID NO: 553265 - DNA, 60 bp, Artificial; identical to SEQ ID NO: 340278
  Synthetic oligonucleotide

SEQ ID NO: 553266 - DNA, 58 bp, Artificial; identical to SEQ ID NO: 340282
  Synthetic oligonucleotide

SEQ ID NO: 553267 - DNA, 60 bp, Artificial; identical to SEQ ID NO: 340285
  Synthetic oligonucleotide

SEQ ID NO: 553268 - DNA, 60 bp, Artificial; identical to SEQ ID NO: 340291
  Synthetic oligonucleotide

SEQ ID NO: 553269 - DNA, 58 bp, Artificial; identical to SEQ ID NO: 340296
  Synthetic oligonucleotide

SEQ ID NO: 553270 - DNA, 55 bp, Artificial; identical to SEQ ID NO: 340297
  Synthetic oligonucleotide

SEQ ID NO: 553271 - DNA, 56 bp, Artificial; identical to SEQ ID NO: 340298
  Synthetic oligonucleotide

SEQ ID NO: 553272 - DNA, 55 bp, Artificial; identical to SEQ ID NO: 340300
  Synthetic oligonucleotide

SEQ ID NO: 553273 - DNA, 53 bp, Artificial; identical to SEQ ID NO: 340303
  Synthetic oligonucleotide

SEQ ID NO: 553274 - DNA, 59 bp, Artificial; identical to SEQ ID NO: 340304
  Synthetic oligonucleotide

SEQ ID NO: 553275 - DNA, 55 bp, Artificial; identical to SEQ ID NO: 340305
  Synthetic oligonucleotide

SEQ ID NO: 553276 - DNA, 58 bp, Artificial; identical to SEQ ID NO: 340306
  Synthetic oligonucleotide

SEQ ID NO: 553277 - DNA, 53 bp, Artificial; identical to SEQ ID NO: 340307
  Synthetic oligonucleotide

SEQ ID NO: 553278 - DNA, 59 bp, Artificial; identical to SEQ ID NO: 340308
  Synthetic oligonucleotide

SEQ ID NO: 553279 - DNA, 55 bp, Artificial; identical to SEQ ID NO: 340311
  Synthetic oligonucleotide

SEQ ID NO: 553280 - DNA, 60 bp, Artificial; identical to SEQ ID NO: 10330
  Synthetic oligonucleotide

SEQ ID NO: 553281 - DNA, 60 bp, Artificial; identical to SEQ ID NO: 340313
  Synthetic oligonucleotide

SEQ ID NO: 553282 - DNA, 60 bp, Artificial; identical to SEQ ID NO: 340318
  Synthetic oligonucleotide

SEQ ID NO: 553283 - DNA, 53 bp, Artificial; identical to SEQ ID NO: 340319
  Synthetic oligonucleotide

SEQ ID NO: 553284 - DNA, 54 bp, Artificial; identical to SEQ ID NO: 340321
  Synthetic oligonucleotide

SEQ ID NO: 553285 - DNA, 50 bp, Artificial; identical to SEQ ID NO: 340328
  Synthetic oligonucleotide

SEQ ID NO: 553286 - DNA, 55 bp, Artificial; identical to SEQ ID NO: 340330
  Synthetic oligonucleotide

SEQ ID NO: 553287 - DNA, 54 bp, Artificial; identical to SEQ ID NO: 340331
  Synthetic oligonucleotide

SEQ ID NO: 553288 - DNA, 55 bp, Artificial; identical to SEQ ID NO: 340332
  Synthetic oligonucleotide

SEQ ID NO: 553289 - DNA, 60 bp, Artificial; identical to SEQ ID NO: 340333
  Synthetic oligonucleotide

SEQ ID NO: 553290 - DNA, 55 bp, Artificial; identical to SEQ ID NO: 340334
  Synthetic oligonucleotide

SEQ ID NO: 553291 - DNA, 60 bp, Artificial; identical to SEQ ID NO: 340336
  Synthetic oligonucleotide

SEQ ID NO: 553292 - DNA, 58 bp, Artificial; identical to SEQ ID NO: 340343
  Synthetic oligonucleotide

SEQ ID NO: 553293 - DNA, 60 bp, Artificial; identical to SEQ ID NO: 340344
  Synthetic oligonucleotide

SEQ ID NO: 553294 - DNA, 55 bp, Artificial; identical to SEQ ID NO: 18400
  Synthetic oligonucleotide

SEQ ID NO: 553295 - DNA, 51 bp, Artificial; identical to SEQ ID NO: 340346
  Synthetic oligonucleotide

SEQ ID NO: 553296 - DNA, 60 bp, Artificial; identical to SEQ ID NO: 340349
  Synthetic oligonucleotide

SEQ ID NO: 553297 - DNA, 55 bp, Artificial; identical to SEQ ID NO: 340350
  Synthetic oligonucleotide

SEQ ID NO: 553298 - DNA, 58 bp, Artificial; identical to SEQ ID NO: 340354
  Synthetic oligonucleotide

SEQ ID NO: 553299 - DNA, 52 bp, Artificial; identical to SEQ ID NO: 340355
  Synthetic oligonucleotide

SEQ ID NO: 553300 - DNA, 52 bp, Artificial; identical to SEQ ID NO: 340356
  Synthetic oligonucleotide

SEQ ID NO: 553301 - DNA, 56 bp, Artificial; identical to SEQ ID NO: 340358
  Synthetic oligonucleotide

SEQ ID NO: 553302 - DNA, 60 bp, Artificial; identical to SEQ ID NO: 340359
  Synthetic oligonucleotide

SEQ ID NO: 553303 - DNA, 59 bp, Artificial; identical to SEQ ID NO: 340360
  Synthetic oligonucleotide

SEQ ID NO: 553304 - DNA, 55 bp, Artificial; identical to SEQ ID NO: 340362
  Synthetic oligonucleotide

SEQ ID NO: 553305 - DNA, 54 bp, Artificial; identical to SEQ ID NO: 340363
  Synthetic oligonucleotide

SEQ ID NO: 553306 - DNA, 60 bp, Artificial; identical to SEQ ID NO: 340368
  Synthetic oligonucleotide

SEQ ID NO: 553307 - DNA, 55 bp, Artificial; identical to SEQ ID NO: 340370
  Synthetic oligonucleotide

SEQ ID NO: 553308 - DNA, 55 bp, Artificial; identical to SEQ ID NO: 340373
  Synthetic oligonucleotide

SEQ ID NO: 553309 - DNA, 55 bp, Artificial; identical to SEQ ID NO: 340376
  Synthetic oligonucleotide

SEQ ID NO: 553310 - DNA, 53 bp, Artificial; identical to SEQ ID NO: 340377
  Synthetic oligonucleotide

SEQ ID NO: 553311 - DNA, 54 bp, Artificial; identical to SEQ ID NO: 340379
  Synthetic oligonucleotide

SEQ ID NO: 553312 - DNA, 57 bp, Artificial; identical to SEQ ID NO: 340380
  Synthetic oligonucleotide

SEQ ID NO: 553313 - DNA, 60 bp, Artificial; identical to SEQ ID NO: 340382
  Synthetic oligonucleotide

SEQ ID NO: 553314 - DNA, 52 bp, Artificial; identical to SEQ ID NO: 340384
  Synthetic oligonucleotide

SEQ ID NO: 553315 - DNA, 55 bp, Artificial; identical to SEQ ID NO: 340385
  Synthetic oligonucleotide

SEQ ID NO: 553316 - DNA, 59 bp, Artificial; identical to SEQ ID NO: 340386
  Synthetic oligonucleotide

SEQ ID NO: 553317 - DNA, 55 bp, Artificial; identical to SEQ ID NO: 340388
  Synthetic oligonucleotide

SEQ ID NO: 553318 - DNA, 54 bp, Artificial; identical to SEQ ID NO: 340389
  Synthetic oligonucleotide

SEQ ID NO: 553319 - DNA, 55 bp, Artificial; identical to SEQ ID NO: 340391
  Synthetic oligonucleotide

SEQ ID NO: 553320 - DNA, 55 bp, Artificial; identical to SEQ ID NO: 340393
  Synthetic oligonucleotide

SEQ ID NO: 553321 - DNA, 58 bp, Artificial; identical to SEQ ID NO: 340397
  Synthetic oligonucleotide

SEQ ID NO: 553322 - DNA, 56 bp, Artificial; identical to SEQ ID NO: 6368
  Synthetic oligonucleotide

SEQ ID NO: 553323 - DNA, 60 bp, Artificial; identical to SEQ ID NO: 340400
  Synthetic oligonucleotide

SEQ ID NO: 553324 - DNA, 60 bp, Artificial; identical to SEQ ID NO: 340401
  Synthetic oligonucleotide

SEQ ID NO: 553325 - DNA, 59 bp, Artificial; identical to SEQ ID NO: 340402
  Synthetic oligonucleotide

SEQ ID NO: 553326 - DNA, 56 bp, Artificial; identical to SEQ ID NO: 340405
  Synthetic oligonucleotide

SEQ ID NO: 553327 - DNA, 52 bp, Artificial; identical to SEQ ID NO: 340408
  Synthetic oligonucleotide

SEQ ID NO: 553328 - DNA, 56 bp, Artificial; identical to SEQ ID NO: 340409
  Synthetic oligonucleotide

SEQ ID NO: 553329 - DNA, 55 bp, Artificial; identical to SEQ ID NO: 340412
  Synthetic oligonucleotide

SEQ ID NO: 553330 - DNA, 51 bp, Artificial; identical to SEQ ID NO: 340413
  Synthetic oligonucleotide

SEQ ID NO: 553331 - DNA, 60 bp, Artificial; identical to SEQ ID NO: 340414
  Synthetic oligonucleotide

SEQ ID NO: 553332 - DNA, 53 bp, Artificial; identical to SEQ ID NO: 340416
  Synthetic oligonucleotide

SEQ ID NO: 553333 - DNA, 56 bp, Artificial; identical to SEQ ID NO: 340418
  Synthetic oligonucleotide

SEQ ID NO: 553334 - DNA, 60 bp, Artificial; identical to SEQ ID NO: 13058
  Synthetic oligonucleotide

SEQ ID NO: 553335 - DNA, 55 bp, Artificial; identical to SEQ ID NO: 340421
  Synthetic oligonucleotide

SEQ ID NO: 553336 - DNA, 55 bp, Artificial; identical to SEQ ID NO: 340427
  Synthetic oligonucleotide

SEQ ID NO: 553337 - DNA, 60 bp, Artificial; identical to SEQ ID NO: 340429
  Synthetic oligonucleotide

SEQ ID NO: 553338 - DNA, 57 bp, Artificial; identical to SEQ ID NO: 340431
  Synthetic oligonucleotide

SEQ ID NO: 553339 - DNA, 52 bp, Artificial; identical to SEQ ID NO: 340432
  Synthetic oligonucleotide

SEQ ID NO: 553340 - DNA, 55 bp, Artificial; identical to SEQ ID NO: 340435
  Synthetic oligonucleotide

SEQ ID NO: 553341 - DNA, 60 bp, Artificial; identical to SEQ ID NO: 340436
  Synthetic oligonucleotide

SEQ ID NO: 553342 - DNA, 57 bp, Artificial; identical to SEQ ID NO: 340437
  Synthetic oligonucleotide

SEQ ID NO: 553343 - DNA, 60 bp, Artificial; identical to SEQ ID NO: 340438
  Synthetic oligonucleotide

SEQ ID NO: 553344 - DNA, 60 bp, Artificial; identical to SEQ ID NO: 340439
  Synthetic oligonucleotide

SEQ ID NO: 553345 - DNA, 60 bp, Artificial; identical to SEQ ID NO: 340440
  Synthetic oligonucleotide

SEQ ID NO: 553346 - DNA, 54 bp, Artificial; identical to SEQ ID NO: 340444
  Synthetic oligonucleotide

SEQ ID NO: 553347 - DNA, 58 bp, Artificial; identical to SEQ ID NO: 340445
  Synthetic oligonucleotide

SEQ ID NO: 553348 - DNA, 58 bp, Artificial; identical to SEQ ID NO: 340446
  Synthetic oligonucleotide

SEQ ID NO: 553349 - DNA, 58 bp, Artificial; identical to SEQ ID NO: 340447
  Synthetic oligonucleotide

SEQ ID NO: 553350 - DNA, 60 bp, Artificial; identical to SEQ ID NO: 340449
  Synthetic oligonucleotide

SEQ ID NO: 553351 - DNA, 56 bp, Artificial; identical to SEQ ID NO: 7218
  Synthetic oligonucleotide

SEQ ID NO: 553352 - DNA, 51 bp, Artificial; identical to SEQ ID NO: 8535
  Synthetic oligonucleotide

SEQ ID NO: 553353 - DNA, 52 bp, Artificial; identical to SEQ ID NO: 340451
  Synthetic oligonucleotide

SEQ ID NO: 553354 - DNA, 55 bp, Artificial; identical to SEQ ID NO: 14083
  Synthetic oligonucleotide

SEQ ID NO: 553355 - DNA, 55 bp, Artificial; identical to SEQ ID NO: 340458
  Synthetic oligonucleotide

SEQ ID NO: 553356 - DNA, 60 bp, Artificial; identical to SEQ ID NO: 340460
  Synthetic oligonucleotide

SEQ ID NO: 553357 - DNA, 60 bp, Artificial; identical to SEQ ID NO: 12588
  Synthetic oligonucleotide

SEQ ID NO: 553358 - DNA, 60 bp, Artificial; identical to SEQ ID NO: 340464
  Synthetic oligonucleotide

SEQ ID NO: 553359 - DNA, 57 bp, Artificial; identical to SEQ ID NO: 340466
  Synthetic oligonucleotide

SEQ ID NO: 553360 - DNA, 60 bp, Artificial; identical to SEQ ID NO: 340469
  Synthetic oligonucleotide

SEQ ID NO: 553361 - DNA, 58 bp, Artificial; identical to SEQ ID NO: 340471
  Synthetic oligonucleotide

SEQ ID NO: 553362 - DNA, 60 bp, Artificial; identical to SEQ ID NO: 340473
  Synthetic oligonucleotide

SEQ ID NO: 553363 - DNA, 55 bp, Artificial; identical to SEQ ID NO: 340475
  Synthetic oligonucleotide

SEQ ID NO: 553364 - DNA, 54 bp, Artificial; identical to SEQ ID NO: 340478
  Synthetic oligonucleotide

SEQ ID NO: 553365 - DNA, 60 bp, Artificial; identical to SEQ ID NO: 340479
  Synthetic oligonucleotide

SEQ ID NO: 553366 - DNA, 55 bp, Artificial; identical to SEQ ID NO: 340480
  Synthetic oligonucleotide

SEQ ID NO: 553367 - DNA, 55 bp, Artificial; identical to SEQ ID NO: 340481
  Synthetic oligonucleotide

SEQ ID NO: 553368 - DNA, 55 bp, Artificial; identical to SEQ ID NO: 340483
  Synthetic oligonucleotide

SEQ ID NO: 553369 - DNA, 60 bp, Artificial; identical to SEQ ID NO: 340484
  Synthetic oligonucleotide

SEQ ID NO: 553370 - DNA, 55 bp, Artificial; identical to SEQ ID NO: 340486
  Synthetic oligonucleotide

SEQ ID NO: 553371 - DNA, 57 bp, Artificial; identical to SEQ ID NO: 340487
  Synthetic oligonucleotide

SEQ ID NO: 553372 - DNA, 53 bp, Artificial; identical to SEQ ID NO: 340488
  Synthetic oligonucleotide

SEQ ID NO: 553373 - DNA, 60 bp, Artificial; identical to SEQ ID NO: 340491
  Synthetic oligonucleotide

SEQ ID NO: 553374 - DNA, 55 bp, Artificial; identical to SEQ ID NO: 340492
  Synthetic oligonucleotide

SEQ ID NO: 553375 - DNA, 55 bp, Artificial; identical to SEQ ID NO: 10721
  Synthetic oligonucleotide

SEQ ID NO: 553376 - DNA, 55 bp, Artificial; identical to SEQ ID NO: 340495
  Synthetic oligonucleotide

SEQ ID NO: 553377 - DNA, 55 bp, Artificial; identical to SEQ ID NO: 340502
  Synthetic oligonucleotide

SEQ ID NO: 553378 - DNA, 50 bp, Artificial; identical to SEQ ID NO: 340503
  Synthetic oligonucleotide

SEQ ID NO: 553379 - DNA, 56 bp, Artificial; identical to SEQ ID NO: 340511
  Synthetic oligonucleotide

SEQ ID NO: 553380 - DNA, 60 bp, Artificial; identical to SEQ ID NO: 340512
  Synthetic oligonucleotide

SEQ ID NO: 553381 - DNA, 55 bp, Artificial; identical to SEQ ID NO: 340516
  Synthetic oligonucleotide

SEQ ID NO: 553382 - DNA, 58 bp, Artificial; identical to SEQ ID NO: 340518
  Synthetic oligonucleotide

SEQ ID NO: 553383 - DNA, 51 bp, Artificial; identical to SEQ ID NO: 340519
  Synthetic oligonucleotide

SEQ ID NO: 553384 - DNA, 51 bp, Artificial; identical to SEQ ID NO: 340521
  Synthetic oligonucleotide

SEQ ID NO: 553385 - DNA, 60 bp, Artificial; identical to SEQ ID NO: 117521
  Synthetic oligonucleotide

SEQ ID NO: 553386 - DNA, 55 bp, Artificial; identical to SEQ ID NO: 340528
  Synthetic oligonucleotide

SEQ ID NO: 553387 - DNA, 60 bp, Artificial; identical to SEQ ID NO: 340529
  Synthetic oligonucleotide

SEQ ID NO: 553388 - DNA, 60 bp, Artificial; identical to SEQ ID NO: 340536
  Synthetic oligonucleotide

SEQ ID NO: 553389 - DNA, 55 bp, Artificial; identical to SEQ ID NO: 340538
  Synthetic oligonucleotide

SEQ ID NO: 553390 - DNA, 60 bp, Artificial; identical to SEQ ID NO: 340540
  Synthetic oligonucleotide

SEQ ID NO: 553391 - DNA, 55 bp, Artificial; identical to SEQ ID NO: 340541
  Synthetic oligonucleotide

SEQ ID NO: 553392 - DNA, 60 bp, Artificial; identical to SEQ ID NO: 340543
  Synthetic oligonucleotide

SEQ ID NO: 553393 - DNA, 57 bp, Artificial; identical to SEQ ID NO: 340546
  Synthetic oligonucleotide

SEQ ID NO: 553394 - DNA, 60 bp, Artificial; identical to SEQ ID NO: 340547
  Synthetic oligonucleotide

SEQ ID NO: 553395 - DNA, 58 bp, Artificial; identical to SEQ ID NO: 340550
  Synthetic oligonucleotide

SEQ ID NO: 553396 - DNA, 59 bp, Artificial; identical to SEQ ID NO: 340551
  Synthetic oligonucleotide

SEQ ID NO: 553397 - DNA, 54 bp, Artificial; identical to SEQ ID NO: 340554
  Synthetic oligonucleotide

SEQ ID NO: 553398 - DNA, 60 bp, Artificial; identical to SEQ ID NO: 340557
  Synthetic oligonucleotide

SEQ ID NO: 553399 - DNA, 60 bp, Artificial; identical to SEQ ID NO: 340561
  Synthetic oligonucleotide

SEQ ID NO: 553400 - DNA, 59 bp, Artificial; identical to SEQ ID NO: 340563
  Synthetic oligonucleotide

SEQ ID NO: 553401 - DNA, 55 bp, Artificial; identical to SEQ ID NO: 340564
  Synthetic oligonucleotide

SEQ ID NO: 553402 - DNA, 55 bp, Artificial; identical to SEQ ID NO: 340566
  Synthetic oligonucleotide

SEQ ID NO: 553403 - DNA, 55 bp, Artificial; identical to SEQ ID NO: 340567
  Synthetic oligonucleotide

SEQ ID NO: 553404 - DNA, 56 bp, Artificial; identical to SEQ ID NO: 340568
  Synthetic oligonucleotide

SEQ ID NO: 553405 - DNA, 60 bp, Artificial; identical to SEQ ID NO: 340569
  Synthetic oligonucleotide

SEQ ID NO: 553406 - DNA, 57 bp, Artificial; identical to SEQ ID NO: 340573
  Synthetic oligonucleotide

SEQ ID NO: 553407 - DNA, 60 bp, Artificial; identical to SEQ ID NO: 340577
  Synthetic oligonucleotide

SEQ ID NO: 553408 - DNA, 51 bp, Artificial; identical to SEQ ID NO: 340579
  Synthetic oligonucleotide

SEQ ID NO: 553409 - DNA, 57 bp, Artificial; identical to SEQ ID NO: 340580
  Synthetic oligonucleotide

SEQ ID NO: 553410 - DNA, 51 bp, Artificial; identical to SEQ ID NO: 340581
  Synthetic oligonucleotide

SEQ ID NO: 553411 - DNA, 55 bp, Artificial; identical to SEQ ID NO: 340582
  Synthetic oligonucleotide

SEQ ID NO: 553412 - DNA, 54 bp, Artificial; identical to SEQ ID NO: 340583
  Synthetic oligonucleotide

SEQ ID NO: 553413 - DNA, 60 bp, Artificial; identical to SEQ ID NO: 340584
  Synthetic oligonucleotide

SEQ ID NO: 553414 - DNA, 59 bp, Artificial; identical to SEQ ID NO: 340591
  Synthetic oligonucleotide

SEQ ID NO: 553415 - DNA, 56 bp, Artificial; identical to SEQ ID NO: 340592
  Synthetic oligonucleotide

SEQ ID NO: 553416 - DNA, 60 bp, Artificial; identical to SEQ ID NO: 340595
  Synthetic oligonucleotide

SEQ ID NO: 553417 - DNA, 52 bp, Artificial; identical to SEQ ID NO: 340597
  Synthetic oligonucleotide

SEQ ID NO: 553418 - DNA, 55 bp, Artificial; identical to SEQ ID NO: 340600
  Synthetic oligonucleotide

SEQ ID NO: 553419 - DNA, 53 bp, Artificial; identical to SEQ ID NO: 340602
  Synthetic oligonucleotide

SEQ ID NO: 553420 - DNA, 55 bp, Artificial; identical to SEQ ID NO: 8369
  Synthetic oligonucleotide

SEQ ID NO: 553421 - DNA, 59 bp, Artificial; identical to SEQ ID NO: 340603
  Synthetic oligonucleotide

SEQ ID NO: 553422 - DNA, 60 bp, Artificial; identical to SEQ ID NO: 340604
  Synthetic oligonucleotide

SEQ ID NO: 553423 - DNA, 60 bp, Artificial; identical to SEQ ID NO: 340607
  Synthetic oligonucleotide

SEQ ID NO: 553424 - DNA, 55 bp, Artificial; identical to SEQ ID NO: 340608
  Synthetic oligonucleotide

SEQ ID NO: 553425 - DNA, 58 bp, Artificial; identical to SEQ ID NO: 340610
  Synthetic oligonucleotide

SEQ ID NO: 553426 - DNA, 58 bp, Artificial; identical to SEQ ID NO: 340614
  Synthetic oligonucleotide

SEQ ID NO: 553427 - DNA, 56 bp, Artificial; identical to SEQ ID NO: 340615
  Synthetic oligonucleotide

SEQ ID NO: 553428 - DNA, 51 bp, Artificial; identical to SEQ ID NO: 340621
  Synthetic oligonucleotide

SEQ ID NO: 553429 - DNA, 55 bp, Artificial; identical to SEQ ID NO: 340622
  Synthetic oligonucleotide

SEQ ID NO: 553430 - DNA, 54 bp, Artificial; identical to SEQ ID NO: 340631
  Synthetic oligonucleotide

SEQ ID NO: 553431 - DNA, 55 bp, Artificial; identical to SEQ ID NO: 340634
  Synthetic oligonucleotide

SEQ ID NO: 553432 - DNA, 60 bp, Artificial; identical to SEQ ID NO: 11926
  Synthetic oligonucleotide

SEQ ID NO: 553433 - DNA, 52 bp, Artificial; identical to SEQ ID NO: 340637
  Synthetic oligonucleotide

SEQ ID NO: 553434 - DNA, 55 bp, Artificial; identical to SEQ ID NO: 340638
  Synthetic oligonucleotide

SEQ ID NO: 553435 - DNA, 55 bp, Artificial; identical to SEQ ID NO: 340643
  Synthetic oligonucleotide

SEQ ID NO: 553436 - DNA, 55 bp, Artificial; identical to SEQ ID NO: 340644
  Synthetic oligonucleotide

SEQ ID NO: 553437 - DNA, 59 bp, Artificial; identical to SEQ ID NO: 340646
  Synthetic oligonucleotide

SEQ ID NO: 553438 - DNA, 59 bp, Artificial; identical to SEQ ID NO: 340647
  Synthetic oligonucleotide

SEQ ID NO: 553439 - DNA, 52 bp, Artificial; identical to SEQ ID NO: 340648
  Synthetic oligonucleotide

SEQ ID NO: 553440 - DNA, 52 bp, Artificial; identical to SEQ ID NO: 340649
  Synthetic oligonucleotide

SEQ ID NO: 553441 - DNA, 57 bp, Artificial; identical to SEQ ID NO: 340654
  Synthetic oligonucleotide

SEQ ID NO: 553442 - DNA, 60 bp, Artificial; identical to SEQ ID NO: 340656
  Synthetic oligonucleotide

SEQ ID NO: 553443 - DNA, 60 bp, Artificial; identical to SEQ ID NO: 340659
  Synthetic oligonucleotide

SEQ ID NO: 553444 - DNA, 55 bp, Artificial; identical to SEQ ID NO: 340660
  Synthetic oligonucleotide

SEQ ID NO: 553445 - DNA, 60 bp, Artificial; identical to SEQ ID NO: 340661
  Synthetic oligonucleotide

SEQ ID NO: 553446 - DNA, 60 bp, Artificial; identical to SEQ ID NO: 340663
  Synthetic oligonucleotide

SEQ ID NO: 553447 - DNA, 60 bp, Artificial; identical to SEQ ID NO: 12472
  Synthetic oligonucleotide

SEQ ID NO: 553448 - DNA, 54 bp, Artificial; identical to SEQ ID NO: 340675
  Synthetic oligonucleotide

SEQ ID NO: 553449 - DNA, 53 bp, Artificial; identical to SEQ ID NO: 340676
  Synthetic oligonucleotide

SEQ ID NO: 553450 - DNA, 55 bp, Artificial; identical to SEQ ID NO: 340677
  Synthetic oligonucleotide

SEQ ID NO: 553451 - DNA, 60 bp, Artificial; identical to SEQ ID NO: 340679
  Synthetic oligonucleotide

SEQ ID NO: 553452 - DNA, 60 bp, Artificial; identical to SEQ ID NO: 340681
  Synthetic oligonucleotide

SEQ ID NO: 553453 - DNA, 55 bp, Artificial; identical to SEQ ID NO: 340682
  Synthetic oligonucleotide

SEQ ID NO: 553454 - DNA, 54 bp, Artificial; identical to SEQ ID NO: 340685
  Synthetic oligonucleotide

SEQ ID NO: 553455 - DNA, 56 bp, Artificial; identical to SEQ ID NO: 340686
  Synthetic oligonucleotide

SEQ ID NO: 553456 - DNA, 57 bp, Artificial; identical to SEQ ID NO: 340687
  Synthetic oligonucleotide

SEQ ID NO: 553457 - DNA, 56 bp, Artificial; identical to SEQ ID NO: 340689
  Synthetic oligonucleotide

SEQ ID NO: 553458 - DNA, 56 bp, Artificial; identical to SEQ ID NO: 340695
  Synthetic oligonucleotide

SEQ ID NO: 553459 - DNA, 60 bp, Artificial; identical to SEQ ID NO: 340699
  Synthetic oligonucleotide

SEQ ID NO: 553460 - DNA, 58 bp, Artificial; identical to SEQ ID NO: 340700
  Synthetic oligonucleotide

SEQ ID NO: 553461 - DNA, 55 bp, Artificial; identical to SEQ ID NO: 340703
  Synthetic oligonucleotide

SEQ ID NO: 553462 - DNA, 55 bp, Artificial; identical to SEQ ID NO: 340704
  Synthetic oligonucleotide

SEQ ID NO: 553463 - DNA, 56 bp, Artificial; identical to SEQ ID NO: 340707
  Synthetic oligonucleotide

SEQ ID NO: 553464 - DNA, 60 bp, Artificial; identical to SEQ ID NO: 340710
  Synthetic oligonucleotide

SEQ ID NO: 553465 - DNA, 55 bp, Artificial; identical to SEQ ID NO: 340712
  Synthetic oligonucleotide

SEQ ID NO: 553466 - DNA, 52 bp, Artificial; identical to SEQ ID NO: 340719
  Synthetic oligonucleotide

SEQ ID NO: 553467 - DNA, 55 bp, Artificial; identical to SEQ ID NO: 340726
  Synthetic oligonucleotide

SEQ ID NO: 553468 - DNA, 59 bp, Artificial; identical to SEQ ID NO: 340727
  Synthetic oligonucleotide

SEQ ID NO: 553469 - DNA, 59 bp, Artificial; identical to SEQ ID NO: 340728
  Synthetic oligonucleotide

SEQ ID NO: 553470 - DNA, 58 bp, Artificial; identical to SEQ ID NO: 340733
  Synthetic oligonucleotide

SEQ ID NO: 553471 - DNA, 59 bp, Artificial; identical to SEQ ID NO: 340736
  Synthetic oligonucleotide

SEQ ID NO: 553472 - DNA, 52 bp, Artificial; identical to SEQ ID NO: 340740
  Synthetic oligonucleotide

SEQ ID NO: 553473 - DNA, 51 bp, Artificial; identical to SEQ ID NO: 340741
  Synthetic oligonucleotide

SEQ ID NO: 553474 - DNA, 57 bp, Artificial; identical to SEQ ID NO: 340744
  Synthetic oligonucleotide

SEQ ID NO: 553475 - DNA, 54 bp, Artificial; identical to SEQ ID NO: 340745
  Synthetic oligonucleotide

SEQ ID NO: 553476 - DNA, 55 bp, Artificial; identical to SEQ ID NO: 340746
  Synthetic oligonucleotide

SEQ ID NO: 553477 - DNA, 58 bp, Artificial; identical to SEQ ID NO: 340749
  Synthetic oligonucleotide

SEQ ID NO: 553478 - DNA, 60 bp, Artificial; identical to SEQ ID NO: 340751
  Synthetic oligonucleotide

SEQ ID NO: 553479 - DNA, 59 bp, Artificial; identical to SEQ ID NO: 340757
  Synthetic oligonucleotide

SEQ ID NO: 553480 - DNA, 57 bp, Artificial; identical to SEQ ID NO: 340758
  Synthetic oligonucleotide

SEQ ID NO: 553481 - DNA, 58 bp, Artificial; identical to SEQ ID NO: 340766
  Synthetic oligonucleotide

SEQ ID NO: 553482 - DNA, 51 bp, Artificial; identical to SEQ ID NO: 340768
  Synthetic oligonucleotide

SEQ ID NO: 553483 - DNA, 58 bp, Artificial; identical to SEQ ID NO: 340769
  Synthetic oligonucleotide

SEQ ID NO: 553484 - DNA, 60 bp, Artificial; identical to SEQ ID NO: 340773
  Synthetic oligonucleotide

SEQ ID NO: 553485 - DNA, 60 bp, Artificial; identical to SEQ ID NO: 340778
  Synthetic oligonucleotide

SEQ ID NO: 553486 - DNA, 60 bp, Artificial; identical to SEQ ID NO: 340779
  Synthetic oligonucleotide

SEQ ID NO: 553487 - DNA, 60 bp, Artificial; identical to SEQ ID NO: 340780
  Synthetic oligonucleotide

SEQ ID NO: 553488 - DNA, 60 bp, Artificial; identical to SEQ ID NO: 340783
  Synthetic oligonucleotide

SEQ ID NO: 553489 - DNA, 60 bp, Artificial; identical to SEQ ID NO: 340785
  Synthetic oligonucleotide

SEQ ID NO: 553490 - DNA, 55 bp, Artificial; identical to SEQ ID NO: 340786
  Synthetic oligonucleotide

SEQ ID NO: 553491 - DNA, 59 bp, Artificial; identical to SEQ ID NO: 340791
  Synthetic oligonucleotide

SEQ ID NO: 553492 - DNA, 55 bp, Artificial; identical to SEQ ID NO: 340793
  Synthetic oligonucleotide

SEQ ID NO: 553493 - DNA, 58 bp, Artificial; identical to SEQ ID NO: 340799
  Synthetic oligonucleotide

SEQ ID NO: 553494 - DNA, 55 bp, Artificial; identical to SEQ ID NO: 340802
  Synthetic oligonucleotide

SEQ ID NO: 553495 - DNA, 60 bp, Artificial; identical to SEQ ID NO: 340803
  Synthetic oligonucleotide

SEQ ID NO: 553496 - DNA, 60 bp, Artificial; identical to SEQ ID NO: 340807
  Synthetic oligonucleotide

SEQ ID NO: 553497 - DNA, 60 bp, Artificial; identical to SEQ ID NO: 340814
  Synthetic oligonucleotide

SEQ ID NO: 553498 - DNA, 55 bp, Artificial; identical to SEQ ID NO: 340815
  Synthetic oligonucleotide

SEQ ID NO: 553499 - DNA, 51 bp, Artificial; identical to SEQ ID NO: 340818
  Synthetic oligonucleotide

SEQ ID NO: 553500 - DNA, 53 bp, Artificial; identical to SEQ ID NO: 340820
  Synthetic oligonucleotide

SEQ ID NO: 553501 - DNA, 50 bp, Artificial; identical to SEQ ID NO: 340821
  Synthetic oligonucleotide

SEQ ID NO: 553502 - DNA, 52 bp, Artificial; identical to SEQ ID NO: 340825
  Synthetic oligonucleotide

SEQ ID NO: 553503 - DNA, 58 bp, Artificial; identical to SEQ ID NO: 340826
  Synthetic oligonucleotide

SEQ ID NO: 553504 - DNA, 52 bp, Artificial; identical to SEQ ID NO: 340827
  Synthetic oligonucleotide

SEQ ID NO: 553505 - DNA, 57 bp, Artificial; identical to SEQ ID NO: 340830
  Synthetic oligonucleotide

SEQ ID NO: 553506 - DNA, 53 bp, Artificial; identical to SEQ ID NO: 14834
  Synthetic oligonucleotide

SEQ ID NO: 553507 - DNA, 54 bp, Artificial; identical to SEQ ID NO: 340836
  Synthetic oligonucleotide

SEQ ID NO: 553508 - DNA, 55 bp, Artificial; identical to SEQ ID NO: 340840
  Synthetic oligonucleotide

SEQ ID NO: 553509 - DNA, 59 bp, Artificial; identical to SEQ ID NO: 340842
  Synthetic oligonucleotide

SEQ ID NO: 553510 - DNA, 52 bp, Artificial; identical to SEQ ID NO: 340843
  Synthetic oligonucleotide

SEQ ID NO: 553511 - DNA, 59 bp, Artificial; identical to SEQ ID NO: 340844
  Synthetic oligonucleotide

SEQ ID NO: 553512 - DNA, 55 bp, Artificial; identical to SEQ ID NO: 340846
  Synthetic oligonucleotide

SEQ ID NO: 553513 - DNA, 60 bp, Artificial; identical to SEQ ID NO: 340851
  Synthetic oligonucleotide

SEQ ID NO: 553514 - DNA, 53 bp, Artificial; identical to SEQ ID NO: 340852
  Synthetic oligonucleotide

SEQ ID NO: 553515 - DNA, 58 bp, Artificial; identical to SEQ ID NO: 340856
  Synthetic oligonucleotide

SEQ ID NO: 553516 - DNA, 60 bp, Artificial; identical to SEQ ID NO: 121145
  Synthetic oligonucleotide

SEQ ID NO: 553517 - DNA, 55 bp, Artificial; identical to SEQ ID NO: 340857
  Synthetic oligonucleotide

SEQ ID NO: 553518 - DNA, 60 bp, Artificial; identical to SEQ ID NO: 340858
  Synthetic oligonucleotide

SEQ ID NO: 553519 - DNA, 60 bp, Artificial; identical to SEQ ID NO: 340859
  Synthetic oligonucleotide

SEQ ID NO: 553520 - DNA, 50 bp, Artificial; identical to SEQ ID NO: 340860
  Synthetic oligonucleotide

SEQ ID NO: 553521 - DNA, 60 bp, Artificial; identical to SEQ ID NO: 340861
  Synthetic oligonucleotide

SEQ ID NO: 553522 - DNA, 59 bp, Artificial; identical to SEQ ID NO: 340867
  Synthetic oligonucleotide

SEQ ID NO: 553523 - DNA, 55 bp, Artificial; identical to SEQ ID NO: 6866
  Synthetic oligonucleotide

SEQ ID NO: 553524 - DNA, 55 bp, Artificial; identical to SEQ ID NO: 6589
  Synthetic oligonucleotide

SEQ ID NO: 553525 - DNA, 60 bp, Artificial; identical to SEQ ID NO: 340868
  Synthetic oligonucleotide

SEQ ID NO: 553526 - DNA, 55 bp, Artificial; identical to SEQ ID NO: 340870
  Synthetic oligonucleotide

SEQ ID NO: 553527 - DNA, 59 bp, Artificial; identical to SEQ ID NO: 340873
  Synthetic oligonucleotide

SEQ ID NO: 553528 - DNA, 56 bp, Artificial; identical to SEQ ID NO: 340874
  Synthetic oligonucleotide

SEQ ID NO: 553529 - DNA, 55 bp, Artificial; identical to SEQ ID NO: 340875
  Synthetic oligonucleotide

SEQ ID NO: 553530 - DNA, 60 bp, Artificial; identical to SEQ ID NO: 340876
  Synthetic oligonucleotide

SEQ ID NO: 553531 - DNA, 58 bp, Artificial; identical to SEQ ID NO: 340879
  Synthetic oligonucleotide

SEQ ID NO: 553532 - DNA, 55 bp, Artificial; identical to SEQ ID NO: 340881
  Synthetic oligonucleotide

SEQ ID NO: 553533 - DNA, 58 bp, Artificial; identical to SEQ ID NO: 340882
  Synthetic oligonucleotide

SEQ ID NO: 553534 - DNA, 60 bp, Artificial; identical to SEQ ID NO: 340884
  Synthetic oligonucleotide

SEQ ID NO: 553535 - DNA, 54 bp, Artificial; identical to SEQ ID NO: 16994
  Synthetic oligonucleotide

SEQ ID NO: 553536 - DNA, 55 bp, Artificial; identical to SEQ ID NO: 10522
  Synthetic oligonucleotide

SEQ ID NO: 553537 - DNA, 60 bp, Artificial; identical to SEQ ID NO: 340891
  Synthetic oligonucleotide

SEQ ID NO: 553538 - DNA, 55 bp, Artificial; identical to SEQ ID NO: 340892
  Synthetic oligonucleotide

SEQ ID NO: 553539 - DNA, 55 bp, Artificial; identical to SEQ ID NO: 340893
  Synthetic oligonucleotide

SEQ ID NO: 553540 - DNA, 60 bp, Artificial; identical to SEQ ID NO: 340894
  Synthetic oligonucleotide

SEQ ID NO: 553541 - DNA, 60 bp, Artificial; identical to SEQ ID NO: 9414
  Synthetic oligonucleotide

SEQ ID NO: 553542 - DNA, 60 bp, Artificial; identical to SEQ ID NO: 340896
  Synthetic oligonucleotide

SEQ ID NO: 553543 - DNA, 55 bp, Artificial; identical to SEQ ID NO: 340901
  Synthetic oligonucleotide

SEQ ID NO: 553544 - DNA, 57 bp, Artificial; identical to SEQ ID NO: 340906
  Synthetic oligonucleotide

SEQ ID NO: 553545 - DNA, 54 bp, Artificial; identical to SEQ ID NO: 340909
  Synthetic oligonucleotide

SEQ ID NO: 553546 - DNA, 55 bp, Artificial; identical to SEQ ID NO: 340910
  Synthetic oligonucleotide

SEQ ID NO: 553547 - DNA, 58 bp, Artificial; identical to SEQ ID NO: 340912
  Synthetic oligonucleotide

SEQ ID NO: 553548 - DNA, 57 bp, Artificial; identical to SEQ ID NO: 340914
  Synthetic oligonucleotide

SEQ ID NO: 553549 - DNA, 56 bp, Artificial; identical to SEQ ID NO: 340918
  Synthetic oligonucleotide

SEQ ID NO: 553550 - DNA, 55 bp, Artificial; identical to SEQ ID NO: 340923
  Synthetic oligonucleotide

SEQ ID NO: 553551 - DNA, 55 bp, Artificial; identical to SEQ ID NO: 340927
  Synthetic oligonucleotide

SEQ ID NO: 553552 - DNA, 52 bp, Artificial; identical to SEQ ID NO: 340929
  Synthetic oligonucleotide

SEQ ID NO: 553553 - DNA, 60 bp, Artificial; identical to SEQ ID NO: 340931
  Synthetic oligonucleotide

SEQ ID NO: 553554 - DNA, 55 bp, Artificial; identical to SEQ ID NO: 340932
  Synthetic oligonucleotide

SEQ ID NO: 553555 - DNA, 60 bp, Artificial; identical to SEQ ID NO: 340933
  Synthetic oligonucleotide

SEQ ID NO: 553556 - DNA, 55 bp, Artificial; identical to SEQ ID NO: 340937
  Synthetic oligonucleotide

SEQ ID NO: 553557 - DNA, 55 bp, Artificial; identical to SEQ ID NO: 340938
  Synthetic oligonucleotide

SEQ ID NO: 553558 - DNA, 60 bp, Artificial; identical to SEQ ID NO: 340941
  Synthetic oligonucleotide

SEQ ID NO: 553559 - DNA, 60 bp, Artificial; identical to SEQ ID NO: 340942
  Synthetic oligonucleotide

SEQ ID NO: 553560 - DNA, 54 bp, Artificial; identical to SEQ ID NO: 340944
  Synthetic oligonucleotide

SEQ ID NO: 553561 - DNA, 51 bp, Artificial; identical to SEQ ID NO: 340945
  Synthetic oligonucleotide

SEQ ID NO: 553562 - DNA, 55 bp, Artificial; identical to SEQ ID NO: 340947
  Synthetic oligonucleotide

SEQ ID NO: 553563 - DNA, 57 bp, Artificial; identical to SEQ ID NO: 340948
  Synthetic oligonucleotide

SEQ ID NO: 553564 - DNA, 55 bp, Artificial; identical to SEQ ID NO: 340949
  Synthetic oligonucleotide

SEQ ID NO: 553565 - DNA, 55 bp, Artificial; identical to SEQ ID NO: 340950
  Synthetic oligonucleotide

SEQ ID NO: 553566 - DNA, 57 bp, Artificial; identical to SEQ ID NO: 340953
  Synthetic oligonucleotide

SEQ ID NO: 553567 - DNA, 55 bp, Artificial; identical to SEQ ID NO: 340956
  Synthetic oligonucleotide

SEQ ID NO: 553568 - DNA, 58 bp, Artificial; identical to SEQ ID NO: 340959
  Synthetic oligonucleotide

SEQ ID NO: 553569 - DNA, 54 bp, Artificial; identical to SEQ ID NO: 340961
  Synthetic oligonucleotide

SEQ ID NO: 553570 - DNA, 55 bp, Artificial; identical to SEQ ID NO: 340964
  Synthetic oligonucleotide

SEQ ID NO: 553571 - DNA, 59 bp, Artificial; identical to SEQ ID NO: 340967
  Synthetic oligonucleotide

SEQ ID NO: 553572 - DNA, 58 bp, Artificial; identical to SEQ ID NO: 340969
  Synthetic oligonucleotide

SEQ ID NO: 553573 - DNA, 60 bp, Artificial; identical to SEQ ID NO: 340970
  Synthetic oligonucleotide

SEQ ID NO: 553574 - DNA, 57 bp, Artificial; identical to SEQ ID NO: 340972
  Synthetic oligonucleotide

SEQ ID NO: 553575 - DNA, 55 bp, Artificial; identical to SEQ ID NO: 340974
  Synthetic oligonucleotide

SEQ ID NO: 553576 - DNA, 55 bp, Artificial; identical to SEQ ID NO: 340975
  Synthetic oligonucleotide

SEQ ID NO: 553577 - DNA, 60 bp, Artificial; identical to SEQ ID NO: 340976
  Synthetic oligonucleotide

SEQ ID NO: 553578 - DNA, 55 bp, Artificial; identical to SEQ ID NO: 340977
  Synthetic oligonucleotide

SEQ ID NO: 553579 - DNA, 60 bp, Artificial; identical to SEQ ID NO: 340981
  Synthetic oligonucleotide

SEQ ID NO: 553580 - DNA, 55 bp, Artificial; identical to SEQ ID NO: 340983
  Synthetic oligonucleotide

SEQ ID NO: 553581 - DNA, 57 bp, Artificial; identical to SEQ ID NO: 340985
  Synthetic oligonucleotide

SEQ ID NO: 553582 - DNA, 60 bp, Artificial; identical to SEQ ID NO: 340987
  Synthetic oligonucleotide

SEQ ID NO: 553583 - DNA, 57 bp, Artificial; identical to SEQ ID NO: 340988
  Synthetic oligonucleotide

SEQ ID NO: 553584 - DNA, 57 bp, Artificial; identical to SEQ ID NO: 16255
  Synthetic oligonucleotide

SEQ ID NO: 553585 - DNA, 59 bp, Artificial; identical to SEQ ID NO: 340998
  Synthetic oligonucleotide

SEQ ID NO: 553586 - DNA, 60 bp, Artificial; identical to SEQ ID NO: 340999
  Synthetic oligonucleotide

SEQ ID NO: 553587 - DNA, 52 bp, Artificial; identical to SEQ ID NO: 341000
  Synthetic oligonucleotide

SEQ ID NO: 553588 - DNA, 55 bp, Artificial; identical to SEQ ID NO: 341001
  Synthetic oligonucleotide

SEQ ID NO: 553589 - DNA, 60 bp, Artificial; identical to SEQ ID NO: 341002
  Synthetic oligonucleotide

SEQ ID NO: 553590 - DNA, 60 bp, Artificial; identical to SEQ ID NO: 341003
  Synthetic oligonucleotide

SEQ ID NO: 553591 - DNA, 58 bp, Artificial; identical to SEQ ID NO: 341004
  Synthetic oligonucleotide

SEQ ID NO: 553592 - DNA, 60 bp, Artificial; identical to SEQ ID NO: 341006
  Synthetic oligonucleotide

SEQ ID NO: 553593 - DNA, 60 bp, Artificial; identical to SEQ ID NO: 341007
  Synthetic oligonucleotide

SEQ ID NO: 553594 - DNA, 51 bp, Artificial; identical to SEQ ID NO: 341009
  Synthetic oligonucleotide

SEQ ID NO: 553595 - DNA, 60 bp, Artificial; identical to SEQ ID NO: 341013
  Synthetic oligonucleotide

SEQ ID NO: 553596 - DNA, 55 bp, Artificial; identical to SEQ ID NO: 341015
  Synthetic oligonucleotide

SEQ ID NO: 553597 - DNA, 55 bp, Artificial; identical to SEQ ID NO: 341018
  Synthetic oligonucleotide

SEQ ID NO: 553598 - DNA, 55 bp, Artificial; identical to SEQ ID NO: 341020
  Synthetic oligonucleotide

SEQ ID NO: 553599 - DNA, 55 bp, Artificial; identical to SEQ ID NO: 341021
  Synthetic oligonucleotide

SEQ ID NO: 553600 - DNA, 60 bp, Artificial; identical to SEQ ID NO: 341030
  Synthetic oligonucleotide

SEQ ID NO: 553601 - DNA, 60 bp, Artificial; identical to SEQ ID NO: 341033
  Synthetic oligonucleotide

SEQ ID NO: 553602 - DNA, 57 bp, Artificial; identical to SEQ ID NO: 341035
  Synthetic oligonucleotide

SEQ ID NO: 553603 - DNA, 60 bp, Artificial; identical to SEQ ID NO: 341039
  Synthetic oligonucleotide

SEQ ID NO: 553604 - DNA, 60 bp, Artificial; identical to SEQ ID NO: 341040
  Synthetic oligonucleotide

SEQ ID NO: 553605 - DNA, 60 bp, Artificial; identical to SEQ ID NO: 341041
  Synthetic oligonucleotide

SEQ ID NO: 553606 - DNA, 59 bp, Artificial; identical to SEQ ID NO: 341044
  Synthetic oligonucleotide

SEQ ID NO: 553607 - DNA, 55 bp, Artificial; identical to SEQ ID NO: 341045
  Synthetic oligonucleotide

SEQ ID NO: 553608 - DNA, 60 bp, Artificial; identical to SEQ ID NO: 11887
  Synthetic oligonucleotide

SEQ ID NO: 553609 - DNA, 54 bp, Artificial; identical to SEQ ID NO: 341049
  Synthetic oligonucleotide

SEQ ID NO: 553610 - DNA, 51 bp, Artificial; identical to SEQ ID NO: 341051
  Synthetic oligonucleotide

SEQ ID NO: 553611 - DNA, 60 bp, Artificial; identical to SEQ ID NO: 341053
  Synthetic oligonucleotide

SEQ ID NO: 553612 - DNA, 59 bp, Artificial; identical to SEQ ID NO: 341054
  Synthetic oligonucleotide

SEQ ID NO: 553613 - DNA, 60 bp, Artificial; identical to SEQ ID NO: 341055
  Synthetic oligonucleotide

SEQ ID NO: 553614 - DNA, 58 bp, Artificial; identical to SEQ ID NO: 18797
  Synthetic oligonucleotide

SEQ ID NO: 553615 - DNA, 56 bp, Artificial; identical to SEQ ID NO: 341056
  Synthetic oligonucleotide

SEQ ID NO: 553616 - DNA, 60 bp, Artificial; identical to SEQ ID NO: 341059
  Synthetic oligonucleotide

SEQ ID NO: 553617 - DNA, 57 bp, Artificial; identical to SEQ ID NO: 341060
  Synthetic oligonucleotide

SEQ ID NO: 553618 - DNA, 60 bp, Artificial; identical to SEQ ID NO: 341063
  Synthetic oligonucleotide

SEQ ID NO: 553619 - DNA, 60 bp, Artificial; identical to SEQ ID NO: 341065
  Synthetic oligonucleotide

SEQ ID NO: 553620 - DNA, 56 bp, Artificial; identical to SEQ ID NO: 341066
  Synthetic oligonucleotide

SEQ ID NO: 553621 - DNA, 58 bp, Artificial; identical to SEQ ID NO: 341067
  Synthetic oligonucleotide

SEQ ID NO: 553622 - DNA, 55 bp, Artificial; identical to SEQ ID NO: 341071
  Synthetic oligonucleotide

SEQ ID NO: 553623 - DNA, 58 bp, Artificial; identical to SEQ ID NO: 341072
  Synthetic oligonucleotide

SEQ ID NO: 553624 - DNA, 59 bp, Artificial; identical to SEQ ID NO: 341076
  Synthetic oligonucleotide

SEQ ID NO: 553625 - DNA, 55 bp, Artificial; identical to SEQ ID NO: 341078
  Synthetic oligonucleotide

SEQ ID NO: 553626 - DNA, 55 bp, Artificial; identical to SEQ ID NO: 341080
  Synthetic oligonucleotide

SEQ ID NO: 553627 - DNA, 60 bp, Artificial; identical to SEQ ID NO: 341083
  Synthetic oligonucleotide

SEQ ID NO: 553628 - DNA, 55 bp, Artificial; identical to SEQ ID NO: 341085
  Synthetic oligonucleotide

SEQ ID NO: 553629 - DNA, 54 bp, Artificial; identical to SEQ ID NO: 341089
  Synthetic oligonucleotide

SEQ ID NO: 553630 - DNA, 55 bp, Artificial; identical to SEQ ID NO: 341090
  Synthetic oligonucleotide

SEQ ID NO: 553631 - DNA, 60 bp, Artificial; identical to SEQ ID NO: 341091
  Synthetic oligonucleotide

SEQ ID NO: 553632 - DNA, 60 bp, Artificial; identical to SEQ ID NO: 341093
  Synthetic oligonucleotide

SEQ ID NO: 553633 - DNA, 60 bp, Artificial; identical to SEQ ID NO: 341095
  Synthetic oligonucleotide

SEQ ID NO: 553634 - DNA, 60 bp, Artificial; identical to SEQ ID NO: 341096
  Synthetic oligonucleotide

SEQ ID NO: 553635 - DNA, 60 bp, Artificial; identical to SEQ ID NO: 12331
  Synthetic oligonucleotide

SEQ ID NO: 553636 - DNA, 60 bp, Artificial; identical to SEQ ID NO: 341097
  Synthetic oligonucleotide

SEQ ID NO: 553637 - DNA, 55 bp, Artificial; identical to SEQ ID NO: 341100
  Synthetic oligonucleotide

SEQ ID NO: 553638 - DNA, 60 bp, Artificial; identical to SEQ ID NO: 341103
  Synthetic oligonucleotide

SEQ ID NO: 553639 - DNA, 60 bp, Artificial; identical to SEQ ID NO: 341104
  Synthetic oligonucleotide

SEQ ID NO: 553640 - DNA, 55 bp, Artificial; identical to SEQ ID NO: 341107
  Synthetic oligonucleotide

SEQ ID NO: 553641 - DNA, 53 bp, Artificial; identical to SEQ ID NO: 341110
  Synthetic oligonucleotide

SEQ ID NO: 553642 - DNA, 60 bp, Artificial; identical to SEQ ID NO: 341116
  Synthetic oligonucleotide

SEQ ID NO: 553643 - DNA, 55 bp, Artificial; identical to SEQ ID NO: 341128
  Synthetic oligonucleotide

SEQ ID NO: 553644 - DNA, 51 bp, Artificial; identical to SEQ ID NO: 341129
  Synthetic oligonucleotide

SEQ ID NO: 553645 - DNA, 60 bp, Artificial; identical to SEQ ID NO: 341136
  Synthetic oligonucleotide

SEQ ID NO: 553646 - DNA, 55 bp, Artificial; identical to SEQ ID NO: 341137
  Synthetic oligonucleotide

SEQ ID NO: 553647 - DNA, 60 bp, Artificial; identical to SEQ ID NO: 341139
  Synthetic oligonucleotide

SEQ ID NO: 553648 - DNA, 51 bp, Artificial; identical to SEQ ID NO: 341142
  Synthetic oligonucleotide

SEQ ID NO: 553649 - DNA, 60 bp, Artificial; identical to SEQ ID NO: 341143
  Synthetic oligonucleotide

SEQ ID NO: 553650 - DNA, 60 bp, Artificial; identical to SEQ ID NO: 341146
  Synthetic oligonucleotide

SEQ ID NO: 553651 - DNA, 55 bp, Artificial; identical to SEQ ID NO: 341147
  Synthetic oligonucleotide

SEQ ID NO: 553652 - DNA, 52 bp, Artificial; identical to SEQ ID NO: 341150
  Synthetic oligonucleotide

SEQ ID NO: 553653 - DNA, 60 bp, Artificial; identical to SEQ ID NO: 341152
  Synthetic oligonucleotide

SEQ ID NO: 553654 - DNA, 60 bp, Artificial; identical to SEQ ID NO: 341154
  Synthetic oligonucleotide

SEQ ID NO: 553655 - DNA, 59 bp, Artificial; identical to SEQ ID NO: 341156
  Synthetic oligonucleotide

SEQ ID NO: 553656 - DNA, 55 bp, Artificial; identical to SEQ ID NO: 341158
  Synthetic oligonucleotide

SEQ ID NO: 553657 - DNA, 60 bp, Artificial; identical to SEQ ID NO: 341162
  Synthetic oligonucleotide

SEQ ID NO: 553658 - DNA, 59 bp, Artificial; identical to SEQ ID NO: 341167
  Synthetic oligonucleotide

SEQ ID NO: 553659 - DNA, 55 bp, Artificial; identical to SEQ ID NO: 341170
  Synthetic oligonucleotide

SEQ ID NO: 553660 - DNA, 54 bp, Artificial; identical to SEQ ID NO: 341172
  Synthetic oligonucleotide

SEQ ID NO: 553661 - DNA, 59 bp, Artificial; identical to SEQ ID NO: 341177
  Synthetic oligonucleotide

SEQ ID NO: 553662 - DNA, 58 bp, Artificial; identical to SEQ ID NO: 341179
  Synthetic oligonucleotide

SEQ ID NO: 553663 - DNA, 60 bp, Artificial; identical to SEQ ID NO: 341181
  Synthetic oligonucleotide

SEQ ID NO: 553664 - DNA, 56 bp, Artificial; identical to SEQ ID NO: 341182
  Synthetic oligonucleotide

SEQ ID NO: 553665 - DNA, 54 bp, Artificial; identical to SEQ ID NO: 341183
  Synthetic oligonucleotide

SEQ ID NO: 553666 - DNA, 60 bp, Artificial; identical to SEQ ID NO: 341186
  Synthetic oligonucleotide

SEQ ID NO: 553667 - DNA, 53 bp, Artificial; identical to SEQ ID NO: 341187
  Synthetic oligonucleotide

SEQ ID NO: 553668 - DNA, 57 bp, Artificial; identical to SEQ ID NO: 341188
  Synthetic oligonucleotide

SEQ ID NO: 553669 - DNA, 55 bp, Artificial; identical to SEQ ID NO: 341189
  Synthetic oligonucleotide

SEQ ID NO: 553670 - DNA, 55 bp, Artificial; identical to SEQ ID NO: 341193
  Synthetic oligonucleotide

SEQ ID NO: 553671 - DNA, 60 bp, Artificial; identical to SEQ ID NO: 341194
  Synthetic oligonucleotide

SEQ ID NO: 553672 - DNA, 56 bp, Artificial; identical to SEQ ID NO: 341196
  Synthetic oligonucleotide

SEQ ID NO: 553673 - DNA, 59 bp, Artificial; identical to SEQ ID NO: 341203
  Synthetic oligonucleotide

SEQ ID NO: 553674 - DNA, 56 bp, Artificial; identical to SEQ ID NO: 341206
  Synthetic oligonucleotide

SEQ ID NO: 553675 - DNA, 60 bp, Artificial; identical to SEQ ID NO: 341208
  Synthetic oligonucleotide

SEQ ID NO: 553676 - DNA, 57 bp, Artificial; identical to SEQ ID NO: 341212
  Synthetic oligonucleotide

SEQ ID NO: 553677 - DNA, 60 bp, Artificial; identical to SEQ ID NO: 9665
  Synthetic oligonucleotide

SEQ ID NO: 553678 - DNA, 55 bp, Artificial; identical to SEQ ID NO: 341213
  Synthetic oligonucleotide

SEQ ID NO: 553679 - DNA, 55 bp, Artificial; identical to SEQ ID NO: 341214
  Synthetic oligonucleotide

SEQ ID NO: 553680 - DNA, 55 bp, Artificial; identical to SEQ ID NO: 341215
  Synthetic oligonucleotide

SEQ ID NO: 553681 - DNA, 59 bp, Artificial; identical to SEQ ID NO: 341216
  Synthetic oligonucleotide

SEQ ID NO: 553682 - DNA, 60 bp, Artificial; identical to SEQ ID NO: 341217
  Synthetic oligonucleotide

SEQ ID NO: 553683 - DNA, 57 bp, Artificial; identical to SEQ ID NO: 341218
  Synthetic oligonucleotide

SEQ ID NO: 553684 - DNA, 60 bp, Artificial; identical to SEQ ID NO: 341222
  Synthetic oligonucleotide

SEQ ID NO: 553685 - DNA, 60 bp, Artificial; identical to SEQ ID NO: 341224
  Synthetic oligonucleotide

SEQ ID NO: 553686 - DNA, 56 bp, Artificial; identical to SEQ ID NO: 341227
  Synthetic oligonucleotide

SEQ ID NO: 553687 - DNA, 55 bp, Artificial; identical to SEQ ID NO: 341232
  Synthetic oligonucleotide

SEQ ID NO: 553688 - DNA, 58 bp, Artificial; identical to SEQ ID NO: 341234
  Synthetic oligonucleotide

SEQ ID NO: 553689 - DNA, 55 bp, Artificial; identical to SEQ ID NO: 341236
  Synthetic oligonucleotide

SEQ ID NO: 553690 - DNA, 60 bp, Artificial; identical to SEQ ID NO: 341238
  Synthetic oligonucleotide

SEQ ID NO: 553691 - DNA, 56 bp, Artificial; identical to SEQ ID NO: 341240
  Synthetic oligonucleotide

SEQ ID NO: 553692 - DNA, 52 bp, Artificial; identical to SEQ ID NO: 341241
  Synthetic oligonucleotide

SEQ ID NO: 553693 - DNA, 52 bp, Artificial; identical to SEQ ID NO: 341242
  Synthetic oligonucleotide

SEQ ID NO: 553694 - DNA, 55 bp, Artificial; identical to SEQ ID NO: 341248
  Synthetic oligonucleotide

SEQ ID NO: 553695 - DNA, 56 bp, Artificial; identical to SEQ ID NO: 18024
  Synthetic oligonucleotide

SEQ ID NO: 553696 - DNA, 60 bp, Artificial; identical to SEQ ID NO: 341250
  Synthetic oligonucleotide

SEQ ID NO: 553697 - DNA, 55 bp, Artificial; identical to SEQ ID NO: 341251
  Synthetic oligonucleotide

SEQ ID NO: 553698 - DNA, 55 bp, Artificial; identical to SEQ ID NO: 341252
  Synthetic oligonucleotide

SEQ ID NO: 553699 - DNA, 56 bp, Artificial; identical to SEQ ID NO: 341253
  Synthetic oligonucleotide

SEQ ID NO: 553700 - DNA, 54 bp, Artificial; identical to SEQ ID NO: 341257
  Synthetic oligonucleotide

SEQ ID NO: 553701 - DNA, 60 bp, Artificial; identical to SEQ ID NO: 341259
  Synthetic oligonucleotide

SEQ ID NO: 553702 - DNA, 53 bp, Artificial; identical to SEQ ID NO: 341260
  Synthetic oligonucleotide

SEQ ID NO: 553703 - DNA, 55 bp, Artificial; identical to SEQ ID NO: 341261
  Synthetic oligonucleotide

SEQ ID NO: 553704 - DNA, 58 bp, Artificial; identical to SEQ ID NO: 341262
  Synthetic oligonucleotide

SEQ ID NO: 553705 - DNA, 59 bp, Artificial; identical to SEQ ID NO: 341265
  Synthetic oligonucleotide

SEQ ID NO: 553706 - DNA, 55 bp, Artificial; identical to SEQ ID NO: 341270
  Synthetic oligonucleotide

SEQ ID NO: 553707 - DNA, 53 bp, Artificial; identical to SEQ ID NO: 341271
  Synthetic oligonucleotide

SEQ ID NO: 553708 - DNA, 55 bp, Artificial; identical to SEQ ID NO: 341272
  Synthetic oligonucleotide

SEQ ID NO: 553709 - DNA, 60 bp, Artificial; identical to SEQ ID NO: 341279
  Synthetic oligonucleotide

SEQ ID NO: 553710 - DNA, 60 bp, Artificial; identical to SEQ ID NO: 341280
  Synthetic oligonucleotide

SEQ ID NO: 553711 - DNA, 55 bp, Artificial; identical to SEQ ID NO: 341283
  Synthetic oligonucleotide

SEQ ID NO: 553712 - DNA, 60 bp, Artificial; identical to SEQ ID NO: 341285
  Synthetic oligonucleotide

SEQ ID NO: 553713 - DNA, 55 bp, Artificial; identical to SEQ ID NO: 341293
  Synthetic oligonucleotide

SEQ ID NO: 553714 - DNA, 58 bp, Artificial; identical to SEQ ID NO: 341294
  Synthetic oligonucleotide

SEQ ID NO: 553715 - DNA, 54 bp, Artificial; identical to SEQ ID NO: 341297
  Synthetic oligonucleotide

SEQ ID NO: 553716 - DNA, 60 bp, Artificial; identical to SEQ ID NO: 341298
  Synthetic oligonucleotide

SEQ ID NO: 553717 - DNA, 55 bp, Artificial; identical to SEQ ID NO: 341306
  Synthetic oligonucleotide

SEQ ID NO: 553718 - DNA, 60 bp, Artificial; identical to SEQ ID NO: 341308
  Synthetic oligonucleotide

SEQ ID NO: 553719 - DNA, 56 bp, Artificial; identical to SEQ ID NO: 341312
  Synthetic oligonucleotide

SEQ ID NO: 553720 - DNA, 58 bp, Artificial; identical to SEQ ID NO: 20257
  Synthetic oligonucleotide

SEQ ID NO: 553721 - DNA, 55 bp, Artificial; identical to SEQ ID NO: 341314
  Synthetic oligonucleotide

SEQ ID NO: 553722 - DNA, 60 bp, Artificial; identical to SEQ ID NO: 341315
  Synthetic oligonucleotide

SEQ ID NO: 553723 - DNA, 58 bp, Artificial; identical to SEQ ID NO: 341316
  Synthetic oligonucleotide

SEQ ID NO: 553724 - DNA, 59 bp, Artificial; identical to SEQ ID NO: 341317
  Synthetic oligonucleotide

SEQ ID NO: 553725 - DNA, 56 bp, Artificial; identical to SEQ ID NO: 341318
  Synthetic oligonucleotide

SEQ ID NO: 553726 - DNA, 58 bp, Artificial; identical to SEQ ID NO: 15328
  Synthetic oligonucleotide

SEQ ID NO: 553727 - DNA, 60 bp, Artificial; identical to SEQ ID NO: 341321
  Synthetic oligonucleotide

SEQ ID NO: 553728 - DNA, 55 bp, Artificial; identical to SEQ ID NO: 341322
  Synthetic oligonucleotide

SEQ ID NO: 553729 - DNA, 55 bp, Artificial; identical to SEQ ID NO: 341324
  Synthetic oligonucleotide

SEQ ID NO: 553730 - DNA, 60 bp, Artificial; identical to SEQ ID NO: 341326
  Synthetic oligonucleotide

SEQ ID NO: 553731 - DNA, 55 bp, Artificial; identical to SEQ ID NO: 341328
  Synthetic oligonucleotide

SEQ ID NO: 553732 - DNA, 60 bp, Artificial; identical to SEQ ID NO: 341329
  Synthetic oligonucleotide

SEQ ID NO: 553733 - DNA, 60 bp, Artificial; identical to SEQ ID NO: 341334
  Synthetic oligonucleotide

SEQ ID NO: 553734 - DNA, 57 bp, Artificial; identical to SEQ ID NO: 341336
  Synthetic oligonucleotide

SEQ ID NO: 553735 - DNA, 55 bp, Artificial; identical to SEQ ID NO: 341337
  Synthetic oligonucleotide

SEQ ID NO: 553736 - DNA, 55 bp, Artificial; identical to SEQ ID NO: 6083
  Synthetic oligonucleotide

SEQ ID NO: 553737 - DNA, 59 bp, Artificial; identical to SEQ ID NO: 341343
  Synthetic oligonucleotide

SEQ ID NO: 553738 - DNA, 60 bp, Artificial; identical to SEQ ID NO: 341345
  Synthetic oligonucleotide

SEQ ID NO: 553739 - DNA, 52 bp, Artificial; identical to SEQ ID NO: 341346
  Synthetic oligonucleotide

SEQ ID NO: 553740 - DNA, 55 bp, Artificial; identical to SEQ ID NO: 341348
  Synthetic oligonucleotide

SEQ ID NO: 553741 - DNA, 60 bp, Artificial; identical to SEQ ID NO: 341350
  Synthetic oligonucleotide

SEQ ID NO: 553742 - DNA, 57 bp, Artificial; identical to SEQ ID NO: 341351
  Synthetic oligonucleotide

SEQ ID NO: 553743 - DNA, 55 bp, Artificial; identical to SEQ ID NO: 341353
  Synthetic oligonucleotide

SEQ ID NO: 553744 - DNA, 51 bp, Artificial; identical to SEQ ID NO: 6147
  Synthetic oligonucleotide

SEQ ID NO: 553745 - DNA, 55 bp, Artificial; identical to SEQ ID NO: 341355
  Synthetic oligonucleotide

SEQ ID NO: 553746 - DNA, 60 bp, Artificial; identical to SEQ ID NO: 341356
  Synthetic oligonucleotide

SEQ ID NO: 553747 - DNA, 57 bp, Artificial; identical to SEQ ID NO: 341358
  Synthetic oligonucleotide

SEQ ID NO: 553748 - DNA, 57 bp, Artificial; identical to SEQ ID NO: 341366
  Synthetic oligonucleotide

SEQ ID NO: 553749 - DNA, 56 bp, Artificial; identical to SEQ ID NO: 341367
  Synthetic oligonucleotide

SEQ ID NO: 553750 - DNA, 50 bp, Artificial; identical to SEQ ID NO: 341369
  Synthetic oligonucleotide

SEQ ID NO: 553751 - DNA, 60 bp, Artificial; identical to SEQ ID NO: 341375
  Synthetic oligonucleotide

SEQ ID NO: 553752 - DNA, 60 bp, Artificial; identical to SEQ ID NO: 341377
  Synthetic oligonucleotide

SEQ ID NO: 553753 - DNA, 59 bp, Artificial; identical to SEQ ID NO: 341383
  Synthetic oligonucleotide

SEQ ID NO: 553754 - DNA, 60 bp, Artificial; identical to SEQ ID NO: 341384
  Synthetic oligonucleotide

SEQ ID NO: 553755 - DNA, 52 bp, Artificial; identical to SEQ ID NO: 341385
  Synthetic oligonucleotide

SEQ ID NO: 553756 - DNA, 56 bp, Artificial; identical to SEQ ID NO: 341387
  Synthetic oligonucleotide

SEQ ID NO: 553757 - DNA, 60 bp, Artificial; identical to SEQ ID NO: 341388
  Synthetic oligonucleotide

SEQ ID NO: 553758 - DNA, 60 bp, Artificial; identical to SEQ ID NO: 341389
  Synthetic oligonucleotide

SEQ ID NO: 553759 - DNA, 58 bp, Artificial; identical to SEQ ID NO: 341391
  Synthetic oligonucleotide

SEQ ID NO: 553760 - DNA, 59 bp, Artificial; identical to SEQ ID NO: 19677
  Synthetic oligonucleotide

SEQ ID NO: 553761 - DNA, 60 bp, Artificial; identical to SEQ ID NO: 341392
  Synthetic oligonucleotide

SEQ ID NO: 553762 - DNA, 56 bp, Artificial; identical to SEQ ID NO: 341398
  Synthetic oligonucleotide

SEQ ID NO: 553763 - DNA, 57 bp, Artificial; identical to SEQ ID NO: 341399
  Synthetic oligonucleotide

SEQ ID NO: 553764 - DNA, 60 bp, Artificial; identical to SEQ ID NO: 341400
  Synthetic oligonucleotide

SEQ ID NO: 553765 - DNA, 60 bp, Artificial; identical to SEQ ID NO: 341401
  Synthetic oligonucleotide

SEQ ID NO: 553766 - DNA, 60 bp, Artificial; identical to SEQ ID NO: 341404
  Synthetic oligonucleotide

SEQ ID NO: 553767 - DNA, 57 bp, Artificial; identical to SEQ ID NO: 341405
  Synthetic oligonucleotide

SEQ ID NO: 553768 - DNA, 55 bp, Artificial; identical to SEQ ID NO: 341408
  Synthetic oligonucleotide

SEQ ID NO: 553769 - DNA, 57 bp, Artificial; identical to SEQ ID NO: 341412
  Synthetic oligonucleotide

SEQ ID NO: 553770 - DNA, 55 bp, Artificial; identical to SEQ ID NO: 341414
  Synthetic oligonucleotide

SEQ ID NO: 553771 - DNA, 59 bp, Artificial; identical to SEQ ID NO: 341416
  Synthetic oligonucleotide

SEQ ID NO: 553772 - DNA, 51 bp, Artificial; identical to SEQ ID NO: 341420
  Synthetic oligonucleotide

SEQ ID NO: 553773 - DNA, 60 bp, Artificial; identical to SEQ ID NO: 341421
  Synthetic oligonucleotide

SEQ ID NO: 553774 - DNA, 54 bp, Artificial; identical to SEQ ID NO: 341422
  Synthetic oligonucleotide

SEQ ID NO: 553775 - DNA, 51 bp, Artificial; identical to SEQ ID NO: 341423
  Synthetic oligonucleotide

SEQ ID NO: 553776 - DNA, 59 bp, Artificial; identical to SEQ ID NO: 341424
  Synthetic oligonucleotide

SEQ ID NO: 553777 - DNA, 55 bp, Artificial; identical to SEQ ID NO: 341426
  Synthetic oligonucleotide

SEQ ID NO: 553778 - DNA, 60 bp, Artificial; identical to SEQ ID NO: 341427
  Synthetic oligonucleotide

SEQ ID NO: 553779 - DNA, 60 bp, Artificial; identical to SEQ ID NO: 341430
  Synthetic oligonucleotide

SEQ ID NO: 553780 - DNA, 55 bp, Artificial; identical to SEQ ID NO: 341432
  Synthetic oligonucleotide

SEQ ID NO: 553781 - DNA, 55 bp, Artificial; identical to SEQ ID NO: 341433
  Synthetic oligonucleotide

SEQ ID NO: 553782 - DNA, 51 bp, Artificial; identical to SEQ ID NO: 341434
  Synthetic oligonucleotide

SEQ ID NO: 553783 - DNA, 59 bp, Artificial; identical to SEQ ID NO: 341435
  Synthetic oligonucleotide

SEQ ID NO: 553784 - DNA, 55 bp, Artificial; identical to SEQ ID NO: 341436
  Synthetic oligonucleotide

SEQ ID NO: 553785 - DNA, 58 bp, Artificial; identical to SEQ ID NO: 341437
  Synthetic oligonucleotide

SEQ ID NO: 553786 - DNA, 58 bp, Artificial; identical to SEQ ID NO: 341440
  Synthetic oligonucleotide

SEQ ID NO: 553787 - DNA, 55 bp, Artificial; identical to SEQ ID NO: 341441
  Synthetic oligonucleotide

SEQ ID NO: 553788 - DNA, 55 bp, Artificial; identical to SEQ ID NO: 341442
  Synthetic oligonucleotide

SEQ ID NO: 553789 - DNA, 59 bp, Artificial; identical to SEQ ID NO: 17827
  Synthetic oligonucleotide

SEQ ID NO: 553790 - DNA, 60 bp, Artificial; identical to SEQ ID NO: 8419
  Synthetic oligonucleotide

SEQ ID NO: 553791 - DNA, 60 bp, Artificial; identical to SEQ ID NO: 341444
  Synthetic oligonucleotide

SEQ ID NO: 553792 - DNA, 57 bp, Artificial; identical to SEQ ID NO: 341445
  Synthetic oligonucleotide

SEQ ID NO: 553793 - DNA, 56 bp, Artificial; identical to SEQ ID NO: 341448
  Synthetic oligonucleotide

SEQ ID NO: 553794 - DNA, 57 bp, Artificial; identical to SEQ ID NO: 341449
  Synthetic oligonucleotide

SEQ ID NO: 553795 - DNA, 55 bp, Artificial; identical to SEQ ID NO: 341451
  Synthetic oligonucleotide

SEQ ID NO: 553796 - DNA, 55 bp, Artificial; identical to SEQ ID NO: 341455
  Synthetic oligonucleotide

SEQ ID NO: 553797 - DNA, 59 bp, Artificial; identical to SEQ ID NO: 341457
  Synthetic oligonucleotide

SEQ ID NO: 553798 - DNA, 60 bp, Artificial; identical to SEQ ID NO: 341459
  Synthetic oligonucleotide

SEQ ID NO: 553799 - DNA, 58 bp, Artificial; identical to SEQ ID NO: 341461
  Synthetic oligonucleotide

SEQ ID NO: 553800 - DNA, 60 bp, Artificial; identical to SEQ ID NO: 341464
  Synthetic oligonucleotide

SEQ ID NO: 553801 - DNA, 60 bp, Artificial; identical to SEQ ID NO: 341466
  Synthetic oligonucleotide

SEQ ID NO: 553802 - DNA, 55 bp, Artificial; identical to SEQ ID NO: 341467
  Synthetic oligonucleotide

SEQ ID NO: 553803 - DNA, 54 bp, Artificial; identical to SEQ ID NO: 341468
  Synthetic oligonucleotide

SEQ ID NO: 553804 - DNA, 57 bp, Artificial; identical to SEQ ID NO: 341470
  Synthetic oligonucleotide

SEQ ID NO: 553805 - DNA, 50 bp, Artificial; identical to SEQ ID NO: 341472
  Synthetic oligonucleotide

SEQ ID NO: 553806 - DNA, 57 bp, Artificial; identical to SEQ ID NO: 341481
  Synthetic oligonucleotide

SEQ ID NO: 553807 - DNA, 57 bp, Artificial; identical to SEQ ID NO: 341482
  Synthetic oligonucleotide

SEQ ID NO: 553808 - DNA, 57 bp, Artificial; identical to SEQ ID NO: 341483
  Synthetic oligonucleotide

SEQ ID NO: 553809 - DNA, 53 bp, Artificial; identical to SEQ ID NO: 341486
  Synthetic oligonucleotide

SEQ ID NO: 553810 - DNA, 60 bp, Artificial; identical to SEQ ID NO: 341487
  Synthetic oligonucleotide

SEQ ID NO: 553811 - DNA, 60 bp, Artificial; identical to SEQ ID NO: 341491
  Synthetic oligonucleotide

SEQ ID NO: 553812 - DNA, 58 bp, Artificial; identical to SEQ ID NO: 341494
  Synthetic oligonucleotide

SEQ ID NO: 553813 - DNA, 55 bp, Artificial; identical to SEQ ID NO: 6510
  Synthetic oligonucleotide

SEQ ID NO: 553814 - DNA, 56 bp, Artificial; identical to SEQ ID NO: 341495
  Synthetic oligonucleotide

SEQ ID NO: 553815 - DNA, 53 bp, Artificial; identical to SEQ ID NO: 341497
  Synthetic oligonucleotide

SEQ ID NO: 553816 - DNA, 57 bp, Artificial; identical to SEQ ID NO: 341501
  Synthetic oligonucleotide

SEQ ID NO: 553817 - DNA, 55 bp, Artificial; identical to SEQ ID NO: 8455
  Synthetic oligonucleotide

SEQ ID NO: 553818 - DNA, 60 bp, Artificial; identical to SEQ ID NO: 10834
  Synthetic oligonucleotide

SEQ ID NO: 553819 - DNA, 60 bp, Artificial; identical to SEQ ID NO: 341507
  Synthetic oligonucleotide

SEQ ID NO: 553820 - DNA, 53 bp, Artificial; identical to SEQ ID NO: 341508
  Synthetic oligonucleotide

SEQ ID NO: 553821 - DNA, 55 bp, Artificial; identical to SEQ ID NO: 341509
  Synthetic oligonucleotide

SEQ ID NO: 553822 - DNA, 55 bp, Artificial; identical to SEQ ID NO: 341511
  Synthetic oligonucleotide

SEQ ID NO: 553823 - DNA, 60 bp, Artificial; identical to SEQ ID NO: 341512
  Synthetic oligonucleotide

SEQ ID NO: 553824 - DNA, 60 bp, Artificial; identical to SEQ ID NO: 341515
  Synthetic oligonucleotide

SEQ ID NO: 553825 - DNA, 59 bp, Artificial; identical to SEQ ID NO: 341516
  Synthetic oligonucleotide

SEQ ID NO: 553826 - DNA, 60 bp, Artificial; identical to SEQ ID NO: 341517
  Synthetic oligonucleotide

SEQ ID NO: 553827 - DNA, 52 bp, Artificial; identical to SEQ ID NO: 341520
  Synthetic oligonucleotide

SEQ ID NO: 553828 - DNA, 52 bp, Artificial; identical to SEQ ID NO: 341521
  Synthetic oligonucleotide

SEQ ID NO: 553829 - DNA, 54 bp, Artificial; identical to SEQ ID NO: 341528
  Synthetic oligonucleotide

SEQ ID NO: 553830 - DNA, 59 bp, Artificial; identical to SEQ ID NO: 341529
  Synthetic oligonucleotide

SEQ ID NO: 553831 - DNA, 60 bp, Artificial; identical to SEQ ID NO: 341530
  Synthetic oligonucleotide

SEQ ID NO: 553832 - DNA, 57 bp, Artificial; identical to SEQ ID NO: 341531
  Synthetic oligonucleotide

SEQ ID NO: 553833 - DNA, 57 bp, Artificial; identical to SEQ ID NO: 341532
  Synthetic oligonucleotide

SEQ ID NO: 553834 - DNA, 55 bp, Artificial; identical to SEQ ID NO: 341534
  Synthetic oligonucleotide

SEQ ID NO: 553835 - DNA, 60 bp, Artificial; identical to SEQ ID NO: 341535
  Synthetic oligonucleotide

SEQ ID NO: 553836 - DNA, 55 bp, Artificial; identical to SEQ ID NO: 341538
  Synthetic oligonucleotide

SEQ ID NO: 553837 - DNA, 60 bp, Artificial; identical to SEQ ID NO: 341539
  Synthetic oligonucleotide

SEQ ID NO: 553838 - DNA, 55 bp, Artificial; identical to SEQ ID NO: 341541
  Synthetic oligonucleotide

SEQ ID NO: 553839 - DNA, 55 bp, Artificial; identical to SEQ ID NO: 341542
  Synthetic oligonucleotide

SEQ ID NO: 553840 - DNA, 59 bp, Artificial; identical to SEQ ID NO: 341546
  Synthetic oligonucleotide

SEQ ID NO: 553841 - DNA, 55 bp, Artificial; identical to SEQ ID NO: 341553
  Synthetic oligonucleotide

SEQ ID NO: 553842 - DNA, 59 bp, Artificial; identical to SEQ ID NO: 341554
  Synthetic oligonucleotide

SEQ ID NO: 553843 - DNA, 55 bp, Artificial; identical to SEQ ID NO: 341555
  Synthetic oligonucleotide

SEQ ID NO: 553844 - DNA, 54 bp, Artificial; identical to SEQ ID NO: 341556
  Synthetic oligonucleotide

SEQ ID NO: 553845 - DNA, 60 bp, Artificial; identical to SEQ ID NO: 341557
  Synthetic oligonucleotide

SEQ ID NO: 553846 - DNA, 60 bp, Artificial; identical to SEQ ID NO: 341558
  Synthetic oligonucleotide

SEQ ID NO: 553847 - DNA, 56 bp, Artificial; identical to SEQ ID NO: 341559
  Synthetic oligonucleotide

SEQ ID NO: 553848 - DNA, 55 bp, Artificial; identical to SEQ ID NO: 341562
  Synthetic oligonucleotide

SEQ ID NO: 553849 - DNA, 50 bp, Artificial; identical to SEQ ID NO: 341564
  Synthetic oligonucleotide

SEQ ID NO: 553850 - DNA, 55 bp, Artificial; identical to SEQ ID NO: 341567
  Synthetic oligonucleotide

SEQ ID NO: 553851 - DNA, 52 bp, Artificial; identical to SEQ ID NO: 17045
  Synthetic oligonucleotide

SEQ ID NO: 553852 - DNA, 57 bp, Artificial; identical to SEQ ID NO: 341568
  Synthetic oligonucleotide

SEQ ID NO: 553853 - DNA, 60 bp, Artificial; identical to SEQ ID NO: 341569
  Synthetic oligonucleotide

SEQ ID NO: 553854 - DNA, 55 bp, Artificial; identical to SEQ ID NO: 341570
  Synthetic oligonucleotide

SEQ ID NO: 553855 - DNA, 51 bp, Artificial; identical to SEQ ID NO: 341574
  Synthetic oligonucleotide

SEQ ID NO: 553856 - DNA, 50 bp, Artificial; identical to SEQ ID NO: 341575
  Synthetic oligonucleotide

SEQ ID NO: 553857 - DNA, 50 bp, Artificial; identical to SEQ ID NO: 341579
  Synthetic oligonucleotide

SEQ ID NO: 553858 - DNA, 55 bp, Artificial; identical to SEQ ID NO: 341580
  Synthetic oligonucleotide

SEQ ID NO: 553859 - DNA, 55 bp, Artificial; identical to SEQ ID NO: 341581
  Synthetic oligonucleotide

SEQ ID NO: 553860 - DNA, 60 bp, Artificial; identical to SEQ ID NO: 341582
  Synthetic oligonucleotide

SEQ ID NO: 553861 - DNA, 55 bp, Artificial; identical to SEQ ID NO: 341583
  Synthetic oligonucleotide

SEQ ID NO: 553862 - DNA, 56 bp, Artificial; identical to SEQ ID NO: 341584
  Synthetic oligonucleotide

SEQ ID NO: 553863 - DNA, 60 bp, Artificial; identical to SEQ ID NO: 341588
  Synthetic oligonucleotide

SEQ ID NO: 553864 - DNA, 60 bp, Artificial; identical to SEQ ID NO: 341591
  Synthetic oligonucleotide

SEQ ID NO: 553865 - DNA, 55 bp, Artificial; identical to SEQ ID NO: 341592
  Synthetic oligonucleotide

SEQ ID NO: 553866 - DNA, 60 bp, Artificial; identical to SEQ ID NO: 341593
  Synthetic oligonucleotide

SEQ ID NO: 553867 - DNA, 55 bp, Artificial; identical to SEQ ID NO: 341594
  Synthetic oligonucleotide

SEQ ID NO: 553868 - DNA, 60 bp, Artificial; identical to SEQ ID NO: 341596
  Synthetic oligonucleotide

SEQ ID NO: 553869 - DNA, 55 bp, Artificial; identical to SEQ ID NO: 341599
  Synthetic oligonucleotide

SEQ ID NO: 553870 - DNA, 54 bp, Artificial; identical to SEQ ID NO: 341603
  Synthetic oligonucleotide

SEQ ID NO: 553871 - DNA, 57 bp, Artificial; identical to SEQ ID NO: 341605
  Synthetic oligonucleotide

SEQ ID NO: 553872 - DNA, 55 bp, Artificial; identical to SEQ ID NO: 341607
  Synthetic oligonucleotide

SEQ ID NO: 553873 - DNA, 55 bp, Artificial; identical to SEQ ID NO: 341608
  Synthetic oligonucleotide

SEQ ID NO: 553874 - DNA, 59 bp, Artificial; identical to SEQ ID NO: 341613
  Synthetic oligonucleotide

SEQ ID NO: 553875 - DNA, 55 bp, Artificial; identical to SEQ ID NO: 341614
  Synthetic oligonucleotide

SEQ ID NO: 553876 - DNA, 60 bp, Artificial; identical to SEQ ID NO: 341615
  Synthetic oligonucleotide

SEQ ID NO: 553877 - DNA, 60 bp, Artificial; identical to SEQ ID NO: 341627
  Synthetic oligonucleotide

SEQ ID NO: 553878 - DNA, 58 bp, Artificial; identical to SEQ ID NO: 341630
  Synthetic oligonucleotide

SEQ ID NO: 553879 - DNA, 55 bp, Artificial; identical to SEQ ID NO: 341636
  Synthetic oligonucleotide

SEQ ID NO: 553880 - DNA, 60 bp, Artificial; identical to SEQ ID NO: 341639
  Synthetic oligonucleotide

SEQ ID NO: 553881 - DNA, 55 bp, Artificial; identical to SEQ ID NO: 341644
  Synthetic oligonucleotide

SEQ ID NO: 553882 - DNA, 55 bp, Artificial; identical to SEQ ID NO: 341645
  Synthetic oligonucleotide

SEQ ID NO: 553883 - DNA, 60 bp, Artificial; identical to SEQ ID NO: 341647
  Synthetic oligonucleotide

SEQ ID NO: 553884 - DNA, 59 bp, Artificial; identical to SEQ ID NO: 341656
  Synthetic oligonucleotide

SEQ ID NO: 553885 - DNA, 58 bp, Artificial; identical to SEQ ID NO: 341665
  Synthetic oligonucleotide

SEQ ID NO: 553886 - DNA, 60 bp, Artificial; identical to SEQ ID NO: 341666
  Synthetic oligonucleotide

SEQ ID NO: 553887 - DNA, 58 bp, Artificial; identical to SEQ ID NO: 341667
  Synthetic oligonucleotide

SEQ ID NO: 553888 - DNA, 60 bp, Artificial; identical to SEQ ID NO: 341670
  Synthetic oligonucleotide

SEQ ID NO: 553889 - DNA, 56 bp, Artificial; identical to SEQ ID NO: 341672
  Synthetic oligonucleotide

SEQ ID NO: 553890 - DNA, 56 bp, Artificial; identical to SEQ ID NO: 11375
  Synthetic oligonucleotide

SEQ ID NO: 553891 - DNA, 58 bp, Artificial; identical to SEQ ID NO: 341678
  Synthetic oligonucleotide

SEQ ID NO: 553892 - DNA, 52 bp, Artificial; identical to SEQ ID NO: 341680
  Synthetic oligonucleotide

SEQ ID NO: 553893 - DNA, 55 bp, Artificial; identical to SEQ ID NO: 341681
  Synthetic oligonucleotide

SEQ ID NO: 553894 - DNA, 55 bp, Artificial; identical to SEQ ID NO: 341682
  Synthetic oligonucleotide

SEQ ID NO: 553895 - DNA, 60 bp, Artificial; identical to SEQ ID NO: 341686
  Synthetic oligonucleotide

SEQ ID NO: 553896 - DNA, 58 bp, Artificial; identical to SEQ ID NO: 341687
  Synthetic oligonucleotide

SEQ ID NO: 553897 - DNA, 56 bp, Artificial; identical to SEQ ID NO: 341688
  Synthetic oligonucleotide

SEQ ID NO: 553898 - DNA, 59 bp, Artificial; identical to SEQ ID NO: 341689
  Synthetic oligonucleotide

SEQ ID NO: 553899 - DNA, 55 bp, Artificial; identical to SEQ ID NO: 341692
  Synthetic oligonucleotide

SEQ ID NO: 553900 - DNA, 59 bp, Artificial; identical to SEQ ID NO: 341694
  Synthetic oligonucleotide

SEQ ID NO: 553901 - DNA, 51 bp, Artificial; identical to SEQ ID NO: 341695
  Synthetic oligonucleotide

SEQ ID NO: 553902 - DNA, 60 bp, Artificial; identical to SEQ ID NO: 341696
  Synthetic oligonucleotide

SEQ ID NO: 553903 - DNA, 51 bp, Artificial; identical to SEQ ID NO: 6032
  Synthetic oligonucleotide

SEQ ID NO: 553904 - DNA, 55 bp, Artificial; identical to SEQ ID NO: 341701
  Synthetic oligonucleotide

SEQ ID NO: 553905 - DNA, 55 bp, Artificial; identical to SEQ ID NO: 341702
  Synthetic oligonucleotide

SEQ ID NO: 553906 - DNA, 60 bp, Artificial; identical to SEQ ID NO: 341703
  Synthetic oligonucleotide

SEQ ID NO: 553907 - DNA, 53 bp, Artificial; identical to SEQ ID NO: 341704
  Synthetic oligonucleotide

SEQ ID NO: 553908 - DNA, 60 bp, Artificial; identical to SEQ ID NO: 341708
  Synthetic oligonucleotide

SEQ ID NO: 553909 - DNA, 54 bp, Artificial; identical to SEQ ID NO: 341710
  Synthetic oligonucleotide

SEQ ID NO: 553910 - DNA, 59 bp, Artificial; identical to SEQ ID NO: 341713
  Synthetic oligonucleotide

SEQ ID NO: 553911 - DNA, 56 bp, Artificial; identical to SEQ ID NO: 341714
  Synthetic oligonucleotide

SEQ ID NO: 553912 - DNA, 56 bp, Artificial; identical to SEQ ID NO: 341715
  Synthetic oligonucleotide

SEQ ID NO: 553913 - DNA, 60 bp, Artificial; identical to SEQ ID NO: 341716
  Synthetic oligonucleotide

SEQ ID NO: 553914 - DNA, 60 bp, Artificial; identical to SEQ ID NO: 341717
  Synthetic oligonucleotide

SEQ ID NO: 553915 - DNA, 60 bp, Artificial; identical to SEQ ID NO: 341718
  Synthetic oligonucleotide

SEQ ID NO: 553916 - DNA, 55 bp, Artificial; identical to SEQ ID NO: 341719
  Synthetic oligonucleotide

SEQ ID NO: 553917 - DNA, 58 bp, Artificial; identical to SEQ ID NO: 341720
  Synthetic oligonucleotide

SEQ ID NO: 553918 - DNA, 60 bp, Artificial; identical to SEQ ID NO: 341721
  Synthetic oligonucleotide

SEQ ID NO: 553919 - DNA, 59 bp, Artificial; identical to SEQ ID NO: 341722
  Synthetic oligonucleotide

SEQ ID NO: 553920 - DNA, 55 bp, Artificial; identical to SEQ ID NO: 341723
  Synthetic oligonucleotide

SEQ ID NO: 553921 - DNA, 60 bp, Artificial; identical to SEQ ID NO: 341727
  Synthetic oligonucleotide

SEQ ID NO: 553922 - DNA, 55 bp, Artificial; identical to SEQ ID NO: 341729
  Synthetic oligonucleotide

SEQ ID NO: 553923 - DNA, 59 bp, Artificial; identical to SEQ ID NO: 17809
  Synthetic oligonucleotide

SEQ ID NO: 553924 - DNA, 55 bp, Artificial; identical to SEQ ID NO: 341734
  Synthetic oligonucleotide

SEQ ID NO: 553925 - DNA, 60 bp, Artificial; identical to SEQ ID NO: 341735
  Synthetic oligonucleotide

SEQ ID NO: 553926 - DNA, 57 bp, Artificial; identical to SEQ ID NO: 341739
  Synthetic oligonucleotide

SEQ ID NO: 553927 - DNA, 60 bp, Artificial; identical to SEQ ID NO: 341743
  Synthetic oligonucleotide

SEQ ID NO: 553928 - DNA, 55 bp, Artificial; identical to SEQ ID NO: 341747
  Synthetic oligonucleotide

SEQ ID NO: 553929 - DNA, 55 bp, Artificial; identical to SEQ ID NO: 341748
  Synthetic oligonucleotide

SEQ ID NO: 553930 - DNA, 54 bp, Artificial; identical to SEQ ID NO: 341753
  Synthetic oligonucleotide

SEQ ID NO: 553931 - DNA, 52 bp, Artificial; identical to SEQ ID NO: 341754
  Synthetic oligonucleotide

SEQ ID NO: 553932 - DNA, 57 bp, Artificial; identical to SEQ ID NO: 341756
  Synthetic oligonucleotide

SEQ ID NO: 553933 - DNA, 60 bp, Artificial; identical to SEQ ID NO: 341757
  Synthetic oligonucleotide

SEQ ID NO: 553934 - DNA, 59 bp, Artificial; identical to SEQ ID NO: 341758
  Synthetic oligonucleotide

SEQ ID NO: 553935 - DNA, 51 bp, Artificial; identical to SEQ ID NO: 341760
  Synthetic oligonucleotide

SEQ ID NO: 553936 - DNA, 58 bp, Artificial; identical to SEQ ID NO: 341762
  Synthetic oligonucleotide

SEQ ID NO: 553937 - DNA, 57 bp, Artificial; identical to SEQ ID NO: 341764
  Synthetic oligonucleotide

SEQ ID NO: 553938 - DNA, 55 bp, Artificial; identical to SEQ ID NO: 341765
  Synthetic oligonucleotide

SEQ ID NO: 553939 - DNA, 57 bp, Artificial; identical to SEQ ID NO: 341771
  Synthetic oligonucleotide

SEQ ID NO: 553940 - DNA, 58 bp, Artificial; identical to SEQ ID NO: 341772
  Synthetic oligonucleotide

SEQ ID NO: 553941 - DNA, 58 bp, Artificial; identical to SEQ ID NO: 341775
  Synthetic oligonucleotide

SEQ ID NO: 553942 - DNA, 58 bp, Artificial; identical to SEQ ID NO: 341776
  Synthetic oligonucleotide

SEQ ID NO: 553943 - DNA, 57 bp, Artificial; identical to SEQ ID NO: 341780
  Synthetic oligonucleotide

SEQ ID NO: 553944 - DNA, 51 bp, Artificial; identical to SEQ ID NO: 341781
  Synthetic oligonucleotide

SEQ ID NO: 553945 - DNA, 56 bp, Artificial; identical to SEQ ID NO: 341782
  Synthetic oligonucleotide

SEQ ID NO: 553946 - DNA, 60 bp, Artificial; identical to SEQ ID NO: 341783
  Synthetic oligonucleotide

SEQ ID NO: 553947 - DNA, 52 bp, Artificial; identical to SEQ ID NO: 341784
  Synthetic oligonucleotide

SEQ ID NO: 553948 - DNA, 56 bp, Artificial; identical to SEQ ID NO: 341786
  Synthetic oligonucleotide

SEQ ID NO: 553949 - DNA, 60 bp, Artificial; identical to SEQ ID NO: 341798
  Synthetic oligonucleotide

SEQ ID NO: 553950 - DNA, 57 bp, Artificial; identical to SEQ ID NO: 341799
  Synthetic oligonucleotide

SEQ ID NO: 553951 - DNA, 60 bp, Artificial; identical to SEQ ID NO: 341800
  Synthetic oligonucleotide

SEQ ID NO: 553952 - DNA, 60 bp, Artificial; identical to SEQ ID NO: 341803
  Synthetic oligonucleotide

SEQ ID NO: 553953 - DNA, 60 bp, Artificial; identical to SEQ ID NO: 341806
  Synthetic oligonucleotide

SEQ ID NO: 553954 - DNA, 59 bp, Artificial; identical to SEQ ID NO: 341808
  Synthetic oligonucleotide

SEQ ID NO: 553955 - DNA, 56 bp, Artificial; identical to SEQ ID NO: 341809
  Synthetic oligonucleotide

SEQ ID NO: 553956 - DNA, 60 bp, Artificial; identical to SEQ ID NO: 341810
  Synthetic oligonucleotide

SEQ ID NO: 553957 - DNA, 55 bp, Artificial; identical to SEQ ID NO: 341811
  Synthetic oligonucleotide

SEQ ID NO: 553958 - DNA, 54 bp, Artificial; identical to SEQ ID NO: 341812
  Synthetic oligonucleotide

SEQ ID NO: 553959 - DNA, 60 bp, Artificial; identical to SEQ ID NO: 341814
  Synthetic oligonucleotide

SEQ ID NO: 553960 - DNA, 60 bp, Artificial; identical to SEQ ID NO: 341817
  Synthetic oligonucleotide

SEQ ID NO: 553961 - DNA, 55 bp, Artificial; identical to SEQ ID NO: 341820
  Synthetic oligonucleotide

SEQ ID NO: 553962 - DNA, 59 bp, Artificial; identical to SEQ ID NO: 341826
  Synthetic oligonucleotide

SEQ ID NO: 553963 - DNA, 55 bp, Artificial; identical to SEQ ID NO: 341830
  Synthetic oligonucleotide

SEQ ID NO: 553964 - DNA, 55 bp, Artificial; identical to SEQ ID NO: 341831
  Synthetic oligonucleotide

SEQ ID NO: 553965 - DNA, 60 bp, Artificial; identical to SEQ ID NO: 341834
  Synthetic oligonucleotide

SEQ ID NO: 553966 - DNA, 59 bp, Artificial; identical to SEQ ID NO: 341836
  Synthetic oligonucleotide

SEQ ID NO: 553967 - DNA, 55 bp, Artificial; identical to SEQ ID NO: 341837
  Synthetic oligonucleotide

SEQ ID NO: 553968 - DNA, 55 bp, Artificial; identical to SEQ ID NO: 341838
  Synthetic oligonucleotide

SEQ ID NO: 553969 - DNA, 57 bp, Artificial; identical to SEQ ID NO: 341839
  Synthetic oligonucleotide

SEQ ID NO: 553970 - DNA, 60 bp, Artificial; identical to SEQ ID NO: 50086
  Synthetic oligonucleotide

SEQ ID NO: 553971 - DNA, 60 bp, Artificial; identical to SEQ ID NO: 341842
  Synthetic oligonucleotide

SEQ ID NO: 553972 - DNA, 60 bp, Artificial; identical to SEQ ID NO: 341844
  Synthetic oligonucleotide

SEQ ID NO: 553973 - DNA, 59 bp, Artificial; identical to SEQ ID NO: 341847
  Synthetic oligonucleotide

SEQ ID NO: 553974 - DNA, 60 bp, Artificial; identical to SEQ ID NO: 341848
  Synthetic oligonucleotide

SEQ ID NO: 553975 - DNA, 55 bp, Artificial; identical to SEQ ID NO: 341849
  Synthetic oligonucleotide

SEQ ID NO: 553976 - DNA, 60 bp, Artificial; identical to SEQ ID NO: 341850
  Synthetic oligonucleotide

SEQ ID NO: 553977 - DNA, 53 bp, Artificial; identical to SEQ ID NO: 341851
  Synthetic oligonucleotide

SEQ ID NO: 553978 - DNA, 53 bp, Artificial; identical to SEQ ID NO: 341853
  Synthetic oligonucleotide

SEQ ID NO: 553979 - DNA, 57 bp, Artificial; identical to SEQ ID NO: 11316
  Synthetic oligonucleotide

SEQ ID NO: 553980 - DNA, 60 bp, Artificial; identical to SEQ ID NO: 341856
  Synthetic oligonucleotide

SEQ ID NO: 553981 - DNA, 60 bp, Artificial; identical to SEQ ID NO: 341857
  Synthetic oligonucleotide

SEQ ID NO: 553982 - DNA, 55 bp, Artificial; identical to SEQ ID NO: 341858
  Synthetic oligonucleotide

SEQ ID NO: 553983 - DNA, 57 bp, Artificial; identical to SEQ ID NO: 341861
  Synthetic oligonucleotide

SEQ ID NO: 553984 - DNA, 59 bp, Artificial; identical to SEQ ID NO: 341862
  Synthetic oligonucleotide

SEQ ID NO: 553985 - DNA, 60 bp, Artificial; identical to SEQ ID NO: 341863
  Synthetic oligonucleotide

SEQ ID NO: 553986 - DNA, 56 bp, Artificial; identical to SEQ ID NO: 341864
  Synthetic oligonucleotide

SEQ ID NO: 553987 - DNA, 55 bp, Artificial; identical to SEQ ID NO: 341867
  Synthetic oligonucleotide

SEQ ID NO: 553988 - DNA, 52 bp, Artificial; identical to SEQ ID NO: 341870
  Synthetic oligonucleotide

SEQ ID NO: 553989 - DNA, 52 bp, Artificial; identical to SEQ ID NO: 7866
  Synthetic oligonucleotide

SEQ ID NO: 553990 - DNA, 60 bp, Artificial; identical to SEQ ID NO: 341879
  Synthetic oligonucleotide

SEQ ID NO: 553991 - DNA, 50 bp, Artificial; identical to SEQ ID NO: 341880
  Synthetic oligonucleotide

SEQ ID NO: 553992 - DNA, 55 bp, Artificial; identical to SEQ ID NO: 341881
  Synthetic oligonucleotide

SEQ ID NO: 553993 - DNA, 55 bp, Artificial; identical to SEQ ID NO: 341883
  Synthetic oligonucleotide

SEQ ID NO: 553994 - DNA, 60 bp, Artificial; identical to SEQ ID NO: 341884
  Synthetic oligonucleotide

SEQ ID NO: 553995 - DNA, 50 bp, Artificial; identical to SEQ ID NO: 341885
  Synthetic oligonucleotide

SEQ ID NO: 553996 - DNA, 55 bp, Artificial; identical to SEQ ID NO: 341886
  Synthetic oligonucleotide

SEQ ID NO: 553997 - DNA, 60 bp, Artificial; identical to SEQ ID NO: 341888
  Synthetic oligonucleotide

SEQ ID NO: 553998 - DNA, 52 bp, Artificial; identical to SEQ ID NO: 341889
  Synthetic oligonucleotide

SEQ ID NO: 553999 - DNA, 57 bp, Artificial; identical to SEQ ID NO: 341893
  Synthetic oligonucleotide

SEQ ID NO: 554000 - DNA, 57 bp, Artificial; identical to SEQ ID NO: 341896
  Synthetic oligonucleotide

SEQ ID NO: 554001 - DNA, 54 bp, Artificial; identical to SEQ ID NO: 341897
  Synthetic oligonucleotide

SEQ ID NO: 554002 - DNA, 55 bp, Artificial; identical to SEQ ID NO: 341899
  Synthetic oligonucleotide

SEQ ID NO: 554003 - DNA, 60 bp, Artificial; identical to SEQ ID NO: 341906
  Synthetic oligonucleotide

SEQ ID NO: 554004 - DNA, 60 bp, Artificial; identical to SEQ ID NO: 341907
  Synthetic oligonucleotide

SEQ ID NO: 554005 - DNA, 60 bp, Artificial; identical to SEQ ID NO: 341910
  Synthetic oligonucleotide

SEQ ID NO: 554006 - DNA, 53 bp, Artificial; identical to SEQ ID NO: 341911
  Synthetic oligonucleotide

SEQ ID NO: 554007 - DNA, 55 bp, Artificial; identical to SEQ ID NO: 341912
  Synthetic oligonucleotide

SEQ ID NO: 554008 - DNA, 60 bp, Artificial; identical to SEQ ID NO: 341913
  Synthetic oligonucleotide

SEQ ID NO: 554009 - DNA, 59 bp, Artificial; identical to SEQ ID NO: 341915
  Synthetic oligonucleotide

SEQ ID NO: 554010 - DNA, 52 bp, Artificial; identical to SEQ ID NO: 341921
  Synthetic oligonucleotide

SEQ ID NO: 554011 - DNA, 59 bp, Artificial; identical to SEQ ID NO: 341922
  Synthetic oligonucleotide

SEQ ID NO: 554012 - DNA, 53 bp, Artificial; identical to SEQ ID NO: 341926
  Synthetic oligonucleotide

SEQ ID NO: 554013 - DNA, 60 bp, Artificial; identical to SEQ ID NO: 341929
  Synthetic oligonucleotide

SEQ ID NO: 554014 - DNA, 60 bp, Artificial; identical to SEQ ID NO: 341932
  Synthetic oligonucleotide

SEQ ID NO: 554015 - DNA, 60 bp, Artificial; identical to SEQ ID NO: 341942
  Synthetic oligonucleotide

SEQ ID NO: 554016 - DNA, 60 bp, Artificial; identical to SEQ ID NO: 341943
  Synthetic oligonucleotide

SEQ ID NO: 554017 - DNA, 58 bp, Artificial; identical to SEQ ID NO: 341948
  Synthetic oligonucleotide

SEQ ID NO: 554018 - DNA, 60 bp, Artificial; identical to SEQ ID NO: 341949
  Synthetic oligonucleotide

SEQ ID NO: 554019 - DNA, 54 bp, Artificial; identical to SEQ ID NO: 341950
  Synthetic oligonucleotide

SEQ ID NO: 554020 - DNA, 60 bp, Artificial; identical to SEQ ID NO: 341951
  Synthetic oligonucleotide

SEQ ID NO: 554021 - DNA, 60 bp, Artificial; identical to SEQ ID NO: 341956
  Synthetic oligonucleotide

SEQ ID NO: 554022 - DNA, 54 bp, Artificial; identical to SEQ ID NO: 341957
  Synthetic oligonucleotide

SEQ ID NO: 554023 - DNA, 60 bp, Artificial; identical to SEQ ID NO: 341960
  Synthetic oligonucleotide

SEQ ID NO: 554024 - DNA, 58 bp, Artificial; identical to SEQ ID NO: 341961
  Synthetic oligonucleotide

SEQ ID NO: 554025 - DNA, 59 bp, Artificial; identical to SEQ ID NO: 341967
  Synthetic oligonucleotide

SEQ ID NO: 554026 - DNA, 55 bp, Artificial; identical to SEQ ID NO: 341968
  Synthetic oligonucleotide

SEQ ID NO: 554027 - DNA, 59 bp, Artificial; identical to SEQ ID NO: 341969
  Synthetic oligonucleotide

SEQ ID NO: 554028 - DNA, 58 bp, Artificial; identical to SEQ ID NO: 341973
  Synthetic oligonucleotide

SEQ ID NO: 554029 - DNA, 55 bp, Artificial; identical to SEQ ID NO: 341978
  Synthetic oligonucleotide

SEQ ID NO: 554030 - DNA, 60 bp, Artificial; identical to SEQ ID NO: 8044
  Synthetic oligonucleotide

SEQ ID NO: 554031 - DNA, 52 bp, Artificial; identical to SEQ ID NO: 341980
  Synthetic oligonucleotide

SEQ ID NO: 554032 - DNA, 50 bp, Artificial; identical to SEQ ID NO: 341981
  Synthetic oligonucleotide

SEQ ID NO: 554033 - DNA, 60 bp, Artificial; identical to SEQ ID NO: 341982
  Synthetic oligonucleotide

SEQ ID NO: 554034 - DNA, 56 bp, Artificial; identical to SEQ ID NO: 341984
  Synthetic oligonucleotide

SEQ ID NO: 554035 - DNA, 51 bp, Artificial; identical to SEQ ID NO: 341988
  Synthetic oligonucleotide

SEQ ID NO: 554036 - DNA, 55 bp, Artificial; identical to SEQ ID NO: 341991
  Synthetic oligonucleotide

SEQ ID NO: 554037 - DNA, 53 bp, Artificial; identical to SEQ ID NO: 341992
  Synthetic oligonucleotide

SEQ ID NO: 554038 - DNA, 60 bp, Artificial; identical to SEQ ID NO: 341993
  Synthetic oligonucleotide

SEQ ID NO: 554039 - DNA, 57 bp, Artificial; identical to SEQ ID NO: 341997
  Synthetic oligonucleotide

SEQ ID NO: 554040 - DNA, 55 bp, Artificial; identical to SEQ ID NO: 341999
  Synthetic oligonucleotide

SEQ ID NO: 554041 - DNA, 60 bp, Artificial; identical to SEQ ID NO: 7069
  Synthetic oligonucleotide

SEQ ID NO: 554042 - DNA, 57 bp, Artificial; identical to SEQ ID NO: 342000
  Synthetic oligonucleotide

SEQ ID NO: 554043 - DNA, 60 bp, Artificial; identical to SEQ ID NO: 342001
  Synthetic oligonucleotide

SEQ ID NO: 554044 - DNA, 60 bp, Artificial; identical to SEQ ID NO: 342003
  Synthetic oligonucleotide

SEQ ID NO: 554045 - DNA, 60 bp, Artificial; identical to SEQ ID NO: 342005
  Synthetic oligonucleotide

SEQ ID NO: 554046 - DNA, 57 bp, Artificial; identical to SEQ ID NO: 342009
  Synthetic oligonucleotide

SEQ ID NO: 554047 - DNA, 58 bp, Artificial; identical to SEQ ID NO: 342013
  Synthetic oligonucleotide

SEQ ID NO: 554048 - DNA, 60 bp, Artificial; identical to SEQ ID NO: 342015
  Synthetic oligonucleotide

SEQ ID NO: 554049 - DNA, 55 bp, Artificial; identical to SEQ ID NO: 342018
  Synthetic oligonucleotide

SEQ ID NO: 554050 - DNA, 55 bp, Artificial; identical to SEQ ID NO: 342023
  Synthetic oligonucleotide

SEQ ID NO: 554051 - DNA, 60 bp, Artificial; identical to SEQ ID NO: 342024
  Synthetic oligonucleotide

SEQ ID NO: 554052 - DNA, 56 bp, Artificial; identical to SEQ ID NO: 342026
  Synthetic oligonucleotide

SEQ ID NO: 554053 - DNA, 59 bp, Artificial; identical to SEQ ID NO: 342027
  Synthetic oligonucleotide

SEQ ID NO: 554054 - DNA, 60 bp, Artificial; identical to SEQ ID NO: 342031
  Synthetic oligonucleotide

SEQ ID NO: 554055 - DNA, 59 bp, Artificial; identical to SEQ ID NO: 342034
  Synthetic oligonucleotide

SEQ ID NO: 554056 - DNA, 60 bp, Artificial; identical to SEQ ID NO: 342035
  Synthetic oligonucleotide

SEQ ID NO: 554057 - DNA, 60 bp, Artificial; identical to SEQ ID NO: 7332
  Synthetic oligonucleotide

SEQ ID NO: 554058 - DNA, 60 bp, Artificial; identical to SEQ ID NO: 342037
  Synthetic oligonucleotide

SEQ ID NO: 554059 - DNA, 59 bp, Artificial; identical to SEQ ID NO: 342040
  Synthetic oligonucleotide

SEQ ID NO: 554060 - DNA, 56 bp, Artificial; identical to SEQ ID NO: 17326
  Synthetic oligonucleotide

SEQ ID NO: 554061 - DNA, 53 bp, Artificial; identical to SEQ ID NO: 342043
  Synthetic oligonucleotide

SEQ ID NO: 554062 - DNA, 56 bp, Artificial; identical to SEQ ID NO: 342044
  Synthetic oligonucleotide

SEQ ID NO: 554063 - DNA, 55 bp, Artificial; identical to SEQ ID NO: 342045
  Synthetic oligonucleotide

SEQ ID NO: 554064 - DNA, 55 bp, Artificial; identical to SEQ ID NO: 342050
  Synthetic oligonucleotide

SEQ ID NO: 554065 - DNA, 60 bp, Artificial; identical to SEQ ID NO: 342053
  Synthetic oligonucleotide

SEQ ID NO: 554066 - DNA, 55 bp, Artificial; identical to SEQ ID NO: 342056
  Synthetic oligonucleotide

SEQ ID NO: 554067 - DNA, 54 bp, Artificial; identical to SEQ ID NO: 161
  Synthetic oligonucleotide

SEQ ID NO: 554068 - DNA, 51 bp, Artificial; identical to SEQ ID NO: 342059
  Synthetic oligonucleotide

SEQ ID NO: 554069 - DNA, 60 bp, Artificial; identical to SEQ ID NO: 342061
  Synthetic oligonucleotide

SEQ ID NO: 554070 - DNA, 60 bp, Artificial; identical to SEQ ID NO: 12203
  Synthetic oligonucleotide

SEQ ID NO: 554071 - DNA, 60 bp, Artificial; identical to SEQ ID NO: 342066
  Synthetic oligonucleotide

SEQ ID NO: 554072 - DNA, 55 bp, Artificial; identical to SEQ ID NO: 342067
  Synthetic oligonucleotide

SEQ ID NO: 554073 - DNA, 60 bp, Artificial; identical to SEQ ID NO: 342068
  Synthetic oligonucleotide

SEQ ID NO: 554074 - DNA, 60 bp, Artificial; identical to SEQ ID NO: 342076
  Synthetic oligonucleotide

SEQ ID NO: 554075 - DNA, 52 bp, Artificial; identical to SEQ ID NO: 342085
  Synthetic oligonucleotide

SEQ ID NO: 554076 - DNA, 60 bp, Artificial; identical to SEQ ID NO: 342088
  Synthetic oligonucleotide

SEQ ID NO: 554077 - DNA, 58 bp, Artificial; identical to SEQ ID NO: 342090
  Synthetic oligonucleotide

SEQ ID NO: 554078 - DNA, 60 bp, Artificial; identical to SEQ ID NO: 342092
  Synthetic oligonucleotide

SEQ ID NO: 554079 - DNA, 55 bp, Artificial; identical to SEQ ID NO: 12152
  Synthetic oligonucleotide

SEQ ID NO: 554080 - DNA, 55 bp, Artificial; identical to SEQ ID NO: 342096
  Synthetic oligonucleotide

SEQ ID NO: 554081 - DNA, 50 bp, Artificial; identical to SEQ ID NO: 342097
  Synthetic oligonucleotide

SEQ ID NO: 554082 - DNA, 55 bp, Artificial; identical to SEQ ID NO: 342098
  Synthetic oligonucleotide

SEQ ID NO: 554083 - DNA, 52 bp, Artificial; identical to SEQ ID NO: 342100
  Synthetic oligonucleotide

SEQ ID NO: 554084 - DNA, 56 bp, Artificial; identical to SEQ ID NO: 342101
  Synthetic oligonucleotide

SEQ ID NO: 554085 - DNA, 60 bp, Artificial; identical to SEQ ID NO: 342105
  Synthetic oligonucleotide

SEQ ID NO: 554086 - DNA, 59 bp, Artificial; identical to SEQ ID NO: 342107
  Synthetic oligonucleotide

SEQ ID NO: 554087 - DNA, 60 bp, Artificial; identical to SEQ ID NO: 342108
  Synthetic oligonucleotide

SEQ ID NO: 554088 - DNA, 55 bp, Artificial; identical to SEQ ID NO: 342109
  Synthetic oligonucleotide

SEQ ID NO: 554089 - DNA, 60 bp, Artificial; identical to SEQ ID NO: 342110
  Synthetic oligonucleotide

SEQ ID NO: 554090 - DNA, 50 bp, Artificial; identical to SEQ ID NO: 342111
  Synthetic oligonucleotide

SEQ ID NO: 554091 - DNA, 60 bp, Artificial; identical to SEQ ID NO: 342112
  Synthetic oligonucleotide

SEQ ID NO: 554092 - DNA, 60 bp, Artificial; identical to SEQ ID NO: 342113
  Synthetic oligonucleotide

SEQ ID NO: 554093 - DNA, 55 bp, Artificial; identical to SEQ ID NO: 342117
  Synthetic oligonucleotide

SEQ ID NO: 554094 - DNA, 55 bp, Artificial; identical to SEQ ID NO: 342118
  Synthetic oligonucleotide

SEQ ID NO: 554095 - DNA, 60 bp, Artificial; identical to SEQ ID NO: 342121
  Synthetic oligonucleotide

SEQ ID NO: 554096 - DNA, 60 bp, Artificial; identical to SEQ ID NO: 342124
  Synthetic oligonucleotide

SEQ ID NO: 554097 - DNA, 60 bp, Artificial; identical to SEQ ID NO: 342129
  Synthetic oligonucleotide

SEQ ID NO: 554098 - DNA, 58 bp, Artificial; identical to SEQ ID NO: 342130
  Synthetic oligonucleotide

SEQ ID NO: 554099 - DNA, 58 bp, Artificial; identical to SEQ ID NO: 342132
  Synthetic oligonucleotide

SEQ ID NO: 554100 - DNA, 60 bp, Artificial; identical to SEQ ID NO: 342133
  Synthetic oligonucleotide

SEQ ID NO: 554101 - DNA, 50 bp, Artificial; identical to SEQ ID NO: 342136
  Synthetic oligonucleotide

SEQ ID NO: 554102 - DNA, 56 bp, Artificial; identical to SEQ ID NO: 342137
  Synthetic oligonucleotide

SEQ ID NO: 554103 - DNA, 51 bp, Artificial; identical to SEQ ID NO: 342139
  Synthetic oligonucleotide

SEQ ID NO: 554104 - DNA, 59 bp, Artificial; identical to SEQ ID NO: 342140
  Synthetic oligonucleotide

SEQ ID NO: 554105 - DNA, 60 bp, Artificial; identical to SEQ ID NO: 342142
  Synthetic oligonucleotide

SEQ ID NO: 554106 - DNA, 55 bp, Artificial; identical to SEQ ID NO: 342149
  Synthetic oligonucleotide

SEQ ID NO: 554107 - DNA, 60 bp, Artificial; identical to SEQ ID NO: 342150
  Synthetic oligonucleotide

SEQ ID NO: 554108 - DNA, 55 bp, Artificial; identical to SEQ ID NO: 342151
  Synthetic oligonucleotide

SEQ ID NO: 554109 - DNA, 56 bp, Artificial; identical to SEQ ID NO: 342152
  Synthetic oligonucleotide

SEQ ID NO: 554110 - DNA, 55 bp, Artificial; identical to SEQ ID NO: 342155
  Synthetic oligonucleotide

SEQ ID NO: 554111 - DNA, 53 bp, Artificial; identical to SEQ ID NO: 342159
  Synthetic oligonucleotide

SEQ ID NO: 554112 - DNA, 60 bp, Artificial; identical to SEQ ID NO: 342160
  Synthetic oligonucleotide

SEQ ID NO: 554113 - DNA, 60 bp, Artificial; identical to SEQ ID NO: 342161
  Synthetic oligonucleotide

SEQ ID NO: 554114 - DNA, 60 bp, Artificial; identical to SEQ ID NO: 342167
  Synthetic oligonucleotide

SEQ ID NO: 554115 - DNA, 55 bp, Artificial; identical to SEQ ID NO: 342168
  Synthetic oligonucleotide

SEQ ID NO: 554116 - DNA, 55 bp, Artificial; identical to SEQ ID NO: 342169
  Synthetic oligonucleotide

SEQ ID NO: 554117 - DNA, 60 bp, Artificial; identical to SEQ ID NO: 342170
  Synthetic oligonucleotide

SEQ ID NO: 554118 - DNA, 58 bp, Artificial; identical to SEQ ID NO: 342173
  Synthetic oligonucleotide

SEQ ID NO: 554119 - DNA, 55 bp, Artificial; identical to SEQ ID NO: 342176
  Synthetic oligonucleotide

SEQ ID NO: 554120 - DNA, 60 bp, Artificial; identical to SEQ ID NO: 11735
  Synthetic oligonucleotide

SEQ ID NO: 554121 - DNA, 55 bp, Artificial; identical to SEQ ID NO: 342177
  Synthetic oligonucleotide

SEQ ID NO: 554122 - DNA, 57 bp, Artificial; identical to SEQ ID NO: 342180
  Synthetic oligonucleotide

SEQ ID NO: 554123 - DNA, 60 bp, Artificial; identical to SEQ ID NO: 342182
  Synthetic oligonucleotide

SEQ ID NO: 554124 - DNA, 60 bp, Artificial; identical to SEQ ID NO: 342185
  Synthetic oligonucleotide

SEQ ID NO: 554125 - DNA, 60 bp, Artificial; identical to SEQ ID NO: 342186
  Synthetic oligonucleotide

SEQ ID NO: 554126 - DNA, 60 bp, Artificial; identical to SEQ ID NO: 342187
  Synthetic oligonucleotide

SEQ ID NO: 554127 - DNA, 57 bp, Artificial; identical to SEQ ID NO: 342189
  Synthetic oligonucleotide

SEQ ID NO: 554128 - DNA, 60 bp, Artificial; identical to SEQ ID NO: 342190
  Synthetic oligonucleotide

SEQ ID NO: 554129 - DNA, 60 bp, Artificial; identical to SEQ ID NO: 342191
  Synthetic oligonucleotide

SEQ ID NO: 554130 - DNA, 57 bp, Artificial; identical to SEQ ID NO: 342194
  Synthetic oligonucleotide

SEQ ID NO: 554131 - DNA, 57 bp, Artificial; identical to SEQ ID NO: 18796
  Synthetic oligonucleotide

SEQ ID NO: 554132 - DNA, 60 bp, Artificial; identical to SEQ ID NO: 7373
  Synthetic oligonucleotide

SEQ ID NO: 554133 - DNA, 55 bp, Artificial; identical to SEQ ID NO: 342197
  Synthetic oligonucleotide

SEQ ID NO: 554134 - DNA, 54 bp, Artificial; identical to SEQ ID NO: 342199
  Synthetic oligonucleotide

SEQ ID NO: 554135 - DNA, 60 bp, Artificial; identical to SEQ ID NO: 342207
  Synthetic oligonucleotide

SEQ ID NO: 554136 - DNA, 50 bp, Artificial; identical to SEQ ID NO: 342208
  Synthetic oligonucleotide

SEQ ID NO: 554137 - DNA, 58 bp, Artificial; identical to SEQ ID NO: 342211
  Synthetic oligonucleotide

SEQ ID NO: 554138 - DNA, 51 bp, Artificial; identical to SEQ ID NO: 342212
  Synthetic oligonucleotide

SEQ ID NO: 554139 - DNA, 50 bp, Artificial; identical to SEQ ID NO: 342213
  Synthetic oligonucleotide

SEQ ID NO: 554140 - DNA, 55 bp, Artificial; identical to SEQ ID NO: 342214
  Synthetic oligonucleotide

SEQ ID NO: 554141 - DNA, 57 bp, Artificial; identical to SEQ ID NO: 342220
  Synthetic oligonucleotide

SEQ ID NO: 554142 - DNA, 60 bp, Artificial; identical to SEQ ID NO: 342221
  Synthetic oligonucleotide

SEQ ID NO: 554143 - DNA, 60 bp, Artificial; identical to SEQ ID NO: 342222
  Synthetic oligonucleotide

SEQ ID NO: 554144 - DNA, 60 bp, Artificial; identical to SEQ ID NO: 342223
  Synthetic oligonucleotide

SEQ ID NO: 554145 - DNA, 60 bp, Artificial; identical to SEQ ID NO: 342225
  Synthetic oligonucleotide

SEQ ID NO: 554146 - DNA, 60 bp, Artificial; identical to SEQ ID NO: 342232
  Synthetic oligonucleotide

SEQ ID NO: 554147 - DNA, 60 bp, Artificial; identical to SEQ ID NO: 342233
  Synthetic oligonucleotide

SEQ ID NO: 554148 - DNA, 55 bp, Artificial; identical to SEQ ID NO: 342238
  Synthetic oligonucleotide

SEQ ID NO: 554149 - DNA, 55 bp, Artificial; identical to SEQ ID NO: 342243
  Synthetic oligonucleotide

SEQ ID NO: 554150 - DNA, 58 bp, Artificial; identical to SEQ ID NO: 342246
  Synthetic oligonucleotide

SEQ ID NO: 554151 - DNA, 60 bp, Artificial; identical to SEQ ID NO: 342247
  Synthetic oligonucleotide

SEQ ID NO: 554152 - DNA, 53 bp, Artificial; identical to SEQ ID NO: 342249
  Synthetic oligonucleotide

SEQ ID NO: 554153 - DNA, 54 bp, Artificial; identical to SEQ ID NO: 342251
  Synthetic oligonucleotide

SEQ ID NO: 554154 - DNA, 53 bp, Artificial; identical to SEQ ID NO: 342253
  Synthetic oligonucleotide

SEQ ID NO: 554155 - DNA, 58 bp, Artificial; identical to SEQ ID NO: 342255
  Synthetic oligonucleotide

SEQ ID NO: 554156 - DNA, 53 bp, Artificial; identical to SEQ ID NO: 342257
  Synthetic oligonucleotide

SEQ ID NO: 554157 - DNA, 50 bp, Artificial; identical to SEQ ID NO: 342260
  Synthetic oligonucleotide

SEQ ID NO: 554158 - DNA, 55 bp, Artificial; identical to SEQ ID NO: 342262
  Synthetic oligonucleotide

SEQ ID NO: 554159 - DNA, 58 bp, Artificial; identical to SEQ ID NO: 342266
  Synthetic oligonucleotide

SEQ ID NO: 554160 - DNA, 55 bp, Artificial; identical to SEQ ID NO: 342267
  Synthetic oligonucleotide

SEQ ID NO: 554161 - DNA, 57 bp, Artificial; identical to SEQ ID NO: 342271
  Synthetic oligonucleotide

SEQ ID NO: 554162 - DNA, 60 bp, Artificial; identical to SEQ ID NO: 342274
  Synthetic oligonucleotide

SEQ ID NO: 554163 - DNA, 60 bp, Artificial; identical to SEQ ID NO: 342275
  Synthetic oligonucleotide

SEQ ID NO: 554164 - DNA, 55 bp, Artificial; identical to SEQ ID NO: 342278
  Synthetic oligonucleotide

SEQ ID NO: 554165 - DNA, 60 bp, Artificial; identical to SEQ ID NO: 342279
  Synthetic oligonucleotide

SEQ ID NO: 554166 - DNA, 55 bp, Artificial; identical to SEQ ID NO: 342280
  Synthetic oligonucleotide

SEQ ID NO: 554167 - DNA, 55 bp, Artificial; identical to SEQ ID NO: 342288
  Synthetic oligonucleotide

SEQ ID NO: 554168 - DNA, 60 bp, Artificial; identical to SEQ ID NO: 342290
  Synthetic oligonucleotide

SEQ ID NO: 554169 - DNA, 54 bp, Artificial; identical to SEQ ID NO: 342292
  Synthetic oligonucleotide

SEQ ID NO: 554170 - DNA, 60 bp, Artificial; identical to SEQ ID NO: 342293
  Synthetic oligonucleotide

SEQ ID NO: 554171 - DNA, 52 bp, Artificial; identical to SEQ ID NO: 342294
  Synthetic oligonucleotide

SEQ ID NO: 554172 - DNA, 60 bp, Artificial; identical to SEQ ID NO: 342296
  Synthetic oligonucleotide

SEQ ID NO: 554173 - DNA, 60 bp, Artificial; identical to SEQ ID NO: 342299
  Synthetic oligonucleotide

SEQ ID NO: 554174 - DNA, 60 bp, Artificial; identical to SEQ ID NO: 342301
  Synthetic oligonucleotide

SEQ ID NO: 554175 - DNA, 60 bp, Artificial; identical to SEQ ID NO: 342304
  Synthetic oligonucleotide

SEQ ID NO: 554176 - DNA, 58 bp, Artificial; identical to SEQ ID NO: 342307
  Synthetic oligonucleotide

SEQ ID NO: 554177 - DNA, 57 bp, Artificial; identical to SEQ ID NO: 6652
  Synthetic oligonucleotide

SEQ ID NO: 554178 - DNA, 60 bp, Artificial; identical to SEQ ID NO: 342308
  Synthetic oligonucleotide

SEQ ID NO: 554179 - DNA, 57 bp, Artificial; identical to SEQ ID NO: 342309
  Synthetic oligonucleotide

SEQ ID NO: 554180 - DNA, 53 bp, Artificial; identical to SEQ ID NO: 16516
  Synthetic oligonucleotide

SEQ ID NO: 554181 - DNA, 55 bp, Artificial; identical to SEQ ID NO: 342315
  Synthetic oligonucleotide

SEQ ID NO: 554182 - DNA, 60 bp, Artificial; identical to SEQ ID NO: 342318
  Synthetic oligonucleotide

SEQ ID NO: 554183 - DNA, 60 bp, Artificial; identical to SEQ ID NO: 342319
  Synthetic oligonucleotide

SEQ ID NO: 554184 - DNA, 58 bp, Artificial; identical to SEQ ID NO: 342323
  Synthetic oligonucleotide

SEQ ID NO: 554185 - DNA, 53 bp, Artificial; identical to SEQ ID NO: 342325
  Synthetic oligonucleotide

SEQ ID NO: 554186 - DNA, 55 bp, Artificial; identical to SEQ ID NO: 342326
  Synthetic oligonucleotide

SEQ ID NO: 554187 - DNA, 58 bp, Artificial; identical to SEQ ID NO: 342327
  Synthetic oligonucleotide

SEQ ID NO: 554188 - DNA, 55 bp, Artificial; identical to SEQ ID NO: 342329
  Synthetic oligonucleotide

SEQ ID NO: 554189 - DNA, 56 bp, Artificial; identical to SEQ ID NO: 342331
  Synthetic oligonucleotide

SEQ ID NO: 554190 - DNA, 57 bp, Artificial; identical to SEQ ID NO: 342332
  Synthetic oligonucleotide

SEQ ID NO: 554191 - DNA, 55 bp, Artificial; identical to SEQ ID NO: 342335
  Synthetic oligonucleotide

SEQ ID NO: 554192 - DNA, 57 bp, Artificial; identical to SEQ ID NO: 342337
  Synthetic oligonucleotide

SEQ ID NO: 554193 - DNA, 55 bp, Artificial; identical to SEQ ID NO: 342339
  Synthetic oligonucleotide

SEQ ID NO: 554194 - DNA, 55 bp, Artificial; identical to SEQ ID NO: 342340
  Synthetic oligonucleotide

SEQ ID NO: 554195 - DNA, 58 bp, Artificial; identical to SEQ ID NO: 342341
  Synthetic oligonucleotide

SEQ ID NO: 554196 - DNA, 60 bp, Artificial; identical to SEQ ID NO: 342342
  Synthetic oligonucleotide

SEQ ID NO: 554197 - DNA, 60 bp, Artificial; identical to SEQ ID NO: 342346
  Synthetic oligonucleotide

SEQ ID NO: 554198 - DNA, 59 bp, Artificial; identical to SEQ ID NO: 342348
  Synthetic oligonucleotide

SEQ ID NO: 554199 - DNA, 60 bp, Artificial; identical to SEQ ID NO: 342349
  Synthetic oligonucleotide

SEQ ID NO: 554200 - DNA, 57 bp, Artificial; identical to SEQ ID NO: 342351
  Synthetic oligonucleotide

SEQ ID NO: 554201 - DNA, 59 bp, Artificial; identical to SEQ ID NO: 342353
  Synthetic oligonucleotide

SEQ ID NO: 554202 - DNA, 60 bp, Artificial; identical to SEQ ID NO: 342355
  Synthetic oligonucleotide

SEQ ID NO: 554203 - DNA, 60 bp, Artificial; identical to SEQ ID NO: 342357
  Synthetic oligonucleotide

SEQ ID NO: 554204 - DNA, 60 bp, Artificial; identical to SEQ ID NO: 342359
  Synthetic oligonucleotide

SEQ ID NO: 554205 - DNA, 58 bp, Artificial; identical to SEQ ID NO: 342361
  Synthetic oligonucleotide

SEQ ID NO: 554206 - DNA, 51 bp, Artificial; identical to SEQ ID NO: 342365
  Synthetic oligonucleotide

SEQ ID NO: 554207 - DNA, 60 bp, Artificial; identical to SEQ ID NO: 342367
  Synthetic oligonucleotide

SEQ ID NO: 554208 - DNA, 52 bp, Artificial; identical to SEQ ID NO: 342368
  Synthetic oligonucleotide

SEQ ID NO: 554209 - DNA, 55 bp, Artificial; identical to SEQ ID NO: 342372
  Synthetic oligonucleotide

SEQ ID NO: 554210 - DNA, 60 bp, Artificial; identical to SEQ ID NO: 342373
  Synthetic oligonucleotide

SEQ ID NO: 554211 - DNA, 60 bp, Artificial; identical to SEQ ID NO: 342374
  Synthetic oligonucleotide

SEQ ID NO: 554212 - DNA, 55 bp, Artificial; identical to SEQ ID NO: 342375
  Synthetic oligonucleotide

SEQ ID NO: 554213 - DNA, 50 bp, Artificial; identical to SEQ ID NO: 342377
  Synthetic oligonucleotide

SEQ ID NO: 554214 - DNA, 59 bp, Artificial; identical to SEQ ID NO: 342378
  Synthetic oligonucleotide

SEQ ID NO: 554215 - DNA, 55 bp, Artificial; identical to SEQ ID NO: 20460
  Synthetic oligonucleotide

SEQ ID NO: 554216 - DNA, 60 bp, Artificial; identical to SEQ ID NO: 7034
  Synthetic oligonucleotide

SEQ ID NO: 554217 - DNA, 60 bp, Artificial; identical to SEQ ID NO: 342385
  Synthetic oligonucleotide

SEQ ID NO: 554218 - DNA, 60 bp, Artificial; identical to SEQ ID NO: 342386
  Synthetic oligonucleotide

SEQ ID NO: 554219 - DNA, 53 bp, Artificial; identical to SEQ ID NO: 342389
  Synthetic oligonucleotide

SEQ ID NO: 554220 - DNA, 60 bp, Artificial; identical to SEQ ID NO: 342390
  Synthetic oligonucleotide

SEQ ID NO: 554221 - DNA, 54 bp, Artificial; identical to SEQ ID NO: 342392
  Synthetic oligonucleotide

SEQ ID NO: 554222 - DNA, 50 bp, Artificial; identical to SEQ ID NO: 342393
  Synthetic oligonucleotide

SEQ ID NO: 554223 - DNA, 58 bp, Artificial; identical to SEQ ID NO: 342396
  Synthetic oligonucleotide

SEQ ID NO: 554224 - DNA, 53 bp, Artificial; identical to SEQ ID NO: 11540
  Synthetic oligonucleotide

SEQ ID NO: 554225 - DNA, 60 bp, Artificial; identical to SEQ ID NO: 342397
  Synthetic oligonucleotide

SEQ ID NO: 554226 - DNA, 55 bp, Artificial; identical to SEQ ID NO: 342400
  Synthetic oligonucleotide

SEQ ID NO: 554227 - DNA, 53 bp, Artificial; identical to SEQ ID NO: 342401
  Synthetic oligonucleotide

SEQ ID NO: 554228 - DNA, 60 bp, Artificial; identical to SEQ ID NO: 342402
  Synthetic oligonucleotide

SEQ ID NO: 554229 - DNA, 56 bp, Artificial; identical to SEQ ID NO: 342407
  Synthetic oligonucleotide

SEQ ID NO: 554230 - DNA, 54 bp, Artificial; identical to SEQ ID NO: 342408
  Synthetic oligonucleotide

SEQ ID NO: 554231 - DNA, 54 bp, Artificial; identical to SEQ ID NO: 342411
  Synthetic oligonucleotide

SEQ ID NO: 554232 - DNA, 55 bp, Artificial; identical to SEQ ID NO: 342414
  Synthetic oligonucleotide

SEQ ID NO: 554233 - DNA, 54 bp, Artificial; identical to SEQ ID NO: 342419
  Synthetic oligonucleotide

SEQ ID NO: 554234 - DNA, 60 bp, Artificial; identical to SEQ ID NO: 342422
  Synthetic oligonucleotide

SEQ ID NO: 554235 - DNA, 55 bp, Artificial; identical to SEQ ID NO: 342423
  Synthetic oligonucleotide

SEQ ID NO: 554236 - DNA, 57 bp, Artificial; identical to SEQ ID NO: 342424
  Synthetic oligonucleotide

SEQ ID NO: 554237 - DNA, 59 bp, Artificial; identical to SEQ ID NO: 342425
  Synthetic oligonucleotide

SEQ ID NO: 554238 - DNA, 60 bp, Artificial; identical to SEQ ID NO: 342427
  Synthetic oligonucleotide

SEQ ID NO: 554239 - DNA, 55 bp, Artificial; identical to SEQ ID NO: 342428
  Synthetic oligonucleotide

SEQ ID NO: 554240 - DNA, 60 bp, Artificial; identical to SEQ ID NO: 342429
  Synthetic oligonucleotide

SEQ ID NO: 554241 - DNA, 58 bp, Artificial; identical to SEQ ID NO: 342432
  Synthetic oligonucleotide

SEQ ID NO: 554242 - DNA, 60 bp, Artificial; identical to SEQ ID NO: 342433
  Synthetic oligonucleotide

SEQ ID NO: 554243 - DNA, 55 bp, Artificial; identical to SEQ ID NO: 7182
  Synthetic oligonucleotide

SEQ ID NO: 554244 - DNA, 59 bp, Artificial; identical to SEQ ID NO: 342434
  Synthetic oligonucleotide

SEQ ID NO: 554245 - DNA, 55 bp, Artificial; identical to SEQ ID NO: 342436
  Synthetic oligonucleotide

SEQ ID NO: 554246 - DNA, 55 bp, Artificial; identical to SEQ ID NO: 342440
  Synthetic oligonucleotide

SEQ ID NO: 554247 - DNA, 59 bp, Artificial; identical to SEQ ID NO: 342441
  Synthetic oligonucleotide

SEQ ID NO: 554248 - DNA, 60 bp, Artificial; identical to SEQ ID NO: 120724
  Synthetic oligonucleotide

SEQ ID NO: 554249 - DNA, 60 bp, Artificial; identical to SEQ ID NO: 14231
  Synthetic oligonucleotide

SEQ ID NO: 554250 - DNA, 55 bp, Artificial; identical to SEQ ID NO: 342443
  Synthetic oligonucleotide

SEQ ID NO: 554251 - DNA, 54 bp, Artificial; identical to SEQ ID NO: 342446
  Synthetic oligonucleotide

SEQ ID NO: 554252 - DNA, 59 bp, Artificial; identical to SEQ ID NO: 342449
  Synthetic oligonucleotide

SEQ ID NO: 554253 - DNA, 55 bp, Artificial; identical to SEQ ID NO: 342455
  Synthetic oligonucleotide

SEQ ID NO: 554254 - DNA, 60 bp, Artificial; identical to SEQ ID NO: 342456
  Synthetic oligonucleotide

SEQ ID NO: 554255 - DNA, 59 bp, Artificial; identical to SEQ ID NO: 342457
  Synthetic oligonucleotide

SEQ ID NO: 554256 - DNA, 59 bp, Artificial; identical to SEQ ID NO: 14875
  Synthetic oligonucleotide

SEQ ID NO: 554257 - DNA, 54 bp, Artificial; identical to SEQ ID NO: 342459
  Synthetic oligonucleotide

SEQ ID NO: 554258 - DNA, 58 bp, Artificial; identical to SEQ ID NO: 342460
  Synthetic oligonucleotide

SEQ ID NO: 554259 - DNA, 59 bp, Artificial; identical to SEQ ID NO: 342464
  Synthetic oligonucleotide

SEQ ID NO: 554260 - DNA, 54 bp, Artificial; identical to SEQ ID NO: 342465
  Synthetic oligonucleotide

SEQ ID NO: 554261 - DNA, 50 bp, Artificial; identical to SEQ ID NO: 342466
  Synthetic oligonucleotide

SEQ ID NO: 554262 - DNA, 60 bp, Artificial; identical to SEQ ID NO: 342467
  Synthetic oligonucleotide

SEQ ID NO: 554263 - DNA, 55 bp, Artificial; identical to SEQ ID NO: 342475
  Synthetic oligonucleotide

SEQ ID NO: 554264 - DNA, 55 bp, Artificial; identical to SEQ ID NO: 342476
  Synthetic oligonucleotide

SEQ ID NO: 554265 - DNA, 59 bp, Artificial; identical to SEQ ID NO: 342478
  Synthetic oligonucleotide

SEQ ID NO: 554266 - DNA, 57 bp, Artificial; identical to SEQ ID NO: 342479
  Synthetic oligonucleotide

SEQ ID NO: 554267 - DNA, 55 bp, Artificial; identical to SEQ ID NO: 342481
  Synthetic oligonucleotide

SEQ ID NO: 554268 - DNA, 55 bp, Artificial; identical to SEQ ID NO: 342482
  Synthetic oligonucleotide

SEQ ID NO: 554269 - DNA, 52 bp, Artificial; identical to SEQ ID NO: 342483
  Synthetic oligonucleotide

SEQ ID NO: 554270 - DNA, 60 bp, Artificial; identical to SEQ ID NO: 342491
  Synthetic oligonucleotide

SEQ ID NO: 554271 - DNA, 55 bp, Artificial; identical to SEQ ID NO: 342495
  Synthetic oligonucleotide

SEQ ID NO: 554272 - DNA, 50 bp, Artificial; identical to SEQ ID NO: 342496
  Synthetic oligonucleotide

SEQ ID NO: 554273 - DNA, 60 bp, Artificial; identical to SEQ ID NO: 342497
  Synthetic oligonucleotide

SEQ ID NO: 554274 - DNA, 60 bp, Artificial; identical to SEQ ID NO: 342498
  Synthetic oligonucleotide

SEQ ID NO: 554275 - DNA, 54 bp, Artificial; identical to SEQ ID NO: 342500
  Synthetic oligonucleotide

SEQ ID NO: 554276 - DNA, 57 bp, Artificial; identical to SEQ ID NO: 342502
  Synthetic oligonucleotide

SEQ ID NO: 554277 - DNA, 59 bp, Artificial; identical to SEQ ID NO: 342503
  Synthetic oligonucleotide

SEQ ID NO: 554278 - DNA, 59 bp, Artificial; identical to SEQ ID NO: 342506
  Synthetic oligonucleotide

SEQ ID NO: 554279 - DNA, 50 bp, Artificial; identical to SEQ ID NO: 342512
  Synthetic oligonucleotide

SEQ ID NO: 554280 - DNA, 55 bp, Artificial; identical to SEQ ID NO: 342513
  Synthetic oligonucleotide

SEQ ID NO: 554281 - DNA, 58 bp, Artificial; identical to SEQ ID NO: 342515
  Synthetic oligonucleotide

SEQ ID NO: 554282 - DNA, 60 bp, Artificial; identical to SEQ ID NO: 342516
  Synthetic oligonucleotide

SEQ ID NO: 554283 - DNA, 54 bp, Artificial; identical to SEQ ID NO: 342517
  Synthetic oligonucleotide

SEQ ID NO: 554284 - DNA, 60 bp, Artificial; identical to SEQ ID NO: 342521
  Synthetic oligonucleotide

SEQ ID NO: 554285 - DNA, 57 bp, Artificial; identical to SEQ ID NO: 342528
  Synthetic oligonucleotide

SEQ ID NO: 554286 - DNA, 60 bp, Artificial; identical to SEQ ID NO: 342529
  Synthetic oligonucleotide

SEQ ID NO: 554287 - DNA, 59 bp, Artificial; identical to SEQ ID NO: 342530
  Synthetic oligonucleotide

SEQ ID NO: 554288 - DNA, 51 bp, Artificial; identical to SEQ ID NO: 342531
  Synthetic oligonucleotide

SEQ ID NO: 554289 - DNA, 56 bp, Artificial; identical to SEQ ID NO: 342532
  Synthetic oligonucleotide

SEQ ID NO: 554290 - DNA, 60 bp, Artificial; identical to SEQ ID NO: 342533
  Synthetic oligonucleotide

SEQ ID NO: 554291 - DNA, 60 bp, Artificial; identical to SEQ ID NO: 342535
  Synthetic oligonucleotide

SEQ ID NO: 554292 - DNA, 60 bp, Artificial; identical to SEQ ID NO: 342537
  Synthetic oligonucleotide

SEQ ID NO: 554293 - DNA, 60 bp, Artificial; identical to SEQ ID NO: 342538
  Synthetic oligonucleotide

SEQ ID NO: 554294 - DNA, 60 bp, Artificial; identical to SEQ ID NO: 342539
  Synthetic oligonucleotide

SEQ ID NO: 554295 - DNA, 55 bp, Artificial; identical to SEQ ID NO: 342542
  Synthetic oligonucleotide

SEQ ID NO: 554296 - DNA, 55 bp, Artificial; identical to SEQ ID NO: 342549
  Synthetic oligonucleotide

SEQ ID NO: 554297 - DNA, 60 bp, Artificial; identical to SEQ ID NO: 342551
  Synthetic oligonucleotide

SEQ ID NO: 554298 - DNA, 60 bp, Artificial; identical to SEQ ID NO: 342552
  Synthetic oligonucleotide

SEQ ID NO: 554299 - DNA, 55 bp, Artificial; identical to SEQ ID NO: 342559
  Synthetic oligonucleotide

SEQ ID NO: 554300 - DNA, 60 bp, Artificial; identical to SEQ ID NO: 342560
  Synthetic oligonucleotide

SEQ ID NO: 554301 - DNA, 60 bp, Artificial; identical to SEQ ID NO: 342561
  Synthetic oligonucleotide

SEQ ID NO: 554302 - DNA, 56 bp, Artificial; identical to SEQ ID NO: 342569
  Synthetic oligonucleotide

SEQ ID NO: 554303 - DNA, 51 bp, Artificial; identical to SEQ ID NO: 342574
  Synthetic oligonucleotide

SEQ ID NO: 554304 - DNA, 50 bp, Artificial; identical to SEQ ID NO: 342575
  Synthetic oligonucleotide

SEQ ID NO: 554305 - DNA, 60 bp, Artificial; identical to SEQ ID NO: 342577
  Synthetic oligonucleotide

SEQ ID NO: 554306 - DNA, 60 bp, Artificial; identical to SEQ ID NO: 342578
  Synthetic oligonucleotide

SEQ ID NO: 554307 - DNA, 55 bp, Artificial; identical to SEQ ID NO: 342583
  Synthetic oligonucleotide

SEQ ID NO: 554308 - DNA, 50 bp, Artificial; identical to SEQ ID NO: 342584
  Synthetic oligonucleotide

SEQ ID NO: 554309 - DNA, 55 bp, Artificial; identical to SEQ ID NO: 342585
  Synthetic oligonucleotide

SEQ ID NO: 554310 - DNA, 55 bp, Artificial; identical to SEQ ID NO: 342587
  Synthetic oligonucleotide

SEQ ID NO: 554311 - DNA, 56 bp, Artificial; identical to SEQ ID NO: 342588
  Synthetic oligonucleotide

SEQ ID NO: 554312 - DNA, 59 bp, Artificial; identical to SEQ ID NO: 342593
  Synthetic oligonucleotide

SEQ ID NO: 554313 - DNA, 59 bp, Artificial; identical to SEQ ID NO: 342594
  Synthetic oligonucleotide

SEQ ID NO: 554314 - DNA, 55 bp, Artificial; identical to SEQ ID NO: 342596
  Synthetic oligonucleotide

SEQ ID NO: 554315 - DNA, 57 bp, Artificial; identical to SEQ ID NO: 16777
  Synthetic oligonucleotide

SEQ ID NO: 554316 - DNA, 60 bp, Artificial; identical to SEQ ID NO: 342600
  Synthetic oligonucleotide

SEQ ID NO: 554317 - DNA, 55 bp, Artificial; identical to SEQ ID NO: 342602
  Synthetic oligonucleotide

SEQ ID NO: 554318 - DNA, 60 bp, Artificial; identical to SEQ ID NO: 342605
  Synthetic oligonucleotide

SEQ ID NO: 554319 - DNA, 59 bp, Artificial; identical to SEQ ID NO: 342606
  Synthetic oligonucleotide

SEQ ID NO: 554320 - DNA, 55 bp, Artificial; identical to SEQ ID NO: 342609
  Synthetic oligonucleotide

SEQ ID NO: 554321 - DNA, 55 bp, Artificial; identical to SEQ ID NO: 342610
  Synthetic oligonucleotide

SEQ ID NO: 554322 - DNA, 57 bp, Artificial; identical to SEQ ID NO: 342611
  Synthetic oligonucleotide

SEQ ID NO: 554323 - DNA, 52 bp, Artificial; identical to SEQ ID NO: 342614
  Synthetic oligonucleotide

SEQ ID NO: 554324 - DNA, 58 bp, Artificial; identical to SEQ ID NO: 342615
  Synthetic oligonucleotide

SEQ ID NO: 554325 - DNA, 58 bp, Artificial; identical to SEQ ID NO: 342616
  Synthetic oligonucleotide

SEQ ID NO: 554326 - DNA, 57 bp, Artificial; identical to SEQ ID NO: 342619
  Synthetic oligonucleotide

SEQ ID NO: 554327 - DNA, 56 bp, Artificial; identical to SEQ ID NO: 342622
  Synthetic oligonucleotide

SEQ ID NO: 554328 - DNA, 53 bp, Artificial; identical to SEQ ID NO: 342623
  Synthetic oligonucleotide

SEQ ID NO: 554329 - DNA, 60 bp, Artificial; identical to SEQ ID NO: 342625
  Synthetic oligonucleotide

SEQ ID NO: 554330 - DNA, 55 bp, Artificial; identical to SEQ ID NO: 342627
  Synthetic oligonucleotide

SEQ ID NO: 554331 - DNA, 60 bp, Artificial; identical to SEQ ID NO: 342629
  Synthetic oligonucleotide

SEQ ID NO: 554332 - DNA, 55 bp, Artificial; identical to SEQ ID NO: 342631
  Synthetic oligonucleotide

SEQ ID NO: 554333 - DNA, 57 bp, Artificial; identical to SEQ ID NO: 342632
  Synthetic oligonucleotide

SEQ ID NO: 554334 - DNA, 58 bp, Artificial; identical to SEQ ID NO: 342639
  Synthetic oligonucleotide

SEQ ID NO: 554335 - DNA, 52 bp, Artificial; identical to SEQ ID NO: 342640
  Synthetic oligonucleotide

SEQ ID NO: 554336 - DNA, 57 bp, Artificial; identical to SEQ ID NO: 342643
  Synthetic oligonucleotide

SEQ ID NO: 554337 - DNA, 52 bp, Artificial; identical to SEQ ID NO: 342646
  Synthetic oligonucleotide

SEQ ID NO: 554338 - DNA, 55 bp, Artificial; identical to SEQ ID NO: 342647
  Synthetic oligonucleotide

SEQ ID NO: 554339 - DNA, 60 bp, Artificial; identical to SEQ ID NO: 342650
  Synthetic oligonucleotide

SEQ ID NO: 554340 - DNA, 57 bp, Artificial; identical to SEQ ID NO: 16046
  Synthetic oligonucleotide

SEQ ID NO: 554341 - DNA, 55 bp, Artificial; identical to SEQ ID NO: 342654
  Synthetic oligonucleotide

SEQ ID NO: 554342 - DNA, 57 bp, Artificial; identical to SEQ ID NO: 342655
  Synthetic oligonucleotide

SEQ ID NO: 554343 - DNA, 55 bp, Artificial; identical to SEQ ID NO: 342656
  Synthetic oligonucleotide

SEQ ID NO: 554344 - DNA, 55 bp, Artificial; identical to SEQ ID NO: 342657
  Synthetic oligonucleotide

SEQ ID NO: 554345 - DNA, 52 bp, Artificial; identical to SEQ ID NO: 342658
  Synthetic oligonucleotide

SEQ ID NO: 554346 - DNA, 56 bp, Artificial; identical to SEQ ID NO: 342660
  Synthetic oligonucleotide

SEQ ID NO: 554347 - DNA, 55 bp, Artificial; identical to SEQ ID NO: 5848
  Synthetic oligonucleotide

SEQ ID NO: 554348 - DNA, 55 bp, Artificial; identical to SEQ ID NO: 342663
  Synthetic oligonucleotide

SEQ ID NO: 554349 - DNA, 55 bp, Artificial; identical to SEQ ID NO: 342667
  Synthetic oligonucleotide

SEQ ID NO: 554350 - DNA, 60 bp, Artificial; identical to SEQ ID NO: 342668
  Synthetic oligonucleotide

SEQ ID NO: 554351 - DNA, 55 bp, Artificial; identical to SEQ ID NO: 342672
  Synthetic oligonucleotide

SEQ ID NO: 554352 - DNA, 55 bp, Artificial; identical to SEQ ID NO: 342675
  Synthetic oligonucleotide

SEQ ID NO: 554353 - DNA, 60 bp, Artificial; identical to SEQ ID NO: 342681
  Synthetic oligonucleotide

SEQ ID NO: 554354 - DNA, 55 bp, Artificial; identical to SEQ ID NO: 342682
  Synthetic oligonucleotide

SEQ ID NO: 554355 - DNA, 59 bp, Artificial; identical to SEQ ID NO: 342685
  Synthetic oligonucleotide

SEQ ID NO: 554356 - DNA, 57 bp, Artificial; identical to SEQ ID NO: 342689
  Synthetic oligonucleotide

SEQ ID NO: 554357 - DNA, 60 bp, Artificial; identical to SEQ ID NO: 342690
  Synthetic oligonucleotide

SEQ ID NO: 554358 - DNA, 59 bp, Artificial; identical to SEQ ID NO: 342696
  Synthetic oligonucleotide

SEQ ID NO: 554359 - DNA, 57 bp, Artificial; identical to SEQ ID NO: 342701
  Synthetic oligonucleotide

SEQ ID NO: 554360 - DNA, 52 bp, Artificial; identical to SEQ ID NO: 342704
  Synthetic oligonucleotide

SEQ ID NO: 554361 - DNA, 60 bp, Artificial; identical to SEQ ID NO: 342706
  Synthetic oligonucleotide

SEQ ID NO: 554362 - DNA, 52 bp, Artificial; identical to SEQ ID NO: 342707
  Synthetic oligonucleotide

SEQ ID NO: 554363 - DNA, 52 bp, Artificial; identical to SEQ ID NO: 342708
  Synthetic oligonucleotide

SEQ ID NO: 554364 - DNA, 55 bp, Artificial; identical to SEQ ID NO: 342709
  Synthetic oligonucleotide

SEQ ID NO: 554365 - DNA, 52 bp, Artificial; identical to SEQ ID NO: 342710
  Synthetic oligonucleotide

SEQ ID NO: 554366 - DNA, 60 bp, Artificial; identical to SEQ ID NO: 342712
  Synthetic oligonucleotide

SEQ ID NO: 554367 - DNA, 60 bp, Artificial; identical to SEQ ID NO: 342713
  Synthetic oligonucleotide

SEQ ID NO: 554368 - DNA, 55 bp, Artificial; identical to SEQ ID NO: 342716
  Synthetic oligonucleotide

SEQ ID NO: 554369 - DNA, 60 bp, Artificial; identical to SEQ ID NO: 342717
  Synthetic oligonucleotide

SEQ ID NO: 554370 - DNA, 55 bp, Artificial; identical to SEQ ID NO: 342719
  Synthetic oligonucleotide

SEQ ID NO: 554371 - DNA, 57 bp, Artificial; identical to SEQ ID NO: 18654
  Synthetic oligonucleotide

SEQ ID NO: 554372 - DNA, 60 bp, Artificial; identical to SEQ ID NO: 342722
  Synthetic oligonucleotide

SEQ ID NO: 554373 - DNA, 55 bp, Artificial; identical to SEQ ID NO: 342724
  Synthetic oligonucleotide

SEQ ID NO: 554374 - DNA, 58 bp, Artificial; identical to SEQ ID NO: 342727
  Synthetic oligonucleotide

SEQ ID NO: 554375 - DNA, 60 bp, Artificial; identical to SEQ ID NO: 342728
  Synthetic oligonucleotide

SEQ ID NO: 554376 - DNA, 60 bp, Artificial; identical to SEQ ID NO: 342732
  Synthetic oligonucleotide

SEQ ID NO: 554377 - DNA, 60 bp, Artificial; identical to SEQ ID NO: 342733
  Synthetic oligonucleotide

SEQ ID NO: 554378 - DNA, 60 bp, Artificial; identical to SEQ ID NO: 342734
  Synthetic oligonucleotide

SEQ ID NO: 554379 - DNA, 51 bp, Artificial; identical to SEQ ID NO: 342735
  Synthetic oligonucleotide

SEQ ID NO: 554380 - DNA, 51 bp, Artificial; identical to SEQ ID NO: 342736
  Synthetic oligonucleotide

SEQ ID NO: 554381 - DNA, 60 bp, Artificial; identical to SEQ ID NO: 342740
  Synthetic oligonucleotide

SEQ ID NO: 554382 - DNA, 50 bp, Artificial; identical to SEQ ID NO: 342741
  Synthetic oligonucleotide

SEQ ID NO: 554383 - DNA, 60 bp, Artificial; identical to SEQ ID NO: 342742
  Synthetic oligonucleotide

SEQ ID NO: 554384 - DNA, 55 bp, Artificial; identical to SEQ ID NO: 342744
  Synthetic oligonucleotide

SEQ ID NO: 554385 - DNA, 55 bp, Artificial; identical to SEQ ID NO: 342746
  Synthetic oligonucleotide

SEQ ID NO: 554386 - DNA, 60 bp, Artificial; identical to SEQ ID NO: 11495
  Synthetic oligonucleotide

SEQ ID NO: 554387 - DNA, 60 bp, Artificial; identical to SEQ ID NO: 342749
  Synthetic oligonucleotide

SEQ ID NO: 554388 - DNA, 56 bp, Artificial; identical to SEQ ID NO: 342751
  Synthetic oligonucleotide

SEQ ID NO: 554389 - DNA, 55 bp, Artificial; identical to SEQ ID NO: 342755
  Synthetic oligonucleotide

SEQ ID NO: 554390 - DNA, 55 bp, Artificial; identical to SEQ ID NO: 342757
  Synthetic oligonucleotide

SEQ ID NO: 554391 - DNA, 55 bp, Artificial; identical to SEQ ID NO: 342759
  Synthetic oligonucleotide

SEQ ID NO: 554392 - DNA, 55 bp, Artificial; identical to SEQ ID NO: 342760
  Synthetic oligonucleotide

SEQ ID NO: 554393 - DNA, 56 bp, Artificial; identical to SEQ ID NO: 342761
  Synthetic oligonucleotide

SEQ ID NO: 554394 - DNA, 53 bp, Artificial; identical to SEQ ID NO: 342763
  Synthetic oligonucleotide

SEQ ID NO: 554395 - DNA, 60 bp, Artificial; identical to SEQ ID NO: 342764
  Synthetic oligonucleotide

SEQ ID NO: 554396 - DNA, 57 bp, Artificial; identical to SEQ ID NO: 342765
  Synthetic oligonucleotide

SEQ ID NO: 554397 - DNA, 56 bp, Artificial; identical to SEQ ID NO: 342770
  Synthetic oligonucleotide

SEQ ID NO: 554398 - DNA, 60 bp, Artificial; identical to SEQ ID NO: 342772
  Synthetic oligonucleotide

SEQ ID NO: 554399 - DNA, 57 bp, Artificial; identical to SEQ ID NO: 342778
  Synthetic oligonucleotide

SEQ ID NO: 554400 - DNA, 53 bp, Artificial; identical to SEQ ID NO: 342780
  Synthetic oligonucleotide

SEQ ID NO: 554401 - DNA, 55 bp, Artificial; identical to SEQ ID NO: 17165
  Synthetic oligonucleotide

SEQ ID NO: 554402 - DNA, 55 bp, Artificial; identical to SEQ ID NO: 342781
  Synthetic oligonucleotide

SEQ ID NO: 554403 - DNA, 55 bp, Artificial; identical to SEQ ID NO: 6987
  Synthetic oligonucleotide

SEQ ID NO: 554404 - DNA, 55 bp, Artificial; identical to SEQ ID NO: 342784
  Synthetic oligonucleotide

SEQ ID NO: 554405 - DNA, 60 bp, Artificial; identical to SEQ ID NO: 342789
  Synthetic oligonucleotide

SEQ ID NO: 554406 - DNA, 55 bp, Artificial; identical to SEQ ID NO: 342790
  Synthetic oligonucleotide

SEQ ID NO: 554407 - DNA, 58 bp, Artificial; identical to SEQ ID NO: 342796
  Synthetic oligonucleotide

SEQ ID NO: 554408 - DNA, 58 bp, Artificial; identical to SEQ ID NO: 342798
  Synthetic oligonucleotide

SEQ ID NO: 554409 - DNA, 55 bp, Artificial; identical to SEQ ID NO: 342799
  Synthetic oligonucleotide

SEQ ID NO: 554410 - DNA, 60 bp, Artificial; identical to SEQ ID NO: 342801
  Synthetic oligonucleotide

SEQ ID NO: 554411 - DNA, 60 bp, Artificial; identical to SEQ ID NO: 342802
  Synthetic oligonucleotide

SEQ ID NO: 554412 - DNA, 59 bp, Artificial; identical to SEQ ID NO: 342803
  Synthetic oligonucleotide

SEQ ID NO: 554413 - DNA, 60 bp, Artificial; identical to SEQ ID NO: 6937
  Synthetic oligonucleotide

SEQ ID NO: 554414 - DNA, 60 bp, Artificial; identical to SEQ ID NO: 342811
  Synthetic oligonucleotide

SEQ ID NO: 554415 - DNA, 60 bp, Artificial; identical to SEQ ID NO: 342816
  Synthetic oligonucleotide

SEQ ID NO: 554416 - DNA, 52 bp, Artificial; identical to SEQ ID NO: 342817
  Synthetic oligonucleotide

SEQ ID NO: 554417 - DNA, 60 bp, Artificial; identical to SEQ ID NO: 342818
  Synthetic oligonucleotide

SEQ ID NO: 554418 - DNA, 55 bp, Artificial; identical to SEQ ID NO: 342819
  Synthetic oligonucleotide

SEQ ID NO: 554419 - DNA, 52 bp, Artificial; identical to SEQ ID NO: 342820
  Synthetic oligonucleotide

SEQ ID NO: 554420 - DNA, 53 bp, Artificial; identical to SEQ ID NO: 342822
  Synthetic oligonucleotide

SEQ ID NO: 554421 - DNA, 60 bp, Artificial; identical to SEQ ID NO: 342824
  Synthetic oligonucleotide

SEQ ID NO: 554422 - DNA, 55 bp, Artificial; identical to SEQ ID NO: 342825
  Synthetic oligonucleotide

SEQ ID NO: 554423 - DNA, 60 bp, Artificial; identical to SEQ ID NO: 342829
  Synthetic oligonucleotide

SEQ ID NO: 554424 - DNA, 55 bp, Artificial; identical to SEQ ID NO: 342832
  Synthetic oligonucleotide

SEQ ID NO: 554425 - DNA, 57 bp, Artificial; identical to SEQ ID NO: 342834
  Synthetic oligonucleotide

SEQ ID NO: 554426 - DNA, 57 bp, Artificial; identical to SEQ ID NO: 342838
  Synthetic oligonucleotide

SEQ ID NO: 554427 - DNA, 55 bp, Artificial; identical to SEQ ID NO: 342839
  Synthetic oligonucleotide

SEQ ID NO: 554428 - DNA, 60 bp, Artificial; identical to SEQ ID NO: 342840
  Synthetic oligonucleotide

SEQ ID NO: 554429 - DNA, 60 bp, Artificial; identical to SEQ ID NO: 342841
  Synthetic oligonucleotide

SEQ ID NO: 554430 - DNA, 60 bp, Artificial; identical to SEQ ID NO: 9236
  Synthetic oligonucleotide

SEQ ID NO: 554431 - DNA, 55 bp, Artificial; identical to SEQ ID NO: 342845
  Synthetic oligonucleotide

SEQ ID NO: 554432 - DNA, 59 bp, Artificial; identical to SEQ ID NO: 17861
  Synthetic oligonucleotide

SEQ ID NO: 554433 - DNA, 57 bp, Artificial; identical to SEQ ID NO: 342848
  Synthetic oligonucleotide

SEQ ID NO: 554434 - DNA, 55 bp, Artificial; identical to SEQ ID NO: 342851
  Synthetic oligonucleotide

SEQ ID NO: 554435 - DNA, 55 bp, Artificial; identical to SEQ ID NO: 342852
  Synthetic oligonucleotide

SEQ ID NO: 554436 - DNA, 60 bp, Artificial; identical to SEQ ID NO: 342856
  Synthetic oligonucleotide

SEQ ID NO: 554437 - DNA, 59 bp, Artificial; identical to SEQ ID NO: 342859
  Synthetic oligonucleotide

SEQ ID NO: 554438 - DNA, 60 bp, Artificial; identical to SEQ ID NO: 342860
  Synthetic oligonucleotide

SEQ ID NO: 554439 - DNA, 59 bp, Artificial; identical to SEQ ID NO: 342861
  Synthetic oligonucleotide

SEQ ID NO: 554440 - DNA, 51 bp, Artificial; identical to SEQ ID NO: 342865
  Synthetic oligonucleotide

SEQ ID NO: 554441 - DNA, 55 bp, Artificial; identical to SEQ ID NO: 342866
  Synthetic oligonucleotide

SEQ ID NO: 554442 - DNA, 59 bp, Artificial; identical to SEQ ID NO: 342867
  Synthetic oligonucleotide

SEQ ID NO: 554443 - DNA, 56 bp, Artificial; identical to SEQ ID NO: 342872
  Synthetic oligonucleotide

SEQ ID NO: 554444 - DNA, 60 bp, Artificial; identical to SEQ ID NO: 342874
  Synthetic oligonucleotide

SEQ ID NO: 554445 - DNA, 55 bp, Artificial; identical to SEQ ID NO: 342876
  Synthetic oligonucleotide

SEQ ID NO: 554446 - DNA, 53 bp, Artificial; identical to SEQ ID NO: 342877
  Synthetic oligonucleotide

SEQ ID NO: 554447 - DNA, 53 bp, Artificial; identical to SEQ ID NO: 342878
  Synthetic oligonucleotide

SEQ ID NO: 554448 - DNA, 54 bp, Artificial; identical to SEQ ID NO: 342879
  Synthetic oligonucleotide

SEQ ID NO: 554449 - DNA, 50 bp, Artificial; identical to SEQ ID NO: 342881
  Synthetic oligonucleotide

SEQ ID NO: 554450 - DNA, 58 bp, Artificial; identical to SEQ ID NO: 342882
  Synthetic oligonucleotide

SEQ ID NO: 554451 - DNA, 56 bp, Artificial; identical to SEQ ID NO: 11595
  Synthetic oligonucleotide

SEQ ID NO: 554452 - DNA, 54 bp, Artificial; identical to SEQ ID NO: 11381
  Synthetic oligonucleotide

SEQ ID NO: 554453 - DNA, 55 bp, Artificial; identical to SEQ ID NO: 342888
  Synthetic oligonucleotide

SEQ ID NO: 554454 - DNA, 57 bp, Artificial; identical to SEQ ID NO: 342891
  Synthetic oligonucleotide

SEQ ID NO: 554455 - DNA, 54 bp, Artificial; identical to SEQ ID NO: 342892
  Synthetic oligonucleotide

SEQ ID NO: 554456 - DNA, 60 bp, Artificial; identical to SEQ ID NO: 342893
  Synthetic oligonucleotide

SEQ ID NO: 554457 - DNA, 60 bp, Artificial; identical to SEQ ID NO: 342897
  Synthetic oligonucleotide

SEQ ID NO: 554458 - DNA, 60 bp, Artificial; identical to SEQ ID NO: 342898
  Synthetic oligonucleotide

SEQ ID NO: 554459 - DNA, 57 bp, Artificial; identical to SEQ ID NO: 342899
  Synthetic oligonucleotide

SEQ ID NO: 554460 - DNA, 55 bp, Artificial; identical to SEQ ID NO: 342901
  Synthetic oligonucleotide

SEQ ID NO: 554461 - DNA, 58 bp, Artificial; identical to SEQ ID NO: 342902
  Synthetic oligonucleotide

SEQ ID NO: 554462 - DNA, 55 bp, Artificial; identical to SEQ ID NO: 342906
  Synthetic oligonucleotide

SEQ ID NO: 554463 - DNA, 60 bp, Artificial; identical to SEQ ID NO: 117535
  Synthetic oligonucleotide

SEQ ID NO: 554464 - DNA, 59 bp, Artificial; identical to SEQ ID NO: 342908
  Synthetic oligonucleotide

SEQ ID NO: 554465 - DNA, 55 bp, Artificial; identical to SEQ ID NO: 342909
  Synthetic oligonucleotide

SEQ ID NO: 554466 - DNA, 55 bp, Artificial; identical to SEQ ID NO: 342910
  Synthetic oligonucleotide

SEQ ID NO: 554467 - DNA, 60 bp, Artificial; identical to SEQ ID NO: 342912
  Synthetic oligonucleotide

SEQ ID NO: 554468 - DNA, 60 bp, Artificial; identical to SEQ ID NO: 14426
  Synthetic oligonucleotide

SEQ ID NO: 554469 - DNA, 54 bp, Artificial; identical to SEQ ID NO: 342913
  Synthetic oligonucleotide

SEQ ID NO: 554470 - DNA, 60 bp, Artificial; identical to SEQ ID NO: 342914
  Synthetic oligonucleotide

SEQ ID NO: 554471 - DNA, 55 bp, Artificial; identical to SEQ ID NO: 342915
  Synthetic oligonucleotide

SEQ ID NO: 554472 - DNA, 52 bp, Artificial; identical to SEQ ID NO: 342916
  Synthetic oligonucleotide

SEQ ID NO: 554473 - DNA, 60 bp, Artificial; identical to SEQ ID NO: 342917
  Synthetic oligonucleotide

SEQ ID NO: 554474 - DNA, 58 bp, Artificial; identical to SEQ ID NO: 342918
  Synthetic oligonucleotide

SEQ ID NO: 554475 - DNA, 55 bp, Artificial; identical to SEQ ID NO: 342919
  Synthetic oligonucleotide

SEQ ID NO: 554476 - DNA, 56 bp, Artificial; identical to SEQ ID NO: 342921
  Synthetic oligonucleotide

SEQ ID NO: 554477 - DNA, 54 bp, Artificial; identical to SEQ ID NO: 342922
  Synthetic oligonucleotide

SEQ ID NO: 554478 - DNA, 60 bp, Artificial; identical to SEQ ID NO: 342924
  Synthetic oligonucleotide

SEQ ID NO: 554479 - DNA, 56 bp, Artificial; identical to SEQ ID NO: 342925
  Synthetic oligonucleotide

SEQ ID NO: 554480 - DNA, 60 bp, Artificial; identical to SEQ ID NO: 342926
  Synthetic oligonucleotide

SEQ ID NO: 554481 - DNA, 60 bp, Artificial; identical to SEQ ID NO: 342929
  Synthetic oligonucleotide

SEQ ID NO: 554482 - DNA, 55 bp, Artificial; identical to SEQ ID NO: 12921
  Synthetic oligonucleotide

SEQ ID NO: 554483 - DNA, 56 bp, Artificial; identical to SEQ ID NO: 342932
  Synthetic oligonucleotide

SEQ ID NO: 554484 - DNA, 60 bp, Artificial; identical to SEQ ID NO: 342937
  Synthetic oligonucleotide

SEQ ID NO: 554485 - DNA, 58 bp, Artificial; identical to SEQ ID NO: 342940
  Synthetic oligonucleotide

SEQ ID NO: 554486 - DNA, 60 bp, Artificial; identical to SEQ ID NO: 342943
  Synthetic oligonucleotide

SEQ ID NO: 554487 - DNA, 59 bp, Artificial; identical to SEQ ID NO: 342944
  Synthetic oligonucleotide

SEQ ID NO: 554488 - DNA, 60 bp, Artificial; identical to SEQ ID NO: 342946
  Synthetic oligonucleotide

SEQ ID NO: 554489 - DNA, 50 bp, Artificial; identical to SEQ ID NO: 15202
  Synthetic oligonucleotide

SEQ ID NO: 554490 - DNA, 55 bp, Artificial; identical to SEQ ID NO: 342961
  Synthetic oligonucleotide

SEQ ID NO: 554491 - DNA, 60 bp, Artificial; identical to SEQ ID NO: 342964
  Synthetic oligonucleotide

SEQ ID NO: 554492 - DNA, 60 bp, Artificial; identical to SEQ ID NO: 342965
  Synthetic oligonucleotide

SEQ ID NO: 554493 - DNA, 55 bp, Artificial; identical to SEQ ID NO: 342970
  Synthetic oligonucleotide

SEQ ID NO: 554494 - DNA, 55 bp, Artificial; identical to SEQ ID NO: 342971
  Synthetic oligonucleotide

SEQ ID NO: 554495 - DNA, 57 bp, Artificial; identical to SEQ ID NO: 342974
  Synthetic oligonucleotide

SEQ ID NO: 554496 - DNA, 53 bp, Artificial; identical to SEQ ID NO: 342976
  Synthetic oligonucleotide

SEQ ID NO: 554497 - DNA, 55 bp, Artificial; identical to SEQ ID NO: 342977
  Synthetic oligonucleotide

SEQ ID NO: 554498 - DNA, 55 bp, Artificial; identical to SEQ ID NO: 342979
  Synthetic oligonucleotide

SEQ ID NO: 554499 - DNA, 60 bp, Artificial; identical to SEQ ID NO: 342983
  Synthetic oligonucleotide

SEQ ID NO: 554500 - DNA, 59 bp, Artificial; identical to SEQ ID NO: 342986
  Synthetic oligonucleotide

SEQ ID NO: 554501 - DNA, 60 bp, Artificial; identical to SEQ ID NO: 342987
  Synthetic oligonucleotide

SEQ ID NO: 554502 - DNA, 60 bp, Artificial; identical to SEQ ID NO: 342988
  Synthetic oligonucleotide

SEQ ID NO: 554503 - DNA, 60 bp, Artificial; identical to SEQ ID NO: 342990
  Synthetic oligonucleotide

SEQ ID NO: 554504 - DNA, 56 bp, Artificial; identical to SEQ ID NO: 342991
  Synthetic oligonucleotide

SEQ ID NO: 554505 - DNA, 60 bp, Artificial; identical to SEQ ID NO: 342994
  Synthetic oligonucleotide

SEQ ID NO: 554506 - DNA, 60 bp, Artificial; identical to SEQ ID NO: 342995
  Synthetic oligonucleotide

SEQ ID NO: 554507 - DNA, 55 bp, Artificial; identical to SEQ ID NO: 342998
  Synthetic oligonucleotide

SEQ ID NO: 554508 - DNA, 55 bp, Artificial; identical to SEQ ID NO: 343000
  Synthetic oligonucleotide

SEQ ID NO: 554509 - DNA, 59 bp, Artificial; identical to SEQ ID NO: 343002
  Synthetic oligonucleotide

SEQ ID NO: 554510 - DNA, 60 bp, Artificial; identical to SEQ ID NO: 343003
  Synthetic oligonucleotide

SEQ ID NO: 554511 - DNA, 58 bp, Artificial; identical to SEQ ID NO: 343005
  Synthetic oligonucleotide

SEQ ID NO: 554512 - DNA, 52 bp, Artificial; identical to SEQ ID NO: 343006
  Synthetic oligonucleotide

SEQ ID NO: 554513 - DNA, 60 bp, Artificial; identical to SEQ ID NO: 343007
  Synthetic oligonucleotide

SEQ ID NO: 554514 - DNA, 51 bp, Artificial; identical to SEQ ID NO: 343010
  Synthetic oligonucleotide

SEQ ID NO: 554515 - DNA, 54 bp, Artificial; identical to SEQ ID NO: 343012
  Synthetic oligonucleotide

SEQ ID NO: 554516 - DNA, 58 bp, Artificial; identical to SEQ ID NO: 343014
  Synthetic oligonucleotide

SEQ ID NO: 554517 - DNA, 60 bp, Artificial; identical to SEQ ID NO: 343016
  Synthetic oligonucleotide

SEQ ID NO: 554518 - DNA, 57 bp, Artificial; identical to SEQ ID NO: 343019
  Synthetic oligonucleotide

SEQ ID NO: 554519 - DNA, 52 bp, Artificial; identical to SEQ ID NO: 343022
  Synthetic oligonucleotide

SEQ ID NO: 554520 - DNA, 60 bp, Artificial; identical to SEQ ID NO: 343024
  Synthetic oligonucleotide

SEQ ID NO: 554521 - DNA, 54 bp, Artificial; identical to SEQ ID NO: 343027
  Synthetic oligonucleotide

SEQ ID NO: 554522 - DNA, 60 bp, Artificial; identical to SEQ ID NO: 343028
  Synthetic oligonucleotide

SEQ ID NO: 554523 - DNA, 55 bp, Artificial; identical to SEQ ID NO: 343031
  Synthetic oligonucleotide

SEQ ID NO: 554524 - DNA, 55 bp, Artificial; identical to SEQ ID NO: 343033
  Synthetic oligonucleotide

SEQ ID NO: 554525 - DNA, 52 bp, Artificial; identical to SEQ ID NO: 343040
  Synthetic oligonucleotide

SEQ ID NO: 554526 - DNA, 56 bp, Artificial; identical to SEQ ID NO: 343043
  Synthetic oligonucleotide

SEQ ID NO: 554527 - DNA, 60 bp, Artificial; identical to SEQ ID NO: 343045
  Synthetic oligonucleotide

SEQ ID NO: 554528 - DNA, 57 bp, Artificial; identical to SEQ ID NO: 343052
  Synthetic oligonucleotide

SEQ ID NO: 554529 - DNA, 60 bp, Artificial; identical to SEQ ID NO: 343053
  Synthetic oligonucleotide

SEQ ID NO: 554530 - DNA, 54 bp, Artificial; identical to SEQ ID NO: 343054
  Synthetic oligonucleotide

SEQ ID NO: 554531 - DNA, 58 bp, Artificial; identical to SEQ ID NO: 343057
  Synthetic oligonucleotide

SEQ ID NO: 554532 - DNA, 52 bp, Artificial; identical to SEQ ID NO: 343059
  Synthetic oligonucleotide

SEQ ID NO: 554533 - DNA, 60 bp, Artificial; identical to SEQ ID NO: 343060
  Synthetic oligonucleotide

SEQ ID NO: 554534 - DNA, 60 bp, Artificial; identical to SEQ ID NO: 343067
  Synthetic oligonucleotide

SEQ ID NO: 554535 - DNA, 60 bp, Artificial; identical to SEQ ID NO: 8746
  Synthetic oligonucleotide

SEQ ID NO: 554536 - DNA, 55 bp, Artificial; identical to SEQ ID NO: 343071
  Synthetic oligonucleotide

SEQ ID NO: 554537 - DNA, 55 bp, Artificial; identical to SEQ ID NO: 343076
  Synthetic oligonucleotide

SEQ ID NO: 554538 - DNA, 55 bp, Artificial; identical to SEQ ID NO: 343078
  Synthetic oligonucleotide

SEQ ID NO: 554539 - DNA, 57 bp, Artificial; identical to SEQ ID NO: 343079
  Synthetic oligonucleotide

SEQ ID NO: 554540 - DNA, 60 bp, Artificial; identical to SEQ ID NO: 10726
  Synthetic oligonucleotide

SEQ ID NO: 554541 - DNA, 55 bp, Artificial; identical to SEQ ID NO: 343083
  Synthetic oligonucleotide

SEQ ID NO: 554542 - DNA, 55 bp, Artificial; identical to SEQ ID NO: 343084
  Synthetic oligonucleotide

SEQ ID NO: 554543 - DNA, 58 bp, Artificial; identical to SEQ ID NO: 343086
  Synthetic oligonucleotide

SEQ ID NO: 554544 - DNA, 53 bp, Artificial; identical to SEQ ID NO: 343087
  Synthetic oligonucleotide

SEQ ID NO: 554545 - DNA, 60 bp, Artificial; identical to SEQ ID NO: 343088
  Synthetic oligonucleotide

SEQ ID NO: 554546 - DNA, 60 bp, Artificial; identical to SEQ ID NO: 343092
  Synthetic oligonucleotide

SEQ ID NO: 554547 - DNA, 52 bp, Artificial; identical to SEQ ID NO: 15740
  Synthetic oligonucleotide

SEQ ID NO: 554548 - DNA, 55 bp, Artificial; identical to SEQ ID NO: 343096
  Synthetic oligonucleotide

SEQ ID NO: 554549 - DNA, 60 bp, Artificial; identical to SEQ ID NO: 343098
  Synthetic oligonucleotide

SEQ ID NO: 554550 - DNA, 57 bp, Artificial; identical to SEQ ID NO: 343102
  Synthetic oligonucleotide

SEQ ID NO: 554551 - DNA, 60 bp, Artificial; identical to SEQ ID NO: 343105
  Synthetic oligonucleotide

SEQ ID NO: 554552 - DNA, 55 bp, Artificial; identical to SEQ ID NO: 343106
  Synthetic oligonucleotide

SEQ ID NO: 554553 - DNA, 59 bp, Artificial; identical to SEQ ID NO: 343110
  Synthetic oligonucleotide

SEQ ID NO: 554554 - DNA, 60 bp, Artificial; identical to SEQ ID NO: 343111
  Synthetic oligonucleotide

SEQ ID NO: 554555 - DNA, 60 bp, Artificial; identical to SEQ ID NO: 343112
  Synthetic oligonucleotide

SEQ ID NO: 554556 - DNA, 60 bp, Artificial; identical to SEQ ID NO: 343113
  Synthetic oligonucleotide

SEQ ID NO: 554557 - DNA, 58 bp, Artificial; identical to SEQ ID NO: 343118
  Synthetic oligonucleotide

SEQ ID NO: 554558 - DNA, 55 bp, Artificial; identical to SEQ ID NO: 343121
  Synthetic oligonucleotide

SEQ ID NO: 554559 - DNA, 59 bp, Artificial; identical to SEQ ID NO: 343125
  Synthetic oligonucleotide

SEQ ID NO: 554560 - DNA, 60 bp, Artificial; identical to SEQ ID NO: 343126
  Synthetic oligonucleotide

SEQ ID NO: 554561 - DNA, 59 bp, Artificial; identical to SEQ ID NO: 343135
  Synthetic oligonucleotide

SEQ ID NO: 554562 - DNA, 52 bp, Artificial; identical to SEQ ID NO: 343136
  Synthetic oligonucleotide

SEQ ID NO: 554563 - DNA, 57 bp, Artificial; identical to SEQ ID NO: 343138
  Synthetic oligonucleotide

SEQ ID NO: 554564 - DNA, 58 bp, Artificial; identical to SEQ ID NO: 343139
  Synthetic oligonucleotide

SEQ ID NO: 554565 - DNA, 59 bp, Artificial; identical to SEQ ID NO: 11191
  Synthetic oligonucleotide

SEQ ID NO: 554566 - DNA, 55 bp, Artificial; identical to SEQ ID NO: 343142
  Synthetic oligonucleotide

SEQ ID NO: 554567 - DNA, 59 bp, Artificial; identical to SEQ ID NO: 343144
  Synthetic oligonucleotide

SEQ ID NO: 554568 - DNA, 55 bp, Artificial; identical to SEQ ID NO: 343147
  Synthetic oligonucleotide

SEQ ID NO: 554569 - DNA, 60 bp, Artificial; identical to SEQ ID NO: 343150
  Synthetic oligonucleotide

SEQ ID NO: 554570 - DNA, 50 bp, Artificial; identical to SEQ ID NO: 343153
  Synthetic oligonucleotide

SEQ ID NO: 554571 - DNA, 55 bp, Artificial; identical to SEQ ID NO: 343154
  Synthetic oligonucleotide

SEQ ID NO: 554572 - DNA, 60 bp, Artificial; identical to SEQ ID NO: 343155
  Synthetic oligonucleotide

SEQ ID NO: 554573 - DNA, 55 bp, Artificial; identical to SEQ ID NO: 343156
  Synthetic oligonucleotide

SEQ ID NO: 554574 - DNA, 52 bp, Artificial; identical to SEQ ID NO: 343158
  Synthetic oligonucleotide

SEQ ID NO: 554575 - DNA, 55 bp, Artificial; identical to SEQ ID NO: 343159
  Synthetic oligonucleotide

SEQ ID NO: 554576 - DNA, 59 bp, Artificial; identical to SEQ ID NO: 343162
  Synthetic oligonucleotide

SEQ ID NO: 554577 - DNA, 58 bp, Artificial; identical to SEQ ID NO: 343164
  Synthetic oligonucleotide

SEQ ID NO: 554578 - DNA, 60 bp, Artificial; identical to SEQ ID NO: 343166
  Synthetic oligonucleotide

SEQ ID NO: 554579 - DNA, 51 bp, Artificial; identical to SEQ ID NO: 12930
  Synthetic oligonucleotide

SEQ ID NO: 554580 - DNA, 60 bp, Artificial; identical to SEQ ID NO: 343167
  Synthetic oligonucleotide

SEQ ID NO: 554581 - DNA, 55 bp, Artificial; identical to SEQ ID NO: 343169
  Synthetic oligonucleotide

SEQ ID NO: 554582 - DNA, 60 bp, Artificial; identical to SEQ ID NO: 343170
  Synthetic oligonucleotide

SEQ ID NO: 554583 - DNA, 53 bp, Artificial; identical to SEQ ID NO: 343172
  Synthetic oligonucleotide

SEQ ID NO: 554584 - DNA, 58 bp, Artificial; identical to SEQ ID NO: 18814
  Synthetic oligonucleotide

SEQ ID NO: 554585 - DNA, 59 bp, Artificial; identical to SEQ ID NO: 343174
  Synthetic oligonucleotide

SEQ ID NO: 554586 - DNA, 55 bp, Artificial; identical to SEQ ID NO: 343175
  Synthetic oligonucleotide

SEQ ID NO: 554587 - DNA, 55 bp, Artificial; identical to SEQ ID NO: 343176
  Synthetic oligonucleotide

SEQ ID NO: 554588 - DNA, 55 bp, Artificial; identical to SEQ ID NO: 343177
  Synthetic oligonucleotide

SEQ ID NO: 554589 - DNA, 56 bp, Artificial; identical to SEQ ID NO: 343178
  Synthetic oligonucleotide

SEQ ID NO: 554590 - DNA, 56 bp, Artificial; identical to SEQ ID NO: 343183
  Synthetic oligonucleotide

SEQ ID NO: 554591 - DNA, 55 bp, Artificial; identical to SEQ ID NO: 343184
  Synthetic oligonucleotide

SEQ ID NO: 554592 - DNA, 60 bp, Artificial; identical to SEQ ID NO: 343186
  Synthetic oligonucleotide

SEQ ID NO: 554593 - DNA, 56 bp, Artificial; identical to SEQ ID NO: 343187
  Synthetic oligonucleotide

SEQ ID NO: 554594 - DNA, 56 bp, Artificial; identical to SEQ ID NO: 343188
  Synthetic oligonucleotide

SEQ ID NO: 554595 - DNA, 57 bp, Artificial; identical to SEQ ID NO: 343189
  Synthetic oligonucleotide

SEQ ID NO: 554596 - DNA, 55 bp, Artificial; identical to SEQ ID NO: 343190
  Synthetic oligonucleotide

SEQ ID NO: 554597 - DNA, 55 bp, Artificial; identical to SEQ ID NO: 343191
  Synthetic oligonucleotide

SEQ ID NO: 554598 - DNA, 55 bp, Artificial; identical to SEQ ID NO: 343195
  Synthetic oligonucleotide

SEQ ID NO: 554599 - DNA, 60 bp, Artificial; identical to SEQ ID NO: 343196
  Synthetic oligonucleotide

SEQ ID NO: 554600 - DNA, 60 bp, Artificial; identical to SEQ ID NO: 343198
  Synthetic oligonucleotide

SEQ ID NO: 554601 - DNA, 60 bp, Artificial; identical to SEQ ID NO: 343200
  Synthetic oligonucleotide

SEQ ID NO: 554602 - DNA, 60 bp, Artificial; identical to SEQ ID NO: 343204
  Synthetic oligonucleotide

SEQ ID NO: 554603 - DNA, 60 bp, Artificial; identical to SEQ ID NO: 343207
  Synthetic oligonucleotide

SEQ ID NO: 554604 - DNA, 55 bp, Artificial; identical to SEQ ID NO: 343209
  Synthetic oligonucleotide

SEQ ID NO: 554605 - DNA, 55 bp, Artificial; identical to SEQ ID NO: 343212
  Synthetic oligonucleotide

SEQ ID NO: 554606 - DNA, 55 bp, Artificial; identical to SEQ ID NO: 343213
  Synthetic oligonucleotide

SEQ ID NO: 554607 - DNA, 60 bp, Artificial; identical to SEQ ID NO: 343214
  Synthetic oligonucleotide

SEQ ID NO: 554608 - DNA, 60 bp, Artificial; identical to SEQ ID NO: 343218
  Synthetic oligonucleotide

SEQ ID NO: 554609 - DNA, 58 bp, Artificial; identical to SEQ ID NO: 343221
  Synthetic oligonucleotide

SEQ ID NO: 554610 - DNA, 57 bp, Artificial; identical to SEQ ID NO: 343222
  Synthetic oligonucleotide

SEQ ID NO: 554611 - DNA, 59 bp, Artificial; identical to SEQ ID NO: 343233
  Synthetic oligonucleotide

SEQ ID NO: 554612 - DNA, 55 bp, Artificial; identical to SEQ ID NO: 343240
  Synthetic oligonucleotide

SEQ ID NO: 554613 - DNA, 58 bp, Artificial; identical to SEQ ID NO: 343246
  Synthetic oligonucleotide

SEQ ID NO: 554614 - DNA, 55 bp, Artificial; identical to SEQ ID NO: 343247
  Synthetic oligonucleotide

SEQ ID NO: 554615 - DNA, 55 bp, Artificial; identical to SEQ ID NO: 343248
  Synthetic oligonucleotide

SEQ ID NO: 554616 - DNA, 55 bp, Artificial; identical to SEQ ID NO: 343252
  Synthetic oligonucleotide

SEQ ID NO: 554617 - DNA, 59 bp, Artificial; identical to SEQ ID NO: 343255
  Synthetic oligonucleotide

SEQ ID NO: 554618 - DNA, 50 bp, Artificial; identical to SEQ ID NO: 343259
  Synthetic oligonucleotide

SEQ ID NO: 554619 - DNA, 58 bp, Artificial; identical to SEQ ID NO: 343260
  Synthetic oligonucleotide

SEQ ID NO: 554620 - DNA, 59 bp, Artificial; identical to SEQ ID NO: 343261
  Synthetic oligonucleotide

SEQ ID NO: 554621 - DNA, 59 bp, Artificial; identical to SEQ ID NO: 343262
  Synthetic oligonucleotide

SEQ ID NO: 554622 - DNA, 60 bp, Artificial; identical to SEQ ID NO: 343263
  Synthetic oligonucleotide

SEQ ID NO: 554623 - DNA, 50 bp, Artificial; identical to SEQ ID NO: 343267
  Synthetic oligonucleotide

SEQ ID NO: 554624 - DNA, 60 bp, Artificial; identical to SEQ ID NO: 343272
  Synthetic oligonucleotide

SEQ ID NO: 554625 - DNA, 51 bp, Artificial; identical to SEQ ID NO: 343273
  Synthetic oligonucleotide

SEQ ID NO: 554626 - DNA, 56 bp, Artificial; identical to SEQ ID NO: 343278
  Synthetic oligonucleotide

SEQ ID NO: 554627 - DNA, 59 bp, Artificial; identical to SEQ ID NO: 343279
  Synthetic oligonucleotide

SEQ ID NO: 554628 - DNA, 60 bp, Artificial; identical to SEQ ID NO: 343281
  Synthetic oligonucleotide

SEQ ID NO: 554629 - DNA, 60 bp, Artificial; identical to SEQ ID NO: 343282
  Synthetic oligonucleotide

SEQ ID NO: 554630 - DNA, 55 bp, Artificial; identical to SEQ ID NO: 343283
  Synthetic oligonucleotide

SEQ ID NO: 554631 - DNA, 59 bp, Artificial; identical to SEQ ID NO: 343285
  Synthetic oligonucleotide

SEQ ID NO: 554632 - DNA, 55 bp, Artificial; identical to SEQ ID NO: 343286
  Synthetic oligonucleotide

SEQ ID NO: 554633 - DNA, 55 bp, Artificial; identical to SEQ ID NO: 343288
  Synthetic oligonucleotide

SEQ ID NO: 554634 - DNA, 55 bp, Artificial; identical to SEQ ID NO: 343289
  Synthetic oligonucleotide

SEQ ID NO: 554635 - DNA, 60 bp, Artificial; identical to SEQ ID NO: 343292
  Synthetic oligonucleotide

SEQ ID NO: 554636 - DNA, 59 bp, Artificial; identical to SEQ ID NO: 343295
  Synthetic oligonucleotide

SEQ ID NO: 554637 - DNA, 55 bp, Artificial; identical to SEQ ID NO: 343302
  Synthetic oligonucleotide

SEQ ID NO: 554638 - DNA, 55 bp, Artificial; identical to SEQ ID NO: 343303
  Synthetic oligonucleotide

SEQ ID NO: 554639 - DNA, 55 bp, Artificial; identical to SEQ ID NO: 343305
  Synthetic oligonucleotide

SEQ ID NO: 554640 - DNA, 58 bp, Artificial; identical to SEQ ID NO: 343306
  Synthetic oligonucleotide

SEQ ID NO: 554641 - DNA, 55 bp, Artificial; identical to SEQ ID NO: 343307
  Synthetic oligonucleotide

SEQ ID NO: 554642 - DNA, 55 bp, Artificial; identical to SEQ ID NO: 343308
  Synthetic oligonucleotide

SEQ ID NO: 554643 - DNA, 55 bp, Artificial; identical to SEQ ID NO: 20553
  Synthetic oligonucleotide

SEQ ID NO: 554644 - DNA, 55 bp, Artificial; identical to SEQ ID NO: 343310
  Synthetic oligonucleotide

SEQ ID NO: 554645 - DNA, 55 bp, Artificial; identical to SEQ ID NO: 343314
  Synthetic oligonucleotide

SEQ ID NO: 554646 - DNA, 58 bp, Artificial; identical to SEQ ID NO: 343317
  Synthetic oligonucleotide

SEQ ID NO: 554647 - DNA, 60 bp, Artificial; identical to SEQ ID NO: 343318
  Synthetic oligonucleotide

SEQ ID NO: 554648 - DNA, 60 bp, Artificial; identical to SEQ ID NO: 343321
  Synthetic oligonucleotide

SEQ ID NO: 554649 - DNA, 55 bp, Artificial; identical to SEQ ID NO: 343325
  Synthetic oligonucleotide

SEQ ID NO: 554650 - DNA, 55 bp, Artificial; identical to SEQ ID NO: 343328
  Synthetic oligonucleotide

SEQ ID NO: 554651 - DNA, 57 bp, Artificial; identical to SEQ ID NO: 343329
  Synthetic oligonucleotide

SEQ ID NO: 554652 - DNA, 60 bp, Artificial; identical to SEQ ID NO: 343332
  Synthetic oligonucleotide

SEQ ID NO: 554653 - DNA, 55 bp, Artificial; identical to SEQ ID NO: 343333
  Synthetic oligonucleotide

SEQ ID NO: 554654 - DNA, 60 bp, Artificial; identical to SEQ ID NO: 343338
  Synthetic oligonucleotide

SEQ ID NO: 554655 - DNA, 57 bp, Artificial; identical to SEQ ID NO: 343339
  Synthetic oligonucleotide

SEQ ID NO: 554656 - DNA, 55 bp, Artificial; identical to SEQ ID NO: 343341
  Synthetic oligonucleotide

SEQ ID NO: 554657 - DNA, 55 bp, Artificial; identical to SEQ ID NO: 343344
  Synthetic oligonucleotide

SEQ ID NO: 554658 - DNA, 57 bp, Artificial; identical to SEQ ID NO: 343345
  Synthetic oligonucleotide

SEQ ID NO: 554659 - DNA, 60 bp, Artificial; identical to SEQ ID NO: 10521
  Synthetic oligonucleotide

SEQ ID NO: 554660 - DNA, 55 bp, Artificial; identical to SEQ ID NO: 343349
  Synthetic oligonucleotide

SEQ ID NO: 554661 - DNA, 60 bp, Artificial; identical to SEQ ID NO: 343351
  Synthetic oligonucleotide

SEQ ID NO: 554662 - DNA, 60 bp, Artificial; identical to SEQ ID NO: 343354
  Synthetic oligonucleotide

SEQ ID NO: 554663 - DNA, 52 bp, Artificial; identical to SEQ ID NO: 343355
  Synthetic oligonucleotide

SEQ ID NO: 554664 - DNA, 55 bp, Artificial; identical to SEQ ID NO: 343356
  Synthetic oligonucleotide

SEQ ID NO: 554665 - DNA, 60 bp, Artificial; identical to SEQ ID NO: 343357
  Synthetic oligonucleotide

SEQ ID NO: 554666 - DNA, 55 bp, Artificial; identical to SEQ ID NO: 343358
  Synthetic oligonucleotide

SEQ ID NO: 554667 - DNA, 58 bp, Artificial; identical to SEQ ID NO: 343360
  Synthetic oligonucleotide

SEQ ID NO: 554668 - DNA, 60 bp, Artificial; identical to SEQ ID NO: 343362
  Synthetic oligonucleotide

SEQ ID NO: 554669 - DNA, 51 bp, Artificial; identical to SEQ ID NO: 343363
  Synthetic oligonucleotide

SEQ ID NO: 554670 - DNA, 54 bp, Artificial; identical to SEQ ID NO: 343364
  Synthetic oligonucleotide

SEQ ID NO: 554671 - DNA, 55 bp, Artificial; identical to SEQ ID NO: 343365
  Synthetic oligonucleotide

SEQ ID NO: 554672 - DNA, 56 bp, Artificial; identical to SEQ ID NO: 343366
  Synthetic oligonucleotide

SEQ ID NO: 554673 - DNA, 60 bp, Artificial; identical to SEQ ID NO: 343367
  Synthetic oligonucleotide

SEQ ID NO: 554674 - DNA, 55 bp, Artificial; identical to SEQ ID NO: 343369
  Synthetic oligonucleotide

SEQ ID NO: 554675 - DNA, 60 bp, Artificial; identical to SEQ ID NO: 343376
  Synthetic oligonucleotide

SEQ ID NO: 554676 - DNA, 60 bp, Artificial; identical to SEQ ID NO: 343377
  Synthetic oligonucleotide

SEQ ID NO: 554677 - DNA, 58 bp, Artificial; identical to SEQ ID NO: 7375
  Synthetic oligonucleotide

SEQ ID NO: 554678 - DNA, 51 bp, Artificial; identical to SEQ ID NO: 343379
  Synthetic oligonucleotide

SEQ ID NO: 554679 - DNA, 56 bp, Artificial; identical to SEQ ID NO: 343382
  Synthetic oligonucleotide

SEQ ID NO: 554680 - DNA, 57 bp, Artificial; identical to SEQ ID NO: 343383
  Synthetic oligonucleotide

SEQ ID NO: 554681 - DNA, 56 bp, Artificial; identical to SEQ ID NO: 343384
  Synthetic oligonucleotide

SEQ ID NO: 554682 - DNA, 56 bp, Artificial; identical to SEQ ID NO: 343385
  Synthetic oligonucleotide

SEQ ID NO: 554683 - DNA, 55 bp, Artificial; identical to SEQ ID NO: 343390
  Synthetic oligonucleotide

SEQ ID NO: 554684 - DNA, 57 bp, Artificial; identical to SEQ ID NO: 343391
  Synthetic oligonucleotide

SEQ ID NO: 554685 - DNA, 55 bp, Artificial; identical to SEQ ID NO: 343392
  Synthetic oligonucleotide

SEQ ID NO: 554686 - DNA, 55 bp, Artificial; identical to SEQ ID NO: 343394
  Synthetic oligonucleotide

SEQ ID NO: 554687 - DNA, 60 bp, Artificial; identical to SEQ ID NO: 343397
  Synthetic oligonucleotide

SEQ ID NO: 554688 - DNA, 56 bp, Artificial; identical to SEQ ID NO: 343399
  Synthetic oligonucleotide

SEQ ID NO: 554689 - DNA, 50 bp, Artificial; identical to SEQ ID NO: 343401
  Synthetic oligonucleotide

SEQ ID NO: 554690 - DNA, 55 bp, Artificial; identical to SEQ ID NO: 343404
  Synthetic oligonucleotide

SEQ ID NO: 554691 - DNA, 51 bp, Artificial; identical to SEQ ID NO: 343405
  Synthetic oligonucleotide

SEQ ID NO: 554692 - DNA, 54 bp, Artificial; identical to SEQ ID NO: 343407
  Synthetic oligonucleotide

SEQ ID NO: 554693 - DNA, 55 bp, Artificial; identical to SEQ ID NO: 343413
  Synthetic oligonucleotide

SEQ ID NO: 554694 - DNA, 57 bp, Artificial; identical to SEQ ID NO: 343415
  Synthetic oligonucleotide

SEQ ID NO: 554695 - DNA, 55 bp, Artificial; identical to SEQ ID NO: 343416
  Synthetic oligonucleotide

SEQ ID NO: 554696 - DNA, 60 bp, Artificial; identical to SEQ ID NO: 343417
  Synthetic oligonucleotide

SEQ ID NO: 554697 - DNA, 55 bp, Artificial; identical to SEQ ID NO: 343419
  Synthetic oligonucleotide

SEQ ID NO: 554698 - DNA, 60 bp, Artificial; identical to SEQ ID NO: 343421
  Synthetic oligonucleotide

SEQ ID NO: 554699 - DNA, 54 bp, Artificial; identical to SEQ ID NO: 343423
  Synthetic oligonucleotide

SEQ ID NO: 554700 - DNA, 55 bp, Artificial; identical to SEQ ID NO: 343425
  Synthetic oligonucleotide

SEQ ID NO: 554701 - DNA, 59 bp, Artificial; identical to SEQ ID NO: 343426
  Synthetic oligonucleotide

SEQ ID NO: 554702 - DNA, 60 bp, Artificial; identical to SEQ ID NO: 343427
  Synthetic oligonucleotide

SEQ ID NO: 554703 - DNA, 55 bp, Artificial; identical to SEQ ID NO: 343431
  Synthetic oligonucleotide

SEQ ID NO: 554704 - DNA, 60 bp, Artificial; identical to SEQ ID NO: 343434
  Synthetic oligonucleotide

SEQ ID NO: 554705 - DNA, 59 bp, Artificial; identical to SEQ ID NO: 343437
  Synthetic oligonucleotide

SEQ ID NO: 554706 - DNA, 55 bp, Artificial; identical to SEQ ID NO: 343438
  Synthetic oligonucleotide

SEQ ID NO: 554707 - DNA, 60 bp, Artificial; identical to SEQ ID NO: 343439
  Synthetic oligonucleotide

SEQ ID NO: 554708 - DNA, 58 bp, Artificial; identical to SEQ ID NO: 343443
  Synthetic oligonucleotide

SEQ ID NO: 554709 - DNA, 55 bp, Artificial; identical to SEQ ID NO: 343445
  Synthetic oligonucleotide

SEQ ID NO: 554710 - DNA, 55 bp, Artificial; identical to SEQ ID NO: 343447
  Synthetic oligonucleotide

SEQ ID NO: 554711 - DNA, 55 bp, Artificial; identical to SEQ ID NO: 343448
  Synthetic oligonucleotide

SEQ ID NO: 554712 - DNA, 59 bp, Artificial; identical to SEQ ID NO: 17719
  Synthetic oligonucleotide

SEQ ID NO: 554713 - DNA, 60 bp, Artificial; identical to SEQ ID NO: 343450
  Synthetic oligonucleotide

SEQ ID NO: 554714 - DNA, 60 bp, Artificial; identical to SEQ ID NO: 343453
  Synthetic oligonucleotide

SEQ ID NO: 554715 - DNA, 55 bp, Artificial; identical to SEQ ID NO: 343455
  Synthetic oligonucleotide

SEQ ID NO: 554716 - DNA, 57 bp, Artificial; identical to SEQ ID NO: 343456
  Synthetic oligonucleotide

SEQ ID NO: 554717 - DNA, 52 bp, Artificial; identical to SEQ ID NO: 343459
  Synthetic oligonucleotide

SEQ ID NO: 554718 - DNA, 60 bp, Artificial; identical to SEQ ID NO: 343462
  Synthetic oligonucleotide

SEQ ID NO: 554719 - DNA, 60 bp, Artificial; identical to SEQ ID NO: 343464
  Synthetic oligonucleotide

SEQ ID NO: 554720 - DNA, 59 bp, Artificial; identical to SEQ ID NO: 343468
  Synthetic oligonucleotide

SEQ ID NO: 554721 - DNA, 59 bp, Artificial; identical to SEQ ID NO: 343469
  Synthetic oligonucleotide

SEQ ID NO: 554722 - DNA, 59 bp, Artificial; identical to SEQ ID NO: 343471
  Synthetic oligonucleotide

SEQ ID NO: 554723 - DNA, 55 bp, Artificial; identical to SEQ ID NO: 343472
  Synthetic oligonucleotide

SEQ ID NO: 554724 - DNA, 60 bp, Artificial; identical to SEQ ID NO: 343474
  Synthetic oligonucleotide

SEQ ID NO: 554725 - DNA, 55 bp, Artificial; identical to SEQ ID NO: 343479
  Synthetic oligonucleotide

SEQ ID NO: 554726 - DNA, 60 bp, Artificial; identical to SEQ ID NO: 343480
  Synthetic oligonucleotide

SEQ ID NO: 554727 - DNA, 59 bp, Artificial; identical to SEQ ID NO: 343481
  Synthetic oligonucleotide

SEQ ID NO: 554728 - DNA, 55 bp, Artificial; identical to SEQ ID NO: 343483
  Synthetic oligonucleotide

SEQ ID NO: 554729 - DNA, 55 bp, Artificial; identical to SEQ ID NO: 343487
  Synthetic oligonucleotide

SEQ ID NO: 554730 - DNA, 59 bp, Artificial; identical to SEQ ID NO: 343488
  Synthetic oligonucleotide

SEQ ID NO: 554731 - DNA, 54 bp, Artificial; identical to SEQ ID NO: 343490
  Synthetic oligonucleotide

SEQ ID NO: 554732 - DNA, 55 bp, Artificial; identical to SEQ ID NO: 343491
  Synthetic oligonucleotide

SEQ ID NO: 554733 - DNA, 51 bp, Artificial; identical to SEQ ID NO: 343493
  Synthetic oligonucleotide

SEQ ID NO: 554734 - DNA, 54 bp, Artificial; identical to SEQ ID NO: 7023
  Synthetic oligonucleotide

SEQ ID NO: 554735 - DNA, 55 bp, Artificial; identical to SEQ ID NO: 343495
  Synthetic oligonucleotide

SEQ ID NO: 554736 - DNA, 55 bp, Artificial; identical to SEQ ID NO: 343496
  Synthetic oligonucleotide

SEQ ID NO: 554737 - DNA, 55 bp, Artificial; identical to SEQ ID NO: 343499
  Synthetic oligonucleotide

SEQ ID NO: 554738 - DNA, 55 bp, Artificial; identical to SEQ ID NO: 343500
  Synthetic oligonucleotide

SEQ ID NO: 554739 - DNA, 60 bp, Artificial; identical to SEQ ID NO: 10526
  Synthetic oligonucleotide

SEQ ID NO: 554740 - DNA, 60 bp, Artificial; identical to SEQ ID NO: 343502
  Synthetic oligonucleotide

SEQ ID NO: 554741 - DNA, 60 bp, Artificial; identical to SEQ ID NO: 343505
  Synthetic oligonucleotide

SEQ ID NO: 554742 - DNA, 50 bp, Artificial; identical to SEQ ID NO: 343507
  Synthetic oligonucleotide

SEQ ID NO: 554743 - DNA, 55 bp, Artificial; identical to SEQ ID NO: 343510
  Synthetic oligonucleotide

SEQ ID NO: 554744 - DNA, 55 bp, Artificial; identical to SEQ ID NO: 343511
  Synthetic oligonucleotide

SEQ ID NO: 554745 - DNA, 60 bp, Artificial; identical to SEQ ID NO: 343513
  Synthetic oligonucleotide

SEQ ID NO: 554746 - DNA, 60 bp, Artificial; identical to SEQ ID NO: 7611
  Synthetic oligonucleotide

SEQ ID NO: 554747 - DNA, 55 bp, Artificial; identical to SEQ ID NO: 343515
  Synthetic oligonucleotide

SEQ ID NO: 554748 - DNA, 60 bp, Artificial; identical to SEQ ID NO: 343517
  Synthetic oligonucleotide

SEQ ID NO: 554749 - DNA, 60 bp, Artificial; identical to SEQ ID NO: 343519
  Synthetic oligonucleotide

SEQ ID NO: 554750 - DNA, 55 bp, Artificial; identical to SEQ ID NO: 343520
  Synthetic oligonucleotide

SEQ ID NO: 554751 - DNA, 60 bp, Artificial; identical to SEQ ID NO: 343521
  Synthetic oligonucleotide

SEQ ID NO: 554752 - DNA, 60 bp, Artificial; identical to SEQ ID NO: 343524
  Synthetic oligonucleotide

SEQ ID NO: 554753 - DNA, 60 bp, Artificial; identical to SEQ ID NO: 343525
  Synthetic oligonucleotide

SEQ ID NO: 554754 - DNA, 54 bp, Artificial; identical to SEQ ID NO: 343526
  Synthetic oligonucleotide

SEQ ID NO: 554755 - DNA, 57 bp, Artificial; identical to SEQ ID NO: 343529
  Synthetic oligonucleotide

SEQ ID NO: 554756 - DNA, 60 bp, Artificial; identical to SEQ ID NO: 343532
  Synthetic oligonucleotide

SEQ ID NO: 554757 - DNA, 55 bp, Artificial; identical to SEQ ID NO: 343535
  Synthetic oligonucleotide

SEQ ID NO: 554758 - DNA, 58 bp, Artificial; identical to SEQ ID NO: 343538
  Synthetic oligonucleotide

SEQ ID NO: 554759 - DNA, 57 bp, Artificial; identical to SEQ ID NO: 343539
  Synthetic oligonucleotide

SEQ ID NO: 554760 - DNA, 60 bp, Artificial; identical to SEQ ID NO: 343541
  Synthetic oligonucleotide

SEQ ID NO: 554761 - DNA, 56 bp, Artificial; identical to SEQ ID NO: 343542
  Synthetic oligonucleotide

SEQ ID NO: 554762 - DNA, 60 bp, Artificial; identical to SEQ ID NO: 343543
  Synthetic oligonucleotide

SEQ ID NO: 554763 - DNA, 55 bp, Artificial; identical to SEQ ID NO: 343544
  Synthetic oligonucleotide

SEQ ID NO: 554764 - DNA, 60 bp, Artificial; identical to SEQ ID NO: 9541
  Synthetic oligonucleotide

SEQ ID NO: 554765 - DNA, 50 bp, Artificial; identical to SEQ ID NO: 343545
  Synthetic oligonucleotide

SEQ ID NO: 554766 - DNA, 55 bp, Artificial; identical to SEQ ID NO: 343546
  Synthetic oligonucleotide

SEQ ID NO: 554767 - DNA, 51 bp, Artificial; identical to SEQ ID NO: 14688
  Synthetic oligonucleotide

SEQ ID NO: 554768 - DNA, 55 bp, Artificial; identical to SEQ ID NO: 343550
  Synthetic oligonucleotide

SEQ ID NO: 554769 - DNA, 57 bp, Artificial; identical to SEQ ID NO: 343551
  Synthetic oligonucleotide

SEQ ID NO: 554770 - DNA, 55 bp, Artificial; identical to SEQ ID NO: 343554
  Synthetic oligonucleotide

SEQ ID NO: 554771 - DNA, 60 bp, Artificial; identical to SEQ ID NO: 343555
  Synthetic oligonucleotide

SEQ ID NO: 554772 - DNA, 55 bp, Artificial; identical to SEQ ID NO: 343559
  Synthetic oligonucleotide

SEQ ID NO: 554773 - DNA, 55 bp, Artificial; identical to SEQ ID NO: 343560
  Synthetic oligonucleotide

SEQ ID NO: 554774 - DNA, 57 bp, Artificial; identical to SEQ ID NO: 343561
  Synthetic oligonucleotide

SEQ ID NO: 554775 - DNA, 53 bp, Artificial; identical to SEQ ID NO: 343564
  Synthetic oligonucleotide

SEQ ID NO: 554776 - DNA, 58 bp, Artificial; identical to SEQ ID NO: 343565
  Synthetic oligonucleotide

SEQ ID NO: 554777 - DNA, 55 bp, Artificial; identical to SEQ ID NO: 343567
  Synthetic oligonucleotide

SEQ ID NO: 554778 - DNA, 59 bp, Artificial; identical to SEQ ID NO: 343568
  Synthetic oligonucleotide

SEQ ID NO: 554779 - DNA, 60 bp, Artificial; identical to SEQ ID NO: 343573
  Synthetic oligonucleotide

SEQ ID NO: 554780 - DNA, 55 bp, Artificial; identical to SEQ ID NO: 343576
  Synthetic oligonucleotide

SEQ ID NO: 554781 - DNA, 56 bp, Artificial; identical to SEQ ID NO: 343581
  Synthetic oligonucleotide

SEQ ID NO: 554782 - DNA, 55 bp, Artificial; identical to SEQ ID NO: 343585
  Synthetic oligonucleotide

SEQ ID NO: 554783 - DNA, 58 bp, Artificial; identical to SEQ ID NO: 343586
  Synthetic oligonucleotide

SEQ ID NO: 554784 - DNA, 60 bp, Artificial; identical to SEQ ID NO: 343589
  Synthetic oligonucleotide

SEQ ID NO: 554785 - DNA, 60 bp, Artificial; identical to SEQ ID NO: 343592
  Synthetic oligonucleotide

SEQ ID NO: 554786 - DNA, 55 bp, Artificial; identical to SEQ ID NO: 343594
  Synthetic oligonucleotide

SEQ ID NO: 554787 - DNA, 57 bp, Artificial; identical to SEQ ID NO: 10829
  Synthetic oligonucleotide

SEQ ID NO: 554788 - DNA, 57 bp, Artificial; identical to SEQ ID NO: 343597
  Synthetic oligonucleotide

SEQ ID NO: 554789 - DNA, 60 bp, Artificial; identical to SEQ ID NO: 13372
  Synthetic oligonucleotide

SEQ ID NO: 554790 - DNA, 60 bp, Artificial; identical to SEQ ID NO: 343603
  Synthetic oligonucleotide

SEQ ID NO: 554791 - DNA, 55 bp, Artificial; identical to SEQ ID NO: 343605
  Synthetic oligonucleotide

SEQ ID NO: 554792 - DNA, 60 bp, Artificial; identical to SEQ ID NO: 343606
  Synthetic oligonucleotide

SEQ ID NO: 554793 - DNA, 60 bp, Artificial; identical to SEQ ID NO: 343609
  Synthetic oligonucleotide

SEQ ID NO: 554794 - DNA, 56 bp, Artificial; identical to SEQ ID NO: 343614
  Synthetic oligonucleotide

SEQ ID NO: 554795 - DNA, 55 bp, Artificial; identical to SEQ ID NO: 343615
  Synthetic oligonucleotide

SEQ ID NO: 554796 - DNA, 55 bp, Artificial; identical to SEQ ID NO: 343617
  Synthetic oligonucleotide

SEQ ID NO: 554797 - DNA, 60 bp, Artificial; identical to SEQ ID NO: 15035
  Synthetic oligonucleotide

SEQ ID NO: 554798 - DNA, 55 bp, Artificial; identical to SEQ ID NO: 343618
  Synthetic oligonucleotide

SEQ ID NO: 554799 - DNA, 60 bp, Artificial; identical to SEQ ID NO: 343625
  Synthetic oligonucleotide

SEQ ID NO: 554800 - DNA, 60 bp, Artificial; identical to SEQ ID NO: 106125
  Synthetic oligonucleotide

SEQ ID NO: 554801 - DNA, 51 bp, Artificial; identical to SEQ ID NO: 343626
  Synthetic oligonucleotide

SEQ ID NO: 554802 - DNA, 60 bp, Artificial; identical to SEQ ID NO: 343630
  Synthetic oligonucleotide

SEQ ID NO: 554803 - DNA, 55 bp, Artificial; identical to SEQ ID NO: 343631
  Synthetic oligonucleotide

SEQ ID NO: 554804 - DNA, 60 bp, Artificial; identical to SEQ ID NO: 343632
  Synthetic oligonucleotide

SEQ ID NO: 554805 - DNA, 54 bp, Artificial; identical to SEQ ID NO: 343634
  Synthetic oligonucleotide

SEQ ID NO: 554806 - DNA, 60 bp, Artificial; identical to SEQ ID NO: 343636
  Synthetic oligonucleotide

SEQ ID NO: 554807 - DNA, 51 bp, Artificial; identical to SEQ ID NO: 343637
  Synthetic oligonucleotide

SEQ ID NO: 554808 - DNA, 55 bp, Artificial; identical to SEQ ID NO: 343640
  Synthetic oligonucleotide

SEQ ID NO: 554809 - DNA, 60 bp, Artificial; identical to SEQ ID NO: 343641
  Synthetic oligonucleotide

SEQ ID NO: 554810 - DNA, 57 bp, Artificial; identical to SEQ ID NO: 343646
  Synthetic oligonucleotide

SEQ ID NO: 554811 - DNA, 60 bp, Artificial; identical to SEQ ID NO: 343648
  Synthetic oligonucleotide

SEQ ID NO: 554812 - DNA, 60 bp, Artificial; identical to SEQ ID NO: 343649
  Synthetic oligonucleotide

SEQ ID NO: 554813 - DNA, 60 bp, Artificial; identical to SEQ ID NO: 343652
  Synthetic oligonucleotide

SEQ ID NO: 554814 - DNA, 60 bp, Artificial; identical to SEQ ID NO: 39407
  Synthetic oligonucleotide

SEQ ID NO: 554815 - DNA, 57 bp, Artificial; identical to SEQ ID NO: 343656
  Synthetic oligonucleotide

SEQ ID NO: 554816 - DNA, 60 bp, Artificial; identical to SEQ ID NO: 343660
  Synthetic oligonucleotide

SEQ ID NO: 554817 - DNA, 55 bp, Artificial; identical to SEQ ID NO: 343661
  Synthetic oligonucleotide

SEQ ID NO: 554818 - DNA, 57 bp, Artificial; identical to SEQ ID NO: 343663
  Synthetic oligonucleotide

SEQ ID NO: 554819 - DNA, 60 bp, Artificial; identical to SEQ ID NO: 9140
  Synthetic oligonucleotide

SEQ ID NO: 554820 - DNA, 55 bp, Artificial; identical to SEQ ID NO: 343665
  Synthetic oligonucleotide

SEQ ID NO: 554821 - DNA, 55 bp, Artificial; identical to SEQ ID NO: 343666
  Synthetic oligonucleotide

SEQ ID NO: 554822 - DNA, 60 bp, Artificial; identical to SEQ ID NO: 343670
  Synthetic oligonucleotide

SEQ ID NO: 554823 - DNA, 60 bp, Artificial; identical to SEQ ID NO: 343671
  Synthetic oligonucleotide

SEQ ID NO: 554824 - DNA, 60 bp, Artificial; identical to SEQ ID NO: 343675
  Synthetic oligonucleotide

SEQ ID NO: 554825 - DNA, 54 bp, Artificial; identical to SEQ ID NO: 343677
  Synthetic oligonucleotide

SEQ ID NO: 554826 - DNA, 60 bp, Artificial; identical to SEQ ID NO: 343678
  Synthetic oligonucleotide

SEQ ID NO: 554827 - DNA, 55 bp, Artificial; identical to SEQ ID NO: 343680
  Synthetic oligonucleotide

SEQ ID NO: 554828 - DNA, 54 bp, Artificial; identical to SEQ ID NO: 343681
  Synthetic oligonucleotide

SEQ ID NO: 554829 - DNA, 59 bp, Artificial; identical to SEQ ID NO: 343685
  Synthetic oligonucleotide

SEQ ID NO: 554830 - DNA, 55 bp, Artificial; identical to SEQ ID NO: 343689
  Synthetic oligonucleotide

SEQ ID NO: 554831 - DNA, 55 bp, Artificial; identical to SEQ ID NO: 343690
  Synthetic oligonucleotide

SEQ ID NO: 554832 - DNA, 59 bp, Artificial; identical to SEQ ID NO: 343691
  Synthetic oligonucleotide

SEQ ID NO: 554833 - DNA, 60 bp, Artificial; identical to SEQ ID NO: 343693
  Synthetic oligonucleotide

SEQ ID NO: 554834 - DNA, 57 bp, Artificial; identical to SEQ ID NO: 17646
  Synthetic oligonucleotide

SEQ ID NO: 554835 - DNA, 60 bp, Artificial; identical to SEQ ID NO: 343694
  Synthetic oligonucleotide

SEQ ID NO: 554836 - DNA, 58 bp, Artificial; identical to SEQ ID NO: 343696
  Synthetic oligonucleotide

SEQ ID NO: 554837 - DNA, 57 bp, Artificial; identical to SEQ ID NO: 343697
  Synthetic oligonucleotide

SEQ ID NO: 554838 - DNA, 55 bp, Artificial; identical to SEQ ID NO: 343698
  Synthetic oligonucleotide

SEQ ID NO: 554839 - DNA, 60 bp, Artificial; identical to SEQ ID NO: 343700
  Synthetic oligonucleotide

SEQ ID NO: 554840 - DNA, 60 bp, Artificial; identical to SEQ ID NO: 343701
  Synthetic oligonucleotide

SEQ ID NO: 554841 - DNA, 60 bp, Artificial; identical to SEQ ID NO: 343713
  Synthetic oligonucleotide

SEQ ID NO: 554842 - DNA, 57 bp, Artificial; identical to SEQ ID NO: 343715
  Synthetic oligonucleotide

SEQ ID NO: 554843 - DNA, 55 bp, Artificial; identical to SEQ ID NO: 343718
  Synthetic oligonucleotide

SEQ ID NO: 554844 - DNA, 56 bp, Artificial; identical to SEQ ID NO: 343719
  Synthetic oligonucleotide

SEQ ID NO: 554845 - DNA, 55 bp, Artificial; identical to SEQ ID NO: 343721
  Synthetic oligonucleotide

SEQ ID NO: 554846 - DNA, 56 bp, Artificial; identical to SEQ ID NO: 343722
  Synthetic oligonucleotide

SEQ ID NO: 554847 - DNA, 55 bp, Artificial; identical to SEQ ID NO: 343723
  Synthetic oligonucleotide

SEQ ID NO: 554848 - DNA, 60 bp, Artificial; identical to SEQ ID NO: 343725
  Synthetic oligonucleotide

SEQ ID NO: 554849 - DNA, 60 bp, Artificial; identical to SEQ ID NO: 343727
  Synthetic oligonucleotide

SEQ ID NO: 554850 - DNA, 60 bp, Artificial; identical to SEQ ID NO: 343729
  Synthetic oligonucleotide

SEQ ID NO: 554851 - DNA, 60 bp, Artificial; identical to SEQ ID NO: 343730
  Synthetic oligonucleotide

SEQ ID NO: 554852 - DNA, 57 bp, Artificial; identical to SEQ ID NO: 343739
  Synthetic oligonucleotide

SEQ ID NO: 554853 - DNA, 59 bp, Artificial; identical to SEQ ID NO: 343740
  Synthetic oligonucleotide

SEQ ID NO: 554854 - DNA, 51 bp, Artificial; identical to SEQ ID NO: 343741
  Synthetic oligonucleotide

SEQ ID NO: 554855 - DNA, 57 bp, Artificial; identical to SEQ ID NO: 343742
  Synthetic oligonucleotide

SEQ ID NO: 554856 - DNA, 51 bp, Artificial; identical to SEQ ID NO: 9781
  Synthetic oligonucleotide

SEQ ID NO: 554857 - DNA, 56 bp, Artificial; identical to SEQ ID NO: 343743
  Synthetic oligonucleotide

SEQ ID NO: 554858 - DNA, 55 bp, Artificial; identical to SEQ ID NO: 343745
  Synthetic oligonucleotide

SEQ ID NO: 554859 - DNA, 60 bp, Artificial; identical to SEQ ID NO: 343749
  Synthetic oligonucleotide

SEQ ID NO: 554860 - DNA, 55 bp, Artificial; identical to SEQ ID NO: 343750
  Synthetic oligonucleotide

SEQ ID NO: 554861 - DNA, 56 bp, Artificial; identical to SEQ ID NO: 343751
  Synthetic oligonucleotide

SEQ ID NO: 554862 - DNA, 52 bp, Artificial; identical to SEQ ID NO: 343752
  Synthetic oligonucleotide

SEQ ID NO: 554863 - DNA, 54 bp, Artificial; identical to SEQ ID NO: 343755
  Synthetic oligonucleotide

SEQ ID NO: 554864 - DNA, 60 bp, Artificial; identical to SEQ ID NO: 343756
  Synthetic oligonucleotide

SEQ ID NO: 554865 - DNA, 55 bp, Artificial; identical to SEQ ID NO: 343760
  Synthetic oligonucleotide

SEQ ID NO: 554866 - DNA, 55 bp, Artificial; identical to SEQ ID NO: 343763
  Synthetic oligonucleotide

SEQ ID NO: 554867 - DNA, 60 bp, Artificial; identical to SEQ ID NO: 343765
  Synthetic oligonucleotide

SEQ ID NO: 554868 - DNA, 55 bp, Artificial; identical to SEQ ID NO: 343770
  Synthetic oligonucleotide

SEQ ID NO: 554869 - DNA, 56 bp, Artificial; identical to SEQ ID NO: 343773
  Synthetic oligonucleotide

SEQ ID NO: 554870 - DNA, 60 bp, Artificial; identical to SEQ ID NO: 343776
  Synthetic oligonucleotide

SEQ ID NO: 554871 - DNA, 60 bp, Artificial; identical to SEQ ID NO: 343777
  Synthetic oligonucleotide

SEQ ID NO: 554872 - DNA, 60 bp, Artificial; identical to SEQ ID NO: 343778
  Synthetic oligonucleotide

SEQ ID NO: 554873 - DNA, 54 bp, Artificial; identical to SEQ ID NO: 343779
  Synthetic oligonucleotide

SEQ ID NO: 554874 - DNA, 55 bp, Artificial; identical to SEQ ID NO: 343781
  Synthetic oligonucleotide

SEQ ID NO: 554875 - DNA, 60 bp, Artificial; identical to SEQ ID NO: 13378
  Synthetic oligonucleotide

SEQ ID NO: 554876 - DNA, 59 bp, Artificial; identical to SEQ ID NO: 343784
  Synthetic oligonucleotide

SEQ ID NO: 554877 - DNA, 60 bp, Artificial; identical to SEQ ID NO: 343786
  Synthetic oligonucleotide

SEQ ID NO: 554878 - DNA, 55 bp, Artificial; identical to SEQ ID NO: 343787
  Synthetic oligonucleotide

SEQ ID NO: 554879 - DNA, 60 bp, Artificial; identical to SEQ ID NO: 343789
  Synthetic oligonucleotide

SEQ ID NO: 554880 - DNA, 53 bp, Artificial; identical to SEQ ID NO: 343793
  Synthetic oligonucleotide

SEQ ID NO: 554881 - DNA, 58 bp, Artificial; identical to SEQ ID NO: 343794
  Synthetic oligonucleotide

SEQ ID NO: 554882 - DNA, 52 bp, Artificial; identical to SEQ ID NO: 343795
  Synthetic oligonucleotide

SEQ ID NO: 554883 - DNA, 55 bp, Artificial; identical to SEQ ID NO: 343796
  Synthetic oligonucleotide

SEQ ID NO: 554884 - DNA, 55 bp, Artificial; identical to SEQ ID NO: 343797
  Synthetic oligonucleotide

SEQ ID NO: 554885 - DNA, 58 bp, Artificial; identical to SEQ ID NO: 16940
  Synthetic oligonucleotide

SEQ ID NO: 554886 - DNA, 60 bp, Artificial; identical to SEQ ID NO: 343798
  Synthetic oligonucleotide

SEQ ID NO: 554887 - DNA, 52 bp, Artificial; identical to SEQ ID NO: 343800
  Synthetic oligonucleotide

SEQ ID NO: 554888 - DNA, 55 bp, Artificial; identical to SEQ ID NO: 343801
  Synthetic oligonucleotide

SEQ ID NO: 554889 - DNA, 60 bp, Artificial; identical to SEQ ID NO: 343802
  Synthetic oligonucleotide

SEQ ID NO: 554890 - DNA, 55 bp, Artificial; identical to SEQ ID NO: 343808
  Synthetic oligonucleotide

SEQ ID NO: 554891 - DNA, 60 bp, Artificial; identical to SEQ ID NO: 343809
  Synthetic oligonucleotide

SEQ ID NO: 554892 - DNA, 59 bp, Artificial; identical to SEQ ID NO: 343810
  Synthetic oligonucleotide

SEQ ID NO: 554893 - DNA, 59 bp, Artificial; identical to SEQ ID NO: 343811
  Synthetic oligonucleotide

SEQ ID NO: 554894 - DNA, 60 bp, Artificial; identical to SEQ ID NO: 343813
  Synthetic oligonucleotide

SEQ ID NO: 554895 - DNA, 55 bp, Artificial; identical to SEQ ID NO: 343814
  Synthetic oligonucleotide

SEQ ID NO: 554896 - DNA, 55 bp, Artificial; identical to SEQ ID NO: 343815
  Synthetic oligonucleotide

SEQ ID NO: 554897 - DNA, 55 bp, Artificial; identical to SEQ ID NO: 343818
  Synthetic oligonucleotide

SEQ ID NO: 554898 - DNA, 55 bp, Artificial; identical to SEQ ID NO: 343819
  Synthetic oligonucleotide

SEQ ID NO: 554899 - DNA, 60 bp, Artificial; identical to SEQ ID NO: 343821
  Synthetic oligonucleotide

SEQ ID NO: 554900 - DNA, 55 bp, Artificial; identical to SEQ ID NO: 343822
  Synthetic oligonucleotide

SEQ ID NO: 554901 - DNA, 52 bp, Artificial; identical to SEQ ID NO: 343825
  Synthetic oligonucleotide

SEQ ID NO: 554902 - DNA, 53 bp, Artificial; identical to SEQ ID NO: 343827
  Synthetic oligonucleotide

SEQ ID NO: 554903 - DNA, 58 bp, Artificial; identical to SEQ ID NO: 343831
  Synthetic oligonucleotide

SEQ ID NO: 554904 - DNA, 59 bp, Artificial; identical to SEQ ID NO: 16745
  Synthetic oligonucleotide

SEQ ID NO: 554905 - DNA, 53 bp, Artificial; identical to SEQ ID NO: 343841
  Synthetic oligonucleotide

SEQ ID NO: 554906 - DNA, 54 bp, Artificial; identical to SEQ ID NO: 343842
  Synthetic oligonucleotide

SEQ ID NO: 554907 - DNA, 53 bp, Artificial; identical to SEQ ID NO: 343843
  Synthetic oligonucleotide

SEQ ID NO: 554908 - DNA, 60 bp, Artificial; identical to SEQ ID NO: 343844
  Synthetic oligonucleotide

SEQ ID NO: 554909 - DNA, 55 bp, Artificial; identical to SEQ ID NO: 343845
  Synthetic oligonucleotide

SEQ ID NO: 554910 - DNA, 55 bp, Artificial; identical to SEQ ID NO: 343846
  Synthetic oligonucleotide

SEQ ID NO: 554911 - DNA, 60 bp, Artificial; identical to SEQ ID NO: 343849
  Synthetic oligonucleotide

SEQ ID NO: 554912 - DNA, 60 bp, Artificial; identical to SEQ ID NO: 343859
  Synthetic oligonucleotide

SEQ ID NO: 554913 - DNA, 51 bp, Artificial; identical to SEQ ID NO: 343866
  Synthetic oligonucleotide

SEQ ID NO: 554914 - DNA, 60 bp, Artificial; identical to SEQ ID NO: 15593
  Synthetic oligonucleotide

SEQ ID NO: 554915 - DNA, 55 bp, Artificial; identical to SEQ ID NO: 8013
  Synthetic oligonucleotide

SEQ ID NO: 554916 - DNA, 59 bp, Artificial; identical to SEQ ID NO: 343870
  Synthetic oligonucleotide

SEQ ID NO: 554917 - DNA, 54 bp, Artificial; identical to SEQ ID NO: 343872
  Synthetic oligonucleotide

SEQ ID NO: 554918 - DNA, 51 bp, Artificial; identical to SEQ ID NO: 343874
  Synthetic oligonucleotide

SEQ ID NO: 554919 - DNA, 53 bp, Artificial; identical to SEQ ID NO: 343877
  Synthetic oligonucleotide

SEQ ID NO: 554920 - DNA, 59 bp, Artificial; identical to SEQ ID NO: 343880
  Synthetic oligonucleotide

SEQ ID NO: 554921 - DNA, 59 bp, Artificial; identical to SEQ ID NO: 343881
  Synthetic oligonucleotide

SEQ ID NO: 554922 - DNA, 55 bp, Artificial; identical to SEQ ID NO: 343882
  Synthetic oligonucleotide

SEQ ID NO: 554923 - DNA, 60 bp, Artificial; identical to SEQ ID NO: 343883
  Synthetic oligonucleotide

SEQ ID NO: 554924 - DNA, 55 bp, Artificial; identical to SEQ ID NO: 343886
  Synthetic oligonucleotide

SEQ ID NO: 554925 - DNA, 59 bp, Artificial; identical to SEQ ID NO: 343892
  Synthetic oligonucleotide

SEQ ID NO: 554926 - DNA, 60 bp, Artificial; identical to SEQ ID NO: 343894
  Synthetic oligonucleotide

SEQ ID NO: 554927 - DNA, 56 bp, Artificial; identical to SEQ ID NO: 343895
  Synthetic oligonucleotide

SEQ ID NO: 554928 - DNA, 52 bp, Artificial; identical to SEQ ID NO: 343896
  Synthetic oligonucleotide

SEQ ID NO: 554929 - DNA, 52 bp, Artificial; identical to SEQ ID NO: 343898
  Synthetic oligonucleotide

SEQ ID NO: 554930 - DNA, 60 bp, Artificial; identical to SEQ ID NO: 343901
  Synthetic oligonucleotide

SEQ ID NO: 554931 - DNA, 57 bp, Artificial; identical to SEQ ID NO: 343902
  Synthetic oligonucleotide

SEQ ID NO: 554932 - DNA, 60 bp, Artificial; identical to SEQ ID NO: 343903
  Synthetic oligonucleotide

SEQ ID NO: 554933 - DNA, 55 bp, Artificial; identical to SEQ ID NO: 343905
  Synthetic oligonucleotide

SEQ ID NO: 554934 - DNA, 55 bp, Artificial; identical to SEQ ID NO: 343908
  Synthetic oligonucleotide

SEQ ID NO: 554935 - DNA, 54 bp, Artificial; identical to SEQ ID NO: 343911
  Synthetic oligonucleotide

SEQ ID NO: 554936 - DNA, 57 bp, Artificial; identical to SEQ ID NO: 343915
  Synthetic oligonucleotide

SEQ ID NO: 554937 - DNA, 57 bp, Artificial; identical to SEQ ID NO: 343916
  Synthetic oligonucleotide

SEQ ID NO: 554938 - DNA, 58 bp, Artificial; identical to SEQ ID NO: 343917
  Synthetic oligonucleotide

SEQ ID NO: 554939 - DNA, 60 bp, Artificial; identical to SEQ ID NO: 343920
  Synthetic oligonucleotide

SEQ ID NO: 554940 - DNA, 57 bp, Artificial; identical to SEQ ID NO: 343921
  Synthetic oligonucleotide

SEQ ID NO: 554941 - DNA, 55 bp, Artificial; identical to SEQ ID NO: 343922
  Synthetic oligonucleotide

SEQ ID NO: 554942 - DNA, 55 bp, Artificial; identical to SEQ ID NO: 343923
  Synthetic oligonucleotide

SEQ ID NO: 554943 - DNA, 60 bp, Artificial; identical to SEQ ID NO: 343924
  Synthetic oligonucleotide

SEQ ID NO: 554944 - DNA, 60 bp, Artificial; identical to SEQ ID NO: 343925
  Synthetic oligonucleotide

SEQ ID NO: 554945 - DNA, 59 bp, Artificial; identical to SEQ ID NO: 343926
  Synthetic oligonucleotide

SEQ ID NO: 554946 - DNA, 57 bp, Artificial; identical to SEQ ID NO: 343927
  Synthetic oligonucleotide

SEQ ID NO: 554947 - DNA, 56 bp, Artificial; identical to SEQ ID NO: 343929
  Synthetic oligonucleotide

SEQ ID NO: 554948 - DNA, 56 bp, Artificial; identical to SEQ ID NO: 343931
  Synthetic oligonucleotide

SEQ ID NO: 554949 - DNA, 60 bp, Artificial; identical to SEQ ID NO: 343935
  Synthetic oligonucleotide

SEQ ID NO: 554950 - DNA, 55 bp, Artificial; identical to SEQ ID NO: 343938
  Synthetic oligonucleotide

SEQ ID NO: 554951 - DNA, 55 bp, Artificial; identical to SEQ ID NO: 343943
  Synthetic oligonucleotide

SEQ ID NO: 554952 - DNA, 55 bp, Artificial; identical to SEQ ID NO: 343950
  Synthetic oligonucleotide

SEQ ID NO: 554953 - DNA, 60 bp, Artificial; identical to SEQ ID NO: 343951
  Synthetic oligonucleotide

SEQ ID NO: 554954 - DNA, 59 bp, Artificial; identical to SEQ ID NO: 343955
  Synthetic oligonucleotide

SEQ ID NO: 554955 - DNA, 60 bp, Artificial; identical to SEQ ID NO: 343956
  Synthetic oligonucleotide

SEQ ID NO: 554956 - DNA, 60 bp, Artificial; identical to SEQ ID NO: 343958
  Synthetic oligonucleotide

SEQ ID NO: 554957 - DNA, 55 bp, Artificial; identical to SEQ ID NO: 343960
  Synthetic oligonucleotide

SEQ ID NO: 554958 - DNA, 60 bp, Artificial; identical to SEQ ID NO: 343963
  Synthetic oligonucleotide

SEQ ID NO: 554959 - DNA, 55 bp, Artificial; identical to SEQ ID NO: 343966
  Synthetic oligonucleotide

SEQ ID NO: 554960 - DNA, 51 bp, Artificial; identical to SEQ ID NO: 343969
  Synthetic oligonucleotide

SEQ ID NO: 554961 - DNA, 51 bp, Artificial; identical to SEQ ID NO: 343972
  Synthetic oligonucleotide

SEQ ID NO: 554962 - DNA, 55 bp, Artificial; identical to SEQ ID NO: 343973
  Synthetic oligonucleotide

SEQ ID NO: 554963 - DNA, 57 bp, Artificial; identical to SEQ ID NO: 343974
  Synthetic oligonucleotide

SEQ ID NO: 554964 - DNA, 60 bp, Artificial; identical to SEQ ID NO: 343976
  Synthetic oligonucleotide

SEQ ID NO: 554965 - DNA, 60 bp, Artificial; identical to SEQ ID NO: 343978
  Synthetic oligonucleotide

SEQ ID NO: 554966 - DNA, 55 bp, Artificial; identical to SEQ ID NO: 343979
  Synthetic oligonucleotide

SEQ ID NO: 554967 - DNA, 59 bp, Artificial; identical to SEQ ID NO: 343981
  Synthetic oligonucleotide

SEQ ID NO: 554968 - DNA, 55 bp, Artificial; identical to SEQ ID NO: 343983
  Synthetic oligonucleotide

SEQ ID NO: 554969 - DNA, 58 bp, Artificial; identical to SEQ ID NO: 343987
  Synthetic oligonucleotide

SEQ ID NO: 554970 - DNA, 58 bp, Artificial; identical to SEQ ID NO: 343989
  Synthetic oligonucleotide

SEQ ID NO: 554971 - DNA, 55 bp, Artificial; identical to SEQ ID NO: 343991
  Synthetic oligonucleotide

SEQ ID NO: 554972 - DNA, 60 bp, Artificial; identical to SEQ ID NO: 343995
  Synthetic oligonucleotide

SEQ ID NO: 554973 - DNA, 52 bp, Artificial; identical to SEQ ID NO: 343996
  Synthetic oligonucleotide

SEQ ID NO: 554974 - DNA, 50 bp, Artificial; identical to SEQ ID NO: 344000
  Synthetic oligonucleotide

SEQ ID NO: 554975 - DNA, 59 bp, Artificial; identical to SEQ ID NO: 18729
  Synthetic oligonucleotide

SEQ ID NO: 554976 - DNA, 56 bp, Artificial; identical to SEQ ID NO: 344003
  Synthetic oligonucleotide

SEQ ID NO: 554977 - DNA, 55 bp, Artificial; identical to SEQ ID NO: 344005
  Synthetic oligonucleotide

SEQ ID NO: 554978 - DNA, 54 bp, Artificial; identical to SEQ ID NO: 344010
  Synthetic oligonucleotide

SEQ ID NO: 554979 - DNA, 53 bp, Artificial; identical to SEQ ID NO: 344011
  Synthetic oligonucleotide

SEQ ID NO: 554980 - DNA, 55 bp, Artificial; identical to SEQ ID NO: 344014
  Synthetic oligonucleotide

SEQ ID NO: 554981 - DNA, 56 bp, Artificial; identical to SEQ ID NO: 344015
  Synthetic oligonucleotide

SEQ ID NO: 554982 - DNA, 55 bp, Artificial; identical to SEQ ID NO: 344016
  Synthetic oligonucleotide

SEQ ID NO: 554983 - DNA, 53 bp, Artificial; identical to SEQ ID NO: 344017
  Synthetic oligonucleotide

SEQ ID NO: 554984 - DNA, 60 bp, Artificial; identical to SEQ ID NO: 9065
  Synthetic oligonucleotide

SEQ ID NO: 554985 - DNA, 57 bp, Artificial; identical to SEQ ID NO: 344020
  Synthetic oligonucleotide

SEQ ID NO: 554986 - DNA, 60 bp, Artificial; identical to SEQ ID NO: 344029
  Synthetic oligonucleotide

SEQ ID NO: 554987 - DNA, 59 bp, Artificial; identical to SEQ ID NO: 344031
  Synthetic oligonucleotide

SEQ ID NO: 554988 - DNA, 58 bp, Artificial; identical to SEQ ID NO: 344035
  Synthetic oligonucleotide

SEQ ID NO: 554989 - DNA, 59 bp, Artificial; identical to SEQ ID NO: 344037
  Synthetic oligonucleotide

SEQ ID NO: 554990 - DNA, 59 bp, Artificial; identical to SEQ ID NO: 344038
  Synthetic oligonucleotide

SEQ ID NO: 554991 - DNA, 55 bp, Artificial; identical to SEQ ID NO: 344043
  Synthetic oligonucleotide

SEQ ID NO: 554992 - DNA, 58 bp, Artificial; identical to SEQ ID NO: 15982
  Synthetic oligonucleotide

SEQ ID NO: 554993 - DNA, 55 bp, Artificial; identical to SEQ ID NO: 344047
  Synthetic oligonucleotide

SEQ ID NO: 554994 - DNA, 55 bp, Artificial; identical to SEQ ID NO: 344048
  Synthetic oligonucleotide

SEQ ID NO: 554995 - DNA, 60 bp, Artificial; identical to SEQ ID NO: 112944
  Synthetic oligonucleotide

SEQ ID NO: 554996 - DNA, 55 bp, Artificial; identical to SEQ ID NO: 344050
  Synthetic oligonucleotide

SEQ ID NO: 554997 - DNA, 56 bp, Artificial; identical to SEQ ID NO: 344051
  Synthetic oligonucleotide

SEQ ID NO: 554998 - DNA, 55 bp, Artificial; identical to SEQ ID NO: 344052
  Synthetic oligonucleotide

SEQ ID NO: 554999 - DNA, 54 bp, Artificial; identical to SEQ ID NO: 344058
  Synthetic oligonucleotide

SEQ ID NO: 555000 - DNA, 54 bp, Artificial; identical to SEQ ID NO: 344060
  Synthetic oligonucleotide

SEQ ID NO: 555001 - DNA, 58 bp, Artificial; identical to SEQ ID NO: 344063
  Synthetic oligonucleotide

SEQ ID NO: 555002 - DNA, 52 bp, Artificial; identical to SEQ ID NO: 344064
  Synthetic oligonucleotide

SEQ ID NO: 555003 - DNA, 54 bp, Artificial; identical to SEQ ID NO: 344065
  Synthetic oligonucleotide

SEQ ID NO: 555004 - DNA, 52 bp, Artificial; identical to SEQ ID NO: 344066
  Synthetic oligonucleotide

SEQ ID NO: 555005 - DNA, 55 bp, Artificial; identical to SEQ ID NO: 344073
  Synthetic oligonucleotide

SEQ ID NO: 555006 - DNA, 59 bp, Artificial; identical to SEQ ID NO: 344074
  Synthetic oligonucleotide

SEQ ID NO: 555007 - DNA, 54 bp, Artificial; identical to SEQ ID NO: 344080
  Synthetic oligonucleotide

SEQ ID NO: 555008 - DNA, 55 bp, Artificial; identical to SEQ ID NO: 344081
  Synthetic oligonucleotide

SEQ ID NO: 555009 - DNA, 55 bp, Artificial; identical to SEQ ID NO: 344084
  Synthetic oligonucleotide

SEQ ID NO: 555010 - DNA, 60 bp, Artificial; identical to SEQ ID NO: 344085
  Synthetic oligonucleotide

SEQ ID NO: 555011 - DNA, 55 bp, Artificial; identical to SEQ ID NO: 344086
  Synthetic oligonucleotide

SEQ ID NO: 555012 - DNA, 55 bp, Artificial; identical to SEQ ID NO: 344094
  Synthetic oligonucleotide

SEQ ID NO: 555013 - DNA, 54 bp, Artificial; identical to SEQ ID NO: 344097
  Synthetic oligonucleotide

SEQ ID NO: 555014 - DNA, 60 bp, Artificial; identical to SEQ ID NO: 344098
  Synthetic oligonucleotide

SEQ ID NO: 555015 - DNA, 55 bp, Artificial; identical to SEQ ID NO: 344099
  Synthetic oligonucleotide

SEQ ID NO: 555016 - DNA, 56 bp, Artificial; identical to SEQ ID NO: 344100
  Synthetic oligonucleotide

SEQ ID NO: 555017 - DNA, 55 bp, Artificial; identical to SEQ ID NO: 344102
  Synthetic oligonucleotide

SEQ ID NO: 555018 - DNA, 53 bp, Artificial; identical to SEQ ID NO: 19074
  Synthetic oligonucleotide

SEQ ID NO: 555019 - DNA, 55 bp, Artificial; identical to SEQ ID NO: 344104
  Synthetic oligonucleotide

SEQ ID NO: 555020 - DNA, 57 bp, Artificial; identical to SEQ ID NO: 344109
  Synthetic oligonucleotide

SEQ ID NO: 555021 - DNA, 55 bp, Artificial; identical to SEQ ID NO: 344115
  Synthetic oligonucleotide

SEQ ID NO: 555022 - DNA, 58 bp, Artificial; identical to SEQ ID NO: 344116
  Synthetic oligonucleotide

SEQ ID NO: 555023 - DNA, 60 bp, Artificial; identical to SEQ ID NO: 344117
  Synthetic oligonucleotide

SEQ ID NO: 555024 - DNA, 55 bp, Artificial; identical to SEQ ID NO: 344119
  Synthetic oligonucleotide

SEQ ID NO: 555025 - DNA, 55 bp, Artificial; identical to SEQ ID NO: 344122
  Synthetic oligonucleotide

SEQ ID NO: 555026 - DNA, 53 bp, Artificial; identical to SEQ ID NO: 344123
  Synthetic oligonucleotide

SEQ ID NO: 555027 - DNA, 60 bp, Artificial; identical to SEQ ID NO: 344132
  Synthetic oligonucleotide

SEQ ID NO: 555028 - DNA, 58 bp, Artificial; identical to SEQ ID NO: 344133
  Synthetic oligonucleotide

SEQ ID NO: 555029 - DNA, 55 bp, Artificial; identical to SEQ ID NO: 344138
  Synthetic oligonucleotide

SEQ ID NO: 555030 - DNA, 59 bp, Artificial; identical to SEQ ID NO: 344139
  Synthetic oligonucleotide

SEQ ID NO: 555031 - DNA, 55 bp, Artificial; identical to SEQ ID NO: 344140
  Synthetic oligonucleotide

SEQ ID NO: 555032 - DNA, 55 bp, Artificial; identical to SEQ ID NO: 344141
  Synthetic oligonucleotide

SEQ ID NO: 555033 - DNA, 56 bp, Artificial; identical to SEQ ID NO: 344145
  Synthetic oligonucleotide

SEQ ID NO: 555034 - DNA, 55 bp, Artificial; identical to SEQ ID NO: 344146
  Synthetic oligonucleotide

SEQ ID NO: 555035 - DNA, 52 bp, Artificial; identical to SEQ ID NO: 344148
  Synthetic oligonucleotide

SEQ ID NO: 555036 - DNA, 59 bp, Artificial; identical to SEQ ID NO: 344157
  Synthetic oligonucleotide

SEQ ID NO: 555037 - DNA, 55 bp, Artificial; identical to SEQ ID NO: 344158
  Synthetic oligonucleotide

SEQ ID NO: 555038 - DNA, 55 bp, Artificial; identical to SEQ ID NO: 344159
  Synthetic oligonucleotide

SEQ ID NO: 555039 - DNA, 55 bp, Artificial; identical to SEQ ID NO: 344160
  Synthetic oligonucleotide

SEQ ID NO: 555040 - DNA, 57 bp, Artificial; identical to SEQ ID NO: 18664
  Synthetic oligonucleotide

SEQ ID NO: 555041 - DNA, 56 bp, Artificial; identical to SEQ ID NO: 344165
  Synthetic oligonucleotide

SEQ ID NO: 555042 - DNA, 60 bp, Artificial; identical to SEQ ID NO: 344166
  Synthetic oligonucleotide

SEQ ID NO: 555043 - DNA, 60 bp, Artificial; identical to SEQ ID NO: 344167
  Synthetic oligonucleotide

SEQ ID NO: 555044 - DNA, 55 bp, Artificial; identical to SEQ ID NO: 344169
  Synthetic oligonucleotide

SEQ ID NO: 555045 - DNA, 51 bp, Artificial; identical to SEQ ID NO: 344171
  Synthetic oligonucleotide

SEQ ID NO: 555046 - DNA, 55 bp, Artificial; identical to SEQ ID NO: 344179
  Synthetic oligonucleotide

SEQ ID NO: 555047 - DNA, 56 bp, Artificial; identical to SEQ ID NO: 344181
  Synthetic oligonucleotide

SEQ ID NO: 555048 - DNA, 60 bp, Artificial; identical to SEQ ID NO: 344182
  Synthetic oligonucleotide

SEQ ID NO: 555049 - DNA, 55 bp, Artificial; identical to SEQ ID NO: 344185
  Synthetic oligonucleotide

SEQ ID NO: 555050 - DNA, 58 bp, Artificial; identical to SEQ ID NO: 344187
  Synthetic oligonucleotide

SEQ ID NO: 555051 - DNA, 55 bp, Artificial; identical to SEQ ID NO: 344191
  Synthetic oligonucleotide

SEQ ID NO: 555052 - DNA, 60 bp, Artificial; identical to SEQ ID NO: 344192
  Synthetic oligonucleotide

SEQ ID NO: 555053 - DNA, 60 bp, Artificial; identical to SEQ ID NO: 344193
  Synthetic oligonucleotide

SEQ ID NO: 555054 - DNA, 55 bp, Artificial; identical to SEQ ID NO: 344200
  Synthetic oligonucleotide

SEQ ID NO: 555055 - DNA, 54 bp, Artificial; identical to SEQ ID NO: 16023
  Synthetic oligonucleotide

SEQ ID NO: 555056 - DNA, 60 bp, Artificial; identical to SEQ ID NO: 344201
  Synthetic oligonucleotide

SEQ ID NO: 555057 - DNA, 52 bp, Artificial; identical to SEQ ID NO: 344202
  Synthetic oligonucleotide

SEQ ID NO: 555058 - DNA, 60 bp, Artificial; identical to SEQ ID NO: 344205
  Synthetic oligonucleotide

SEQ ID NO: 555059 - DNA, 54 bp, Artificial; identical to SEQ ID NO: 344209
  Synthetic oligonucleotide

SEQ ID NO: 555060 - DNA, 55 bp, Artificial; identical to SEQ ID NO: 344211
  Synthetic oligonucleotide

SEQ ID NO: 555061 - DNA, 55 bp, Artificial; identical to SEQ ID NO: 344212
  Synthetic oligonucleotide

SEQ ID NO: 555062 - DNA, 56 bp, Artificial; identical to SEQ ID NO: 16596
  Synthetic oligonucleotide

SEQ ID NO: 555063 - DNA, 58 bp, Artificial; identical to SEQ ID NO: 19973
  Synthetic oligonucleotide

SEQ ID NO: 555064 - DNA, 60 bp, Artificial; identical to SEQ ID NO: 344221
  Synthetic oligonucleotide

SEQ ID NO: 555065 - DNA, 59 bp, Artificial; identical to SEQ ID NO: 344222
  Synthetic oligonucleotide

SEQ ID NO: 555066 - DNA, 50 bp, Artificial; identical to SEQ ID NO: 344224
  Synthetic oligonucleotide

SEQ ID NO: 555067 - DNA, 53 bp, Artificial; identical to SEQ ID NO: 15649
  Synthetic oligonucleotide

SEQ ID NO: 555068 - DNA, 55 bp, Artificial; identical to SEQ ID NO: 344227
  Synthetic oligonucleotide

SEQ ID NO: 555069 - DNA, 55 bp, Artificial; identical to SEQ ID NO: 344230
  Synthetic oligonucleotide

SEQ ID NO: 555070 - DNA, 53 bp, Artificial; identical to SEQ ID NO: 344231
  Synthetic oligonucleotide

SEQ ID NO: 555071 - DNA, 57 bp, Artificial; identical to SEQ ID NO: 344234
  Synthetic oligonucleotide

SEQ ID NO: 555072 - DNA, 55 bp, Artificial; identical to SEQ ID NO: 344235
  Synthetic oligonucleotide

SEQ ID NO: 555073 - DNA, 60 bp, Artificial; identical to SEQ ID NO: 344238
  Synthetic oligonucleotide

SEQ ID NO: 555074 - DNA, 60 bp, Artificial; identical to SEQ ID NO: 344240
  Synthetic oligonucleotide

SEQ ID NO: 555075 - DNA, 56 bp, Artificial; identical to SEQ ID NO: 344242
  Synthetic oligonucleotide

SEQ ID NO: 555076 - DNA, 53 bp, Artificial; identical to SEQ ID NO: 344246
  Synthetic oligonucleotide

SEQ ID NO: 555077 - DNA, 54 bp, Artificial; identical to SEQ ID NO: 344250
  Synthetic oligonucleotide

SEQ ID NO: 555078 - DNA, 54 bp, Artificial; identical to SEQ ID NO: 344252
  Synthetic oligonucleotide

SEQ ID NO: 555079 - DNA, 56 bp, Artificial; identical to SEQ ID NO: 344255
  Synthetic oligonucleotide

SEQ ID NO: 555080 - DNA, 57 bp, Artificial; identical to SEQ ID NO: 344256
  Synthetic oligonucleotide

SEQ ID NO: 555081 - DNA, 60 bp, Artificial; identical to SEQ ID NO: 344261
  Synthetic oligonucleotide

SEQ ID NO: 555082 - DNA, 55 bp, Artificial; identical to SEQ ID NO: 344262
  Synthetic oligonucleotide

SEQ ID NO: 555083 - DNA, 55 bp, Artificial; identical to SEQ ID NO: 344263
  Synthetic oligonucleotide

SEQ ID NO: 555084 - DNA, 55 bp, Artificial; identical to SEQ ID NO: 344264
  Synthetic oligonucleotide

SEQ ID NO: 555085 - DNA, 56 bp, Artificial; identical to SEQ ID NO: 344267
  Synthetic oligonucleotide

SEQ ID NO: 555086 - DNA, 53 bp, Artificial; identical to SEQ ID NO: 344268
  Synthetic oligonucleotide

SEQ ID NO: 555087 - DNA, 55 bp, Artificial; identical to SEQ ID NO: 344270
  Synthetic oligonucleotide

SEQ ID NO: 555088 - DNA, 60 bp, Artificial; identical to SEQ ID NO: 7928
  Synthetic oligonucleotide

SEQ ID NO: 555089 - DNA, 60 bp, Artificial; identical to SEQ ID NO: 344276
  Synthetic oligonucleotide

SEQ ID NO: 555090 - DNA, 55 bp, Artificial; identical to SEQ ID NO: 344277
  Synthetic oligonucleotide

SEQ ID NO: 555091 - DNA, 60 bp, Artificial; identical to SEQ ID NO: 344278
  Synthetic oligonucleotide

SEQ ID NO: 555092 - DNA, 53 bp, Artificial; identical to SEQ ID NO: 20529
  Synthetic oligonucleotide

SEQ ID NO: 555093 - DNA, 53 bp, Artificial; identical to SEQ ID NO: 344280
  Synthetic oligonucleotide

SEQ ID NO: 555094 - DNA, 54 bp, Artificial; identical to SEQ ID NO: 16272
  Synthetic oligonucleotide

SEQ ID NO: 555095 - DNA, 55 bp, Artificial; identical to SEQ ID NO: 344282
  Synthetic oligonucleotide

SEQ ID NO: 555096 - DNA, 55 bp, Artificial; identical to SEQ ID NO: 344287
  Synthetic oligonucleotide

SEQ ID NO: 555097 - DNA, 55 bp, Artificial; identical to SEQ ID NO: 344288
  Synthetic oligonucleotide

SEQ ID NO: 555098 - DNA, 57 bp, Artificial; identical to SEQ ID NO: 344289
  Synthetic oligonucleotide

SEQ ID NO: 555099 - DNA, 59 bp, Artificial; identical to SEQ ID NO: 344303
  Synthetic oligonucleotide

SEQ ID NO: 555100 - DNA, 55 bp, Artificial; identical to SEQ ID NO: 344306
  Synthetic oligonucleotide

SEQ ID NO: 555101 - DNA, 55 bp, Artificial; identical to SEQ ID NO: 8904
  Synthetic oligonucleotide

SEQ ID NO: 555102 - DNA, 53 bp, Artificial; identical to SEQ ID NO: 344307
  Synthetic oligonucleotide

SEQ ID NO: 555103 - DNA, 55 bp, Artificial; identical to SEQ ID NO: 344309
  Synthetic oligonucleotide

SEQ ID NO: 555104 - DNA, 53 bp, Artificial; identical to SEQ ID NO: 344310
  Synthetic oligonucleotide

SEQ ID NO: 555105 - DNA, 55 bp, Artificial; identical to SEQ ID NO: 344312
  Synthetic oligonucleotide

SEQ ID NO: 555106 - DNA, 55 bp, Artificial; identical to SEQ ID NO: 344317
  Synthetic oligonucleotide

SEQ ID NO: 555107 - DNA, 60 bp, Artificial; identical to SEQ ID NO: 344322
  Synthetic oligonucleotide

SEQ ID NO: 555108 - DNA, 54 bp, Artificial; identical to SEQ ID NO: 344329
  Synthetic oligonucleotide

SEQ ID NO: 555109 - DNA, 55 bp, Artificial; identical to SEQ ID NO: 344332
  Synthetic oligonucleotide

SEQ ID NO: 555110 - DNA, 56 bp, Artificial; identical to SEQ ID NO: 19867
  Synthetic oligonucleotide

SEQ ID NO: 555111 - DNA, 55 bp, Artificial; identical to SEQ ID NO: 344334
  Synthetic oligonucleotide

SEQ ID NO: 555112 - DNA, 56 bp, Artificial; identical to SEQ ID NO: 344338
  Synthetic oligonucleotide

SEQ ID NO: 555113 - DNA, 58 bp, Artificial; identical to SEQ ID NO: 344339
  Synthetic oligonucleotide

SEQ ID NO: 555114 - DNA, 57 bp, Artificial; identical to SEQ ID NO: 13071
  Synthetic oligonucleotide

SEQ ID NO: 555115 - DNA, 55 bp, Artificial; identical to SEQ ID NO: 344342
  Synthetic oligonucleotide

SEQ ID NO: 555116 - DNA, 53 bp, Artificial; identical to SEQ ID NO: 344343
  Synthetic oligonucleotide

SEQ ID NO: 555117 - DNA, 60 bp, Artificial; identical to SEQ ID NO: 10593
  Synthetic oligonucleotide

SEQ ID NO: 555118 - DNA, 60 bp, Artificial; identical to SEQ ID NO: 344348
  Synthetic oligonucleotide

SEQ ID NO: 555119 - DNA, 60 bp, Artificial; identical to SEQ ID NO: 344352
  Synthetic oligonucleotide

SEQ ID NO: 555120 - DNA, 57 bp, Artificial; identical to SEQ ID NO: 344355
  Synthetic oligonucleotide

SEQ ID NO: 555121 - DNA, 55 bp, Artificial; identical to SEQ ID NO: 344356
  Synthetic oligonucleotide

SEQ ID NO: 555122 - DNA, 55 bp, Artificial; identical to SEQ ID NO: 344358
  Synthetic oligonucleotide

SEQ ID NO: 555123 - DNA, 60 bp, Artificial; identical to SEQ ID NO: 344360
  Synthetic oligonucleotide

SEQ ID NO: 555124 - DNA, 58 bp, Artificial; identical to SEQ ID NO: 344361
  Synthetic oligonucleotide

SEQ ID NO: 555125 - DNA, 55 bp, Artificial; identical to SEQ ID NO: 8840
  Synthetic oligonucleotide

SEQ ID NO: 555126 - DNA, 60 bp, Artificial; identical to SEQ ID NO: 344366
  Synthetic oligonucleotide

SEQ ID NO: 555127 - DNA, 58 bp, Artificial; identical to SEQ ID NO: 344367
  Synthetic oligonucleotide

SEQ ID NO: 555128 - DNA, 51 bp, Artificial; identical to SEQ ID NO: 344369
  Synthetic oligonucleotide

SEQ ID NO: 555129 - DNA, 53 bp, Artificial; identical to SEQ ID NO: 14774
  Synthetic oligonucleotide

SEQ ID NO: 555130 - DNA, 60 bp, Artificial; identical to SEQ ID NO: 344374
  Synthetic oligonucleotide

SEQ ID NO: 555131 - DNA, 59 bp, Artificial; identical to SEQ ID NO: 344375
  Synthetic oligonucleotide

SEQ ID NO: 555132 - DNA, 55 bp, Artificial; identical to SEQ ID NO: 344376
  Synthetic oligonucleotide

SEQ ID NO: 555133 - DNA, 55 bp, Artificial; identical to SEQ ID NO: 344378
  Synthetic oligonucleotide

SEQ ID NO: 555134 - DNA, 55 bp, Artificial; identical to SEQ ID NO: 344379
  Synthetic oligonucleotide

SEQ ID NO: 555135 - DNA, 59 bp, Artificial; identical to SEQ ID NO: 344380
  Synthetic oligonucleotide

SEQ ID NO: 555136 - DNA, 55 bp, Artificial; identical to SEQ ID NO: 344385
  Synthetic oligonucleotide

SEQ ID NO: 555137 - DNA, 55 bp, Artificial; identical to SEQ ID NO: 344386
  Synthetic oligonucleotide

SEQ ID NO: 555138 - DNA, 58 bp, Artificial; identical to SEQ ID NO: 344387
  Synthetic oligonucleotide

SEQ ID NO: 555139 - DNA, 58 bp, Artificial; identical to SEQ ID NO: 344390
  Synthetic oligonucleotide

SEQ ID NO: 555140 - DNA, 60 bp, Artificial; identical to SEQ ID NO: 344392
  Synthetic oligonucleotide

SEQ ID NO: 555141 - DNA, 58 bp, Artificial; identical to SEQ ID NO: 344396
  Synthetic oligonucleotide

SEQ ID NO: 555142 - DNA, 60 bp, Artificial; identical to SEQ ID NO: 344397
  Synthetic oligonucleotide

SEQ ID NO: 555143 - DNA, 60 bp, Artificial; identical to SEQ ID NO: 344399
  Synthetic oligonucleotide

SEQ ID NO: 555144 - DNA, 58 bp, Artificial; identical to SEQ ID NO: 344404
  Synthetic oligonucleotide

SEQ ID NO: 555145 - DNA, 52 bp, Artificial; identical to SEQ ID NO: 344408
  Synthetic oligonucleotide

SEQ ID NO: 555146 - DNA, 55 bp, Artificial; identical to SEQ ID NO: 344413
  Synthetic oligonucleotide

SEQ ID NO: 555147 - DNA, 60 bp, Artificial; identical to SEQ ID NO: 344420
  Synthetic oligonucleotide

SEQ ID NO: 555148 - DNA, 56 bp, Artificial; identical to SEQ ID NO: 344421
  Synthetic oligonucleotide

SEQ ID NO: 555149 - DNA, 60 bp, Artificial; identical to SEQ ID NO: 344426
  Synthetic oligonucleotide

SEQ ID NO: 555150 - DNA, 50 bp, Artificial; identical to SEQ ID NO: 344428
  Synthetic oligonucleotide

SEQ ID NO: 555151 - DNA, 56 bp, Artificial; identical to SEQ ID NO: 344430
  Synthetic oligonucleotide

SEQ ID NO: 555152 - DNA, 55 bp, Artificial; identical to SEQ ID NO: 344433
  Synthetic oligonucleotide

SEQ ID NO: 555153 - DNA, 55 bp, Artificial; identical to SEQ ID NO: 344439
  Synthetic oligonucleotide

SEQ ID NO: 555154 - DNA, 51 bp, Artificial; identical to SEQ ID NO: 344440
  Synthetic oligonucleotide

SEQ ID NO: 555155 - DNA, 55 bp, Artificial; identical to SEQ ID NO: 344442
  Synthetic oligonucleotide

SEQ ID NO: 555156 - DNA, 52 bp, Artificial; identical to SEQ ID NO: 344444
  Synthetic oligonucleotide

SEQ ID NO: 555157 - DNA, 55 bp, Artificial; identical to SEQ ID NO: 344446
  Synthetic oligonucleotide

SEQ ID NO: 555158 - DNA, 55 bp, Artificial; identical to SEQ ID NO: 344447
  Synthetic oligonucleotide

SEQ ID NO: 555159 - DNA, 56 bp, Artificial; identical to SEQ ID NO: 344448
  Synthetic oligonucleotide

SEQ ID NO: 555160 - DNA, 60 bp, Artificial; identical to SEQ ID NO: 344452
  Synthetic oligonucleotide

SEQ ID NO: 555161 - DNA, 57 bp, Artificial; identical to SEQ ID NO: 20228
  Synthetic oligonucleotide

SEQ ID NO: 555162 - DNA, 60 bp, Artificial; identical to SEQ ID NO: 344453
  Synthetic oligonucleotide

SEQ ID NO: 555163 - DNA, 60 bp, Artificial; identical to SEQ ID NO: 344454
  Synthetic oligonucleotide

SEQ ID NO: 555164 - DNA, 56 bp, Artificial; identical to SEQ ID NO: 344455
  Synthetic oligonucleotide

SEQ ID NO: 555165 - DNA, 55 bp, Artificial; identical to SEQ ID NO: 344456
  Synthetic oligonucleotide

SEQ ID NO: 555166 - DNA, 58 bp, Artificial; identical to SEQ ID NO: 344458
  Synthetic oligonucleotide

SEQ ID NO: 555167 - DNA, 55 bp, Artificial; identical to SEQ ID NO: 344459
  Synthetic oligonucleotide

SEQ ID NO: 555168 - DNA, 59 bp, Artificial; identical to SEQ ID NO: 344465
  Synthetic oligonucleotide

SEQ ID NO: 555169 - DNA, 53 bp, Artificial; identical to SEQ ID NO: 344466
  Synthetic oligonucleotide

SEQ ID NO: 555170 - DNA, 60 bp, Artificial; identical to SEQ ID NO: 344471
  Synthetic oligonucleotide

SEQ ID NO: 555171 - DNA, 59 bp, Artificial; identical to SEQ ID NO: 344472
  Synthetic oligonucleotide

SEQ ID NO: 555172 - DNA, 55 bp, Artificial; identical to SEQ ID NO: 344475
  Synthetic oligonucleotide

SEQ ID NO: 555173 - DNA, 59 bp, Artificial; identical to SEQ ID NO: 344476
  Synthetic oligonucleotide

SEQ ID NO: 555174 - DNA, 58 bp, Artificial; identical to SEQ ID NO: 344478
  Synthetic oligonucleotide

SEQ ID NO: 555175 - DNA, 57 bp, Artificial; identical to SEQ ID NO: 344480
  Synthetic oligonucleotide

SEQ ID NO: 555176 - DNA, 60 bp, Artificial; identical to SEQ ID NO: 344483
  Synthetic oligonucleotide

SEQ ID NO: 555177 - DNA, 60 bp, Artificial; identical to SEQ ID NO: 344486
  Synthetic oligonucleotide

SEQ ID NO: 555178 - DNA, 55 bp, Artificial; identical to SEQ ID NO: 344491
  Synthetic oligonucleotide

SEQ ID NO: 555179 - DNA, 55 bp, Artificial; identical to SEQ ID NO: 344492
  Synthetic oligonucleotide

SEQ ID NO: 555180 - DNA, 60 bp, Artificial; identical to SEQ ID NO: 344493
  Synthetic oligonucleotide

SEQ ID NO: 555181 - DNA, 54 bp, Artificial; identical to SEQ ID NO: 344494
  Synthetic oligonucleotide

SEQ ID NO: 555182 - DNA, 60 bp, Artificial; identical to SEQ ID NO: 344502
  Synthetic oligonucleotide

SEQ ID NO: 555183 - DNA, 60 bp, Artificial; identical to SEQ ID NO: 344506
  Synthetic oligonucleotide

SEQ ID NO: 555184 - DNA, 55 bp, Artificial; identical to SEQ ID NO: 344509
  Synthetic oligonucleotide

SEQ ID NO: 555185 - DNA, 53 bp, Artificial; identical to SEQ ID NO: 344513
  Synthetic oligonucleotide

SEQ ID NO: 555186 - DNA, 58 bp, Artificial; identical to SEQ ID NO: 344516
  Synthetic oligonucleotide

SEQ ID NO: 555187 - DNA, 60 bp, Artificial; identical to SEQ ID NO: 344519
  Synthetic oligonucleotide

SEQ ID NO: 555188 - DNA, 52 bp, Artificial; identical to SEQ ID NO: 344520
  Synthetic oligonucleotide

SEQ ID NO: 555189 - DNA, 57 bp, Artificial; identical to SEQ ID NO: 344521
  Synthetic oligonucleotide

SEQ ID NO: 555190 - DNA, 55 bp, Artificial; identical to SEQ ID NO: 344526
  Synthetic oligonucleotide

SEQ ID NO: 555191 - DNA, 50 bp, Artificial; identical to SEQ ID NO: 344527
  Synthetic oligonucleotide

SEQ ID NO: 555192 - DNA, 50 bp, Artificial; identical to SEQ ID NO: 344528
  Synthetic oligonucleotide

SEQ ID NO: 555193 - DNA, 54 bp, Artificial; identical to SEQ ID NO: 344529
  Synthetic oligonucleotide

SEQ ID NO: 555194 - DNA, 59 bp, Artificial; identical to SEQ ID NO: 344531
  Synthetic oligonucleotide

SEQ ID NO: 555195 - DNA, 51 bp, Artificial; identical to SEQ ID NO: 344539
  Synthetic oligonucleotide

SEQ ID NO: 555196 - DNA, 54 bp, Artificial; identical to SEQ ID NO: 344540
  Synthetic oligonucleotide

SEQ ID NO: 555197 - DNA, 60 bp, Artificial; identical to SEQ ID NO: 344549
  Synthetic oligonucleotide

SEQ ID NO: 555198 - DNA, 55 bp, Artificial; identical to SEQ ID NO: 344552
  Synthetic oligonucleotide

SEQ ID NO: 555199 - DNA, 55 bp, Artificial; identical to SEQ ID NO: 344553
  Synthetic oligonucleotide

SEQ ID NO: 555200 - DNA, 60 bp, Artificial; identical to SEQ ID NO: 344554
  Synthetic oligonucleotide

SEQ ID NO: 555201 - DNA, 60 bp, Artificial; identical to SEQ ID NO: 344558
  Synthetic oligonucleotide

SEQ ID NO: 555202 - DNA, 60 bp, Artificial; identical to SEQ ID NO: 344560
  Synthetic oligonucleotide

SEQ ID NO: 555203 - DNA, 60 bp, Artificial; identical to SEQ ID NO: 344569
  Synthetic oligonucleotide

SEQ ID NO: 555204 - DNA, 56 bp, Artificial; identical to SEQ ID NO: 344570
  Synthetic oligonucleotide

SEQ ID NO: 555205 - DNA, 60 bp, Artificial; identical to SEQ ID NO: 344571
  Synthetic oligonucleotide

SEQ ID NO: 555206 - DNA, 60 bp, Artificial; identical to SEQ ID NO: 344573
  Synthetic oligonucleotide

SEQ ID NO: 555207 - DNA, 60 bp, Artificial; identical to SEQ ID NO: 344574
  Synthetic oligonucleotide

SEQ ID NO: 555208 - DNA, 56 bp, Artificial; identical to SEQ ID NO: 344575
  Synthetic oligonucleotide

SEQ ID NO: 555209 - DNA, 55 bp, Artificial; identical to SEQ ID NO: 344576
  Synthetic oligonucleotide

SEQ ID NO: 555210 - DNA, 60 bp, Artificial; identical to SEQ ID NO: 11201
  Synthetic oligonucleotide

SEQ ID NO: 555211 - DNA, 58 bp, Artificial; identical to SEQ ID NO: 344579
  Synthetic oligonucleotide

SEQ ID NO: 555212 - DNA, 55 bp, Artificial; identical to SEQ ID NO: 344583
  Synthetic oligonucleotide

SEQ ID NO: 555213 - DNA, 53 bp, Artificial; identical to SEQ ID NO: 344584
  Synthetic oligonucleotide

SEQ ID NO: 555214 - DNA, 53 bp, Artificial; identical to SEQ ID NO: 344585
  Synthetic oligonucleotide

SEQ ID NO: 555215 - DNA, 58 bp, Artificial; identical to SEQ ID NO: 18986
  Synthetic oligonucleotide

SEQ ID NO: 555216 - DNA, 55 bp, Artificial; identical to SEQ ID NO: 344590
  Synthetic oligonucleotide

SEQ ID NO: 555217 - DNA, 60 bp, Artificial; identical to SEQ ID NO: 344593
  Synthetic oligonucleotide

SEQ ID NO: 555218 - DNA, 56 bp, Artificial; identical to SEQ ID NO: 344596
  Synthetic oligonucleotide

SEQ ID NO: 555219 - DNA, 59 bp, Artificial; identical to SEQ ID NO: 344599
  Synthetic oligonucleotide

SEQ ID NO: 555220 - DNA, 59 bp, Artificial; identical to SEQ ID NO: 344600
  Synthetic oligonucleotide

SEQ ID NO: 555221 - DNA, 55 bp, Artificial; identical to SEQ ID NO: 344601
  Synthetic oligonucleotide

SEQ ID NO: 555222 - DNA, 58 bp, Artificial; identical to SEQ ID NO: 344602
  Synthetic oligonucleotide

SEQ ID NO: 555223 - DNA, 55 bp, Artificial; identical to SEQ ID NO: 344604
  Synthetic oligonucleotide

SEQ ID NO: 555224 - DNA, 51 bp, Artificial; identical to SEQ ID NO: 344605
  Synthetic oligonucleotide

SEQ ID NO: 555225 - DNA, 58 bp, Artificial; identical to SEQ ID NO: 344606
  Synthetic oligonucleotide

SEQ ID NO: 555226 - DNA, 56 bp, Artificial; identical to SEQ ID NO: 19495
  Synthetic oligonucleotide

SEQ ID NO: 555227 - DNA, 57 bp, Artificial; identical to SEQ ID NO: 344610
  Synthetic oligonucleotide

SEQ ID NO: 555228 - DNA, 55 bp, Artificial; identical to SEQ ID NO: 344612
  Synthetic oligonucleotide

SEQ ID NO: 555229 - DNA, 55 bp, Artificial; identical to SEQ ID NO: 344613
  Synthetic oligonucleotide

SEQ ID NO: 555230 - DNA, 55 bp, Artificial; identical to SEQ ID NO: 344614
  Synthetic oligonucleotide

SEQ ID NO: 555231 - DNA, 57 bp, Artificial; identical to SEQ ID NO: 344615
  Synthetic oligonucleotide

SEQ ID NO: 555232 - DNA, 60 bp, Artificial; identical to SEQ ID NO: 344616
  Synthetic oligonucleotide

SEQ ID NO: 555233 - DNA, 55 bp, Artificial; identical to SEQ ID NO: 344617
  Synthetic oligonucleotide

SEQ ID NO: 555234 - DNA, 50 bp, Artificial; identical to SEQ ID NO: 344619
  Synthetic oligonucleotide

SEQ ID NO: 555235 - DNA, 55 bp, Artificial; identical to SEQ ID NO: 344621
  Synthetic oligonucleotide

SEQ ID NO: 555236 - DNA, 55 bp, Artificial; identical to SEQ ID NO: 344636
  Synthetic oligonucleotide

SEQ ID NO: 555237 - DNA, 60 bp, Artificial; identical to SEQ ID NO: 344639
  Synthetic oligonucleotide

SEQ ID NO: 555238 - DNA, 57 bp, Artificial; identical to SEQ ID NO: 11769
  Synthetic oligonucleotide

SEQ ID NO: 555239 - DNA, 55 bp, Artificial; identical to SEQ ID NO: 344647
  Synthetic oligonucleotide

SEQ ID NO: 555240 - DNA, 57 bp, Artificial; identical to SEQ ID NO: 344648
  Synthetic oligonucleotide

SEQ ID NO: 555241 - DNA, 55 bp, Artificial; identical to SEQ ID NO: 344652
  Synthetic oligonucleotide

SEQ ID NO: 555242 - DNA, 50 bp, Artificial; identical to SEQ ID NO: 344654
  Synthetic oligonucleotide

SEQ ID NO: 555243 - DNA, 53 bp, Artificial; identical to SEQ ID NO: 344655
  Synthetic oligonucleotide

SEQ ID NO: 555244 - DNA, 55 bp, Artificial; identical to SEQ ID NO: 344658
  Synthetic oligonucleotide

SEQ ID NO: 555245 - DNA, 60 bp, Artificial; identical to SEQ ID NO: 344661
  Synthetic oligonucleotide

SEQ ID NO: 555246 - DNA, 59 bp, Artificial; identical to SEQ ID NO: 344664
  Synthetic oligonucleotide

SEQ ID NO: 555247 - DNA, 60 bp, Artificial; identical to SEQ ID NO: 106631
  Synthetic oligonucleotide

SEQ ID NO: 555248 - DNA, 60 bp, Artificial; identical to SEQ ID NO: 344668
  Synthetic oligonucleotide

SEQ ID NO: 555249 - DNA, 55 bp, Artificial; identical to SEQ ID NO: 344671
  Synthetic oligonucleotide

SEQ ID NO: 555250 - DNA, 57 bp, Artificial; identical to SEQ ID NO: 344672
  Synthetic oligonucleotide

SEQ ID NO: 555251 - DNA, 59 bp, Artificial; identical to SEQ ID NO: 344675
  Synthetic oligonucleotide

SEQ ID NO: 555252 - DNA, 58 bp, Artificial; identical to SEQ ID NO: 344676
  Synthetic oligonucleotide

SEQ ID NO: 555253 - DNA, 52 bp, Artificial; identical to SEQ ID NO: 344679
  Synthetic oligonucleotide

SEQ ID NO: 555254 - DNA, 55 bp, Artificial; identical to SEQ ID NO: 344681
  Synthetic oligonucleotide

SEQ ID NO: 555255 - DNA, 60 bp, Artificial; identical to SEQ ID NO: 344682
  Synthetic oligonucleotide

SEQ ID NO: 555256 - DNA, 60 bp, Artificial; identical to SEQ ID NO: 8300
  Synthetic oligonucleotide

SEQ ID NO: 555257 - DNA, 54 bp, Artificial; identical to SEQ ID NO: 344686
  Synthetic oligonucleotide

SEQ ID NO: 555258 - DNA, 58 bp, Artificial; identical to SEQ ID NO: 344690
  Synthetic oligonucleotide

SEQ ID NO: 555259 - DNA, 60 bp, Artificial; identical to SEQ ID NO: 344691
  Synthetic oligonucleotide

SEQ ID NO: 555260 - DNA, 60 bp, Artificial; identical to SEQ ID NO: 344692
  Synthetic oligonucleotide

SEQ ID NO: 555261 - DNA, 60 bp, Artificial; identical to SEQ ID NO: 344694
  Synthetic oligonucleotide

SEQ ID NO: 555262 - DNA, 57 bp, Artificial; identical to SEQ ID NO: 344696
  Synthetic oligonucleotide

SEQ ID NO: 555263 - DNA, 60 bp, Artificial; identical to SEQ ID NO: 344697
  Synthetic oligonucleotide

SEQ ID NO: 555264 - DNA, 53 bp, Artificial; identical to SEQ ID NO: 344699
  Synthetic oligonucleotide

SEQ ID NO: 555265 - DNA, 55 bp, Artificial; identical to SEQ ID NO: 344702
  Synthetic oligonucleotide

SEQ ID NO: 555266 - DNA, 55 bp, Artificial; identical to SEQ ID NO: 344704
  Synthetic oligonucleotide

SEQ ID NO: 555267 - DNA, 56 bp, Artificial; identical to SEQ ID NO: 344710
  Synthetic oligonucleotide

SEQ ID NO: 555268 - DNA, 60 bp, Artificial; identical to SEQ ID NO: 344712
  Synthetic oligonucleotide

SEQ ID NO: 555269 - DNA, 55 bp, Artificial; identical to SEQ ID NO: 344713
  Synthetic oligonucleotide

SEQ ID NO: 555270 - DNA, 60 bp, Artificial; identical to SEQ ID NO: 344714
  Synthetic oligonucleotide

SEQ ID NO: 555271 - DNA, 60 bp, Artificial; identical to SEQ ID NO: 344715
  Synthetic oligonucleotide

SEQ ID NO: 555272 - DNA, 55 bp, Artificial; identical to SEQ ID NO: 344716
  Synthetic oligonucleotide

SEQ ID NO: 555273 - DNA, 57 bp, Artificial; identical to SEQ ID NO: 344720
  Synthetic oligonucleotide

SEQ ID NO: 555274 - DNA, 56 bp, Artificial; identical to SEQ ID NO: 344721
  Synthetic oligonucleotide

SEQ ID NO: 555275 - DNA, 58 bp, Artificial; identical to SEQ ID NO: 344724
  Synthetic oligonucleotide

SEQ ID NO: 555276 - DNA, 56 bp, Artificial; identical to SEQ ID NO: 344725
  Synthetic oligonucleotide

SEQ ID NO: 555277 - DNA, 55 bp, Artificial; identical to SEQ ID NO: 344727
  Synthetic oligonucleotide

SEQ ID NO: 555278 - DNA, 55 bp, Artificial; identical to SEQ ID NO: 344731
  Synthetic oligonucleotide

SEQ ID NO: 555279 - DNA, 51 bp, Artificial; identical to SEQ ID NO: 344733
  Synthetic oligonucleotide

SEQ ID NO: 555280 - DNA, 60 bp, Artificial; identical to SEQ ID NO: 344734
  Synthetic oligonucleotide

SEQ ID NO: 555281 - DNA, 55 bp, Artificial; identical to SEQ ID NO: 13744
  Synthetic oligonucleotide

SEQ ID NO: 555282 - DNA, 57 bp, Artificial; identical to SEQ ID NO: 344736
  Synthetic oligonucleotide

SEQ ID NO: 555283 - DNA, 60 bp, Artificial; identical to SEQ ID NO: 344739
  Synthetic oligonucleotide

SEQ ID NO: 555284 - DNA, 60 bp, Artificial; identical to SEQ ID NO: 344747
  Synthetic oligonucleotide

SEQ ID NO: 555285 - DNA, 55 bp, Artificial; identical to SEQ ID NO: 344748
  Synthetic oligonucleotide

SEQ ID NO: 555286 - DNA, 54 bp, Artificial; identical to SEQ ID NO: 344750
  Synthetic oligonucleotide

SEQ ID NO: 555287 - DNA, 51 bp, Artificial; identical to SEQ ID NO: 344752
  Synthetic oligonucleotide

SEQ ID NO: 555288 - DNA, 57 bp, Artificial; identical to SEQ ID NO: 344753
  Synthetic oligonucleotide

SEQ ID NO: 555289 - DNA, 55 bp, Artificial; identical to SEQ ID NO: 344760
  Synthetic oligonucleotide

SEQ ID NO: 555290 - DNA, 60 bp, Artificial; identical to SEQ ID NO: 344762
  Synthetic oligonucleotide

SEQ ID NO: 555291 - DNA, 60 bp, Artificial; identical to SEQ ID NO: 344764
  Synthetic oligonucleotide

SEQ ID NO: 555292 - DNA, 58 bp, Artificial; identical to SEQ ID NO: 344766
  Synthetic oligonucleotide

SEQ ID NO: 555293 - DNA, 55 bp, Artificial; identical to SEQ ID NO: 344767
  Synthetic oligonucleotide

SEQ ID NO: 555294 - DNA, 59 bp, Artificial; identical to SEQ ID NO: 344769
  Synthetic oligonucleotide

SEQ ID NO: 555295 - DNA, 51 bp, Artificial; identical to SEQ ID NO: 344770
  Synthetic oligonucleotide

SEQ ID NO: 555296 - DNA, 58 bp, Artificial; identical to SEQ ID NO: 344772
  Synthetic oligonucleotide

SEQ ID NO: 555297 - DNA, 60 bp, Artificial; identical to SEQ ID NO: 344773
  Synthetic oligonucleotide

SEQ ID NO: 555298 - DNA, 55 bp, Artificial; identical to SEQ ID NO: 344775
  Synthetic oligonucleotide

SEQ ID NO: 555299 - DNA, 55 bp, Artificial; identical to SEQ ID NO: 13711
  Synthetic oligonucleotide

SEQ ID NO: 555300 - DNA, 60 bp, Artificial; identical to SEQ ID NO: 344785
  Synthetic oligonucleotide

SEQ ID NO: 555301 - DNA, 53 bp, Artificial; identical to SEQ ID NO: 344788
  Synthetic oligonucleotide

SEQ ID NO: 555302 - DNA, 59 bp, Artificial; identical to SEQ ID NO: 344790
  Synthetic oligonucleotide

SEQ ID NO: 555303 - DNA, 54 bp, Artificial; identical to SEQ ID NO: 344791
  Synthetic oligonucleotide

SEQ ID NO: 555304 - DNA, 52 bp, Artificial; identical to SEQ ID NO: 344795
  Synthetic oligonucleotide

SEQ ID NO: 555305 - DNA, 60 bp, Artificial; identical to SEQ ID NO: 344801
  Synthetic oligonucleotide

SEQ ID NO: 555306 - DNA, 55 bp, Artificial; identical to SEQ ID NO: 344804
  Synthetic oligonucleotide

SEQ ID NO: 555307 - DNA, 56 bp, Artificial; identical to SEQ ID NO: 7745
  Synthetic oligonucleotide

SEQ ID NO: 555308 - DNA, 55 bp, Artificial; identical to SEQ ID NO: 344808
  Synthetic oligonucleotide

SEQ ID NO: 555309 - DNA, 55 bp, Artificial; identical to SEQ ID NO: 344818
  Synthetic oligonucleotide

SEQ ID NO: 555310 - DNA, 60 bp, Artificial; identical to SEQ ID NO: 344819
  Synthetic oligonucleotide

SEQ ID NO: 555311 - DNA, 58 bp, Artificial; identical to SEQ ID NO: 344820
  Synthetic oligonucleotide

SEQ ID NO: 555312 - DNA, 56 bp, Artificial; identical to SEQ ID NO: 344821
  Synthetic oligonucleotide

SEQ ID NO: 555313 - DNA, 58 bp, Artificial; identical to SEQ ID NO: 344823
  Synthetic oligonucleotide

SEQ ID NO: 555314 - DNA, 60 bp, Artificial; identical to SEQ ID NO: 344825
  Synthetic oligonucleotide

SEQ ID NO: 555315 - DNA, 60 bp, Artificial; identical to SEQ ID NO: 344827
  Synthetic oligonucleotide

SEQ ID NO: 555316 - DNA, 57 bp, Artificial; identical to SEQ ID NO: 344829
  Synthetic oligonucleotide

SEQ ID NO: 555317 - DNA, 54 bp, Artificial; identical to SEQ ID NO: 344832
  Synthetic oligonucleotide

SEQ ID NO: 555318 - DNA, 55 bp, Artificial; identical to SEQ ID NO: 344833
  Synthetic oligonucleotide

SEQ ID NO: 555319 - DNA, 52 bp, Artificial; identical to SEQ ID NO: 344834
  Synthetic oligonucleotide

SEQ ID NO: 555320 - DNA, 59 bp, Artificial; identical to SEQ ID NO: 344837
  Synthetic oligonucleotide

SEQ ID NO: 555321 - DNA, 54 bp, Artificial; identical to SEQ ID NO: 344841
  Synthetic oligonucleotide

SEQ ID NO: 555322 - DNA, 60 bp, Artificial; identical to SEQ ID NO: 344842
  Synthetic oligonucleotide

SEQ ID NO: 555323 - DNA, 55 bp, Artificial; identical to SEQ ID NO: 344844
  Synthetic oligonucleotide

SEQ ID NO: 555324 - DNA, 55 bp, Artificial; identical to SEQ ID NO: 344845
  Synthetic oligonucleotide

SEQ ID NO: 555325 - DNA, 55 bp, Artificial; identical to SEQ ID NO: 344846
  Synthetic oligonucleotide

SEQ ID NO: 555326 - DNA, 51 bp, Artificial; identical to SEQ ID NO: 344847
  Synthetic oligonucleotide

SEQ ID NO: 555327 - DNA, 53 bp, Artificial; identical to SEQ ID NO: 344850
  Synthetic oligonucleotide

SEQ ID NO: 555328 - DNA, 60 bp, Artificial; identical to SEQ ID NO: 344853
  Synthetic oligonucleotide

SEQ ID NO: 555329 - DNA, 59 bp, Artificial; identical to SEQ ID NO: 344857
  Synthetic oligonucleotide

SEQ ID NO: 555330 - DNA, 53 bp, Artificial; identical to SEQ ID NO: 344859
  Synthetic oligonucleotide

SEQ ID NO: 555331 - DNA, 59 bp, Artificial; identical to SEQ ID NO: 344860
  Synthetic oligonucleotide

SEQ ID NO: 555332 - DNA, 60 bp, Artificial; identical to SEQ ID NO: 344861
  Synthetic oligonucleotide

SEQ ID NO: 555333 - DNA, 60 bp, Artificial; identical to SEQ ID NO: 344864
  Synthetic oligonucleotide

SEQ ID NO: 555334 - DNA, 55 bp, Artificial; identical to SEQ ID NO: 344865
  Synthetic oligonucleotide

SEQ ID NO: 555335 - DNA, 51 bp, Artificial; identical to SEQ ID NO: 344869
  Synthetic oligonucleotide

SEQ ID NO: 555336 - DNA, 55 bp, Artificial; identical to SEQ ID NO: 344875
  Synthetic oligonucleotide

SEQ ID NO: 555337 - DNA, 60 bp, Artificial; identical to SEQ ID NO: 8199
  Synthetic oligonucleotide

SEQ ID NO: 555338 - DNA, 53 bp, Artificial; identical to SEQ ID NO: 344876
  Synthetic oligonucleotide

SEQ ID NO: 555339 - DNA, 55 bp, Artificial; identical to SEQ ID NO: 344878
  Synthetic oligonucleotide

SEQ ID NO: 555340 - DNA, 55 bp, Artificial; identical to SEQ ID NO: 344880
  Synthetic oligonucleotide

SEQ ID NO: 555341 - DNA, 55 bp, Artificial; identical to SEQ ID NO: 344882
  Synthetic oligonucleotide

SEQ ID NO: 555342 - DNA, 60 bp, Artificial; identical to SEQ ID NO: 344888
  Synthetic oligonucleotide

SEQ ID NO: 555343 - DNA, 53 bp, Artificial; identical to SEQ ID NO: 344890
  Synthetic oligonucleotide

SEQ ID NO: 555344 - DNA, 55 bp, Artificial; identical to SEQ ID NO: 344894
  Synthetic oligonucleotide

SEQ ID NO: 555345 - DNA, 60 bp, Artificial; identical to SEQ ID NO: 344896
  Synthetic oligonucleotide

SEQ ID NO: 555346 - DNA, 55 bp, Artificial; identical to SEQ ID NO: 344897
  Synthetic oligonucleotide

SEQ ID NO: 555347 - DNA, 58 bp, Artificial; identical to SEQ ID NO: 344909
  Synthetic oligonucleotide

SEQ ID NO: 555348 - DNA, 55 bp, Artificial; identical to SEQ ID NO: 344915
  Synthetic oligonucleotide

SEQ ID NO: 555349 - DNA, 55 bp, Artificial; identical to SEQ ID NO: 344917
  Synthetic oligonucleotide

SEQ ID NO: 555350 - DNA, 57 bp, Artificial; identical to SEQ ID NO: 344918
  Synthetic oligonucleotide

SEQ ID NO: 555351 - DNA, 60 bp, Artificial; identical to SEQ ID NO: 344919
  Synthetic oligonucleotide

SEQ ID NO: 555352 - DNA, 58 bp, Artificial; identical to SEQ ID NO: 344924
  Synthetic oligonucleotide

SEQ ID NO: 555353 - DNA, 55 bp, Artificial; identical to SEQ ID NO: 344927
  Synthetic oligonucleotide

SEQ ID NO: 555354 - DNA, 60 bp, Artificial; identical to SEQ ID NO: 344929
  Synthetic oligonucleotide

SEQ ID NO: 555355 - DNA, 55 bp, Artificial; identical to SEQ ID NO: 344930
  Synthetic oligonucleotide

SEQ ID NO: 555356 - DNA, 60 bp, Artificial; identical to SEQ ID NO: 344931
  Synthetic oligonucleotide

SEQ ID NO: 555357 - DNA, 54 bp, Artificial; identical to SEQ ID NO: 344936
  Synthetic oligonucleotide

SEQ ID NO: 555358 - DNA, 59 bp, Artificial; identical to SEQ ID NO: 344937
  Synthetic oligonucleotide

SEQ ID NO: 555359 - DNA, 57 bp, Artificial; identical to SEQ ID NO: 344940
  Synthetic oligonucleotide

SEQ ID NO: 555360 - DNA, 55 bp, Artificial; identical to SEQ ID NO: 344941
  Synthetic oligonucleotide

SEQ ID NO: 555361 - DNA, 60 bp, Artificial; identical to SEQ ID NO: 344942
  Synthetic oligonucleotide

SEQ ID NO: 555362 - DNA, 60 bp, Artificial; identical to SEQ ID NO: 344943
  Synthetic oligonucleotide

SEQ ID NO: 555363 - DNA, 60 bp, Artificial; identical to SEQ ID NO: 344944
  Synthetic oligonucleotide

SEQ ID NO: 555364 - DNA, 60 bp, Artificial; identical to SEQ ID NO: 344946
  Synthetic oligonucleotide

SEQ ID NO: 555365 - DNA, 55 bp, Artificial; identical to SEQ ID NO: 344950
  Synthetic oligonucleotide

SEQ ID NO: 555366 - DNA, 55 bp, Artificial; identical to SEQ ID NO: 344952
  Synthetic oligonucleotide

SEQ ID NO: 555367 - DNA, 55 bp, Artificial; identical to SEQ ID NO: 344953
  Synthetic oligonucleotide

SEQ ID NO: 555368 - DNA, 60 bp, Artificial; identical to SEQ ID NO: 344954
  Synthetic oligonucleotide

SEQ ID NO: 555369 - DNA, 55 bp, Artificial; identical to SEQ ID NO: 344959
  Synthetic oligonucleotide

SEQ ID NO: 555370 - DNA, 58 bp, Artificial; identical to SEQ ID NO: 344967
  Synthetic oligonucleotide

SEQ ID NO: 555371 - DNA, 60 bp, Artificial; identical to SEQ ID NO: 344969
  Synthetic oligonucleotide

SEQ ID NO: 555372 - DNA, 54 bp, Artificial; identical to SEQ ID NO: 344971
  Synthetic oligonucleotide

SEQ ID NO: 555373 - DNA, 55 bp, Artificial; identical to SEQ ID NO: 344972
  Synthetic oligonucleotide

SEQ ID NO: 555374 - DNA, 52 bp, Artificial; identical to SEQ ID NO: 344975
  Synthetic oligonucleotide

SEQ ID NO: 555375 - DNA, 60 bp, Artificial; identical to SEQ ID NO: 344976
  Synthetic oligonucleotide

SEQ ID NO: 555376 - DNA, 55 bp, Artificial; identical to SEQ ID NO: 344985
  Synthetic oligonucleotide

SEQ ID NO: 555377 - DNA, 60 bp, Artificial; identical to SEQ ID NO: 344987
  Synthetic oligonucleotide

SEQ ID NO: 555378 - DNA, 51 bp, Artificial; identical to SEQ ID NO: 344988
  Synthetic oligonucleotide

SEQ ID NO: 555379 - DNA, 55 bp, Artificial; identical to SEQ ID NO: 344989
  Synthetic oligonucleotide

SEQ ID NO: 555380 - DNA, 60 bp, Artificial; identical to SEQ ID NO: 344990
  Synthetic oligonucleotide

SEQ ID NO: 555381 - DNA, 60 bp, Artificial; identical to SEQ ID NO: 344996
  Synthetic oligonucleotide

SEQ ID NO: 555382 - DNA, 59 bp, Artificial; identical to SEQ ID NO: 344997
  Synthetic oligonucleotide

SEQ ID NO: 555383 - DNA, 60 bp, Artificial; identical to SEQ ID NO: 344998
  Synthetic oligonucleotide

SEQ ID NO: 555384 - DNA, 58 bp, Artificial; identical to SEQ ID NO: 344999
  Synthetic oligonucleotide

SEQ ID NO: 555385 - DNA, 54 bp, Artificial; identical to SEQ ID NO: 345006
  Synthetic oligonucleotide

SEQ ID NO: 555386 - DNA, 58 bp, Artificial; identical to SEQ ID NO: 345008
  Synthetic oligonucleotide

SEQ ID NO: 555387 - DNA, 59 bp, Artificial; identical to SEQ ID NO: 345011
  Synthetic oligonucleotide

SEQ ID NO: 555388 - DNA, 58 bp, Artificial; identical to SEQ ID NO: 20283
  Synthetic oligonucleotide

SEQ ID NO: 555389 - DNA, 60 bp, Artificial; identical to SEQ ID NO: 345014
  Synthetic oligonucleotide

SEQ ID NO: 555390 - DNA, 58 bp, Artificial; identical to SEQ ID NO: 345015
  Synthetic oligonucleotide

SEQ ID NO: 555391 - DNA, 55 bp, Artificial; identical to SEQ ID NO: 345017
  Synthetic oligonucleotide

SEQ ID NO: 555392 - DNA, 56 bp, Artificial; identical to SEQ ID NO: 345019
  Synthetic oligonucleotide

SEQ ID NO: 555393 - DNA, 50 bp, Artificial; identical to SEQ ID NO: 345022
  Synthetic oligonucleotide

SEQ ID NO: 555394 - DNA, 60 bp, Artificial; identical to SEQ ID NO: 10524
  Synthetic oligonucleotide

SEQ ID NO: 555395 - DNA, 57 bp, Artificial; identical to SEQ ID NO: 345025
  Synthetic oligonucleotide

SEQ ID NO: 555396 - DNA, 55 bp, Artificial; identical to SEQ ID NO: 345026
  Synthetic oligonucleotide

SEQ ID NO: 555397 - DNA, 53 bp, Artificial; identical to SEQ ID NO: 16588
  Synthetic oligonucleotide

SEQ ID NO: 555398 - DNA, 55 bp, Artificial; identical to SEQ ID NO: 345037
  Synthetic oligonucleotide

SEQ ID NO: 555399 - DNA, 51 bp, Artificial; identical to SEQ ID NO: 345038
  Synthetic oligonucleotide

SEQ ID NO: 555400 - DNA, 55 bp, Artificial; identical to SEQ ID NO: 345045
  Synthetic oligonucleotide

SEQ ID NO: 555401 - DNA, 54 bp, Artificial; identical to SEQ ID NO: 345048
  Synthetic oligonucleotide

SEQ ID NO: 555402 - DNA, 55 bp, Artificial; identical to SEQ ID NO: 345049
  Synthetic oligonucleotide

SEQ ID NO: 555403 - DNA, 60 bp, Artificial; identical to SEQ ID NO: 345052
  Synthetic oligonucleotide

SEQ ID NO: 555404 - DNA, 60 bp, Artificial; identical to SEQ ID NO: 345053
  Synthetic oligonucleotide

SEQ ID NO: 555405 - DNA, 55 bp, Artificial; identical to SEQ ID NO: 345054
  Synthetic oligonucleotide

SEQ ID NO: 555406 - DNA, 55 bp, Artificial; identical to SEQ ID NO: 345055
  Synthetic oligonucleotide

SEQ ID NO: 555407 - DNA, 51 bp, Artificial; identical to SEQ ID NO: 345056
  Synthetic oligonucleotide

SEQ ID NO: 555408 - DNA, 55 bp, Artificial; identical to SEQ ID NO: 345057
  Synthetic oligonucleotide

SEQ ID NO: 555409 - DNA, 54 bp, Artificial; identical to SEQ ID NO: 19560
  Synthetic oligonucleotide

SEQ ID NO: 555410 - DNA, 55 bp, Artificial; identical to SEQ ID NO: 345058
  Synthetic oligonucleotide

SEQ ID NO: 555411 - DNA, 55 bp, Artificial; identical to SEQ ID NO: 345060
  Synthetic oligonucleotide

SEQ ID NO: 555412 - DNA, 58 bp, Artificial; identical to SEQ ID NO: 345061
  Synthetic oligonucleotide

SEQ ID NO: 555413 - DNA, 55 bp, Artificial; identical to SEQ ID NO: 345062
  Synthetic oligonucleotide

SEQ ID NO: 555414 - DNA, 57 bp, Artificial; identical to SEQ ID NO: 345065
  Synthetic oligonucleotide

SEQ ID NO: 555415 - DNA, 57 bp, Artificial; identical to SEQ ID NO: 345066
  Synthetic oligonucleotide

SEQ ID NO: 555416 - DNA, 54 bp, Artificial; identical to SEQ ID NO: 345067
  Synthetic oligonucleotide

SEQ ID NO: 555417 - DNA, 58 bp, Artificial; identical to SEQ ID NO: 345075
  Synthetic oligonucleotide

SEQ ID NO: 555418 - DNA, 60 bp, Artificial; identical to SEQ ID NO: 345077
  Synthetic oligonucleotide

SEQ ID NO: 555419 - DNA, 52 bp, Artificial; identical to SEQ ID NO: 345081
  Synthetic oligonucleotide

SEQ ID NO: 555420 - DNA, 53 bp, Artificial; identical to SEQ ID NO: 345083
  Synthetic oligonucleotide

SEQ ID NO: 555421 - DNA, 51 bp, Artificial; identical to SEQ ID NO: 345088
  Synthetic oligonucleotide

SEQ ID NO: 555422 - DNA, 55 bp, Artificial; identical to SEQ ID NO: 345089
  Synthetic oligonucleotide

SEQ ID NO: 555423 - DNA, 60 bp, Artificial; identical to SEQ ID NO: 7707
  Synthetic oligonucleotide

SEQ ID NO: 555424 - DNA, 55 bp, Artificial; identical to SEQ ID NO: 345093
  Synthetic oligonucleotide

SEQ ID NO: 555425 - DNA, 57 bp, Artificial; identical to SEQ ID NO: 345096
  Synthetic oligonucleotide

SEQ ID NO: 555426 - DNA, 59 bp, Artificial; identical to SEQ ID NO: 345099
  Synthetic oligonucleotide

SEQ ID NO: 555427 - DNA, 55 bp, Artificial; identical to SEQ ID NO: 345100
  Synthetic oligonucleotide

SEQ ID NO: 555428 - DNA, 55 bp, Artificial; identical to SEQ ID NO: 345101
  Synthetic oligonucleotide

SEQ ID NO: 555429 - DNA, 54 bp, Artificial; identical to SEQ ID NO: 345103
  Synthetic oligonucleotide

SEQ ID NO: 555430 - DNA, 59 bp, Artificial; identical to SEQ ID NO: 345106
  Synthetic oligonucleotide

SEQ ID NO: 555431 - DNA, 56 bp, Artificial; identical to SEQ ID NO: 345108
  Synthetic oligonucleotide

SEQ ID NO: 555432 - DNA, 60 bp, Artificial; identical to SEQ ID NO: 345109
  Synthetic oligonucleotide

SEQ ID NO: 555433 - DNA, 58 bp, Artificial; identical to SEQ ID NO: 345110
  Synthetic oligonucleotide

SEQ ID NO: 555434 - DNA, 60 bp, Artificial; identical to SEQ ID NO: 345111
  Synthetic oligonucleotide

SEQ ID NO: 555435 - DNA, 55 bp, Artificial; identical to SEQ ID NO: 345112
  Synthetic oligonucleotide

SEQ ID NO: 555436 - DNA, 52 bp, Artificial; identical to SEQ ID NO: 345113
  Synthetic oligonucleotide

SEQ ID NO: 555437 - DNA, 52 bp, Artificial; identical to SEQ ID NO: 345114
  Synthetic oligonucleotide

SEQ ID NO: 555438 - DNA, 59 bp, Artificial; identical to SEQ ID NO: 345115
  Synthetic oligonucleotide

SEQ ID NO: 555439 - DNA, 60 bp, Artificial; identical to SEQ ID NO: 345122
  Synthetic oligonucleotide

SEQ ID NO: 555440 - DNA, 60 bp, Artificial; identical to SEQ ID NO: 345125
  Synthetic oligonucleotide

SEQ ID NO: 555441 - DNA, 55 bp, Artificial; identical to SEQ ID NO: 345128
  Synthetic oligonucleotide

SEQ ID NO: 555442 - DNA, 60 bp, Artificial; identical to SEQ ID NO: 345129
  Synthetic oligonucleotide

SEQ ID NO: 555443 - DNA, 60 bp, Artificial; identical to SEQ ID NO: 345130
  Synthetic oligonucleotide

SEQ ID NO: 555444 - DNA, 53 bp, Artificial; identical to SEQ ID NO: 345131
  Synthetic oligonucleotide

SEQ ID NO: 555445 - DNA, 58 bp, Artificial; identical to SEQ ID NO: 345132
  Synthetic oligonucleotide

SEQ ID NO: 555446 - DNA, 60 bp, Artificial; identical to SEQ ID NO: 345138
  Synthetic oligonucleotide

SEQ ID NO: 555447 - DNA, 55 bp, Artificial; identical to SEQ ID NO: 345139
  Synthetic oligonucleotide

SEQ ID NO: 555448 - DNA, 55 bp, Artificial; identical to SEQ ID NO: 345146
  Synthetic oligonucleotide

SEQ ID NO: 555449 - DNA, 55 bp, Artificial; identical to SEQ ID NO: 345147
  Synthetic oligonucleotide

SEQ ID NO: 555450 - DNA, 55 bp, Artificial; identical to SEQ ID NO: 345149
  Synthetic oligonucleotide

SEQ ID NO: 555451 - DNA, 55 bp, Artificial; identical to SEQ ID NO: 345153
  Synthetic oligonucleotide

SEQ ID NO: 555452 - DNA, 60 bp, Artificial; identical to SEQ ID NO: 345155
  Synthetic oligonucleotide

SEQ ID NO: 555453 - DNA, 55 bp, Artificial; identical to SEQ ID NO: 345157
  Synthetic oligonucleotide

SEQ ID NO: 555454 - DNA, 57 bp, Artificial; identical to SEQ ID NO: 345161
  Synthetic oligonucleotide

SEQ ID NO: 555455 - DNA, 53 bp, Artificial; identical to SEQ ID NO: 345168
  Synthetic oligonucleotide

SEQ ID NO: 555456 - DNA, 55 bp, Artificial; identical to SEQ ID NO: 345171
  Synthetic oligonucleotide

SEQ ID NO: 555457 - DNA, 54 bp, Artificial; identical to SEQ ID NO: 345172
  Synthetic oligonucleotide

SEQ ID NO: 555458 - DNA, 55 bp, Artificial; identical to SEQ ID NO: 345174
  Synthetic oligonucleotide

SEQ ID NO: 555459 - DNA, 59 bp, Artificial; identical to SEQ ID NO: 345176
  Synthetic oligonucleotide

SEQ ID NO: 555460 - DNA, 55 bp, Artificial; identical to SEQ ID NO: 345178
  Synthetic oligonucleotide

SEQ ID NO: 555461 - DNA, 57 bp, Artificial; identical to SEQ ID NO: 345182
  Synthetic oligonucleotide

SEQ ID NO: 555462 - DNA, 55 bp, Artificial; identical to SEQ ID NO: 345185
  Synthetic oligonucleotide

SEQ ID NO: 555463 - DNA, 59 bp, Artificial; identical to SEQ ID NO: 345194
  Synthetic oligonucleotide

SEQ ID NO: 555464 - DNA, 55 bp, Artificial; identical to SEQ ID NO: 345195
  Synthetic oligonucleotide

SEQ ID NO: 555465 - DNA, 55 bp, Artificial; identical to SEQ ID NO: 345196
  Synthetic oligonucleotide

SEQ ID NO: 555466 - DNA, 55 bp, Artificial; identical to SEQ ID NO: 345198
  Synthetic oligonucleotide

SEQ ID NO: 555467 - DNA, 55 bp, Artificial; identical to SEQ ID NO: 345200
  Synthetic oligonucleotide

SEQ ID NO: 555468 - DNA, 60 bp, Artificial; identical to SEQ ID NO: 345205
  Synthetic oligonucleotide

SEQ ID NO: 555469 - DNA, 60 bp, Artificial; identical to SEQ ID NO: 345207
  Synthetic oligonucleotide

SEQ ID NO: 555470 - DNA, 57 bp, Artificial; identical to SEQ ID NO: 17750
  Synthetic oligonucleotide

SEQ ID NO: 555471 - DNA, 55 bp, Artificial; identical to SEQ ID NO: 345212
  Synthetic oligonucleotide

SEQ ID NO: 555472 - DNA, 55 bp, Artificial; identical to SEQ ID NO: 345214
  Synthetic oligonucleotide

SEQ ID NO: 555473 - DNA, 60 bp, Artificial; identical to SEQ ID NO: 345221
  Synthetic oligonucleotide

SEQ ID NO: 555474 - DNA, 50 bp, Artificial; identical to SEQ ID NO: 345225
  Synthetic oligonucleotide

SEQ ID NO: 555475 - DNA, 54 bp, Artificial; identical to SEQ ID NO: 345230
  Synthetic oligonucleotide

SEQ ID NO: 555476 - DNA, 55 bp, Artificial; identical to SEQ ID NO: 345232
  Synthetic oligonucleotide

SEQ ID NO: 555477 - DNA, 55 bp, Artificial; identical to SEQ ID NO: 345235
  Synthetic oligonucleotide

SEQ ID NO: 555478 - DNA, 55 bp, Artificial; identical to SEQ ID NO: 345237
  Synthetic oligonucleotide

SEQ ID NO: 555479 - DNA, 55 bp, Artificial; identical to SEQ ID NO: 345238
  Synthetic oligonucleotide

SEQ ID NO: 555480 - DNA, 60 bp, Artificial; identical to SEQ ID NO: 345240
  Synthetic oligonucleotide

SEQ ID NO: 555481 - DNA, 59 bp, Artificial; identical to SEQ ID NO: 345241
  Synthetic oligonucleotide

SEQ ID NO: 555482 - DNA, 59 bp, Artificial; identical to SEQ ID NO: 345245
  Synthetic oligonucleotide

SEQ ID NO: 555483 - DNA, 52 bp, Artificial; identical to SEQ ID NO: 345247
  Synthetic oligonucleotide

SEQ ID NO: 555484 - DNA, 60 bp, Artificial; identical to SEQ ID NO: 345253
  Synthetic oligonucleotide

SEQ ID NO: 555485 - DNA, 60 bp, Artificial; identical to SEQ ID NO: 345256
  Synthetic oligonucleotide

SEQ ID NO: 555486 - DNA, 54 bp, Artificial; identical to SEQ ID NO: 345257
  Synthetic oligonucleotide

SEQ ID NO: 555487 - DNA, 54 bp, Artificial; identical to SEQ ID NO: 345258
  Synthetic oligonucleotide

SEQ ID NO: 555488 - DNA, 58 bp, Artificial; identical to SEQ ID NO: 345260
  Synthetic oligonucleotide

SEQ ID NO: 555489 - DNA, 60 bp, Artificial; identical to SEQ ID NO: 345261
  Synthetic oligonucleotide

SEQ ID NO: 555490 - DNA, 60 bp, Artificial; identical to SEQ ID NO: 345265
  Synthetic oligonucleotide

SEQ ID NO: 555491 - DNA, 55 bp, Artificial; identical to SEQ ID NO: 345266
  Synthetic oligonucleotide

SEQ ID NO: 555492 - DNA, 55 bp, Artificial; identical to SEQ ID NO: 345268
  Synthetic oligonucleotide

SEQ ID NO: 555493 - DNA, 52 bp, Artificial; identical to SEQ ID NO: 16453
  Synthetic oligonucleotide

SEQ ID NO: 555494 - DNA, 60 bp, Artificial; identical to SEQ ID NO: 345272
  Synthetic oligonucleotide

SEQ ID NO: 555495 - DNA, 53 bp, Artificial; identical to SEQ ID NO: 345275
  Synthetic oligonucleotide

SEQ ID NO: 555496 - DNA, 56 bp, Artificial; identical to SEQ ID NO: 345276
  Synthetic oligonucleotide

SEQ ID NO: 555497 - DNA, 60 bp, Artificial; identical to SEQ ID NO: 345277
  Synthetic oligonucleotide

SEQ ID NO: 555498 - DNA, 58 bp, Artificial; identical to SEQ ID NO: 345279
  Synthetic oligonucleotide

SEQ ID NO: 555499 - DNA, 55 bp, Artificial; identical to SEQ ID NO: 345284
  Synthetic oligonucleotide

SEQ ID NO: 555500 - DNA, 56 bp, Artificial; identical to SEQ ID NO: 345286
  Synthetic oligonucleotide

SEQ ID NO: 555501 - DNA, 60 bp, Artificial; identical to SEQ ID NO: 345287
  Synthetic oligonucleotide

SEQ ID NO: 555502 - DNA, 60 bp, Artificial; identical to SEQ ID NO: 345289
  Synthetic oligonucleotide

SEQ ID NO: 555503 - DNA, 60 bp, Artificial; identical to SEQ ID NO: 345291
  Synthetic oligonucleotide

SEQ ID NO: 555504 - DNA, 55 bp, Artificial; identical to SEQ ID NO: 345292
  Synthetic oligonucleotide

SEQ ID NO: 555505 - DNA, 60 bp, Artificial; identical to SEQ ID NO: 345293
  Synthetic oligonucleotide

SEQ ID NO: 555506 - DNA, 60 bp, Artificial; identical to SEQ ID NO: 345295
  Synthetic oligonucleotide

SEQ ID NO: 555507 - DNA, 50 bp, Artificial; identical to SEQ ID NO: 345296
  Synthetic oligonucleotide

SEQ ID NO: 555508 - DNA, 55 bp, Artificial; identical to SEQ ID NO: 345302
  Synthetic oligonucleotide

SEQ ID NO: 555509 - DNA, 57 bp, Artificial; identical to SEQ ID NO: 345303
  Synthetic oligonucleotide

SEQ ID NO: 555510 - DNA, 51 bp, Artificial; identical to SEQ ID NO: 345305
  Synthetic oligonucleotide

SEQ ID NO: 555511 - DNA, 55 bp, Artificial; identical to SEQ ID NO: 345306
  Synthetic oligonucleotide

SEQ ID NO: 555512 - DNA, 55 bp, Artificial; identical to SEQ ID NO: 345308
  Synthetic oligonucleotide

SEQ ID NO: 555513 - DNA, 57 bp, Artificial; identical to SEQ ID NO: 17955
  Synthetic oligonucleotide

SEQ ID NO: 555514 - DNA, 54 bp, Artificial; identical to SEQ ID NO: 345312
  Synthetic oligonucleotide

SEQ ID NO: 555515 - DNA, 60 bp, Artificial; identical to SEQ ID NO: 345313
  Synthetic oligonucleotide

SEQ ID NO: 555516 - DNA, 55 bp, Artificial; identical to SEQ ID NO: 345317
  Synthetic oligonucleotide

SEQ ID NO: 555517 - DNA, 55 bp, Artificial; identical to SEQ ID NO: 345319
  Synthetic oligonucleotide

SEQ ID NO: 555518 - DNA, 60 bp, Artificial; identical to SEQ ID NO: 345322
  Synthetic oligonucleotide

SEQ ID NO: 555519 - DNA, 57 bp, Artificial; identical to SEQ ID NO: 345325
  Synthetic oligonucleotide

SEQ ID NO: 555520 - DNA, 55 bp, Artificial; identical to SEQ ID NO: 345326
  Synthetic oligonucleotide

SEQ ID NO: 555521 - DNA, 58 bp, Artificial; identical to SEQ ID NO: 16500
  Synthetic oligonucleotide

SEQ ID NO: 555522 - DNA, 58 bp, Artificial; identical to SEQ ID NO: 345328
  Synthetic oligonucleotide

SEQ ID NO: 555523 - DNA, 57 bp, Artificial; identical to SEQ ID NO: 345329
  Synthetic oligonucleotide

SEQ ID NO: 555524 - DNA, 54 bp, Artificial; identical to SEQ ID NO: 345330
  Synthetic oligonucleotide

SEQ ID NO: 555525 - DNA, 51 bp, Artificial; identical to SEQ ID NO: 345334
  Synthetic oligonucleotide

SEQ ID NO: 555526 - DNA, 55 bp, Artificial; identical to SEQ ID NO: 345337
  Synthetic oligonucleotide

SEQ ID NO: 555527 - DNA, 54 bp, Artificial; identical to SEQ ID NO: 345340
  Synthetic oligonucleotide

SEQ ID NO: 555528 - DNA, 56 bp, Artificial; identical to SEQ ID NO: 345341
  Synthetic oligonucleotide

SEQ ID NO: 555529 - DNA, 57 bp, Artificial; identical to SEQ ID NO: 345342
  Synthetic oligonucleotide

SEQ ID NO: 555530 - DNA, 60 bp, Artificial; identical to SEQ ID NO: 345345
  Synthetic oligonucleotide

SEQ ID NO: 555531 - DNA, 59 bp, Artificial; identical to SEQ ID NO: 345347
  Synthetic oligonucleotide

SEQ ID NO: 555532 - DNA, 55 bp, Artificial; identical to SEQ ID NO: 345348
  Synthetic oligonucleotide

SEQ ID NO: 555533 - DNA, 56 bp, Artificial; identical to SEQ ID NO: 345349
  Synthetic oligonucleotide

SEQ ID NO: 555534 - DNA, 55 bp, Artificial; identical to SEQ ID NO: 345353
  Synthetic oligonucleotide

SEQ ID NO: 555535 - DNA, 55 bp, Artificial; identical to SEQ ID NO: 345354
  Synthetic oligonucleotide

SEQ ID NO: 555536 - DNA, 60 bp, Artificial; identical to SEQ ID NO: 345356
  Synthetic oligonucleotide

SEQ ID NO: 555537 - DNA, 50 bp, Artificial; identical to SEQ ID NO: 345357
  Synthetic oligonucleotide

SEQ ID NO: 555538 - DNA, 53 bp, Artificial; identical to SEQ ID NO: 345359
  Synthetic oligonucleotide

SEQ ID NO: 555539 - DNA, 60 bp, Artificial; identical to SEQ ID NO: 345363
  Synthetic oligonucleotide

SEQ ID NO: 555540 - DNA, 55 bp, Artificial; identical to SEQ ID NO: 345365
  Synthetic oligonucleotide

SEQ ID NO: 555541 - DNA, 51 bp, Artificial; identical to SEQ ID NO: 345368
  Synthetic oligonucleotide

SEQ ID NO: 555542 - DNA, 59 bp, Artificial; identical to SEQ ID NO: 11045
  Synthetic oligonucleotide

SEQ ID NO: 555543 - DNA, 60 bp, Artificial; identical to SEQ ID NO: 345373
  Synthetic oligonucleotide

SEQ ID NO: 555544 - DNA, 60 bp, Artificial; identical to SEQ ID NO: 345375
  Synthetic oligonucleotide

SEQ ID NO: 555545 - DNA, 60 bp, Artificial; identical to SEQ ID NO: 345376
  Synthetic oligonucleotide

SEQ ID NO: 555546 - DNA, 56 bp, Artificial; identical to SEQ ID NO: 345379
  Synthetic oligonucleotide

SEQ ID NO: 555547 - DNA, 60 bp, Artificial; identical to SEQ ID NO: 14803
  Synthetic oligonucleotide

SEQ ID NO: 555548 - DNA, 55 bp, Artificial; identical to SEQ ID NO: 345380
  Synthetic oligonucleotide

SEQ ID NO: 555549 - DNA, 55 bp, Artificial; identical to SEQ ID NO: 345381
  Synthetic oligonucleotide

SEQ ID NO: 555550 - DNA, 59 bp, Artificial; identical to SEQ ID NO: 345382
  Synthetic oligonucleotide

SEQ ID NO: 555551 - DNA, 58 bp, Artificial; identical to SEQ ID NO: 345383
  Synthetic oligonucleotide

SEQ ID NO: 555552 - DNA, 51 bp, Artificial; identical to SEQ ID NO: 345385
  Synthetic oligonucleotide

SEQ ID NO: 555553 - DNA, 51 bp, Artificial; identical to SEQ ID NO: 345386
  Synthetic oligonucleotide

SEQ ID NO: 555554 - DNA, 53 bp, Artificial; identical to SEQ ID NO: 345387
  Synthetic oligonucleotide

SEQ ID NO: 555555 - DNA, 55 bp, Artificial; identical to SEQ ID NO: 345390
  Synthetic oligonucleotide

SEQ ID NO: 555556 - DNA, 55 bp, Artificial; identical to SEQ ID NO: 345391
  Synthetic oligonucleotide

SEQ ID NO: 555557 - DNA, 59 bp, Artificial; identical to SEQ ID NO: 345393
  Synthetic oligonucleotide

SEQ ID NO: 555558 - DNA, 55 bp, Artificial; identical to SEQ ID NO: 345394
  Synthetic oligonucleotide

SEQ ID NO: 555559 - DNA, 56 bp, Artificial; identical to SEQ ID NO: 345395
  Synthetic oligonucleotide

SEQ ID NO: 555560 - DNA, 54 bp, Artificial; identical to SEQ ID NO: 345399
  Synthetic oligonucleotide

SEQ ID NO: 555561 - DNA, 55 bp, Artificial; identical to SEQ ID NO: 345400
  Synthetic oligonucleotide

SEQ ID NO: 555562 - DNA, 55 bp, Artificial; identical to SEQ ID NO: 345401
  Synthetic oligonucleotide

SEQ ID NO: 555563 - DNA, 60 bp, Artificial; identical to SEQ ID NO: 345405
  Synthetic oligonucleotide

SEQ ID NO: 555564 - DNA, 60 bp, Artificial; identical to SEQ ID NO: 10990
  Synthetic oligonucleotide

SEQ ID NO: 555565 - DNA, 60 bp, Artificial; identical to SEQ ID NO: 345408
  Synthetic oligonucleotide

SEQ ID NO: 555566 - DNA, 59 bp, Artificial; identical to SEQ ID NO: 345409
  Synthetic oligonucleotide

SEQ ID NO: 555567 - DNA, 60 bp, Artificial; identical to SEQ ID NO: 345410
  Synthetic oligonucleotide

SEQ ID NO: 555568 - DNA, 55 bp, Artificial; identical to SEQ ID NO: 345411
  Synthetic oligonucleotide

SEQ ID NO: 555569 - DNA, 58 bp, Artificial; identical to SEQ ID NO: 345415
  Synthetic oligonucleotide

SEQ ID NO: 555570 - DNA, 60 bp, Artificial; identical to SEQ ID NO: 345417
  Synthetic oligonucleotide

SEQ ID NO: 555571 - DNA, 54 bp, Artificial; identical to SEQ ID NO: 345419
  Synthetic oligonucleotide

SEQ ID NO: 555572 - DNA, 55 bp, Artificial; identical to SEQ ID NO: 345420
  Synthetic oligonucleotide

SEQ ID NO: 555573 - DNA, 60 bp, Artificial; identical to SEQ ID NO: 345422
  Synthetic oligonucleotide

SEQ ID NO: 555574 - DNA, 60 bp, Artificial; identical to SEQ ID NO: 12955
  Synthetic oligonucleotide

SEQ ID NO: 555575 - DNA, 60 bp, Artificial; identical to SEQ ID NO: 345428
  Synthetic oligonucleotide

SEQ ID NO: 555576 - DNA, 56 bp, Artificial; identical to SEQ ID NO: 17611
  Synthetic oligonucleotide

SEQ ID NO: 555577 - DNA, 55 bp, Artificial; identical to SEQ ID NO: 345430
  Synthetic oligonucleotide

SEQ ID NO: 555578 - DNA, 60 bp, Artificial; identical to SEQ ID NO: 6263
  Synthetic oligonucleotide

SEQ ID NO: 555579 - DNA, 56 bp, Artificial; identical to SEQ ID NO: 345431
  Synthetic oligonucleotide

SEQ ID NO: 555580 - DNA, 60 bp, Artificial; identical to SEQ ID NO: 345435
  Synthetic oligonucleotide

SEQ ID NO: 555581 - DNA, 55 bp, Artificial; identical to SEQ ID NO: 345437
  Synthetic oligonucleotide

SEQ ID NO: 555582 - DNA, 60 bp, Artificial; identical to SEQ ID NO: 345438
  Synthetic oligonucleotide

SEQ ID NO: 555583 - DNA, 60 bp, Artificial; identical to SEQ ID NO: 345439
  Synthetic oligonucleotide

SEQ ID NO: 555584 - DNA, 60 bp, Artificial; identical to SEQ ID NO: 345440
  Synthetic oligonucleotide

SEQ ID NO: 555585 - DNA, 60 bp, Artificial; identical to SEQ ID NO: 345441
  Synthetic oligonucleotide

SEQ ID NO: 555586 - DNA, 59 bp, Artificial; identical to SEQ ID NO: 345443
  Synthetic oligonucleotide

SEQ ID NO: 555587 - DNA, 60 bp, Artificial; identical to SEQ ID NO: 345444
  Synthetic oligonucleotide

SEQ ID NO: 555588 - DNA, 51 bp, Artificial; identical to SEQ ID NO: 345445
  Synthetic oligonucleotide

SEQ ID NO: 555589 - DNA, 55 bp, Artificial; identical to SEQ ID NO: 345446
  Synthetic oligonucleotide

SEQ ID NO: 555590 - DNA, 57 bp, Artificial; identical to SEQ ID NO: 345447
  Synthetic oligonucleotide

SEQ ID NO: 555591 - DNA, 55 bp, Artificial; identical to SEQ ID NO: 345449
  Synthetic oligonucleotide

SEQ ID NO: 555592 - DNA, 60 bp, Artificial; identical to SEQ ID NO: 345453
  Synthetic oligonucleotide

SEQ ID NO: 555593 - DNA, 51 bp, Artificial; identical to SEQ ID NO: 345454
  Synthetic oligonucleotide

SEQ ID NO: 555594 - DNA, 60 bp, Artificial; identical to SEQ ID NO: 345459
  Synthetic oligonucleotide

SEQ ID NO: 555595 - DNA, 52 bp, Artificial; identical to SEQ ID NO: 345461
  Synthetic oligonucleotide

SEQ ID NO: 555596 - DNA, 55 bp, Artificial; identical to SEQ ID NO: 345462
  Synthetic oligonucleotide

SEQ ID NO: 555597 - DNA, 54 bp, Artificial; identical to SEQ ID NO: 345463
  Synthetic oligonucleotide

SEQ ID NO: 555598 - DNA, 52 bp, Artificial; identical to SEQ ID NO: 345465
  Synthetic oligonucleotide

SEQ ID NO: 555599 - DNA, 58 bp, Artificial; identical to SEQ ID NO: 345466
  Synthetic oligonucleotide

SEQ ID NO: 555600 - DNA, 55 bp, Artificial; identical to SEQ ID NO: 345471
  Synthetic oligonucleotide

SEQ ID NO: 555601 - DNA, 55 bp, Artificial; identical to SEQ ID NO: 345473
  Synthetic oligonucleotide

SEQ ID NO: 555602 - DNA, 54 bp, Artificial; identical to SEQ ID NO: 345475
  Synthetic oligonucleotide

SEQ ID NO: 555603 - DNA, 55 bp, Artificial; identical to SEQ ID NO: 345476
  Synthetic oligonucleotide

SEQ ID NO: 555604 - DNA, 59 bp, Artificial; identical to SEQ ID NO: 345480
  Synthetic oligonucleotide

SEQ ID NO: 555605 - DNA, 60 bp, Artificial; identical to SEQ ID NO: 345481
  Synthetic oligonucleotide

SEQ ID NO: 555606 - DNA, 51 bp, Artificial; identical to SEQ ID NO: 345482
  Synthetic oligonucleotide

SEQ ID NO: 555607 - DNA, 60 bp, Artificial; identical to SEQ ID NO: 345486
  Synthetic oligonucleotide

SEQ ID NO: 555608 - DNA, 55 bp, Artificial; identical to SEQ ID NO: 345489
  Synthetic oligonucleotide

SEQ ID NO: 555609 - DNA, 54 bp, Artificial; identical to SEQ ID NO: 345492
  Synthetic oligonucleotide

SEQ ID NO: 555610 - DNA, 55 bp, Artificial; identical to SEQ ID NO: 345493
  Synthetic oligonucleotide

SEQ ID NO: 555611 - DNA, 56 bp, Artificial; identical to SEQ ID NO: 345495
  Synthetic oligonucleotide

SEQ ID NO: 555612 - DNA, 52 bp, Artificial; identical to SEQ ID NO: 345503
  Synthetic oligonucleotide

SEQ ID NO: 555613 - DNA, 55 bp, Artificial; identical to SEQ ID NO: 345504
  Synthetic oligonucleotide

SEQ ID NO: 555614 - DNA, 60 bp, Artificial; identical to SEQ ID NO: 345505
  Synthetic oligonucleotide

SEQ ID NO: 555615 - DNA, 55 bp, Artificial; identical to SEQ ID NO: 345507
  Synthetic oligonucleotide

SEQ ID NO: 555616 - DNA, 55 bp, Artificial; identical to SEQ ID NO: 345508
  Synthetic oligonucleotide

SEQ ID NO: 555617 - DNA, 54 bp, Artificial; identical to SEQ ID NO: 345510
  Synthetic oligonucleotide

SEQ ID NO: 555618 - DNA, 57 bp, Artificial; identical to SEQ ID NO: 345511
  Synthetic oligonucleotide

SEQ ID NO: 555619 - DNA, 50 bp, Artificial; identical to SEQ ID NO: 345513
  Synthetic oligonucleotide

SEQ ID NO: 555620 - DNA, 60 bp, Artificial; identical to SEQ ID NO: 345514
  Synthetic oligonucleotide

SEQ ID NO: 555621 - DNA, 60 bp, Artificial; identical to SEQ ID NO: 345515
  Synthetic oligonucleotide

SEQ ID NO: 555622 - DNA, 59 bp, Artificial; identical to SEQ ID NO: 345526
  Synthetic oligonucleotide

SEQ ID NO: 555623 - DNA, 58 bp, Artificial; identical to SEQ ID NO: 345527
  Synthetic oligonucleotide

SEQ ID NO: 555624 - DNA, 59 bp, Artificial; identical to SEQ ID NO: 345529
  Synthetic oligonucleotide

SEQ ID NO: 555625 - DNA, 60 bp, Artificial; identical to SEQ ID NO: 345531
  Synthetic oligonucleotide

SEQ ID NO: 555626 - DNA, 60 bp, Artificial; identical to SEQ ID NO: 345537
  Synthetic oligonucleotide

SEQ ID NO: 555627 - DNA, 58 bp, Artificial; identical to SEQ ID NO: 345541
  Synthetic oligonucleotide

SEQ ID NO: 555628 - DNA, 60 bp, Artificial; identical to SEQ ID NO: 345542
  Synthetic oligonucleotide

SEQ ID NO: 555629 - DNA, 54 bp, Artificial; identical to SEQ ID NO: 345543
  Synthetic oligonucleotide

SEQ ID NO: 555630 - DNA, 60 bp, Artificial; identical to SEQ ID NO: 345544
  Synthetic oligonucleotide

SEQ ID NO: 555631 - DNA, 60 bp, Artificial; identical to SEQ ID NO: 345547
  Synthetic oligonucleotide

SEQ ID NO: 555632 - DNA, 55 bp, Artificial; identical to SEQ ID NO: 345550
  Synthetic oligonucleotide

SEQ ID NO: 555633 - DNA, 59 bp, Artificial; identical to SEQ ID NO: 345551
  Synthetic oligonucleotide

SEQ ID NO: 555634 - DNA, 55 bp, Artificial; identical to SEQ ID NO: 345554
  Synthetic oligonucleotide

SEQ ID NO: 555635 - DNA, 52 bp, Artificial; identical to SEQ ID NO: 345556
  Synthetic oligonucleotide

SEQ ID NO: 555636 - DNA, 60 bp, Artificial; identical to SEQ ID NO: 345557
  Synthetic oligonucleotide

SEQ ID NO: 555637 - DNA, 60 bp, Artificial; identical to SEQ ID NO: 345558
  Synthetic oligonucleotide

SEQ ID NO: 555638 - DNA, 60 bp, Artificial; identical to SEQ ID NO: 345561
  Synthetic oligonucleotide

SEQ ID NO: 555639 - DNA, 54 bp, Artificial; identical to SEQ ID NO: 345566
  Synthetic oligonucleotide

SEQ ID NO: 555640 - DNA, 55 bp, Artificial; identical to SEQ ID NO: 345568
  Synthetic oligonucleotide

SEQ ID NO: 555641 - DNA, 54 bp, Artificial; identical to SEQ ID NO: 345569
  Synthetic oligonucleotide

SEQ ID NO: 555642 - DNA, 54 bp, Artificial; identical to SEQ ID NO: 345571
  Synthetic oligonucleotide

SEQ ID NO: 555643 - DNA, 59 bp, Artificial; identical to SEQ ID NO: 345573
  Synthetic oligonucleotide

SEQ ID NO: 555644 - DNA, 59 bp, Artificial; identical to SEQ ID NO: 345576
  Synthetic oligonucleotide

SEQ ID NO: 555645 - DNA, 53 bp, Artificial; identical to SEQ ID NO: 345580
  Synthetic oligonucleotide

SEQ ID NO: 555646 - DNA, 59 bp, Artificial; identical to SEQ ID NO: 345581
  Synthetic oligonucleotide

SEQ ID NO: 555647 - DNA, 52 bp, Artificial; identical to SEQ ID NO: 345583
  Synthetic oligonucleotide

SEQ ID NO: 555648 - DNA, 55 bp, Artificial; identical to SEQ ID NO: 345584
  Synthetic oligonucleotide

SEQ ID NO: 555649 - DNA, 55 bp, Artificial; identical to SEQ ID NO: 345585
  Synthetic oligonucleotide

SEQ ID NO: 555650 - DNA, 55 bp, Artificial; identical to SEQ ID NO: 345591
  Synthetic oligonucleotide

SEQ ID NO: 555651 - DNA, 54 bp, Artificial; identical to SEQ ID NO: 345592
  Synthetic oligonucleotide

SEQ ID NO: 555652 - DNA, 60 bp, Artificial; identical to SEQ ID NO: 345593
  Synthetic oligonucleotide

SEQ ID NO: 555653 - DNA, 55 bp, Artificial; identical to SEQ ID NO: 345598
  Synthetic oligonucleotide

SEQ ID NO: 555654 - DNA, 55 bp, Artificial; identical to SEQ ID NO: 345599
  Synthetic oligonucleotide

SEQ ID NO: 555655 - DNA, 55 bp, Artificial; identical to SEQ ID NO: 345600
  Synthetic oligonucleotide

SEQ ID NO: 555656 - DNA, 55 bp, Artificial; identical to SEQ ID NO: 345601
  Synthetic oligonucleotide

SEQ ID NO: 555657 - DNA, 53 bp, Artificial; identical to SEQ ID NO: 345602
  Synthetic oligonucleotide

SEQ ID NO: 555658 - DNA, 60 bp, Artificial; identical to SEQ ID NO: 345605
  Synthetic oligonucleotide

SEQ ID NO: 555659 - DNA, 55 bp, Artificial; identical to SEQ ID NO: 345608
  Synthetic oligonucleotide

SEQ ID NO: 555660 - DNA, 55 bp, Artificial; identical to SEQ ID NO: 345609
  Synthetic oligonucleotide

SEQ ID NO: 555661 - DNA, 56 bp, Artificial; identical to SEQ ID NO: 345612
  Synthetic oligonucleotide

SEQ ID NO: 555662 - DNA, 55 bp, Artificial; identical to SEQ ID NO: 345615
  Synthetic oligonucleotide

SEQ ID NO: 555663 - DNA, 55 bp, Artificial; identical to SEQ ID NO: 345616
  Synthetic oligonucleotide

SEQ ID NO: 555664 - DNA, 58 bp, Artificial; identical to SEQ ID NO: 345622
  Synthetic oligonucleotide

SEQ ID NO: 555665 - DNA, 55 bp, Artificial; identical to SEQ ID NO: 345628
  Synthetic oligonucleotide

SEQ ID NO: 555666 - DNA, 60 bp, Artificial; identical to SEQ ID NO: 345631
  Synthetic oligonucleotide

SEQ ID NO: 555667 - DNA, 55 bp, Artificial; identical to SEQ ID NO: 345632
  Synthetic oligonucleotide

SEQ ID NO: 555668 - DNA, 57 bp, Artificial; identical to SEQ ID NO: 345634
  Synthetic oligonucleotide

SEQ ID NO: 555669 - DNA, 53 bp, Artificial; identical to SEQ ID NO: 345635
  Synthetic oligonucleotide

SEQ ID NO: 555670 - DNA, 55 bp, Artificial; identical to SEQ ID NO: 345636
  Synthetic oligonucleotide

SEQ ID NO: 555671 - DNA, 60 bp, Artificial; identical to SEQ ID NO: 345638
  Synthetic oligonucleotide

SEQ ID NO: 555672 - DNA, 60 bp, Artificial; identical to SEQ ID NO: 345640
  Synthetic oligonucleotide

SEQ ID NO: 555673 - DNA, 51 bp, Artificial; identical to SEQ ID NO: 345641
  Synthetic oligonucleotide

SEQ ID NO: 555674 - DNA, 60 bp, Artificial; identical to SEQ ID NO: 345643
  Synthetic oligonucleotide

SEQ ID NO: 555675 - DNA, 60 bp, Artificial; identical to SEQ ID NO: 345646
  Synthetic oligonucleotide

SEQ ID NO: 555676 - DNA, 52 bp, Artificial; identical to SEQ ID NO: 345651
  Synthetic oligonucleotide

SEQ ID NO: 555677 - DNA, 58 bp, Artificial; identical to SEQ ID NO: 345652
  Synthetic oligonucleotide

SEQ ID NO: 555678 - DNA, 59 bp, Artificial; identical to SEQ ID NO: 345658
  Synthetic oligonucleotide

SEQ ID NO: 555679 - DNA, 54 bp, Artificial; identical to SEQ ID NO: 345659
  Synthetic oligonucleotide

SEQ ID NO: 555680 - DNA, 53 bp, Artificial; identical to SEQ ID NO: 345662
  Synthetic oligonucleotide

SEQ ID NO: 555681 - DNA, 56 bp, Artificial; identical to SEQ ID NO: 345664
  Synthetic oligonucleotide

SEQ ID NO: 555682 - DNA, 55 bp, Artificial; identical to SEQ ID NO: 345667
  Synthetic oligonucleotide

SEQ ID NO: 555683 - DNA, 53 bp, Artificial; identical to SEQ ID NO: 345668
  Synthetic oligonucleotide

SEQ ID NO: 555684 - DNA, 60 bp, Artificial; identical to SEQ ID NO: 345674
  Synthetic oligonucleotide

SEQ ID NO: 555685 - DNA, 56 bp, Artificial; identical to SEQ ID NO: 345676
  Synthetic oligonucleotide

SEQ ID NO: 555686 - DNA, 55 bp, Artificial; identical to SEQ ID NO: 345677
  Synthetic oligonucleotide

SEQ ID NO: 555687 - DNA, 60 bp, Artificial; identical to SEQ ID NO: 345681
  Synthetic oligonucleotide

SEQ ID NO: 555688 - DNA, 50 bp, Artificial; identical to SEQ ID NO: 345684
  Synthetic oligonucleotide

SEQ ID NO: 555689 - DNA, 57 bp, Artificial; identical to SEQ ID NO: 345685
  Synthetic oligonucleotide

SEQ ID NO: 555690 - DNA, 55 bp, Artificial; identical to SEQ ID NO: 345686
  Synthetic oligonucleotide

SEQ ID NO: 555691 - DNA, 55 bp, Artificial; identical to SEQ ID NO: 345690
  Synthetic oligonucleotide

SEQ ID NO: 555692 - DNA, 60 bp, Artificial; identical to SEQ ID NO: 345694
  Synthetic oligonucleotide

SEQ ID NO: 555693 - DNA, 60 bp, Artificial; identical to SEQ ID NO: 345695
  Synthetic oligonucleotide

SEQ ID NO: 555694 - DNA, 59 bp, Artificial; identical to SEQ ID NO: 345698
  Synthetic oligonucleotide

SEQ ID NO: 555695 - DNA, 60 bp, Artificial; identical to SEQ ID NO: 345699
  Synthetic oligonucleotide

SEQ ID NO: 555696 - DNA, 52 bp, Artificial; identical to SEQ ID NO: 345700
  Synthetic oligonucleotide

SEQ ID NO: 555697 - DNA, 60 bp, Artificial; identical to SEQ ID NO: 345701
  Synthetic oligonucleotide

SEQ ID NO: 555698 - DNA, 58 bp, Artificial; identical to SEQ ID NO: 345703
  Synthetic oligonucleotide

SEQ ID NO: 555699 - DNA, 55 bp, Artificial; identical to SEQ ID NO: 345704
  Synthetic oligonucleotide

SEQ ID NO: 555700 - DNA, 60 bp, Artificial; identical to SEQ ID NO: 345705
  Synthetic oligonucleotide

SEQ ID NO: 555701 - DNA, 60 bp, Artificial; identical to SEQ ID NO: 345708
  Synthetic oligonucleotide

SEQ ID NO: 555702 - DNA, 55 bp, Artificial; identical to SEQ ID NO: 345709
  Synthetic oligonucleotide

SEQ ID NO: 555703 - DNA, 60 bp, Artificial; identical to SEQ ID NO: 345711
  Synthetic oligonucleotide

SEQ ID NO: 555704 - DNA, 55 bp, Artificial; identical to SEQ ID NO: 345718
  Synthetic oligonucleotide

SEQ ID NO: 555705 - DNA, 55 bp, Artificial; identical to SEQ ID NO: 345720
  Synthetic oligonucleotide

SEQ ID NO: 555706 - DNA, 55 bp, Artificial; identical to SEQ ID NO: 345723
  Synthetic oligonucleotide

SEQ ID NO: 555707 - DNA, 50 bp, Artificial; identical to SEQ ID NO: 345728
  Synthetic oligonucleotide

SEQ ID NO: 555708 - DNA, 55 bp, Artificial; identical to SEQ ID NO: 11612
  Synthetic oligonucleotide

SEQ ID NO: 555709 - DNA, 58 bp, Artificial; identical to SEQ ID NO: 345729
  Synthetic oligonucleotide

SEQ ID NO: 555710 - DNA, 59 bp, Artificial; identical to SEQ ID NO: 345732
  Synthetic oligonucleotide

SEQ ID NO: 555711 - DNA, 60 bp, Artificial; identical to SEQ ID NO: 15811
  Synthetic oligonucleotide

SEQ ID NO: 555712 - DNA, 54 bp, Artificial; identical to SEQ ID NO: 345742
  Synthetic oligonucleotide

SEQ ID NO: 555713 - DNA, 60 bp, Artificial; identical to SEQ ID NO: 345744
  Synthetic oligonucleotide

SEQ ID NO: 555714 - DNA, 60 bp, Artificial; identical to SEQ ID NO: 345746
  Synthetic oligonucleotide

SEQ ID NO: 555715 - DNA, 57 bp, Artificial; identical to SEQ ID NO: 345747
  Synthetic oligonucleotide

SEQ ID NO: 555716 - DNA, 52 bp, Artificial; identical to SEQ ID NO: 345748
  Synthetic oligonucleotide

SEQ ID NO: 555717 - DNA, 55 bp, Artificial; identical to SEQ ID NO: 345749
  Synthetic oligonucleotide

SEQ ID NO: 555718 - DNA, 60 bp, Artificial; identical to SEQ ID NO: 345754
  Synthetic oligonucleotide

SEQ ID NO: 555719 - DNA, 60 bp, Artificial; identical to SEQ ID NO: 345755
  Synthetic oligonucleotide

SEQ ID NO: 555720 - DNA, 60 bp, Artificial; identical to SEQ ID NO: 345756
  Synthetic oligonucleotide

SEQ ID NO: 555721 - DNA, 55 bp, Artificial; identical to SEQ ID NO: 345759
  Synthetic oligonucleotide

SEQ ID NO: 555722 - DNA, 55 bp, Artificial; identical to SEQ ID NO: 345761
  Synthetic oligonucleotide

SEQ ID NO: 555723 - DNA, 60 bp, Artificial; identical to SEQ ID NO: 345765
  Synthetic oligonucleotide

SEQ ID NO: 555724 - DNA, 55 bp, Artificial; identical to SEQ ID NO: 345767
  Synthetic oligonucleotide

SEQ ID NO: 555725 - DNA, 51 bp, Artificial; identical to SEQ ID NO: 345772
  Synthetic oligonucleotide

SEQ ID NO: 555726 - DNA, 58 bp, Artificial; identical to SEQ ID NO: 345777
  Synthetic oligonucleotide

SEQ ID NO: 555727 - DNA, 55 bp, Artificial; identical to SEQ ID NO: 345778
  Synthetic oligonucleotide

SEQ ID NO: 555728 - DNA, 60 bp, Artificial; identical to SEQ ID NO: 345780
  Synthetic oligonucleotide

SEQ ID NO: 555729 - DNA, 55 bp, Artificial; identical to SEQ ID NO: 345782
  Synthetic oligonucleotide

SEQ ID NO: 555730 - DNA, 53 bp, Artificial; identical to SEQ ID NO: 345784
  Synthetic oligonucleotide

SEQ ID NO: 555731 - DNA, 60 bp, Artificial; identical to SEQ ID NO: 345786
  Synthetic oligonucleotide

SEQ ID NO: 555732 - DNA, 55 bp, Artificial; identical to SEQ ID NO: 345787
  Synthetic oligonucleotide

SEQ ID NO: 555733 - DNA, 60 bp, Artificial; identical to SEQ ID NO: 345789
  Synthetic oligonucleotide

SEQ ID NO: 555734 - DNA, 60 bp, Artificial; identical to SEQ ID NO: 345791
  Synthetic oligonucleotide

SEQ ID NO: 555735 - DNA, 57 bp, Artificial; identical to SEQ ID NO: 345792
  Synthetic oligonucleotide

SEQ ID NO: 555736 - DNA, 55 bp, Artificial; identical to SEQ ID NO: 345803
  Synthetic oligonucleotide

SEQ ID NO: 555737 - DNA, 60 bp, Artificial; identical to SEQ ID NO: 14251
  Synthetic oligonucleotide

SEQ ID NO: 555738 - DNA, 60 bp, Artificial; identical to SEQ ID NO: 345806
  Synthetic oligonucleotide

SEQ ID NO: 555739 - DNA, 60 bp, Artificial; identical to SEQ ID NO: 345808
  Synthetic oligonucleotide

SEQ ID NO: 555740 - DNA, 60 bp, Artificial; identical to SEQ ID NO: 345809
  Synthetic oligonucleotide

SEQ ID NO: 555741 - DNA, 55 bp, Artificial; identical to SEQ ID NO: 345810
  Synthetic oligonucleotide

SEQ ID NO: 555742 - DNA, 60 bp, Artificial; identical to SEQ ID NO: 345813
  Synthetic oligonucleotide

SEQ ID NO: 555743 - DNA, 55 bp, Artificial; identical to SEQ ID NO: 345816
  Synthetic oligonucleotide

SEQ ID NO: 555744 - DNA, 60 bp, Artificial; identical to SEQ ID NO: 345819
  Synthetic oligonucleotide

SEQ ID NO: 555745 - DNA, 59 bp, Artificial; identical to SEQ ID NO: 345822
  Synthetic oligonucleotide

SEQ ID NO: 555746 - DNA, 55 bp, Artificial; identical to SEQ ID NO: 345824
  Synthetic oligonucleotide

SEQ ID NO: 555747 - DNA, 56 bp, Artificial; identical to SEQ ID NO: 345828
  Synthetic oligonucleotide

SEQ ID NO: 555748 - DNA, 60 bp, Artificial; identical to SEQ ID NO: 345829
  Synthetic oligonucleotide

SEQ ID NO: 555749 - DNA, 56 bp, Artificial; identical to SEQ ID NO: 345833
  Synthetic oligonucleotide

SEQ ID NO: 555750 - DNA, 60 bp, Artificial; identical to SEQ ID NO: 345835
  Synthetic oligonucleotide

SEQ ID NO: 555751 - DNA, 60 bp, Artificial; identical to SEQ ID NO: 345837
  Synthetic oligonucleotide

SEQ ID NO: 555752 - DNA, 60 bp, Artificial; identical to SEQ ID NO: 345839
  Synthetic oligonucleotide

SEQ ID NO: 555753 - DNA, 55 bp, Artificial; identical to SEQ ID NO: 345840
  Synthetic oligonucleotide

SEQ ID NO: 555754 - DNA, 53 bp, Artificial; identical to SEQ ID NO: 345842
  Synthetic oligonucleotide

SEQ ID NO: 555755 - DNA, 59 bp, Artificial; identical to SEQ ID NO: 18949
  Synthetic oligonucleotide

SEQ ID NO: 555756 - DNA, 53 bp, Artificial; identical to SEQ ID NO: 345844
  Synthetic oligonucleotide

SEQ ID NO: 555757 - DNA, 55 bp, Artificial; identical to SEQ ID NO: 345847
  Synthetic oligonucleotide

SEQ ID NO: 555758 - DNA, 60 bp, Artificial; identical to SEQ ID NO: 345850
  Synthetic oligonucleotide

SEQ ID NO: 555759 - DNA, 55 bp, Artificial; identical to SEQ ID NO: 345852
  Synthetic oligonucleotide

SEQ ID NO: 555760 - DNA, 55 bp, Artificial; identical to SEQ ID NO: 345855
  Synthetic oligonucleotide

SEQ ID NO: 555761 - DNA, 55 bp, Artificial; identical to SEQ ID NO: 345856
  Synthetic oligonucleotide

SEQ ID NO: 555762 - DNA, 60 bp, Artificial; identical to SEQ ID NO: 8302
  Synthetic oligonucleotide

SEQ ID NO: 555763 - DNA, 55 bp, Artificial; identical to SEQ ID NO: 345861
  Synthetic oligonucleotide

SEQ ID NO: 555764 - DNA, 60 bp, Artificial; identical to SEQ ID NO: 345863
  Synthetic oligonucleotide

SEQ ID NO: 555765 - DNA, 53 bp, Artificial; identical to SEQ ID NO: 345864
  Synthetic oligonucleotide

SEQ ID NO: 555766 - DNA, 58 bp, Artificial; identical to SEQ ID NO: 345867
  Synthetic oligonucleotide

SEQ ID NO: 555767 - DNA, 60 bp, Artificial; identical to SEQ ID NO: 345868
  Synthetic oligonucleotide

SEQ ID NO: 555768 - DNA, 60 bp, Artificial; identical to SEQ ID NO: 345869
  Synthetic oligonucleotide

SEQ ID NO: 555769 - DNA, 57 bp, Artificial; identical to SEQ ID NO: 345870
  Synthetic oligonucleotide

SEQ ID NO: 555770 - DNA, 58 bp, Artificial; identical to SEQ ID NO: 345871
  Synthetic oligonucleotide

SEQ ID NO: 555771 - DNA, 55 bp, Artificial; identical to SEQ ID NO: 345872
  Synthetic oligonucleotide

SEQ ID NO: 555772 - DNA, 58 bp, Artificial; identical to SEQ ID NO: 345873
  Synthetic oligonucleotide

SEQ ID NO: 555773 - DNA, 51 bp, Artificial; identical to SEQ ID NO: 345874
  Synthetic oligonucleotide

SEQ ID NO: 555774 - DNA, 55 bp, Artificial; identical to SEQ ID NO: 345875
  Synthetic oligonucleotide

SEQ ID NO: 555775 - DNA, 52 bp, Artificial; identical to SEQ ID NO: 345876
  Synthetic oligonucleotide

SEQ ID NO: 555776 - DNA, 60 bp, Artificial; identical to SEQ ID NO: 345879
  Synthetic oligonucleotide

SEQ ID NO: 555777 - DNA, 60 bp, Artificial; identical to SEQ ID NO: 345880
  Synthetic oligonucleotide

SEQ ID NO: 555778 - DNA, 55 bp, Artificial; identical to SEQ ID NO: 345881
  Synthetic oligonucleotide

SEQ ID NO: 555779 - DNA, 55 bp, Artificial; identical to SEQ ID NO: 345888
  Synthetic oligonucleotide

SEQ ID NO: 555780 - DNA, 60 bp, Artificial; identical to SEQ ID NO: 345894
  Synthetic oligonucleotide

SEQ ID NO: 555781 - DNA, 60 bp, Artificial; identical to SEQ ID NO: 345895
  Synthetic oligonucleotide

SEQ ID NO: 555782 - DNA, 60 bp, Artificial; identical to SEQ ID NO: 345897
  Synthetic oligonucleotide

SEQ ID NO: 555783 - DNA, 57 bp, Artificial; identical to SEQ ID NO: 345899
  Synthetic oligonucleotide

SEQ ID NO: 555784 - DNA, 58 bp, Artificial; identical to SEQ ID NO: 345901
  Synthetic oligonucleotide

SEQ ID NO: 555785 - DNA, 55 bp, Artificial; identical to SEQ ID NO: 345903
  Synthetic oligonucleotide

SEQ ID NO: 555786 - DNA, 60 bp, Artificial; identical to SEQ ID NO: 345904
  Synthetic oligonucleotide

SEQ ID NO: 555787 - DNA, 59 bp, Artificial; identical to SEQ ID NO: 345908
  Synthetic oligonucleotide

SEQ ID NO: 555788 - DNA, 53 bp, Artificial; identical to SEQ ID NO: 10267
  Synthetic oligonucleotide

SEQ ID NO: 555789 - DNA, 52 bp, Artificial; identical to SEQ ID NO: 345909
  Synthetic oligonucleotide

SEQ ID NO: 555790 - DNA, 51 bp, Artificial; identical to SEQ ID NO: 345914
  Synthetic oligonucleotide

SEQ ID NO: 555791 - DNA, 54 bp, Artificial; identical to SEQ ID NO: 345917
  Synthetic oligonucleotide

SEQ ID NO: 555792 - DNA, 55 bp, Artificial; identical to SEQ ID NO: 345922
  Synthetic oligonucleotide

SEQ ID NO: 555793 - DNA, 55 bp, Artificial; identical to SEQ ID NO: 345924
  Synthetic oligonucleotide

SEQ ID NO: 555794 - DNA, 58 bp, Artificial; identical to SEQ ID NO: 345927
  Synthetic oligonucleotide

SEQ ID NO: 555795 - DNA, 52 bp, Artificial; identical to SEQ ID NO: 345929
  Synthetic oligonucleotide

SEQ ID NO: 555796 - DNA, 54 bp, Artificial; identical to SEQ ID NO: 345931
  Synthetic oligonucleotide

SEQ ID NO: 555797 - DNA, 56 bp, Artificial; identical to SEQ ID NO: 345936
  Synthetic oligonucleotide

SEQ ID NO: 555798 - DNA, 55 bp, Artificial; identical to SEQ ID NO: 345937
  Synthetic oligonucleotide

SEQ ID NO: 555799 - DNA, 55 bp, Artificial; identical to SEQ ID NO: 345939
  Synthetic oligonucleotide

SEQ ID NO: 555800 - DNA, 56 bp, Artificial; identical to SEQ ID NO: 345941
  Synthetic oligonucleotide

SEQ ID NO: 555801 - DNA, 57 bp, Artificial; identical to SEQ ID NO: 345942
  Synthetic oligonucleotide

SEQ ID NO: 555802 - DNA, 57 bp, Artificial; identical to SEQ ID NO: 345943
  Synthetic oligonucleotide

SEQ ID NO: 555803 - DNA, 55 bp, Artificial; identical to SEQ ID NO: 345947
  Synthetic oligonucleotide

SEQ ID NO: 555804 - DNA, 55 bp, Artificial; identical to SEQ ID NO: 345949
  Synthetic oligonucleotide

SEQ ID NO: 555805 - DNA, 60 bp, Artificial; identical to SEQ ID NO: 345953
  Synthetic oligonucleotide

SEQ ID NO: 555806 - DNA, 55 bp, Artificial; identical to SEQ ID NO: 345955
  Synthetic oligonucleotide

SEQ ID NO: 555807 - DNA, 55 bp, Artificial; identical to SEQ ID NO: 345956
  Synthetic oligonucleotide

SEQ ID NO: 555808 - DNA, 55 bp, Artificial; identical to SEQ ID NO: 345959
  Synthetic oligonucleotide

SEQ ID NO: 555809 - DNA, 55 bp, Artificial; identical to SEQ ID NO: 345961
  Synthetic oligonucleotide

SEQ ID NO: 555810 - DNA, 59 bp, Artificial; identical to SEQ ID NO: 345962
  Synthetic oligonucleotide

SEQ ID NO: 555811 - DNA, 52 bp, Artificial; identical to SEQ ID NO: 345963
  Synthetic oligonucleotide

SEQ ID NO: 555812 - DNA, 56 bp, Artificial; identical to SEQ ID NO: 345964
  Synthetic oligonucleotide

SEQ ID NO: 555813 - DNA, 54 bp, Artificial; identical to SEQ ID NO: 345965
  Synthetic oligonucleotide

SEQ ID NO: 555814 - DNA, 58 bp, Artificial; identical to SEQ ID NO: 11877
  Synthetic oligonucleotide

SEQ ID NO: 555815 - DNA, 60 bp, Artificial; identical to SEQ ID NO: 345969
  Synthetic oligonucleotide

SEQ ID NO: 555816 - DNA, 53 bp, Artificial; identical to SEQ ID NO: 345970
  Synthetic oligonucleotide

SEQ ID NO: 555817 - DNA, 55 bp, Artificial; identical to SEQ ID NO: 345971
  Synthetic oligonucleotide

SEQ ID NO: 555818 - DNA, 55 bp, Artificial; identical to SEQ ID NO: 13020
  Synthetic oligonucleotide

SEQ ID NO: 555819 - DNA, 60 bp, Artificial; identical to SEQ ID NO: 345977
  Synthetic oligonucleotide

SEQ ID NO: 555820 - DNA, 60 bp, Artificial; identical to SEQ ID NO: 345979
  Synthetic oligonucleotide

SEQ ID NO: 555821 - DNA, 57 bp, Artificial; identical to SEQ ID NO: 17698
  Synthetic oligonucleotide

SEQ ID NO: 555822 - DNA, 55 bp, Artificial; identical to SEQ ID NO: 345983
  Synthetic oligonucleotide

SEQ ID NO: 555823 - DNA, 57 bp, Artificial; identical to SEQ ID NO: 345984
  Synthetic oligonucleotide

SEQ ID NO: 555824 - DNA, 53 bp, Artificial; identical to SEQ ID NO: 345986
  Synthetic oligonucleotide

SEQ ID NO: 555825 - DNA, 60 bp, Artificial; identical to SEQ ID NO: 345990
  Synthetic oligonucleotide

SEQ ID NO: 555826 - DNA, 56 bp, Artificial; identical to SEQ ID NO: 345992
  Synthetic oligonucleotide

SEQ ID NO: 555827 - DNA, 57 bp, Artificial; identical to SEQ ID NO: 345993
  Synthetic oligonucleotide

SEQ ID NO: 555828 - DNA, 60 bp, Artificial; identical to SEQ ID NO: 13926
  Synthetic oligonucleotide

SEQ ID NO: 555829 - DNA, 59 bp, Artificial; identical to SEQ ID NO: 345999
  Synthetic oligonucleotide

SEQ ID NO: 555830 - DNA, 60 bp, Artificial; identical to SEQ ID NO: 76310
  Synthetic oligonucleotide

SEQ ID NO: 555831 - DNA, 52 bp, Artificial; identical to SEQ ID NO: 346003
  Synthetic oligonucleotide

SEQ ID NO: 555832 - DNA, 57 bp, Artificial; identical to SEQ ID NO: 346004
  Synthetic oligonucleotide

SEQ ID NO: 555833 - DNA, 60 bp, Artificial; identical to SEQ ID NO: 346007
  Synthetic oligonucleotide

SEQ ID NO: 555834 - DNA, 60 bp, Artificial; identical to SEQ ID NO: 346008
  Synthetic oligonucleotide

SEQ ID NO: 555835 - DNA, 60 bp, Artificial; identical to SEQ ID NO: 346011
  Synthetic oligonucleotide

SEQ ID NO: 555836 - DNA, 55 bp, Artificial; identical to SEQ ID NO: 346012
  Synthetic oligonucleotide

SEQ ID NO: 555837 - DNA, 55 bp, Artificial; identical to SEQ ID NO: 346013
  Synthetic oligonucleotide

SEQ ID NO: 555838 - DNA, 60 bp, Artificial; identical to SEQ ID NO: 346014
  Synthetic oligonucleotide

SEQ ID NO: 555839 - DNA, 55 bp, Artificial; identical to SEQ ID NO: 346020
  Synthetic oligonucleotide

SEQ ID NO: 555840 - DNA, 60 bp, Artificial; identical to SEQ ID NO: 346023
  Synthetic oligonucleotide

SEQ ID NO: 555841 - DNA, 53 bp, Artificial; identical to SEQ ID NO: 346025
  Synthetic oligonucleotide

SEQ ID NO: 555842 - DNA, 54 bp, Artificial; identical to SEQ ID NO: 346026
  Synthetic oligonucleotide

SEQ ID NO: 555843 - DNA, 60 bp, Artificial; identical to SEQ ID NO: 346028
  Synthetic oligonucleotide

SEQ ID NO: 555844 - DNA, 60 bp, Artificial; identical to SEQ ID NO: 346035
  Synthetic oligonucleotide

SEQ ID NO: 555845 - DNA, 60 bp, Artificial; identical to SEQ ID NO: 12394
  Synthetic oligonucleotide

SEQ ID NO: 555846 - DNA, 55 bp, Artificial; identical to SEQ ID NO: 346040
  Synthetic oligonucleotide

SEQ ID NO: 555847 - DNA, 51 bp, Artificial; identical to SEQ ID NO: 346042
  Synthetic oligonucleotide

SEQ ID NO: 555848 - DNA, 55 bp, Artificial; identical to SEQ ID NO: 346043
  Synthetic oligonucleotide

SEQ ID NO: 555849 - DNA, 52 bp, Artificial; identical to SEQ ID NO: 346045
  Synthetic oligonucleotide

SEQ ID NO: 555850 - DNA, 55 bp, Artificial; identical to SEQ ID NO: 346046
  Synthetic oligonucleotide

SEQ ID NO: 555851 - DNA, 56 bp, Artificial; identical to SEQ ID NO: 346047
  Synthetic oligonucleotide

SEQ ID NO: 555852 - DNA, 57 bp, Artificial; identical to SEQ ID NO: 346048
  Synthetic oligonucleotide

SEQ ID NO: 555853 - DNA, 57 bp, Artificial; identical to SEQ ID NO: 346049
  Synthetic oligonucleotide

SEQ ID NO: 555854 - DNA, 60 bp, Artificial; identical to SEQ ID NO: 346053
  Synthetic oligonucleotide

SEQ ID NO: 555855 - DNA, 51 bp, Artificial; identical to SEQ ID NO: 346058
  Synthetic oligonucleotide

SEQ ID NO: 555856 - DNA, 60 bp, Artificial; identical to SEQ ID NO: 346061
  Synthetic oligonucleotide

SEQ ID NO: 555857 - DNA, 57 bp, Artificial; identical to SEQ ID NO: 346062
  Synthetic oligonucleotide

SEQ ID NO: 555858 - DNA, 60 bp, Artificial; identical to SEQ ID NO: 346063
  Synthetic oligonucleotide

SEQ ID NO: 555859 - DNA, 54 bp, Artificial; identical to SEQ ID NO: 346065
  Synthetic oligonucleotide

SEQ ID NO: 555860 - DNA, 55 bp, Artificial; identical to SEQ ID NO: 346067
  Synthetic oligonucleotide

SEQ ID NO: 555861 - DNA, 59 bp, Artificial; identical to SEQ ID NO: 346068
  Synthetic oligonucleotide

SEQ ID NO: 555862 - DNA, 55 bp, Artificial; identical to SEQ ID NO: 346070
  Synthetic oligonucleotide

SEQ ID NO: 555863 - DNA, 53 bp, Artificial; identical to SEQ ID NO: 346072
  Synthetic oligonucleotide

SEQ ID NO: 555864 - DNA, 60 bp, Artificial; identical to SEQ ID NO: 346073
  Synthetic oligonucleotide

SEQ ID NO: 555865 - DNA, 57 bp, Artificial; identical to SEQ ID NO: 14811
  Synthetic oligonucleotide

SEQ ID NO: 555866 - DNA, 55 bp, Artificial; identical to SEQ ID NO: 346076
  Synthetic oligonucleotide

SEQ ID NO: 555867 - DNA, 60 bp, Artificial; identical to SEQ ID NO: 346078
  Synthetic oligonucleotide

SEQ ID NO: 555868 - DNA, 60 bp, Artificial; identical to SEQ ID NO: 346079
  Synthetic oligonucleotide

SEQ ID NO: 555869 - DNA, 57 bp, Artificial; identical to SEQ ID NO: 346085
  Synthetic oligonucleotide

SEQ ID NO: 555870 - DNA, 57 bp, Artificial; identical to SEQ ID NO: 346086
  Synthetic oligonucleotide

SEQ ID NO: 555871 - DNA, 55 bp, Artificial; identical to SEQ ID NO: 346088
  Synthetic oligonucleotide

SEQ ID NO: 555872 - DNA, 60 bp, Artificial; identical to SEQ ID NO: 346092
  Synthetic oligonucleotide

SEQ ID NO: 555873 - DNA, 57 bp, Artificial; identical to SEQ ID NO: 346093
  Synthetic oligonucleotide

SEQ ID NO: 555874 - DNA, 55 bp, Artificial; identical to SEQ ID NO: 346095
  Synthetic oligonucleotide

SEQ ID NO: 555875 - DNA, 60 bp, Artificial; identical to SEQ ID NO: 346097
  Synthetic oligonucleotide

SEQ ID NO: 555876 - DNA, 55 bp, Artificial; identical to SEQ ID NO: 346098
  Synthetic oligonucleotide

SEQ ID NO: 555877 - DNA, 53 bp, Artificial; identical to SEQ ID NO: 346105
  Synthetic oligonucleotide

SEQ ID NO: 555878 - DNA, 60 bp, Artificial; identical to SEQ ID NO: 346107
  Synthetic oligonucleotide

SEQ ID NO: 555879 - DNA, 50 bp, Artificial; identical to SEQ ID NO: 346109
  Synthetic oligonucleotide

SEQ ID NO: 555880 - DNA, 60 bp, Artificial; identical to SEQ ID NO: 346111
  Synthetic oligonucleotide

SEQ ID NO: 555881 - DNA, 60 bp, Artificial; identical to SEQ ID NO: 346113
  Synthetic oligonucleotide

SEQ ID NO: 555882 - DNA, 55 bp, Artificial; identical to SEQ ID NO: 346115
  Synthetic oligonucleotide

SEQ ID NO: 555883 - DNA, 60 bp, Artificial; identical to SEQ ID NO: 15096
  Synthetic oligonucleotide

SEQ ID NO: 555884 - DNA, 51 bp, Artificial; identical to SEQ ID NO: 346116
  Synthetic oligonucleotide

SEQ ID NO: 555885 - DNA, 57 bp, Artificial; identical to SEQ ID NO: 346119
  Synthetic oligonucleotide

SEQ ID NO: 555886 - DNA, 60 bp, Artificial; identical to SEQ ID NO: 346121
  Synthetic oligonucleotide

SEQ ID NO: 555887 - DNA, 59 bp, Artificial; identical to SEQ ID NO: 346123
  Synthetic oligonucleotide

SEQ ID NO: 555888 - DNA, 56 bp, Artificial; identical to SEQ ID NO: 346126
  Synthetic oligonucleotide

SEQ ID NO: 555889 - DNA, 57 bp, Artificial; identical to SEQ ID NO: 346130
  Synthetic oligonucleotide

SEQ ID NO: 555890 - DNA, 60 bp, Artificial; identical to SEQ ID NO: 346131
  Synthetic oligonucleotide

SEQ ID NO: 555891 - DNA, 56 bp, Artificial; identical to SEQ ID NO: 346133
  Synthetic oligonucleotide

SEQ ID NO: 555892 - DNA, 53 bp, Artificial; identical to SEQ ID NO: 346134
  Synthetic oligonucleotide

SEQ ID NO: 555893 - DNA, 60 bp, Artificial; identical to SEQ ID NO: 346135
  Synthetic oligonucleotide

SEQ ID NO: 555894 - DNA, 55 bp, Artificial; identical to SEQ ID NO: 346136
  Synthetic oligonucleotide

SEQ ID NO: 555895 - DNA, 55 bp, Artificial; identical to SEQ ID NO: 346138
  Synthetic oligonucleotide

SEQ ID NO: 555896 - DNA, 55 bp, Artificial; identical to SEQ ID NO: 346140
  Synthetic oligonucleotide

SEQ ID NO: 555897 - DNA, 60 bp, Artificial; identical to SEQ ID NO: 346141
  Synthetic oligonucleotide

SEQ ID NO: 555898 - DNA, 56 bp, Artificial; identical to SEQ ID NO: 346149
  Synthetic oligonucleotide

SEQ ID NO: 555899 - DNA, 60 bp, Artificial; identical to SEQ ID NO: 346153
  Synthetic oligonucleotide

SEQ ID NO: 555900 - DNA, 55 bp, Artificial; identical to SEQ ID NO: 346158
  Synthetic oligonucleotide

SEQ ID NO: 555901 - DNA, 55 bp, Artificial; identical to SEQ ID NO: 346160
  Synthetic oligonucleotide

SEQ ID NO: 555902 - DNA, 55 bp, Artificial; identical to SEQ ID NO: 346165
  Synthetic oligonucleotide

SEQ ID NO: 555903 - DNA, 52 bp, Artificial; identical to SEQ ID NO: 346166
  Synthetic oligonucleotide

SEQ ID NO: 555904 - DNA, 60 bp, Artificial; identical to SEQ ID NO: 346173
  Synthetic oligonucleotide

SEQ ID NO: 555905 - DNA, 60 bp, Artificial; identical to SEQ ID NO: 346174
  Synthetic oligonucleotide

SEQ ID NO: 555906 - DNA, 53 bp, Artificial; identical to SEQ ID NO: 14511
  Synthetic oligonucleotide

SEQ ID NO: 555907 - DNA, 60 bp, Artificial; identical to SEQ ID NO: 346180
  Synthetic oligonucleotide

SEQ ID NO: 555908 - DNA, 57 bp, Artificial; identical to SEQ ID NO: 346181
  Synthetic oligonucleotide

SEQ ID NO: 555909 - DNA, 54 bp, Artificial; identical to SEQ ID NO: 346183
  Synthetic oligonucleotide

SEQ ID NO: 555910 - DNA, 55 bp, Artificial; identical to SEQ ID NO: 346188
  Synthetic oligonucleotide

SEQ ID NO: 555911 - DNA, 60 bp, Artificial; identical to SEQ ID NO: 346192
  Synthetic oligonucleotide

SEQ ID NO: 555912 - DNA, 56 bp, Artificial; identical to SEQ ID NO: 346194
  Synthetic oligonucleotide

SEQ ID NO: 555913 - DNA, 54 bp, Artificial; identical to SEQ ID NO: 346195
  Synthetic oligonucleotide

SEQ ID NO: 555914 - DNA, 53 bp, Artificial; identical to SEQ ID NO: 346199
  Synthetic oligonucleotide

SEQ ID NO: 555915 - DNA, 51 bp, Artificial; identical to SEQ ID NO: 346201
  Synthetic oligonucleotide

SEQ ID NO: 555916 - DNA, 55 bp, Artificial; identical to SEQ ID NO: 346203
  Synthetic oligonucleotide

SEQ ID NO: 555917 - DNA, 55 bp, Artificial; identical to SEQ ID NO: 346204
  Synthetic oligonucleotide

SEQ ID NO: 555918 - DNA, 59 bp, Artificial; identical to SEQ ID NO: 346206
  Synthetic oligonucleotide

SEQ ID NO: 555919 - DNA, 60 bp, Artificial; identical to SEQ ID NO: 346208
  Synthetic oligonucleotide

SEQ ID NO: 555920 - DNA, 54 bp, Artificial; identical to SEQ ID NO: 346209
  Synthetic oligonucleotide

SEQ ID NO: 555921 - DNA, 60 bp, Artificial; identical to SEQ ID NO: 346210
  Synthetic oligonucleotide

SEQ ID NO: 555922 - DNA, 55 bp, Artificial; identical to SEQ ID NO: 346212
  Synthetic oligonucleotide

SEQ ID NO: 555923 - DNA, 55 bp, Artificial; identical to SEQ ID NO: 346213
  Synthetic oligonucleotide

SEQ ID NO: 555924 - DNA, 60 bp, Artificial; identical to SEQ ID NO: 346221
  Synthetic oligonucleotide

SEQ ID NO: 555925 - DNA, 57 bp, Artificial; identical to SEQ ID NO: 346222
  Synthetic oligonucleotide

SEQ ID NO: 555926 - DNA, 59 bp, Artificial; identical to SEQ ID NO: 346226
  Synthetic oligonucleotide

SEQ ID NO: 555927 - DNA, 51 bp, Artificial; identical to SEQ ID NO: 346227
  Synthetic oligonucleotide

SEQ ID NO: 555928 - DNA, 58 bp, Artificial; identical to SEQ ID NO: 346228
  Synthetic oligonucleotide

SEQ ID NO: 555929 - DNA, 58 bp, Artificial; identical to SEQ ID NO: 346230
  Synthetic oligonucleotide

SEQ ID NO: 555930 - DNA, 54 bp, Artificial; identical to SEQ ID NO: 346231
  Synthetic oligonucleotide

SEQ ID NO: 555931 - DNA, 55 bp, Artificial; identical to SEQ ID NO: 346233
  Synthetic oligonucleotide

SEQ ID NO: 555932 - DNA, 60 bp, Artificial; identical to SEQ ID NO: 346234
  Synthetic oligonucleotide

SEQ ID NO: 555933 - DNA, 59 bp, Artificial; identical to SEQ ID NO: 346240
  Synthetic oligonucleotide

SEQ ID NO: 555934 - DNA, 56 bp, Artificial; identical to SEQ ID NO: 346241
  Synthetic oligonucleotide

SEQ ID NO: 555935 - DNA, 60 bp, Artificial; identical to SEQ ID NO: 346242
  Synthetic oligonucleotide

SEQ ID NO: 555936 - DNA, 55 bp, Artificial; identical to SEQ ID NO: 346247
  Synthetic oligonucleotide

SEQ ID NO: 555937 - DNA, 58 bp, Artificial; identical to SEQ ID NO: 346248
  Synthetic oligonucleotide

SEQ ID NO: 555938 - DNA, 55 bp, Artificial; identical to SEQ ID NO: 346249
  Synthetic oligonucleotide

SEQ ID NO: 555939 - DNA, 56 bp, Artificial; identical to SEQ ID NO: 346250
  Synthetic oligonucleotide

SEQ ID NO: 555940 - DNA, 55 bp, Artificial; identical to SEQ ID NO: 346251
  Synthetic oligonucleotide

SEQ ID NO: 555941 - DNA, 54 bp, Artificial; identical to SEQ ID NO: 346252
  Synthetic oligonucleotide

SEQ ID NO: 555942 - DNA, 50 bp, Artificial; identical to SEQ ID NO: 346253
  Synthetic oligonucleotide

SEQ ID NO: 555943 - DNA, 60 bp, Artificial; identical to SEQ ID NO: 346254
  Synthetic oligonucleotide

SEQ ID NO: 555944 - DNA, 55 bp, Artificial; identical to SEQ ID NO: 346255
  Synthetic oligonucleotide

SEQ ID NO: 555945 - DNA, 59 bp, Artificial; identical to SEQ ID NO: 346258
  Synthetic oligonucleotide

SEQ ID NO: 555946 - DNA, 60 bp, Artificial; identical to SEQ ID NO: 346259
  Synthetic oligonucleotide

SEQ ID NO: 555947 - DNA, 54 bp, Artificial; identical to SEQ ID NO: 346260
  Synthetic oligonucleotide

SEQ ID NO: 555948 - DNA, 56 bp, Artificial; identical to SEQ ID NO: 346261
  Synthetic oligonucleotide

SEQ ID NO: 555949 - DNA, 55 bp, Artificial; identical to SEQ ID NO: 346262
  Synthetic oligonucleotide

SEQ ID NO: 555950 - DNA, 55 bp, Artificial; identical to SEQ ID NO: 346263
  Synthetic oligonucleotide

SEQ ID NO: 555951 - DNA, 60 bp, Artificial; identical to SEQ ID NO: 346264
  Synthetic oligonucleotide

SEQ ID NO: 555952 - DNA, 60 bp, Artificial; identical to SEQ ID NO: 346265
  Synthetic oligonucleotide

SEQ ID NO: 555953 - DNA, 51 bp, Artificial; identical to SEQ ID NO: 346268
  Synthetic oligonucleotide

SEQ ID NO: 555954 - DNA, 60 bp, Artificial; identical to SEQ ID NO: 346269
  Synthetic oligonucleotide

SEQ ID NO: 555955 - DNA, 60 bp, Artificial; identical to SEQ ID NO: 346270
  Synthetic oligonucleotide

SEQ ID NO: 555956 - DNA, 60 bp, Artificial; identical to SEQ ID NO: 346273
  Synthetic oligonucleotide

SEQ ID NO: 555957 - DNA, 60 bp, Artificial; identical to SEQ ID NO: 346274
  Synthetic oligonucleotide

SEQ ID NO: 555958 - DNA, 58 bp, Artificial; identical to SEQ ID NO: 346277
  Synthetic oligonucleotide

SEQ ID NO: 555959 - DNA, 60 bp, Artificial; identical to SEQ ID NO: 346279
  Synthetic oligonucleotide

SEQ ID NO: 555960 - DNA, 55 bp, Artificial; identical to SEQ ID NO: 346281
  Synthetic oligonucleotide

SEQ ID NO: 555961 - DNA, 56 bp, Artificial; identical to SEQ ID NO: 346286
  Synthetic oligonucleotide

SEQ ID NO: 555962 - DNA, 59 bp, Artificial; identical to SEQ ID NO: 346291
  Synthetic oligonucleotide

SEQ ID NO: 555963 - DNA, 53 bp, Artificial; identical to SEQ ID NO: 346294
  Synthetic oligonucleotide

SEQ ID NO: 555964 - DNA, 58 bp, Artificial; identical to SEQ ID NO: 346296
  Synthetic oligonucleotide

SEQ ID NO: 555965 - DNA, 54 bp, Artificial; identical to SEQ ID NO: 346298
  Synthetic oligonucleotide

SEQ ID NO: 555966 - DNA, 55 bp, Artificial; identical to SEQ ID NO: 346299
  Synthetic oligonucleotide

SEQ ID NO: 555967 - DNA, 52 bp, Artificial; identical to SEQ ID NO: 346301
  Synthetic oligonucleotide

SEQ ID NO: 555968 - DNA, 53 bp, Artificial; identical to SEQ ID NO: 346302
  Synthetic oligonucleotide

SEQ ID NO: 555969 - DNA, 50 bp, Artificial; identical to SEQ ID NO: 346304
  Synthetic oligonucleotide

SEQ ID NO: 555970 - DNA, 55 bp, Artificial; identical to SEQ ID NO: 346305
  Synthetic oligonucleotide

SEQ ID NO: 555971 - DNA, 55 bp, Artificial; identical to SEQ ID NO: 346306
  Synthetic oligonucleotide

SEQ ID NO: 555972 - DNA, 57 bp, Artificial; identical to SEQ ID NO: 346311
  Synthetic oligonucleotide

SEQ ID NO: 555973 - DNA, 60 bp, Artificial; identical to SEQ ID NO: 346312
  Synthetic oligonucleotide

SEQ ID NO: 555974 - DNA, 60 bp, Artificial; identical to SEQ ID NO: 346314
  Synthetic oligonucleotide

SEQ ID NO: 555975 - DNA, 60 bp, Artificial; identical to SEQ ID NO: 346316
  Synthetic oligonucleotide

SEQ ID NO: 555976 - DNA, 59 bp, Artificial; identical to SEQ ID NO: 346324
  Synthetic oligonucleotide

SEQ ID NO: 555977 - DNA, 55 bp, Artificial; identical to SEQ ID NO: 346327
  Synthetic oligonucleotide

SEQ ID NO: 555978 - DNA, 54 bp, Artificial; identical to SEQ ID NO: 346328
  Synthetic oligonucleotide

SEQ ID NO: 555979 - DNA, 55 bp, Artificial; identical to SEQ ID NO: 346329
  Synthetic oligonucleotide

SEQ ID NO: 555980 - DNA, 60 bp, Artificial; identical to SEQ ID NO: 346330
  Synthetic oligonucleotide

SEQ ID NO: 555981 - DNA, 55 bp, Artificial; identical to SEQ ID NO: 346331
  Synthetic oligonucleotide

SEQ ID NO: 555982 - DNA, 60 bp, Artificial; identical to SEQ ID NO: 346333
  Synthetic oligonucleotide

SEQ ID NO: 555983 - DNA, 58 bp, Artificial; identical to SEQ ID NO: 346336
  Synthetic oligonucleotide

SEQ ID NO: 555984 - DNA, 60 bp, Artificial; identical to SEQ ID NO: 346337
  Synthetic oligonucleotide

SEQ ID NO: 555985 - DNA, 60 bp, Artificial; identical to SEQ ID NO: 346339
  Synthetic oligonucleotide

SEQ ID NO: 555986 - DNA, 55 bp, Artificial; identical to SEQ ID NO: 346340
  Synthetic oligonucleotide

SEQ ID NO: 555987 - DNA, 60 bp, Artificial; identical to SEQ ID NO: 346342
  Synthetic oligonucleotide

SEQ ID NO: 555988 - DNA, 55 bp, Artificial; identical to SEQ ID NO: 346343
  Synthetic oligonucleotide

SEQ ID NO: 555989 - DNA, 55 bp, Artificial; identical to SEQ ID NO: 7203
  Synthetic oligonucleotide

SEQ ID NO: 555990 - DNA, 60 bp, Artificial; identical to SEQ ID NO: 346344
  Synthetic oligonucleotide

SEQ ID NO: 555991 - DNA, 56 bp, Artificial; identical to SEQ ID NO: 346345
  Synthetic oligonucleotide

SEQ ID NO: 555992 - DNA, 60 bp, Artificial; identical to SEQ ID NO: 346346
  Synthetic oligonucleotide

SEQ ID NO: 555993 - DNA, 60 bp, Artificial; identical to SEQ ID NO: 346351
  Synthetic oligonucleotide

SEQ ID NO: 555994 - DNA, 60 bp, Artificial; identical to SEQ ID NO: 346352
  Synthetic oligonucleotide

SEQ ID NO: 555995 - DNA, 59 bp, Artificial; identical to SEQ ID NO: 346353
  Synthetic oligonucleotide

SEQ ID NO: 555996 - DNA, 60 bp, Artificial; identical to SEQ ID NO: 346354
  Synthetic oligonucleotide

SEQ ID NO: 555997 - DNA, 60 bp, Artificial; identical to SEQ ID NO: 346355
  Synthetic oligonucleotide

SEQ ID NO: 555998 - DNA, 57 bp, Artificial; identical to SEQ ID NO: 346356
  Synthetic oligonucleotide

SEQ ID NO: 555999 - DNA, 60 bp, Artificial; identical to SEQ ID NO: 346357
  Synthetic oligonucleotide

SEQ ID NO: 556000 - DNA, 60 bp, Artificial; identical to SEQ ID NO: 346360
  Synthetic oligonucleotide

SEQ ID NO: 556001 - DNA, 59 bp, Artificial; identical to SEQ ID NO: 346362
  Synthetic oligonucleotide

SEQ ID NO: 556002 - DNA, 55 bp, Artificial; identical to SEQ ID NO: 14966
  Synthetic oligonucleotide

SEQ ID NO: 556003 - DNA, 60 bp, Artificial; identical to SEQ ID NO: 346367
  Synthetic oligonucleotide

SEQ ID NO: 556004 - DNA, 60 bp, Artificial; identical to SEQ ID NO: 346369
  Synthetic oligonucleotide

SEQ ID NO: 556005 - DNA, 55 bp, Artificial; identical to SEQ ID NO: 346371
  Synthetic oligonucleotide

SEQ ID NO: 556006 - DNA, 51 bp, Artificial; identical to SEQ ID NO: 346372
  Synthetic oligonucleotide

SEQ ID NO: 556007 - DNA, 60 bp, Artificial; identical to SEQ ID NO: 346374
  Synthetic oligonucleotide

SEQ ID NO: 556008 - DNA, 55 bp, Artificial; identical to SEQ ID NO: 346377
  Synthetic oligonucleotide

SEQ ID NO: 556009 - DNA, 55 bp, Artificial; identical to SEQ ID NO: 346378
  Synthetic oligonucleotide

SEQ ID NO: 556010 - DNA, 55 bp, Artificial; identical to SEQ ID NO: 346382
  Synthetic oligonucleotide

SEQ ID NO: 556011 - DNA, 55 bp, Artificial; identical to SEQ ID NO: 346385
  Synthetic oligonucleotide

SEQ ID NO: 556012 - DNA, 60 bp, Artificial; identical to SEQ ID NO: 346386
  Synthetic oligonucleotide

SEQ ID NO: 556013 - DNA, 55 bp, Artificial; identical to SEQ ID NO: 346391
  Synthetic oligonucleotide

SEQ ID NO: 556014 - DNA, 60 bp, Artificial; identical to SEQ ID NO: 346396
  Synthetic oligonucleotide

SEQ ID NO: 556015 - DNA, 58 bp, Artificial; identical to SEQ ID NO: 346397
  Synthetic oligonucleotide

SEQ ID NO: 556016 - DNA, 60 bp, Artificial; identical to SEQ ID NO: 346402
  Synthetic oligonucleotide

SEQ ID NO: 556017 - DNA, 55 bp, Artificial; identical to SEQ ID NO: 346403
  Synthetic oligonucleotide

SEQ ID NO: 556018 - DNA, 59 bp, Artificial; identical to SEQ ID NO: 346406
  Synthetic oligonucleotide

SEQ ID NO: 556019 - DNA, 55 bp, Artificial; identical to SEQ ID NO: 346407
  Synthetic oligonucleotide

SEQ ID NO: 556020 - DNA, 59 bp, Artificial; identical to SEQ ID NO: 346410
  Synthetic oligonucleotide

SEQ ID NO: 556021 - DNA, 51 bp, Artificial; identical to SEQ ID NO: 346412
  Synthetic oligonucleotide

SEQ ID NO: 556022 - DNA, 56 bp, Artificial; identical to SEQ ID NO: 346415
  Synthetic oligonucleotide

SEQ ID NO: 556023 - DNA, 55 bp, Artificial; identical to SEQ ID NO: 346419
  Synthetic oligonucleotide

SEQ ID NO: 556024 - DNA, 54 bp, Artificial; identical to SEQ ID NO: 15483
  Synthetic oligonucleotide

SEQ ID NO: 556025 - DNA, 57 bp, Artificial; identical to SEQ ID NO: 346420
  Synthetic oligonucleotide

SEQ ID NO: 556026 - DNA, 53 bp, Artificial; identical to SEQ ID NO: 346422
  Synthetic oligonucleotide

SEQ ID NO: 556027 - DNA, 59 bp, Artificial; identical to SEQ ID NO: 17543
  Synthetic oligonucleotide

SEQ ID NO: 556028 - DNA, 59 bp, Artificial; identical to SEQ ID NO: 346430
  Synthetic oligonucleotide

SEQ ID NO: 556029 - DNA, 60 bp, Artificial; identical to SEQ ID NO: 12309
  Synthetic oligonucleotide

SEQ ID NO: 556030 - DNA, 55 bp, Artificial; identical to SEQ ID NO: 346432
  Synthetic oligonucleotide

SEQ ID NO: 556031 - DNA, 56 bp, Artificial; identical to SEQ ID NO: 20082
  Synthetic oligonucleotide

SEQ ID NO: 556032 - DNA, 50 bp, Artificial; identical to SEQ ID NO: 15403
  Synthetic oligonucleotide

SEQ ID NO: 556033 - DNA, 55 bp, Artificial; identical to SEQ ID NO: 346433
  Synthetic oligonucleotide

SEQ ID NO: 556034 - DNA, 60 bp, Artificial; identical to SEQ ID NO: 346436
  Synthetic oligonucleotide

SEQ ID NO: 556035 - DNA, 55 bp, Artificial; identical to SEQ ID NO: 346437
  Synthetic oligonucleotide

SEQ ID NO: 556036 - DNA, 60 bp, Artificial; identical to SEQ ID NO: 346439
  Synthetic oligonucleotide

SEQ ID NO: 556037 - DNA, 60 bp, Artificial; identical to SEQ ID NO: 9717
  Synthetic oligonucleotide

SEQ ID NO: 556038 - DNA, 56 bp, Artificial; identical to SEQ ID NO: 346444
  Synthetic oligonucleotide

SEQ ID NO: 556039 - DNA, 58 bp, Artificial; identical to SEQ ID NO: 346451
  Synthetic oligonucleotide

SEQ ID NO: 556040 - DNA, 58 bp, Artificial; identical to SEQ ID NO: 346453
  Synthetic oligonucleotide

SEQ ID NO: 556041 - DNA, 55 bp, Artificial; identical to SEQ ID NO: 346454
  Synthetic oligonucleotide

SEQ ID NO: 556042 - DNA, 60 bp, Artificial; identical to SEQ ID NO: 346457
  Synthetic oligonucleotide

SEQ ID NO: 556043 - DNA, 55 bp, Artificial; identical to SEQ ID NO: 346458
  Synthetic oligonucleotide

SEQ ID NO: 556044 - DNA, 60 bp, Artificial; identical to SEQ ID NO: 346463
  Synthetic oligonucleotide

SEQ ID NO: 556045 - DNA, 53 bp, Artificial; identical to SEQ ID NO: 346464
  Synthetic oligonucleotide

SEQ ID NO: 556046 - DNA, 55 bp, Artificial; identical to SEQ ID NO: 346470
  Synthetic oligonucleotide

SEQ ID NO: 556047 - DNA, 60 bp, Artificial; identical to SEQ ID NO: 346471
  Synthetic oligonucleotide

SEQ ID NO: 556048 - DNA, 58 bp, Artificial; identical to SEQ ID NO: 346472
  Synthetic oligonucleotide

SEQ ID NO: 556049 - DNA, 60 bp, Artificial; identical to SEQ ID NO: 346473
  Synthetic oligonucleotide

SEQ ID NO: 556050 - DNA, 57 bp, Artificial; identical to SEQ ID NO: 346474
  Synthetic oligonucleotide

SEQ ID NO: 556051 - DNA, 60 bp, Artificial; identical to SEQ ID NO: 346477
  Synthetic oligonucleotide

SEQ ID NO: 556052 - DNA, 60 bp, Artificial; identical to SEQ ID NO: 346480
  Synthetic oligonucleotide

SEQ ID NO: 556053 - DNA, 55 bp, Artificial; identical to SEQ ID NO: 346484
  Synthetic oligonucleotide

SEQ ID NO: 556054 - DNA, 59 bp, Artificial; identical to SEQ ID NO: 346485
  Synthetic oligonucleotide

SEQ ID NO: 556055 - DNA, 59 bp, Artificial; identical to SEQ ID NO: 346488
  Synthetic oligonucleotide

SEQ ID NO: 556056 - DNA, 53 bp, Artificial; identical to SEQ ID NO: 346493
  Synthetic oligonucleotide

SEQ ID NO: 556057 - DNA, 60 bp, Artificial; identical to SEQ ID NO: 346496
  Synthetic oligonucleotide

SEQ ID NO: 556058 - DNA, 60 bp, Artificial; identical to SEQ ID NO: 346497
  Synthetic oligonucleotide

SEQ ID NO: 556059 - DNA, 60 bp, Artificial; identical to SEQ ID NO: 346498
  Synthetic oligonucleotide

SEQ ID NO: 556060 - DNA, 60 bp, Artificial; identical to SEQ ID NO: 346501
  Synthetic oligonucleotide

SEQ ID NO: 556061 - DNA, 50 bp, Artificial; identical to SEQ ID NO: 346503
  Synthetic oligonucleotide

SEQ ID NO: 556062 - DNA, 60 bp, Artificial; identical to SEQ ID NO: 346504
  Synthetic oligonucleotide

SEQ ID NO: 556063 - DNA, 55 bp, Artificial; identical to SEQ ID NO: 346507
  Synthetic oligonucleotide

SEQ ID NO: 556064 - DNA, 60 bp, Artificial; identical to SEQ ID NO: 346509
  Synthetic oligonucleotide

SEQ ID NO: 556065 - DNA, 53 bp, Artificial; identical to SEQ ID NO: 346510
  Synthetic oligonucleotide

SEQ ID NO: 556066 - DNA, 53 bp, Artificial; identical to SEQ ID NO: 346514
  Synthetic oligonucleotide

SEQ ID NO: 556067 - DNA, 55 bp, Artificial; identical to SEQ ID NO: 346518
  Synthetic oligonucleotide

SEQ ID NO: 556068 - DNA, 58 bp, Artificial; identical to SEQ ID NO: 346520
  Synthetic oligonucleotide

SEQ ID NO: 556069 - DNA, 60 bp, Artificial; identical to SEQ ID NO: 346521
  Synthetic oligonucleotide

SEQ ID NO: 556070 - DNA, 60 bp, Artificial; identical to SEQ ID NO: 346522
  Synthetic oligonucleotide

SEQ ID NO: 556071 - DNA, 60 bp, Artificial; identical to SEQ ID NO: 346523
  Synthetic oligonucleotide

SEQ ID NO: 556072 - DNA, 55 bp, Artificial; identical to SEQ ID NO: 346526
  Synthetic oligonucleotide

SEQ ID NO: 556073 - DNA, 60 bp, Artificial; identical to SEQ ID NO: 346527
  Synthetic oligonucleotide

SEQ ID NO: 556074 - DNA, 55 bp, Artificial; identical to SEQ ID NO: 346528
  Synthetic oligonucleotide

SEQ ID NO: 556075 - DNA, 55 bp, Artificial; identical to SEQ ID NO: 346529
  Synthetic oligonucleotide

SEQ ID NO: 556076 - DNA, 57 bp, Artificial; identical to SEQ ID NO: 346531
  Synthetic oligonucleotide

SEQ ID NO: 556077 - DNA, 55 bp, Artificial; identical to SEQ ID NO: 346534
  Synthetic oligonucleotide

SEQ ID NO: 556078 - DNA, 54 bp, Artificial; identical to SEQ ID NO: 346535
  Synthetic oligonucleotide

SEQ ID NO: 556079 - DNA, 55 bp, Artificial; identical to SEQ ID NO: 346538
  Synthetic oligonucleotide

SEQ ID NO: 556080 - DNA, 55 bp, Artificial; identical to SEQ ID NO: 346545
  Synthetic oligonucleotide

SEQ ID NO: 556081 - DNA, 60 bp, Artificial; identical to SEQ ID NO: 346547
  Synthetic oligonucleotide

SEQ ID NO: 556082 - DNA, 55 bp, Artificial; identical to SEQ ID NO: 346549
  Synthetic oligonucleotide

SEQ ID NO: 556083 - DNA, 60 bp, Artificial; identical to SEQ ID NO: 15361
  Synthetic oligonucleotide

SEQ ID NO: 556084 - DNA, 57 bp, Artificial; identical to SEQ ID NO: 346554
  Synthetic oligonucleotide

SEQ ID NO: 556085 - DNA, 60 bp, Artificial; identical to SEQ ID NO: 346555
  Synthetic oligonucleotide

SEQ ID NO: 556086 - DNA, 58 bp, Artificial; identical to SEQ ID NO: 346558
  Synthetic oligonucleotide

SEQ ID NO: 556087 - DNA, 60 bp, Artificial; identical to SEQ ID NO: 346564
  Synthetic oligonucleotide

SEQ ID NO: 556088 - DNA, 60 bp, Artificial; identical to SEQ ID NO: 346571
  Synthetic oligonucleotide

SEQ ID NO: 556089 - DNA, 55 bp, Artificial; identical to SEQ ID NO: 346572
  Synthetic oligonucleotide

SEQ ID NO: 556090 - DNA, 55 bp, Artificial; identical to SEQ ID NO: 346578
  Synthetic oligonucleotide

SEQ ID NO: 556091 - DNA, 55 bp, Artificial; identical to SEQ ID NO: 346579
  Synthetic oligonucleotide

SEQ ID NO: 556092 - DNA, 52 bp, Artificial; identical to SEQ ID NO: 346580
  Synthetic oligonucleotide

SEQ ID NO: 556093 - DNA, 55 bp, Artificial; identical to SEQ ID NO: 346581
  Synthetic oligonucleotide

SEQ ID NO: 556094 - DNA, 60 bp, Artificial; identical to SEQ ID NO: 346582
  Synthetic oligonucleotide

SEQ ID NO: 556095 - DNA, 55 bp, Artificial; identical to SEQ ID NO: 346584
  Synthetic oligonucleotide

SEQ ID NO: 556096 - DNA, 60 bp, Artificial; identical to SEQ ID NO: 346585
  Synthetic oligonucleotide

SEQ ID NO: 556097 - DNA, 60 bp, Artificial; identical to SEQ ID NO: 346587
  Synthetic oligonucleotide

SEQ ID NO: 556098 - DNA, 58 bp, Artificial; identical to SEQ ID NO: 346588
  Synthetic oligonucleotide

SEQ ID NO: 556099 - DNA, 60 bp, Artificial; identical to SEQ ID NO: 10376
  Synthetic oligonucleotide

SEQ ID NO: 556100 - DNA, 59 bp, Artificial; identical to SEQ ID NO: 346591
  Synthetic oligonucleotide

SEQ ID NO: 556101 - DNA, 55 bp, Artificial; identical to SEQ ID NO: 346593
  Synthetic oligonucleotide

SEQ ID NO: 556102 - DNA, 60 bp, Artificial; identical to SEQ ID NO: 11398
  Synthetic oligonucleotide

SEQ ID NO: 556103 - DNA, 58 bp, Artificial; identical to SEQ ID NO: 346594
  Synthetic oligonucleotide

SEQ ID NO: 556104 - DNA, 52 bp, Artificial; identical to SEQ ID NO: 346596
  Synthetic oligonucleotide

SEQ ID NO: 556105 - DNA, 55 bp, Artificial; identical to SEQ ID NO: 346599
  Synthetic oligonucleotide

SEQ ID NO: 556106 - DNA, 58 bp, Artificial; identical to SEQ ID NO: 346600
  Synthetic oligonucleotide

SEQ ID NO: 556107 - DNA, 57 bp, Artificial; identical to SEQ ID NO: 346605
  Synthetic oligonucleotide

SEQ ID NO: 556108 - DNA, 55 bp, Artificial; identical to SEQ ID NO: 346609
  Synthetic oligonucleotide

SEQ ID NO: 556109 - DNA, 55 bp, Artificial; identical to SEQ ID NO: 346614
  Synthetic oligonucleotide

SEQ ID NO: 556110 - DNA, 59 bp, Artificial; identical to SEQ ID NO: 346615
  Synthetic oligonucleotide

SEQ ID NO: 556111 - DNA, 56 bp, Artificial; identical to SEQ ID NO: 346616
  Synthetic oligonucleotide

SEQ ID NO: 556112 - DNA, 53 bp, Artificial; identical to SEQ ID NO: 346617
  Synthetic oligonucleotide

SEQ ID NO: 556113 - DNA, 55 bp, Artificial; identical to SEQ ID NO: 346619
  Synthetic oligonucleotide

SEQ ID NO: 556114 - DNA, 55 bp, Artificial; identical to SEQ ID NO: 346620
  Synthetic oligonucleotide

SEQ ID NO: 556115 - DNA, 60 bp, Artificial; identical to SEQ ID NO: 346622
  Synthetic oligonucleotide

SEQ ID NO: 556116 - DNA, 52 bp, Artificial; identical to SEQ ID NO: 346627
  Synthetic oligonucleotide

SEQ ID NO: 556117 - DNA, 60 bp, Artificial; identical to SEQ ID NO: 346628
  Synthetic oligonucleotide

SEQ ID NO: 556118 - DNA, 54 bp, Artificial; identical to SEQ ID NO: 346629
  Synthetic oligonucleotide

SEQ ID NO: 556119 - DNA, 53 bp, Artificial; identical to SEQ ID NO: 346630
  Synthetic oligonucleotide

SEQ ID NO: 556120 - DNA, 55 bp, Artificial; identical to SEQ ID NO: 20443
  Synthetic oligonucleotide

SEQ ID NO: 556121 - DNA, 56 bp, Artificial; identical to SEQ ID NO: 346632
  Synthetic oligonucleotide

SEQ ID NO: 556122 - DNA, 55 bp, Artificial; identical to SEQ ID NO: 346633
  Synthetic oligonucleotide

SEQ ID NO: 556123 - DNA, 58 bp, Artificial; identical to SEQ ID NO: 346637
  Synthetic oligonucleotide

SEQ ID NO: 556124 - DNA, 60 bp, Artificial; identical to SEQ ID NO: 346641
  Synthetic oligonucleotide

SEQ ID NO: 556125 - DNA, 60 bp, Artificial; identical to SEQ ID NO: 15636
  Synthetic oligonucleotide

SEQ ID NO: 556126 - DNA, 58 bp, Artificial; identical to SEQ ID NO: 346643
  Synthetic oligonucleotide

SEQ ID NO: 556127 - DNA, 55 bp, Artificial; identical to SEQ ID NO: 346647
  Synthetic oligonucleotide

SEQ ID NO: 556128 - DNA, 51 bp, Artificial; identical to SEQ ID NO: 346648
  Synthetic oligonucleotide

SEQ ID NO: 556129 - DNA, 55 bp, Artificial; identical to SEQ ID NO: 346649
  Synthetic oligonucleotide

SEQ ID NO: 556130 - DNA, 56 bp, Artificial; identical to SEQ ID NO: 346658
  Synthetic oligonucleotide

SEQ ID NO: 556131 - DNA, 60 bp, Artificial; identical to SEQ ID NO: 346660
  Synthetic oligonucleotide

SEQ ID NO: 556132 - DNA, 60 bp, Artificial; identical to SEQ ID NO: 346662
  Synthetic oligonucleotide

SEQ ID NO: 556133 - DNA, 54 bp, Artificial; identical to SEQ ID NO: 346663
  Synthetic oligonucleotide

SEQ ID NO: 556134 - DNA, 55 bp, Artificial; identical to SEQ ID NO: 346674
  Synthetic oligonucleotide

SEQ ID NO: 556135 - DNA, 60 bp, Artificial; identical to SEQ ID NO: 346676
  Synthetic oligonucleotide

SEQ ID NO: 556136 - DNA, 55 bp, Artificial; identical to SEQ ID NO: 346677
  Synthetic oligonucleotide

SEQ ID NO: 556137 - DNA, 60 bp, Artificial; identical to SEQ ID NO: 346678
  Synthetic oligonucleotide

SEQ ID NO: 556138 - DNA, 60 bp, Artificial; identical to SEQ ID NO: 346680
  Synthetic oligonucleotide

SEQ ID NO: 556139 - DNA, 55 bp, Artificial; identical to SEQ ID NO: 346682
  Synthetic oligonucleotide

SEQ ID NO: 556140 - DNA, 55 bp, Artificial; identical to SEQ ID NO: 346683
  Synthetic oligonucleotide

SEQ ID NO: 556141 - DNA, 51 bp, Artificial; identical to SEQ ID NO: 346686
  Synthetic oligonucleotide

SEQ ID NO: 556142 - DNA, 60 bp, Artificial; identical to SEQ ID NO: 346689
  Synthetic oligonucleotide

SEQ ID NO: 556143 - DNA, 55 bp, Artificial; identical to SEQ ID NO: 346690
  Synthetic oligonucleotide

SEQ ID NO: 556144 - DNA, 59 bp, Artificial; identical to SEQ ID NO: 17895
  Synthetic oligonucleotide

SEQ ID NO: 556145 - DNA, 57 bp, Artificial; identical to SEQ ID NO: 346698
  Synthetic oligonucleotide

SEQ ID NO: 556146 - DNA, 60 bp, Artificial; identical to SEQ ID NO: 346699
  Synthetic oligonucleotide

SEQ ID NO: 556147 - DNA, 60 bp, Artificial; identical to SEQ ID NO: 346700
  Synthetic oligonucleotide

SEQ ID NO: 556148 - DNA, 60 bp, Artificial; identical to SEQ ID NO: 346701
  Synthetic oligonucleotide

SEQ ID NO: 556149 - DNA, 59 bp, Artificial; identical to SEQ ID NO: 346703
  Synthetic oligonucleotide

SEQ ID NO: 556150 - DNA, 60 bp, Artificial; identical to SEQ ID NO: 346707
  Synthetic oligonucleotide

SEQ ID NO: 556151 - DNA, 56 bp, Artificial; identical to SEQ ID NO: 346708
  Synthetic oligonucleotide

SEQ ID NO: 556152 - DNA, 55 bp, Artificial; identical to SEQ ID NO: 346709
  Synthetic oligonucleotide

SEQ ID NO: 556153 - DNA, 53 bp, Artificial; identical to SEQ ID NO: 346710
  Synthetic oligonucleotide

SEQ ID NO: 556154 - DNA, 60 bp, Artificial; identical to SEQ ID NO: 346713
  Synthetic oligonucleotide

SEQ ID NO: 556155 - DNA, 55 bp, Artificial; identical to SEQ ID NO: 346714
  Synthetic oligonucleotide

SEQ ID NO: 556156 - DNA, 55 bp, Artificial; identical to SEQ ID NO: 346715
  Synthetic oligonucleotide

SEQ ID NO: 556157 - DNA, 55 bp, Artificial; identical to SEQ ID NO: 346717
  Synthetic oligonucleotide

SEQ ID NO: 556158 - DNA, 55 bp, Artificial; identical to SEQ ID NO: 346718
  Synthetic oligonucleotide

SEQ ID NO: 556159 - DNA, 58 bp, Artificial; identical to SEQ ID NO: 19777
  Synthetic oligonucleotide

SEQ ID NO: 556160 - DNA, 60 bp, Artificial; identical to SEQ ID NO: 7929
  Synthetic oligonucleotide

SEQ ID NO: 556161 - DNA, 60 bp, Artificial; identical to SEQ ID NO: 346724
  Synthetic oligonucleotide

SEQ ID NO: 556162 - DNA, 59 bp, Artificial; identical to SEQ ID NO: 346725
  Synthetic oligonucleotide

SEQ ID NO: 556163 - DNA, 51 bp, Artificial; identical to SEQ ID NO: 346727
  Synthetic oligonucleotide

SEQ ID NO: 556164 - DNA, 54 bp, Artificial; identical to SEQ ID NO: 346729
  Synthetic oligonucleotide

SEQ ID NO: 556165 - DNA, 60 bp, Artificial; identical to SEQ ID NO: 346730
  Synthetic oligonucleotide

SEQ ID NO: 556166 - DNA, 60 bp, Artificial; identical to SEQ ID NO: 346731
  Synthetic oligonucleotide

SEQ ID NO: 556167 - DNA, 60 bp, Artificial; identical to SEQ ID NO: 11548
  Synthetic oligonucleotide

SEQ ID NO: 556168 - DNA, 56 bp, Artificial; identical to SEQ ID NO: 346734
  Synthetic oligonucleotide

SEQ ID NO: 556169 - DNA, 53 bp, Artificial; identical to SEQ ID NO: 346737
  Synthetic oligonucleotide

SEQ ID NO: 556170 - DNA, 58 bp, Artificial; identical to SEQ ID NO: 346738
  Synthetic oligonucleotide

SEQ ID NO: 556171 - DNA, 58 bp, Artificial; identical to SEQ ID NO: 346743
  Synthetic oligonucleotide

SEQ ID NO: 556172 - DNA, 60 bp, Artificial; identical to SEQ ID NO: 346744
  Synthetic oligonucleotide

SEQ ID NO: 556173 - DNA, 58 bp, Artificial; identical to SEQ ID NO: 346746
  Synthetic oligonucleotide

SEQ ID NO: 556174 - DNA, 60 bp, Artificial; identical to SEQ ID NO: 346748
  Synthetic oligonucleotide

SEQ ID NO: 556175 - DNA, 54 bp, Artificial; identical to SEQ ID NO: 346750
  Synthetic oligonucleotide

SEQ ID NO: 556176 - DNA, 55 bp, Artificial; identical to SEQ ID NO: 346751
  Synthetic oligonucleotide

SEQ ID NO: 556177 - DNA, 60 bp, Artificial; identical to SEQ ID NO: 346753
  Synthetic oligonucleotide

SEQ ID NO: 556178 - DNA, 60 bp, Artificial; identical to SEQ ID NO: 346755
  Synthetic oligonucleotide

SEQ ID NO: 556179 - DNA, 60 bp, Artificial; identical to SEQ ID NO: 346759
  Synthetic oligonucleotide

SEQ ID NO: 556180 - DNA, 60 bp, Artificial; identical to SEQ ID NO: 346760
  Synthetic oligonucleotide

SEQ ID NO: 556181 - DNA, 57 bp, Artificial; identical to SEQ ID NO: 16830
  Synthetic oligonucleotide

SEQ ID NO: 556182 - DNA, 56 bp, Artificial; identical to SEQ ID NO: 346762
  Synthetic oligonucleotide

SEQ ID NO: 556183 - DNA, 60 bp, Artificial; identical to SEQ ID NO: 346763
  Synthetic oligonucleotide

SEQ ID NO: 556184 - DNA, 55 bp, Artificial; identical to SEQ ID NO: 346765
  Synthetic oligonucleotide

SEQ ID NO: 556185 - DNA, 55 bp, Artificial; identical to SEQ ID NO: 346767
  Synthetic oligonucleotide

SEQ ID NO: 556186 - DNA, 60 bp, Artificial; identical to SEQ ID NO: 346768
  Synthetic oligonucleotide

SEQ ID NO: 556187 - DNA, 59 bp, Artificial; identical to SEQ ID NO: 346774
  Synthetic oligonucleotide

SEQ ID NO: 556188 - DNA, 55 bp, Artificial; identical to SEQ ID NO: 346775
  Synthetic oligonucleotide

SEQ ID NO: 556189 - DNA, 53 bp, Artificial; identical to SEQ ID NO: 346776
  Synthetic oligonucleotide

SEQ ID NO: 556190 - DNA, 55 bp, Artificial; identical to SEQ ID NO: 346779
  Synthetic oligonucleotide

SEQ ID NO: 556191 - DNA, 55 bp, Artificial; identical to SEQ ID NO: 346783
  Synthetic oligonucleotide

SEQ ID NO: 556192 - DNA, 60 bp, Artificial; identical to SEQ ID NO: 346784
  Synthetic oligonucleotide

SEQ ID NO: 556193 - DNA, 55 bp, Artificial; identical to SEQ ID NO: 346787
  Synthetic oligonucleotide

SEQ ID NO: 556194 - DNA, 55 bp, Artificial; identical to SEQ ID NO: 346797
  Synthetic oligonucleotide

SEQ ID NO: 556195 - DNA, 59 bp, Artificial; identical to SEQ ID NO: 346798
  Synthetic oligonucleotide

SEQ ID NO: 556196 - DNA, 60 bp, Artificial; identical to SEQ ID NO: 346802
  Synthetic oligonucleotide

SEQ ID NO: 556197 - DNA, 55 bp, Artificial; identical to SEQ ID NO: 346804
  Synthetic oligonucleotide

SEQ ID NO: 556198 - DNA, 60 bp, Artificial; identical to SEQ ID NO: 346805
  Synthetic oligonucleotide

SEQ ID NO: 556199 - DNA, 55 bp, Artificial; identical to SEQ ID NO: 346806
  Synthetic oligonucleotide

SEQ ID NO: 556200 - DNA, 60 bp, Artificial; identical to SEQ ID NO: 346808
  Synthetic oligonucleotide

SEQ ID NO: 556201 - DNA, 60 bp, Artificial; identical to SEQ ID NO: 346809
  Synthetic oligonucleotide

SEQ ID NO: 556202 - DNA, 55 bp, Artificial; identical to SEQ ID NO: 346811
  Synthetic oligonucleotide

SEQ ID NO: 556203 - DNA, 54 bp, Artificial; identical to SEQ ID NO: 346812
  Synthetic oligonucleotide

SEQ ID NO: 556204 - DNA, 58 bp, Artificial; identical to SEQ ID NO: 346821
  Synthetic oligonucleotide

SEQ ID NO: 556205 - DNA, 55 bp, Artificial; identical to SEQ ID NO: 346823
  Synthetic oligonucleotide

SEQ ID NO: 556206 - DNA, 55 bp, Artificial; identical to SEQ ID NO: 346828
  Synthetic oligonucleotide

SEQ ID NO: 556207 - DNA, 60 bp, Artificial; identical to SEQ ID NO: 346829
  Synthetic oligonucleotide

SEQ ID NO: 556208 - DNA, 52 bp, Artificial; identical to SEQ ID NO: 346830
  Synthetic oligonucleotide

SEQ ID NO: 556209 - DNA, 55 bp, Artificial; identical to SEQ ID NO: 14722
  Synthetic oligonucleotide

SEQ ID NO: 556210 - DNA, 55 bp, Artificial; identical to SEQ ID NO: 346833
  Synthetic oligonucleotide

SEQ ID NO: 556211 - DNA, 55 bp, Artificial; identical to SEQ ID NO: 346836
  Synthetic oligonucleotide

SEQ ID NO: 556212 - DNA, 56 bp, Artificial; identical to SEQ ID NO: 346837
  Synthetic oligonucleotide

SEQ ID NO: 556213 - DNA, 55 bp, Artificial; identical to SEQ ID NO: 346838
  Synthetic oligonucleotide

SEQ ID NO: 556214 - DNA, 55 bp, Artificial; identical to SEQ ID NO: 346839
  Synthetic oligonucleotide

SEQ ID NO: 556215 - DNA, 56 bp, Artificial; identical to SEQ ID NO: 346840
  Synthetic oligonucleotide

SEQ ID NO: 556216 - DNA, 55 bp, Artificial; identical to SEQ ID NO: 346842
  Synthetic oligonucleotide

SEQ ID NO: 556217 - DNA, 60 bp, Artificial; identical to SEQ ID NO: 346847
  Synthetic oligonucleotide

SEQ ID NO: 556218 - DNA, 60 bp, Artificial; identical to SEQ ID NO: 7364
  Synthetic oligonucleotide

SEQ ID NO: 556219 - DNA, 60 bp, Artificial; identical to SEQ ID NO: 346851
  Synthetic oligonucleotide

SEQ ID NO: 556220 - DNA, 59 bp, Artificial; identical to SEQ ID NO: 346852
  Synthetic oligonucleotide

SEQ ID NO: 556221 - DNA, 55 bp, Artificial; identical to SEQ ID NO: 346854
  Synthetic oligonucleotide

SEQ ID NO: 556222 - DNA, 60 bp, Artificial; identical to SEQ ID NO: 346860
  Synthetic oligonucleotide

SEQ ID NO: 556223 - DNA, 59 bp, Artificial; identical to SEQ ID NO: 346863
  Synthetic oligonucleotide

SEQ ID NO: 556224 - DNA, 55 bp, Artificial; identical to SEQ ID NO: 346865
  Synthetic oligonucleotide

SEQ ID NO: 556225 - DNA, 56 bp, Artificial; identical to SEQ ID NO: 346866
  Synthetic oligonucleotide

SEQ ID NO: 556226 - DNA, 55 bp, Artificial; identical to SEQ ID NO: 346867
  Synthetic oligonucleotide

SEQ ID NO: 556227 - DNA, 60 bp, Artificial; identical to SEQ ID NO: 346868
  Synthetic oligonucleotide

SEQ ID NO: 556228 - DNA, 60 bp, Artificial; identical to SEQ ID NO: 346871
  Synthetic oligonucleotide

SEQ ID NO: 556229 - DNA, 55 bp, Artificial; identical to SEQ ID NO: 346872
  Synthetic oligonucleotide

SEQ ID NO: 556230 - DNA, 55 bp, Artificial; identical to SEQ ID NO: 346873
  Synthetic oligonucleotide

SEQ ID NO: 556231 - DNA, 60 bp, Artificial; identical to SEQ ID NO: 346876
  Synthetic oligonucleotide

SEQ ID NO: 556232 - DNA, 51 bp, Artificial; identical to SEQ ID NO: 346880
  Synthetic oligonucleotide

SEQ ID NO: 556233 - DNA, 55 bp, Artificial; identical to SEQ ID NO: 346881
  Synthetic oligonucleotide

SEQ ID NO: 556234 - DNA, 55 bp, Artificial; identical to SEQ ID NO: 346882
  Synthetic oligonucleotide

SEQ ID NO: 556235 - DNA, 55 bp, Artificial; identical to SEQ ID NO: 346883
  Synthetic oligonucleotide

SEQ ID NO: 556236 - DNA, 55 bp, Artificial; identical to SEQ ID NO: 346886
  Synthetic oligonucleotide

SEQ ID NO: 556237 - DNA, 59 bp, Artificial; identical to SEQ ID NO: 346889
  Synthetic oligonucleotide

SEQ ID NO: 556238 - DNA, 55 bp, Artificial; identical to SEQ ID NO: 346890
  Synthetic oligonucleotide

SEQ ID NO: 556239 - DNA, 60 bp, Artificial; identical to SEQ ID NO: 346891
  Synthetic oligonucleotide

SEQ ID NO: 556240 - DNA, 55 bp, Artificial; identical to SEQ ID NO: 346893
  Synthetic oligonucleotide

SEQ ID NO: 556241 - DNA, 58 bp, Artificial; identical to SEQ ID NO: 346896
  Synthetic oligonucleotide

SEQ ID NO: 556242 - DNA, 60 bp, Artificial; identical to SEQ ID NO: 346897
  Synthetic oligonucleotide

SEQ ID NO: 556243 - DNA, 55 bp, Artificial; identical to SEQ ID NO: 346900
  Synthetic oligonucleotide

SEQ ID NO: 556244 - DNA, 60 bp, Artificial; identical to SEQ ID NO: 346902
  Synthetic oligonucleotide

SEQ ID NO: 556245 - DNA, 56 bp, Artificial; identical to SEQ ID NO: 346904
  Synthetic oligonucleotide

SEQ ID NO: 556246 - DNA, 55 bp, Artificial; identical to SEQ ID NO: 346905
  Synthetic oligonucleotide

SEQ ID NO: 556247 - DNA, 60 bp, Artificial; identical to SEQ ID NO: 346907
  Synthetic oligonucleotide

SEQ ID NO: 556248 - DNA, 55 bp, Artificial; identical to SEQ ID NO: 346908
  Synthetic oligonucleotide

SEQ ID NO: 556249 - DNA, 59 bp, Artificial; identical to SEQ ID NO: 346911
  Synthetic oligonucleotide

SEQ ID NO: 556250 - DNA, 60 bp, Artificial; identical to SEQ ID NO: 346913
  Synthetic oligonucleotide

SEQ ID NO: 556251 - DNA, 56 bp, Artificial; identical to SEQ ID NO: 346916
  Synthetic oligonucleotide

SEQ ID NO: 556252 - DNA, 60 bp, Artificial; identical to SEQ ID NO: 346917
  Synthetic oligonucleotide

SEQ ID NO: 556253 - DNA, 54 bp, Artificial; identical to SEQ ID NO: 346918
  Synthetic oligonucleotide

SEQ ID NO: 556254 - DNA, 50 bp, Artificial; identical to SEQ ID NO: 346919
  Synthetic oligonucleotide

SEQ ID NO: 556255 - DNA, 55 bp, Artificial; identical to SEQ ID NO: 346920
  Synthetic oligonucleotide

SEQ ID NO: 556256 - DNA, 55 bp, Artificial; identical to SEQ ID NO: 346921
  Synthetic oligonucleotide

SEQ ID NO: 556257 - DNA, 60 bp, Artificial; identical to SEQ ID NO: 346922
  Synthetic oligonucleotide

SEQ ID NO: 556258 - DNA, 57 bp, Artificial; identical to SEQ ID NO: 346923
  Synthetic oligonucleotide

SEQ ID NO: 556259 - DNA, 54 bp, Artificial; identical to SEQ ID NO: 346924
  Synthetic oligonucleotide

SEQ ID NO: 556260 - DNA, 60 bp, Artificial; identical to SEQ ID NO: 346925
  Synthetic oligonucleotide

SEQ ID NO: 556261 - DNA, 55 bp, Artificial; identical to SEQ ID NO: 346927
  Synthetic oligonucleotide

SEQ ID NO: 556262 - DNA, 59 bp, Artificial; identical to SEQ ID NO: 346930
  Synthetic oligonucleotide

SEQ ID NO: 556263 - DNA, 58 bp, Artificial; identical to SEQ ID NO: 346932
  Synthetic oligonucleotide

SEQ ID NO: 556264 - DNA, 56 bp, Artificial; identical to SEQ ID NO: 346934
  Synthetic oligonucleotide

SEQ ID NO: 556265 - DNA, 55 bp, Artificial; identical to SEQ ID NO: 346935
  Synthetic oligonucleotide

SEQ ID NO: 556266 - DNA, 55 bp, Artificial; identical to SEQ ID NO: 346936
  Synthetic oligonucleotide

SEQ ID NO: 556267 - DNA, 60 bp, Artificial; identical to SEQ ID NO: 346937
  Synthetic oligonucleotide

SEQ ID NO: 556268 - DNA, 60 bp, Artificial; identical to SEQ ID NO: 346938
  Synthetic oligonucleotide

SEQ ID NO: 556269 - DNA, 59 bp, Artificial; identical to SEQ ID NO: 346941
  Synthetic oligonucleotide

SEQ ID NO: 556270 - DNA, 56 bp, Artificial; identical to SEQ ID NO: 346943
  Synthetic oligonucleotide

SEQ ID NO: 556271 - DNA, 55 bp, Artificial; identical to SEQ ID NO: 346945
  Synthetic oligonucleotide

SEQ ID NO: 556272 - DNA, 55 bp, Artificial; identical to SEQ ID NO: 346947
  Synthetic oligonucleotide

SEQ ID NO: 556273 - DNA, 55 bp, Artificial; identical to SEQ ID NO: 346948
  Synthetic oligonucleotide

SEQ ID NO: 556274 - DNA, 55 bp, Artificial; identical to SEQ ID NO: 346951
  Synthetic oligonucleotide

SEQ ID NO: 556275 - DNA, 55 bp, Artificial; identical to SEQ ID NO: 346953
  Synthetic oligonucleotide

SEQ ID NO: 556276 - DNA, 57 bp, Artificial; identical to SEQ ID NO: 346957
  Synthetic oligonucleotide

SEQ ID NO: 556277 - DNA, 55 bp, Artificial; identical to SEQ ID NO: 346958
  Synthetic oligonucleotide

SEQ ID NO: 556278 - DNA, 56 bp, Artificial; identical to SEQ ID NO: 346959
  Synthetic oligonucleotide

SEQ ID NO: 556279 - DNA, 56 bp, Artificial; identical to SEQ ID NO: 346962
  Synthetic oligonucleotide

SEQ ID NO: 556280 - DNA, 60 bp, Artificial; identical to SEQ ID NO: 346967
  Synthetic oligonucleotide

SEQ ID NO: 556281 - DNA, 60 bp, Artificial; identical to SEQ ID NO: 346969
  Synthetic oligonucleotide

SEQ ID NO: 556282 - DNA, 58 bp, Artificial; identical to SEQ ID NO: 346970
  Synthetic oligonucleotide

SEQ ID NO: 556283 - DNA, 59 bp, Artificial; identical to SEQ ID NO: 346973
  Synthetic oligonucleotide

SEQ ID NO: 556284 - DNA, 60 bp, Artificial; identical to SEQ ID NO: 15677
  Synthetic oligonucleotide

SEQ ID NO: 556285 - DNA, 56 bp, Artificial; identical to SEQ ID NO: 346977
  Synthetic oligonucleotide

SEQ ID NO: 556286 - DNA, 55 bp, Artificial; identical to SEQ ID NO: 346978
  Synthetic oligonucleotide

SEQ ID NO: 556287 - DNA, 56 bp, Artificial; identical to SEQ ID NO: 346982
  Synthetic oligonucleotide

SEQ ID NO: 556288 - DNA, 52 bp, Artificial; identical to SEQ ID NO: 346984
  Synthetic oligonucleotide

SEQ ID NO: 556289 - DNA, 55 bp, Artificial; identical to SEQ ID NO: 346986
  Synthetic oligonucleotide

SEQ ID NO: 556290 - DNA, 60 bp, Artificial; identical to SEQ ID NO: 346987
  Synthetic oligonucleotide

SEQ ID NO: 556291 - DNA, 60 bp, Artificial; identical to SEQ ID NO: 346988
  Synthetic oligonucleotide

SEQ ID NO: 556292 - DNA, 56 bp, Artificial; identical to SEQ ID NO: 346989
  Synthetic oligonucleotide

SEQ ID NO: 556293 - DNA, 58 bp, Artificial; identical to SEQ ID NO: 346991
  Synthetic oligonucleotide

SEQ ID NO: 556294 - DNA, 60 bp, Artificial; identical to SEQ ID NO: 409
  Synthetic oligonucleotide

SEQ ID NO: 556295 - DNA, 55 bp, Artificial; identical to SEQ ID NO: 10643
  Synthetic oligonucleotide

SEQ ID NO: 556296 - DNA, 60 bp, Artificial; identical to SEQ ID NO: 346996
  Synthetic oligonucleotide

SEQ ID NO: 556297 - DNA, 58 bp, Artificial; identical to SEQ ID NO: 20030
  Synthetic oligonucleotide

SEQ ID NO: 556298 - DNA, 50 bp, Artificial; identical to SEQ ID NO: 347002
  Synthetic oligonucleotide

SEQ ID NO: 556299 - DNA, 60 bp, Artificial; identical to SEQ ID NO: 347004
  Synthetic oligonucleotide

SEQ ID NO: 556300 - DNA, 55 bp, Artificial; identical to SEQ ID NO: 347007
  Synthetic oligonucleotide

SEQ ID NO: 556301 - DNA, 60 bp, Artificial; identical to SEQ ID NO: 347011
  Synthetic oligonucleotide

SEQ ID NO: 556302 - DNA, 60 bp, Artificial; identical to SEQ ID NO: 347014
  Synthetic oligonucleotide

SEQ ID NO: 556303 - DNA, 60 bp, Artificial; identical to SEQ ID NO: 347015
  Synthetic oligonucleotide

SEQ ID NO: 556304 - DNA, 60 bp, Artificial; identical to SEQ ID NO: 347017
  Synthetic oligonucleotide

SEQ ID NO: 556305 - DNA, 57 bp, Artificial; identical to SEQ ID NO: 347021
  Synthetic oligonucleotide

SEQ ID NO: 556306 - DNA, 58 bp, Artificial; identical to SEQ ID NO: 347022
  Synthetic oligonucleotide

SEQ ID NO: 556307 - DNA, 60 bp, Artificial; identical to SEQ ID NO: 347024
  Synthetic oligonucleotide

SEQ ID NO: 556308 - DNA, 60 bp, Artificial; identical to SEQ ID NO: 347029
  Synthetic oligonucleotide

SEQ ID NO: 556309 - DNA, 51 bp, Artificial; identical to SEQ ID NO: 347030
  Synthetic oligonucleotide

SEQ ID NO: 556310 - DNA, 60 bp, Artificial; identical to SEQ ID NO: 347031
  Synthetic oligonucleotide

SEQ ID NO: 556311 - DNA, 60 bp, Artificial; identical to SEQ ID NO: 347033
  Synthetic oligonucleotide

SEQ ID NO: 556312 - DNA, 60 bp, Artificial; identical to SEQ ID NO: 347036
  Synthetic oligonucleotide

SEQ ID NO: 556313 - DNA, 59 bp, Artificial; identical to SEQ ID NO: 347037
  Synthetic oligonucleotide

SEQ ID NO: 556314 - DNA, 55 bp, Artificial; identical to SEQ ID NO: 347044
  Synthetic oligonucleotide

SEQ ID NO: 556315 - DNA, 54 bp, Artificial; identical to SEQ ID NO: 347048
  Synthetic oligonucleotide

SEQ ID NO: 556316 - DNA, 50 bp, Artificial; identical to SEQ ID NO: 347054
  Synthetic oligonucleotide

SEQ ID NO: 556317 - DNA, 57 bp, Artificial; identical to SEQ ID NO: 347056
  Synthetic oligonucleotide

SEQ ID NO: 556318 - DNA, 60 bp, Artificial; identical to SEQ ID NO: 347057
  Synthetic oligonucleotide

SEQ ID NO: 556319 - DNA, 55 bp, Artificial; identical to SEQ ID NO: 347059
  Synthetic oligonucleotide

SEQ ID NO: 556320 - DNA, 60 bp, Artificial; identical to SEQ ID NO: 347061
  Synthetic oligonucleotide

SEQ ID NO: 556321 - DNA, 60 bp, Artificial; identical to SEQ ID NO: 347063
  Synthetic oligonucleotide

SEQ ID NO: 556322 - DNA, 58 bp, Artificial; identical to SEQ ID NO: 347064
  Synthetic oligonucleotide

SEQ ID NO: 556323 - DNA, 60 bp, Artificial; identical to SEQ ID NO: 347065
  Synthetic oligonucleotide

SEQ ID NO: 556324 - DNA, 60 bp, Artificial; identical to SEQ ID NO: 347066
  Synthetic oligonucleotide

SEQ ID NO: 556325 - DNA, 59 bp, Artificial; identical to SEQ ID NO: 347067
  Synthetic oligonucleotide

SEQ ID NO: 556326 - DNA, 60 bp, Artificial; identical to SEQ ID NO: 347071
  Synthetic oligonucleotide

SEQ ID NO: 556327 - DNA, 55 bp, Artificial; identical to SEQ ID NO: 347072
  Synthetic oligonucleotide

SEQ ID NO: 556328 - DNA, 54 bp, Artificial; identical to SEQ ID NO: 347073
  Synthetic oligonucleotide

SEQ ID NO: 556329 - DNA, 60 bp, Artificial; identical to SEQ ID NO: 347075
  Synthetic oligonucleotide

SEQ ID NO: 556330 - DNA, 55 bp, Artificial; identical to SEQ ID NO: 347076
  Synthetic oligonucleotide

SEQ ID NO: 556331 - DNA, 60 bp, Artificial; identical to SEQ ID NO: 347078
  Synthetic oligonucleotide

SEQ ID NO: 556332 - DNA, 52 bp, Artificial; identical to SEQ ID NO: 347079
  Synthetic oligonucleotide

SEQ ID NO: 556333 - DNA, 60 bp, Artificial; identical to SEQ ID NO: 347081
  Synthetic oligonucleotide

SEQ ID NO: 556334 - DNA, 55 bp, Artificial; identical to SEQ ID NO: 347082
  Synthetic oligonucleotide

SEQ ID NO: 556335 - DNA, 60 bp, Artificial; identical to SEQ ID NO: 347083
  Synthetic oligonucleotide

SEQ ID NO: 556336 - DNA, 55 bp, Artificial; identical to SEQ ID NO: 347085
  Synthetic oligonucleotide

SEQ ID NO: 556337 - DNA, 60 bp, Artificial; identical to SEQ ID NO: 347086
  Synthetic oligonucleotide

SEQ ID NO: 556338 - DNA, 60 bp, Artificial; identical to SEQ ID NO: 347088
  Synthetic oligonucleotide

SEQ ID NO: 556339 - DNA, 55 bp, Artificial; identical to SEQ ID NO: 347089
  Synthetic oligonucleotide

SEQ ID NO: 556340 - DNA, 55 bp, Artificial; identical to SEQ ID NO: 347090
  Synthetic oligonucleotide

SEQ ID NO: 556341 - DNA, 60 bp, Artificial; identical to SEQ ID NO: 347091
  Synthetic oligonucleotide

SEQ ID NO: 556342 - DNA, 51 bp, Artificial; identical to SEQ ID NO: 347092
  Synthetic oligonucleotide

SEQ ID NO: 556343 - DNA, 55 bp, Artificial; identical to SEQ ID NO: 347095
  Synthetic oligonucleotide

SEQ ID NO: 556344 - DNA, 56 bp, Artificial; identical to SEQ ID NO: 347096
  Synthetic oligonucleotide

SEQ ID NO: 556345 - DNA, 60 bp, Artificial; identical to SEQ ID NO: 347097
  Synthetic oligonucleotide

SEQ ID NO: 556346 - DNA, 55 bp, Artificial; identical to SEQ ID NO: 347099
  Synthetic oligonucleotide

SEQ ID NO: 556347 - DNA, 51 bp, Artificial; identical to SEQ ID NO: 347106
  Synthetic oligonucleotide

SEQ ID NO: 556348 - DNA, 52 bp, Artificial; identical to SEQ ID NO: 347107
  Synthetic oligonucleotide

SEQ ID NO: 556349 - DNA, 57 bp, Artificial; identical to SEQ ID NO: 347111
  Synthetic oligonucleotide

SEQ ID NO: 556350 - DNA, 60 bp, Artificial; identical to SEQ ID NO: 347113
  Synthetic oligonucleotide

SEQ ID NO: 556351 - DNA, 59 bp, Artificial; identical to SEQ ID NO: 130
  Synthetic oligonucleotide

SEQ ID NO: 556352 - DNA, 55 bp, Artificial; identical to SEQ ID NO: 347116
  Synthetic oligonucleotide

SEQ ID NO: 556353 - DNA, 52 bp, Artificial; identical to SEQ ID NO: 347119
  Synthetic oligonucleotide

SEQ ID NO: 556354 - DNA, 60 bp, Artificial; identical to SEQ ID NO: 347120
  Synthetic oligonucleotide

SEQ ID NO: 556355 - DNA, 59 bp, Artificial; identical to SEQ ID NO: 347121
  Synthetic oligonucleotide

SEQ ID NO: 556356 - DNA, 56 bp, Artificial; identical to SEQ ID NO: 347123
  Synthetic oligonucleotide

SEQ ID NO: 556357 - DNA, 60 bp, Artificial; identical to SEQ ID NO: 347130
  Synthetic oligonucleotide

SEQ ID NO: 556358 - DNA, 55 bp, Artificial; identical to SEQ ID NO: 347134
  Synthetic oligonucleotide

SEQ ID NO: 556359 - DNA, 59 bp, Artificial; identical to SEQ ID NO: 347135
  Synthetic oligonucleotide

SEQ ID NO: 556360 - DNA, 60 bp, Artificial; identical to SEQ ID NO: 347137
  Synthetic oligonucleotide

SEQ ID NO: 556361 - DNA, 60 bp, Artificial; identical to SEQ ID NO: 347138
  Synthetic oligonucleotide

SEQ ID NO: 556362 - DNA, 55 bp, Artificial; identical to SEQ ID NO: 347139
  Synthetic oligonucleotide

SEQ ID NO: 556363 - DNA, 60 bp, Artificial; identical to SEQ ID NO: 347144
  Synthetic oligonucleotide

SEQ ID NO: 556364 - DNA, 51 bp, Artificial; identical to SEQ ID NO: 14572
  Synthetic oligonucleotide

SEQ ID NO: 556365 - DNA, 55 bp, Artificial; identical to SEQ ID NO: 347147
  Synthetic oligonucleotide

SEQ ID NO: 556366 - DNA, 60 bp, Artificial; identical to SEQ ID NO: 76600
  Synthetic oligonucleotide

SEQ ID NO: 556367 - DNA, 54 bp, Artificial; identical to SEQ ID NO: 347148
  Synthetic oligonucleotide

SEQ ID NO: 556368 - DNA, 51 bp, Artificial; identical to SEQ ID NO: 347149
  Synthetic oligonucleotide

SEQ ID NO: 556369 - DNA, 55 bp, Artificial; identical to SEQ ID NO: 347150
  Synthetic oligonucleotide

SEQ ID NO: 556370 - DNA, 60 bp, Artificial; identical to SEQ ID NO: 347156
  Synthetic oligonucleotide

SEQ ID NO: 556371 - DNA, 60 bp, Artificial; identical to SEQ ID NO: 347158
  Synthetic oligonucleotide

SEQ ID NO: 556372 - DNA, 55 bp, Artificial; identical to SEQ ID NO: 12520
  Synthetic oligonucleotide

SEQ ID NO: 556373 - DNA, 55 bp, Artificial; identical to SEQ ID NO: 347159
  Synthetic oligonucleotide

SEQ ID NO: 556374 - DNA, 55 bp, Artificial; identical to SEQ ID NO: 347161
  Synthetic oligonucleotide

SEQ ID NO: 556375 - DNA, 55 bp, Artificial; identical to SEQ ID NO: 347162
  Synthetic oligonucleotide

SEQ ID NO: 556376 - DNA, 60 bp, Artificial; identical to SEQ ID NO: 347164
  Synthetic oligonucleotide

SEQ ID NO: 556377 - DNA, 59 bp, Artificial; identical to SEQ ID NO: 8209
  Synthetic oligonucleotide

SEQ ID NO: 556378 - DNA, 60 bp, Artificial; identical to SEQ ID NO: 347168
  Synthetic oligonucleotide

SEQ ID NO: 556379 - DNA, 60 bp, Artificial; identical to SEQ ID NO: 12707
  Synthetic oligonucleotide

SEQ ID NO: 556380 - DNA, 56 bp, Artificial; identical to SEQ ID NO: 347169
  Synthetic oligonucleotide

SEQ ID NO: 556381 - DNA, 55 bp, Artificial; identical to SEQ ID NO: 347171
  Synthetic oligonucleotide

SEQ ID NO: 556382 - DNA, 60 bp, Artificial; identical to SEQ ID NO: 347174
  Synthetic oligonucleotide

SEQ ID NO: 556383 - DNA, 60 bp, Artificial; identical to SEQ ID NO: 347182
  Synthetic oligonucleotide

SEQ ID NO: 556384 - DNA, 55 bp, Artificial; identical to SEQ ID NO: 347183
  Synthetic oligonucleotide

SEQ ID NO: 556385 - DNA, 50 bp, Artificial; identical to SEQ ID NO: 347186
  Synthetic oligonucleotide

SEQ ID NO: 556386 - DNA, 60 bp, Artificial; identical to SEQ ID NO: 347191
  Synthetic oligonucleotide

SEQ ID NO: 556387 - DNA, 51 bp, Artificial; identical to SEQ ID NO: 347193
  Synthetic oligonucleotide

SEQ ID NO: 556388 - DNA, 57 bp, Artificial; identical to SEQ ID NO: 347197
  Synthetic oligonucleotide

SEQ ID NO: 556389 - DNA, 59 bp, Artificial; identical to SEQ ID NO: 347200
  Synthetic oligonucleotide

SEQ ID NO: 556390 - DNA, 59 bp, Artificial; identical to SEQ ID NO: 347202
  Synthetic oligonucleotide

SEQ ID NO: 556391 - DNA, 60 bp, Artificial; identical to SEQ ID NO: 347206
  Synthetic oligonucleotide

SEQ ID NO: 556392 - DNA, 60 bp, Artificial; identical to SEQ ID NO: 347208
  Synthetic oligonucleotide

SEQ ID NO: 556393 - DNA, 59 bp, Artificial; identical to SEQ ID NO: 347209
  Synthetic oligonucleotide

SEQ ID NO: 556394 - DNA, 56 bp, Artificial; identical to SEQ ID NO: 347210
  Synthetic oligonucleotide

SEQ ID NO: 556395 - DNA, 60 bp, Artificial; identical to SEQ ID NO: 347214
  Synthetic oligonucleotide

SEQ ID NO: 556396 - DNA, 55 bp, Artificial; identical to SEQ ID NO: 347215
  Synthetic oligonucleotide

SEQ ID NO: 556397 - DNA, 50 bp, Artificial; identical to SEQ ID NO: 14939
  Synthetic oligonucleotide

SEQ ID NO: 556398 - DNA, 54 bp, Artificial; identical to SEQ ID NO: 347219
  Synthetic oligonucleotide

SEQ ID NO: 556399 - DNA, 54 bp, Artificial; identical to SEQ ID NO: 347220
  Synthetic oligonucleotide

SEQ ID NO: 556400 - DNA, 60 bp, Artificial; identical to SEQ ID NO: 347222
  Synthetic oligonucleotide

SEQ ID NO: 556401 - DNA, 52 bp, Artificial; identical to SEQ ID NO: 347223
  Synthetic oligonucleotide

SEQ ID NO: 556402 - DNA, 60 bp, Artificial; identical to SEQ ID NO: 11245
  Synthetic oligonucleotide

SEQ ID NO: 556403 - DNA, 55 bp, Artificial; identical to SEQ ID NO: 347227
  Synthetic oligonucleotide

SEQ ID NO: 556404 - DNA, 59 bp, Artificial; identical to SEQ ID NO: 347228
  Synthetic oligonucleotide

SEQ ID NO: 556405 - DNA, 60 bp, Artificial; identical to SEQ ID NO: 347230
  Synthetic oligonucleotide

SEQ ID NO: 556406 - DNA, 58 bp, Artificial; identical to SEQ ID NO: 347231
  Synthetic oligonucleotide

SEQ ID NO: 556407 - DNA, 55 bp, Artificial; identical to SEQ ID NO: 347235
  Synthetic oligonucleotide

SEQ ID NO: 556408 - DNA, 50 bp, Artificial; identical to SEQ ID NO: 347239
  Synthetic oligonucleotide

SEQ ID NO: 556409 - DNA, 60 bp, Artificial; identical to SEQ ID NO: 347240
  Synthetic oligonucleotide

SEQ ID NO: 556410 - DNA, 57 bp, Artificial; identical to SEQ ID NO: 347243
  Synthetic oligonucleotide

SEQ ID NO: 556411 - DNA, 60 bp, Artificial; identical to SEQ ID NO: 347245
  Synthetic oligonucleotide

SEQ ID NO: 556412 - DNA, 55 bp, Artificial; identical to SEQ ID NO: 347247
  Synthetic oligonucleotide

SEQ ID NO: 556413 - DNA, 58 bp, Artificial; identical to SEQ ID NO: 347248
  Synthetic oligonucleotide

SEQ ID NO: 556414 - DNA, 55 bp, Artificial; identical to SEQ ID NO: 347250
  Synthetic oligonucleotide

SEQ ID NO: 556415 - DNA, 60 bp, Artificial; identical to SEQ ID NO: 347251
  Synthetic oligonucleotide

SEQ ID NO: 556416 - DNA, 60 bp, Artificial; identical to SEQ ID NO: 347252
  Synthetic oligonucleotide

SEQ ID NO: 556417 - DNA, 60 bp, Artificial; identical to SEQ ID NO: 347256
  Synthetic oligonucleotide

SEQ ID NO: 556418 - DNA, 57 bp, Artificial; identical to SEQ ID NO: 347257
  Synthetic oligonucleotide

SEQ ID NO: 556419 - DNA, 55 bp, Artificial; identical to SEQ ID NO: 347258
  Synthetic oligonucleotide

SEQ ID NO: 556420 - DNA, 55 bp, Artificial; identical to SEQ ID NO: 347260
  Synthetic oligonucleotide

SEQ ID NO: 556421 - DNA, 56 bp, Artificial; identical to SEQ ID NO: 347262
  Synthetic oligonucleotide

SEQ ID NO: 556422 - DNA, 56 bp, Artificial; identical to SEQ ID NO: 347263
  Synthetic oligonucleotide

SEQ ID NO: 556423 - DNA, 55 bp, Artificial; identical to SEQ ID NO: 347264
  Synthetic oligonucleotide

SEQ ID NO: 556424 - DNA, 53 bp, Artificial; identical to SEQ ID NO: 347266
  Synthetic oligonucleotide

SEQ ID NO: 556425 - DNA, 57 bp, Artificial; identical to SEQ ID NO: 347267
  Synthetic oligonucleotide

SEQ ID NO: 556426 - DNA, 55 bp, Artificial; identical to SEQ ID NO: 347270
  Synthetic oligonucleotide

SEQ ID NO: 556427 - DNA, 57 bp, Artificial; identical to SEQ ID NO: 347272
  Synthetic oligonucleotide

SEQ ID NO: 556428 - DNA, 56 bp, Artificial; identical to SEQ ID NO: 347273
  Synthetic oligonucleotide

SEQ ID NO: 556429 - DNA, 56 bp, Artificial; identical to SEQ ID NO: 347274
  Synthetic oligonucleotide

SEQ ID NO: 556430 - DNA, 58 bp, Artificial; identical to SEQ ID NO: 347276
  Synthetic oligonucleotide

SEQ ID NO: 556431 - DNA, 58 bp, Artificial; identical to SEQ ID NO: 347281
  Synthetic oligonucleotide

SEQ ID NO: 556432 - DNA, 57 bp, Artificial; identical to SEQ ID NO: 347282
  Synthetic oligonucleotide

SEQ ID NO: 556433 - DNA, 57 bp, Artificial; identical to SEQ ID NO: 347283
  Synthetic oligonucleotide

SEQ ID NO: 556434 - DNA, 55 bp, Artificial; identical to SEQ ID NO: 347284
  Synthetic oligonucleotide

SEQ ID NO: 556435 - DNA, 60 bp, Artificial; identical to SEQ ID NO: 347285
  Synthetic oligonucleotide

SEQ ID NO: 556436 - DNA, 60 bp, Artificial; identical to SEQ ID NO: 347287
  Synthetic oligonucleotide

SEQ ID NO: 556437 - DNA, 59 bp, Artificial; identical to SEQ ID NO: 347291
  Synthetic oligonucleotide

SEQ ID NO: 556438 - DNA, 59 bp, Artificial; identical to SEQ ID NO: 347296
  Synthetic oligonucleotide

SEQ ID NO: 556439 - DNA, 58 bp, Artificial; identical to SEQ ID NO: 347297
  Synthetic oligonucleotide

SEQ ID NO: 556440 - DNA, 60 bp, Artificial; identical to SEQ ID NO: 347298
  Synthetic oligonucleotide

SEQ ID NO: 556441 - DNA, 60 bp, Artificial; identical to SEQ ID NO: 347302
  Synthetic oligonucleotide

SEQ ID NO: 556442 - DNA, 58 bp, Artificial; identical to SEQ ID NO: 347303
  Synthetic oligonucleotide

SEQ ID NO: 556443 - DNA, 60 bp, Artificial; identical to SEQ ID NO: 347305
  Synthetic oligonucleotide

SEQ ID NO: 556444 - DNA, 60 bp, Artificial; identical to SEQ ID NO: 12830
  Synthetic oligonucleotide

SEQ ID NO: 556445 - DNA, 59 bp, Artificial; identical to SEQ ID NO: 347306
  Synthetic oligonucleotide

SEQ ID NO: 556446 - DNA, 55 bp, Artificial; identical to SEQ ID NO: 347308
  Synthetic oligonucleotide

SEQ ID NO: 556447 - DNA, 60 bp, Artificial; identical to SEQ ID NO: 347310
  Synthetic oligonucleotide

SEQ ID NO: 556448 - DNA, 55 bp, Artificial; identical to SEQ ID NO: 347312
  Synthetic oligonucleotide

SEQ ID NO: 556449 - DNA, 58 bp, Artificial; identical to SEQ ID NO: 18164
  Synthetic oligonucleotide

SEQ ID NO: 556450 - DNA, 60 bp, Artificial; identical to SEQ ID NO: 347314
  Synthetic oligonucleotide

SEQ ID NO: 556451 - DNA, 52 bp, Artificial; identical to SEQ ID NO: 347317
  Synthetic oligonucleotide

SEQ ID NO: 556452 - DNA, 60 bp, Artificial; identical to SEQ ID NO: 347318
  Synthetic oligonucleotide

SEQ ID NO: 556453 - DNA, 59 bp, Artificial; identical to SEQ ID NO: 347322
  Synthetic oligonucleotide

SEQ ID NO: 556454 - DNA, 60 bp, Artificial; identical to SEQ ID NO: 347326
  Synthetic oligonucleotide

SEQ ID NO: 556455 - DNA, 60 bp, Artificial; identical to SEQ ID NO: 347331
  Synthetic oligonucleotide

SEQ ID NO: 556456 - DNA, 55 bp, Artificial; identical to SEQ ID NO: 347337
  Synthetic oligonucleotide

SEQ ID NO: 556457 - DNA, 55 bp, Artificial; identical to SEQ ID NO: 347338
  Synthetic oligonucleotide

SEQ ID NO: 556458 - DNA, 60 bp, Artificial; identical to SEQ ID NO: 347339
  Synthetic oligonucleotide

SEQ ID NO: 556459 - DNA, 60 bp, Artificial; identical to SEQ ID NO: 347340
  Synthetic oligonucleotide

SEQ ID NO: 556460 - DNA, 58 bp, Artificial; identical to SEQ ID NO: 347348
  Synthetic oligonucleotide

SEQ ID NO: 556461 - DNA, 55 bp, Artificial; identical to SEQ ID NO: 347350
  Synthetic oligonucleotide

SEQ ID NO: 556462 - DNA, 55 bp, Artificial; identical to SEQ ID NO: 347352
  Synthetic oligonucleotide

SEQ ID NO: 556463 - DNA, 55 bp, Artificial; identical to SEQ ID NO: 347353
  Synthetic oligonucleotide

SEQ ID NO: 556464 - DNA, 57 bp, Artificial; identical to SEQ ID NO: 347355
  Synthetic oligonucleotide

SEQ ID NO: 556465 - DNA, 55 bp, Artificial; identical to SEQ ID NO: 347357
  Synthetic oligonucleotide

SEQ ID NO: 556466 - DNA, 60 bp, Artificial; identical to SEQ ID NO: 347358
  Synthetic oligonucleotide

SEQ ID NO: 556467 - DNA, 60 bp, Artificial; identical to SEQ ID NO: 347359
  Synthetic oligonucleotide

SEQ ID NO: 556468 - DNA, 56 bp, Artificial; identical to SEQ ID NO: 347360
  Synthetic oligonucleotide

SEQ ID NO: 556469 - DNA, 53 bp, Artificial; identical to SEQ ID NO: 347361
  Synthetic oligonucleotide

SEQ ID NO: 556470 - DNA, 55 bp, Artificial; identical to SEQ ID NO: 347365
  Synthetic oligonucleotide

SEQ ID NO: 556471 - DNA, 60 bp, Artificial; identical to SEQ ID NO: 347367
  Synthetic oligonucleotide

SEQ ID NO: 556472 - DNA, 55 bp, Artificial; identical to SEQ ID NO: 9176
  Synthetic oligonucleotide

SEQ ID NO: 556473 - DNA, 60 bp, Artificial; identical to SEQ ID NO: 347368
  Synthetic oligonucleotide

SEQ ID NO: 556474 - DNA, 55 bp, Artificial; identical to SEQ ID NO: 347375
  Synthetic oligonucleotide

SEQ ID NO: 556475 - DNA, 55 bp, Artificial; identical to SEQ ID NO: 347378
  Synthetic oligonucleotide

SEQ ID NO: 556476 - DNA, 60 bp, Artificial; identical to SEQ ID NO: 347379
  Synthetic oligonucleotide

SEQ ID NO: 556477 - DNA, 58 bp, Artificial; identical to SEQ ID NO: 347380
  Synthetic oligonucleotide

SEQ ID NO: 556478 - DNA, 53 bp, Artificial; identical to SEQ ID NO: 347381
  Synthetic oligonucleotide

SEQ ID NO: 556479 - DNA, 60 bp, Artificial; identical to SEQ ID NO: 347383
  Synthetic oligonucleotide

SEQ ID NO: 556480 - DNA, 51 bp, Artificial; identical to SEQ ID NO: 347384
  Synthetic oligonucleotide

SEQ ID NO: 556481 - DNA, 60 bp, Artificial; identical to SEQ ID NO: 347385
  Synthetic oligonucleotide

SEQ ID NO: 556482 - DNA, 55 bp, Artificial; identical to SEQ ID NO: 347386
  Synthetic oligonucleotide

SEQ ID NO: 556483 - DNA, 56 bp, Artificial; identical to SEQ ID NO: 347391
  Synthetic oligonucleotide

SEQ ID NO: 556484 - DNA, 60 bp, Artificial; identical to SEQ ID NO: 347392
  Synthetic oligonucleotide

SEQ ID NO: 556485 - DNA, 60 bp, Artificial; identical to SEQ ID NO: 347394
  Synthetic oligonucleotide

SEQ ID NO: 556486 - DNA, 53 bp, Artificial; identical to SEQ ID NO: 347395
  Synthetic oligonucleotide

SEQ ID NO: 556487 - DNA, 55 bp, Artificial; identical to SEQ ID NO: 15024
  Synthetic oligonucleotide

SEQ ID NO: 556488 - DNA, 60 bp, Artificial; identical to SEQ ID NO: 347397
  Synthetic oligonucleotide

SEQ ID NO: 556489 - DNA, 51 bp, Artificial; identical to SEQ ID NO: 347398
  Synthetic oligonucleotide

SEQ ID NO: 556490 - DNA, 60 bp, Artificial; identical to SEQ ID NO: 347399
  Synthetic oligonucleotide

SEQ ID NO: 556491 - DNA, 60 bp, Artificial; identical to SEQ ID NO: 347400
  Synthetic oligonucleotide

SEQ ID NO: 556492 - DNA, 55 bp, Artificial; identical to SEQ ID NO: 347403
  Synthetic oligonucleotide

SEQ ID NO: 556493 - DNA, 60 bp, Artificial; identical to SEQ ID NO: 347405
  Synthetic oligonucleotide

SEQ ID NO: 556494 - DNA, 55 bp, Artificial; identical to SEQ ID NO: 347407
  Synthetic oligonucleotide

SEQ ID NO: 556495 - DNA, 53 bp, Artificial; identical to SEQ ID NO: 347410
  Synthetic oligonucleotide

SEQ ID NO: 556496 - DNA, 55 bp, Artificial; identical to SEQ ID NO: 347411
  Synthetic oligonucleotide

SEQ ID NO: 556497 - DNA, 60 bp, Artificial; identical to SEQ ID NO: 347412
  Synthetic oligonucleotide

SEQ ID NO: 556498 - DNA, 60 bp, Artificial; identical to SEQ ID NO: 347418
  Synthetic oligonucleotide

SEQ ID NO: 556499 - DNA, 60 bp, Artificial; identical to SEQ ID NO: 347424
  Synthetic oligonucleotide

SEQ ID NO: 556500 - DNA, 59 bp, Artificial; identical to SEQ ID NO: 19575
  Synthetic oligonucleotide

SEQ ID NO: 556501 - DNA, 60 bp, Artificial; identical to SEQ ID NO: 347426
  Synthetic oligonucleotide

SEQ ID NO: 556502 - DNA, 59 bp, Artificial; identical to SEQ ID NO: 347427
  Synthetic oligonucleotide

SEQ ID NO: 556503 - DNA, 60 bp, Artificial; identical to SEQ ID NO: 347429
  Synthetic oligonucleotide

SEQ ID NO: 556504 - DNA, 55 bp, Artificial; identical to SEQ ID NO: 347430
  Synthetic oligonucleotide

SEQ ID NO: 556505 - DNA, 60 bp, Artificial; identical to SEQ ID NO: 347433
  Synthetic oligonucleotide

SEQ ID NO: 556506 - DNA, 60 bp, Artificial; identical to SEQ ID NO: 347434
  Synthetic oligonucleotide

SEQ ID NO: 556507 - DNA, 55 bp, Artificial; identical to SEQ ID NO: 347435
  Synthetic oligonucleotide

SEQ ID NO: 556508 - DNA, 55 bp, Artificial; identical to SEQ ID NO: 347436
  Synthetic oligonucleotide

SEQ ID NO: 556509 - DNA, 60 bp, Artificial; identical to SEQ ID NO: 347437
  Synthetic oligonucleotide

SEQ ID NO: 556510 - DNA, 52 bp, Artificial; identical to SEQ ID NO: 347438
  Synthetic oligonucleotide

SEQ ID NO: 556511 - DNA, 60 bp, Artificial; identical to SEQ ID NO: 347440
  Synthetic oligonucleotide

SEQ ID NO: 556512 - DNA, 55 bp, Artificial; identical to SEQ ID NO: 347441
  Synthetic oligonucleotide

SEQ ID NO: 556513 - DNA, 55 bp, Artificial; identical to SEQ ID NO: 347442
  Synthetic oligonucleotide

SEQ ID NO: 556514 - DNA, 55 bp, Artificial; identical to SEQ ID NO: 347446
  Synthetic oligonucleotide

SEQ ID NO: 556515 - DNA, 55 bp, Artificial; identical to SEQ ID NO: 347447
  Synthetic oligonucleotide

SEQ ID NO: 556516 - DNA, 60 bp, Artificial; identical to SEQ ID NO: 347448
  Synthetic oligonucleotide

SEQ ID NO: 556517 - DNA, 55 bp, Artificial; identical to SEQ ID NO: 347451
  Synthetic oligonucleotide

SEQ ID NO: 556518 - DNA, 55 bp, Artificial; identical to SEQ ID NO: 347453
  Synthetic oligonucleotide

SEQ ID NO: 556519 - DNA, 53 bp, Artificial; identical to SEQ ID NO: 347464
  Synthetic oligonucleotide

SEQ ID NO: 556520 - DNA, 59 bp, Artificial; identical to SEQ ID NO: 347465
  Synthetic oligonucleotide

SEQ ID NO: 556521 - DNA, 55 bp, Artificial; identical to SEQ ID NO: 347469
  Synthetic oligonucleotide

SEQ ID NO: 556522 - DNA, 55 bp, Artificial; identical to SEQ ID NO: 347472
  Synthetic oligonucleotide

SEQ ID NO: 556523 - DNA, 55 bp, Artificial; identical to SEQ ID NO: 347473
  Synthetic oligonucleotide

SEQ ID NO: 556524 - DNA, 55 bp, Artificial; identical to SEQ ID NO: 347474
  Synthetic oligonucleotide

SEQ ID NO: 556525 - DNA, 60 bp, Artificial; identical to SEQ ID NO: 347475
  Synthetic oligonucleotide

SEQ ID NO: 556526 - DNA, 55 bp, Artificial; identical to SEQ ID NO: 347478
  Synthetic oligonucleotide

SEQ ID NO: 556527 - DNA, 55 bp, Artificial; identical to SEQ ID NO: 347479
  Synthetic oligonucleotide

SEQ ID NO: 556528 - DNA, 55 bp, Artificial; identical to SEQ ID NO: 347481
  Synthetic oligonucleotide

SEQ ID NO: 556529 - DNA, 60 bp, Artificial; identical to SEQ ID NO: 347485
  Synthetic oligonucleotide

SEQ ID NO: 556530 - DNA, 55 bp, Artificial; identical to SEQ ID NO: 347487
  Synthetic oligonucleotide

SEQ ID NO: 556531 - DNA, 60 bp, Artificial; identical to SEQ ID NO: 347488
  Synthetic oligonucleotide

SEQ ID NO: 556532 - DNA, 55 bp, Artificial; identical to SEQ ID NO: 347489
  Synthetic oligonucleotide

SEQ ID NO: 556533 - DNA, 55 bp, Artificial; identical to SEQ ID NO: 347490
  Synthetic oligonucleotide

SEQ ID NO: 556534 - DNA, 54 bp, Artificial; identical to SEQ ID NO: 347491
  Synthetic oligonucleotide

SEQ ID NO: 556535 - DNA, 60 bp, Artificial; identical to SEQ ID NO: 347492
  Synthetic oligonucleotide

SEQ ID NO: 556536 - DNA, 55 bp, Artificial; identical to SEQ ID NO: 347494
  Synthetic oligonucleotide

SEQ ID NO: 556537 - DNA, 60 bp, Artificial; identical to SEQ ID NO: 347498
  Synthetic oligonucleotide

SEQ ID NO: 556538 - DNA, 58 bp, Artificial; identical to SEQ ID NO: 347499
  Synthetic oligonucleotide

SEQ ID NO: 556539 - DNA, 60 bp, Artificial; identical to SEQ ID NO: 347500
  Synthetic oligonucleotide

SEQ ID NO: 556540 - DNA, 60 bp, Artificial; identical to SEQ ID NO: 347502
  Synthetic oligonucleotide

SEQ ID NO: 556541 - DNA, 60 bp, Artificial; identical to SEQ ID NO: 347503
  Synthetic oligonucleotide

SEQ ID NO: 556542 - DNA, 54 bp, Artificial; identical to SEQ ID NO: 347505
  Synthetic oligonucleotide

SEQ ID NO: 556543 - DNA, 60 bp, Artificial; identical to SEQ ID NO: 347507
  Synthetic oligonucleotide

SEQ ID NO: 556544 - DNA, 52 bp, Artificial; identical to SEQ ID NO: 347509
  Synthetic oligonucleotide

SEQ ID NO: 556545 - DNA, 59 bp, Artificial; identical to SEQ ID NO: 347510
  Synthetic oligonucleotide

SEQ ID NO: 556546 - DNA, 53 bp, Artificial; identical to SEQ ID NO: 347511
  Synthetic oligonucleotide

SEQ ID NO: 556547 - DNA, 50 bp, Artificial; identical to SEQ ID NO: 347512
  Synthetic oligonucleotide

SEQ ID NO: 556548 - DNA, 52 bp, Artificial; identical to SEQ ID NO: 347513
  Synthetic oligonucleotide

SEQ ID NO: 556549 - DNA, 60 bp, Artificial; identical to SEQ ID NO: 347514
  Synthetic oligonucleotide

SEQ ID NO: 556550 - DNA, 60 bp, Artificial; identical to SEQ ID NO: 347518
  Synthetic oligonucleotide

SEQ ID NO: 556551 - DNA, 57 bp, Artificial; identical to SEQ ID NO: 18045
  Synthetic oligonucleotide

SEQ ID NO: 556552 - DNA, 60 bp, Artificial; identical to SEQ ID NO: 347521
  Synthetic oligonucleotide

SEQ ID NO: 556553 - DNA, 60 bp, Artificial; identical to SEQ ID NO: 347522
  Synthetic oligonucleotide

SEQ ID NO: 556554 - DNA, 55 bp, Artificial; identical to SEQ ID NO: 347524
  Synthetic oligonucleotide

SEQ ID NO: 556555 - DNA, 56 bp, Artificial; identical to SEQ ID NO: 347531
  Synthetic oligonucleotide

SEQ ID NO: 556556 - DNA, 58 bp, Artificial; identical to SEQ ID NO: 13008
  Synthetic oligonucleotide

SEQ ID NO: 556557 - DNA, 56 bp, Artificial; identical to SEQ ID NO: 347534
  Synthetic oligonucleotide

SEQ ID NO: 556558 - DNA, 55 bp, Artificial; identical to SEQ ID NO: 347535
  Synthetic oligonucleotide

SEQ ID NO: 556559 - DNA, 60 bp, Artificial; identical to SEQ ID NO: 347541
  Synthetic oligonucleotide

SEQ ID NO: 556560 - DNA, 60 bp, Artificial; identical to SEQ ID NO: 347542
  Synthetic oligonucleotide

SEQ ID NO: 556561 - DNA, 60 bp, Artificial; identical to SEQ ID NO: 347544
  Synthetic oligonucleotide

SEQ ID NO: 556562 - DNA, 53 bp, Artificial; identical to SEQ ID NO: 347546
  Synthetic oligonucleotide

SEQ ID NO: 556563 - DNA, 60 bp, Artificial; identical to SEQ ID NO: 347548
  Synthetic oligonucleotide

SEQ ID NO: 556564 - DNA, 57 bp, Artificial; identical to SEQ ID NO: 347549
  Synthetic oligonucleotide

SEQ ID NO: 556565 - DNA, 59 bp, Artificial; identical to SEQ ID NO: 347552
  Synthetic oligonucleotide

SEQ ID NO: 556566 - DNA, 60 bp, Artificial; identical to SEQ ID NO: 347555
  Synthetic oligonucleotide

SEQ ID NO: 556567 - DNA, 57 bp, Artificial; identical to SEQ ID NO: 347556
  Synthetic oligonucleotide

SEQ ID NO: 556568 - DNA, 50 bp, Artificial; identical to SEQ ID NO: 347557
  Synthetic oligonucleotide

SEQ ID NO: 556569 - DNA, 52 bp, Artificial; identical to SEQ ID NO: 347559
  Synthetic oligonucleotide

SEQ ID NO: 556570 - DNA, 57 bp, Artificial; identical to SEQ ID NO: 347560
  Synthetic oligonucleotide

SEQ ID NO: 556571 - DNA, 55 bp, Artificial; identical to SEQ ID NO: 347563
  Synthetic oligonucleotide

SEQ ID NO: 556572 - DNA, 55 bp, Artificial; identical to SEQ ID NO: 347565
  Synthetic oligonucleotide

SEQ ID NO: 556573 - DNA, 58 bp, Artificial; identical to SEQ ID NO: 347568
  Synthetic oligonucleotide

SEQ ID NO: 556574 - DNA, 54 bp, Artificial; identical to SEQ ID NO: 347570
  Synthetic oligonucleotide

SEQ ID NO: 556575 - DNA, 55 bp, Artificial; identical to SEQ ID NO: 347571
  Synthetic oligonucleotide

SEQ ID NO: 556576 - DNA, 55 bp, Artificial; identical to SEQ ID NO: 7282
  Synthetic oligonucleotide

SEQ ID NO: 556577 - DNA, 55 bp, Artificial; identical to SEQ ID NO: 347572
  Synthetic oligonucleotide

SEQ ID NO: 556578 - DNA, 60 bp, Artificial; identical to SEQ ID NO: 347575
  Synthetic oligonucleotide

SEQ ID NO: 556579 - DNA, 60 bp, Artificial; identical to SEQ ID NO: 347577
  Synthetic oligonucleotide

SEQ ID NO: 556580 - DNA, 50 bp, Artificial; identical to SEQ ID NO: 347578
  Synthetic oligonucleotide

SEQ ID NO: 556581 - DNA, 55 bp, Artificial; identical to SEQ ID NO: 347580
  Synthetic oligonucleotide

SEQ ID NO: 556582 - DNA, 60 bp, Artificial; identical to SEQ ID NO: 347582
  Synthetic oligonucleotide

SEQ ID NO: 556583 - DNA, 60 bp, Artificial; identical to SEQ ID NO: 347587
  Synthetic oligonucleotide

SEQ ID NO: 556584 - DNA, 60 bp, Artificial; identical to SEQ ID NO: 347590
  Synthetic oligonucleotide

SEQ ID NO: 556585 - DNA, 54 bp, Artificial; identical to SEQ ID NO: 347592
  Synthetic oligonucleotide

SEQ ID NO: 556586 - DNA, 60 bp, Artificial; identical to SEQ ID NO: 347593
  Synthetic oligonucleotide

SEQ ID NO: 556587 - DNA, 57 bp, Artificial; identical to SEQ ID NO: 347595
  Synthetic oligonucleotide

SEQ ID NO: 556588 - DNA, 60 bp, Artificial; identical to SEQ ID NO: 347596
  Synthetic oligonucleotide

SEQ ID NO: 556589 - DNA, 60 bp, Artificial; identical to SEQ ID NO: 347597
  Synthetic oligonucleotide

SEQ ID NO: 556590 - DNA, 55 bp, Artificial; identical to SEQ ID NO: 347599
  Synthetic oligonucleotide

SEQ ID NO: 556591 - DNA, 56 bp, Artificial; identical to SEQ ID NO: 347604
  Synthetic oligonucleotide

SEQ ID NO: 556592 - DNA, 57 bp, Artificial; identical to SEQ ID NO: 347609
  Synthetic oligonucleotide

SEQ ID NO: 556593 - DNA, 51 bp, Artificial; identical to SEQ ID NO: 347612
  Synthetic oligonucleotide

SEQ ID NO: 556594 - DNA, 55 bp, Artificial; identical to SEQ ID NO: 347615
  Synthetic oligonucleotide

SEQ ID NO: 556595 - DNA, 55 bp, Artificial; identical to SEQ ID NO: 347618
  Synthetic oligonucleotide

SEQ ID NO: 556596 - DNA, 55 bp, Artificial; identical to SEQ ID NO: 347622
  Synthetic oligonucleotide

SEQ ID NO: 556597 - DNA, 58 bp, Artificial; identical to SEQ ID NO: 20583
  Synthetic oligonucleotide

SEQ ID NO: 556598 - DNA, 57 bp, Artificial; identical to SEQ ID NO: 347623
  Synthetic oligonucleotide

SEQ ID NO: 556599 - DNA, 58 bp, Artificial; identical to SEQ ID NO: 347629
  Synthetic oligonucleotide

SEQ ID NO: 556600 - DNA, 55 bp, Artificial; identical to SEQ ID NO: 347630
  Synthetic oligonucleotide

SEQ ID NO: 556601 - DNA, 60 bp, Artificial; identical to SEQ ID NO: 347631
  Synthetic oligonucleotide

SEQ ID NO: 556602 - DNA, 55 bp, Artificial; identical to SEQ ID NO: 347633
  Synthetic oligonucleotide

SEQ ID NO: 556603 - DNA, 55 bp, Artificial; identical to SEQ ID NO: 347635
  Synthetic oligonucleotide

SEQ ID NO: 556604 - DNA, 54 bp, Artificial; identical to SEQ ID NO: 16519
  Synthetic oligonucleotide

SEQ ID NO: 556605 - DNA, 55 bp, Artificial; identical to SEQ ID NO: 347638
  Synthetic oligonucleotide

SEQ ID NO: 556606 - DNA, 55 bp, Artificial; identical to SEQ ID NO: 347640
  Synthetic oligonucleotide

SEQ ID NO: 556607 - DNA, 55 bp, Artificial; identical to SEQ ID NO: 347641
  Synthetic oligonucleotide

SEQ ID NO: 556608 - DNA, 59 bp, Artificial; identical to SEQ ID NO: 347644
  Synthetic oligonucleotide

SEQ ID NO: 556609 - DNA, 60 bp, Artificial; identical to SEQ ID NO: 347645
  Synthetic oligonucleotide

SEQ ID NO: 556610 - DNA, 55 bp, Artificial; identical to SEQ ID NO: 347646
  Synthetic oligonucleotide

SEQ ID NO: 556611 - DNA, 57 bp, Artificial; identical to SEQ ID NO: 347648
  Synthetic oligonucleotide

SEQ ID NO: 556612 - DNA, 55 bp, Artificial; identical to SEQ ID NO: 347649
  Synthetic oligonucleotide

SEQ ID NO: 556613 - DNA, 55 bp, Artificial; identical to SEQ ID NO: 347652
  Synthetic oligonucleotide

SEQ ID NO: 556614 - DNA, 59 bp, Artificial; identical to SEQ ID NO: 347654
  Synthetic oligonucleotide

SEQ ID NO: 556615 - DNA, 60 bp, Artificial; identical to SEQ ID NO: 10832
  Synthetic oligonucleotide

SEQ ID NO: 556616 - DNA, 55 bp, Artificial; identical to SEQ ID NO: 347657
  Synthetic oligonucleotide

SEQ ID NO: 556617 - DNA, 59 bp, Artificial; identical to SEQ ID NO: 347658
  Synthetic oligonucleotide

SEQ ID NO: 556618 - DNA, 60 bp, Artificial; identical to SEQ ID NO: 347662
  Synthetic oligonucleotide

SEQ ID NO: 556619 - DNA, 55 bp, Artificial; identical to SEQ ID NO: 347664
  Synthetic oligonucleotide

SEQ ID NO: 556620 - DNA, 55 bp, Artificial; identical to SEQ ID NO: 347665
  Synthetic oligonucleotide

SEQ ID NO: 556621 - DNA, 55 bp, Artificial; identical to SEQ ID NO: 347668
  Synthetic oligonucleotide

SEQ ID NO: 556622 - DNA, 55 bp, Artificial; identical to SEQ ID NO: 347670
  Synthetic oligonucleotide

SEQ ID NO: 556623 - DNA, 56 bp, Artificial; identical to SEQ ID NO: 347672
  Synthetic oligonucleotide

SEQ ID NO: 556624 - DNA, 55 bp, Artificial; identical to SEQ ID NO: 347673
  Synthetic oligonucleotide

SEQ ID NO: 556625 - DNA, 55 bp, Artificial; identical to SEQ ID NO: 347674
  Synthetic oligonucleotide

SEQ ID NO: 556626 - DNA, 60 bp, Artificial; identical to SEQ ID NO: 347676
  Synthetic oligonucleotide

SEQ ID NO: 556627 - DNA, 60 bp, Artificial; identical to SEQ ID NO: 347678
  Synthetic oligonucleotide

SEQ ID NO: 556628 - DNA, 56 bp, Artificial; identical to SEQ ID NO: 347680
  Synthetic oligonucleotide

SEQ ID NO: 556629 - DNA, 52 bp, Artificial; identical to SEQ ID NO: 347681
  Synthetic oligonucleotide

SEQ ID NO: 556630 - DNA, 58 bp, Artificial; identical to SEQ ID NO: 347682
  Synthetic oligonucleotide

SEQ ID NO: 556631 - DNA, 58 bp, Artificial; identical to SEQ ID NO: 18090
  Synthetic oligonucleotide

SEQ ID NO: 556632 - DNA, 60 bp, Artificial; identical to SEQ ID NO: 347690
  Synthetic oligonucleotide

SEQ ID NO: 556633 - DNA, 52 bp, Artificial; identical to SEQ ID NO: 347691
  Synthetic oligonucleotide

SEQ ID NO: 556634 - DNA, 55 bp, Artificial; identical to SEQ ID NO: 347693
  Synthetic oligonucleotide

SEQ ID NO: 556635 - DNA, 56 bp, Artificial; identical to SEQ ID NO: 347694
  Synthetic oligonucleotide

SEQ ID NO: 556636 - DNA, 60 bp, Artificial; identical to SEQ ID NO: 347699
  Synthetic oligonucleotide

SEQ ID NO: 556637 - DNA, 59 bp, Artificial; identical to SEQ ID NO: 347701
  Synthetic oligonucleotide

SEQ ID NO: 556638 - DNA, 60 bp, Artificial; identical to SEQ ID NO: 347703
  Synthetic oligonucleotide

SEQ ID NO: 556639 - DNA, 55 bp, Artificial; identical to SEQ ID NO: 347704
  Synthetic oligonucleotide

SEQ ID NO: 556640 - DNA, 55 bp, Artificial; identical to SEQ ID NO: 347705
  Synthetic oligonucleotide

SEQ ID NO: 556641 - DNA, 60 bp, Artificial; identical to SEQ ID NO: 347707
  Synthetic oligonucleotide

SEQ ID NO: 556642 - DNA, 60 bp, Artificial; identical to SEQ ID NO: 347708
  Synthetic oligonucleotide

SEQ ID NO: 556643 - DNA, 53 bp, Artificial; identical to SEQ ID NO: 347710
  Synthetic oligonucleotide

SEQ ID NO: 556644 - DNA, 60 bp, Artificial; identical to SEQ ID NO: 10887
  Synthetic oligonucleotide

SEQ ID NO: 556645 - DNA, 60 bp, Artificial; identical to SEQ ID NO: 347723
  Synthetic oligonucleotide

SEQ ID NO: 556646 - DNA, 55 bp, Artificial; identical to SEQ ID NO: 347724
  Synthetic oligonucleotide

SEQ ID NO: 556647 - DNA, 57 bp, Artificial; identical to SEQ ID NO: 347726
  Synthetic oligonucleotide

SEQ ID NO: 556648 - DNA, 60 bp, Artificial; identical to SEQ ID NO: 347729
  Synthetic oligonucleotide

SEQ ID NO: 556649 - DNA, 60 bp, Artificial; identical to SEQ ID NO: 347731
  Synthetic oligonucleotide

SEQ ID NO: 556650 - DNA, 55 bp, Artificial; identical to SEQ ID NO: 347734
  Synthetic oligonucleotide

SEQ ID NO: 556651 - DNA, 60 bp, Artificial; identical to SEQ ID NO: 347736
  Synthetic oligonucleotide

SEQ ID NO: 556652 - DNA, 51 bp, Artificial; identical to SEQ ID NO: 347738
  Synthetic oligonucleotide

SEQ ID NO: 556653 - DNA, 56 bp, Artificial; identical to SEQ ID NO: 347740
  Synthetic oligonucleotide

SEQ ID NO: 556654 - DNA, 60 bp, Artificial; identical to SEQ ID NO: 347742
  Synthetic oligonucleotide

SEQ ID NO: 556655 - DNA, 55 bp, Artificial; identical to SEQ ID NO: 347743
  Synthetic oligonucleotide

SEQ ID NO: 556656 - DNA, 60 bp, Artificial; identical to SEQ ID NO: 11123
  Synthetic oligonucleotide

SEQ ID NO: 556657 - DNA, 56 bp, Artificial; identical to SEQ ID NO: 347747
  Synthetic oligonucleotide

SEQ ID NO: 556658 - DNA, 60 bp, Artificial; identical to SEQ ID NO: 347749
  Synthetic oligonucleotide

SEQ ID NO: 556659 - DNA, 60 bp, Artificial; identical to SEQ ID NO: 347750
  Synthetic oligonucleotide

SEQ ID NO: 556660 - DNA, 58 bp, Artificial; identical to SEQ ID NO: 347751
  Synthetic oligonucleotide

SEQ ID NO: 556661 - DNA, 60 bp, Artificial; identical to SEQ ID NO: 7099
  Synthetic oligonucleotide

SEQ ID NO: 556662 - DNA, 60 bp, Artificial; identical to SEQ ID NO: 347754
  Synthetic oligonucleotide

SEQ ID NO: 556663 - DNA, 56 bp, Artificial; identical to SEQ ID NO: 347763
  Synthetic oligonucleotide

SEQ ID NO: 556664 - DNA, 58 bp, Artificial; identical to SEQ ID NO: 347764
  Synthetic oligonucleotide

SEQ ID NO: 556665 - DNA, 55 bp, Artificial; identical to SEQ ID NO: 347769
  Synthetic oligonucleotide

SEQ ID NO: 556666 - DNA, 60 bp, Artificial; identical to SEQ ID NO: 347771
  Synthetic oligonucleotide

SEQ ID NO: 556667 - DNA, 60 bp, Artificial; identical to SEQ ID NO: 347772
  Synthetic oligonucleotide

SEQ ID NO: 556668 - DNA, 55 bp, Artificial; identical to SEQ ID NO: 347774
  Synthetic oligonucleotide

SEQ ID NO: 556669 - DNA, 55 bp, Artificial; identical to SEQ ID NO: 347775
  Synthetic oligonucleotide

SEQ ID NO: 556670 - DNA, 55 bp, Artificial; identical to SEQ ID NO: 347776
  Synthetic oligonucleotide

SEQ ID NO: 556671 - DNA, 60 bp, Artificial; identical to SEQ ID NO: 347778
  Synthetic oligonucleotide

SEQ ID NO: 556672 - DNA, 55 bp, Artificial; identical to SEQ ID NO: 347781
  Synthetic oligonucleotide

SEQ ID NO: 556673 - DNA, 55 bp, Artificial; identical to SEQ ID NO: 347786
  Synthetic oligonucleotide

SEQ ID NO: 556674 - DNA, 59 bp, Artificial; identical to SEQ ID NO: 347789
  Synthetic oligonucleotide

SEQ ID NO: 556675 - DNA, 55 bp, Artificial; identical to SEQ ID NO: 347791
  Synthetic oligonucleotide

SEQ ID NO: 556676 - DNA, 60 bp, Artificial; identical to SEQ ID NO: 347792
  Synthetic oligonucleotide

SEQ ID NO: 556677 - DNA, 55 bp, Artificial; identical to SEQ ID NO: 347803
  Synthetic oligonucleotide

SEQ ID NO: 556678 - DNA, 55 bp, Artificial; identical to SEQ ID NO: 347804
  Synthetic oligonucleotide

SEQ ID NO: 556679 - DNA, 51 bp, Artificial; identical to SEQ ID NO: 347805
  Synthetic oligonucleotide

SEQ ID NO: 556680 - DNA, 51 bp, Artificial; identical to SEQ ID NO: 347806
  Synthetic oligonucleotide

SEQ ID NO: 556681 - DNA, 55 bp, Artificial; identical to SEQ ID NO: 347807
  Synthetic oligonucleotide

SEQ ID NO: 556682 - DNA, 55 bp, Artificial; identical to SEQ ID NO: 347808
  Synthetic oligonucleotide

SEQ ID NO: 556683 - DNA, 59 bp, Artificial; identical to SEQ ID NO: 347812
  Synthetic oligonucleotide

SEQ ID NO: 556684 - DNA, 57 bp, Artificial; identical to SEQ ID NO: 347814
  Synthetic oligonucleotide

SEQ ID NO: 556685 - DNA, 55 bp, Artificial; identical to SEQ ID NO: 347816
  Synthetic oligonucleotide

SEQ ID NO: 556686 - DNA, 55 bp, Artificial; identical to SEQ ID NO: 347817
  Synthetic oligonucleotide

SEQ ID NO: 556687 - DNA, 54 bp, Artificial; identical to SEQ ID NO: 347820
  Synthetic oligonucleotide

SEQ ID NO: 556688 - DNA, 55 bp, Artificial; identical to SEQ ID NO: 347822
  Synthetic oligonucleotide

SEQ ID NO: 556689 - DNA, 55 bp, Artificial; identical to SEQ ID NO: 347826
  Synthetic oligonucleotide

SEQ ID NO: 556690 - DNA, 55 bp, Artificial; identical to SEQ ID NO: 347829
  Synthetic oligonucleotide

SEQ ID NO: 556691 - DNA, 59 bp, Artificial; identical to SEQ ID NO: 347830
  Synthetic oligonucleotide

SEQ ID NO: 556692 - DNA, 55 bp, Artificial; identical to SEQ ID NO: 347832
  Synthetic oligonucleotide

SEQ ID NO: 556693 - DNA, 58 bp, Artificial; identical to SEQ ID NO: 347833
  Synthetic oligonucleotide

SEQ ID NO: 556694 - DNA, 55 bp, Artificial; identical to SEQ ID NO: 347834
  Synthetic oligonucleotide

SEQ ID NO: 556695 - DNA, 51 bp, Artificial; identical to SEQ ID NO: 347835
  Synthetic oligonucleotide

SEQ ID NO: 556696 - DNA, 59 bp, Artificial; identical to SEQ ID NO: 347838
  Synthetic oligonucleotide

SEQ ID NO: 556697 - DNA, 60 bp, Artificial; identical to SEQ ID NO: 347841
  Synthetic oligonucleotide

SEQ ID NO: 556698 - DNA, 52 bp, Artificial; identical to SEQ ID NO: 347842
  Synthetic oligonucleotide

SEQ ID NO: 556699 - DNA, 55 bp, Artificial; identical to SEQ ID NO: 347843
  Synthetic oligonucleotide

SEQ ID NO: 556700 - DNA, 59 bp, Artificial; identical to SEQ ID NO: 347844
  Synthetic oligonucleotide

SEQ ID NO: 556701 - DNA, 56 bp, Artificial; identical to SEQ ID NO: 347845
  Synthetic oligonucleotide

SEQ ID NO: 556702 - DNA, 57 bp, Artificial; identical to SEQ ID NO: 347847
  Synthetic oligonucleotide

SEQ ID NO: 556703 - DNA, 60 bp, Artificial; identical to SEQ ID NO: 8647
  Synthetic oligonucleotide

SEQ ID NO: 556704 - DNA, 53 bp, Artificial; identical to SEQ ID NO: 9227
  Synthetic oligonucleotide

SEQ ID NO: 556705 - DNA, 55 bp, Artificial; identical to SEQ ID NO: 347853
  Synthetic oligonucleotide

SEQ ID NO: 556706 - DNA, 58 bp, Artificial; identical to SEQ ID NO: 347855
  Synthetic oligonucleotide

SEQ ID NO: 556707 - DNA, 55 bp, Artificial; identical to SEQ ID NO: 347856
  Synthetic oligonucleotide

SEQ ID NO: 556708 - DNA, 60 bp, Artificial; identical to SEQ ID NO: 347857
  Synthetic oligonucleotide

SEQ ID NO: 556709 - DNA, 55 bp, Artificial; identical to SEQ ID NO: 347859
  Synthetic oligonucleotide

SEQ ID NO: 556710 - DNA, 55 bp, Artificial; identical to SEQ ID NO: 347864
  Synthetic oligonucleotide

SEQ ID NO: 556711 - DNA, 56 bp, Artificial; identical to SEQ ID NO: 347866
  Synthetic oligonucleotide

SEQ ID NO: 556712 - DNA, 55 bp, Artificial; identical to SEQ ID NO: 347869
  Synthetic oligonucleotide

SEQ ID NO: 556713 - DNA, 60 bp, Artificial; identical to SEQ ID NO: 347870
  Synthetic oligonucleotide

SEQ ID NO: 556714 - DNA, 60 bp, Artificial; identical to SEQ ID NO: 347873
  Synthetic oligonucleotide

SEQ ID NO: 556715 - DNA, 60 bp, Artificial; identical to SEQ ID NO: 347875
  Synthetic oligonucleotide

SEQ ID NO: 556716 - DNA, 55 bp, Artificial; identical to SEQ ID NO: 347876
  Synthetic oligonucleotide

SEQ ID NO: 556717 - DNA, 55 bp, Artificial; identical to SEQ ID NO: 347879
  Synthetic oligonucleotide

SEQ ID NO: 556718 - DNA, 55 bp, Artificial; identical to SEQ ID NO: 347888
  Synthetic oligonucleotide

SEQ ID NO: 556719 - DNA, 60 bp, Artificial; identical to SEQ ID NO: 347890
  Synthetic oligonucleotide

SEQ ID NO: 556720 - DNA, 56 bp, Artificial; identical to SEQ ID NO: 12856
  Synthetic oligonucleotide

SEQ ID NO: 556721 - DNA, 55 bp, Artificial; identical to SEQ ID NO: 347893
  Synthetic oligonucleotide

SEQ ID NO: 556722 - DNA, 56 bp, Artificial; identical to SEQ ID NO: 347899
  Synthetic oligonucleotide

SEQ ID NO: 556723 - DNA, 55 bp, Artificial; identical to SEQ ID NO: 347905
  Synthetic oligonucleotide

SEQ ID NO: 556724 - DNA, 58 bp, Artificial; identical to SEQ ID NO: 347907
  Synthetic oligonucleotide

SEQ ID NO: 556725 - DNA, 55 bp, Artificial; identical to SEQ ID NO: 347908
  Synthetic oligonucleotide

SEQ ID NO: 556726 - DNA, 60 bp, Artificial; identical to SEQ ID NO: 347909
  Synthetic oligonucleotide

SEQ ID NO: 556727 - DNA, 60 bp, Artificial; identical to SEQ ID NO: 347911
  Synthetic oligonucleotide

SEQ ID NO: 556728 - DNA, 60 bp, Artificial; identical to SEQ ID NO: 347913
  Synthetic oligonucleotide

SEQ ID NO: 556729 - DNA, 59 bp, Artificial; identical to SEQ ID NO: 17851
  Synthetic oligonucleotide

SEQ ID NO: 556730 - DNA, 58 bp, Artificial; identical to SEQ ID NO: 347914
  Synthetic oligonucleotide

SEQ ID NO: 556731 - DNA, 53 bp, Artificial; identical to SEQ ID NO: 347915
  Synthetic oligonucleotide

SEQ ID NO: 556732 - DNA, 60 bp, Artificial; identical to SEQ ID NO: 347917
  Synthetic oligonucleotide

SEQ ID NO: 556733 - DNA, 55 bp, Artificial; identical to SEQ ID NO: 347918
  Synthetic oligonucleotide

SEQ ID NO: 556734 - DNA, 57 bp, Artificial; identical to SEQ ID NO: 347919
  Synthetic oligonucleotide

SEQ ID NO: 556735 - DNA, 55 bp, Artificial; identical to SEQ ID NO: 15852
  Synthetic oligonucleotide

SEQ ID NO: 556736 - DNA, 55 bp, Artificial; identical to SEQ ID NO: 347921
  Synthetic oligonucleotide

SEQ ID NO: 556737 - DNA, 58 bp, Artificial; identical to SEQ ID NO: 12054
  Synthetic oligonucleotide

SEQ ID NO: 556738 - DNA, 60 bp, Artificial; identical to SEQ ID NO: 347926
  Synthetic oligonucleotide

SEQ ID NO: 556739 - DNA, 55 bp, Artificial; identical to SEQ ID NO: 347929
  Synthetic oligonucleotide

SEQ ID NO: 556740 - DNA, 60 bp, Artificial; identical to SEQ ID NO: 5958
  Synthetic oligonucleotide

SEQ ID NO: 556741 - DNA, 58 bp, Artificial; identical to SEQ ID NO: 347930
  Synthetic oligonucleotide

SEQ ID NO: 556742 - DNA, 55 bp, Artificial; identical to SEQ ID NO: 347934
  Synthetic oligonucleotide

SEQ ID NO: 556743 - DNA, 53 bp, Artificial; identical to SEQ ID NO: 347937
  Synthetic oligonucleotide

SEQ ID NO: 556744 - DNA, 60 bp, Artificial; identical to SEQ ID NO: 347938
  Synthetic oligonucleotide

SEQ ID NO: 556745 - DNA, 59 bp, Artificial; identical to SEQ ID NO: 347942
  Synthetic oligonucleotide

SEQ ID NO: 556746 - DNA, 56 bp, Artificial; identical to SEQ ID NO: 16792
  Synthetic oligonucleotide

SEQ ID NO: 556747 - DNA, 60 bp, Artificial; identical to SEQ ID NO: 347943
  Synthetic oligonucleotide

SEQ ID NO: 556748 - DNA, 60 bp, Artificial; identical to SEQ ID NO: 347947
  Synthetic oligonucleotide

SEQ ID NO: 556749 - DNA, 57 bp, Artificial; identical to SEQ ID NO: 347949
  Synthetic oligonucleotide

SEQ ID NO: 556750 - DNA, 60 bp, Artificial; identical to SEQ ID NO: 12517
  Synthetic oligonucleotide

SEQ ID NO: 556751 - DNA, 60 bp, Artificial; identical to SEQ ID NO: 8313
  Synthetic oligonucleotide

SEQ ID NO: 556752 - DNA, 60 bp, Artificial; identical to SEQ ID NO: 347954
  Synthetic oligonucleotide

SEQ ID NO: 556753 - DNA, 60 bp, Artificial; identical to SEQ ID NO: 347956
  Synthetic oligonucleotide

SEQ ID NO: 556754 - DNA, 55 bp, Artificial; identical to SEQ ID NO: 347957
  Synthetic oligonucleotide

SEQ ID NO: 556755 - DNA, 55 bp, Artificial; identical to SEQ ID NO: 347958
  Synthetic oligonucleotide

SEQ ID NO: 556756 - DNA, 57 bp, Artificial; identical to SEQ ID NO: 347961
  Synthetic oligonucleotide

SEQ ID NO: 556757 - DNA, 58 bp, Artificial; identical to SEQ ID NO: 347965
  Synthetic oligonucleotide

SEQ ID NO: 556758 - DNA, 55 bp, Artificial; identical to SEQ ID NO: 347968
  Synthetic oligonucleotide

SEQ ID NO: 556759 - DNA, 60 bp, Artificial; identical to SEQ ID NO: 347970
  Synthetic oligonucleotide

SEQ ID NO: 556760 - DNA, 55 bp, Artificial; identical to SEQ ID NO: 347971
  Synthetic oligonucleotide

SEQ ID NO: 556761 - DNA, 60 bp, Artificial; identical to SEQ ID NO: 347972
  Synthetic oligonucleotide

SEQ ID NO: 556762 - DNA, 55 bp, Artificial; identical to SEQ ID NO: 347977
  Synthetic oligonucleotide

SEQ ID NO: 556763 - DNA, 60 bp, Artificial; identical to SEQ ID NO: 347978
  Synthetic oligonucleotide

SEQ ID NO: 556764 - DNA, 60 bp, Artificial; identical to SEQ ID NO: 347981
  Synthetic oligonucleotide

SEQ ID NO: 556765 - DNA, 60 bp, Artificial; identical to SEQ ID NO: 347982
  Synthetic oligonucleotide

SEQ ID NO: 556766 - DNA, 55 bp, Artificial; identical to SEQ ID NO: 14707
  Synthetic oligonucleotide

SEQ ID NO: 556767 - DNA, 57 bp, Artificial; identical to SEQ ID NO: 347993
  Synthetic oligonucleotide

SEQ ID NO: 556768 - DNA, 56 bp, Artificial; identical to SEQ ID NO: 347996
  Synthetic oligonucleotide

SEQ ID NO: 556769 - DNA, 56 bp, Artificial; identical to SEQ ID NO: 347997
  Synthetic oligonucleotide

SEQ ID NO: 556770 - DNA, 60 bp, Artificial; identical to SEQ ID NO: 347999
  Synthetic oligonucleotide

SEQ ID NO: 556771 - DNA, 55 bp, Artificial; identical to SEQ ID NO: 348000
  Synthetic oligonucleotide

SEQ ID NO: 556772 - DNA, 60 bp, Artificial; identical to SEQ ID NO: 348001
  Synthetic oligonucleotide

SEQ ID NO: 556773 - DNA, 60 bp, Artificial; identical to SEQ ID NO: 348005
  Synthetic oligonucleotide

SEQ ID NO: 556774 - DNA, 60 bp, Artificial; identical to SEQ ID NO: 348006
  Synthetic oligonucleotide

SEQ ID NO: 556775 - DNA, 60 bp, Artificial; identical to SEQ ID NO: 348007
  Synthetic oligonucleotide

SEQ ID NO: 556776 - DNA, 60 bp, Artificial; identical to SEQ ID NO: 8222
  Synthetic oligonucleotide

SEQ ID NO: 556777 - DNA, 60 bp, Artificial; identical to SEQ ID NO: 348008
  Synthetic oligonucleotide

SEQ ID NO: 556778 - DNA, 55 bp, Artificial; identical to SEQ ID NO: 348011
  Synthetic oligonucleotide

SEQ ID NO: 556779 - DNA, 55 bp, Artificial; identical to SEQ ID NO: 348015
  Synthetic oligonucleotide

SEQ ID NO: 556780 - DNA, 55 bp, Artificial; identical to SEQ ID NO: 348018
  Synthetic oligonucleotide

SEQ ID NO: 556781 - DNA, 54 bp, Artificial; identical to SEQ ID NO: 348022
  Synthetic oligonucleotide

SEQ ID NO: 556782 - DNA, 55 bp, Artificial; identical to SEQ ID NO: 348025
  Synthetic oligonucleotide

SEQ ID NO: 556783 - DNA, 52 bp, Artificial; identical to SEQ ID NO: 348030
  Synthetic oligonucleotide

SEQ ID NO: 556784 - DNA, 59 bp, Artificial; identical to SEQ ID NO: 348032
  Synthetic oligonucleotide

SEQ ID NO: 556785 - DNA, 53 bp, Artificial; identical to SEQ ID NO: 348033
  Synthetic oligonucleotide

SEQ ID NO: 556786 - DNA, 60 bp, Artificial; identical to SEQ ID NO: 348034
  Synthetic oligonucleotide

SEQ ID NO: 556787 - DNA, 60 bp, Artificial; identical to SEQ ID NO: 348035
  Synthetic oligonucleotide

SEQ ID NO: 556788 - DNA, 60 bp, Artificial; identical to SEQ ID NO: 348036
  Synthetic oligonucleotide

SEQ ID NO: 556789 - DNA, 55 bp, Artificial; identical to SEQ ID NO: 348037
  Synthetic oligonucleotide

SEQ ID NO: 556790 - DNA, 60 bp, Artificial; identical to SEQ ID NO: 348040
  Synthetic oligonucleotide

SEQ ID NO: 556791 - DNA, 55 bp, Artificial; identical to SEQ ID NO: 348041
  Synthetic oligonucleotide

SEQ ID NO: 556792 - DNA, 60 bp, Artificial; identical to SEQ ID NO: 348043
  Synthetic oligonucleotide

SEQ ID NO: 556793 - DNA, 60 bp, Artificial; identical to SEQ ID NO: 348046
  Synthetic oligonucleotide

SEQ ID NO: 556794 - DNA, 60 bp, Artificial; identical to SEQ ID NO: 348048
  Synthetic oligonucleotide

SEQ ID NO: 556795 - DNA, 55 bp, Artificial; identical to SEQ ID NO: 348049
  Synthetic oligonucleotide

SEQ ID NO: 556796 - DNA, 53 bp, Artificial; identical to SEQ ID NO: 348050
  Synthetic oligonucleotide

SEQ ID NO: 556797 - DNA, 60 bp, Artificial; identical to SEQ ID NO: 348051
  Synthetic oligonucleotide

SEQ ID NO: 556798 - DNA, 52 bp, Artificial; identical to SEQ ID NO: 348052
  Synthetic oligonucleotide

SEQ ID NO: 556799 - DNA, 60 bp, Artificial; identical to SEQ ID NO: 348054
  Synthetic oligonucleotide

SEQ ID NO: 556800 - DNA, 60 bp, Artificial; identical to SEQ ID NO: 348055
  Synthetic oligonucleotide

SEQ ID NO: 556801 - DNA, 55 bp, Artificial; identical to SEQ ID NO: 348056
  Synthetic oligonucleotide

SEQ ID NO: 556802 - DNA, 60 bp, Artificial; identical to SEQ ID NO: 348062
  Synthetic oligonucleotide

SEQ ID NO: 556803 - DNA, 55 bp, Artificial; identical to SEQ ID NO: 348064
  Synthetic oligonucleotide

SEQ ID NO: 556804 - DNA, 55 bp, Artificial; identical to SEQ ID NO: 348070
  Synthetic oligonucleotide

SEQ ID NO: 556805 - DNA, 60 bp, Artificial; identical to SEQ ID NO: 348071
  Synthetic oligonucleotide

SEQ ID NO: 556806 - DNA, 56 bp, Artificial; identical to SEQ ID NO: 348073
  Synthetic oligonucleotide

SEQ ID NO: 556807 - DNA, 59 bp, Artificial; identical to SEQ ID NO: 348076
  Synthetic oligonucleotide

SEQ ID NO: 556808 - DNA, 50 bp, Artificial; identical to SEQ ID NO: 348077
  Synthetic oligonucleotide

SEQ ID NO: 556809 - DNA, 60 bp, Artificial; identical to SEQ ID NO: 348080
  Synthetic oligonucleotide

SEQ ID NO: 556810 - DNA, 60 bp, Artificial; identical to SEQ ID NO: 348081
  Synthetic oligonucleotide

SEQ ID NO: 556811 - DNA, 60 bp, Artificial; identical to SEQ ID NO: 348086
  Synthetic oligonucleotide

SEQ ID NO: 556812 - DNA, 60 bp, Artificial; identical to SEQ ID NO: 348087
  Synthetic oligonucleotide

SEQ ID NO: 556813 - DNA, 60 bp, Artificial; identical to SEQ ID NO: 348091
  Synthetic oligonucleotide

SEQ ID NO: 556814 - DNA, 55 bp, Artificial; identical to SEQ ID NO: 348092
  Synthetic oligonucleotide

SEQ ID NO: 556815 - DNA, 60 bp, Artificial; identical to SEQ ID NO: 348093
  Synthetic oligonucleotide

SEQ ID NO: 556816 - DNA, 58 bp, Artificial; identical to SEQ ID NO: 348094
  Synthetic oligonucleotide

SEQ ID NO: 556817 - DNA, 55 bp, Artificial; identical to SEQ ID NO: 348096
  Synthetic oligonucleotide

SEQ ID NO: 556818 - DNA, 60 bp, Artificial; identical to SEQ ID NO: 348100
  Synthetic oligonucleotide

SEQ ID NO: 556819 - DNA, 60 bp, Artificial; identical to SEQ ID NO: 348101
  Synthetic oligonucleotide

SEQ ID NO: 556820 - DNA, 55 bp, Artificial; identical to SEQ ID NO: 348102
  Synthetic oligonucleotide

SEQ ID NO: 556821 - DNA, 55 bp, Artificial; identical to SEQ ID NO: 348104
  Synthetic oligonucleotide

SEQ ID NO: 556822 - DNA, 57 bp, Artificial; identical to SEQ ID NO: 348107
  Synthetic oligonucleotide

SEQ ID NO: 556823 - DNA, 55 bp, Artificial; identical to SEQ ID NO: 348111
  Synthetic oligonucleotide

SEQ ID NO: 556824 - DNA, 55 bp, Artificial; identical to SEQ ID NO: 348112
  Synthetic oligonucleotide

SEQ ID NO: 556825 - DNA, 55 bp, Artificial; identical to SEQ ID NO: 348113
  Synthetic oligonucleotide

SEQ ID NO: 556826 - DNA, 55 bp, Artificial; identical to SEQ ID NO: 348115
  Synthetic oligonucleotide

SEQ ID NO: 556827 - DNA, 55 bp, Artificial; identical to SEQ ID NO: 348116
  Synthetic oligonucleotide

SEQ ID NO: 556828 - DNA, 60 bp, Artificial; identical to SEQ ID NO: 348117
  Synthetic oligonucleotide

SEQ ID NO: 556829 - DNA, 55 bp, Artificial; identical to SEQ ID NO: 348119
  Synthetic oligonucleotide

SEQ ID NO: 556830 - DNA, 55 bp, Artificial; identical to SEQ ID NO: 348121
  Synthetic oligonucleotide

SEQ ID NO: 556831 - DNA, 52 bp, Artificial; identical to SEQ ID NO: 348122
  Synthetic oligonucleotide

SEQ ID NO: 556832 - DNA, 55 bp, Artificial; identical to SEQ ID NO: 348123
  Synthetic oligonucleotide

SEQ ID NO: 556833 - DNA, 57 bp, Artificial; identical to SEQ ID NO: 348124
  Synthetic oligonucleotide

SEQ ID NO: 556834 - DNA, 60 bp, Artificial; identical to SEQ ID NO: 348125
  Synthetic oligonucleotide

SEQ ID NO: 556835 - DNA, 60 bp, Artificial; identical to SEQ ID NO: 7898
  Synthetic oligonucleotide

SEQ ID NO: 556836 - DNA, 55 bp, Artificial; identical to SEQ ID NO: 348127
  Synthetic oligonucleotide

SEQ ID NO: 556837 - DNA, 59 bp, Artificial; identical to SEQ ID NO: 348128
  Synthetic oligonucleotide

SEQ ID NO: 556838 - DNA, 60 bp, Artificial; identical to SEQ ID NO: 348129
  Synthetic oligonucleotide

SEQ ID NO: 556839 - DNA, 57 bp, Artificial; identical to SEQ ID NO: 348130
  Synthetic oligonucleotide

SEQ ID NO: 556840 - DNA, 55 bp, Artificial; identical to SEQ ID NO: 348133
  Synthetic oligonucleotide

SEQ ID NO: 556841 - DNA, 55 bp, Artificial; identical to SEQ ID NO: 348135
  Synthetic oligonucleotide

SEQ ID NO: 556842 - DNA, 55 bp, Artificial; identical to SEQ ID NO: 348139
  Synthetic oligonucleotide

SEQ ID NO: 556843 - DNA, 55 bp, Artificial; identical to SEQ ID NO: 348140
  Synthetic oligonucleotide

SEQ ID NO: 556844 - DNA, 55 bp, Artificial; identical to SEQ ID NO: 348142
  Synthetic oligonucleotide

SEQ ID NO: 556845 - DNA, 58 bp, Artificial; identical to SEQ ID NO: 348143
  Synthetic oligonucleotide

SEQ ID NO: 556846 - DNA, 60 bp, Artificial; identical to SEQ ID NO: 348148
  Synthetic oligonucleotide

SEQ ID NO: 556847 - DNA, 59 bp, Artificial; identical to SEQ ID NO: 348149
  Synthetic oligonucleotide

SEQ ID NO: 556848 - DNA, 55 bp, Artificial; identical to SEQ ID NO: 348165
  Synthetic oligonucleotide

SEQ ID NO: 556849 - DNA, 56 bp, Artificial; identical to SEQ ID NO: 348168
  Synthetic oligonucleotide

SEQ ID NO: 556850 - DNA, 59 bp, Artificial; identical to SEQ ID NO: 348170
  Synthetic oligonucleotide

SEQ ID NO: 556851 - DNA, 60 bp, Artificial; identical to SEQ ID NO: 348171
  Synthetic oligonucleotide

SEQ ID NO: 556852 - DNA, 60 bp, Artificial; identical to SEQ ID NO: 348172
  Synthetic oligonucleotide

SEQ ID NO: 556853 - DNA, 60 bp, Artificial; identical to SEQ ID NO: 348173
  Synthetic oligonucleotide

SEQ ID NO: 556854 - DNA, 55 bp, Artificial; identical to SEQ ID NO: 348174
  Synthetic oligonucleotide

SEQ ID NO: 556855 - DNA, 55 bp, Artificial; identical to SEQ ID NO: 10523
  Synthetic oligonucleotide

SEQ ID NO: 556856 - DNA, 55 bp, Artificial; identical to SEQ ID NO: 348177
  Synthetic oligonucleotide

SEQ ID NO: 556857 - DNA, 55 bp, Artificial; identical to SEQ ID NO: 348178
  Synthetic oligonucleotide

SEQ ID NO: 556858 - DNA, 51 bp, Artificial; identical to SEQ ID NO: 348179
  Synthetic oligonucleotide

SEQ ID NO: 556859 - DNA, 53 bp, Artificial; identical to SEQ ID NO: 348180
  Synthetic oligonucleotide

SEQ ID NO: 556860 - DNA, 55 bp, Artificial; identical to SEQ ID NO: 348182
  Synthetic oligonucleotide

SEQ ID NO: 556861 - DNA, 55 bp, Artificial; identical to SEQ ID NO: 348183
  Synthetic oligonucleotide

SEQ ID NO: 556862 - DNA, 55 bp, Artificial; identical to SEQ ID NO: 348185
  Synthetic oligonucleotide

SEQ ID NO: 556863 - DNA, 51 bp, Artificial; identical to SEQ ID NO: 348186
  Synthetic oligonucleotide

SEQ ID NO: 556864 - DNA, 55 bp, Artificial; identical to SEQ ID NO: 348187
  Synthetic oligonucleotide

SEQ ID NO: 556865 - DNA, 55 bp, Artificial; identical to SEQ ID NO: 348188
  Synthetic oligonucleotide

SEQ ID NO: 556866 - DNA, 54 bp, Artificial; identical to SEQ ID NO: 348190
  Synthetic oligonucleotide

SEQ ID NO: 556867 - DNA, 60 bp, Artificial; identical to SEQ ID NO: 348195
  Synthetic oligonucleotide

SEQ ID NO: 556868 - DNA, 60 bp, Artificial; identical to SEQ ID NO: 348197
  Synthetic oligonucleotide

SEQ ID NO: 556869 - DNA, 60 bp, Artificial; identical to SEQ ID NO: 9218
  Synthetic oligonucleotide

SEQ ID NO: 556870 - DNA, 51 bp, Artificial; identical to SEQ ID NO: 348198
  Synthetic oligonucleotide

SEQ ID NO: 556871 - DNA, 55 bp, Artificial; identical to SEQ ID NO: 348199
  Synthetic oligonucleotide

SEQ ID NO: 556872 - DNA, 60 bp, Artificial; identical to SEQ ID NO: 348200
  Synthetic oligonucleotide

SEQ ID NO: 556873 - DNA, 60 bp, Artificial; identical to SEQ ID NO: 348201
  Synthetic oligonucleotide

SEQ ID NO: 556874 - DNA, 58 bp, Artificial; identical to SEQ ID NO: 348203
  Synthetic oligonucleotide

SEQ ID NO: 556875 - DNA, 52 bp, Artificial; identical to SEQ ID NO: 348208
  Synthetic oligonucleotide

SEQ ID NO: 556876 - DNA, 51 bp, Artificial; identical to SEQ ID NO: 348209
  Synthetic oligonucleotide

SEQ ID NO: 556877 - DNA, 57 bp, Artificial; identical to SEQ ID NO: 348211
  Synthetic oligonucleotide

SEQ ID NO: 556878 - DNA, 56 bp, Artificial; identical to SEQ ID NO: 348218
  Synthetic oligonucleotide

SEQ ID NO: 556879 - DNA, 54 bp, Artificial; identical to SEQ ID NO: 348219
  Synthetic oligonucleotide

SEQ ID NO: 556880 - DNA, 55 bp, Artificial; identical to SEQ ID NO: 348224
  Synthetic oligonucleotide

SEQ ID NO: 556881 - DNA, 57 bp, Artificial; identical to SEQ ID NO: 348226
  Synthetic oligonucleotide

SEQ ID NO: 556882 - DNA, 55 bp, Artificial; identical to SEQ ID NO: 348227
  Synthetic oligonucleotide

SEQ ID NO: 556883 - DNA, 59 bp, Artificial; identical to SEQ ID NO: 348230
  Synthetic oligonucleotide

SEQ ID NO: 556884 - DNA, 55 bp, Artificial; identical to SEQ ID NO: 348231
  Synthetic oligonucleotide

SEQ ID NO: 556885 - DNA, 55 bp, Artificial; identical to SEQ ID NO: 348233
  Synthetic oligonucleotide

SEQ ID NO: 556886 - DNA, 55 bp, Artificial; identical to SEQ ID NO: 348236
  Synthetic oligonucleotide

SEQ ID NO: 556887 - DNA, 55 bp, Artificial; identical to SEQ ID NO: 348241
  Synthetic oligonucleotide

SEQ ID NO: 556888 - DNA, 60 bp, Artificial; identical to SEQ ID NO: 348243
  Synthetic oligonucleotide

SEQ ID NO: 556889 - DNA, 55 bp, Artificial; identical to SEQ ID NO: 348244
  Synthetic oligonucleotide

SEQ ID NO: 556890 - DNA, 60 bp, Artificial; identical to SEQ ID NO: 348245
  Synthetic oligonucleotide

SEQ ID NO: 556891 - DNA, 55 bp, Artificial; identical to SEQ ID NO: 348247
  Synthetic oligonucleotide

SEQ ID NO: 556892 - DNA, 60 bp, Artificial; identical to SEQ ID NO: 348249
  Synthetic oligonucleotide

SEQ ID NO: 556893 - DNA, 55 bp, Artificial; identical to SEQ ID NO: 348251
  Synthetic oligonucleotide

SEQ ID NO: 556894 - DNA, 55 bp, Artificial; identical to SEQ ID NO: 348252
  Synthetic oligonucleotide

SEQ ID NO: 556895 - DNA, 57 bp, Artificial; identical to SEQ ID NO: 19168
  Synthetic oligonucleotide

SEQ ID NO: 556896 - DNA, 55 bp, Artificial; identical to SEQ ID NO: 348253
  Synthetic oligonucleotide

SEQ ID NO: 556897 - DNA, 60 bp, Artificial; identical to SEQ ID NO: 348254
  Synthetic oligonucleotide

SEQ ID NO: 556898 - DNA, 55 bp, Artificial; identical to SEQ ID NO: 348259
  Synthetic oligonucleotide

SEQ ID NO: 556899 - DNA, 60 bp, Artificial; identical to SEQ ID NO: 348263
  Synthetic oligonucleotide

SEQ ID NO: 556900 - DNA, 56 bp, Artificial; identical to SEQ ID NO: 348266
  Synthetic oligonucleotide

SEQ ID NO: 556901 - DNA, 60 bp, Artificial; identical to SEQ ID NO: 348267
  Synthetic oligonucleotide

SEQ ID NO: 556902 - DNA, 57 bp, Artificial; identical to SEQ ID NO: 348270
  Synthetic oligonucleotide

SEQ ID NO: 556903 - DNA, 60 bp, Artificial; identical to SEQ ID NO: 348271
  Synthetic oligonucleotide

SEQ ID NO: 556904 - DNA, 60 bp, Artificial; identical to SEQ ID NO: 348274
  Synthetic oligonucleotide

SEQ ID NO: 556905 - DNA, 55 bp, Artificial; identical to SEQ ID NO: 348275
  Synthetic oligonucleotide

SEQ ID NO: 556906 - DNA, 52 bp, Artificial; identical to SEQ ID NO: 348278
  Synthetic oligonucleotide

SEQ ID NO: 556907 - DNA, 54 bp, Artificial; identical to SEQ ID NO: 348280
  Synthetic oligonucleotide

SEQ ID NO: 556908 - DNA, 55 bp, Artificial; identical to SEQ ID NO: 348281
  Synthetic oligonucleotide

SEQ ID NO: 556909 - DNA, 59 bp, Artificial; identical to SEQ ID NO: 348282
  Synthetic oligonucleotide

SEQ ID NO: 556910 - DNA, 48 bp, Artificial; identical to SEQ ID NO: 348283
  Synthetic oligonucleotide

SEQ ID NO: 556911 - DNA, 59 bp, Artificial; identical to SEQ ID NO: 348287
  Synthetic oligonucleotide

SEQ ID NO: 556912 - DNA, 55 bp, Artificial; identical to SEQ ID NO: 348291
  Synthetic oligonucleotide

SEQ ID NO: 556913 - DNA, 55 bp, Artificial; identical to SEQ ID NO: 348292
  Synthetic oligonucleotide

SEQ ID NO: 556914 - DNA, 58 bp, Artificial; identical to SEQ ID NO: 348297
  Synthetic oligonucleotide

SEQ ID NO: 556915 - DNA, 57 bp, Artificial; identical to SEQ ID NO: 348298
  Synthetic oligonucleotide

SEQ ID NO: 556916 - DNA, 55 bp, Artificial; identical to SEQ ID NO: 348304
  Synthetic oligonucleotide

SEQ ID NO: 556917 - DNA, 55 bp, Artificial; identical to SEQ ID NO: 348307
  Synthetic oligonucleotide

SEQ ID NO: 556918 - DNA, 51 bp, Artificial; identical to SEQ ID NO: 348310
  Synthetic oligonucleotide

SEQ ID NO: 556919 - DNA, 56 bp, Artificial; identical to SEQ ID NO: 348311
  Synthetic oligonucleotide

SEQ ID NO: 556920 - DNA, 58 bp, Artificial; identical to SEQ ID NO: 348314
  Synthetic oligonucleotide

SEQ ID NO: 556921 - DNA, 55 bp, Artificial; identical to SEQ ID NO: 348315
  Synthetic oligonucleotide

SEQ ID NO: 556922 - DNA, 55 bp, Artificial; identical to SEQ ID NO: 348317
  Synthetic oligonucleotide

SEQ ID NO: 556923 - DNA, 54 bp, Artificial; identical to SEQ ID NO: 348322
  Synthetic oligonucleotide

SEQ ID NO: 556924 - DNA, 60 bp, Artificial; identical to SEQ ID NO: 348323
  Synthetic oligonucleotide

SEQ ID NO: 556925 - DNA, 54 bp, Artificial; identical to SEQ ID NO: 348326
  Synthetic oligonucleotide

SEQ ID NO: 556926 - DNA, 55 bp, Artificial; identical to SEQ ID NO: 348327
  Synthetic oligonucleotide

SEQ ID NO: 556927 - DNA, 56 bp, Artificial; identical to SEQ ID NO: 348328
  Synthetic oligonucleotide

SEQ ID NO: 556928 - DNA, 60 bp, Artificial; identical to SEQ ID NO: 348335
  Synthetic oligonucleotide

SEQ ID NO: 556929 - DNA, 59 bp, Artificial; identical to SEQ ID NO: 348338
  Synthetic oligonucleotide

SEQ ID NO: 556930 - DNA, 55 bp, Artificial; identical to SEQ ID NO: 348343
  Synthetic oligonucleotide

SEQ ID NO: 556931 - DNA, 58 bp, Artificial; identical to SEQ ID NO: 348344
  Synthetic oligonucleotide

SEQ ID NO: 556932 - DNA, 60 bp, Artificial; identical to SEQ ID NO: 348346
  Synthetic oligonucleotide

SEQ ID NO: 556933 - DNA, 60 bp, Artificial; identical to SEQ ID NO: 348349
  Synthetic oligonucleotide

SEQ ID NO: 556934 - DNA, 57 bp, Artificial; identical to SEQ ID NO: 348350
  Synthetic oligonucleotide

SEQ ID NO: 556935 - DNA, 60 bp, Artificial; identical to SEQ ID NO: 348355
  Synthetic oligonucleotide

SEQ ID NO: 556936 - DNA, 60 bp, Artificial; identical to SEQ ID NO: 348356
  Synthetic oligonucleotide

SEQ ID NO: 556937 - DNA, 60 bp, Artificial; identical to SEQ ID NO: 348357
  Synthetic oligonucleotide

SEQ ID NO: 556938 - DNA, 58 bp, Artificial; identical to SEQ ID NO: 348360
  Synthetic oligonucleotide

SEQ ID NO: 556939 - DNA, 56 bp, Artificial; identical to SEQ ID NO: 348361
  Synthetic oligonucleotide

SEQ ID NO: 556940 - DNA, 60 bp, Artificial; identical to SEQ ID NO: 348363
  Synthetic oligonucleotide

SEQ ID NO: 556941 - DNA, 54 bp, Artificial; identical to SEQ ID NO: 348365
  Synthetic oligonucleotide

SEQ ID NO: 556942 - DNA, 60 bp, Artificial; identical to SEQ ID NO: 348367
  Synthetic oligonucleotide

SEQ ID NO: 556943 - DNA, 52 bp, Artificial; identical to SEQ ID NO: 348368
  Synthetic oligonucleotide

SEQ ID NO: 556944 - DNA, 55 bp, Artificial; identical to SEQ ID NO: 348369
  Synthetic oligonucleotide

SEQ ID NO: 556945 - DNA, 57 bp, Artificial; identical to SEQ ID NO: 348371
  Synthetic oligonucleotide

SEQ ID NO: 556946 - DNA, 55 bp, Artificial; identical to SEQ ID NO: 348374
  Synthetic oligonucleotide

SEQ ID NO: 556947 - DNA, 55 bp, Artificial; identical to SEQ ID NO: 348380
  Synthetic oligonucleotide

SEQ ID NO: 556948 - DNA, 56 bp, Artificial; identical to SEQ ID NO: 348382
  Synthetic oligonucleotide

SEQ ID NO: 556949 - DNA, 60 bp, Artificial; identical to SEQ ID NO: 348385
  Synthetic oligonucleotide

SEQ ID NO: 556950 - DNA, 60 bp, Artificial; identical to SEQ ID NO: 348386
  Synthetic oligonucleotide

SEQ ID NO: 556951 - DNA, 55 bp, Artificial; identical to SEQ ID NO: 348389
  Synthetic oligonucleotide

SEQ ID NO: 556952 - DNA, 60 bp, Artificial; identical to SEQ ID NO: 348391
  Synthetic oligonucleotide

SEQ ID NO: 556953 - DNA, 54 bp, Artificial; identical to SEQ ID NO: 348392
  Synthetic oligonucleotide

SEQ ID NO: 556954 - DNA, 52 bp, Artificial; identical to SEQ ID NO: 348394
  Synthetic oligonucleotide

SEQ ID NO: 556955 - DNA, 55 bp, Artificial; identical to SEQ ID NO: 348395
  Synthetic oligonucleotide

SEQ ID NO: 556956 - DNA, 60 bp, Artificial; identical to SEQ ID NO: 348396
  Synthetic oligonucleotide

SEQ ID NO: 556957 - DNA, 60 bp, Artificial; identical to SEQ ID NO: 348397
  Synthetic oligonucleotide

SEQ ID NO: 556958 - DNA, 55 bp, Artificial; identical to SEQ ID NO: 348398
  Synthetic oligonucleotide

SEQ ID NO: 556959 - DNA, 55 bp, Artificial; identical to SEQ ID NO: 348403
  Synthetic oligonucleotide

SEQ ID NO: 556960 - DNA, 53 bp, Artificial; identical to SEQ ID NO: 348405
  Synthetic oligonucleotide

SEQ ID NO: 556961 - DNA, 59 bp, Artificial; identical to SEQ ID NO: 348406
  Synthetic oligonucleotide

SEQ ID NO: 556962 - DNA, 60 bp, Artificial; identical to SEQ ID NO: 348407
  Synthetic oligonucleotide

SEQ ID NO: 556963 - DNA, 55 bp, Artificial; identical to SEQ ID NO: 348409
  Synthetic oligonucleotide

SEQ ID NO: 556964 - DNA, 59 bp, Artificial; identical to SEQ ID NO: 348413
  Synthetic oligonucleotide

SEQ ID NO: 556965 - DNA, 55 bp, Artificial; identical to SEQ ID NO: 348415
  Synthetic oligonucleotide

SEQ ID NO: 556966 - DNA, 56 bp, Artificial; identical to SEQ ID NO: 348418
  Synthetic oligonucleotide

SEQ ID NO: 556967 - DNA, 55 bp, Artificial; identical to SEQ ID NO: 348419
  Synthetic oligonucleotide

SEQ ID NO: 556968 - DNA, 55 bp, Artificial; identical to SEQ ID NO: 10153
  Synthetic oligonucleotide

SEQ ID NO: 556969 - DNA, 59 bp, Artificial; identical to SEQ ID NO: 348421
  Synthetic oligonucleotide

SEQ ID NO: 556970 - DNA, 59 bp, Artificial; identical to SEQ ID NO: 348426
  Synthetic oligonucleotide

SEQ ID NO: 556971 - DNA, 55 bp, Artificial; identical to SEQ ID NO: 348430
  Synthetic oligonucleotide

SEQ ID NO: 556972 - DNA, 55 bp, Artificial; identical to SEQ ID NO: 12497
  Synthetic oligonucleotide

SEQ ID NO: 556973 - DNA, 53 bp, Artificial; identical to SEQ ID NO: 348431
  Synthetic oligonucleotide

SEQ ID NO: 556974 - DNA, 60 bp, Artificial; identical to SEQ ID NO: 348433
  Synthetic oligonucleotide

SEQ ID NO: 556975 - DNA, 60 bp, Artificial; identical to SEQ ID NO: 348436
  Synthetic oligonucleotide

SEQ ID NO: 556976 - DNA, 55 bp, Artificial; identical to SEQ ID NO: 348437
  Synthetic oligonucleotide

SEQ ID NO: 556977 - DNA, 54 bp, Artificial; identical to SEQ ID NO: 348438
  Synthetic oligonucleotide

SEQ ID NO: 556978 - DNA, 60 bp, Artificial; identical to SEQ ID NO: 348440
  Synthetic oligonucleotide

SEQ ID NO: 556979 - DNA, 55 bp, Artificial; identical to SEQ ID NO: 348441
  Synthetic oligonucleotide

SEQ ID NO: 556980 - DNA, 60 bp, Artificial; identical to SEQ ID NO: 348442
  Synthetic oligonucleotide

SEQ ID NO: 556981 - DNA, 60 bp, Artificial; identical to SEQ ID NO: 348449
  Synthetic oligonucleotide

SEQ ID NO: 556982 - DNA, 60 bp, Artificial; identical to SEQ ID NO: 348451
  Synthetic oligonucleotide

SEQ ID NO: 556983 - DNA, 57 bp, Artificial; identical to SEQ ID NO: 348452
  Synthetic oligonucleotide

SEQ ID NO: 556984 - DNA, 55 bp, Artificial; identical to SEQ ID NO: 348453
  Synthetic oligonucleotide

SEQ ID NO: 556985 - DNA, 55 bp, Artificial; identical to SEQ ID NO: 348456
  Synthetic oligonucleotide

SEQ ID NO: 556986 - DNA, 56 bp, Artificial; identical to SEQ ID NO: 348457
  Synthetic oligonucleotide

SEQ ID NO: 556987 - DNA, 54 bp, Artificial; identical to SEQ ID NO: 348459
  Synthetic oligonucleotide

SEQ ID NO: 556988 - DNA, 60 bp, Artificial; identical to SEQ ID NO: 31382
  Synthetic oligonucleotide

SEQ ID NO: 556989 - DNA, 55 bp, Artificial; identical to SEQ ID NO: 348464
  Synthetic oligonucleotide

SEQ ID NO: 556990 - DNA, 50 bp, Artificial; identical to SEQ ID NO: 348465
  Synthetic oligonucleotide

SEQ ID NO: 556991 - DNA, 56 bp, Artificial; identical to SEQ ID NO: 348468
  Synthetic oligonucleotide

SEQ ID NO: 556992 - DNA, 56 bp, Artificial; identical to SEQ ID NO: 348471
  Synthetic oligonucleotide

SEQ ID NO: 556993 - DNA, 55 bp, Artificial; identical to SEQ ID NO: 348473
  Synthetic oligonucleotide

SEQ ID NO: 556994 - DNA, 55 bp, Artificial; identical to SEQ ID NO: 348476
  Synthetic oligonucleotide

SEQ ID NO: 556995 - DNA, 60 bp, Artificial; identical to SEQ ID NO: 348477
  Synthetic oligonucleotide

SEQ ID NO: 556996 - DNA, 59 bp, Artificial; identical to SEQ ID NO: 348478
  Synthetic oligonucleotide

SEQ ID NO: 556997 - DNA, 55 bp, Artificial; identical to SEQ ID NO: 348480
  Synthetic oligonucleotide

SEQ ID NO: 556998 - DNA, 55 bp, Artificial; identical to SEQ ID NO: 348481
  Synthetic oligonucleotide

SEQ ID NO: 556999 - DNA, 54 bp, Artificial; identical to SEQ ID NO: 348486
  Synthetic oligonucleotide

SEQ ID NO: 557000 - DNA, 60 bp, Artificial; identical to SEQ ID NO: 348488
  Synthetic oligonucleotide

SEQ ID NO: 557001 - DNA, 59 bp, Artificial; identical to SEQ ID NO: 348491
  Synthetic oligonucleotide

SEQ ID NO: 557002 - DNA, 60 bp, Artificial; identical to SEQ ID NO: 348495
  Synthetic oligonucleotide

SEQ ID NO: 557003 - DNA, 55 bp, Artificial; identical to SEQ ID NO: 348497
  Synthetic oligonucleotide

SEQ ID NO: 557004 - DNA, 56 bp, Artificial; identical to SEQ ID NO: 348500
  Synthetic oligonucleotide

SEQ ID NO: 557005 - DNA, 55 bp, Artificial; identical to SEQ ID NO: 348502
  Synthetic oligonucleotide

SEQ ID NO: 557006 - DNA, 55 bp, Artificial; identical to SEQ ID NO: 348504
  Synthetic oligonucleotide

SEQ ID NO: 557007 - DNA, 60 bp, Artificial; identical to SEQ ID NO: 348507
  Synthetic oligonucleotide

SEQ ID NO: 557008 - DNA, 55 bp, Artificial; identical to SEQ ID NO: 348508
  Synthetic oligonucleotide

SEQ ID NO: 557009 - DNA, 60 bp, Artificial; identical to SEQ ID NO: 348509
  Synthetic oligonucleotide

SEQ ID NO: 557010 - DNA, 60 bp, Artificial; identical to SEQ ID NO: 348511
  Synthetic oligonucleotide

SEQ ID NO: 557011 - DNA, 50 bp, Artificial; identical to SEQ ID NO: 348513
  Synthetic oligonucleotide

SEQ ID NO: 557012 - DNA, 55 bp, Artificial; identical to SEQ ID NO: 348514
  Synthetic oligonucleotide

SEQ ID NO: 557013 - DNA, 56 bp, Artificial; identical to SEQ ID NO: 348515
  Synthetic oligonucleotide

SEQ ID NO: 557014 - DNA, 60 bp, Artificial; identical to SEQ ID NO: 348516
  Synthetic oligonucleotide

SEQ ID NO: 557015 - DNA, 60 bp, Artificial; identical to SEQ ID NO: 348518
  Synthetic oligonucleotide

SEQ ID NO: 557016 - DNA, 60 bp, Artificial; identical to SEQ ID NO: 348521
  Synthetic oligonucleotide

SEQ ID NO: 557017 - DNA, 60 bp, Artificial; identical to SEQ ID NO: 348527
  Synthetic oligonucleotide

SEQ ID NO: 557018 - DNA, 55 bp, Artificial; identical to SEQ ID NO: 348536
  Synthetic oligonucleotide

SEQ ID NO: 557019 - DNA, 54 bp, Artificial; identical to SEQ ID NO: 348538
  Synthetic oligonucleotide

SEQ ID NO: 557020 - DNA, 60 bp, Artificial; identical to SEQ ID NO: 348539
  Synthetic oligonucleotide

SEQ ID NO: 557021 - DNA, 60 bp, Artificial; identical to SEQ ID NO: 348540
  Synthetic oligonucleotide

SEQ ID NO: 557022 - DNA, 55 bp, Artificial; identical to SEQ ID NO: 348542
  Synthetic oligonucleotide

SEQ ID NO: 557023 - DNA, 55 bp, Artificial; identical to SEQ ID NO: 348543
  Synthetic oligonucleotide

SEQ ID NO: 557024 - DNA, 60 bp, Artificial; identical to SEQ ID NO: 348544
  Synthetic oligonucleotide

SEQ ID NO: 557025 - DNA, 60 bp, Artificial; identical to SEQ ID NO: 348545
  Synthetic oligonucleotide

SEQ ID NO: 557026 - DNA, 55 bp, Artificial; identical to SEQ ID NO: 348546
  Synthetic oligonucleotide

SEQ ID NO: 557027 - DNA, 55 bp, Artificial; identical to SEQ ID NO: 348548
  Synthetic oligonucleotide

SEQ ID NO: 557028 - DNA, 60 bp, Artificial; identical to SEQ ID NO: 348551
  Synthetic oligonucleotide

SEQ ID NO: 557029 - DNA, 57 bp, Artificial; identical to SEQ ID NO: 348555
  Synthetic oligonucleotide

SEQ ID NO: 557030 - DNA, 58 bp, Artificial; identical to SEQ ID NO: 348559
  Synthetic oligonucleotide

SEQ ID NO: 557031 - DNA, 60 bp, Artificial; identical to SEQ ID NO: 348562
  Synthetic oligonucleotide

SEQ ID NO: 557032 - DNA, 55 bp, Artificial; identical to SEQ ID NO: 348563
  Synthetic oligonucleotide

SEQ ID NO: 557033 - DNA, 55 bp, Artificial; identical to SEQ ID NO: 348567
  Synthetic oligonucleotide

SEQ ID NO: 557034 - DNA, 54 bp, Artificial; identical to SEQ ID NO: 348581
  Synthetic oligonucleotide

SEQ ID NO: 557035 - DNA, 58 bp, Artificial; identical to SEQ ID NO: 348584
  Synthetic oligonucleotide

SEQ ID NO: 557036 - DNA, 55 bp, Artificial; identical to SEQ ID NO: 348587
  Synthetic oligonucleotide

SEQ ID NO: 557037 - DNA, 55 bp, Artificial; identical to SEQ ID NO: 348589
  Synthetic oligonucleotide

SEQ ID NO: 557038 - DNA, 55 bp, Artificial; identical to SEQ ID NO: 348591
  Synthetic oligonucleotide

SEQ ID NO: 557039 - DNA, 59 bp, Artificial; identical to SEQ ID NO: 348594
  Synthetic oligonucleotide

SEQ ID NO: 557040 - DNA, 56 bp, Artificial; identical to SEQ ID NO: 15485
  Synthetic oligonucleotide

SEQ ID NO: 557041 - DNA, 60 bp, Artificial; identical to SEQ ID NO: 348597
  Synthetic oligonucleotide

SEQ ID NO: 557042 - DNA, 57 bp, Artificial; identical to SEQ ID NO: 348598
  Synthetic oligonucleotide

SEQ ID NO: 557043 - DNA, 58 bp, Artificial; identical to SEQ ID NO: 348599
  Synthetic oligonucleotide

SEQ ID NO: 557044 - DNA, 55 bp, Artificial; identical to SEQ ID NO: 348600
  Synthetic oligonucleotide

SEQ ID NO: 557045 - DNA, 60 bp, Artificial; identical to SEQ ID NO: 14549
  Synthetic oligonucleotide

SEQ ID NO: 557046 - DNA, 52 bp, Artificial; identical to SEQ ID NO: 348602
  Synthetic oligonucleotide

SEQ ID NO: 557047 - DNA, 55 bp, Artificial; identical to SEQ ID NO: 348604
  Synthetic oligonucleotide

SEQ ID NO: 557048 - DNA, 55 bp, Artificial; identical to SEQ ID NO: 348610
  Synthetic oligonucleotide

SEQ ID NO: 557049 - DNA, 50 bp, Artificial; identical to SEQ ID NO: 348611
  Synthetic oligonucleotide

SEQ ID NO: 557050 - DNA, 60 bp, Artificial; identical to SEQ ID NO: 348613
  Synthetic oligonucleotide

SEQ ID NO: 557051 - DNA, 55 bp, Artificial; identical to SEQ ID NO: 348615
  Synthetic oligonucleotide

SEQ ID NO: 557052 - DNA, 60 bp, Artificial; identical to SEQ ID NO: 348617
  Synthetic oligonucleotide

SEQ ID NO: 557053 - DNA, 56 bp, Artificial; identical to SEQ ID NO: 348618
  Synthetic oligonucleotide

SEQ ID NO: 557054 - DNA, 55 bp, Artificial; identical to SEQ ID NO: 348619
  Synthetic oligonucleotide

SEQ ID NO: 557055 - DNA, 51 bp, Artificial; identical to SEQ ID NO: 348623
  Synthetic oligonucleotide

SEQ ID NO: 557056 - DNA, 55 bp, Artificial; identical to SEQ ID NO: 348624
  Synthetic oligonucleotide

SEQ ID NO: 557057 - DNA, 53 bp, Artificial; identical to SEQ ID NO: 348626
  Synthetic oligonucleotide

SEQ ID NO: 557058 - DNA, 59 bp, Artificial; identical to SEQ ID NO: 348628
  Synthetic oligonucleotide

SEQ ID NO: 557059 - DNA, 60 bp, Artificial; identical to SEQ ID NO: 15386
  Synthetic oligonucleotide

SEQ ID NO: 557060 - DNA, 58 bp, Artificial; identical to SEQ ID NO: 348632
  Synthetic oligonucleotide

SEQ ID NO: 557061 - DNA, 60 bp, Artificial; identical to SEQ ID NO: 348636
  Synthetic oligonucleotide

SEQ ID NO: 557062 - DNA, 57 bp, Artificial; identical to SEQ ID NO: 348640
  Synthetic oligonucleotide

SEQ ID NO: 557063 - DNA, 53 bp, Artificial; identical to SEQ ID NO: 348644
  Synthetic oligonucleotide

SEQ ID NO: 557064 - DNA, 60 bp, Artificial; identical to SEQ ID NO: 348645
  Synthetic oligonucleotide

SEQ ID NO: 557065 - DNA, 55 bp, Artificial; identical to SEQ ID NO: 348646
  Synthetic oligonucleotide

SEQ ID NO: 557066 - DNA, 55 bp, Artificial; identical to SEQ ID NO: 348650
  Synthetic oligonucleotide

SEQ ID NO: 557067 - DNA, 53 bp, Artificial; identical to SEQ ID NO: 348655
  Synthetic oligonucleotide

SEQ ID NO: 557068 - DNA, 60 bp, Artificial; identical to SEQ ID NO: 348657
  Synthetic oligonucleotide

SEQ ID NO: 557069 - DNA, 58 bp, Artificial; identical to SEQ ID NO: 348659
  Synthetic oligonucleotide

SEQ ID NO: 557070 - DNA, 55 bp, Artificial; identical to SEQ ID NO: 348661
  Synthetic oligonucleotide

SEQ ID NO: 557071 - DNA, 59 bp, Artificial; identical to SEQ ID NO: 348662
  Synthetic oligonucleotide

SEQ ID NO: 557072 - DNA, 50 bp, Artificial; identical to SEQ ID NO: 348664
  Synthetic oligonucleotide

SEQ ID NO: 557073 - DNA, 55 bp, Artificial; identical to SEQ ID NO: 18427
  Synthetic oligonucleotide

SEQ ID NO: 557074 - DNA, 55 bp, Artificial; identical to SEQ ID NO: 348670
  Synthetic oligonucleotide

SEQ ID NO: 557075 - DNA, 55 bp, Artificial; identical to SEQ ID NO: 348671
  Synthetic oligonucleotide

SEQ ID NO: 557076 - DNA, 55 bp, Artificial; identical to SEQ ID NO: 348677
  Synthetic oligonucleotide

SEQ ID NO: 557077 - DNA, 60 bp, Artificial; identical to SEQ ID NO: 348678
  Synthetic oligonucleotide

SEQ ID NO: 557078 - DNA, 55 bp, Artificial; identical to SEQ ID NO: 348679
  Synthetic oligonucleotide

SEQ ID NO: 557079 - DNA, 55 bp, Artificial; identical to SEQ ID NO: 348681
  Synthetic oligonucleotide

SEQ ID NO: 557080 - DNA, 56 bp, Artificial; identical to SEQ ID NO: 348683
  Synthetic oligonucleotide

SEQ ID NO: 557081 - DNA, 59 bp, Artificial; identical to SEQ ID NO: 348684
  Synthetic oligonucleotide

SEQ ID NO: 557082 - DNA, 52 bp, Artificial; identical to SEQ ID NO: 348685
  Synthetic oligonucleotide

SEQ ID NO: 557083 - DNA, 54 bp, Artificial; identical to SEQ ID NO: 348690
  Synthetic oligonucleotide

SEQ ID NO: 557084 - DNA, 57 bp, Artificial; identical to SEQ ID NO: 348694
  Synthetic oligonucleotide

SEQ ID NO: 557085 - DNA, 58 bp, Artificial; identical to SEQ ID NO: 348695
  Synthetic oligonucleotide

SEQ ID NO: 557086 - DNA, 60 bp, Artificial; identical to SEQ ID NO: 348696
  Synthetic oligonucleotide

SEQ ID NO: 557087 - DNA, 60 bp, Artificial; identical to SEQ ID NO: 348697
  Synthetic oligonucleotide

SEQ ID NO: 557088 - DNA, 55 bp, Artificial; identical to SEQ ID NO: 348699
  Synthetic oligonucleotide

SEQ ID NO: 557089 - DNA, 55 bp, Artificial; identical to SEQ ID NO: 348703
  Synthetic oligonucleotide

SEQ ID NO: 557090 - DNA, 55 bp, Artificial; identical to SEQ ID NO: 348708
  Synthetic oligonucleotide

SEQ ID NO: 557091 - DNA, 55 bp, Artificial; identical to SEQ ID NO: 348709
  Synthetic oligonucleotide

SEQ ID NO: 557092 - DNA, 55 bp, Artificial; identical to SEQ ID NO: 348713
  Synthetic oligonucleotide

SEQ ID NO: 557093 - DNA, 56 bp, Artificial; identical to SEQ ID NO: 348714
  Synthetic oligonucleotide

SEQ ID NO: 557094 - DNA, 60 bp, Artificial; identical to SEQ ID NO: 7038
  Synthetic oligonucleotide

SEQ ID NO: 557095 - DNA, 55 bp, Artificial; identical to SEQ ID NO: 348716
  Synthetic oligonucleotide

SEQ ID NO: 557096 - DNA, 60 bp, Artificial; identical to SEQ ID NO: 348718
  Synthetic oligonucleotide

SEQ ID NO: 557097 - DNA, 52 bp, Artificial; identical to SEQ ID NO: 348720
  Synthetic oligonucleotide

SEQ ID NO: 557098 - DNA, 55 bp, Artificial; identical to SEQ ID NO: 348722
  Synthetic oligonucleotide

SEQ ID NO: 557099 - DNA, 57 bp, Artificial; identical to SEQ ID NO: 348723
  Synthetic oligonucleotide

SEQ ID NO: 557100 - DNA, 59 bp, Artificial; identical to SEQ ID NO: 348725
  Synthetic oligonucleotide

SEQ ID NO: 557101 - DNA, 60 bp, Artificial; identical to SEQ ID NO: 348729
  Synthetic oligonucleotide

SEQ ID NO: 557102 - DNA, 51 bp, Artificial; identical to SEQ ID NO: 348730
  Synthetic oligonucleotide

SEQ ID NO: 557103 - DNA, 60 bp, Artificial; identical to SEQ ID NO: 348733
  Synthetic oligonucleotide

SEQ ID NO: 557104 - DNA, 52 bp, Artificial; identical to SEQ ID NO: 348737
  Synthetic oligonucleotide

SEQ ID NO: 557105 - DNA, 55 bp, Artificial; identical to SEQ ID NO: 348738
  Synthetic oligonucleotide

SEQ ID NO: 557106 - DNA, 60 bp, Artificial; identical to SEQ ID NO: 348740
  Synthetic oligonucleotide

SEQ ID NO: 557107 - DNA, 55 bp, Artificial; identical to SEQ ID NO: 348743
  Synthetic oligonucleotide

SEQ ID NO: 557108 - DNA, 59 bp, Artificial; identical to SEQ ID NO: 348744
  Synthetic oligonucleotide

SEQ ID NO: 557109 - DNA, 55 bp, Artificial; identical to SEQ ID NO: 9850
  Synthetic oligonucleotide

SEQ ID NO: 557110 - DNA, 58 bp, Artificial; identical to SEQ ID NO: 348746
  Synthetic oligonucleotide

SEQ ID NO: 557111 - DNA, 58 bp, Artificial; identical to SEQ ID NO: 348747
  Synthetic oligonucleotide

SEQ ID NO: 557112 - DNA, 58 bp, Artificial; identical to SEQ ID NO: 348754
  Synthetic oligonucleotide

SEQ ID NO: 557113 - DNA, 54 bp, Artificial; identical to SEQ ID NO: 348758
  Synthetic oligonucleotide

SEQ ID NO: 557114 - DNA, 60 bp, Artificial; identical to SEQ ID NO: 348759
  Synthetic oligonucleotide

SEQ ID NO: 557115 - DNA, 53 bp, Artificial; identical to SEQ ID NO: 348760
  Synthetic oligonucleotide

SEQ ID NO: 557116 - DNA, 57 bp, Artificial; identical to SEQ ID NO: 20035
  Synthetic oligonucleotide

SEQ ID NO: 557117 - DNA, 52 bp, Artificial; identical to SEQ ID NO: 348765
  Synthetic oligonucleotide

SEQ ID NO: 557118 - DNA, 55 bp, Artificial; identical to SEQ ID NO: 348767
  Synthetic oligonucleotide

SEQ ID NO: 557119 - DNA, 54 bp, Artificial; identical to SEQ ID NO: 348771
  Synthetic oligonucleotide

SEQ ID NO: 557120 - DNA, 55 bp, Artificial; identical to SEQ ID NO: 348772
  Synthetic oligonucleotide

SEQ ID NO: 557121 - DNA, 58 bp, Artificial; identical to SEQ ID NO: 348773
  Synthetic oligonucleotide

SEQ ID NO: 557122 - DNA, 55 bp, Artificial; identical to SEQ ID NO: 348775
  Synthetic oligonucleotide

SEQ ID NO: 557123 - DNA, 55 bp, Artificial; identical to SEQ ID NO: 348776
  Synthetic oligonucleotide

SEQ ID NO: 557124 - DNA, 52 bp, Artificial; identical to SEQ ID NO: 348778
  Synthetic oligonucleotide

SEQ ID NO: 557125 - DNA, 55 bp, Artificial; identical to SEQ ID NO: 348779
  Synthetic oligonucleotide

SEQ ID NO: 557126 - DNA, 54 bp, Artificial; identical to SEQ ID NO: 348781
  Synthetic oligonucleotide

SEQ ID NO: 557127 - DNA, 53 bp, Artificial; identical to SEQ ID NO: 6662
  Synthetic oligonucleotide

SEQ ID NO: 557128 - DNA, 59 bp, Artificial; identical to SEQ ID NO: 348790
  Synthetic oligonucleotide

SEQ ID NO: 557129 - DNA, 55 bp, Artificial; identical to SEQ ID NO: 348792
  Synthetic oligonucleotide

SEQ ID NO: 557130 - DNA, 60 bp, Artificial; identical to SEQ ID NO: 348795
  Synthetic oligonucleotide

SEQ ID NO: 557131 - DNA, 60 bp, Artificial; identical to SEQ ID NO: 348799
  Synthetic oligonucleotide

SEQ ID NO: 557132 - DNA, 59 bp, Artificial; identical to SEQ ID NO: 348805
  Synthetic oligonucleotide

SEQ ID NO: 557133 - DNA, 58 bp, Artificial; identical to SEQ ID NO: 348808
  Synthetic oligonucleotide

SEQ ID NO: 557134 - DNA, 57 bp, Artificial; identical to SEQ ID NO: 348809
  Synthetic oligonucleotide

SEQ ID NO: 557135 - DNA, 60 bp, Artificial; identical to SEQ ID NO: 348810
  Synthetic oligonucleotide

SEQ ID NO: 557136 - DNA, 55 bp, Artificial; identical to SEQ ID NO: 348812
  Synthetic oligonucleotide

SEQ ID NO: 557137 - DNA, 60 bp, Artificial; identical to SEQ ID NO: 348813
  Synthetic oligonucleotide

SEQ ID NO: 557138 - DNA, 57 bp, Artificial; identical to SEQ ID NO: 348815
  Synthetic oligonucleotide

SEQ ID NO: 557139 - DNA, 53 bp, Artificial; identical to SEQ ID NO: 348816
  Synthetic oligonucleotide

SEQ ID NO: 557140 - DNA, 60 bp, Artificial; identical to SEQ ID NO: 348819
  Synthetic oligonucleotide

SEQ ID NO: 557141 - DNA, 60 bp, Artificial; identical to SEQ ID NO: 348822
  Synthetic oligonucleotide

SEQ ID NO: 557142 - DNA, 55 bp, Artificial; identical to SEQ ID NO: 348824
  Synthetic oligonucleotide

SEQ ID NO: 557143 - DNA, 55 bp, Artificial; identical to SEQ ID NO: 348828
  Synthetic oligonucleotide

SEQ ID NO: 557144 - DNA, 50 bp, Artificial; identical to SEQ ID NO: 348830
  Synthetic oligonucleotide

SEQ ID NO: 557145 - DNA, 59 bp, Artificial; identical to SEQ ID NO: 348831
  Synthetic oligonucleotide

SEQ ID NO: 557146 - DNA, 57 bp, Artificial; identical to SEQ ID NO: 16515
  Synthetic oligonucleotide

SEQ ID NO: 557147 - DNA, 51 bp, Artificial; identical to SEQ ID NO: 348832
  Synthetic oligonucleotide

SEQ ID NO: 557148 - DNA, 55 bp, Artificial; identical to SEQ ID NO: 348834
  Synthetic oligonucleotide

SEQ ID NO: 557149 - DNA, 52 bp, Artificial; identical to SEQ ID NO: 348838
  Synthetic oligonucleotide

SEQ ID NO: 557150 - DNA, 60 bp, Artificial; identical to SEQ ID NO: 348841
  Synthetic oligonucleotide

SEQ ID NO: 557151 - DNA, 60 bp, Artificial; identical to SEQ ID NO: 348843
  Synthetic oligonucleotide

SEQ ID NO: 557152 - DNA, 54 bp, Artificial; identical to SEQ ID NO: 348847
  Synthetic oligonucleotide

SEQ ID NO: 557153 - DNA, 58 bp, Artificial; identical to SEQ ID NO: 348848
  Synthetic oligonucleotide

SEQ ID NO: 557154 - DNA, 53 bp, Artificial; identical to SEQ ID NO: 348853
  Synthetic oligonucleotide

SEQ ID NO: 557155 - DNA, 60 bp, Artificial; identical to SEQ ID NO: 348857
  Synthetic oligonucleotide

SEQ ID NO: 557156 - DNA, 57 bp, Artificial; identical to SEQ ID NO: 348858
  Synthetic oligonucleotide

SEQ ID NO: 557157 - DNA, 56 bp, Artificial; identical to SEQ ID NO: 348859
  Synthetic oligonucleotide

SEQ ID NO: 557158 - DNA, 55 bp, Artificial; identical to SEQ ID NO: 348861
  Synthetic oligonucleotide

SEQ ID NO: 557159 - DNA, 60 bp, Artificial; identical to SEQ ID NO: 348863
  Synthetic oligonucleotide

SEQ ID NO: 557160 - DNA, 60 bp, Artificial; identical to SEQ ID NO: 348864
  Synthetic oligonucleotide

SEQ ID NO: 557161 - DNA, 54 bp, Artificial; identical to SEQ ID NO: 348865
  Synthetic oligonucleotide

SEQ ID NO: 557162 - DNA, 53 bp, Artificial; identical to SEQ ID NO: 348866
  Synthetic oligonucleotide

SEQ ID NO: 557163 - DNA, 55 bp, Artificial; identical to SEQ ID NO: 348871
  Synthetic oligonucleotide

SEQ ID NO: 557164 - DNA, 55 bp, Artificial; identical to SEQ ID NO: 348873
  Synthetic oligonucleotide

SEQ ID NO: 557165 - DNA, 55 bp, Artificial; identical to SEQ ID NO: 348874
  Synthetic oligonucleotide

SEQ ID NO: 557166 - DNA, 59 bp, Artificial; identical to SEQ ID NO: 348876
  Synthetic oligonucleotide

SEQ ID NO: 557167 - DNA, 55 bp, Artificial; identical to SEQ ID NO: 348877
  Synthetic oligonucleotide

SEQ ID NO: 557168 - DNA, 54 bp, Artificial; identical to SEQ ID NO: 348878
  Synthetic oligonucleotide

SEQ ID NO: 557169 - DNA, 60 bp, Artificial; identical to SEQ ID NO: 348880
  Synthetic oligonucleotide

SEQ ID NO: 557170 - DNA, 55 bp, Artificial; identical to SEQ ID NO: 348881
  Synthetic oligonucleotide

SEQ ID NO: 557171 - DNA, 51 bp, Artificial; identical to SEQ ID NO: 348882
  Synthetic oligonucleotide

SEQ ID NO: 557172 - DNA, 54 bp, Artificial; identical to SEQ ID NO: 348883
  Synthetic oligonucleotide

SEQ ID NO: 557173 - DNA, 57 bp, Artificial; identical to SEQ ID NO: 348885
  Synthetic oligonucleotide

SEQ ID NO: 557174 - DNA, 58 bp, Artificial; identical to SEQ ID NO: 348886
  Synthetic oligonucleotide

SEQ ID NO: 557175 - DNA, 60 bp, Artificial; identical to SEQ ID NO: 348889
  Synthetic oligonucleotide

SEQ ID NO: 557176 - DNA, 57 bp, Artificial; identical to SEQ ID NO: 348891
  Synthetic oligonucleotide

SEQ ID NO: 557177 - DNA, 56 bp, Artificial; identical to SEQ ID NO: 348892
  Synthetic oligonucleotide

SEQ ID NO: 557178 - DNA, 60 bp, Artificial; identical to SEQ ID NO: 348893
  Synthetic oligonucleotide

SEQ ID NO: 557179 - DNA, 55 bp, Artificial; identical to SEQ ID NO: 348894
  Synthetic oligonucleotide

SEQ ID NO: 557180 - DNA, 55 bp, Artificial; identical to SEQ ID NO: 348896
  Synthetic oligonucleotide

SEQ ID NO: 557181 - DNA, 52 bp, Artificial; identical to SEQ ID NO: 348899
  Synthetic oligonucleotide

SEQ ID NO: 557182 - DNA, 60 bp, Artificial; identical to SEQ ID NO: 348900
  Synthetic oligonucleotide

SEQ ID NO: 557183 - DNA, 55 bp, Artificial; identical to SEQ ID NO: 348904
  Synthetic oligonucleotide

SEQ ID NO: 557184 - DNA, 52 bp, Artificial; identical to SEQ ID NO: 348906
  Synthetic oligonucleotide

SEQ ID NO: 557185 - DNA, 55 bp, Artificial; identical to SEQ ID NO: 348907
  Synthetic oligonucleotide

SEQ ID NO: 557186 - DNA, 55 bp, Artificial; identical to SEQ ID NO: 348909
  Synthetic oligonucleotide

SEQ ID NO: 557187 - DNA, 55 bp, Artificial; identical to SEQ ID NO: 348910
  Synthetic oligonucleotide

SEQ ID NO: 557188 - DNA, 55 bp, Artificial; identical to SEQ ID NO: 348912
  Synthetic oligonucleotide

SEQ ID NO: 557189 - DNA, 59 bp, Artificial; identical to SEQ ID NO: 348914
  Synthetic oligonucleotide

SEQ ID NO: 557190 - DNA, 60 bp, Artificial; identical to SEQ ID NO: 348915
  Synthetic oligonucleotide

SEQ ID NO: 557191 - DNA, 60 bp, Artificial; identical to SEQ ID NO: 348917
  Synthetic oligonucleotide

SEQ ID NO: 557192 - DNA, 51 bp, Artificial; identical to SEQ ID NO: 348918
  Synthetic oligonucleotide

SEQ ID NO: 557193 - DNA, 52 bp, Artificial; identical to SEQ ID NO: 11537
  Synthetic oligonucleotide

SEQ ID NO: 557194 - DNA, 55 bp, Artificial; identical to SEQ ID NO: 348924
  Synthetic oligonucleotide

SEQ ID NO: 557195 - DNA, 55 bp, Artificial; identical to SEQ ID NO: 348926
  Synthetic oligonucleotide

SEQ ID NO: 557196 - DNA, 55 bp, Artificial; identical to SEQ ID NO: 348927
  Synthetic oligonucleotide

SEQ ID NO: 557197 - DNA, 55 bp, Artificial; identical to SEQ ID NO: 348929
  Synthetic oligonucleotide

SEQ ID NO: 557198 - DNA, 55 bp, Artificial; identical to SEQ ID NO: 348930
  Synthetic oligonucleotide

SEQ ID NO: 557199 - DNA, 60 bp, Artificial; identical to SEQ ID NO: 348932
  Synthetic oligonucleotide

SEQ ID NO: 557200 - DNA, 58 bp, Artificial; identical to SEQ ID NO: 348937
  Synthetic oligonucleotide

SEQ ID NO: 557201 - DNA, 60 bp, Artificial; identical to SEQ ID NO: 13140
  Synthetic oligonucleotide

SEQ ID NO: 557202 - DNA, 55 bp, Artificial; identical to SEQ ID NO: 348942
  Synthetic oligonucleotide

SEQ ID NO: 557203 - DNA, 55 bp, Artificial; identical to SEQ ID NO: 348944
  Synthetic oligonucleotide

SEQ ID NO: 557204 - DNA, 55 bp, Artificial; identical to SEQ ID NO: 348947
  Synthetic oligonucleotide

SEQ ID NO: 557205 - DNA, 57 bp, Artificial; identical to SEQ ID NO: 348949
  Synthetic oligonucleotide

SEQ ID NO: 557206 - DNA, 56 bp, Artificial; identical to SEQ ID NO: 348950
  Synthetic oligonucleotide

SEQ ID NO: 557207 - DNA, 60 bp, Artificial; identical to SEQ ID NO: 348953
  Synthetic oligonucleotide

SEQ ID NO: 557208 - DNA, 50 bp, Artificial; identical to SEQ ID NO: 348955
  Synthetic oligonucleotide

SEQ ID NO: 557209 - DNA, 59 bp, Artificial; identical to SEQ ID NO: 348956
  Synthetic oligonucleotide

SEQ ID NO: 557210 - DNA, 58 bp, Artificial; identical to SEQ ID NO: 348957
  Synthetic oligonucleotide

SEQ ID NO: 557211 - DNA, 60 bp, Artificial; identical to SEQ ID NO: 348961
  Synthetic oligonucleotide

SEQ ID NO: 557212 - DNA, 60 bp, Artificial; identical to SEQ ID NO: 348962
  Synthetic oligonucleotide

SEQ ID NO: 557213 - DNA, 60 bp, Artificial; identical to SEQ ID NO: 348965
  Synthetic oligonucleotide

SEQ ID NO: 557214 - DNA, 55 bp, Artificial; identical to SEQ ID NO: 348966
  Synthetic oligonucleotide

SEQ ID NO: 557215 - DNA, 52 bp, Artificial; identical to SEQ ID NO: 348968
  Synthetic oligonucleotide

SEQ ID NO: 557216 - DNA, 60 bp, Artificial; identical to SEQ ID NO: 348969
  Synthetic oligonucleotide

SEQ ID NO: 557217 - DNA, 58 bp, Artificial; identical to SEQ ID NO: 348970
  Synthetic oligonucleotide

SEQ ID NO: 557218 - DNA, 55 bp, Artificial; identical to SEQ ID NO: 348973
  Synthetic oligonucleotide

SEQ ID NO: 557219 - DNA, 60 bp, Artificial; identical to SEQ ID NO: 348975
  Synthetic oligonucleotide

SEQ ID NO: 557220 - DNA, 55 bp, Artificial; identical to SEQ ID NO: 348976
  Synthetic oligonucleotide

SEQ ID NO: 557221 - DNA, 59 bp, Artificial; identical to SEQ ID NO: 348977
  Synthetic oligonucleotide

SEQ ID NO: 557222 - DNA, 58 bp, Artificial; identical to SEQ ID NO: 348980
  Synthetic oligonucleotide

SEQ ID NO: 557223 - DNA, 50 bp, Artificial; identical to SEQ ID NO: 348981
  Synthetic oligonucleotide

SEQ ID NO: 557224 - DNA, 55 bp, Artificial; identical to SEQ ID NO: 348983
  Synthetic oligonucleotide

SEQ ID NO: 557225 - DNA, 55 bp, Artificial; identical to SEQ ID NO: 348986
  Synthetic oligonucleotide

SEQ ID NO: 557226 - DNA, 58 bp, Artificial; identical to SEQ ID NO: 15859
  Synthetic oligonucleotide

SEQ ID NO: 557227 - DNA, 58 bp, Artificial; identical to SEQ ID NO: 348989
  Synthetic oligonucleotide

SEQ ID NO: 557228 - DNA, 58 bp, Artificial; identical to SEQ ID NO: 348991
  Synthetic oligonucleotide

SEQ ID NO: 557229 - DNA, 52 bp, Artificial; identical to SEQ ID NO: 348993
  Synthetic oligonucleotide

SEQ ID NO: 557230 - DNA, 51 bp, Artificial; identical to SEQ ID NO: 348994
  Synthetic oligonucleotide

SEQ ID NO: 557231 - DNA, 60 bp, Artificial; identical to SEQ ID NO: 348995
  Synthetic oligonucleotide

SEQ ID NO: 557232 - DNA, 56 bp, Artificial; identical to SEQ ID NO: 348996
  Synthetic oligonucleotide

SEQ ID NO: 557233 - DNA, 59 bp, Artificial; identical to SEQ ID NO: 348998
  Synthetic oligonucleotide

SEQ ID NO: 557234 - DNA, 54 bp, Artificial; identical to SEQ ID NO: 349001
  Synthetic oligonucleotide

SEQ ID NO: 557235 - DNA, 57 bp, Artificial; identical to SEQ ID NO: 349002
  Synthetic oligonucleotide

SEQ ID NO: 557236 - DNA, 60 bp, Artificial; identical to SEQ ID NO: 349005
  Synthetic oligonucleotide

SEQ ID NO: 557237 - DNA, 56 bp, Artificial; identical to SEQ ID NO: 349007
  Synthetic oligonucleotide

SEQ ID NO: 557238 - DNA, 57 bp, Artificial; identical to SEQ ID NO: 349008
  Synthetic oligonucleotide

SEQ ID NO: 557239 - DNA, 55 bp, Artificial; identical to SEQ ID NO: 349011
  Synthetic oligonucleotide

SEQ ID NO: 557240 - DNA, 58 bp, Artificial; identical to SEQ ID NO: 349013
  Synthetic oligonucleotide

SEQ ID NO: 557241 - DNA, 54 bp, Artificial; identical to SEQ ID NO: 349014
  Synthetic oligonucleotide

SEQ ID NO: 557242 - DNA, 60 bp, Artificial; identical to SEQ ID NO: 349017
  Synthetic oligonucleotide

SEQ ID NO: 557243 - DNA, 51 bp, Artificial; identical to SEQ ID NO: 349021
  Synthetic oligonucleotide

SEQ ID NO: 557244 - DNA, 55 bp, Artificial; identical to SEQ ID NO: 349025
  Synthetic oligonucleotide

SEQ ID NO: 557245 - DNA, 53 bp, Artificial; identical to SEQ ID NO: 349026
  Synthetic oligonucleotide

SEQ ID NO: 557246 - DNA, 55 bp, Artificial; identical to SEQ ID NO: 349027
  Synthetic oligonucleotide

SEQ ID NO: 557247 - DNA, 55 bp, Artificial; identical to SEQ ID NO: 349028
  Synthetic oligonucleotide

SEQ ID NO: 557248 - DNA, 57 bp, Artificial; identical to SEQ ID NO: 349029
  Synthetic oligonucleotide

SEQ ID NO: 557249 - DNA, 60 bp, Artificial; identical to SEQ ID NO: 349031
  Synthetic oligonucleotide

SEQ ID NO: 557250 - DNA, 56 bp, Artificial; identical to SEQ ID NO: 349036
  Synthetic oligonucleotide

SEQ ID NO: 557251 - DNA, 55 bp, Artificial; identical to SEQ ID NO: 349037
  Synthetic oligonucleotide

SEQ ID NO: 557252 - DNA, 57 bp, Artificial; identical to SEQ ID NO: 349038
  Synthetic oligonucleotide

SEQ ID NO: 557253 - DNA, 60 bp, Artificial; identical to SEQ ID NO: 349041
  Synthetic oligonucleotide

SEQ ID NO: 557254 - DNA, 53 bp, Artificial; identical to SEQ ID NO: 349043
  Synthetic oligonucleotide

SEQ ID NO: 557255 - DNA, 55 bp, Artificial; identical to SEQ ID NO: 349045
  Synthetic oligonucleotide

SEQ ID NO: 557256 - DNA, 55 bp, Artificial; identical to SEQ ID NO: 349046
  Synthetic oligonucleotide

SEQ ID NO: 557257 - DNA, 60 bp, Artificial; identical to SEQ ID NO: 349047
  Synthetic oligonucleotide

SEQ ID NO: 557258 - DNA, 60 bp, Artificial; identical to SEQ ID NO: 349048
  Synthetic oligonucleotide

SEQ ID NO: 557259 - DNA, 60 bp, Artificial; identical to SEQ ID NO: 349054
  Synthetic oligonucleotide

SEQ ID NO: 557260 - DNA, 60 bp, Artificial; identical to SEQ ID NO: 349057
  Synthetic oligonucleotide

SEQ ID NO: 557261 - DNA, 58 bp, Artificial; identical to SEQ ID NO: 349060
  Synthetic oligonucleotide

SEQ ID NO: 557262 - DNA, 57 bp, Artificial; identical to SEQ ID NO: 349064
  Synthetic oligonucleotide

SEQ ID NO: 557263 - DNA, 55 bp, Artificial; identical to SEQ ID NO: 349065
  Synthetic oligonucleotide

SEQ ID NO: 557264 - DNA, 60 bp, Artificial; identical to SEQ ID NO: 119444
  Synthetic oligonucleotide

SEQ ID NO: 557265 - DNA, 60 bp, Artificial; identical to SEQ ID NO: 349068
  Synthetic oligonucleotide

SEQ ID NO: 557266 - DNA, 54 bp, Artificial; identical to SEQ ID NO: 349069
  Synthetic oligonucleotide

SEQ ID NO: 557267 - DNA, 54 bp, Artificial; identical to SEQ ID NO: 349070
  Synthetic oligonucleotide

SEQ ID NO: 557268 - DNA, 51 bp, Artificial; identical to SEQ ID NO: 349081
  Synthetic oligonucleotide

SEQ ID NO: 557269 - DNA, 60 bp, Artificial; identical to SEQ ID NO: 349082
  Synthetic oligonucleotide

SEQ ID NO: 557270 - DNA, 60 bp, Artificial; identical to SEQ ID NO: 349086
  Synthetic oligonucleotide

SEQ ID NO: 557271 - DNA, 53 bp, Artificial; identical to SEQ ID NO: 349087
  Synthetic oligonucleotide

SEQ ID NO: 557272 - DNA, 54 bp, Artificial; identical to SEQ ID NO: 349091
  Synthetic oligonucleotide

SEQ ID NO: 557273 - DNA, 55 bp, Artificial; identical to SEQ ID NO: 349093
  Synthetic oligonucleotide

SEQ ID NO: 557274 - DNA, 50 bp, Artificial; identical to SEQ ID NO: 349095
  Synthetic oligonucleotide

SEQ ID NO: 557275 - DNA, 55 bp, Artificial; identical to SEQ ID NO: 349096
  Synthetic oligonucleotide

SEQ ID NO: 557276 - DNA, 60 bp, Artificial; identical to SEQ ID NO: 349097
  Synthetic oligonucleotide

SEQ ID NO: 557277 - DNA, 55 bp, Artificial; identical to SEQ ID NO: 349103
  Synthetic oligonucleotide

SEQ ID NO: 557278 - DNA, 55 bp, Artificial; identical to SEQ ID NO: 349106
  Synthetic oligonucleotide

SEQ ID NO: 557279 - DNA, 54 bp, Artificial; identical to SEQ ID NO: 349109
  Synthetic oligonucleotide

SEQ ID NO: 557280 - DNA, 60 bp, Artificial; identical to SEQ ID NO: 349112
  Synthetic oligonucleotide

SEQ ID NO: 557281 - DNA, 60 bp, Artificial; identical to SEQ ID NO: 349119
  Synthetic oligonucleotide

SEQ ID NO: 557282 - DNA, 60 bp, Artificial; identical to SEQ ID NO: 349125
  Synthetic oligonucleotide

SEQ ID NO: 557283 - DNA, 57 bp, Artificial; identical to SEQ ID NO: 18850
  Synthetic oligonucleotide

SEQ ID NO: 557284 - DNA, 53 bp, Artificial; identical to SEQ ID NO: 349126
  Synthetic oligonucleotide

SEQ ID NO: 557285 - DNA, 54 bp, Artificial; identical to SEQ ID NO: 349132
  Synthetic oligonucleotide

SEQ ID NO: 557286 - DNA, 56 bp, Artificial; identical to SEQ ID NO: 16100
  Synthetic oligonucleotide

SEQ ID NO: 557287 - DNA, 55 bp, Artificial; identical to SEQ ID NO: 349136
  Synthetic oligonucleotide

SEQ ID NO: 557288 - DNA, 50 bp, Artificial; identical to SEQ ID NO: 349137
  Synthetic oligonucleotide

SEQ ID NO: 557289 - DNA, 56 bp, Artificial; identical to SEQ ID NO: 349142
  Synthetic oligonucleotide

SEQ ID NO: 557290 - DNA, 59 bp, Artificial; identical to SEQ ID NO: 349145
  Synthetic oligonucleotide

SEQ ID NO: 557291 - DNA, 58 bp, Artificial; identical to SEQ ID NO: 19586
  Synthetic oligonucleotide

SEQ ID NO: 557292 - DNA, 58 bp, Artificial; identical to SEQ ID NO: 349147
  Synthetic oligonucleotide

SEQ ID NO: 557293 - DNA, 59 bp, Artificial; identical to SEQ ID NO: 349148
  Synthetic oligonucleotide

SEQ ID NO: 557294 - DNA, 58 bp, Artificial; identical to SEQ ID NO: 349149
  Synthetic oligonucleotide

SEQ ID NO: 557295 - DNA, 54 bp, Artificial; identical to SEQ ID NO: 349150
  Synthetic oligonucleotide

SEQ ID NO: 557296 - DNA, 55 bp, Artificial; identical to SEQ ID NO: 349152
  Synthetic oligonucleotide

SEQ ID NO: 557297 - DNA, 55 bp, Artificial; identical to SEQ ID NO: 349155
  Synthetic oligonucleotide

SEQ ID NO: 557298 - DNA, 55 bp, Artificial; identical to SEQ ID NO: 349156
  Synthetic oligonucleotide

SEQ ID NO: 557299 - DNA, 53 bp, Artificial; identical to SEQ ID NO: 18946
  Synthetic oligonucleotide

SEQ ID NO: 557300 - DNA, 60 bp, Artificial; identical to SEQ ID NO: 349164
  Synthetic oligonucleotide

SEQ ID NO: 557301 - DNA, 55 bp, Artificial; identical to SEQ ID NO: 349166
  Synthetic oligonucleotide

SEQ ID NO: 557302 - DNA, 60 bp, Artificial; identical to SEQ ID NO: 349167
  Synthetic oligonucleotide

SEQ ID NO: 557303 - DNA, 60 bp, Artificial; identical to SEQ ID NO: 349169
  Synthetic oligonucleotide

SEQ ID NO: 557304 - DNA, 55 bp, Artificial; identical to SEQ ID NO: 349170
  Synthetic oligonucleotide

SEQ ID NO: 557305 - DNA, 58 bp, Artificial; identical to SEQ ID NO: 349171
  Synthetic oligonucleotide

SEQ ID NO: 557306 - DNA, 54 bp, Artificial; identical to SEQ ID NO: 349172
  Synthetic oligonucleotide

SEQ ID NO: 557307 - DNA, 55 bp, Artificial; identical to SEQ ID NO: 349175
  Synthetic oligonucleotide

SEQ ID NO: 557308 - DNA, 60 bp, Artificial; identical to SEQ ID NO: 349177
  Synthetic oligonucleotide

SEQ ID NO: 557309 - DNA, 60 bp, Artificial; identical to SEQ ID NO: 349178
  Synthetic oligonucleotide

SEQ ID NO: 557310 - DNA, 55 bp, Artificial; identical to SEQ ID NO: 349183
  Synthetic oligonucleotide

SEQ ID NO: 557311 - DNA, 60 bp, Artificial; identical to SEQ ID NO: 349184
  Synthetic oligonucleotide

SEQ ID NO: 557312 - DNA, 53 bp, Artificial; identical to SEQ ID NO: 349185
  Synthetic oligonucleotide

SEQ ID NO: 557313 - DNA, 60 bp, Artificial; identical to SEQ ID NO: 349188
  Synthetic oligonucleotide

SEQ ID NO: 557314 - DNA, 59 bp, Artificial; identical to SEQ ID NO: 349189
  Synthetic oligonucleotide

SEQ ID NO: 557315 - DNA, 55 bp, Artificial; identical to SEQ ID NO: 349192
  Synthetic oligonucleotide

SEQ ID NO: 557316 - DNA, 54 bp, Artificial; identical to SEQ ID NO: 349195
  Synthetic oligonucleotide

SEQ ID NO: 557317 - DNA, 59 bp, Artificial; identical to SEQ ID NO: 16458
  Synthetic oligonucleotide

SEQ ID NO: 557318 - DNA, 52 bp, Artificial; identical to SEQ ID NO: 349198
  Synthetic oligonucleotide

SEQ ID NO: 557319 - DNA, 57 bp, Artificial; identical to SEQ ID NO: 349201
  Synthetic oligonucleotide

SEQ ID NO: 557320 - DNA, 55 bp, Artificial; identical to SEQ ID NO: 349203
  Synthetic oligonucleotide

SEQ ID NO: 557321 - DNA, 60 bp, Artificial; identical to SEQ ID NO: 349204
  Synthetic oligonucleotide

SEQ ID NO: 557322 - DNA, 60 bp, Artificial; identical to SEQ ID NO: 349205
  Synthetic oligonucleotide

SEQ ID NO: 557323 - DNA, 60 bp, Artificial; identical to SEQ ID NO: 10255
  Synthetic oligonucleotide

SEQ ID NO: 557324 - DNA, 55 bp, Artificial; identical to SEQ ID NO: 349210
  Synthetic oligonucleotide

SEQ ID NO: 557325 - DNA, 54 bp, Artificial; identical to SEQ ID NO: 349213
  Synthetic oligonucleotide

SEQ ID NO: 557326 - DNA, 55 bp, Artificial; identical to SEQ ID NO: 349214
  Synthetic oligonucleotide

SEQ ID NO: 557327 - DNA, 50 bp, Artificial; identical to SEQ ID NO: 349216
  Synthetic oligonucleotide

SEQ ID NO: 557328 - DNA, 60 bp, Artificial; identical to SEQ ID NO: 349217
  Synthetic oligonucleotide

SEQ ID NO: 557329 - DNA, 55 bp, Artificial; identical to SEQ ID NO: 349218
  Synthetic oligonucleotide

SEQ ID NO: 557330 - DNA, 55 bp, Artificial; identical to SEQ ID NO: 349219
  Synthetic oligonucleotide

SEQ ID NO: 557331 - DNA, 58 bp, Artificial; identical to SEQ ID NO: 349220
  Synthetic oligonucleotide

SEQ ID NO: 557332 - DNA, 55 bp, Artificial; identical to SEQ ID NO: 349221
  Synthetic oligonucleotide

SEQ ID NO: 557333 - DNA, 50 bp, Artificial; identical to SEQ ID NO: 349224
  Synthetic oligonucleotide

SEQ ID NO: 557334 - DNA, 51 bp, Artificial; identical to SEQ ID NO: 349225
  Synthetic oligonucleotide

SEQ ID NO: 557335 - DNA, 60 bp, Artificial; identical to SEQ ID NO: 349226
  Synthetic oligonucleotide

SEQ ID NO: 557336 - DNA, 60 bp, Artificial; identical to SEQ ID NO: 349227
  Synthetic oligonucleotide

SEQ ID NO: 557337 - DNA, 59 bp, Artificial; identical to SEQ ID NO: 349228
  Synthetic oligonucleotide

SEQ ID NO: 557338 - DNA, 51 bp, Artificial; identical to SEQ ID NO: 349230
  Synthetic oligonucleotide

SEQ ID NO: 557339 - DNA, 51 bp, Artificial; identical to SEQ ID NO: 349231
  Synthetic oligonucleotide

SEQ ID NO: 557340 - DNA, 58 bp, Artificial; identical to SEQ ID NO: 349233
  Synthetic oligonucleotide

SEQ ID NO: 557341 - DNA, 56 bp, Artificial; identical to SEQ ID NO: 349235
  Synthetic oligonucleotide

SEQ ID NO: 557342 - DNA, 55 bp, Artificial; identical to SEQ ID NO: 349240
  Synthetic oligonucleotide

SEQ ID NO: 557343 - DNA, 55 bp, Artificial; identical to SEQ ID NO: 349242
  Synthetic oligonucleotide

SEQ ID NO: 557344 - DNA, 60 bp, Artificial; identical to SEQ ID NO: 349243
  Synthetic oligonucleotide

SEQ ID NO: 557345 - DNA, 57 bp, Artificial; identical to SEQ ID NO: 18511
  Synthetic oligonucleotide

SEQ ID NO: 557346 - DNA, 58 bp, Artificial; identical to SEQ ID NO: 349244
  Synthetic oligonucleotide

SEQ ID NO: 557347 - DNA, 59 bp, Artificial; identical to SEQ ID NO: 16455
  Synthetic oligonucleotide

SEQ ID NO: 557348 - DNA, 55 bp, Artificial; identical to SEQ ID NO: 349246
  Synthetic oligonucleotide

SEQ ID NO: 557349 - DNA, 55 bp, Artificial; identical to SEQ ID NO: 349255
  Synthetic oligonucleotide

SEQ ID NO: 557350 - DNA, 60 bp, Artificial; identical to SEQ ID NO: 13391
  Synthetic oligonucleotide

SEQ ID NO: 557351 - DNA, 57 bp, Artificial; identical to SEQ ID NO: 349257
  Synthetic oligonucleotide

SEQ ID NO: 557352 - DNA, 60 bp, Artificial; identical to SEQ ID NO: 349266
  Synthetic oligonucleotide

SEQ ID NO: 557353 - DNA, 60 bp, Artificial; identical to SEQ ID NO: 349267
  Synthetic oligonucleotide

SEQ ID NO: 557354 - DNA, 60 bp, Artificial; identical to SEQ ID NO: 349268
  Synthetic oligonucleotide

SEQ ID NO: 557355 - DNA, 55 bp, Artificial; identical to SEQ ID NO: 349271
  Synthetic oligonucleotide

SEQ ID NO: 557356 - DNA, 55 bp, Artificial; identical to SEQ ID NO: 349272
  Synthetic oligonucleotide

SEQ ID NO: 557357 - DNA, 59 bp, Artificial; identical to SEQ ID NO: 349273
  Synthetic oligonucleotide

SEQ ID NO: 557358 - DNA, 54 bp, Artificial; identical to SEQ ID NO: 349276
  Synthetic oligonucleotide

SEQ ID NO: 557359 - DNA, 56 bp, Artificial; identical to SEQ ID NO: 349279
  Synthetic oligonucleotide

SEQ ID NO: 557360 - DNA, 50 bp, Artificial; identical to SEQ ID NO: 10828
  Synthetic oligonucleotide

SEQ ID NO: 557361 - DNA, 55 bp, Artificial; identical to SEQ ID NO: 349281
  Synthetic oligonucleotide

SEQ ID NO: 557362 - DNA, 59 bp, Artificial; identical to SEQ ID NO: 349283
  Synthetic oligonucleotide

SEQ ID NO: 557363 - DNA, 52 bp, Artificial; identical to SEQ ID NO: 349285
  Synthetic oligonucleotide

SEQ ID NO: 557364 - DNA, 60 bp, Artificial; identical to SEQ ID NO: 349287
  Synthetic oligonucleotide

SEQ ID NO: 557365 - DNA, 55 bp, Artificial; identical to SEQ ID NO: 349290
  Synthetic oligonucleotide

SEQ ID NO: 557366 - DNA, 54 bp, Artificial; identical to SEQ ID NO: 349293
  Synthetic oligonucleotide

SEQ ID NO: 557367 - DNA, 55 bp, Artificial; identical to SEQ ID NO: 349294
  Synthetic oligonucleotide

SEQ ID NO: 557368 - DNA, 55 bp, Artificial; identical to SEQ ID NO: 349295
  Synthetic oligonucleotide

SEQ ID NO: 557369 - DNA, 55 bp, Artificial; identical to SEQ ID NO: 349296
  Synthetic oligonucleotide

SEQ ID NO: 557370 - DNA, 60 bp, Artificial; identical to SEQ ID NO: 349297
  Synthetic oligonucleotide

SEQ ID NO: 557371 - DNA, 55 bp, Artificial; identical to SEQ ID NO: 349299
  Synthetic oligonucleotide

SEQ ID NO: 557372 - DNA, 55 bp, Artificial; identical to SEQ ID NO: 349301
  Synthetic oligonucleotide

SEQ ID NO: 557373 - DNA, 55 bp, Artificial; identical to SEQ ID NO: 349303
  Synthetic oligonucleotide

SEQ ID NO: 557374 - DNA, 51 bp, Artificial; identical to SEQ ID NO: 349308
  Synthetic oligonucleotide

SEQ ID NO: 557375 - DNA, 55 bp, Artificial; identical to SEQ ID NO: 349311
  Synthetic oligonucleotide

SEQ ID NO: 557376 - DNA, 55 bp, Artificial; identical to SEQ ID NO: 349312
  Synthetic oligonucleotide

SEQ ID NO: 557377 - DNA, 60 bp, Artificial; identical to SEQ ID NO: 349314
  Synthetic oligonucleotide

SEQ ID NO: 557378 - DNA, 59 bp, Artificial; identical to SEQ ID NO: 349315
  Synthetic oligonucleotide

SEQ ID NO: 557379 - DNA, 60 bp, Artificial; identical to SEQ ID NO: 349317
  Synthetic oligonucleotide

SEQ ID NO: 557380 - DNA, 60 bp, Artificial; identical to SEQ ID NO: 349318
  Synthetic oligonucleotide

SEQ ID NO: 557381 - DNA, 60 bp, Artificial; identical to SEQ ID NO: 349319
  Synthetic oligonucleotide

SEQ ID NO: 557382 - DNA, 52 bp, Artificial; identical to SEQ ID NO: 349321
  Synthetic oligonucleotide

SEQ ID NO: 557383 - DNA, 54 bp, Artificial; identical to SEQ ID NO: 349322
  Synthetic oligonucleotide

SEQ ID NO: 557384 - DNA, 54 bp, Artificial; identical to SEQ ID NO: 18173
  Synthetic oligonucleotide

SEQ ID NO: 557385 - DNA, 57 bp, Artificial; identical to SEQ ID NO: 349323
  Synthetic oligonucleotide

SEQ ID NO: 557386 - DNA, 54 bp, Artificial; identical to SEQ ID NO: 349325
  Synthetic oligonucleotide

SEQ ID NO: 557387 - DNA, 50 bp, Artificial; identical to SEQ ID NO: 349326
  Synthetic oligonucleotide

SEQ ID NO: 557388 - DNA, 59 bp, Artificial; identical to SEQ ID NO: 349328
  Synthetic oligonucleotide

SEQ ID NO: 557389 - DNA, 59 bp, Artificial; identical to SEQ ID NO: 349329
  Synthetic oligonucleotide

SEQ ID NO: 557390 - DNA, 60 bp, Artificial; identical to SEQ ID NO: 349335
  Synthetic oligonucleotide

SEQ ID NO: 557391 - DNA, 50 bp, Artificial; identical to SEQ ID NO: 349336
  Synthetic oligonucleotide

SEQ ID NO: 557392 - DNA, 55 bp, Artificial; identical to SEQ ID NO: 349337
  Synthetic oligonucleotide

SEQ ID NO: 557393 - DNA, 58 bp, Artificial; identical to SEQ ID NO: 349338
  Synthetic oligonucleotide

SEQ ID NO: 557394 - DNA, 60 bp, Artificial; identical to SEQ ID NO: 349339
  Synthetic oligonucleotide

SEQ ID NO: 557395 - DNA, 57 bp, Artificial; identical to SEQ ID NO: 349341
  Synthetic oligonucleotide

SEQ ID NO: 557396 - DNA, 55 bp, Artificial; identical to SEQ ID NO: 349343
  Synthetic oligonucleotide

SEQ ID NO: 557397 - DNA, 53 bp, Artificial; identical to SEQ ID NO: 349346
  Synthetic oligonucleotide

SEQ ID NO: 557398 - DNA, 59 bp, Artificial; identical to SEQ ID NO: 349348
  Synthetic oligonucleotide

SEQ ID NO: 557399 - DNA, 60 bp, Artificial; identical to SEQ ID NO: 12194
  Synthetic oligonucleotide

SEQ ID NO: 557400 - DNA, 58 bp, Artificial; identical to SEQ ID NO: 349353
  Synthetic oligonucleotide

SEQ ID NO: 557401 - DNA, 58 bp, Artificial; identical to SEQ ID NO: 349354
  Synthetic oligonucleotide

SEQ ID NO: 557402 - DNA, 55 bp, Artificial; identical to SEQ ID NO: 349358
  Synthetic oligonucleotide

SEQ ID NO: 557403 - DNA, 60 bp, Artificial; identical to SEQ ID NO: 349359
  Synthetic oligonucleotide

SEQ ID NO: 557404 - DNA, 52 bp, Artificial; identical to SEQ ID NO: 349360
  Synthetic oligonucleotide

SEQ ID NO: 557405 - DNA, 55 bp, Artificial; identical to SEQ ID NO: 349361
  Synthetic oligonucleotide

SEQ ID NO: 557406 - DNA, 58 bp, Artificial; identical to SEQ ID NO: 349362
  Synthetic oligonucleotide

SEQ ID NO: 557407 - DNA, 60 bp, Artificial; identical to SEQ ID NO: 349365
  Synthetic oligonucleotide

SEQ ID NO: 557408 - DNA, 51 bp, Artificial; identical to SEQ ID NO: 349366
  Synthetic oligonucleotide

SEQ ID NO: 557409 - DNA, 58 bp, Artificial; identical to SEQ ID NO: 349367
  Synthetic oligonucleotide

SEQ ID NO: 557410 - DNA, 54 bp, Artificial; identical to SEQ ID NO: 349368
  Synthetic oligonucleotide

SEQ ID NO: 557411 - DNA, 55 bp, Artificial; identical to SEQ ID NO: 349373
  Synthetic oligonucleotide

SEQ ID NO: 557412 - DNA, 54 bp, Artificial; identical to SEQ ID NO: 349376
  Synthetic oligonucleotide

SEQ ID NO: 557413 - DNA, 53 bp, Artificial; identical to SEQ ID NO: 349377
  Synthetic oligonucleotide

SEQ ID NO: 557414 - DNA, 58 bp, Artificial; identical to SEQ ID NO: 349380
  Synthetic oligonucleotide

SEQ ID NO: 557415 - DNA, 59 bp, Artificial; identical to SEQ ID NO: 349381
  Synthetic oligonucleotide

SEQ ID NO: 557416 - DNA, 60 bp, Artificial; identical to SEQ ID NO: 349384
  Synthetic oligonucleotide

SEQ ID NO: 557417 - DNA, 54 bp, Artificial; identical to SEQ ID NO: 349386
  Synthetic oligonucleotide

SEQ ID NO: 557418 - DNA, 60 bp, Artificial; identical to SEQ ID NO: 349388
  Synthetic oligonucleotide

SEQ ID NO: 557419 - DNA, 60 bp, Artificial; identical to SEQ ID NO: 349393
  Synthetic oligonucleotide

SEQ ID NO: 557420 - DNA, 60 bp, Artificial; identical to SEQ ID NO: 349394
  Synthetic oligonucleotide

SEQ ID NO: 557421 - DNA, 56 bp, Artificial; identical to SEQ ID NO: 349395
  Synthetic oligonucleotide

SEQ ID NO: 557422 - DNA, 55 bp, Artificial; identical to SEQ ID NO: 349399
  Synthetic oligonucleotide

SEQ ID NO: 557423 - DNA, 57 bp, Artificial; identical to SEQ ID NO: 349400
  Synthetic oligonucleotide

SEQ ID NO: 557424 - DNA, 60 bp, Artificial; identical to SEQ ID NO: 349403
  Synthetic oligonucleotide

SEQ ID NO: 557425 - DNA, 55 bp, Artificial; identical to SEQ ID NO: 349405
  Synthetic oligonucleotide

SEQ ID NO: 557426 - DNA, 50 bp, Artificial; identical to SEQ ID NO: 349408
  Synthetic oligonucleotide

SEQ ID NO: 557427 - DNA, 59 bp, Artificial; identical to SEQ ID NO: 349409
  Synthetic oligonucleotide

SEQ ID NO: 557428 - DNA, 60 bp, Artificial; identical to SEQ ID NO: 349411
  Synthetic oligonucleotide

SEQ ID NO: 557429 - DNA, 60 bp, Artificial; identical to SEQ ID NO: 349414
  Synthetic oligonucleotide

SEQ ID NO: 557430 - DNA, 56 bp, Artificial; identical to SEQ ID NO: 349415
  Synthetic oligonucleotide

SEQ ID NO: 557431 - DNA, 60 bp, Artificial; identical to SEQ ID NO: 349420
  Synthetic oligonucleotide

SEQ ID NO: 557432 - DNA, 55 bp, Artificial; identical to SEQ ID NO: 349425
  Synthetic oligonucleotide

SEQ ID NO: 557433 - DNA, 58 bp, Artificial; identical to SEQ ID NO: 349426
  Synthetic oligonucleotide

SEQ ID NO: 557434 - DNA, 57 bp, Artificial; identical to SEQ ID NO: 349430
  Synthetic oligonucleotide

SEQ ID NO: 557435 - DNA, 58 bp, Artificial; identical to SEQ ID NO: 349432
  Synthetic oligonucleotide

SEQ ID NO: 557436 - DNA, 55 bp, Artificial; identical to SEQ ID NO: 349433
  Synthetic oligonucleotide

SEQ ID NO: 557437 - DNA, 53 bp, Artificial; identical to SEQ ID NO: 349435
  Synthetic oligonucleotide

SEQ ID NO: 557438 - DNA, 58 bp, Artificial; identical to SEQ ID NO: 349436
  Synthetic oligonucleotide

SEQ ID NO: 557439 - DNA, 55 bp, Artificial; identical to SEQ ID NO: 349438
  Synthetic oligonucleotide

SEQ ID NO: 557440 - DNA, 59 bp, Artificial; identical to SEQ ID NO: 349440
  Synthetic oligonucleotide

SEQ ID NO: 557441 - DNA, 57 bp, Artificial; identical to SEQ ID NO: 349442
  Synthetic oligonucleotide

SEQ ID NO: 557442 - DNA, 60 bp, Artificial; identical to SEQ ID NO: 349443
  Synthetic oligonucleotide

SEQ ID NO: 557443 - DNA, 55 bp, Artificial; identical to SEQ ID NO: 16908
  Synthetic oligonucleotide

SEQ ID NO: 557444 - DNA, 55 bp, Artificial; identical to SEQ ID NO: 349444
  Synthetic oligonucleotide

SEQ ID NO: 557445 - DNA, 57 bp, Artificial; identical to SEQ ID NO: 349446
  Synthetic oligonucleotide

SEQ ID NO: 557446 - DNA, 55 bp, Artificial; identical to SEQ ID NO: 349448
  Synthetic oligonucleotide

SEQ ID NO: 557447 - DNA, 60 bp, Artificial; identical to SEQ ID NO: 349449
  Synthetic oligonucleotide

SEQ ID NO: 557448 - DNA, 60 bp, Artificial; identical to SEQ ID NO: 349453
  Synthetic oligonucleotide

SEQ ID NO: 557449 - DNA, 58 bp, Artificial; identical to SEQ ID NO: 349456
  Synthetic oligonucleotide

SEQ ID NO: 557450 - DNA, 56 bp, Artificial; identical to SEQ ID NO: 349457
  Synthetic oligonucleotide

SEQ ID NO: 557451 - DNA, 60 bp, Artificial; identical to SEQ ID NO: 349459
  Synthetic oligonucleotide

SEQ ID NO: 557452 - DNA, 55 bp, Artificial; identical to SEQ ID NO: 11250
  Synthetic oligonucleotide

SEQ ID NO: 557453 - DNA, 55 bp, Artificial; identical to SEQ ID NO: 349463
  Synthetic oligonucleotide

SEQ ID NO: 557454 - DNA, 55 bp, Artificial; identical to SEQ ID NO: 349464
  Synthetic oligonucleotide

SEQ ID NO: 557455 - DNA, 60 bp, Artificial; identical to SEQ ID NO: 349466
  Synthetic oligonucleotide

SEQ ID NO: 557456 - DNA, 55 bp, Artificial; identical to SEQ ID NO: 349467
  Synthetic oligonucleotide

SEQ ID NO: 557457 - DNA, 55 bp, Artificial; identical to SEQ ID NO: 349471
  Synthetic oligonucleotide

SEQ ID NO: 557458 - DNA, 51 bp, Artificial; identical to SEQ ID NO: 349473
  Synthetic oligonucleotide

SEQ ID NO: 557459 - DNA, 55 bp, Artificial; identical to SEQ ID NO: 349475
  Synthetic oligonucleotide

SEQ ID NO: 557460 - DNA, 55 bp, Artificial; identical to SEQ ID NO: 349476
  Synthetic oligonucleotide

SEQ ID NO: 557461 - DNA, 60 bp, Artificial; identical to SEQ ID NO: 349477
  Synthetic oligonucleotide

SEQ ID NO: 557462 - DNA, 60 bp, Artificial; identical to SEQ ID NO: 349479
  Synthetic oligonucleotide

SEQ ID NO: 557463 - DNA, 60 bp, Artificial; identical to SEQ ID NO: 349480
  Synthetic oligonucleotide

SEQ ID NO: 557464 - DNA, 59 bp, Artificial; identical to SEQ ID NO: 349481
  Synthetic oligonucleotide

SEQ ID NO: 557465 - DNA, 55 bp, Artificial; identical to SEQ ID NO: 349483
  Synthetic oligonucleotide

SEQ ID NO: 557466 - DNA, 59 bp, Artificial; identical to SEQ ID NO: 18342
  Synthetic oligonucleotide

SEQ ID NO: 557467 - DNA, 55 bp, Artificial; identical to SEQ ID NO: 349491
  Synthetic oligonucleotide

SEQ ID NO: 557468 - DNA, 55 bp, Artificial; identical to SEQ ID NO: 349492
  Synthetic oligonucleotide

SEQ ID NO: 557469 - DNA, 54 bp, Artificial; identical to SEQ ID NO: 349495
  Synthetic oligonucleotide

SEQ ID NO: 557470 - DNA, 54 bp, Artificial; identical to SEQ ID NO: 349497
  Synthetic oligonucleotide

SEQ ID NO: 557471 - DNA, 56 bp, Artificial; identical to SEQ ID NO: 349501
  Synthetic oligonucleotide

SEQ ID NO: 557472 - DNA, 60 bp, Artificial; identical to SEQ ID NO: 349502
  Synthetic oligonucleotide

SEQ ID NO: 557473 - DNA, 60 bp, Artificial; identical to SEQ ID NO: 349503
  Synthetic oligonucleotide

SEQ ID NO: 557474 - DNA, 55 bp, Artificial; identical to SEQ ID NO: 349507
  Synthetic oligonucleotide

SEQ ID NO: 557475 - DNA, 60 bp, Artificial; identical to SEQ ID NO: 349508
  Synthetic oligonucleotide

SEQ ID NO: 557476 - DNA, 58 bp, Artificial; identical to SEQ ID NO: 349513
  Synthetic oligonucleotide

SEQ ID NO: 557477 - DNA, 59 bp, Artificial; identical to SEQ ID NO: 349514
  Synthetic oligonucleotide

SEQ ID NO: 557478 - DNA, 59 bp, Artificial; identical to SEQ ID NO: 349518
  Synthetic oligonucleotide

SEQ ID NO: 557479 - DNA, 52 bp, Artificial; identical to SEQ ID NO: 349522
  Synthetic oligonucleotide

SEQ ID NO: 557480 - DNA, 53 bp, Artificial; identical to SEQ ID NO: 349524
  Synthetic oligonucleotide

SEQ ID NO: 557481 - DNA, 55 bp, Artificial; identical to SEQ ID NO: 349525
  Synthetic oligonucleotide

SEQ ID NO: 557482 - DNA, 60 bp, Artificial; identical to SEQ ID NO: 349526
  Synthetic oligonucleotide

SEQ ID NO: 557483 - DNA, 54 bp, Artificial; identical to SEQ ID NO: 349527
  Synthetic oligonucleotide

SEQ ID NO: 557484 - DNA, 55 bp, Artificial; identical to SEQ ID NO: 349530
  Synthetic oligonucleotide

SEQ ID NO: 557485 - DNA, 55 bp, Artificial; identical to SEQ ID NO: 349534
  Synthetic oligonucleotide

SEQ ID NO: 557486 - DNA, 60 bp, Artificial; identical to SEQ ID NO: 349538
  Synthetic oligonucleotide

SEQ ID NO: 557487 - DNA, 54 bp, Artificial; identical to SEQ ID NO: 349540
  Synthetic oligonucleotide

SEQ ID NO: 557488 - DNA, 60 bp, Artificial; identical to SEQ ID NO: 349542
  Synthetic oligonucleotide

SEQ ID NO: 557489 - DNA, 58 bp, Artificial; identical to SEQ ID NO: 349543
  Synthetic oligonucleotide

SEQ ID NO: 557490 - DNA, 60 bp, Artificial; identical to SEQ ID NO: 349544
  Synthetic oligonucleotide

SEQ ID NO: 557491 - DNA, 59 bp, Artificial; identical to SEQ ID NO: 349546
  Synthetic oligonucleotide

SEQ ID NO: 557492 - DNA, 60 bp, Artificial; identical to SEQ ID NO: 11906
  Synthetic oligonucleotide

SEQ ID NO: 557493 - DNA, 55 bp, Artificial; identical to SEQ ID NO: 349554
  Synthetic oligonucleotide

SEQ ID NO: 557494 - DNA, 51 bp, Artificial; identical to SEQ ID NO: 349558
  Synthetic oligonucleotide

SEQ ID NO: 557495 - DNA, 60 bp, Artificial; identical to SEQ ID NO: 349563
  Synthetic oligonucleotide

SEQ ID NO: 557496 - DNA, 60 bp, Artificial; identical to SEQ ID NO: 349571
  Synthetic oligonucleotide

SEQ ID NO: 557497 - DNA, 51 bp, Artificial; identical to SEQ ID NO: 349572
  Synthetic oligonucleotide

SEQ ID NO: 557498 - DNA, 52 bp, Artificial; identical to SEQ ID NO: 349573
  Synthetic oligonucleotide

SEQ ID NO: 557499 - DNA, 56 bp, Artificial; identical to SEQ ID NO: 349576
  Synthetic oligonucleotide

SEQ ID NO: 557500 - DNA, 59 bp, Artificial; identical to SEQ ID NO: 349581
  Synthetic oligonucleotide

SEQ ID NO: 557501 - DNA, 60 bp, Artificial; identical to SEQ ID NO: 349582
  Synthetic oligonucleotide

SEQ ID NO: 557502 - DNA, 60 bp, Artificial; identical to SEQ ID NO: 349584
  Synthetic oligonucleotide

SEQ ID NO: 557503 - DNA, 60 bp, Artificial; identical to SEQ ID NO: 349586
  Synthetic oligonucleotide

SEQ ID NO: 557504 - DNA, 60 bp, Artificial; identical to SEQ ID NO: 349587
  Synthetic oligonucleotide

SEQ ID NO: 557505 - DNA, 60 bp, Artificial; identical to SEQ ID NO: 349588
  Synthetic oligonucleotide

SEQ ID NO: 557506 - DNA, 55 bp, Artificial; identical to SEQ ID NO: 349590
  Synthetic oligonucleotide

SEQ ID NO: 557507 - DNA, 60 bp, Artificial; identical to SEQ ID NO: 349591
  Synthetic oligonucleotide

SEQ ID NO: 557508 - DNA, 55 bp, Artificial; identical to SEQ ID NO: 349592
  Synthetic oligonucleotide

SEQ ID NO: 557509 - DNA, 55 bp, Artificial; identical to SEQ ID NO: 349593
  Synthetic oligonucleotide

SEQ ID NO: 557510 - DNA, 59 bp, Artificial; identical to SEQ ID NO: 349594
  Synthetic oligonucleotide

SEQ ID NO: 557511 - DNA, 60 bp, Artificial; identical to SEQ ID NO: 11343
  Synthetic oligonucleotide

SEQ ID NO: 557512 - DNA, 55 bp, Artificial; identical to SEQ ID NO: 349597
  Synthetic oligonucleotide

SEQ ID NO: 557513 - DNA, 60 bp, Artificial; identical to SEQ ID NO: 349598
  Synthetic oligonucleotide

SEQ ID NO: 557514 - DNA, 55 bp, Artificial; identical to SEQ ID NO: 349600
  Synthetic oligonucleotide

SEQ ID NO: 557515 - DNA, 60 bp, Artificial; identical to SEQ ID NO: 349601
  Synthetic oligonucleotide

SEQ ID NO: 557516 - DNA, 60 bp, Artificial; identical to SEQ ID NO: 349605
  Synthetic oligonucleotide

SEQ ID NO: 557517 - DNA, 59 bp, Artificial; identical to SEQ ID NO: 349606
  Synthetic oligonucleotide

SEQ ID NO: 557518 - DNA, 59 bp, Artificial; identical to SEQ ID NO: 349607
  Synthetic oligonucleotide

SEQ ID NO: 557519 - DNA, 60 bp, Artificial; identical to SEQ ID NO: 349609
  Synthetic oligonucleotide

SEQ ID NO: 557520 - DNA, 60 bp, Artificial; identical to SEQ ID NO: 349611
  Synthetic oligonucleotide

SEQ ID NO: 557521 - DNA, 60 bp, Artificial; identical to SEQ ID NO: 349612
  Synthetic oligonucleotide

SEQ ID NO: 557522 - DNA, 55 bp, Artificial; identical to SEQ ID NO: 349614
  Synthetic oligonucleotide

SEQ ID NO: 557523 - DNA, 55 bp, Artificial; identical to SEQ ID NO: 349615
  Synthetic oligonucleotide

SEQ ID NO: 557524 - DNA, 60 bp, Artificial; identical to SEQ ID NO: 349618
  Synthetic oligonucleotide

SEQ ID NO: 557525 - DNA, 60 bp, Artificial; identical to SEQ ID NO: 349619
  Synthetic oligonucleotide

SEQ ID NO: 557526 - DNA, 55 bp, Artificial; identical to SEQ ID NO: 349621
  Synthetic oligonucleotide

SEQ ID NO: 557527 - DNA, 52 bp, Artificial; identical to SEQ ID NO: 349623
  Synthetic oligonucleotide

SEQ ID NO: 557528 - DNA, 60 bp, Artificial; identical to SEQ ID NO: 349625
  Synthetic oligonucleotide

SEQ ID NO: 557529 - DNA, 60 bp, Artificial; identical to SEQ ID NO: 349627
  Synthetic oligonucleotide

SEQ ID NO: 557530 - DNA, 51 bp, Artificial; identical to SEQ ID NO: 349628
  Synthetic oligonucleotide

SEQ ID NO: 557531 - DNA, 55 bp, Artificial; identical to SEQ ID NO: 349630
  Synthetic oligonucleotide

SEQ ID NO: 557532 - DNA, 53 bp, Artificial; identical to SEQ ID NO: 349634
  Synthetic oligonucleotide

SEQ ID NO: 557533 - DNA, 59 bp, Artificial; identical to SEQ ID NO: 349636
  Synthetic oligonucleotide

SEQ ID NO: 557534 - DNA, 55 bp, Artificial; identical to SEQ ID NO: 349638
  Synthetic oligonucleotide

SEQ ID NO: 557535 - DNA, 55 bp, Artificial; identical to SEQ ID NO: 349645
  Synthetic oligonucleotide

SEQ ID NO: 557536 - DNA, 55 bp, Artificial; identical to SEQ ID NO: 349652
  Synthetic oligonucleotide

SEQ ID NO: 557537 - DNA, 60 bp, Artificial; identical to SEQ ID NO: 349654
  Synthetic oligonucleotide

SEQ ID NO: 557538 - DNA, 60 bp, Artificial; identical to SEQ ID NO: 349656
  Synthetic oligonucleotide

SEQ ID NO: 557539 - DNA, 60 bp, Artificial; identical to SEQ ID NO: 349657
  Synthetic oligonucleotide

SEQ ID NO: 557540 - DNA, 53 bp, Artificial; identical to SEQ ID NO: 349659
  Synthetic oligonucleotide

SEQ ID NO: 557541 - DNA, 55 bp, Artificial; identical to SEQ ID NO: 349660
  Synthetic oligonucleotide

SEQ ID NO: 557542 - DNA, 55 bp, Artificial; identical to SEQ ID NO: 349662
  Synthetic oligonucleotide

SEQ ID NO: 557543 - DNA, 57 bp, Artificial; identical to SEQ ID NO: 349663
  Synthetic oligonucleotide

SEQ ID NO: 557544 - DNA, 58 bp, Artificial; identical to SEQ ID NO: 349664
  Synthetic oligonucleotide

SEQ ID NO: 557545 - DNA, 59 bp, Artificial; identical to SEQ ID NO: 349665
  Synthetic oligonucleotide

SEQ ID NO: 557546 - DNA, 60 bp, Artificial; identical to SEQ ID NO: 349666
  Synthetic oligonucleotide

SEQ ID NO: 557547 - DNA, 55 bp, Artificial; identical to SEQ ID NO: 349669
  Synthetic oligonucleotide

SEQ ID NO: 557548 - DNA, 55 bp, Artificial; identical to SEQ ID NO: 349670
  Synthetic oligonucleotide

SEQ ID NO: 557549 - DNA, 50 bp, Artificial; identical to SEQ ID NO: 349672
  Synthetic oligonucleotide

SEQ ID NO: 557550 - DNA, 55 bp, Artificial; identical to SEQ ID NO: 349673
  Synthetic oligonucleotide

SEQ ID NO: 557551 - DNA, 60 bp, Artificial; identical to SEQ ID NO: 349674
  Synthetic oligonucleotide

SEQ ID NO: 557552 - DNA, 55 bp, Artificial; identical to SEQ ID NO: 349675
  Synthetic oligonucleotide

SEQ ID NO: 557553 - DNA, 60 bp, Artificial; identical to SEQ ID NO: 349676
  Synthetic oligonucleotide

SEQ ID NO: 557554 - DNA, 60 bp, Artificial; identical to SEQ ID NO: 349678
  Synthetic oligonucleotide

SEQ ID NO: 557555 - DNA, 55 bp, Artificial; identical to SEQ ID NO: 349681
  Synthetic oligonucleotide

SEQ ID NO: 557556 - DNA, 55 bp, Artificial; identical to SEQ ID NO: 349683
  Synthetic oligonucleotide

SEQ ID NO: 557557 - DNA, 57 bp, Artificial; identical to SEQ ID NO: 18022
  Synthetic oligonucleotide

SEQ ID NO: 557558 - DNA, 57 bp, Artificial; identical to SEQ ID NO: 349686
  Synthetic oligonucleotide

SEQ ID NO: 557559 - DNA, 55 bp, Artificial; identical to SEQ ID NO: 349687
  Synthetic oligonucleotide

SEQ ID NO: 557560 - DNA, 55 bp, Artificial; identical to SEQ ID NO: 6387
  Synthetic oligonucleotide

SEQ ID NO: 557561 - DNA, 60 bp, Artificial; identical to SEQ ID NO: 8061
  Synthetic oligonucleotide

SEQ ID NO: 557562 - DNA, 55 bp, Artificial; identical to SEQ ID NO: 349690
  Synthetic oligonucleotide

SEQ ID NO: 557563 - DNA, 55 bp, Artificial; identical to SEQ ID NO: 349698
  Synthetic oligonucleotide

SEQ ID NO: 557564 - DNA, 60 bp, Artificial; identical to SEQ ID NO: 349700
  Synthetic oligonucleotide

SEQ ID NO: 557565 - DNA, 50 bp, Artificial; identical to SEQ ID NO: 349701
  Synthetic oligonucleotide

SEQ ID NO: 557566 - DNA, 60 bp, Artificial; identical to SEQ ID NO: 349702
  Synthetic oligonucleotide

SEQ ID NO: 557567 - DNA, 60 bp, Artificial; identical to SEQ ID NO: 349704
  Synthetic oligonucleotide

SEQ ID NO: 557568 - DNA, 59 bp, Artificial; identical to SEQ ID NO: 349706
  Synthetic oligonucleotide

SEQ ID NO: 557569 - DNA, 54 bp, Artificial; identical to SEQ ID NO: 349707
  Synthetic oligonucleotide

SEQ ID NO: 557570 - DNA, 53 bp, Artificial; identical to SEQ ID NO: 349713
  Synthetic oligonucleotide

SEQ ID NO: 557571 - DNA, 50 bp, Artificial; identical to SEQ ID NO: 349714
  Synthetic oligonucleotide

SEQ ID NO: 557572 - DNA, 55 bp, Artificial; identical to SEQ ID NO: 349715
  Synthetic oligonucleotide

SEQ ID NO: 557573 - DNA, 55 bp, Artificial; identical to SEQ ID NO: 349718
  Synthetic oligonucleotide

SEQ ID NO: 557574 - DNA, 60 bp, Artificial; identical to SEQ ID NO: 349721
  Synthetic oligonucleotide

SEQ ID NO: 557575 - DNA, 58 bp, Artificial; identical to SEQ ID NO: 349722
  Synthetic oligonucleotide

SEQ ID NO: 557576 - DNA, 59 bp, Artificial; identical to SEQ ID NO: 18561
  Synthetic oligonucleotide

SEQ ID NO: 557577 - DNA, 60 bp, Artificial; identical to SEQ ID NO: 349724
  Synthetic oligonucleotide

SEQ ID NO: 557578 - DNA, 60 bp, Artificial; identical to SEQ ID NO: 14789
  Synthetic oligonucleotide

SEQ ID NO: 557579 - DNA, 60 bp, Artificial; identical to SEQ ID NO: 349726
  Synthetic oligonucleotide

SEQ ID NO: 557580 - DNA, 60 bp, Artificial; identical to SEQ ID NO: 349728
  Synthetic oligonucleotide

SEQ ID NO: 557581 - DNA, 51 bp, Artificial; identical to SEQ ID NO: 349729
  Synthetic oligonucleotide

SEQ ID NO: 557582 - DNA, 55 bp, Artificial; identical to SEQ ID NO: 349731
  Synthetic oligonucleotide

SEQ ID NO: 557583 - DNA, 60 bp, Artificial; identical to SEQ ID NO: 349735
  Synthetic oligonucleotide

SEQ ID NO: 557584 - DNA, 60 bp, Artificial; identical to SEQ ID NO: 349738
  Synthetic oligonucleotide

SEQ ID NO: 557585 - DNA, 55 bp, Artificial; identical to SEQ ID NO: 349740
  Synthetic oligonucleotide

SEQ ID NO: 557586 - DNA, 53 bp, Artificial; identical to SEQ ID NO: 349741
  Synthetic oligonucleotide

SEQ ID NO: 557587 - DNA, 60 bp, Artificial; identical to SEQ ID NO: 349745
  Synthetic oligonucleotide

SEQ ID NO: 557588 - DNA, 57 bp, Artificial; identical to SEQ ID NO: 349746
  Synthetic oligonucleotide

SEQ ID NO: 557589 - DNA, 55 bp, Artificial; identical to SEQ ID NO: 349747
  Synthetic oligonucleotide

SEQ ID NO: 557590 - DNA, 60 bp, Artificial; identical to SEQ ID NO: 349753
  Synthetic oligonucleotide

SEQ ID NO: 557591 - DNA, 57 bp, Artificial; identical to SEQ ID NO: 349757
  Synthetic oligonucleotide

SEQ ID NO: 557592 - DNA, 54 bp, Artificial; identical to SEQ ID NO: 349758
  Synthetic oligonucleotide

SEQ ID NO: 557593 - DNA, 55 bp, Artificial; identical to SEQ ID NO: 349759
  Synthetic oligonucleotide

SEQ ID NO: 557594 - DNA, 60 bp, Artificial; identical to SEQ ID NO: 349762
  Synthetic oligonucleotide

SEQ ID NO: 557595 - DNA, 55 bp, Artificial; identical to SEQ ID NO: 349763
  Synthetic oligonucleotide

SEQ ID NO: 557596 - DNA, 60 bp, Artificial; identical to SEQ ID NO: 349765
  Synthetic oligonucleotide

SEQ ID NO: 557597 - DNA, 60 bp, Artificial; identical to SEQ ID NO: 10051
  Synthetic oligonucleotide

SEQ ID NO: 557598 - DNA, 60 bp, Artificial; identical to SEQ ID NO: 349767
  Synthetic oligonucleotide

SEQ ID NO: 557599 - DNA, 51 bp, Artificial; identical to SEQ ID NO: 349770
  Synthetic oligonucleotide

SEQ ID NO: 557600 - DNA, 58 bp, Artificial; identical to SEQ ID NO: 349771
  Synthetic oligonucleotide

SEQ ID NO: 557601 - DNA, 60 bp, Artificial; identical to SEQ ID NO: 349772
  Synthetic oligonucleotide

SEQ ID NO: 557602 - DNA, 55 bp, Artificial; identical to SEQ ID NO: 349773
  Synthetic oligonucleotide

SEQ ID NO: 557603 - DNA, 55 bp, Artificial; identical to SEQ ID NO: 5966
  Synthetic oligonucleotide

SEQ ID NO: 557604 - DNA, 55 bp, Artificial; identical to SEQ ID NO: 349778
  Synthetic oligonucleotide

SEQ ID NO: 557605 - DNA, 60 bp, Artificial; identical to SEQ ID NO: 349781
  Synthetic oligonucleotide

SEQ ID NO: 557606 - DNA, 60 bp, Artificial; identical to SEQ ID NO: 349782
  Synthetic oligonucleotide

SEQ ID NO: 557607 - DNA, 55 bp, Artificial; identical to SEQ ID NO: 349783
  Synthetic oligonucleotide

SEQ ID NO: 557608 - DNA, 58 bp, Artificial; identical to SEQ ID NO: 349785
  Synthetic oligonucleotide

SEQ ID NO: 557609 - DNA, 60 bp, Artificial; identical to SEQ ID NO: 349786
  Synthetic oligonucleotide

SEQ ID NO: 557610 - DNA, 57 bp, Artificial; identical to SEQ ID NO: 349795
  Synthetic oligonucleotide

SEQ ID NO: 557611 - DNA, 60 bp, Artificial; identical to SEQ ID NO: 349796
  Synthetic oligonucleotide

SEQ ID NO: 557612 - DNA, 53 bp, Artificial; identical to SEQ ID NO: 349800
  Synthetic oligonucleotide

SEQ ID NO: 557613 - DNA, 51 bp, Artificial; identical to SEQ ID NO: 349801
  Synthetic oligonucleotide

SEQ ID NO: 557614 - DNA, 55 bp, Artificial; identical to SEQ ID NO: 16580
  Synthetic oligonucleotide

SEQ ID NO: 557615 - DNA, 52 bp, Artificial; identical to SEQ ID NO: 349809
  Synthetic oligonucleotide

SEQ ID NO: 557616 - DNA, 53 bp, Artificial; identical to SEQ ID NO: 349810
  Synthetic oligonucleotide

SEQ ID NO: 557617 - DNA, 56 bp, Artificial; identical to SEQ ID NO: 349812
  Synthetic oligonucleotide

SEQ ID NO: 557618 - DNA, 53 bp, Artificial; identical to SEQ ID NO: 349814
  Synthetic oligonucleotide

SEQ ID NO: 557619 - DNA, 59 bp, Artificial; identical to SEQ ID NO: 349815
  Synthetic oligonucleotide

SEQ ID NO: 557620 - DNA, 60 bp, Artificial; identical to SEQ ID NO: 349817
  Synthetic oligonucleotide

SEQ ID NO: 557621 - DNA, 59 bp, Artificial; identical to SEQ ID NO: 349821
  Synthetic oligonucleotide

SEQ ID NO: 557622 - DNA, 55 bp, Artificial; identical to SEQ ID NO: 349829
  Synthetic oligonucleotide

SEQ ID NO: 557623 - DNA, 60 bp, Artificial; identical to SEQ ID NO: 349840
  Synthetic oligonucleotide

SEQ ID NO: 557624 - DNA, 58 bp, Artificial; identical to SEQ ID NO: 17269
  Synthetic oligonucleotide

SEQ ID NO: 557625 - DNA, 60 bp, Artificial; identical to SEQ ID NO: 349845
  Synthetic oligonucleotide

SEQ ID NO: 557626 - DNA, 56 bp, Artificial; identical to SEQ ID NO: 349849
  Synthetic oligonucleotide

SEQ ID NO: 557627 - DNA, 55 bp, Artificial; identical to SEQ ID NO: 349850
  Synthetic oligonucleotide

SEQ ID NO: 557628 - DNA, 59 bp, Artificial; identical to SEQ ID NO: 349854
  Synthetic oligonucleotide

SEQ ID NO: 557629 - DNA, 57 bp, Artificial; identical to SEQ ID NO: 349858
  Synthetic oligonucleotide

SEQ ID NO: 557630 - DNA, 55 bp, Artificial; identical to SEQ ID NO: 349860
  Synthetic oligonucleotide

SEQ ID NO: 557631 - DNA, 58 bp, Artificial; identical to SEQ ID NO: 349866
  Synthetic oligonucleotide

SEQ ID NO: 557632 - DNA, 55 bp, Artificial; identical to SEQ ID NO: 349867
  Synthetic oligonucleotide

SEQ ID NO: 557633 - DNA, 57 bp, Artificial; identical to SEQ ID NO: 349869
  Synthetic oligonucleotide

SEQ ID NO: 557634 - DNA, 60 bp, Artificial; identical to SEQ ID NO: 349871
  Synthetic oligonucleotide

SEQ ID NO: 557635 - DNA, 55 bp, Artificial; identical to SEQ ID NO: 349872
  Synthetic oligonucleotide

SEQ ID NO: 557636 - DNA, 55 bp, Artificial; identical to SEQ ID NO: 349874
  Synthetic oligonucleotide

SEQ ID NO: 557637 - DNA, 50 bp, Artificial; identical to SEQ ID NO: 349875
  Synthetic oligonucleotide

SEQ ID NO: 557638 - DNA, 60 bp, Artificial; identical to SEQ ID NO: 349878
  Synthetic oligonucleotide

SEQ ID NO: 557639 - DNA, 60 bp, Artificial; identical to SEQ ID NO: 349881
  Synthetic oligonucleotide

SEQ ID NO: 557640 - DNA, 60 bp, Artificial; identical to SEQ ID NO: 349885
  Synthetic oligonucleotide

SEQ ID NO: 557641 - DNA, 54 bp, Artificial; identical to SEQ ID NO: 349886
  Synthetic oligonucleotide

SEQ ID NO: 557642 - DNA, 55 bp, Artificial; identical to SEQ ID NO: 10411
  Synthetic oligonucleotide

SEQ ID NO: 557643 - DNA, 50 bp, Artificial; identical to SEQ ID NO: 349887
  Synthetic oligonucleotide

SEQ ID NO: 557644 - DNA, 57 bp, Artificial; identical to SEQ ID NO: 349889
  Synthetic oligonucleotide

SEQ ID NO: 557645 - DNA, 60 bp, Artificial; identical to SEQ ID NO: 349890
  Synthetic oligonucleotide

SEQ ID NO: 557646 - DNA, 54 bp, Artificial; identical to SEQ ID NO: 349891
  Synthetic oligonucleotide

SEQ ID NO: 557647 - DNA, 60 bp, Artificial; identical to SEQ ID NO: 349893
  Synthetic oligonucleotide

SEQ ID NO: 557648 - DNA, 58 bp, Artificial; identical to SEQ ID NO: 17584
  Synthetic oligonucleotide

SEQ ID NO: 557649 - DNA, 59 bp, Artificial; identical to SEQ ID NO: 349897
  Synthetic oligonucleotide

SEQ ID NO: 557650 - DNA, 60 bp, Artificial; identical to SEQ ID NO: 14975
  Synthetic oligonucleotide

SEQ ID NO: 557651 - DNA, 55 bp, Artificial; identical to SEQ ID NO: 349899
  Synthetic oligonucleotide

SEQ ID NO: 557652 - DNA, 55 bp, Artificial; identical to SEQ ID NO: 349901
  Synthetic oligonucleotide

SEQ ID NO: 557653 - DNA, 60 bp, Artificial; identical to SEQ ID NO: 349906
  Synthetic oligonucleotide

SEQ ID NO: 557654 - DNA, 60 bp, Artificial; identical to SEQ ID NO: 349908
  Synthetic oligonucleotide

SEQ ID NO: 557655 - DNA, 55 bp, Artificial; identical to SEQ ID NO: 349911
  Synthetic oligonucleotide

SEQ ID NO: 557656 - DNA, 56 bp, Artificial; identical to SEQ ID NO: 349914
  Synthetic oligonucleotide

SEQ ID NO: 557657 - DNA, 60 bp, Artificial; identical to SEQ ID NO: 349915
  Synthetic oligonucleotide

SEQ ID NO: 557658 - DNA, 60 bp, Artificial; identical to SEQ ID NO: 349917
  Synthetic oligonucleotide

SEQ ID NO: 557659 - DNA, 55 bp, Artificial; identical to SEQ ID NO: 349920
  Synthetic oligonucleotide

SEQ ID NO: 557660 - DNA, 55 bp, Artificial; identical to SEQ ID NO: 349921
  Synthetic oligonucleotide

SEQ ID NO: 557661 - DNA, 60 bp, Artificial; identical to SEQ ID NO: 349922
  Synthetic oligonucleotide

SEQ ID NO: 557662 - DNA, 50 bp, Artificial; identical to SEQ ID NO: 349923
  Synthetic oligonucleotide

SEQ ID NO: 557663 - DNA, 55 bp, Artificial; identical to SEQ ID NO: 349929
  Synthetic oligonucleotide

SEQ ID NO: 557664 - DNA, 55 bp, Artificial; identical to SEQ ID NO: 349931
  Synthetic oligonucleotide

SEQ ID NO: 557665 - DNA, 60 bp, Artificial; identical to SEQ ID NO: 349933
  Synthetic oligonucleotide

SEQ ID NO: 557666 - DNA, 60 bp, Artificial; identical to SEQ ID NO: 349934
  Synthetic oligonucleotide

SEQ ID NO: 557667 - DNA, 55 bp, Artificial; identical to SEQ ID NO: 349935
  Synthetic oligonucleotide

SEQ ID NO: 557668 - DNA, 55 bp, Artificial; identical to SEQ ID NO: 349938
  Synthetic oligonucleotide

SEQ ID NO: 557669 - DNA, 60 bp, Artificial; identical to SEQ ID NO: 349939
  Synthetic oligonucleotide

SEQ ID NO: 557670 - DNA, 58 bp, Artificial; identical to SEQ ID NO: 349948
  Synthetic oligonucleotide

SEQ ID NO: 557671 - DNA, 59 bp, Artificial; identical to SEQ ID NO: 349954
  Synthetic oligonucleotide

SEQ ID NO: 557672 - DNA, 56 bp, Artificial; identical to SEQ ID NO: 349957
  Synthetic oligonucleotide

SEQ ID NO: 557673 - DNA, 60 bp, Artificial; identical to SEQ ID NO: 349958
  Synthetic oligonucleotide

SEQ ID NO: 557674 - DNA, 60 bp, Artificial; identical to SEQ ID NO: 349961
  Synthetic oligonucleotide

SEQ ID NO: 557675 - DNA, 56 bp, Artificial; identical to SEQ ID NO: 349962
  Synthetic oligonucleotide

SEQ ID NO: 557676 - DNA, 60 bp, Artificial; identical to SEQ ID NO: 349965
  Synthetic oligonucleotide

SEQ ID NO: 557677 - DNA, 55 bp, Artificial; identical to SEQ ID NO: 349966
  Synthetic oligonucleotide

SEQ ID NO: 557678 - DNA, 57 bp, Artificial; identical to SEQ ID NO: 18786
  Synthetic oligonucleotide

SEQ ID NO: 557679 - DNA, 60 bp, Artificial; identical to SEQ ID NO: 349972
  Synthetic oligonucleotide

SEQ ID NO: 557680 - DNA, 54 bp, Artificial; identical to SEQ ID NO: 349974
  Synthetic oligonucleotide

SEQ ID NO: 557681 - DNA, 60 bp, Artificial; identical to SEQ ID NO: 349976
  Synthetic oligonucleotide

SEQ ID NO: 557682 - DNA, 55 bp, Artificial; identical to SEQ ID NO: 349978
  Synthetic oligonucleotide

SEQ ID NO: 557683 - DNA, 59 bp, Artificial; identical to SEQ ID NO: 349979
  Synthetic oligonucleotide

SEQ ID NO: 557684 - DNA, 53 bp, Artificial; identical to SEQ ID NO: 349982
  Synthetic oligonucleotide

SEQ ID NO: 557685 - DNA, 60 bp, Artificial; identical to SEQ ID NO: 349983
  Synthetic oligonucleotide

SEQ ID NO: 557686 - DNA, 60 bp, Artificial; identical to SEQ ID NO: 349986
  Synthetic oligonucleotide

SEQ ID NO: 557687 - DNA, 58 bp, Artificial; identical to SEQ ID NO: 349988
  Synthetic oligonucleotide

SEQ ID NO: 557688 - DNA, 55 bp, Artificial; identical to SEQ ID NO: 349989
  Synthetic oligonucleotide

SEQ ID NO: 557689 - DNA, 55 bp, Artificial; identical to SEQ ID NO: 349991
  Synthetic oligonucleotide

SEQ ID NO: 557690 - DNA, 53 bp, Artificial; identical to SEQ ID NO: 349994
  Synthetic oligonucleotide

SEQ ID NO: 557691 - DNA, 60 bp, Artificial; identical to SEQ ID NO: 349996
  Synthetic oligonucleotide

SEQ ID NO: 557692 - DNA, 60 bp, Artificial; identical to SEQ ID NO: 10208
  Synthetic oligonucleotide

SEQ ID NO: 557693 - DNA, 52 bp, Artificial; identical to SEQ ID NO: 349998
  Synthetic oligonucleotide

SEQ ID NO: 557694 - DNA, 58 bp, Artificial; identical to SEQ ID NO: 350001
  Synthetic oligonucleotide

SEQ ID NO: 557695 - DNA, 58 bp, Artificial; identical to SEQ ID NO: 350002
  Synthetic oligonucleotide

SEQ ID NO: 557696 - DNA, 55 bp, Artificial; identical to SEQ ID NO: 350003
  Synthetic oligonucleotide

SEQ ID NO: 557697 - DNA, 57 bp, Artificial; identical to SEQ ID NO: 350004
  Synthetic oligonucleotide

SEQ ID NO: 557698 - DNA, 58 bp, Artificial; identical to SEQ ID NO: 350005
  Synthetic oligonucleotide

SEQ ID NO: 557699 - DNA, 60 bp, Artificial; identical to SEQ ID NO: 350006
  Synthetic oligonucleotide

SEQ ID NO: 557700 - DNA, 52 bp, Artificial; identical to SEQ ID NO: 350008
  Synthetic oligonucleotide

SEQ ID NO: 557701 - DNA, 60 bp, Artificial; identical to SEQ ID NO: 350009
  Synthetic oligonucleotide

SEQ ID NO: 557702 - DNA, 60 bp, Artificial; identical to SEQ ID NO: 350010
  Synthetic oligonucleotide

SEQ ID NO: 557703 - DNA, 55 bp, Artificial; identical to SEQ ID NO: 350011
  Synthetic oligonucleotide

SEQ ID NO: 557704 - DNA, 55 bp, Artificial; identical to SEQ ID NO: 350017
  Synthetic oligonucleotide

SEQ ID NO: 557705 - DNA, 56 bp, Artificial; identical to SEQ ID NO: 350018
  Synthetic oligonucleotide

SEQ ID NO: 557706 - DNA, 60 bp, Artificial; identical to SEQ ID NO: 350019
  Synthetic oligonucleotide

SEQ ID NO: 557707 - DNA, 60 bp, Artificial; identical to SEQ ID NO: 350020
  Synthetic oligonucleotide

SEQ ID NO: 557708 - DNA, 51 bp, Artificial; identical to SEQ ID NO: 350021
  Synthetic oligonucleotide

SEQ ID NO: 557709 - DNA, 60 bp, Artificial; identical to SEQ ID NO: 350022
  Synthetic oligonucleotide

SEQ ID NO: 557710 - DNA, 57 bp, Artificial; identical to SEQ ID NO: 350025
  Synthetic oligonucleotide

SEQ ID NO: 557711 - DNA, 55 bp, Artificial; identical to SEQ ID NO: 350026
  Synthetic oligonucleotide

SEQ ID NO: 557712 - DNA, 55 bp, Artificial; identical to SEQ ID NO: 350028
  Synthetic oligonucleotide

SEQ ID NO: 557713 - DNA, 51 bp, Artificial; identical to SEQ ID NO: 350029
  Synthetic oligonucleotide

SEQ ID NO: 557714 - DNA, 60 bp, Artificial; identical to SEQ ID NO: 350030
  Synthetic oligonucleotide

SEQ ID NO: 557715 - DNA, 55 bp, Artificial; identical to SEQ ID NO: 350031
  Synthetic oligonucleotide

SEQ ID NO: 557716 - DNA, 55 bp, Artificial; identical to SEQ ID NO: 350032
  Synthetic oligonucleotide

SEQ ID NO: 557717 - DNA, 60 bp, Artificial; identical to SEQ ID NO: 350034
  Synthetic oligonucleotide

SEQ ID NO: 557718 - DNA, 55 bp, Artificial; identical to SEQ ID NO: 350035
  Synthetic oligonucleotide

SEQ ID NO: 557719 - DNA, 55 bp, Artificial; identical to SEQ ID NO: 350037
  Synthetic oligonucleotide

SEQ ID NO: 557720 - DNA, 58 bp, Artificial; identical to SEQ ID NO: 350040
  Synthetic oligonucleotide

SEQ ID NO: 557721 - DNA, 57 bp, Artificial; identical to SEQ ID NO: 350043
  Synthetic oligonucleotide

SEQ ID NO: 557722 - DNA, 55 bp, Artificial; identical to SEQ ID NO: 350044
  Synthetic oligonucleotide

SEQ ID NO: 557723 - DNA, 60 bp, Artificial; identical to SEQ ID NO: 350047
  Synthetic oligonucleotide

SEQ ID NO: 557724 - DNA, 55 bp, Artificial; identical to SEQ ID NO: 350050
  Synthetic oligonucleotide

SEQ ID NO: 557725 - DNA, 59 bp, Artificial; identical to SEQ ID NO: 350052
  Synthetic oligonucleotide

SEQ ID NO: 557726 - DNA, 59 bp, Artificial; identical to SEQ ID NO: 350053
  Synthetic oligonucleotide

SEQ ID NO: 557727 - DNA, 55 bp, Artificial; identical to SEQ ID NO: 12214
  Synthetic oligonucleotide

SEQ ID NO: 557728 - DNA, 60 bp, Artificial; identical to SEQ ID NO: 350057
  Synthetic oligonucleotide

SEQ ID NO: 557729 - DNA, 59 bp, Artificial; identical to SEQ ID NO: 350058
  Synthetic oligonucleotide

SEQ ID NO: 557730 - DNA, 55 bp, Artificial; identical to SEQ ID NO: 350060
  Synthetic oligonucleotide

SEQ ID NO: 557731 - DNA, 55 bp, Artificial; identical to SEQ ID NO: 350062
  Synthetic oligonucleotide

SEQ ID NO: 557732 - DNA, 60 bp, Artificial; identical to SEQ ID NO: 350067
  Synthetic oligonucleotide

SEQ ID NO: 557733 - DNA, 57 bp, Artificial; identical to SEQ ID NO: 350068
  Synthetic oligonucleotide

SEQ ID NO: 557734 - DNA, 55 bp, Artificial; identical to SEQ ID NO: 350072
  Synthetic oligonucleotide

SEQ ID NO: 557735 - DNA, 52 bp, Artificial; identical to SEQ ID NO: 350073
  Synthetic oligonucleotide

SEQ ID NO: 557736 - DNA, 55 bp, Artificial; identical to SEQ ID NO: 350074
  Synthetic oligonucleotide

SEQ ID NO: 557737 - DNA, 55 bp, Artificial; identical to SEQ ID NO: 350075
  Synthetic oligonucleotide

SEQ ID NO: 557738 - DNA, 52 bp, Artificial; identical to SEQ ID NO: 350076
  Synthetic oligonucleotide

SEQ ID NO: 557739 - DNA, 55 bp, Artificial; identical to SEQ ID NO: 11212
  Synthetic oligonucleotide

SEQ ID NO: 557740 - DNA, 58 bp, Artificial; identical to SEQ ID NO: 350079
  Synthetic oligonucleotide

SEQ ID NO: 557741 - DNA, 55 bp, Artificial; identical to SEQ ID NO: 350082
  Synthetic oligonucleotide

SEQ ID NO: 557742 - DNA, 57 bp, Artificial; identical to SEQ ID NO: 350083
  Synthetic oligonucleotide

SEQ ID NO: 557743 - DNA, 60 bp, Artificial; identical to SEQ ID NO: 350084
  Synthetic oligonucleotide

SEQ ID NO: 557744 - DNA, 55 bp, Artificial; identical to SEQ ID NO: 350088
  Synthetic oligonucleotide

SEQ ID NO: 557745 - DNA, 60 bp, Artificial; identical to SEQ ID NO: 350090
  Synthetic oligonucleotide

SEQ ID NO: 557746 - DNA, 58 bp, Artificial; identical to SEQ ID NO: 350091
  Synthetic oligonucleotide

SEQ ID NO: 557747 - DNA, 60 bp, Artificial; identical to SEQ ID NO: 350093
  Synthetic oligonucleotide

SEQ ID NO: 557748 - DNA, 55 bp, Artificial; identical to SEQ ID NO: 350104
  Synthetic oligonucleotide

SEQ ID NO: 557749 - DNA, 60 bp, Artificial; identical to SEQ ID NO: 350108
  Synthetic oligonucleotide

SEQ ID NO: 557750 - DNA, 60 bp, Artificial; identical to SEQ ID NO: 350109
  Synthetic oligonucleotide

SEQ ID NO: 557751 - DNA, 58 bp, Artificial; identical to SEQ ID NO: 350112
  Synthetic oligonucleotide

SEQ ID NO: 557752 - DNA, 60 bp, Artificial; identical to SEQ ID NO: 350113
  Synthetic oligonucleotide

SEQ ID NO: 557753 - DNA, 57 bp, Artificial; identical to SEQ ID NO: 350115
  Synthetic oligonucleotide

SEQ ID NO: 557754 - DNA, 55 bp, Artificial; identical to SEQ ID NO: 350118
  Synthetic oligonucleotide

SEQ ID NO: 557755 - DNA, 60 bp, Artificial; identical to SEQ ID NO: 350119
  Synthetic oligonucleotide

SEQ ID NO: 557756 - DNA, 55 bp, Artificial; identical to SEQ ID NO: 350120
  Synthetic oligonucleotide

SEQ ID NO: 557757 - DNA, 55 bp, Artificial; identical to SEQ ID NO: 350121
  Synthetic oligonucleotide

SEQ ID NO: 557758 - DNA, 59 bp, Artificial; identical to SEQ ID NO: 350125
  Synthetic oligonucleotide

SEQ ID NO: 557759 - DNA, 60 bp, Artificial; identical to SEQ ID NO: 350126
  Synthetic oligonucleotide

SEQ ID NO: 557760 - DNA, 55 bp, Artificial; identical to SEQ ID NO: 350129
  Synthetic oligonucleotide

SEQ ID NO: 557761 - DNA, 57 bp, Artificial; identical to SEQ ID NO: 350130
  Synthetic oligonucleotide

SEQ ID NO: 557762 - DNA, 59 bp, Artificial; identical to SEQ ID NO: 350131
  Synthetic oligonucleotide

SEQ ID NO: 557763 - DNA, 60 bp, Artificial; identical to SEQ ID NO: 350132
  Synthetic oligonucleotide

SEQ ID NO: 557764 - DNA, 53 bp, Artificial; identical to SEQ ID NO: 350138
  Synthetic oligonucleotide

SEQ ID NO: 557765 - DNA, 52 bp, Artificial; identical to SEQ ID NO: 350140
  Synthetic oligonucleotide

SEQ ID NO: 557766 - DNA, 55 bp, Artificial; identical to SEQ ID NO: 350141
  Synthetic oligonucleotide

SEQ ID NO: 557767 - DNA, 51 bp, Artificial; identical to SEQ ID NO: 350143
  Synthetic oligonucleotide

SEQ ID NO: 557768 - DNA, 60 bp, Artificial; identical to SEQ ID NO: 350146
  Synthetic oligonucleotide

SEQ ID NO: 557769 - DNA, 58 bp, Artificial; identical to SEQ ID NO: 350147
  Synthetic oligonucleotide

SEQ ID NO: 557770 - DNA, 60 bp, Artificial; identical to SEQ ID NO: 12635
  Synthetic oligonucleotide

SEQ ID NO: 557771 - DNA, 56 bp, Artificial; identical to SEQ ID NO: 350148
  Synthetic oligonucleotide

SEQ ID NO: 557772 - DNA, 58 bp, Artificial; identical to SEQ ID NO: 350151
  Synthetic oligonucleotide

SEQ ID NO: 557773 - DNA, 55 bp, Artificial; identical to SEQ ID NO: 350152
  Synthetic oligonucleotide

SEQ ID NO: 557774 - DNA, 55 bp, Artificial; identical to SEQ ID NO: 350155
  Synthetic oligonucleotide

SEQ ID NO: 557775 - DNA, 55 bp, Artificial; identical to SEQ ID NO: 350157
  Synthetic oligonucleotide

SEQ ID NO: 557776 - DNA, 55 bp, Artificial; identical to SEQ ID NO: 350159
  Synthetic oligonucleotide

SEQ ID NO: 557777 - DNA, 56 bp, Artificial; identical to SEQ ID NO: 20356
  Synthetic oligonucleotide

SEQ ID NO: 557778 - DNA, 57 bp, Artificial; identical to SEQ ID NO: 350163
  Synthetic oligonucleotide

SEQ ID NO: 557779 - DNA, 54 bp, Artificial; identical to SEQ ID NO: 350165
  Synthetic oligonucleotide

SEQ ID NO: 557780 - DNA, 52 bp, Artificial; identical to SEQ ID NO: 350166
  Synthetic oligonucleotide

SEQ ID NO: 557781 - DNA, 59 bp, Artificial; identical to SEQ ID NO: 350169
  Synthetic oligonucleotide

SEQ ID NO: 557782 - DNA, 60 bp, Artificial; identical to SEQ ID NO: 350171
  Synthetic oligonucleotide

SEQ ID NO: 557783 - DNA, 59 bp, Artificial; identical to SEQ ID NO: 350176
  Synthetic oligonucleotide

SEQ ID NO: 557784 - DNA, 51 bp, Artificial; identical to SEQ ID NO: 350177
  Synthetic oligonucleotide

SEQ ID NO: 557785 - DNA, 55 bp, Artificial; identical to SEQ ID NO: 350178
  Synthetic oligonucleotide

SEQ ID NO: 557786 - DNA, 55 bp, Artificial; identical to SEQ ID NO: 350179
  Synthetic oligonucleotide

SEQ ID NO: 557787 - DNA, 60 bp, Artificial; identical to SEQ ID NO: 350180
  Synthetic oligonucleotide

SEQ ID NO: 557788 - DNA, 51 bp, Artificial; identical to SEQ ID NO: 350181
  Synthetic oligonucleotide

SEQ ID NO: 557789 - DNA, 56 bp, Artificial; identical to SEQ ID NO: 350185
  Synthetic oligonucleotide

SEQ ID NO: 557790 - DNA, 56 bp, Artificial; identical to SEQ ID NO: 350186
  Synthetic oligonucleotide

SEQ ID NO: 557791 - DNA, 58 bp, Artificial; identical to SEQ ID NO: 350187
  Synthetic oligonucleotide

SEQ ID NO: 557792 - DNA, 57 bp, Artificial; identical to SEQ ID NO: 350190
  Synthetic oligonucleotide

SEQ ID NO: 557793 - DNA, 60 bp, Artificial; identical to SEQ ID NO: 350191
  Synthetic oligonucleotide

SEQ ID NO: 557794 - DNA, 60 bp, Artificial; identical to SEQ ID NO: 350192
  Synthetic oligonucleotide

SEQ ID NO: 557795 - DNA, 60 bp, Artificial; identical to SEQ ID NO: 350194
  Synthetic oligonucleotide

SEQ ID NO: 557796 - DNA, 60 bp, Artificial; identical to SEQ ID NO: 350196
  Synthetic oligonucleotide

SEQ ID NO: 557797 - DNA, 58 bp, Artificial; identical to SEQ ID NO: 350197
  Synthetic oligonucleotide

SEQ ID NO: 557798 - DNA, 52 bp, Artificial; identical to SEQ ID NO: 350199
  Synthetic oligonucleotide

SEQ ID NO: 557799 - DNA, 60 bp, Artificial; identical to SEQ ID NO: 11912
  Synthetic oligonucleotide

SEQ ID NO: 557800 - DNA, 55 bp, Artificial; identical to SEQ ID NO: 350204
  Synthetic oligonucleotide

SEQ ID NO: 557801 - DNA, 56 bp, Artificial; identical to SEQ ID NO: 350207
  Synthetic oligonucleotide

SEQ ID NO: 557802 - DNA, 57 bp, Artificial; identical to SEQ ID NO: 350211
  Synthetic oligonucleotide

SEQ ID NO: 557803 - DNA, 60 bp, Artificial; identical to SEQ ID NO: 350215
  Synthetic oligonucleotide

SEQ ID NO: 557804 - DNA, 60 bp, Artificial; identical to SEQ ID NO: 350218
  Synthetic oligonucleotide

SEQ ID NO: 557805 - DNA, 60 bp, Artificial; identical to SEQ ID NO: 350231
  Synthetic oligonucleotide

SEQ ID NO: 557806 - DNA, 60 bp, Artificial; identical to SEQ ID NO: 350232
  Synthetic oligonucleotide

SEQ ID NO: 557807 - DNA, 60 bp, Artificial; identical to SEQ ID NO: 350233
  Synthetic oligonucleotide

SEQ ID NO: 557808 - DNA, 51 bp, Artificial; identical to SEQ ID NO: 350235
  Synthetic oligonucleotide

SEQ ID NO: 557809 - DNA, 50 bp, Artificial; identical to SEQ ID NO: 350236
  Synthetic oligonucleotide

SEQ ID NO: 557810 - DNA, 57 bp, Artificial; identical to SEQ ID NO: 350238
  Synthetic oligonucleotide

SEQ ID NO: 557811 - DNA, 53 bp, Artificial; identical to SEQ ID NO: 350240
  Synthetic oligonucleotide

SEQ ID NO: 557812 - DNA, 60 bp, Artificial; identical to SEQ ID NO: 350243
  Synthetic oligonucleotide

SEQ ID NO: 557813 - DNA, 55 bp, Artificial; identical to SEQ ID NO: 350244
  Synthetic oligonucleotide

SEQ ID NO: 557814 - DNA, 57 bp, Artificial; identical to SEQ ID NO: 350249
  Synthetic oligonucleotide

SEQ ID NO: 557815 - DNA, 54 bp, Artificial; identical to SEQ ID NO: 19394
  Synthetic oligonucleotide

SEQ ID NO: 557816 - DNA, 53 bp, Artificial; identical to SEQ ID NO: 350250
  Synthetic oligonucleotide

SEQ ID NO: 557817 - DNA, 60 bp, Artificial; identical to SEQ ID NO: 350252
  Synthetic oligonucleotide

SEQ ID NO: 557818 - DNA, 60 bp, Artificial; identical to SEQ ID NO: 350256
  Synthetic oligonucleotide

SEQ ID NO: 557819 - DNA, 55 bp, Artificial; identical to SEQ ID NO: 350258
  Synthetic oligonucleotide

SEQ ID NO: 557820 - DNA, 60 bp, Artificial; identical to SEQ ID NO: 350260
  Synthetic oligonucleotide

SEQ ID NO: 557821 - DNA, 56 bp, Artificial; identical to SEQ ID NO: 350262
  Synthetic oligonucleotide

SEQ ID NO: 557822 - DNA, 50 bp, Artificial; identical to SEQ ID NO: 350263
  Synthetic oligonucleotide

SEQ ID NO: 557823 - DNA, 56 bp, Artificial; identical to SEQ ID NO: 350264
  Synthetic oligonucleotide

SEQ ID NO: 557824 - DNA, 60 bp, Artificial; identical to SEQ ID NO: 350269
  Synthetic oligonucleotide

SEQ ID NO: 557825 - DNA, 60 bp, Artificial; identical to SEQ ID NO: 350270
  Synthetic oligonucleotide

SEQ ID NO: 557826 - DNA, 60 bp, Artificial; identical to SEQ ID NO: 350272
  Synthetic oligonucleotide

SEQ ID NO: 557827 - DNA, 59 bp, Artificial; identical to SEQ ID NO: 350274
  Synthetic oligonucleotide

SEQ ID NO: 557828 - DNA, 60 bp, Artificial; identical to SEQ ID NO: 350275
  Synthetic oligonucleotide

SEQ ID NO: 557829 - DNA, 60 bp, Artificial; identical to SEQ ID NO: 350277
  Synthetic oligonucleotide

SEQ ID NO: 557830 - DNA, 51 bp, Artificial; identical to SEQ ID NO: 350280
  Synthetic oligonucleotide

SEQ ID NO: 557831 - DNA, 50 bp, Artificial; identical to SEQ ID NO: 350281
  Synthetic oligonucleotide

SEQ ID NO: 557832 - DNA, 50 bp, Artificial; identical to SEQ ID NO: 350282
  Synthetic oligonucleotide

SEQ ID NO: 557833 - DNA, 59 bp, Artificial; identical to SEQ ID NO: 350288
  Synthetic oligonucleotide

SEQ ID NO: 557834 - DNA, 56 bp, Artificial; identical to SEQ ID NO: 350289
  Synthetic oligonucleotide

SEQ ID NO: 557835 - DNA, 60 bp, Artificial; identical to SEQ ID NO: 350290
  Synthetic oligonucleotide

SEQ ID NO: 557836 - DNA, 60 bp, Artificial; identical to SEQ ID NO: 350292
  Synthetic oligonucleotide

SEQ ID NO: 557837 - DNA, 60 bp, Artificial; identical to SEQ ID NO: 350295
  Synthetic oligonucleotide

SEQ ID NO: 557838 - DNA, 60 bp, Artificial; identical to SEQ ID NO: 350297
  Synthetic oligonucleotide

SEQ ID NO: 557839 - DNA, 56 bp, Artificial; identical to SEQ ID NO: 350298
  Synthetic oligonucleotide

SEQ ID NO: 557840 - DNA, 54 bp, Artificial; identical to SEQ ID NO: 350300
  Synthetic oligonucleotide

SEQ ID NO: 557841 - DNA, 55 bp, Artificial; identical to SEQ ID NO: 350302
  Synthetic oligonucleotide

SEQ ID NO: 557842 - DNA, 60 bp, Artificial; identical to SEQ ID NO: 350306
  Synthetic oligonucleotide

SEQ ID NO: 557843 - DNA, 50 bp, Artificial; identical to SEQ ID NO: 350308
  Synthetic oligonucleotide

SEQ ID NO: 557844 - DNA, 56 bp, Artificial; identical to SEQ ID NO: 350311
  Synthetic oligonucleotide

SEQ ID NO: 557845 - DNA, 60 bp, Artificial; identical to SEQ ID NO: 350313
  Synthetic oligonucleotide

SEQ ID NO: 557846 - DNA, 58 bp, Artificial; identical to SEQ ID NO: 350314
  Synthetic oligonucleotide

SEQ ID NO: 557847 - DNA, 55 bp, Artificial; identical to SEQ ID NO: 350315
  Synthetic oligonucleotide

SEQ ID NO: 557848 - DNA, 53 bp, Artificial; identical to SEQ ID NO: 350317
  Synthetic oligonucleotide

SEQ ID NO: 557849 - DNA, 58 bp, Artificial; identical to SEQ ID NO: 350319
  Synthetic oligonucleotide

SEQ ID NO: 557850 - DNA, 60 bp, Artificial; identical to SEQ ID NO: 8275
  Synthetic oligonucleotide

SEQ ID NO: 557851 - DNA, 55 bp, Artificial; identical to SEQ ID NO: 350323
  Synthetic oligonucleotide

SEQ ID NO: 557852 - DNA, 56 bp, Artificial; identical to SEQ ID NO: 350327
  Synthetic oligonucleotide

SEQ ID NO: 557853 - DNA, 57 bp, Artificial; identical to SEQ ID NO: 350329
  Synthetic oligonucleotide

SEQ ID NO: 557854 - DNA, 59 bp, Artificial; identical to SEQ ID NO: 18426
  Synthetic oligonucleotide

SEQ ID NO: 557855 - DNA, 55 bp, Artificial; identical to SEQ ID NO: 350334
  Synthetic oligonucleotide

SEQ ID NO: 557856 - DNA, 60 bp, Artificial; identical to SEQ ID NO: 350336
  Synthetic oligonucleotide

SEQ ID NO: 557857 - DNA, 51 bp, Artificial; identical to SEQ ID NO: 350338
  Synthetic oligonucleotide

SEQ ID NO: 557858 - DNA, 57 bp, Artificial; identical to SEQ ID NO: 350340
  Synthetic oligonucleotide

SEQ ID NO: 557859 - DNA, 54 bp, Artificial; identical to SEQ ID NO: 350341
  Synthetic oligonucleotide

SEQ ID NO: 557860 - DNA, 60 bp, Artificial; identical to SEQ ID NO: 350344
  Synthetic oligonucleotide

SEQ ID NO: 557861 - DNA, 60 bp, Artificial; identical to SEQ ID NO: 350345
  Synthetic oligonucleotide

SEQ ID NO: 557862 - DNA, 60 bp, Artificial; identical to SEQ ID NO: 10824
  Synthetic oligonucleotide

SEQ ID NO: 557863 - DNA, 52 bp, Artificial; identical to SEQ ID NO: 350355
  Synthetic oligonucleotide

SEQ ID NO: 557864 - DNA, 55 bp, Artificial; identical to SEQ ID NO: 10518
  Synthetic oligonucleotide

SEQ ID NO: 557865 - DNA, 55 bp, Artificial; identical to SEQ ID NO: 350357
  Synthetic oligonucleotide

SEQ ID NO: 557866 - DNA, 55 bp, Artificial; identical to SEQ ID NO: 350360
  Synthetic oligonucleotide

SEQ ID NO: 557867 - DNA, 55 bp, Artificial; identical to SEQ ID NO: 350362
  Synthetic oligonucleotide

SEQ ID NO: 557868 - DNA, 55 bp, Artificial; identical to SEQ ID NO: 350363
  Synthetic oligonucleotide

SEQ ID NO: 557869 - DNA, 60 bp, Artificial; identical to SEQ ID NO: 117515
  Synthetic oligonucleotide

SEQ ID NO: 557870 - DNA, 54 bp, Artificial; identical to SEQ ID NO: 350364
  Synthetic oligonucleotide

SEQ ID NO: 557871 - DNA, 60 bp, Artificial; identical to SEQ ID NO: 350367
  Synthetic oligonucleotide

SEQ ID NO: 557872 - DNA, 59 bp, Artificial; identical to SEQ ID NO: 350368
  Synthetic oligonucleotide

SEQ ID NO: 557873 - DNA, 60 bp, Artificial; identical to SEQ ID NO: 350369
  Synthetic oligonucleotide

SEQ ID NO: 557874 - DNA, 56 bp, Artificial; identical to SEQ ID NO: 350372
  Synthetic oligonucleotide

SEQ ID NO: 557875 - DNA, 60 bp, Artificial; identical to SEQ ID NO: 350373
  Synthetic oligonucleotide

SEQ ID NO: 557876 - DNA, 55 bp, Artificial; identical to SEQ ID NO: 350375
  Synthetic oligonucleotide

SEQ ID NO: 557877 - DNA, 55 bp, Artificial; identical to SEQ ID NO: 350377
  Synthetic oligonucleotide

SEQ ID NO: 557878 - DNA, 56 bp, Artificial; identical to SEQ ID NO: 350379
  Synthetic oligonucleotide

SEQ ID NO: 557879 - DNA, 60 bp, Artificial; identical to SEQ ID NO: 350382
  Synthetic oligonucleotide

SEQ ID NO: 557880 - DNA, 51 bp, Artificial; identical to SEQ ID NO: 350383
  Synthetic oligonucleotide

SEQ ID NO: 557881 - DNA, 55 bp, Artificial; identical to SEQ ID NO: 350384
  Synthetic oligonucleotide

SEQ ID NO: 557882 - DNA, 57 bp, Artificial; identical to SEQ ID NO: 350387
  Synthetic oligonucleotide

SEQ ID NO: 557883 - DNA, 50 bp, Artificial; identical to SEQ ID NO: 350392
  Synthetic oligonucleotide

SEQ ID NO: 557884 - DNA, 60 bp, Artificial; identical to SEQ ID NO: 350395
  Synthetic oligonucleotide

SEQ ID NO: 557885 - DNA, 60 bp, Artificial; identical to SEQ ID NO: 350396
  Synthetic oligonucleotide

SEQ ID NO: 557886 - DNA, 60 bp, Artificial; identical to SEQ ID NO: 350399
  Synthetic oligonucleotide

SEQ ID NO: 557887 - DNA, 60 bp, Artificial; identical to SEQ ID NO: 350402
  Synthetic oligonucleotide

SEQ ID NO: 557888 - DNA, 60 bp, Artificial; identical to SEQ ID NO: 350403
  Synthetic oligonucleotide

SEQ ID NO: 557889 - DNA, 56 bp, Artificial; identical to SEQ ID NO: 350405
  Synthetic oligonucleotide

SEQ ID NO: 557890 - DNA, 56 bp, Artificial; identical to SEQ ID NO: 350407
  Synthetic oligonucleotide

SEQ ID NO: 557891 - DNA, 60 bp, Artificial; identical to SEQ ID NO: 350409
  Synthetic oligonucleotide

SEQ ID NO: 557892 - DNA, 60 bp, Artificial; identical to SEQ ID NO: 350410
  Synthetic oligonucleotide

SEQ ID NO: 557893 - DNA, 60 bp, Artificial; identical to SEQ ID NO: 350412
  Synthetic oligonucleotide

SEQ ID NO: 557894 - DNA, 58 bp, Artificial; identical to SEQ ID NO: 350414
  Synthetic oligonucleotide

SEQ ID NO: 557895 - DNA, 55 bp, Artificial; identical to SEQ ID NO: 350415
  Synthetic oligonucleotide

SEQ ID NO: 557896 - DNA, 59 bp, Artificial; identical to SEQ ID NO: 350418
  Synthetic oligonucleotide

SEQ ID NO: 557897 - DNA, 55 bp, Artificial; identical to SEQ ID NO: 350421
  Synthetic oligonucleotide

SEQ ID NO: 557898 - DNA, 55 bp, Artificial; identical to SEQ ID NO: 350422
  Synthetic oligonucleotide

SEQ ID NO: 557899 - DNA, 55 bp, Artificial; identical to SEQ ID NO: 350426
  Synthetic oligonucleotide

SEQ ID NO: 557900 - DNA, 54 bp, Artificial; identical to SEQ ID NO: 350431
  Synthetic oligonucleotide

SEQ ID NO: 557901 - DNA, 52 bp, Artificial; identical to SEQ ID NO: 350435
  Synthetic oligonucleotide

SEQ ID NO: 557902 - DNA, 53 bp, Artificial; identical to SEQ ID NO: 350438
  Synthetic oligonucleotide

SEQ ID NO: 557903 - DNA, 58 bp, Artificial; identical to SEQ ID NO: 350444
  Synthetic oligonucleotide

SEQ ID NO: 557904 - DNA, 60 bp, Artificial; identical to SEQ ID NO: 350446
  Synthetic oligonucleotide

SEQ ID NO: 557905 - DNA, 55 bp, Artificial; identical to SEQ ID NO: 350448
  Synthetic oligonucleotide

SEQ ID NO: 557906 - DNA, 60 bp, Artificial; identical to SEQ ID NO: 350453
  Synthetic oligonucleotide

SEQ ID NO: 557907 - DNA, 57 bp, Artificial; identical to SEQ ID NO: 350454
  Synthetic oligonucleotide

SEQ ID NO: 557908 - DNA, 60 bp, Artificial; identical to SEQ ID NO: 350458
  Synthetic oligonucleotide

SEQ ID NO: 557909 - DNA, 57 bp, Artificial; identical to SEQ ID NO: 12019
  Synthetic oligonucleotide

SEQ ID NO: 557910 - DNA, 55 bp, Artificial; identical to SEQ ID NO: 350462
  Synthetic oligonucleotide

SEQ ID NO: 557911 - DNA, 60 bp, Artificial; identical to SEQ ID NO: 350463
  Synthetic oligonucleotide

SEQ ID NO: 557912 - DNA, 55 bp, Artificial; identical to SEQ ID NO: 350464
  Synthetic oligonucleotide

SEQ ID NO: 557913 - DNA, 57 bp, Artificial; identical to SEQ ID NO: 350470
  Synthetic oligonucleotide

SEQ ID NO: 557914 - DNA, 55 bp, Artificial; identical to SEQ ID NO: 350472
  Synthetic oligonucleotide

SEQ ID NO: 557915 - DNA, 60 bp, Artificial; identical to SEQ ID NO: 350473
  Synthetic oligonucleotide

SEQ ID NO: 557916 - DNA, 50 bp, Artificial; identical to SEQ ID NO: 350475
  Synthetic oligonucleotide

SEQ ID NO: 557917 - DNA, 57 bp, Artificial; identical to SEQ ID NO: 350476
  Synthetic oligonucleotide

SEQ ID NO: 557918 - DNA, 55 bp, Artificial; identical to SEQ ID NO: 350477
  Synthetic oligonucleotide

SEQ ID NO: 557919 - DNA, 59 bp, Artificial; identical to SEQ ID NO: 350478
  Synthetic oligonucleotide

SEQ ID NO: 557920 - DNA, 60 bp, Artificial; identical to SEQ ID NO: 350480
  Synthetic oligonucleotide

SEQ ID NO: 557921 - DNA, 60 bp, Artificial; identical to SEQ ID NO: 350481
  Synthetic oligonucleotide

SEQ ID NO: 557922 - DNA, 54 bp, Artificial; identical to SEQ ID NO: 350483
  Synthetic oligonucleotide

SEQ ID NO: 557923 - DNA, 60 bp, Artificial; identical to SEQ ID NO: 350486
  Synthetic oligonucleotide

SEQ ID NO: 557924 - DNA, 57 bp, Artificial; identical to SEQ ID NO: 350487
  Synthetic oligonucleotide

SEQ ID NO: 557925 - DNA, 56 bp, Artificial; identical to SEQ ID NO: 350490
  Synthetic oligonucleotide

SEQ ID NO: 557926 - DNA, 60 bp, Artificial; identical to SEQ ID NO: 350493
  Synthetic oligonucleotide

SEQ ID NO: 557927 - DNA, 57 bp, Artificial; identical to SEQ ID NO: 350494
  Synthetic oligonucleotide

SEQ ID NO: 557928 - DNA, 60 bp, Artificial; identical to SEQ ID NO: 13632
  Synthetic oligonucleotide

SEQ ID NO: 557929 - DNA, 60 bp, Artificial; identical to SEQ ID NO: 350499
  Synthetic oligonucleotide

SEQ ID NO: 557930 - DNA, 60 bp, Artificial; identical to SEQ ID NO: 350500
  Synthetic oligonucleotide

SEQ ID NO: 557931 - DNA, 60 bp, Artificial; identical to SEQ ID NO: 350502
  Synthetic oligonucleotide

SEQ ID NO: 557932 - DNA, 60 bp, Artificial; identical to SEQ ID NO: 350503
  Synthetic oligonucleotide

SEQ ID NO: 557933 - DNA, 56 bp, Artificial; identical to SEQ ID NO: 10519
  Synthetic oligonucleotide

SEQ ID NO: 557934 - DNA, 60 bp, Artificial; identical to SEQ ID NO: 350505
  Synthetic oligonucleotide

SEQ ID NO: 557935 - DNA, 54 bp, Artificial; identical to SEQ ID NO: 11646
  Synthetic oligonucleotide

SEQ ID NO: 557936 - DNA, 60 bp, Artificial; identical to SEQ ID NO: 350514
  Synthetic oligonucleotide

SEQ ID NO: 557937 - DNA, 55 bp, Artificial; identical to SEQ ID NO: 350517
  Synthetic oligonucleotide

SEQ ID NO: 557938 - DNA, 55 bp, Artificial; identical to SEQ ID NO: 350518
  Synthetic oligonucleotide

SEQ ID NO: 557939 - DNA, 55 bp, Artificial; identical to SEQ ID NO: 350519
  Synthetic oligonucleotide

SEQ ID NO: 557940 - DNA, 53 bp, Artificial; identical to SEQ ID NO: 350521
  Synthetic oligonucleotide

SEQ ID NO: 557941 - DNA, 60 bp, Artificial; identical to SEQ ID NO: 350523
  Synthetic oligonucleotide

SEQ ID NO: 557942 - DNA, 60 bp, Artificial; identical to SEQ ID NO: 350525
  Synthetic oligonucleotide

SEQ ID NO: 557943 - DNA, 55 bp, Artificial; identical to SEQ ID NO: 350527
  Synthetic oligonucleotide

SEQ ID NO: 557944 - DNA, 55 bp, Artificial; identical to SEQ ID NO: 350528
  Synthetic oligonucleotide

SEQ ID NO: 557945 - DNA, 60 bp, Artificial; identical to SEQ ID NO: 350531
  Synthetic oligonucleotide

SEQ ID NO: 557946 - DNA, 60 bp, Artificial; identical to SEQ ID NO: 350532
  Synthetic oligonucleotide

SEQ ID NO: 557947 - DNA, 59 bp, Artificial; identical to SEQ ID NO: 350534
  Synthetic oligonucleotide

SEQ ID NO: 557948 - DNA, 53 bp, Artificial; identical to SEQ ID NO: 350537
  Synthetic oligonucleotide

SEQ ID NO: 557949 - DNA, 59 bp, Artificial; identical to SEQ ID NO: 350538
  Synthetic oligonucleotide

SEQ ID NO: 557950 - DNA, 58 bp, Artificial; identical to SEQ ID NO: 350540
  Synthetic oligonucleotide

SEQ ID NO: 557951 - DNA, 60 bp, Artificial; identical to SEQ ID NO: 350559
  Synthetic oligonucleotide

SEQ ID NO: 557952 - DNA, 57 bp, Artificial; identical to SEQ ID NO: 350564
  Synthetic oligonucleotide

SEQ ID NO: 557953 - DNA, 60 bp, Artificial; identical to SEQ ID NO: 350567
  Synthetic oligonucleotide

SEQ ID NO: 557954 - DNA, 60 bp, Artificial; identical to SEQ ID NO: 350569
  Synthetic oligonucleotide

SEQ ID NO: 557955 - DNA, 60 bp, Artificial; identical to SEQ ID NO: 350574
  Synthetic oligonucleotide

SEQ ID NO: 557956 - DNA, 51 bp, Artificial; identical to SEQ ID NO: 350576
  Synthetic oligonucleotide

SEQ ID NO: 557957 - DNA, 52 bp, Artificial; identical to SEQ ID NO: 350579
  Synthetic oligonucleotide

SEQ ID NO: 557958 - DNA, 60 bp, Artificial; identical to SEQ ID NO: 350583
  Synthetic oligonucleotide

SEQ ID NO: 557959 - DNA, 55 bp, Artificial; identical to SEQ ID NO: 350584
  Synthetic oligonucleotide

SEQ ID NO: 557960 - DNA, 60 bp, Artificial; identical to SEQ ID NO: 350588
  Synthetic oligonucleotide

SEQ ID NO: 557961 - DNA, 55 bp, Artificial; identical to SEQ ID NO: 350589
  Synthetic oligonucleotide

SEQ ID NO: 557962 - DNA, 55 bp, Artificial; identical to SEQ ID NO: 350590
  Synthetic oligonucleotide

SEQ ID NO: 557963 - DNA, 58 bp, Artificial; identical to SEQ ID NO: 350592
  Synthetic oligonucleotide

SEQ ID NO: 557964 - DNA, 56 bp, Artificial; identical to SEQ ID NO: 16276
  Synthetic oligonucleotide

SEQ ID NO: 557965 - DNA, 50 bp, Artificial; identical to SEQ ID NO: 350594
  Synthetic oligonucleotide

SEQ ID NO: 557966 - DNA, 55 bp, Artificial; identical to SEQ ID NO: 350595
  Synthetic oligonucleotide

SEQ ID NO: 557967 - DNA, 53 bp, Artificial; identical to SEQ ID NO: 350600
  Synthetic oligonucleotide

SEQ ID NO: 557968 - DNA, 55 bp, Artificial; identical to SEQ ID NO: 350602
  Synthetic oligonucleotide

SEQ ID NO: 557969 - DNA, 55 bp, Artificial; identical to SEQ ID NO: 350604
  Synthetic oligonucleotide

SEQ ID NO: 557970 - DNA, 56 bp, Artificial; identical to SEQ ID NO: 350605
  Synthetic oligonucleotide

SEQ ID NO: 557971 - DNA, 56 bp, Artificial; identical to SEQ ID NO: 350608
  Synthetic oligonucleotide

SEQ ID NO: 557972 - DNA, 51 bp, Artificial; identical to SEQ ID NO: 350617
  Synthetic oligonucleotide

SEQ ID NO: 557973 - DNA, 55 bp, Artificial; identical to SEQ ID NO: 350618
  Synthetic oligonucleotide

SEQ ID NO: 557974 - DNA, 55 bp, Artificial; identical to SEQ ID NO: 350621
  Synthetic oligonucleotide

SEQ ID NO: 557975 - DNA, 52 bp, Artificial; identical to SEQ ID NO: 350622
  Synthetic oligonucleotide

SEQ ID NO: 557976 - DNA, 60 bp, Artificial; identical to SEQ ID NO: 6065
  Synthetic oligonucleotide

SEQ ID NO: 557977 - DNA, 60 bp, Artificial; identical to SEQ ID NO: 350625
  Synthetic oligonucleotide

SEQ ID NO: 557978 - DNA, 59 bp, Artificial; identical to SEQ ID NO: 350628
  Synthetic oligonucleotide

SEQ ID NO: 557979 - DNA, 60 bp, Artificial; identical to SEQ ID NO: 350629
  Synthetic oligonucleotide

SEQ ID NO: 557980 - DNA, 60 bp, Artificial; identical to SEQ ID NO: 9763
  Synthetic oligonucleotide

SEQ ID NO: 557981 - DNA, 57 bp, Artificial; identical to SEQ ID NO: 350636
  Synthetic oligonucleotide

SEQ ID NO: 557982 - DNA, 60 bp, Artificial; identical to SEQ ID NO: 350637
  Synthetic oligonucleotide

SEQ ID NO: 557983 - DNA, 58 bp, Artificial; identical to SEQ ID NO: 350640
  Synthetic oligonucleotide

SEQ ID NO: 557984 - DNA, 55 bp, Artificial; identical to SEQ ID NO: 350641
  Synthetic oligonucleotide

SEQ ID NO: 557985 - DNA, 60 bp, Artificial; identical to SEQ ID NO: 350642
  Synthetic oligonucleotide

SEQ ID NO: 557986 - DNA, 55 bp, Artificial; identical to SEQ ID NO: 350645
  Synthetic oligonucleotide

SEQ ID NO: 557987 - DNA, 60 bp, Artificial; identical to SEQ ID NO: 350648
  Synthetic oligonucleotide

SEQ ID NO: 557988 - DNA, 55 bp, Artificial; identical to SEQ ID NO: 350652
  Synthetic oligonucleotide

SEQ ID NO: 557989 - DNA, 60 bp, Artificial; identical to SEQ ID NO: 350653
  Synthetic oligonucleotide

SEQ ID NO: 557990 - DNA, 60 bp, Artificial; identical to SEQ ID NO: 350657
  Synthetic oligonucleotide

SEQ ID NO: 557991 - DNA, 55 bp, Artificial; identical to SEQ ID NO: 350658
  Synthetic oligonucleotide

SEQ ID NO: 557992 - DNA, 58 bp, Artificial; identical to SEQ ID NO: 350665
  Synthetic oligonucleotide

SEQ ID NO: 557993 - DNA, 60 bp, Artificial; identical to SEQ ID NO: 350666
  Synthetic oligonucleotide

SEQ ID NO: 557994 - DNA, 55 bp, Artificial; identical to SEQ ID NO: 350667
  Synthetic oligonucleotide

SEQ ID NO: 557995 - DNA, 56 bp, Artificial; identical to SEQ ID NO: 350668
  Synthetic oligonucleotide

SEQ ID NO: 557996 - DNA, 57 bp, Artificial; identical to SEQ ID NO: 350670
  Synthetic oligonucleotide

SEQ ID NO: 557997 - DNA, 50 bp, Artificial; identical to SEQ ID NO: 350671
  Synthetic oligonucleotide

SEQ ID NO: 557998 - DNA, 55 bp, Artificial; identical to SEQ ID NO: 350675
  Synthetic oligonucleotide

SEQ ID NO: 557999 - DNA, 60 bp, Artificial; identical to SEQ ID NO: 350676
  Synthetic oligonucleotide

SEQ ID NO: 558000 - DNA, 60 bp, Artificial; identical to SEQ ID NO: 350681
  Synthetic oligonucleotide

SEQ ID NO: 558001 - DNA, 55 bp, Artificial; identical to SEQ ID NO: 350687
  Synthetic oligonucleotide

SEQ ID NO: 558002 - DNA, 56 bp, Artificial; identical to SEQ ID NO: 350688
  Synthetic oligonucleotide

SEQ ID NO: 558003 - DNA, 51 bp, Artificial; identical to SEQ ID NO: 350699
  Synthetic oligonucleotide

SEQ ID NO: 558004 - DNA, 55 bp, Artificial; identical to SEQ ID NO: 350701
  Synthetic oligonucleotide

SEQ ID NO: 558005 - DNA, 60 bp, Artificial; identical to SEQ ID NO: 350704
  Synthetic oligonucleotide

SEQ ID NO: 558006 - DNA, 60 bp, Artificial; identical to SEQ ID NO: 350705
  Synthetic oligonucleotide

SEQ ID NO: 558007 - DNA, 58 bp, Artificial; identical to SEQ ID NO: 350707
  Synthetic oligonucleotide

SEQ ID NO: 558008 - DNA, 56 bp, Artificial; identical to SEQ ID NO: 350708
  Synthetic oligonucleotide

SEQ ID NO: 558009 - DNA, 60 bp, Artificial; identical to SEQ ID NO: 8423
  Synthetic oligonucleotide

SEQ ID NO: 558010 - DNA, 53 bp, Artificial; identical to SEQ ID NO: 350714
  Synthetic oligonucleotide

SEQ ID NO: 558011 - DNA, 50 bp, Artificial; identical to SEQ ID NO: 350716
  Synthetic oligonucleotide

SEQ ID NO: 558012 - DNA, 57 bp, Artificial; identical to SEQ ID NO: 350723
  Synthetic oligonucleotide

SEQ ID NO: 558013 - DNA, 60 bp, Artificial; identical to SEQ ID NO: 350726
  Synthetic oligonucleotide

SEQ ID NO: 558014 - DNA, 60 bp, Artificial; identical to SEQ ID NO: 350727
  Synthetic oligonucleotide

SEQ ID NO: 558015 - DNA, 55 bp, Artificial; identical to SEQ ID NO: 350732
  Synthetic oligonucleotide

SEQ ID NO: 558016 - DNA, 57 bp, Artificial; identical to SEQ ID NO: 350734
  Synthetic oligonucleotide

SEQ ID NO: 558017 - DNA, 55 bp, Artificial; identical to SEQ ID NO: 350735
  Synthetic oligonucleotide

SEQ ID NO: 558018 - DNA, 51 bp, Artificial; identical to SEQ ID NO: 350737
  Synthetic oligonucleotide

SEQ ID NO: 558019 - DNA, 55 bp, Artificial; identical to SEQ ID NO: 350738
  Synthetic oligonucleotide

SEQ ID NO: 558020 - DNA, 60 bp, Artificial; identical to SEQ ID NO: 350744
  Synthetic oligonucleotide

SEQ ID NO: 558021 - DNA, 60 bp, Artificial; identical to SEQ ID NO: 350745
  Synthetic oligonucleotide

SEQ ID NO: 558022 - DNA, 60 bp, Artificial; identical to SEQ ID NO: 350747
  Synthetic oligonucleotide

SEQ ID NO: 558023 - DNA, 60 bp, Artificial; identical to SEQ ID NO: 350749
  Synthetic oligonucleotide

SEQ ID NO: 558024 - DNA, 55 bp, Artificial; identical to SEQ ID NO: 350750
  Synthetic oligonucleotide

SEQ ID NO: 558025 - DNA, 55 bp, Artificial; identical to SEQ ID NO: 350751
  Synthetic oligonucleotide

SEQ ID NO: 558026 - DNA, 55 bp, Artificial; identical to SEQ ID NO: 350752
  Synthetic oligonucleotide

SEQ ID NO: 558027 - DNA, 55 bp, Artificial; identical to SEQ ID NO: 350753
  Synthetic oligonucleotide

SEQ ID NO: 558028 - DNA, 55 bp, Artificial; identical to SEQ ID NO: 350754
  Synthetic oligonucleotide

SEQ ID NO: 558029 - DNA, 55 bp, Artificial; identical to SEQ ID NO: 350759
  Synthetic oligonucleotide

SEQ ID NO: 558030 - DNA, 60 bp, Artificial; identical to SEQ ID NO: 350762
  Synthetic oligonucleotide

SEQ ID NO: 558031 - DNA, 60 bp, Artificial; identical to SEQ ID NO: 350763
  Synthetic oligonucleotide

SEQ ID NO: 558032 - DNA, 55 bp, Artificial; identical to SEQ ID NO: 350765
  Synthetic oligonucleotide

SEQ ID NO: 558033 - DNA, 60 bp, Artificial; identical to SEQ ID NO: 350771
  Synthetic oligonucleotide

SEQ ID NO: 558034 - DNA, 60 bp, Artificial; identical to SEQ ID NO: 350776
  Synthetic oligonucleotide

SEQ ID NO: 558035 - DNA, 55 bp, Artificial; identical to SEQ ID NO: 350777
  Synthetic oligonucleotide

SEQ ID NO: 558036 - DNA, 60 bp, Artificial; identical to SEQ ID NO: 350780
  Synthetic oligonucleotide

SEQ ID NO: 558037 - DNA, 60 bp, Artificial; identical to SEQ ID NO: 350781
  Synthetic oligonucleotide

SEQ ID NO: 558038 - DNA, 58 bp, Artificial; identical to SEQ ID NO: 350783
  Synthetic oligonucleotide

SEQ ID NO: 558039 - DNA, 57 bp, Artificial; identical to SEQ ID NO: 350784
  Synthetic oligonucleotide

SEQ ID NO: 558040 - DNA, 60 bp, Artificial; identical to SEQ ID NO: 112693
  Synthetic oligonucleotide

SEQ ID NO: 558041 - DNA, 60 bp, Artificial; identical to SEQ ID NO: 350789
  Synthetic oligonucleotide

SEQ ID NO: 558042 - DNA, 60 bp, Artificial; identical to SEQ ID NO: 9270
  Synthetic oligonucleotide

SEQ ID NO: 558043 - DNA, 59 bp, Artificial; identical to SEQ ID NO: 350795
  Synthetic oligonucleotide

SEQ ID NO: 558044 - DNA, 55 bp, Artificial; identical to SEQ ID NO: 350799
  Synthetic oligonucleotide

SEQ ID NO: 558045 - DNA, 60 bp, Artificial; identical to SEQ ID NO: 350803
  Synthetic oligonucleotide

SEQ ID NO: 558046 - DNA, 56 bp, Artificial; identical to SEQ ID NO: 350810
  Synthetic oligonucleotide

SEQ ID NO: 558047 - DNA, 58 bp, Artificial; identical to SEQ ID NO: 350813
  Synthetic oligonucleotide

SEQ ID NO: 558048 - DNA, 60 bp, Artificial; identical to SEQ ID NO: 350820
  Synthetic oligonucleotide

SEQ ID NO: 558049 - DNA, 57 bp, Artificial; identical to SEQ ID NO: 350822
  Synthetic oligonucleotide

SEQ ID NO: 558050 - DNA, 59 bp, Artificial; identical to SEQ ID NO: 350824
  Synthetic oligonucleotide

SEQ ID NO: 558051 - DNA, 60 bp, Artificial; identical to SEQ ID NO: 350828
  Synthetic oligonucleotide

SEQ ID NO: 558052 - DNA, 60 bp, Artificial; identical to SEQ ID NO: 350829
  Synthetic oligonucleotide

SEQ ID NO: 558053 - DNA, 52 bp, Artificial; identical to SEQ ID NO: 350832
  Synthetic oligonucleotide

SEQ ID NO: 558054 - DNA, 60 bp, Artificial; identical to SEQ ID NO: 350834
  Synthetic oligonucleotide

SEQ ID NO: 558055 - DNA, 56 bp, Artificial; identical to SEQ ID NO: 350835
  Synthetic oligonucleotide

SEQ ID NO: 558056 - DNA, 59 bp, Artificial; identical to SEQ ID NO: 350836
  Synthetic oligonucleotide

SEQ ID NO: 558057 - DNA, 60 bp, Artificial; identical to SEQ ID NO: 350841
  Synthetic oligonucleotide

SEQ ID NO: 558058 - DNA, 59 bp, Artificial; identical to SEQ ID NO: 350845
  Synthetic oligonucleotide

SEQ ID NO: 558059 - DNA, 60 bp, Artificial; identical to SEQ ID NO: 350850
  Synthetic oligonucleotide

SEQ ID NO: 558060 - DNA, 60 bp, Artificial; identical to SEQ ID NO: 15062
  Synthetic oligonucleotide

SEQ ID NO: 558061 - DNA, 60 bp, Artificial; identical to SEQ ID NO: 350853
  Synthetic oligonucleotide

SEQ ID NO: 558062 - DNA, 58 bp, Artificial; identical to SEQ ID NO: 350854
  Synthetic oligonucleotide

SEQ ID NO: 558063 - DNA, 57 bp, Artificial; identical to SEQ ID NO: 350858
  Synthetic oligonucleotide

SEQ ID NO: 558064 - DNA, 51 bp, Artificial; identical to SEQ ID NO: 350861
  Synthetic oligonucleotide

SEQ ID NO: 558065 - DNA, 55 bp, Artificial; identical to SEQ ID NO: 350865
  Synthetic oligonucleotide

SEQ ID NO: 558066 - DNA, 55 bp, Artificial; identical to SEQ ID NO: 350867
  Synthetic oligonucleotide

SEQ ID NO: 558067 - DNA, 60 bp, Artificial; identical to SEQ ID NO: 350868
  Synthetic oligonucleotide

SEQ ID NO: 558068 - DNA, 55 bp, Artificial; identical to SEQ ID NO: 350870
  Synthetic oligonucleotide

SEQ ID NO: 558069 - DNA, 55 bp, Artificial; identical to SEQ ID NO: 350871
  Synthetic oligonucleotide

SEQ ID NO: 558070 - DNA, 57 bp, Artificial; identical to SEQ ID NO: 350872
  Synthetic oligonucleotide

SEQ ID NO: 558071 - DNA, 57 bp, Artificial; identical to SEQ ID NO: 350873
  Synthetic oligonucleotide

SEQ ID NO: 558072 - DNA, 60 bp, Artificial; identical to SEQ ID NO: 350878
  Synthetic oligonucleotide

SEQ ID NO: 558073 - DNA, 55 bp, Artificial; identical to SEQ ID NO: 350882
  Synthetic oligonucleotide

SEQ ID NO: 558074 - DNA, 60 bp, Artificial; identical to SEQ ID NO: 350883
  Synthetic oligonucleotide

SEQ ID NO: 558075 - DNA, 58 bp, Artificial; identical to SEQ ID NO: 350884
  Synthetic oligonucleotide

SEQ ID NO: 558076 - DNA, 55 bp, Artificial; identical to SEQ ID NO: 350886
  Synthetic oligonucleotide

SEQ ID NO: 558077 - DNA, 55 bp, Artificial; identical to SEQ ID NO: 350888
  Synthetic oligonucleotide

SEQ ID NO: 558078 - DNA, 60 bp, Artificial; identical to SEQ ID NO: 350889
  Synthetic oligonucleotide

SEQ ID NO: 558079 - DNA, 60 bp, Artificial; identical to SEQ ID NO: 350890
  Synthetic oligonucleotide

SEQ ID NO: 558080 - DNA, 59 bp, Artificial; identical to SEQ ID NO: 350891
  Synthetic oligonucleotide

SEQ ID NO: 558081 - DNA, 58 bp, Artificial; identical to SEQ ID NO: 350892
  Synthetic oligonucleotide

SEQ ID NO: 558082 - DNA, 56 bp, Artificial; identical to SEQ ID NO: 350895
  Synthetic oligonucleotide

SEQ ID NO: 558083 - DNA, 60 bp, Artificial; identical to SEQ ID NO: 350897
  Synthetic oligonucleotide

SEQ ID NO: 558084 - DNA, 50 bp, Artificial; identical to SEQ ID NO: 350900
  Synthetic oligonucleotide

SEQ ID NO: 558085 - DNA, 60 bp, Artificial; identical to SEQ ID NO: 350908
  Synthetic oligonucleotide

SEQ ID NO: 558086 - DNA, 60 bp, Artificial; identical to SEQ ID NO: 350910
  Synthetic oligonucleotide

SEQ ID NO: 558087 - DNA, 55 bp, Artificial; identical to SEQ ID NO: 350911
  Synthetic oligonucleotide

SEQ ID NO: 558088 - DNA, 54 bp, Artificial; identical to SEQ ID NO: 350914
  Synthetic oligonucleotide

SEQ ID NO: 558089 - DNA, 56 bp, Artificial; identical to SEQ ID NO: 350915
  Synthetic oligonucleotide

SEQ ID NO: 558090 - DNA, 57 bp, Artificial; identical to SEQ ID NO: 350917
  Synthetic oligonucleotide

SEQ ID NO: 558091 - DNA, 52 bp, Artificial; identical to SEQ ID NO: 350920
  Synthetic oligonucleotide

SEQ ID NO: 558092 - DNA, 55 bp, Artificial; identical to SEQ ID NO: 350924
  Synthetic oligonucleotide

SEQ ID NO: 558093 - DNA, 60 bp, Artificial; identical to SEQ ID NO: 350925
  Synthetic oligonucleotide

SEQ ID NO: 558094 - DNA, 60 bp, Artificial; identical to SEQ ID NO: 350927
  Synthetic oligonucleotide

SEQ ID NO: 558095 - DNA, 52 bp, Artificial; identical to SEQ ID NO: 350931
  Synthetic oligonucleotide

SEQ ID NO: 558096 - DNA, 52 bp, Artificial; identical to SEQ ID NO: 350932
  Synthetic oligonucleotide

SEQ ID NO: 558097 - DNA, 55 bp, Artificial; identical to SEQ ID NO: 350934
  Synthetic oligonucleotide

SEQ ID NO: 558098 - DNA, 59 bp, Artificial; identical to SEQ ID NO: 350938
  Synthetic oligonucleotide

SEQ ID NO: 558099 - DNA, 59 bp, Artificial; identical to SEQ ID NO: 350939
  Synthetic oligonucleotide

SEQ ID NO: 558100 - DNA, 55 bp, Artificial; identical to SEQ ID NO: 350940
  Synthetic oligonucleotide

SEQ ID NO: 558101 - DNA, 55 bp, Artificial; identical to SEQ ID NO: 7095
  Synthetic oligonucleotide

SEQ ID NO: 558102 - DNA, 60 bp, Artificial; identical to SEQ ID NO: 350941
  Synthetic oligonucleotide

SEQ ID NO: 558103 - DNA, 55 bp, Artificial; identical to SEQ ID NO: 350944
  Synthetic oligonucleotide

SEQ ID NO: 558104 - DNA, 60 bp, Artificial; identical to SEQ ID NO: 350951
  Synthetic oligonucleotide

SEQ ID NO: 558105 - DNA, 56 bp, Artificial; identical to SEQ ID NO: 350952
  Synthetic oligonucleotide

SEQ ID NO: 558106 - DNA, 51 bp, Artificial; identical to SEQ ID NO: 350953
  Synthetic oligonucleotide

SEQ ID NO: 558107 - DNA, 60 bp, Artificial; identical to SEQ ID NO: 350959
  Synthetic oligonucleotide

SEQ ID NO: 558108 - DNA, 60 bp, Artificial; identical to SEQ ID NO: 350960
  Synthetic oligonucleotide

SEQ ID NO: 558109 - DNA, 55 bp, Artificial; identical to SEQ ID NO: 350962
  Synthetic oligonucleotide

SEQ ID NO: 558110 - DNA, 60 bp, Artificial; identical to SEQ ID NO: 350963
  Synthetic oligonucleotide

SEQ ID NO: 558111 - DNA, 55 bp, Artificial; identical to SEQ ID NO: 350968
  Synthetic oligonucleotide

SEQ ID NO: 558112 - DNA, 50 bp, Artificial; identical to SEQ ID NO: 350969
  Synthetic oligonucleotide

SEQ ID NO: 558113 - DNA, 60 bp, Artificial; identical to SEQ ID NO: 350972
  Synthetic oligonucleotide

SEQ ID NO: 558114 - DNA, 55 bp, Artificial; identical to SEQ ID NO: 350975
  Synthetic oligonucleotide

SEQ ID NO: 558115 - DNA, 60 bp, Artificial; identical to SEQ ID NO: 9251
  Synthetic oligonucleotide

SEQ ID NO: 558116 - DNA, 60 bp, Artificial; identical to SEQ ID NO: 350988
  Synthetic oligonucleotide

SEQ ID NO: 558117 - DNA, 55 bp, Artificial; identical to SEQ ID NO: 350989
  Synthetic oligonucleotide

SEQ ID NO: 558118 - DNA, 60 bp, Artificial; identical to SEQ ID NO: 350991
  Synthetic oligonucleotide

SEQ ID NO: 558119 - DNA, 55 bp, Artificial; identical to SEQ ID NO: 350992
  Synthetic oligonucleotide

SEQ ID NO: 558120 - DNA, 60 bp, Artificial; identical to SEQ ID NO: 350995
  Synthetic oligonucleotide

SEQ ID NO: 558121 - DNA, 55 bp, Artificial; identical to SEQ ID NO: 350996
  Synthetic oligonucleotide

SEQ ID NO: 558122 - DNA, 55 bp, Artificial; identical to SEQ ID NO: 350998
  Synthetic oligonucleotide

SEQ ID NO: 558123 - DNA, 55 bp, Artificial; identical to SEQ ID NO: 351000
  Synthetic oligonucleotide

SEQ ID NO: 558124 - DNA, 55 bp, Artificial; identical to SEQ ID NO: 351002
  Synthetic oligonucleotide

SEQ ID NO: 558125 - DNA, 60 bp, Artificial; identical to SEQ ID NO: 351004
  Synthetic oligonucleotide

SEQ ID NO: 558126 - DNA, 55 bp, Artificial; identical to SEQ ID NO: 351005
  Synthetic oligonucleotide

SEQ ID NO: 558127 - DNA, 55 bp, Artificial; identical to SEQ ID NO: 351006
  Synthetic oligonucleotide

SEQ ID NO: 558128 - DNA, 60 bp, Artificial; identical to SEQ ID NO: 10934
  Synthetic oligonucleotide

SEQ ID NO: 558129 - DNA, 60 bp, Artificial; identical to SEQ ID NO: 351007
  Synthetic oligonucleotide

SEQ ID NO: 558130 - DNA, 60 bp, Artificial; identical to SEQ ID NO: 351010
  Synthetic oligonucleotide

SEQ ID NO: 558131 - DNA, 55 bp, Artificial; identical to SEQ ID NO: 351023
  Synthetic oligonucleotide

SEQ ID NO: 558132 - DNA, 51 bp, Artificial; identical to SEQ ID NO: 351026
  Synthetic oligonucleotide

SEQ ID NO: 558133 - DNA, 60 bp, Artificial; identical to SEQ ID NO: 351027
  Synthetic oligonucleotide

SEQ ID NO: 558134 - DNA, 51 bp, Artificial; identical to SEQ ID NO: 351031
  Synthetic oligonucleotide

SEQ ID NO: 558135 - DNA, 55 bp, Artificial; identical to SEQ ID NO: 351033
  Synthetic oligonucleotide

SEQ ID NO: 558136 - DNA, 54 bp, Artificial; identical to SEQ ID NO: 351035
  Synthetic oligonucleotide

SEQ ID NO: 558137 - DNA, 58 bp, Artificial; identical to SEQ ID NO: 351037
  Synthetic oligonucleotide

SEQ ID NO: 558138 - DNA, 60 bp, Artificial; identical to SEQ ID NO: 351039
  Synthetic oligonucleotide

SEQ ID NO: 558139 - DNA, 58 bp, Artificial; identical to SEQ ID NO: 351040
  Synthetic oligonucleotide

SEQ ID NO: 558140 - DNA, 52 bp, Artificial; identical to SEQ ID NO: 351042
  Synthetic oligonucleotide

SEQ ID NO: 558141 - DNA, 60 bp, Artificial; identical to SEQ ID NO: 351043
  Synthetic oligonucleotide

SEQ ID NO: 558142 - DNA, 59 bp, Artificial; identical to SEQ ID NO: 16818
  Synthetic oligonucleotide

SEQ ID NO: 558143 - DNA, 58 bp, Artificial; identical to SEQ ID NO: 351045
  Synthetic oligonucleotide

SEQ ID NO: 558144 - DNA, 60 bp, Artificial; identical to SEQ ID NO: 351054
  Synthetic oligonucleotide

SEQ ID NO: 558145 - DNA, 60 bp, Artificial; identical to SEQ ID NO: 351056
  Synthetic oligonucleotide

SEQ ID NO: 558146 - DNA, 60 bp, Artificial; identical to SEQ ID NO: 351058
  Synthetic oligonucleotide

SEQ ID NO: 558147 - DNA, 59 bp, Artificial; identical to SEQ ID NO: 351061
  Synthetic oligonucleotide

SEQ ID NO: 558148 - DNA, 55 bp, Artificial; identical to SEQ ID NO: 351063
  Synthetic oligonucleotide

SEQ ID NO: 558149 - DNA, 55 bp, Artificial; identical to SEQ ID NO: 351064
  Synthetic oligonucleotide

SEQ ID NO: 558150 - DNA, 55 bp, Artificial; identical to SEQ ID NO: 351065
  Synthetic oligonucleotide

SEQ ID NO: 558151 - DNA, 55 bp, Artificial; identical to SEQ ID NO: 351066
  Synthetic oligonucleotide

SEQ ID NO: 558152 - DNA, 60 bp, Artificial; identical to SEQ ID NO: 351074
  Synthetic oligonucleotide

SEQ ID NO: 558153 - DNA, 55 bp, Artificial; identical to SEQ ID NO: 351075
  Synthetic oligonucleotide

SEQ ID NO: 558154 - DNA, 55 bp, Artificial; identical to SEQ ID NO: 351078
  Synthetic oligonucleotide

SEQ ID NO: 558155 - DNA, 60 bp, Artificial; identical to SEQ ID NO: 351079
  Synthetic oligonucleotide

SEQ ID NO: 558156 - DNA, 60 bp, Artificial; identical to SEQ ID NO: 351081
  Synthetic oligonucleotide

SEQ ID NO: 558157 - DNA, 59 bp, Artificial; identical to SEQ ID NO: 351082
  Synthetic oligonucleotide

SEQ ID NO: 558158 - DNA, 60 bp, Artificial; identical to SEQ ID NO: 351084
  Synthetic oligonucleotide

SEQ ID NO: 558159 - DNA, 55 bp, Artificial; identical to SEQ ID NO: 351088
  Synthetic oligonucleotide

SEQ ID NO: 558160 - DNA, 55 bp, Artificial; identical to SEQ ID NO: 351089
  Synthetic oligonucleotide

SEQ ID NO: 558161 - DNA, 55 bp, Artificial; identical to SEQ ID NO: 351090
  Synthetic oligonucleotide

SEQ ID NO: 558162 - DNA, 56 bp, Artificial; identical to SEQ ID NO: 351091
  Synthetic oligonucleotide

SEQ ID NO: 558163 - DNA, 59 bp, Artificial; identical to SEQ ID NO: 351095
  Synthetic oligonucleotide

SEQ ID NO: 558164 - DNA, 60 bp, Artificial; identical to SEQ ID NO: 351098
  Synthetic oligonucleotide

SEQ ID NO: 558165 - DNA, 53 bp, Artificial; identical to SEQ ID NO: 351099
  Synthetic oligonucleotide

SEQ ID NO: 558166 - DNA, 57 bp, Artificial; identical to SEQ ID NO: 351100
  Synthetic oligonucleotide

SEQ ID NO: 558167 - DNA, 55 bp, Artificial; identical to SEQ ID NO: 351101
  Synthetic oligonucleotide

SEQ ID NO: 558168 - DNA, 57 bp, Artificial; identical to SEQ ID NO: 351106
  Synthetic oligonucleotide

SEQ ID NO: 558169 - DNA, 57 bp, Artificial; identical to SEQ ID NO: 351109
  Synthetic oligonucleotide

SEQ ID NO: 558170 - DNA, 55 bp, Artificial; identical to SEQ ID NO: 351119
  Synthetic oligonucleotide

SEQ ID NO: 558171 - DNA, 59 bp, Artificial; identical to SEQ ID NO: 351121
  Synthetic oligonucleotide

SEQ ID NO: 558172 - DNA, 60 bp, Artificial; identical to SEQ ID NO: 351123
  Synthetic oligonucleotide

SEQ ID NO: 558173 - DNA, 60 bp, Artificial; identical to SEQ ID NO: 351133
  Synthetic oligonucleotide

SEQ ID NO: 558174 - DNA, 55 bp, Artificial; identical to SEQ ID NO: 351136
  Synthetic oligonucleotide

SEQ ID NO: 558175 - DNA, 55 bp, Artificial; identical to SEQ ID NO: 351137
  Synthetic oligonucleotide

SEQ ID NO: 558176 - DNA, 60 bp, Artificial; identical to SEQ ID NO: 10545
  Synthetic oligonucleotide

SEQ ID NO: 558177 - DNA, 57 bp, Artificial; identical to SEQ ID NO: 351140
  Synthetic oligonucleotide

SEQ ID NO: 558178 - DNA, 60 bp, Artificial; identical to SEQ ID NO: 351147
  Synthetic oligonucleotide

SEQ ID NO: 558179 - DNA, 60 bp, Artificial; identical to SEQ ID NO: 351148
  Synthetic oligonucleotide

SEQ ID NO: 558180 - DNA, 55 bp, Artificial; identical to SEQ ID NO: 351149
  Synthetic oligonucleotide

SEQ ID NO: 558181 - DNA, 57 bp, Artificial; identical to SEQ ID NO: 351150
  Synthetic oligonucleotide

SEQ ID NO: 558182 - DNA, 52 bp, Artificial; identical to SEQ ID NO: 351151
  Synthetic oligonucleotide

SEQ ID NO: 558183 - DNA, 51 bp, Artificial; identical to SEQ ID NO: 351154
  Synthetic oligonucleotide

SEQ ID NO: 558184 - DNA, 59 bp, Artificial; identical to SEQ ID NO: 19202
  Synthetic oligonucleotide

SEQ ID NO: 558185 - DNA, 60 bp, Artificial; identical to SEQ ID NO: 351157
  Synthetic oligonucleotide

SEQ ID NO: 558186 - DNA, 58 bp, Artificial; identical to SEQ ID NO: 351158
  Synthetic oligonucleotide

SEQ ID NO: 558187 - DNA, 55 bp, Artificial; identical to SEQ ID NO: 351163
  Synthetic oligonucleotide

SEQ ID NO: 558188 - DNA, 55 bp, Artificial; identical to SEQ ID NO: 351164
  Synthetic oligonucleotide

SEQ ID NO: 558189 - DNA, 54 bp, Artificial; identical to SEQ ID NO: 351166
  Synthetic oligonucleotide

SEQ ID NO: 558190 - DNA, 53 bp, Artificial; identical to SEQ ID NO: 351168
  Synthetic oligonucleotide

SEQ ID NO: 558191 - DNA, 59 bp, Artificial; identical to SEQ ID NO: 351169
  Synthetic oligonucleotide

SEQ ID NO: 558192 - DNA, 60 bp, Artificial; identical to SEQ ID NO: 351175
  Synthetic oligonucleotide

SEQ ID NO: 558193 - DNA, 56 bp, Artificial; identical to SEQ ID NO: 351176
  Synthetic oligonucleotide

SEQ ID NO: 558194 - DNA, 55 bp, Artificial; identical to SEQ ID NO: 351177
  Synthetic oligonucleotide

SEQ ID NO: 558195 - DNA, 55 bp, Artificial; identical to SEQ ID NO: 351178
  Synthetic oligonucleotide

SEQ ID NO: 558196 - DNA, 55 bp, Artificial; identical to SEQ ID NO: 351181
  Synthetic oligonucleotide

SEQ ID NO: 558197 - DNA, 60 bp, Artificial; identical to SEQ ID NO: 351188
  Synthetic oligonucleotide

SEQ ID NO: 558198 - DNA, 60 bp, Artificial; identical to SEQ ID NO: 351189
  Synthetic oligonucleotide

SEQ ID NO: 558199 - DNA, 60 bp, Artificial; identical to SEQ ID NO: 351190
  Synthetic oligonucleotide

SEQ ID NO: 558200 - DNA, 60 bp, Artificial; identical to SEQ ID NO: 351191
  Synthetic oligonucleotide

SEQ ID NO: 558201 - DNA, 55 bp, Artificial; identical to SEQ ID NO: 351192
  Synthetic oligonucleotide

SEQ ID NO: 558202 - DNA, 57 bp, Artificial; identical to SEQ ID NO: 351195
  Synthetic oligonucleotide

SEQ ID NO: 558203 - DNA, 55 bp, Artificial; identical to SEQ ID NO: 351197
  Synthetic oligonucleotide

SEQ ID NO: 558204 - DNA, 55 bp, Artificial; identical to SEQ ID NO: 351198
  Synthetic oligonucleotide

SEQ ID NO: 558205 - DNA, 60 bp, Artificial; identical to SEQ ID NO: 351199
  Synthetic oligonucleotide

SEQ ID NO: 558206 - DNA, 60 bp, Artificial; identical to SEQ ID NO: 351200
  Synthetic oligonucleotide

SEQ ID NO: 558207 - DNA, 60 bp, Artificial; identical to SEQ ID NO: 351201
  Synthetic oligonucleotide

SEQ ID NO: 558208 - DNA, 55 bp, Artificial; identical to SEQ ID NO: 351203
  Synthetic oligonucleotide

SEQ ID NO: 558209 - DNA, 50 bp, Artificial; identical to SEQ ID NO: 351205
  Synthetic oligonucleotide

SEQ ID NO: 558210 - DNA, 53 bp, Artificial; identical to SEQ ID NO: 351206
  Synthetic oligonucleotide

SEQ ID NO: 558211 - DNA, 55 bp, Artificial; identical to SEQ ID NO: 351207
  Synthetic oligonucleotide

SEQ ID NO: 558212 - DNA, 57 bp, Artificial; identical to SEQ ID NO: 351208
  Synthetic oligonucleotide

SEQ ID NO: 558213 - DNA, 55 bp, Artificial; identical to SEQ ID NO: 351209
  Synthetic oligonucleotide

SEQ ID NO: 558214 - DNA, 55 bp, Artificial; identical to SEQ ID NO: 351213
  Synthetic oligonucleotide

SEQ ID NO: 558215 - DNA, 60 bp, Artificial; identical to SEQ ID NO: 351220
  Synthetic oligonucleotide

SEQ ID NO: 558216 - DNA, 54 bp, Artificial; identical to SEQ ID NO: 351224
  Synthetic oligonucleotide

SEQ ID NO: 558217 - DNA, 59 bp, Artificial; identical to SEQ ID NO: 351226
  Synthetic oligonucleotide

SEQ ID NO: 558218 - DNA, 57 bp, Artificial; identical to SEQ ID NO: 351229
  Synthetic oligonucleotide

SEQ ID NO: 558219 - DNA, 52 bp, Artificial; identical to SEQ ID NO: 351230
  Synthetic oligonucleotide

SEQ ID NO: 558220 - DNA, 52 bp, Artificial; identical to SEQ ID NO: 351233
  Synthetic oligonucleotide

SEQ ID NO: 558221 - DNA, 60 bp, Artificial; identical to SEQ ID NO: 351234
  Synthetic oligonucleotide

SEQ ID NO: 558222 - DNA, 59 bp, Artificial; identical to SEQ ID NO: 351236
  Synthetic oligonucleotide

SEQ ID NO: 558223 - DNA, 55 bp, Artificial; identical to SEQ ID NO: 351237
  Synthetic oligonucleotide

SEQ ID NO: 558224 - DNA, 57 bp, Artificial; identical to SEQ ID NO: 351239
  Synthetic oligonucleotide

SEQ ID NO: 558225 - DNA, 60 bp, Artificial; identical to SEQ ID NO: 351242
  Synthetic oligonucleotide

SEQ ID NO: 558226 - DNA, 57 bp, Artificial; identical to SEQ ID NO: 351246
  Synthetic oligonucleotide

SEQ ID NO: 558227 - DNA, 60 bp, Artificial; identical to SEQ ID NO: 351247
  Synthetic oligonucleotide

SEQ ID NO: 558228 - DNA, 55 bp, Artificial; identical to SEQ ID NO: 351257
  Synthetic oligonucleotide

SEQ ID NO: 558229 - DNA, 56 bp, Artificial; identical to SEQ ID NO: 351260
  Synthetic oligonucleotide

SEQ ID NO: 558230 - DNA, 60 bp, Artificial; identical to SEQ ID NO: 351261
  Synthetic oligonucleotide

SEQ ID NO: 558231 - DNA, 60 bp, Artificial; identical to SEQ ID NO: 351265
  Synthetic oligonucleotide

SEQ ID NO: 558232 - DNA, 56 bp, Artificial; identical to SEQ ID NO: 20501
  Synthetic oligonucleotide

SEQ ID NO: 558233 - DNA, 55 bp, Artificial; identical to SEQ ID NO: 351269
  Synthetic oligonucleotide

SEQ ID NO: 558234 - DNA, 53 bp, Artificial; identical to SEQ ID NO: 351270
  Synthetic oligonucleotide

SEQ ID NO: 558235 - DNA, 55 bp, Artificial; identical to SEQ ID NO: 351271
  Synthetic oligonucleotide

SEQ ID NO: 558236 - DNA, 60 bp, Artificial; identical to SEQ ID NO: 351274
  Synthetic oligonucleotide

SEQ ID NO: 558237 - DNA, 53 bp, Artificial; identical to SEQ ID NO: 351275
  Synthetic oligonucleotide

SEQ ID NO: 558238 - DNA, 59 bp, Artificial; identical to SEQ ID NO: 351277
  Synthetic oligonucleotide

SEQ ID NO: 558239 - DNA, 60 bp, Artificial; identical to SEQ ID NO: 351278
  Synthetic oligonucleotide

SEQ ID NO: 558240 - DNA, 54 bp, Artificial; identical to SEQ ID NO: 351283
  Synthetic oligonucleotide

SEQ ID NO: 558241 - DNA, 60 bp, Artificial; identical to SEQ ID NO: 351285
  Synthetic oligonucleotide

SEQ ID NO: 558242 - DNA, 60 bp, Artificial; identical to SEQ ID NO: 351286
  Synthetic oligonucleotide

SEQ ID NO: 558243 - DNA, 55 bp, Artificial; identical to SEQ ID NO: 351289
  Synthetic oligonucleotide

SEQ ID NO: 558244 - DNA, 60 bp, Artificial; identical to SEQ ID NO: 351293
  Synthetic oligonucleotide

SEQ ID NO: 558245 - DNA, 55 bp, Artificial; identical to SEQ ID NO: 351294
  Synthetic oligonucleotide

SEQ ID NO: 558246 - DNA, 60 bp, Artificial; identical to SEQ ID NO: 351297
  Synthetic oligonucleotide

SEQ ID NO: 558247 - DNA, 54 bp, Artificial; identical to SEQ ID NO: 351302
  Synthetic oligonucleotide

SEQ ID NO: 558248 - DNA, 60 bp, Artificial; identical to SEQ ID NO: 351305
  Synthetic oligonucleotide

SEQ ID NO: 558249 - DNA, 55 bp, Artificial; identical to SEQ ID NO: 351310
  Synthetic oligonucleotide

SEQ ID NO: 558250 - DNA, 55 bp, Artificial; identical to SEQ ID NO: 351315
  Synthetic oligonucleotide

SEQ ID NO: 558251 - DNA, 58 bp, Artificial; identical to SEQ ID NO: 351316
  Synthetic oligonucleotide

SEQ ID NO: 558252 - DNA, 60 bp, Artificial; identical to SEQ ID NO: 351318
  Synthetic oligonucleotide

SEQ ID NO: 558253 - DNA, 58 bp, Artificial; identical to SEQ ID NO: 351320
  Synthetic oligonucleotide

SEQ ID NO: 558254 - DNA, 60 bp, Artificial; identical to SEQ ID NO: 351323
  Synthetic oligonucleotide

SEQ ID NO: 558255 - DNA, 58 bp, Artificial; identical to SEQ ID NO: 351326
  Synthetic oligonucleotide

SEQ ID NO: 558256 - DNA, 55 bp, Artificial; identical to SEQ ID NO: 351329
  Synthetic oligonucleotide

SEQ ID NO: 558257 - DNA, 51 bp, Artificial; identical to SEQ ID NO: 351332
  Synthetic oligonucleotide

SEQ ID NO: 558258 - DNA, 60 bp, Artificial; identical to SEQ ID NO: 351337
  Synthetic oligonucleotide

SEQ ID NO: 558259 - DNA, 54 bp, Artificial; identical to SEQ ID NO: 351338
  Synthetic oligonucleotide

SEQ ID NO: 558260 - DNA, 60 bp, Artificial; identical to SEQ ID NO: 351339
  Synthetic oligonucleotide

SEQ ID NO: 558261 - DNA, 53 bp, Artificial; identical to SEQ ID NO: 351341
  Synthetic oligonucleotide

SEQ ID NO: 558262 - DNA, 51 bp, Artificial; identical to SEQ ID NO: 351343
  Synthetic oligonucleotide

SEQ ID NO: 558263 - DNA, 57 bp, Artificial; identical to SEQ ID NO: 20380
  Synthetic oligonucleotide

SEQ ID NO: 558264 - DNA, 55 bp, Artificial; identical to SEQ ID NO: 351349
  Synthetic oligonucleotide

SEQ ID NO: 558265 - DNA, 53 bp, Artificial; identical to SEQ ID NO: 351350
  Synthetic oligonucleotide

SEQ ID NO: 558266 - DNA, 60 bp, Artificial; identical to SEQ ID NO: 351352
  Synthetic oligonucleotide

SEQ ID NO: 558267 - DNA, 50 bp, Artificial; identical to SEQ ID NO: 351353
  Synthetic oligonucleotide

SEQ ID NO: 558268 - DNA, 60 bp, Artificial; identical to SEQ ID NO: 351356
  Synthetic oligonucleotide

SEQ ID NO: 558269 - DNA, 55 bp, Artificial; identical to SEQ ID NO: 351357
  Synthetic oligonucleotide

SEQ ID NO: 558270 - DNA, 55 bp, Artificial; identical to SEQ ID NO: 351361
  Synthetic oligonucleotide

SEQ ID NO: 558271 - DNA, 60 bp, Artificial; identical to SEQ ID NO: 351362
  Synthetic oligonucleotide

SEQ ID NO: 558272 - DNA, 55 bp, Artificial; identical to SEQ ID NO: 351363
  Synthetic oligonucleotide

SEQ ID NO: 558273 - DNA, 55 bp, Artificial; identical to SEQ ID NO: 351367
  Synthetic oligonucleotide

SEQ ID NO: 558274 - DNA, 57 bp, Artificial; identical to SEQ ID NO: 351372
  Synthetic oligonucleotide

SEQ ID NO: 558275 - DNA, 60 bp, Artificial; identical to SEQ ID NO: 351373
  Synthetic oligonucleotide

SEQ ID NO: 558276 - DNA, 60 bp, Artificial; identical to SEQ ID NO: 351374
  Synthetic oligonucleotide

SEQ ID NO: 558277 - DNA, 58 bp, Artificial; identical to SEQ ID NO: 351380
  Synthetic oligonucleotide

SEQ ID NO: 558278 - DNA, 57 bp, Artificial; identical to SEQ ID NO: 351381
  Synthetic oligonucleotide

SEQ ID NO: 558279 - DNA, 53 bp, Artificial; identical to SEQ ID NO: 351383
  Synthetic oligonucleotide

SEQ ID NO: 558280 - DNA, 54 bp, Artificial; identical to SEQ ID NO: 351386
  Synthetic oligonucleotide

SEQ ID NO: 558281 - DNA, 55 bp, Artificial; identical to SEQ ID NO: 351393
  Synthetic oligonucleotide

SEQ ID NO: 558282 - DNA, 55 bp, Artificial; identical to SEQ ID NO: 351395
  Synthetic oligonucleotide

SEQ ID NO: 558283 - DNA, 55 bp, Artificial; identical to SEQ ID NO: 351400
  Synthetic oligonucleotide

SEQ ID NO: 558284 - DNA, 58 bp, Artificial; identical to SEQ ID NO: 351402
  Synthetic oligonucleotide

SEQ ID NO: 558285 - DNA, 60 bp, Artificial; identical to SEQ ID NO: 351404
  Synthetic oligonucleotide

SEQ ID NO: 558286 - DNA, 50 bp, Artificial; identical to SEQ ID NO: 351409
  Synthetic oligonucleotide

SEQ ID NO: 558287 - DNA, 56 bp, Artificial; identical to SEQ ID NO: 351411
  Synthetic oligonucleotide

SEQ ID NO: 558288 - DNA, 53 bp, Artificial; identical to SEQ ID NO: 351412
  Synthetic oligonucleotide

SEQ ID NO: 558289 - DNA, 57 bp, Artificial; identical to SEQ ID NO: 351413
  Synthetic oligonucleotide

SEQ ID NO: 558290 - DNA, 60 bp, Artificial; identical to SEQ ID NO: 351419
  Synthetic oligonucleotide

SEQ ID NO: 558291 - DNA, 60 bp, Artificial; identical to SEQ ID NO: 351421
  Synthetic oligonucleotide

SEQ ID NO: 558292 - DNA, 59 bp, Artificial; identical to SEQ ID NO: 351422
  Synthetic oligonucleotide

SEQ ID NO: 558293 - DNA, 55 bp, Artificial; identical to SEQ ID NO: 351425
  Synthetic oligonucleotide

SEQ ID NO: 558294 - DNA, 60 bp, Artificial; identical to SEQ ID NO: 351426
  Synthetic oligonucleotide

SEQ ID NO: 558295 - DNA, 55 bp, Artificial; identical to SEQ ID NO: 351429
  Synthetic oligonucleotide

SEQ ID NO: 558296 - DNA, 60 bp, Artificial; identical to SEQ ID NO: 351433
  Synthetic oligonucleotide

SEQ ID NO: 558297 - DNA, 55 bp, Artificial; identical to SEQ ID NO: 351435
  Synthetic oligonucleotide

SEQ ID NO: 558298 - DNA, 60 bp, Artificial; identical to SEQ ID NO: 351437
  Synthetic oligonucleotide

SEQ ID NO: 558299 - DNA, 55 bp, Artificial; identical to SEQ ID NO: 351439
  Synthetic oligonucleotide

SEQ ID NO: 558300 - DNA, 60 bp, Artificial; identical to SEQ ID NO: 351441
  Synthetic oligonucleotide

SEQ ID NO: 558301 - DNA, 60 bp, Artificial; identical to SEQ ID NO: 351442
  Synthetic oligonucleotide

SEQ ID NO: 558302 - DNA, 55 bp, Artificial; identical to SEQ ID NO: 7017
  Synthetic oligonucleotide

SEQ ID NO: 558303 - DNA, 60 bp, Artificial; identical to SEQ ID NO: 351443
  Synthetic oligonucleotide

SEQ ID NO: 558304 - DNA, 55 bp, Artificial; identical to SEQ ID NO: 351446
  Synthetic oligonucleotide

SEQ ID NO: 558305 - DNA, 50 bp, Artificial; identical to SEQ ID NO: 351448
  Synthetic oligonucleotide

SEQ ID NO: 558306 - DNA, 55 bp, Artificial; identical to SEQ ID NO: 351449
  Synthetic oligonucleotide

SEQ ID NO: 558307 - DNA, 56 bp, Artificial; identical to SEQ ID NO: 351451
  Synthetic oligonucleotide

SEQ ID NO: 558308 - DNA, 56 bp, Artificial; identical to SEQ ID NO: 351452
  Synthetic oligonucleotide

SEQ ID NO: 558309 - DNA, 55 bp, Artificial; identical to SEQ ID NO: 351453
  Synthetic oligonucleotide

SEQ ID NO: 558310 - DNA, 58 bp, Artificial; identical to SEQ ID NO: 351454
  Synthetic oligonucleotide

SEQ ID NO: 558311 - DNA, 59 bp, Artificial; identical to SEQ ID NO: 351455
  Synthetic oligonucleotide

SEQ ID NO: 558312 - DNA, 60 bp, Artificial; identical to SEQ ID NO: 351457
  Synthetic oligonucleotide

SEQ ID NO: 558313 - DNA, 60 bp, Artificial; identical to SEQ ID NO: 351458
  Synthetic oligonucleotide

SEQ ID NO: 558314 - DNA, 60 bp, Artificial; identical to SEQ ID NO: 351461
  Synthetic oligonucleotide

SEQ ID NO: 558315 - DNA, 52 bp, Artificial; identical to SEQ ID NO: 351462
  Synthetic oligonucleotide

SEQ ID NO: 558316 - DNA, 60 bp, Artificial; identical to SEQ ID NO: 351465
  Synthetic oligonucleotide

SEQ ID NO: 558317 - DNA, 60 bp, Artificial; identical to SEQ ID NO: 351466
  Synthetic oligonucleotide

SEQ ID NO: 558318 - DNA, 55 bp, Artificial; identical to SEQ ID NO: 351471
  Synthetic oligonucleotide

SEQ ID NO: 558319 - DNA, 60 bp, Artificial; identical to SEQ ID NO: 351474
  Synthetic oligonucleotide

SEQ ID NO: 558320 - DNA, 55 bp, Artificial; identical to SEQ ID NO: 351477
  Synthetic oligonucleotide

SEQ ID NO: 558321 - DNA, 56 bp, Artificial; identical to SEQ ID NO: 351478
  Synthetic oligonucleotide

SEQ ID NO: 558322 - DNA, 51 bp, Artificial; identical to SEQ ID NO: 351479
  Synthetic oligonucleotide

SEQ ID NO: 558323 - DNA, 60 bp, Artificial; identical to SEQ ID NO: 351480
  Synthetic oligonucleotide

SEQ ID NO: 558324 - DNA, 60 bp, Artificial; identical to SEQ ID NO: 351481
  Synthetic oligonucleotide

SEQ ID NO: 558325 - DNA, 53 bp, Artificial; identical to SEQ ID NO: 351484
  Synthetic oligonucleotide

SEQ ID NO: 558326 - DNA, 58 bp, Artificial; identical to SEQ ID NO: 351492
  Synthetic oligonucleotide

SEQ ID NO: 558327 - DNA, 51 bp, Artificial; identical to SEQ ID NO: 351494
  Synthetic oligonucleotide

SEQ ID NO: 558328 - DNA, 51 bp, Artificial; identical to SEQ ID NO: 351498
  Synthetic oligonucleotide

SEQ ID NO: 558329 - DNA, 56 bp, Artificial; identical to SEQ ID NO: 351500
  Synthetic oligonucleotide

SEQ ID NO: 558330 - DNA, 60 bp, Artificial; identical to SEQ ID NO: 351502
  Synthetic oligonucleotide

SEQ ID NO: 558331 - DNA, 55 bp, Artificial; identical to SEQ ID NO: 351509
  Synthetic oligonucleotide

SEQ ID NO: 558332 - DNA, 60 bp, Artificial; identical to SEQ ID NO: 351511
  Synthetic oligonucleotide

SEQ ID NO: 558333 - DNA, 55 bp, Artificial; identical to SEQ ID NO: 351512
  Synthetic oligonucleotide

SEQ ID NO: 558334 - DNA, 55 bp, Artificial; identical to SEQ ID NO: 351520
  Synthetic oligonucleotide

SEQ ID NO: 558335 - DNA, 56 bp, Artificial; identical to SEQ ID NO: 351522
  Synthetic oligonucleotide

SEQ ID NO: 558336 - DNA, 60 bp, Artificial; identical to SEQ ID NO: 351523
  Synthetic oligonucleotide

SEQ ID NO: 558337 - DNA, 60 bp, Artificial; identical to SEQ ID NO: 351526
  Synthetic oligonucleotide

SEQ ID NO: 558338 - DNA, 60 bp, Artificial; identical to SEQ ID NO: 351528
  Synthetic oligonucleotide

SEQ ID NO: 558339 - DNA, 60 bp, Artificial; identical to SEQ ID NO: 351531
  Synthetic oligonucleotide

SEQ ID NO: 558340 - DNA, 55 bp, Artificial; identical to SEQ ID NO: 351534
  Synthetic oligonucleotide

SEQ ID NO: 558341 - DNA, 60 bp, Artificial; identical to SEQ ID NO: 351535
  Synthetic oligonucleotide

SEQ ID NO: 558342 - DNA, 60 bp, Artificial; identical to SEQ ID NO: 117233
  Synthetic oligonucleotide

SEQ ID NO: 558343 - DNA, 60 bp, Artificial; identical to SEQ ID NO: 351537
  Synthetic oligonucleotide

SEQ ID NO: 558344 - DNA, 52 bp, Artificial; identical to SEQ ID NO: 351538
  Synthetic oligonucleotide

SEQ ID NO: 558345 - DNA, 56 bp, Artificial; identical to SEQ ID NO: 351539
  Synthetic oligonucleotide

SEQ ID NO: 558346 - DNA, 50 bp, Artificial; identical to SEQ ID NO: 351545
  Synthetic oligonucleotide

SEQ ID NO: 558347 - DNA, 56 bp, Artificial; identical to SEQ ID NO: 351546
  Synthetic oligonucleotide

SEQ ID NO: 558348 - DNA, 60 bp, Artificial; identical to SEQ ID NO: 351547
  Synthetic oligonucleotide

SEQ ID NO: 558349 - DNA, 60 bp, Artificial; identical to SEQ ID NO: 351551
  Synthetic oligonucleotide

SEQ ID NO: 558350 - DNA, 56 bp, Artificial; identical to SEQ ID NO: 20590
  Synthetic oligonucleotide

SEQ ID NO: 558351 - DNA, 60 bp, Artificial; identical to SEQ ID NO: 351555
  Synthetic oligonucleotide

SEQ ID NO: 558352 - DNA, 55 bp, Artificial; identical to SEQ ID NO: 351558
  Synthetic oligonucleotide

SEQ ID NO: 558353 - DNA, 58 bp, Artificial; identical to SEQ ID NO: 351565
  Synthetic oligonucleotide

SEQ ID NO: 558354 - DNA, 60 bp, Artificial; identical to SEQ ID NO: 351568
  Synthetic oligonucleotide

SEQ ID NO: 558355 - DNA, 55 bp, Artificial; identical to SEQ ID NO: 351569
  Synthetic oligonucleotide

SEQ ID NO: 558356 - DNA, 59 bp, Artificial; identical to SEQ ID NO: 351570
  Synthetic oligonucleotide

SEQ ID NO: 558357 - DNA, 59 bp, Artificial; identical to SEQ ID NO: 351573
  Synthetic oligonucleotide

SEQ ID NO: 558358 - DNA, 60 bp, Artificial; identical to SEQ ID NO: 351574
  Synthetic oligonucleotide

SEQ ID NO: 558359 - DNA, 60 bp, Artificial; identical to SEQ ID NO: 351575
  Synthetic oligonucleotide

SEQ ID NO: 558360 - DNA, 60 bp, Artificial; identical to SEQ ID NO: 351576
  Synthetic oligonucleotide

SEQ ID NO: 558361 - DNA, 55 bp, Artificial; identical to SEQ ID NO: 351577
  Synthetic oligonucleotide

SEQ ID NO: 558362 - DNA, 60 bp, Artificial; identical to SEQ ID NO: 351579
  Synthetic oligonucleotide

SEQ ID NO: 558363 - DNA, 57 bp, Artificial; identical to SEQ ID NO: 351580
  Synthetic oligonucleotide

SEQ ID NO: 558364 - DNA, 60 bp, Artificial; identical to SEQ ID NO: 351582
  Synthetic oligonucleotide

SEQ ID NO: 558365 - DNA, 60 bp, Artificial; identical to SEQ ID NO: 351583
  Synthetic oligonucleotide

SEQ ID NO: 558366 - DNA, 55 bp, Artificial; identical to SEQ ID NO: 351584
  Synthetic oligonucleotide

SEQ ID NO: 558367 - DNA, 56 bp, Artificial; identical to SEQ ID NO: 351586
  Synthetic oligonucleotide

SEQ ID NO: 558368 - DNA, 57 bp, Artificial; identical to SEQ ID NO: 351593
  Synthetic oligonucleotide

SEQ ID NO: 558369 - DNA, 57 bp, Artificial; identical to SEQ ID NO: 351595
  Synthetic oligonucleotide

SEQ ID NO: 558370 - DNA, 57 bp, Artificial; identical to SEQ ID NO: 351596
  Synthetic oligonucleotide

SEQ ID NO: 558371 - DNA, 60 bp, Artificial; identical to SEQ ID NO: 351597
  Synthetic oligonucleotide

SEQ ID NO: 558372 - DNA, 58 bp, Artificial; identical to SEQ ID NO: 351599
  Synthetic oligonucleotide

SEQ ID NO: 558373 - DNA, 60 bp, Artificial; identical to SEQ ID NO: 351600
  Synthetic oligonucleotide

SEQ ID NO: 558374 - DNA, 59 bp, Artificial; identical to SEQ ID NO: 351602
  Synthetic oligonucleotide

SEQ ID NO: 558375 - DNA, 55 bp, Artificial; identical to SEQ ID NO: 351604
  Synthetic oligonucleotide

SEQ ID NO: 558376 - DNA, 58 bp, Artificial; identical to SEQ ID NO: 351607
  Synthetic oligonucleotide

SEQ ID NO: 558377 - DNA, 60 bp, Artificial; identical to SEQ ID NO: 351608
  Synthetic oligonucleotide

SEQ ID NO: 558378 - DNA, 59 bp, Artificial; identical to SEQ ID NO: 351610
  Synthetic oligonucleotide

SEQ ID NO: 558379 - DNA, 60 bp, Artificial; identical to SEQ ID NO: 351611
  Synthetic oligonucleotide

SEQ ID NO: 558380 - DNA, 55 bp, Artificial; identical to SEQ ID NO: 351616
  Synthetic oligonucleotide

SEQ ID NO: 558381 - DNA, 60 bp, Artificial; identical to SEQ ID NO: 351617
  Synthetic oligonucleotide

SEQ ID NO: 558382 - DNA, 60 bp, Artificial; identical to SEQ ID NO: 351618
  Synthetic oligonucleotide

SEQ ID NO: 558383 - DNA, 60 bp, Artificial; identical to SEQ ID NO: 351619
  Synthetic oligonucleotide

SEQ ID NO: 558384 - DNA, 53 bp, Artificial; identical to SEQ ID NO: 351620
  Synthetic oligonucleotide

SEQ ID NO: 558385 - DNA, 50 bp, Artificial; identical to SEQ ID NO: 9185
  Synthetic oligonucleotide

SEQ ID NO: 558386 - DNA, 60 bp, Artificial; identical to SEQ ID NO: 351625
  Synthetic oligonucleotide

SEQ ID NO: 558387 - DNA, 57 bp, Artificial; identical to SEQ ID NO: 351629
  Synthetic oligonucleotide

SEQ ID NO: 558388 - DNA, 54 bp, Artificial; identical to SEQ ID NO: 351633
  Synthetic oligonucleotide

SEQ ID NO: 558389 - DNA, 60 bp, Artificial; identical to SEQ ID NO: 351635
  Synthetic oligonucleotide

SEQ ID NO: 558390 - DNA, 60 bp, Artificial; identical to SEQ ID NO: 351638
  Synthetic oligonucleotide

SEQ ID NO: 558391 - DNA, 54 bp, Artificial; identical to SEQ ID NO: 351641
  Synthetic oligonucleotide

SEQ ID NO: 558392 - DNA, 55 bp, Artificial; identical to SEQ ID NO: 351646
  Synthetic oligonucleotide

SEQ ID NO: 558393 - DNA, 59 bp, Artificial; identical to SEQ ID NO: 351658
  Synthetic oligonucleotide

SEQ ID NO: 558394 - DNA, 55 bp, Artificial; identical to SEQ ID NO: 351659
  Synthetic oligonucleotide

SEQ ID NO: 558395 - DNA, 59 bp, Artificial; identical to SEQ ID NO: 351665
  Synthetic oligonucleotide

SEQ ID NO: 558396 - DNA, 60 bp, Artificial; identical to SEQ ID NO: 6133
  Synthetic oligonucleotide

SEQ ID NO: 558397 - DNA, 60 bp, Artificial; identical to SEQ ID NO: 351669
  Synthetic oligonucleotide

SEQ ID NO: 558398 - DNA, 60 bp, Artificial; identical to SEQ ID NO: 351670
  Synthetic oligonucleotide

SEQ ID NO: 558399 - DNA, 60 bp, Artificial; identical to SEQ ID NO: 351671
  Synthetic oligonucleotide

SEQ ID NO: 558400 - DNA, 51 bp, Artificial; identical to SEQ ID NO: 351672
  Synthetic oligonucleotide

SEQ ID NO: 558401 - DNA, 52 bp, Artificial; identical to SEQ ID NO: 11306
  Synthetic oligonucleotide

SEQ ID NO: 558402 - DNA, 60 bp, Artificial; identical to SEQ ID NO: 351677
  Synthetic oligonucleotide

SEQ ID NO: 558403 - DNA, 55 bp, Artificial; identical to SEQ ID NO: 351685
  Synthetic oligonucleotide

SEQ ID NO: 558404 - DNA, 55 bp, Artificial; identical to SEQ ID NO: 351688
  Synthetic oligonucleotide

SEQ ID NO: 558405 - DNA, 60 bp, Artificial; identical to SEQ ID NO: 351692
  Synthetic oligonucleotide

SEQ ID NO: 558406 - DNA, 55 bp, Artificial; identical to SEQ ID NO: 351697
  Synthetic oligonucleotide

SEQ ID NO: 558407 - DNA, 57 bp, Artificial; identical to SEQ ID NO: 7568
  Synthetic oligonucleotide

SEQ ID NO: 558408 - DNA, 60 bp, Artificial; identical to SEQ ID NO: 351701
  Synthetic oligonucleotide

SEQ ID NO: 558409 - DNA, 59 bp, Artificial; identical to SEQ ID NO: 351702
  Synthetic oligonucleotide

SEQ ID NO: 558410 - DNA, 60 bp, Artificial; identical to SEQ ID NO: 351707
  Synthetic oligonucleotide

SEQ ID NO: 558411 - DNA, 60 bp, Artificial; identical to SEQ ID NO: 351709
  Synthetic oligonucleotide

SEQ ID NO: 558412 - DNA, 60 bp, Artificial; identical to SEQ ID NO: 351712
  Synthetic oligonucleotide

SEQ ID NO: 558413 - DNA, 60 bp, Artificial; identical to SEQ ID NO: 8637
  Synthetic oligonucleotide

SEQ ID NO: 558414 - DNA, 56 bp, Artificial; identical to SEQ ID NO: 351713
  Synthetic oligonucleotide

SEQ ID NO: 558415 - DNA, 58 bp, Artificial; identical to SEQ ID NO: 351714
  Synthetic oligonucleotide

SEQ ID NO: 558416 - DNA, 59 bp, Artificial; identical to SEQ ID NO: 351718
  Synthetic oligonucleotide

SEQ ID NO: 558417 - DNA, 59 bp, Artificial; identical to SEQ ID NO: 351722
  Synthetic oligonucleotide

SEQ ID NO: 558418 - DNA, 59 bp, Artificial; identical to SEQ ID NO: 351723
  Synthetic oligonucleotide

SEQ ID NO: 558419 - DNA, 54 bp, Artificial; identical to SEQ ID NO: 351726
  Synthetic oligonucleotide

SEQ ID NO: 558420 - DNA, 60 bp, Artificial; identical to SEQ ID NO: 351732
  Synthetic oligonucleotide

SEQ ID NO: 558421 - DNA, 60 bp, Artificial; identical to SEQ ID NO: 351733
  Synthetic oligonucleotide

SEQ ID NO: 558422 - DNA, 55 bp, Artificial; identical to SEQ ID NO: 351739
  Synthetic oligonucleotide

SEQ ID NO: 558423 - DNA, 55 bp, Artificial; identical to SEQ ID NO: 351745
  Synthetic oligonucleotide

SEQ ID NO: 558424 - DNA, 60 bp, Artificial; identical to SEQ ID NO: 351749
  Synthetic oligonucleotide

SEQ ID NO: 558425 - DNA, 55 bp, Artificial; identical to SEQ ID NO: 351750
  Synthetic oligonucleotide

SEQ ID NO: 558426 - DNA, 55 bp, Artificial; identical to SEQ ID NO: 351752
  Synthetic oligonucleotide

SEQ ID NO: 558427 - DNA, 55 bp, Artificial; identical to SEQ ID NO: 351753
  Synthetic oligonucleotide

SEQ ID NO: 558428 - DNA, 56 bp, Artificial; identical to SEQ ID NO: 351755
  Synthetic oligonucleotide

SEQ ID NO: 558429 - DNA, 59 bp, Artificial; identical to SEQ ID NO: 351757
  Synthetic oligonucleotide

SEQ ID NO: 558430 - DNA, 60 bp, Artificial; identical to SEQ ID NO: 15554
  Synthetic oligonucleotide

SEQ ID NO: 558431 - DNA, 60 bp, Artificial; identical to SEQ ID NO: 351762
  Synthetic oligonucleotide

SEQ ID NO: 558432 - DNA, 53 bp, Artificial; identical to SEQ ID NO: 351763
  Synthetic oligonucleotide

SEQ ID NO: 558433 - DNA, 58 bp, Artificial; identical to SEQ ID NO: 351767
  Synthetic oligonucleotide

SEQ ID NO: 558434 - DNA, 55 bp, Artificial; identical to SEQ ID NO: 351769
  Synthetic oligonucleotide

SEQ ID NO: 558435 - DNA, 58 bp, Artificial; identical to SEQ ID NO: 351772
  Synthetic oligonucleotide

SEQ ID NO: 558436 - DNA, 55 bp, Artificial; identical to SEQ ID NO: 351774
  Synthetic oligonucleotide

SEQ ID NO: 558437 - DNA, 60 bp, Artificial; identical to SEQ ID NO: 351780
  Synthetic oligonucleotide

SEQ ID NO: 558438 - DNA, 58 bp, Artificial; identical to SEQ ID NO: 20550
  Synthetic oligonucleotide

SEQ ID NO: 558439 - DNA, 60 bp, Artificial; identical to SEQ ID NO: 351786
  Synthetic oligonucleotide

SEQ ID NO: 558440 - DNA, 55 bp, Artificial; identical to SEQ ID NO: 351790
  Synthetic oligonucleotide

SEQ ID NO: 558441 - DNA, 55 bp, Artificial; identical to SEQ ID NO: 14779
  Synthetic oligonucleotide

SEQ ID NO: 558442 - DNA, 60 bp, Artificial; identical to SEQ ID NO: 351796
  Synthetic oligonucleotide

SEQ ID NO: 558443 - DNA, 55 bp, Artificial; identical to SEQ ID NO: 351800
  Synthetic oligonucleotide

SEQ ID NO: 558444 - DNA, 55 bp, Artificial; identical to SEQ ID NO: 351803
  Synthetic oligonucleotide

SEQ ID NO: 558445 - DNA, 55 bp, Artificial; identical to SEQ ID NO: 351806
  Synthetic oligonucleotide

SEQ ID NO: 558446 - DNA, 60 bp, Artificial; identical to SEQ ID NO: 351810
  Synthetic oligonucleotide

SEQ ID NO: 558447 - DNA, 60 bp, Artificial; identical to SEQ ID NO: 351811
  Synthetic oligonucleotide

SEQ ID NO: 558448 - DNA, 58 bp, Artificial; identical to SEQ ID NO: 351816
  Synthetic oligonucleotide

SEQ ID NO: 558449 - DNA, 60 bp, Artificial; identical to SEQ ID NO: 351817
  Synthetic oligonucleotide

SEQ ID NO: 558450 - DNA, 55 bp, Artificial; identical to SEQ ID NO: 351818
  Synthetic oligonucleotide

SEQ ID NO: 558451 - DNA, 60 bp, Artificial; identical to SEQ ID NO: 351820
  Synthetic oligonucleotide

SEQ ID NO: 558452 - DNA, 60 bp, Artificial; identical to SEQ ID NO: 351824
  Synthetic oligonucleotide

SEQ ID NO: 558453 - DNA, 60 bp, Artificial; identical to SEQ ID NO: 351826
  Synthetic oligonucleotide

SEQ ID NO: 558454 - DNA, 55 bp, Artificial; identical to SEQ ID NO: 351827
  Synthetic oligonucleotide

SEQ ID NO: 558455 - DNA, 54 bp, Artificial; identical to SEQ ID NO: 351829
  Synthetic oligonucleotide

SEQ ID NO: 558456 - DNA, 60 bp, Artificial; identical to SEQ ID NO: 351830
  Synthetic oligonucleotide

SEQ ID NO: 558457 - DNA, 55 bp, Artificial; identical to SEQ ID NO: 351832
  Synthetic oligonucleotide

SEQ ID NO: 558458 - DNA, 60 bp, Artificial; identical to SEQ ID NO: 351834
  Synthetic oligonucleotide

SEQ ID NO: 558459 - DNA, 60 bp, Artificial; identical to SEQ ID NO: 351835
  Synthetic oligonucleotide

SEQ ID NO: 558460 - DNA, 60 bp, Artificial; identical to SEQ ID NO: 351841
  Synthetic oligonucleotide

SEQ ID NO: 558461 - DNA, 53 bp, Artificial; identical to SEQ ID NO: 351843
  Synthetic oligonucleotide

SEQ ID NO: 558462 - DNA, 55 bp, Artificial; identical to SEQ ID NO: 351846
  Synthetic oligonucleotide

SEQ ID NO: 558463 - DNA, 60 bp, Artificial; identical to SEQ ID NO: 351848
  Synthetic oligonucleotide

SEQ ID NO: 558464 - DNA, 51 bp, Artificial; identical to SEQ ID NO: 351852
  Synthetic oligonucleotide

SEQ ID NO: 558465 - DNA, 60 bp, Artificial; identical to SEQ ID NO: 351853
  Synthetic oligonucleotide

SEQ ID NO: 558466 - DNA, 60 bp, Artificial; identical to SEQ ID NO: 351856
  Synthetic oligonucleotide

SEQ ID NO: 558467 - DNA, 57 bp, Artificial; identical to SEQ ID NO: 351857
  Synthetic oligonucleotide

SEQ ID NO: 558468 - DNA, 60 bp, Artificial; identical to SEQ ID NO: 351864
  Synthetic oligonucleotide

SEQ ID NO: 558469 - DNA, 58 bp, Artificial; identical to SEQ ID NO: 351866
  Synthetic oligonucleotide

SEQ ID NO: 558470 - DNA, 58 bp, Artificial; identical to SEQ ID NO: 351867
  Synthetic oligonucleotide

SEQ ID NO: 558471 - DNA, 55 bp, Artificial; identical to SEQ ID NO: 351868
  Synthetic oligonucleotide

SEQ ID NO: 558472 - DNA, 55 bp, Artificial; identical to SEQ ID NO: 351869
  Synthetic oligonucleotide

SEQ ID NO: 558473 - DNA, 55 bp, Artificial; identical to SEQ ID NO: 351870
  Synthetic oligonucleotide

SEQ ID NO: 558474 - DNA, 60 bp, Artificial; identical to SEQ ID NO: 37806
  Synthetic oligonucleotide

SEQ ID NO: 558475 - DNA, 60 bp, Artificial; identical to SEQ ID NO: 351877
  Synthetic oligonucleotide

SEQ ID NO: 558476 - DNA, 55 bp, Artificial; identical to SEQ ID NO: 351879
  Synthetic oligonucleotide

SEQ ID NO: 558477 - DNA, 55 bp, Artificial; identical to SEQ ID NO: 351881
  Synthetic oligonucleotide

SEQ ID NO: 558478 - DNA, 55 bp, Artificial; identical to SEQ ID NO: 351883
  Synthetic oligonucleotide

SEQ ID NO: 558479 - DNA, 60 bp, Artificial; identical to SEQ ID NO: 351885
  Synthetic oligonucleotide

SEQ ID NO: 558480 - DNA, 60 bp, Artificial; identical to SEQ ID NO: 351887
  Synthetic oligonucleotide

SEQ ID NO: 558481 - DNA, 60 bp, Artificial; identical to SEQ ID NO: 351888
  Synthetic oligonucleotide

SEQ ID NO: 558482 - DNA, 60 bp, Artificial; identical to SEQ ID NO: 351889
  Synthetic oligonucleotide

SEQ ID NO: 558483 - DNA, 60 bp, Artificial; identical to SEQ ID NO: 351891
  Synthetic oligonucleotide

SEQ ID NO: 558484 - DNA, 60 bp, Artificial; identical to SEQ ID NO: 351893
  Synthetic oligonucleotide

SEQ ID NO: 558485 - DNA, 60 bp, Artificial; identical to SEQ ID NO: 351895
  Synthetic oligonucleotide

SEQ ID NO: 558486 - DNA, 55 bp, Artificial; identical to SEQ ID NO: 351896
  Synthetic oligonucleotide

SEQ ID NO: 558487 - DNA, 60 bp, Artificial; identical to SEQ ID NO: 351900
  Synthetic oligonucleotide

SEQ ID NO: 558488 - DNA, 57 bp, Artificial; identical to SEQ ID NO: 351902
  Synthetic oligonucleotide

SEQ ID NO: 558489 - DNA, 55 bp, Artificial; identical to SEQ ID NO: 351903
  Synthetic oligonucleotide

SEQ ID NO: 558490 - DNA, 58 bp, Artificial; identical to SEQ ID NO: 351904
  Synthetic oligonucleotide

SEQ ID NO: 558491 - DNA, 59 bp, Artificial; identical to SEQ ID NO: 351907
  Synthetic oligonucleotide

SEQ ID NO: 558492 - DNA, 56 bp, Artificial; identical to SEQ ID NO: 351910
  Synthetic oligonucleotide

SEQ ID NO: 558493 - DNA, 57 bp, Artificial; identical to SEQ ID NO: 351911
  Synthetic oligonucleotide

SEQ ID NO: 558494 - DNA, 57 bp, Artificial; identical to SEQ ID NO: 351912
  Synthetic oligonucleotide

SEQ ID NO: 558495 - DNA, 56 bp, Artificial; identical to SEQ ID NO: 351914
  Synthetic oligonucleotide

SEQ ID NO: 558496 - DNA, 58 bp, Artificial; identical to SEQ ID NO: 351915
  Synthetic oligonucleotide

SEQ ID NO: 558497 - DNA, 60 bp, Artificial; identical to SEQ ID NO: 351920
  Synthetic oligonucleotide

SEQ ID NO: 558498 - DNA, 56 bp, Artificial; identical to SEQ ID NO: 351925
  Synthetic oligonucleotide

SEQ ID NO: 558499 - DNA, 56 bp, Artificial; identical to SEQ ID NO: 351926
  Synthetic oligonucleotide

SEQ ID NO: 558500 - DNA, 55 bp, Artificial; identical to SEQ ID NO: 351927
  Synthetic oligonucleotide

SEQ ID NO: 558501 - DNA, 56 bp, Artificial; identical to SEQ ID NO: 351929
  Synthetic oligonucleotide

SEQ ID NO: 558502 - DNA, 60 bp, Artificial; identical to SEQ ID NO: 351935
  Synthetic oligonucleotide

SEQ ID NO: 558503 - DNA, 58 bp, Artificial; identical to SEQ ID NO: 351936
  Synthetic oligonucleotide

SEQ ID NO: 558504 - DNA, 52 bp, Artificial; identical to SEQ ID NO: 351937
  Synthetic oligonucleotide

SEQ ID NO: 558505 - DNA, 60 bp, Artificial; identical to SEQ ID NO: 351939
  Synthetic oligonucleotide

SEQ ID NO: 558506 - DNA, 51 bp, Artificial; identical to SEQ ID NO: 351940
  Synthetic oligonucleotide

SEQ ID NO: 558507 - DNA, 60 bp, Artificial; identical to SEQ ID NO: 351942
  Synthetic oligonucleotide

SEQ ID NO: 558508 - DNA, 55 bp, Artificial; identical to SEQ ID NO: 351947
  Synthetic oligonucleotide

SEQ ID NO: 558509 - DNA, 53 bp, Artificial; identical to SEQ ID NO: 351948
  Synthetic oligonucleotide

SEQ ID NO: 558510 - DNA, 60 bp, Artificial; identical to SEQ ID NO: 351949
  Synthetic oligonucleotide

SEQ ID NO: 558511 - DNA, 50 bp, Artificial; identical to SEQ ID NO: 351959
  Synthetic oligonucleotide

SEQ ID NO: 558512 - DNA, 60 bp, Artificial; identical to SEQ ID NO: 351960
  Synthetic oligonucleotide

SEQ ID NO: 558513 - DNA, 59 bp, Artificial; identical to SEQ ID NO: 351962
  Synthetic oligonucleotide

SEQ ID NO: 558514 - DNA, 55 bp, Artificial; identical to SEQ ID NO: 351963
  Synthetic oligonucleotide

SEQ ID NO: 558515 - DNA, 55 bp, Artificial; identical to SEQ ID NO: 351965
  Synthetic oligonucleotide

SEQ ID NO: 558516 - DNA, 55 bp, Artificial; identical to SEQ ID NO: 351967
  Synthetic oligonucleotide

SEQ ID NO: 558517 - DNA, 60 bp, Artificial; identical to SEQ ID NO: 351968
  Synthetic oligonucleotide

SEQ ID NO: 558518 - DNA, 58 bp, Artificial; identical to SEQ ID NO: 351970
  Synthetic oligonucleotide

SEQ ID NO: 558519 - DNA, 51 bp, Artificial; identical to SEQ ID NO: 351974
  Synthetic oligonucleotide

SEQ ID NO: 558520 - DNA, 60 bp, Artificial; identical to SEQ ID NO: 351977
  Synthetic oligonucleotide

SEQ ID NO: 558521 - DNA, 57 bp, Artificial; identical to SEQ ID NO: 351984
  Synthetic oligonucleotide

SEQ ID NO: 558522 - DNA, 60 bp, Artificial; identical to SEQ ID NO: 351985
  Synthetic oligonucleotide

SEQ ID NO: 558523 - DNA, 60 bp, Artificial; identical to SEQ ID NO: 351986
  Synthetic oligonucleotide

SEQ ID NO: 558524 - DNA, 59 bp, Artificial; identical to SEQ ID NO: 351987
  Synthetic oligonucleotide

SEQ ID NO: 558525 - DNA, 60 bp, Artificial; identical to SEQ ID NO: 351988
  Synthetic oligonucleotide

SEQ ID NO: 558526 - DNA, 55 bp, Artificial; identical to SEQ ID NO: 351989
  Synthetic oligonucleotide

SEQ ID NO: 558527 - DNA, 60 bp, Artificial; identical to SEQ ID NO: 351990
  Synthetic oligonucleotide

SEQ ID NO: 558528 - DNA, 60 bp, Artificial; identical to SEQ ID NO: 351992
  Synthetic oligonucleotide

SEQ ID NO: 558529 - DNA, 60 bp, Artificial; identical to SEQ ID NO: 351993
  Synthetic oligonucleotide

SEQ ID NO: 558530 - DNA, 53 bp, Artificial; identical to SEQ ID NO: 351994
  Synthetic oligonucleotide

SEQ ID NO: 558531 - DNA, 60 bp, Artificial; identical to SEQ ID NO: 351998
  Synthetic oligonucleotide

SEQ ID NO: 558532 - DNA, 60 bp, Artificial; identical to SEQ ID NO: 351999
  Synthetic oligonucleotide

SEQ ID NO: 558533 - DNA, 60 bp, Artificial; identical to SEQ ID NO: 352000
  Synthetic oligonucleotide

SEQ ID NO: 558534 - DNA, 60 bp, Artificial; identical to SEQ ID NO: 352001
  Synthetic oligonucleotide

SEQ ID NO: 558535 - DNA, 58 bp, Artificial; identical to SEQ ID NO: 352002
  Synthetic oligonucleotide

SEQ ID NO: 558536 - DNA, 60 bp, Artificial; identical to SEQ ID NO: 352003
  Synthetic oligonucleotide

SEQ ID NO: 558537 - DNA, 60 bp, Artificial; identical to SEQ ID NO: 352004
  Synthetic oligonucleotide

SEQ ID NO: 558538 - DNA, 60 bp, Artificial; identical to SEQ ID NO: 352009
  Synthetic oligonucleotide

SEQ ID NO: 558539 - DNA, 55 bp, Artificial; identical to SEQ ID NO: 352011
  Synthetic oligonucleotide

SEQ ID NO: 558540 - DNA, 60 bp, Artificial; identical to SEQ ID NO: 352019
  Synthetic oligonucleotide

SEQ ID NO: 558541 - DNA, 55 bp, Artificial; identical to SEQ ID NO: 352020
  Synthetic oligonucleotide

SEQ ID NO: 558542 - DNA, 55 bp, Artificial; identical to SEQ ID NO: 352022
  Synthetic oligonucleotide

SEQ ID NO: 558543 - DNA, 55 bp, Artificial; identical to SEQ ID NO: 352024
  Synthetic oligonucleotide

SEQ ID NO: 558544 - DNA, 60 bp, Artificial; identical to SEQ ID NO: 352025
  Synthetic oligonucleotide

SEQ ID NO: 558545 - DNA, 51 bp, Artificial; identical to SEQ ID NO: 352027
  Synthetic oligonucleotide

SEQ ID NO: 558546 - DNA, 59 bp, Artificial; identical to SEQ ID NO: 352028
  Synthetic oligonucleotide

SEQ ID NO: 558547 - DNA, 60 bp, Artificial; identical to SEQ ID NO: 352030
  Synthetic oligonucleotide

SEQ ID NO: 558548 - DNA, 55 bp, Artificial; identical to SEQ ID NO: 352033
  Synthetic oligonucleotide

SEQ ID NO: 558549 - DNA, 60 bp, Artificial; identical to SEQ ID NO: 352034
  Synthetic oligonucleotide

SEQ ID NO: 558550 - DNA, 57 bp, Artificial; identical to SEQ ID NO: 17548
  Synthetic oligonucleotide

SEQ ID NO: 558551 - DNA, 58 bp, Artificial; identical to SEQ ID NO: 352036
  Synthetic oligonucleotide

SEQ ID NO: 558552 - DNA, 60 bp, Artificial; identical to SEQ ID NO: 352038
  Synthetic oligonucleotide

SEQ ID NO: 558553 - DNA, 55 bp, Artificial; identical to SEQ ID NO: 352039
  Synthetic oligonucleotide

SEQ ID NO: 558554 - DNA, 60 bp, Artificial; identical to SEQ ID NO: 352040
  Synthetic oligonucleotide

SEQ ID NO: 558555 - DNA, 60 bp, Artificial; identical to SEQ ID NO: 352042
  Synthetic oligonucleotide

SEQ ID NO: 558556 - DNA, 60 bp, Artificial; identical to SEQ ID NO: 352043
  Synthetic oligonucleotide

SEQ ID NO: 558557 - DNA, 55 bp, Artificial; identical to SEQ ID NO: 352044
  Synthetic oligonucleotide

SEQ ID NO: 558558 - DNA, 55 bp, Artificial; identical to SEQ ID NO: 352047
  Synthetic oligonucleotide

SEQ ID NO: 558559 - DNA, 58 bp, Artificial; identical to SEQ ID NO: 352052
  Synthetic oligonucleotide

SEQ ID NO: 558560 - DNA, 59 bp, Artificial; identical to SEQ ID NO: 352056
  Synthetic oligonucleotide

SEQ ID NO: 558561 - DNA, 60 bp, Artificial; identical to SEQ ID NO: 15222
  Synthetic oligonucleotide

SEQ ID NO: 558562 - DNA, 55 bp, Artificial; identical to SEQ ID NO: 352061
  Synthetic oligonucleotide

SEQ ID NO: 558563 - DNA, 58 bp, Artificial; identical to SEQ ID NO: 352064
  Synthetic oligonucleotide

SEQ ID NO: 558564 - DNA, 60 bp, Artificial; identical to SEQ ID NO: 352067
  Synthetic oligonucleotide

SEQ ID NO: 558565 - DNA, 55 bp, Artificial; identical to SEQ ID NO: 352068
  Synthetic oligonucleotide

SEQ ID NO: 558566 - DNA, 55 bp, Artificial; identical to SEQ ID NO: 352070
  Synthetic oligonucleotide

SEQ ID NO: 558567 - DNA, 60 bp, Artificial; identical to SEQ ID NO: 352071
  Synthetic oligonucleotide

SEQ ID NO: 558568 - DNA, 55 bp, Artificial; identical to SEQ ID NO: 352072
  Synthetic oligonucleotide

SEQ ID NO: 558569 - DNA, 58 bp, Artificial; identical to SEQ ID NO: 7404
  Synthetic oligonucleotide

SEQ ID NO: 558570 - DNA, 60 bp, Artificial; identical to SEQ ID NO: 352074
  Synthetic oligonucleotide

SEQ ID NO: 558571 - DNA, 55 bp, Artificial; identical to SEQ ID NO: 352075
  Synthetic oligonucleotide

SEQ ID NO: 558572 - DNA, 60 bp, Artificial; identical to SEQ ID NO: 352077
  Synthetic oligonucleotide

SEQ ID NO: 558573 - DNA, 60 bp, Artificial; identical to SEQ ID NO: 352078
  Synthetic oligonucleotide

SEQ ID NO: 558574 - DNA, 60 bp, Artificial; identical to SEQ ID NO: 352080
  Synthetic oligonucleotide

SEQ ID NO: 558575 - DNA, 51 bp, Artificial; identical to SEQ ID NO: 352081
  Synthetic oligonucleotide

SEQ ID NO: 558576 - DNA, 60 bp, Artificial; identical to SEQ ID NO: 352085
  Synthetic oligonucleotide

SEQ ID NO: 558577 - DNA, 55 bp, Artificial; identical to SEQ ID NO: 352089
  Synthetic oligonucleotide

SEQ ID NO: 558578 - DNA, 55 bp, Artificial; identical to SEQ ID NO: 352092
  Synthetic oligonucleotide

SEQ ID NO: 558579 - DNA, 60 bp, Artificial; identical to SEQ ID NO: 352093
  Synthetic oligonucleotide

SEQ ID NO: 558580 - DNA, 58 bp, Artificial; identical to SEQ ID NO: 352094
  Synthetic oligonucleotide

SEQ ID NO: 558581 - DNA, 55 bp, Artificial; identical to SEQ ID NO: 352096
  Synthetic oligonucleotide

SEQ ID NO: 558582 - DNA, 60 bp, Artificial; identical to SEQ ID NO: 352097
  Synthetic oligonucleotide

SEQ ID NO: 558583 - DNA, 56 bp, Artificial; identical to SEQ ID NO: 352099
  Synthetic oligonucleotide

SEQ ID NO: 558584 - DNA, 55 bp, Artificial; identical to SEQ ID NO: 352103
  Synthetic oligonucleotide

SEQ ID NO: 558585 - DNA, 55 bp, Artificial; identical to SEQ ID NO: 352105
  Synthetic oligonucleotide

SEQ ID NO: 558586 - DNA, 55 bp, Artificial; identical to SEQ ID NO: 352107
  Synthetic oligonucleotide

SEQ ID NO: 558587 - DNA, 57 bp, Artificial; identical to SEQ ID NO: 352109
  Synthetic oligonucleotide

SEQ ID NO: 558588 - DNA, 60 bp, Artificial; identical to SEQ ID NO: 352110
  Synthetic oligonucleotide

SEQ ID NO: 558589 - DNA, 55 bp, Artificial; identical to SEQ ID NO: 352114
  Synthetic oligonucleotide

SEQ ID NO: 558590 - DNA, 55 bp, Artificial; identical to SEQ ID NO: 352116
  Synthetic oligonucleotide

SEQ ID NO: 558591 - DNA, 51 bp, Artificial; identical to SEQ ID NO: 352117
  Synthetic oligonucleotide

SEQ ID NO: 558592 - DNA, 58 bp, Artificial; identical to SEQ ID NO: 352122
  Synthetic oligonucleotide

SEQ ID NO: 558593 - DNA, 55 bp, Artificial; identical to SEQ ID NO: 352123
  Synthetic oligonucleotide

SEQ ID NO: 558594 - DNA, 60 bp, Artificial; identical to SEQ ID NO: 352124
  Synthetic oligonucleotide

SEQ ID NO: 558595 - DNA, 55 bp, Artificial; identical to SEQ ID NO: 352125
  Synthetic oligonucleotide

SEQ ID NO: 558596 - DNA, 60 bp, Artificial; identical to SEQ ID NO: 352128
  Synthetic oligonucleotide

SEQ ID NO: 558597 - DNA, 60 bp, Artificial; identical to SEQ ID NO: 352129
  Synthetic oligonucleotide

SEQ ID NO: 558598 - DNA, 53 bp, Artificial; identical to SEQ ID NO: 352130
  Synthetic oligonucleotide

SEQ ID NO: 558599 - DNA, 56 bp, Artificial; identical to SEQ ID NO: 352135
  Synthetic oligonucleotide

SEQ ID NO: 558600 - DNA, 57 bp, Artificial; identical to SEQ ID NO: 352136
  Synthetic oligonucleotide

SEQ ID NO: 558601 - DNA, 60 bp, Artificial; identical to SEQ ID NO: 7925
  Synthetic oligonucleotide

SEQ ID NO: 558602 - DNA, 60 bp, Artificial; identical to SEQ ID NO: 352139
  Synthetic oligonucleotide

SEQ ID NO: 558603 - DNA, 60 bp, Artificial; identical to SEQ ID NO: 8175
  Synthetic oligonucleotide

SEQ ID NO: 558604 - DNA, 60 bp, Artificial; identical to SEQ ID NO: 352142
  Synthetic oligonucleotide

SEQ ID NO: 558605 - DNA, 60 bp, Artificial; identical to SEQ ID NO: 352144
  Synthetic oligonucleotide

SEQ ID NO: 558606 - DNA, 55 bp, Artificial; identical to SEQ ID NO: 352150
  Synthetic oligonucleotide

SEQ ID NO: 558607 - DNA, 60 bp, Artificial; identical to SEQ ID NO: 352152
  Synthetic oligonucleotide

SEQ ID NO: 558608 - DNA, 55 bp, Artificial; identical to SEQ ID NO: 352153
  Synthetic oligonucleotide

SEQ ID NO: 558609 - DNA, 55 bp, Artificial; identical to SEQ ID NO: 352155
  Synthetic oligonucleotide

SEQ ID NO: 558610 - DNA, 60 bp, Artificial; identical to SEQ ID NO: 352156
  Synthetic oligonucleotide

SEQ ID NO: 558611 - DNA, 60 bp, Artificial; identical to SEQ ID NO: 352161
  Synthetic oligonucleotide

SEQ ID NO: 558612 - DNA, 55 bp, Artificial; identical to SEQ ID NO: 352163
  Synthetic oligonucleotide

SEQ ID NO: 558613 - DNA, 58 bp, Artificial; identical to SEQ ID NO: 11830
  Synthetic oligonucleotide

SEQ ID NO: 558614 - DNA, 60 bp, Artificial; identical to SEQ ID NO: 352166
  Synthetic oligonucleotide

SEQ ID NO: 558615 - DNA, 60 bp, Artificial; identical to SEQ ID NO: 352168
  Synthetic oligonucleotide

SEQ ID NO: 558616 - DNA, 60 bp, Artificial; identical to SEQ ID NO: 352169
  Synthetic oligonucleotide

SEQ ID NO: 558617 - DNA, 56 bp, Artificial; identical to SEQ ID NO: 352171
  Synthetic oligonucleotide

SEQ ID NO: 558618 - DNA, 60 bp, Artificial; identical to SEQ ID NO: 352179
  Synthetic oligonucleotide

SEQ ID NO: 558619 - DNA, 55 bp, Artificial; identical to SEQ ID NO: 352180
  Synthetic oligonucleotide

SEQ ID NO: 558620 - DNA, 56 bp, Artificial; identical to SEQ ID NO: 352182
  Synthetic oligonucleotide

SEQ ID NO: 558621 - DNA, 60 bp, Artificial; identical to SEQ ID NO: 352185
  Synthetic oligonucleotide

SEQ ID NO: 558622 - DNA, 60 bp, Artificial; identical to SEQ ID NO: 8366
  Synthetic oligonucleotide

SEQ ID NO: 558623 - DNA, 60 bp, Artificial; identical to SEQ ID NO: 352189
  Synthetic oligonucleotide

SEQ ID NO: 558624 - DNA, 60 bp, Artificial; identical to SEQ ID NO: 352196
  Synthetic oligonucleotide

SEQ ID NO: 558625 - DNA, 57 bp, Artificial; identical to SEQ ID NO: 352201
  Synthetic oligonucleotide

SEQ ID NO: 558626 - DNA, 56 bp, Artificial; identical to SEQ ID NO: 352203
  Synthetic oligonucleotide

SEQ ID NO: 558627 - DNA, 58 bp, Artificial; identical to SEQ ID NO: 352205
  Synthetic oligonucleotide

SEQ ID NO: 558628 - DNA, 55 bp, Artificial; identical to SEQ ID NO: 352206
  Synthetic oligonucleotide

SEQ ID NO: 558629 - DNA, 55 bp, Artificial; identical to SEQ ID NO: 352208
  Synthetic oligonucleotide

SEQ ID NO: 558630 - DNA, 56 bp, Artificial; identical to SEQ ID NO: 352211
  Synthetic oligonucleotide

SEQ ID NO: 558631 - DNA, 59 bp, Artificial; identical to SEQ ID NO: 352215
  Synthetic oligonucleotide

SEQ ID NO: 558632 - DNA, 55 bp, Artificial; identical to SEQ ID NO: 352217
  Synthetic oligonucleotide

SEQ ID NO: 558633 - DNA, 55 bp, Artificial; identical to SEQ ID NO: 352219
  Synthetic oligonucleotide

SEQ ID NO: 558634 - DNA, 58 bp, Artificial; identical to SEQ ID NO: 352223
  Synthetic oligonucleotide

SEQ ID NO: 558635 - DNA, 60 bp, Artificial; identical to SEQ ID NO: 352224
  Synthetic oligonucleotide

SEQ ID NO: 558636 - DNA, 53 bp, Artificial; identical to SEQ ID NO: 352225
  Synthetic oligonucleotide

SEQ ID NO: 558637 - DNA, 59 bp, Artificial; identical to SEQ ID NO: 352226
  Synthetic oligonucleotide

SEQ ID NO: 558638 - DNA, 53 bp, Artificial; identical to SEQ ID NO: 352227
  Synthetic oligonucleotide

SEQ ID NO: 558639 - DNA, 55 bp, Artificial; identical to SEQ ID NO: 352228
  Synthetic oligonucleotide

SEQ ID NO: 558640 - DNA, 51 bp, Artificial; identical to SEQ ID NO: 352229
  Synthetic oligonucleotide

SEQ ID NO: 558641 - DNA, 55 bp, Artificial; identical to SEQ ID NO: 352231
  Synthetic oligonucleotide

SEQ ID NO: 558642 - DNA, 54 bp, Artificial; identical to SEQ ID NO: 352236
  Synthetic oligonucleotide

SEQ ID NO: 558643 - DNA, 57 bp, Artificial; identical to SEQ ID NO: 352237
  Synthetic oligonucleotide

SEQ ID NO: 558644 - DNA, 59 bp, Artificial; identical to SEQ ID NO: 20085
  Synthetic oligonucleotide

SEQ ID NO: 558645 - DNA, 59 bp, Artificial; identical to SEQ ID NO: 352238
  Synthetic oligonucleotide

SEQ ID NO: 558646 - DNA, 59 bp, Artificial; identical to SEQ ID NO: 352243
  Synthetic oligonucleotide

SEQ ID NO: 558647 - DNA, 57 bp, Artificial; identical to SEQ ID NO: 352245
  Synthetic oligonucleotide

SEQ ID NO: 558648 - DNA, 54 bp, Artificial; identical to SEQ ID NO: 352248
  Synthetic oligonucleotide

SEQ ID NO: 558649 - DNA, 54 bp, Artificial; identical to SEQ ID NO: 352249
  Synthetic oligonucleotide

SEQ ID NO: 558650 - DNA, 60 bp, Artificial; identical to SEQ ID NO: 352250
  Synthetic oligonucleotide

SEQ ID NO: 558651 - DNA, 59 bp, Artificial; identical to SEQ ID NO: 352251
  Synthetic oligonucleotide

SEQ ID NO: 558652 - DNA, 60 bp, Artificial; identical to SEQ ID NO: 352252
  Synthetic oligonucleotide

SEQ ID NO: 558653 - DNA, 57 bp, Artificial; identical to SEQ ID NO: 352253
  Synthetic oligonucleotide

SEQ ID NO: 558654 - DNA, 59 bp, Artificial; identical to SEQ ID NO: 352255
  Synthetic oligonucleotide

SEQ ID NO: 558655 - DNA, 59 bp, Artificial; identical to SEQ ID NO: 16051
  Synthetic oligonucleotide

SEQ ID NO: 558656 - DNA, 57 bp, Artificial; identical to SEQ ID NO: 352260
  Synthetic oligonucleotide

SEQ ID NO: 558657 - DNA, 60 bp, Artificial; identical to SEQ ID NO: 352261
  Synthetic oligonucleotide

SEQ ID NO: 558658 - DNA, 60 bp, Artificial; identical to SEQ ID NO: 352262
  Synthetic oligonucleotide

SEQ ID NO: 558659 - DNA, 55 bp, Artificial; identical to SEQ ID NO: 18242
  Synthetic oligonucleotide

SEQ ID NO: 558660 - DNA, 56 bp, Artificial; identical to SEQ ID NO: 352265
  Synthetic oligonucleotide

SEQ ID NO: 558661 - DNA, 58 bp, Artificial; identical to SEQ ID NO: 352270
  Synthetic oligonucleotide

SEQ ID NO: 558662 - DNA, 60 bp, Artificial; identical to SEQ ID NO: 352271
  Synthetic oligonucleotide

SEQ ID NO: 558663 - DNA, 55 bp, Artificial; identical to SEQ ID NO: 352272
  Synthetic oligonucleotide

SEQ ID NO: 558664 - DNA, 60 bp, Artificial; identical to SEQ ID NO: 352274
  Synthetic oligonucleotide

SEQ ID NO: 558665 - DNA, 60 bp, Artificial; identical to SEQ ID NO: 352275
  Synthetic oligonucleotide

SEQ ID NO: 558666 - DNA, 60 bp, Artificial; identical to SEQ ID NO: 352279
  Synthetic oligonucleotide

SEQ ID NO: 558667 - DNA, 56 bp, Artificial; identical to SEQ ID NO: 352280
  Synthetic oligonucleotide

SEQ ID NO: 558668 - DNA, 55 bp, Artificial; identical to SEQ ID NO: 352281
  Synthetic oligonucleotide

SEQ ID NO: 558669 - DNA, 58 bp, Artificial; identical to SEQ ID NO: 352282
  Synthetic oligonucleotide

SEQ ID NO: 558670 - DNA, 60 bp, Artificial; identical to SEQ ID NO: 352283
  Synthetic oligonucleotide

SEQ ID NO: 558671 - DNA, 56 bp, Artificial; identical to SEQ ID NO: 352284
  Synthetic oligonucleotide

SEQ ID NO: 558672 - DNA, 60 bp, Artificial; identical to SEQ ID NO: 352289
  Synthetic oligonucleotide

SEQ ID NO: 558673 - DNA, 55 bp, Artificial; identical to SEQ ID NO: 352291
  Synthetic oligonucleotide

SEQ ID NO: 558674 - DNA, 51 bp, Artificial; identical to SEQ ID NO: 352294
  Synthetic oligonucleotide

SEQ ID NO: 558675 - DNA, 54 bp, Artificial; identical to SEQ ID NO: 352296
  Synthetic oligonucleotide

SEQ ID NO: 558676 - DNA, 60 bp, Artificial; identical to SEQ ID NO: 352297
  Synthetic oligonucleotide

SEQ ID NO: 558677 - DNA, 55 bp, Artificial; identical to SEQ ID NO: 352300
  Synthetic oligonucleotide

SEQ ID NO: 558678 - DNA, 54 bp, Artificial; identical to SEQ ID NO: 352301
  Synthetic oligonucleotide

SEQ ID NO: 558679 - DNA, 60 bp, Artificial; identical to SEQ ID NO: 352302
  Synthetic oligonucleotide

SEQ ID NO: 558680 - DNA, 51 bp, Artificial; identical to SEQ ID NO: 352303
  Synthetic oligonucleotide

SEQ ID NO: 558681 - DNA, 60 bp, Artificial; identical to SEQ ID NO: 352305
  Synthetic oligonucleotide

SEQ ID NO: 558682 - DNA, 57 bp, Artificial; identical to SEQ ID NO: 352307
  Synthetic oligonucleotide

SEQ ID NO: 558683 - DNA, 55 bp, Artificial; identical to SEQ ID NO: 352308
  Synthetic oligonucleotide

SEQ ID NO: 558684 - DNA, 56 bp, Artificial; identical to SEQ ID NO: 352310
  Synthetic oligonucleotide

SEQ ID NO: 558685 - DNA, 54 bp, Artificial; identical to SEQ ID NO: 352312
  Synthetic oligonucleotide

SEQ ID NO: 558686 - DNA, 55 bp, Artificial; identical to SEQ ID NO: 13132
  Synthetic oligonucleotide

SEQ ID NO: 558687 - DNA, 58 bp, Artificial; identical to SEQ ID NO: 352316
  Synthetic oligonucleotide

SEQ ID NO: 558688 - DNA, 55 bp, Artificial; identical to SEQ ID NO: 352319
  Synthetic oligonucleotide

SEQ ID NO: 558689 - DNA, 56 bp, Artificial; identical to SEQ ID NO: 352322
  Synthetic oligonucleotide

SEQ ID NO: 558690 - DNA, 55 bp, Artificial; identical to SEQ ID NO: 352323
  Synthetic oligonucleotide

SEQ ID NO: 558691 - DNA, 59 bp, Artificial; identical to SEQ ID NO: 352324
  Synthetic oligonucleotide

SEQ ID NO: 558692 - DNA, 59 bp, Artificial; identical to SEQ ID NO: 352326
  Synthetic oligonucleotide

SEQ ID NO: 558693 - DNA, 60 bp, Artificial; identical to SEQ ID NO: 352328
  Synthetic oligonucleotide

SEQ ID NO: 558694 - DNA, 60 bp, Artificial; identical to SEQ ID NO: 352331
  Synthetic oligonucleotide

SEQ ID NO: 558695 - DNA, 60 bp, Artificial; identical to SEQ ID NO: 352332
  Synthetic oligonucleotide

SEQ ID NO: 558696 - DNA, 60 bp, Artificial; identical to SEQ ID NO: 123298
  Synthetic oligonucleotide

SEQ ID NO: 558697 - DNA, 57 bp, Artificial; identical to SEQ ID NO: 352333
  Synthetic oligonucleotide

SEQ ID NO: 558698 - DNA, 60 bp, Artificial; identical to SEQ ID NO: 352335
  Synthetic oligonucleotide

SEQ ID NO: 558699 - DNA, 56 bp, Artificial; identical to SEQ ID NO: 352337
  Synthetic oligonucleotide

SEQ ID NO: 558700 - DNA, 57 bp, Artificial; identical to SEQ ID NO: 18165
  Synthetic oligonucleotide

SEQ ID NO: 558701 - DNA, 51 bp, Artificial; identical to SEQ ID NO: 352339
  Synthetic oligonucleotide

SEQ ID NO: 558702 - DNA, 60 bp, Artificial; identical to SEQ ID NO: 352342
  Synthetic oligonucleotide

SEQ ID NO: 558703 - DNA, 54 bp, Artificial; identical to SEQ ID NO: 352344
  Synthetic oligonucleotide

SEQ ID NO: 558704 - DNA, 55 bp, Artificial; identical to SEQ ID NO: 352347
  Synthetic oligonucleotide

SEQ ID NO: 558705 - DNA, 56 bp, Artificial; identical to SEQ ID NO: 352348
  Synthetic oligonucleotide

SEQ ID NO: 558706 - DNA, 55 bp, Artificial; identical to SEQ ID NO: 352349
  Synthetic oligonucleotide

SEQ ID NO: 558707 - DNA, 55 bp, Artificial; identical to SEQ ID NO: 352352
  Synthetic oligonucleotide

SEQ ID NO: 558708 - DNA, 51 bp, Artificial; identical to SEQ ID NO: 352353
  Synthetic oligonucleotide

SEQ ID NO: 558709 - DNA, 58 bp, Artificial; identical to SEQ ID NO: 352356
  Synthetic oligonucleotide

SEQ ID NO: 558710 - DNA, 59 bp, Artificial; identical to SEQ ID NO: 352358
  Synthetic oligonucleotide

SEQ ID NO: 558711 - DNA, 60 bp, Artificial; identical to SEQ ID NO: 352360
  Synthetic oligonucleotide

SEQ ID NO: 558712 - DNA, 60 bp, Artificial; identical to SEQ ID NO: 352362
  Synthetic oligonucleotide

SEQ ID NO: 558713 - DNA, 60 bp, Artificial; identical to SEQ ID NO: 352363
  Synthetic oligonucleotide

SEQ ID NO: 558714 - DNA, 52 bp, Artificial; identical to SEQ ID NO: 352366
  Synthetic oligonucleotide

SEQ ID NO: 558715 - DNA, 56 bp, Artificial; identical to SEQ ID NO: 352367
  Synthetic oligonucleotide

SEQ ID NO: 558716 - DNA, 53 bp, Artificial; identical to SEQ ID NO: 352368
  Synthetic oligonucleotide

SEQ ID NO: 558717 - DNA, 55 bp, Artificial; identical to SEQ ID NO: 352370
  Synthetic oligonucleotide

SEQ ID NO: 558718 - DNA, 55 bp, Artificial; identical to SEQ ID NO: 352372
  Synthetic oligonucleotide

SEQ ID NO: 558719 - DNA, 60 bp, Artificial; identical to SEQ ID NO: 352374
  Synthetic oligonucleotide

SEQ ID NO: 558720 - DNA, 58 bp, Artificial; identical to SEQ ID NO: 352375
  Synthetic oligonucleotide

SEQ ID NO: 558721 - DNA, 60 bp, Artificial; identical to SEQ ID NO: 352376
  Synthetic oligonucleotide

SEQ ID NO: 558722 - DNA, 55 bp, Artificial; identical to SEQ ID NO: 352378
  Synthetic oligonucleotide

SEQ ID NO: 558723 - DNA, 55 bp, Artificial; identical to SEQ ID NO: 352380
  Synthetic oligonucleotide

SEQ ID NO: 558724 - DNA, 60 bp, Artificial; identical to SEQ ID NO: 352389
  Synthetic oligonucleotide

SEQ ID NO: 558725 - DNA, 56 bp, Artificial; identical to SEQ ID NO: 352390
  Synthetic oligonucleotide

SEQ ID NO: 558726 - DNA, 60 bp, Artificial; identical to SEQ ID NO: 76128
  Synthetic oligonucleotide

SEQ ID NO: 558727 - DNA, 58 bp, Artificial; identical to SEQ ID NO: 352404
  Synthetic oligonucleotide

SEQ ID NO: 558728 - DNA, 60 bp, Artificial; identical to SEQ ID NO: 352405
  Synthetic oligonucleotide

SEQ ID NO: 558729 - DNA, 60 bp, Artificial; identical to SEQ ID NO: 352409
  Synthetic oligonucleotide

SEQ ID NO: 558730 - DNA, 53 bp, Artificial; identical to SEQ ID NO: 352411
  Synthetic oligonucleotide

SEQ ID NO: 558731 - DNA, 55 bp, Artificial; identical to SEQ ID NO: 352412
  Synthetic oligonucleotide

SEQ ID NO: 558732 - DNA, 51 bp, Artificial; identical to SEQ ID NO: 6033
  Synthetic oligonucleotide

SEQ ID NO: 558733 - DNA, 60 bp, Artificial; identical to SEQ ID NO: 352418
  Synthetic oligonucleotide

SEQ ID NO: 558734 - DNA, 54 bp, Artificial; identical to SEQ ID NO: 352422
  Synthetic oligonucleotide

SEQ ID NO: 558735 - DNA, 56 bp, Artificial; identical to SEQ ID NO: 352423
  Synthetic oligonucleotide

SEQ ID NO: 558736 - DNA, 58 bp, Artificial; identical to SEQ ID NO: 352424
  Synthetic oligonucleotide

SEQ ID NO: 558737 - DNA, 59 bp, Artificial; identical to SEQ ID NO: 352426
  Synthetic oligonucleotide

SEQ ID NO: 558738 - DNA, 51 bp, Artificial; identical to SEQ ID NO: 352429
  Synthetic oligonucleotide

SEQ ID NO: 558739 - DNA, 60 bp, Artificial; identical to SEQ ID NO: 352434
  Synthetic oligonucleotide

SEQ ID NO: 558740 - DNA, 58 bp, Artificial; identical to SEQ ID NO: 352439
  Synthetic oligonucleotide

SEQ ID NO: 558741 - DNA, 52 bp, Artificial; identical to SEQ ID NO: 352440
  Synthetic oligonucleotide

SEQ ID NO: 558742 - DNA, 60 bp, Artificial; identical to SEQ ID NO: 352445
  Synthetic oligonucleotide

SEQ ID NO: 558743 - DNA, 60 bp, Artificial; identical to SEQ ID NO: 352447
  Synthetic oligonucleotide

SEQ ID NO: 558744 - DNA, 55 bp, Artificial; identical to SEQ ID NO: 352448
  Synthetic oligonucleotide

SEQ ID NO: 558745 - DNA, 55 bp, Artificial; identical to SEQ ID NO: 352449
  Synthetic oligonucleotide

SEQ ID NO: 558746 - DNA, 59 bp, Artificial; identical to SEQ ID NO: 352450
  Synthetic oligonucleotide

SEQ ID NO: 558747 - DNA, 55 bp, Artificial; identical to SEQ ID NO: 352455
  Synthetic oligonucleotide

SEQ ID NO: 558748 - DNA, 60 bp, Artificial; identical to SEQ ID NO: 352457
  Synthetic oligonucleotide

SEQ ID NO: 558749 - DNA, 60 bp, Artificial; identical to SEQ ID NO: 352460
  Synthetic oligonucleotide

SEQ ID NO: 558750 - DNA, 60 bp, Artificial; identical to SEQ ID NO: 352464
  Synthetic oligonucleotide

SEQ ID NO: 558751 - DNA, 51 bp, Artificial; identical to SEQ ID NO: 352467
  Synthetic oligonucleotide

SEQ ID NO: 558752 - DNA, 55 bp, Artificial; identical to SEQ ID NO: 352469
  Synthetic oligonucleotide

SEQ ID NO: 558753 - DNA, 60 bp, Artificial; identical to SEQ ID NO: 352470
  Synthetic oligonucleotide

SEQ ID NO: 558754 - DNA, 60 bp, Artificial; identical to SEQ ID NO: 352476
  Synthetic oligonucleotide

SEQ ID NO: 558755 - DNA, 55 bp, Artificial; identical to SEQ ID NO: 352485
  Synthetic oligonucleotide

SEQ ID NO: 558756 - DNA, 58 bp, Artificial; identical to SEQ ID NO: 13368
  Synthetic oligonucleotide

SEQ ID NO: 558757 - DNA, 60 bp, Artificial; identical to SEQ ID NO: 352487
  Synthetic oligonucleotide

SEQ ID NO: 558758 - DNA, 60 bp, Artificial; identical to SEQ ID NO: 352488
  Synthetic oligonucleotide

SEQ ID NO: 558759 - DNA, 60 bp, Artificial; identical to SEQ ID NO: 352489
  Synthetic oligonucleotide

SEQ ID NO: 558760 - DNA, 55 bp, Artificial; identical to SEQ ID NO: 10225
  Synthetic oligonucleotide

SEQ ID NO: 558761 - DNA, 59 bp, Artificial; identical to SEQ ID NO: 352491
  Synthetic oligonucleotide

SEQ ID NO: 558762 - DNA, 58 bp, Artificial; identical to SEQ ID NO: 352493
  Synthetic oligonucleotide

SEQ ID NO: 558763 - DNA, 55 bp, Artificial; identical to SEQ ID NO: 352496
  Synthetic oligonucleotide

SEQ ID NO: 558764 - DNA, 60 bp, Artificial; identical to SEQ ID NO: 352500
  Synthetic oligonucleotide

SEQ ID NO: 558765 - DNA, 55 bp, Artificial; identical to SEQ ID NO: 352501
  Synthetic oligonucleotide

SEQ ID NO: 558766 - DNA, 60 bp, Artificial; identical to SEQ ID NO: 352505
  Synthetic oligonucleotide

SEQ ID NO: 558767 - DNA, 55 bp, Artificial; identical to SEQ ID NO: 13742
  Synthetic oligonucleotide

SEQ ID NO: 558768 - DNA, 56 bp, Artificial; identical to SEQ ID NO: 352506
  Synthetic oligonucleotide

SEQ ID NO: 558769 - DNA, 60 bp, Artificial; identical to SEQ ID NO: 352509
  Synthetic oligonucleotide

SEQ ID NO: 558770 - DNA, 60 bp, Artificial; identical to SEQ ID NO: 352511
  Synthetic oligonucleotide

SEQ ID NO: 558771 - DNA, 60 bp, Artificial; identical to SEQ ID NO: 13072
  Synthetic oligonucleotide

SEQ ID NO: 558772 - DNA, 55 bp, Artificial; identical to SEQ ID NO: 352512
  Synthetic oligonucleotide

SEQ ID NO: 558773 - DNA, 60 bp, Artificial; identical to SEQ ID NO: 352516
  Synthetic oligonucleotide

SEQ ID NO: 558774 - DNA, 55 bp, Artificial; identical to SEQ ID NO: 352517
  Synthetic oligonucleotide

SEQ ID NO: 558775 - DNA, 56 bp, Artificial; identical to SEQ ID NO: 352521
  Synthetic oligonucleotide

SEQ ID NO: 558776 - DNA, 59 bp, Artificial; identical to SEQ ID NO: 352528
  Synthetic oligonucleotide

SEQ ID NO: 558777 - DNA, 53 bp, Artificial; identical to SEQ ID NO: 11237
  Synthetic oligonucleotide

SEQ ID NO: 558778 - DNA, 60 bp, Artificial; identical to SEQ ID NO: 352529
  Synthetic oligonucleotide

SEQ ID NO: 558779 - DNA, 60 bp, Artificial; identical to SEQ ID NO: 352535
  Synthetic oligonucleotide

SEQ ID NO: 558780 - DNA, 60 bp, Artificial; identical to SEQ ID NO: 352537
  Synthetic oligonucleotide

SEQ ID NO: 558781 - DNA, 60 bp, Artificial; identical to SEQ ID NO: 352538
  Synthetic oligonucleotide

SEQ ID NO: 558782 - DNA, 60 bp, Artificial; identical to SEQ ID NO: 7742
  Synthetic oligonucleotide

SEQ ID NO: 558783 - DNA, 60 bp, Artificial; identical to SEQ ID NO: 352547
  Synthetic oligonucleotide

SEQ ID NO: 558784 - DNA, 60 bp, Artificial; identical to SEQ ID NO: 352548
  Synthetic oligonucleotide

SEQ ID NO: 558785 - DNA, 60 bp, Artificial; identical to SEQ ID NO: 352549
  Synthetic oligonucleotide

SEQ ID NO: 558786 - DNA, 55 bp, Artificial; identical to SEQ ID NO: 352550
  Synthetic oligonucleotide

SEQ ID NO: 558787 - DNA, 52 bp, Artificial; identical to SEQ ID NO: 7137
  Synthetic oligonucleotide

SEQ ID NO: 558788 - DNA, 55 bp, Artificial; identical to SEQ ID NO: 352556
  Synthetic oligonucleotide

SEQ ID NO: 558789 - DNA, 60 bp, Artificial; identical to SEQ ID NO: 352557
  Synthetic oligonucleotide

SEQ ID NO: 558790 - DNA, 60 bp, Artificial; identical to SEQ ID NO: 352558
  Synthetic oligonucleotide

SEQ ID NO: 558791 - DNA, 59 bp, Artificial; identical to SEQ ID NO: 6155
  Synthetic oligonucleotide

SEQ ID NO: 558792 - DNA, 60 bp, Artificial; identical to SEQ ID NO: 352564
  Synthetic oligonucleotide

SEQ ID NO: 558793 - DNA, 60 bp, Artificial; identical to SEQ ID NO: 352567
  Synthetic oligonucleotide

SEQ ID NO: 558794 - DNA, 55 bp, Artificial; identical to SEQ ID NO: 352569
  Synthetic oligonucleotide

SEQ ID NO: 558795 - DNA, 60 bp, Artificial; identical to SEQ ID NO: 352573
  Synthetic oligonucleotide

SEQ ID NO: 558796 - DNA, 56 bp, Artificial; identical to SEQ ID NO: 352574
  Synthetic oligonucleotide

SEQ ID NO: 558797 - DNA, 60 bp, Artificial; identical to SEQ ID NO: 352577
  Synthetic oligonucleotide

SEQ ID NO: 558798 - DNA, 50 bp, Artificial; identical to SEQ ID NO: 352583
  Synthetic oligonucleotide

SEQ ID NO: 558799 - DNA, 54 bp, Artificial; identical to SEQ ID NO: 352585
  Synthetic oligonucleotide

SEQ ID NO: 558800 - DNA, 50 bp, Artificial; identical to SEQ ID NO: 352588
  Synthetic oligonucleotide

SEQ ID NO: 558801 - DNA, 60 bp, Artificial; identical to SEQ ID NO: 352590
  Synthetic oligonucleotide

SEQ ID NO: 558802 - DNA, 53 bp, Artificial; identical to SEQ ID NO: 352593
  Synthetic oligonucleotide

SEQ ID NO: 558803 - DNA, 55 bp, Artificial; identical to SEQ ID NO: 352594
  Synthetic oligonucleotide

SEQ ID NO: 558804 - DNA, 55 bp, Artificial; identical to SEQ ID NO: 352595
  Synthetic oligonucleotide

SEQ ID NO: 558805 - DNA, 59 bp, Artificial; identical to SEQ ID NO: 352597
  Synthetic oligonucleotide

SEQ ID NO: 558806 - DNA, 59 bp, Artificial; identical to SEQ ID NO: 352600
  Synthetic oligonucleotide

SEQ ID NO: 558807 - DNA, 52 bp, Artificial; identical to SEQ ID NO: 352602
  Synthetic oligonucleotide

SEQ ID NO: 558808 - DNA, 60 bp, Artificial; identical to SEQ ID NO: 352603
  Synthetic oligonucleotide

SEQ ID NO: 558809 - DNA, 60 bp, Artificial; identical to SEQ ID NO: 352608
  Synthetic oligonucleotide

SEQ ID NO: 558810 - DNA, 57 bp, Artificial; identical to SEQ ID NO: 352611
  Synthetic oligonucleotide

SEQ ID NO: 558811 - DNA, 51 bp, Artificial; identical to SEQ ID NO: 352613
  Synthetic oligonucleotide

SEQ ID NO: 558812 - DNA, 60 bp, Artificial; identical to SEQ ID NO: 352614
  Synthetic oligonucleotide

SEQ ID NO: 558813 - DNA, 55 bp, Artificial; identical to SEQ ID NO: 352616
  Synthetic oligonucleotide

SEQ ID NO: 558814 - DNA, 60 bp, Artificial; identical to SEQ ID NO: 352617
  Synthetic oligonucleotide

SEQ ID NO: 558815 - DNA, 54 bp, Artificial; identical to SEQ ID NO: 352618
  Synthetic oligonucleotide

SEQ ID NO: 558816 - DNA, 60 bp, Artificial; identical to SEQ ID NO: 352622
  Synthetic oligonucleotide

SEQ ID NO: 558817 - DNA, 56 bp, Artificial; identical to SEQ ID NO: 352623
  Synthetic oligonucleotide

SEQ ID NO: 558818 - DNA, 55 bp, Artificial; identical to SEQ ID NO: 352624
  Synthetic oligonucleotide

SEQ ID NO: 558819 - DNA, 60 bp, Artificial; identical to SEQ ID NO: 352626
  Synthetic oligonucleotide

SEQ ID NO: 558820 - DNA, 56 bp, Artificial; identical to SEQ ID NO: 352632
  Synthetic oligonucleotide

SEQ ID NO: 558821 - DNA, 59 bp, Artificial; identical to SEQ ID NO: 352637
  Synthetic oligonucleotide

SEQ ID NO: 558822 - DNA, 51 bp, Artificial; identical to SEQ ID NO: 352638
  Synthetic oligonucleotide

SEQ ID NO: 558823 - DNA, 58 bp, Artificial; identical to SEQ ID NO: 352640
  Synthetic oligonucleotide

SEQ ID NO: 558824 - DNA, 56 bp, Artificial; identical to SEQ ID NO: 352642
  Synthetic oligonucleotide

SEQ ID NO: 558825 - DNA, 51 bp, Artificial; identical to SEQ ID NO: 352643
  Synthetic oligonucleotide

SEQ ID NO: 558826 - DNA, 50 bp, Artificial; identical to SEQ ID NO: 352644
  Synthetic oligonucleotide

SEQ ID NO: 558827 - DNA, 58 bp, Artificial; identical to SEQ ID NO: 352646
  Synthetic oligonucleotide

SEQ ID NO: 558828 - DNA, 59 bp, Artificial; identical to SEQ ID NO: 18592
  Synthetic oligonucleotide

SEQ ID NO: 558829 - DNA, 60 bp, Artificial; identical to SEQ ID NO: 352648
  Synthetic oligonucleotide

SEQ ID NO: 558830 - DNA, 60 bp, Artificial; identical to SEQ ID NO: 352649
  Synthetic oligonucleotide

SEQ ID NO: 558831 - DNA, 60 bp, Artificial; identical to SEQ ID NO: 352652
  Synthetic oligonucleotide

SEQ ID NO: 558832 - DNA, 55 bp, Artificial; identical to SEQ ID NO: 352656
  Synthetic oligonucleotide

SEQ ID NO: 558833 - DNA, 60 bp, Artificial; identical to SEQ ID NO: 352670
  Synthetic oligonucleotide

SEQ ID NO: 558834 - DNA, 54 bp, Artificial; identical to SEQ ID NO: 352671
  Synthetic oligonucleotide

SEQ ID NO: 558835 - DNA, 60 bp, Artificial; identical to SEQ ID NO: 352672
  Synthetic oligonucleotide

SEQ ID NO: 558836 - DNA, 60 bp, Artificial; identical to SEQ ID NO: 352673
  Synthetic oligonucleotide

SEQ ID NO: 558837 - DNA, 50 bp, Artificial; identical to SEQ ID NO: 352674
  Synthetic oligonucleotide

SEQ ID NO: 558838 - DNA, 55 bp, Artificial; identical to SEQ ID NO: 352676
  Synthetic oligonucleotide

SEQ ID NO: 558839 - DNA, 55 bp, Artificial; identical to SEQ ID NO: 352678
  Synthetic oligonucleotide

SEQ ID NO: 558840 - DNA, 60 bp, Artificial; identical to SEQ ID NO: 352685
  Synthetic oligonucleotide

SEQ ID NO: 558841 - DNA, 51 bp, Artificial; identical to SEQ ID NO: 352686
  Synthetic oligonucleotide

SEQ ID NO: 558842 - DNA, 55 bp, Artificial; identical to SEQ ID NO: 352690
  Synthetic oligonucleotide

SEQ ID NO: 558843 - DNA, 55 bp, Artificial; identical to SEQ ID NO: 352691
  Synthetic oligonucleotide

SEQ ID NO: 558844 - DNA, 59 bp, Artificial; identical to SEQ ID NO: 352695
  Synthetic oligonucleotide

SEQ ID NO: 558845 - DNA, 60 bp, Artificial; identical to SEQ ID NO: 352696
  Synthetic oligonucleotide

SEQ ID NO: 558846 - DNA, 50 bp, Artificial; identical to SEQ ID NO: 352697
  Synthetic oligonucleotide

SEQ ID NO: 558847 - DNA, 55 bp, Artificial; identical to SEQ ID NO: 352700
  Synthetic oligonucleotide

SEQ ID NO: 558848 - DNA, 55 bp, Artificial; identical to SEQ ID NO: 352703
  Synthetic oligonucleotide

SEQ ID NO: 558849 - DNA, 58 bp, Artificial; identical to SEQ ID NO: 352704
  Synthetic oligonucleotide

SEQ ID NO: 558850 - DNA, 55 bp, Artificial; identical to SEQ ID NO: 352705
  Synthetic oligonucleotide

SEQ ID NO: 558851 - DNA, 57 bp, Artificial; identical to SEQ ID NO: 352706
  Synthetic oligonucleotide

SEQ ID NO: 558852 - DNA, 55 bp, Artificial; identical to SEQ ID NO: 352708
  Synthetic oligonucleotide

SEQ ID NO: 558853 - DNA, 52 bp, Artificial; identical to SEQ ID NO: 352710
  Synthetic oligonucleotide

SEQ ID NO: 558854 - DNA, 58 bp, Artificial; identical to SEQ ID NO: 352711
  Synthetic oligonucleotide

SEQ ID NO: 558855 - DNA, 57 bp, Artificial; identical to SEQ ID NO: 352713
  Synthetic oligonucleotide

SEQ ID NO: 558856 - DNA, 56 bp, Artificial; identical to SEQ ID NO: 352715
  Synthetic oligonucleotide

SEQ ID NO: 558857 - DNA, 60 bp, Artificial; identical to SEQ ID NO: 352719
  Synthetic oligonucleotide

SEQ ID NO: 558858 - DNA, 55 bp, Artificial; identical to SEQ ID NO: 352721
  Synthetic oligonucleotide

SEQ ID NO: 558859 - DNA, 55 bp, Artificial; identical to SEQ ID NO: 352722
  Synthetic oligonucleotide

SEQ ID NO: 558860 - DNA, 55 bp, Artificial; identical to SEQ ID NO: 352723
  Synthetic oligonucleotide

SEQ ID NO: 558861 - DNA, 60 bp, Artificial; identical to SEQ ID NO: 352724
  Synthetic oligonucleotide

SEQ ID NO: 558862 - DNA, 58 bp, Artificial; identical to SEQ ID NO: 352725
  Synthetic oligonucleotide

SEQ ID NO: 558863 - DNA, 60 bp, Artificial; identical to SEQ ID NO: 352728
  Synthetic oligonucleotide

SEQ ID NO: 558864 - DNA, 60 bp, Artificial; identical to SEQ ID NO: 352729
  Synthetic oligonucleotide

SEQ ID NO: 558865 - DNA, 60 bp, Artificial; identical to SEQ ID NO: 352730
  Synthetic oligonucleotide

SEQ ID NO: 558866 - DNA, 55 bp, Artificial; identical to SEQ ID NO: 352731
  Synthetic oligonucleotide

SEQ ID NO: 558867 - DNA, 57 bp, Artificial; identical to SEQ ID NO: 352733
  Synthetic oligonucleotide

SEQ ID NO: 558868 - DNA, 51 bp, Artificial; identical to SEQ ID NO: 352734
  Synthetic oligonucleotide

SEQ ID NO: 558869 - DNA, 57 bp, Artificial; identical to SEQ ID NO: 352735
  Synthetic oligonucleotide

SEQ ID NO: 558870 - DNA, 60 bp, Artificial; identical to SEQ ID NO: 352737
  Synthetic oligonucleotide

SEQ ID NO: 558871 - DNA, 58 bp, Artificial; identical to SEQ ID NO: 352738
  Synthetic oligonucleotide

SEQ ID NO: 558872 - DNA, 60 bp, Artificial; identical to SEQ ID NO: 352739
  Synthetic oligonucleotide

SEQ ID NO: 558873 - DNA, 59 bp, Artificial; identical to SEQ ID NO: 352740
  Synthetic oligonucleotide

SEQ ID NO: 558874 - DNA, 56 bp, Artificial; identical to SEQ ID NO: 352742
  Synthetic oligonucleotide

SEQ ID NO: 558875 - DNA, 55 bp, Artificial; identical to SEQ ID NO: 352743
  Synthetic oligonucleotide

SEQ ID NO: 558876 - DNA, 59 bp, Artificial; identical to SEQ ID NO: 352744
  Synthetic oligonucleotide

SEQ ID NO: 558877 - DNA, 55 bp, Artificial; identical to SEQ ID NO: 352745
  Synthetic oligonucleotide

SEQ ID NO: 558878 - DNA, 51 bp, Artificial; identical to SEQ ID NO: 352746
  Synthetic oligonucleotide

SEQ ID NO: 558879 - DNA, 53 bp, Artificial; identical to SEQ ID NO: 352747
  Synthetic oligonucleotide

SEQ ID NO: 558880 - DNA, 60 bp, Artificial; identical to SEQ ID NO: 352749
  Synthetic oligonucleotide

SEQ ID NO: 558881 - DNA, 58 bp, Artificial; identical to SEQ ID NO: 352752
  Synthetic oligonucleotide

SEQ ID NO: 558882 - DNA, 57 bp, Artificial; identical to SEQ ID NO: 352761
  Synthetic oligonucleotide

SEQ ID NO: 558883 - DNA, 55 bp, Artificial; identical to SEQ ID NO: 352763
  Synthetic oligonucleotide

SEQ ID NO: 558884 - DNA, 55 bp, Artificial; identical to SEQ ID NO: 352764
  Synthetic oligonucleotide

SEQ ID NO: 558885 - DNA, 60 bp, Artificial; identical to SEQ ID NO: 352765
  Synthetic oligonucleotide

SEQ ID NO: 558886 - DNA, 59 bp, Artificial; identical to SEQ ID NO: 352766
  Synthetic oligonucleotide

SEQ ID NO: 558887 - DNA, 56 bp, Artificial; identical to SEQ ID NO: 352770
  Synthetic oligonucleotide

SEQ ID NO: 558888 - DNA, 60 bp, Artificial; identical to SEQ ID NO: 352771
  Synthetic oligonucleotide

SEQ ID NO: 558889 - DNA, 59 bp, Artificial; identical to SEQ ID NO: 352772
  Synthetic oligonucleotide

SEQ ID NO: 558890 - DNA, 60 bp, Artificial; identical to SEQ ID NO: 352774
  Synthetic oligonucleotide

SEQ ID NO: 558891 - DNA, 50 bp, Artificial; identical to SEQ ID NO: 352778
  Synthetic oligonucleotide

SEQ ID NO: 558892 - DNA, 55 bp, Artificial; identical to SEQ ID NO: 352781
  Synthetic oligonucleotide

SEQ ID NO: 558893 - DNA, 60 bp, Artificial; identical to SEQ ID NO: 15473
  Synthetic oligonucleotide

SEQ ID NO: 558894 - DNA, 58 bp, Artificial; identical to SEQ ID NO: 352784
  Synthetic oligonucleotide

SEQ ID NO: 558895 - DNA, 55 bp, Artificial; identical to SEQ ID NO: 352786
  Synthetic oligonucleotide

SEQ ID NO: 558896 - DNA, 60 bp, Artificial; identical to SEQ ID NO: 352787
  Synthetic oligonucleotide

SEQ ID NO: 558897 - DNA, 60 bp, Artificial; identical to SEQ ID NO: 352790
  Synthetic oligonucleotide

SEQ ID NO: 558898 - DNA, 60 bp, Artificial; identical to SEQ ID NO: 352795
  Synthetic oligonucleotide

SEQ ID NO: 558899 - DNA, 60 bp, Artificial; identical to SEQ ID NO: 352798
  Synthetic oligonucleotide

SEQ ID NO: 558900 - DNA, 60 bp, Artificial; identical to SEQ ID NO: 352799
  Synthetic oligonucleotide

SEQ ID NO: 558901 - DNA, 58 bp, Artificial; identical to SEQ ID NO: 352801
  Synthetic oligonucleotide

SEQ ID NO: 558902 - DNA, 52 bp, Artificial; identical to SEQ ID NO: 352802
  Synthetic oligonucleotide

SEQ ID NO: 558903 - DNA, 55 bp, Artificial; identical to SEQ ID NO: 352803
  Synthetic oligonucleotide

SEQ ID NO: 558904 - DNA, 60 bp, Artificial; identical to SEQ ID NO: 352804
  Synthetic oligonucleotide

SEQ ID NO: 558905 - DNA, 54 bp, Artificial; identical to SEQ ID NO: 352805
  Synthetic oligonucleotide

SEQ ID NO: 558906 - DNA, 56 bp, Artificial; identical to SEQ ID NO: 352809
  Synthetic oligonucleotide

SEQ ID NO: 558907 - DNA, 53 bp, Artificial; identical to SEQ ID NO: 352814
  Synthetic oligonucleotide

SEQ ID NO: 558908 - DNA, 55 bp, Artificial; identical to SEQ ID NO: 352827
  Synthetic oligonucleotide

SEQ ID NO: 558909 - DNA, 57 bp, Artificial; identical to SEQ ID NO: 16552
  Synthetic oligonucleotide

SEQ ID NO: 558910 - DNA, 60 bp, Artificial; identical to SEQ ID NO: 352828
  Synthetic oligonucleotide

SEQ ID NO: 558911 - DNA, 54 bp, Artificial; identical to SEQ ID NO: 352831
  Synthetic oligonucleotide

SEQ ID NO: 558912 - DNA, 55 bp, Artificial; identical to SEQ ID NO: 352832
  Synthetic oligonucleotide

SEQ ID NO: 558913 - DNA, 60 bp, Artificial; identical to SEQ ID NO: 352833
  Synthetic oligonucleotide

SEQ ID NO: 558914 - DNA, 56 bp, Artificial; identical to SEQ ID NO: 352834
  Synthetic oligonucleotide

SEQ ID NO: 558915 - DNA, 54 bp, Artificial; identical to SEQ ID NO: 352835
  Synthetic oligonucleotide

SEQ ID NO: 558916 - DNA, 60 bp, Artificial; identical to SEQ ID NO: 352836
  Synthetic oligonucleotide

SEQ ID NO: 558917 - DNA, 60 bp, Artificial; identical to SEQ ID NO: 352838
  Synthetic oligonucleotide

SEQ ID NO: 558918 - DNA, 60 bp, Artificial; identical to SEQ ID NO: 352840
  Synthetic oligonucleotide

SEQ ID NO: 558919 - DNA, 55 bp, Artificial; identical to SEQ ID NO: 352843
  Synthetic oligonucleotide

SEQ ID NO: 558920 - DNA, 53 bp, Artificial; identical to SEQ ID NO: 20276
  Synthetic oligonucleotide

SEQ ID NO: 558921 - DNA, 55 bp, Artificial; identical to SEQ ID NO: 352850
  Synthetic oligonucleotide

SEQ ID NO: 558922 - DNA, 55 bp, Artificial; identical to SEQ ID NO: 7093
  Synthetic oligonucleotide

SEQ ID NO: 558923 - DNA, 60 bp, Artificial; identical to SEQ ID NO: 352851
  Synthetic oligonucleotide

SEQ ID NO: 558924 - DNA, 55 bp, Artificial; identical to SEQ ID NO: 352852
  Synthetic oligonucleotide

SEQ ID NO: 558925 - DNA, 60 bp, Artificial; identical to SEQ ID NO: 352855
  Synthetic oligonucleotide

SEQ ID NO: 558926 - DNA, 58 bp, Artificial; identical to SEQ ID NO: 352857
  Synthetic oligonucleotide

SEQ ID NO: 558927 - DNA, 59 bp, Artificial; identical to SEQ ID NO: 352859
  Synthetic oligonucleotide

SEQ ID NO: 558928 - DNA, 55 bp, Artificial; identical to SEQ ID NO: 352862
  Synthetic oligonucleotide

SEQ ID NO: 558929 - DNA, 59 bp, Artificial; identical to SEQ ID NO: 352866
  Synthetic oligonucleotide

SEQ ID NO: 558930 - DNA, 60 bp, Artificial; identical to SEQ ID NO: 352868
  Synthetic oligonucleotide

SEQ ID NO: 558931 - DNA, 58 bp, Artificial; identical to SEQ ID NO: 352869
  Synthetic oligonucleotide

SEQ ID NO: 558932 - DNA, 55 bp, Artificial; identical to SEQ ID NO: 352875
  Synthetic oligonucleotide

SEQ ID NO: 558933 - DNA, 56 bp, Artificial; identical to SEQ ID NO: 6532
  Synthetic oligonucleotide

SEQ ID NO: 558934 - DNA, 60 bp, Artificial; identical to SEQ ID NO: 352878
  Synthetic oligonucleotide

SEQ ID NO: 558935 - DNA, 55 bp, Artificial; identical to SEQ ID NO: 352879
  Synthetic oligonucleotide

SEQ ID NO: 558936 - DNA, 60 bp, Artificial; identical to SEQ ID NO: 352881
  Synthetic oligonucleotide

SEQ ID NO: 558937 - DNA, 52 bp, Artificial; identical to SEQ ID NO: 352883
  Synthetic oligonucleotide

SEQ ID NO: 558938 - DNA, 55 bp, Artificial; identical to SEQ ID NO: 352885
  Synthetic oligonucleotide

SEQ ID NO: 558939 - DNA, 51 bp, Artificial; identical to SEQ ID NO: 352888
  Synthetic oligonucleotide

SEQ ID NO: 558940 - DNA, 55 bp, Artificial; identical to SEQ ID NO: 352890
  Synthetic oligonucleotide

SEQ ID NO: 558941 - DNA, 60 bp, Artificial; identical to SEQ ID NO: 352891
  Synthetic oligonucleotide

SEQ ID NO: 558942 - DNA, 52 bp, Artificial; identical to SEQ ID NO: 352894
  Synthetic oligonucleotide

SEQ ID NO: 558943 - DNA, 60 bp, Artificial; identical to SEQ ID NO: 352895
  Synthetic oligonucleotide

SEQ ID NO: 558944 - DNA, 60 bp, Artificial; identical to SEQ ID NO: 352900
  Synthetic oligonucleotide

SEQ ID NO: 558945 - DNA, 60 bp, Artificial; identical to SEQ ID NO: 352901
  Synthetic oligonucleotide

SEQ ID NO: 558946 - DNA, 60 bp, Artificial; identical to SEQ ID NO: 352904
  Synthetic oligonucleotide

SEQ ID NO: 558947 - DNA, 55 bp, Artificial; identical to SEQ ID NO: 352905
  Synthetic oligonucleotide

SEQ ID NO: 558948 - DNA, 55 bp, Artificial; identical to SEQ ID NO: 352907
  Synthetic oligonucleotide

SEQ ID NO: 558949 - DNA, 57 bp, Artificial; identical to SEQ ID NO: 352908
  Synthetic oligonucleotide

SEQ ID NO: 558950 - DNA, 54 bp, Artificial; identical to SEQ ID NO: 352910
  Synthetic oligonucleotide

SEQ ID NO: 558951 - DNA, 60 bp, Artificial; identical to SEQ ID NO: 352912
  Synthetic oligonucleotide

SEQ ID NO: 558952 - DNA, 60 bp, Artificial; identical to SEQ ID NO: 10256
  Synthetic oligonucleotide

SEQ ID NO: 558953 - DNA, 60 bp, Artificial; identical to SEQ ID NO: 352916
  Synthetic oligonucleotide

SEQ ID NO: 558954 - DNA, 55 bp, Artificial; identical to SEQ ID NO: 352919
  Synthetic oligonucleotide

SEQ ID NO: 558955 - DNA, 52 bp, Artificial; identical to SEQ ID NO: 352920
  Synthetic oligonucleotide

SEQ ID NO: 558956 - DNA, 55 bp, Artificial; identical to SEQ ID NO: 352921
  Synthetic oligonucleotide

SEQ ID NO: 558957 - DNA, 59 bp, Artificial; identical to SEQ ID NO: 352922
  Synthetic oligonucleotide

SEQ ID NO: 558958 - DNA, 51 bp, Artificial; identical to SEQ ID NO: 352925
  Synthetic oligonucleotide

SEQ ID NO: 558959 - DNA, 60 bp, Artificial; identical to SEQ ID NO: 352930
  Synthetic oligonucleotide

SEQ ID NO: 558960 - DNA, 55 bp, Artificial; identical to SEQ ID NO: 352932
  Synthetic oligonucleotide

SEQ ID NO: 558961 - DNA, 60 bp, Artificial; identical to SEQ ID NO: 352934
  Synthetic oligonucleotide

SEQ ID NO: 558962 - DNA, 55 bp, Artificial; identical to SEQ ID NO: 352936
  Synthetic oligonucleotide

SEQ ID NO: 558963 - DNA, 53 bp, Artificial; identical to SEQ ID NO: 352939
  Synthetic oligonucleotide

SEQ ID NO: 558964 - DNA, 60 bp, Artificial; identical to SEQ ID NO: 352942
  Synthetic oligonucleotide

SEQ ID NO: 558965 - DNA, 60 bp, Artificial; identical to SEQ ID NO: 352943
  Synthetic oligonucleotide

SEQ ID NO: 558966 - DNA, 59 bp, Artificial; identical to SEQ ID NO: 352947
  Synthetic oligonucleotide

SEQ ID NO: 558967 - DNA, 55 bp, Artificial; identical to SEQ ID NO: 352949
  Synthetic oligonucleotide

SEQ ID NO: 558968 - DNA, 60 bp, Artificial; identical to SEQ ID NO: 352954
  Synthetic oligonucleotide

SEQ ID NO: 558969 - DNA, 60 bp, Artificial; identical to SEQ ID NO: 352955
  Synthetic oligonucleotide

SEQ ID NO: 558970 - DNA, 59 bp, Artificial; identical to SEQ ID NO: 352960
  Synthetic oligonucleotide

SEQ ID NO: 558971 - DNA, 55 bp, Artificial; identical to SEQ ID NO: 352965
  Synthetic oligonucleotide

SEQ ID NO: 558972 - DNA, 55 bp, Artificial; identical to SEQ ID NO: 352967
  Synthetic oligonucleotide

SEQ ID NO: 558973 - DNA, 60 bp, Artificial; identical to SEQ ID NO: 352970
  Synthetic oligonucleotide

SEQ ID NO: 558974 - DNA, 55 bp, Artificial; identical to SEQ ID NO: 352974
  Synthetic oligonucleotide

SEQ ID NO: 558975 - DNA, 55 bp, Artificial; identical to SEQ ID NO: 352976
  Synthetic oligonucleotide

SEQ ID NO: 558976 - DNA, 52 bp, Artificial; identical to SEQ ID NO: 352977
  Synthetic oligonucleotide

SEQ ID NO: 558977 - DNA, 60 bp, Artificial; identical to SEQ ID NO: 352980
  Synthetic oligonucleotide

SEQ ID NO: 558978 - DNA, 55 bp, Artificial; identical to SEQ ID NO: 352981
  Synthetic oligonucleotide

SEQ ID NO: 558979 - DNA, 50 bp, Artificial; identical to SEQ ID NO: 352982
  Synthetic oligonucleotide

SEQ ID NO: 558980 - DNA, 60 bp, Artificial; identical to SEQ ID NO: 352984
  Synthetic oligonucleotide

SEQ ID NO: 558981 - DNA, 55 bp, Artificial; identical to SEQ ID NO: 352987
  Synthetic oligonucleotide

SEQ ID NO: 558982 - DNA, 53 bp, Artificial; identical to SEQ ID NO: 352990
  Synthetic oligonucleotide

SEQ ID NO: 558983 - DNA, 55 bp, Artificial; identical to SEQ ID NO: 352991
  Synthetic oligonucleotide

SEQ ID NO: 558984 - DNA, 60 bp, Artificial; identical to SEQ ID NO: 352992
  Synthetic oligonucleotide

SEQ ID NO: 558985 - DNA, 55 bp, Artificial; identical to SEQ ID NO: 352996
  Synthetic oligonucleotide

SEQ ID NO: 558986 - DNA, 58 bp, Artificial; identical to SEQ ID NO: 352999
  Synthetic oligonucleotide

SEQ ID NO: 558987 - DNA, 60 bp, Artificial; identical to SEQ ID NO: 353000
  Synthetic oligonucleotide

SEQ ID NO: 558988 - DNA, 56 bp, Artificial; identical to SEQ ID NO: 353003
  Synthetic oligonucleotide

SEQ ID NO: 558989 - DNA, 50 bp, Artificial; identical to SEQ ID NO: 353004
  Synthetic oligonucleotide

SEQ ID NO: 558990 - DNA, 59 bp, Artificial; identical to SEQ ID NO: 353006
  Synthetic oligonucleotide

SEQ ID NO: 558991 - DNA, 54 bp, Artificial; identical to SEQ ID NO: 353009
  Synthetic oligonucleotide

SEQ ID NO: 558992 - DNA, 58 bp, Artificial; identical to SEQ ID NO: 353011
  Synthetic oligonucleotide

SEQ ID NO: 558993 - DNA, 57 bp, Artificial; identical to SEQ ID NO: 353017
  Synthetic oligonucleotide

SEQ ID NO: 558994 - DNA, 60 bp, Artificial; identical to SEQ ID NO: 353021
  Synthetic oligonucleotide

SEQ ID NO: 558995 - DNA, 58 bp, Artificial; identical to SEQ ID NO: 353024
  Synthetic oligonucleotide

SEQ ID NO: 558996 - DNA, 51 bp, Artificial; identical to SEQ ID NO: 353029
  Synthetic oligonucleotide

SEQ ID NO: 558997 - DNA, 60 bp, Artificial; identical to SEQ ID NO: 353030
  Synthetic oligonucleotide

SEQ ID NO: 558998 - DNA, 55 bp, Artificial; identical to SEQ ID NO: 353032
  Synthetic oligonucleotide

SEQ ID NO: 558999 - DNA, 57 bp, Artificial; identical to SEQ ID NO: 353038
  Synthetic oligonucleotide

SEQ ID NO: 559000 - DNA, 58 bp, Artificial; identical to SEQ ID NO: 18160
  Synthetic oligonucleotide

SEQ ID NO: 559001 - DNA, 60 bp, Artificial; identical to SEQ ID NO: 353042
  Synthetic oligonucleotide

SEQ ID NO: 559002 - DNA, 59 bp, Artificial; identical to SEQ ID NO: 353044
  Synthetic oligonucleotide

SEQ ID NO: 559003 - DNA, 60 bp, Artificial; identical to SEQ ID NO: 353045
  Synthetic oligonucleotide

SEQ ID NO: 559004 - DNA, 57 bp, Artificial; identical to SEQ ID NO: 353046
  Synthetic oligonucleotide

SEQ ID NO: 559005 - DNA, 55 bp, Artificial; identical to SEQ ID NO: 353050
  Synthetic oligonucleotide

SEQ ID NO: 559006 - DNA, 56 bp, Artificial; identical to SEQ ID NO: 353055
  Synthetic oligonucleotide

SEQ ID NO: 559007 - DNA, 60 bp, Artificial; identical to SEQ ID NO: 353061
  Synthetic oligonucleotide

SEQ ID NO: 559008 - DNA, 58 bp, Artificial; identical to SEQ ID NO: 353062
  Synthetic oligonucleotide

SEQ ID NO: 559009 - DNA, 60 bp, Artificial; identical to SEQ ID NO: 353063
  Synthetic oligonucleotide

SEQ ID NO: 559010 - DNA, 58 bp, Artificial; identical to SEQ ID NO: 353069
  Synthetic oligonucleotide

SEQ ID NO: 559011 - DNA, 60 bp, Artificial; identical to SEQ ID NO: 353072
  Synthetic oligonucleotide

SEQ ID NO: 559012 - DNA, 59 bp, Artificial; identical to SEQ ID NO: 353078
  Synthetic oligonucleotide

SEQ ID NO: 559013 - DNA, 60 bp, Artificial; identical to SEQ ID NO: 353079
  Synthetic oligonucleotide

SEQ ID NO: 559014 - DNA, 50 bp, Artificial; identical to SEQ ID NO: 353082
  Synthetic oligonucleotide

SEQ ID NO: 559015 - DNA, 60 bp, Artificial; identical to SEQ ID NO: 353085
  Synthetic oligonucleotide

SEQ ID NO: 559016 - DNA, 55 bp, Artificial; identical to SEQ ID NO: 353089
  Synthetic oligonucleotide

SEQ ID NO: 559017 - DNA, 51 bp, Artificial; identical to SEQ ID NO: 8439
  Synthetic oligonucleotide

SEQ ID NO: 559018 - DNA, 51 bp, Artificial; identical to SEQ ID NO: 353092
  Synthetic oligonucleotide

SEQ ID NO: 559019 - DNA, 60 bp, Artificial; identical to SEQ ID NO: 353094
  Synthetic oligonucleotide

SEQ ID NO: 559020 - DNA, 55 bp, Artificial; identical to SEQ ID NO: 353095
  Synthetic oligonucleotide

SEQ ID NO: 559021 - DNA, 60 bp, Artificial; identical to SEQ ID NO: 353097
  Synthetic oligonucleotide

SEQ ID NO: 559022 - DNA, 56 bp, Artificial; identical to SEQ ID NO: 353099
  Synthetic oligonucleotide

SEQ ID NO: 559023 - DNA, 55 bp, Artificial; identical to SEQ ID NO: 353100
  Synthetic oligonucleotide

SEQ ID NO: 559024 - DNA, 55 bp, Artificial; identical to SEQ ID NO: 353101
  Synthetic oligonucleotide

SEQ ID NO: 559025 - DNA, 55 bp, Artificial; identical to SEQ ID NO: 353102
  Synthetic oligonucleotide

SEQ ID NO: 559026 - DNA, 53 bp, Artificial; identical to SEQ ID NO: 15985
  Synthetic oligonucleotide

SEQ ID NO: 559027 - DNA, 60 bp, Artificial; identical to SEQ ID NO: 353104
  Synthetic oligonucleotide

SEQ ID NO: 559028 - DNA, 60 bp, Artificial; identical to SEQ ID NO: 353107
  Synthetic oligonucleotide

SEQ ID NO: 559029 - DNA, 58 bp, Artificial; identical to SEQ ID NO: 18482
  Synthetic oligonucleotide

SEQ ID NO: 559030 - DNA, 55 bp, Artificial; identical to SEQ ID NO: 353111
  Synthetic oligonucleotide

SEQ ID NO: 559031 - DNA, 60 bp, Artificial; identical to SEQ ID NO: 353113
  Synthetic oligonucleotide

SEQ ID NO: 559032 - DNA, 59 bp, Artificial; identical to SEQ ID NO: 353114
  Synthetic oligonucleotide

SEQ ID NO: 559033 - DNA, 55 bp, Artificial; identical to SEQ ID NO: 353115
  Synthetic oligonucleotide

SEQ ID NO: 559034 - DNA, 59 bp, Artificial; identical to SEQ ID NO: 353116
  Synthetic oligonucleotide

SEQ ID NO: 559035 - DNA, 58 bp, Artificial; identical to SEQ ID NO: 353119
  Synthetic oligonucleotide

SEQ ID NO: 559036 - DNA, 50 bp, Artificial; identical to SEQ ID NO: 353121
  Synthetic oligonucleotide

SEQ ID NO: 559037 - DNA, 60 bp, Artificial; identical to SEQ ID NO: 353122
  Synthetic oligonucleotide

SEQ ID NO: 559038 - DNA, 56 bp, Artificial; identical to SEQ ID NO: 353124
  Synthetic oligonucleotide

SEQ ID NO: 559039 - DNA, 55 bp, Artificial; identical to SEQ ID NO: 353125
  Synthetic oligonucleotide

SEQ ID NO: 559040 - DNA, 55 bp, Artificial; identical to SEQ ID NO: 353126
  Synthetic oligonucleotide

SEQ ID NO: 559041 - DNA, 56 bp, Artificial; identical to SEQ ID NO: 353129
  Synthetic oligonucleotide

SEQ ID NO: 559042 - DNA, 60 bp, Artificial; identical to SEQ ID NO: 353133
  Synthetic oligonucleotide

SEQ ID NO: 559043 - DNA, 55 bp, Artificial; identical to SEQ ID NO: 353137
  Synthetic oligonucleotide

SEQ ID NO: 559044 - DNA, 55 bp, Artificial; identical to SEQ ID NO: 353138
  Synthetic oligonucleotide

SEQ ID NO: 559045 - DNA, 60 bp, Artificial; identical to SEQ ID NO: 353141
  Synthetic oligonucleotide

SEQ ID NO: 559046 - DNA, 57 bp, Artificial; identical to SEQ ID NO: 353142
  Synthetic oligonucleotide

SEQ ID NO: 559047 - DNA, 60 bp, Artificial; identical to SEQ ID NO: 353143
  Synthetic oligonucleotide

SEQ ID NO: 559048 - DNA, 59 bp, Artificial; identical to SEQ ID NO: 353145
  Synthetic oligonucleotide

SEQ ID NO: 559049 - DNA, 60 bp, Artificial; identical to SEQ ID NO: 353149
  Synthetic oligonucleotide

SEQ ID NO: 559050 - DNA, 60 bp, Artificial; identical to SEQ ID NO: 353153
  Synthetic oligonucleotide

SEQ ID NO: 559051 - DNA, 55 bp, Artificial; identical to SEQ ID NO: 353154
  Synthetic oligonucleotide

SEQ ID NO: 559052 - DNA, 51 bp, Artificial; identical to SEQ ID NO: 353155
  Synthetic oligonucleotide

SEQ ID NO: 559053 - DNA, 60 bp, Artificial; identical to SEQ ID NO: 353156
  Synthetic oligonucleotide

SEQ ID NO: 559054 - DNA, 58 bp, Artificial; identical to SEQ ID NO: 353158
  Synthetic oligonucleotide

SEQ ID NO: 559055 - DNA, 59 bp, Artificial; identical to SEQ ID NO: 353160
  Synthetic oligonucleotide

SEQ ID NO: 559056 - DNA, 51 bp, Artificial; identical to SEQ ID NO: 353164
  Synthetic oligonucleotide

SEQ ID NO: 559057 - DNA, 57 bp, Artificial; identical to SEQ ID NO: 353168
  Synthetic oligonucleotide

SEQ ID NO: 559058 - DNA, 60 bp, Artificial; identical to SEQ ID NO: 353169
  Synthetic oligonucleotide

SEQ ID NO: 559059 - DNA, 56 bp, Artificial; identical to SEQ ID NO: 11699
  Synthetic oligonucleotide

SEQ ID NO: 559060 - DNA, 53 bp, Artificial; identical to SEQ ID NO: 353177
  Synthetic oligonucleotide

SEQ ID NO: 559061 - DNA, 60 bp, Artificial; identical to SEQ ID NO: 353178
  Synthetic oligonucleotide

SEQ ID NO: 559062 - DNA, 60 bp, Artificial; identical to SEQ ID NO: 353179
  Synthetic oligonucleotide

SEQ ID NO: 559063 - DNA, 60 bp, Artificial; identical to SEQ ID NO: 353180
  Synthetic oligonucleotide

SEQ ID NO: 559064 - DNA, 57 bp, Artificial; identical to SEQ ID NO: 353181
  Synthetic oligonucleotide

SEQ ID NO: 559065 - DNA, 59 bp, Artificial; identical to SEQ ID NO: 353182
  Synthetic oligonucleotide

SEQ ID NO: 559066 - DNA, 60 bp, Artificial; identical to SEQ ID NO: 353183
  Synthetic oligonucleotide

SEQ ID NO: 559067 - DNA, 58 bp, Artificial; identical to SEQ ID NO: 353184
  Synthetic oligonucleotide

SEQ ID NO: 559068 - DNA, 55 bp, Artificial; identical to SEQ ID NO: 353196
  Synthetic oligonucleotide

SEQ ID NO: 559069 - DNA, 50 bp, Artificial; identical to SEQ ID NO: 353199
  Synthetic oligonucleotide

SEQ ID NO: 559070 - DNA, 60 bp, Artificial; identical to SEQ ID NO: 353200
  Synthetic oligonucleotide

SEQ ID NO: 559071 - DNA, 53 bp, Artificial; identical to SEQ ID NO: 353208
  Synthetic oligonucleotide

SEQ ID NO: 559072 - DNA, 51 bp, Artificial; identical to SEQ ID NO: 353209
  Synthetic oligonucleotide

SEQ ID NO: 559073 - DNA, 55 bp, Artificial; identical to SEQ ID NO: 353211
  Synthetic oligonucleotide

SEQ ID NO: 559074 - DNA, 54 bp, Artificial; identical to SEQ ID NO: 353214
  Synthetic oligonucleotide

SEQ ID NO: 559075 - DNA, 50 bp, Artificial; identical to SEQ ID NO: 353216
  Synthetic oligonucleotide

SEQ ID NO: 559076 - DNA, 55 bp, Artificial; identical to SEQ ID NO: 353219
  Synthetic oligonucleotide

SEQ ID NO: 559077 - DNA, 60 bp, Artificial; identical to SEQ ID NO: 353220
  Synthetic oligonucleotide

SEQ ID NO: 559078 - DNA, 55 bp, Artificial; identical to SEQ ID NO: 353221
  Synthetic oligonucleotide

SEQ ID NO: 559079 - DNA, 60 bp, Artificial; identical to SEQ ID NO: 353224
  Synthetic oligonucleotide

SEQ ID NO: 559080 - DNA, 58 bp, Artificial; identical to SEQ ID NO: 353225
  Synthetic oligonucleotide

SEQ ID NO: 559081 - DNA, 57 bp, Artificial; identical to SEQ ID NO: 353227
  Synthetic oligonucleotide

SEQ ID NO: 559082 - DNA, 55 bp, Artificial; identical to SEQ ID NO: 20063
  Synthetic oligonucleotide

SEQ ID NO: 559083 - DNA, 55 bp, Artificial; identical to SEQ ID NO: 353231
  Synthetic oligonucleotide

SEQ ID NO: 559084 - DNA, 60 bp, Artificial; identical to SEQ ID NO: 353232
  Synthetic oligonucleotide

SEQ ID NO: 559085 - DNA, 57 bp, Artificial; identical to SEQ ID NO: 353233
  Synthetic oligonucleotide

SEQ ID NO: 559086 - DNA, 55 bp, Artificial; identical to SEQ ID NO: 353234
  Synthetic oligonucleotide

SEQ ID NO: 559087 - DNA, 53 bp, Artificial; identical to SEQ ID NO: 353236
  Synthetic oligonucleotide

SEQ ID NO: 559088 - DNA, 55 bp, Artificial; identical to SEQ ID NO: 353240
  Synthetic oligonucleotide

SEQ ID NO: 559089 - DNA, 60 bp, Artificial; identical to SEQ ID NO: 353241
  Synthetic oligonucleotide

SEQ ID NO: 559090 - DNA, 60 bp, Artificial; identical to SEQ ID NO: 353242
  Synthetic oligonucleotide

SEQ ID NO: 559091 - DNA, 59 bp, Artificial; identical to SEQ ID NO: 353243
  Synthetic oligonucleotide

SEQ ID NO: 559092 - DNA, 51 bp, Artificial; identical to SEQ ID NO: 353244
  Synthetic oligonucleotide

SEQ ID NO: 559093 - DNA, 55 bp, Artificial; identical to SEQ ID NO: 353247
  Synthetic oligonucleotide

SEQ ID NO: 559094 - DNA, 55 bp, Artificial; identical to SEQ ID NO: 353248
  Synthetic oligonucleotide

SEQ ID NO: 559095 - DNA, 60 bp, Artificial; identical to SEQ ID NO: 353249
  Synthetic oligonucleotide

SEQ ID NO: 559096 - DNA, 50 bp, Artificial; identical to SEQ ID NO: 353252
  Synthetic oligonucleotide

SEQ ID NO: 559097 - DNA, 53 bp, Artificial; identical to SEQ ID NO: 353253
  Synthetic oligonucleotide

SEQ ID NO: 559098 - DNA, 60 bp, Artificial; identical to SEQ ID NO: 353254
  Synthetic oligonucleotide

SEQ ID NO: 559099 - DNA, 59 bp, Artificial; identical to SEQ ID NO: 353255
  Synthetic oligonucleotide

SEQ ID NO: 559100 - DNA, 58 bp, Artificial; identical to SEQ ID NO: 353257
  Synthetic oligonucleotide

SEQ ID NO: 559101 - DNA, 50 bp, Artificial; identical to SEQ ID NO: 353258
  Synthetic oligonucleotide

SEQ ID NO: 559102 - DNA, 51 bp, Artificial; identical to SEQ ID NO: 353260
  Synthetic oligonucleotide

SEQ ID NO: 559103 - DNA, 60 bp, Artificial; identical to SEQ ID NO: 353261
  Synthetic oligonucleotide

SEQ ID NO: 559104 - DNA, 56 bp, Artificial; identical to SEQ ID NO: 353262
  Synthetic oligonucleotide

SEQ ID NO: 559105 - DNA, 55 bp, Artificial; identical to SEQ ID NO: 353263
  Synthetic oligonucleotide

SEQ ID NO: 559106 - DNA, 55 bp, Artificial; identical to SEQ ID NO: 353264
  Synthetic oligonucleotide

SEQ ID NO: 559107 - DNA, 57 bp, Artificial; identical to SEQ ID NO: 353266
  Synthetic oligonucleotide

SEQ ID NO: 559108 - DNA, 54 bp, Artificial; identical to SEQ ID NO: 353270
  Synthetic oligonucleotide

SEQ ID NO: 559109 - DNA, 55 bp, Artificial; identical to SEQ ID NO: 353276
  Synthetic oligonucleotide

SEQ ID NO: 559110 - DNA, 58 bp, Artificial; identical to SEQ ID NO: 353278
  Synthetic oligonucleotide

SEQ ID NO: 559111 - DNA, 60 bp, Artificial; identical to SEQ ID NO: 353282
  Synthetic oligonucleotide

SEQ ID NO: 559112 - DNA, 52 bp, Artificial; identical to SEQ ID NO: 353285
  Synthetic oligonucleotide

SEQ ID NO: 559113 - DNA, 55 bp, Artificial; identical to SEQ ID NO: 353286
  Synthetic oligonucleotide

SEQ ID NO: 559114 - DNA, 55 bp, Artificial; identical to SEQ ID NO: 353287
  Synthetic oligonucleotide

SEQ ID NO: 559115 - DNA, 60 bp, Artificial; identical to SEQ ID NO: 353293
  Synthetic oligonucleotide

SEQ ID NO: 559116 - DNA, 60 bp, Artificial; identical to SEQ ID NO: 353294
  Synthetic oligonucleotide

SEQ ID NO: 559117 - DNA, 55 bp, Artificial; identical to SEQ ID NO: 353297
  Synthetic oligonucleotide

SEQ ID NO: 559118 - DNA, 60 bp, Artificial; identical to SEQ ID NO: 353299
  Synthetic oligonucleotide

SEQ ID NO: 559119 - DNA, 55 bp, Artificial; identical to SEQ ID NO: 353302
  Synthetic oligonucleotide

SEQ ID NO: 559120 - DNA, 55 bp, Artificial; identical to SEQ ID NO: 353304
  Synthetic oligonucleotide

SEQ ID NO: 559121 - DNA, 57 bp, Artificial; identical to SEQ ID NO: 353305
  Synthetic oligonucleotide

SEQ ID NO: 559122 - DNA, 58 bp, Artificial; identical to SEQ ID NO: 353306
  Synthetic oligonucleotide

SEQ ID NO: 559123 - DNA, 56 bp, Artificial; identical to SEQ ID NO: 353307
  Synthetic oligonucleotide

SEQ ID NO: 559124 - DNA, 60 bp, Artificial; identical to SEQ ID NO: 14047
  Synthetic oligonucleotide

SEQ ID NO: 559125 - DNA, 58 bp, Artificial; identical to SEQ ID NO: 353314
  Synthetic oligonucleotide

SEQ ID NO: 559126 - DNA, 58 bp, Artificial; identical to SEQ ID NO: 353315
  Synthetic oligonucleotide

SEQ ID NO: 559127 - DNA, 60 bp, Artificial; identical to SEQ ID NO: 14831
  Synthetic oligonucleotide

SEQ ID NO: 559128 - DNA, 53 bp, Artificial; identical to SEQ ID NO: 353321
  Synthetic oligonucleotide

SEQ ID NO: 559129 - DNA, 59 bp, Artificial; identical to SEQ ID NO: 353324
  Synthetic oligonucleotide

SEQ ID NO: 559130 - DNA, 52 bp, Artificial; identical to SEQ ID NO: 353326
  Synthetic oligonucleotide

SEQ ID NO: 559131 - DNA, 56 bp, Artificial; identical to SEQ ID NO: 353328
  Synthetic oligonucleotide

SEQ ID NO: 559132 - DNA, 55 bp, Artificial; identical to SEQ ID NO: 353329
  Synthetic oligonucleotide

SEQ ID NO: 559133 - DNA, 60 bp, Artificial; identical to SEQ ID NO: 353333
  Synthetic oligonucleotide

SEQ ID NO: 559134 - DNA, 60 bp, Artificial; identical to SEQ ID NO: 353340
  Synthetic oligonucleotide

SEQ ID NO: 559135 - DNA, 55 bp, Artificial; identical to SEQ ID NO: 353341
  Synthetic oligonucleotide

SEQ ID NO: 559136 - DNA, 60 bp, Artificial; identical to SEQ ID NO: 353342
  Synthetic oligonucleotide

SEQ ID NO: 559137 - DNA, 56 bp, Artificial; identical to SEQ ID NO: 353343
  Synthetic oligonucleotide

SEQ ID NO: 559138 - DNA, 55 bp, Artificial; identical to SEQ ID NO: 353344
  Synthetic oligonucleotide

SEQ ID NO: 559139 - DNA, 56 bp, Artificial; identical to SEQ ID NO: 353345
  Synthetic oligonucleotide

SEQ ID NO: 559140 - DNA, 56 bp, Artificial; identical to SEQ ID NO: 353346
  Synthetic oligonucleotide

SEQ ID NO: 559141 - DNA, 56 bp, Artificial; identical to SEQ ID NO: 353350
  Synthetic oligonucleotide

SEQ ID NO: 559142 - DNA, 60 bp, Artificial; identical to SEQ ID NO: 353352
  Synthetic oligonucleotide

SEQ ID NO: 559143 - DNA, 60 bp, Artificial; identical to SEQ ID NO: 353353
  Synthetic oligonucleotide

SEQ ID NO: 559144 - DNA, 55 bp, Artificial; identical to SEQ ID NO: 353354
  Synthetic oligonucleotide

SEQ ID NO: 559145 - DNA, 55 bp, Artificial; identical to SEQ ID NO: 353361
  Synthetic oligonucleotide

SEQ ID NO: 559146 - DNA, 55 bp, Artificial; identical to SEQ ID NO: 353367
  Synthetic oligonucleotide

SEQ ID NO: 559147 - DNA, 60 bp, Artificial; identical to SEQ ID NO: 353369
  Synthetic oligonucleotide

SEQ ID NO: 559148 - DNA, 53 bp, Artificial; identical to SEQ ID NO: 353373
  Synthetic oligonucleotide

SEQ ID NO: 559149 - DNA, 57 bp, Artificial; identical to SEQ ID NO: 353378
  Synthetic oligonucleotide

SEQ ID NO: 559150 - DNA, 57 bp, Artificial; identical to SEQ ID NO: 353379
  Synthetic oligonucleotide

SEQ ID NO: 559151 - DNA, 60 bp, Artificial; identical to SEQ ID NO: 353380
  Synthetic oligonucleotide

SEQ ID NO: 559152 - DNA, 60 bp, Artificial; identical to SEQ ID NO: 353381
  Synthetic oligonucleotide

SEQ ID NO: 559153 - DNA, 59 bp, Artificial; identical to SEQ ID NO: 353382
  Synthetic oligonucleotide

SEQ ID NO: 559154 - DNA, 57 bp, Artificial; identical to SEQ ID NO: 353385
  Synthetic oligonucleotide

SEQ ID NO: 559155 - DNA, 50 bp, Artificial; identical to SEQ ID NO: 353387
  Synthetic oligonucleotide

SEQ ID NO: 559156 - DNA, 53 bp, Artificial; identical to SEQ ID NO: 353389
  Synthetic oligonucleotide

SEQ ID NO: 559157 - DNA, 52 bp, Artificial; identical to SEQ ID NO: 353390
  Synthetic oligonucleotide

SEQ ID NO: 559158 - DNA, 53 bp, Artificial; identical to SEQ ID NO: 353395
  Synthetic oligonucleotide

SEQ ID NO: 559159 - DNA, 54 bp, Artificial; identical to SEQ ID NO: 353396
  Synthetic oligonucleotide

SEQ ID NO: 559160 - DNA, 55 bp, Artificial; identical to SEQ ID NO: 353398
  Synthetic oligonucleotide

SEQ ID NO: 559161 - DNA, 54 bp, Artificial; identical to SEQ ID NO: 353400
  Synthetic oligonucleotide

SEQ ID NO: 559162 - DNA, 55 bp, Artificial; identical to SEQ ID NO: 353403
  Synthetic oligonucleotide

SEQ ID NO: 559163 - DNA, 55 bp, Artificial; identical to SEQ ID NO: 353408
  Synthetic oligonucleotide

SEQ ID NO: 559164 - DNA, 52 bp, Artificial; identical to SEQ ID NO: 353409
  Synthetic oligonucleotide

SEQ ID NO: 559165 - DNA, 53 bp, Artificial; identical to SEQ ID NO: 353410
  Synthetic oligonucleotide

SEQ ID NO: 559166 - DNA, 54 bp, Artificial; identical to SEQ ID NO: 353413
  Synthetic oligonucleotide

SEQ ID NO: 559167 - DNA, 55 bp, Artificial; identical to SEQ ID NO: 353414
  Synthetic oligonucleotide

SEQ ID NO: 559168 - DNA, 51 bp, Artificial; identical to SEQ ID NO: 353416
  Synthetic oligonucleotide

SEQ ID NO: 559169 - DNA, 56 bp, Artificial; identical to SEQ ID NO: 353417
  Synthetic oligonucleotide

SEQ ID NO: 559170 - DNA, 55 bp, Artificial; identical to SEQ ID NO: 353419
  Synthetic oligonucleotide

SEQ ID NO: 559171 - DNA, 50 bp, Artificial; identical to SEQ ID NO: 353420
  Synthetic oligonucleotide

SEQ ID NO: 559172 - DNA, 54 bp, Artificial; identical to SEQ ID NO: 353421
  Synthetic oligonucleotide

SEQ ID NO: 559173 - DNA, 58 bp, Artificial; identical to SEQ ID NO: 353422
  Synthetic oligonucleotide

SEQ ID NO: 559174 - DNA, 60 bp, Artificial; identical to SEQ ID NO: 56402
  Synthetic oligonucleotide

SEQ ID NO: 559175 - DNA, 60 bp, Artificial; identical to SEQ ID NO: 353424
  Synthetic oligonucleotide

SEQ ID NO: 559176 - DNA, 56 bp, Artificial; identical to SEQ ID NO: 353425
  Synthetic oligonucleotide

SEQ ID NO: 559177 - DNA, 58 bp, Artificial; identical to SEQ ID NO: 353427
  Synthetic oligonucleotide

SEQ ID NO: 559178 - DNA, 55 bp, Artificial; identical to SEQ ID NO: 353431
  Synthetic oligonucleotide

SEQ ID NO: 559179 - DNA, 60 bp, Artificial; identical to SEQ ID NO: 353435
  Synthetic oligonucleotide

SEQ ID NO: 559180 - DNA, 60 bp, Artificial; identical to SEQ ID NO: 353437
  Synthetic oligonucleotide

SEQ ID NO: 559181 - DNA, 55 bp, Artificial; identical to SEQ ID NO: 353438
  Synthetic oligonucleotide

SEQ ID NO: 559182 - DNA, 55 bp, Artificial; identical to SEQ ID NO: 353440
  Synthetic oligonucleotide

SEQ ID NO: 559183 - DNA, 60 bp, Artificial; identical to SEQ ID NO: 353441
  Synthetic oligonucleotide

SEQ ID NO: 559184 - DNA, 54 bp, Artificial; identical to SEQ ID NO: 353446
  Synthetic oligonucleotide

SEQ ID NO: 559185 - DNA, 58 bp, Artificial; identical to SEQ ID NO: 353447
  Synthetic oligonucleotide

SEQ ID NO: 559186 - DNA, 60 bp, Artificial; identical to SEQ ID NO: 353452
  Synthetic oligonucleotide

SEQ ID NO: 559187 - DNA, 59 bp, Artificial; identical to SEQ ID NO: 353457
  Synthetic oligonucleotide

SEQ ID NO: 559188 - DNA, 58 bp, Artificial; identical to SEQ ID NO: 353459
  Synthetic oligonucleotide

SEQ ID NO: 559189 - DNA, 59 bp, Artificial; identical to SEQ ID NO: 353464
  Synthetic oligonucleotide

SEQ ID NO: 559190 - DNA, 56 bp, Artificial; identical to SEQ ID NO: 353466
  Synthetic oligonucleotide

SEQ ID NO: 559191 - DNA, 59 bp, Artificial; identical to SEQ ID NO: 353467
  Synthetic oligonucleotide

SEQ ID NO: 559192 - DNA, 60 bp, Artificial; identical to SEQ ID NO: 11341
  Synthetic oligonucleotide

SEQ ID NO: 559193 - DNA, 58 bp, Artificial; identical to SEQ ID NO: 353470
  Synthetic oligonucleotide

SEQ ID NO: 559194 - DNA, 50 bp, Artificial; identical to SEQ ID NO: 353473
  Synthetic oligonucleotide

SEQ ID NO: 559195 - DNA, 55 bp, Artificial; identical to SEQ ID NO: 353475
  Synthetic oligonucleotide

SEQ ID NO: 559196 - DNA, 57 bp, Artificial; identical to SEQ ID NO: 353480
  Synthetic oligonucleotide

SEQ ID NO: 559197 - DNA, 55 bp, Artificial; identical to SEQ ID NO: 353482
  Synthetic oligonucleotide

SEQ ID NO: 559198 - DNA, 60 bp, Artificial; identical to SEQ ID NO: 353485
  Synthetic oligonucleotide

SEQ ID NO: 559199 - DNA, 50 bp, Artificial; identical to SEQ ID NO: 353486
  Synthetic oligonucleotide

SEQ ID NO: 559200 - DNA, 59 bp, Artificial; identical to SEQ ID NO: 353492
  Synthetic oligonucleotide

SEQ ID NO: 559201 - DNA, 59 bp, Artificial; identical to SEQ ID NO: 353494
  Synthetic oligonucleotide

SEQ ID NO: 559202 - DNA, 55 bp, Artificial; identical to SEQ ID NO: 353495
  Synthetic oligonucleotide

SEQ ID NO: 559203 - DNA, 59 bp, Artificial; identical to SEQ ID NO: 353498
  Synthetic oligonucleotide

SEQ ID NO: 559204 - DNA, 59 bp, Artificial; identical to SEQ ID NO: 353502
  Synthetic oligonucleotide

SEQ ID NO: 559205 - DNA, 57 bp, Artificial; identical to SEQ ID NO: 353504
  Synthetic oligonucleotide

SEQ ID NO: 559206 - DNA, 59 bp, Artificial; identical to SEQ ID NO: 353505
  Synthetic oligonucleotide

SEQ ID NO: 559207 - DNA, 60 bp, Artificial; identical to SEQ ID NO: 353506
  Synthetic oligonucleotide

SEQ ID NO: 559208 - DNA, 52 bp, Artificial; identical to SEQ ID NO: 353508
  Synthetic oligonucleotide

SEQ ID NO: 559209 - DNA, 60 bp, Artificial; identical to SEQ ID NO: 353510
  Synthetic oligonucleotide

SEQ ID NO: 559210 - DNA, 52 bp, Artificial; identical to SEQ ID NO: 353513
  Synthetic oligonucleotide

SEQ ID NO: 559211 - DNA, 55 bp, Artificial; identical to SEQ ID NO: 353514
  Synthetic oligonucleotide

SEQ ID NO: 559212 - DNA, 55 bp, Artificial; identical to SEQ ID NO: 353515
  Synthetic oligonucleotide

SEQ ID NO: 559213 - DNA, 60 bp, Artificial; identical to SEQ ID NO: 353516
  Synthetic oligonucleotide

SEQ ID NO: 559214 - DNA, 50 bp, Artificial; identical to SEQ ID NO: 353517
  Synthetic oligonucleotide

SEQ ID NO: 559215 - DNA, 55 bp, Artificial; identical to SEQ ID NO: 353519
  Synthetic oligonucleotide

SEQ ID NO: 559216 - DNA, 60 bp, Artificial; identical to SEQ ID NO: 353521
  Synthetic oligonucleotide

SEQ ID NO: 559217 - DNA, 60 bp, Artificial; identical to SEQ ID NO: 353524
  Synthetic oligonucleotide

SEQ ID NO: 559218 - DNA, 53 bp, Artificial; identical to SEQ ID NO: 353525
  Synthetic oligonucleotide

SEQ ID NO: 559219 - DNA, 60 bp, Artificial; identical to SEQ ID NO: 353526
  Synthetic oligonucleotide

SEQ ID NO: 559220 - DNA, 59 bp, Artificial; identical to SEQ ID NO: 353527
  Synthetic oligonucleotide

SEQ ID NO: 559221 - DNA, 58 bp, Artificial; identical to SEQ ID NO: 353533
  Synthetic oligonucleotide

SEQ ID NO: 559222 - DNA, 60 bp, Artificial; identical to SEQ ID NO: 353534
  Synthetic oligonucleotide

SEQ ID NO: 559223 - DNA, 55 bp, Artificial; identical to SEQ ID NO: 11686
  Synthetic oligonucleotide

SEQ ID NO: 559224 - DNA, 60 bp, Artificial; identical to SEQ ID NO: 353535
  Synthetic oligonucleotide

SEQ ID NO: 559225 - DNA, 57 bp, Artificial; identical to SEQ ID NO: 353539
  Synthetic oligonucleotide

SEQ ID NO: 559226 - DNA, 55 bp, Artificial; identical to SEQ ID NO: 353540
  Synthetic oligonucleotide

SEQ ID NO: 559227 - DNA, 55 bp, Artificial; identical to SEQ ID NO: 353541
  Synthetic oligonucleotide

SEQ ID NO: 559228 - DNA, 58 bp, Artificial; identical to SEQ ID NO: 353542
  Synthetic oligonucleotide

SEQ ID NO: 559229 - DNA, 60 bp, Artificial; identical to SEQ ID NO: 353543
  Synthetic oligonucleotide

SEQ ID NO: 559230 - DNA, 55 bp, Artificial; identical to SEQ ID NO: 353544
  Synthetic oligonucleotide

SEQ ID NO: 559231 - DNA, 55 bp, Artificial; identical to SEQ ID NO: 353545
  Synthetic oligonucleotide

SEQ ID NO: 559232 - DNA, 53 bp, Artificial; identical to SEQ ID NO: 353548
  Synthetic oligonucleotide

SEQ ID NO: 559233 - DNA, 52 bp, Artificial; identical to SEQ ID NO: 353551
  Synthetic oligonucleotide

SEQ ID NO: 559234 - DNA, 60 bp, Artificial; identical to SEQ ID NO: 353552
  Synthetic oligonucleotide

SEQ ID NO: 559235 - DNA, 57 bp, Artificial; identical to SEQ ID NO: 353553
  Synthetic oligonucleotide

SEQ ID NO: 559236 - DNA, 57 bp, Artificial; identical to SEQ ID NO: 353556
  Synthetic oligonucleotide

SEQ ID NO: 559237 - DNA, 50 bp, Artificial; identical to SEQ ID NO: 353558
  Synthetic oligonucleotide

SEQ ID NO: 559238 - DNA, 59 bp, Artificial; identical to SEQ ID NO: 353559
  Synthetic oligonucleotide

SEQ ID NO: 559239 - DNA, 60 bp, Artificial; identical to SEQ ID NO: 353560
  Synthetic oligonucleotide

SEQ ID NO: 559240 - DNA, 55 bp, Artificial; identical to SEQ ID NO: 353564
  Synthetic oligonucleotide

SEQ ID NO: 559241 - DNA, 51 bp, Artificial; identical to SEQ ID NO: 353569
  Synthetic oligonucleotide

SEQ ID NO: 559242 - DNA, 58 bp, Artificial; identical to SEQ ID NO: 353571
  Synthetic oligonucleotide

SEQ ID NO: 559243 - DNA, 53 bp, Artificial; identical to SEQ ID NO: 353572
  Synthetic oligonucleotide

SEQ ID NO: 559244 - DNA, 56 bp, Artificial; identical to SEQ ID NO: 353575
  Synthetic oligonucleotide

SEQ ID NO: 559245 - DNA, 55 bp, Artificial; identical to SEQ ID NO: 353577
  Synthetic oligonucleotide

SEQ ID NO: 559246 - DNA, 57 bp, Artificial; identical to SEQ ID NO: 353579
  Synthetic oligonucleotide

SEQ ID NO: 559247 - DNA, 60 bp, Artificial; identical to SEQ ID NO: 353582
  Synthetic oligonucleotide

SEQ ID NO: 559248 - DNA, 56 bp, Artificial; identical to SEQ ID NO: 353584
  Synthetic oligonucleotide

SEQ ID NO: 559249 - DNA, 53 bp, Artificial; identical to SEQ ID NO: 353586
  Synthetic oligonucleotide

SEQ ID NO: 559250 - DNA, 60 bp, Artificial; identical to SEQ ID NO: 14717
  Synthetic oligonucleotide

SEQ ID NO: 559251 - DNA, 59 bp, Artificial; identical to SEQ ID NO: 353589
  Synthetic oligonucleotide

SEQ ID NO: 559252 - DNA, 56 bp, Artificial; identical to SEQ ID NO: 353591
  Synthetic oligonucleotide

SEQ ID NO: 559253 - DNA, 54 bp, Artificial; identical to SEQ ID NO: 353592
  Synthetic oligonucleotide

SEQ ID NO: 559254 - DNA, 59 bp, Artificial; identical to SEQ ID NO: 6519
  Synthetic oligonucleotide

SEQ ID NO: 559255 - DNA, 55 bp, Artificial; identical to SEQ ID NO: 353594
  Synthetic oligonucleotide

SEQ ID NO: 559256 - DNA, 59 bp, Artificial; identical to SEQ ID NO: 353595
  Synthetic oligonucleotide

SEQ ID NO: 559257 - DNA, 54 bp, Artificial; identical to SEQ ID NO: 353604
  Synthetic oligonucleotide

SEQ ID NO: 559258 - DNA, 58 bp, Artificial; identical to SEQ ID NO: 353606
  Synthetic oligonucleotide

SEQ ID NO: 559259 - DNA, 60 bp, Artificial; identical to SEQ ID NO: 353607
  Synthetic oligonucleotide

SEQ ID NO: 559260 - DNA, 57 bp, Artificial; identical to SEQ ID NO: 353608
  Synthetic oligonucleotide

SEQ ID NO: 559261 - DNA, 55 bp, Artificial; identical to SEQ ID NO: 353610
  Synthetic oligonucleotide

SEQ ID NO: 559262 - DNA, 55 bp, Artificial; identical to SEQ ID NO: 353614
  Synthetic oligonucleotide

SEQ ID NO: 559263 - DNA, 56 bp, Artificial; identical to SEQ ID NO: 353616
  Synthetic oligonucleotide

SEQ ID NO: 559264 - DNA, 59 bp, Artificial; identical to SEQ ID NO: 353619
  Synthetic oligonucleotide

SEQ ID NO: 559265 - DNA, 52 bp, Artificial; identical to SEQ ID NO: 353620
  Synthetic oligonucleotide

SEQ ID NO: 559266 - DNA, 57 bp, Artificial; identical to SEQ ID NO: 353624
  Synthetic oligonucleotide

SEQ ID NO: 559267 - DNA, 55 bp, Artificial; identical to SEQ ID NO: 353625
  Synthetic oligonucleotide

SEQ ID NO: 559268 - DNA, 55 bp, Artificial; identical to SEQ ID NO: 353626
  Synthetic oligonucleotide

SEQ ID NO: 559269 - DNA, 55 bp, Artificial; identical to SEQ ID NO: 353630
  Synthetic oligonucleotide

SEQ ID NO: 559270 - DNA, 60 bp, Artificial; identical to SEQ ID NO: 353631
  Synthetic oligonucleotide

SEQ ID NO: 559271 - DNA, 60 bp, Artificial; identical to SEQ ID NO: 353632
  Synthetic oligonucleotide

SEQ ID NO: 559272 - DNA, 53 bp, Artificial; identical to SEQ ID NO: 353635
  Synthetic oligonucleotide

SEQ ID NO: 559273 - DNA, 56 bp, Artificial; identical to SEQ ID NO: 353637
  Synthetic oligonucleotide

SEQ ID NO: 559274 - DNA, 58 bp, Artificial; identical to SEQ ID NO: 16402
  Synthetic oligonucleotide

SEQ ID NO: 559275 - DNA, 60 bp, Artificial; identical to SEQ ID NO: 8951
  Synthetic oligonucleotide

SEQ ID NO: 559276 - DNA, 51 bp, Artificial; identical to SEQ ID NO: 353641
  Synthetic oligonucleotide

SEQ ID NO: 559277 - DNA, 56 bp, Artificial; identical to SEQ ID NO: 353642
  Synthetic oligonucleotide

SEQ ID NO: 559278 - DNA, 56 bp, Artificial; identical to SEQ ID NO: 353643
  Synthetic oligonucleotide

SEQ ID NO: 559279 - DNA, 53 bp, Artificial; identical to SEQ ID NO: 353646
  Synthetic oligonucleotide

SEQ ID NO: 559280 - DNA, 55 bp, Artificial; identical to SEQ ID NO: 353648
  Synthetic oligonucleotide

SEQ ID NO: 559281 - DNA, 56 bp, Artificial; identical to SEQ ID NO: 353649
  Synthetic oligonucleotide

SEQ ID NO: 559282 - DNA, 55 bp, Artificial; identical to SEQ ID NO: 353651
  Synthetic oligonucleotide

SEQ ID NO: 559283 - DNA, 60 bp, Artificial; identical to SEQ ID NO: 353656
  Synthetic oligonucleotide

SEQ ID NO: 559284 - DNA, 60 bp, Artificial; identical to SEQ ID NO: 353658
  Synthetic oligonucleotide

SEQ ID NO: 559285 - DNA, 50 bp, Artificial; identical to SEQ ID NO: 353659
  Synthetic oligonucleotide

SEQ ID NO: 559286 - DNA, 58 bp, Artificial; identical to SEQ ID NO: 353661
  Synthetic oligonucleotide

SEQ ID NO: 559287 - DNA, 60 bp, Artificial; identical to SEQ ID NO: 353662
  Synthetic oligonucleotide

SEQ ID NO: 559288 - DNA, 55 bp, Artificial; identical to SEQ ID NO: 353663
  Synthetic oligonucleotide

SEQ ID NO: 559289 - DNA, 55 bp, Artificial; identical to SEQ ID NO: 353666
  Synthetic oligonucleotide

SEQ ID NO: 559290 - DNA, 56 bp, Artificial; identical to SEQ ID NO: 353667
  Synthetic oligonucleotide

SEQ ID NO: 559291 - DNA, 60 bp, Artificial; identical to SEQ ID NO: 353670
  Synthetic oligonucleotide

SEQ ID NO: 559292 - DNA, 60 bp, Artificial; identical to SEQ ID NO: 353673
  Synthetic oligonucleotide

SEQ ID NO: 559293 - DNA, 55 bp, Artificial; identical to SEQ ID NO: 353674
  Synthetic oligonucleotide

SEQ ID NO: 559294 - DNA, 55 bp, Artificial; identical to SEQ ID NO: 353679
  Synthetic oligonucleotide

SEQ ID NO: 559295 - DNA, 57 bp, Artificial; identical to SEQ ID NO: 353680
  Synthetic oligonucleotide

SEQ ID NO: 559296 - DNA, 54 bp, Artificial; identical to SEQ ID NO: 353682
  Synthetic oligonucleotide

SEQ ID NO: 559297 - DNA, 56 bp, Artificial; identical to SEQ ID NO: 353683
  Synthetic oligonucleotide

SEQ ID NO: 559298 - DNA, 55 bp, Artificial; identical to SEQ ID NO: 353685
  Synthetic oligonucleotide

SEQ ID NO: 559299 - DNA, 55 bp, Artificial; identical to SEQ ID NO: 353686
  Synthetic oligonucleotide

SEQ ID NO: 559300 - DNA, 58 bp, Artificial; identical to SEQ ID NO: 353689
  Synthetic oligonucleotide

SEQ ID NO: 559301 - DNA, 55 bp, Artificial; identical to SEQ ID NO: 353690
  Synthetic oligonucleotide

SEQ ID NO: 559302 - DNA, 50 bp, Artificial; identical to SEQ ID NO: 353692
  Synthetic oligonucleotide

SEQ ID NO: 559303 - DNA, 59 bp, Artificial; identical to SEQ ID NO: 353693
  Synthetic oligonucleotide

SEQ ID NO: 559304 - DNA, 60 bp, Artificial; identical to SEQ ID NO: 353695
  Synthetic oligonucleotide

SEQ ID NO: 559305 - DNA, 55 bp, Artificial; identical to SEQ ID NO: 353696
  Synthetic oligonucleotide

SEQ ID NO: 559306 - DNA, 55 bp, Artificial; identical to SEQ ID NO: 353698
  Synthetic oligonucleotide

SEQ ID NO: 559307 - DNA, 57 bp, Artificial; identical to SEQ ID NO: 353704
  Synthetic oligonucleotide

SEQ ID NO: 559308 - DNA, 57 bp, Artificial; identical to SEQ ID NO: 353706
  Synthetic oligonucleotide

SEQ ID NO: 559309 - DNA, 57 bp, Artificial; identical to SEQ ID NO: 353707
  Synthetic oligonucleotide

SEQ ID NO: 559310 - DNA, 55 bp, Artificial; identical to SEQ ID NO: 353709
  Synthetic oligonucleotide

SEQ ID NO: 559311 - DNA, 60 bp, Artificial; identical to SEQ ID NO: 353713
  Synthetic oligonucleotide

SEQ ID NO: 559312 - DNA, 60 bp, Artificial; identical to SEQ ID NO: 353715
  Synthetic oligonucleotide

SEQ ID NO: 559313 - DNA, 60 bp, Artificial; identical to SEQ ID NO: 353716
  Synthetic oligonucleotide

SEQ ID NO: 559314 - DNA, 60 bp, Artificial; identical to SEQ ID NO: 353720
  Synthetic oligonucleotide

SEQ ID NO: 559315 - DNA, 55 bp, Artificial; identical to SEQ ID NO: 353723
  Synthetic oligonucleotide

SEQ ID NO: 559316 - DNA, 60 bp, Artificial; identical to SEQ ID NO: 7066
  Synthetic oligonucleotide

SEQ ID NO: 559317 - DNA, 55 bp, Artificial; identical to SEQ ID NO: 353725
  Synthetic oligonucleotide

SEQ ID NO: 559318 - DNA, 52 bp, Artificial; identical to SEQ ID NO: 353731
  Synthetic oligonucleotide

SEQ ID NO: 559319 - DNA, 59 bp, Artificial; identical to SEQ ID NO: 353735
  Synthetic oligonucleotide

SEQ ID NO: 559320 - DNA, 60 bp, Artificial; identical to SEQ ID NO: 353736
  Synthetic oligonucleotide

SEQ ID NO: 559321 - DNA, 60 bp, Artificial; identical to SEQ ID NO: 353739
  Synthetic oligonucleotide

SEQ ID NO: 559322 - DNA, 56 bp, Artificial; identical to SEQ ID NO: 353740
  Synthetic oligonucleotide

SEQ ID NO: 559323 - DNA, 60 bp, Artificial; identical to SEQ ID NO: 353741
  Synthetic oligonucleotide

SEQ ID NO: 559324 - DNA, 58 bp, Artificial; identical to SEQ ID NO: 353742
  Synthetic oligonucleotide

SEQ ID NO: 559325 - DNA, 58 bp, Artificial; identical to SEQ ID NO: 15165
  Synthetic oligonucleotide

SEQ ID NO: 559326 - DNA, 57 bp, Artificial; identical to SEQ ID NO: 353745
  Synthetic oligonucleotide

SEQ ID NO: 559327 - DNA, 55 bp, Artificial; identical to SEQ ID NO: 353750
  Synthetic oligonucleotide

SEQ ID NO: 559328 - DNA, 58 bp, Artificial; identical to SEQ ID NO: 353751
  Synthetic oligonucleotide

SEQ ID NO: 559329 - DNA, 55 bp, Artificial; identical to SEQ ID NO: 353754
  Synthetic oligonucleotide

SEQ ID NO: 559330 - DNA, 60 bp, Artificial; identical to SEQ ID NO: 353756
  Synthetic oligonucleotide

SEQ ID NO: 559331 - DNA, 60 bp, Artificial; identical to SEQ ID NO: 353757
  Synthetic oligonucleotide

SEQ ID NO: 559332 - DNA, 57 bp, Artificial; identical to SEQ ID NO: 353758
  Synthetic oligonucleotide

SEQ ID NO: 559333 - DNA, 55 bp, Artificial; identical to SEQ ID NO: 353759
  Synthetic oligonucleotide

SEQ ID NO: 559334 - DNA, 55 bp, Artificial; identical to SEQ ID NO: 353762
  Synthetic oligonucleotide

SEQ ID NO: 559335 - DNA, 55 bp, Artificial; identical to SEQ ID NO: 353763
  Synthetic oligonucleotide

SEQ ID NO: 559336 - DNA, 56 bp, Artificial; identical to SEQ ID NO: 11233
  Synthetic oligonucleotide
